United States Patent Application Publication US 2006/0257851 A1 - sequence listing, part 8

SEQ ID NO: 243898 - RNA, 32 nt, Homo Sapiens
uuagaaaauaaaugcagguuauaaaugugugu

SEQ ID NO: 243899 - RNA, 32 nt, Homo Sapiens
uuuccuuccuucccuccacagguuuggaacaa

SEQ ID NO: 243900 - RNA, 32 nt, Homo Sapiens
ggcaauguuucauuaagacaguucuugauggc

SEQ ID NO: 243901 - RNA, 32 nt, Homo Sapiens
acgcaacauuguaucugugagaaucuauuguc

SEQ ID NO: 243902 - RNA, 31 nt, Homo Sapiens
cuuugcuauugagccaacaucaggaauaauu

SEQ ID NO: 243903 - RNA, 32 nt, Homo Sapiens
gauaauuaaaacaaaauaauuuccguuuaagg

SEQ ID NO: 243904 - RNA, 32 nt, Homo Sapiens
gguaugugaaggaagcacuuagaacuugcaag

SEQ ID NO: 243905 - RNA, 32 nt, Homo Sapiens
agugagaggggagguggcaggacagacagaca

SEQ ID NO: 243906 - RNA, 32 nt, Homo Sapiens
agaaaccaaacacagcuaaugcuauggggugu

SEQ ID NO: 243907 - RNA, 32 nt, Homo Sapiens
auuaguuuucccuuuuuagaaucucaggagua

SEQ ID NO: 243908 - RNA, 32 nt, Homo Sapiens
cagaggcucaaguuaagauaagauacauagac

SEQ ID NO: 243909 - RNA, 32 nt, Homo Sapiens
ccgagugguuuggagaucuuuaggggcgggua

SEQ ID NO: 243910 - RNA, 32 nt, Homo Sapiens
ccaagaggggccacaacccaccccucugcugg

SEQ ID NO: 243911 - RNA, 32 nt, Homo Sapiens
ugagggccccaccauguccacacugggaagga

SEQ ID NO: 243912 - RNA, 32 nt, Homo Sapiens
gccugcggagagcaccgggaggcgggcccugc

SEQ ID NO: 243913 - RNA, 32 nt, Homo Sapiens
gcaggagccucacccagggucuguggcucuga

SEQ ID NO: 243914 - RNA, 32 nt, Homo Sapiens
uccauuucuggugugugcagacaugguggcca

SEQ ID NO: 243915 - RNA, 32 nt, Homo Sapiens
ggcaccuggcgcccagcgcgcccguggccgcu

SEQ ID NO: 243916 - RNA, 32 nt, Homo Sapiens
gcucuguguucccuagcagcugccggaggauu

SEQ ID NO: 243917 - RNA, 32 nt, Homo Sapiens
caaaagugcacucauaucauggcuuuaguguu

SEQ ID NO: 243918 - RNA, 32 nt, Homo Sapiens
acaacggguucaguuaccauaaugcagacauu

SEQ ID NO: 243919 - RNA, 32 nt, Homo Sapiens
uguuggccaggccccagggcacagcccugaca

SEQ ID NO: 243920 - RNA, 31 nt, Homo Sapiens
uaauuaugaugauaccgaggugguggccaac

SEQ ID NO: 243921 - RNA, 32 nt, Homo Sapiens
auuuuuauauuauaacucuguauaauagagau

SEQ ID NO: 243922 - RNA, 32 nt, Homo Sapiens
uugagccccguccggguccuggacccgcguag

SEQ ID NO: 243923 - RNA, 32 nt, Homo Sapiens
ucagccucucgaguagcugggaccacaguugu

SEQ ID NO: 243924 - RNA, 32 nt, Homo Sapiens
uccucucccuccccgacguucuaguuagcuug

SEQ ID NO: 243925 - RNA, 32 nt, Homo Sapiens
ccgccuucucugaugcucaccccucccaggcc

SEQ ID NO: 243926 - RNA, 32 nt, Homo Sapiens
cacuaucguaaacauucaugauagggcaagga

SEQ ID NO: 243927 - RNA, 32 nt, Homo Sapiens
cccuauugcuaacaagaccacaguggaauuaa

SEQ ID NO: 243928 - RNA, 32 nt, Homo Sapiens
agaauaccaaaauaaugucaauacuguaguuu

SEQ ID NO: 243929 - RNA, 32 nt, Homo Sapiens
aaccuuaaaauuuggugaaaauccauuguguu

SEQ ID NO: 243930 - RNA, 32 nt, Homo Sapiens
aaaacucugaauuagcccaacaaaaucacaaa

SEQ ID NO: 243931 - RNA, 32 nt, Homo Sapiens
caggcugggccgggcgcuccuggugugugacu

SEQ ID NO: 243932 - RNA, 32 nt, Homo Sapiens
ggccccggcucugaacaagaccuuuucguuuc

SEQ ID NO: 243933 - RNA, 32 nt, Homo Sapiens
caccgcuuguucugaggccccuagcaggucgg

SEQ ID NO: 243934 - RNA, 32 nt, Homo Sapiens
agggacgcugcucagcugcugcucugcuccug

SEQ ID NO: 243935 - RNA, 32 nt, Homo Sapiens
ccugcuccuuuucugcugaacauuuaguauug

SEQ ID NO: 243936 - RNA, 32 nt, Homo Sapiens
auaacauuuggaaauugugagaauaaucaagc

SEQ ID NO: 243937 - RNA, 32 nt, Homo Sapiens
caauuggcugugaugcucaaauccauugcauc

SEQ ID NO: 243938 - RNA, 32 nt, Homo Sapiens
cugggagccaugugggagaggcgugaggaagu

SEQ ID NO: 243939 - RNA, 32 nt, Homo Sapiens
acuucuuucaaggcuuaaaugaagauuaaauc

SEQ ID NO: 243940 - RNA, 32 nt, Homo Sapiens
ccccuggacaaaguugcugacaagcugcugaa

SEQ ID NO: 243941 - RNA, 32 nt, Homo Sapiens
aucuggaggagcugucuucaaaugcugugcuu

SEQ ID NO: 243942 - RNA, 32 nt, Homo Sapiens
uauuugucaggaaaacaaaagcuuaggcuguu

SEQ ID NO: 243943 - RNA, 32 nt, Homo Sapiens
cgaccuuauuuauuacccuccccucccacacc

SEQ ID NO: 243944 - RNA, 32 nt, Homo Sapiens
aauuuuggguggcaauaaauauauucgcacau

SEQ ID NO: 243945 - RNA, 32 nt, Homo Sapiens
cugagcucucggcuccuccuccgucuucaggg

SEQ ID NO: 243946 - RNA, 32 nt, Homo Sapiens
ucugagcacaggaugccugugacaaccgaaua

SEQ ID NO: 243947 - RNA, 32 nt, Homo Sapiens
agggaggacaguuuuucuuuguucugcuuuuu

SEQ ID NO: 243948 - RNA, 32 nt, Homo Sapiens
auauaaauauauauguaggauacauguucucu

SEQ ID NO: 243949 - RNA, 32 nt, Homo Sapiens
uccacggccgcacgcucagaggcuggucuccg

SEQ ID NO: 243950 - RNA, 32 nt, Homo Sapiens
acaauuacuacaucuuuauucucuaaauguag

SEQ ID NO: 243951 - RNA, 30 nt, Homo Sapiens
gcuugaagugccccugaccagucgacagca

SEQ ID NO: 243952 - RNA, 32 nt, Homo Sapiens
ggggauucucccuuuaucaucaccucaguuuc

SEQ ID NO: 243953 - RNA, 32 nt, Homo Sapiens
acccaaucugguuuucuuuuacccauaaauaa

SEQ ID NO: 243954 - RNA, 32 nt, Homo Sapiens
gugguuuauaugcccagccucauuuaauccuc

SEQ ID NO: 243955 - RNA, 32 nt, Homo Sapiens
gcuugagugaauuguguaccugaaguacagua

SEQ ID NO: 243956 - RNA, 32 nt, Homo Sapiens
uucugaaauuuauugugauaauuuguauuucu

SEQ ID NO: 243957 - RNA, 31 nt, Homo Sapiens
auuguuuucaggagaaaguuuugcuucuaug

SEQ ID NO: 243958 - RNA, 32 nt, Homo Sapiens
uggacuggacccccagcccacaugaccaugcc

SEQ ID NO: 243959 - RNA, 32 nt, Homo Sapiens
aauauucugaccaagagaaggcuugcugcccc

SEQ ID NO: 243960 - RNA, 32 nt, Homo Sapiens
aaacguugacauucuaucuguaaaccaugguu

SEQ ID NO: 243961 - RNA, 32 nt, Homo Sapiens
gcagccgccgccgccgccuccuccccccggau

SEQ ID NO: 243962 - RNA, 32 nt, Homo Sapiens
ugaggcugccgcgcggcggucacugcgccggg

SEQ ID NO: 243963 - RNA, 32 nt, Homo Sapiens
gcagugagaaaguugaggugauaaacaacuuu

SEQ ID NO: 243964 - RNA, 32 nt, Homo Sapiens
cggggacguacggcagugacucggggcucacc

SEQ ID NO: 243965 - RNA, 32 nt, Homo Sapiens
gaagauauaggcaguaauaucaacacugcuau

SEQ ID NO: 243966 - RNA, 32 nt, Homo Sapiens
uagcaagaaagucuuaauuugugucacgauuu

SEQ ID NO: 243967 - RNA, 32 nt, Homo Sapiens
cagugaaguaggaaacaauauuuugaaaauaa

SEQ ID NO: 243968 - RNA, 32 nt, Homo Sapiens
ccggagcgcccucuccucacuuccagguuuug

SEQ ID NO: 243969 - RNA, 32 nt, Homo Sapiens
cucccgggaaccgcggcugugacccaaguggc

SEQ ID NO: 243970 - RNA, 32 nt, Homo Sapiens
uuucaaacagcgccuccaccuggccuacucug

SEQ ID NO: 243971 - RNA, 32 nt, Homo Sapiens
ucauauaggugccaaauugacaagaaguggac

SEQ ID NO: 243972 - RNA, 28 nt, Homo Sapiens
aacauggccgugcugcugcugcugcucc

SEQ ID NO: 243973 - RNA, 32 nt, Homo Sapiens
uuauaucaauuucuaauggauuugcuuuucuu

SEQ ID NO: 243974 - RNA, 32 nt, Homo Sapiens
caggucugcagcucagcuccuggaaggagaag

SEQ ID NO: 243975 - RNA, 32 nt, Homo Sapiens
uguaaaacagagcucuaagaugauccuuuaag

SEQ ID NO: 243976 - RNA, 32 nt, Homo Sapiens
cguggucaggguguccauuccuaaucaugggg

SEQ ID NO: 243977 - RNA, 32 nt, Homo Sapiens
ggaagggcgagcagcgggaggcacgggcucuc

SEQ ID NO: 243978 - RNA, 32 nt, Homo Sapiens
aagccacagacaccccacaaaguuccccuguu

SEQ ID NO: 243979 - RNA, 32 nt, Homo Sapiens
acgaggcucccuccaggcuuggggccguggug

SEQ ID NO: 243980 - RNA, 32 nt, Homo Sapiens
ccaccaaagcuacaaaccuaaaaugcugcugc

SEQ ID NO: 243981 - RNA, 30 nt, Homo Sapiens
acacauuuuauaaugggggagauguaugac

SEQ ID NO: 243982 - RNA, 32 nt, Homo Sapiens
gugggggagauuacaaaguacauugauaguua

SEQ ID NO: 243983 - RNA, 32 nt, Homo Sapiens
aauguaugaugagaaugaucaaggacucuaca

SEQ ID NO: 243984 - RNA, 32 nt, Homo Sapiens
acaaauguucagaauucucaccaccuucuggu

SEQ ID NO: 243985 - RNA, 32 nt, Homo Sapiens
ugcggacccucgcggaccgugugugaaugccu

SEQ ID NO: 243986 - RNA, 32 nt, Homo Sapiens
ggccagggcuguauggaauaauaauuuaaugc

SEQ ID NO: 243987 - RNA, 32 nt, Homo Sapiens
caucuguguggcauacguuauuggcuuugucu

SEQ ID NO: 243988 - RNA, 31 nt, Homo Sapiens
caagaaugaaacacuuauacugacuuucauc

SEQ ID NO: 243989 - RNA, 32 nt, Homo Sapiens
auuccacaucuuacacuauccauccucagaga

SEQ ID NO: 243990 - RNA, 32 nt, Homo Sapiens
uucgguaccaggcccaccuggaaucccacaac

SEQ ID NO: 243991 - RNA, 32 nt, Homo Sapiens
cuacaauaaaaagauggacaagaacgaguguc

SEQ ID NO: 243992 - RNA, 32 nt, Homo Sapiens
aggcuccucacguaucuuuccuggaaaauccu

SEQ ID NO: 243993 - RNA, 32 nt, Homo Sapiens
guucccuacuauacucccaacuucuacucuuu

SEQ ID NO: 243994 - RNA, 32 nt, Homo Sapiens
augaaccuugaggauguugugccaagugcaau

SEQ ID NO: 243995 - RNA, 32 nt, Homo Sapiens
acggugugaagcauagacagagcugcagucug

SEQ ID NO: 243996 - RNA, 32 nt, Homo Sapiens
caaaacauuuuucauuuuguuuaaaguagaag

SEQ ID NO: 243997 - RNA, 31 nt, Homo Sapiens
ucugcccauucccagaaccagcggcccccuu

SEQ ID NO: 243998 - RNA, 32 nt, Homo Sapiens
aguucuuaaguacagaagauagaagugauuua

SEQ ID NO: 243999 - RNA, 32 nt, Homo Sapiens
ggagacgagcgucugaagacguccucccgagg

SEQ ID NO: 244000 - RNA, 32 nt, Homo Sapiens
ggugagggggaacagcgagagcuuggguaaug

SEQ ID NO: 244001 - RNA, 32 nt, Homo Sapiens
agugaugugugagcuaugcaaacaaaauccaa

SEQ ID NO: 244002 - RNA, 32 nt, Homo Sapiens
cauauuuugggguuauaauuucucuaaauuuu

SEQ ID NO: 244003 - RNA, 32 nt, Homo Sapiens
ggcgcagagaaccucaagaaggcaugaagcca

SEQ ID NO: 244004 - RNA, 32 nt, Homo Sapiens
ugccugcaaauuuucuucuccugcaaggaucu

SEQ ID NO: 244005 - RNA, 32 nt, Homo Sapiens
ucagccaccguccaagaacugcacacaugcuu

SEQ ID NO: 244006 - RNA, 32 nt, Homo Sapiens
uuugcaauccaccuuaaaaauguuuuaaaaua

SEQ ID NO: 244007 - RNA, 32 nt, Homo Sapiens
gcggcugcuugagaucuguuucuggggccucu

SEQ ID NO: 244008 - RNA, 32 nt, Homo Sapiens
caggucugccaguuucugugccugcagagaga

SEQ ID NO: 244009 - RNA, 32 nt, Homo Sapiens
cacagccugucuuuuccaggcugggcuccauc

SEQ ID NO: 244010 - RNA, 32 nt, Homo Sapiens
acuuuaaaauuaucuuuuuauuuuauaaggcc

SEQ ID NO: 244011 - RNA, 32 nt, Homo Sapiens
cucuugaggccgugguucccacguggacuggg

SEQ ID NO: 244012 - RNA, 30 nt, Homo Sapiens
ccugugguggguucacacgcagcuagacac

SEQ ID NO: 244013 - RNA, 32 nt, Homo Sapiens
aagcccauuuuucuuaaaaagggaucuggacu

SEQ ID NO: 244014 - RNA, 32 nt, Homo Sapiens
uucuucaaaaugaaaauaacgaaugacagugc

SEQ ID NO: 244015 - RNA, 32 nt, Homo Sapiens
ggcugcgaagagucaauaaacagccuugauac

SEQ ID NO: 244016 - RNA, 32 nt, Homo Sapiens
uuccaaauugguuuaguugggccaucucauuc

SEQ ID NO: 244017 - RNA, 32 nt, Homo Sapiens
agucuugcuguaaaaaugaaaacaaaacaaac

SEQ ID NO: 244018 - RNA, 32 nt, Homo Sapiens
accuugagggugggccagcauaggggggaggg

SEQ ID NO: 244019 - RNA, 32 nt, Homo Sapiens
gcaucguggggccuuuccuucucggcugguuc

SEQ ID NO: 244020 - RNA, 32 nt, Homo Sapiens
agcaaugagucugcuuuuuuuaaugauuuaua

SEQ ID NO: 244021 - RNA, 32 nt, Homo Sapiens
accguuacuuggauguggucaaucggaacaag

SEQ ID NO: 244022 - RNA, 32 nt, Homo Sapiens
gagccuggggacgcccacccacacccacugcu

SEQ ID NO: 244023 - RNA, 32 nt, Homo Sapiens
agcuccagccccagccccucgaaccaccugua

SEQ ID NO: 244024 - RNA, 32 nt, Homo Sapiens
gaggaagcugccugccggaggacccccaccug

SEQ ID NO: 244025 - RNA, 32 nt, Homo Sapiens
gaaauguuuauuuucacaaauaucuuaauuuu

SEQ ID NO: 244026 - RNA, 32 nt, Homo Sapiens
gggaagugcuuagguaaugagcuacuaguggu

SEQ ID NO: 244027 - RNA, 32 nt, Homo Sapiens
uuaaaggagauauuuuuaaaacaggguacaac

SEQ ID NO: 244028 - RNA, 32 nt, Homo Sapiens
aucacguaguggugccaaucacuuacaaagac

SEQ ID NO: 244029 - RNA, 32 nt, Homo Sapiens
guuuugggggcuguaugacguacuggucggua

SEQ ID NO: 244030 - RNA, 32 nt, Homo Sapiens
aauuugccaaaauaaugucuuguuaauauucu

SEQ ID NO: 244031 - RNA, 32 nt, Homo Sapiens
gggccccacaguggcauuaggaugcaccucuc

SEQ ID NO: 244032 - RNA, 32 nt, Homo Sapiens
uguucaggugcauucugcccuggcugcgcugg

SEQ ID NO: 244033 - RNA, 32 nt, Homo Sapiens
ugacccccaagcagauauaacaagcugugcag

SEQ ID NO: 244034 - RNA, 32 nt, Homo Sapiens
cccacugccccgagugucgggcagcgauguac

SEQ ID NO: 244035 - RNA, 32 nt, Homo Sapiens
caggccacgcucucccucgagguggcgggggg

SEQ ID NO: 244036 - RNA, 32 nt, Homo Sapiens
aggaauguucguuuaaauuaaucugcaguuuu

SEQ ID NO: 244037 - RNA, 32 nt, Homo Sapiens
uggauaaaauguucuguaaauaucuauuagau

SEQ ID NO: 244038 - RNA, 32 nt, Homo Sapiens
gggcagcccuccccugcaugauucuuacagcc

SEQ ID NO: 244039 - RNA, 32 nt, Homo Sapiens
gcccccggccccagcgccgcugacccuguccg

SEQ ID NO: 244040 - RNA, 32 nt, Homo Sapiens
aucccuguguuagugauuucuaagcccauuug

SEQ ID NO: 244041 - RNA, 32 nt, Homo Sapiens
acaauuaugugugaagcugaaaaauuguagag

SEQ ID NO: 244042 - RNA, 32 nt, Homo Sapiens
accccuggauccuugccauuccccucagcuaa

SEQ ID NO: 244043 - RNA, 32 nt, Homo Sapiens
auagguuugugaugaucuuuacguucaggacu

SEQ ID NO: 244044 - RNA, 32 nt, Homo Sapiens
uugguccuugaggcgacgggugaggcacagcu

SEQ ID NO: 244045 - RNA, 32 nt, Homo Sapiens
ggugccugguggccucacccggaggaaagcac

SEQ ID NO: 244046 - RNA, 32 nt, Homo Sapiens
agaggcacugguguucggucuacauuuaguuc

SEQ ID NO: 244047 - RNA, 32 nt, Homo Sapiens
aaaaggaggaagcucaaacugaagugaguuaa

SEQ ID NO: 244048 - RNA, 32 nt, Homo Sapiens
cugccuauuugauggcuguaacaagucuucaa

SEQ ID NO: 244049 - RNA, 32 nt, Homo Sapiens
uguggacgggacagugaguggcugggaggaag

SEQ ID NO: 244050 - RNA, 32 nt, Homo Sapiens
ugaauuugacuauguggaacacagaagcuguu

SEQ ID NO: 244051 - RNA, 32 nt, Homo Sapiens
aggaaauccagccccauagaaaacaaucugcc

SEQ ID NO: 244052 - RNA, 32 nt, Homo Sapiens
ggagaguuugaaaaaugcuuauuggacacgua

SEQ ID NO: 244053 - RNA, 32 nt, Homo Sapiens
auaccugguuaucuauuuccauuugaaauaaa

SEQ ID NO: 244054 - RNA, 32 nt, Homo Sapiens
uccaggcuguggaaccuuuguucuuucacucu

SEQ ID NO: 244055 - RNA, 32 nt, Homo Sapiens
ugaaagacaucuuuuuauuaugaucuacacuu

SEQ ID NO: 244056 - RNA, 32 nt, Homo Sapiens
acgggggaagggggaaucccguaccugcugcu

SEQ ID NO: 244057 - RNA, 32 nt, Homo Sapiens
ugggacccgccuuucuguguuguguucugccc

SEQ ID NO: 244058 - RNA, 32 nt, Homo Sapiens
aacgccacggagcucacgcaggacccggccgc

SEQ ID NO: 244059 - RNA, 32 nt, Homo Sapiens
gaggaaaagggagggcacggcagccaggcuuc

SEQ ID NO: 244060 - RNA, 32 nt, Homo Sapiens
aacacaugguuggaaagagaugcacgcaguug

SEQ ID NO: 244061 - RNA, 32 nt, Homo Sapiens
gcaguucccggccccugccacccagccucaug

SEQ ID NO: 244062 - RNA, 32 nt, Homo Sapiens
gcaaaguacuaguggauauaggggugucugcc

SEQ ID NO: 244063 - RNA, 32 nt, Homo Sapiens
auuuaucugaaacgugauauuuuaaaaacaug

SEQ ID NO: 244064 - RNA, 32 nt, Homo Sapiens
aggcagguguccucgggggcacaguaaagggg

SEQ ID NO: 244065 - RNA, 31 nt, Homo Sapiens
auaggcuuaacucgcugaugaguuaauuguu

SEQ ID NO: 244066 - RNA, 32 nt, Homo Sapiens
auccuucuaguuccuuucauaauuacuuuagc

SEQ ID NO: 244067 - RNA, 32 nt, Homo Sapiens
uuuugugccacuugcuuggggggaugugcaaa

SEQ ID NO: 244068 - RNA, 32 nt, Homo Sapiens
cuccaggugccugggcccccggcggccugcgg

SEQ ID NO: 244069 - RNA, 32 nt, Homo Sapiens
gcauggaaaaggagaaauguaccugaagaggc

SEQ ID NO: 244070 - RNA, 32 nt, Homo Sapiens
cuuuuaauucuauuuuuccaugaacuuuuuga

SEQ ID NO: 244071 - RNA, 32 nt, Homo Sapiens
ggagaaaagggaggcuugaccccgggcaccau

SEQ ID NO: 244072 - RNA, 32 nt, Homo Sapiens
aaaacucaauuucagaugcucauaaaaguuac

SEQ ID NO: 244073 - RNA, 32 nt, Homo Sapiens
cugccuugcagggugcccaggggggugccagg

SEQ ID NO: 244074 - RNA, 29 nt, Homo Sapiens
uagaaguuagaugagugaucucuaagguu

SEQ ID NO: 244075 - RNA, 32 nt, Homo Sapiens
uacuguuuucuuuuuugucaguguaaagcagu

SEQ ID NO: 244076 - RNA, 32 nt, Homo Sapiens
ugcggcugucgcgcucagcugcggcccgaggc

SEQ ID NO: 244077 - RNA, 32 nt, Homo Sapiens
aguccacaaauaauuccaaaguuuacuugauc

SEQ ID NO: 244078 - RNA, 32 nt, Homo Sapiens
accucaguucccucuugcucagugggggcaga

SEQ ID NO: 244079 - RNA, 32 nt, Homo Sapiens
uuaguccuguuauagacgagaaucgaggugcu

SEQ ID NO: 244080 - RNA, 32 nt, Homo Sapiens
cacuccugccagcccggcucggcccagcaccc

SEQ ID NO: 244081 - RNA, 32 nt, Homo Sapiens
gcuuuauucuaauguaucccaaaccuaaucuu

SEQ ID NO: 244082 - RNA, 32 nt, Homo Sapiens
uuguccaccuuauuuacuuguuuaucuuuaau

SEQ ID NO: 244083 - RNA, 32 nt, Homo Sapiens
gagaaaggccccaaccagguuucugagauaau

SEQ ID NO: 244084 - RNA, 32 nt, Homo Sapiens
uucagaggaugauaaacuugcacugauagauc

SEQ ID NO: 244085 - RNA, 30 nt, Homo Sapiens
aaggcguugcucaugggggacaaggacuuc

SEQ ID NO: 244086 - RNA, 32 nt, Homo Sapiens
ucuuucugaggccauauaagcuuauaagaaaa

SEQ ID NO: 244087 - RNA, 32 nt, Homo Sapiens
ugacugccugacgcuuggucuccgguggcccu

SEQ ID NO: 244088 - RNA, 32 nt, Homo Sapiens
gugaucuccuucucagcaaggagguuauauag

SEQ ID NO: 244089 - RNA, 32 nt, Homo Sapiens
cgaguuugccugaagcucugcugcuggcuucu

SEQ ID NO: 244090 - RNA, 32 nt, Homo Sapiens
caaaucagugaaucuuuuuuuuuuuuuuuuuu

SEQ ID NO: 244091 - RNA, 32 nt, Homo Sapiens
cuccaacagggcaggagugaguggaguauguu

SEQ ID NO: 244092 - RNA, 32 nt, Homo Sapiens
cccuguacuuaccaaggagaaagaggagagac

SEQ ID NO: 244093 - RNA, 32 nt, Homo Sapiens
uagaaaugguuuccucuggaucguuuuaugcg

SEQ ID NO: 244094 - RNA, 32 nt, Homo Sapiens
gaguuucgcucuugucacccaggcuggaguac

SEQ ID NO: 244095 - RNA, 30 nt, Homo Sapiens
agcagaauccucccugccagcucagaggca

SEQ ID NO: 244096 - RNA, 32 nt, Homo Sapiens
ugugcuucuguuggcgccugcugcugaggccc

SEQ ID NO: 244097 - RNA, 32 nt, Homo Sapiens
agaccacgcugucccggcagcuuucccugcaa

SEQ ID NO: 244098 - RNA, 32 nt, Homo Sapiens
caaaggccgacuccuggcaggaccucagucaa

SEQ ID NO: 244099 - RNA, 32 nt, Homo Sapiens
aguuuuaguuuaaaaagaaaaaaugcagggug

SEQ ID NO: 244100 - RNA, 32 nt, Homo Sapiens
cagcuacuucuccugcacuuugaaagaccccu

SEQ ID NO: 244101 - RNA, 32 nt, Homo Sapiens
gauuaguuuuacaauuuuuuuauccaucaaau

SEQ ID NO: 244102 - RNA, 32 nt, Homo Sapiens
guugguaauuuaauagggauaacuugcaucug

SEQ ID NO: 244103 - RNA, 32 nt, Homo Sapiens
uuuccaaacuuguuucucagacuuccgcagau

SEQ ID NO: 244104 - RNA, 32 nt, Homo Sapiens
aaaggcuucaugggacuugaauccccauccua

SEQ ID NO: 244105 - RNA, 32 nt, Homo Sapiens
accagcucaucccagacaccucauagcaaccu

SEQ ID NO: 244106 - RNA, 32 nt, Homo Sapiens
cauaacuucucgcguccccggcguccgccgcc

SEQ ID NO: 244107 - RNA, 32 nt, Homo Sapiens
aggaaaaaacaaaaucugauauuuuuccaaac

SEQ ID NO: 244108 - RNA, 32 nt, Homo Sapiens
ugaaggcucuuuccccgcaagggccagguguu

SEQ ID NO: 244109 - RNA, 32 nt, Homo Sapiens
ggguggcaagggggcggggcgggggcccgaaa

SEQ ID NO: 244110 - RNA, 32 nt, Homo Sapiens
uuaucaaaagacuuuuauuauuagauugggac

SEQ ID NO: 244111 - RNA, 32 nt, Homo Sapiens
agcacaguauugggaaaugggagcacaguacu

SEQ ID NO: 244112 - RNA, 32 nt, Homo Sapiens
uuaugugauugaagcaaaugugaaucguauua

SEQ ID NO: 244113 - RNA, 32 nt, Homo Sapiens
ugguagcucaggugggcguggucacugcuguc

SEQ ID NO: 244114 - RNA, 32 nt, Homo Sapiens
cagggaacagggaagcacuuacaauuauuccu

SEQ ID NO: 244115 - RNA, 32 nt, Homo Sapiens
ggucugcaucuaagucacuuugaaaaacagua

SEQ ID NO: 244116 - RNA, 32 nt, Homo Sapiens
gccuaggagacggaggcuguagugagcugaga

SEQ ID NO: 244117 - RNA, 32 nt, Homo Sapiens
acuuuaaaaauauugcagugcuauuuuuucuu

SEQ ID NO: 244118 - RNA, 32 nt, Homo Sapiens
ggcuguguauucaacagcacuuccagaagagg

SEQ ID NO: 244119 - RNA, 32 nt, Homo Sapiens
gcgcagccccgcggacucggccccgcggccaa

SEQ ID NO: 244120 - RNA, 32 nt, Homo Sapiens
ugaccuugaagaaauguauauacaguugccuu

SEQ ID NO: 244121 - RNA, 32 nt, Homo Sapiens
gcccuuacggaugagccgaggcagcuuccgcu

SEQ ID NO: 244122 - RNA, 32 nt, Homo Sapiens
uucauucuauuucaaaugcuuauaaagcuacu

SEQ ID NO: 244123 - RNA, 32 nt, Homo Sapiens
gaaacccauucugucgugucugccggggccca

SEQ ID NO: 244124 - RNA, 32 nt, Homo Sapiens
gggagggcgcgcggccgagcggaggcggaguc

SEQ ID NO: 244125 - RNA, 32 nt, Homo Sapiens
gauaaugcugcuauaauuaguauuauguugau

SEQ ID NO: 244126 - RNA, 30 nt, Homo Sapiens
gcccuuccuuaugcaaagcgcgccagcagc

SEQ ID NO: 244127 - RNA, 32 nt, Homo Sapiens
aguggaguggagcggcugugguugccgacucu

SEQ ID NO: 244128 - RNA, 32 nt, Homo Sapiens
gagauugggggugccugugucugggacagggg

SEQ ID NO: 244129 - RNA, 32 nt, Homo Sapiens
ucuuuaacugaucccacccccacccaaaaguc

SEQ ID NO: 244130 - RNA, 32 nt, Homo Sapiens
uguuugcacuuuauauuuuagcagauacaguc

SEQ ID NO: 244131 - RNA, 32 nt, Homo Sapiens
cauugcacuccagccugggugacaagagcaag

SEQ ID NO: 244132 - RNA, 32 nt, Homo Sapiens
agcagugacaccuuuguguuuuuaugucuccg

SEQ ID NO: 244133 - RNA, 32 nt, Homo Sapiens
auuauaugucucugucucucucuauugugugu

SEQ ID NO: 244134 - RNA, 32 nt, Homo Sapiens
aguucauggagaagagaaaaacaagugugggu

SEQ ID NO: 244135 - RNA, 32 nt, Homo Sapiens
gcuucagaggacuuauaauugcuugguuuugu

SEQ ID NO: 244136 - RNA, 32 nt, Homo Sapiens
augacugcguccucucgccuuaagauucagcu

SEQ ID NO: 244137 - RNA, 32 nt, Homo Sapiens
cagucaccucuuugucucucucuucuuucuga

SEQ ID NO: 244138 - RNA, 32 nt, Homo Sapiens
ucuaaguuaaguggaucucaccagauuucaac

SEQ ID NO: 244139 - RNA, 32 nt, Homo Sapiens
acugcgugcgugcgcgcacgcauacacacaca

SEQ ID NO: 244140 - RNA, 32 nt, Homo Sapiens
ucccggagaccacgcuucuccuccgugccgug

SEQ ID NO: 244141 - RNA, 32 nt, Homo Sapiens
cauuauaaacaaacaauagcaaccaguugucu

SEQ ID NO: 244142 - RNA, 32 nt, Homo Sapiens
cuggggcuccugugucagguguguuuacauug

SEQ ID NO: 244143 - RNA, 32 nt, Homo Sapiens
cccagagugcgcucgcgccggcaccagcuccc

SEQ ID NO: 244144 - RNA, 32 nt, Homo Sapiens
agacuccacgcaggaccagggaucucacgagg

SEQ ID NO: 244145 - RNA, 32 nt, Homo Sapiens
gcaccgccgcggcuggagcccgcagaggcagg

SEQ ID NO: 244146 - RNA, 32 nt, Homo Sapiens
ugucuuuuuucccuauggaauagacacauagu

SEQ ID NO: 244147 - RNA, 32 nt, Homo Sapiens
gggggccggccgcuggcagggagcugugguca

SEQ ID NO: 244148 - RNA, 32 nt, Homo Sapiens
gcuccuggguccccggcaccccggccccgcag

SEQ ID NO: 244149 - RNA, 32 nt, Homo Sapiens
cugcaucacugccugugccuucguuucuucau

SEQ ID NO: 244150 - RNA, 32 nt, Homo Sapiens
ccuuugggaugagaugaauauauuuuacaugu

SEQ ID NO: 244151 - RNA, 30 nt, Homo Sapiens
agucagcccugcugcucagagugcaggcau

SEQ ID NO: 244152 - RNA, 32 nt, Homo Sapiens
aaacugagucccagccccaggguccucccucg

SEQ ID NO: 244153 - RNA, 32 nt, Homo Sapiens
augcaaaaccucccaaccuuucuaaggacaag

SEQ ID NO: 244154 - RNA, 32 nt, Homo Sapiens
gucgcggggccggccgcuacuccggccccagg

SEQ ID NO: 244155 - RNA, 32 nt, Homo Sapiens
cacgcguccgcggacgcgugggccgcgccgga

SEQ ID NO: 244156 - RNA, 32 nt, Homo Sapiens
ugaguauauauucaugcaauauauggcauauu

SEQ ID NO: 244157 - RNA, 32 nt, Homo Sapiens
gucgcucccuucccugggugccgcacguccag

SEQ ID NO: 244158 - RNA, 32 nt, Homo Sapiens
gcauuaccauagagaacaaaauagacaaauac

SEQ ID NO: 244159 - RNA, 32 nt, Homo Sapiens
aaagggcugcuucuaacggaugugguuuguug

SEQ ID NO: 244160 - RNA, 32 nt, Homo Sapiens
uccucagaccaucuccuucauucugggcagug

SEQ ID NO: 244161 - RNA, 32 nt, Homo Sapiens
uaaacucaagcaggccaaaaccaauaugcuua

SEQ ID NO: 244162 - RNA, 32 nt, Homo Sapiens
uuguagaugaaaaaaaucauuauguuuagagg

SEQ ID NO: 244163 - RNA, 32 nt, Homo Sapiens
uaggaaauagaacagucugcugggagucagac

SEQ ID NO: 244164 - RNA, 32 nt, Homo Sapiens
cuggugagggaagagggugggcaaguuuaugu

SEQ ID NO: 244165 - RNA, 32 nt, Homo Sapiens
cagcuuccagggcggcuuggaguccgggggcc

SEQ ID NO: 244166 - RNA, 32 nt, Homo Sapiens
agaaucgugacuauuauugcuccaucaaacug

SEQ ID NO: 244167 - RNA, 32 nt, Homo Sapiens
agagcaaucugggcacuuuggccaauuuuagu

SEQ ID NO: 244168 - RNA, 30 nt, Homo Sapiens
agacggguggcauggggagcagcuaaacaa

SEQ ID NO: 244169 - RNA, 32 nt, Homo Sapiens
ggcuccaaagucugcaucuggauuugggggug

SEQ ID NO: 244170 - RNA, 32 nt, Homo Sapiens
guagaaaggggagaaugucaaggaagacuuuu

SEQ ID NO: 244171 - RNA, 32 nt, Homo Sapiens
cugaagugugaccugaccguguggaaccaaac

SEQ ID NO: 244172 - RNA, 32 nt, Homo Sapiens
uggagguuuggcuccugugcugccgguggggg

SEQ ID NO: 244173 - RNA, 32 nt, Homo Sapiens
aagucggaaguaccagcugcgggaaggagcug

SEQ ID NO: 244174 - RNA, 32 nt, Homo Sapiens
guuucccccacagcagcacgggccccacugug

SEQ ID NO: 244175 - RNA, 32 nt, Homo Sapiens
ccccauccccaucgcaggccgaugaccuggag

SEQ ID NO: 244176 - RNA, 32 nt, Homo Sapiens
cgccauuggcuggccuggucacauggcugccc

SEQ ID NO: 244177 - RNA, 30 nt, Homo Sapiens
ccgaggggcuguggaacgggucccggaacu

SEQ ID NO: 244178 - RNA, 32 nt, Homo Sapiens
ugaguuaagggagagagacaaaacggggauug

SEQ ID NO: 244179 - RNA, 32 nt, Homo Sapiens
ggaaggcuggcuaauuucagugcuugugcuug

SEQ ID NO: 244180 - RNA, 32 nt, Homo Sapiens
gcgcucccugcggagcuccgccgcccgccucu

SEQ ID NO: 244181 - RNA, 32 nt, Homo Sapiens
aucacgggcuccuguuucccgcagggugcugg

SEQ ID NO: 244182 - RNA, 32 nt, Homo Sapiens
ccauuuagggaucguggggacgggguccaccc

SEQ ID NO: 244183 - RNA, 31 nt, Homo Sapiens
uuuuugcauaagaaaaaugauacaauuucuu

SEQ ID NO: 244184 - RNA, 32 nt, Homo Sapiens
uccuggcuccagcaccaugauacuugggcaug

SEQ ID NO: 244185 - RNA, 32 nt, Homo Sapiens
gaagugggagaagaggcgacccaaggcgggcu

SEQ ID NO: 244186 - RNA, 32 nt, Homo Sapiens
ccgaagccgggcggaggagagcucaagcuaag

SEQ ID NO: 244187 - RNA, 32 nt, Homo Sapiens
cccuugcucccucucugccugcaaucaccagu

SEQ ID NO: 244188 - RNA, 32 nt, Homo Sapiens
aaaagaaaaaaauuauagugagaaugagauuc

SEQ ID NO: 244189 - RNA, 32 nt, Homo Sapiens
aagggauccuaaaagaggcgguggaagugaaa

SEQ ID NO: 244190 - RNA, 32 nt, Homo Sapiens
uuucaucuguuguucuguggucacagugaccu

SEQ ID NO: 244191 - RNA, 32 nt, Homo Sapiens
gagcaggagcagcugguauuccggugauuaaa

SEQ ID NO: 244192 - RNA, 31 nt, Homo Sapiens
ugacucacaggcagccaaggaccugcuguac

SEQ ID NO: 244193 - RNA, 32 nt, Homo Sapiens
aguuucuggagcuacuugccaaggcugagugu

SEQ ID NO: 244194 - RNA, 32 nt, Homo Sapiens
cggggagagcagccuuggcgcuacggaggagc

SEQ ID NO: 244195 - RNA, 32 nt, Homo Sapiens
uuugcaaauauguguuuagacaauaagaugga

SEQ ID NO: 244196 - RNA, 32 nt, Homo Sapiens
uagcaagagacacuauuaccaaagauuguugg

SEQ ID NO: 244197 - RNA, 32 nt, Homo Sapiens
auuuuugaaccaugcauaugauggacacacaa

SEQ ID NO: 244198 - RNA, 32 nt, Homo Sapiens
uucccuucuuugacuuuuccuggauugcuagu

SEQ ID NO: 244199 - RNA, 32 nt, Homo Sapiens
gcagccccagagcacaaggcaaugcagaaagg

SEQ ID NO: 244200 - RNA, 32 nt, Homo Sapiens
gagugaggcaugguauaaacaccuggucauuu

SEQ ID NO: 244201 - RNA, 32 nt, Homo Sapiens
cuuuccuggcccaguccucaccacaguccaca

SEQ ID NO: 244202 - RNA, 32 nt, Homo Sapiens
cuuuccagagcaauugucuccuccucuacacu

SEQ ID NO: 244203 - RNA, 32 nt, Homo Sapiens
uacugguacacgaacacacuuuuuacaaaacc

SEQ ID NO: 244204 - RNA, 32 nt, Homo Sapiens
aacaggugcauaaucccugugcuccuuaagcc

SEQ ID NO: 244205 - RNA, 32 nt, Homo Sapiens
cacccccaccucccucccggacggggcagcug

SEQ ID NO: 244206 - RNA, 30 nt, Homo Sapiens
accacucuggacuguucuguaaaguggcug

SEQ ID NO: 244207 - RNA, 32 nt, Homo Sapiens
gcagcccccuuuggagaucuccagguagacuu

SEQ ID NO: 244208 - RNA, 32 nt, Homo Sapiens
ugcagaaaaguguuuuuacacaaacuuucuca

SEQ ID NO: 244209 - RNA, 32 nt, Homo Sapiens
ggggugagagaccagcagcccaagggcuccag

SEQ ID NO: 244210 - RNA, 32 nt, Homo Sapiens
cgccuguaaucccagcacuuugggaggccaau

SEQ ID NO: 244211 - RNA, 32 nt, Homo Sapiens
cgccuguaaucccagcacuuugguaggccaag

SEQ ID NO: 244212 - RNA, 32 nt, Homo Sapiens
ucagcaggacgcugcgcacaacaugggcaacc

SEQ ID NO: 244213 - RNA, 32 nt, Homo Sapiens
ggccaccugagacugucacugcucuccccugg

SEQ ID NO: 244214 - RNA, 32 nt, Homo Sapiens
ucaaggggcuccccucccgugcauggacauuu

SEQ ID NO: 244215 - RNA, 30 nt, Homo Sapiens
aaaguacuggacugccugguucagggcuga

SEQ ID NO: 244216 - RNA, 32 nt, Homo Sapiens
cuuagaggaaaauagaauaaacugaguagaga

SEQ ID NO: 244217 - RNA, 27 nt, Homo Sapiens
ccugccugugucuucagcccugaugca

SEQ ID NO: 244218 - RNA, 32 nt, Homo Sapiens
gccguggagcagcaggcuggcuuugguagggg

SEQ ID NO: 244219 - RNA, 32 nt, Homo Sapiens
ucugcggggucgcggcagccgcaccugcgcgg

SEQ ID NO: 244220 - RNA, 31 nt, Homo Sapiens
uucccuauucaccaacaaugaguuaaacacu

SEQ ID NO: 244221 - RNA, 32 nt, Homo Sapiens
gagaugccaccguaccccuacugcaugcagcc

SEQ ID NO: 244222 - RNA, 32 nt, Homo Sapiens
aagugcuugugccagcagcauggacugcgugc

SEQ ID NO: 244223 - RNA, 32 nt, Homo Sapiens
uuauaaaaucccagcccucucugucuuaauua

SEQ ID NO: 244224 - RNA, 32 nt, Homo Sapiens
auuaugcagcuauaauccauuauuuuucauug

SEQ ID NO: 244225 - RNA, 32 nt, Homo Sapiens
gcuuuuaucagauacacacuuugauuuuagca

SEQ ID NO: 244226 - RNA, 32 nt, Homo Sapiens
guuaaagguucuaugaaaauaaaaaagaauuc

SEQ ID NO: 244227 - RNA, 32 nt, Homo Sapiens
ccaagaaagggaguggaggugcagcgaaggac

SEQ ID NO: 244228 - RNA, 31 nt, Homo Sapiens
uagagccaagccacacccacugcugggugga

SEQ ID NO: 244229 - RNA, 32 nt, Homo Sapiens
ggcauacugcugugcucugugcuuuccagcag

SEQ ID NO: 244230 - RNA, 32 nt, Homo Sapiens
gucuccagcugauuuuaacuuuuuugauggua

SEQ ID NO: 244231 - RNA, 32 nt, Homo Sapiens
auccagaucagaucagaagagaauaugccugg

SEQ ID NO: 244232 - RNA, 32 nt, Homo Sapiens
cuagagaaauggugaggaguucucuaauguag

SEQ ID NO: 244233 - RNA, 32 nt, Homo Sapiens
agauuguuucaguuauuugaggucuuuuaugg

SEQ ID NO: 244234 - RNA, 32 nt, Homo Sapiens
aagcauggaguucuaaugcucccauaaacuau

SEQ ID NO: 244235 - RNA, 32 nt, Homo Sapiens
uuuuauguauauauauucugaaaugcucccuu

SEQ ID NO: 244236 - RNA, 32 nt, Homo Sapiens
uacacuauuuuugauagcacacauggggcccc

SEQ ID NO: 244237 - RNA, 32 nt, Homo Sapiens
gccggaguuaaggccggggggaggcggcgagu

SEQ ID NO: 244238 - RNA, 32 nt, Homo Sapiens
uauguagcuuacucuuuuuuuccccccuucuu

SEQ ID NO: 244239 - RNA, 32 nt, Homo Sapiens
agaaggggaugguguugucacaaacugugguu

SEQ ID NO: 244240 - RNA, 32 nt, Homo Sapiens
uaaauuuaaauauuauuuuuaaaagaaaaaaa

SEQ ID NO: 244241 - RNA, 32 nt, Homo Sapiens
cacuaugugaaugagauguuuuaggagcuaua

SEQ ID NO: 244242 - RNA, 32 nt, Homo Sapiens
cuccacacucugggcucugggcuccuugaccu

SEQ ID NO: 244243 - RNA, 28 nt, Homo Sapiens
caacagguuacaggaggagcuaugaaua

SEQ ID NO: 244244 - RNA, 32 nt, Homo Sapiens
agaaccuagacaauauugucuucuaguuaaaa

SEQ ID NO: 244245 - RNA, 32 nt, Homo Sapiens
gaaaaaucuucaguuguaucucuuccuuuacu

SEQ ID NO: 244246 - RNA, 32 nt, Homo Sapiens
gcuuagcccagcugaccccagacccucucccc

SEQ ID NO: 244247 - RNA, 32 nt, Homo Sapiens
cgcugcuccugccuugaagccacgcgcuccac

SEQ ID NO: 244248 - RNA, 32 nt, Homo Sapiens
auauuguaaacuaauacauugucuagcauuga

SEQ ID NO: 244249 - RNA, 32 nt, Homo Sapiens
accuuaagauaauggauaaucuucggccaauu

SEQ ID NO: 244250 - RNA, 32 nt, Homo Sapiens
accuccuaacugaguuuacacacgcuuguguu

SEQ ID NO: 244251 - RNA, 32 nt, Homo Sapiens
aggccaucgcugcccugccgcuuaccacaggg

SEQ ID NO: 244252 - RNA, 32 nt, Homo Sapiens
cgggcggaaggggacgcgggcugugccuuacu

SEQ ID NO: 244253 - RNA, 32 nt, Homo Sapiens
ggcuacuccaugauaguguuaaaaaacaaaau

SEQ ID NO: 244254 - RNA, 32 nt, Homo Sapiens
gguguaugcaaguugaauuugcugacuccagc

SEQ ID NO: 244255 - RNA, 25 nt, Homo Sapiens
augguuuguggcggcuuugccugcu

SEQ ID NO: 244256 - RNA, 32 nt, Homo Sapiens
gaguccccagaccccaggaucagggaggugua

SEQ ID NO: 244257 - RNA, 32 nt, Homo Sapiens
gagggaagauggcugauguggcauuuaaggga

SEQ ID NO: 244258 - RNA, 32 nt, Homo Sapiens
auccuccugccucuccucugccccuguccagu

SEQ ID NO: 244259 - RNA, 32 nt, Homo Sapiens
ucacuguguuggggagagggugacgauugcaa

SEQ ID NO: 244260 - RNA, 32 nt, Homo Sapiens
cagaagugggagaggccggcagccugcaccga

SEQ ID NO: 244261 - RNA, 32 nt, Homo Sapiens
gucggccuccacugaugcuggugcucaggcac

SEQ ID NO: 244262 - RNA, 32 nt, Homo Sapiens
ucugucugaggagccccagucaugcucagcac

SEQ ID NO: 244263 - RNA, 32 nt, Homo Sapiens
aucauaauguagucuguaaguaacaaacauuu

SEQ ID NO: 244264 - RNA, 32 nt, Homo Sapiens
agcuacagccuggacuuaccaccacuaaacug

SEQ ID NO: 244265 - RNA, 32 nt, Homo Sapiens
gccuccugucuucuaggagcuaucaagggucu

SEQ ID NO: 244266 - RNA, 32 nt, Homo Sapiens
aaagcaggaaaugugcauguguaaugguuuau

SEQ ID NO: 244267 - RNA, 32 nt, Homo Sapiens
aaauuugguacauuucaaaacuucugguccuc

SEQ ID NO: 244268 - RNA, 32 nt, Homo Sapiens
agaccagggggaagagugucagcguggggugg

SEQ ID NO: 244269 - RNA, 29 nt, Homo Sapiens
guuauuucuauccacgccuaugaaucuuu

SEQ ID NO: 244270 - RNA, 32 nt, Homo Sapiens
cucgccucagucuccucuguccucucccaggc

SEQ ID NO: 244271 - RNA, 32 nt, Homo Sapiens
guccaagcugucuucagccuuccccagcuaaa

SEQ ID NO: 244272 - RNA, 31 nt, Homo Sapiens
uuccgugugaacaugaagacaaugcugccuc

SEQ ID NO: 244273 - RNA, 32 nt, Homo Sapiens
ugccaggauggcuuuuccugcuguacugaacc

SEQ ID NO: 244274 - RNA, 32 nt, Homo Sapiens
auuugggcauuugggaggugggguuuugccau

SEQ ID NO: 244275 - RNA, 32 nt, Homo Sapiens
ugucuuuuauucauucuaaaucuuauuaaccg

SEQ ID NO: 244276 - RNA, 32 nt, Homo Sapiens
ugauuugauuuuuuuucuuuuugagacagagu

SEQ ID NO: 244277 - RNA, 32 nt, Homo Sapiens
gaggggggugaucaccugaggucaggaguuug

SEQ ID NO: 244278 - RNA, 32 nt, Homo Sapiens
uuaugaugaagaugauaguagugcuaugggau

SEQ ID NO: 244279 - RNA, 32 nt, Homo Sapiens
uuaauugcguaaucccuguuguccuccagggu

SEQ ID NO: 244280 - RNA, 32 nt, Homo Sapiens
aauggcucguccgugaaacgcgagccacggcu

SEQ ID NO: 244281 - RNA, 32 nt, Homo Sapiens
agcuguguucucgucacccaugccggcacagu

SEQ ID NO: 244282 - RNA, 32 nt, Homo Sapiens
ugaggcagacccagcaggguccuccuggggcc

SEQ ID NO: 244283 - RNA, 32 nt, Homo Sapiens
auggaugucuuuguggugaugauccuucagaa

SEQ ID NO: 244284 - RNA, 30 nt, Homo Sapiens
ucuucccuuaucccugcucuggauuuuagu

SEQ ID NO: 244285 - RNA, 32 nt, Homo Sapiens
cuccgugguggguggcagcuguacaccuccag

SEQ ID NO: 244286 - RNA, 32 nt, Homo Sapiens
aaacaggcucuacucucuucugaugggaggag

SEQ ID NO: 244287 - RNA, 32 nt, Homo Sapiens
gccggccccccgcgcccaacucaccgcugccc

SEQ ID NO: 244288 - RNA, 32 nt, Homo Sapiens
aggaggcggaggaggguggcaccaugggcccg

SEQ ID NO: 244289 - RNA, 32 nt, Homo Sapiens
aaaaucuuguaccuagcacaguauuguuauag

SEQ ID NO: 244290 - RNA, 32 nt, Homo Sapiens
ugugggcagccucauggugccugucuuugugg

SEQ ID NO: 244291 - RNA, 32 nt, Homo Sapiens
aguuuaaauuuauguaucaccucauugugacu

SEQ ID NO: 244292 - RNA, 32 nt, Homo Sapiens
ugugguuccuucccuuuccucccccucccaug

SEQ ID NO: 244293 - RNA, 32 nt, Homo Sapiens
uugugcauugaguuuucuuuuaaaaaugcuug

SEQ ID NO: 244294 - RNA, 32 nt, Homo Sapiens
agcuguguccuggcagaaggucuggguuugca

SEQ ID NO: 244295 - RNA, 32 nt, Homo Sapiens
agguggcacaucuggagggcagggguugaggg

SEQ ID NO: 244296 - RNA, 32 nt, Homo Sapiens
caacagcgaacugguccagagcggcaagagca

SEQ ID NO: 244297 - RNA, 32 nt, Homo Sapiens
ggucuaggggaagagguguuggggcaggaagu

SEQ ID NO: 244298 - RNA, 32 nt, Homo Sapiens
aagaauuucuucaauucuucuguuuuguuuuu

SEQ ID NO: 244299 - RNA, 32 nt, Homo Sapiens
guauaaaauaccaguuuguacaguaugaccua

SEQ ID NO: 244300 - RNA, 32 nt, Homo Sapiens
aauucuugauaaagaagauucuguggucuaaa

SEQ ID NO: 244301 - RNA, 32 nt, Homo Sapiens
uuauggugguggccuggugauggggaccgucu

SEQ ID NO: 244302 - RNA, 32 nt, Homo Sapiens
uaaauuaaugaaaagcacuuuuaaaaaucaac

SEQ ID NO: 244303 - RNA, 32 nt, Homo Sapiens
ggcucagacaccuuccuccaggcccaggggcc

SEQ ID NO: 244304 - RNA, 32 nt, Homo Sapiens
ggucucacuauguggcccaggcuggucucaaa

SEQ ID NO: 244305 - RNA, 32 nt, Homo Sapiens
auaaccaaaugguagagggcuguuccaugaug

SEQ ID NO: 244306 - RNA, 32 nt, Homo Sapiens
uuuaaacagucuuuuuauuguggauugugaaa

SEQ ID NO: 244307 - RNA, 32 nt, Homo Sapiens
uccccuggucuucacuauucuagcuugccauu

SEQ ID NO: 244308 - RNA, 32 nt, Homo Sapiens
caacacucuuuccccaugucuuucuggcuguc

SEQ ID NO: 244309 - RNA, 32 nt, Homo Sapiens
uucuuuuaacauacucuuucuguucuauugua

SEQ ID NO: 244310 - RNA, 32 nt, Homo Sapiens
uugugcacuaacguccuuugcuccauccccgc

SEQ ID NO: 244311 - RNA, 32 nt, Homo Sapiens
cccuaaaauaauccacgugucuuccuaaaauc

SEQ ID NO: 244312 - RNA, 32 nt, Homo Sapiens
caacgaagaacuauaaaaauaacuuuuauaca

SEQ ID NO: 244313 - RNA, 32 nt, Homo Sapiens
cccaaguccagccccaggaugcccagacccca

SEQ ID NO: 244314 - RNA, 32 nt, Homo Sapiens
cacacacgcgcacacacacacacacacacaca

SEQ ID NO: 244315 - RNA, 30 nt, Homo Sapiens
accuggagaugaugaugaugaugaugaugg

SEQ ID NO: 244316 - RNA, 32 nt, Homo Sapiens
ccuugaggacuggggugcuggguguggggauu

SEQ ID NO: 244317 - RNA, 32 nt, Homo Sapiens
aaagagugaaacauuaaaaugacgcauggauu

SEQ ID NO: 244318 - RNA, 32 nt, Homo Sapiens
ggcucagugcggagcucggcgccggggcccau

SEQ ID NO: 244319 - RNA, 32 nt, Homo Sapiens
cuugaaucugggaaacaagcucaaaaaacagu

SEQ ID NO: 244320 - RNA, 32 nt, Homo Sapiens
ugcuguuugggguuucgaugcuuuuuaugcug

SEQ ID NO: 244321 - RNA, 32 nt, Homo Sapiens
gggggaugugagcgcucaggaugugaugaggu

SEQ ID NO: 244322 - RNA, 32 nt, Homo Sapiens
cuguauagcuuauaccaauuauagaaucauga

SEQ ID NO: 244323 - RNA, 32 nt, Homo Sapiens
uuaggggucuggauuuuguagguccgacuaca

SEQ ID NO: 244324 - RNA, 32 nt, Homo Sapiens
cuauauaaaaucaaagcuaaccacugaggcac

SEQ ID NO: 244325 - RNA, 32 nt, Homo Sapiens
uaggaacgccuucucccaccccucccaguggu

SEQ ID NO: 244326 - RNA, 32 nt, Homo Sapiens
auauaugugagaaaaaccugaauauaggacag

SEQ ID NO: 244327 - RNA, 32 nt, Homo Sapiens
ucguuaaguauuuauacuuguaacuaacccca

SEQ ID NO: 244328 - RNA, 32 nt, Homo Sapiens
auguuggugucugcuuaucuacagcccuaauc

SEQ ID NO: 244329 - RNA, 32 nt, Homo Sapiens
gucccuccccagugcagcauggcacucaggag

SEQ ID NO: 244330 - RNA, 32 nt, Homo Sapiens
caacagccccggggcccggcccuagccagcug

SEQ ID NO: 244331 - RNA, 32 nt, Homo Sapiens
cuggcugcccaucugcggccuuucucaucucc

SEQ ID NO: 244332 - RNA, 32 nt, Homo Sapiens
gaaaucacuguguuuucagcucagcggcccug

SEQ ID NO: 244333 - RNA, 32 nt, Homo Sapiens
ucauuauuauuucucuuugcuuucucaauguu

SEQ ID NO: 244334 - RNA, 32 nt, Homo Sapiens
uucuugccccagggcuggccugcuagcgcuuc

SEQ ID NO: 244335 - RNA, 32 nt, Homo Sapiens
ccaacugauuaacguguucaucccuaauuuaa

SEQ ID NO: 244336 - RNA, 32 nt, Homo Sapiens
caaaagacauaauuuucuuuuuuaaggcugcu

SEQ ID NO: 244337 - RNA, 32 nt, Homo Sapiens
ugcugccaucuuccuagaaucccuuuaaaucc

SEQ ID NO: 244338 - RNA, 32 nt, Homo Sapiens
uaucuagcugucugccaucugaguguccaucu

SEQ ID NO: 244339 - RNA, 32 nt, Homo Sapiens
acccuucucgcuuuugccauuagccaaggaua

SEQ ID NO: 244340 - RNA, 32 nt, Homo Sapiens
cagaccacuccagagcuuccuggggagcagga

SEQ ID NO: 244341 - RNA, 32 nt, Homo Sapiens
gcuccagccccggcuggcccggcacuucucgg

SEQ ID NO: 244342 - RNA, 32 nt, Homo Sapiens
agaguucaaacaacaaaauaaaaaauauuaag

SEQ ID NO: 244343 - RNA, 32 nt, Homo Sapiens
gacagagaagauccucuugggcugcuuuagug

SEQ ID NO: 244344 - RNA, 32 nt, Homo Sapiens
aagcccucccugucugucugucucucuuuugc

SEQ ID NO: 244345 - RNA, 32 nt, Homo Sapiens
augauuuguaauuaaauuguagcaauuuuggu

SEQ ID NO: 244346 - RNA, 32 nt, Homo Sapiens
caacuccagcccagccccgcgucccugugucc

SEQ ID NO: 244347 - RNA, 32 nt, Homo Sapiens
ucuuacucauuucagucccaucuaaaaaugug

SEQ ID NO: 244348 - RNA, 32 nt, Homo Sapiens
ccagucccuggccccaccucuucugccacaaa

SEQ ID NO: 244349 - RNA, 32 nt, Homo Sapiens
acaaaggauaaucuuucuuuucauugacaaca

SEQ ID NO: 244350 - RNA, 32 nt, Homo Sapiens
cuagcgccuuugguccuaagaaugggaggcug

SEQ ID NO: 244351 - RNA, 32 nt, Homo Sapiens
ucggagccccccagcccaccccugggugcggc

SEQ ID NO: 244352 - RNA, 32 nt, Homo Sapiens
ucaaggccgccagccgcccgccgcccucuuug

SEQ ID NO: 244353 - RNA, 32 nt, Homo Sapiens
gggaagugggaggagggaaaccagggccugag

SEQ ID NO: 244354 - RNA, 32 nt, Homo Sapiens
gacguggcauuuggaaacgaaacuuagauguu

SEQ ID NO: 244355 - RNA, 32 nt, Homo Sapiens
caaggggccggcacagcccccaucccacugag

SEQ ID NO: 244356 - RNA, 32 nt, Homo Sapiens
ucucagucccugcuaacagccucagcacaucc

SEQ ID NO: 244357 - RNA, 32 nt, Homo Sapiens
ugcaagacaaugcugcugccaacuacauugca

SEQ ID NO: 244358 - RNA, 30 nt, Homo Sapiens
ggacaaugaaauucuucaguuacauucugg

SEQ ID NO: 244359 - RNA, 32 nt, Homo Sapiens
aauaacauauuaugaaaguaguauuuuguacu

SEQ ID NO: 244360 - RNA, 32 nt, Homo Sapiens
uauguggaauaauacauacuaaugaaguauua

SEQ ID NO: 244361 - RNA, 32 nt, Homo Sapiens
agccgugaguauggccagccuccagcucucag

SEQ ID NO: 244362 - RNA, 32 nt, Homo Sapiens
uugaaacucccugacagccuguucuacguagu

SEQ ID NO: 244363 - RNA, 32 nt, Homo Sapiens
uggauagaaggggacuguucuucacacaucau

SEQ ID NO: 244364 - RNA, 32 nt, Homo Sapiens
cacccauugaauuuuuaaauggcuguucaguu

SEQ ID NO: 244365 - RNA, 29 nt, Homo Sapiens
agaagaugaaguuuauugcaguuuugugu

SEQ ID NO: 244366 - RNA, 32 nt, Homo Sapiens
ccgggccaccucaggacuccaagaggcugugu

SEQ ID NO: 244367 - RNA, 32 nt, Homo Sapiens
gggaaguaugguauuggauuuaccaacauggu

SEQ ID NO: 244368 - RNA, 32 nt, Homo Sapiens
cugcagucugugaggagggcugucuugccuca

SEQ ID NO: 244369 - RNA, 32 nt, Homo Sapiens
gcuugcucccguugugcuuugaggaugaauug

SEQ ID NO: 244370 - RNA, 32 nt, Homo Sapiens
ccccugcccuccccgacccgcccagcuuagcc

SEQ ID NO: 244371 - RNA, 31 nt, Homo Sapiens
uagaagaaaaggcagagacaggcaagacagc

SEQ ID NO: 244372 - RNA, 32 nt, Homo Sapiens
aauguauuaaugaaaugaaaugauaauuuggc

SEQ ID NO: 244373 - RNA, 32 nt, Homo Sapiens
ugcauggaacuaaaauguuauugccuaaucac

SEQ ID NO: 244374 - RNA, 27 nt, Homo Sapiens
gaugugcucuucuucaggacucaggcu

SEQ ID NO: 244375 - RNA, 32 nt, Homo Sapiens
gguuggauuugcuguucuugccugcagggccu

SEQ ID NO: 244376 - RNA, 32 nt, Homo Sapiens
cuaagaaaaauauaauaaaauuuugguaguga

SEQ ID NO: 244377 - RNA, 32 nt, Homo Sapiens
ucugccagaggggugggucagagcaguggagg

SEQ ID NO: 244378 - RNA, 32 nt, Homo Sapiens
acaggacuaugaauugaaauguuggcauacuu

SEQ ID NO: 244379 - RNA, 32 nt, Homo Sapiens
gacagagcagcugcugaugucuggaggcugau

SEQ ID NO: 244380 - RNA, 32 nt, Homo Sapiens
ccaggguccccuccccagcucccuugggaagg

SEQ ID NO: 244381 - RNA, 32 nt, Homo Sapiens
uugcuaccaaaauagucugggcaggccacuuu

SEQ ID NO: 244382 - RNA, 32 nt, Homo Sapiens
ccuugcccuucccccgcccccggacggucaca

SEQ ID NO: 244383 - RNA, 32 nt, Homo Sapiens
uuaaaugacaacaguauuuccaauaacagcgu

SEQ ID NO: 244384 - RNA, 32 nt, Homo Sapiens
ugccccucugaguuacaaccacugucuccuuu

SEQ ID NO: 244385 - RNA, 32 nt, Homo Sapiens
guacaguaaaaauacuguauaagagauaaaac

SEQ ID NO: 244386 - RNA, 32 nt, Homo Sapiens
cugaagcauuuuauaggaacuacucauuguuc

SEQ ID NO: 244387 - RNA, 32 nt, Homo Sapiens
aguugggcagaucaccugagaucaggaguucg

SEQ ID NO: 244388 - RNA, 28 nt, Homo Sapiens
gggucguagcugccgccgagccggggcu

SEQ ID NO: 244389 - RNA, 32 nt, Homo Sapiens
uuaagggcauuuuuauacucagaacuguccca

SEQ ID NO: 244390 - RNA, 32 nt, Homo Sapiens
ccccagccgggcgcagcagccggaggugucgg

SEQ ID NO: 244391 - RNA, 32 nt, Homo Sapiens
aaauguucaugucuuauuuuuguguuagauuu

SEQ ID NO: 244392 - RNA, 32 nt, Homo Sapiens
uuuagccaauuucucucauuuggaauggcugu

SEQ ID NO: 244393 - RNA, 32 nt, Homo Sapiens
ugcuuuguguuuuuauuuuuauuuuuugaaaa

SEQ ID NO: 244394 - RNA, 32 nt, Homo Sapiens
agggcggagccagccccuccccuacccggagc

SEQ ID NO: 244395 - RNA, 32 nt, Homo Sapiens
uucucgguguccugggguaggugcugugugcc

SEQ ID NO: 244396 - RNA, 32 nt, Homo Sapiens
ccaucagcgggcgggggugucgccgaacaggc

SEQ ID NO: 244397 - RNA, 32 nt, Homo Sapiens
ucgcggacuccggcggcccuggcgggucgcgg

SEQ ID NO: 244398 - RNA, 32 nt, Homo Sapiens
acacagguucugauguggaggaggcgguggca

SEQ ID NO: 244399 - RNA, 32 nt, Homo Sapiens
uccccucugugucuccauggccugcaguccau

SEQ ID NO: 244400 - RNA, 32 nt, Homo Sapiens
auuuugcuuaggaugucaguagccauauuaag

SEQ ID NO: 244401 - RNA, 32 nt, Homo Sapiens
cuaacaaaauggcaaccuuaauguaugcugug

SEQ ID NO: 244402 - RNA, 32 nt, Homo Sapiens
cggagcccggcgggucaggcauuucuggggac

SEQ ID NO: 244403 - RNA, 32 nt, Homo Sapiens
gcucuccggccgcgggcaucucccggcccggc

SEQ ID NO: 244404 - RNA, 32 nt, Homo Sapiens
cggcaagcccccuggguccccgcgcggcgcau

SEQ ID NO: 244405 - RNA, 32 nt, Homo Sapiens
cacgaggcucugccugugcgaccgccgcccac

SEQ ID NO: 244406 - RNA, 32 nt, Homo Sapiens
cugcuccccacuuucucggacccgguccugga

SEQ ID NO: 244407 - RNA, 32 nt, Homo Sapiens
uguucaucuuucccuuuucucaaagaccugug

SEQ ID NO: 244408 - RNA, 28 nt, Homo Sapiens
cuacaauaaauggaaauuauaaagccuu

SEQ ID NO: 244409 - RNA, 32 nt, Homo Sapiens
aguuuacccuguacagaacacgugcauuucca

SEQ ID NO: 244410 - RNA, 32 nt, Homo Sapiens
gaauuuaauugugcuuuuuuuuuuuuuuuggc

SEQ ID NO: 244411 - RNA, 32 nt, Homo Sapiens
acucccuuucauguuaaucaaacaagugagua

SEQ ID NO: 244412 - RNA, 32 nt, Homo Sapiens
uuggugaugcugugcgagcggcuucgggggcc

SEQ ID NO: 244413 - RNA, 32 nt, Homo Sapiens
cggccuagggcgggcagcucccggggccuggc

SEQ ID NO: 244414 - RNA, 32 nt, Homo Sapiens
uuagcgcccugccagcugggacuccagcaagg

SEQ ID NO: 244415 - RNA, 32 nt, Homo Sapiens
ugguagcagcaacagcagcagcagcagcagca

SEQ ID NO: 244416 - RNA, 30 nt, Homo Sapiens
auugaagaugaugaugaagaaccucugcau

SEQ ID NO: 244417 - RNA, 32 nt, Homo Sapiens
aucuggaauauauaaauaacucuuauaacaca

SEQ ID NO: 244418 - RNA, 28 nt, Homo Sapiens
cagcaggggagucggaagagcuuggaag

SEQ ID NO: 244419 - RNA, 27 nt, Homo Sapiens
acaugcggccccaggagcuccccaggc

SEQ ID NO: 244420 - RNA, 32 nt, Homo Sapiens
acacagaugucucagcuggaaucuaaacauaa

SEQ ID NO: 244421 - RNA, 32 nt, Homo Sapiens
uacaucucauuguccuguggagguggacauga

SEQ ID NO: 244422 - RNA, 32 nt, Homo Sapiens
cugcaaagacaauguugcucuccgccuacacu

SEQ ID NO: 244423 - RNA, 29 nt, Homo Sapiens
uuuaucugauuuuuguauuuucugagguu

SEQ ID NO: 244424 - RNA, 32 nt, Homo Sapiens
gaaagugccugccucugguccgagccgccucg

SEQ ID NO: 244425 - RNA, 32 nt, Homo Sapiens
auuccuacugucacacaggucacgagggugga

SEQ ID NO: 244426 - RNA, 32 nt, Homo Sapiens
gggaaaaggcugaccuuuuggcuggaauugau

SEQ ID NO: 244427 - RNA, 32 nt, Homo Sapiens
auauuaaugagcucgcucgcugcgagggcagg

SEQ ID NO: 244428 - RNA, 32 nt, Homo Sapiens
ucaaaguuaacaccuguuuguuuucuaaaggg

SEQ ID NO: 244429 - RNA, 32 nt, Homo Sapiens
gagucagccaugaacggaauaccugcuagguu

SEQ ID NO: 244430 - RNA, 32 nt, Homo Sapiens
cugcaguucuuuggcuuguguugcucacugca

SEQ ID NO: 244431 - RNA, 32 nt, Homo Sapiens
uuaggcauuuggaaaaucugguucacaucaua

SEQ ID NO: 244432 - RNA, 32 nt, Homo Sapiens
agcucagagugggaggcagagaagugugcuca

SEQ ID NO: 244433 - RNA, 32 nt, Homo Sapiens
agcgaaugugacaugugaaauaaaagcagauu

SEQ ID NO: 244434 - RNA, 32 nt, Homo Sapiens
gccuccuccaugaaccgagaauugggacagaa

SEQ ID NO: 244435 - RNA, 32 nt, Homo Sapiens
uaaaacuaaaauggauuagagauacaagauga

SEQ ID NO: 244436 - RNA, 32 nt, Homo Sapiens
ggggacgcugcacgagccguggaccaagaggc

SEQ ID NO: 244437 - RNA, 32 nt, Homo Sapiens
gcucugggucccuccgccucccagcgacggac

SEQ ID NO: 244438 - RNA, 32 nt, Homo Sapiens
ccuccuuucucuguccucuccugagguucugc

SEQ ID NO: 244439 - RNA, 32 nt, Homo Sapiens
gcagggucgagcuuccccgcgcggcgcgggcu

SEQ ID NO: 244440 - RNA, 32 nt, Homo Sapiens
acaacauggcaaguacaguacuuugaauuuua

SEQ ID NO: 244441 - RNA, 32 nt, Homo Sapiens
uuaguaaaaaagaaaacagaaaaaagaaagau

SEQ ID NO: 244442 - RNA, 31 nt, Homo Sapiens
caccuacuaaucacagaauccacucccuaca

SEQ ID NO: 244443 - RNA, 32 nt, Homo Sapiens
uucuauaaagauuuuuucacuguuuacuagug

SEQ ID NO: 244444 - RNA, 32 nt, Homo Sapiens
gccggaauccugcucuccaucuacgccuacca

SEQ ID NO: 244445 - RNA, 32 nt, Homo Sapiens
uaaaggaagaucugggaugggcuggugggcca

SEQ ID NO: 244446 - RNA, 32 nt, Homo Sapiens
gggagugucuauuuuccucaccauagacacuu

SEQ ID NO: 244447 - RNA, 32 nt, Homo Sapiens
cuuagccgggugugcuggcacgugccuguagu

SEQ ID NO: 244448 - RNA, 32 nt, Homo Sapiens
uaucccuccacccaccguuucccugcagugca

SEQ ID NO: 244449 - RNA, 32 nt, Homo Sapiens
gauuuggacucggacagcugcggccgcgggac

SEQ ID NO: 244450 - RNA, 32 nt, Homo Sapiens
agcucgcgcgugcugaugauggcgauucuuug

SEQ ID NO: 244451 - RNA, 31 nt, Homo Sapiens
aggacuguggaacaucucagagccucucagu

SEQ ID NO: 244452 - RNA, 32 nt, Homo Sapiens
gucuacuccaaaauuauuaaauuuauaauugu

SEQ ID NO: 244453 - RNA, 32 nt, Homo Sapiens
ccuagugccuucuggaccuaaggggccucccu

SEQ ID NO: 244454 - RNA, 32 nt, Homo Sapiens
caagugaucugccugccuuggucucccaaagu

SEQ ID NO: 244455 - RNA, 32 nt, Homo Sapiens
cucacugcccuucuagaugugccuucccgcuu

SEQ ID NO: 244456 - RNA, 32 nt, Homo Sapiens
uuugucuauguuucauaugaaacauuucagaa

SEQ ID NO: 244457 - RNA, 32 nt, Homo Sapiens
cuugugaaguuccaaucuaaugacaccugcug

SEQ ID NO: 244458 - RNA, 32 nt, Homo Sapiens
cuacccagacugccagagcccaggcuggccuc

SEQ ID NO: 244459 - RNA, 32 nt, Homo Sapiens
aagacucucugugccagcccggaggggaagcu

SEQ ID NO: 244460 - RNA, 32 nt, Homo Sapiens
ccuagaguuuucugcuaucuuugcuggaaaug

SEQ ID NO: 244461 - RNA, 32 nt, Homo Sapiens
uccugcucugccuuuuucaugagcuuccaugc

SEQ ID NO: 244462 - RNA, 32 nt, Homo Sapiens
cuccagcuggcgaaggacccaggcucugccaa

SEQ ID NO: 244463 - RNA, 32 nt, Homo Sapiens
acuaaagaaaaauuauuaaaggaacacauacc

SEQ ID NO: 244464 - RNA, 32 nt, Homo Sapiens
gccgggcccagggccucuggcuucccugccca

SEQ ID NO: 244465 - RNA, 32 nt, Homo Sapiens
aauggggugugucuuccccacccccauuccuu

SEQ ID NO: 244466 - RNA, 32 nt, Homo Sapiens
ucuuuucuagauaacuaaguacugcaaucucc

SEQ ID NO: 244467 - RNA, 32 nt, Homo Sapiens
uggcggaagaacuaaacucuaucugugaaaca

SEQ ID NO: 244468 - RNA, 32 nt, Homo Sapiens
aauguguuuuaguugguuaaaaauuauguacc

SEQ ID NO: 244469 - RNA, 32 nt, Homo Sapiens
ccugacacucccuugggcucccuguaaccucu

SEQ ID NO: 244470 - RNA, 32 nt, Homo Sapiens
gcccccgggucugcaccuccagagcccacccu

SEQ ID NO: 244471 - RNA, 32 nt, Homo Sapiens
uagccgggcgugggggugggcgccuguagucc

SEQ ID NO: 244472 - RNA, 32 nt, Homo Sapiens
aggggaacugugucagcagaucagggcuggcu

SEQ ID NO: 244473 - RNA, 32 nt, Homo Sapiens
aaugauuaccauaugaaagauuccaugcaguu

SEQ ID NO: 244474 - RNA, 32 nt, Homo Sapiens
gcccggcaccugcuccucccccuugugaugcu

SEQ ID NO: 244475 - RNA, 32 nt, Homo Sapiens
aaggggcucaagcugugaugcugcugguuuua

SEQ ID NO: 244476 - RNA, 32 nt, Homo Sapiens
gaaagucagaggaggggauccaguagcccuuu

SEQ ID NO: 244477 - RNA, 32 nt, Homo Sapiens
ccuuccaggauguggagucagagaacgucaac

SEQ ID NO: 244478 - RNA, 32 nt, Homo Sapiens
aaacucaaugaaauaauucucagcugccaaau

SEQ ID NO: 244479 - RNA, 32 nt, Homo Sapiens
cccuuggacuuccagccaccagaacugugaag

SEQ ID NO: 244480 - RNA, 32 nt, Homo Sapiens
ccacccuucccgcuguuuucucuuccuggaac

SEQ ID NO: 244481 - RNA, 32 nt, Homo Sapiens
ucgccccgugcccucacgccgccgggcucugg

SEQ ID NO: 244482 - RNA, 32 nt, Homo Sapiens
gguggagcuauggcgccuccaaugaaggaucu

SEQ ID NO: 244483 - RNA, 32 nt, Homo Sapiens
uggcugcagacacccacucaguccaguccugu

SEQ ID NO: 244484 - RNA, 32 nt, Homo Sapiens
ccuugagacuaaaagucagagcugaagggagu

SEQ ID NO: 244485 - RNA, 32 nt, Homo Sapiens
auuaccauuauggauaaagaugagaugguuuc

SEQ ID NO: 244486 - RNA, 32 nt, Homo Sapiens
ccgcucuggcuuuuccucucagcccuggcccu

SEQ ID NO: 244487 - RNA, 32 nt, Homo Sapiens
ccaguaauaaaauggaagauggagucagcuau

SEQ ID NO: 244488 - RNA, 32 nt, Homo Sapiens
ggcagcccauucuucugugcuccuacuguugg

SEQ ID NO: 244489 - RNA, 32 nt, Homo Sapiens
gcagguuugcuuuagacaacagagcacagccc

SEQ ID NO: 244490 - RNA, 32 nt, Homo Sapiens
aaauggcucgugggcucuggcucccugggacc

SEQ ID NO: 244491 - RNA, 32 nt, Homo Sapiens
gccucagcccgcgcagaaugugcucgcugccc

SEQ ID NO: 244492 - RNA, 32 nt, Homo Sapiens
gugggaauuuuaucuuuuuuaggcuucuccuu

SEQ ID NO: 244493 - RNA, 32 nt, Homo Sapiens
gaagaaagaagccauugaaaacaaagacauuc

SEQ ID NO: 244494 - RNA, 32 nt, Homo Sapiens
aggcagacugaauucuaaaucugugaaggauc

SEQ ID NO: 244495 - RNA, 32 nt, Homo Sapiens
ccaggaguuugaggccagacugcacaacacag

SEQ ID NO: 244496 - RNA, 32 nt, Homo Sapiens
uacagcaggacacucuggacaguagauugcag

SEQ ID NO: 244497 - RNA, 31 nt, Homo Sapiens
ucacgcagcaacguuuuuaauaggauuuuua

SEQ ID NO: 244498 - RNA, 32 nt, Homo Sapiens
accgaagccuacugugguacugaagacuucug

SEQ ID NO: 244499 - RNA, 32 nt, Homo Sapiens
acacugaaggcacguacugcccaacccacuga

SEQ ID NO: 244500 - RNA, 32 nt, Homo Sapiens
gccacauuguguuaaucagcgcccaucccuag

SEQ ID NO: 244501 - RNA, 32 nt, Homo Sapiens
guccagcgccgacggccagcggcuagaggccg

SEQ ID NO: 244502 - RNA, 32 nt, Homo Sapiens
guucccauauagcuucaaaaacaaaaacaaau

SEQ ID NO: 244503 - RNA, 32 nt, Homo Sapiens
guggcccggcagugggggccuggcuggcucgg

SEQ ID NO: 244504 - RNA, 32 nt, Homo Sapiens
caucugcagcugccggccugugaucgugccgc

SEQ ID NO: 244505 - RNA, 32 nt, Homo Sapiens
gugauuucucucucuuuuuuuuuuuuuuuuuu

SEQ ID NO: 244506 - RNA, 30 nt, Homo Sapiens
gggcgcugagcagcaccucgaguuaaaccc

SEQ ID NO: 244507 - RNA, 32 nt, Homo Sapiens
uucuaccugcuuucaagucucuaauuauuaaa

SEQ ID NO: 244508 - RNA, 32 nt, Homo Sapiens
uggcagaaagacugaaaaauaacaguaauuaa

SEQ ID NO: 244509 - RNA, 32 nt, Homo Sapiens
uggauagucagagagcagcggcugggcagugc

SEQ ID NO: 244510 - RNA, 28 nt, Homo Sapiens
auguguguggcagccaggaugacuagau

SEQ ID NO: 244511 - RNA, 32 nt, Homo Sapiens
cucaaaugauauacauuuaaagggcagauuuu

SEQ ID NO: 244512 - RNA, 32 nt, Homo Sapiens
uucaguuuacuuuguuaugccuuaauauucug

SEQ ID NO: 244513 - RNA, 32 nt, Homo Sapiens
aacuuaggaaaaaaccagcccuacugagucag

SEQ ID NO: 244514 - RNA, 32 nt, Homo Sapiens
guucaggcagcugcugcuaaagugacaaggug

SEQ ID NO: 244515 - RNA, 32 nt, Homo Sapiens
uucauuucccccuccuuugcuggaugggguuu

SEQ ID NO: 244516 - RNA, 32 nt, Homo Sapiens
aaguucugcccaucuuccugaccuccacggau

SEQ ID NO: 244517 - RNA, 28 nt, Homo Sapiens
aaugacaauaaauuauuuaugaagaguu

SEQ ID NO: 244518 - RNA, 31 nt, Homo Sapiens
cacuggcucuucccuagguagccagggaaag

SEQ ID NO: 244519 - RNA, 32 nt, Homo Sapiens
gcuuauccuugacagguauggggccaggugag

SEQ ID NO: 244520 - RNA, 32 nt, Homo Sapiens
gaaauaguuuauaaguuuguuaaguacuuaua

SEQ ID NO: 244521 - RNA, 32 nt, Homo Sapiens
cagccugccccggcagcccgggcccguccucc

SEQ ID NO: 244522 - RNA, 32 nt, Homo Sapiens
aucuaacauagaaaguguguuuuaucagacaa

SEQ ID NO: 244523 - RNA, 32 nt, Homo Sapiens
uuuugucuagccuggagacagagcuaaggauu

SEQ ID NO: 244524 - RNA, 32 nt, Homo Sapiens
uuuaugauuuaaccucuuccauuugaugauuc

SEQ ID NO: 244525 - RNA, 32 nt, Homo Sapiens
cucgcuggacgaagaggagcugcaccccgaga

SEQ ID NO: 244526 - RNA, 32 nt, Homo Sapiens
cuccauuggauccauggaugaggaaccugaga

SEQ ID NO: 244527 - RNA, 32 nt, Homo Sapiens
caucuguaaaaugagaguauugguucuaagau

SEQ ID NO: 244528 - RNA, 32 nt, Homo Sapiens
gcuaugagguugucuguaacccaagccaucaa

SEQ ID NO: 244529 - RNA, 32 nt, Homo Sapiens
gugcugauguuuuugugucaauggcuugaaac

SEQ ID NO: 244530 - RNA, 32 nt, Homo Sapiens
gcuuguuuuaucauacuuccugccucuccccu

SEQ ID NO: 244531 - RNA, 32 nt, Homo Sapiens
auagggcucccccaccucccccauuucugugu

SEQ ID NO: 244532 - RNA, 32 nt, Homo Sapiens
ggggggagggaucagggugcuggggguuuccu

SEQ ID NO: 244533 - RNA, 32 nt, Homo Sapiens
ucccagagagcgcucaccuguuuuccauguga

SEQ ID NO: 244534 - RNA, 32 nt, Homo Sapiens
agauuuuguaucuguuucuccuccuuuacgcc

SEQ ID NO: 244535 - RNA, 32 nt, Homo Sapiens
uacucuccucugaguucaaucaucuugcacuc

SEQ ID NO: 244536 - RNA, 32 nt, Homo Sapiens
cacacacacacacaagcacacacacacaugca

SEQ ID NO: 244537 - RNA, 32 nt, Homo Sapiens
gaugugagcccaccuguggaggucuugauccc

SEQ ID NO: 244538 - RNA, 32 nt, Homo Sapiens
guucccuucauuuaagcuacucauuuguucau

SEQ ID NO: 244539 - RNA, 32 nt, Homo Sapiens
ccucucccauuccuggccccagccuggccagg

SEQ ID NO: 244540 - RNA, 32 nt, Homo Sapiens
cagaggcagggccagccauccugucgcaagcc

SEQ ID NO: 244541 - RNA, 32 nt, Homo Sapiens
ucaacuggcuacugagucaugauccuugcuga

SEQ ID NO: 244542 - RNA, 32 nt, Homo Sapiens
caccuccgugcagcugaccugcccuccagccc

SEQ ID NO: 244543 - RNA, 32 nt, Homo Sapiens
aagauagaugaagucauuugcauaaagguaca

SEQ ID NO: 244544 - RNA, 32 nt, Homo Sapiens
acgccuaagacugcaaaggcucgggggagaac

SEQ ID NO: 244545 - RNA, 32 nt, Homo Sapiens
agagaagacaggcaaaguuguggacuguuuga

SEQ ID NO: 244546 - RNA, 32 nt, Homo Sapiens
agggaauggggacgguguauggaggggaggga

SEQ ID NO: 244547 - RNA, 32 nt, Homo Sapiens
cuguggggagacgggggucuuccuucaccagc

SEQ ID NO: 244548 - RNA, 32 nt, Homo Sapiens
uugcuggagaccucagaaaacacaagugccuu

SEQ ID NO: 244549 - RNA, 32 nt, Homo Sapiens
uggauggccuggaguccagcccgggggaugcu

SEQ ID NO: 244550 - RNA, 32 nt, Homo Sapiens
cagaguauguuguauuaaaaucuuaucuaauc

SEQ ID NO: 244551 - RNA, 32 nt, Homo Sapiens
caaccguugcuguucacacgcucagccugucu

SEQ ID NO: 244552 - RNA, 32 nt, Homo Sapiens
cacagccucacaggaagugggggugaggagcc

SEQ ID NO: 244553 - RNA, 32 nt, Homo Sapiens
auccauagugucauuuuauuuuagucauuauu

SEQ ID NO: 244554 - RNA, 32 nt, Homo Sapiens
uacauguucuaccuguuguaccuauuagcauc

SEQ ID NO: 244555 - RNA, 32 nt, Homo Sapiens
uugccaaacacuucaacaguuggugguugaau

SEQ ID NO: 244556 - RNA, 31 nt, Homo Sapiens
gcgccgcugccgggugcuggaggcgccauug

SEQ ID NO: 244557 - RNA, 32 nt, Homo Sapiens
ucaugccucccuaaaauacauaaaaccaagcu

SEQ ID NO: 244558 - RNA, 32 nt, Homo Sapiens
ucugucucuaugguuuuaucuauucuugcuau

SEQ ID NO: 244559 - RNA, 32 nt, Homo Sapiens
ggguaccagggaggagagaguggcugaccacu

SEQ ID NO: 244560 - RNA, 30 nt, Homo Sapiens
ugcccugcgcccgugccuacgugagcccgc

SEQ ID NO: 244561 - RNA, 32 nt, Homo Sapiens
uucuggucugcaccgcaccagugcaugagggg

SEQ ID NO: 244562 - RNA, 32 nt, Homo Sapiens
ucacuaauacauugacauuaaacaaguagaaa

SEQ ID NO: 244563 - RNA, 32 nt, Homo Sapiens
ccagcugcgccggggcgcccuccggagaugcu

SEQ ID NO: 244564 - RNA, 32 nt, Homo Sapiens
agaggcagcuauuuuaccaucugguauuuaug

SEQ ID NO: 244565 - RNA, 32 nt, Homo Sapiens
cccggggcuggccagcagccugcuccgcgcgg

SEQ ID NO: 244566 - RNA, 32 nt, Homo Sapiens
caauaguuggggucuccugggaagcugagugc

SEQ ID NO: 244567 - RNA, 32 nt, Homo Sapiens
ugcgauacagacagcuaacuuuucuuaugaaa

SEQ ID NO: 244568 - RNA, 32 nt, Homo Sapiens
guggcuauggaggcagcuccuucuaaagaaaa

SEQ ID NO: 244569 - RNA, 32 nt, Homo Sapiens
accccccaccccaccccucagcccaucgugaa

SEQ ID NO: 244570 - RNA, 32 nt, Homo Sapiens
uuuugugucauguaaauuguaacucagggggg

SEQ ID NO: 244571 - RNA, 32 nt, Homo Sapiens
uacagaagaaaguugaccuugugucacuauuu

SEQ ID NO: 244572 - RNA, 32 nt, Homo Sapiens
ugauggagauaauuugggggcuuuugucauug

SEQ ID NO: 244573 - RNA, 32 nt, Homo Sapiens
agguagauccugagaugauuuggucagauugg

SEQ ID NO: 244574 - RNA, 32 nt, Homo Sapiens
accagccuggccaacauggugaaacacugucu

SEQ ID NO: 244575 - RNA, 32 nt, Homo Sapiens
aucggguagccccagggcuggggcugccagaa

SEQ ID NO: 244576 - RNA, 32 nt, Homo Sapiens
cuccacugccugggagcagcucacucagcuug

SEQ ID NO: 244577 - RNA, 32 nt, Homo Sapiens
gugucaguucuuccccgugagcugucccugca

SEQ ID NO: 244578 - RNA, 32 nt, Homo Sapiens
gcuguugcuugacuucgggggcacugugagcc

SEQ ID NO: 244579 - RNA, 32 nt, Homo Sapiens
acaaguauaucugaaauguuuauuuucacaaa

SEQ ID NO: 244580 - RNA, 32 nt, Homo Sapiens
gggaagugcuguauauuaaaugcaugugaaua

SEQ ID NO: 244581 - RNA, 32 nt, Homo Sapiens
gugaauuaggcaugugaagcagugggugucca

SEQ ID NO: 244582 - RNA, 32 nt, Homo Sapiens
auacuuucuuaaaaauacguucuugcaccaac

SEQ ID NO: 244583 - RNA, 32 nt, Homo Sapiens
uuuccuauuuuugugcaucuuuugcauuuauu

SEQ ID NO: 244584 - RNA, 32 nt, Homo Sapiens
agaggcuuggugccggggccuggggcucugag

SEQ ID NO: 244585 - RNA, 32 nt, Homo Sapiens
uggcagggcccccagccccuccccuggcugag

SEQ ID NO: 244586 - RNA, 32 nt, Homo Sapiens
gcacuugucccucuccagcaagaggcuagcac

SEQ ID NO: 244587 - RNA, 31 nt, Homo Sapiens
aauuagcagcgcauuaaaaauaggaaauaaa

SEQ ID NO: 244588 - RNA, 32 nt, Homo Sapiens
uguugugacuuauucguccugagcacaguuga

SEQ ID NO: 244589 - RNA, 32 nt, Homo Sapiens
ccauuguuaacagauugcauggacaaucuucc

SEQ ID NO: 244590 - RNA, 32 nt, Homo Sapiens
uaauggacaaauaaguuuuugcuaaaugugag

SEQ ID NO: 244591 - RNA, 32 nt, Homo Sapiens
agcugaaacugggcagacaacauuggggaacc

SEQ ID NO: 244592 - RNA, 32 nt, Homo Sapiens
cuguauguuggcacagaaaugaaacauguuau

SEQ ID NO: 244593 - RNA, 32 nt, Homo Sapiens
ggcccuggaaaagggagggcacuucaucucag

SEQ ID NO: 244594 - RNA, 29 nt, Homo Sapiens
aacacuaagaaggcuggucaguaccuacu

SEQ ID NO: 244595 - RNA, 32 nt, Homo Sapiens
aaaaaaauagaaaagcacuugaagaauauucc

SEQ ID NO: 244596 - RNA, 32 nt, Homo Sapiens
uaguugcuuagaaauggaaauaaaauauaugu

SEQ ID NO: 244597 - RNA, 32 nt, Homo Sapiens
uccuggaggucagcauuugaucuguugcaagc

SEQ ID NO: 244598 - RNA, 32 nt, Homo Sapiens
agaaggcgccagcggcagccucacacgcgagc

SEQ ID NO: 244599 - RNA, 32 nt, Homo Sapiens
cuuucuugcucccuguuuucucuucuguggga

SEQ ID NO: 244600 - RNA, 28 nt, Homo Sapiens
gagcggccagugggcaggaugacgagcc

SEQ ID NO: 244601 - RNA, 32 nt, Homo Sapiens
gccaccccaaagcccuccuccuccuuaacccu

SEQ ID NO: 244602 - RNA, 32 nt, Homo Sapiens
cugucucaaaaauaaacuaaguauugagggug

SEQ ID NO: 244603 - RNA, 32 nt, Homo Sapiens
ccucuuauuccucuaggcaagcaggaccuggc

SEQ ID NO: 244604 - RNA, 32 nt, Homo Sapiens
gcaacgcccaacucuuuuuuuccuucucuucu

SEQ ID NO: 244605 - RNA, 32 nt, Homo Sapiens
ucaaauuuucuuggcccuuccuuucucccugu

SEQ ID NO: 244606 - RNA, 32 nt, Homo Sapiens
aauacagguucagacaguguagccaggaccga

SEQ ID NO: 244607 - RNA, 32 nt, Homo Sapiens
caacagauuugguauuaaaaauuaaauguggu

SEQ ID NO: 244608 - RNA, 32 nt, Homo Sapiens
aauguuuuuguacagcuaaaucaaauguaauu

SEQ ID NO: 244609 - RNA, 32 nt, Homo Sapiens
cugcaaguuccugccaucuacaugugcccaga

SEQ ID NO: 244610 - RNA, 32 nt, Homo Sapiens
cuuuuuucugcacuuauaacugauuugguuuu

SEQ ID NO: 244611 - RNA, 32 nt, Homo Sapiens
aauuagaaaaauuuuauaugggcugggcacag

SEQ ID NO: 244612 - RNA, 32 nt, Homo Sapiens
ccuuaaagguuaacauuucuaaagcaauauua

SEQ ID NO: 244613 - RNA, 32 nt, Homo Sapiens
acacuuacaaaauuucuuaucuguaaaauccg

SEQ ID NO: 244614 - RNA, 32 nt, Homo Sapiens
auucuggacacgcacacacacacacacacaca

SEQ ID NO: 244615 - RNA, 32 nt, Homo Sapiens
ccccgcugaccgcuccuccagccccgccuccc

SEQ ID NO: 244616 - RNA, 32 nt, Homo Sapiens
ugguccuaugugucacauucaucacagguuuc

SEQ ID NO: 244617 - RNA, 32 nt, Homo Sapiens
caaacugcaugagcagcugaauguuccugugc

SEQ ID NO: 244618 - RNA, 32 nt, Homo Sapiens
gaaccugaccagugagcugcugcagaaaugca

SEQ ID NO: 244619 - RNA, 32 nt, Homo Sapiens
gcaguggcucucuggccgcgggcccugucugu

SEQ ID NO: 244620 - RNA, 32 nt, Homo Sapiens
uaaacuuggggauggcugagggaacauagacu

SEQ ID NO: 244621 - RNA, 32 nt, Homo Sapiens
uuguguacuuuuaagacuuugguuauuuuacu

SEQ ID NO: 244622 - RNA, 32 nt, Homo Sapiens
uauauaaagggcuguaagcuaauugugguguc

SEQ ID NO: 244623 - RNA, 32 nt, Homo Sapiens
auuugcuuuaaaauauuguaaaauagcaagaa

SEQ ID NO: 244624 - RNA, 32 nt, Homo Sapiens
cgccugggccgcggaguuugugucccggcucg

SEQ ID NO: 244625 - RNA, 32 nt, Homo Sapiens
aucaaucaaaggcuaccaacugaguccucagg

SEQ ID NO: 244626 - RNA, 31 nt, Homo Sapiens
caguguguguucucucagucaguguaucuac

SEQ ID NO: 244627 - RNA, 32 nt, Homo Sapiens
cuugacaugagaugcccuucagacaucucuuc

SEQ ID NO: 244628 - RNA, 32 nt, Homo Sapiens
uuuccauugccaacaacagccauccauauuuc

SEQ ID NO: 244629 - RNA, 32 nt, Homo Sapiens
aaaagaaaaauauguugcuaagauuguguugg

SEQ ID NO: 244630 - RNA, 32 nt, Homo Sapiens
ggcagcaauuuuuuacaaaaaggucauccucu

SEQ ID NO: 244631 - RNA, 32 nt, Homo Sapiens
aaauacaauggauuuuuaaauguugaucuugu

SEQ ID NO: 244632 - RNA, 32 nt, Homo Sapiens
uaguugauaucauagaagaaaauacugagauc

SEQ ID NO: 244633 - RNA, 32 nt, Homo Sapiens
aaggaauauugcuaaaaacaaacaaaaaaaac

SEQ ID NO: 244634 - RNA, 32 nt, Homo Sapiens
acuuggaagguuuuaagcagagaagugacagg

SEQ ID NO: 244635 - RNA, 32 nt, Homo Sapiens
guguuuucagaauuacagugagcacagaggug

SEQ ID NO: 244636 - RNA, 32 nt, Homo Sapiens
caaaugagagauuuuuagauuuuuguauucug

SEQ ID NO: 244637 - RNA, 32 nt, Homo Sapiens
caucuucuagaaaaaauacauaaaggaguagu

SEQ ID NO: 244638 - RNA, 32 nt, Homo Sapiens
agauugaaaauauuguaacuuucaguuagaaa

SEQ ID NO: 244639 - RNA, 32 nt, Homo Sapiens
uucuaguucagauguguuugcuugguuuaaau

SEQ ID NO: 244640 - RNA, 32 nt, Homo Sapiens
aggcaacucaaguuuagacccuuacucuuuuu

SEQ ID NO: 244641 - RNA, 32 nt, Homo Sapiens
ggacucucugguggugacccaggccuugucag

SEQ ID NO: 244642 - RNA, 32 nt, Homo Sapiens
acuucucaggcaccaccagcagcgccaccgag

SEQ ID NO: 244643 - RNA, 32 nt, Homo Sapiens
cugcagccccacucccgccccucccccaucgu

SEQ ID NO: 244644 - RNA, 32 nt, Homo Sapiens
cuccgccucccggcccgcagauccccgacggc

SEQ ID NO: 244645 - RNA, 32 nt, Homo Sapiens
uuguguuuuuauuguuaacucuugucuauuuu

SEQ ID NO: 244646 - RNA, 32 nt, Homo Sapiens
auauacugugauaaaucauugcuguuacauac

SEQ ID NO: 244647 - RNA, 32 nt, Homo Sapiens
ggcacacaucaaaugaugagaugugcagccag

SEQ ID NO: 244648 - RNA, 32 nt, Homo Sapiens
ggaugcguguggaugugugugcaugccugagu

SEQ ID NO: 244649 - RNA, 32 nt, Homo Sapiens
agcuuccuggccucccagccacuuccucaccc

SEQ ID NO: 244650 - RNA, 30 nt, Homo Sapiens
aucuucauguuaaugggguggaccaggggg

SEQ ID NO: 244651 - RNA, 32 nt, Homo Sapiens
ccagguaaagagaacagcagguccuggacuaa

SEQ ID NO: 244652 - RNA, 32 nt, Homo Sapiens
ccaggaauggcgggccugcccaacguguuugg

SEQ ID NO: 244653 - RNA, 32 nt, Homo Sapiens
aaaaucucgcugaauccgccugccccagcagc

SEQ ID NO: 244654 - RNA, 32 nt, Homo Sapiens
cuuuguacauuuuuuaugugguguugauuuca

SEQ ID NO: 244655 - RNA, 32 nt, Homo Sapiens
gcuguuaaaacuccucuuucaguuuuaccaga

SEQ ID NO: 244656 - RNA, 32 nt, Homo Sapiens
ggggcucgggcacccucuggccccacacuggc

SEQ ID NO: 244657 - RNA, 32 nt, Homo Sapiens
uuuuuuguaagcuguuucaugauguuuucuuu

SEQ ID NO: 244658 - RNA, 32 nt, Homo Sapiens
ggauuuuggauauuuguagcucccucaauacg

SEQ ID NO: 244659 - RNA, 32 nt, Homo Sapiens
gcacucuacuccagcccuucucccucccuccc

SEQ ID NO: 244660 - RNA, 32 nt, Homo Sapiens
gugcaugaaaauacaugugugugucuacacgu

SEQ ID NO: 244661 - RNA, 32 nt, Homo Sapiens
cauugaauccgaaucugcauuuugacaggauc

SEQ ID NO: 244662 - RNA, 32 nt, Homo Sapiens
auugcagcggcugugugaugcuguaaauauuu

SEQ ID NO: 244663 - RNA, 32 nt, Homo Sapiens
cacacgugcacauucauguguacaccacaaau

SEQ ID NO: 244664 - RNA, 32 nt, Homo Sapiens
ccuggaguugugguggaacagcaaccggugcc

SEQ ID NO: 244665 - RNA, 32 nt, Homo Sapiens
gcucguccggccccggcccggaaccgggcugg

SEQ ID NO: 244666 - RNA, 32 nt, Homo Sapiens
cacucccggccgcgagcaggcagggcuucggg

SEQ ID NO: 244667 - RNA, 32 nt, Homo Sapiens
acacauuucuucaugucuucaagcucuucccu

SEQ ID NO: 244668 - RNA, 32 nt, Homo Sapiens
uuucaccguggucauuucuaccuccggagcaa

SEQ ID NO: 244669 - RNA, 32 nt, Homo Sapiens
gggcucaacgcgcugcugcugcugcucuaucg

SEQ ID NO: 244670 - RNA, 32 nt, Homo Sapiens
ucauuucuagaaugguagacuauacauguuag

SEQ ID NO: 244671 - RNA, 32 nt, Homo Sapiens
uacuguuuacauugcagauugcuauaauuuca

SEQ ID NO: 244672 - RNA, 32 nt, Homo Sapiens
uuauugucacaagaguacaguuaaugcugcgu

SEQ ID NO: 244673 - RNA, 32 nt, Homo Sapiens
uggaauuaaaacuguucagaaugauuuuccaa

SEQ ID NO: 244674 - RNA, 32 nt, Homo Sapiens
uaaaaauaucuccacuuuuuuauugaauaccu

SEQ ID NO: 244675 - RNA, 32 nt, Homo Sapiens
gcagugcuugccaucuuguugcacagauaacu

SEQ ID NO: 244676 - RNA, 32 nt, Homo Sapiens
agauagggaacgaggaugaagggaagggagag

SEQ ID NO: 244677 - RNA, 32 nt, Homo Sapiens
cuuggucauucccauuuugaagagaugcaaga

SEQ ID NO: 244678 - RNA, 32 nt, Homo Sapiens
aggaacguguucacaggcuguuguguggcaau

SEQ ID NO: 244679 - RNA, 32 nt, Homo Sapiens
uuaaacugcaccuugcagaaaugcauugccag

SEQ ID NO: 244680 - RNA, 32 nt, Homo Sapiens
agucgauuuaugauaaccuuauggaaaaugua

SEQ ID NO: 244681 - RNA, 32 nt, Homo Sapiens
ucuucuacuuggaguucucugcugcuuguuug

SEQ ID NO: 244682 - RNA, 32 nt, Homo Sapiens
auucugugcauuaucuuuucauuuucuugcug

SEQ ID NO: 244683 - RNA, 32 nt, Homo Sapiens
ccaaucccgccaggccgcggcccaguggcgcc

SEQ ID NO: 244684 - RNA, 32 nt, Homo Sapiens
cuuucauccucagaaugugucugggggugaga

SEQ ID NO: 244685 - RNA, 32 nt, Homo Sapiens
uagacuguaaaaccucuuccaugacuugcuga

SEQ ID NO: 244686 - RNA, 32 nt, Homo Sapiens
gaggagcuggggugagccgcggcggccgucuc

SEQ ID NO: 244687 - RNA, 32 nt, Homo Sapiens
ugcugcugggcacugagcugccgccuggugaa

SEQ ID NO: 244688 - RNA, 32 nt, Homo Sapiens
auaacugcgugugcaccaacuacucuguuuug

SEQ ID NO: 244689 - RNA, 32 nt, Homo Sapiens
cgggagaagggagaggguccuguugacgggaa

SEQ ID NO: 244690 - RNA, 32 nt, Homo Sapiens
gcugguauccgccccuggccccaggagcacug

SEQ ID NO: 244691 - RNA, 32 nt, Homo Sapiens
aauuaccucacucauucacaugugagcgacac

SEQ ID NO: 244692 - RNA, 31 nt, Homo Sapiens
cccucgcaccgcagccagugccgaccgcagc

SEQ ID NO: 244693 - RNA, 32 nt, Homo Sapiens
gccgcucccccggccccucccgcagcaguucc

SEQ ID NO: 244694 - RNA, 32 nt, Homo Sapiens
ccuugauccgugaucauuucagagcaccaacu

SEQ ID NO: 244695 - RNA, 32 nt, Homo Sapiens
guuuugccaauauaaugaguauuacauuggcc

SEQ ID NO: 244696 - RNA, 32 nt, Homo Sapiens
ggugggucagcuauuucuuuuuuaaaaacaga

SEQ ID NO: 244697 - RNA, 32 nt, Homo Sapiens
uuuuuacguuuaaucugcuguuuaccuaaacu

SEQ ID NO: 244698 - RNA, 32 nt, Homo Sapiens
cuccucuacuccaaauuucucauucuucaggc

SEQ ID NO: 244699 - RNA, 32 nt, Homo Sapiens
gaaucguccgcacuaaaguccccugcagcgug

SEQ ID NO: 244700 - RNA, 32 nt, Homo Sapiens
guuucauguuuuucuuaaaugacuccagucuu

SEQ ID NO: 244701 - RNA, 32 nt, Homo Sapiens
caugguuucaguagagcagcuaccacauguug

SEQ ID NO: 244702 - RNA, 32 nt, Homo Sapiens
aaugaguggaggccuccugggguggccugucc

SEQ ID NO: 244703 - RNA, 32 nt, Homo Sapiens
gguccccagaaacuccaaccccugcccuuccu

SEQ ID NO: 244704 - RNA, 32 nt, Homo Sapiens
uuaaccuggggucuuucacucccggacugcuu

SEQ ID NO: 244705 - RNA, 32 nt, Homo Sapiens
ccccucaaacaaaacaauuaucagccaagaau

SEQ ID NO: 244706 - RNA, 32 nt, Homo Sapiens
aaguuuacuuucacggcaaacaugcccacagg

SEQ ID NO: 244707 - RNA, 27 nt, Homo Sapiens
acaugaagcagaugacauuugaagccc

SEQ ID NO: 244708 - RNA, 32 nt, Homo Sapiens
agaagagcaucauauguuuuggguuuucagug

SEQ ID NO: 244709 - RNA, 32 nt, Homo Sapiens
uccacggauggacuuuugaauaaacucaaaua

SEQ ID NO: 244710 - RNA, 32 nt, Homo Sapiens
uuuagaaaacucuacauuuuaauuguauaguu

SEQ ID NO: 244711 - RNA, 32 nt, Homo Sapiens
guugcgcaccacagaagcccuggcucugaggc

SEQ ID NO: 244712 - RNA, 32 nt, Homo Sapiens
ugcccauccuguugugaccaaccccguuuuaa

SEQ ID NO: 244713 - RNA, 32 nt, Homo Sapiens
gcacagauuuuaagaagaaaauacauacucug

SEQ ID NO: 244714 - RNA, 32 nt, Homo Sapiens
cagucucucaggccuccccgggccccccauac

SEQ ID NO: 244715 - RNA, 31 nt, Homo Sapiens
ggcuggcugccgggcagcauggaggagcuga

SEQ ID NO: 244716 - RNA, 32 nt, Homo Sapiens
cacuucccaggagagccaaagcgugucuggcc

SEQ ID NO: 244717 - RNA, 32 nt, Homo Sapiens
uguuguccaaauaggucaauaauucugggaga

SEQ ID NO: 244718 - RNA, 32 nt, Homo Sapiens
agucccugcaggugaauaaacacacagaucug

SEQ ID NO: 244719 - RNA, 32 nt, Homo Sapiens
ccugugaugucagccacugggguguugugcuc

SEQ ID NO: 244720 - RNA, 32 nt, Homo Sapiens
caaaaacccuuaggacuucucauacucuagcc

SEQ ID NO: 244721 - RNA, 32 nt, Homo Sapiens
cgauccuccccgcucagccuccugaguagcug

SEQ ID NO: 244722 - RNA, 32 nt, Homo Sapiens
gcgggggcgagggagcaggagcggccagugcc

SEQ ID NO: 244723 - RNA, 32 nt, Homo Sapiens
ccuggguacagguggagccacccccaggaguu

SEQ ID NO: 244724 - RNA, 32 nt, Homo Sapiens
uuuuacuaaaauugugcauguaaauuaauugu

SEQ ID NO: 244725 - RNA, 32 nt, Homo Sapiens
cacgugagaagggcccgggugccggucccgcu

SEQ ID NO: 244726 - RNA, 32 nt, Homo Sapiens
ggggagagggugguagcacagggcuugggaua

SEQ ID NO: 244727 - RNA, 32 nt, Homo Sapiens
ggguugacuugagcugagacaccagaugcuca

SEQ ID NO: 244728 - RNA, 32 nt, Homo Sapiens
aagaucaaagcaugcauacaauuauaaaucau

SEQ ID NO: 244729 - RNA, 32 nt, Homo Sapiens
ugccggggacccuggcagccccccuguagcug

SEQ ID NO: 244730 - RNA, 32 nt, Homo Sapiens
gcugccgccucccgacaccuucagaaaacacg

SEQ ID NO: 244731 - RNA, 32 nt, Homo Sapiens
gcucaugagguuuucauuuuuauucuuccuuc

SEQ ID NO: 244732 - RNA, 32 nt, Homo Sapiens
uggggauguguucugagaaaugugucauuagg

SEQ ID NO: 244733 - RNA, 32 nt, Homo Sapiens
uuuaacauaauuuuuguuuuauccacaacuuu

SEQ ID NO: 244734 - RNA, 32 nt, Homo Sapiens
gguuccacagaaaauccaacaguaggaguaag

SEQ ID NO: 244735 - RNA, 32 nt, Homo Sapiens
auaauuugcauaccauuaaauaaugcauaaua

SEQ ID NO: 244736 - RNA, 32 nt, Homo Sapiens
guucuucggcccgggccugucgaugcccgcca

SEQ ID NO: 244737 - RNA, 32 nt, Homo Sapiens
ggcggaggggagaagccuggugguacauucca

SEQ ID NO: 244738 - RNA, 32 nt, Homo Sapiens
ucaacuugacacaacuuugaaacugcauaaag

SEQ ID NO: 244739 - RNA, 32 nt, Homo Sapiens
auaccugaaaauuuaaacacuugaaugucauc

SEQ ID NO: 244740 - RNA, 32 nt, Homo Sapiens
aggucugcgcaggugaggagggggcggggcag

SEQ ID NO: 244741 - RNA, 32 nt, Homo Sapiens
aggaggccgagcgggagcggcggcagcuggcu

SEQ ID NO: 244742 - RNA, 32 nt, Homo Sapiens
ugcaguuccuccccggcaagacggucguccac

SEQ ID NO: 244743 - RNA, 32 nt, Homo Sapiens
uucugcgucuuacuggcaaccacacaacucag

SEQ ID NO: 244744 - RNA, 32 nt, Homo Sapiens
guaagccaucccacaaguucuauaccauauuu

SEQ ID NO: 244745 - RNA, 32 nt, Homo Sapiens
uucuugugucuccuuaugguacacuccagcgg

SEQ ID NO: 244746 - RNA, 32 nt, Homo Sapiens
uccugcggggguauggggaagcugugacagaa

SEQ ID NO: 244747 - RNA, 32 nt, Homo Sapiens
uuauuuucaucauaugauuucaauucucuuua

SEQ ID NO: 244748 - RNA, 32 nt, Homo Sapiens
cagcuagaggucccgggcgcaccugcagagcc

SEQ ID NO: 244749 - RNA, 32 nt, Homo Sapiens
cccaggcccccuccaccauggccagccggggu

SEQ ID NO: 244750 - RNA, 32 nt, Homo Sapiens
uauagaaaaaagugcuugaaaaguguguuugg

SEQ ID NO: 244751 - RNA, 30 nt, Homo Sapiens
gaucgaacucuugcugcaggguuucgaucg

SEQ ID NO: 244752 - RNA, 32 nt, Homo Sapiens
cuucucugcacuuuuccuuaccuccuggccuc

SEQ ID NO: 244753 - RNA, 32 nt, Homo Sapiens
ucacagaacaaaagcaaggaauugcugauuug

SEQ ID NO: 244754 - RNA, 32 nt, Homo Sapiens
aucggucucuggacgcugcgcggcgcuccuag

SEQ ID NO: 244755 - RNA, 32 nt, Homo Sapiens
cacccucucccucucccuucagcucugggagg

SEQ ID NO: 244756 - RNA, 32 nt, Homo Sapiens
caucagccggcgccgcgccgccggguguuacu

SEQ ID NO: 244757 - RNA, 32 nt, Homo Sapiens
cuaaauccaaggugggggcaguagguacagag

SEQ ID NO: 244758 - RNA, 32 nt, Homo Sapiens
aggggcaucccggcccauaccccuccagacag

SEQ ID NO: 244759 - RNA, 32 nt, Homo Sapiens
ucaucucgguaacacccucuaccuguuccaua

SEQ ID NO: 244760 - RNA, 32 nt, Homo Sapiens
gacuugcggcggugagagcaagcggucucagg

SEQ ID NO: 244761 - RNA, 32 nt, Homo Sapiens
agggacuggugccccugccacuccgagauaac

SEQ ID NO: 244762 - RNA, 32 nt, Homo Sapiens
uuuggguuuggguugcagcugcacccuaauuu

SEQ ID NO: 244763 - RNA, 32 nt, Homo Sapiens
gggaggggaagggaggcccacuuccuucuuug

SEQ ID NO: 244764 - RNA, 32 nt, Homo Sapiens
ugggucaaucccaguugaauuauuggcaugaa

SEQ ID NO: 244765 - RNA, 32 nt, Homo Sapiens
cugggguggggucugaagaaucugcauuuuuu

SEQ ID NO: 244766 - RNA, 32 nt, Homo Sapiens
cgucccuccgucuccauccccccgucccccca

SEQ ID NO: 244767 - RNA, 32 nt, Homo Sapiens
uaucacaagccagauacauacuggucuguagg

SEQ ID NO: 244768 - RNA, 32 nt, Homo Sapiens
cuguugaacuuguucaggaauuucugaaugac

SEQ ID NO: 244769 - RNA, 32 nt, Homo Sapiens
ucucggaggggaccggcugugcagacgccaug

SEQ ID NO: 244770 - RNA, 32 nt, Homo Sapiens
auuugcggguggcggggcucuggguuuggguu

SEQ ID NO: 244771 - RNA, 32 nt, Homo Sapiens
aaggaaaggucuuuuuucacugcuuaaagugg

SEQ ID NO: 244772 - RNA, 32 nt, Homo Sapiens
aaauaauuuguaaguguucaguuucuacacaa

SEQ ID NO: 244773 - RNA, 32 nt, Homo Sapiens
aguaaggcuuucaauuuuuaaaacagacaucc

SEQ ID NO: 244774 - RNA, 32 nt, Homo Sapiens
aucagcucuuguacuuuucaguauauuuucau

SEQ ID NO: 244775 - RNA, 32 nt, Homo Sapiens
uuuauuuguaccaaggagaugcgugucuaaug

SEQ ID NO: 244776 - RNA, 32 nt, Homo Sapiens
auggggaaaugaugaaggaguuugaaucucuu

SEQ ID NO: 244777 - RNA, 32 nt, Homo Sapiens
aauggaaaugaaaaaugaaacaaaaaaggaca

SEQ ID NO: 244778 - RNA, 32 nt, Homo Sapiens
uccgagcugcggucggugagcgcccgcgaagg

SEQ ID NO: 244779 - RNA, 32 nt, Homo Sapiens
ucacuguagggagaaggaaaccccaaggguag

SEQ ID NO: 244780 - RNA, 32 nt, Homo Sapiens
gcugacuggccuggcccggccccgccgcgcuc

SEQ ID NO: 244781 - RNA, 32 nt, Homo Sapiens
caaguuggggggcugugaugacaauuaaauca

SEQ ID NO: 244782 - RNA, 32 nt, Homo Sapiens
aucuggauauauuaucaaugguuuaucauagu

SEQ ID NO: 244783 - RNA, 32 nt, Homo Sapiens
uggccauuggaauccggcugcuccaucguggu

SEQ ID NO: 244784 - RNA, 32 nt, Homo Sapiens
auguucaaacuuagacaaggacaucucagaaa

SEQ ID NO: 244785 - RNA, 32 nt, Homo Sapiens
auucccugcuuguaucaaaacaucucauguac

SEQ ID NO: 244786 - RNA, 32 nt, Homo Sapiens
gaaacagagaaaucagacaaucuccuagaaaa

SEQ ID NO: 244787 - RNA, 32 nt, Homo Sapiens
gucucuaaguaaaggaaaaaacaaaauaagga

SEQ ID NO: 244788 - RNA, 32 nt, Homo Sapiens
cggucaauaacuugaggauaauaaucaauugc

SEQ ID NO: 244789 - RNA, 32 nt, Homo Sapiens
caagcaaucaagaaacaaacaaaagcugaaca

SEQ ID NO: 244790 - RNA, 32 nt, Homo Sapiens
aggaggcaggugggcugcugcagugccccgag

SEQ ID NO: 244791 - RNA, 32 nt, Homo Sapiens
cuuucguuauggauaaaguauuuacaaaacag

SEQ ID NO: 244792 - RNA, 32 nt, Homo Sapiens
caaauaaucauuaauuagcuauuuucagcuaa

SEQ ID NO: 244793 - RNA, 32 nt, Homo Sapiens
uagugagaaaaaaugcacuguaaauaugcuuu

SEQ ID NO: 244794 - RNA, 32 nt, Homo Sapiens
ggccuccacagacccccaugggcccccagggc

SEQ ID NO: 244795 - RNA, 32 nt, Homo Sapiens
guugcuacacgguaucucagugucaagaauca

SEQ ID NO: 244796 - RNA, 32 nt, Homo Sapiens
gcaaaugcuauuugauaacaguuacuccagua

SEQ ID NO: 244797 - RNA, 32 nt, Homo Sapiens
agcugccuucaccacugccuaccuguucacuu

SEQ ID NO: 244798 - RNA, 32 nt, Homo Sapiens
gcgggacggaccgcggccaaggcgggggcgcu

SEQ ID NO: 244799 - RNA, 32 nt, Homo Sapiens
ggccaccugccagccuccaugcaacucugucu

SEQ ID NO: 244800 - RNA, 32 nt, Homo Sapiens
gucacaggcccccacacccgcuccauaacggc

SEQ ID NO: 244801 - RNA, 32 nt, Homo Sapiens
caaaaccaaugcagcacacauuaaauaccugg

SEQ ID NO: 244802 - RNA, 32 nt, Homo Sapiens
cuuuuacucaaguuuaauugugcaugaggguu

SEQ ID NO: 244803 - RNA, 32 nt, Homo Sapiens
acgcgugcagggaguucaggugccggucggcg

SEQ ID NO: 244804 - RNA, 32 nt, Homo Sapiens
ccugcagagacccgggccggccuccggacaaa

SEQ ID NO: 244805 - RNA, 32 nt, Homo Sapiens
gccgagaggggcggggucgcggcggggccuga

SEQ ID NO: 244806 - RNA, 32 nt, Homo Sapiens
cccccgcugucaauguuccccauccacacccu

SEQ ID NO: 244807 - RNA, 32 nt, Homo Sapiens
gcaggggccggggcucucauggagcugccugu

SEQ ID NO: 244808 - RNA, 32 nt, Homo Sapiens
gcuauuauggcauugauuuugcuggcucuaag

SEQ ID NO: 244809 - RNA, 32 nt, Homo Sapiens
uuugggaagaauuuaaaaaacacauagcuuuu

SEQ ID NO: 244810 - RNA, 32 nt, Homo Sapiens
ugugaaacaacccuugcccaaccccacgaagu

SEQ ID NO: 244811 - RNA, 32 nt, Homo Sapiens
cagagacaagacucugacuauaaacagaacau

SEQ ID NO: 244812 - RNA, 32 nt, Homo Sapiens
ugauucuuauuuuaccuucucaucuucuuauu

SEQ ID NO: 244813 - RNA, 32 nt, Homo Sapiens
ggaaggauaauuagcugaaagcuaugaugaua

SEQ ID NO: 244814 - RNA, 32 nt, Homo Sapiens
auccugggcucucaaaguaucacaucagggaa

SEQ ID NO: 244815 - RNA, 31 nt, Homo Sapiens
auaucaguauaaaaacacuggugugcaauua

SEQ ID NO: 244816 - RNA, 32 nt, Homo Sapiens
gaguccuggagcuggcucuauaaggcagccuu

SEQ ID NO: 244817 - RNA, 32 nt, Homo Sapiens
gaaaaaggauuuuguuuaaaauacuuuaaaaa

SEQ ID NO: 244818 - RNA, 32 nt, Homo Sapiens
uagucuugguucugaaacuucucuaaaggaaa

SEQ ID NO: 244819 - RNA, 32 nt, Homo Sapiens
gaccccacuccagccccuccaccccuucuuca

SEQ ID NO: 244820 - RNA, 32 nt, Homo Sapiens
uggauauggagcuggcugcugccaaguccggg

SEQ ID NO: 244821 - RNA, 32 nt, Homo Sapiens
cccgaugggaccagcuggaauuuccaagcugc

SEQ ID NO: 244822 - RNA, 32 nt, Homo Sapiens
gauccaccacugggcucucccucccccagccu

SEQ ID NO: 244823 - RNA, 32 nt, Homo Sapiens
ugcacggcgggggccuggccggccgaggaagc

SEQ ID NO: 244824 - RNA, 32 nt, Homo Sapiens
gcacucccugcagcuggucagcccauccuucu

SEQ ID NO: 244825 - RNA, 32 nt, Homo Sapiens
gcagcugaccucugaggaggaggagcugcaca

SEQ ID NO: 244826 - RNA, 32 nt, Homo Sapiens
ugccgggccugcauucccgccggcgcccccgc

SEQ ID NO: 244827 - RNA, 32 nt, Homo Sapiens
cggagucucccucugucguccaggcuggagug

SEQ ID NO: 244828 - RNA, 32 nt, Homo Sapiens
ucaugucaguguaggggaacuacuccaucaua

SEQ ID NO: 244829 - RNA, 32 nt, Homo Sapiens
aacaaauacuuauuuaauuguauuggugguua

SEQ ID NO: 244830 - RNA, 32 nt, Homo Sapiens
gccaccagacugcuuccugccagccugugcuu

SEQ ID NO: 244831 - RNA, 32 nt, Homo Sapiens
ggaggggggaacaggagaagaugcucaaggac

SEQ ID NO: 244832 - RNA, 32 nt, Homo Sapiens
ugugaccuuacuuauggugaugccaauccagu

SEQ ID NO: 244833 - RNA, 32 nt, Homo Sapiens
ugcuuggcuggggcugggggcugcugggaggu

SEQ ID NO: 244834 - RNA, 32 nt, Homo Sapiens
gaccccgcgggccagcgccgcgaccccuuccc

SEQ ID NO: 244835 - RNA, 32 nt, Homo Sapiens
caccgccguccgcgccagccgccccgagccga

SEQ ID NO: 244836 - RNA, 29 nt, Homo Sapiens
acuguauaucaguugccaaaacauuaaaa

SEQ ID NO: 244837 - RNA, 32 nt, Homo Sapiens
cacuuucaaagucuugcuauagauuugcagcu

SEQ ID NO: 244838 - RNA, 32 nt, Homo Sapiens
ucauugaggauagaguaagagauugaguuuag

SEQ ID NO: 244839 - RNA, 32 nt, Homo Sapiens
uaccaggcagccaaagagcugcucuugcaauu

SEQ ID NO: 244840 - RNA, 32 nt, Homo Sapiens
aaaaaacccuuuaacagugugaaucuuuauag

SEQ ID NO: 244841 - RNA, 32 nt, Homo Sapiens
uacauuaaaaauucaauuaagagaagagucac

SEQ ID NO: 244842 - RNA, 32 nt, Homo Sapiens
aggucucuggccaucacccucccagagcccaa

SEQ ID NO: 244843 - RNA, 32 nt, Homo Sapiens
ccgcaagcuuaccuaccuuguuugguugggug

SEQ ID NO: 244844 - RNA, 32 nt, Homo Sapiens
agcuuucccuccggaaggcugggaggaggugg

SEQ ID NO: 244845 - RNA, 32 nt, Homo Sapiens
uuugaaacccucaucacaagagaacauugugu

SEQ ID NO: 244846 - RNA, 32 nt, Homo Sapiens
gguacagcggccugggcaggggcggagcugag

SEQ ID NO: 244847 - RNA, 32 nt, Homo Sapiens
uaaauuuugccccaaaauaaaaacagaaauua

SEQ ID NO: 244848 - RNA, 31 nt, Homo Sapiens
aaugagcucaaugaacucuacacgggacuga

SEQ ID NO: 244849 - RNA, 32 nt, Homo Sapiens
gaagcuggugcuggacagcuggcgccggcagc

SEQ ID NO: 244850 - RNA, 32 nt, Homo Sapiens
aguuccaccacaugugcuacugggagcugaug

SEQ ID NO: 244851 - RNA, 32 nt, Homo Sapiens
uugggccaggacuguuggguuuucuagauaua

SEQ ID NO: 244852 - RNA, 32 nt, Homo Sapiens
uuuggaaagggaggggagggagacccgaaccu

SEQ ID NO: 244853 - RNA, 32 nt, Homo Sapiens
caguggcaauaaauuuaucugauguugacuug

SEQ ID NO: 244854 - RNA, 32 nt, Homo Sapiens
ucagccuagaaaaaaggaggggaagcaggacc

SEQ ID NO: 244855 - RNA, 32 nt, Homo Sapiens
gagagagcccccacaagcuccucaggaaacag

SEQ ID NO: 244856 - RNA, 32 nt, Homo Sapiens
ucauucucuccccaccacucucuucucguggc

SEQ ID NO: 244857 - RNA, 32 nt, Homo Sapiens
gcucagcagggcccugccuggucucccgagca

SEQ ID NO: 244858 - RNA, 32 nt, Homo Sapiens
gccguggugucuacugagaggcagaugacaaa

SEQ ID NO: 244859 - RNA, 32 nt, Homo Sapiens
acccggggggcugcucuucccucccccgccau

SEQ ID NO: 244860 - RNA, 32 nt, Homo Sapiens
aaugaaaaccuucagcucuaauagucuaauuu

SEQ ID NO: 244861 - RNA, 29 nt, Homo Sapiens
guggcagggucauggaggacgcuggcggc

SEQ ID NO: 244862 - RNA, 32 nt, Homo Sapiens
auacauaugguaggcauuuaauuacugauugu

SEQ ID NO: 244863 - RNA, 29 nt, Homo Sapiens
gcuaauucuaaauauacauaucucuuuuc

SEQ ID NO: 244864 - RNA, 32 nt, Homo Sapiens
auggugggcuaaauuuuaauucucaaaagugu

SEQ ID NO: 244865 - RNA, 32 nt, Homo Sapiens
gccucuuccuggugauucuguuuugcugcuuu

SEQ ID NO: 244866 - RNA, 32 nt, Homo Sapiens
auaauuucaaauggaauagaguauuuugauau

SEQ ID NO: 244867 - RNA, 32 nt, Homo Sapiens
ucugagaauacagcaaauauuaacuuaaauua

SEQ ID NO: 244868 - RNA, 32 nt, Homo Sapiens
ucuccagccuggcucuaucuuccuccuuguga

SEQ ID NO: 244869 - RNA, 32 nt, Homo Sapiens
cuuuucccacugagagaaggcugcucuuuugu

SEQ ID NO: 244870 - RNA, 32 nt, Homo Sapiens
aaugauuagugucaguauuuuuucacuugggu

SEQ ID NO: 244871 - RNA, 32 nt, Homo Sapiens
cagugcccgagcuggggacgugcuggggggag

SEQ ID NO: 244872 - RNA, 32 nt, Homo Sapiens
cacgggacuggcgggaggagcacgcggggccg

SEQ ID NO: 244873 - RNA, 32 nt, Homo Sapiens
acccacucaccggcaaaccccuggaccccagc

SEQ ID NO: 244874 - RNA, 32 nt, Homo Sapiens
ggucccuccguccaaugggccuggccagggcc

SEQ ID NO: 244875 - RNA, 32 nt, Homo Sapiens
ccugaaaggggaggagggcacuguccuuucag

SEQ ID NO: 244876 - RNA, 32 nt, Homo Sapiens
gucucgucaggaggugccugagagcagaauga

SEQ ID NO: 244877 - RNA, 32 nt, Homo Sapiens
uuaaugcauggauaaacuugcugcaagccugg

SEQ ID NO: 244878 - RNA, 32 nt, Homo Sapiens
cccgucuguccagccuggacucccgagcccac

SEQ ID NO: 244879 - RNA, 32 nt, Homo Sapiens
aaggggcugguggcgccacaggcgcugggacc

SEQ ID NO: 244880 - RNA, 32 nt, Homo Sapiens
aagaaagaauuuucuguaaaaauuaaguugaa

SEQ ID NO: 244881 - RNA, 32 nt, Homo Sapiens
gccugggagacugcaucucaaaaaagaaaaau

SEQ ID NO: 244882 - RNA, 32 nt, Homo Sapiens
auauuuuucccuacucuggaauuugaacuuuc

SEQ ID NO: 244883 - RNA, 32 nt, Homo Sapiens
gucuguacuaaaaauacaaaauuuagccaggc

SEQ ID NO: 244884 - RNA, 32 nt, Homo Sapiens
aacaaggagggagaggcgaccugucaggggcc

SEQ ID NO: 244885 - RNA, 32 nt, Homo Sapiens
guuccaugcucagcugaccggaugccaacuca

SEQ ID NO: 244886 - RNA, 32 nt, Homo Sapiens
gcaaggagugacuuucuuucugcuacguguaa

SEQ ID NO: 244887 - RNA, 32 nt, Homo Sapiens
gcggggagaaggcgggggcgcugcaugcagcg

SEQ ID NO: 244888 - RNA, 32 nt, Homo Sapiens
uagccuaugccagcugacaggggcagagggca

SEQ ID NO: 244889 - RNA, 32 nt, Homo Sapiens
uuucaagcaguuccuuagcuccccuccccagu

SEQ ID NO: 244890 - RNA, 32 nt, Homo Sapiens
ccaagacccugcccggcccugccccauccuca

SEQ ID NO: 244891 - RNA, 32 nt, Homo Sapiens
uuuucuuugauuacuguggacaaaggaaaaca

SEQ ID NO: 244892 - RNA, 32 nt, Homo Sapiens
uugagaacagagcugguggauuaauuaauagu

SEQ ID NO: 244893 - RNA, 31 nt, Homo Sapiens
ggcugagggggccccacagagcuuggacuuc

SEQ ID NO: 244894 - RNA, 30 nt, Homo Sapiens
ccuggaggagguggucauggcagaggagga

SEQ ID NO: 244895 - RNA, 32 nt, Homo Sapiens
gaagaucagaacauucagcucuggagaacagu

SEQ ID NO: 244896 - RNA, 32 nt, Homo Sapiens
uaaauaaauguaaacugaggcuaaaccgcucc

SEQ ID NO: 244897 - RNA, 32 nt, Homo Sapiens
cccuuuagcaaccugaguaagagacucucugc

SEQ ID NO: 244898 - RNA, 32 nt, Homo Sapiens
cccuucuccuucccggccccaccaacacucug

SEQ ID NO: 244899 - RNA, 32 nt, Homo Sapiens
gugaguccagacaugcacagggcaggugaaug

SEQ ID NO: 244900 - RNA, 32 nt, Homo Sapiens
accgaccugcgagcugacgggcccggaccaug

SEQ ID NO: 244901 - RNA, 32 nt, Homo Sapiens
uauuaagucugcugaaaaaugagguuuuaagg

SEQ ID NO: 244902 - RNA, 32 nt, Homo Sapiens
gcuuuauguauuaacuugcugaugugguuuac

SEQ ID NO: 244903 - RNA, 32 nt, Homo Sapiens
uuaacucaugaugcagauggugaggcaaaagu

SEQ ID NO: 244904 - RNA, 32 nt, Homo Sapiens
aaaaauacugaauuuaccuucacaaaagauuu

SEQ ID NO: 244905 - RNA, 32 nt, Homo Sapiens
uggccccggcuccacacccugccccauccacc

SEQ ID NO: 244906 - RNA, 29 nt, Homo Sapiens
guaagcaugaauguguauuuucuacaaaa

SEQ ID NO: 244907 - RNA, 32 nt, Homo Sapiens
auacgcauuucuuuaaauauucuuugaaaaug

SEQ ID NO: 244908 - RNA, 32 nt, Homo Sapiens
ggggcugagcauggagcagcgcggcggaggug

SEQ ID NO: 244909 - RNA, 32 nt, Homo Sapiens
uggcccgucgcgcugcugcugcggcgcuccaa

SEQ ID NO: 244910 - RNA, 32 nt, Homo Sapiens
aaguggaaaaauuuaaauuuccaauuuauucu

SEQ ID NO: 244911 - RNA, 32 nt, Homo Sapiens
ugauagagcuaaaauaugaucuuuuuuaauuu

SEQ ID NO: 244912 - RNA, 32 nt, Homo Sapiens
ccacaagggggguggggggcggugaaucaccu

SEQ ID NO: 244913 - RNA, 32 nt, Homo Sapiens
ucccuguaaaaugcagauuacagguauuaaag

SEQ ID NO: 244914 - RNA, 32 nt, Homo Sapiens
uucauaguaugcuaaauauauuagauuucaua

SEQ ID NO: 244915 - RNA, 32 nt, Homo Sapiens
uaagaaagacuaaaacagaaaaggugaaaaua

SEQ ID NO: 244916 - RNA, 32 nt, Homo Sapiens
ccaguuucaaauuuuuuuuuuauucuuaugcu

SEQ ID NO: 244917 - RNA, 32 nt, Homo Sapiens
aauacuugguaugaaaaaauuugaugggauuc

SEQ ID NO: 244918 - RNA, 32 nt, Homo Sapiens
cuaaaaacggugaaagguugcgacuauuacca

SEQ ID NO: 244919 - RNA, 32 nt, Homo Sapiens
uuaagagcuuggaaaaagugggcuugcuacau

SEQ ID NO: 244920 - RNA, 32 nt, Homo Sapiens
aguggucgcgcccccuuuaagagcagcgauug

SEQ ID NO: 244921 - RNA, 28 nt, Homo Sapiens
gaucggcguuggccgccgacaugacgcc

SEQ ID NO: 244922 - RNA, 29 nt, Homo Sapiens
ugcugccggggacagagcugcccccgagg

SEQ ID NO: 244923 - RNA, 32 nt, Homo Sapiens
gacaagagagcuuguucuccaaucucugcuca

SEQ ID NO: 244924 - RNA, 32 nt, Homo Sapiens
cauccagguggagacccugagaaggacccugg

SEQ ID NO: 244925 - RNA, 32 nt, Homo Sapiens
auaaugaguaaccuaaaguaggacauucauac

SEQ ID NO: 244926 - RNA, 32 nt, Homo Sapiens
acuacuuaugagucuguagaccacguguuguc

SEQ ID NO: 244927 - RNA, 32 nt, Homo Sapiens
agagggaagaagggaggagcggugcuugccuc

SEQ ID NO: 244928 - RNA, 32 nt, Homo Sapiens
auauuucaaaagacaaaaagaagcagcagcag

SEQ ID NO: 244929 - RNA, 32 nt, Homo Sapiens
aggaaaaggucagauucuaagagcuaaacguu

SEQ ID NO: 244930 - RNA, 32 nt, Homo Sapiens
ccugggagccaggggcugacuccagcaacacu

SEQ ID NO: 244931 - RNA, 32 nt, Homo Sapiens
cuucacucuccagccugagguggugaaggcag

SEQ ID NO: 244932 - RNA, 32 nt, Homo Sapiens
ucccuccgccccacucuaacuuuccgcgaaaa

SEQ ID NO: 244933 - RNA, 32 nt, Homo Sapiens
caggccgagcgcgguggcucacgccuguaauc

SEQ ID NO: 244934 - RNA, 32 nt, Homo Sapiens
gaaaagaguucgcuacuccagggguuauuuag

SEQ ID NO: 244935 - RNA, 32 nt, Homo Sapiens
gccgguggggacggcugccacucccccagagc

SEQ ID NO: 244936 - RNA, 32 nt, Homo Sapiens
auugcccuuugaaauuuuuggauaaaagauga

SEQ ID NO: 244937 - RNA, 32 nt, Homo Sapiens
cuuugccuggggagggcuaggcuugggaugag

SEQ ID NO: 244938 - RNA, 32 nt, Homo Sapiens
gcagcaagggaaguggcuuaagggaagaguca

SEQ ID NO: 244939 - RNA, 32 nt, Homo Sapiens
auccuuggaaaacuuaaguucucauucacccc

SEQ ID NO: 244940 - RNA, 32 nt, Homo Sapiens
aaaagccagucaaaacaaaaacuuuacugaaa

SEQ ID NO: 244941 - RNA, 32 nt, Homo Sapiens
gguggucccagcuggugggagccucuggcugc

SEQ ID NO: 244942 - RNA, 32 nt, Homo Sapiens
cauccuggugucaucacagccaagguuuuuag

SEQ ID NO: 244943 - RNA, 32 nt, Homo Sapiens
ggggcccugcaggagucugugcugggcucuca

SEQ ID NO: 244944 - RNA, 32 nt, Homo Sapiens
aggagggagcagggcucggcgaggggaagacg

SEQ ID NO: 244945 - RNA, 32 nt, Homo Sapiens
uaacugcauuuuaccagauguuuugauguuau

SEQ ID NO: 244946 - RNA, 32 nt, Homo Sapiens
cagggcugcaggagcaggcuucggacauuaaa

SEQ ID NO: 244947 - RNA, 32 nt, Homo Sapiens
guagaucauucuuuuuaucuuauuuguuuuug

SEQ ID NO: 244948 - RNA, 32 nt, Homo Sapiens
gccaggaggcggagaggcaggcggagcucaga

SEQ ID NO: 244949 - RNA, 32 nt, Homo Sapiens
gcggggccuuggcugcacggaccccaugggag

SEQ ID NO: 244950 - RNA, 32 nt, Homo Sapiens
auuuagaaauuaacaugauaucuuaaauuacc

SEQ ID NO: 244951 - RNA, 32 nt, Homo Sapiens
aacagauguacaagacauuuauuacacuuuuu

SEQ ID NO: 244952 - RNA, 32 nt, Homo Sapiens
auaaugucuauuauauauaaaaugcucuguua

SEQ ID NO: 244953 - RNA, 32 nt, Homo Sapiens
uggcauucuucguaaaaaagauuauucccugc

SEQ ID NO: 244954 - RNA, 32 nt, Homo Sapiens
ccagguuaccgccgcugccacccaggagcccc

SEQ ID NO: 244955 - RNA, 32 nt, Homo Sapiens
acuugggaagauacacaugcaaaaugggaaca

SEQ ID NO: 244956 - RNA, 31 nt, Homo Sapiens
uucuugaacaacauacaaaguuuaaaguaac

SEQ ID NO: 244957 - RNA, 32 nt, Homo Sapiens
uuugcacuaaagccaaaccacaccgcuguccc

SEQ ID NO: 244958 - RNA, 32 nt, Homo Sapiens
uggcuagaggguuagccuggcuggggccagcu

SEQ ID NO: 244959 - RNA, 32 nt, Homo Sapiens
ccagagcgaaaggggaccuucugccaccagcg

SEQ ID NO: 244960 - RNA, 32 nt, Homo Sapiens
gccaguuuugauugcaaaugcuguaaagauau

SEQ ID NO: 244961 - RNA, 32 nt, Homo Sapiens
uccuacaggaggagcaggcagccagggccauc

SEQ ID NO: 244962 - RNA, 32 nt, Homo Sapiens
uguggcaaagccuugagacaauccacaguucu

SEQ ID NO: 244963 - RNA, 32 nt, Homo Sapiens
aaggugcuguugcaggauuucauuuagcugcu

SEQ ID NO: 244964 - RNA, 32 nt, Homo Sapiens
uggccaacaccgugaaccucguaucuacuaaa

SEQ ID NO: 244965 - RNA, 32 nt, Homo Sapiens
ucauagucaccauuuucucacuguuaacauua

SEQ ID NO: 244966 - RNA, 32 nt, Homo Sapiens
ucagccugacggguggcccaguccucgccgga

SEQ ID NO: 244967 - RNA, 32 nt, Homo Sapiens
agcugacccgcaagaagggcauccucuugcag

SEQ ID NO: 244968 - RNA, 32 nt, Homo Sapiens
cuaggacugauggcagaaggguuugcaaacca

SEQ ID NO: 244969 - RNA, 32 nt, Homo Sapiens
aaaaagcacugggauuccauuuauuuuuuauu

SEQ ID NO: 244970 - RNA, 32 nt, Homo Sapiens
aguaauuccaaacugaaagaucuauacauucg

SEQ ID NO: 244971 - RNA, 32 nt, Homo Sapiens
uacucgagcccagggacccccgggccagcgga

SEQ ID NO: 244972 - RNA, 32 nt, Homo Sapiens
gaauuagguuggcauuccuagcagaagaaccc

SEQ ID NO: 244973 - RNA, 32 nt, Homo Sapiens
ggcaaggagagcccuggggucagugacacugu

SEQ ID NO: 244974 - RNA, 32 nt, Homo Sapiens
agcuccauuccaggucaacugaauuaaaauuu

SEQ ID NO: 244975 - RNA, 32 nt, Homo Sapiens
uugaugcuguugcucucguccgccucccuucc

SEQ ID NO: 244976 - RNA, 32 nt, Homo Sapiens
ccuuauuuucauaauucauuuaagacaagaga

SEQ ID NO: 244977 - RNA, 32 nt, Homo Sapiens
aaguggccacaaaacuguguuagcucuuggug

SEQ ID NO: 244978 - RNA, 32 nt, Homo Sapiens
uccuggcacugacgacgccaagagacucgagu

SEQ ID NO: 244979 - RNA, 31 nt, Homo Sapiens
gggcugcagcgcagcagcacccaacgcaguu

SEQ ID NO: 244980 - RNA, 32 nt, Homo Sapiens
cuccgcgacucggcgcugagcccgccaccggu

SEQ ID NO: 244981 - RNA, 32 nt, Homo Sapiens
agaggugagggugcacgucuucccuccugucc

SEQ ID NO: 244982 - RNA, 32 nt, Homo Sapiens
uuccauguuuuugcuguugugaauagugcugc

SEQ ID NO: 244983 - RNA, 32 nt, Homo Sapiens
gaaaauccugaagaauuuucgagauauuaacu

SEQ ID NO: 244984 - RNA, 32 nt, Homo Sapiens
ccaggauucuuuucuuuuuuuugagauggagu

SEQ ID NO: 244985 - RNA, 32 nt, Homo Sapiens
cucuaaccuuccaacugcuucccacaaacaca

SEQ ID NO: 244986 - RNA, 32 nt, Homo Sapiens
acaaagcuacucuaguggcaucugggagcaga

SEQ ID NO: 244987 - RNA, 32 nt, Homo Sapiens
uugaaaaacaauuaucuuguuuugcaaauugu

SEQ ID NO: 244988 - RNA, 32 nt, Homo Sapiens
gagauggggugagccuggggacaguggagccu

SEQ ID NO: 244989 - RNA, 32 nt, Homo Sapiens
uauguuguuaccauuuuauuggcuuuauagua

SEQ ID NO: 244990 - RNA, 32 nt, Homo Sapiens
cugccuggcugcccaaccagcuccaacacugc

SEQ ID NO: 244991 - RNA, 32 nt, Homo Sapiens
cuccacgcuccgggcgccccaacuccaacacc

SEQ ID NO: 244992 - RNA, 32 nt, Homo Sapiens
cuaauauguuugcugccuaccccauuggguuu

SEQ ID NO: 244993 - RNA, 32 nt, Homo Sapiens
ugaugaggccccagccuccucgcucccacuca

SEQ ID NO: 244994 - RNA, 32 nt, Homo Sapiens
ccguuugaauauauuuuaucuugguaguacau

SEQ ID NO: 244995 - RNA, 32 nt, Homo Sapiens
gccgccccauaugggaagugaggagcgccucu

SEQ ID NO: 244996 - RNA, 32 nt, Homo Sapiens
ccacgcguccggcgggagcccgcggcgagcgu

SEQ ID NO: 244997 - RNA, 32 nt, Homo Sapiens
cuugggcccugggaaccccaccccaccccacc

SEQ ID NO: 244998 - RNA, 32 nt, Homo Sapiens
aaggccacaggcuggaggagagacggggcugg

SEQ ID NO: 244999 - RNA, 32 nt, Homo Sapiens
guuuguaaaaauucugaauugaaacuuuguuu

SEQ ID NO: 245000 - RNA, 32 nt, Homo Sapiens
aguauuuuuaguugacauuguuuucuguucag

SEQ ID NO: 245001 - RNA, 32 nt, Homo Sapiens
ucuugcugaaagccaaggcagcucuucuggag

SEQ ID NO: 245002 - RNA, 32 nt, Homo Sapiens
ccauagacagacugaccucacagcuggaggcu

SEQ ID NO: 245003 - RNA, 32 nt, Homo Sapiens
uuacuugcccuucuauacuuucucacaugugg

SEQ ID NO: 245004 - RNA, 32 nt, Homo Sapiens
uuguugcacuaaaugaaauacuguaugugaag

SEQ ID NO: 245005 - RNA, 32 nt, Homo Sapiens
gccugggugguaccugcuccaggcagggaaac

SEQ ID NO: 245006 - RNA, 32 nt, Homo Sapiens
ggaagagaauucauuggaggugagauugaagu

SEQ ID NO: 245007 - RNA, 29 nt, Homo Sapiens
aagcuucauguucaugaccacaaagaaaa

SEQ ID NO: 245008 - RNA, 32 nt, Homo Sapiens
ugguaacucauggguuuuuggccucauaagau

SEQ ID NO: 245009 - RNA, 32 nt, Homo Sapiens
gucuccgagcgcggguucgccgggaggagcgu

SEQ ID NO: 245010 - RNA, 32 nt, Homo Sapiens
cgugccgccgcgcgcgcagggaaggccgcuuc

SEQ ID NO: 245011 - RNA, 32 nt, Homo Sapiens
cugaccuccccaugcccuccccagccucuccc

SEQ ID NO: 245012 - RNA, 32 nt, Homo Sapiens
auuauguucuauuuuaaaguccacucccccaa

SEQ ID NO: 245013 - RNA, 32 nt, Homo Sapiens
aggcgcgcgggaagaacaggcgcgcacaaugg

SEQ ID NO: 245014 - RNA, 32 nt, Homo Sapiens
gccucuucuugcaccuucuccugccucuccac

SEQ ID NO: 245015 - RNA, 32 nt, Homo Sapiens
gggucaaguaaggcccuugggaguagcugggu

SEQ ID NO: 245016 - RNA, 32 nt, Homo Sapiens
uggguguuuuaaagaaagaaugagggagacgg

SEQ ID NO: 245017 - RNA, 32 nt, Homo Sapiens
auggaaagcagcucccgaaacaacacccgccc

SEQ ID NO: 245018 - RNA, 32 nt, Homo Sapiens
uuaugugaaauguuuuaaauuugugaacucgu

SEQ ID NO: 245019 - RNA, 32 nt, Homo Sapiens
gguugggagacggggcuggcacggaaugguag

SEQ ID NO: 245020 - RNA, 31 nt, Homo Sapiens
uuuucaggcuccugccugccccaggcccccu

SEQ ID NO: 245021 - RNA, 32 nt, Homo Sapiens
aaguuguguauuacugagucuuggagucaucu

SEQ ID NO: 245022 - RNA, 32 nt, Homo Sapiens
uguaaaaaagauguguauuaaauaucagacac

SEQ ID NO: 245023 - RNA, 32 nt, Homo Sapiens
acuaggccuucaguaaaugugauucaccucuu

SEQ ID NO: 245024 - RNA, 32 nt, Homo Sapiens
cucacuacuccccugcucacagcccuccgcgu

SEQ ID NO: 245025 - RNA, 32 nt, Homo Sapiens
uaagauuaacagaaagauaaucugaaaggaga

SEQ ID NO: 245026 - RNA, 32 nt, Homo Sapiens
auuuagcugguaguuuuaauuuggguuuuagu

SEQ ID NO: 245027 - RNA, 32 nt, Homo Sapiens
ggacgcccggggauccggcccgggcccccacu

SEQ ID NO: 245028 - RNA, 32 nt, Homo Sapiens
ugcugugucauucacacucacuacuuaauacu

SEQ ID NO: 245029 - RNA, 32 nt, Homo Sapiens
aagcggauaaaacuuucauuguacuggaaugu

SEQ ID NO: 245030 - RNA, 32 nt, Homo Sapiens
gaaauaaucuucaugcagagauauucaggguu

SEQ ID NO: 245031 - RNA, 31 nt, Homo Sapiens
aaacccgggcgcugccugcucugcguuuccu

SEQ ID NO: 245032 - RNA, 32 nt, Homo Sapiens
agcaagucugccuuuucccugcuugaggccau

SEQ ID NO: 245033 - RNA, 30 nt, Homo Sapiens
uacuacaccugugcuguaagaagcugaaaa

SEQ ID NO: 245034 - RNA, 29 nt, Homo Sapiens
aggaguuaaaguuuuauauuuuccugcuc

SEQ ID NO: 245035 - RNA, 32 nt, Homo Sapiens
gauauaucuguccuaaugcuuauauuugcaca

SEQ ID NO: 245036 - RNA, 32 nt, Homo Sapiens
cccuuguucuggauucggauuuucucacauuu

SEQ ID NO: 245037 - RNA, 32 nt, Homo Sapiens
cccuucugucuguaagauuuuauuuucaagca

SEQ ID NO: 245038 - RNA, 32 nt, Homo Sapiens
ggaaugcccgcggugcggggccccagagccgc

SEQ ID NO: 245039 - RNA, 32 nt, Homo Sapiens
auccagcauuugcaucaccucccuggcaccuc

SEQ ID NO: 245040 - RNA, 32 nt, Homo Sapiens
gaugagcuaggauaucuggauugagauggccu

SEQ ID NO: 245041 - RNA, 32 nt, Homo Sapiens
gagccugagccggagauagaggggcugcugac

SEQ ID NO: 245042 - RNA, 32 nt, Homo Sapiens
ucaccaauuaguuaaaucagugcuucgacuca

SEQ ID NO: 245043 - RNA, 32 nt, Homo Sapiens
gauucuguuaaauucuaaacaucaucuagaaa

SEQ ID NO: 245044 - RNA, 32 nt, Homo Sapiens
cuuugcuuguguauauuugucagagguguuuc

SEQ ID NO: 245045 - RNA, 32 nt, Homo Sapiens
acaucuaaaaacaaauguuugugaucaugugu

SEQ ID NO: 245046 - RNA, 32 nt, Homo Sapiens
cugccccggucuguccgguuugcaguacuugc

SEQ ID NO: 245047 - RNA, 32 nt, Homo Sapiens
ggaccugccuucugacggggccggggugcccg

SEQ ID NO: 245048 - RNA, 32 nt, Homo Sapiens
gauaacccgcggccgcgccugcccgcucgcac

SEQ ID NO: 245049 - RNA, 32 nt, Homo Sapiens
auacagucaacacagugagccucagcauucgc

SEQ ID NO: 245050 - RNA, 32 nt, Homo Sapiens
aaagugcugucaugcugccugcuuucuggagc

SEQ ID NO: 245051 - RNA, 32 nt, Homo Sapiens
ccuggagcuguggccuggcuguggagggccgg

SEQ ID NO: 245052 - RNA, 32 nt, Homo Sapiens
gacuggaggggaggaggaggagcaggccgagc

SEQ ID NO: 245053 - RNA, 32 nt, Homo Sapiens
uacaaugugggaagaggaagaaugagugucac

SEQ ID NO: 245054 - RNA, 32 nt, Homo Sapiens
uggcccagccccaccuccuucccuuuaauccu

SEQ ID NO: 245055 - RNA, 32 nt, Homo Sapiens
ugccauugcacuccagccuggcgacaagagcg

SEQ ID NO: 245056 - RNA, 32 nt, Homo Sapiens
gcuggggcugcaggggcugggguguguuacuc

SEQ ID NO: 245057 - RNA, 32 nt, Homo Sapiens
guuaccuuuaucuuguugaggaccacaacauu

SEQ ID NO: 245058 - RNA, 32 nt, Homo Sapiens
gccuguaaucccaacuaccuggaaggcugagg

SEQ ID NO: 245059 - RNA, 32 nt, Homo Sapiens
ucggugagcggcggggguggcuccagcaacgg

SEQ ID NO: 245060 - RNA, 32 nt, Homo Sapiens
auggugaccugcucaggggcugauugggaguc

SEQ ID NO: 245061 - RNA, 32 nt, Homo Sapiens
ccacaccguccacagcagcugucuggcccuca

SEQ ID NO: 245062 - RNA, 32 nt, Homo Sapiens
aaacaagccccagccuuacucccggcccccca

SEQ ID NO: 245063 - RNA, 32 nt, Homo Sapiens
cucguccgcccggcuugaggcccgcggggagc

SEQ ID NO: 245064 - RNA, 32 nt, Homo Sapiens
acacaaagaaaaugggcacaugcugaaauucc

SEQ ID NO: 245065 - RNA, 32 nt, Homo Sapiens
uccaaacaagcacugauugauccaaggccuuc

SEQ ID NO: 245066 - RNA, 32 nt, Homo Sapiens
ugucacacaguauuuauuguuaccaaaauggc

SEQ ID NO: 245067 - RNA, 32 nt, Homo Sapiens
agcacauauggcaacccccaacucccaggggg

SEQ ID NO: 245068 - RNA, 30 nt, Homo Sapiens
gaagauuggaucaugggggaguuuucucau

SEQ ID NO: 245069 - RNA, 32 nt, Homo Sapiens
gcuguacauccucuuuaccaucccuccuucuc

SEQ ID NO: 245070 - RNA, 32 nt, Homo Sapiens
ugugguacaccugguauuacagccuuugccuu

SEQ ID NO: 245071 - RNA, 32 nt, Homo Sapiens
uguuuauacacacacacacacacacacacaca

SEQ ID NO: 245072 - RNA, 32 nt, Homo Sapiens
cugaugggauuccacaccggagccucugagcg

SEQ ID NO: 245073 - RNA, 32 nt, Homo Sapiens
ugaagcccaggguggggggugucagggcagug

SEQ ID NO: 245074 - RNA, 32 nt, Homo Sapiens
gucccguucuguagcucuggcccuuugaauau

SEQ ID NO: 245075 - RNA, 32 nt, Homo Sapiens
uggaaauauucugacaacauuaaaagacucua

SEQ ID NO: 245076 - RNA, 32 nt, Homo Sapiens
ccucugcuuggaaagcacugguuuagggacuu

SEQ ID NO: 245077 - RNA, 32 nt, Homo Sapiens
agucaccuuccacuggguuccucccacaacac

SEQ ID NO: 245078 - RNA, 32 nt, Homo Sapiens
ggaacagggcuggaaagaggcugcuggcuguc

SEQ ID NO: 245079 - RNA, 32 nt, Homo Sapiens
ugagcgaccuccccggggcuccucuggaagcg

SEQ ID NO: 245080 - RNA, 32 nt, Homo Sapiens
gaaguuuguaacacccugaaccccgcuaccuu

SEQ ID NO: 245081 - RNA, 32 nt, Homo Sapiens
guacaaaaaaguuauaagaaaacuacauguaa

SEQ ID NO: 245082 - RNA, 32 nt, Homo Sapiens
accuggagcaccugggggcgcgggcgggggac

SEQ ID NO: 245083 - RNA, 32 nt, Homo Sapiens
aagcugaugagguuaggauacccaggcccuuu

SEQ ID NO: 245084 - RNA, 32 nt, Homo Sapiens
uucucugcuuaaauucuggagcuccguggcag

SEQ ID NO: 245085 - RNA, 32 nt, Homo Sapiens
ugacaaucaaaccaaaucaucaguuaucaaug

SEQ ID NO: 245086 - RNA, 32 nt, Homo Sapiens
ccuaggcugugaccgccgaacuccacugcaac

SEQ ID NO: 245087 - RNA, 32 nt, Homo Sapiens
cauagucgccugguuacggcccagggggaaua

SEQ ID NO: 245088 - RNA, 32 nt, Homo Sapiens
auucuugcuggcuaaugugcugauagccaggu

SEQ ID NO: 245089 - RNA, 32 nt, Homo Sapiens
uuugcugguaguccgcauacccauacccucug

SEQ ID NO: 245090 - RNA, 32 nt, Homo Sapiens
cgugcauguuuuauguuauuaauuaguagcuu

SEQ ID NO: 245091 - RNA, 32 nt, Homo Sapiens
ccccagugcaacgcccugagugacggaaagag

SEQ ID NO: 245092 - RNA, 32 nt, Homo Sapiens
acccaggaccucuggggguuguugggaggagg

SEQ ID NO: 245093 - RNA, 32 nt, Homo Sapiens
gcugucauggcaaucguguuucccaucaccug

SEQ ID NO: 245094 - RNA, 32 nt, Homo Sapiens
aagauggaagcaguuugagcaaugaaauccgu

SEQ ID NO: 245095 - RNA, 32 nt, Homo Sapiens
ggagagggaaagacauucagacccacagaaag

SEQ ID NO: 245096 - RNA, 32 nt, Homo Sapiens
agaggguggucgucugugcauuccagguuacu

SEQ ID NO: 245097 - RNA, 32 nt, Homo Sapiens
uaaacacuaauagauauucaauaacggaguaa

SEQ ID NO: 245098 - RNA, 32 nt, Homo Sapiens
guguaauacagucaaggcagcccccagccuag

SEQ ID NO: 245099 - RNA, 32 nt, Homo Sapiens
ccuuaagcagagucaggagaccccaaggcaug

SEQ ID NO: 245100 - RNA, 32 nt, Homo Sapiens
uuuuguuguaccgucuuucaauaaaaagaagc

SEQ ID NO: 245101 - RNA, 32 nt, Homo Sapiens
gugcacaggucagggcucggagggagccucug

SEQ ID NO: 245102 - RNA, 32 nt, Homo Sapiens
acugccccagccgcuuuuuuuuuuuuuuugug

SEQ ID NO: 245103 - RNA, 32 nt, Homo Sapiens
uuaauguaucuggaauggauucuuauguguag

SEQ ID NO: 245104 - RNA, 32 nt, Homo Sapiens
ugggaccgggagcggcuucuggaggagcgcga

SEQ ID NO: 245105 - RNA, 32 nt, Homo Sapiens
agucuuuaacuguguguguaccagucucacau

SEQ ID NO: 245106 - RNA, 32 nt, Homo Sapiens
gagccccuaaaauggagccuggcagauaacaa

SEQ ID NO: 245107 - RNA, 32 nt, Homo Sapiens
acuauuaacuaaaauaugaaacuuaaaaacaa

SEQ ID NO: 245108 - RNA, 27 nt, Homo Sapiens
ggccacucccucuccagcccccgaugu

SEQ ID NO: 245109 - RNA, 32 nt, Homo Sapiens
uggucuggaugaugccccacuccauauuugua

SEQ ID NO: 245110 - RNA, 32 nt, Homo Sapiens
uccagggccagguguggucaguccuccugaac

SEQ ID NO: 245111 - RNA, 32 nt, Homo Sapiens
agguaccaccgauaaugcuauuagcccaaacc

SEQ ID NO: 245112 - RNA, 32 nt, Homo Sapiens
uaagcuggcuguaccuguuccucccccauaaa

SEQ ID NO: 245113 - RNA, 32 nt, Homo Sapiens
ucuccauauuuuauguuuuucuauguaucuga

SEQ ID NO: 245114 - RNA, 32 nt, Homo Sapiens
gucaaaggacucugcaugcugcugaaagcaaa

SEQ ID NO: 245115 - RNA, 32 nt, Homo Sapiens
auccugcaaucacuucugaccaggaguuagau

SEQ ID NO: 245116 - RNA, 32 nt, Homo Sapiens
aaaacuugaaaaaugcagaaauguauaaaaaa

SEQ ID NO: 245117 - RNA, 32 nt, Homo Sapiens
cugggaguuuucugccacacagauuugcggaa

SEQ ID NO: 245118 - RNA, 32 nt, Homo Sapiens
cccagcuccccgccaccgccaugguccccgac

SEQ ID NO: 245119 - RNA, 32 nt, Homo Sapiens
accccucacccccuccucccgggcucuuccug

SEQ ID NO: 245120 - RNA, 32 nt, Homo Sapiens
gaggggcugcugcuccucaguugcauuucuuc

SEQ ID NO: 245121 - RNA, 32 nt, Homo Sapiens
ccaucugcuggcaaaccaccugcuacaggacc

SEQ ID NO: 245122 - RNA, 32 nt, Homo Sapiens
ugaaguaauuuaauuggugaggcccauucuug

SEQ ID NO: 245123 - RNA, 32 nt, Homo Sapiens
augugagaaauacuuugguguuuaccuuauga

SEQ ID NO: 245124 - RNA, 32 nt, Homo Sapiens
gcuuugcgaaagguaaggaaagaggccaguug

SEQ ID NO: 245125 - RNA, 32 nt, Homo Sapiens
cuuccagacgaccagcagugacaauuuuagau

SEQ ID NO: 245126 - RNA, 32 nt, Homo Sapiens
ggugcugugcugaggaaaggggaugcagagcc

SEQ ID NO: 245127 - RNA, 32 nt, Homo Sapiens
cauaggaacucucauuuauaaaaccaucagau

SEQ ID NO: 245128 - RNA, 32 nt, Homo Sapiens
uauuuuucaugauuuugaaaccaugaagagau

SEQ ID NO: 245129 - RNA, 32 nt, Homo Sapiens
cggucacaaaauuuaaaggcacuaaaaaacuc

SEQ ID NO: 245130 - RNA, 32 nt, Homo Sapiens
cccaaggaaagccccugaagcucaccaggagg

SEQ ID NO: 245131 - RNA, 32 nt, Homo Sapiens
ugguggaagggggaaacgagugaccuuuccau

SEQ ID NO: 245132 - RNA, 32 nt, Homo Sapiens
auauacuguguuuaguacacuaauuuugaagc

SEQ ID NO: 245133 - RNA, 32 nt, Homo Sapiens
aaauaauuuuuguagaauuagcauuucuaggu

SEQ ID NO: 245134 - RNA, 32 nt, Homo Sapiens
cacccugcucggugcccuggcccgcagacagu

SEQ ID NO: 245135 - RNA, 32 nt, Homo Sapiens
agaagcagguccaugucuuuugugguuuccug

SEQ ID NO: 245136 - RNA, 32 nt, Homo Sapiens
ucccuugccagccccaggguaagagccaccuc

SEQ ID NO: 245137 - RNA, 32 nt, Homo Sapiens
uaauuuguauaaauguaccaucugaugucauu

SEQ ID NO: 245138 - RNA, 31 nt, Homo Sapiens
uaaaaaacaaagaauuacaugaguuaguaca

SEQ ID NO: 245139 - RNA, 32 nt, Homo Sapiens
accggaugcugggccaugucaagaagaguuuc

SEQ ID NO: 245140 - RNA, 32 nt, Homo Sapiens
ggacuauuugggaaaaggaaaagaguugggaa

SEQ ID NO: 245141 - RNA, 32 nt, Homo Sapiens
ucuaaggcacuggagaacucuugcuccacaga

SEQ ID NO: 245142 - RNA, 32 nt, Homo Sapiens
cugagaccggugagggggagggggagccucuc

SEQ ID NO: 245143 - RNA, 32 nt, Homo Sapiens
caaaggagauuaacauuugagucaggcugggg

SEQ ID NO: 245144 - RNA, 32 nt, Homo Sapiens
ugugcugugugagcauacaagaaaacugccau

SEQ ID NO: 245145 - RNA, 31 nt, Homo Sapiens
cuccccugaaacacugacucaggagguuugg

SEQ ID NO: 245146 - RNA, 32 nt, Homo Sapiens
cggcaccagguguauuugauauaguguuugca

SEQ ID NO: 245147 - RNA, 30 nt, Homo Sapiens
cuguuuuucuaacugggggaaaagauuccc

SEQ ID NO: 245148 - RNA, 32 nt, Homo Sapiens
cggcgggaacuguuggccgcgcggccucggga

SEQ ID NO: 245149 - RNA, 32 nt, Homo Sapiens
uaaaaaagacuucuagaaauauguaccuuaau

SEQ ID NO: 245150 - RNA, 32 nt, Homo Sapiens
gcagaguguugcauuuagagguuugaguccca

SEQ ID NO: 245151 - RNA, 32 nt, Homo Sapiens
uggaagaucauucgaagguaguauuauugaua

SEQ ID NO: 245152 - RNA, 32 nt, Homo Sapiens
guuucuucguagcagauugaauagaacuaucu

SEQ ID NO: 245153 - RNA, 32 nt, Homo Sapiens
guguuggggagacaucaaaaccacccuaaccu

SEQ ID NO: 245154 - RNA, 32 nt, Homo Sapiens
ugugggaaaacgcaagauagaccaggagggcc

SEQ ID NO: 245155 - RNA, 32 nt, Homo Sapiens
uucuucccaacucuccucccuagcuagagcac

SEQ ID NO: 245156 - RNA, 32 nt, Homo Sapiens
uaccugagcaugcucucaaaauguguuauacc

SEQ ID NO: 245157 - RNA, 32 nt, Homo Sapiens
guggugccaggaagaaauggagcgaugacuga

SEQ ID NO: 245158 - RNA, 32 nt, Homo Sapiens
acugagcgcucgccgccgcccagccucuccuc

SEQ ID NO: 245159 - RNA, 32 nt, Homo Sapiens
aucugugcccgugacgucaccugugcccgugc

SEQ ID NO: 245160 - RNA, 32 nt, Homo Sapiens
cuaaauauuuuuguuuuaccaagaaacugaaa

SEQ ID NO: 245161 - RNA, 32 nt, Homo Sapiens
aaaaguaagacccaguaauguuaggauuuguu

SEQ ID NO: 245162 - RNA, 32 nt, Homo Sapiens
caggacagacuacuuuuuaaaugauaugaaga

SEQ ID NO: 245163 - RNA, 32 nt, Homo Sapiens
gcuuggcaguugcagugcugcucucugggggg

SEQ ID NO: 245164 - RNA, 32 nt, Homo Sapiens
ugagacuucccagaccccggaggcguggagga

SEQ ID NO: 245165 - RNA, 32 nt, Homo Sapiens
acugacuucuuugucucuuuucuggguugcag

SEQ ID NO: 245166 - RNA, 32 nt, Homo Sapiens
gcgcgaccggcuggcgcuggugacgggggccu

SEQ ID NO: 245167 - RNA, 32 nt, Homo Sapiens
uuguuuuccuuccgucaaguugucuuauuuuu

SEQ ID NO: 245168 - RNA, 32 nt, Homo Sapiens
uccagacacggggacugcagagaaaggcugug

SEQ ID NO: 245169 - RNA, 32 nt, Homo Sapiens
cauugauguugcaguguugaaacuacaagagc

SEQ ID NO: 245170 - RNA, 32 nt, Homo Sapiens
cacuguuauuuuugucuuuagcuuuaaaggaa

SEQ ID NO: 245171 - RNA, 32 nt, Homo Sapiens
guuacccuaaaucuauuuuaaaauuguuuucu

SEQ ID NO: 245172 - RNA, 32 nt, Homo Sapiens
gauacguguuggaaaugugguuuuucaggaga

SEQ ID NO: 245173 - RNA, 32 nt, Homo Sapiens
cugcgccgugugcucucuggcucuucauggaa

SEQ ID NO: 245174 - RNA, 32 nt, Homo Sapiens
auugacuauagcaauuugauacauuuuuaaag

SEQ ID NO: 245175 - RNA, 32 nt, Homo Sapiens
uguauccuauuauggauacugguuuuguuaau

SEQ ID NO: 245176 - RNA, 32 nt, Homo Sapiens
gaucgccgcgcgcucgccgcucgcccgccagc

SEQ ID NO: 245177 - RNA, 32 nt, Homo Sapiens
uauacauaaaauguaacccauuuagaaaaaga

SEQ ID NO: 245178 - RNA, 32 nt, Homo Sapiens
uugauuauguaagcaagggcuguucuacuuug

SEQ ID NO: 245179 - RNA, 32 nt, Homo Sapiens
ggcaacagagucuagcucauggccaccagacc

SEQ ID NO: 245180 - RNA, 32 nt, Homo Sapiens
aauacccgugcaggcgcggagaagcaaccggc

SEQ ID NO: 245181 - RNA, 32 nt, Homo Sapiens
cucuucuacccuccccaagaaaaagggccuuc

SEQ ID NO: 245182 - RNA, 32 nt, Homo Sapiens
cucuuggccuggugagccccuccaccuuccag

SEQ ID NO: 245183 - RNA, 32 nt, Homo Sapiens
guuuucaccauguuggccaggcuggucuugaa

SEQ ID NO: 245184 - RNA, 32 nt, Homo Sapiens
aaccagcuugggugcuaccucaguguuguagu

SEQ ID NO: 245185 - RNA, 32 nt, Homo Sapiens
uuagauaaagcaucauguaaagaaauccuaac

SEQ ID NO: 245186 - RNA, 32 nt, Homo Sapiens
uuacacuuuucucucuuguggugaagauggaa

SEQ ID NO: 245187 - RNA, 32 nt, Homo Sapiens
gaucuacacacacacacacacacacacgugca

SEQ ID NO: 245188 - RNA, 32 nt, Homo Sapiens
agguguuuguccuuuuaccaucgagcuacuuc

SEQ ID NO: 245189 - RNA, 32 nt, Homo Sapiens
accacagagacaugagcaccagcaaguuugag

SEQ ID NO: 245190 - RNA, 32 nt, Homo Sapiens
gcugucaggaccagauuuucccagccauccag

SEQ ID NO: 245191 - RNA, 31 nt, Homo Sapiens
agcaagaaguaaaaacagaaacgucaaacgu

SEQ ID NO: 245192 - RNA, 32 nt, Homo Sapiens
cugccgcggagcugcguccgccacucauguuu

SEQ ID NO: 245193 - RNA, 32 nt, Homo Sapiens
cccccauuguuuugcuuccccagcgcccagga

SEQ ID NO: 245194 - RNA, 32 nt, Homo Sapiens
aauggagaguggaaauauauaguggucaaaag

SEQ ID NO: 245195 - RNA, 32 nt, Homo Sapiens
cggccguucucacugcggcugcaccggccccc

SEQ ID NO: 245196 - RNA, 31 nt, Homo Sapiens
ggcagggacagucucauucagagcuuugggu

SEQ ID NO: 245197 - RNA, 32 nt, Homo Sapiens
gacaaccacagagggauauagugaauaucgua

SEQ ID NO: 245198 - RNA, 32 nt, Homo Sapiens
agaagaaaaguacuucuacagccauguccuau

SEQ ID NO: 245199 - RNA, 32 nt, Homo Sapiens
cugcagugacccacccaccuaccuuugcauca

SEQ ID NO: 245200 - RNA, 32 nt, Homo Sapiens
auccaaagccccauauacaaggcauuauccaa

SEQ ID NO: 245201 - RNA, 32 nt, Homo Sapiens
cgcaccaagccgccccgagguucucagaggcg

SEQ ID NO: 245202 - RNA, 32 nt, Homo Sapiens
agcagaaaguagcugggcucuggccauccuuu

SEQ ID NO: 245203 - RNA, 32 nt, Homo Sapiens
uucuuacacuguccagcuuguaauguuuaaug

SEQ ID NO: 245204 - RNA, 32 nt, Homo Sapiens
cuugggaggcugagcgaguccuggagagcaug

SEQ ID NO: 245205 - RNA, 32 nt, Homo Sapiens
cucuugacauggaaauacacugauacaauagg

SEQ ID NO: 245206 - RNA, 32 nt, Homo Sapiens
gcccgucguuccccggccccgagggguccggc

SEQ ID NO: 245207 - RNA, 32 nt, Homo Sapiens
cucaucuccagauuggugggaauucaugagcu

SEQ ID NO: 245208 - RNA, 32 nt, Homo Sapiens
ugagauucaggguggggcuggcaaccccugaa

SEQ ID NO: 245209 - RNA, 32 nt, Homo Sapiens
ugucaucgcuauaaggaguggggcuuucauca

SEQ ID NO: 245210 - RNA, 27 nt, Homo Sapiens
gcaacccauuaaucuuuuguaguuugu

SEQ ID NO: 245211 - RNA, 32 nt, Homo Sapiens
ugucuaucccugguaaugauguuguagugcag

SEQ ID NO: 245212 - RNA, 32 nt, Homo Sapiens
agaaaagcugauuguaaaauuuucauuuugac

SEQ ID NO: 245213 - RNA, 32 nt, Homo Sapiens
ucauuagguucaguaugaaacagguauuguca

SEQ ID NO: 245214 - RNA, 32 nt, Homo Sapiens
cugguggaccagcuggcuccuaaagaggagag

SEQ ID NO: 245215 - RNA, 32 nt, Homo Sapiens
caugucuccgcggaggggcuaccuuccuuccc

SEQ ID NO: 245216 - RNA, 32 nt, Homo Sapiens
caaaaauugcacccucauggcuuaucaggaug

SEQ ID NO: 245217 - RNA, 32 nt, Homo Sapiens
uaucaaagauguaauuuguaaaccucaaauag

SEQ ID NO: 245218 - RNA, 32 nt, Homo Sapiens
agaacauaaaaugaauggcagaaagaggaguc

SEQ ID NO: 245219 - RNA, 32 nt, Homo Sapiens
ugaaaccaaccgccagcgagcagcacgggaga

SEQ ID NO: 245220 - RNA, 32 nt, Homo Sapiens
cccagugacaaggcccugagcuuuguccugaa

SEQ ID NO: 245221 - RNA, 32 nt, Homo Sapiens
aggcccagcuacugccugacgauggcuucccc

SEQ ID NO: 245222 - RNA, 31 nt, Homo Sapiens
cucugagcguucgcacugucaugcuucccag

SEQ ID NO: 245223 - RNA, 32 nt, Homo Sapiens
augggagcaguccauggugcagcccucauggg

SEQ ID NO: 245224 - RNA, 32 nt, Homo Sapiens
uccaaaaaucugggguacuauaagguugccaa

SEQ ID NO: 245225 - RNA, 32 nt, Homo Sapiens
uuuguuuuugcuaguguguguuguugaaaaaa

SEQ ID NO: 245226 - RNA, 32 nt, Homo Sapiens
acuucugggucaugcacugagguccacagacc

SEQ ID NO: 245227 - RNA, 32 nt, Homo Sapiens
gaccuaaaauacugacuuuaguuaguauccuu

SEQ ID NO: 245228 - RNA, 32 nt, Homo Sapiens
aggaaccaguguucauggugacagggcgacgg

SEQ ID NO: 245229 - RNA, 32 nt, Homo Sapiens
aaauuacuauuuuuuaauuuuaucuuguucag

SEQ ID NO: 245230 - RNA, 32 nt, Homo Sapiens
cacuaggccucuuuccagggccccacacucac

SEQ ID NO: 245231 - RNA, 32 nt, Homo Sapiens
uuaaacuucuauuuaggaaauuacauuaagua

SEQ ID NO: 245232 - RNA, 32 nt, Homo Sapiens
acaugagugaaugucauuaauuuugaaguaau

SEQ ID NO: 245233 - RNA, 32 nt, Homo Sapiens
cacauucuggucuagccuuguugggcccaauc

SEQ ID NO: 245234 - RNA, 32 nt, Homo Sapiens
gcacggcccccaccaggcgccauggacuggaa

SEQ ID NO: 245235 - RNA, 32 nt, Homo Sapiens
guucacauuuuuccacaguauaauggaaaaua

SEQ ID NO: 245236 - RNA, 32 nt, Homo Sapiens
cugacacacacacgcacacacacacacaauuu

SEQ ID NO: 245237 - RNA, 32 nt, Homo Sapiens
uaaggcuuggguguuccuggggugcaagggca

SEQ ID NO: 245238 - RNA, 32 nt, Homo Sapiens
cuccccgcccccgagagcuacagcgugugaug

SEQ ID NO: 245239 - RNA, 32 nt, Homo Sapiens
cccagaccacccuuuaccucgaguccuuaugc

SEQ ID NO: 245240 - RNA, 32 nt, Homo Sapiens
acucccacggcucaccccggacuugcaccuua

SEQ ID NO: 245241 - RNA, 32 nt, Homo Sapiens
cgcagaaauggagcaagagccacaaaauggag

SEQ ID NO: 245242 - RNA, 32 nt, Homo Sapiens
gcccugugaaagauaggaugugaggugagcau

SEQ ID NO: 245243 - RNA, 32 nt, Homo Sapiens
cacaauuaagaggaaacuuauuguucacaagg

SEQ ID NO: 245244 - RNA, 31 nt, Homo Sapiens
ggagcugagcacugcccgcugugccugccug

SEQ ID NO: 245245 - RNA, 32 nt, Homo Sapiens
aaaucuuuuuaaaaaauaguaugaaugugaau

SEQ ID NO: 245246 - RNA, 32 nt, Homo Sapiens
uggucugaacagaggcaucuccgcacccaaga

SEQ ID NO: 245247 - RNA, 32 nt, Homo Sapiens
uaaaauaacuuccaaaaggugcuggauuggag

SEQ ID NO: 245248 - RNA, 32 nt, Homo Sapiens
agcagcuccagagggagggccaccacccugca

SEQ ID NO: 245249 - RNA, 32 nt, Homo Sapiens
uaaaaaugaugauuuaaaauguugcuuguaau

SEQ ID NO: 245250 - RNA, 32 nt, Homo Sapiens
gcuaaaauuacauuauguuuuguuacuaugaa

SEQ ID NO: 245251 - RNA, 32 nt, Homo Sapiens
uuuuuaaacacuuuuugaaauagagugugcug

SEQ ID NO: 245252 - RNA, 32 nt, Homo Sapiens
uaccccggcccgggcucuggaggcccccacac

SEQ ID NO: 245253 - RNA, 32 nt, Homo Sapiens
gcaagagguggcccugggccagugcguuggaa

SEQ ID NO: 245254 - RNA, 32 nt, Homo Sapiens
auguucuuuauccuaauuaguucauuuaucca

SEQ ID NO: 245255 - RNA, 32 nt, Homo Sapiens
agggaacacuucuuaugagaaaacauuuauaa

SEQ ID NO: 245256 - RNA, 32 nt, Homo Sapiens
gagcaauaggauuuuaauaaacagaacccauc

SEQ ID NO: 245257 - RNA, 32 nt, Homo Sapiens
guuuggccgcuuucucuuuuccucuaccuucc

SEQ ID NO: 245258 - RNA, 32 nt, Homo Sapiens
gaaagccgcuggcggaccgcgcgcagcggcca

SEQ ID NO: 245259 - RNA, 32 nt, Homo Sapiens
ggaggcggaagugagucgacagacgaggcggc

SEQ ID NO: 245260 - RNA, 32 nt, Homo Sapiens
gcuggugagggaagagggugggcaaguuuaug

SEQ ID NO: 245261 - RNA, 32 nt, Homo Sapiens
ucccuuguuccaucagaagcugcagugacucu

SEQ ID NO: 245262 - RNA, 32 nt, Homo Sapiens
ucaagugauccgcccuccccagccucccaaag

SEQ ID NO: 245263 - RNA, 32 nt, Homo Sapiens
agugaagaugaacccuuucugugcaggagcag

SEQ ID NO: 245264 - RNA, 32 nt, Homo Sapiens
ucucgcugaccgcgcuagcugcggcuucuacg

SEQ ID NO: 245265 - RNA, 32 nt, Homo Sapiens
uguacccccuccccagucuucgccuuccucuu

SEQ ID NO: 245266 - RNA, 32 nt, Homo Sapiens
caauaaaugcugugggauuguuuguauuaaaa

SEQ ID NO: 245267 - RNA, 32 nt, Homo Sapiens
uccaccaagaucugugggugcacuuggcaugu

SEQ ID NO: 245268 - RNA, 32 nt, Homo Sapiens
gugauccugaugcacauccaugguggagagcu

SEQ ID NO: 245269 - RNA, 30 nt, Homo Sapiens
ggaucccgcgcgcaguuccagcaggugugu

SEQ ID NO: 245270 - RNA, 29 nt, Homo Sapiens
caggauggcggaagcucaccaggccgugg

SEQ ID NO: 245271 - RNA, 32 nt, Homo Sapiens
uuucaaagaacauuuagguuauuuucaacagu

SEQ ID NO: 245272 - RNA, 32 nt, Homo Sapiens
uauauauguuuccuauuuauagauucaucgua

SEQ ID NO: 245273 - RNA, 32 nt, Homo Sapiens
ccgcggcgcgcccgggcucccugcugauccca

SEQ ID NO: 245274 - RNA, 32 nt, Homo Sapiens
guagauuucagcaacuugagcuugaguugaug

SEQ ID NO: 245275 - RNA, 32 nt, Homo Sapiens
ggguagaagaucucugaaacuugucuuuagau

SEQ ID NO: 245276 - RNA, 32 nt, Homo Sapiens
aauacuauuucuguggaauaauuauaaaagua

SEQ ID NO: 245277 - RNA, 32 nt, Homo Sapiens
cccugcugacccccuccuccagagcagccagc

SEQ ID NO: 245278 - RNA, 32 nt, Homo Sapiens
uuucagaacacugauaacacucagaaaaccac

SEQ ID NO: 245279 - RNA, 32 nt, Homo Sapiens
cuauaaagaacacugaaaggugaugugugugg

SEQ ID NO: 245280 - RNA, 32 nt, Homo Sapiens
auacgcaguccugcuggaccgccccgucgcgc

SEQ ID NO: 245281 - RNA, 32 nt, Homo Sapiens
uggaagggcucgcagugggugauucagggugc

SEQ ID NO: 245282 - RNA, 30 nt, Homo Sapiens
aaccuugucuguguuguucauggcuauauc

SEQ ID NO: 245283 - RNA, 32 nt, Homo Sapiens
uuuugggguucaccagaugcuuccuggcccac

SEQ ID NO: 245284 - RNA, 32 nt, Homo Sapiens
gagaaagcgccauggcggcggcggcggcugug

SEQ ID NO: 245285 - RNA, 32 nt, Homo Sapiens
agagggaaaaggaaaagagccucaaacauuuu

SEQ ID NO: 245286 - RNA, 32 nt, Homo Sapiens
gcuuauacacugcuuacccagccaaaugcuuu

SEQ ID NO: 245287 - RNA, 32 nt, Homo Sapiens
caacccugcccagggacccccaucccgggcgg

SEQ ID NO: 245288 - RNA, 32 nt, Homo Sapiens
agggcccggcggcaggucccagcccggggcua

SEQ ID NO: 245289 - RNA, 32 nt, Homo Sapiens
cugacagccaaggcagggcacugucuccugag

SEQ ID NO: 245290 - RNA, 32 nt, Homo Sapiens
uaagcuugacagccuuccaacucuuggagucu

SEQ ID NO: 245291 - RNA, 32 nt, Homo Sapiens
ucaaauaaaaauuuuauacuauaaaaaaaaaa

SEQ ID NO: 245292 - RNA, 32 nt, Homo Sapiens
cccgcgggcgaagaggggagagggagcugccc

SEQ ID NO: 245293 - RNA, 32 nt, Homo Sapiens
cuguuuuugucugacuucuacucugucaaucu

SEQ ID NO: 245294 - RNA, 30 nt, Homo Sapiens
ccacuuuuagcaaaaggggaaaccaucgca

SEQ ID NO: 245295 - RNA, 32 nt, Homo Sapiens
cgcgccuuccacgcgccgugccccaccggcga

SEQ ID NO: 245296 - RNA, 32 nt, Homo Sapiens
cucuagauccauauuaauaaacaugagcaucu

SEQ ID NO: 245297 - RNA, 32 nt, Homo Sapiens
auucaaauauuguaguuuagguucaaacagag

SEQ ID NO: 245298 - RNA, 32 nt, Homo Sapiens
ugcagaggccccacagacagcuugaggccccu

SEQ ID NO: 245299 - RNA, 32 nt, Homo Sapiens
aaaacaauauguuagauuagguguaagacuuu

SEQ ID NO: 245300 - RNA, 32 nt, Homo Sapiens
ugagagcguggccugacuugcagacucggcuu

SEQ ID NO: 245301 - RNA, 31 nt, Homo Sapiens
uugaucucacccucacuccaaggcacauagc

SEQ ID NO: 245302 - RNA, 32 nt, Homo Sapiens
gugguagcuuguccugaaauguguguagaaag

SEQ ID NO: 245303 - RNA, 30 nt, Homo Sapiens
gcugggggugguggcaugcgccuguagucc

SEQ ID NO: 245304 - RNA, 32 nt, Homo Sapiens
aguugcaggcgagcaggcgaggaaucgccgug

SEQ ID NO: 245305 - RNA, 32 nt, Homo Sapiens
uuuuaaaacacuuccauaaucuggacuccucu

SEQ ID NO: 245306 - RNA, 32 nt, Homo Sapiens
gccccggagguugagacugcagugcgccauga

SEQ ID NO: 245307 - RNA, 32 nt, Homo Sapiens
ucuuuuucccccuguaggacugacuguuggcu

SEQ ID NO: 245308 - RNA, 32 nt, Homo Sapiens
uuugccauugguuacuuggcguacacccugug

SEQ ID NO: 245309 - RNA, 32 nt, Homo Sapiens
ccaauuuguacauuuuaauuauucaauuucua

SEQ ID NO: 245310 - RNA, 30 nt, Homo Sapiens
acugcgccccccgugcccuagccgggggcc

SEQ ID NO: 245311 - RNA, 32 nt, Homo Sapiens
ccaccuggaucuccugccuccucccgaggaga

SEQ ID NO: 245312 - RNA, 32 nt, Homo Sapiens
agcaccaggccagcugagcugcacccacaguc

SEQ ID NO: 245313 - RNA, 32 nt, Homo Sapiens
aguuacucauuuugacucguuuggacaaguga

SEQ ID NO: 245314 - RNA, 32 nt, Homo Sapiens
aaacacgucuaccugucugggaucaacuccug

SEQ ID NO: 245315 - RNA, 32 nt, Homo Sapiens
gaagcuucacugugucuauuauacauccccau

SEQ ID NO: 245316 - RNA, 32 nt, Homo Sapiens
ccccacugcugcccuccugucgagaaugacug

SEQ ID NO: 245317 - RNA, 32 nt, Homo Sapiens
ggcucccgcccucggcgcugaucuccggcgcg

SEQ ID NO: 245318 - RNA, 32 nt, Homo Sapiens
uuuuuuccuuuauguucucaccguuugaaugc

SEQ ID NO: 245319 - RNA, 32 nt, Homo Sapiens
auuguuuuguaucucaaaaguauugaguuuag

SEQ ID NO: 245320 - RNA, 32 nt, Homo Sapiens
ccuaucccauccccagccuccacccccaucca

SEQ ID NO: 245321 - RNA, 32 nt, Homo Sapiens
agagugauguaccccaaggcugcagcuaagau

SEQ ID NO: 245322 - RNA, 32 nt, Homo Sapiens
auucagauuucauaaugaccuuauuaaaaggc

SEQ ID NO: 245323 - RNA, 32 nt, Homo Sapiens
gggagagugagugauauguacaguguuuugag

SEQ ID NO: 245324 - RNA, 32 nt, Homo Sapiens
ucuuagcugggucuuuccugcuguucagcccu

SEQ ID NO: 245325 - RNA, 32 nt, Homo Sapiens
gaaaagggagucaugcauuuugcuuuggacac

SEQ ID NO: 245326 - RNA, 32 nt, Homo Sapiens
aacuggaauaagaugaauauauuauuaaagca

SEQ ID NO: 245327 - RNA, 32 nt, Homo Sapiens
gaagagagggccucagaagaaaccaacccugc

SEQ ID NO: 245328 - RNA, 32 nt, Homo Sapiens
uugggagcagguuacaauguuacuucagccca

SEQ ID NO: 245329 - RNA, 31 nt, Homo Sapiens
uuaaagaaauaaaaaagaacuuuuguaucuu

SEQ ID NO: 245330 - RNA, 32 nt, Homo Sapiens
guccgccggcccugcgggccgccggugaaaua

SEQ ID NO: 245331 - RNA, 32 nt, Homo Sapiens
ccgccggagggagaggggagcugcgggccaga

SEQ ID NO: 245332 - RNA, 32 nt, Homo Sapiens
guacaauuauacauuaauggcuguaaugugaa

SEQ ID NO: 245333 - RNA, 32 nt, Homo Sapiens
ccccaaugaugaugaauggaaaaauacuuuuc

SEQ ID NO: 245334 - RNA, 32 nt, Homo Sapiens
guguaacuaggauuuaaaccuaggacuaucuu

SEQ ID NO: 245335 - RNA, 32 nt, Homo Sapiens
ugugagccacuacgccccggcccaacuggaug

SEQ ID NO: 245336 - RNA, 32 nt, Homo Sapiens
cuucuccccaucagagcucucccuuuaaacua

SEQ ID NO: 245337 - RNA, 32 nt, Homo Sapiens
gugcccgccuuggccucccaaagugcugggau

SEQ ID NO: 245338 - RNA, 32 nt, Homo Sapiens
guucuucgagcgcgccuucgaucaaggcgcgg

SEQ ID NO: 245339 - RNA, 32 nt, Homo Sapiens
caggagcgccuggcccaggcacgggaggcccu

SEQ ID NO: 245340 - RNA, 32 nt, Homo Sapiens
ucguucaggaccauggagagcggcaccagcag

SEQ ID NO: 245341 - RNA, 32 nt, Homo Sapiens
uugggucuuugguuugcugagggcugcuugga

SEQ ID NO: 245342 - RNA, 32 nt, Homo Sapiens
gcagagacggcuggggcgggggcaggaggagg

SEQ ID NO: 245343 - RNA, 32 nt, Homo Sapiens
uccauacauuuuagguauauuuugugccuuca

SEQ ID NO: 245344 - RNA, 32 nt, Homo Sapiens
uuagagaugugauuugccauugcuguuaguuu

SEQ ID NO: 245345 - RNA, 32 nt, Homo Sapiens
gcauucucuaaagagucuucuagaucaauuuu

SEQ ID NO: 245346 - RNA, 32 nt, Homo Sapiens
ggggccuggagacacuccauggagcucugcuu

SEQ ID NO: 245347 - RNA, 32 nt, Homo Sapiens
ucaacagaaaaugugauuuucacagauucagc

SEQ ID NO: 245348 - RNA, 32 nt, Homo Sapiens
gcgagccaggacuaggagauuccggugccucc

SEQ ID NO: 245349 - RNA, 32 nt, Homo Sapiens
uguauguaaauauauacagaauaauacacaca

SEQ ID NO: 245350 - RNA, 32 nt, Homo Sapiens
auagagggcagacagauuccugcuagcagcuu

SEQ ID NO: 245351 - RNA, 32 nt, Homo Sapiens
uauuuauuguuacugagacaaaacaguacuca

SEQ ID NO: 245352 - RNA, 32 nt, Homo Sapiens
cgccgacucccggcgccgccgccgccacugcc

SEQ ID NO: 245353 - RNA, 32 nt, Homo Sapiens
aagagagaggggcugccuuaaccagcuguggu

SEQ ID NO: 245354 - RNA, 32 nt, Homo Sapiens
guuuuacaacuguguuuucauuuuuucaaaug

SEQ ID NO: 245355 - RNA, 32 nt, Homo Sapiens
gacuugcaaagaccuaccuccagacuucaaaa

SEQ ID NO: 245356 - RNA, 32 nt, Homo Sapiens
guugcccucccucuccuggccuuacaagcacu

SEQ ID NO: 245357 - RNA, 32 nt, Homo Sapiens
uuucauaaauuaaaaacaauggucagaaaaaa

SEQ ID NO: 245358 - RNA, 32 nt, Homo Sapiens
gagagacauuugaucccuuguuugcuuaauaa

SEQ ID NO: 245359 - RNA, 32 nt, Homo Sapiens
gcccccauccgguuccucuucuucccaggugu

SEQ ID NO: 245360 - RNA, 32 nt, Homo Sapiens
agagccgccugcccuggcaugggagggaggcu

SEQ ID NO: 245361 - RNA, 32 nt, Homo Sapiens
cgaucucuaaucugcuucaguucauccuucuu

SEQ ID NO: 245362 - RNA, 32 nt, Homo Sapiens
caaaagcagacaccuuugccuuguuccugagc

SEQ ID NO: 245363 - RNA, 32 nt, Homo Sapiens
acggaggcuuuacucugcccaguguccaaugg

SEQ ID NO: 245364 - RNA, 32 nt, Homo Sapiens
acaacaagcuuacucuuccucagcauuacaua

SEQ ID NO: 245365 - RNA, 32 nt, Homo Sapiens
aacacuuuuuaaaaaacuuuauuuuguuguuu

SEQ ID NO: 245366 - RNA, 32 nt, Homo Sapiens
aaguggugggugcccaggacggugccuccagc

SEQ ID NO: 245367 - RNA, 30 nt, Homo Sapiens
agcucgucugcugugcagccggcgcagagg

SEQ ID NO: 245368 - RNA, 32 nt, Homo Sapiens
aggaguccugucauuuacuuucccuacaggag

SEQ ID NO: 245369 - RNA, 32 nt, Homo Sapiens
ggaaauauucaugagucaacuauccagaauca

SEQ ID NO: 245370 - RNA, 32 nt, Homo Sapiens
ggguaauagucguuacccacgaggccacacuu

SEQ ID NO: 245371 - RNA, 31 nt, Homo Sapiens
acagcagcgcacucggugccccgcgcagggu

SEQ ID NO: 245372 - RNA, 32 nt, Homo Sapiens
ggcgugggaggcugcgcggcgaugcugcaguu

SEQ ID NO: 245373 - RNA, 32 nt, Homo Sapiens
uacucagcggcuuucagguagagagagaaagu

SEQ ID NO: 245374 - RNA, 32 nt, Homo Sapiens
cuacuuuagcucuccuuucucuagaccucacu

SEQ ID NO: 245375 - RNA, 32 nt, Homo Sapiens
ggagaaccagcgguuaccauggaggggaucag

SEQ ID NO: 245376 - RNA, 32 nt, Homo Sapiens
ucuacuaaaaauacaaaaaauuacccagccgu

SEQ ID NO: 245377 - RNA, 32 nt, Homo Sapiens
agaauaugaaacaaauuggccgggugcggugg

SEQ ID NO: 245378 - RNA, 32 nt, Homo Sapiens
cuuucuuggguugaaagagggguggggggagg

SEQ ID NO: 245379 - RNA, 32 nt, Homo Sapiens
gccugucagaguuuucaacggugcuuauagcu

SEQ ID NO: 245380 - RNA, 32 nt, Homo Sapiens
aaacccuuugaaaaaagauggaagacucagac

SEQ ID NO: 245381 - RNA, 32 nt, Homo Sapiens
augccuguaauccagcacuuugggaggcuaag

SEQ ID NO: 245382 - RNA, 32 nt, Homo Sapiens
aagaaggugucugaccguaaauuacaccugca

SEQ ID NO: 245383 - RNA, 32 nt, Homo Sapiens
gcugaauuacaaugaaacaugucuuauuacua

SEQ ID NO: 245384 - RNA, 32 nt, Homo Sapiens
uuucgaauuaggaguagagagaucugaccucu

SEQ ID NO: 245385 - RNA, 32 nt, Homo Sapiens
aaggcuucuugaaauuacacgugggacuuuua

SEQ ID NO: 245386 - RNA, 32 nt, Homo Sapiens
aacuuuauuauaccucuuuguuaugauacuga

SEQ ID NO: 245387 - RNA, 32 nt, Homo Sapiens
cuguccuacuguuuaauagaaaacuguuuuac

SEQ ID NO: 245388 - RNA, 32 nt, Homo Sapiens
guccgagcgcgucaccuccucacgcugcggcu

SEQ ID NO: 245389 - RNA, 32 nt, Homo Sapiens
aguagagguugcuuaagcaagcaauggauaau

SEQ ID NO: 245390 - RNA, 32 nt, Homo Sapiens
aucaagagcauggagaauaaacgcgggaaaaa

SEQ ID NO: 245391 - RNA, 32 nt, Homo Sapiens
guaugauaguuuuuaaauuaauuuagagcaga

SEQ ID NO: 245392 - RNA, 32 nt, Homo Sapiens
ugucagaaaaggaaugauuauauuagccaaau

SEQ ID NO: 245393 - RNA, 32 nt, Homo Sapiens
uccuugguaugcuaagcgccgguacccugggc

SEQ ID NO: 245394 - RNA, 32 nt, Homo Sapiens
aggacugagcagacccaccuccuccagcuugg

SEQ ID NO: 245395 - RNA, 32 nt, Homo Sapiens
augggccgggcucgggaaguggguuggauggc

SEQ ID NO: 245396 - RNA, 32 nt, Homo Sapiens
uuuaaugggcagguucuugcucucccaggcug

SEQ ID NO: 245397 - RNA, 32 nt, Homo Sapiens
uuaugaagaaaaaaccgauauuuaaggagaug

SEQ ID NO: 245398 - RNA, 31 nt, Homo Sapiens
cagcuucugccggucggcagccugggccagg

SEQ ID NO: 245399 - RNA, 32 nt, Homo Sapiens
cuggggcagaggucuuuuuuucauuuaauacu

SEQ ID NO: 245400 - RNA, 32 nt, Homo Sapiens
cccacuaaaaauugcugcuguagaaguuggag

SEQ ID NO: 245401 - RNA, 32 nt, Homo Sapiens
aauguguauuucuuugucucuuucuuucuugu

SEQ ID NO: 245402 - RNA, 32 nt, Homo Sapiens
guggguauacaguauguguauaucuuuaugcc

SEQ ID NO: 245403 - RNA, 32 nt, Homo Sapiens
ggugguggagggugggggugcacugcagcaag

SEQ ID NO: 245404 - RNA, 32 nt, Homo Sapiens
gaguccaaguggauuaaugaugucaugcauaa

SEQ ID NO: 245405 - RNA, 32 nt, Homo Sapiens
uaaauauuagagauuauguacacaagggcaug

SEQ ID NO: 245406 - RNA, 32 nt, Homo Sapiens
agcgcgcuccauuugcagaaaggaaaucgaga

SEQ ID NO: 245407 - RNA, 32 nt, Homo Sapiens
auuuuucucuugcugcagccauguaagcaagu

SEQ ID NO: 245408 - RNA, 32 nt, Homo Sapiens
cauuucccacuuuccuaucuuaccuugagggu

SEQ ID NO: 245409 - RNA, 32 nt, Homo Sapiens
cgaaaagcaagucaaaaccgugagauuucaga

SEQ ID NO: 245410 - RNA, 32 nt, Homo Sapiens
guuuagugucaauuucuuuaacuguaaaauga

SEQ ID NO: 245411 - RNA, 32 nt, Homo Sapiens
ugcaaaccgggaagauggcggccggcggcggc

SEQ ID NO: 245412 - RNA, 32 nt, Homo Sapiens
aauuacuguaugcagauaaggcagaugguguc

SEQ ID NO: 245413 - RNA, 32 nt, Homo Sapiens
agacauguaaauauaucauuauaggguagugu

SEQ ID NO: 245414 - RNA, 32 nt, Homo Sapiens
aucacagagcauggggcagagccaggacuaga

SEQ ID NO: 245415 - RNA, 32 nt, Homo Sapiens
gccuggcuccccuggggugcaggcgccucaac

SEQ ID NO: 245416 - RNA, 32 nt, Homo Sapiens
ucacuccaccccacccacaucugcccuguccu

SEQ ID NO: 245417 - RNA, 32 nt, Homo Sapiens
uauaacuuuuaaauggcuggaacuacucguau

SEQ ID NO: 245418 - RNA, 32 nt, Homo Sapiens
cgcgggaccccgaugagcugcacuagccccag

SEQ ID NO: 245419 - RNA, 32 nt, Homo Sapiens
gugggccccgccccggcguccggagcaggaga

SEQ ID NO: 245420 - RNA, 32 nt, Homo Sapiens
uguuguuauuauugauacaacuuucuaccaaa

SEQ ID NO: 245421 - RNA, 32 nt, Homo Sapiens
gguggaggacgcugaggcccguggggggcagg

SEQ ID NO: 245422 - RNA, 32 nt, Homo Sapiens
gcccugggccccagcaccuccccuccuccagc

SEQ ID NO: 245423 - RNA, 32 nt, Homo Sapiens
acagcacgugcagccacgucagccaaaugacu

SEQ ID NO: 245424 - RNA, 32 nt, Homo Sapiens
gaagcagcuccaggagcgccggcgccggcugg

SEQ ID NO: 245425 - RNA, 32 nt, Homo Sapiens
uuauauguacuaaauguggaaccauuagaaag

SEQ ID NO: 245426 - RNA, 32 nt, Homo Sapiens
uuuuucucuagggagagguacaguguuuauau

SEQ ID NO: 245427 - RNA, 32 nt, Homo Sapiens
ucuugguggaaggaaacucuaauuauuggaag

SEQ ID NO: 245428 - RNA, 32 nt, Homo Sapiens
aggggcgcccucgcgcgacguccugcuggucu

SEQ ID NO: 245429 - RNA, 32 nt, Homo Sapiens
aguuaauaaaauuuauuugugauguacuguaa

SEQ ID NO: 245430 - RNA, 32 nt, Homo Sapiens
uacuauugcuacuucuggugugauuuguaaug

SEQ ID NO: 245431 - RNA, 32 nt, Homo Sapiens
cuauaggcgugguggcucaugccuauaauccc

SEQ ID NO: 245432 - RNA, 32 nt, Homo Sapiens
acuaucauaguuuuaagaaaaacauuuuaaga

SEQ ID NO: 245433 - RNA, 32 nt, Homo Sapiens
aaacaaaaacaaacccugaaauguauauuugg

SEQ ID NO: 245434 - RNA, 32 nt, Homo Sapiens
aauacuuguaaauguuuucuuaaccauuuaua

SEQ ID NO: 245435 - RNA, 32 nt, Homo Sapiens
caaauugcaaauaaaacuguauggaaacgaaa

SEQ ID NO: 245436 - RNA, 32 nt, Homo Sapiens
uggaccuccccgcucccucaagcucuggaugg

SEQ ID NO: 245437 - RNA, 32 nt, Homo Sapiens
aaguacauggaaggcauagaaaaggaggagaa

SEQ ID NO: 245438 - RNA, 32 nt, Homo Sapiens
accugaaggggaacaugaaaagagacuaggug

SEQ ID NO: 245439 - RNA, 32 nt, Homo Sapiens
aucauacagccaguuaaaagcagagcuggaac

SEQ ID NO: 245440 - RNA, 32 nt, Homo Sapiens
agauucaggaccagcuugggcugcgugcguuc

SEQ ID NO: 245441 - RNA, 32 nt, Homo Sapiens
ugugggaggcugagacacgaggaucacuugaa

SEQ ID NO: 245442 - RNA, 32 nt, Homo Sapiens
cuuuuuaaaaauuguaaaguaaaugaaagcua

SEQ ID NO: 245443 - RNA, 32 nt, Homo Sapiens
cucugcccagcugcugccccgucugggaagug

SEQ ID NO: 245444 - RNA, 32 nt, Homo Sapiens
cuggagccuggccagcccucaccucuucugga

SEQ ID NO: 245445 - RNA, 32 nt, Homo Sapiens
ucaccccaagccccagcccgcgaggccucccc

SEQ ID NO: 245446 - RNA, 32 nt, Homo Sapiens
ucaacagacacuuuacagaagagauauccagg

SEQ ID NO: 245447 - RNA, 32 nt, Homo Sapiens
gcccacuccgcggagggcacgcggcgcgguag

SEQ ID NO: 245448 - RNA, 32 nt, Homo Sapiens
uccuccaaucccauuuuaucccauggaaccac

SEQ ID NO: 245449 - RNA, 32 nt, Homo Sapiens
accagcaaaauggagaagaucagagaaugcag

SEQ ID NO: 245450 - RNA, 32 nt, Homo Sapiens
ugacaccccuccccaccaccucucauaagcac

SEQ ID NO: 245451 - RNA, 32 nt, Homo Sapiens
cccugucggcgcggaacccuggccucguccgc

SEQ ID NO: 245452 - RNA, 32 nt, Homo Sapiens
guucuaaugauaaaguuuugagucaaaauaga

SEQ ID NO: 245453 - RNA, 31 nt, Homo Sapiens
cuaaaacaagaggcuugacucuggucugggc

SEQ ID NO: 245454 - RNA, 32 nt, Homo Sapiens
ccauccugcuccagugggacagcccagagccu

SEQ ID NO: 245455 - RNA, 32 nt, Homo Sapiens
uaaucaacaucaacaaaggacauccacacaga

SEQ ID NO: 245456 - RNA, 32 nt, Homo Sapiens
uuuuucauuaucguuuuuuuuauuuuugugaa

SEQ ID NO: 245457 - RNA, 32 nt, Homo Sapiens
aaaaguaaauguuucuugaauugauuuuguuc

SEQ ID NO: 245458 - RNA, 32 nt, Homo Sapiens
aagagagggcacagcccuccucccaagggaaa

SEQ ID NO: 245459 - RNA, 32 nt, Homo Sapiens
ucacucugccccccuuuuacugaugaggagag

SEQ ID NO: 245460 - RNA, 32 nt, Homo Sapiens
auccccuuugcuguccucccccgguaccaagg

SEQ ID NO: 245461 - RNA, 32 nt, Homo Sapiens
agcccagaacagaggaagccagagccccugcc

SEQ ID NO: 245462 - RNA, 32 nt, Homo Sapiens
guagggacggacuaguucgggcccuggggucu

SEQ ID NO: 245463 - RNA, 32 nt, Homo Sapiens
cugaggcccagcccccuucgcccguuuccauc

SEQ ID NO: 245464 - RNA, 32 nt, Homo Sapiens
ucuuccauccauugggccuuugaaaggacuaa

SEQ ID NO: 245465 - RNA, 32 nt, Homo Sapiens
guccugaaguuuuauguuaugaaacagaagaa

SEQ ID NO: 245466 - RNA, 32 nt, Homo Sapiens
uggaucuucccuccccagcugggaucugcucc

SEQ ID NO: 245467 - RNA, 32 nt, Homo Sapiens
gaccccgcguuccuccucccugccggucccca

SEQ ID NO: 245468 - RNA, 32 nt, Homo Sapiens
guggcuucagcaucacugugggcuggguuguc

SEQ ID NO: 245469 - RNA, 32 nt, Homo Sapiens
aggugucugguuuggguccagagugcucauca

SEQ ID NO: 245470 - RNA, 32 nt, Homo Sapiens
caccaucugcccggucacucagcgagaaacuc

SEQ ID NO: 245471 - RNA, 32 nt, Homo Sapiens
uccuuugaaaauaccuguguacugaggguuau

SEQ ID NO: 245472 - RNA, 32 nt, Homo Sapiens
uauuacauguuuuauuauccuguccccagagg

SEQ ID NO: 245473 - RNA, 32 nt, Homo Sapiens
guuaaauagcuggaguuuuucuuauucagguu

SEQ ID NO: 245474 - RNA, 30 nt, Homo Sapiens
gggauucuggacuggcucccuccccuccug

SEQ ID NO: 245475 - RNA, 30 nt, Homo Sapiens
gcaggugggagcuaaggggaaaccgaggcu

SEQ ID NO: 245476 - RNA, 32 nt, Homo Sapiens
ugcccaauacgguagcuacgcggcaaugaaau

SEQ ID NO: 245477 - RNA, 32 nt, Homo Sapiens
aacagucuuuggauacuaaauaaacuuucccu

SEQ ID NO: 245478 - RNA, 32 nt, Homo Sapiens
gagaaugcuacuagugugcaucuugcaaauaa

SEQ ID NO: 245479 - RNA, 32 nt, Homo Sapiens
ccuuuaaggcccagcugcgccugugccuuggg

SEQ ID NO: 245480 - RNA, 32 nt, Homo Sapiens
guguucagcuccgggccucuuuuuucaggaau

SEQ ID NO: 245481 - RNA, 32 nt, Homo Sapiens
ugaguccccuggacaucugccacagugcccag

SEQ ID NO: 245482 - RNA, 32 nt, Homo Sapiens
aacacugaagagcaaaaggggcugggacacuc

SEQ ID NO: 245483 - RNA, 32 nt, Homo Sapiens
agggucuccgaaaugcugucuuucuugcuccc

SEQ ID NO: 245484 - RNA, 32 nt, Homo Sapiens
auggugagcauuucuuuuuguuacauaagaga

SEQ ID NO: 245485 - RNA, 32 nt, Homo Sapiens
ccaugaucaaaguagcccuuuauguaguuaaa

SEQ ID NO: 245486 - RNA, 32 nt, Homo Sapiens
gacagagauggggaggggcagaggaauuuaag

SEQ ID NO: 245487 - RNA, 32 nt, Homo Sapiens
uuuuguugaacaaauuugauuuccggagucag

SEQ ID NO: 245488 - RNA, 32 nt, Homo Sapiens
cuguaccccacuuuuccuccugugagcagucu

SEQ ID NO: 245489 - RNA, 32 nt, Homo Sapiens
ggacaccaccucagcccacugaguaggaguca

SEQ ID NO: 245490 - RNA, 32 nt, Homo Sapiens
acccauaaauguucccuuggggguguugagcc

SEQ ID NO: 245491 - RNA, 32 nt, Homo Sapiens
ccuggugagcccucaccuccagguccaguagc

SEQ ID NO: 245492 - RNA, 32 nt, Homo Sapiens
ggaaaaaaggggcagcaggggguguguuugug

SEQ ID NO: 245493 - RNA, 32 nt, Homo Sapiens
gugcuggacgugucgcugcugcugcugcugcu

SEQ ID NO: 245494 - RNA, 32 nt, Homo Sapiens
uccagcaucuucuuccccuucccuggcccugc

SEQ ID NO: 245495 - RNA, 32 nt, Homo Sapiens
accuuauguaauuuuccaaauguaaaagucac

SEQ ID NO: 245496 - RNA, 32 nt, Homo Sapiens
gaaccaugcucccacauuauagauaaagcugc

SEQ ID NO: 245497 - RNA, 32 nt, Homo Sapiens
auuuuuuuuugguauuugauaauuaagauuag

SEQ ID NO: 245498 - RNA, 32 nt, Homo Sapiens
agagcaccaaaauuagacacugcuaacauaca

SEQ ID NO: 245499 - RNA, 32 nt, Homo Sapiens
ccuucucaguuaugugucuguagggcugggac

SEQ ID NO: 245500 - RNA, 32 nt, Homo Sapiens
augaauuugcugucauguuuuguggaaugagg

SEQ ID NO: 245501 - RNA, 32 nt, Homo Sapiens
ccuuuuuaaaaauaauaauaaauguaaggggg

SEQ ID NO: 245502 - RNA, 32 nt, Homo Sapiens
caagagugguggcagcucaaaaugauauguuu

SEQ ID NO: 245503 - RNA, 32 nt, Homo Sapiens
ggccgaggaggaaguggcggcggcggcggcgg

SEQ ID NO: 245504 - RNA, 32 nt, Homo Sapiens
ccuguugauaacuccauuacccgcccaucacu

SEQ ID NO: 245505 - RNA, 32 nt, Homo Sapiens
cgcacccccuccccacggccccacccacaggg

SEQ ID NO: 245506 - RNA, 32 nt, Homo Sapiens
uagggaacucugcaugaggccaucggugcagg

SEQ ID NO: 245507 - RNA, 32 nt, Homo Sapiens
ugaaaaaucuucauguuaggauuaauuuucuu

SEQ ID NO: 245508 - RNA, 32 nt, Homo Sapiens
caagagauuccucuccuuuuacugugucuugu

SEQ ID NO: 245509 - RNA, 32 nt, Homo Sapiens
ggcuucuaauggcugcagcugcgcugggggcu

SEQ ID NO: 245510 - RNA, 32 nt, Homo Sapiens
caccagccccucaacacugccauccaccuggc

SEQ ID NO: 245511 - RNA, 32 nt, Homo Sapiens
cuggggaacguucucuuugguuauguuuguuu

SEQ ID NO: 245512 - RNA, 31 nt, Homo Sapiens
agaccuggggcggugugacgggcagcuucgc

SEQ ID NO: 245513 - RNA, 32 nt, Homo Sapiens
ugaauacugucaacuugacaguaacuuuguag

SEQ ID NO: 245514 - RNA, 32 nt, Homo Sapiens
uuuuguaucuucauuuuaugucauuuuccuuu

SEQ ID NO: 245515 - RNA, 32 nt, Homo Sapiens
uuguugguuuuuugauuuuagcauauuauuuc

SEQ ID NO: 245516 - RNA, 32 nt, Homo Sapiens
agcuuccucccucuaguuuuuucuuccuuguc

SEQ ID NO: 245517 - RNA, 32 nt, Homo Sapiens
uaacuuuuuuaguuuguguucuuuuaauaaac

SEQ ID NO: 245518 - RNA, 32 nt, Homo Sapiens
aacguggggcugcggccgcccauggugccccg

SEQ ID NO: 245519 - RNA, 32 nt, Homo Sapiens
guccugggccccgggcggcggucgccaggucu

SEQ ID NO: 245520 - RNA, 32 nt, Homo Sapiens
ccaccggaaauaccaugcacagaguccuuaaa

SEQ ID NO: 245521 - RNA, 32 nt, Homo Sapiens
ccagcugcggccugggcaccgcgggccaugug

SEQ ID NO: 245522 - RNA, 32 nt, Homo Sapiens
uuaaaacauuuuacuguaauucuguugugugu

SEQ ID NO: 245523 - RNA, 32 nt, Homo Sapiens
uuuucguuucuauacaacuucauuucauacac

SEQ ID NO: 245524 - RNA, 32 nt, Homo Sapiens
ggaggguucgcaccauccagcugcagcccucg

SEQ ID NO: 245525 - RNA, 32 nt, Homo Sapiens
cgcaaaaagcaucuuuugugaaagacagggag

SEQ ID NO: 245526 - RNA, 32 nt, Homo Sapiens
gccacugcacuccagccugggcgacagagcua

SEQ ID NO: 245527 - RNA, 32 nt, Homo Sapiens
ugcauuuuacuugccuagaaaauacacgguaa

SEQ ID NO: 245528 - RNA, 32 nt, Homo Sapiens
ccucgggaaaacagugggcagugaaguuagag

SEQ ID NO: 245529 - RNA, 32 nt, Homo Sapiens
ugggcugugcugaccuagccauuacaauucca

SEQ ID NO: 245530 - RNA, 32 nt, Homo Sapiens
gggauaguaaugcacaaaaugguggagcugaa

SEQ ID NO: 245531 - RNA, 32 nt, Homo Sapiens
guccucugcccccaaggucuacucccuccuca

SEQ ID NO: 245532 - RNA, 32 nt, Homo Sapiens
aaguacgaccucagccaguucauccaggucaa

SEQ ID NO: 245533 - RNA, 32 nt, Homo Sapiens
ucugcucauguuucaucauauuuguagcucug

SEQ ID NO: 245534 - RNA, 32 nt, Homo Sapiens
agcccagcagugccucugcucagcuaccuggg

SEQ ID NO: 245535 - RNA, 32 nt, Homo Sapiens
aauucaaaaauauauauggaacugaaacauua

SEQ ID NO: 245536 - RNA, 32 nt, Homo Sapiens
cuuguuuuuguuucuuuuucuuucuuguuucc

SEQ ID NO: 245537 - RNA, 32 nt, Homo Sapiens
ucugugcggggcgugggaaaaagggagaaagc

SEQ ID NO: 245538 - RNA, 32 nt, Homo Sapiens
ugucucccugccaguuacccaggcuucacucu

SEQ ID NO: 245539 - RNA, 32 nt, Homo Sapiens
ccccaugauucaauuacccccaucccacaaca

SEQ ID NO: 245540 - RNA, 32 nt, Homo Sapiens
gccucccuuuguuuccucaguccuuauaccca

SEQ ID NO: 245541 - RNA, 32 nt, Homo Sapiens
gugguaaaaugaaucuuaaggagugugguaaa

SEQ ID NO: 245542 - RNA, 32 nt, Homo Sapiens
guaacuggaccugguauuggugcggagugggg

SEQ ID NO: 245543 - RNA, 32 nt, Homo Sapiens
cuuggccguggccugauugucugggagacggg

SEQ ID NO: 245544 - RNA, 32 nt, Homo Sapiens
cucucuucugaauugcagaaaucagauaaaaa

SEQ ID NO: 245545 - RNA, 32 nt, Homo Sapiens
uucugugcccuaaagaauuccgacucagaucc

SEQ ID NO: 245546 - RNA, 32 nt, Homo Sapiens
gaaagacccaccuuuauuuuugcccucacccc

SEQ ID NO: 245547 - RNA, 32 nt, Homo Sapiens
cuggcccugggcuuguguggcuccugaggauu

SEQ ID NO: 245548 - RNA, 32 nt, Homo Sapiens
ugacugaggaagaccacgggguuuucucucuu

SEQ ID NO: 245549 - RNA, 32 nt, Homo Sapiens
uuuaauuuuuaaaaauuacauucuucugaugu

SEQ ID NO: 245550 - RNA, 32 nt, Homo Sapiens
agugcggcaguaccgccuccuucccagccgcg

SEQ ID NO: 245551 - RNA, 32 nt, Homo Sapiens
uuaacaaaacaguucuugggauugaaugacuc

SEQ ID NO: 245552 - RNA, 32 nt, Homo Sapiens
uugguacauccuaugcaauauaucuaaauuga

SEQ ID NO: 245553 - RNA, 32 nt, Homo Sapiens
guuuguacaaauacuggggucaucgggaaagg

SEQ ID NO: 245554 - RNA, 32 nt, Homo Sapiens
aguucacacgucgacugaauuuuucaguacac

SEQ ID NO: 245555 - RNA, 32 nt, Homo Sapiens
gguugggugggaaggaaggcuggggguuuugu

SEQ ID NO: 245556 - RNA, 28 nt, Homo Sapiens
cuaauaaaacaaaaauagacaacuguuc

SEQ ID NO: 245557 - RNA, 28 nt, Homo Sapiens
gcugugaaagauuacaaauuugaacaug

SEQ ID NO: 245558 - RNA, 32 nt, Homo Sapiens
agcauuuguaaauacucuagguaucuguaaac

SEQ ID NO: 245559 - RNA, 32 nt, Homo Sapiens
cuaauuuguuuaucuuuuguguauaaauccca

SEQ ID NO: 245560 - RNA, 32 nt, Homo Sapiens
ccugaagcccagccuucuucaucccaggacac

SEQ ID NO: 245561 - RNA, 32 nt, Homo Sapiens
gggcuccgggaacacagcgcggaggggacgcu

SEQ ID NO: 245562 - RNA, 29 nt, Homo Sapiens
uuacauccgggacagaggcggcguccccu

SEQ ID NO: 245563 - RNA, 29 nt, Homo Sapiens
cugaggcggaagauucgcuugagcccagg

SEQ ID NO: 245564 - RNA, 32 nt, Homo Sapiens
uguggagaaaaguaaacuuauaagcagaacuu

SEQ ID NO: 245565 - RNA, 32 nt, Homo Sapiens
cccccagaauacugguaggggccaaggccaug

SEQ ID NO: 245566 - RNA, 32 nt, Homo Sapiens
aaaauaccaaaauuagcugggugugguggugc

SEQ ID NO: 245567 - RNA, 32 nt, Homo Sapiens
guaguuuuuaaagauuuuaggauuaaucuuag

SEQ ID NO: 245568 - RNA, 32 nt, Homo Sapiens
caugccuuaauacauagcaugccacuaaaacc

SEQ ID NO: 245569 - RNA, 32 nt, Homo Sapiens
aauagagagguaccuuaaacauuuuuuguucu

SEQ ID NO: 245570 - RNA, 32 nt, Homo Sapiens
agugguauuuuccagcacuuuguaugauuuug

SEQ ID NO: 245571 - RNA, 32 nt, Homo Sapiens
gaggcucgcacgccuccagcccggccccggcc

SEQ ID NO: 245572 - RNA, 32 nt, Homo Sapiens
uuuaaacaaccacagucauguuuaugguuguu

SEQ ID NO: 245573 - RNA, 32 nt, Homo Sapiens
uauauuguguauauauuuacagcuguauugua

SEQ ID NO: 245574 - RNA, 32 nt, Homo Sapiens
agcccccagcuggccccugacuccauguggcc

SEQ ID NO: 245575 - RNA, 32 nt, Homo Sapiens
cuagcggggaggugggcggcgagggucccggc

SEQ ID NO: 245576 - RNA, 32 nt, Homo Sapiens
gagucagcaaaucuuaaucuguuuaguuuacu

SEQ ID NO: 245577 - RNA, 32 nt, Homo Sapiens
acuuccuguagugagcacuuuguaugaaucgu

SEQ ID NO: 245578 - RNA, 32 nt, Homo Sapiens
agagaugaucaaucaucauauuaaaucauaau

SEQ ID NO: 245579 - RNA, 32 nt, Homo Sapiens
cacgccgacaccugggaucuugagauacccag

SEQ ID NO: 245580 - RNA, 32 nt, Homo Sapiens
cuguuucuuuuggcuugguuuggaccacaguc

SEQ ID NO: 245581 - RNA, 32 nt, Homo Sapiens
cgguucuccagcucacccccagccugccgaug

SEQ ID NO: 245582 - RNA, 32 nt, Homo Sapiens
ggcgugugcauuggcucuucaagcugccugug

SEQ ID NO: 245583 - RNA, 32 nt, Homo Sapiens
ggucuuucaagccacacccccaccugcggaug

SEQ ID NO: 245584 - RNA, 32 nt, Homo Sapiens
agccgcuguggcagcguaugcugccacgggga

SEQ ID NO: 245585 - RNA, 32 nt, Homo Sapiens
ccuuuuaggagucagaguugggagaaggagac

SEQ ID NO: 245586 - RNA, 31 nt, Homo Sapiens
cgccucagacgccgccugcccugcagccaug

SEQ ID NO: 245587 - RNA, 32 nt, Homo Sapiens
cucgcguagccauggcggagccaucggcggcc

SEQ ID NO: 245588 - RNA, 32 nt, Homo Sapiens
cauugcacccauauggcugggcaggcacaggc

SEQ ID NO: 245589 - RNA, 32 nt, Homo Sapiens
gggcggaagugggaaacgagugcugcacacag

SEQ ID NO: 245590 - RNA, 32 nt, Homo Sapiens
uuagcugggcagccuuggguucuccagaagag

SEQ ID NO: 245591 - RNA, 32 nt, Homo Sapiens
cggauugggugucaaggucuccuccgggcugg

SEQ ID NO: 245592 - RNA, 32 nt, Homo Sapiens
ucucugaagcuccuuuccccuugcucuugguc

SEQ ID NO: 245593 - RNA, 32 nt, Homo Sapiens
ugaugaugaugaugaugaagaugaugcuaagu

SEQ ID NO: 245594 - RNA, 32 nt, Homo Sapiens
ggagccucauuucccuuccccagacauuggca

SEQ ID NO: 245595 - RNA, 32 nt, Homo Sapiens
guggaguguacuuugcuucaauaaaucugugc

SEQ ID NO: 245596 - RNA, 32 nt, Homo Sapiens
cucccaagucugcauuuggagaggggaacagc

SEQ ID NO: 245597 - RNA, 32 nt, Homo Sapiens
cgcacagaagguggccuugauuucucaggcac

SEQ ID NO: 245598 - RNA, 32 nt, Homo Sapiens
uacacgguggggggcggggggaccuuuugcgg

SEQ ID NO: 245599 - RNA, 32 nt, Homo Sapiens
cagccgggcgcgcgccaccgcccacucgcccu

SEQ ID NO: 245600 - RNA, 32 nt, Homo Sapiens
caaacaguugcauauuuacuguaaaaguauuc

SEQ ID NO: 245601 - RNA, 32 nt, Homo Sapiens
ugagcacaggaguucaagaccagcgugggcaa

SEQ ID NO: 245602 - RNA, 32 nt, Homo Sapiens
auguauacugaaaaaugugcauuugucugagg

SEQ ID NO: 245603 - RNA, 32 nt, Homo Sapiens
acugccgccccuccccgauguggugcgcucaa

SEQ ID NO: 245604 - RNA, 32 nt, Homo Sapiens
cgcugaagggagcucgaggccuggaucuaggg

SEQ ID NO: 245605 - RNA, 32 nt, Homo Sapiens
ggaacgccuacgcaccaguaccucugaccuua

SEQ ID NO: 245606 - RNA, 32 nt, Homo Sapiens
aauugacacucucuccaaaaauccauuccauu

SEQ ID NO: 245607 - RNA, 32 nt, Homo Sapiens
caaagccaguguuaaggagagggaaaucagac

SEQ ID NO: 245608 - RNA, 32 nt, Homo Sapiens
ucccccacaagccucaagguagccucagguuu

SEQ ID NO: 245609 - RNA, 32 nt, Homo Sapiens
agcaauuguaagugguguagugcuuaauuuug

SEQ ID NO: 245610 - RNA, 32 nt, Homo Sapiens
ugucacugcuaagauuucccuggggcuucgga

SEQ ID NO: 245611 - RNA, 32 nt, Homo Sapiens
ggcuaaguucggguggcagcgccgggcgcaac

SEQ ID NO: 245612 - RNA, 32 nt, Homo Sapiens
aucgaaacaccguuggccgagccugggcggga

SEQ ID NO: 245613 - RNA, 32 nt, Homo Sapiens
acagaaaacaaaugcgaaaccacagcuuccuu

SEQ ID NO: 245614 - RNA, 32 nt, Homo Sapiens
ggaaagcaugucugcugggugugaccauguuu

SEQ ID NO: 245615 - RNA, 32 nt, Homo Sapiens
aaugaaagcacagauagccuaagacugcacag

SEQ ID NO: 245616 - RNA, 32 nt, Homo Sapiens
cugaccagugauuuacaaauauuucauauucc

SEQ ID NO: 245617 - RNA, 32 nt, Homo Sapiens
agaauucccuguaucaucuggaucucaacauc

SEQ ID NO: 245618 - RNA, 32 nt, Homo Sapiens
ggaaaaacagucgguguagacagcagcggcag

SEQ ID NO: 245619 - RNA, 32 nt, Homo Sapiens
ucuacacacggaaacagaguugugagucccau

SEQ ID NO: 245620 - RNA, 32 nt, Homo Sapiens
gguugccauggagaccaggagcuccaaaacgc

SEQ ID NO: 245621 - RNA, 32 nt, Homo Sapiens
aggagcugaccgugccagagcuuguuuguacc

SEQ ID NO: 245622 - RNA, 32 nt, Homo Sapiens
cgcacaggccccagucauggcccugcccugag

SEQ ID NO: 245623 - RNA, 32 nt, Homo Sapiens
uuuuguauaaaaaggaaauuagucuuuuucuu

SEQ ID NO: 245624 - RNA, 32 nt, Homo Sapiens
acaaggucaugcugaaauuuuauuuugcucuu

SEQ ID NO: 245625 - RNA, 32 nt, Homo Sapiens
cgcaggacgcccgccgugcccgggccaugaag

SEQ ID NO: 245626 - RNA, 32 nt, Homo Sapiens
ccaggguccccccgccccacccgcccccgcca

SEQ ID NO: 245627 - RNA, 32 nt, Homo Sapiens
gacccuugcugcggagcgacggagagagacug

SEQ ID NO: 245628 - RNA, 32 nt, Homo Sapiens
cuguguugcacaaucaaagagaauuuagcaug

SEQ ID NO: 245629 - RNA, 32 nt, Homo Sapiens
uuggguagcugaugucauaauucggggacaau

SEQ ID NO: 245630 - RNA, 32 nt, Homo Sapiens
aaacgcccgcggcaccaaagccccucagagcg

SEQ ID NO: 245631 - RNA, 32 nt, Homo Sapiens
gagacgugcgguuccgggucgcugcucggcuc

SEQ ID NO: 245632 - RNA, 32 nt, Homo Sapiens
aagaaagcgcaggacuccugggccuaagaacu

SEQ ID NO: 245633 - RNA, 32 nt, Homo Sapiens
ugugggcuggagaggagaaggaaagggucugc

SEQ ID NO: 245634 - RNA, 32 nt, Homo Sapiens
acacccccaucccauguuccccccaguucuuc

SEQ ID NO: 245635 - RNA, 32 nt, Homo Sapiens
ggauucggacgcggcgcuccccgggcucgucu

SEQ ID NO: 245636 - RNA, 32 nt, Homo Sapiens
cauccuggcgaacauggugagacccaucucua

SEQ ID NO: 245637 - RNA, 32 nt, Homo Sapiens
gaggauaacugggagcaggaaaagaaaauccg

SEQ ID NO: 245638 - RNA, 32 nt, Homo Sapiens
ccccaacccagcugacaauguggagcccccag

SEQ ID NO: 245639 - RNA, 32 nt, Homo Sapiens
cgccucggccgcccugccccagccucguacac

SEQ ID NO: 245640 - RNA, 32 nt, Homo Sapiens
ugaaacauacccaucauauuuccuauuauaau

SEQ ID NO: 245641 - RNA, 32 nt, Homo Sapiens
gggaccgaguggaaccccagagcgugucccug

SEQ ID NO: 245642 - RNA, 32 nt, Homo Sapiens
uaccaaaauaaaaugaaaaauugaguuuuucc

SEQ ID NO: 245643 - RNA, 32 nt, Homo Sapiens
uguaaauaccaaucaagauacauugaaauaag

SEQ ID NO: 245644 - RNA, 32 nt, Homo Sapiens
uccaaagacaacauggccaaggagagagcauc

SEQ ID NO: 245645 - RNA, 32 nt, Homo Sapiens
uugaggcuggagaggagagguuuugagcaacu

SEQ ID NO: 245646 - RNA, 32 nt, Homo Sapiens
gggccccugccugccuucuccccuccacgcaa

SEQ ID NO: 245647 - RNA, 32 nt, Homo Sapiens
auguuggacaccuuuagguucuuugcugcauu

SEQ ID NO: 245648 - RNA, 31 nt, Homo Sapiens
ugccccgggauuccccagccccgcgcggcuc

SEQ ID NO: 245649 - RNA, 32 nt, Homo Sapiens
ucagggccagcuuugauaauggagcgagaugc

SEQ ID NO: 245650 - RNA, 30 nt, Homo Sapiens
gcccagcauaggcgcgcugauccugaaagc

SEQ ID NO: 245651 - RNA, 32 nt, Homo Sapiens
gcaaaggcugugaauuugaauucuuuguuggu

SEQ ID NO: 245652 - RNA, 32 nt, Homo Sapiens
gaaaaaaugcaaacguuggaguuugggcugga

SEQ ID NO: 245653 - RNA, 32 nt, Homo Sapiens
caguacuuugccauccuugcacuuucuguuau

SEQ ID NO: 245654 - RNA, 32 nt, Homo Sapiens
ugaaucaucaugcacugaccgaaaugccaccu

SEQ ID NO: 245655 - RNA, 32 nt, Homo Sapiens
ccuucaccuacgagcagcugguggccuuggag

SEQ ID NO: 245656 - RNA, 32 nt, Homo Sapiens
ucuguggagaagcggcuuggucgggggugguc

SEQ ID NO: 245657 - RNA, 32 nt, Homo Sapiens
auuagccaagugcaguggcaugugcuuguaau

SEQ ID NO: 245658 - RNA, 32 nt, Homo Sapiens
gucggggguggugggagaaggaggaggcggcg

SEQ ID NO: 245659 - RNA, 32 nt, Homo Sapiens
augccaaauguuaaaaugugaguuuaccagcc

SEQ ID NO: 245660 - RNA, 32 nt, Homo Sapiens
ggucacucaauccuuuguuuccaguuucacau

SEQ ID NO: 245661 - RNA, 32 nt, Homo Sapiens
gccgaggacaucccaaaccccucugugcucau

SEQ ID NO: 245662 - RNA, 32 nt, Homo Sapiens
uuuucuggaugaucagaaaaauaauuccauaa

SEQ ID NO: 245663 - RNA, 32 nt, Homo Sapiens
cuguggagacgggacagcccugucccacucac

SEQ ID NO: 245664 - RNA, 32 nt, Homo Sapiens
auaccugcagagccagugugacugcugcagcu

SEQ ID NO: 245665 - RNA, 32 nt, Homo Sapiens
ggagccagcuggaagggaaggagaggggccag

SEQ ID NO: 245666 - RNA, 32 nt, Homo Sapiens
uuacuccuggacuuaaauggugugaccaggau

SEQ ID NO: 245667 - RNA, 32 nt, Homo Sapiens
gggcugugacucccgcuuucucagaagggaug

SEQ ID NO: 245668 - RNA, 32 nt, Homo Sapiens
agccacaacaucuauuuuaccaauauuguuuc

SEQ ID NO: 245669 - RNA, 32 nt, Homo Sapiens
uguuacuguaaauaccuuguaccuguucaugg

SEQ ID NO: 245670 - RNA, 32 nt, Homo Sapiens
uggccuuauuuuugcuauguuaagguuguguu

SEQ ID NO: 245671 - RNA, 32 nt, Homo Sapiens
cucucucaugauagaaggcuauggggauagau

SEQ ID NO: 245672 - RNA, 32 nt, Homo Sapiens
cuggucugccuuguggguccuggacggagccc

SEQ ID NO: 245673 - RNA, 32 nt, Homo Sapiens
cuguaaugccagcacuuugggaggccaaggug

SEQ ID NO: 245674 - RNA, 32 nt, Homo Sapiens
gugugggacccuuuccuuggggccugggggga

SEQ ID NO: 245675 - RNA, 32 nt, Homo Sapiens
gcaaccuccgccuccuggguucgggcgauucu

SEQ ID NO: 245676 - RNA, 32 nt, Homo Sapiens
gccacguuuguuuggauuuaaucuuacagcug

SEQ ID NO: 245677 - RNA, 32 nt, Homo Sapiens
guugguuguuuuauuuuuuuuccuccaaaauu

SEQ ID NO: 245678 - RNA, 32 nt, Homo Sapiens
guaugucgcaguaaacaaaaccaaaccucaaa

SEQ ID NO: 245679 - RNA, 32 nt, Homo Sapiens
cuaggaccggcgggcuggguguucacgugugu

SEQ ID NO: 245680 - RNA, 32 nt, Homo Sapiens
ucugaggaccccaagagcagugauucagagaa

SEQ ID NO: 245681 - RNA, 32 nt, Homo Sapiens
ucacacuuucugccuuuuuucuuucuuaacgu

SEQ ID NO: 245682 - RNA, 32 nt, Homo Sapiens
ugaggcugccuugcacaggcccuucccagggc

SEQ ID NO: 245683 - RNA, 32 nt, Homo Sapiens
uacuaauguauucaucauuuaacaugaauagu

SEQ ID NO: 245684 - RNA, 32 nt, Homo Sapiens
agggggcauggaguaauuuguauuuaaaaaac

SEQ ID NO: 245685 - RNA, 32 nt, Homo Sapiens
ucauuuggauaaguugugauuugacgacugau

SEQ ID NO: 245686 - RNA, 32 nt, Homo Sapiens
ccaggacagaauagccacuugcuuaauuuucu

SEQ ID NO: 245687 - RNA, 30 nt, Homo Sapiens
cuucuuguuaaccuagacaagaguagauua

SEQ ID NO: 245688 - RNA, 32 nt, Homo Sapiens
gcucuuuuaauauauaaugauggcuuuaaaua

SEQ ID NO: 245689 - RNA, 32 nt, Homo Sapiens
gaaaugucaucaaauauuaccaaaaaaguauu

SEQ ID NO: 245690 - RNA, 32 nt, Homo Sapiens
uccccauacucuaauucauauuuuguuugacu

SEQ ID NO: 245691 - RNA, 32 nt, Homo Sapiens
agcccuggaugucuagcuaucuccaggacagu

SEQ ID NO: 245692 - RNA, 32 nt, Homo Sapiens
aaaguuucauuuccugauucaagaauugcagc

SEQ ID NO: 245693 - RNA, 32 nt, Homo Sapiens
aaauggcuugucccgcucucggucuggaagcu

SEQ ID NO: 245694 - RNA, 32 nt, Homo Sapiens
ccugugacuccagcgaccccugcuggccagag

SEQ ID NO: 245695 - RNA, 32 nt, Homo Sapiens
acccaggaggcagagguugcagugcgcugaga

SEQ ID NO: 245696 - RNA, 32 nt, Homo Sapiens
acagcuuccacaacuucucuguuuucugucag

SEQ ID NO: 245697 - RNA, 32 nt, Homo Sapiens
gucagcugggcgccaccaggcgcggacuucgg

SEQ ID NO: 245698 - RNA, 32 nt, Homo Sapiens
gggacgcuagggccuuccuuccaccggcguga

SEQ ID NO: 245699 - RNA, 32 nt, Homo Sapiens
aaggauggcaaugccaguggaaccaugcugcu

SEQ ID NO: 245700 - RNA, 32 nt, Homo Sapiens
acccccggguaccaccuaacccuccagguguu

SEQ ID NO: 245701 - RNA, 32 nt, Homo Sapiens
ugauggaaggaucuuaaccagucgaguggagu

SEQ ID NO: 245702 - RNA, 32 nt, Homo Sapiens
ccccuaauauucuuuaucagacccucagacaa

SEQ ID NO: 245703 - RNA, 32 nt, Homo Sapiens
cauggcucaucuggggaccauuuuggauucau

SEQ ID NO: 245704 - RNA, 30 nt, Homo Sapiens
gcggggggaggugggugugaagaacgugcu

SEQ ID NO: 245705 - RNA, 32 nt, Homo Sapiens
ucuuccaguccugcagcacgggcccccagcua

SEQ ID NO: 245706 - RNA, 32 nt, Homo Sapiens
ugauggagaaggaaaaggcuggcaaggugggu

SEQ ID NO: 245707 - RNA, 32 nt, Homo Sapiens
gaaugguguggccuugagcugguccaggagcc

SEQ ID NO: 245708 - RNA, 32 nt, Homo Sapiens
aacauugggcgguuuucuuaauuugaaguaua

SEQ ID NO: 245709 - RNA, 32 nt, Homo Sapiens
cucgcccgcgcgcugcagccccaucuccuagc

SEQ ID NO: 245710 - RNA, 30 nt, Homo Sapiens
gucugcaccggcagcaccaugucgcucaug

SEQ ID NO: 245711 - RNA, 32 nt, Homo Sapiens
agugccuuuuugcuggacacuguguccuuaug

SEQ ID NO: 245712 - RNA, 32 nt, Homo Sapiens
gacaccuccgcgggcacucacccaggccggcc

SEQ ID NO: 245713 - RNA, 32 nt, Homo Sapiens
aaagaaaagugaacacguuuguagaacuuuca

SEQ ID NO: 245714 - RNA, 32 nt, Homo Sapiens
aagugcagugccuacgugggcgugccaguggc

SEQ ID NO: 245715 - RNA, 32 nt, Homo Sapiens
cuccccaaaacaaguaaacuugugaaaguuua

SEQ ID NO: 245716 - RNA, 32 nt, Homo Sapiens
cugggguggugggcugggcaccccccugcggc

SEQ ID NO: 245717 - RNA, 32 nt, Homo Sapiens
uguucugcuauuguuugaucuaaucuuaauca

SEQ ID NO: 245718 - RNA, 32 nt, Homo Sapiens
cagacaaaaaucacugaccuaaauggagcuug

SEQ ID NO: 245719 - RNA, 32 nt, Homo Sapiens
ccaguuaguauaccucuuuguuguacuuucuu

SEQ ID NO: 245720 - RNA, 29 nt, Homo Sapiens
gaacaugggcggugcugugagugcuggug

SEQ ID NO: 245721 - RNA, 32 nt, Homo Sapiens
ucagguugacucuguacaucugaauagugagu

SEQ ID NO: 245722 - RNA, 32 nt, Homo Sapiens
ccugcgcgcccugcgcucgccauggcgguuug

SEQ ID NO: 245723 - RNA, 32 nt, Homo Sapiens
gccuucauuuucugccugaggucucaguccgu

SEQ ID NO: 245724 - RNA, 32 nt, Homo Sapiens
ugcugucaccaauuuuuuauaauagcagagug

SEQ ID NO: 245725 - RNA, 32 nt, Homo Sapiens
gcugaauuuaaauuauuuacauauuaauucau

SEQ ID NO: 245726 - RNA, 32 nt, Homo Sapiens
acgacagaaggggucaugaugaaauagagaac

SEQ ID NO: 245727 - RNA, 32 nt, Homo Sapiens
ccacuccuuccucauuuugcugcugauucuag

SEQ ID NO: 245728 - RNA, 32 nt, Homo Sapiens
ugggaagauuauagagcauaauaauuuuguaa

SEQ ID NO: 245729 - RNA, 32 nt, Homo Sapiens
uuuguucagaauuuaacauccauuccaauguu

SEQ ID NO: 245730 - RNA, 32 nt, Homo Sapiens
gucuuugugaaugaauacgaaugauacagauu

SEQ ID NO: 245731 - RNA, 32 nt, Homo Sapiens
agguccccaggggggccgggcuggggcugcgu

SEQ ID NO: 245732 - RNA, 32 nt, Homo Sapiens
aauaaauuacaauuguucucuauuaguaaaaa

SEQ ID NO: 245733 - RNA, 32 nt, Homo Sapiens
guuguugcaguuccccuuugcauuguauugcu

SEQ ID NO: 245734 - RNA, 32 nt, Homo Sapiens
gccaaaauacuucuucauuccuuuaaaaacua

SEQ ID NO: 245735 - RNA, 32 nt, Homo Sapiens
agagcgcccuccccacgccagucgaccccaca

SEQ ID NO: 245736 - RNA, 32 nt, Homo Sapiens
cuaaauauauauguauccuguuuuuuggauaa

SEQ ID NO: 245737 - RNA, 32 nt, Homo Sapiens
ugacauaaugaaaaguaaucacuugaagagaa

SEQ ID NO: 245738 - RNA, 32 nt, Homo Sapiens
aaaagguuauggaacuggagggggugagcuuu

SEQ ID NO: 245739 - RNA, 32 nt, Homo Sapiens
ccgggcuacagccggcgccgccgcccgcuagu

SEQ ID NO: 245740 - RNA, 32 nt, Homo Sapiens
uuguuucucuacagaauccuaauagaucaucu

SEQ ID NO: 245741 - RNA, 32 nt, Homo Sapiens
cuaccgcgagaggcaucccuggcgcugucucc

SEQ ID NO: 245742 - RNA, 32 nt, Homo Sapiens
ugugccuaaaauucagauagaugcacuguaau

SEQ ID NO: 245743 - RNA, 32 nt, Homo Sapiens
ugggacauaaggagcauccacugcacaaaccc

SEQ ID NO: 245744 - RNA, 32 nt, Homo Sapiens
agccaagacauuauccaccaaauugcuuugug

SEQ ID NO: 245745 - RNA, 32 nt, Homo Sapiens
cugcugccgggagaugcggcggcggccgcgcg

SEQ ID NO: 245746 - RNA, 32 nt, Homo Sapiens
cuucuggcugguuuuuccaucuucucugucuu

SEQ ID NO: 245747 - RNA, 28 nt, Homo Sapiens
aauuuguugucuauuacaguuugcuccg

SEQ ID NO: 245748 - RNA, 32 nt, Homo Sapiens
cgggucgucgcagcugcgggugaacgcggcgu

SEQ ID NO: 245749 - RNA, 32 nt, Homo Sapiens
cgugcagggaggaaccugggggaggggguggc

SEQ ID NO: 245750 - RNA, 32 nt, Homo Sapiens
ggaaacagcccugucucaacuaauggaaauau

SEQ ID NO: 245751 - RNA, 32 nt, Homo Sapiens
gagaggagggucauggaggauguuggggcucu

SEQ ID NO: 245752 - RNA, 32 nt, Homo Sapiens
gaguccacgugggccuggugcacggggggcau

SEQ ID NO: 245753 - RNA, 32 nt, Homo Sapiens
gacucgcccuccccacccgggccucggacuuu

SEQ ID NO: 245754 - RNA, 32 nt, Homo Sapiens
uauuuucaguuauuauauuuacaaaugggaaa

SEQ ID NO: 245755 - RNA, 32 nt, Homo Sapiens
auaauuaaaugaaugaacugugacagaagcaa

SEQ ID NO: 245756 - RNA, 32 nt, Homo Sapiens
cagcacuuugggaggcugagggggguggauca

SEQ ID NO: 245757 - RNA, 32 nt, Homo Sapiens
cccuuaccaaaccacagagaauccaaaccaau

SEQ ID NO: 245758 - RNA, 32 nt, Homo Sapiens
cauggaaggacgguucugggaaaauaaugaaa

SEQ ID NO: 245759 - RNA, 32 nt, Homo Sapiens
ucuagggucacagauggugcuauuaauugaac

SEQ ID NO: 245760 - RNA, 32 nt, Homo Sapiens
gccacuuccagaaaaaucuuccaguuuacgcu

SEQ ID NO: 245761 - RNA, 32 nt, Homo Sapiens
ucaaccacauucaauaaggaauugugggguuc

SEQ ID NO: 245762 - RNA, 32 nt, Homo Sapiens
ggaggaguguauguagucauggccacacccag

SEQ ID NO: 245763 - RNA, 32 nt, Homo Sapiens
gacuauucaagagcuuuuggauaaggaggcag

SEQ ID NO: 245764 - RNA, 32 nt, Homo Sapiens
aauuuauauaaauuauuuuauaucauuuacuu

SEQ ID NO: 245765 - RNA, 32 nt, Homo Sapiens
agguagcagacacuucacuuccaaguaaaaga

SEQ ID NO: 245766 - RNA, 32 nt, Homo Sapiens
uguuagcaaaauuuauacuuugauaugaucac

SEQ ID NO: 245767 - RNA, 32 nt, Homo Sapiens
aggaugcuaaaauaaaagucucugaaguauuc

SEQ ID NO: 245768 - RNA, 32 nt, Homo Sapiens
uaucagucauauucuccguugagucauaauuu

SEQ ID NO: 245769 - RNA, 32 nt, Homo Sapiens
aagcggcugugugucgagguuauuuuaacuuu

SEQ ID NO: 245770 - RNA, 32 nt, Homo Sapiens
uuuccauuuuacauuuuuuucuugaaguuauu

SEQ ID NO: 245771 - RNA, 32 nt, Homo Sapiens
uagagguugcuuaagcaagcaauggauaauaa

SEQ ID NO: 245772 - RNA, 32 nt, Homo Sapiens
aaguugcagaacuugggcugguuuucuuucuu

SEQ ID NO: 245773 - RNA, 32 nt, Homo Sapiens
gacugcgaacgggcaggcgcgcgcggggcucg

SEQ ID NO: 245774 - RNA, 32 nt, Homo Sapiens
cagggucuggcgggcucucaggccaggggcac

SEQ ID NO: 245775 - RNA, 32 nt, Homo Sapiens
uuguuugaauuaacauuucagcauggaacuaa

SEQ ID NO: 245776 - RNA, 29 nt, Homo Sapiens
auauacauauguaucuuauaaucuuuucu

SEQ ID NO: 245777 - RNA, 32 nt, Homo Sapiens
cuaugagauauguuucugaucuuggaugacca

SEQ ID NO: 245778 - RNA, 32 nt, Homo Sapiens
cccaucauugguuaaggugguauucucuacau

SEQ ID NO: 245779 - RNA, 32 nt, Homo Sapiens
uguucaugauacugaauagacaguccauauaa

SEQ ID NO: 245780 - RNA, 32 nt, Homo Sapiens
caauguuuuuaaaacuuaguaaugagaaacug

SEQ ID NO: 245781 - RNA, 32 nt, Homo Sapiens
gccugcccauguuguugagaggucuuggugag

SEQ ID NO: 245782 - RNA, 32 nt, Homo Sapiens
aaauugucuaauguaauaaagucagacaaaau

SEQ ID NO: 245783 - RNA, 32 nt, Homo Sapiens
gaaccaguccaugcuguuuuuauuuuuuaucu

SEQ ID NO: 245784 - RNA, 32 nt, Homo Sapiens
uucugucccuggcuugaguccugggcuuaacu

SEQ ID NO: 245785 - RNA, 32 nt, Homo Sapiens
cagcucuaggaacuuaguacuuuggagcuuuu

SEQ ID NO: 245786 - RNA, 32 nt, Homo Sapiens
aaacaaaaauaaaaacaaaaccacacaaggag

SEQ ID NO: 245787 - RNA, 32 nt, Homo Sapiens
gguaguggguugcugggcugggcuugcugagg

SEQ ID NO: 245788 - RNA, 32 nt, Homo Sapiens
gcaucuuccccgggcgcugccuggacaggccu

SEQ ID NO: 245789 - RNA, 30 nt, Homo Sapiens
gccaaauacugugcugauaagcuugaaagc

SEQ ID NO: 245790 - RNA, 32 nt, Homo Sapiens
ccagcgugcugaagccggagcgagcuagccgc

SEQ ID NO: 245791 - RNA, 32 nt, Homo Sapiens
ucauauucucucccuuuccccucccaguuacc

SEQ ID NO: 245792 - RNA, 32 nt, Homo Sapiens
accaaaauuaaacaucaacaaacaagcaauau

SEQ ID NO: 245793 - RNA, 32 nt, Homo Sapiens
cguccgcagcccgagcgccccggagccgcagg

SEQ ID NO: 245794 - RNA, 32 nt, Homo Sapiens
aacaacaaaaauauaacuacaacuucccuugu

SEQ ID NO: 245795 - RNA, 32 nt, Homo Sapiens
uuuguauuauacuuuuuaaaucuugaacuuua

SEQ ID NO: 245796 - RNA, 32 nt, Homo Sapiens
auuuuuaaauauucuuuuuuuuuuccuauuuu

SEQ ID NO: 245797 - RNA, 32 nt, Homo Sapiens
uuucugggaaauguuaauaaauuuuuaauauu

SEQ ID NO: 245798 - RNA, 32 nt, Homo Sapiens
ugaacgcacauaaaaagggaccacugacgucc

SEQ ID NO: 245799 - RNA, 32 nt, Homo Sapiens
cuugcauccaaauuaaagcuuauuuucuuuac

SEQ ID NO: 245800 - RNA, 30 nt, Homo Sapiens
gggccaggcaggccaggcccgagauggcac

SEQ ID NO: 245801 - RNA, 28 nt, Homo Sapiens
aguccaauuaaaccucuuuuucuucccc

SEQ ID NO: 245802 - RNA, 32 nt, Homo Sapiens
ccauuuuuaagugauagcguuuaaagguguug

SEQ ID NO: 245803 - RNA, 32 nt, Homo Sapiens
ggagcuggagggcaucaucaugagucuggaga

SEQ ID NO: 245804 - RNA, 32 nt, Homo Sapiens
auggcucuguuguauauacuggugaugcaucu

SEQ ID NO: 245805 - RNA, 32 nt, Homo Sapiens
uccgcccugccaggcuuggggccgagcggccc

SEQ ID NO: 245806 - RNA, 32 nt, Homo Sapiens
cggagcacccccaccccuccccugccgggcca

SEQ ID NO: 245807 - RNA, 32 nt, Homo Sapiens
cuauuugguuccugcuccauggucgggccucu

SEQ ID NO: 245808 - RNA, 30 nt, Homo Sapiens
guccuggccaggcgcgguggcucaugccug

SEQ ID NO: 245809 - RNA, 32 nt, Homo Sapiens
agaaucuucuaaaaacaguuguaucuaaccgc

SEQ ID NO: 245810 - RNA, 32 nt, Homo Sapiens
ugguucucuauuauguaaacacuauuacaguc

SEQ ID NO: 245811 - RNA, 32 nt, Homo Sapiens
ccaaaauauuauaauuucaaccaguaauguuu

SEQ ID NO: 245812 - RNA, 32 nt, Homo Sapiens
acauagucagcuaaaagccgcacauguggaua

SEQ ID NO: 245813 - RNA, 32 nt, Homo Sapiens
aaugcauuuuaccugcuacuauuuauuaaaaa

SEQ ID NO: 245814 - RNA, 32 nt, Homo Sapiens
uaaaacugcucgccgcgaagccagucuucagc

SEQ ID NO: 245815 - RNA, 32 nt, Homo Sapiens
gaggugggcuccuggugacggguguccaagaa

SEQ ID NO: 245816 - RNA, 32 nt, Homo Sapiens
cugucgcauuucaaaacaaaccaugauggagu

SEQ ID NO: 245817 - RNA, 32 nt, Homo Sapiens
cccucucauagcauacccugacagauacucaa

SEQ ID NO: 245818 - RNA, 32 nt, Homo Sapiens
ggcugcaugcugucacauuguggaggcacgag

SEQ ID NO: 245819 - RNA, 32 nt, Homo Sapiens
gagaguguaaaaaaugcauuuuuaaauuaaug

SEQ ID NO: 245820 - RNA, 32 nt, Homo Sapiens
cccggcugcucccgaacaucugaucuaagaaa

SEQ ID NO: 245821 - RNA, 32 nt, Homo Sapiens
gagcugcuugacucaccggcuuccuauuugau

SEQ ID NO: 245822 - RNA, 32 nt, Homo Sapiens
cacacugggcugugagauagggauuccugcug

SEQ ID NO: 245823 - RNA, 32 nt, Homo Sapiens
ugccuuacuuaaaaguuuuuuaaacuacuaga

SEQ ID NO: 245824 - RNA, 32 nt, Homo Sapiens
cuauauuuuacagccagugauuguaguuucau

SEQ ID NO: 245825 - RNA, 32 nt, Homo Sapiens
agaucaagaugaugaagccagaguucaguaug

SEQ ID NO: 245826 - RNA, 32 nt, Homo Sapiens
gcagucaggauccagaagugcaagcagagaaa

SEQ ID NO: 245827 - RNA, 32 nt, Homo Sapiens
uuuugaaaugaaauuuuuauaauuguauggca

SEQ ID NO: 245828 - RNA, 32 nt, Homo Sapiens
aauguuacuguaauacuauuugccauuguaaa

SEQ ID NO: 245829 - RNA, 32 nt, Homo Sapiens
uaauauugugucaaacucuacuucagauuguc

SEQ ID NO: 245830 - RNA, 32 nt, Homo Sapiens
uccggcagcuggugggcguuguguguaguuag

SEQ ID NO: 245831 - RNA, 32 nt, Homo Sapiens
aucauuuaugggauuggugcugauugaaagaa

SEQ ID NO: 245832 - RNA, 32 nt, Homo Sapiens
acucagaaaaaauuaugugccagugaaagugu

SEQ ID NO: 245833 - RNA, 32 nt, Homo Sapiens
aucaacgugccuauggcgggaccacgcucgga

SEQ ID NO: 245834 - RNA, 32 nt, Homo Sapiens
cuacuaauuuaaacuaagacaguuuaaaaagg

SEQ ID NO: 245835 - RNA, 32 nt, Homo Sapiens
ucaggaaaugacuucaccuauuuuuuccauaa

SEQ ID NO: 245836 - RNA, 32 nt, Homo Sapiens
cuaugguuacacaauggcauaugaagucugga

SEQ ID NO: 245837 - RNA, 32 nt, Homo Sapiens
ccaaguauuuuuauauuucagaucauaucuac

SEQ ID NO: 245838 - RNA, 32 nt, Homo Sapiens
auuuuggguucagugagacgaagugcugcaga

SEQ ID NO: 245839 - RNA, 32 nt, Homo Sapiens
uccuucuccuagcuccgcgccccucccagccu

SEQ ID NO: 245840 - RNA, 32 nt, Homo Sapiens
aaaaaagucuugguugugaaaaacgauuugca

SEQ ID NO: 245841 - RNA, 29 nt, Homo Sapiens
caguauuucauuguauaccacaauuuuuc

SEQ ID NO: 245842 - RNA, 32 nt, Homo Sapiens
uauccccauguuacaaaugaagaaacugaggc

SEQ ID NO: 245843 - RNA, 32 nt, Homo Sapiens
acugcaaagccuaugaugauaauuauguuaaa

SEQ ID NO: 245844 - RNA, 32 nt, Homo Sapiens
ggcucccgaggggaaggggcggugcccacacc

SEQ ID NO: 245845 - RNA, 32 nt, Homo Sapiens
cuugaugaagagaucauuuuaaaggccccaau

SEQ ID NO: 245846 - RNA, 32 nt, Homo Sapiens
gauggagucucacucuguuacccaggcuagag

SEQ ID NO: 245847 - RNA, 32 nt, Homo Sapiens
uccugguugucacucuaauucacgcuaaagag

SEQ ID NO: 245848 - RNA, 32 nt, Homo Sapiens
agggcaggguggagggcaaggcuggggggagg

SEQ ID NO: 245849 - RNA, 32 nt, Homo Sapiens
uuuuguuggggguggggugggggcagaggaga

SEQ ID NO: 245850 - RNA, 32 nt, Homo Sapiens
caaccuguaaaaaguuacuuuuaucuuggauu

SEQ ID NO: 245851 - RNA, 32 nt, Homo Sapiens
cugccaggggagaggaaggugguacccccuuc

SEQ ID NO: 245852 - RNA, 32 nt, Homo Sapiens
gaugguuugcauaauauuguguucaagaggac

SEQ ID NO: 245853 - RNA, 29 nt, Homo Sapiens
caggaugcggggggcgcccgcgcgccugc

SEQ ID NO: 245854 - RNA, 32 nt, Homo Sapiens
uaugaauuagcaguuuacaaguuuacauauua

SEQ ID NO: 245855 - RNA, 32 nt, Homo Sapiens
aauccuuccuucucuuucccccuaagucuuuu

SEQ ID NO: 245856 - RNA, 32 nt, Homo Sapiens
aagcgaaguauuuuugguucaaaccugcacua

SEQ ID NO: 245857 - RNA, 32 nt, Homo Sapiens
cugaccaaauaggaaggacauuugagcagagc

SEQ ID NO: 245858 - RNA, 32 nt, Homo Sapiens
uguaguuggaagaacuacuauaaaaacaauau

SEQ ID NO: 245859 - RNA, 32 nt, Homo Sapiens
accacuacuucugccacagccaucacauucac

SEQ ID NO: 245860 - RNA, 32 nt, Homo Sapiens
cacacacacacgcacauacacacacacacaca

SEQ ID NO: 245861 - RNA, 32 nt, Homo Sapiens
caggugcacgcaugcauggacacacacacaca

SEQ ID NO: 245862 - RNA, 32 nt, Homo Sapiens
cgaugcccucagaggugcgaaaagcugaccga

SEQ ID NO: 245863 - RNA, 32 nt, Homo Sapiens
uuuggauaaagaacuauauuuuucucaaaaga

SEQ ID NO: 245864 - RNA, 32 nt, Homo Sapiens
ucucuggguaacaagugccauuucuuuguugu

SEQ ID NO: 245865 - RNA, 32 nt, Homo Sapiens
ugauugcgcucccuccuucuguagagggcgcc

SEQ ID NO: 245866 - RNA, 32 nt, Homo Sapiens
caugcagaucauaaaggcuuugguuuuaagac

SEQ ID NO: 245867 - RNA, 32 nt, Homo Sapiens
ggccgggcgcagugacucacgccuguaauccc

SEQ ID NO: 245868 - RNA, 32 nt, Homo Sapiens
cauccgagggcuuccugaugugacggacugug

SEQ ID NO: 245869 - RNA, 32 nt, Homo Sapiens
gucagagcucgagccagcggcgcccggagaga

SEQ ID NO: 245870 - RNA, 32 nt, Homo Sapiens
acaaggucaggagaucgagaccauccuggcca

SEQ ID NO: 245871 - RNA, 32 nt, Homo Sapiens
aucuugucaacacaauguaggccagggauuuu

SEQ ID NO: 245872 - RNA, 32 nt, Homo Sapiens
uuaaaguugucuauggcuguucuacuuguaag

SEQ ID NO: 245873 - RNA, 32 nt, Homo Sapiens
ggaugugcuuugccuggcccaguucucacagg

SEQ ID NO: 245874 - RNA, 32 nt, Homo Sapiens
caauaggaacaucaucauaauuuuugugguuc

SEQ ID NO: 245875 - RNA, 32 nt, Homo Sapiens
uguuggaguaugcauggauguagugcuuuuua

SEQ ID NO: 245876 - RNA, 32 nt, Homo Sapiens
ggggguaguaaacugaaacauaaaguaaacau

SEQ ID NO: 245877 - RNA, 32 nt, Homo Sapiens
cagcaaccaaacuuggagugguuauugcagac

SEQ ID NO: 245878 - RNA, 32 nt, Homo Sapiens
cauguuuguggaauugauauugaaauagcagg

SEQ ID NO: 245879 - RNA, 32 nt, Homo Sapiens
uuccacaggccccuggccuccuugcccuagca

SEQ ID NO: 245880 - RNA, 32 nt, Homo Sapiens
caaccucaaugacaccuuucugauggucuuua

SEQ ID NO: 245881 - RNA, 32 nt, Homo Sapiens
uccuggcacugaccaggaaagacugccucuga

SEQ ID NO: 245882 - RNA, 32 nt, Homo Sapiens
ggcugugugcgcacgccugcggggcgaggagg

SEQ ID NO: 245883 - RNA, 32 nt, Homo Sapiens
caauuucucccauugggaauaguuguauuuac

SEQ ID NO: 245884 - RNA, 32 nt, Homo Sapiens
ggagugugaguggccuggggagggggccgugg

SEQ ID NO: 245885 - RNA, 32 nt, Homo Sapiens
acgccccgcccgggagcgccucgggucaguaa

SEQ ID NO: 245886 - RNA, 32 nt, Homo Sapiens
ucccgaggcccggccaggggcugggcagggau

SEQ ID NO: 245887 - RNA, 32 nt, Homo Sapiens
ugugacccgccagccugcaccgcgggcacguc

SEQ ID NO: 245888 - RNA, 32 nt, Homo Sapiens
uuguacguauuauacaaauagauggaaagaaa

SEQ ID NO: 245889 - RNA, 32 nt, Homo Sapiens
ccaugucaacauaguccagggauugugggacu

SEQ ID NO: 245890 - RNA, 32 nt, Homo Sapiens
gaguggcgcgucgggggcuccgccgcuggcca

SEQ ID NO: 245891 - RNA, 32 nt, Homo Sapiens
ucuuuacccuccccagggcuccaucuccgccu

SEQ ID NO: 245892 - RNA, 32 nt, Homo Sapiens
aucuggcccccggcccgcgccaucccccagga

SEQ ID NO: 245893 - RNA, 32 nt, Homo Sapiens
cuguggcccagccuggcuggccugcagguguc

SEQ ID NO: 245894 - RNA, 32 nt, Homo Sapiens
ugacgaugaugaugauucuuggcgguuacaca

SEQ ID NO: 245895 - RNA, 32 nt, Homo Sapiens
uuucuuccaaguuugccuggggccuagcccug

SEQ ID NO: 245896 - RNA, 32 nt, Homo Sapiens
accgauuagcugucacggccacucuguguaag

SEQ ID NO: 245897 - RNA, 32 nt, Homo Sapiens
caggagcugcugcggccuccucugccaggggg

SEQ ID NO: 245898 - RNA, 32 nt, Homo Sapiens
uuacacacauaaagacaccacucaaaaggaaa

SEQ ID NO: 245899 - RNA, 32 nt, Homo Sapiens
gacgagcggcgccccgacacccccucuucucc

SEQ ID NO: 245900 - RNA, 32 nt, Homo Sapiens
aagaauacauuuuauaucuggauuuuuacaaa

SEQ ID NO: 245901 - RNA, 32 nt, Homo Sapiens
cuaauuguaugaaacuuuuauauccuaauuua

SEQ ID NO: 245902 - RNA, 32 nt, Homo Sapiens
cuuuucuuuccacacucagcucucccuccuca

SEQ ID NO: 245903 - RNA, 32 nt, Homo Sapiens
aucucuuugcacaugggcaucauuuuaaaaag

SEQ ID NO: 245904 - RNA, 32 nt, Homo Sapiens
ccuauucuacggcugaccccugguggucacgu

SEQ ID NO: 245905 - RNA, 32 nt, Homo Sapiens
gaugcucuguaucagaugcuaacaucaacaca

SEQ ID NO: 245906 - RNA, 32 nt, Homo Sapiens
gcuggcugugccggcgcacgccuggaauccca

SEQ ID NO: 245907 - RNA, 32 nt, Homo Sapiens
augugcuugugcucauguguguggucagcggu

SEQ ID NO: 245908 - RNA, 32 nt, Homo Sapiens
uaaggaaaaauauuuugcacagauuuacucca

SEQ ID NO: 245909 - RNA, 32 nt, Homo Sapiens
guuucaaaucccaaaacuaauggggacaguca

SEQ ID NO: 245910 - RNA, 32 nt, Homo Sapiens
ucuaguuagguuuucuauuucauuuuauuuua

SEQ ID NO: 245911 - RNA, 32 nt, Homo Sapiens
acccaaagaccauuuacaccacaggaggcuca

SEQ ID NO: 245912 - RNA, 32 nt, Homo Sapiens
aauggcgccugccucagggacauugcccacac

SEQ ID NO: 245913 - RNA, 32 nt, Homo Sapiens
agagacuacauauuguguaccgugauucuugg

SEQ ID NO: 245914 - RNA, 32 nt, Homo Sapiens
cucugggcucugacccgccgccgcgaaucucc

SEQ ID NO: 245915 - RNA, 32 nt, Homo Sapiens
cuugggcaaccacugcuucccuuugaaaagcc

SEQ ID NO: 245916 - RNA, 32 nt, Homo Sapiens
cagaaggauuuguaccgagauguaauguugga

SEQ ID NO: 245917 - RNA, 32 nt, Homo Sapiens
cugugggcucugcguggccgggccuugcugga

SEQ ID NO: 245918 - RNA, 32 nt, Homo Sapiens
ggguccuuggcucccgggggccccaccucggc

SEQ ID NO: 245919 - RNA, 32 nt, Homo Sapiens
aguaaugaagacuguaauacuggcauagaggc

SEQ ID NO: 245920 - RNA, 32 nt, Homo Sapiens
caggaaguccugagcugagacaucgcgggccc

SEQ ID NO: 245921 - RNA, 32 nt, Homo Sapiens
ccucgugggagaaaaaagacaauuuuauucuc

SEQ ID NO: 245922 - RNA, 32 nt, Homo Sapiens
aggcugcgccugcugccuccagcccugaggau

SEQ ID NO: 245923 - RNA, 32 nt, Homo Sapiens
uguuccaaguacucacaggggcucugggugcc

SEQ ID NO: 245924 - RNA, 32 nt, Homo Sapiens
aauauauucccaucuuuuuuuaguuaacccuu

SEQ ID NO: 245925 - RNA, 32 nt, Homo Sapiens
uuuuuuuaccucagguuucucuuaauauaguu

SEQ ID NO: 245926 - RNA, 32 nt, Homo Sapiens
gcucaugggaaauguuuugacuuuacaaagua

SEQ ID NO: 245927 - RNA, 32 nt, Homo Sapiens
uugcauuauaugcauuuauguaauguuucugu

SEQ ID NO: 245928 - RNA, 32 nt, Homo Sapiens
uaagagugcaacuucagacugaagauaggcca

SEQ ID NO: 245929 - RNA, 32 nt, Homo Sapiens
aaagguggccccagcuguugacuuccagucac

SEQ ID NO: 245930 - RNA, 32 nt, Homo Sapiens
ggguggcuuaugggggagaaaagggaaaaugc

SEQ ID NO: 245931 - RNA, 32 nt, Homo Sapiens
cuccaccaccgccuacguuuuuggccaucaga

SEQ ID NO: 245932 - RNA, 32 nt, Homo Sapiens
auauuaaacuaaaauaguauuaggaacaauua

SEQ ID NO: 245933 - RNA, 32 nt, Homo Sapiens
auauggaauugaaaugagcuagcuuuauaacu

SEQ ID NO: 245934 - RNA, 32 nt, Homo Sapiens
ccucccaggggggaacaucagagccacagggc

SEQ ID NO: 245935 - RNA, 32 nt, Homo Sapiens
aagccucugaccagccuuuaccaugcgcugag

SEQ ID NO: 245936 - RNA, 31 nt, Homo Sapiens
ugcugccuaagagaagcaggagucugugaca

SEQ ID NO: 245937 - RNA, 32 nt, Homo Sapiens
ggucacugucuccaccucaguuccucagggcu

SEQ ID NO: 245938 - RNA, 32 nt, Homo Sapiens
aggugccauuuuccccucuccuaugagucuau

SEQ ID NO: 245939 - RNA, 32 nt, Homo Sapiens
gauguuugaaagauuaaugagauacaauuuau

SEQ ID NO: 245940 - RNA, 32 nt, Homo Sapiens
ccaacuuauuaauuaugaaaugacuuuuggcc

SEQ ID NO: 245941 - RNA, 32 nt, Homo Sapiens
uucggggcugaccuuucaaaccagaggguugc

SEQ ID NO: 245942 - RNA, 32 nt, Homo Sapiens
uugucuuccaugaaggcagucccuggugucaa

SEQ ID NO: 245943 - RNA, 32 nt, Homo Sapiens
ucgauguccagguuaagaagaaaccuccuugu

SEQ ID NO: 245944 - RNA, 32 nt, Homo Sapiens
aaccuugcugccuuccucacaguguccaggau

SEQ ID NO: 245945 - RNA, 32 nt, Homo Sapiens
uagcaagagauuaauaauaauguaauagaaca

SEQ ID NO: 245946 - RNA, 32 nt, Homo Sapiens
agcaccaauucuaaguuuuucuugaugguaaa

SEQ ID NO: 245947 - RNA, 32 nt, Homo Sapiens
ucuuaauuugcauacuuaagcauuuaggaaug

SEQ ID NO: 245948 - RNA, 32 nt, Homo Sapiens
aagagaaaaacaaaaauaaaucauaccucaaa

SEQ ID NO: 245949 - RNA, 31 nt, Homo Sapiens
uccccaucacggaggguccagacuguccacu

SEQ ID NO: 245950 - RNA, 32 nt, Homo Sapiens
gcugugugaggaccagugucuucugucucagg

SEQ ID NO: 245951 - RNA, 32 nt, Homo Sapiens
uucuaaucauauaucugcaguuccucauuuuu

SEQ ID NO: 245952 - RNA, 32 nt, Homo Sapiens
cacuugguggacagggcggggcugacguggcc

SEQ ID NO: 245953 - RNA, 32 nt, Homo Sapiens
cuuuaaaacaaauugcauggauuuguauuaag

SEQ ID NO: 245954 - RNA, 32 nt, Homo Sapiens
ugggguauguagacuaguaacacauaagaaaa

SEQ ID NO: 245955 - RNA, 32 nt, Homo Sapiens
gggcagacaaacacugacguuucuggguggcc

SEQ ID NO: 245956 - RNA, 32 nt, Homo Sapiens
gucuaucuagaauacaggucuuccagucagcu

SEQ ID NO: 245957 - RNA, 32 nt, Homo Sapiens
uagccaagggaagccaugagggacugugccau

SEQ ID NO: 245958 - RNA, 32 nt, Homo Sapiens
ccuccuugacugugucccagccagcaccaggc

SEQ ID NO: 245959 - RNA, 32 nt, Homo Sapiens
acuggccgggacaacuggucuuaucacggagg

SEQ ID NO: 245960 - RNA, 32 nt, Homo Sapiens
uuuuaaaaaagcauaaucagccaggcacggcg

SEQ ID NO: 245961 - RNA, 32 nt, Homo Sapiens
gucccagccugggcaacauagcaagacccugu

SEQ ID NO: 245962 - RNA, 32 nt, Homo Sapiens
uagaacgcgccagaggucggcgcgcgcacacc

SEQ ID NO: 245963 - RNA, 30 nt, Homo Sapiens
ugccagaaugucccugcccuucucuccaga

SEQ ID NO: 245964 - RNA, 32 nt, Homo Sapiens
uauguugcuuuuaauuggggugggaaaguaga

SEQ ID NO: 245965 - RNA, 32 nt, Homo Sapiens
aaagccucugaaagaugcaucaucucuuccuc

SEQ ID NO: 245966 - RNA, 32 nt, Homo Sapiens
uuucagaaagggaccugggcuuccucacaaua

SEQ ID NO: 245967 - RNA, 32 nt, Homo Sapiens
guggaaaguaauaauuuuuuuauuuucuauca

SEQ ID NO: 245968 - RNA, 32 nt, Homo Sapiens
auuuuaacuauaauuuuaacugugauauaggc

SEQ ID NO: 245969 - RNA, 32 nt, Homo Sapiens
cccagcacuuugggggccaaggaggguggauc

SEQ ID NO: 245970 - RNA, 32 nt, Homo Sapiens
uguauaacaguacaacaaagacaauuacuugg

SEQ ID NO: 245971 - RNA, 32 nt, Homo Sapiens
aggcgcaggcgaccgggccuccccuccauggg

SEQ ID NO: 245972 - RNA, 32 nt, Homo Sapiens
ggcagccaggacuuugagguggugcagacggc

SEQ ID NO: 245973 - RNA, 32 nt, Homo Sapiens
uacaaaaaacaaaaagcaaauauucauaaaga

SEQ ID NO: 245974 - RNA, 32 nt, Homo Sapiens
acaccuuguuugcgguguuggaacaugguucc

SEQ ID NO: 245975 - RNA, 32 nt, Homo Sapiens
ccaggggcuagcccuuccuucggaccgugaga

SEQ ID NO: 245976 - RNA, 32 nt, Homo Sapiens
ccagucagucucagauuuacaagcauuuagga

SEQ ID NO: 245977 - RNA, 32 nt, Homo Sapiens
ccaaaauguucccauagaugaucgugaaacaa

SEQ ID NO: 245978 - RNA, 32 nt, Homo Sapiens
cgacagugccaccuguugggcaucauaaaugc

SEQ ID NO: 245979 - RNA, 32 nt, Homo Sapiens
gcagagaagauaagaacuuggagcccauuucu

SEQ ID NO: 245980 - RNA, 32 nt, Homo Sapiens
uuuuuggacaauuuuuaaaauuuguaucuuua

SEQ ID NO: 245981 - RNA, 32 nt, Homo Sapiens
gcuuucaguuguaacggacuucaucacaucac

SEQ ID NO: 245982 - RNA, 32 nt, Homo Sapiens
ccccagugcccuuuccucucucggguccuuac

SEQ ID NO: 245983 - RNA, 32 nt, Homo Sapiens
ggccuucuuguacacuaguaguagcggaauga

SEQ ID NO: 245984 - RNA, 32 nt, Homo Sapiens
acccuuaggagcuaguuugcaguuugguucuu

SEQ ID NO: 245985 - RNA, 32 nt, Homo Sapiens
ccuaagagaaaguucaacggcuaagcucaaac

SEQ ID NO: 245986 - RNA, 32 nt, Homo Sapiens
ucauguuuugacuucagaggcuuuuugcuuug

SEQ ID NO: 245987 - RNA, 32 nt, Homo Sapiens
aaaaacuguagauaaacuuacugaggacugua

SEQ ID NO: 245988 - RNA, 32 nt, Homo Sapiens
uuguuacagaauuuaaagauuugaugaaauaa

SEQ ID NO: 245989 - RNA, 32 nt, Homo Sapiens
gcaggccaucugucucaguauaaggaucaaua

SEQ ID NO: 245990 - RNA, 32 nt, Homo Sapiens
ugaaaugaacaccuugaauagcacuaauuuuu

SEQ ID NO: 245991 - RNA, 32 nt, Homo Sapiens
accucugccucaguuuaccauguacggccuca

SEQ ID NO: 245992 - RNA, 32 nt, Homo Sapiens
uagauauuuuccaucauauuggcacugcuaaa

SEQ ID NO: 245993 - RNA, 32 nt, Homo Sapiens
ucagcagugggauaucaaugcuuauuuacauu

SEQ ID NO: 245994 - RNA, 32 nt, Homo Sapiens
caugucaagaaauuauuaaaaauacagguacu

SEQ ID NO: 245995 - RNA, 32 nt, Homo Sapiens
aauucaguagcauaggaauuauagaauaccug

SEQ ID NO: 245996 - RNA, 32 nt, Homo Sapiens
gcggagccgggcggagcuggcuugcggcuacc

SEQ ID NO: 245997 - RNA, 32 nt, Homo Sapiens
gggcccuggcccagccccggccuccaaggacc

SEQ ID NO: 245998 - RNA, 32 nt, Homo Sapiens
guccugggaaaggcgcaugcgcucucauugca

SEQ ID NO: 245999 - RNA, 32 nt, Homo Sapiens
aaauuuuaaguacuuugcugaaugucauuuua

SEQ ID NO: 246000 - RNA, 32 nt, Homo Sapiens
uuacccugggcuggagaguugguuucagguuc

SEQ ID NO: 246001 - RNA, 32 nt, Homo Sapiens
aggcacaaauaugaagaaaugaaacaagaaga

SEQ ID NO: 246002 - RNA, 32 nt, Homo Sapiens
aguuucaccauguuggccaggcuggucuugaa

SEQ ID NO: 246003 - RNA, 32 nt, Homo Sapiens
cugccgcugcgcccgcccgccauggugucccg

SEQ ID NO: 246004 - RNA, 32 nt, Homo Sapiens
gggccgucacgaugagcgcccugggcagcccg

SEQ ID NO: 246005 - RNA, 32 nt, Homo Sapiens
gcugcagcuccagggagggggucugagucgcc

SEQ ID NO: 246006 - RNA, 32 nt, Homo Sapiens
accuuaucuuacugaauucuuaaacuuugaac

SEQ ID NO: 246007 - RNA, 32 nt, Homo Sapiens
cuucauuccucgaggaugcccgggccccaccu

SEQ ID NO: 246008 - RNA, 32 nt, Homo Sapiens
ccagcgacaggucauuggcgaaggggaucguc

SEQ ID NO: 246009 - RNA, 32 nt, Homo Sapiens
guagagaagaacauaagaagaaaaacccagag

SEQ ID NO: 246010 - RNA, 32 nt, Homo Sapiens
ggaauuuaucuucccagucucccuuucuggcu

SEQ ID NO: 246011 - RNA, 31 nt, Homo Sapiens
gucaccccuggccccauuccuugguaauuag

SEQ ID NO: 246012 - RNA, 32 nt, Homo Sapiens
gguugcuuggggcauccugugcucuccacugc

SEQ ID NO: 246013 - RNA, 32 nt, Homo Sapiens
gcugccggaccgugaggcugugagucgcgcgg

SEQ ID NO: 246014 - RNA, 32 nt, Homo Sapiens
caggcuggcuccuggggauggccagguacaac

SEQ ID NO: 246015 - RNA, 32 nt, Homo Sapiens
ggagccgguggcggcucggcaucaugcgucga

SEQ ID NO: 246016 - RNA, 32 nt, Homo Sapiens
uucuguguauaaauaaaacaagccuguuuuug

SEQ ID NO: 246017 - RNA, 32 nt, Homo Sapiens
cggggagcgucgucgccgccacccugggcgcu

SEQ ID NO: 246018 - RNA, 32 nt, Homo Sapiens
gguaccggcaaccacgggcagcucucagggaa

SEQ ID NO: 246019 - RNA, 32 nt, Homo Sapiens
gaauugaugcuucaguccuggggcagaauuuc

SEQ ID NO: 246020 - RNA, 32 nt, Homo Sapiens
gccucccggaguugggggcggccuggcggcag

SEQ ID NO: 246021 - RNA, 32 nt, Homo Sapiens
uuucccuuuuuauuuuucagcaucaagagaaa

SEQ ID NO: 246022 - RNA, 32 nt, Homo Sapiens
gucaugcccuuaaguucagcaacuguuuaacc

SEQ ID NO: 246023 - RNA, 31 nt, Homo Sapiens
caauauuugugcuauauauuuagguacuuca

SEQ ID NO: 246024 - RNA, 32 nt, Homo Sapiens
cgcugaaagccauuugccuacugcagguuccc

SEQ ID NO: 246025 - RNA, 32 nt, Homo Sapiens
cuugaccaagcuggucucggcacauaugcaug

SEQ ID NO: 246026 - RNA, 32 nt, Homo Sapiens
ccugggggaaaggggcauucaugaccugaacu

SEQ ID NO: 246027 - RNA, 32 nt, Homo Sapiens
ggccuacagaaugaagagggggaccaggaacc

SEQ ID NO: 246028 - RNA, 30 nt, Homo Sapiens
cgcugaguggacugcguugucagggaguga

SEQ ID NO: 246029 - RNA, 32 nt, Homo Sapiens
caagccccccgccccgcccccaucaccccgua

SEQ ID NO: 246030 - RNA, 32 nt, Homo Sapiens
agaaggcggaauccacagcuggcgacgcggga

SEQ ID NO: 246031 - RNA, 32 nt, Homo Sapiens
agcaauaccaccuucaguacuuggcaagauuu

SEQ ID NO: 246032 - RNA, 32 nt, Homo Sapiens
caugaggacugggaagaguccugcccacagcu

SEQ ID NO: 246033 - RNA, 32 nt, Homo Sapiens
auuuuuucauugaucuaugcuuugaguuugcu

SEQ ID NO: 246034 - RNA, 32 nt, Homo Sapiens
cucuuaucuacccaccaccuaggacagaggcu

SEQ ID NO: 246035 - RNA, 32 nt, Homo Sapiens
uuugucugaccucucuccuccccuccuuccuc

SEQ ID NO: 246036 - RNA, 32 nt, Homo Sapiens
cuucucugggccgcgccucugcagacugcgca

SEQ ID NO: 246037 - RNA, 32 nt, Homo Sapiens
ucucccaaguucuccuucagaaccuaguugcu

SEQ ID NO: 246038 - RNA, 32 nt, Homo Sapiens
cggaccccccucgaagcccccuggacugauuc

SEQ ID NO: 246039 - RNA, 32 nt, Homo Sapiens
aauauuaaaaaauuacaaucaauuuauuuuca

SEQ ID NO: 246040 - RNA, 32 nt, Homo Sapiens
acacaaaggaggcgucucgggagaggauuagg

SEQ ID NO: 246041 - RNA, 32 nt, Homo Sapiens
ugaaagcaggcacagcagcaggggugcugccu

SEQ ID NO: 246042 - RNA, 32 nt, Homo Sapiens
agaagaaaaaaauuaugaacuuaaagaagcug

SEQ ID NO: 246043 - RNA, 32 nt, Homo Sapiens
agucauaucagugacuggauuaugaugucaca

SEQ ID NO: 246044 - RNA, 32 nt, Homo Sapiens
uggcggcccguaguuccuccccgauuucuucu

SEQ ID NO: 246045 - RNA, 32 nt, Homo Sapiens
uuaaaagcccauguguucccacacauccacau

SEQ ID NO: 246046 - RNA, 32 nt, Homo Sapiens
aggacagcagucuucuauguuuagucaauauu

SEQ ID NO: 246047 - RNA, 32 nt, Homo Sapiens
uggaggaucacugagcaaaaccacaaauauug

SEQ ID NO: 246048 - RNA, 32 nt, Homo Sapiens
aaggaggaagacuucgagcgccugcugcggcu

SEQ ID NO: 246049 - RNA, 32 nt, Homo Sapiens
cauaggacccuacuccaugaacccguccacgc

SEQ ID NO: 246050 - RNA, 32 nt, Homo Sapiens
ugagaaggugaucgcucugcucucccaacccc

SEQ ID NO: 246051 - RNA, 32 nt, Homo Sapiens
ccaaugaaacuuccccucaccuccucaucuuu

SEQ ID NO: 246052 - RNA, 32 nt, Homo Sapiens
aaaaugggagcacaguauugggaaaugggagc

SEQ ID NO: 246053 - RNA, 32 nt, Homo Sapiens
ugugcaauagaaugaugucugcucuagggaaa

SEQ ID NO: 246054 - RNA, 32 nt, Homo Sapiens
cggagaacuccugacgcccagcccuguccccu

SEQ ID NO: 246055 - RNA, 32 nt, Homo Sapiens
cuccgcgccgagccgaacgucccggcccgccg

SEQ ID NO: 246056 - RNA, 32 nt, Homo Sapiens
cugggcucgagcucagaagcccgaggaacucu

SEQ ID NO: 246057 - RNA, 32 nt, Homo Sapiens
uaaaaaugaagauaaaaagccagauuguacaa

SEQ ID NO: 246058 - RNA, 32 nt, Homo Sapiens
aguucuuggugcccucuucggcagccaagggu

SEQ ID NO: 246059 - RNA, 32 nt, Homo Sapiens
gcucagaacugcaauuuaauucuuguucuuug

SEQ ID NO: 246060 - RNA, 32 nt, Homo Sapiens
cagucccuacuuggguagagccaggcgccccu

SEQ ID NO: 246061 - RNA, 32 nt, Homo Sapiens
acuuuaggaggccaaggcagguggaugacuug

SEQ ID NO: 246062 - RNA, 32 nt, Homo Sapiens
ugaacauaaagaaucuaucugcuguuaaaaaa

SEQ ID NO: 246063 - RNA, 32 nt, Homo Sapiens
acagcccaucuuggcuugggguugcaaugaug

SEQ ID NO: 246064 - RNA, 32 nt, Homo Sapiens
ugguuuuugaguuguuuuuucuuaauguaaga

SEQ ID NO: 246065 - RNA, 32 nt, Homo Sapiens
uuaaaagaauaaaacugggcaggggcaugaga

SEQ ID NO: 246066 - RNA, 32 nt, Homo Sapiens
gggggccuugucugcuggccacgcaaguguca

SEQ ID NO: 246067 - RNA, 32 nt, Homo Sapiens
ugcacuaugcugaguggaaagcaccgucauaa

SEQ ID NO: 246068 - RNA, 30 nt, Homo Sapiens
ucagaggaccacggugcgggucccgcgcuc

SEQ ID NO: 246069 - RNA, 32 nt, Homo Sapiens
cuaggguaugugggaaggucagggcuguggua

SEQ ID NO: 246070 - RNA, 32 nt, Homo Sapiens
uaugcguucuguagucuuuucuuaggugggua

SEQ ID NO: 246071 - RNA, 32 nt, Homo Sapiens
ggagagcgugugcacagcgaggccaucucacc

SEQ ID NO: 246072 - RNA, 32 nt, Homo Sapiens
aaaagaggggaagaguauuaaagaccauuucu

SEQ ID NO: 246073 - RNA, 32 nt, Homo Sapiens
ggaggucugccagcugccccggccaggcuugc

SEQ ID NO: 246074 - RNA, 32 nt, Homo Sapiens
gggucuuugugcuuccauugcugugugccacc

SEQ ID NO: 246075 - RNA, 32 nt, Homo Sapiens
caagucuguuugcugcauacacauuucuggug

SEQ ID NO: 246076 - RNA, 32 nt, Homo Sapiens
gacccgcccccaggcccgcaguguccuggacc

SEQ ID NO: 246077 - RNA, 32 nt, Homo Sapiens
ucaguggcucugcaccgcuggcgcgggaaggg

SEQ ID NO: 246078 - RNA, 32 nt, Homo Sapiens
gaggucaaggauccacugggaaugccaugcuc

SEQ ID NO: 246079 - RNA, 32 nt, Homo Sapiens
uugauuacugaccccgguuccacacacuguaa

SEQ ID NO: 246080 - RNA, 32 nt, Homo Sapiens
cugcguuccugcaggcuucaucuggcccuaug

SEQ ID NO: 246081 - RNA, 32 nt, Homo Sapiens
ugcaaggaugcuuuugagguuggacaggaggu

SEQ ID NO: 246082 - RNA, 32 nt, Homo Sapiens
uuaccuugcagcgcccggcugucucccgaucg

SEQ ID NO: 246083 - RNA, 32 nt, Homo Sapiens
aacgaaguaagcuggcagcugguuuuauugga

SEQ ID NO: 246084 - RNA, 32 nt, Homo Sapiens
gcaggacccuccccugcuccaugugacccucc

SEQ ID NO: 246085 - RNA, 32 nt, Homo Sapiens
cugucgugccugagacccccucugcucccucc

SEQ ID NO: 246086 - RNA, 32 nt, Homo Sapiens
ucacccagucucugcccucauguucacauggc

SEQ ID NO: 246087 - RNA, 32 nt, Homo Sapiens
uauugcuuugcacuuugguuugauauuaagaa

SEQ ID NO: 246088 - RNA, 32 nt, Homo Sapiens
cccuucuccugugaggggagccaggcacacag

SEQ ID NO: 246089 - RNA, 32 nt, Homo Sapiens
caggaaggugacucugaccuucugccugcugu

SEQ ID NO: 246090 - RNA, 32 nt, Homo Sapiens
cgagcugagagaagaaggcuucagaugaucgg

SEQ ID NO: 246091 - RNA, 32 nt, Homo Sapiens
ccuagcucagugccgagcccuuagcguggacu

SEQ ID NO: 246092 - RNA, 32 nt, Homo Sapiens
gggcuguggcuuuggcagcugcgacggggagc

SEQ ID NO: 246093 - RNA, 32 nt, Homo Sapiens
ccagguucgguccgccauccucgucccguccu

SEQ ID NO: 246094 - RNA, 32 nt, Homo Sapiens
accuagguuuguguaaguauacgcuaugauau

SEQ ID NO: 246095 - RNA, 32 nt, Homo Sapiens
agcuggacagcgccauccaccugugcaacaac

SEQ ID NO: 246096 - RNA, 32 nt, Homo Sapiens
agugccacgggcggggcugugcgggcgcccgg

SEQ ID NO: 246097 - RNA, 32 nt, Homo Sapiens
uuccugaagaucuggcaggggaucgacauuga

SEQ ID NO: 246098 - RNA, 32 nt, Homo Sapiens
uaacucucugagacugcgaggaucuccaggca

SEQ ID NO: 246099 - RNA, 32 nt, Homo Sapiens
auuuauuggaaauucagaaauagacaaaaacc

SEQ ID NO: 246100 - RNA, 32 nt, Homo Sapiens
gagcagauaauauauagaguuccauacaccca

SEQ ID NO: 246101 - RNA, 32 nt, Homo Sapiens
uagggccguggccuuugccgagacuguagcag

SEQ ID NO: 246102 - RNA, 32 nt, Homo Sapiens
aaauauuguauuacuguacauagagagacagg

SEQ ID NO: 246103 - RNA, 32 nt, Homo Sapiens
agguuggcagaucaccugaggucaggaguuca

SEQ ID NO: 246104 - RNA, 32 nt, Homo Sapiens
uacacagaaagauauuuuuuacaguaccauuu

SEQ ID NO: 246105 - RNA, 32 nt, Homo Sapiens
ucaccgaggggagagggaaaguaagccuguau

SEQ ID NO: 246106 - RNA, 32 nt, Homo Sapiens
ugggugagggauccggcggcaugggcugguuu

SEQ ID NO: 246107 - RNA, 32 nt, Homo Sapiens
cugauuuacugauuuaagcuagccaaacugua

SEQ ID NO: 246108 - RNA, 32 nt, Homo Sapiens
uuuacuuuuacacacuuuccuguucauagcaa

SEQ ID NO: 246109 - RNA, 32 nt, Homo Sapiens
agagaugcugcagcugaugccuuuaaaaggua

SEQ ID NO: 246110 - RNA, 32 nt, Homo Sapiens
cuacuguuccgggggccgcgggagcccccacc

SEQ ID NO: 246111 - RNA, 32 nt, Homo Sapiens
aucugguuuuccugaacuuauuuuuucuuaau

SEQ ID NO: 246112 - RNA, 32 nt, Homo Sapiens
cacacacacacacacacacacacacacacgca

SEQ ID NO: 246113 - RNA, 32 nt, Homo Sapiens
cacacgcacacacacacacacacacacacaca

SEQ ID NO: 246114 - RNA, 32 nt, Homo Sapiens
cgcacgcacgcacacacacacacacacacaca

SEQ ID NO: 246115 - RNA, 32 nt, Homo Sapiens
acacagacacacacacacacaaacacacacac

SEQ ID NO: 246116 - RNA, 32 nt, Homo Sapiens
cacacacacacacgcacacacacacacacaca

SEQ ID NO: 246117 - RNA, 32 nt, Homo Sapiens
gagaugcaggugagcaagaggaugcuggcggg

SEQ ID NO: 246118 - RNA, 32 nt, Homo Sapiens
auggguuuucucuggaggacaagcaguuagag

SEQ ID NO: 246119 - RNA, 32 nt, Homo Sapiens
cauaauauuuuuccagaauuaacaguauaaau

SEQ ID NO: 246120 - RNA, 32 nt, Homo Sapiens
aacccuaccuucggcccggccugggugccccu

SEQ ID NO: 246121 - RNA, 32 nt, Homo Sapiens
cauucuuguuaaagcugaaacacugaaacagc

SEQ ID NO: 246122 - RNA, 32 nt, Homo Sapiens
cgucgguuacagcgggaaugggcgggccaaca

SEQ ID NO: 246123 - RNA, 32 nt, Homo Sapiens
acccugagcaaaugacuuacgcuccauuggau

SEQ ID NO: 246124 - RNA, 27 nt, Homo Sapiens
cgauucuccuacuucagccucccaagu

SEQ ID NO: 246125 - RNA, 32 nt, Homo Sapiens
aaugucccauucuccuaaggacuuucccuuca

SEQ ID NO: 246126 - RNA, 32 nt, Homo Sapiens
aggucccggggugggggcgcggcgcuccggga

SEQ ID NO: 246127 - RNA, 32 nt, Homo Sapiens
gugauccacccgccucggccucccagagugcu

SEQ ID NO: 246128 - RNA, 32 nt, Homo Sapiens
aguaauaggaccagcuuugaauuucugacauu

SEQ ID NO: 246129 - RNA, 32 nt, Homo Sapiens
ucucugugccugggaauuaggaccccugcucc

SEQ ID NO: 246130 - RNA, 32 nt, Homo Sapiens
cagcaugguggccuugacuaaguuuauggcga

SEQ ID NO: 246131 - RNA, 32 nt, Homo Sapiens
uuuccuuugcagacaaauugaagaacuggugg

SEQ ID NO: 246132 - RNA, 26 nt, Homo Sapiens
uguuuuaauauauuuuugugacuuuc

SEQ ID NO: 246133 - RNA, 32 nt, Homo Sapiens
guggaaaugaugaaagaagagacaggcaauga

SEQ ID NO: 246134 - RNA, 32 nt, Homo Sapiens
gaaggucauaguccgcgugacccacccccguu

SEQ ID NO: 246135 - RNA, 32 nt, Homo Sapiens
auucugcccugugggaccccaggcccacucag

SEQ ID NO: 246136 - RNA, 31 nt, Homo Sapiens
cgaagcuccggccgcgucccccgcgccagcc

SEQ ID NO: 246137 - RNA, 32 nt, Homo Sapiens
ugaucuguuccucuguuuuucuuuuugauuuu

SEQ ID NO: 246138 - RNA, 32 nt, Homo Sapiens
acuggccggccgcgggaucccaggagcccgcc

SEQ ID NO: 246139 - RNA, 32 nt, Homo Sapiens
ggauugcugcaggucagcagucuccacuggaa

SEQ ID NO: 246140 - RNA, 32 nt, Homo Sapiens
cuaucuugcuucaguugguuuccuccuaaaua

SEQ ID NO: 246141 - RNA, 32 nt, Homo Sapiens
aucaaaagaaaagaagauggaugaggacacua

SEQ ID NO: 246142 - RNA, 32 nt, Homo Sapiens
gggcuuggggcgccgcgcuggggaaagccggg

SEQ ID NO: 246143 - RNA, 32 nt, Homo Sapiens
gagcuuggaaaacaauaaacaucugugugugc

SEQ ID NO: 246144 - RNA, 32 nt, Homo Sapiens
agcugcuguggguggggcccagacaccagccu

SEQ ID NO: 246145 - RNA, 32 nt, Homo Sapiens
gcacgcacuggcaccuggccccaggagcgggc

SEQ ID NO: 246146 - RNA, 32 nt, Homo Sapiens
uugagucaucuauuuucuuuuacagucaucga

SEQ ID NO: 246147 - RNA, 32 nt, Homo Sapiens
ugguccccauucuuccccacagacuuccuuug

SEQ ID NO: 246148 - RNA, 32 nt, Homo Sapiens
cucaccagcccccuccucccuuuucaucuaag

SEQ ID NO: 246149 - RNA, 32 nt, Homo Sapiens
cacuugccuuggagucugagugaugcgcgucg

SEQ ID NO: 246150 - RNA, 32 nt, Homo Sapiens
ucgagccgggacugcgugcgggccccgaggcc

SEQ ID NO: 246151 - RNA, 32 nt, Homo Sapiens
guguuucgaguuuaacaugcgcuguuucugcu

SEQ ID NO: 246152 - RNA, 32 nt, Homo Sapiens
cuacauugaaguucugucuauguaucuuaauc

SEQ ID NO: 246153 - RNA, 32 nt, Homo Sapiens
cggcgaguucccucgggccccagcuccgccuc

SEQ ID NO: 246154 - RNA, 32 nt, Homo Sapiens
uagagauaauuauuuggaauuuuuauagcuua

SEQ ID NO: 246155 - RNA, 32 nt, Homo Sapiens
cucucauuuguuuuugauaccuugggaauuuc

SEQ ID NO: 246156 - RNA, 32 nt, Homo Sapiens
cagguuuccuggauuuggggccccauggccuu

SEQ ID NO: 246157 - RNA, 32 nt, Homo Sapiens
agcuuauauauucaugguaugaauuccuuuaa

SEQ ID NO: 246158 - RNA, 32 nt, Homo Sapiens
uucucucccuccgggggcacccgcucccuagc

SEQ ID NO: 246159 - RNA, 32 nt, Homo Sapiens
gcaagggcgccuuguaggagccugcagucccc

SEQ ID NO: 246160 - RNA, 32 nt, Homo Sapiens
guacaccccacagccucuuaugcugggcucuc

SEQ ID NO: 246161 - RNA, 29 nt, Homo Sapiens
agugagcuuagaauaucuauaaagcaaaa

SEQ ID NO: 246162 - RNA, 32 nt, Homo Sapiens
gcgcagccgggccggcccgaccccaccggcca

SEQ ID NO: 246163 - RNA, 32 nt, Homo Sapiens
ucccugagcuccugcuccccgccgggcugcuc

SEQ ID NO: 246164 - RNA, 29 nt, Homo Sapiens
cuaaauauauguauauauacaguacauag

SEQ ID NO: 246165 - RNA, 32 nt, Homo Sapiens
ugcagugccugccaauagcgagcuuggagccu

SEQ ID NO: 246166 - RNA, 32 nt, Homo Sapiens
gggccgagugggagcgcagagccccucccagu

SEQ ID NO: 246167 - RNA, 32 nt, Homo Sapiens
aauagaaaaugguuuagauaucuuucuuccuu

SEQ ID NO: 246168 - RNA, 32 nt, Homo Sapiens
uggcccugacaucugcccccagccccaacccu

SEQ ID NO: 246169 - RNA, 32 nt, Homo Sapiens
uauuuuuauuauguuuguuucuuucuucguuu

SEQ ID NO: 246170 - RNA, 32 nt, Homo Sapiens
uaauuccugcuccacaccccuauuuuccucuu

SEQ ID NO: 246171 - RNA, 30 nt, Homo Sapiens
agagaucuggacuccaacccaagggcccuc

SEQ ID NO: 246172 - RNA, 32 nt, Homo Sapiens
gcucggggaaggcuggcggcggcggccgagcc

SEQ ID NO: 246173 - RNA, 32 nt, Homo Sapiens
cccugccucgguuucccuucuguuuaguggcg

SEQ ID NO: 246174 - RNA, 32 nt, Homo Sapiens
gguccccucaggugugucguuuccgucgcgcu

SEQ ID NO: 246175 - RNA, 32 nt, Homo Sapiens
augaagccuagaucuucaguaucauaaaaagg

SEQ ID NO: 246176 - RNA, 32 nt, Homo Sapiens
gcagcaucuucccugacggucaccuuagggcg

SEQ ID NO: 246177 - RNA, 32 nt, Homo Sapiens
ccaagucuuugcugccuaugugcggaaaacug

SEQ ID NO: 246178 - RNA, 32 nt, Homo Sapiens
uaacagaaagcucaacucuaaauucaacaaga

SEQ ID NO: 246179 - RNA, 32 nt, Homo Sapiens
gaaaaaaggaggaggaauaaacacacgccugu

SEQ ID NO: 246180 - RNA, 32 nt, Homo Sapiens
gcaagauaagacaacuuuaagaaaccaguguu

SEQ ID NO: 246181 - RNA, 32 nt, Homo Sapiens
uuaacucauuucucaugccauuagcucucuac

SEQ ID NO: 246182 - RNA, 32 nt, Homo Sapiens
cggagacccgcggggagcugcugcagcuccug

SEQ ID NO: 246183 - RNA, 32 nt, Homo Sapiens
gcaugggaauccacgucuauacucagcccauc

SEQ ID NO: 246184 - RNA, 32 nt, Homo Sapiens
acugcagcugucuaggucugcggccacaucuu

SEQ ID NO: 246185 - RNA, 32 nt, Homo Sapiens
guggccaggcagccuccaccugugcuucagug

SEQ ID NO: 246186 - RNA, 32 nt, Homo Sapiens
acacugccgguuccagagggcacgggaauggg

SEQ ID NO: 246187 - RNA, 32 nt, Homo Sapiens
acuaagugcugacuaguuuguuuucuauguca

SEQ ID NO: 246188 - RNA, 32 nt, Homo Sapiens
cggggaagcacgccgccucccuacgcaccagc

SEQ ID NO: 246189 - RNA, 32 nt, Homo Sapiens
acaacaggguggggugggaggggaggagacau

SEQ ID NO: 246190 - RNA, 32 nt, Homo Sapiens
aauaguauuuuuguauguuuugggugugucua

SEQ ID NO: 246191 - RNA, 32 nt, Homo Sapiens
gugggggcgggccccgcacacgguaagaccuc

SEQ ID NO: 246192 - RNA, 32 nt, Homo Sapiens
gaccagagggcuucccuggaggccgccaucac

SEQ ID NO: 246193 - RNA, 32 nt, Homo Sapiens
ucgccgagccgcaggagagacacgcugggccg

SEQ ID NO: 246194 - RNA, 32 nt, Homo Sapiens
ucagaagauaaaaaguauucuggauuuaaaga

SEQ ID NO: 246195 - RNA, 32 nt, Homo Sapiens
cuacacuggagaaaacaaaacaaaccaaauua

SEQ ID NO: 246196 - RNA, 32 nt, Homo Sapiens
cugucgcccacccaggcuggaguacaguggca

SEQ ID NO: 246197 - RNA, 32 nt, Homo Sapiens
ugucucgguggccggacccgggcccgagcccg

SEQ ID NO: 246198 - RNA, 32 nt, Homo Sapiens
ggcaaggauuacugccuuuuguagguacuuca

SEQ ID NO: 246199 - RNA, 32 nt, Homo Sapiens
ucucacaggugucugagaauuccuccuccugg

SEQ ID NO: 246200 - RNA, 32 nt, Homo Sapiens
gcucuagauaaaacuuucuuuucugaucauga

SEQ ID NO: 246201 - RNA, 32 nt, Homo Sapiens
ccuggggaaaucaacugaccucccugaacauu

SEQ ID NO: 246202 - RNA, 32 nt, Homo Sapiens
gacgcaggaagaacaggugcgcacaaaggcac

SEQ ID NO: 246203 - RNA, 32 nt, Homo Sapiens
cuucgacgcacacgcgcacgcgcacgcacgca

SEQ ID NO: 246204 - RNA, 32 nt, Homo Sapiens
uccucggugccgccucugcccagcguuugcuu

SEQ ID NO: 246205 - RNA, 29 nt, Homo Sapiens
uugaaauaaaguuuagugucuagggcugg

SEQ ID NO: 246206 - RNA, 32 nt, Homo Sapiens
uaacuuguuuaaaaguuuuucugguagcuuua

SEQ ID NO: 246207 - RNA, 32 nt, Homo Sapiens
ggaaugcuaauuuacuuguugacaugccauuu

SEQ ID NO: 246208 - RNA, 32 nt, Homo Sapiens
gcucuaugagucuagauguuuauucuucuaga

SEQ ID NO: 246209 - RNA, 32 nt, Homo Sapiens
cuacaaucaaggaagaaggacaucucugcuuc

SEQ ID NO: 246210 - RNA, 32 nt, Homo Sapiens
uauauguaaaacaaaaacauguuugaggacua

SEQ ID NO: 246211 - RNA, 32 nt, Homo Sapiens
gcaaugauauuaugagggauaugagauaggug

SEQ ID NO: 246212 - RNA, 32 nt, Homo Sapiens
uacauaucaaaccaugacuuugaaaggucuuc

SEQ ID NO: 246213 - RNA, 32 nt, Homo Sapiens
cuauacuguuuccauuuuuguuuuuacaaauc

SEQ ID NO: 246214 - RNA, 32 nt, Homo Sapiens
cagcucauugcaaagcgaacauccucuccuuu

SEQ ID NO: 246215 - RNA, 32 nt, Homo Sapiens
auacgcccaccucggccucccaaagugcuggg

SEQ ID NO: 246216 - RNA, 32 nt, Homo Sapiens
cccuucaaauauauuuuacguuugcagcacaa

SEQ ID NO: 246217 - RNA, 32 nt, Homo Sapiens
aaagaaaagagauuuauuuggcucaugguucu

SEQ ID NO: 246218 - RNA, 32 nt, Homo Sapiens
uuuugacaaauauuucauauauuuucauugaa

SEQ ID NO: 246219 - RNA, 32 nt, Homo Sapiens
cugagccuugucacgcgcacucgccaauuaag

SEQ ID NO: 246220 - RNA, 32 nt, Homo Sapiens
uacuaaggaacaacauucccuuugaaaggaca

SEQ ID NO: 246221 - RNA, 32 nt, Homo Sapiens
uuguuaagguuugggcaggagcagaacucugu

SEQ ID NO: 246222 - RNA, 32 nt, Homo Sapiens
agaaaaaccuuauuuucuuuuguaagagcugg

SEQ ID NO: 246223 - RNA, 32 nt, Homo Sapiens
gcacuggccucagaccggggccacacugaggu

SEQ ID NO: 246224 - RNA, 32 nt, Homo Sapiens
uacaaauauaagauuuucugggccuaaaggau

SEQ ID NO: 246225 - RNA, 32 nt, Homo Sapiens
acgucuauuuuauuuugauaguuucuuuccga

SEQ ID NO: 246226 - RNA, 32 nt, Homo Sapiens
ggcaacugaaccccagccuggacccgggaccc

SEQ ID NO: 246227 - RNA, 29 nt, Homo Sapiens
ggccgguggggacagagggccaauucggg

SEQ ID NO: 246228 - RNA, 32 nt, Homo Sapiens
aagcuggcagagcuauauuccugacagcccug

SEQ ID NO: 246229 - RNA, 32 nt, Homo Sapiens
auacgacacaugcccuugaugagaagcagaac

SEQ ID NO: 246230 - RNA, 32 nt, Homo Sapiens
cuaaagagucuggccuggacccugagaagcca

SEQ ID NO: 246231 - RNA, 32 nt, Homo Sapiens
uguucaggucagucuuuuuuuacuucauuagg

SEQ ID NO: 246232 - RNA, 32 nt, Homo Sapiens
ugaaugguaugaugaagaaaguuugaccaaau

SEQ ID NO: 246233 - RNA, 32 nt, Homo Sapiens
gaggguacuuggcaucaccggugcacagcugg

SEQ ID NO: 246234 - RNA, 32 nt, Homo Sapiens
ccucaacccuucccuucccgccacacucccuc

SEQ ID NO: 246235 - RNA, 29 nt, Homo Sapiens
cuuaauaauguggcauauuuucuagauau

SEQ ID NO: 246236 - RNA, 32 nt, Homo Sapiens
auggaaaugagcuaagaaaaccacuggagccu

SEQ ID NO: 246237 - RNA, 32 nt, Homo Sapiens
acaucagugggagaguugaagaucugagaauu

SEQ ID NO: 246238 - RNA, 32 nt, Homo Sapiens
cgggggcaggggcaggggcagcucuccuuuac

SEQ ID NO: 246239 - RNA, 32 nt, Homo Sapiens
ucucaucgguuaaaacauaguuuuccggacuu

SEQ ID NO: 246240 - RNA, 32 nt, Homo Sapiens
uaaugaccugaauugaaagagaauuuggagcc

SEQ ID NO: 246241 - RNA, 32 nt, Homo Sapiens
uggaaggaggggacuggacgugcggagaauuc

SEQ ID NO: 246242 - RNA, 32 nt, Homo Sapiens
auuuuccuguguacuucaucuauuuguguaca

SEQ ID NO: 246243 - RNA, 32 nt, Homo Sapiens
auuaaaaauggcaggcuaggggcucuguuucc

SEQ ID NO: 246244 - RNA, 32 nt, Homo Sapiens
aacagucagagcagggagccucuuccucaacc

SEQ ID NO: 246245 - RNA, 32 nt, Homo Sapiens
cuccugccacccugcuggccgggagccccucc

SEQ ID NO: 246246 - RNA, 32 nt, Homo Sapiens
cggcacugcccccggccuuccaugagaagccg

SEQ ID NO: 246247 - RNA, 32 nt, Homo Sapiens
guggaaaaugcagcuuccaggucccacuaccc

SEQ ID NO: 246248 - RNA, 32 nt, Homo Sapiens
uuuucaugagagaagucacaugagaaaaaacu

SEQ ID NO: 246249 - RNA, 30 nt, Homo Sapiens
gagucaggcgcgcgcgggcaggguccccau

SEQ ID NO: 246250 - RNA, 32 nt, Homo Sapiens
ggacaaguaccaauggaaugcauauuccacug

SEQ ID NO: 246251 - RNA, 32 nt, Homo Sapiens
ugacauauguaugccuuaauucuuaaaucuga

SEQ ID NO: 246252 - RNA, 32 nt, Homo Sapiens
ucauuugguggguugguggcugggaauaucug

SEQ ID NO: 246253 - RNA, 32 nt, Homo Sapiens
acuuuuugauaaagagaaagauguuuacucau

SEQ ID NO: 246254 - RNA, 32 nt, Homo Sapiens
guuauguuuccuuuuucauauuucuugcaucc

SEQ ID NO: 246255 - RNA, 32 nt, Homo Sapiens
aauguagucuugggguggcuggauagacuucc

SEQ ID NO: 246256 - RNA, 32 nt, Homo Sapiens
acaguauuuuuggcagggagaaggugcgcagg

SEQ ID NO: 246257 - RNA, 32 nt, Homo Sapiens
cuggcauggaggaguuguuccaaacuggccuc

SEQ ID NO: 246258 - RNA, 32 nt, Homo Sapiens
uguguauuugucccggggaggguagcaguggg

SEQ ID NO: 246259 - RNA, 32 nt, Homo Sapiens
uaaggccucuucgugcccuuugggguugccca

SEQ ID NO: 246260 - RNA, 32 nt, Homo Sapiens
uggaaggagucgcugggagcagugcgguugga

SEQ ID NO: 246261 - RNA, 32 nt, Homo Sapiens
cucguuaaguauuuauacuuguaacuaacccc

SEQ ID NO: 246262 - RNA, 32 nt, Homo Sapiens
uuccccucucugagccucggugucuucaaccu

SEQ ID NO: 246263 - RNA, 32 nt, Homo Sapiens
gagaagaaacaaucagaaucauccaggggaag

SEQ ID NO: 246264 - RNA, 32 nt, Homo Sapiens
gggacucggcggaggaugggcuugcucucaau

SEQ ID NO: 246265 - RNA, 32 nt, Homo Sapiens
ugaauaugugcaaggucagauacauuucucaa

SEQ ID NO: 246266 - RNA, 32 nt, Homo Sapiens
cauagcacugguuaguauaucucaguaguuuc

SEQ ID NO: 246267 - RNA, 32 nt, Homo Sapiens
uuaaauggacauuuaaaagaauguuguucagg

SEQ ID NO: 246268 - RNA, 32 nt, Homo Sapiens
accugcuacuucugccgcugcuucugcacaga

SEQ ID NO: 246269 - RNA, 32 nt, Homo Sapiens
ugauacaauuuacuguauaacaacuuaauagu

SEQ ID NO: 246270 - RNA, 32 nt, Homo Sapiens
aauuucauuauuuuggguuuuugguuuuugca

SEQ ID NO: 246271 - RNA, 32 nt, Homo Sapiens
cuguuuguguaaacauacuagaguauacugcg

SEQ ID NO: 246272 - RNA, 32 nt, Homo Sapiens
agggcacgguggucagcgugcagcgggacggg

SEQ ID NO: 246273 - RNA, 32 nt, Homo Sapiens
uauguguguuguuuccauagcucuucacuucc

SEQ ID NO: 246274 - RNA, 32 nt, Homo Sapiens
ccuugcccaaggcagagcuguuccagcaagag

SEQ ID NO: 246275 - RNA, 32 nt, Homo Sapiens
uucggggaguuuuaguuuauauucccauagua

SEQ ID NO: 246276 - RNA, 32 nt, Homo Sapiens
agggcaggcagcccggccccagaguucccuua

SEQ ID NO: 246277 - RNA, 32 nt, Homo Sapiens
cuccccuugggcggcugagagccccagcugac

SEQ ID NO: 246278 - RNA, 32 nt, Homo Sapiens
guccaggaugcauuaccugcuaauccuuaggu

SEQ ID NO: 246279 - RNA, 32 nt, Homo Sapiens
caccaucgcaugcccagggaccacugccuggc

SEQ ID NO: 246280 - RNA, 32 nt, Homo Sapiens
cucagaaugaacuggauugugguguucacaag

SEQ ID NO: 246281 - RNA, 32 nt, Homo Sapiens
agcagcucaaagaagaaaaagaaggacugaac

SEQ ID NO: 246282 - RNA, 31 nt, Homo Sapiens
caccagcccugcagccugcccuaucuccgca

SEQ ID NO: 246283 - RNA, 32 nt, Homo Sapiens
aacuuucugaauuugcagcuaaucucggggaa

SEQ ID NO: 246284 - RNA, 32 nt, Homo Sapiens
caauucaugaguuaaaauauucaccagaugga

SEQ ID NO: 246285 - RNA, 32 nt, Homo Sapiens
uccaccuacuccccaaggucuuacccucccca

SEQ ID NO: 246286 - RNA, 32 nt, Homo Sapiens
uaaaugggaguucauuugggcugggguggagg

SEQ ID NO: 246287 - RNA, 32 nt, Homo Sapiens
cacauagagaauaucaguggcuugugcuugug

SEQ ID NO: 246288 - RNA, 32 nt, Homo Sapiens
gcagcuucacuccugaagccagcaaagaccac

SEQ ID NO: 246289 - RNA, 32 nt, Homo Sapiens
uggggcuaguugcuggaaauagacagauaaaa

SEQ ID NO: 246290 - RNA, 32 nt, Homo Sapiens
aggaucccagucaccugugugcaugucaagug

SEQ ID NO: 246291 - RNA, 32 nt, Homo Sapiens
gcagagcuugcagugagccuagauagcgccac

SEQ ID NO: 246292 - RNA, 32 nt, Homo Sapiens
ccgaaaucacaccacuguacuccagccuggug

SEQ ID NO: 246293 - RNA, 32 nt, Homo Sapiens
cucuguggcuacauauacacacacguauuucc

SEQ ID NO: 246294 - RNA, 32 nt, Homo Sapiens
gcuucugggaagacaacuaggauacuuucuac

SEQ ID NO: 246295 - RNA, 32 nt, Homo Sapiens
aguaugucccgcugccuggagagauggcccag

SEQ ID NO: 246296 - RNA, 32 nt, Homo Sapiens
aaacuacaaaaauuagccgggugugguggcgg

SEQ ID NO: 246297 - RNA, 32 nt, Homo Sapiens
gcagugucuccucagcugggcugcuuccacug

SEQ ID NO: 246298 - RNA, 32 nt, Homo Sapiens
aauuccuauccagaauaaaacugaaagcuuuc

SEQ ID NO: 246299 - RNA, 32 nt, Homo Sapiens
uaguuugacaauggguaauucuacucagaccc

SEQ ID NO: 246300 - RNA, 27 nt, Homo Sapiens
gcaugccucacaggaagaaaaagcccu

SEQ ID NO: 246301 - RNA, 32 nt, Homo Sapiens
uuccugcugucaugaaggacguaccgggcuuc

SEQ ID NO: 246302 - RNA, 32 nt, Homo Sapiens
ggugugugcagguaucuugcucucuaggccug

SEQ ID NO: 246303 - RNA, 32 nt, Homo Sapiens
acugaaucuauuuuuguuucgggucuuuaccu

SEQ ID NO: 246304 - RNA, 32 nt, Homo Sapiens
auccaguagugggaaaacuggggugggggugg

SEQ ID NO: 246305 - RNA, 32 nt, Homo Sapiens
acucggccaauccgcaucucagcccucucagg

SEQ ID NO: 246306 - RNA, 32 nt, Homo Sapiens
cagcagagcacagagacacauaaaaacucugg

SEQ ID NO: 246307 - RNA, 32 nt, Homo Sapiens
uuccuuguagaauugaaugcgaguggauuaau

SEQ ID NO: 246308 - RNA, 32 nt, Homo Sapiens
acugcccagacccuucagagccagcaggcagg

SEQ ID NO: 246309 - RNA, 32 nt, Homo Sapiens
aaucagaagcuggcagaguuguguuugcagug

SEQ ID NO: 246310 - RNA, 32 nt, Homo Sapiens
agcagugcaguuggauuguaaggaaaaauucc

SEQ ID NO: 246311 - RNA, 32 nt, Homo Sapiens
cucugcugccccagccuucuacagccgagccc

SEQ ID NO: 246312 - RNA, 32 nt, Homo Sapiens
uuuuugaaaaaauuaauaaaauagaccacuag

SEQ ID NO: 246313 - RNA, 32 nt, Homo Sapiens
auggggcggccgcgggagcccgagcgcgcgca

SEQ ID NO: 246314 - RNA, 32 nt, Homo Sapiens
cgggucccgcggcucccgcgcgcgaucugccg

SEQ ID NO: 246315 - RNA, 32 nt, Homo Sapiens
uucuucccggcggccgagcccuccuccccgcg

SEQ ID NO: 246316 - RNA, 32 nt, Homo Sapiens
cuuaaaauuaaaaaccuacaaaaguuggugua

SEQ ID NO: 246317 - RNA, 32 nt, Homo Sapiens
aaaaaaaaaucuguaucuuuuacugagaacac

SEQ ID NO: 246318 - RNA, 28 nt, Homo Sapiens
aggcaguugucuaauaugaacaauaauc

SEQ ID NO: 246319 - RNA, 32 nt, Homo Sapiens
gacccgggccucaaaucagggaggauacgcgg

SEQ ID NO: 246320 - RNA, 32 nt, Homo Sapiens
gcugccagcaaggagcuugcagucuuguagcu

SEQ ID NO: 246321 - RNA, 32 nt, Homo Sapiens
caggcugggcggguccauauccggguggaccg

SEQ ID NO: 246322 - RNA, 32 nt, Homo Sapiens
cugaggaauaugucacauuuucagucaaagaa

SEQ ID NO: 246323 - RNA, 31 nt, Homo Sapiens
ccaugauaaagauuucucagaguuugguucc

SEQ ID NO: 246324 - RNA, 32 nt, Homo Sapiens
agggcccugaccaucuucuccucccagggcca

SEQ ID NO: 246325 - RNA, 32 nt, Homo Sapiens
ccauuuguuguaaaugccaauaaaauauucac

SEQ ID NO: 246326 - RNA, 32 nt, Homo Sapiens
aauaucugcagggcuggacguggcggcucuug

SEQ ID NO: 246327 - RNA, 32 nt, Homo Sapiens
agggaccuugauuuuggggacacacauugcaa

SEQ ID NO: 246328 - RNA, 31 nt, Homo Sapiens
ucaggccgcacuggccugccccagcucucag

SEQ ID NO: 246329 - RNA, 32 nt, Homo Sapiens
cugcaugguuaccaguuuuucucacaacacug

SEQ ID NO: 246330 - RNA, 32 nt, Homo Sapiens
caugugagauccuacaggaaaagcauuccauu

SEQ ID NO: 246331 - RNA, 32 nt, Homo Sapiens
ggcauuguuccccccuuuuucuucccauaggc

SEQ ID NO: 246332 - RNA, 32 nt, Homo Sapiens
ccaaagugccugugagggcgggcccuccgcac

SEQ ID NO: 246333 - RNA, 32 nt, Homo Sapiens
uuauaguagugggaaagauacaugcuaagaaa

SEQ ID NO: 246334 - RNA, 32 nt, Homo Sapiens
caauaugugaauggaaaauucauaaaugaaug

SEQ ID NO: 246335 - RNA, 32 nt, Homo Sapiens
ccugcuugacugauaagccauuagcuagaccc

SEQ ID NO: 246336 - RNA, 32 nt, Homo Sapiens
aagaaaauucuauauccaucccaucuuuugug

SEQ ID NO: 246337 - RNA, 32 nt, Homo Sapiens
uuuuaauuaagugacagguccaagugugacau

SEQ ID NO: 246338 - RNA, 32 nt, Homo Sapiens
caucuagaacagcuuccacuuuggcagugagg

SEQ ID NO: 246339 - RNA, 32 nt, Homo Sapiens
ugaaaccaagguggcuauggcgguuccaguag

SEQ ID NO: 246340 - RNA, 31 nt, Homo Sapiens
cagcugguggucugucugccccgccugucug

SEQ ID NO: 246341 - RNA, 32 nt, Homo Sapiens
agccgugcccagccuggcaugcauaugcggug

SEQ ID NO: 246342 - RNA, 32 nt, Homo Sapiens
gaagccgcgccaugaaugaccggagcagucgg

SEQ ID NO: 246343 - RNA, 32 nt, Homo Sapiens
aaaaaggcauuuucuucaagaauuuuaaacac

SEQ ID NO: 246344 - RNA, 32 nt, Homo Sapiens
agcuuuccuuucugcccccacccacgcugccu

SEQ ID NO: 246345 - RNA, 32 nt, Homo Sapiens
cccuugcgaucccacggccgggacugcccgga

SEQ ID NO: 246346 - RNA, 32 nt, Homo Sapiens
gauggccggcagagccgccgagacgccgaaga

SEQ ID NO: 246347 - RNA, 32 nt, Homo Sapiens
ucaagagacaagcaguuuagaaucaggcagaa

SEQ ID NO: 246348 - RNA, 32 nt, Homo Sapiens
cacuuccccucccccaggagcccucaucugcu

SEQ ID NO: 246349 - RNA, 32 nt, Homo Sapiens
uugagaaaaaucaaaacaucauguagggugac

SEQ ID NO: 246350 - RNA, 32 nt, Homo Sapiens
uccuuugccugugccaagguuucugggaagaa

SEQ ID NO: 246351 - RNA, 32 nt, Homo Sapiens
cuugagcccaagcagcacuuuggguccugguu

SEQ ID NO: 246352 - RNA, 32 nt, Homo Sapiens
uucauggaaaauuuuagggcaaauuccagaug

SEQ ID NO: 246353 - RNA, 28 nt, Homo Sapiens
agagacacugcccccaggaugacacagg

SEQ ID NO: 246354 - RNA, 32 nt, Homo Sapiens
cuccuaucaaaggagcaauuuccaacuuaucu

SEQ ID NO: 246355 - RNA, 32 nt, Homo Sapiens
cccggggccugcaggagaaggacgcgcugcgc

SEQ ID NO: 246356 - RNA, 32 nt, Homo Sapiens
agcgaaccgagaccagcgagccgaccaugcgg

SEQ ID NO: 246357 - RNA, 32 nt, Homo Sapiens
uuuccacaauaggguucaaauuccugcaaaau

SEQ ID NO: 246358 - RNA, 32 nt, Homo Sapiens
accuucuucagaagcucacugcuuuggccccc

SEQ ID NO: 246359 - RNA, 32 nt, Homo Sapiens
uuuuguucaaaauaaaauaguugagagcaugc

SEQ ID NO: 246360 - RNA, 32 nt, Homo Sapiens
uauuguaaauguuuaauuuugucucaaauaua

SEQ ID NO: 246361 - RNA, 32 nt, Homo Sapiens
uggccugcccucagucugcuagguggggcugg

SEQ ID NO: 246362 - RNA, 32 nt, Homo Sapiens
gucccguggagauguucuuugcucuuauuauc

SEQ ID NO: 246363 - RNA, 32 nt, Homo Sapiens
gcacccccacgcccggcccgcagcaucccgcu

SEQ ID NO: 246364 - RNA, 32 nt, Homo Sapiens
uuccuuccugucaucuaaccucaguccugccu

SEQ ID NO: 246365 - RNA, 32 nt, Homo Sapiens
acaaacacacgcuuuaguuuagucuuggaguu

SEQ ID NO: 246366 - RNA, 30 nt, Homo Sapiens
guggcugcgauccucggggaaaccgaggug

SEQ ID NO: 246367 - RNA, 28 nt, Homo Sapiens
gaagggaggcggccgccguggccauucu

SEQ ID NO: 246368 - RNA, 32 nt, Homo Sapiens
cuggaucuccucccuccucccagggguucaga

SEQ ID NO: 246369 - RNA, 32 nt, Homo Sapiens
accugucuuccccuccucccauccaggucucc

SEQ ID NO: 246370 - RNA, 32 nt, Homo Sapiens
ucuguauguaaugugguauaucaauaaaaaau

SEQ ID NO: 246371 - RNA, 32 nt, Homo Sapiens
cacaaaagaacaggcugucaccugaccaccac

SEQ ID NO: 246372 - RNA, 32 nt, Homo Sapiens
cuccaagucuucugggcgcuccagguucugug

SEQ ID NO: 246373 - RNA, 32 nt, Homo Sapiens
gcuuuguuugguuuggccucgauuuagaacag

SEQ ID NO: 246374 - RNA, 32 nt, Homo Sapiens
acuccugcggugcggggcuggcugucuggcug

SEQ ID NO: 246375 - RNA, 32 nt, Homo Sapiens
uauaccucagucuauuauguaaaauuaaaaau

SEQ ID NO: 246376 - RNA, 31 nt, Homo Sapiens
gagucagaagaaaaacagaucagaccaagca

SEQ ID NO: 246377 - RNA, 31 nt, Homo Sapiens
aaggcgcaaaagaaaaagaaauuaaggcagg

SEQ ID NO: 246378 - RNA, 32 nt, Homo Sapiens
cugagagggcgccgccggcguccugaaggccc

SEQ ID NO: 246379 - RNA, 32 nt, Homo Sapiens
ggcgcacucgcagcucgggcgccgcgcgagcc

SEQ ID NO: 246380 - RNA, 32 nt, Homo Sapiens
uuuauaaaauuuuuauauuuuacaauguucag

SEQ ID NO: 246381 - RNA, 29 nt, Homo Sapiens
agaagugugacuuucccccaaaaguauuu

SEQ ID NO: 246382 - RNA, 32 nt, Homo Sapiens
ucaucucuuuuggagaguugcacuaaacauuc

SEQ ID NO: 246383 - RNA, 32 nt, Homo Sapiens
ugaugccuucccuccacggcccaggucuccuc

SEQ ID NO: 246384 - RNA, 32 nt, Homo Sapiens
gaaacacaaaaaugauguguaugaaaagcacc

SEQ ID NO: 246385 - RNA, 32 nt, Homo Sapiens
cccgguucuccgcuucuccccauccccuacuu

SEQ ID NO: 246386 - RNA, 32 nt, Homo Sapiens
ugaaugcccgucugcaggcccugacucugacc

SEQ ID NO: 246387 - RNA, 32 nt, Homo Sapiens
ugcauacugcgaaaaugagucuuuuaaauucu

SEQ ID NO: 246388 - RNA, 32 nt, Homo Sapiens
ugugcugcgcgcgcucaugcacgcggccgccc

SEQ ID NO: 246389 - RNA, 32 nt, Homo Sapiens
acagaggauacaucuauuuuuaucauuauuug

SEQ ID NO: 246390 - RNA, 32 nt, Homo Sapiens
gucaaguggaaacaacugucugguaguuuucu

SEQ ID NO: 246391 - RNA, 32 nt, Homo Sapiens
uggcccgggaugcugggcggcgucagguaacc

SEQ ID NO: 246392 - RNA, 32 nt, Homo Sapiens
ugauuggcuagugauucuuguuuucagaaggg

SEQ ID NO: 246393 - RNA, 32 nt, Homo Sapiens
aaaaacagaaaaaugcacaacagagggacaac

SEQ ID NO: 246394 - RNA, 32 nt, Homo Sapiens
ccuggccuugagggaggggugcagguguggcu

SEQ ID NO: 246395 - RNA, 28 nt, Homo Sapiens
accauguacagcuucaugggugguggcc

SEQ ID NO: 246396 - RNA, 32 nt, Homo Sapiens
uccgucucaaggaaaaaauaaaaauaaaaagc

SEQ ID NO: 246397 - RNA, 32 nt, Homo Sapiens
cccuagggccuggguggcaggggguggguggc

SEQ ID NO: 246398 - RNA, 32 nt, Homo Sapiens
accuggcaagguggggcccccuaccgcgcaau

SEQ ID NO: 246399 - RNA, 32 nt, Homo Sapiens
aggcugcugcgaaggccgcgggcccgugacug

SEQ ID NO: 246400 - RNA, 32 nt, Homo Sapiens
ugucaccagaauauuucuuucaugucuaauug

SEQ ID NO: 246401 - RNA, 29 nt, Homo Sapiens
uuguacauagugaggagcuuugaaacgag

SEQ ID NO: 246402 - RNA, 32 nt, Homo Sapiens
agugagggggagagagaagagaaggcugcauc

SEQ ID NO: 246403 - RNA, 32 nt, Homo Sapiens
gcaacacauuuuauuuuguuucaaguccacac

SEQ ID NO: 246404 - RNA, 32 nt, Homo Sapiens
gcugaaauuaaucaacgauucuugaaguugaa

SEQ ID NO: 246405 - RNA, 32 nt, Homo Sapiens
uuugucuucuauuuuuuaucuguuuuucuuuu

SEQ ID NO: 246406 - RNA, 32 nt, Homo Sapiens
aucucccagcugcacgcucgggcccggcucag

SEQ ID NO: 246407 - RNA, 32 nt, Homo Sapiens
auuuucacaauuuaucauguuuacuguuuaaa

SEQ ID NO: 246408 - RNA, 30 nt, Homo Sapiens
aggugugucugugcuucacucaggucucgu

SEQ ID NO: 246409 - RNA, 32 nt, Homo Sapiens
cauccauuuuucccuuucuuuaaaagaaacuu

SEQ ID NO: 246410 - RNA, 32 nt, Homo Sapiens
acuaugagauaaagauuuuagguuucaauugu

SEQ ID NO: 246411 - RNA, 32 nt, Homo Sapiens
cgaugaugaugaugaucaugaugaugaugauu

SEQ ID NO: 246412 - RNA, 32 nt, Homo Sapiens
acacagaaaggaaaugggaacuuuacauuuuu

SEQ ID NO: 246413 - RNA, 32 nt, Homo Sapiens
ggagaggcucugcugcacgaucucgcgcaccu

SEQ ID NO: 246414 - RNA, 32 nt, Homo Sapiens
ggagcaagggaggcggcugucugcgacacagc

SEQ ID NO: 246415 - RNA, 32 nt, Homo Sapiens
aggguuuggugugccugucuucugcccucccu

SEQ ID NO: 246416 - RNA, 32 nt, Homo Sapiens
aaauucuucaguuuuuuaaaucucuagggauu

SEQ ID NO: 246417 - RNA, 32 nt, Homo Sapiens
cgaggcccuuggcgggcacgggugucacggcc

SEQ ID NO: 246418 - RNA, 32 nt, Homo Sapiens
cucagggaagagcaggcagagccuuggagugc

SEQ ID NO: 246419 - RNA, 32 nt, Homo Sapiens
aggaauugccuuucuuuuuuaaacagcaucau

SEQ ID NO: 246420 - RNA, 32 nt, Homo Sapiens
cucacauuuguacaggcuacauagacuggugc

SEQ ID NO: 246421 - RNA, 32 nt, Homo Sapiens
ugaggacaaaaauuacaucuuaagcuaauucc

SEQ ID NO: 246422 - RNA, 32 nt, Homo Sapiens
cuauggagggaucagacagggcugggaacagc

SEQ ID NO: 246423 - RNA, 32 nt, Homo Sapiens
ccugcucaugcaaaaucauggaagugguuuaa

SEQ ID NO: 246424 - RNA, 32 nt, Homo Sapiens
ccgucucggcuuuccuucuccuuccucuaguc

SEQ ID NO: 246425 - RNA, 32 nt, Homo Sapiens
uaauaaauauuugcucucaugauugcuaaaaa

SEQ ID NO: 246426 - RNA, 32 nt, Homo Sapiens
agggucaccuccuguuugugaaaggggaccuu

SEQ ID NO: 246427 - RNA, 32 nt, Homo Sapiens
ugucugcaacauuuuuguuuucuuuuuuaaug

SEQ ID NO: 246428 - RNA, 32 nt, Homo Sapiens
caccuguaaccccagcacuuugggaggcugag

SEQ ID NO: 246429 - RNA, 32 nt, Homo Sapiens
cuuuaccaacuggcuagaacggaacagcauca

SEQ ID NO: 246430 - RNA, 32 nt, Homo Sapiens
aucucuucuaaggccuggcuaggccugaagcu

SEQ ID NO: 246431 - RNA, 32 nt, Homo Sapiens
agagguucuggguucugcccucuugcugucgu

SEQ ID NO: 246432 - RNA, 32 nt, Homo Sapiens
gcuggcgggaggaagcgcggugugaacaggga

SEQ ID NO: 246433 - RNA, 32 nt, Homo Sapiens
ggccacucaacagagaggaccaacauccaguc

SEQ ID NO: 246434 - RNA, 32 nt, Homo Sapiens
cauguccacaguuccuugggcugcugaggggc

SEQ ID NO: 246435 - RNA, 32 nt, Homo Sapiens
gccgcaucgagccccagcgcccggcccgcagc

SEQ ID NO: 246436 - RNA, 32 nt, Homo Sapiens
uggcaguuaguagcuauggggagcuuucauuu

SEQ ID NO: 246437 - RNA, 32 nt, Homo Sapiens
accuagagaagcugcacacccaggagcuuucc

SEQ ID NO: 246438 - RNA, 32 nt, Homo Sapiens
auauaaaauaggaucuuaauuuaacaguagac

SEQ ID NO: 246439 - RNA, 32 nt, Homo Sapiens
uucccccuguaguauuuuuaaaacuuuuuaga

SEQ ID NO: 246440 - RNA, 32 nt, Homo Sapiens
gcuuaucuggauauuucuuucuuuauuuauuu

SEQ ID NO: 246441 - RNA, 32 nt, Homo Sapiens
uguccagcagugucucccacuccuugugaagu

SEQ ID NO: 246442 - RNA, 32 nt, Homo Sapiens
ugaugggacugauauuaagagaaauaggaccu

SEQ ID NO: 246443 - RNA, 32 nt, Homo Sapiens
acuggcucugggcuccuccucgucucugcuuu

SEQ ID NO: 246444 - RNA, 32 nt, Homo Sapiens
guuaaugucugguguucuggucgggcgcagug

SEQ ID NO: 246445 - RNA, 32 nt, Homo Sapiens
aagaaaaaauaaaagguggauuugagcugugg

SEQ ID NO: 246446 - RNA, 32 nt, Homo Sapiens
gaauaccagcaguucacccauccaguacgagu

SEQ ID NO: 246447 - RNA, 32 nt, Homo Sapiens
gaaugguguucccuuugcuuggcuggggagcc

SEQ ID NO: 246448 - RNA, 32 nt, Homo Sapiens
gccugagggcuugagggaggcuggggaaaacc

SEQ ID NO: 246449 - RNA, 32 nt, Homo Sapiens
uuggccuucuaaaauacugagauuacaggugu

SEQ ID NO: 246450 - RNA, 32 nt, Homo Sapiens
uguuaagaguuccauuugcuucaauuaauuau

SEQ ID NO: 246451 - RNA, 32 nt, Homo Sapiens
auguauuaaaauguuaacuuugccuaaaaaua

SEQ ID NO: 246452 - RNA, 32 nt, Homo Sapiens
ucgcuguguggccuugggcaagucacuuaacc

SEQ ID NO: 246453 - RNA, 32 nt, Homo Sapiens
agggaaggugguggaaugucuauguuuuugau

SEQ ID NO: 246454 - RNA, 32 nt, Homo Sapiens
cuauccaaggggauggacccaggcucgugggg

SEQ ID NO: 246455 - RNA, 32 nt, Homo Sapiens
uaugcuaaaaauuuugucaccuaaguguuugg

SEQ ID NO: 246456 - RNA, 32 nt, Homo Sapiens
aaguucuacauucuauuauuguauuguaacac

SEQ ID NO: 246457 - RNA, 32 nt, Homo Sapiens
guucuagcauucacaugaacaccuggacuguu

SEQ ID NO: 246458 - RNA, 32 nt, Homo Sapiens
aagggugggcggcggcgggcgggcggugaguu

SEQ ID NO: 246459 - RNA, 32 nt, Homo Sapiens
caggauuuauuuguauuucacauauuacaauu

SEQ ID NO: 246460 - RNA, 32 nt, Homo Sapiens
ggcugucagggcgacuggccggaggagucaga

SEQ ID NO: 246461 - RNA, 32 nt, Homo Sapiens
caguggugguggcggcggcgcaagggugaggg

SEQ ID NO: 246462 - RNA, 32 nt, Homo Sapiens
acuucgaaacaaaauggaagaaaauaaucuac

SEQ ID NO: 246463 - RNA, 32 nt, Homo Sapiens
uguccagugaagcgucugaggacccgccgccc

SEQ ID NO: 246464 - RNA, 32 nt, Homo Sapiens
auaagauuauuccuacuggagagaaacuacaa

SEQ ID NO: 246465 - RNA, 32 nt, Homo Sapiens
uuuuggcaagcaaauacacacacacacacaua

SEQ ID NO: 246466 - RNA, 32 nt, Homo Sapiens
gaccggcccuggugggggccgcagucgagguc

SEQ ID NO: 246467 - RNA, 32 nt, Homo Sapiens
uucucuaaauaccagcuggcuggggcccagga

SEQ ID NO: 246468 - RNA, 32 nt, Homo Sapiens
aucauacucuccaggaaauauggagaaagaaa

SEQ ID NO: 246469 - RNA, 32 nt, Homo Sapiens
ugcccccguuccagcugacaucuugcacggug

SEQ ID NO: 246470 - RNA, 32 nt, Homo Sapiens
aacuuccugccaguuuagcauggacacugagg

SEQ ID NO: 246471 - RNA, 32 nt, Homo Sapiens
gcccugaaaaucaacgcaugauuaacauggcu

SEQ ID NO: 246472 - RNA, 32 nt, Homo Sapiens
uugcaggagacauuuucauaucaucaauguga

SEQ ID NO: 246473 - RNA, 32 nt, Homo Sapiens
caucucuccccucccuaugccuugcaggucgc

SEQ ID NO: 246474 - RNA, 32 nt, Homo Sapiens
cuucuucauuuuuaaccuguuuucauuuguaa

SEQ ID NO: 246475 - RNA, 32 nt, Homo Sapiens
agacuugggggcagaaguucagacacaccgug

SEQ ID NO: 246476 - RNA, 32 nt, Homo Sapiens
uacgauugaaaugaaaucacauaguucgugcu

SEQ ID NO: 246477 - RNA, 32 nt, Homo Sapiens
ugcacugaaaagggauagugcuuuugugaaau

SEQ ID NO: 246478 - RNA, 32 nt, Homo Sapiens
uauuuuccccuagcuuuccccagacacccugu

SEQ ID NO: 246479 - RNA, 32 nt, Homo Sapiens
aauaaagcugcuacuuuaacagagcaccuggc

SEQ ID NO: 246480 - RNA, 32 nt, Homo Sapiens
gagaaaggaaaacaaaaggaaauuuuaacaua

SEQ ID NO: 246481 - RNA, 32 nt, Homo Sapiens
uauuucauccaguuuguucuccggguguggcc

SEQ ID NO: 246482 - RNA, 32 nt, Homo Sapiens
augacaaagugauugaacauuggguggagcua

SEQ ID NO: 246483 - RNA, 32 nt, Homo Sapiens
aaauggaggguggaaggugugaucugugggac

SEQ ID NO: 246484 - RNA, 32 nt, Homo Sapiens
uuaguguuauuuauuuauaacuucuaccaugu

SEQ ID NO: 246485 - RNA, 32 nt, Homo Sapiens
gggaacccaucugugcugaaauguagauuucc

SEQ ID NO: 246486 - RNA, 30 nt, Homo Sapiens
ggucauauuugagcaugagaagcucacgca

SEQ ID NO: 246487 - RNA, 32 nt, Homo Sapiens
uugcacauggaaacccaaaggcauauaucugc

SEQ ID NO: 246488 - RNA, 32 nt, Homo Sapiens
acuaccugccagccuucuuccuugcucugcgc

SEQ ID NO: 246489 - RNA, 32 nt, Homo Sapiens
ggcgcucccuuuucuccacacccacacgccuc

SEQ ID NO: 246490 - RNA, 32 nt, Homo Sapiens
cgggccccgggaaggcgaccccugcccucagu

SEQ ID NO: 246491 - RNA, 32 nt, Homo Sapiens
ccucuguaccugcggcgcggcccgaggggcgg

SEQ ID NO: 246492 - RNA, 32 nt, Homo Sapiens
aguggcaauaaagggggaggcauauuauaaaa

SEQ ID NO: 246493 - RNA, 32 nt, Homo Sapiens
gugagccuaagacuuuuuuccccuuuugcaaa

SEQ ID NO: 246494 - RNA, 32 nt, Homo Sapiens
uuuacuggaaagauuacauacauuugagaaua

SEQ ID NO: 246495 - RNA, 30 nt, Homo Sapiens
caagaagaucaccacugcuguuguggaccc

SEQ ID NO: 246496 - RNA, 32 nt, Homo Sapiens
ggagugaggggaagaagcuguuacagaagugg

SEQ ID NO: 246497 - RNA, 32 nt, Homo Sapiens
uggaguugacuuucuucuguccaaacaaacaa

SEQ ID NO: 246498 - RNA, 32 nt, Homo Sapiens
uguguccuugugcaugagcuacgccugccucc

SEQ ID NO: 246499 - RNA, 32 nt, Homo Sapiens
caggcucaggggaggggcgcgcaugguccgcc

SEQ ID NO: 246500 - RNA, 32 nt, Homo Sapiens
accuugcucccucucccaaaucacacccaaaa

SEQ ID NO: 246501 - RNA, 32 nt, Homo Sapiens
ccugugcgcugggcuuggagccccaaguacgg

SEQ ID NO: 246502 - RNA, 32 nt, Homo Sapiens
agaguguugcuguuuauuuccugguuugguac

SEQ ID NO: 246503 - RNA, 32 nt, Homo Sapiens
cccagagaugacugaggaggacgcagaugaag

SEQ ID NO: 246504 - RNA, 32 nt, Homo Sapiens
uggacuaacaaggcaguagauuugccugugug

SEQ ID NO: 246505 - RNA, 32 nt, Homo Sapiens
cugcaugcuucccccaggccgucaagacuuga

SEQ ID NO: 246506 - RNA, 32 nt, Homo Sapiens
uuguaaagggauacuauaaaugugcuaauuau

SEQ ID NO: 246507 - RNA, 32 nt, Homo Sapiens
caggcagcagugcugaauccaugcccugcaau

SEQ ID NO: 246508 - RNA, 32 nt, Homo Sapiens
cucuccucugggcuccuccuugccuaaugcag

SEQ ID NO: 246509 - RNA, 32 nt, Homo Sapiens
augcccggacauuuucugaacggcaguaacaa

SEQ ID NO: 246510 - RNA, 32 nt, Homo Sapiens
acacccccuaaaauucucacccucagcuauuu

SEQ ID NO: 246511 - RNA, 32 nt, Homo Sapiens
gcucaagaaguaccccgcgcgggacagcggcc

SEQ ID NO: 246512 - RNA, 32 nt, Homo Sapiens
gcuggggccugggucagagcggugcugcccgu

SEQ ID NO: 246513 - RNA, 32 nt, Homo Sapiens
gguaauauagcucuuucuuuuauuaacuguuc

SEQ ID NO: 246514 - RNA, 32 nt, Homo Sapiens
ucaaguugcuuugucuuuuccauccucaucac

SEQ ID NO: 246515 - RNA, 32 nt, Homo Sapiens
gugccggaggaguuccagucaccgagcgaggg

SEQ ID NO: 246516 - RNA, 32 nt, Homo Sapiens
aggagggcaucugaaauugagaggagauuuca

SEQ ID NO: 246517 - RNA, 32 nt, Homo Sapiens
uuuccuuccuuccccucugaccccuaagcuuu

SEQ ID NO: 246518 - RNA, 32 nt, Homo Sapiens
uuuugaaaccaccuuugcaaaauuaugacuga

SEQ ID NO: 246519 - RNA, 32 nt, Homo Sapiens
cagcccuccguucucaagacagauggugcuuu

SEQ ID NO: 246520 - RNA, 32 nt, Homo Sapiens
caggucaccgucuccuuccaccccugcagugu

SEQ ID NO: 246521 - RNA, 32 nt, Homo Sapiens
gcacaccuacuccgccauggagcgccccgacg

SEQ ID NO: 246522 - RNA, 32 nt, Homo Sapiens
caaagcuugggguuucuuugguguuaccaucc

SEQ ID NO: 246523 - RNA, 32 nt, Homo Sapiens
cucacggcuguccgacuugcgcggcgguggcg

SEQ ID NO: 246524 - RNA, 32 nt, Homo Sapiens
gucccagcugucugaguguuuguccggcuguc

SEQ ID NO: 246525 - RNA, 32 nt, Homo Sapiens
uuucacaugaauuggaaauaucagaauaaagu

SEQ ID NO: 246526 - RNA, 32 nt, Homo Sapiens
cucuauauguagugcauuuuuaaacuugaaau

SEQ ID NO: 246527 - RNA, 32 nt, Homo Sapiens
aguugugcugguuuuuaaaugugcaucaagaa

SEQ ID NO: 246528 - RNA, 32 nt, Homo Sapiens
ccaucagcacuaacgcccugcuccaucggcac

SEQ ID NO: 246529 - RNA, 32 nt, Homo Sapiens
acauucuuaauuuauuugauaggagcaauggg

SEQ ID NO: 246530 - RNA, 32 nt, Homo Sapiens
agaaauacacuuuguaucuggaccucaaaauu

SEQ ID NO: 246531 - RNA, 32 nt, Homo Sapiens
acagcaauuucuuuuuuccccaagucagccuc

SEQ ID NO: 246532 - RNA, 32 nt, Homo Sapiens
cagucaggccccagguucuuccaugggugaac

SEQ ID NO: 246533 - RNA, 29 nt, Homo Sapiens
uaacauggguuauuuaguuuaacucuggc

SEQ ID NO: 246534 - RNA, 32 nt, Homo Sapiens
gguguaucaaggaacugcuggauuaugguagc

SEQ ID NO: 246535 - RNA, 32 nt, Homo Sapiens
aaaacagcaacugaacagagcuccacacaucu

SEQ ID NO: 246536 - RNA, 28 nt, Homo Sapiens
ugcccaggcuggccgccgccgugccgau

SEQ ID NO: 246537 - RNA, 32 nt, Homo Sapiens
aggaaagggcuuugaauuccccagauacugaa

SEQ ID NO: 246538 - RNA, 32 nt, Homo Sapiens
cuggauuuaauaagcuguguaacugguacucg

SEQ ID NO: 246539 - RNA, 32 nt, Homo Sapiens
ugagccauuguuaacaaugccuuuuuucuuca

SEQ ID NO: 246540 - RNA, 32 nt, Homo Sapiens
cucucugcaaugagcuuucucagcucucagcc

SEQ ID NO: 246541 - RNA, 32 nt, Homo Sapiens
agauggcauuacacugcaauugggaugucaca

SEQ ID NO: 246542 - RNA, 32 nt, Homo Sapiens
gauugauuuuguucuuuuuucuuaccaccucu

SEQ ID NO: 246543 - RNA, 32 nt, Homo Sapiens
aaggaagaagcacccucuccccggccuccucu

SEQ ID NO: 246544 - RNA, 32 nt, Homo Sapiens
auauccaaggaggcugucuugagaguggaaag

SEQ ID NO: 246545 - RNA, 32 nt, Homo Sapiens
agaccuggaacaagauucugcuucucugugau

SEQ ID NO: 246546 - RNA, 32 nt, Homo Sapiens
cucaucuccucugcccaaaaaugaugcucuuc

SEQ ID NO: 246547 - RNA, 32 nt, Homo Sapiens
acuugcaguaucuccacgacccgccccuacag

SEQ ID NO: 246548 - RNA, 32 nt, Homo Sapiens
cuaaacuuuuucucuuaagagcggucagagaa

SEQ ID NO: 246549 - RNA, 32 nt, Homo Sapiens
cuuugguagccugaguggucuuuuucaucucu

SEQ ID NO: 246550 - RNA, 32 nt, Homo Sapiens
gguggcccugcgcgcgcaccauccucgcgguc

SEQ ID NO: 246551 - RNA, 32 nt, Homo Sapiens
ccuggccaggcucccgucccagcccagccuag

SEQ ID NO: 246552 - RNA, 32 nt, Homo Sapiens
acaaauaaaugauaacaaaaccucaaaaaaaa

SEQ ID NO: 246553 - RNA, 32 nt, Homo Sapiens
auggcuccugcgccucgugcuuuccgcguaca

SEQ ID NO: 246554 - RNA, 32 nt, Homo Sapiens
auuuggagcaggcacgcgcggcccgggcgucc

SEQ ID NO: 246555 - RNA, 32 nt, Homo Sapiens
cauuugcagacguuaugaucuugcuuccaacu

SEQ ID NO: 246556 - RNA, 32 nt, Homo Sapiens
uauuaucuuuauacaaauuauucauuguguua

SEQ ID NO: 246557 - RNA, 32 nt, Homo Sapiens
gacagucuggaggucccagacaugcugcccac

SEQ ID NO: 246558 - RNA, 32 nt, Homo Sapiens
ggaacugcagcuuuugcugaauagcauuuuac

SEQ ID NO: 246559 - RNA, 32 nt, Homo Sapiens
ggaaugugguacaaagagccccaggcugguga

SEQ ID NO: 246560 - RNA, 32 nt, Homo Sapiens
ccuguacugauaguacuucccaguaugauauu

SEQ ID NO: 246561 - RNA, 32 nt, Homo Sapiens
uuaguuccucggggagccccuggugccccgga

SEQ ID NO: 246562 - RNA, 32 nt, Homo Sapiens
cacgagggcuuccgagagacucggccccugcu

SEQ ID NO: 246563 - RNA, 32 nt, Homo Sapiens
gacuauuuauaguggcuucucuuuuucuaaac

SEQ ID NO: 246564 - RNA, 32 nt, Homo Sapiens
uguucuuuucuggugauucuccaggccauuua

SEQ ID NO: 246565 - RNA, 32 nt, Homo Sapiens
cacuaggcuagacaaugcugccggggacugac

SEQ ID NO: 246566 - RNA, 32 nt, Homo Sapiens
gcaacccuucacaucaccccccucgaaggucg

SEQ ID NO: 246567 - RNA, 28 nt, Homo Sapiens
uuuaaaaauauuugucuagguccuucaa

SEQ ID NO: 246568 - RNA, 32 nt, Homo Sapiens
aaccaucaccucaggcucgucgugcaagugug

SEQ ID NO: 246569 - RNA, 32 nt, Homo Sapiens
cccgaggcagcugcugggggcugggcuuugag

SEQ ID NO: 246570 - RNA, 32 nt, Homo Sapiens
aacuguugguauaugggaaugcuagugguuuu

SEQ ID NO: 246571 - RNA, 32 nt, Homo Sapiens
ccgcggggaaccugccguuguuugucaaaaaa

SEQ ID NO: 246572 - RNA, 32 nt, Homo Sapiens
gaugcaggccucugaaggaaaaggugcacauu

SEQ ID NO: 246573 - RNA, 32 nt, Homo Sapiens
aucucccuaccucccacugcacugccgguuuc

SEQ ID NO: 246574 - RNA, 32 nt, Homo Sapiens
gcucucgcccgcuagcucuccucccuuccgcu

SEQ ID NO: 246575 - RNA, 32 nt, Homo Sapiens
ucagucgccaaggcccaggagaaccccgguga

SEQ ID NO: 246576 - RNA, 32 nt, Homo Sapiens
gccacagguggggacgaggcugagagagucag

SEQ ID NO: 246577 - RNA, 32 nt, Homo Sapiens
auugucaagcuuaugaagguuccaaucagauc

SEQ ID NO: 246578 - RNA, 32 nt, Homo Sapiens
aagaaguauuuaagcugugcuguggugugaga

SEQ ID NO: 246579 - RNA, 32 nt, Homo Sapiens
guggugacugagguacaggaaacuacuaaucu

SEQ ID NO: 246580 - RNA, 32 nt, Homo Sapiens
ucuugcaaccucaccucacagcauggagagag

SEQ ID NO: 246581 - RNA, 32 nt, Homo Sapiens
uggggaaaaaauuuuaauuuugaaaaaauuua

SEQ ID NO: 246582 - RNA, 32 nt, Homo Sapiens
gacugaucuaaugugaaauguaaguauccuua

SEQ ID NO: 246583 - RNA, 32 nt, Homo Sapiens
caagagacagagcuguccugagaaugcuuugu

SEQ ID NO: 246584 - RNA, 32 nt, Homo Sapiens
gauuagucgggguucuuuuuccgggauguuuu

SEQ ID NO: 246585 - RNA, 32 nt, Homo Sapiens
acaggccucaaggggaagguauaucaggaacc

SEQ ID NO: 246586 - RNA, 32 nt, Homo Sapiens
uuuauucugcugucuggcuucaugccauugca

SEQ ID NO: 246587 - RNA, 32 nt, Homo Sapiens
aagaauacuugauguuuaugaugauuguggua

SEQ ID NO: 246588 - RNA, 32 nt, Homo Sapiens
uuggacagaacacuaacacuaaauaguuuuua

SEQ ID NO: 246589 - RNA, 32 nt, Homo Sapiens
cccgcccgcccggcgaccagcaaggaguuggc

SEQ ID NO: 246590 - RNA, 32 nt, Homo Sapiens
gccucccgccgccucccgcgcggccauggacu

SEQ ID NO: 246591 - RNA, 32 nt, Homo Sapiens
guugcguacuguaucauauuguagcuauuagg

SEQ ID NO: 246592 - RNA, 32 nt, Homo Sapiens
cauaauaacaauaauaauaaaugaugauaaag

SEQ ID NO: 246593 - RNA, 32 nt, Homo Sapiens
aaaaggcugucuuggaccaugaaacaguaaac

SEQ ID NO: 246594 - RNA, 32 nt, Homo Sapiens
cugguguggagcggcgagucccggggcggugc

SEQ ID NO: 246595 - RNA, 32 nt, Homo Sapiens
gccugagauugugagucaacgacuuugcuauc

SEQ ID NO: 246596 - RNA, 32 nt, Homo Sapiens
agguuuaacauuuuguacaaaauggaaccugu

SEQ ID NO: 246597 - RNA, 32 nt, Homo Sapiens
caccagacuaaaucuguauuaugugauauuga

SEQ ID NO: 246598 - RNA, 32 nt, Homo Sapiens
agggauuacuuagaagacauuuuuguacaugc

SEQ ID NO: 246599 - RNA, 32 nt, Homo Sapiens
aacugaaaucauacuucuuaggguuaugauua

SEQ ID NO: 246600 - RNA, 32 nt, Homo Sapiens
gaggggaccccggagcugggcugggcuguggc

SEQ ID NO: 246601 - RNA, 32 nt, Homo Sapiens
cgcgcccgaggagcugcagguggcagcccagg

SEQ ID NO: 246602 - RNA, 32 nt, Homo Sapiens
acccgaccuuccucucuguccuccccucccac

SEQ ID NO: 246603 - RNA, 32 nt, Homo Sapiens
cugcccccagggucccucccccgccgccagca

SEQ ID NO: 246604 - RNA, 32 nt, Homo Sapiens
cauucugcuugagggagggaauagaaaggggc

SEQ ID NO: 246605 - RNA, 32 nt, Homo Sapiens
aaacugcuuuuguaguguguuuucauaacaac

SEQ ID NO: 246606 - RNA, 32 nt, Homo Sapiens
agggaaacguauucucucuuuucuacuuuaca

SEQ ID NO: 246607 - RNA, 32 nt, Homo Sapiens
ggauuaagaaacaaaaacaauccagaaauuga

SEQ ID NO: 246608 - RNA, 32 nt, Homo Sapiens
uuuagagaaauugugaaacaagcaaaacaaaa

SEQ ID NO: 246609 - RNA, 32 nt, Homo Sapiens
cugugccuaugcccuggcguugccaggcuuaa

SEQ ID NO: 246610 - RNA, 32 nt, Homo Sapiens
ggcaucgguccuggcuggucuuguuuauuuug

SEQ ID NO: 246611 - RNA, 32 nt, Homo Sapiens
uuugguucuguuaaguuuuuugauggcuuuuc

SEQ ID NO: 246612 - RNA, 32 nt, Homo Sapiens
ccugucucguuugccuugaccgccaugugaaa

SEQ ID NO: 246613 - RNA, 32 nt, Homo Sapiens
cuauucccugugucugccaaccccaggauccc

SEQ ID NO: 246614 - RNA, 32 nt, Homo Sapiens
cagcagcagcagcagcagcagcagcaagagua

SEQ ID NO: 246615 - RNA, 32 nt, Homo Sapiens
guaacuagcugagauaggacuggagucccuag

SEQ ID NO: 246616 - RNA, 32 nt, Homo Sapiens
caacuguauuggguagugggaggugggaggga

SEQ ID NO: 246617 - RNA, 32 nt, Homo Sapiens
ucaccucggccgggcguccguggcagcucacu

SEQ ID NO: 246618 - RNA, 32 nt, Homo Sapiens
gcaggcaggaggaggcggaggcggggguacga

SEQ ID NO: 246619 - RNA, 32 nt, Homo Sapiens
cuacccucgaucugggugggugucaucuaguc

SEQ ID NO: 246620 - RNA, 32 nt, Homo Sapiens
ccggcuccucucccgcugcagcagccgcgcug

SEQ ID NO: 246621 - RNA, 32 nt, Homo Sapiens
caugcuagcaaggcccaccuuccugaccuccc

SEQ ID NO: 246622 - RNA, 32 nt, Homo Sapiens
gucugccuuguacuucuagaaagagacacaaa

SEQ ID NO: 246623 - RNA, 32 nt, Homo Sapiens
uuuuuaguaugugcaauuuaauauagaaagau

SEQ ID NO: 246624 - RNA, 32 nt, Homo Sapiens
gcccggcggcugcugcugcugcugacgcugcu

SEQ ID NO: 246625 - RNA, 32 nt, Homo Sapiens
ggaccacaggaggugugauagagccuuugauc

SEQ ID NO: 246626 - RNA, 32 nt, Homo Sapiens
ccucaaccgagaccuugagcuugcagcuacgu

SEQ ID NO: 246627 - RNA, 32 nt, Homo Sapiens
guccuccccauccccaggcaccucugagccag

SEQ ID NO: 246628 - RNA, 32 nt, Homo Sapiens
agcuggggaaacugaggccuggaauggcccag

SEQ ID NO: 246629 - RNA, 32 nt, Homo Sapiens
cggcagcugagccagcgcggcgggucuggagc

SEQ ID NO: 246630 - RNA, 32 nt, Homo Sapiens
gaacuucaccuccauaucagaagugccaauaa

SEQ ID NO: 246631 - RNA, 32 nt, Homo Sapiens
cauuauccccaccuuaguucuuucucucugau

SEQ ID NO: 246632 - RNA, 32 nt, Homo Sapiens
gagucugugaucuucuucauggcugcugucuc

SEQ ID NO: 246633 - RNA, 32 nt, Homo Sapiens
uauuaguaguuacuuacugcuaacauagucag

SEQ ID NO: 246634 - RNA, 32 nt, Homo Sapiens
accuuccgcagcacccagcaucaaaggacgga

SEQ ID NO: 246635 - RNA, 30 nt, Homo Sapiens
uuuugaccacuugccaagucccugucucuu

SEQ ID NO: 246636 - RNA, 32 nt, Homo Sapiens
acaguuggcuccuggccacugcugugagccgu

SEQ ID NO: 246637 - RNA, 32 nt, Homo Sapiens
cuugugugggucugguaugugacaaaggccug

SEQ ID NO: 246638 - RNA, 32 nt, Homo Sapiens
aauauuuguugaccauauguguuguacacugu

SEQ ID NO: 246639 - RNA, 32 nt, Homo Sapiens
aucucgggauaugaggccucggaggcuggggu

SEQ ID NO: 246640 - RNA, 32 nt, Homo Sapiens
acccguggcaugugucccaggacagcuuugaa

SEQ ID NO: 246641 - RNA, 32 nt, Homo Sapiens
auuguaaaaaauacaggaaaccaccccucacc

SEQ ID NO: 246642 - RNA, 32 nt, Homo Sapiens
ggccagaggguggggcagguggcggcgauggc

SEQ ID NO: 246643 - RNA, 32 nt, Homo Sapiens
ccuuguucugguguuguagagaugugauuagg

SEQ ID NO: 246644 - RNA, 32 nt, Homo Sapiens
agucagccaagaucgugccacugcacaccauc

SEQ ID NO: 246645 - RNA, 32 nt, Homo Sapiens
acaggcuggaggaggguuugggcagagcgaag

SEQ ID NO: 246646 - RNA, 32 nt, Homo Sapiens
gcugggagggucaccaggucccuuuuccuucc

SEQ ID NO: 246647 - RNA, 32 nt, Homo Sapiens
gggaaaugggcauacaguacugggaaaugggc

SEQ ID NO: 246648 - RNA, 32 nt, Homo Sapiens
agugccucuuugcuaacagcaacaucugcaag

SEQ ID NO: 246649 - RNA, 32 nt, Homo Sapiens
aagacucugggccccaggacucaccuaaacug

SEQ ID NO: 246650 - RNA, 32 nt, Homo Sapiens
acguuguugggucauuuuuuauccauuaagcc

SEQ ID NO: 246651 - RNA, 32 nt, Homo Sapiens
gcugugcccuccccuggcacucugacugcaug

SEQ ID NO: 246652 - RNA, 32 nt, Homo Sapiens
aagauaaaagguuucaugugcaaugcagauga

SEQ ID NO: 246653 - RNA, 32 nt, Homo Sapiens
auucaugacaccuuugacucuucuacugucuc

SEQ ID NO: 246654 - RNA, 32 nt, Homo Sapiens
uucccaaaacaaugguguggugaaugugugag

SEQ ID NO: 246655 - RNA, 32 nt, Homo Sapiens
uccuggagucauuugugggaguuagggucuua

SEQ ID NO: 246656 - RNA, 32 nt, Homo Sapiens
uaucacaguaugcacacacacacacacacaac

SEQ ID NO: 246657 - RNA, 32 nt, Homo Sapiens
ggcuucuucagcuguuuguuugauguguuugg

SEQ ID NO: 246658 - RNA, 32 nt, Homo Sapiens
uaaugagaaaaguuuuaaauguaguacagguu

SEQ ID NO: 246659 - RNA, 31 nt, Homo Sapiens
gcaaggcggcacuccuggcgcugcgggcguc

SEQ ID NO: 246660 - RNA, 32 nt, Homo Sapiens
cgaccaccgcugcuuccagcccggggcggcgc

SEQ ID NO: 246661 - RNA, 32 nt, Homo Sapiens
cccaggaagaucuggccuccguccuaugccca

SEQ ID NO: 246662 - RNA, 32 nt, Homo Sapiens
cgcugugcgagcgggcgggcggcgagugcgug

SEQ ID NO: 246663 - RNA, 32 nt, Homo Sapiens
acccagggcugccugucucgcuucucuuuaug

SEQ ID NO: 246664 - RNA, 32 nt, Homo Sapiens
caaaugaugcccucugacuaguagauuucuau

SEQ ID NO: 246665 - RNA, 32 nt, Homo Sapiens
uuuagaaggagaaacuuaaguguggaaugcau

SEQ ID NO: 246666 - RNA, 32 nt, Homo Sapiens
uaaauuaaaaaauacugacuggcuggcaggca

SEQ ID NO: 246667 - RNA, 32 nt, Homo Sapiens
ucaccuuccuuccuuugacacaccagucuuuc

SEQ ID NO: 246668 - RNA, 32 nt, Homo Sapiens
uuacaaaaauggcccaaaauaguucuccccca

SEQ ID NO: 246669 - RNA, 32 nt, Homo Sapiens
uuguccacauuuuauuguuuuccuuuuauuuc

SEQ ID NO: 246670 - RNA, 32 nt, Homo Sapiens
accuauauaugaugaaguggaauuggaugcau

SEQ ID NO: 246671 - RNA, 32 nt, Homo Sapiens
acuuaguucucaggcagagacaucuuugggcc

SEQ ID NO: 246672 - RNA, 32 nt, Homo Sapiens
ucucuguaaaaugucuguucuacuucacacag

SEQ ID NO: 246673 - RNA, 32 nt, Homo Sapiens
gauuuaauuuaguuccacagauuuuacugaua

SEQ ID NO: 246674 - RNA, 32 nt, Homo Sapiens
gagauggcgggggcucuggagauggcgggggc

SEQ ID NO: 246675 - RNA, 32 nt, Homo Sapiens
gaguuucauguaugaaaacauaaaauugaaaa

SEQ ID NO: 246676 - RNA, 32 nt, Homo Sapiens
cuggaaacaaaguacuguugaaaccagcuugg

SEQ ID NO: 246677 - RNA, 32 nt, Homo Sapiens
uuacuaagccccaagagacauuuccugugcua

SEQ ID NO: 246678 - RNA, 32 nt, Homo Sapiens
ugacccgugucuucauuuuuggcacucuuauu

SEQ ID NO: 246679 - RNA, 32 nt, Homo Sapiens
auucuuuaaugaucaaggaagggugucuuuac

SEQ ID NO: 246680 - RNA, 32 nt, Homo Sapiens
gacuggucuugaacucuugaccucaggugauc

SEQ ID NO: 246681 - RNA, 32 nt, Homo Sapiens
acagugacauuugauucaauuguugagcugua

SEQ ID NO: 246682 - RNA, 32 nt, Homo Sapiens
guucuacccuccccacagaccuaagcugcucc

SEQ ID NO: 246683 - RNA, 32 nt, Homo Sapiens
aggcagacacacugacaccucccgaaguggac

SEQ ID NO: 246684 - RNA, 32 nt, Homo Sapiens
ugagguggaggggccgcaagcugcugaccggc

SEQ ID NO: 246685 - RNA, 32 nt, Homo Sapiens
uucuuguugcuguuagaauagugcuauauauc

SEQ ID NO: 246686 - RNA, 32 nt, Homo Sapiens
cucgugucguccugucucuggugcugcaucca

SEQ ID NO: 246687 - RNA, 30 nt, Homo Sapiens
gccaccacugaugccacccaggaccucgga

SEQ ID NO: 246688 - RNA, 32 nt, Homo Sapiens
aaaagguaaaagacguaauauguggccuaagg

SEQ ID NO: 246689 - RNA, 32 nt, Homo Sapiens
aauuagccaggcgugguggugcaugccuauaa

SEQ ID NO: 246690 - RNA, 32 nt, Homo Sapiens
gauuggccgggcgugguggugcgugccuguga

SEQ ID NO: 246691 - RNA, 32 nt, Homo Sapiens
aauccucggugucaaggaacuuggaaaaaagu

SEQ ID NO: 246692 - RNA, 32 nt, Homo Sapiens
auauuguuuuuuuaaauuuucuuaauugagag

SEQ ID NO: 246693 - RNA, 31 nt, Homo Sapiens
gccucgcugccggugggaggaagcgagaggg

SEQ ID NO: 246694 - RNA, 32 nt, Homo Sapiens
ccauauaugugaaugaaauuauguaaaagaau

SEQ ID NO: 246695 - RNA, 32 nt, Homo Sapiens
auaagagcaaggaaacaaggaauaaauucagg

SEQ ID NO: 246696 - RNA, 32 nt, Homo Sapiens
accugugugcagcugggagccuccuuccuccc

SEQ ID NO: 246697 - RNA, 32 nt, Homo Sapiens
auaucaauuuaaaauuugcuagugguuugaaa

SEQ ID NO: 246698 - RNA, 32 nt, Homo Sapiens
gcugcaguggcuuccucuggggugucaccaag

SEQ ID NO: 246699 - RNA, 32 nt, Homo Sapiens
ucggagcaacuggcauggcccgagccauggcc

SEQ ID NO: 246700 - RNA, 32 nt, Homo Sapiens
uuucccgcggcuguucgcuguuccaguggguc

SEQ ID NO: 246701 - RNA, 32 nt, Homo Sapiens
auuugggucccuuccuccccagccccauuuuu

SEQ ID NO: 246702 - RNA, 32 nt, Homo Sapiens
uggacccguugccugccuuugcccuggacucc

SEQ ID NO: 246703 - RNA, 32 nt, Homo Sapiens
cauuaagcucugccuuccuucugcuuuuugga

SEQ ID NO: 246704 - RNA, 32 nt, Homo Sapiens
gcuccuugcuguucaccuccucuuuccugaug

SEQ ID NO: 246705 - RNA, 32 nt, Homo Sapiens
cugcacuuugcacgggcugggcuggucguggu

SEQ ID NO: 246706 - RNA, 32 nt, Homo Sapiens
acaccuaugaaacauauguuggcugccucugc

SEQ ID NO: 246707 - RNA, 32 nt, Homo Sapiens
ucccgguuuccuguccuucuccccucccagcu

SEQ ID NO: 246708 - RNA, 32 nt, Homo Sapiens
ugaagcuuugguaccucuucugaguaauguaa

SEQ ID NO: 246709 - RNA, 32 nt, Homo Sapiens
gagaaaacugaaacagaagggcgguucauucu

SEQ ID NO: 246710 - RNA, 32 nt, Homo Sapiens
cuuuuuuuaauaaauacacauaaaaaccaaaa

SEQ ID NO: 246711 - RNA, 32 nt, Homo Sapiens
acaggaauaaguagacacuuugaaaauggauu

SEQ ID NO: 246712 - RNA, 32 nt, Homo Sapiens
uaacagccaccacauuuucaaaacagauuugu

SEQ ID NO: 246713 - RNA, 32 nt, Homo Sapiens
aggaggugggucuaggcaggggaaauuggggu

SEQ ID NO: 246714 - RNA, 32 nt, Homo Sapiens
uauaauauucagacuauucuuaaaaugggaca

SEQ ID NO: 246715 - RNA, 32 nt, Homo Sapiens
ggcccaccauucucacuggaaaacaguggucu

SEQ ID NO: 246716 - RNA, 32 nt, Homo Sapiens
uugguguggguucauuggcauucuuugcaaua

SEQ ID NO: 246717 - RNA, 32 nt, Homo Sapiens
cauguaagguggagacagaaaaguauacaugg

SEQ ID NO: 246718 - RNA, 32 nt, Homo Sapiens
uuccccgccccgagcagaaaggcauugacguu

SEQ ID NO: 246719 - RNA, 32 nt, Homo Sapiens
aagcacaccacaauucucccuaucuugugaag

SEQ ID NO: 246720 - RNA, 32 nt, Homo Sapiens
caggaagcagugcccuggaaaaaacccaaagg

SEQ ID NO: 246721 - RNA, 32 nt, Homo Sapiens
gccagggcaccucgcucccucgccucuggcag

SEQ ID NO: 246722 - RNA, 32 nt, Homo Sapiens
gccccucccgcacucugcugaccgcgcacuag

SEQ ID NO: 246723 - RNA, 32 nt, Homo Sapiens
agugugaauuucuauuugggaaggagaaaaua

SEQ ID NO: 246724 - RNA, 32 nt, Homo Sapiens
auugucugugaaauauaaacauuaauauauaa

SEQ ID NO: 246725 - RNA, 32 nt, Homo Sapiens
cuggaaccaaggaaacuaacaauguagguuac

SEQ ID NO: 246726 - RNA, 32 nt, Homo Sapiens
agguaucagguggcaauuuagaauuccaguca

SEQ ID NO: 246727 - RNA, 32 nt, Homo Sapiens
acagugcccagugcccaucuucguucgucucc

SEQ ID NO: 246728 - RNA, 32 nt, Homo Sapiens
gccggcucggcuucugaccuggcaccgcugcu

SEQ ID NO: 246729 - RNA, 29 nt, Homo Sapiens
gugauuuaauuauaaugauaaugccacag

SEQ ID NO: 246730 - RNA, 32 nt, Homo Sapiens
gcuggccggcgccguacugccugcguuguguc

SEQ ID NO: 246731 - RNA, 32 nt, Homo Sapiens
uuguaaaauauuauaagaaggcauggaaaugu

SEQ ID NO: 246732 - RNA, 32 nt, Homo Sapiens
cacagugacaacacacaccaugacaacgacac

SEQ ID NO: 246733 - RNA, 32 nt, Homo Sapiens
aucuguagucccaauuacucgggaggcugcag

SEQ ID NO: 246734 - RNA, 32 nt, Homo Sapiens
gacucuggaguagcagaggggcugggaaagag

SEQ ID NO: 246735 - RNA, 32 nt, Homo Sapiens
ugggaggccaagaugggaggaucgcuugagcc

SEQ ID NO: 246736 - RNA, 32 nt, Homo Sapiens
ccagucagcucuuguacagacaugugcucugg

SEQ ID NO: 246737 - RNA, 32 nt, Homo Sapiens
aaagccucgugcgcagcuaacucgcgagcuga

SEQ ID NO: 246738 - RNA, 32 nt, Homo Sapiens
gaagcuucauggaccuuguuaaaguuuuuucu

SEQ ID NO: 246739 - RNA, 32 nt, Homo Sapiens
uggcaugaucauggcucgcugcggccuugacc

SEQ ID NO: 246740 - RNA, 32 nt, Homo Sapiens
ccagcccucagacuggaucuucugccuccaaa

SEQ ID NO: 246741 - RNA, 31 nt, Homo Sapiens
augaaucaugauuauauucuaacugagauau

SEQ ID NO: 246742 - RNA, 32 nt, Homo Sapiens
gaucuggcucaggucacuccuccagcuacgaa

SEQ ID NO: 246743 - RNA, 32 nt, Homo Sapiens
gaauaggaacagcucuggucugcagcucccag

SEQ ID NO: 246744 - RNA, 32 nt, Homo Sapiens
cgaaagcccccucuucaacuccucucacuuuu

SEQ ID NO: 246745 - RNA, 32 nt, Homo Sapiens
gguguggagugaagaacaugcuguauguuacu

SEQ ID NO: 246746 - RNA, 32 nt, Homo Sapiens
gcccgaccucuuaggcgccgggacccucaggc

SEQ ID NO: 246747 - RNA, 32 nt, Homo Sapiens
cccgcucuucuggccuguugagcccgcucccu

SEQ ID NO: 246748 - RNA, 32 nt, Homo Sapiens
gggcauuggaagcucucuccaccugaaccaug

SEQ ID NO: 246749 - RNA, 32 nt, Homo Sapiens
ggaugcaggaaagagggugccucggugggaga

SEQ ID NO: 246750 - RNA, 32 nt, Homo Sapiens
uuuguaggggcacuaauccagcccuuaaaucc

SEQ ID NO: 246751 - RNA, 32 nt, Homo Sapiens
agaugaguuuaaaaaauuacauacaaacagcu

SEQ ID NO: 246752 - RNA, 32 nt, Homo Sapiens
uuuccuuaguuuuuaccuuguuuucucuauag

SEQ ID NO: 246753 - RNA, 32 nt, Homo Sapiens
auuacuguccuagaugagacauggacuguauu

SEQ ID NO: 246754 - RNA, 32 nt, Homo Sapiens
cuggccgugugagcccauaucccacucucacg

SEQ ID NO: 246755 - RNA, 32 nt, Homo Sapiens
ugugaagcaaacugcccuuuguccucaaagaa

SEQ ID NO: 246756 - RNA, 32 nt, Homo Sapiens
gcagagaggcuguucgcagagcugcggaagau

SEQ ID NO: 246757 - RNA, 32 nt, Homo Sapiens
ggguguccuggacccgcugcuccagcuccugc

SEQ ID NO: 246758 - RNA, 32 nt, Homo Sapiens
cucuccagccucuggaggaacucagggcccug

SEQ ID NO: 246759 - RNA, 32 nt, Homo Sapiens
ccucagguggaucgccgcggccccuccuccca

SEQ ID NO: 246760 - RNA, 32 nt, Homo Sapiens
uuugcuuuuuaaaaaaugcccuauuguaaguu

SEQ ID NO: 246761 - RNA, 31 nt, Homo Sapiens
ccaucuaaaaauacaaaaacugauuguucag

SEQ ID NO: 246762 - RNA, 32 nt, Homo Sapiens
aucuccauacagaacuuucucaucuacguggc

SEQ ID NO: 246763 - RNA, 32 nt, Homo Sapiens
gggaugagaugacugauguguguguugcccug

SEQ ID NO: 246764 - RNA, 32 nt, Homo Sapiens
ucgucgcagcuggccuggccugcuccaggacu

SEQ ID NO: 246765 - RNA, 32 nt, Homo Sapiens
uuugguacuguaucuugaaacuugugaaauaa

SEQ ID NO: 246766 - RNA, 32 nt, Homo Sapiens
ugcuuugaaaaacuuaaaaagcccccguuuac

SEQ ID NO: 246767 - RNA, 32 nt, Homo Sapiens
gcagcuuuaaacaaauucauauucugucugga

SEQ ID NO: 246768 - RNA, 32 nt, Homo Sapiens
cacucgagaaguauuacuccaauguuaugauc

SEQ ID NO: 246769 - RNA, 32 nt, Homo Sapiens
ucccuccggccgcccgagcucccggccucucu

SEQ ID NO: 246770 - RNA, 31 nt, Homo Sapiens
ucaaggaaauaaacacgauaauuucagauag

SEQ ID NO: 246771 - RNA, 32 nt, Homo Sapiens
uacugagagauuagggacuccacagcugccuu

SEQ ID NO: 246772 - RNA, 32 nt, Homo Sapiens
gaacucaaaaggagaacugugcucucccaaag

SEQ ID NO: 246773 - RNA, 32 nt, Homo Sapiens
agagucuucuaaaauagcuuagauguuguaau

SEQ ID NO: 246774 - RNA, 29 nt, Homo Sapiens
ccuguugugacuuugcuuuuggggucuau

SEQ ID NO: 246775 - RNA, 32 nt, Homo Sapiens
cguucuacuuuauucuguuuuacaauaagcau

SEQ ID NO: 246776 - RNA, 32 nt, Homo Sapiens
uugccucuaaaauaaauguaggagaaaaaaaa

SEQ ID NO: 246777 - RNA, 32 nt, Homo Sapiens
cuccaggaagagccaccaucccugcccccguu

SEQ ID NO: 246778 - RNA, 32 nt, Homo Sapiens
gcuuggaguggcucacgguggaugcauugacg

SEQ ID NO: 246779 - RNA, 32 nt, Homo Sapiens
guuuaggcaccccuuuccccagccucuccucc

SEQ ID NO: 246780 - RNA, 32 nt, Homo Sapiens
gggcccuccugcugccagcagguugggguggu

SEQ ID NO: 246781 - RNA, 32 nt, Homo Sapiens
aucuaccucuuggggugugucaaggguaaaag

SEQ ID NO: 246782 - RNA, 32 nt, Homo Sapiens
agagccgcagggcuccauccccggccugggag

SEQ ID NO: 246783 - RNA, 32 nt, Homo Sapiens
cccgggggaggguggcgccgugagagagcggg

SEQ ID NO: 246784 - RNA, 32 nt, Homo Sapiens
uucauccuucagguaccagccauccagacagu

SEQ ID NO: 246785 - RNA, 32 nt, Homo Sapiens
uuuagcucaguucuaccuuuuaucugacacau

SEQ ID NO: 246786 - RNA, 32 nt, Homo Sapiens
uugugaauauauuuguacauuguuaaaauagu

SEQ ID NO: 246787 - RNA, 32 nt, Homo Sapiens
cggguaagauguuauuuaaaucaguaaaaggc

SEQ ID NO: 246788 - RNA, 32 nt, Homo Sapiens
ugacccuuuccaccacggcggagccuuccaag

SEQ ID NO: 246789 - RNA, 32 nt, Homo Sapiens
cagugcggccuccuuccacccgccgcugccug

SEQ ID NO: 246790 - RNA, 32 nt, Homo Sapiens
ugcaguugcuaagggacuuuauuuuguaacau

SEQ ID NO: 246791 - RNA, 32 nt, Homo Sapiens
acaacccugaccaagcuaaaagacgcuuguua

SEQ ID NO: 246792 - RNA, 32 nt, Homo Sapiens
cauaaccacugcugaguggccuugaggacgaa

SEQ ID NO: 246793 - RNA, 32 nt, Homo Sapiens
gaugcagacucaccgaccgggaccucagacgc

SEQ ID NO: 246794 - RNA, 32 nt, Homo Sapiens
aaggccucuugcaauuuguugaggauccauga

SEQ ID NO: 246795 - RNA, 32 nt, Homo Sapiens
uuuauucuauuuccucuuugcuguuuguagua

SEQ ID NO: 246796 - RNA, 32 nt, Homo Sapiens
ccuucugaaaauaaguugcagacaucaugaaa

SEQ ID NO: 246797 - RNA, 32 nt, Homo Sapiens
aguacuguaucucagagcugccccuuccccag

SEQ ID NO: 246798 - RNA, 32 nt, Homo Sapiens
uuacaagaggcugaaauugagcaaucagauac

SEQ ID NO: 246799 - RNA, 32 nt, Homo Sapiens
aaugaucgcuaucuagcaacccuaacaguaag

SEQ ID NO: 246800 - RNA, 32 nt, Homo Sapiens
aaccuaccucccacacucccaagguuggagcc

SEQ ID NO: 246801 - RNA, 32 nt, Homo Sapiens
gagccgugccagaggcccggcccgccauuccc

SEQ ID NO: 246802 - RNA, 32 nt, Homo Sapiens
ggugaaggaggcucgugccggaggggaugaag

SEQ ID NO: 246803 - RNA, 32 nt, Homo Sapiens
cuuucauguauuaaaauaacacugagauuuuu

SEQ ID NO: 246804 - RNA, 32 nt, Homo Sapiens
auccuuucuucucugguccccaucccugucuc

SEQ ID NO: 246805 - RNA, 32 nt, Homo Sapiens
ccucaacuuauugucuccgaggauagaaaagc

SEQ ID NO: 246806 - RNA, 32 nt, Homo Sapiens
agccuaggccugcuccuccacccuucccggga

SEQ ID NO: 246807 - RNA, 28 nt, Homo Sapiens
caggcagugaugaacauuaugaacacag

SEQ ID NO: 246808 - RNA, 30 nt, Homo Sapiens
cuacaggguucccuaggccagguggagaug

SEQ ID NO: 246809 - RNA, 32 nt, Homo Sapiens
cuuucuuggggagagggaacccugauuuucag

SEQ ID NO: 246810 - RNA, 32 nt, Homo Sapiens
uacuauuguggaaagaacauauauuauauucu

SEQ ID NO: 246811 - RNA, 32 nt, Homo Sapiens
auggggcagcgggcugcagcuggcggccggaa

SEQ ID NO: 246812 - RNA, 32 nt, Homo Sapiens
ucuuaucaguagcuucagucuuucuugcucuc

SEQ ID NO: 246813 - RNA, 32 nt, Homo Sapiens
gacucacguuuuuguuguuuucucaucauucc

SEQ ID NO: 246814 - RNA, 30 nt, Homo Sapiens
cuggagaccacauuugguucucgaaccauc

SEQ ID NO: 246815 - RNA, 32 nt, Homo Sapiens
acgcccauccagcugaccccagcccccgacgg

SEQ ID NO: 246816 - RNA, 32 nt, Homo Sapiens
ugcuuuauaacacuaagacauccuuucuaaag

SEQ ID NO: 246817 - RNA, 32 nt, Homo Sapiens
ugcgggcgccgcgccgccuuuaaagcgaggcc

SEQ ID NO: 246818 - RNA, 32 nt, Homo Sapiens
agcggagacucaccucugacgccgcucuucgc

SEQ ID NO: 246819 - RNA, 32 nt, Homo Sapiens
guuaccggaauagagugugucaaccuuaaaug

SEQ ID NO: 246820 - RNA, 31 nt, Homo Sapiens
gcccuccugguucggccuccccgcgcacuag

SEQ ID NO: 246821 - RNA, 32 nt, Homo Sapiens
uaagauccucuguuaaaaccagcuguccuguu

SEQ ID NO: 246822 - RNA, 32 nt, Homo Sapiens
cgccgcccugucagccgccucggcgcccccag

SEQ ID NO: 246823 - RNA, 32 nt, Homo Sapiens
ccaucuguggagccccagagccugcggcugug

SEQ ID NO: 246824 - RNA, 32 nt, Homo Sapiens
uacugggguaugccugguaauaaacaguaaua

SEQ ID NO: 246825 - RNA, 29 nt, Homo Sapiens
cagccugggggacagagcaagaccguguc

SEQ ID NO: 246826 - RNA, 32 nt, Homo Sapiens
uacagcaaaaggaaacaaauaauguucauuuu

SEQ ID NO: 246827 - RNA, 32 nt, Homo Sapiens
uuaauacaguagccuguaaauaaaacacucuu

SEQ ID NO: 246828 - RNA, 32 nt, Homo Sapiens
cucuuccagccuguccauagaccuccaggcag

SEQ ID NO: 246829 - RNA, 32 nt, Homo Sapiens
gugcucacaaaacagccauguaacacaugagc

SEQ ID NO: 246830 - RNA, 32 nt, Homo Sapiens
uugugggagggggacaugaacagacacucuac

SEQ ID NO: 246831 - RNA, 32 nt, Homo Sapiens
accucucccaggcgaguaucugucccaggagc

SEQ ID NO: 246832 - RNA, 32 nt, Homo Sapiens
auuagaaacuaucaaaaauguggcuuaaaaga

SEQ ID NO: 246833 - RNA, 32 nt, Homo Sapiens
gcgguuaauucuuuuuaccgugaggcuucacu

SEQ ID NO: 246834 - RNA, 32 nt, Homo Sapiens
gagaagcccuuugaauaaucaagugcuaaaac

SEQ ID NO: 246835 - RNA, 32 nt, Homo Sapiens
ucuggauccuucccaagguacagcuguauaua

SEQ ID NO: 246836 - RNA, 32 nt, Homo Sapiens
uuaaggauuuguggcaucaucaguucuaggua

SEQ ID NO: 246837 - RNA, 32 nt, Homo Sapiens
gugaauguaacuuauuacccacagggacaauu

SEQ ID NO: 246838 - RNA, 32 nt, Homo Sapiens
gccccccagaccccuuccuucucggagugacc

SEQ ID NO: 246839 - RNA, 32 nt, Homo Sapiens
cacacucgcgcgcgcauccucccgccagccug

SEQ ID NO: 246840 - RNA, 32 nt, Homo Sapiens
caccuguaaucccagcacuuuggggagcugag

SEQ ID NO: 246841 - RNA, 32 nt, Homo Sapiens
ccuuuuuuuucauuuuaaaugugucagcacug

SEQ ID NO: 246842 - RNA, 32 nt, Homo Sapiens
uaagacucuaaaggcguugauuucaacccucc

SEQ ID NO: 246843 - RNA, 32 nt, Homo Sapiens
cacucccuuuucuuaccaucccagaaaaucga

SEQ ID NO: 246844 - RNA, 32 nt, Homo Sapiens
ggcuucucguggggaguuggcuccuuaacauu

SEQ ID NO: 246845 - RNA, 32 nt, Homo Sapiens
aaauacaccaaaaccauuuuuuauagaaacag

SEQ ID NO: 246846 - RNA, 32 nt, Homo Sapiens
cuggaagguuuuacaagaagacugauagucuu

SEQ ID NO: 246847 - RNA, 32 nt, Homo Sapiens
gagaggaauucaucagaagcuccauaaaauuc

SEQ ID NO: 246848 - RNA, 29 nt, Homo Sapiens
acaugaauaaaguggauauuucuauucau

SEQ ID NO: 246849 - RNA, 32 nt, Homo Sapiens
cuucugacccuagaaauguucccuuuaaucuu

SEQ ID NO: 246850 - RNA, 32 nt, Homo Sapiens
uuccgguugccggcccgcgccucauaacuucg

SEQ ID NO: 246851 - RNA, 32 nt, Homo Sapiens
ggacucagaacgcagaagcaggaaauggagag

SEQ ID NO: 246852 - RNA, 32 nt, Homo Sapiens
agagaugggggaggagucagggcaugguggcc

SEQ ID NO: 246853 - RNA, 32 nt, Homo Sapiens
caggcacccagcucccacuggacuccaauuuu

SEQ ID NO: 246854 - RNA, 32 nt, Homo Sapiens
cugaaaguuguauuuuuuuuuaaucagggcuc

SEQ ID NO: 246855 - RNA, 32 nt, Homo Sapiens
acuaggaaugaacuuuuaauuuuuuggagcua

SEQ ID NO: 246856 - RNA, 32 nt, Homo Sapiens
agaagagagccgagcugcgcgcggcgcgccug

SEQ ID NO: 246857 - RNA, 30 nt, Homo Sapiens
agcgaugaucaccacugccaugaguauucc

SEQ ID NO: 246858 - RNA, 32 nt, Homo Sapiens
uucuuuuuuauuuuggaaaaucauauugcuau

SEQ ID NO: 246859 - RNA, 32 nt, Homo Sapiens
uaagccaccagaguugccugcuuuugucauga

SEQ ID NO: 246860 - RNA, 32 nt, Homo Sapiens
aacuugcggguuuuuguuguuguuuuuugagg

SEQ ID NO: 246861 - RNA, 32 nt, Homo Sapiens
aaggaauaccacagaagugauguuguuuucuu

SEQ ID NO: 246862 - RNA, 32 nt, Homo Sapiens
ggggagggggagaggaggccgagcagaauaca

SEQ ID NO: 246863 - RNA, 32 nt, Homo Sapiens
gaguucugcuacuuccuaguaagggacgucuc

SEQ ID NO: 246864 - RNA, 32 nt, Homo Sapiens
cgugccugugggggcugcugcaggcuccugcu

SEQ ID NO: 246865 - RNA, 32 nt, Homo Sapiens
uguguacuacacagaagcuguguuuucuaguu

SEQ ID NO: 246866 - RNA, 32 nt, Homo Sapiens
gccaccuuacacaagucagaaggauauuuaua

SEQ ID NO: 246867 - RNA, 32 nt, Homo Sapiens
uuaaaaggaauaaucaacaauuuuauaaagga

SEQ ID NO: 246868 - RNA, 32 nt, Homo Sapiens
uuucuuaaacaaaacagugacaacaacaauca

SEQ ID NO: 246869 - RNA, 32 nt, Homo Sapiens
cuuccccaagcuguuggcaugucuaguucauu

SEQ ID NO: 246870 - RNA, 32 nt, Homo Sapiens
ugcacaugucucucccugcucuuccaggguga

SEQ ID NO: 246871 - RNA, 32 nt, Homo Sapiens
uuuaaucuuaagcaauaauauucaagaacuaa

SEQ ID NO: 246872 - RNA, 32 nt, Homo Sapiens
uccccaggccucgcuuccccagccuucugaaa

SEQ ID NO: 246873 - RNA, 32 nt, Homo Sapiens
aguaucauauuauuauccuccuguucugaaac

SEQ ID NO: 246874 - RNA, 32 nt, Homo Sapiens
ccacccccuauggcaaagucucugccaacacu

SEQ ID NO: 246875 - RNA, 31 nt, Homo Sapiens
uacaagaccugcuacucgccaagggcugauu

SEQ ID NO: 246876 - RNA, 32 nt, Homo Sapiens
auucauguccuacccagcuaaaacagaggcca

SEQ ID NO: 246877 - RNA, 32 nt, Homo Sapiens
ucccuggggguggaaauagaaggggcauguca

SEQ ID NO: 246878 - RNA, 32 nt, Homo Sapiens
cugcaacaggcacuucuccccacguuugaugu

SEQ ID NO: 246879 - RNA, 32 nt, Homo Sapiens
gaggcggcgagggucccggggcgcgaggaagg

SEQ ID NO: 246880 - RNA, 32 nt, Homo Sapiens
cuccagcaacacucuucaguacauaauaagcu

SEQ ID NO: 246881 - RNA, 30 nt, Homo Sapiens
ccgaaguggcccgugccgccgcacagagac

SEQ ID NO: 246882 - RNA, 32 nt, Homo Sapiens
uugccuccugucauuuugguuaacccaguccu

SEQ ID NO: 246883 - RNA, 32 nt, Homo Sapiens
cauccugcacgucgccggggagcccgcgggca

SEQ ID NO: 246884 - RNA, 32 nt, Homo Sapiens
gccugagcugugcacggccuccccugcccucc

SEQ ID NO: 246885 - RNA, 32 nt, Homo Sapiens
cgacacagcagccagaaggauccuuuaaaaac

SEQ ID NO: 246886 - RNA, 32 nt, Homo Sapiens
ugcgaucauuacgucuucuauuacaaugcccu

SEQ ID NO: 246887 - RNA, 32 nt, Homo Sapiens
ugucuuuccuauuugcacacguccauguuuau

SEQ ID NO: 246888 - RNA, 32 nt, Homo Sapiens
caucccucugaaaauaaaaauguauugcccuc

SEQ ID NO: 246889 - RNA, 32 nt, Homo Sapiens
aguuuuuuacuuuuguuuauuuuuaugguaac

SEQ ID NO: 246890 - RNA, 32 nt, Homo Sapiens
aacacacccuguguugccuccucccugucuga

SEQ ID NO: 246891 - RNA, 32 nt, Homo Sapiens
cuucauauacccucuuuuuuuuugcccccaac

SEQ ID NO: 246892 - RNA, 32 nt, Homo Sapiens
agacagagacauuugaacagggccuugaaggg

SEQ ID NO: 246893 - RNA, 32 nt, Homo Sapiens
aaagccugaaaagcuaucauggcagcaaggcc

SEQ ID NO: 246894 - RNA, 32 nt, Homo Sapiens
ugugagaaggagaugcggcugcugcuggcccu

SEQ ID NO: 246895 - RNA, 32 nt, Homo Sapiens
gauaaugcaauaaauagaaaaaugugguuuac

SEQ ID NO: 246896 - RNA, 32 nt, Homo Sapiens
ugcgugcagacacacugacacacuccgccacg

SEQ ID NO: 246897 - RNA, 32 nt, Homo Sapiens
auggggaugggggcgggcaggggcguggggag

SEQ ID NO: 246898 - RNA, 32 nt, Homo Sapiens
ggaaucugcauaacucagcagucaacccagaa

SEQ ID NO: 246899 - RNA, 32 nt, Homo Sapiens
gcugggcccucccuugcccccaagcucaagaa

SEQ ID NO: 246900 - RNA, 32 nt, Homo Sapiens
uugaggguagacguguggggaaaauaaaucau

SEQ ID NO: 246901 - RNA, 32 nt, Homo Sapiens
acaggcgggaggaggagaggccuguagcaccc

SEQ ID NO: 246902 - RNA, 32 nt, Homo Sapiens
ggucuuuucuauuuuuuuuuguuuauuuuguu

SEQ ID NO: 246903 - RNA, 32 nt, Homo Sapiens
cagccagcuccggcccgcggcucccggcugaa

SEQ ID NO: 246904 - RNA, 32 nt, Homo Sapiens
guuaucugauuguguaccacuccaaauucccu

SEQ ID NO: 246905 - RNA, 32 nt, Homo Sapiens
uuaucuacuuuuucauuaaaauguaaagaugu

SEQ ID NO: 246906 - RNA, 32 nt, Homo Sapiens
cugugcucaugcacuaggccccgggaagccug

SEQ ID NO: 246907 - RNA, 32 nt, Homo Sapiens
gauggaaauuauauuggccaaguuuuaguuac

SEQ ID NO: 246908 - RNA, 32 nt, Homo Sapiens
caacaaagauuugaauuauaauaaugaaagga

SEQ ID NO: 246909 - RNA, 32 nt, Homo Sapiens
cggucgcccucccuauuccucuuagcccgagg

SEQ ID NO: 246910 - RNA, 32 nt, Homo Sapiens
aaaaggguucuuuguucccauccagccgauga

SEQ ID NO: 246911 - RNA, 29 nt, Homo Sapiens
acuggaucaugcugaucuauaaagaggug

SEQ ID NO: 246912 - RNA, 32 nt, Homo Sapiens
cugcugguuuugcugugagcugcaguguucug

SEQ ID NO: 246913 - RNA, 32 nt, Homo Sapiens
caggaacauuggcgcgggaaaccuggcguacu

SEQ ID NO: 246914 - RNA, 32 nt, Homo Sapiens
ugugauagugguucugucaucaucauucaugu

SEQ ID NO: 246915 - RNA, 28 nt, Homo Sapiens
aucgcgcggcggccgccgcgagggugug

SEQ ID NO: 246916 - RNA, 32 nt, Homo Sapiens
uccggcccgucuccggaggcaagucgggcugc

SEQ ID NO: 246917 - RNA, 32 nt, Homo Sapiens
gaaagaggaggccuggcgccuccggcagaggg

SEQ ID NO: 246918 - RNA, 32 nt, Homo Sapiens
ccaguugacaccuacuggugacuucuagggca

SEQ ID NO: 246919 - RNA, 32 nt, Homo Sapiens
caguagaaacaaaaguaggcuacagucugugc

SEQ ID NO: 246920 - RNA, 32 nt, Homo Sapiens
uuuuuaaauggcacaucuucaaguucuugccc

SEQ ID NO: 246921 - RNA, 32 nt, Homo Sapiens
gcccgcaagcccggcucggcccggcccugcuc

SEQ ID NO: 246922 - RNA, 32 nt, Homo Sapiens
caaaacugacuucuguagaaguuuccagaggg

SEQ ID NO: 246923 - RNA, 32 nt, Homo Sapiens
aauaagcagagcagaguggggaggcggcaaga

SEQ ID NO: 246924 - RNA, 32 nt, Homo Sapiens
gaaaugccacuuaguucucaauugaugacagu

SEQ ID NO: 246925 - RNA, 32 nt, Homo Sapiens
caacuuacuuggagauccaaacagccagguuc

SEQ ID NO: 246926 - RNA, 32 nt, Homo Sapiens
cucaaaccaaggaugagcgucuggucucugcu

SEQ ID NO: 246927 - RNA, 32 nt, Homo Sapiens
ucgguggacucuaugauguacucaaggccagc

SEQ ID NO: 246928 - RNA, 32 nt, Homo Sapiens
uuuucacagggagaagcaggucuaggacuccc

SEQ ID NO: 246929 - RNA, 32 nt, Homo Sapiens
auuuuuugaauuauauacuaaagcaaauaagu

SEQ ID NO: 246930 - RNA, 32 nt, Homo Sapiens
cugcagcugucauccugggacugugugcccgg

SEQ ID NO: 246931 - RNA, 32 nt, Homo Sapiens
auacuccaguguuuuagggguuuugaaaauaa

SEQ ID NO: 246932 - RNA, 32 nt, Homo Sapiens
aggcaacuuccaaugcuucucuaggcccugca

SEQ ID NO: 246933 - RNA, 32 nt, Homo Sapiens
guaauuaggacacauuuaaaauuuggcaaaua

SEQ ID NO: 246934 - RNA, 32 nt, Homo Sapiens
uauuauuguaaauagaaaugaccacaucagaa

SEQ ID NO: 246935 - RNA, 32 nt, Homo Sapiens
guuggcggcgugggacccagggggcgacagag

SEQ ID NO: 246936 - RNA, 32 nt, Homo Sapiens
acccagccccacuugcccuuauugguugcuua

SEQ ID NO: 246937 - RNA, 32 nt, Homo Sapiens
cggcuccaggcacuucuucccuugagugggug

SEQ ID NO: 246938 - RNA, 30 nt, Homo Sapiens
gcacgcugccgaggggucccccauuggagc

SEQ ID NO: 246939 - RNA, 32 nt, Homo Sapiens
uauggaguaguacuuuguguuaaaugagcuaa

SEQ ID NO: 246940 - RNA, 32 nt, Homo Sapiens
aguguucugcuucuuucugucaccuuagaaau

SEQ ID NO: 246941 - RNA, 32 nt, Homo Sapiens
gacauuuucuucacagugucuuaucaagugug

SEQ ID NO: 246942 - RNA, 32 nt, Homo Sapiens
acugccuaugcuuuuuaccuuaggcuuacaga

SEQ ID NO: 246943 - RNA, 32 nt, Homo Sapiens
cccucacauuggugcuuucuccucauccucau

SEQ ID NO: 246944 - RNA, 32 nt, Homo Sapiens
uagaaauguaucuauuucaucaaauuauuuca

SEQ ID NO: 246945 - RNA, 32 nt, Homo Sapiens
cauuuauauaaaacuuaaaaacaagagaaaag

SEQ ID NO: 246946 - RNA, 32 nt, Homo Sapiens
cccagccaguccagcucugccuugccggcucu

SEQ ID NO: 246947 - RNA, 32 nt, Homo Sapiens
augaaugauuugacaguguccaaacugagaca

SEQ ID NO: 246948 - RNA, 32 nt, Homo Sapiens
accccccaccuucaagcuguccugcuuuucug

SEQ ID NO: 246949 - RNA, 32 nt, Homo Sapiens
caucuguaacaagacucccacucccuaauccu

SEQ ID NO: 246950 - RNA, 32 nt, Homo Sapiens
ggauugugugucugcugucucgugcuguuuau

SEQ ID NO: 246951 - RNA, 29 nt, Homo Sapiens
gaagauggcggagcugcagaugcugcugg

SEQ ID NO: 246952 - RNA, 32 nt, Homo Sapiens
gccagaacacacucuacaaaaugacuaggaua

SEQ ID NO: 246953 - RNA, 32 nt, Homo Sapiens
aguucuuaauauauucauaguuuuauaaccau

SEQ ID NO: 246954 - RNA, 32 nt, Homo Sapiens
uagaaggaacggacuuuuuuuuuucuauuuua

SEQ ID NO: 246955 - RNA, 32 nt, Homo Sapiens
caaggggcccucuggagcugagcaaacccccu

SEQ ID NO: 246956 - RNA, 32 nt, Homo Sapiens
aagaugccauugacaagguguuucucuguaaa

SEQ ID NO: 246957 - RNA, 32 nt, Homo Sapiens
agacaaagcuacugccuucuagagacaaccgg

SEQ ID NO: 246958 - RNA, 32 nt, Homo Sapiens
guggaaaaaaauuuaagugaggaagaagaggc

SEQ ID NO: 246959 - RNA, 32 nt, Homo Sapiens
ggccuccgguuggugggcuucucuaggcccag

SEQ ID NO: 246960 - RNA, 31 nt, Homo Sapiens
gcaagucauaauaaaaauaacuuuuuacauc

SEQ ID NO: 246961 - RNA, 29 nt, Homo Sapiens
gguaaauaaaaccaccugauucuccagcc

SEQ ID NO: 246962 - RNA, 32 nt, Homo Sapiens
cugugcggcccggcucuccggcggcagcgagu

SEQ ID NO: 246963 - RNA, 32 nt, Homo Sapiens
acaacuccaagcauggacggagagcaagaaga

SEQ ID NO: 246964 - RNA, 32 nt, Homo Sapiens
caggcacuccccagcccacaccugcagcacug

SEQ ID NO: 246965 - RNA, 32 nt, Homo Sapiens
aucgcagggcuggccugugugguuuccagaug

SEQ ID NO: 246966 - RNA, 32 nt, Homo Sapiens
uaauaccaauguauaaguguauauuauuauau

SEQ ID NO: 246967 - RNA, 32 nt, Homo Sapiens
gaaacucugaagauggaucauggccaugacug

SEQ ID NO: 246968 - RNA, 32 nt, Homo Sapiens
aaggagugccuguguccuguacugcccucgcu

SEQ ID NO: 246969 - RNA, 32 nt, Homo Sapiens
uauauguaaauuauauuucuaagcaaaauaca

SEQ ID NO: 246970 - RNA, 32 nt, Homo Sapiens
cauccaugccagcacuucugcacuacggccau

SEQ ID NO: 246971 - RNA, 32 nt, Homo Sapiens
gcauacaauuuaauguaauuucauuccauucu

SEQ ID NO: 246972 - RNA, 32 nt, Homo Sapiens
aauggguaugaguauuauagaacaauuagacc

SEQ ID NO: 246973 - RNA, 32 nt, Homo Sapiens
gaccauucaggauuucuugucacucuucucaa

SEQ ID NO: 246974 - RNA, 32 nt, Homo Sapiens
ucauuacacacacagacguacacacacacccg

SEQ ID NO: 246975 - RNA, 32 nt, Homo Sapiens
gcaggaggcuccauccuucuccccaaggucug

SEQ ID NO: 246976 - RNA, 32 nt, Homo Sapiens
accagcaagcuaggccgcuggaggaaagggaa

SEQ ID NO: 246977 - RNA, 32 nt, Homo Sapiens
uucaggagagaggaaagaaaaaauauauaugc

SEQ ID NO: 246978 - RNA, 32 nt, Homo Sapiens
uauacauuuuuagagcagauuuagguucacag

SEQ ID NO: 246979 - RNA, 32 nt, Homo Sapiens
uuuauaaacagcuuaauauaaaacauuauaga

SEQ ID NO: 246980 - RNA, 32 nt, Homo Sapiens
acgaagauguguauuuuaaauguuucuuucuu

SEQ ID NO: 246981 - RNA, 32 nt, Homo Sapiens
uuccuuuuagaaacuaguauucucuuauuucu

SEQ ID NO: 246982 - RNA, 32 nt, Homo Sapiens
uuguggcacugacugugaaugccugagcugua

SEQ ID NO: 246983 - RNA, 31 nt, Homo Sapiens
guaaugaaauaaaaugugaucuaguguaaug

SEQ ID NO: 246984 - RNA, 32 nt, Homo Sapiens
ugcucuuccgcgcuccucgacuccagcuuugg

SEQ ID NO: 246985 - RNA, 32 nt, Homo Sapiens
uucaaacugguauuuuuuaaaaaacaaaucaa

SEQ ID NO: 246986 - RNA, 32 nt, Homo Sapiens
ggcaacguuuauauauuaaaaggcaugauaga

SEQ ID NO: 246987 - RNA, 32 nt, Homo Sapiens
ugagucauuuucugcccaucucuggucgcgcg

SEQ ID NO: 246988 - RNA, 32 nt, Homo Sapiens
guggaagaugaccucuaguuucuuggcucaaa

SEQ ID NO: 246989 - RNA, 32 nt, Homo Sapiens
ucauuuguguguuugcuuuaagaguaaguuuu

SEQ ID NO: 246990 - RNA, 32 nt, Homo Sapiens
aaacuaggagaaauaagaauggcuguagagga

SEQ ID NO: 246991 - RNA, 32 nt, Homo Sapiens
ggucugucauugggcauuucugaugugcuuuu

SEQ ID NO: 246992 - RNA, 32 nt, Homo Sapiens
agucagggaaggaugccucggagcugaggugg

SEQ ID NO: 246993 - RNA, 32 nt, Homo Sapiens
ugaagccugugcucuacagacagggagucaca

SEQ ID NO: 246994 - RNA, 32 nt, Homo Sapiens
augaaaaggcuuuauugccaaacucuuaaggu

SEQ ID NO: 246995 - RNA, 32 nt, Homo Sapiens
auauuuucccccuguuuuuagagcuuccaaau

SEQ ID NO: 246996 - RNA, 30 nt, Homo Sapiens
ucaccaggagguggcagcggugugggagga

SEQ ID NO: 246997 - RNA, 32 nt, Homo Sapiens
acugaguaggggugucccaugacacuauuuca

SEQ ID NO: 246998 - RNA, 32 nt, Homo Sapiens
gauuaaaaacaguaaugaaaagugaguggcaa

SEQ ID NO: 246999 - RNA, 32 nt, Homo Sapiens
aaauuacaaaguuuuccagagcuuauauaccu

SEQ ID NO: 247000 - RNA, 32 nt, Homo Sapiens
uaugcuauugguuuuuagguuaagcuuccuaa

SEQ ID NO: 247001 - RNA, 32 nt, Homo Sapiens
ccgcgcgcaccucagccgccuccuagcggcgc

SEQ ID NO: 247002 - RNA, 32 nt, Homo Sapiens
ugaguggcccuggccuggcccguggcgcaucc

SEQ ID NO: 247003 - RNA, 32 nt, Homo Sapiens
ccuuggucgccuugcuugccagcaguugcucc

SEQ ID NO: 247004 - RNA, 32 nt, Homo Sapiens
agccccgugcggauccacucgccccgcuuccu

SEQ ID NO: 247005 - RNA, 25 nt, Homo Sapiens
guguuaaaauaaaauauaacuugug

SEQ ID NO: 247006 - RNA, 32 nt, Homo Sapiens
gagcuugcagggaggagaaaagagagauauca

SEQ ID NO: 247007 - RNA, 32 nt, Homo Sapiens
ggccaagggcgguggcucacgccuguaauccc

SEQ ID NO: 247008 - RNA, 32 nt, Homo Sapiens
cuuugcugugugcucuguccagugucaugaga

SEQ ID NO: 247009 - RNA, 32 nt, Homo Sapiens
cucuuccugccuuuccucuaucagagaaguug

SEQ ID NO: 247010 - RNA, 32 nt, Homo Sapiens
ggaagcgagaaguuaaggaugccuucaaaauu

SEQ ID NO: 247011 - RNA, 32 nt, Homo Sapiens
gguucgaaaauacagcugaaccccgcgggccc

SEQ ID NO: 247012 - RNA, 32 nt, Homo Sapiens
gggccucgcugggccuggcgagccgcgccagu

SEQ ID NO: 247013 - RNA, 32 nt, Homo Sapiens
ccugggagggccucauguuuuaucugguucuu

SEQ ID NO: 247014 - RNA, 32 nt, Homo Sapiens
acuuguccugugccggcacugcuggggaggcc

SEQ ID NO: 247015 - RNA, 32 nt, Homo Sapiens
cugaguaacugggauuacagagcccaggacug

SEQ ID NO: 247016 - RNA, 32 nt, Homo Sapiens
gcgcgccgcaugcuggccggcucuguggugau

SEQ ID NO: 247017 - RNA, 32 nt, Homo Sapiens
gucagguuucuuuuauaugcagccaaaugcag

SEQ ID NO: 247018 - RNA, 32 nt, Homo Sapiens
uacuaucagaauuuauauuguuuauuauaucu

SEQ ID NO: 247019 - RNA, 32 nt, Homo Sapiens
uucagaaucucaagucaaggccaggcacggcg

SEQ ID NO: 247020 - RNA, 32 nt, Homo Sapiens
cugcuugaugaaauguaucuccuuguaccugg

SEQ ID NO: 247021 - RNA, 32 nt, Homo Sapiens
uuuaaauguuuguguuuauacagauaagaaau

SEQ ID NO: 247022 - RNA, 31 nt, Homo Sapiens
uguuuuaaauaaaaauaaguguacaauaagu

SEQ ID NO: 247023 - RNA, 32 nt, Homo Sapiens
cgucugaagguaaugauagcuauacagucugu

SEQ ID NO: 247024 - RNA, 32 nt, Homo Sapiens
gcgucuccgcggcuacugccgcuucaguucuc

SEQ ID NO: 247025 - RNA, 32 nt, Homo Sapiens
agcagguccgccagaccacccgcuggcacuca

SEQ ID NO: 247026 - RNA, 32 nt, Homo Sapiens
aagcugaguuagugcgcccgggacgccaggca

SEQ ID NO: 247027 - RNA, 32 nt, Homo Sapiens
gcucugggacaaggcgggagguucgggggccu

SEQ ID NO: 247028 - RNA, 32 nt, Homo Sapiens
aggccggcgggcggugauguggcaggacucuu

SEQ ID NO: 247029 - RNA, 32 nt, Homo Sapiens
agauagccugguuuuauuuucgucagugaaaa

SEQ ID NO: 247030 - RNA, 32 nt, Homo Sapiens
cauccccacguccucucguccccuugucccgu

SEQ ID NO: 247031 - RNA, 32 nt, Homo Sapiens
cuuuuucuaccuuguuguguuucuaucucguc

SEQ ID NO: 247032 - RNA, 32 nt, Homo Sapiens
gaccaagagggaggaggggaaggacuccaugg

SEQ ID NO: 247033 - RNA, 32 nt, Homo Sapiens
cgcucuccuaguuccuucucccuccucuagga

SEQ ID NO: 247034 - RNA, 32 nt, Homo Sapiens
ugaacuugcuguuuccucaucuuugccuuuug

SEQ ID NO: 247035 - RNA, 32 nt, Homo Sapiens
gccugguuucaaaacuaucuucagcucuuaau

SEQ ID NO: 247036 - RNA, 32 nt, Homo Sapiens
agauacaauuuugaaauuguaucuggugagca

SEQ ID NO: 247037 - RNA, 32 nt, Homo Sapiens
ugccgacagggagcuuccuuggcuggcauggc

SEQ ID NO: 247038 - RNA, 32 nt, Homo Sapiens
cuucccgcucgcgaagacccagacggcugcag

SEQ ID NO: 247039 - RNA, 32 nt, Homo Sapiens
cuuuuugugaaauaaacuuuuguaauagucag

SEQ ID NO: 247040 - RNA, 32 nt, Homo Sapiens
uugcaugcauuuuuccccuguuuggugcuaug

SEQ ID NO: 247041 - RNA, 32 nt, Homo Sapiens
uagcuggguggccuugcauucuggaagugaaa

SEQ ID NO: 247042 - RNA, 32 nt, Homo Sapiens
ucaugaaaaagaccagccucuauuagaucagu

SEQ ID NO: 247043 - RNA, 32 nt, Homo Sapiens
acagaaucaaggaagcaccucaauuuaguuca

SEQ ID NO: 247044 - RNA, 32 nt, Homo Sapiens
gagccucggucccggcccccauccuccccgcc

SEQ ID NO: 247045 - RNA, 32 nt, Homo Sapiens
cugcagauggaccucucuccgcuagagaugcc

SEQ ID NO: 247046 - RNA, 30 nt, Homo Sapiens
aguuucuuuugaugugcagaagcucuuuaa

SEQ ID NO: 247047 - RNA, 32 nt, Homo Sapiens
aauauuuuuaucggcucuagaaaaugcauaag

SEQ ID NO: 247048 - RNA, 32 nt, Homo Sapiens
gaaacuuccuuccaucuucucugcauaaaaac

SEQ ID NO: 247049 - RNA, 32 nt, Homo Sapiens
uuauugcugggcgggguggcucagaccuguaa

SEQ ID NO: 247050 - RNA, 32 nt, Homo Sapiens
ccgugggcgagggacguguggggacaggugca

SEQ ID NO: 247051 - RNA, 32 nt, Homo Sapiens
aacuguacacuuaaaauaggugaauguuauga

SEQ ID NO: 247052 - RNA, 32 nt, Homo Sapiens
ccuuucuggaguuugcagaguucagcaauaug

SEQ ID NO: 247053 - RNA, 32 nt, Homo Sapiens
uuuuguccucaauggcacccaugagcuuucca

SEQ ID NO: 247054 - RNA, 32 nt, Homo Sapiens
ugauggcauccacagugaugucaagguugggg

SEQ ID NO: 247055 - RNA, 32 nt, Homo Sapiens
auuauuuuugaguuuauuaaagauugacauuu

SEQ ID NO: 247056 - RNA, 32 nt, Homo Sapiens
uuaggccucccucucccuucccucugucucau

SEQ ID NO: 247057 - RNA, 32 nt, Homo Sapiens
ugaaacugcuuuucaagcaucaugcugcuauu

SEQ ID NO: 247058 - RNA, 32 nt, Homo Sapiens
aggcccuccuccccggcccucccuggcccggc

SEQ ID NO: 247059 - RNA, 32 nt, Homo Sapiens
gugugugucuggcuguagcagacgcgaggcgg

SEQ ID NO: 247060 - RNA, 32 nt, Homo Sapiens
uuuccuaaauuaaaacaugcagcuuuuucaca

SEQ ID NO: 247061 - RNA, 32 nt, Homo Sapiens
uggagcuaaucgucugugaaugccaagugaug

SEQ ID NO: 247062 - RNA, 32 nt, Homo Sapiens
ggucuuucugcauuuuguuuucuuauuuauag

SEQ ID NO: 247063 - RNA, 32 nt, Homo Sapiens
acucugaaagagagugaaaaugcagacaagac

SEQ ID NO: 247064 - RNA, 32 nt, Homo Sapiens
auaguuccuugacuuuccucgaauuucauuac

SEQ ID NO: 247065 - RNA, 32 nt, Homo Sapiens
ggcauauguuaccgaaucaacuggccuuccag

SEQ ID NO: 247066 - RNA, 32 nt, Homo Sapiens
cauuguaauugagaggaaugugaaggugcauu

SEQ ID NO: 247067 - RNA, 32 nt, Homo Sapiens
ccaccuuuauuuuauacaaaauuaaaaacaag

SEQ ID NO: 247068 - RNA, 32 nt, Homo Sapiens
ucucaagagcaucuuggacccagaacauucuc

SEQ ID NO: 247069 - RNA, 32 nt, Homo Sapiens
gguuuccccucuacccugccuccugucucccc

SEQ ID NO: 247070 - RNA, 32 nt, Homo Sapiens
cucucaguuuuaauauagcuuuauuuuucagu

SEQ ID NO: 247071 - RNA, 32 nt, Homo Sapiens
agaguaaagauaagagaaaaugucuaaagcau

SEQ ID NO: 247072 - RNA, 32 nt, Homo Sapiens
cccagcgaggggcggagaccugucccacgauc

SEQ ID NO: 247073 - RNA, 32 nt, Homo Sapiens
cuguccucuggugagaagguggugaggcuucc

SEQ ID NO: 247074 - RNA, 32 nt, Homo Sapiens
ugauaccaaacaaaauauuuucauauuuauuu

SEQ ID NO: 247075 - RNA, 32 nt, Homo Sapiens
ggccuggagcagccaagaauuucgggcuguuu

SEQ ID NO: 247076 - RNA, 32 nt, Homo Sapiens
cugcaagugacgagaaagauucuguuucaaau

SEQ ID NO: 247077 - RNA, 32 nt, Homo Sapiens
cgaaaucuaauugcuuuuuuuuuuaauuguug

SEQ ID NO: 247078 - RNA, 32 nt, Homo Sapiens
aggcgugcuuggauucuugacaagcagaccug

SEQ ID NO: 247079 - RNA, 32 nt, Homo Sapiens
gagaacucuuacauaguagaauccauucuaua

SEQ ID NO: 247080 - RNA, 32 nt, Homo Sapiens
uucagucaacauuuaaugaugcuucaggcacu

SEQ ID NO: 247081 - RNA, 32 nt, Homo Sapiens
uuucuauaaaagaccaaacaguaaauauuuua

SEQ ID NO: 247082 - RNA, 32 nt, Homo Sapiens
gguccagaugagagcagagauacagugagaaa

SEQ ID NO: 247083 - RNA, 32 nt, Homo Sapiens
ggauacuucuaaaagcuaaagccuuguugccu

SEQ ID NO: 247084 - RNA, 32 nt, Homo Sapiens
aaagaaaaauaaauaauucaguagauauaugu

SEQ ID NO: 247085 - RNA, 32 nt, Homo Sapiens
uggugcggggagagaagccugugccuuaugga

SEQ ID NO: 247086 - RNA, 32 nt, Homo Sapiens
caauuagacaauuugggguaacaaaucauagc

SEQ ID NO: 247087 - RNA, 32 nt, Homo Sapiens
aaaacuuauaaaaugcaauagaaugcacacaa

SEQ ID NO: 247088 - RNA, 26 nt, Homo Sapiens
caugccgcgggccccggcgccgcugu

SEQ ID NO: 247089 - RNA, 32 nt, Homo Sapiens
gccccucgcccggcgcgccuucgguagggggc

SEQ ID NO: 247090 - RNA, 32 nt, Homo Sapiens
cuaaauaaaacacuugauaugccuagagaaca

SEQ ID NO: 247091 - RNA, 32 nt, Homo Sapiens
acaaucaagaacugaggccugaggcugguugu

SEQ ID NO: 247092 - RNA, 32 nt, Homo Sapiens
ccuguccccagcugugucuccuccagggcccc

SEQ ID NO: 247093 - RNA, 32 nt, Homo Sapiens
agcccacccucuccuggugcugccuggggagg

SEQ ID NO: 247094 - RNA, 30 nt, Homo Sapiens
gccccagugggggaucacgcacuugaacuc

SEQ ID NO: 247095 - RNA, 32 nt, Homo Sapiens
acuggcaaggaccagcuucccagaaucagaca

SEQ ID NO: 247096 - RNA, 32 nt, Homo Sapiens
aagagguggcuuuggcccagaggcucaggccg

SEQ ID NO: 247097 - RNA, 32 nt, Homo Sapiens
gaggaggcgaggagcgcaggguaucgggcggg

SEQ ID NO: 247098 - RNA, 30 nt, Homo Sapiens
gcaggcgcagugguucccgcaggcuugcgc

SEQ ID NO: 247099 - RNA, 32 nt, Homo Sapiens
caagccgcaggccccaggcaacugccuucccg

SEQ ID NO: 247100 - RNA, 32 nt, Homo Sapiens
agccuugaaugugauuaaauuuaagaaaaucu

SEQ ID NO: 247101 - RNA, 32 nt, Homo Sapiens
aaacuacaaaaauuggccaggugugguggugc

SEQ ID NO: 247102 - RNA, 32 nt, Homo Sapiens
cccaacccccuacacccaagcacauccgucaa

SEQ ID NO: 247103 - RNA, 32 nt, Homo Sapiens
augauuuuuuauuaacaugauuuccuuuucug

SEQ ID NO: 247104 - RNA, 32 nt, Homo Sapiens
cuuccuuauguccaaugucuguccuccucuuc

SEQ ID NO: 247105 - RNA, 32 nt, Homo Sapiens
ccccgagcggagccccggagccauggcccuga

SEQ ID NO: 247106 - RNA, 32 nt, Homo Sapiens
gggcagagaguggcuuccugaaggagggggca

SEQ ID NO: 247107 - RNA, 29 nt, Homo Sapiens
uaguguuuuauccaauauagacguuaugg

SEQ ID NO: 247108 - RNA, 32 nt, Homo Sapiens
acccucaugcugccccugaccgagggcucgcu

SEQ ID NO: 247109 - RNA, 32 nt, Homo Sapiens
aggaccacaaaguggaagaguccugugccauu

SEQ ID NO: 247110 - RNA, 32 nt, Homo Sapiens
uagccuguccugucaucaucauggccagcugg

SEQ ID NO: 247111 - RNA, 32 nt, Homo Sapiens
cucgccugacagaaugagcggcucggacgggg

SEQ ID NO: 247112 - RNA, 32 nt, Homo Sapiens
gccagcaucgacgagaaacagcugagucagga

SEQ ID NO: 247113 - RNA, 32 nt, Homo Sapiens
ggcacgcgggcuccuggggcaccgugugcgac

SEQ ID NO: 247114 - RNA, 32 nt, Homo Sapiens
uccguggcguccucggcgugcucgacgccgcc

SEQ ID NO: 247115 - RNA, 32 nt, Homo Sapiens
aacacgugcagguuuguucuauagaucaauua

SEQ ID NO: 247116 - RNA, 32 nt, Homo Sapiens
guccccagacugcagugagcugaccuggcagg

SEQ ID NO: 247117 - RNA, 32 nt, Homo Sapiens
agaaugaauaaaccucuuuauauuugcaaaaa

SEQ ID NO: 247118 - RNA, 32 nt, Homo Sapiens
uauacacacauauauauguacauacacauaca

SEQ ID NO: 247119 - RNA, 30 nt, Homo Sapiens
gaucccuggcuucugaucgcccggaagacu

SEQ ID NO: 247120 - RNA, 32 nt, Homo Sapiens
cguacacacacacacacacacacacacacaca

SEQ ID NO: 247121 - RNA, 32 nt, Homo Sapiens
gcccaggccaggggggcugcagcccucagccc

SEQ ID NO: 247122 - RNA, 31 nt, Homo Sapiens
gggucgaggucgacgguaucgauaaguuuuu

SEQ ID NO: 247123 - RNA, 31 nt, Homo Sapiens
uaccuuuauuuuauuuugccaaacauaccug

SEQ ID NO: 247124 - RNA, 32 nt, Homo Sapiens
uuuggugggcggggucaagagccccuggaugu

SEQ ID NO: 247125 - RNA, 32 nt, Homo Sapiens
ugacaaagaugaccugcugcuguuggugagau

SEQ ID NO: 247126 - RNA, 32 nt, Homo Sapiens
cagcgggcaggcgggcggagccuguauauaug

SEQ ID NO: 247127 - RNA, 32 nt, Homo Sapiens
gauaauuccuuccccaaagcccagcagccccc

SEQ ID NO: 247128 - RNA, 32 nt, Homo Sapiens
aauuaggucagauauguacauaaaaaauagaa

SEQ ID NO: 247129 - RNA, 32 nt, Homo Sapiens
uggagaguagcuguauggacugagaggcauuu

SEQ ID NO: 247130 - RNA, 32 nt, Homo Sapiens
ugcuuuauugaguaaagguuauaguuugacuu

SEQ ID NO: 247131 - RNA, 32 nt, Homo Sapiens
ccagugcccugcucugagacacucagacuacc

SEQ ID NO: 247132 - RNA, 32 nt, Homo Sapiens
gucccccagaaaggucugggcugcgcgugcuu

SEQ ID NO: 247133 - RNA, 32 nt, Homo Sapiens
cagaaugcuucuuucuugucuuuaugugaaga

SEQ ID NO: 247134 - RNA, 28 nt, Homo Sapiens
ggggaggggcggcccccucuggugcucc

SEQ ID NO: 247135 - RNA, 32 nt, Homo Sapiens
ccugacaaguguuaaggcaacauuccuugcuu

SEQ ID NO: 247136 - RNA, 32 nt, Homo Sapiens
aagacauuucaugaaacagugauuccagcucu

SEQ ID NO: 247137 - RNA, 32 nt, Homo Sapiens
gacuccuguacagacauaguggcuugcagacc

SEQ ID NO: 247138 - RNA, 32 nt, Homo Sapiens
acacggagcaagcaucguucuuucauuuuuau

SEQ ID NO: 247139 - RNA, 32 nt, Homo Sapiens
uuugucuccgaggaagacccagggaacuggau

SEQ ID NO: 247140 - RNA, 32 nt, Homo Sapiens
agaggacuuggauugaaugaaaacagagagcu

SEQ ID NO: 247141 - RNA, 32 nt, Homo Sapiens
uuauuuauuuauuuuugagacggagucuugcu

SEQ ID NO: 247142 - RNA, 32 nt, Homo Sapiens
gaccacgucucccuggccccagugaccggggg

SEQ ID NO: 247143 - RNA, 32 nt, Homo Sapiens
aagauuacaaaauaaaaauauagagagaguaa

SEQ ID NO: 247144 - RNA, 32 nt, Homo Sapiens
auggugucuauuauagugaaacauguacuuug

SEQ ID NO: 247145 - RNA, 32 nt, Homo Sapiens
augaccuaaccuaagcaaaaccacugagcuuc

SEQ ID NO: 247146 - RNA, 32 nt, Homo Sapiens
acaccugaacucauuugcaucauuuuaaccau

SEQ ID NO: 247147 - RNA, 32 nt, Homo Sapiens
aguuucuaacugucuguugccaugguuaccgc

SEQ ID NO: 247148 - RNA, 32 nt, Homo Sapiens
gguaauggcuccggcccggguguucgcugucc

SEQ ID NO: 247149 - RNA, 32 nt, Homo Sapiens
aaauaaaauaaauuguuuuugacuaagugacu

SEQ ID NO: 247150 - RNA, 32 nt, Homo Sapiens
cugccagcucccugggucuccuccucucuggg

SEQ ID NO: 247151 - RNA, 32 nt, Homo Sapiens
uacagaguugguuuccuuccuuccuuccuucc

SEQ ID NO: 247152 - RNA, 32 nt, Homo Sapiens
acagcggggcaaacagugagugggguucagcg

SEQ ID NO: 247153 - RNA, 32 nt, Homo Sapiens
aauuuuaauuuucuuuuuacuuggagucauuc

SEQ ID NO: 247154 - RNA, 32 nt, Homo Sapiens
uaucucaauugcuuaugugcauauggaauaug

SEQ ID NO: 247155 - RNA, 32 nt, Homo Sapiens
gguucguacgggaggagggggaggcgcccacg

SEQ ID NO: 247156 - RNA, 31 nt, Homo Sapiens
cauccucauuugaacgccagguaucuccccu

SEQ ID NO: 247157 - RNA, 32 nt, Homo Sapiens
ccugugaagucaaguauuuuuaccaaguaaaa

SEQ ID NO: 247158 - RNA, 32 nt, Homo Sapiens
ugcuuuuauuuuuuuucuuuuuugcuuucauu

SEQ ID NO: 247159 - RNA, 32 nt, Homo Sapiens
accaaccuuccauguaucuccauccuccccug

SEQ ID NO: 247160 - RNA, 32 nt, Homo Sapiens
uugcccuccgugcuccuccggcauuagagcgg

SEQ ID NO: 247161 - RNA, 32 nt, Homo Sapiens
gcgcgcccucgcgccucugccugagaagccag

SEQ ID NO: 247162 - RNA, 32 nt, Homo Sapiens
cgcucugggcugcuccucccauccccgcaugg

SEQ ID NO: 247163 - RNA, 32 nt, Homo Sapiens
uccggccccccgccgccuccugcccccaccug

SEQ ID NO: 247164 - RNA, 32 nt, Homo Sapiens
gggacucugccgcuguguagggaccaguggga

SEQ ID NO: 247165 - RNA, 31 nt, Homo Sapiens
uuagguggguuccuauuaggucagauuuuua

SEQ ID NO: 247166 - RNA, 32 nt, Homo Sapiens
ccaaguaugaagaggauggggccagcggggcc

SEQ ID NO: 247167 - RNA, 32 nt, Homo Sapiens
ccugucccccuaggcuuuuccuuguggacaac

SEQ ID NO: 247168 - RNA, 32 nt, Homo Sapiens
uucaagacauuccacuugcuaaaauuauuuau

SEQ ID NO: 247169 - RNA, 32 nt, Homo Sapiens
gcagcuugcgggaaaucacgcugcugcuccgc

SEQ ID NO: 247170 - RNA, 32 nt, Homo Sapiens
agccauaacaaguuuacuuguggaaaagaaaa

SEQ ID NO: 247171 - RNA, 32 nt, Homo Sapiens
uuaacaguagccauccuguuccuacucagagu

SEQ ID NO: 247172 - RNA, 32 nt, Homo Sapiens
caagcuggcuggccauuuugcugcugugugug

SEQ ID NO: 247173 - RNA, 32 nt, Homo Sapiens
aauagguguauuacccaagaaguaaagaugga

SEQ ID NO: 247174 - RNA, 32 nt, Homo Sapiens
gucaacuggguugucuuccugaaguaugaauc

SEQ ID NO: 247175 - RNA, 32 nt, Homo Sapiens
caccuguaaucccagcacuuugggagaccaag

SEQ ID NO: 247176 - RNA, 32 nt, Homo Sapiens
ccgcagcaaggcccagcugaggugguggaggg

SEQ ID NO: 247177 - RNA, 32 nt, Homo Sapiens
auaaauuugaauaaacaaaacaggcuugcuga

SEQ ID NO: 247178 - RNA, 32 nt, Homo Sapiens
cuccgaggccgacgagauggccaaggcgcugg

SEQ ID NO: 247179 - RNA, 32 nt, Homo Sapiens
ugccuuagacauucucaagucaucagcgucac

SEQ ID NO: 247180 - RNA, 32 nt, Homo Sapiens
ugucagcaauacuaagggcuuccucaugggag

SEQ ID NO: 247181 - RNA, 32 nt, Homo Sapiens
uuuguaccagguuuuucuuucuuucuuuuuug

SEQ ID NO: 247182 - RNA, 32 nt, Homo Sapiens
cugucucggccgcggggcauugcccugagugg

SEQ ID NO: 247183 - RNA, 32 nt, Homo Sapiens
ucauacuggugccacguuuccuucccuuauuu

SEQ ID NO: 247184 - RNA, 32 nt, Homo Sapiens
cugcuugagguaguuguuuuuacucccagucc

SEQ ID NO: 247185 - RNA, 32 nt, Homo Sapiens
ggagacuuccugccuccagacgagcuggaaaa

SEQ ID NO: 247186 - RNA, 32 nt, Homo Sapiens
aaggcccagaauggcgaccucucuuuagcuca

SEQ ID NO: 247187 - RNA, 32 nt, Homo Sapiens
aggggugagggagagagcaccagacaggcuau

SEQ ID NO: 247188 - RNA, 32 nt, Homo Sapiens
gugcuguucuaguuccucuccauccgccaccu

SEQ ID NO: 247189 - RNA, 29 nt, Homo Sapiens
uuucaauaaaguuugaucuuccucugcua

SEQ ID NO: 247190 - RNA, 32 nt, Homo Sapiens
uaccccucuccucacagaaguaccugaaacua

SEQ ID NO: 247191 - RNA, 32 nt, Homo Sapiens
aacaggcagaggggcgguaaggaagggcaggu

SEQ ID NO: 247192 - RNA, 32 nt, Homo Sapiens
cagcugugcagaauuguuugcuagugugguug

SEQ ID NO: 247193 - RNA, 32 nt, Homo Sapiens
aaggaugcaagaaauaugaaaaaggaaacaua

SEQ ID NO: 247194 - RNA, 32 nt, Homo Sapiens
augauugaagaguaccugcugcuguaucuugg

SEQ ID NO: 247195 - RNA, 30 nt, Homo Sapiens
gacuuacuggacuggcaccgccaggagaaa

SEQ ID NO: 247196 - RNA, 32 nt, Homo Sapiens
gauaccgaggaaaacagggucuguaguggacc

SEQ ID NO: 247197 - RNA, 32 nt, Homo Sapiens
gcauaacaguauucauaaguacucaugaguga

SEQ ID NO: 247198 - RNA, 32 nt, Homo Sapiens
gagacagucucgcucuuucacccaggccggac

SEQ ID NO: 247199 - RNA, 28 nt, Homo Sapiens
gcgccggggcggcggccgaauggagaga

SEQ ID NO: 247200 - RNA, 32 nt, Homo Sapiens
gaguucacgagcuaccguuggcugggaacccu

SEQ ID NO: 247201 - RNA, 32 nt, Homo Sapiens
agccguguacugccugggcuccccucaaaggg

SEQ ID NO: 247202 - RNA, 32 nt, Homo Sapiens
uuucuuauuuagauuuuuuuuauuuacauaga

SEQ ID NO: 247203 - RNA, 32 nt, Homo Sapiens
auuuaucaagaacaugaaaauauuuuauuuug

SEQ ID NO: 247204 - RNA, 32 nt, Homo Sapiens
gugccuccuuuugaccacuugccaagucccug

SEQ ID NO: 247205 - RNA, 32 nt, Homo Sapiens
cgccccaucgugucauggccgacgguggccuc

SEQ ID NO: 247206 - RNA, 32 nt, Homo Sapiens
aggcgacccggagguagcauuucccaggaggc

SEQ ID NO: 247207 - RNA, 32 nt, Homo Sapiens
agcccaaggcucuggagugggacaggggauag

SEQ ID NO: 247208 - RNA, 32 nt, Homo Sapiens
cugugcuuuucccccuuguaacccaugugcca

SEQ ID NO: 247209 - RNA, 32 nt, Homo Sapiens
gauacagaaggcuggaggaaacgucagggaug

SEQ ID NO: 247210 - RNA, 31 nt, Homo Sapiens
ccucaggugaucugccugccuuggcauccca

SEQ ID NO: 247211 - RNA, 32 nt, Homo Sapiens
ugcccagcagugcugccuucagcggccgugac

SEQ ID NO: 247212 - RNA, 31 nt, Homo Sapiens
cccagugcaaggugcccaggacagaaacaga

SEQ ID NO: 247213 - RNA, 32 nt, Homo Sapiens
ccacuuucuacaggccagcaggggcuuguugc

SEQ ID NO: 247214 - RNA, 32 nt, Homo Sapiens
gaucgaucaguucauccaaucacagaucauga

SEQ ID NO: 247215 - RNA, 32 nt, Homo Sapiens
gcuuccucuauuccuuuauaugaucucuguau

SEQ ID NO: 247216 - RNA, 32 nt, Homo Sapiens
ccuggggaagggggcguucgcugcgcucggag

SEQ ID NO: 247217 - RNA, 32 nt, Homo Sapiens
cuuagcauuuauuaaacaucuaccagaugaua

SEQ ID NO: 247218 - RNA, 32 nt, Homo Sapiens
acuugggccgagcgguccccagcccucuucau

SEQ ID NO: 247219 - RNA, 32 nt, Homo Sapiens
uuggauuuuugcauagaguacaauagacacuu

SEQ ID NO: 247220 - RNA, 32 nt, Homo Sapiens
cagccuggagccgggcuggggaggccggcggg

SEQ ID NO: 247221 - RNA, 31 nt, Homo Sapiens
gcgggcagguucugccugcuuuggcgggcag

SEQ ID NO: 247222 - RNA, 32 nt, Homo Sapiens
cguccugacgacuauaaaacaguuggaggcaa

SEQ ID NO: 247223 - RNA, 32 nt, Homo Sapiens
uucuaagggaggcacuuccuccccucgcccau

SEQ ID NO: 247224 - RNA, 32 nt, Homo Sapiens
ucagguauucuauguggcaacccuagguaggg

SEQ ID NO: 247225 - RNA, 32 nt, Homo Sapiens
uagcaccugggccagcagcugcugugcucaau

SEQ ID NO: 247226 - RNA, 32 nt, Homo Sapiens
auguggaugagugaagggagccagguacacgg

SEQ ID NO: 247227 - RNA, 32 nt, Homo Sapiens
aaauacuguaaaacgugucgugaauguuucuu

SEQ ID NO: 247228 - RNA, 32 nt, Homo Sapiens
ucacauuggccauucuuuccccuccccuaccc

SEQ ID NO: 247229 - RNA, 32 nt, Homo Sapiens
gcaucgcggcuucggcggcuuccaccuagaca

SEQ ID NO: 247230 - RNA, 32 nt, Homo Sapiens
ccgcguagcuggagcagcccaggcccggcgga

SEQ ID NO: 247231 - RNA, 32 nt, Homo Sapiens
uaauauguauuucuagaagagaauaaaaaccc

SEQ ID NO: 247232 - RNA, 32 nt, Homo Sapiens
uccgcccgcuccuggcgccgggagccagccgc

SEQ ID NO: 247233 - RNA, 32 nt, Homo Sapiens
cgcagcacgggugccagugugcaugcgugugc

SEQ ID NO: 247234 - RNA, 32 nt, Homo Sapiens
gccuggugcaggcggcuugcugggggauguga

SEQ ID NO: 247235 - RNA, 32 nt, Homo Sapiens
ggaaggagaaagccuuccucuucucucauagg

SEQ ID NO: 247236 - RNA, 32 nt, Homo Sapiens
gacgcgaggagggaaggggcgucugugggcgg

SEQ ID NO: 247237 - RNA, 32 nt, Homo Sapiens
gcagcccggaggcgccgggcggugcgcuggga

SEQ ID NO: 247238 - RNA, 32 nt, Homo Sapiens
ggucccgacgcggaagccgagccgccuccgcc

SEQ ID NO: 247239 - RNA, 32 nt, Homo Sapiens
caacacuucugacaccaaauguguggaguuuu

SEQ ID NO: 247240 - RNA, 32 nt, Homo Sapiens
ccccaccccgccccacccccagcccuggcccu

SEQ ID NO: 247241 - RNA, 32 nt, Homo Sapiens
aggugggaaggcugggguggugcaggggccuu

SEQ ID NO: 247242 - RNA, 32 nt, Homo Sapiens
gcgcccgugccgguagcgcccgugccgguagc

SEQ ID NO: 247243 - RNA, 32 nt, Homo Sapiens
uauaagcgccagcggccucgccgcccgucaag

SEQ ID NO: 247244 - RNA, 32 nt, Homo Sapiens
ucuaaagguaaauuauuuguuagaugaguaag

SEQ ID NO: 247245 - RNA, 32 nt, Homo Sapiens
gccgucgacgcgagcgcccuggcguggcgccc

SEQ ID NO: 247246 - RNA, 32 nt, Homo Sapiens
guugaguauuauuugcaauuuuauuaguuaca

SEQ ID NO: 247247 - RNA, 32 nt, Homo Sapiens
uuguuaacaacaaggauaucucuucuggagua

SEQ ID NO: 247248 - RNA, 32 nt, Homo Sapiens
gugcgaccaagcccuggcuccagcucuagcgg

SEQ ID NO: 247249 - RNA, 32 nt, Homo Sapiens
ggagcccgagcaccaugagcuccggagacccu

SEQ ID NO: 247250 - RNA, 32 nt, Homo Sapiens
ccacagugcaguauuucuaaccagugaucagg

SEQ ID NO: 247251 - RNA, 32 nt, Homo Sapiens
ucaguuugcucaucuguaaauugggugcagug

SEQ ID NO: 247252 - RNA, 32 nt, Homo Sapiens
uuacagaagugaugucuguaggucacauuaaa

SEQ ID NO: 247253 - RNA, 32 nt, Homo Sapiens
gaccguguggacgaggacccccaggcaagcau

SEQ ID NO: 247254 - RNA, 32 nt, Homo Sapiens
acagugacacaggugagggagguaauggggga

SEQ ID NO: 247255 - RNA, 32 nt, Homo Sapiens
caagauggcucaugaggauaucgaacccccau

SEQ ID NO: 247256 - RNA, 32 nt, Homo Sapiens
gcagagagccccaccucacucccuuuggcuac

SEQ ID NO: 247257 - RNA, 32 nt, Homo Sapiens
caaaacagaacagacccccaucccugggcugg

SEQ ID NO: 247258 - RNA, 32 nt, Homo Sapiens
agagagcucagguagccugccuagauggcggc

SEQ ID NO: 247259 - RNA, 32 nt, Homo Sapiens
auuaaauugaguccugguaccuggucaaaauc

SEQ ID NO: 247260 - RNA, 32 nt, Homo Sapiens
aggaguagucucauaucagggauccucucucc

SEQ ID NO: 247261 - RNA, 30 nt, Homo Sapiens
gcucuuguuucacugggggaaacaaguuau

SEQ ID NO: 247262 - RNA, 32 nt, Homo Sapiens
cggagccccaaguuucucaucuguaaacaagg

SEQ ID NO: 247263 - RNA, 32 nt, Homo Sapiens
cuaaugugacauucuuuaagcauaucuuaaaa

SEQ ID NO: 247264 - RNA, 32 nt, Homo Sapiens
auggagggaaauaagggagaccaagagcacag

SEQ ID NO: 247265 - RNA, 32 nt, Homo Sapiens
guggugcccagcugcuugggaggcugagguag

SEQ ID NO: 247266 - RNA, 32 nt, Homo Sapiens
ugaacagggccaguugacaccuuucccccagc

SEQ ID NO: 247267 - RNA, 32 nt, Homo Sapiens
uucagcagaaggaaaaggugauuuagaucagu

SEQ ID NO: 247268 - RNA, 32 nt, Homo Sapiens
aucuauacagaaaauugaagaguacuggaaau

SEQ ID NO: 247269 - RNA, 32 nt, Homo Sapiens
uacuuuucuuaauucuucagacuucucacauu

SEQ ID NO: 247270 - RNA, 32 nt, Homo Sapiens
ggauuucagacaacaaggaaaugagccuucuc

SEQ ID NO: 247271 - RNA, 32 nt, Homo Sapiens
ggcucucuuccacuuccaccuuccaccauggg

SEQ ID NO: 247272 - RNA, 32 nt, Homo Sapiens
uauuggugugaacacggaacaugaugggggau

SEQ ID NO: 247273 - RNA, 29 nt, Homo Sapiens
acuguggugacuuuggucggcugaguucc

SEQ ID NO: 247274 - RNA, 32 nt, Homo Sapiens
ccaggagccagaccucgguuuugcgggcuggg

SEQ ID NO: 247275 - RNA, 32 nt, Homo Sapiens
gugugugacgaugcugaccuagcuguguggcc

SEQ ID NO: 247276 - RNA, 32 nt, Homo Sapiens
ucugaaacauggcaggcucggaugcugagugg

SEQ ID NO: 247277 - RNA, 32 nt, Homo Sapiens
gugcaguggcacagucucggcucacugcaagc

SEQ ID NO: 247278 - RNA, 29 nt, Homo Sapiens
gcuguuucugucuucagaggccuacacac

SEQ ID NO: 247279 - RNA, 32 nt, Homo Sapiens
gcaggagaugagaccagccuucuguguucacc

SEQ ID NO: 247280 - RNA, 32 nt, Homo Sapiens
gcccgagcuguauguuggccccuuucagccau

SEQ ID NO: 247281 - RNA, 32 nt, Homo Sapiens
cucuuugucuuguagccuaaguaucucuuggu

SEQ ID NO: 247282 - RNA, 32 nt, Homo Sapiens
ggccuugaugaugcagcuggcccgagagcuga

SEQ ID NO: 247283 - RNA, 32 nt, Homo Sapiens
acuuuugcauaaauaaaacucuagacaaaugg

SEQ ID NO: 247284 - RNA, 32 nt, Homo Sapiens
aaaaagacaaaacuuucuuccuaguuuuugua

SEQ ID NO: 247285 - RNA, 32 nt, Homo Sapiens
uuuaaauggauguagaugaaaggucucacaua

SEQ ID NO: 247286 - RNA, 32 nt, Homo Sapiens
cggugcccccugccccggggccucccaagaga

SEQ ID NO: 247287 - RNA, 32 nt, Homo Sapiens
gguagucuuacgacccuggugcccugggcugc

SEQ ID NO: 247288 - RNA, 32 nt, Homo Sapiens
ucccuaaaacaccacugauaucauuaaagcca

SEQ ID NO: 247289 - RNA, 32 nt, Homo Sapiens
ccucuuccucguagcgucugcuccucacuuug

SEQ ID NO: 247290 - RNA, 32 nt, Homo Sapiens
gugaugcuuuugcugcugcuuaauccuacccc

SEQ ID NO: 247291 - RNA, 32 nt, Homo Sapiens
uauccucuaaaauguauguguaugaagauccu

SEQ ID NO: 247292 - RNA, 32 nt, Homo Sapiens
agaguaccuugaucaauuaaaugguagggagc

SEQ ID NO: 247293 - RNA, 32 nt, Homo Sapiens
aaagacagaaaagauuaagggacgggcacauu

SEQ ID NO: 247294 - RNA, 32 nt, Homo Sapiens
ccggcccggacucccgagccccggccuccucg

SEQ ID NO: 247295 - RNA, 32 nt, Homo Sapiens
gacucuuuugguaaccagacaccaaucaaaua

SEQ ID NO: 247296 - RNA, 32 nt, Homo Sapiens
gagauuggacuagaggaguccugagaggacac

SEQ ID NO: 247297 - RNA, 32 nt, Homo Sapiens
cuguggaauuugggggugaagggugugaggaa

SEQ ID NO: 247298 - RNA, 32 nt, Homo Sapiens
acgaggcagggccggugggauccccucgggcu

SEQ ID NO: 247299 - RNA, 32 nt, Homo Sapiens
gcaaaacauaguauaauucacacuggagagaa

SEQ ID NO: 247300 - RNA, 32 nt, Homo Sapiens
uagaauugagcauugaauuugcuacuguagga

SEQ ID NO: 247301 - RNA, 32 nt, Homo Sapiens
cccuguuugaaaaagggccugaauauacucug

SEQ ID NO: 247302 - RNA, 32 nt, Homo Sapiens
gcacugaggcggagaaaugagaucuggcccca

SEQ ID NO: 247303 - RNA, 27 nt, Homo Sapiens
cugaucaucuucuucaauuccugcuag

SEQ ID NO: 247304 - RNA, 32 nt, Homo Sapiens
ggaguacgacuuggaccgggaccgcgacuggg

SEQ ID NO: 247305 - RNA, 32 nt, Homo Sapiens
uaucucacaccaacucuguuuccucauugccc

SEQ ID NO: 247306 - RNA, 32 nt, Homo Sapiens
ggugcgagggaagcaauugaaaaggaacuugc

SEQ ID NO: 247307 - RNA, 32 nt, Homo Sapiens
agggaagggggaggaggggacuuuuagagcca

SEQ ID NO: 247308 - RNA, 31 nt, Homo Sapiens
ccugcccugcgcagccagucccgagaccggc

SEQ ID NO: 247309 - RNA, 32 nt, Homo Sapiens
ccacacauaagcugcgaugaggagcuuuacga

SEQ ID NO: 247310 - RNA, 32 nt, Homo Sapiens
uaggauuugaaaguagcccuuaugauacuaag

SEQ ID NO: 247311 - RNA, 32 nt, Homo Sapiens
ccucuccacccuaucccagccucccccacaag

SEQ ID NO: 247312 - RNA, 32 nt, Homo Sapiens
aaggccaagaaccugauguaccugaagcagau

SEQ ID NO: 247313 - RNA, 32 nt, Homo Sapiens
auuuuauagcacaaacuuuaaauucaagcugc

SEQ ID NO: 247314 - RNA, 32 nt, Homo Sapiens
ggaagagcagcuccgagagaagcaggagauga

SEQ ID NO: 247315 - RNA, 32 nt, Homo Sapiens
cuuaucacauauauuuaaacuuacagauggaa

SEQ ID NO: 247316 - RNA, 32 nt, Homo Sapiens
ugcucccuuccucuccucuccuucuaguggau

SEQ ID NO: 247317 - RNA, 32 nt, Homo Sapiens
gaaguggcuguugggucugacccccuccuuuc

SEQ ID NO: 247318 - RNA, 32 nt, Homo Sapiens
gcauacgggggaagagagucugcagaaguugg

SEQ ID NO: 247319 - RNA, 32 nt, Homo Sapiens
ugccccgaccaccuugggcacauguucucagg

SEQ ID NO: 247320 - RNA, 32 nt, Homo Sapiens
uccccgagauaagugugcagggggaugggcca

SEQ ID NO: 247321 - RNA, 32 nt, Homo Sapiens
uauaaccuaggauacagguaguuucgaguaug

SEQ ID NO: 247322 - RNA, 32 nt, Homo Sapiens
gagcauugucugucuguuuucuuaacucuuua

SEQ ID NO: 247323 - RNA, 32 nt, Homo Sapiens
cuagacugcagcuauccaaauuccuuccaugg

SEQ ID NO: 247324 - RNA, 32 nt, Homo Sapiens
ugaccccagggccacuagucucuuccccuguu

SEQ ID NO: 247325 - RNA, 32 nt, Homo Sapiens
ccuauuauuguuaaaggccuuuuauggaaacc

SEQ ID NO: 247326 - RNA, 32 nt, Homo Sapiens
ccacgaacccaccagaaggaagaaacucugaa

SEQ ID NO: 247327 - RNA, 32 nt, Homo Sapiens
augugcuggcuguuuuguaaguaaauuuauac

SEQ ID NO: 247328 - RNA, 32 nt, Homo Sapiens
uugucaaaaaauguuugccugauucuaaucau

SEQ ID NO: 247329 - RNA, 32 nt, Homo Sapiens
agggcacaugccuccccuccccaggccgcggc

SEQ ID NO: 247330 - RNA, 32 nt, Homo Sapiens
acagcuagaugaauaaaugauucguguuucac

SEQ ID NO: 247331 - RNA, 32 nt, Homo Sapiens
aaggaacccacccaaaguagcgagagugagga

SEQ ID NO: 247332 - RNA, 32 nt, Homo Sapiens
cuggauuugagucuuggugcuaucaaucaccg

SEQ ID NO: 247333 - RNA, 32 nt, Homo Sapiens
cccuuuacccagcucuuggggugucucuguuu

SEQ ID NO: 247334 - RNA, 32 nt, Homo Sapiens
ugagauuggccaucagcccccauuucugcugc

SEQ ID NO: 247335 - RNA, 30 nt, Homo Sapiens
ccaggaugcugaaucugcugcugcuggcgc

SEQ ID NO: 247336 - RNA, 32 nt, Homo Sapiens
ggcgcccaggaugccccgcagccccgggacgc

SEQ ID NO: 247337 - RNA, 31 nt, Homo Sapiens
aacacuucauuuuuauggccaaauaaaauug

SEQ ID NO: 247338 - RNA, 32 nt, Homo Sapiens
uccaaagcccccagugucaucaucacaggucu

SEQ ID NO: 247339 - RNA, 32 nt, Homo Sapiens
ggcugugaggcggucgcccccgggccgaaaug

SEQ ID NO: 247340 - RNA, 32 nt, Homo Sapiens
uacuuaauuuuggcauuugacucuuaagauua

SEQ ID NO: 247341 - RNA, 32 nt, Homo Sapiens
aaggacauaaacaaaacaaacccgaggcagca

SEQ ID NO: 247342 - RNA, 32 nt, Homo Sapiens
agucaguaugcaaucuuaauauaugcuuucuu

SEQ ID NO: 247343 - RNA, 32 nt, Homo Sapiens
cgugggagggcuuccuucccugggguuuucug

SEQ ID NO: 247344 - RNA, 32 nt, Homo Sapiens
gcccugccgucacagcugggccaguaaaguac

SEQ ID NO: 247345 - RNA, 32 nt, Homo Sapiens
aaagugccauagucuuuuuuuauguguagcau

SEQ ID NO: 247346 - RNA, 32 nt, Homo Sapiens
uagcuguggacaccccgcccucaccccuccaa

SEQ ID NO: 247347 - RNA, 32 nt, Homo Sapiens
cccaucaguguguguuggggggaugcuuggca

SEQ ID NO: 247348 - RNA, 32 nt, Homo Sapiens
aaaaccuugaucugugaaagcgggcguuuugg

SEQ ID NO: 247349 - RNA, 32 nt, Homo Sapiens
uauuuuuguaaauguuaugcacucucugaaag

SEQ ID NO: 247350 - RNA, 32 nt, Homo Sapiens
cgggcugucuccccggccauccccucggcccc

SEQ ID NO: 247351 - RNA, 32 nt, Homo Sapiens
cagcauuuuagacugcaugaaaccaugacuga

SEQ ID NO: 247352 - RNA, 32 nt, Homo Sapiens
gcuuaaagaaugcccuuuaugaugcacugauu

SEQ ID NO: 247353 - RNA, 32 nt, Homo Sapiens
acauauuugcgguuagaaucccauggauguuu

SEQ ID NO: 247354 - RNA, 32 nt, Homo Sapiens
gcaguuguuaaaagugccaagcguguguauca

SEQ ID NO: 247355 - RNA, 32 nt, Homo Sapiens
ggugacaccaguggagaugagggaacggguag

SEQ ID NO: 247356 - RNA, 32 nt, Homo Sapiens
acacccaaaaucaagggccuggaugccagcag

SEQ ID NO: 247357 - RNA, 32 nt, Homo Sapiens
auggcggcugcaggguugcugccgccccaucu

SEQ ID NO: 247358 - RNA, 32 nt, Homo Sapiens
gcggggacgcagaaagguuaaggcacuuuuaa

SEQ ID NO: 247359 - RNA, 32 nt, Homo Sapiens
gguggcgcgcaugagcggcgaagcuccuccuc

SEQ ID NO: 247360 - RNA, 32 nt, Homo Sapiens
uuuugcaccaaccuaauauuugauggcagugg

SEQ ID NO: 247361 - RNA, 30 nt, Homo Sapiens
agaauaggagguggcugaugcagucauuua

SEQ ID NO: 247362 - RNA, 30 nt, Homo Sapiens
gggccgggcaggcggcugaggccugucccc

SEQ ID NO: 247363 - RNA, 32 nt, Homo Sapiens
ugugucccagggucuuccugucacccaggcug

SEQ ID NO: 247364 - RNA, 32 nt, Homo Sapiens
uuauuccuuauuucucuuucaucaaaacaaaa

SEQ ID NO: 247365 - RNA, 32 nt, Homo Sapiens
aaauuuacuuauuauucuuuuacucauuuacu

SEQ ID NO: 247366 - RNA, 32 nt, Homo Sapiens
cucccacaaggagcaagggcucugcccgcccu

SEQ ID NO: 247367 - RNA, 32 nt, Homo Sapiens
acacucccccuccugcgcugcgagccacccuc

SEQ ID NO: 247368 - RNA, 32 nt, Homo Sapiens
gauucaacagcuuuauugucuggaagcaguga

SEQ ID NO: 247369 - RNA, 32 nt, Homo Sapiens
uguaaagcuuuuucuuuuuccuuuuuaaaaag

SEQ ID NO: 247370 - RNA, 32 nt, Homo Sapiens
uugugguuucccuucuuuagaacuuuuacuca

SEQ ID NO: 247371 - RNA, 32 nt, Homo Sapiens
gugcggggagcaggcugcugcugcugacucug

SEQ ID NO: 247372 - RNA, 32 nt, Homo Sapiens
ucucgagaccccagccccuccgcugucuaccc

SEQ ID NO: 247373 - RNA, 32 nt, Homo Sapiens
ggggggccuguuauauuauuaaggccagacuc

SEQ ID NO: 247374 - RNA, 32 nt, Homo Sapiens
aaaagagauaagauuuaaccaacaucaacaaa

SEQ ID NO: 247375 - RNA, 32 nt, Homo Sapiens
cccuugugugacucagccucuguuagcugggu

SEQ ID NO: 247376 - RNA, 32 nt, Homo Sapiens
acucggucaugguguauaauccauuuacucug

SEQ ID NO: 247377 - RNA, 32 nt, Homo Sapiens
caggcggacuuuucgguuccccgccccgccag

SEQ ID NO: 247378 - RNA, 32 nt, Homo Sapiens
auucugaugauuaugauuucauuugguuuaac

SEQ ID NO: 247379 - RNA, 32 nt, Homo Sapiens
aacuuacccagcuguuauacauguuuucaguu

SEQ ID NO: 247380 - RNA, 32 nt, Homo Sapiens
caauuccauuuucuuuggcaucucuuugcccu

SEQ ID NO: 247381 - RNA, 32 nt, Homo Sapiens
agguucugcuuggccuccaucuccucguccag

SEQ ID NO: 247382 - RNA, 32 nt, Homo Sapiens
cccaggcuccgggcagcuccguucucaugcug

SEQ ID NO: 247383 - RNA, 32 nt, Homo Sapiens
agcuacaucaagaauaaaaugucuagcagcaa

SEQ ID NO: 247384 - RNA, 32 nt, Homo Sapiens
uuucagggcaaagcggccaugcguuccggggg

SEQ ID NO: 247385 - RNA, 32 nt, Homo Sapiens
ucuuaaccugaacauuccuuuccauggaucuc

SEQ ID NO: 247386 - RNA, 32 nt, Homo Sapiens
ugaccaugccugccugcugaucaguuaacugg

SEQ ID NO: 247387 - RNA, 32 nt, Homo Sapiens
uuucuaguuuguuucuuaauuuauuuguagaa

SEQ ID NO: 247388 - RNA, 32 nt, Homo Sapiens
gccccuaccaggaucagcacuccacuggcccc

SEQ ID NO: 247389 - RNA, 32 nt, Homo Sapiens
ccccaauaaaggaaacaaggccuugaagguga

SEQ ID NO: 247390 - RNA, 32 nt, Homo Sapiens
gguaagacauucaaaccugguuuugauacugg

SEQ ID NO: 247391 - RNA, 32 nt, Homo Sapiens
ggcgcccgcggcuuuuaaacccgggaaggcgc

SEQ ID NO: 247392 - RNA, 32 nt, Homo Sapiens
uugccaaaaauauuuuuguagcauaauauauu

SEQ ID NO: 247393 - RNA, 32 nt, Homo Sapiens
ucugucgucaggcacacaccagagccagcuag

SEQ ID NO: 247394 - RNA, 32 nt, Homo Sapiens
uagugagugcagcuggggucccgaggguagcg

SEQ ID NO: 247395 - RNA, 32 nt, Homo Sapiens
cauccauuauuuaucuucuguggcaaugcauu

SEQ ID NO: 247396 - RNA, 32 nt, Homo Sapiens
gacucggcgcgccuuucccgcggccugcggaa

SEQ ID NO: 247397 - RNA, 32 nt, Homo Sapiens
auccuguggugggagagugggcugggaugugc

SEQ ID NO: 247398 - RNA, 32 nt, Homo Sapiens
aggcggucaaacuuagagcaacauugucuuau

SEQ ID NO: 247399 - RNA, 32 nt, Homo Sapiens
ucaugagaaagaugagauucuuuuaaugaaua

SEQ ID NO: 247400 - RNA, 31 nt, Homo Sapiens
aacucccaagccacuaauaacuucaguuaug

SEQ ID NO: 247401 - RNA, 32 nt, Homo Sapiens
gcagcgcagaccucugcggcccgggcgggcgc

SEQ ID NO: 247402 - RNA, 32 nt, Homo Sapiens
gcccaucugcugcuccucccccuuggcucucc

SEQ ID NO: 247403 - RNA, 32 nt, Homo Sapiens
cuaaucugaaauuucuuacauaaaaaugaagu

SEQ ID NO: 247404 - RNA, 32 nt, Homo Sapiens
aagccagagccauuccaccuccccucccccag

SEQ ID NO: 247405 - RNA, 32 nt, Homo Sapiens
agcacauuuguacuguuuuucuucaauaauca

SEQ ID NO: 247406 - RNA, 32 nt, Homo Sapiens
cagccaugcagccagcagguccuccggaucac

SEQ ID NO: 247407 - RNA, 32 nt, Homo Sapiens
cagggacccaaguauaugcauuuacagaacgu

SEQ ID NO: 247408 - RNA, 32 nt, Homo Sapiens
aagauggaauggggguguggggguccggcucu

SEQ ID NO: 247409 - RNA, 32 nt, Homo Sapiens
augcaguuaaguagaaugguuuuaacaauaca

SEQ ID NO: 247410 - RNA, 32 nt, Homo Sapiens
ggccuucccugcuuccucucuagaauccaauu

SEQ ID NO: 247411 - RNA, 32 nt, Homo Sapiens
gaccaggugucugcagucagcuccugagacac

SEQ ID NO: 247412 - RNA, 32 nt, Homo Sapiens
uggacauguggguggagaagggaggguggcca

SEQ ID NO: 247413 - RNA, 32 nt, Homo Sapiens
ccugacaccugcggucucccgccgggcugggc

SEQ ID NO: 247414 - RNA, 29 nt, Homo Sapiens
gucgugcggcugcagguacggugccuuuc

SEQ ID NO: 247415 - RNA, 32 nt, Homo Sapiens
cgccggcggaagcucucccugaacauccccau

SEQ ID NO: 247416 - RNA, 32 nt, Homo Sapiens
ugcacccccucaccccgguccuccucauuagg

SEQ ID NO: 247417 - RNA, 32 nt, Homo Sapiens
ucccuucaccucaccccugcccggcccaagcu

SEQ ID NO: 247418 - RNA, 32 nt, Homo Sapiens
gguccggaccugggcgcugcuauagcaacguc

SEQ ID NO: 247419 - RNA, 32 nt, Homo Sapiens
gggguuggagcagcggcgagggggccccuccc

SEQ ID NO: 247420 - RNA, 32 nt, Homo Sapiens
acagugguuacccacgaggaaauauuuauuau

SEQ ID NO: 247421 - RNA, 32 nt, Homo Sapiens
cgagcgaccccucagaguuuggcaccgaguuc

SEQ ID NO: 247422 - RNA, 32 nt, Homo Sapiens
auggcggccccgguccgccugggccggaagcg

SEQ ID NO: 247423 - RNA, 32 nt, Homo Sapiens
acaucucugaccauccaucgcuguauucaaau

SEQ ID NO: 247424 - RNA, 31 nt, Homo Sapiens
uggcuuaugggacugauccuuucuaccagac

SEQ ID NO: 247425 - RNA, 32 nt, Homo Sapiens
cauccuaauuuucaaauaaguuucaaggagac

SEQ ID NO: 247426 - RNA, 32 nt, Homo Sapiens
gagagggacagagagauaaaagaaauugggug

SEQ ID NO: 247427 - RNA, 32 nt, Homo Sapiens
ggcaaacuuucggccccuccccgccccucgcc

SEQ ID NO: 247428 - RNA, 32 nt, Homo Sapiens
aaucucggcucacugcaagcuccaccucccgg

SEQ ID NO: 247429 - RNA, 32 nt, Homo Sapiens
ucacucucuuuccuuucauucuaguauucuua

SEQ ID NO: 247430 - RNA, 28 nt, Homo Sapiens
acuguuuucuguuuuauguguuuauaca

SEQ ID NO: 247431 - RNA, 32 nt, Homo Sapiens
cucugcaguaccagcuccucugucucccucug

SEQ ID NO: 247432 - RNA, 32 nt, Homo Sapiens
gcaucaggguaggggagcauucugccuaacag

SEQ ID NO: 247433 - RNA, 32 nt, Homo Sapiens
uuuuccuuuucucuugaaauuuguaucagaua

SEQ ID NO: 247434 - RNA, 32 nt, Homo Sapiens
aacaaaucuaauggaaaggagaguugacugaa

SEQ ID NO: 247435 - RNA, 32 nt, Homo Sapiens
gcuguugugcuaauaguguaaauaaaauaagc

SEQ ID NO: 247436 - RNA, 30 nt, Homo Sapiens
ggaccucgcgggcgcgcgucuuuuggcucu

SEQ ID NO: 247437 - RNA, 32 nt, Homo Sapiens
ccauugcaugcccucaacucuugcuuggcagg

SEQ ID NO: 247438 - RNA, 32 nt, Homo Sapiens
gaauccuggcucggcccuccccacgccaccca

SEQ ID NO: 247439 - RNA, 32 nt, Homo Sapiens
cccucaggccccacagguggguccugguugug

SEQ ID NO: 247440 - RNA, 32 nt, Homo Sapiens
aaaucaggugaugguggaaccauggggacuug

SEQ ID NO: 247441 - RNA, 32 nt, Homo Sapiens
cugcacgucacaccucuuucucaccuggacac

SEQ ID NO: 247442 - RNA, 32 nt, Homo Sapiens
cugugcaggaggaggguugcuaguagguucug

SEQ ID NO: 247443 - RNA, 32 nt, Homo Sapiens
cacaggcucagguccgacccugcugcuuggcc

SEQ ID NO: 247444 - RNA, 32 nt, Homo Sapiens
ugaauuuuuuguaucacugccuguggaaaucu

SEQ ID NO: 247445 - RNA, 32 nt, Homo Sapiens
ucagugacagguaauaugcuggauuugugcag

SEQ ID NO: 247446 - RNA, 32 nt, Homo Sapiens
gaagaccauuuucugguucuguguccucugcc

SEQ ID NO: 247447 - RNA, 32 nt, Homo Sapiens
agucuuagguaaaaaucuugggacauauuugg

SEQ ID NO: 247448 - RNA, 31 nt, Homo Sapiens
cuugucacaaagacagcugauguuucgcaug

SEQ ID NO: 247449 - RNA, 32 nt, Homo Sapiens
uagaauuugucuuuuuacugugggugggcugu

SEQ ID NO: 247450 - RNA, 32 nt, Homo Sapiens
ccgagguugugucauugcacuccagccugggg

SEQ ID NO: 247451 - RNA, 32 nt, Homo Sapiens
agagaacccagaaauaaagccaaauacuuaca

SEQ ID NO: 247452 - RNA, 32 nt, Homo Sapiens
uuccucccccucaucacccauaaucgugggcc

SEQ ID NO: 247453 - RNA, 32 nt, Homo Sapiens
gggggagauggcagacgcuuucugggaccugc

SEQ ID NO: 247454 - RNA, 32 nt, Homo Sapiens
gccacgugcagggcgaccggauggagggacag

SEQ ID NO: 247455 - RNA, 29 nt, Homo Sapiens
uguugguuguauucuuaccacaaccaaaa

SEQ ID NO: 247456 - RNA, 32 nt, Homo Sapiens
guauuuuuuauuuuguguaauuuuacauuuca

SEQ ID NO: 247457 - RNA, 32 nt, Homo Sapiens
aacaacuucagaugaauuuuuacaaguuacac

SEQ ID NO: 247458 - RNA, 32 nt, Homo Sapiens
ggaguguggucuuuuucugaucuuccucagcu

SEQ ID NO: 247459 - RNA, 32 nt, Homo Sapiens
ggagcagcaggggcuccuagugggccaggcug

SEQ ID NO: 247460 - RNA, 32 nt, Homo Sapiens
gugguaccgagccuucccggcgcccccuccuc

SEQ ID NO: 247461 - RNA, 32 nt, Homo Sapiens
ccugccucucucuccuccuccccucugggaau

SEQ ID NO: 247462 - RNA, 32 nt, Homo Sapiens
uaauuuaacucuauguuguccgccguguagac

SEQ ID NO: 247463 - RNA, 32 nt, Homo Sapiens
cugggaaguggcugcaccuuggcggcucccca

SEQ ID NO: 247464 - RNA, 32 nt, Homo Sapiens
aacauucccacccacaaagcaguacucccgag

SEQ ID NO: 247465 - RNA, 32 nt, Homo Sapiens
uguuugcuccacucaguucuggggacuuagcu

SEQ ID NO: 247466 - RNA, 32 nt, Homo Sapiens
gcuagggaaggaagaaagaagcuggagacugg

SEQ ID NO: 247467 - RNA, 32 nt, Homo Sapiens
uccaugcagagauccugaggcuuuucccccag

SEQ ID NO: 247468 - RNA, 32 nt, Homo Sapiens
gcugcucccccuccaccugaguuggggugggg

SEQ ID NO: 247469 - RNA, 32 nt, Homo Sapiens
acgcucgcgcucgcgguccgcgggucgccggg

SEQ ID NO: 247470 - RNA, 32 nt, Homo Sapiens
ugugucagcuacuucauuccuguaaauacucu

SEQ ID NO: 247471 - RNA, 32 nt, Homo Sapiens
cugaggauaggcaucucagggauuucagagca

SEQ ID NO: 247472 - RNA, 32 nt, Homo Sapiens
agacgccacaugccaacaaccugucaagcaga

SEQ ID NO: 247473 - RNA, 32 nt, Homo Sapiens
ugcugcccugugcuccuccccgcaggacaugg

SEQ ID NO: 247474 - RNA, 32 nt, Homo Sapiens
ugccugcuccuuggcacccccaugcugccuuc

SEQ ID NO: 247475 - RNA, 32 nt, Homo Sapiens
ugaaacuagcuuucaaauuucucuaaaaucuc

SEQ ID NO: 247476 - RNA, 32 nt, Homo Sapiens
gaaggauugaaaauaaaauugcacuuuuuagg

SEQ ID NO: 247477 - RNA, 32 nt, Homo Sapiens
ggaaaggacauuugagggaaacaucaaauuuc

SEQ ID NO: 247478 - RNA, 32 nt, Homo Sapiens
gggugaggaucgagggcgcccgaggccggguc

SEQ ID NO: 247479 - RNA, 32 nt, Homo Sapiens
guuccccacagaggagaagcucugcuuucuuu

SEQ ID NO: 247480 - RNA, 32 nt, Homo Sapiens
gagcagagggucacggucaugucaguuugggg

SEQ ID NO: 247481 - RNA, 32 nt, Homo Sapiens
ccaguagcggccccuaaaccacuuccucagag

SEQ ID NO: 247482 - RNA, 32 nt, Homo Sapiens
agcccuugccugggagaacaguucaggagaca

SEQ ID NO: 247483 - RNA, 32 nt, Homo Sapiens
cgccgcuccgccugagcuccccgguuugcaga

SEQ ID NO: 247484 - RNA, 32 nt, Homo Sapiens
acaaagcugaggugcuggagaugccaagggaa

SEQ ID NO: 247485 - RNA, 30 nt, Homo Sapiens
aguuugggagguggcggcagaauaagggcu

SEQ ID NO: 247486 - RNA, 32 nt, Homo Sapiens
gugguagccaguaaacuauacaugacaaauua

SEQ ID NO: 247487 - RNA, 32 nt, Homo Sapiens
aacuaaguuuauggagaaaauaccuucaguug

SEQ ID NO: 247488 - RNA, 32 nt, Homo Sapiens
uaccuucuggaagagggaauguuucauuuauu

SEQ ID NO: 247489 - RNA, 32 nt, Homo Sapiens
uauuuaaacuuguauuuuuuuauuuacaaaau

SEQ ID NO: 247490 - RNA, 32 nt, Homo Sapiens
uuucagcagcaaucucagaagcuuacaaauag

SEQ ID NO: 247491 - RNA, 32 nt, Homo Sapiens
uccugugcauuaaccucugcaugugaaaacuu

SEQ ID NO: 247492 - RNA, 32 nt, Homo Sapiens
ugauuauaguucugaggcccuagcuacucacu

SEQ ID NO: 247493 - RNA, 32 nt, Homo Sapiens
cuguuuggauaccuggguggagcccacagacc

SEQ ID NO: 247494 - RNA, 32 nt, Homo Sapiens
acaacuauuuuuguuguuguuguuuguaaaug

SEQ ID NO: 247495 - RNA, 32 nt, Homo Sapiens
cuuuugagacaacuguugcauuuugggguacu

SEQ ID NO: 247496 - RNA, 32 nt, Homo Sapiens
augaaagaacagagucucaacucacuccuugu

SEQ ID NO: 247497 - RNA, 25 nt, Homo Sapiens
auggccaccggcggcggcgcggagg

SEQ ID NO: 247498 - RNA, 32 nt, Homo Sapiens
aaaacaaacaaauauguguuacaaguacuugu

SEQ ID NO: 247499 - RNA, 32 nt, Homo Sapiens
guucuuuuaaccucagaaugucaaauuuuggu

SEQ ID NO: 247500 - RNA, 32 nt, Homo Sapiens
uuggggagauauguuugauuauagagagacuc

SEQ ID NO: 247501 - RNA, 32 nt, Homo Sapiens
agagaucaaaaauaaaccucuuaugucaagcc

SEQ ID NO: 247502 - RNA, 32 nt, Homo Sapiens
cacgugugcuuggucagcuccagugugucguc

SEQ ID NO: 247503 - RNA, 32 nt, Homo Sapiens
accgcccguggaaaaaucauggaguuuagaga

SEQ ID NO: 247504 - RNA, 32 nt, Homo Sapiens
gaauugcuuuuaaaauacauuuggccucugcc

SEQ ID NO: 247505 - RNA, 30 nt, Homo Sapiens
agggaguagaagcuuuguggugucaggcaa

SEQ ID NO: 247506 - RNA, 32 nt, Homo Sapiens
uacccaaaaaucaaaccuuauuguacaucagc

SEQ ID NO: 247507 - RNA, 32 nt, Homo Sapiens
uuacgcucggaacacauucuccaggggcaucu

SEQ ID NO: 247508 - RNA, 32 nt, Homo Sapiens
ccuggcaaagauuuucuguuaaaaaccuaugc

SEQ ID NO: 247509 - RNA, 32 nt, Homo Sapiens
ugaacacacacacacacacacacacacacaca

SEQ ID NO: 247510 - RNA, 32 nt, Homo Sapiens
agaagcccaaacaaaaacgcuguccggcgcca

SEQ ID NO: 247511 - RNA, 32 nt, Homo Sapiens
ccggagcgguccccggcccgggaaacuuggac

SEQ ID NO: 247512 - RNA, 32 nt, Homo Sapiens
auuagcagauaucugaaguacuauuuuugcag

SEQ ID NO: 247513 - RNA, 32 nt, Homo Sapiens
gcccuggaauggggcuccauggagaggugcau

SEQ ID NO: 247514 - RNA, 32 nt, Homo Sapiens
cuuggcgccucuguccuggcccgggagccgca

SEQ ID NO: 247515 - RNA, 32 nt, Homo Sapiens
gacugaaacagaggggcugggacaugguagga

SEQ ID NO: 247516 - RNA, 32 nt, Homo Sapiens
cauagggguccuaugagaaggggcagcacgau

SEQ ID NO: 247517 - RNA, 32 nt, Homo Sapiens
gggcgcggugacucacaccuguaaucccagca

SEQ ID NO: 247518 - RNA, 32 nt, Homo Sapiens
cuccgcccuggucccgccccccgggagucgcc

SEQ ID NO: 247519 - RNA, 32 nt, Homo Sapiens
gcgggucuggagagaggggaccucaagcagcc

SEQ ID NO: 247520 - RNA, 32 nt, Homo Sapiens
aaugcagcucagaugcugagcucuaguaggaa

SEQ ID NO: 247521 - RNA, 32 nt, Homo Sapiens
ucacaccuggccuccucuggcuucagcuucuc

SEQ ID NO: 247522 - RNA, 32 nt, Homo Sapiens
ggcacccucgcucucaccucccuccuccugag

SEQ ID NO: 247523 - RNA, 32 nt, Homo Sapiens
acuaaaaaacuauauauacauauacauaugug

SEQ ID NO: 247524 - RNA, 32 nt, Homo Sapiens
gauccagagcugugcagcccaggccguucuua

SEQ ID NO: 247525 - RNA, 32 nt, Homo Sapiens
uugaucucgggcggccccgauaagggaggcgg

SEQ ID NO: 247526 - RNA, 32 nt, Homo Sapiens
uccagcuggugagugaugcggcagauugaguu

SEQ ID NO: 247527 - RNA, 32 nt, Homo Sapiens
uaaaaggaaaauaagucacaucuggucauugg

SEQ ID NO: 247528 - RNA, 32 nt, Homo Sapiens
ccgccaggccuggccuggccggggcuucccuu

SEQ ID NO: 247529 - RNA, 32 nt, Homo Sapiens
uugcaucaaaaaugauuagguugcagaacuuc

SEQ ID NO: 247530 - RNA, 32 nt, Homo Sapiens
gcccaguccaacccggcccagccuagcccagc

SEQ ID NO: 247531 - RNA, 32 nt, Homo Sapiens
cggccagugggagagcgaggccugagccucug

SEQ ID NO: 247532 - RNA, 32 nt, Homo Sapiens
uugggcugaaaggugauaauggcauugcgugg

SEQ ID NO: 247533 - RNA, 32 nt, Homo Sapiens
cuuuuagaacgggaaacggcucagauccugcu

SEQ ID NO: 247534 - RNA, 32 nt, Homo Sapiens
ucccagaggguggaaggagccaggacgcaccc

SEQ ID NO: 247535 - RNA, 32 nt, Homo Sapiens
ggaugggcucugagcacaccccugcccggccc

SEQ ID NO: 247536 - RNA, 32 nt, Homo Sapiens
acacaacauauucgaauugagucaagcccauu

SEQ ID NO: 247537 - RNA, 32 nt, Homo Sapiens
acugagguucagagagguuaagagacuccacu

SEQ ID NO: 247538 - RNA, 32 nt, Homo Sapiens
ggccaccauuuucauuugugcaguguauuuuu

SEQ ID NO: 247539 - RNA, 32 nt, Homo Sapiens
uuucggggccgcgguugaacuggagucuugag

SEQ ID NO: 247540 - RNA, 32 nt, Homo Sapiens
cuccucagaucuuuaaucuggaagugacaaaa

SEQ ID NO: 247541 - RNA, 32 nt, Homo Sapiens
gcgagggcgggggugucccggcuauaaagcgu

SEQ ID NO: 247542 - RNA, 32 nt, Homo Sapiens
gguuucaccauguugguuaggcuggucuggaa

SEQ ID NO: 247543 - RNA, 32 nt, Homo Sapiens
gaaagccagacaacuucuguuucuucucuugg

SEQ ID NO: 247544 - RNA, 32 nt, Homo Sapiens
ggaaucugaacacgacugauauuuucuuuaau

SEQ ID NO: 247545 - RNA, 32 nt, Homo Sapiens
uucagugucuuacuuguacuguaucaaauucc

SEQ ID NO: 247546 - RNA, 32 nt, Homo Sapiens
cgacugcacucucuccuuagcugcagaccaug

SEQ ID NO: 247547 - RNA, 32 nt, Homo Sapiens
caaagcacaacacuaauguucguuuccuuaga

SEQ ID NO: 247548 - RNA, 32 nt, Homo Sapiens
ggguucaggaggagguuagaaguuacaggcau

SEQ ID NO: 247549 - RNA, 32 nt, Homo Sapiens
ucaguuuuuccacauuguccacggccagcaca

SEQ ID NO: 247550 - RNA, 32 nt, Homo Sapiens
aaucaacuuccacucugccucuugcaagcugu

SEQ ID NO: 247551 - RNA, 32 nt, Homo Sapiens
gguaccugcccccagcccuggccaccuggagg

SEQ ID NO: 247552 - RNA, 27 nt, Homo Sapiens
cauccuaucuuauucagcccuaccauc

SEQ ID NO: 247553 - RNA, 32 nt, Homo Sapiens
aauaaaugguaucuaucauuuauuauucucac

SEQ ID NO: 247554 - RNA, 32 nt, Homo Sapiens
aaaauaagccugccuucauaaaacacuaacuu

SEQ ID NO: 247555 - RNA, 32 nt, Homo Sapiens
agugacccaagaucgugccacuucacuccagc

SEQ ID NO: 247556 - RNA, 32 nt, Homo Sapiens
accagggguuggaacuuuuguuucaaauccuc

SEQ ID NO: 247557 - RNA, 32 nt, Homo Sapiens
ggggagugucauuguucuagacuuaguucaaa

SEQ ID NO: 247558 - RNA, 32 nt, Homo Sapiens
guucuggaguucaugucgaugaaguccuaucc

SEQ ID NO: 247559 - RNA, 32 nt, Homo Sapiens
cucuuaacuuggaugagagcaaaaaccuggga

SEQ ID NO: 247560 - RNA, 32 nt, Homo Sapiens
gcagaucuuccgcguguccuucguccuggaga

SEQ ID NO: 247561 - RNA, 32 nt, Homo Sapiens
gccuccuucuucugccgcuccuggugcugcuu

SEQ ID NO: 247562 - RNA, 32 nt, Homo Sapiens
uuucuaaauuuauguaauacuuuaaacauucg

SEQ ID NO: 247563 - RNA, 32 nt, Homo Sapiens
uuuuaacaaucuuuuuauuauuuguaaaagau

SEQ ID NO: 247564 - RNA, 32 nt, Homo Sapiens
aacugaaguuuggugccuccucuuuaucaugu

SEQ ID NO: 247565 - RNA, 32 nt, Homo Sapiens
ucuccuagccaccucugcccagccccucugag

SEQ ID NO: 247566 - RNA, 32 nt, Homo Sapiens
guggguguucaguucugugucugguggguaug

SEQ ID NO: 247567 - RNA, 32 nt, Homo Sapiens
agauugggguaguggcuuccaaguuguaccua

SEQ ID NO: 247568 - RNA, 32 nt, Homo Sapiens
cucgacccccgcaaugagugggcaccagggga

SEQ ID NO: 247569 - RNA, 32 nt, Homo Sapiens
caagccuccucucuccuucugucccacugccc

SEQ ID NO: 247570 - RNA, 32 nt, Homo Sapiens
uggggguagcuccaagccuucuccugccucug

SEQ ID NO: 247571 - RNA, 32 nt, Homo Sapiens
gacaucaucagggcagccccccugcccaggua

SEQ ID NO: 247572 - RNA, 32 nt, Homo Sapiens
gacccacagggagaggugggcagagcuggagu

SEQ ID NO: 247573 - RNA, 32 nt, Homo Sapiens
cagaugaggcaaacagcaagaguaagcagugu

SEQ ID NO: 247574 - RNA, 32 nt, Homo Sapiens
ccauggcaggcucggagccaucugaaacaacg

SEQ ID NO: 247575 - RNA, 32 nt, Homo Sapiens
gccucccccuagagcaggccuggggcuccugc

SEQ ID NO: 247576 - RNA, 32 nt, Homo Sapiens
cagguggcagauguuugagaaaaggaauuaug

SEQ ID NO: 247577 - RNA, 32 nt, Homo Sapiens
cgguggugguggcggcggcggcggggaggguc

SEQ ID NO: 247578 - RNA, 32 nt, Homo Sapiens
cagaccugucuccugggugcauccuuagccuu

SEQ ID NO: 247579 - RNA, 32 nt, Homo Sapiens
gcauuccaacuuuuucucuuuguuuuugucca

SEQ ID NO: 247580 - RNA, 32 nt, Homo Sapiens
uucugauguacaaagcuugauuaccauagaaa

SEQ ID NO: 247581 - RNA, 32 nt, Homo Sapiens
cgccacugcacuccagcccuggcgacagagug

SEQ ID NO: 247582 - RNA, 32 nt, Homo Sapiens
auugagccaagaccaaguccucaaagcaccug

SEQ ID NO: 247583 - RNA, 32 nt, Homo Sapiens
ugcucugcugauucuuuuuuccuuuuuuuuuu

SEQ ID NO: 247584 - RNA, 32 nt, Homo Sapiens
aggugucugucccagggcuggagaugcuuccc

SEQ ID NO: 247585 - RNA, 32 nt, Homo Sapiens
ucauugauuauauucuuguuaagcaaaucucc

SEQ ID NO: 247586 - RNA, 32 nt, Homo Sapiens
uauacaauguuaaacuugauucuuaugacaua

SEQ ID NO: 247587 - RNA, 32 nt, Homo Sapiens
caaugaaguauuuuauaaauguauuuaugcug

SEQ ID NO: 247588 - RNA, 32 nt, Homo Sapiens
cuccugccucccagccccacuggcacugacca

SEQ ID NO: 247589 - RNA, 32 nt, Homo Sapiens
gcugaaaauaaaacuuugcuauguauuuacuc

SEQ ID NO: 247590 - RNA, 32 nt, Homo Sapiens
gagcugugaccuggcucugguucaacaaaagg

SEQ ID NO: 247591 - RNA, 32 nt, Homo Sapiens
cagaaccagaaagcgugcugagcucggccucu

SEQ ID NO: 247592 - RNA, 32 nt, Homo Sapiens
ccugacaagaacauauuguuucccugaccccu

SEQ ID NO: 247593 - RNA, 32 nt, Homo Sapiens
aaaaugaauauaagagugcuugucauuauaaa

SEQ ID NO: 247594 - RNA, 32 nt, Homo Sapiens
acuaucuuuuauuauuucuggcuuuucaacca

SEQ ID NO: 247595 - RNA, 32 nt, Homo Sapiens
ucuuuuuuuaauagaaaauacugcaguuucua

SEQ ID NO: 247596 - RNA, 32 nt, Homo Sapiens
agucccuggugcccuccuggcccugcugccca

SEQ ID NO: 247597 - RNA, 32 nt, Homo Sapiens
gcugccugacccccagcacaauaaaaaugaaa

SEQ ID NO: 247598 - RNA, 32 nt, Homo Sapiens
aagucauguucaauguuuccuaaaccuucaau

SEQ ID NO: 247599 - RNA, 32 nt, Homo Sapiens
acaucaggauuauggaaggugagcuuggagaa

SEQ ID NO: 247600 - RNA, 32 nt, Homo Sapiens
gcucccuguugcccagcgcgggcccguugagg

SEQ ID NO: 247601 - RNA, 32 nt, Homo Sapiens
uaaguacugucacguuuucucaugcaaaacuc

SEQ ID NO: 247602 - RNA, 30 nt, Homo Sapiens
gcuaccaugccuggcuauucuuuuuuguua

SEQ ID NO: 247603 - RNA, 32 nt, Homo Sapiens
gcuccccucgccccgccccugcagugugaaug

SEQ ID NO: 247604 - RNA, 32 nt, Homo Sapiens
gaagcaugauuuuuuggcaggugucuauccug

SEQ ID NO: 247605 - RNA, 32 nt, Homo Sapiens
gagcagcagugaugaagaaggaugauaucauc

SEQ ID NO: 247606 - RNA, 32 nt, Homo Sapiens
cagaaagcuucauggaacaauauuaucuucug

SEQ ID NO: 247607 - RNA, 32 nt, Homo Sapiens
guggcugagcauggcccucccagcccugggcc

SEQ ID NO: 247608 - RNA, 32 nt, Homo Sapiens
aacuguguuuccauccuuugcauuucucugcg

SEQ ID NO: 247609 - RNA, 32 nt, Homo Sapiens
uggaggacgagagagcggucggaggcgucggc

SEQ ID NO: 247610 - RNA, 32 nt, Homo Sapiens
gccuacccagcacgcgcuccgcgcccacuggu

SEQ ID NO: 247611 - RNA, 32 nt, Homo Sapiens
ugaagcaggugcuggaacaggcccuggccccu

SEQ ID NO: 247612 - RNA, 32 nt, Homo Sapiens
agaggggcgggggcgggguccugggggccgag

SEQ ID NO: 247613 - RNA, 32 nt, Homo Sapiens
cgcccggaggcgggguggagggggucggggcu

SEQ ID NO: 247614 - RNA, 32 nt, Homo Sapiens
uccucucccccuccuccagggaagguggccac

SEQ ID NO: 247615 - RNA, 32 nt, Homo Sapiens
ugggggucgaggagagaccccggggaguagag

SEQ ID NO: 247616 - RNA, 32 nt, Homo Sapiens
ccuuuuaguaugagaaauguguucagguccag

SEQ ID NO: 247617 - RNA, 32 nt, Homo Sapiens
guaacugacguuuccccucccccuccccucug

SEQ ID NO: 247618 - RNA, 32 nt, Homo Sapiens
gaacucacaccucuagccccagcuacucaggc

SEQ ID NO: 247619 - RNA, 31 nt, Homo Sapiens
cuucuccaagacgcugagagagccugcauug

SEQ ID NO: 247620 - RNA, 32 nt, Homo Sapiens
aaaaaauccagaaacuuguucuuccaaagcag

SEQ ID NO: 247621 - RNA, 32 nt, Homo Sapiens
ggugggaaaggaagaugccuguccucuccgug

SEQ ID NO: 247622 - RNA, 29 nt, Homo Sapiens
agugaugugacuucuuggucagaagaaaa

SEQ ID NO: 247623 - RNA, 32 nt, Homo Sapiens
gagaaaaaaugcacuguaaauaugcuuuaguu

SEQ ID NO: 247624 - RNA, 32 nt, Homo Sapiens
ucuggcugccaggaaaggacugagagauaaau

SEQ ID NO: 247625 - RNA, 32 nt, Homo Sapiens
uaccucuaacuguguaacauuuuagacuucuu

SEQ ID NO: 247626 - RNA, 32 nt, Homo Sapiens
cuugcagacuaaaaggagauacaugagagaga

SEQ ID NO: 247627 - RNA, 32 nt, Homo Sapiens
cacagcugccagccgucuguccauucacccau

SEQ ID NO: 247628 - RNA, 32 nt, Homo Sapiens
ggucuccgcgucugccagccuggcuggcaguc

SEQ ID NO: 247629 - RNA, 30 nt, Homo Sapiens
aggagaugggagagggcguagcauccagga

SEQ ID NO: 247630 - RNA, 32 nt, Homo Sapiens
uuucuuuuucauucuagaauuaucuccuugau

SEQ ID NO: 247631 - RNA, 32 nt, Homo Sapiens
aggggccuuguaccugcuucauugcauguauu

SEQ ID NO: 247632 - RNA, 32 nt, Homo Sapiens
cccgccugccccagcccggccucaggucccgg

SEQ ID NO: 247633 - RNA, 32 nt, Homo Sapiens
augcaaugucuauaagccuguuuaaagcuuuc

SEQ ID NO: 247634 - RNA, 32 nt, Homo Sapiens
acugagaaaaugccucuuggugccccgacccc

SEQ ID NO: 247635 - RNA, 32 nt, Homo Sapiens
gccaucuuugcagcucagucuagaagggcugc

SEQ ID NO: 247636 - RNA, 32 nt, Homo Sapiens
agaucccggugacauucuauuuccaggaaaau

SEQ ID NO: 247637 - RNA, 32 nt, Homo Sapiens
uucuuuuucccgacucuuuuccuugcugccag

SEQ ID NO: 247638 - RNA, 32 nt, Homo Sapiens
auuagauaggugaaaauuugcauauauucaag

SEQ ID NO: 247639 - RNA, 32 nt, Homo Sapiens
ugagaaauaaaguggagcagccucauccagac

SEQ ID NO: 247640 - RNA, 32 nt, Homo Sapiens
uguauuuuucuuuaccuacuauaaauauaaua

SEQ ID NO: 247641 - RNA, 32 nt, Homo Sapiens
ucccagcuuaucauuucuuuuagagaggaacc

SEQ ID NO: 247642 - RNA, 32 nt, Homo Sapiens
uuguuccaacaucuuccaaucauugcuagaaa

SEQ ID NO: 247643 - RNA, 32 nt, Homo Sapiens
gaccagcaggagccuggaggggcgcgcaccag

SEQ ID NO: 247644 - RNA, 32 nt, Homo Sapiens
caaccaagguagucucugcccucuguaacuua

SEQ ID NO: 247645 - RNA, 32 nt, Homo Sapiens
agcaccaagauggaagucaaaggucagcugau

SEQ ID NO: 247646 - RNA, 32 nt, Homo Sapiens
gcgacccucucggcccggcucggcgccucggc

SEQ ID NO: 247647 - RNA, 30 nt, Homo Sapiens
gcagugggguuugcugcagaauucacugca

SEQ ID NO: 247648 - RNA, 32 nt, Homo Sapiens
ggcagaccucauccuggcugccuggccacagg

SEQ ID NO: 247649 - RNA, 32 nt, Homo Sapiens
ucucgcgcaccucccgagcccccagcagccca

SEQ ID NO: 247650 - RNA, 32 nt, Homo Sapiens
ggacgauuaccaugcauaaggauagcacugga

SEQ ID NO: 247651 - RNA, 32 nt, Homo Sapiens
uuacaugcaaauaacuauuuuguaucuacagu

SEQ ID NO: 247652 - RNA, 32 nt, Homo Sapiens
aaaauaaauggcaaccccuggucuaagauaag

SEQ ID NO: 247653 - RNA, 32 nt, Homo Sapiens
cgccccgccggucacuuccgcgcggacaccag

SEQ ID NO: 247654 - RNA, 32 nt, Homo Sapiens
gcagugaggggagguccucacccaggcagaag

SEQ ID NO: 247655 - RNA, 32 nt, Homo Sapiens
uuuuaacuugaggguguagagguccuccacgc

SEQ ID NO: 247656 - RNA, 32 nt, Homo Sapiens
ccuaccugcaguggacugucauuuuccuuucu

SEQ ID NO: 247657 - RNA, 32 nt, Homo Sapiens
guucuaagccccagcacgucugccucuggcuu

SEQ ID NO: 247658 - RNA, 32 nt, Homo Sapiens
gggcuagcuggaagggcgcagcuccucuccca

SEQ ID NO: 247659 - RNA, 32 nt, Homo Sapiens
ccccacgcccccagcccagccugcuccaaaca

SEQ ID NO: 247660 - RNA, 32 nt, Homo Sapiens
guuugccuuaagaauuauuuugaaagaaguau

SEQ ID NO: 247661 - RNA, 32 nt, Homo Sapiens
agaagacaaaaauucugaaagaauaauaguaa

SEQ ID NO: 247662 - RNA, 32 nt, Homo Sapiens
gacucagaaccuggucauguccucgucgggcg

SEQ ID NO: 247663 - RNA, 32 nt, Homo Sapiens
uuguagauaugauagacuccuauuuuucuugu

SEQ ID NO: 247664 - RNA, 32 nt, Homo Sapiens
cuggaggagagcgggcggucuuugcgggccuc

SEQ ID NO: 247665 - RNA, 32 nt, Homo Sapiens
aggacacguggcccagcagagccucugaacag

SEQ ID NO: 247666 - RNA, 32 nt, Homo Sapiens
uauaaaucgcugugggcucaccaccucuaagg

SEQ ID NO: 247667 - RNA, 32 nt, Homo Sapiens
caguucuagagcaaucuacagcuguuuaugug

SEQ ID NO: 247668 - RNA, 31 nt, Homo Sapiens
cgccggcucgcaugccugcccgcccgccagc

SEQ ID NO: 247669 - RNA, 32 nt, Homo Sapiens
gccuggccaacaugucgaacuccaccucuacu

SEQ ID NO: 247670 - RNA, 32 nt, Homo Sapiens
aucaguuguaaauuauaaacugagauacuucu

SEQ ID NO: 247671 - RNA, 32 nt, Homo Sapiens
ugauggccagggccagaugcuguucuucacac

SEQ ID NO: 247672 - RNA, 32 nt, Homo Sapiens
gggccaguggggauccugggggcuuucugggg

SEQ ID NO: 247673 - RNA, 32 nt, Homo Sapiens
acccuuggugccuaaugcugugugaugcaccu

SEQ ID NO: 247674 - RNA, 32 nt, Homo Sapiens
gcagaaucuccaugggacgccuuucuggagca

SEQ ID NO: 247675 - RNA, 32 nt, Homo Sapiens
cuaauacccuugauaaaauguacaaagcuagg

SEQ ID NO: 247676 - RNA, 28 nt, Homo Sapiens
agaugaguggcuauuccagaacgacaua

SEQ ID NO: 247677 - RNA, 32 nt, Homo Sapiens
uugaugcagacaaaaugcugcugcugcugcuc

SEQ ID NO: 247678 - RNA, 32 nt, Homo Sapiens
gcccucaaguagguguuggagagaggggugau

SEQ ID NO: 247679 - RNA, 32 nt, Homo Sapiens
cugauccccuccccgcugccgccuccuccugg

SEQ ID NO: 247680 - RNA, 32 nt, Homo Sapiens
uucgucgucuuaccccacugaaaccaacaggg

SEQ ID NO: 247681 - RNA, 32 nt, Homo Sapiens
uuuuuccacaguguuuaaucugucauuaaucc

SEQ ID NO: 247682 - RNA, 32 nt, Homo Sapiens
uacuugaaaugaagaucaaaucaucaaguccu

SEQ ID NO: 247683 - RNA, 32 nt, Homo Sapiens
agagcacuuaggaucuugcuaucagcugcccu

SEQ ID NO: 247684 - RNA, 32 nt, Homo Sapiens
ggccaggccucccaggcagguguuuuauguuc

SEQ ID NO: 247685 - RNA, 32 nt, Homo Sapiens
uccguugcgguuuggccuccaguggugguccc

SEQ ID NO: 247686 - RNA, 32 nt, Homo Sapiens
cuggcuccaagccccggccucuauaguaauau

SEQ ID NO: 247687 - RNA, 32 nt, Homo Sapiens
ggugaucacugaauaguaacuucuuucuugaa

SEQ ID NO: 247688 - RNA, 32 nt, Homo Sapiens
cauguaaaauugaauucaaauaaaaucauaca

SEQ ID NO: 247689 - RNA, 32 nt, Homo Sapiens
agaucacuuguuucauaugcuguauuuaaaaa

SEQ ID NO: 247690 - RNA, 32 nt, Homo Sapiens
gcaaagaaaaagaaaaagauacgcuugaagau

SEQ ID NO: 247691 - RNA, 32 nt, Homo Sapiens
gcaagugcccaucuuuccccagccucucauca

SEQ ID NO: 247692 - RNA, 32 nt, Homo Sapiens
ggcugcacguacgagagccgggacgcccgggu

SEQ ID NO: 247693 - RNA, 32 nt, Homo Sapiens
gaccuuuugugauuucauuaucaugccuaugc

SEQ ID NO: 247694 - RNA, 32 nt, Homo Sapiens
ugaugcggaucgaaagggacuggccccggagc

SEQ ID NO: 247695 - RNA, 32 nt, Homo Sapiens
ggcacacaggccggccggcagccgcugggaaa

SEQ ID NO: 247696 - RNA, 32 nt, Homo Sapiens
cuagaugcuuggcgagugcccaaacauggaag

SEQ ID NO: 247697 - RNA, 32 nt, Homo Sapiens
gaggacaagugauggaggaaggauggauuugg

SEQ ID NO: 247698 - RNA, 32 nt, Homo Sapiens
ugcuaggggaugcacacagcauggacaaccug

SEQ ID NO: 247699 - RNA, 32 nt, Homo Sapiens
accgugggccuguuaccuccaguacgagccau

SEQ ID NO: 247700 - RNA, 32 nt, Homo Sapiens
cggccagccacgggcuccaugggcaguugccc

SEQ ID NO: 247701 - RNA, 32 nt, Homo Sapiens
aauaguggaauucuuuuaaauggaaaccucuu

SEQ ID NO: 247702 - RNA, 32 nt, Homo Sapiens
gucucccaaauagaaaaucauguauaguauuu

SEQ ID NO: 247703 - RNA, 32 nt, Homo Sapiens
gcgggcggccccggagcgcuggugccggcaga

SEQ ID NO: 247704 - RNA, 32 nt, Homo Sapiens
cgcaugcugucaucuuggugguauuucuuggc

SEQ ID NO: 247705 - RNA, 32 nt, Homo Sapiens
aaauacauuuuucaucuuauaaaagcuaugga

SEQ ID NO: 247706 - RNA, 32 nt, Homo Sapiens
cacagaacacuggguaguagcuaaugaaauug

SEQ ID NO: 247707 - RNA, 30 nt, Homo Sapiens
auccgguuguuugcgaucgccgcggccggg

SEQ ID NO: 247708 - RNA, 32 nt, Homo Sapiens
ucuucauagacuaugaaaguauuuuuacauau

SEQ ID NO: 247709 - RNA, 32 nt, Homo Sapiens
uuaguuuuuguuuuuaagugugaaugcaagug

SEQ ID NO: 247710 - RNA, 32 nt, Homo Sapiens
uacuggcugugaugaagugccagaaugucucu

SEQ ID NO: 247711 - RNA, 32 nt, Homo Sapiens
ugggcuauuucuguaugauccaauaacuuauu

SEQ ID NO: 247712 - RNA, 32 nt, Homo Sapiens
agacgcuccgccccacccggugauggagcccc

SEQ ID NO: 247713 - RNA, 32 nt, Homo Sapiens
cacucaaaaauagcuaaaauggcaaauugucu

SEQ ID NO: 247714 - RNA, 27 nt, Homo Sapiens
aggaucuguuaauucuuauauuuuucu

SEQ ID NO: 247715 - RNA, 32 nt, Homo Sapiens
aacacagggccuggccugggguccugggcaag

SEQ ID NO: 247716 - RNA, 32 nt, Homo Sapiens
uuccuuaauaaaccucuuauaucugaaaaaaa

SEQ ID NO: 247717 - RNA, 32 nt, Homo Sapiens
ugugaguuuuguguguacacacacagaaacau

SEQ ID NO: 247718 - RNA, 32 nt, Homo Sapiens
ccaggacucugcaagcggcaucucauuccggg

SEQ ID NO: 247719 - RNA, 32 nt, Homo Sapiens
ugcugaucuucaguaacucugcugccucugcc

SEQ ID NO: 247720 - RNA, 32 nt, Homo Sapiens
ggggccuggaagaaugauuggcugggaggccg

SEQ ID NO: 247721 - RNA, 32 nt, Homo Sapiens
agccaaaaauaaaagaggugccucugaggauu

SEQ ID NO: 247722 - RNA, 32 nt, Homo Sapiens
ggauuguaaguacccgaggcgaagagagcucg

SEQ ID NO: 247723 - RNA, 32 nt, Homo Sapiens
cccaagugacgugaaaugguguguguauuuau

SEQ ID NO: 247724 - RNA, 32 nt, Homo Sapiens
auuugcuuuggaaguuuuaaucucuaacagug

SEQ ID NO: 247725 - RNA, 32 nt, Homo Sapiens
guucucuggggcccgcacaggcugggacauuc

SEQ ID NO: 247726 - RNA, 32 nt, Homo Sapiens
uugagaaaagccuugaaaguugugaagcacug

SEQ ID NO: 247727 - RNA, 32 nt, Homo Sapiens
ggagaggcuggggcggcuguguccuuuccaug

SEQ ID NO: 247728 - RNA, 32 nt, Homo Sapiens
ucuaacuacaaugagaccagaauagagaaagg

SEQ ID NO: 247729 - RNA, 32 nt, Homo Sapiens
agauccccuagguccuggcccaggccugccca

SEQ ID NO: 247730 - RNA, 32 nt, Homo Sapiens
gaaggaauggagagagugggacgugggguaau

SEQ ID NO: 247731 - RNA, 32 nt, Homo Sapiens
guugaagugggccuugaacagugcccuguaaa

SEQ ID NO: 247732 - RNA, 32 nt, Homo Sapiens
uuggguugcugguuggauuaaucuuuaauaac

SEQ ID NO: 247733 - RNA, 32 nt, Homo Sapiens
caaauaguaugacaccaauuggcacaaaguua

SEQ ID NO: 247734 - RNA, 32 nt, Homo Sapiens
ggccgaaucuucauuggcaccuuuaaggcuuu

SEQ ID NO: 247735 - RNA, 32 nt, Homo Sapiens
uaacaguaaugugucccuuucauuuucuggau

SEQ ID NO: 247736 - RNA, 32 nt, Homo Sapiens
uuuguuuuaagguauagcauuuaguccagauu

SEQ ID NO: 247737 - RNA, 32 nt, Homo Sapiens
ccguggggcugaccacgguguucccuggcauc

SEQ ID NO: 247738 - RNA, 32 nt, Homo Sapiens
ccgcugccgccuccgagcagcccgccaggacu

SEQ ID NO: 247739 - RNA, 29 nt, Homo Sapiens
auguguguauguaugaaggccacaucaac

SEQ ID NO: 247740 - RNA, 30 nt, Homo Sapiens
cgguguccgcccgugucgcgccggggcacc

SEQ ID NO: 247741 - RNA, 32 nt, Homo Sapiens
uuggggcccuuaaccuuaucaggaugguggac

SEQ ID NO: 247742 - RNA, 32 nt, Homo Sapiens
caaguccuuacaaaguaugauuuuauaaauga

SEQ ID NO: 247743 - RNA, 32 nt, Homo Sapiens
ucaucuagugauugcaaaacuggaccaauggg

SEQ ID NO: 247744 - RNA, 32 nt, Homo Sapiens
agaugaccaauggaauuuuucuuaauaucauu

SEQ ID NO: 247745 - RNA, 32 nt, Homo Sapiens
gcugagggcggguguucuggggugucugcccu

SEQ ID NO: 247746 - RNA, 32 nt, Homo Sapiens
agaacuguggagccccaauuucugcugagcac

SEQ ID NO: 247747 - RNA, 32 nt, Homo Sapiens
aagcgggccugaacaccaugaucccuuuggag

SEQ ID NO: 247748 - RNA, 32 nt, Homo Sapiens
gugcguucccugggagagcccgagggagacgg

SEQ ID NO: 247749 - RNA, 29 nt, Homo Sapiens
cgggaacugaaacugguacggucuuuuug

SEQ ID NO: 247750 - RNA, 30 nt, Homo Sapiens
uuccaucuggaaaugggggagggggguaac

SEQ ID NO: 247751 - RNA, 32 nt, Homo Sapiens
ucaaagggagcauugcuagaagggcagcuagu

SEQ ID NO: 247752 - RNA, 30 nt, Homo Sapiens
cuuucgcuucccgggccgccggcagccgcc

SEQ ID NO: 247753 - RNA, 32 nt, Homo Sapiens
uggcccuagcccuccccuccccgggauguaga

SEQ ID NO: 247754 - RNA, 32 nt, Homo Sapiens
uguucgaaauuccaguugggcaaaaaacggcu

SEQ ID NO: 247755 - RNA, 32 nt, Homo Sapiens
ucuccacuugaaccucuucaugucaugaauca

SEQ ID NO: 247756 - RNA, 31 nt, Homo Sapiens
ccuggugccggccugcugccccggccgcaca

SEQ ID NO: 247757 - RNA, 32 nt, Homo Sapiens
aggcccccgcggcagugcggccgagucgaggc

SEQ ID NO: 247758 - RNA, 31 nt, Homo Sapiens
uguaccguccuccucuuacucauccauccca

SEQ ID NO: 247759 - RNA, 32 nt, Homo Sapiens
cgccacaucccggguggcucuggggcucugaa

SEQ ID NO: 247760 - RNA, 32 nt, Homo Sapiens
guagggguagaguaagaugucuuauggugaaa

SEQ ID NO: 247761 - RNA, 32 nt, Homo Sapiens
auuaccacuguuagcaaauauuucaugauaaa

SEQ ID NO: 247762 - RNA, 32 nt, Homo Sapiens
ucugacuaugagauugaugacagggaugucaa

SEQ ID NO: 247763 - RNA, 32 nt, Homo Sapiens
ugaccuuguuuaaagaaaauaaauaucuccca

SEQ ID NO: 247764 - RNA, 32 nt, Homo Sapiens
gcucccuggcuucuguggggccccucaccuac

SEQ ID NO: 247765 - RNA, 32 nt, Homo Sapiens
ugucugggguuccuuuagucuugaaugucuua

SEQ ID NO: 247766 - RNA, 32 nt, Homo Sapiens
cugugcaccugagcugcaguguaacuuugaaa

SEQ ID NO: 247767 - RNA, 32 nt, Homo Sapiens
ccggcgacucugcggccagcgcccugggucuc

SEQ ID NO: 247768 - RNA, 32 nt, Homo Sapiens
caacuaacaaaaucaagccugauucaaaacau

SEQ ID NO: 247769 - RNA, 32 nt, Homo Sapiens
ccucuggccagaacccacacccggccccuucc

SEQ ID NO: 247770 - RNA, 32 nt, Homo Sapiens
cacagcggggccaggagcugcccuguuaauau

SEQ ID NO: 247771 - RNA, 32 nt, Homo Sapiens
ccacgcuccaagacgccagcucugccgcgggc

SEQ ID NO: 247772 - RNA, 32 nt, Homo Sapiens
uguugcuguccuuguuucuguuuggauuuuuc

SEQ ID NO: 247773 - RNA, 32 nt, Homo Sapiens
ugaauguuuaguuuuucuucugcaugauacgu

SEQ ID NO: 247774 - RNA, 32 nt, Homo Sapiens
agguggccucugcggcaauugccucacccuga

SEQ ID NO: 247775 - RNA, 32 nt, Homo Sapiens
uggucccaugggugggggacaggagcugcuuc

SEQ ID NO: 247776 - RNA, 32 nt, Homo Sapiens
acugugcucugcuggcagcugugcuuuugcca

SEQ ID NO: 247777 - RNA, 32 nt, Homo Sapiens
aguuuuaguuuaggauucaguaacagugaagu

SEQ ID NO: 247778 - RNA, 32 nt, Homo Sapiens
aaaauuauuucuggguugauucaaagggagga

SEQ ID NO: 247779 - RNA, 32 nt, Homo Sapiens
uuguguaauacuuaaaaauguauuaauaacuu

SEQ ID NO: 247780 - RNA, 32 nt, Homo Sapiens
gaaugggaugggggcuucggugcccaccaacc

SEQ ID NO: 247781 - RNA, 32 nt, Homo Sapiens
aggcgugcgcgucggcggcgccgggggccuga

SEQ ID NO: 247782 - RNA, 32 nt, Homo Sapiens
gugggggguccucccaccgcuggccgacgcag

SEQ ID NO: 247783 - RNA, 32 nt, Homo Sapiens
uccugaccucaucguccaccugccucggccuc

SEQ ID NO: 247784 - RNA, 32 nt, Homo Sapiens
agaauaggcguccagaauaaagaaagaaacag

SEQ ID NO: 247785 - RNA, 32 nt, Homo Sapiens
cccaggugccgcuuccucucgccgccgagggu

SEQ ID NO: 247786 - RNA, 32 nt, Homo Sapiens
cgggggguuugccaccugagcccagggaucag

SEQ ID NO: 247787 - RNA, 32 nt, Homo Sapiens
agcauaauagaauagaauauaaaccgaaagga

SEQ ID NO: 247788 - RNA, 32 nt, Homo Sapiens
aagguagaaaauaaauuaugacaucucuucua

SEQ ID NO: 247789 - RNA, 32 nt, Homo Sapiens
uacccacccacccaccuuuguagagucccaga

SEQ ID NO: 247790 - RNA, 32 nt, Homo Sapiens
ucagagaccugcuggacaacuacccacagacc

SEQ ID NO: 247791 - RNA, 32 nt, Homo Sapiens
uauccggccauuuaauuggucaccuuaagaaa

SEQ ID NO: 247792 - RNA, 32 nt, Homo Sapiens
aucgaaagauucauaccagaguuuaaagauac

SEQ ID NO: 247793 - RNA, 30 nt, Homo Sapiens
guagugcuagguaggaccuuagagauguuc

SEQ ID NO: 247794 - RNA, 32 nt, Homo Sapiens
uuauuuugaagaaagauauuguuucuuuaguc

SEQ ID NO: 247795 - RNA, 32 nt, Homo Sapiens
cuaaagcuaguggaugugaagugguaucucau

SEQ ID NO: 247796 - RNA, 32 nt, Homo Sapiens
ugugauacuguauacugaucuaacuccuuaug

SEQ ID NO: 247797 - RNA, 32 nt, Homo Sapiens
auaccugggaugagaagaauccugagacugcc

SEQ ID NO: 247798 - RNA, 32 nt, Homo Sapiens
cagauaggacucagauacaaugcaaaaaguuc

SEQ ID NO: 247799 - RNA, 32 nt, Homo Sapiens
cuuuaaaaaaaucuguguucugaugguagagu

SEQ ID NO: 247800 - RNA, 29 nt, Homo Sapiens
cuauauugaauuuuauauuucugagcaaa

SEQ ID NO: 247801 - RNA, 32 nt, Homo Sapiens
ccuggcacccgucaucggccagcgguggaugc

SEQ ID NO: 247802 - RNA, 32 nt, Homo Sapiens
aaauguacuucaaugucuuuuuaagucacuca

SEQ ID NO: 247803 - RNA, 32 nt, Homo Sapiens
uuuauagcugucuguuugcauucugauuggga

SEQ ID NO: 247804 - RNA, 32 nt, Homo Sapiens
uauuauuauuuuuucuguuugaauucacucau

SEQ ID NO: 247805 - RNA, 32 nt, Homo Sapiens
gauuauugcauuguauuuuaauuugugcagaa

SEQ ID NO: 247806 - RNA, 32 nt, Homo Sapiens
ccugcccauuuuccucucuggcuuccugccaa

SEQ ID NO: 247807 - RNA, 32 nt, Homo Sapiens
gcugcgccuuccuggggugcccgguggugugu

SEQ ID NO: 247808 - RNA, 32 nt, Homo Sapiens
cucaucuggaauaguuucucacuuguuuugga

SEQ ID NO: 247809 - RNA, 32 nt, Homo Sapiens
gugcuggaccccggcgucuccggcugcaccga

SEQ ID NO: 247810 - RNA, 32 nt, Homo Sapiens
gagacaggggaagagggauagaggguauagca

SEQ ID NO: 247811 - RNA, 32 nt, Homo Sapiens
acauuccauuuucaauuguuacagaugugaac

SEQ ID NO: 247812 - RNA, 32 nt, Homo Sapiens
uuucuagggcuauauuugugcaucuuuucgga

SEQ ID NO: 247813 - RNA, 32 nt, Homo Sapiens
cagcaaacaaaguggaaguauagaucuucuuc

SEQ ID NO: 247814 - RNA, 32 nt, Homo Sapiens
acacagacaaauuccaccuggcaccuguuuuu

SEQ ID NO: 247815 - RNA, 23 nt, Homo Sapiens
gaaaucccccgacgaggugcuac

SEQ ID NO: 247816 - RNA, 32 nt, Homo Sapiens
aguaguucaacagcuaaacagucauaaaauag

SEQ ID NO: 247817 - RNA, 32 nt, Homo Sapiens
ggugggccgccgggcggugcuggaggugacug

SEQ ID NO: 247818 - RNA, 32 nt, Homo Sapiens
gucccaaaaugaauuccaagacaaugaaggag

SEQ ID NO: 247819 - RNA, 32 nt, Homo Sapiens
gcuggagguguguauauauacacacacacacg

SEQ ID NO: 247820 - RNA, 32 nt, Homo Sapiens
agggggccccucccuugcaccuccccccaccg

SEQ ID NO: 247821 - RNA, 32 nt, Homo Sapiens
aguguuuuuguaaauaaauguauuuguauaac

SEQ ID NO: 247822 - RNA, 32 nt, Homo Sapiens
aaauauuucuauuuuuagaaaggguuuuuaug

SEQ ID NO: 247823 - RNA, 32 nt, Homo Sapiens
cguccugaccccacaguuccugucccaugacc

SEQ ID NO: 247824 - RNA, 32 nt, Homo Sapiens
aauccagguccuuaucauccuucagguugucu

SEQ ID NO: 247825 - RNA, 32 nt, Homo Sapiens
auucaagcauucaaaguauauuuucaaugaau

SEQ ID NO: 247826 - RNA, 32 nt, Homo Sapiens
cugugccgagugucgccuccugccuggaguga

SEQ ID NO: 247827 - RNA, 32 nt, Homo Sapiens
aacaacuuugguacacaaaggcagcuuuguga

SEQ ID NO: 247828 - RNA, 32 nt, Homo Sapiens
aguauacuuccaccagacaacaaaauagauua

SEQ ID NO: 247829 - RNA, 32 nt, Homo Sapiens
acuccuccuuucuggagucugacauuagaaag

SEQ ID NO: 247830 - RNA, 32 nt, Homo Sapiens
agcuggacagaccucagccuccccucgaagac

SEQ ID NO: 247831 - RNA, 32 nt, Homo Sapiens
accuuagcuuccccggcuucaaguagaacaga

SEQ ID NO: 247832 - RNA, 32 nt, Homo Sapiens
ccugggcggagcaaaguaugggccagggagaa

SEQ ID NO: 247833 - RNA, 32 nt, Homo Sapiens
uguuuauuuaggaugcacuaaucuuggucucu

SEQ ID NO: 247834 - RNA, 32 nt, Homo Sapiens
gcaacagcaaauuaauguguaaaauuggauua

SEQ ID NO: 247835 - RNA, 32 nt, Homo Sapiens
aaaaggcuggagagggcagggagcggcaggau

SEQ ID NO: 247836 - RNA, 32 nt, Homo Sapiens
uguaauguugauggccgccacccucaugacau

SEQ ID NO: 247837 - RNA, 32 nt, Homo Sapiens
aggaagcauacaaccucuuuugugugaauuuu

SEQ ID NO: 247838 - RNA, 32 nt, Homo Sapiens
guaccggaaccuaucaaaguuacuucuccaug

SEQ ID NO: 247839 - RNA, 32 nt, Homo Sapiens
uuuaaacaaaaaugggauaagaauagucuucu

SEQ ID NO: 247840 - RNA, 32 nt, Homo Sapiens
aaagccaacagaccagcuccucuuccuccgga

SEQ ID NO: 247841 - RNA, 32 nt, Homo Sapiens
ucuacuaaaaacacaaaaguuagcugagcgug

SEQ ID NO: 247842 - RNA, 32 nt, Homo Sapiens
cccuuugcccuucacggcgcccggcccuccuu

SEQ ID NO: 247843 - RNA, 32 nt, Homo Sapiens
accucuccaugaucccaccucccauucacaga

SEQ ID NO: 247844 - RNA, 32 nt, Homo Sapiens
gcaagugacaccugcugagagaggcccaggau

SEQ ID NO: 247845 - RNA, 32 nt, Homo Sapiens
aaaguuugaagaaagaaaauuccacucggcca

SEQ ID NO: 247846 - RNA, 28 nt, Homo Sapiens
caaaauauagagagacauuugaacugua

SEQ ID NO: 247847 - RNA, 32 nt, Homo Sapiens
uucauuuugguccgguuuccacagcaugccuc

SEQ ID NO: 247848 - RNA, 32 nt, Homo Sapiens
acuaccaucggugggccaguucugccucucug

SEQ ID NO: 247849 - RNA, 32 nt, Homo Sapiens
caccacucauuuucccaaaaauaugaccccag

SEQ ID NO: 247850 - RNA, 29 nt, Homo Sapiens
uguggaaucauuuuccugccagauaccuu

SEQ ID NO: 247851 - RNA, 32 nt, Homo Sapiens
uguagauauucuuuauucuuuugcuuuuuuaa

SEQ ID NO: 247852 - RNA, 32 nt, Homo Sapiens
gggcagccggcacccggcaccacuuuggcgag

SEQ ID NO: 247853 - RNA, 32 nt, Homo Sapiens
cacacacauauuacugcaaucugugauugcuu

SEQ ID NO: 247854 - RNA, 32 nt, Homo Sapiens
gggugugcacgcuggcagguggccucugcggc

SEQ ID NO: 247855 - RNA, 32 nt, Homo Sapiens
cuagaauuuuaaaaucaaguuggauuuauaga

SEQ ID NO: 247856 - RNA, 32 nt, Homo Sapiens
accuccuccagacccccuccccuccugugucc

SEQ ID NO: 247857 - RNA, 32 nt, Homo Sapiens
aggggccgugcagggcuucagcagcaccuccu

SEQ ID NO: 247858 - RNA, 32 nt, Homo Sapiens
gucauugaauuuaaggcccaccccaaguccag

SEQ ID NO: 247859 - RNA, 32 nt, Homo Sapiens
ucuguccccugccccaggucaggguggggccu

SEQ ID NO: 247860 - RNA, 32 nt, Homo Sapiens
uggguaaaugauguaaaugaugugaucuguac

SEQ ID NO: 247861 - RNA, 32 nt, Homo Sapiens
ggggccugauucuccuuccuccgaacgggcuc

SEQ ID NO: 247862 - RNA, 32 nt, Homo Sapiens
cugucuugcuccuggggagaaagaggggccug

SEQ ID NO: 247863 - RNA, 32 nt, Homo Sapiens
ggcacuggugggucggccgccauagccccagu

SEQ ID NO: 247864 - RNA, 32 nt, Homo Sapiens
cugaggucaggaguuugagaucagccuggcca

SEQ ID NO: 247865 - RNA, 32 nt, Homo Sapiens
ucuguuggaagacuuuuaagugaguuuuuguu

SEQ ID NO: 247866 - RNA, 32 nt, Homo Sapiens
gcucucaacuacucccaaaagugugccuuccu

SEQ ID NO: 247867 - RNA, 32 nt, Homo Sapiens
uuauauuuuuauauuucuugaaagaugguaag

SEQ ID NO: 247868 - RNA, 32 nt, Homo Sapiens
gcucaguuacuauauuaagaucuuguacugug

SEQ ID NO: 247869 - RNA, 32 nt, Homo Sapiens
gguaugugggaagaaguucagaggaaccguug

SEQ ID NO: 247870 - RNA, 32 nt, Homo Sapiens
gguuccagaacauuucaugaccucaggaaaaa

SEQ ID NO: 247871 - RNA, 32 nt, Homo Sapiens
uguuuugacgaaauaaauuugcuugauacaga

SEQ ID NO: 247872 - RNA, 32 nt, Homo Sapiens
auacuaggaaacaaaaugucuucaguaucuaa

SEQ ID NO: 247873 - RNA, 32 nt, Homo Sapiens
agaucucugcaagggagguguuacagcugguu

SEQ ID NO: 247874 - RNA, 32 nt, Homo Sapiens
gggugucucugcaucacccacagccgcagcug

SEQ ID NO: 247875 - RNA, 30 nt, Homo Sapiens
uagacuggugaauugggggaaauagaagga

SEQ ID NO: 247876 - RNA, 32 nt, Homo Sapiens
auauccagugauugcugaaaaaugucugccau

SEQ ID NO: 247877 - RNA, 32 nt, Homo Sapiens
aagacaggcacagcuaaagugcucucugguac

SEQ ID NO: 247878 - RNA, 32 nt, Homo Sapiens
cagaagcugcugggcuuggcucaggauguguu

SEQ ID NO: 247879 - RNA, 32 nt, Homo Sapiens
gcugggaagggcugagcucacccaggccagca

SEQ ID NO: 247880 - RNA, 32 nt, Homo Sapiens
ccaggacuuucugccuaaggcagagcacaaga

SEQ ID NO: 247881 - RNA, 32 nt, Homo Sapiens
ggcugggaauuccaccugagaacaagucccgc

SEQ ID NO: 247882 - RNA, 32 nt, Homo Sapiens
ggcgccggcgccgucuacgcagugcguuccac

SEQ ID NO: 247883 - RNA, 32 nt, Homo Sapiens
caggcugugcacggagcgccugacgggcccaa

SEQ ID NO: 247884 - RNA, 32 nt, Homo Sapiens
ccgggcgguggcagagccccugucccaagcug

SEQ ID NO: 247885 - RNA, 32 nt, Homo Sapiens
ucaugcccacccagcaagggacagaggccaca

SEQ ID NO: 247886 - RNA, 32 nt, Homo Sapiens
cucggauggcaaggacgcguucugccugggca

SEQ ID NO: 247887 - RNA, 32 nt, Homo Sapiens
gguacugucuuggacauguucuuaauaugaac

SEQ ID NO: 247888 - RNA, 32 nt, Homo Sapiens
uuaugcuuccuucuuuccaugacuaauucuuc

SEQ ID NO: 247889 - RNA, 29 nt, Homo Sapiens
caccucggggacggaagugcgaguccggg

SEQ ID NO: 247890 - RNA, 32 nt, Homo Sapiens
auguuaaggagaacugcaaaccacuguucaau

SEQ ID NO: 247891 - RNA, 32 nt, Homo Sapiens
auugcugcauuuuaagcauaauuaauuuggac

SEQ ID NO: 247892 - RNA, 32 nt, Homo Sapiens
uugacccugaguuuuaaauucgaaaauaaagu

SEQ ID NO: 247893 - RNA, 32 nt, Homo Sapiens
ugcuaaucaggguucuccauggagcuucccuc

SEQ ID NO: 247894 - RNA, 32 nt, Homo Sapiens
gcggcgcgaccccgucccggcgcggcccccag

SEQ ID NO: 247895 - RNA, 32 nt, Homo Sapiens
cugaaguugcgagcggcgagcggcgagcggcg

SEQ ID NO: 247896 - RNA, 32 nt, Homo Sapiens
caagcgcagggccuggcauggcuuccuucaag

SEQ ID NO: 247897 - RNA, 32 nt, Homo Sapiens
gggcuccgcgcgcuccggcagcgcauucgggu

SEQ ID NO: 247898 - RNA, 32 nt, Homo Sapiens
ucagcuuuuggaaaggacucaggaagcuuuua

SEQ ID NO: 247899 - RNA, 32 nt, Homo Sapiens
cucaccugaaaaauaaagugcuuggcuaagaa

SEQ ID NO: 247900 - RNA, 29 nt, Homo Sapiens
cuucuuggcacuuuccuuucgaaccaucc

SEQ ID NO: 247901 - RNA, 32 nt, Homo Sapiens
gccccagcacccucaggguccuggacgagaac

SEQ ID NO: 247902 - RNA, 32 nt, Homo Sapiens
gaaaugcaguucuuggaguugaugagagguua

SEQ ID NO: 247903 - RNA, 32 nt, Homo Sapiens
gauucuguccacucgggaauguuucggacuug

SEQ ID NO: 247904 - RNA, 32 nt, Homo Sapiens
agcugucgccgccgcucucagaucgagucuug

SEQ ID NO: 247905 - RNA, 32 nt, Homo Sapiens
ugguguggcugagacugccuuacuggcagcca

SEQ ID NO: 247906 - RNA, 32 nt, Homo Sapiens
ugggaaccggaaaccuauucucuuuuuaacaa

SEQ ID NO: 247907 - RNA, 32 nt, Homo Sapiens
agcucccaaacagcacguugcgggaaagagga

SEQ ID NO: 247908 - RNA, 32 nt, Homo Sapiens
uuaagaguagccaacauuaaaguuaauuuuua

SEQ ID NO: 247909 - RNA, 32 nt, Homo Sapiens
gcccggcgcgcgcgggaagucucuguagggcg

SEQ ID NO: 247910 - RNA, 32 nt, Homo Sapiens
gcaaaaaagcacauaaaguaaaaauuaguuga

SEQ ID NO: 247911 - RNA, 32 nt, Homo Sapiens
ugugguauguuagcuuuaaaagaguauuuaug

SEQ ID NO: 247912 - RNA, 30 nt, Homo Sapiens
aguccgacugcgcugccgccgccgccgccg

SEQ ID NO: 247913 - RNA, 32 nt, Homo Sapiens
uccauugcucuuuuuucuuaguucuucaauaa

SEQ ID NO: 247914 - RNA, 32 nt, Homo Sapiens
auauuuuguagguugaaggacuugcuuuuugg

SEQ ID NO: 247915 - RNA, 32 nt, Homo Sapiens
uugggaaggcaaaaaugaaucuauuguuuugc

SEQ ID NO: 247916 - RNA, 32 nt, Homo Sapiens
cugcaggauucuggcauuuugcaugccauucu

SEQ ID NO: 247917 - RNA, 32 nt, Homo Sapiens
ccuccacaagcacucgggccuccacaagcacu

SEQ ID NO: 247918 - RNA, 32 nt, Homo Sapiens
uguggcuucguggucacugcuccagccucagc

SEQ ID NO: 247919 - RNA, 32 nt, Homo Sapiens
ccucacgucccagccaggaucccccuggaaga

SEQ ID NO: 247920 - RNA, 32 nt, Homo Sapiens
ggaaccgcagguggugagcggcuggggagggc

SEQ ID NO: 247921 - RNA, 32 nt, Homo Sapiens
cuucuguuuggaauuuucuuuauuaugugugg

SEQ ID NO: 247922 - RNA, 32 nt, Homo Sapiens
cuuuuuauuuuaguuccuucuauacauguuug

SEQ ID NO: 247923 - RNA, 32 nt, Homo Sapiens
auauguuggaguagucauuuccauucuuuaca

SEQ ID NO: 247924 - RNA, 32 nt, Homo Sapiens
cgccccgauguacagcaugaugauggagaccg

SEQ ID NO: 247925 - RNA, 32 nt, Homo Sapiens
guuggaaaaaauacccaggagcugguccccuu

SEQ ID NO: 247926 - RNA, 32 nt, Homo Sapiens
cacaggaaugcugcugggaaaagcagggccug

SEQ ID NO: 247927 - RNA, 31 nt, Homo Sapiens
cggcgaaugggaccggaggcgaggaggacga

SEQ ID NO: 247928 - RNA, 32 nt, Homo Sapiens
agcaccacacucagcccucauuggcucuugaa

SEQ ID NO: 247929 - RNA, 32 nt, Homo Sapiens
aauuggcaaaggcuccuuguaagauuucacug

SEQ ID NO: 247930 - RNA, 27 nt, Homo Sapiens
gcgguccucuucuucagcacaugccaa

SEQ ID NO: 247931 - RNA, 32 nt, Homo Sapiens
gguugugaaugauuucuuuugaagauauauug

SEQ ID NO: 247932 - RNA, 32 nt, Homo Sapiens
gaggggcggcugcugccuggugacggcacccg

SEQ ID NO: 247933 - RNA, 32 nt, Homo Sapiens
ccuguuuuacuauuuguuauuaaacuaucauc

SEQ ID NO: 247934 - RNA, 32 nt, Homo Sapiens
uaucaccaauacugauuaacauucucuuugga

SEQ ID NO: 247935 - RNA, 32 nt, Homo Sapiens
uuuuccauuauuuccucauuugccuuaauuga

SEQ ID NO: 247936 - RNA, 32 nt, Homo Sapiens
guucuuccaguuccucacggguuagguagggg

SEQ ID NO: 247937 - RNA, 32 nt, Homo Sapiens
uuucucuuuuuaauuucuuuuacccuuuugug

SEQ ID NO: 247938 - RNA, 32 nt, Homo Sapiens
ugcugcuuugggggaaucuccuccccuaccac

SEQ ID NO: 247939 - RNA, 32 nt, Homo Sapiens
uccuuucgcccccacacccccuccccuugcca

SEQ ID NO: 247940 - RNA, 32 nt, Homo Sapiens
ccacaaucucaaaugauugaaauucaugaaca

SEQ ID NO: 247941 - RNA, 32 nt, Homo Sapiens
agugugccuacugcgucaugggcuucacgcag

SEQ ID NO: 247942 - RNA, 32 nt, Homo Sapiens
ugguagcugaaaaaacuauauuugagcacugg

SEQ ID NO: 247943 - RNA, 32 nt, Homo Sapiens
aauccccgaccccccuaccccaugcuguacuu

SEQ ID NO: 247944 - RNA, 32 nt, Homo Sapiens
agaccgaaggcacagcuccccgcgccgcgcac

SEQ ID NO: 247945 - RNA, 32 nt, Homo Sapiens
gcgcuugagaggacgcggggcugcgcaaaugg

SEQ ID NO: 247946 - RNA, 32 nt, Homo Sapiens
gugacauaccggccuugggguacgcgugccuu

SEQ ID NO: 247947 - RNA, 32 nt, Homo Sapiens
ccauuuuuaaguucucuuucugcauugugucu

SEQ ID NO: 247948 - RNA, 32 nt, Homo Sapiens
uuuaauugacauuuuaaaaugucuucaaaaag

SEQ ID NO: 247949 - RNA, 32 nt, Homo Sapiens
agcaguaacaguggcauguuuccuccuaaaaa

SEQ ID NO: 247950 - RNA, 26 nt, Homo Sapiens
cauggcugccccagccucccggcagg

SEQ ID NO: 247951 - RNA, 32 nt, Homo Sapiens
ugccuugggccucccauuucaacagcauccuu

SEQ ID NO: 247952 - RNA, 32 nt, Homo Sapiens
cuucuuuguucacaauucaguuccucccaacc

SEQ ID NO: 247953 - RNA, 32 nt, Homo Sapiens
gggcccuggacauggcccggccccacugcuga

SEQ ID NO: 247954 - RNA, 32 nt, Homo Sapiens
gcuaaggcgggccccacgcggcuggcagcgga

SEQ ID NO: 247955 - RNA, 32 nt, Homo Sapiens
uuuuuaaugaauuaaaacuagaaaacaaauug

SEQ ID NO: 247956 - RNA, 32 nt, Homo Sapiens
acauuuaaaaauuaguuuauuaucagauauca

SEQ ID NO: 247957 - RNA, 32 nt, Homo Sapiens
gauaagucuggaaagaguaaucaauauauugu

SEQ ID NO: 247958 - RNA, 32 nt, Homo Sapiens
uguguauuuuggaguuuuggugacuuuuguca

SEQ ID NO: 247959 - RNA, 32 nt, Homo Sapiens
uguggagaggggcuggcgcuguuccuuggccc

SEQ ID NO: 247960 - RNA, 31 nt, Homo Sapiens
uucaugaaauaaauaauggaggaauugucaa

SEQ ID NO: 247961 - RNA, 32 nt, Homo Sapiens
acauuuuccuuccuccuguuacauuuucccaa

SEQ ID NO: 247962 - RNA, 32 nt, Homo Sapiens
uggcaucgccggggcguuggcggaagcccccg

SEQ ID NO: 247963 - RNA, 32 nt, Homo Sapiens
uguuuuauaucauauugcuuuuuguccaucuu

SEQ ID NO: 247964 - RNA, 32 nt, Homo Sapiens
gccccugcuccccaucccggcgcaauggaguu

SEQ ID NO: 247965 - RNA, 32 nt, Homo Sapiens
gagagacaccaccuuuuaaaaauuuuuacaua

SEQ ID NO: 247966 - RNA, 32 nt, Homo Sapiens
uagauagaggaucuuggugacucaucucccag

SEQ ID NO: 247967 - RNA, 32 nt, Homo Sapiens
ugagccccacucccggccccacucacuccauc

SEQ ID NO: 247968 - RNA, 30 nt, Homo Sapiens
ggccaggucuucggccgcauccgguacgga

SEQ ID NO: 247969 - RNA, 32 nt, Homo Sapiens
gaccacaccaaaaugccaucucaaauggaaca

SEQ ID NO: 247970 - RNA, 32 nt, Homo Sapiens
aaggagcagcauauaguccagagggucagccc

SEQ ID NO: 247971 - RNA, 32 nt, Homo Sapiens
uauuuuauuuuucccauuuguacaaugccacg

SEQ ID NO: 247972 - RNA, 32 nt, Homo Sapiens
cucauauaaaacagcccuguauggaagcugag

SEQ ID NO: 247973 - RNA, 32 nt, Homo Sapiens
cuggccgagagcugcgcgcuggcagccgucaa

SEQ ID NO: 247974 - RNA, 32 nt, Homo Sapiens
aaauuagccagacaugguggcauucgucugua

SEQ ID NO: 247975 - RNA, 32 nt, Homo Sapiens
ucucccaacuacuguuacugguuauagagguc

SEQ ID NO: 247976 - RNA, 32 nt, Homo Sapiens
agaaacacucaguguccccuccccucaggcuc

SEQ ID NO: 247977 - RNA, 32 nt, Homo Sapiens
uagaaauguauuaccacccacuaauauguauu

SEQ ID NO: 247978 - RNA, 32 nt, Homo Sapiens
gacuuuggacuucucugagucugugcaaucau

SEQ ID NO: 247979 - RNA, 32 nt, Homo Sapiens
cuacuguucuuugaauaagugaauguuucuuu

SEQ ID NO: 247980 - RNA, 32 nt, Homo Sapiens
agauugaaggcacaguguuugacaggagugga

SEQ ID NO: 247981 - RNA, 32 nt, Homo Sapiens
augaauguauaggaacugucuaugaguaugga

SEQ ID NO: 247982 - RNA, 32 nt, Homo Sapiens
uggcugccauucccuucuuccuccucaucacc

SEQ ID NO: 247983 - RNA, 32 nt, Homo Sapiens
ucgauacccaaguagugagcacaguaccagua

SEQ ID NO: 247984 - RNA, 32 nt, Homo Sapiens
uacuuuccaaccaaauaaagucaauuuuucua

SEQ ID NO: 247985 - RNA, 31 nt, Homo Sapiens
agcauuuucaaugauguuagccugauuuggg

SEQ ID NO: 247986 - RNA, 32 nt, Homo Sapiens
cccagccgagccgagccggcccgagcgcuccg

SEQ ID NO: 247987 - RNA, 32 nt, Homo Sapiens
ucacaaaggagagagggaagaaaagaucuuuu

SEQ ID NO: 247988 - RNA, 32 nt, Homo Sapiens
gucacccuggaaaauacagugcccugccuucu

SEQ ID NO: 247989 - RNA, 32 nt, Homo Sapiens
uggguagauacccaaaggauuacaaaucaugc

SEQ ID NO: 247990 - RNA, 32 nt, Homo Sapiens
cgcgggucggagcucgguccugcuggaggcca

SEQ ID NO: 247991 - RNA, 32 nt, Homo Sapiens
ccgcugggcucggguuuucagcugcguuggag

SEQ ID NO: 247992 - RNA, 32 nt, Homo Sapiens
gagagagacagagagaaagaaauauuuaaauu

SEQ ID NO: 247993 - RNA, 32 nt, Homo Sapiens
aaggggaaucuggggucaugcauauugaaguu

SEQ ID NO: 247994 - RNA, 32 nt, Homo Sapiens
cauggugaggaauuuauaugcauggcuguugu

SEQ ID NO: 247995 - RNA, 32 nt, Homo Sapiens
aggcagaguuugccuuccuuucuccaggacca

SEQ ID NO: 247996 - RNA, 32 nt, Homo Sapiens
cuauaaaccuuauaaacuugcucugggagaau

SEQ ID NO: 247997 - RNA, 32 nt, Homo Sapiens
ugcauuugucuauguauuuucuuaaaaauuaa

SEQ ID NO: 247998 - RNA, 32 nt, Homo Sapiens
uguauagagauaaguauccuuuaggccagaau

SEQ ID NO: 247999 - RNA, 32 nt, Homo Sapiens
ugggagaugggaugucuuugcauaucucucuc

SEQ ID NO: 248000 - RNA, 32 nt, Homo Sapiens
gguggggggccgcggagcgcuggggagcagcg

SEQ ID NO: 248001 - RNA, 32 nt, Homo Sapiens
gucuuuggguacaggcuuggugggagggaagu

SEQ ID NO: 248002 - RNA, 32 nt, Homo Sapiens
aaucagacuuuuucaagucacacaauacacuc

SEQ ID NO: 248003 - RNA, 30 nt, Homo Sapiens
cuuucugccucuucaauccaucuuaccaca

SEQ ID NO: 248004 - RNA, 32 nt, Homo Sapiens
ugcgaaagucauaaguucuuuacauauuacuu

SEQ ID NO: 248005 - RNA, 32 nt, Homo Sapiens
gucacacaaagcugugaaagcagagcuggccu

SEQ ID NO: 248006 - RNA, 32 nt, Homo Sapiens
gcccugaagauaauaguggcuucuuucugauu

SEQ ID NO: 248007 - RNA, 32 nt, Homo Sapiens
guguuggugcaaggcgggagcgagcggcgguc

SEQ ID NO: 248008 - RNA, 32 nt, Homo Sapiens
gacuggcccucccuuggcucacuguccccuuc

SEQ ID NO: 248009 - RNA, 32 nt, Homo Sapiens
ugccucugcgaauggacggcgugggaagagaa

SEQ ID NO: 248010 - RNA, 32 nt, Homo Sapiens
gcggcgcagcaccagcauuguguuagugccgg

SEQ ID NO: 248011 - RNA, 32 nt, Homo Sapiens
ugagggguugggggaucggcaguugggagggg

SEQ ID NO: 248012 - RNA, 32 nt, Homo Sapiens
gaggagacggcggccuucgaggaggugaugau

SEQ ID NO: 248013 - RNA, 32 nt, Homo Sapiens
uuaaacccaggcggcagagguugcagugagcc

SEQ ID NO: 248014 - RNA, 32 nt, Homo Sapiens
cagaucuucaguguucacugguaaauuucuaa

SEQ ID NO: 248015 - RNA, 32 nt, Homo Sapiens
ucagauuaugaguuacuguuuaaaagaaaaau

SEQ ID NO: 248016 - RNA, 32 nt, Homo Sapiens
ugggagguggagguugcagugagcugagauca

SEQ ID NO: 248017 - RNA, 32 nt, Homo Sapiens
gucuuguaauauuguucauucauauugaccug

SEQ ID NO: 248018 - RNA, 32 nt, Homo Sapiens
cuaauaaaauuuaauuaauagagcuaugaaua

SEQ ID NO: 248019 - RNA, 32 nt, Homo Sapiens
agcuuuaccacuuuucagccauuuauuaauau

SEQ ID NO: 248020 - RNA, 31 nt, Homo Sapiens
ggcgggaggacugcggugccccgcggagggg

SEQ ID NO: 248021 - RNA, 32 nt, Homo Sapiens
uugagagccccucuccugccuggccuggggac

SEQ ID NO: 248022 - RNA, 32 nt, Homo Sapiens
uaaacaaauuuaugaaggacauuauucugauu

SEQ ID NO: 248023 - RNA, 32 nt, Homo Sapiens
auaccacagugggaaaaggaaagggaagaaag

SEQ ID NO: 248024 - RNA, 32 nt, Homo Sapiens
auccuacaaaaauauuaauaugugcacacaaa

SEQ ID NO: 248025 - RNA, 32 nt, Homo Sapiens
gggcagccucagacccuucucuggggcuccug

SEQ ID NO: 248026 - RNA, 28 nt, Homo Sapiens
cuuuugguuacaggacguggcagcuggu

SEQ ID NO: 248027 - RNA, 32 nt, Homo Sapiens
uagagcagagcacaacucuccuugcgucugag

SEQ ID NO: 248028 - RNA, 32 nt, Homo Sapiens
gucuguuguuuuaugaaguuuauuucucaaga

SEQ ID NO: 248029 - RNA, 32 nt, Homo Sapiens
cugcagguacgcugcgcacccgcacuggggcc

SEQ ID NO: 248030 - RNA, 30 nt, Homo Sapiens
gcgguccagaagcuugcggugagugugugc

SEQ ID NO: 248031 - RNA, 32 nt, Homo Sapiens
agcugaggaagacagcguaaccgccucagaaa

SEQ ID NO: 248032 - RNA, 32 nt, Homo Sapiens
acagaaaccagccccagaggugucacaggaag

SEQ ID NO: 248033 - RNA, 32 nt, Homo Sapiens
acuggaaaacaguauuuugguugucuuaggau

SEQ ID NO: 248034 - RNA, 32 nt, Homo Sapiens
aaggugaugcuaaaggagauaaaaccaagaug

SEQ ID NO: 248035 - RNA, 32 nt, Homo Sapiens
cgguggggggaagguuggggggugucuggagg

SEQ ID NO: 248036 - RNA, 32 nt, Homo Sapiens
ggguuaccugcugucauucagaacaagaguac

SEQ ID NO: 248037 - RNA, 30 nt, Homo Sapiens
cugaugagaagaaugcacguucugcaguug

SEQ ID NO: 248038 - RNA, 32 nt, Homo Sapiens
aaauauucaacgcuuuuauuuuuucucccguc

SEQ ID NO: 248039 - RNA, 32 nt, Homo Sapiens
gcgaaauauauuugguucuuuacuucuuuuca

SEQ ID NO: 248040 - RNA, 29 nt, Homo Sapiens
guguuguagguugagugaaugcuaccaga

SEQ ID NO: 248041 - RNA, 32 nt, Homo Sapiens
ccuagggagagccccaggggccccgcaggucu

SEQ ID NO: 248042 - RNA, 32 nt, Homo Sapiens
cccuccagccuggugcugggcuccucggcugg

SEQ ID NO: 248043 - RNA, 32 nt, Homo Sapiens
ggauccuucagcgucugcaucucggcgucgcc

SEQ ID NO: 248044 - RNA, 32 nt, Homo Sapiens
gcggccuggggguggggggcgggacucucacg

SEQ ID NO: 248045 - RNA, 31 nt, Homo Sapiens
gccagcaguggcucagccggaguccaacagc

SEQ ID NO: 248046 - RNA, 32 nt, Homo Sapiens
gcgcuccgagccugcgucuagggcgcccccgg

SEQ ID NO: 248047 - RNA, 32 nt, Homo Sapiens
uugguugugucuuuuuuuuccccccuuuuucc

SEQ ID NO: 248048 - RNA, 31 nt, Homo Sapiens
uuugcugcuacugggagauccacuccuucua

SEQ ID NO: 248049 - RNA, 32 nt, Homo Sapiens
aaagcuagugaauaauucaagugacuaagcua

SEQ ID NO: 248050 - RNA, 32 nt, Homo Sapiens
aauacagguguguuuucuuuucuuucuuuuuu

SEQ ID NO: 248051 - RNA, 32 nt, Homo Sapiens
ggaccccgcuccccaacaccugucuuucccuc

SEQ ID NO: 248052 - RNA, 32 nt, Homo Sapiens
caguaucuuuagcacaugauucaccaauaucu

SEQ ID NO: 248053 - RNA, 32 nt, Homo Sapiens
gcuggcuugaguuuguaccaaaacaguccuuc

SEQ ID NO: 248054 - RNA, 32 nt, Homo Sapiens
auaacauaggugcucuuccucaucucaucucc

SEQ ID NO: 248055 - RNA, 32 nt, Homo Sapiens
uuucgccggccgcgcggccagaugaggggggc

SEQ ID NO: 248056 - RNA, 32 nt, Homo Sapiens
guaacguguucauuuuggucuugaauguccaa

SEQ ID NO: 248057 - RNA, 32 nt, Homo Sapiens
cgcugucgggugcgcggcguggagcggcagcc

SEQ ID NO: 248058 - RNA, 32 nt, Homo Sapiens
cuccucccaucccucccgccacucagcucagg

SEQ ID NO: 248059 - RNA, 28 nt, Homo Sapiens
gccgaggggcggcgcgcggacauggagg

SEQ ID NO: 248060 - RNA, 32 nt, Homo Sapiens
acagccuaguggaagacacagauuccuaauua

SEQ ID NO: 248061 - RNA, 32 nt, Homo Sapiens
auuuuugucauucauggguccucccugggccu

SEQ ID NO: 248062 - RNA, 32 nt, Homo Sapiens
uaaaaaacuagauaaaaugaucugaaagauua

SEQ ID NO: 248063 - RNA, 32 nt, Homo Sapiens
aucuguaaaaauuguuauaauuagaguuguga

SEQ ID NO: 248064 - RNA, 32 nt, Homo Sapiens
uccuuaucgcacccucccgggcaaaggcccaa

SEQ ID NO: 248065 - RNA, 32 nt, Homo Sapiens
cccuucccugcgggcucucuccccgacacauu

SEQ ID NO: 248066 - RNA, 32 nt, Homo Sapiens
gcugagccgcacugcugccccuggccucaccg

SEQ ID NO: 248067 - RNA, 32 nt, Homo Sapiens
gucucaaaacaaaacaaaacaaaacacuguau

SEQ ID NO: 248068 - RNA, 32 nt, Homo Sapiens
caacagugguggccguagcagcggccgggccg

SEQ ID NO: 248069 - RNA, 32 nt, Homo Sapiens
aaauguauguuuuuauugauuuuuacuuuaga

SEQ ID NO: 248070 - RNA, 32 nt, Homo Sapiens
uggacugcccgaugcucccaaugacguaucca

SEQ ID NO: 248071 - RNA, 32 nt, Homo Sapiens
guaugacccagcugcccauuucuaggaaccca

SEQ ID NO: 248072 - RNA, 32 nt, Homo Sapiens
uugccguggggaccuuggaaaccuggcuuugc

SEQ ID NO: 248073 - RNA, 32 nt, Homo Sapiens
gacuggaggagacuaagaagaccugacaacua

SEQ ID NO: 248074 - RNA, 32 nt, Homo Sapiens
ugguugaugcaaacaaaaaacuauuauauuua

SEQ ID NO: 248075 - RNA, 32 nt, Homo Sapiens
cugcggaaaaugagaugguuugugaaaaaaug

SEQ ID NO: 248076 - RNA, 32 nt, Homo Sapiens
guuggccguuugcuuaaugccagaaguugggg

SEQ ID NO: 248077 - RNA, 32 nt, Homo Sapiens
cucagugaacagucacuccauagugcaaucca

SEQ ID NO: 248078 - RNA, 32 nt, Homo Sapiens
aauuagccgggcgugguggcgugugccuguag

SEQ ID NO: 248079 - RNA, 32 nt, Homo Sapiens
uugacugggcccgaggccccgccugccccggg

SEQ ID NO: 248080 - RNA, 32 nt, Homo Sapiens
uccucauguaaauuuuacuuuucaugcuuaua

SEQ ID NO: 248081 - RNA, 32 nt, Homo Sapiens
uuccgccugccagcuccccauccacccuuccc

SEQ ID NO: 248082 - RNA, 32 nt, Homo Sapiens
cauggagcggggaggcgggcgccgucugcucc

SEQ ID NO: 248083 - RNA, 32 nt, Homo Sapiens
acuggggcaaggcccaucugucugcaaggcug

SEQ ID NO: 248084 - RNA, 32 nt, Homo Sapiens
uaacauuuuuuggagaugacauuucugauuuu

SEQ ID NO: 248085 - RNA, 30 nt, Homo Sapiens
cgguccgcgagcagcggcggcugccggagg

SEQ ID NO: 248086 - RNA, 32 nt, Homo Sapiens
accccucuggggaugggcaaggccuuccagga

SEQ ID NO: 248087 - RNA, 32 nt, Homo Sapiens
cgcuaaccccggagcccggccccggggaacua

SEQ ID NO: 248088 - RNA, 32 nt, Homo Sapiens
cuuccaggggguaugggagacagguuuugguu

SEQ ID NO: 248089 - RNA, 32 nt, Homo Sapiens
uagacugaaaauaauuuugguccuuaaaagga

SEQ ID NO: 248090 - RNA, 32 nt, Homo Sapiens
uuaauuauuuucacauuuucucucugcaaacc

SEQ ID NO: 248091 - RNA, 32 nt, Homo Sapiens
cauauauacauauauauacacacauauauacg

SEQ ID NO: 248092 - RNA, 32 nt, Homo Sapiens
uauauacacauauauauacacacacauauaug

SEQ ID NO: 248093 - RNA, 32 nt, Homo Sapiens
uuggcugggauuacaggcaugagccacugcac

SEQ ID NO: 248094 - RNA, 32 nt, Homo Sapiens
agccguuugugcccgggguaaccccguuccgg

SEQ ID NO: 248095 - RNA, 32 nt, Homo Sapiens
gccauuuuaugacugucaaugccguuacuuua

SEQ ID NO: 248096 - RNA, 30 nt, Homo Sapiens
ggauuugauaaaagacuuaugagcaagcug

SEQ ID NO: 248097 - RNA, 32 nt, Homo Sapiens
ccauccauaauuccuaucuuuaaaagagggaa

SEQ ID NO: 248098 - RNA, 32 nt, Homo Sapiens
ggggcagcggaaagauuccucugcuuuuccuc

SEQ ID NO: 248099 - RNA, 32 nt, Homo Sapiens
ugcaaauuuuaaaauuuauuuuugacucuuuu

SEQ ID NO: 248100 - RNA, 32 nt, Homo Sapiens
ccacugugcucggaggugcccuggacugugua

SEQ ID NO: 248101 - RNA, 32 nt, Homo Sapiens
ugguaauaaaaaguauaaauuauaaaugcaau

SEQ ID NO: 248102 - RNA, 32 nt, Homo Sapiens
uagaacuaguuacaaaaauaauuuaaggugaa

SEQ ID NO: 248103 - RNA, 32 nt, Homo Sapiens
uucuggcggcgugucucccaccccacccccaa

SEQ ID NO: 248104 - RNA, 32 nt, Homo Sapiens
agaaucaccuaaaaaugugcuacuguaccuug

SEQ ID NO: 248105 - RNA, 32 nt, Homo Sapiens
uacauugccuucuucaagggcagguuuguggg

SEQ ID NO: 248106 - RNA, 32 nt, Homo Sapiens
uugugcuacgagucagcguccgugcgcgagga

SEQ ID NO: 248107 - RNA, 32 nt, Homo Sapiens
gagccgugcccgccccggggcuucgcagaccu

SEQ ID NO: 248108 - RNA, 32 nt, Homo Sapiens
acuuguaucauagauuuuuuuauuacagauau

SEQ ID NO: 248109 - RNA, 32 nt, Homo Sapiens
uagucauggagaguaacaggccugcuggugaa

SEQ ID NO: 248110 - RNA, 32 nt, Homo Sapiens
gggcuuugcauucaaacugcuuuuccagggcu

SEQ ID NO: 248111 - RNA, 32 nt, Homo Sapiens
ucaggccuggguggagggaguggcaagucagg

SEQ ID NO: 248112 - RNA, 32 nt, Homo Sapiens
gggggcagugccuuacacaugcuugauuccca

SEQ ID NO: 248113 - RNA, 32 nt, Homo Sapiens
gggagcccaaaauaaagggaguguuguuuuca

SEQ ID NO: 248114 - RNA, 32 nt, Homo Sapiens
uugaagggaaaauauauugagcccuuauuuug

SEQ ID NO: 248115 - RNA, 32 nt, Homo Sapiens
ccuggucagagcccgagugggugcugguugcu

SEQ ID NO: 248116 - RNA, 32 nt, Homo Sapiens
ugaugucaugguguuauauguguugaguuuaa

SEQ ID NO: 248117 - RNA, 32 nt, Homo Sapiens
aaccaagagauaacuguaaaugugacauugau

SEQ ID NO: 248118 - RNA, 32 nt, Homo Sapiens
guuagcaaggcacagucucugacuuugcaggg

SEQ ID NO: 248119 - RNA, 32 nt, Homo Sapiens
cagggcccugucaaccucucuuuucuccucca

SEQ ID NO: 248120 - RNA, 32 nt, Homo Sapiens
gaagucugcuaagagagauggaggcuguggcg

SEQ ID NO: 248121 - RNA, 32 nt, Homo Sapiens
ggcaggcgggccaaccggcccaugguguggug

SEQ ID NO: 248122 - RNA, 32 nt, Homo Sapiens
ugccccucccccagccuugaggugcccugccc

SEQ ID NO: 248123 - RNA, 32 nt, Homo Sapiens
ccuuaagcaauaaccucauugaauugaauacc

SEQ ID NO: 248124 - RNA, 32 nt, Homo Sapiens
agcccgccuucuccgaggcgcagaaguggauu

SEQ ID NO: 248125 - RNA, 32 nt, Homo Sapiens
ccgcggcgaggcucccgcgcgcggcugagugc

SEQ ID NO: 248126 - RNA, 32 nt, Homo Sapiens
cuagacgccccgaggucggagugaagcgccgg

SEQ ID NO: 248127 - RNA, 32 nt, Homo Sapiens
guucagaugcagccuuccagauuuagaggcac

SEQ ID NO: 248128 - RNA, 32 nt, Homo Sapiens
auggaugaaacauauuuuaauguuguuuacuu

SEQ ID NO: 248129 - RNA, 32 nt, Homo Sapiens
gaagcacguccucugacuucacugccgcagcu

SEQ ID NO: 248130 - RNA, 32 nt, Homo Sapiens
cauuuuuuuaggaugucugaagaugaagaaaa

SEQ ID NO: 248131 - RNA, 32 nt, Homo Sapiens
agcuagcgcgcgggccccggcgccccgcaccu

SEQ ID NO: 248132 - RNA, 32 nt, Homo Sapiens
ugacgggucggcgggcggguuugugugaacag

SEQ ID NO: 248133 - RNA, 32 nt, Homo Sapiens
ccugcucaaacacaguggggaucagagaaaag

SEQ ID NO: 248134 - RNA, 32 nt, Homo Sapiens
ugacaaaaaguuuuauuuuaaauguuaaaaau

SEQ ID NO: 248135 - RNA, 32 nt, Homo Sapiens
uugcaguuaacgacuuggaaaauacaacacaa

SEQ ID NO: 248136 - RNA, 32 nt, Homo Sapiens
uuagcccccuccucuccuuuccugcuucugcg

SEQ ID NO: 248137 - RNA, 32 nt, Homo Sapiens
cuccaguggggagaggcccagggacuggggcu

SEQ ID NO: 248138 - RNA, 32 nt, Homo Sapiens
cugugucaccugacugguuuuggagguucugu

SEQ ID NO: 248139 - RNA, 32 nt, Homo Sapiens
gcaaaucugcaccuauguagcucugcaucucc

SEQ ID NO: 248140 - RNA, 32 nt, Homo Sapiens
gggacccuggugaccaaaguggcuccggucag

SEQ ID NO: 248141 - RNA, 32 nt, Homo Sapiens
uggaucauaugguaauucuuuaauuuuucugg

SEQ ID NO: 248142 - RNA, 32 nt, Homo Sapiens
ggcccgucggggagaggacgcagcucguaggg

SEQ ID NO: 248143 - RNA, 32 nt, Homo Sapiens
auguccaguguuuuuuuuuuuacaaucauuuc

SEQ ID NO: 248144 - RNA, 32 nt, Homo Sapiens
uguuauugacauuauacacugaagucuuaaca

SEQ ID NO: 248145 - RNA, 32 nt, Homo Sapiens
cccgacaccuguaaagggucggugcugaggag

SEQ ID NO: 248146 - RNA, 32 nt, Homo Sapiens
augccaggccuggagacguccagccgcaggcg

SEQ ID NO: 248147 - RNA, 32 nt, Homo Sapiens
aagcugcccuccccuuucagccuucucaacuc

SEQ ID NO: 248148 - RNA, 32 nt, Homo Sapiens
ugugcauugcugucugucucuauugccaaaau

SEQ ID NO: 248149 - RNA, 32 nt, Homo Sapiens
gcacgugugugcacguacacacacauacacac

SEQ ID NO: 248150 - RNA, 32 nt, Homo Sapiens
cucguauuucuuuuuccuuguaaauguaauca

SEQ ID NO: 248151 - RNA, 32 nt, Homo Sapiens
cacuuccuggaaagaucuaauuguuauugcug

SEQ ID NO: 248152 - RNA, 32 nt, Homo Sapiens
auuuugggaaaggggcuugguuucugaguguc

SEQ ID NO: 248153 - RNA, 32 nt, Homo Sapiens
uugacuaacuguaaaagagucuugaaaguauu

SEQ ID NO: 248154 - RNA, 32 nt, Homo Sapiens
gggagcauccugcagcugggacagaggccagc

SEQ ID NO: 248155 - RNA, 32 nt, Homo Sapiens
uuauuuugguccaacacaguuuuacauugccc

SEQ ID NO: 248156 - RNA, 32 nt, Homo Sapiens
agaaaaaggucaagauuucuaucacuuccccg

SEQ ID NO: 248157 - RNA, 32 nt, Homo Sapiens
ucauuaauuacaucuuaauuagaaccauuugu

SEQ ID NO: 248158 - RNA, 32 nt, Homo Sapiens
caaccucuuuuggagugcagaaacauuugcgg

SEQ ID NO: 248159 - RNA, 32 nt, Homo Sapiens
cuggaacucagucccaggauuaggguuuucug

SEQ ID NO: 248160 - RNA, 31 nt, Homo Sapiens
acggcugccucaggcaggcaggcaaggagcu

SEQ ID NO: 248161 - RNA, 32 nt, Homo Sapiens
cagguggauaauugaggccuacaagagagggg

SEQ ID NO: 248162 - RNA, 32 nt, Homo Sapiens
cagcuggcuuccuggggugaagaggcaggcac

SEQ ID NO: 248163 - RNA, 32 nt, Homo Sapiens
augcaauuuaugucuucauaaaauuuugauua

SEQ ID NO: 248164 - RNA, 32 nt, Homo Sapiens
agaaccugcacacaggacagcgggaaaaaucg

SEQ ID NO: 248165 - RNA, 32 nt, Homo Sapiens
uuuucuuuucuuuucucugguaauauugacuu

SEQ ID NO: 248166 - RNA, 32 nt, Homo Sapiens
uguaaccaccaccaccuguguaaccaccaccg

SEQ ID NO: 248167 - RNA, 32 nt, Homo Sapiens
agcaguggccccaggccgcagcaggccgggcu

SEQ ID NO: 248168 - RNA, 32 nt, Homo Sapiens
gaacaggaugagaaucuaagauauauuauuaa

SEQ ID NO: 248169 - RNA, 32 nt, Homo Sapiens
cagcgcguuggcggccccgccgcagggggcag

SEQ ID NO: 248170 - RNA, 32 nt, Homo Sapiens
gcuguuguuguccguauuuaaacaacagcucc

SEQ ID NO: 248171 - RNA, 31 nt, Homo Sapiens
ccggccaugcuucgcgguccguggcgccagc

SEQ ID NO: 248172 - RNA, 32 nt, Homo Sapiens
gcuucuugaugauggcgguggagguggugguu

SEQ ID NO: 248173 - RNA, 28 nt, Homo Sapiens
uugcagaacuggaccaggaugaaaggac

SEQ ID NO: 248174 - RNA, 32 nt, Homo Sapiens
agggagguccagccauguucucugggcuccca

SEQ ID NO: 248175 - RNA, 32 nt, Homo Sapiens
uggcaccucccauaguuacagccacuacaucc

SEQ ID NO: 248176 - RNA, 32 nt, Homo Sapiens
ccagccaguggcguuccuggcuccucgggauu

SEQ ID NO: 248177 - RNA, 32 nt, Homo Sapiens
aaaaaauucugaacaugcaaccccaauaugua

SEQ ID NO: 248178 - RNA, 32 nt, Homo Sapiens
ccuccgcgcccccggcugcugcucacgccccg

SEQ ID NO: 248179 - RNA, 32 nt, Homo Sapiens
agggcuaaccaccuugcuuuucucuuuucucu

SEQ ID NO: 248180 - RNA, 32 nt, Homo Sapiens
uuuccccuuuggugucucuuugaaagauuuug

SEQ ID NO: 248181 - RNA, 32 nt, Homo Sapiens
uucacuaaucccaaaggucccaaggaacaagu

SEQ ID NO: 248182 - RNA, 32 nt, Homo Sapiens
auauuuuuucccuuuugaaaaauucaauuuua

SEQ ID NO: 248183 - RNA, 32 nt, Homo Sapiens
aggagguccaaggggacagccuggugcaggga

SEQ ID NO: 248184 - RNA, 32 nt, Homo Sapiens
ucuuugcugugcuauaucugauaugaauacag

SEQ ID NO: 248185 - RNA, 32 nt, Homo Sapiens
ucauuaacguuuuuuauuuaguuucuuuagcc

SEQ ID NO: 248186 - RNA, 32 nt, Homo Sapiens
uugccccgccggggccggcccgcgggaucagc

SEQ ID NO: 248187 - RNA, 32 nt, Homo Sapiens
ucuuuuauaagauguaauuauuugagaaacaa

SEQ ID NO: 248188 - RNA, 32 nt, Homo Sapiens
ccguggacgggggcguggucgcggccggggac

SEQ ID NO: 248189 - RNA, 32 nt, Homo Sapiens
uacagcuaggacuuaaccuugaaauggaaagu

SEQ ID NO: 248190 - RNA, 32 nt, Homo Sapiens
agauggccccuacacagcaggggcagguuugg

SEQ ID NO: 248191 - RNA, 32 nt, Homo Sapiens
gugccccccaccccccugcccuccucagggug

SEQ ID NO: 248192 - RNA, 32 nt, Homo Sapiens
ccaguguggguggucaccaucuacucuccuga

SEQ ID NO: 248193 - RNA, 32 nt, Homo Sapiens
ggccgggagcagcgccuucuuuuuaggaaacg

SEQ ID NO: 248194 - RNA, 32 nt, Homo Sapiens
gcacucugaggaauuuuuaaguuucuuugacc

SEQ ID NO: 248195 - RNA, 30 nt, Homo Sapiens
uggggguuugucaugggggaacugcccuuu

SEQ ID NO: 248196 - RNA, 30 nt, Homo Sapiens
gacaccagaaagccugccuaacucugccug

SEQ ID NO: 248197 - RNA, 32 nt, Homo Sapiens
uucacagagacacguggcagccacacucaccc

SEQ ID NO: 248198 - RNA, 32 nt, Homo Sapiens
gcugaagaugaaauggaagagaaccguuuuaa

SEQ ID NO: 248199 - RNA, 32 nt, Homo Sapiens
uuugagacuguucgggaggaaaaguuccucac

SEQ ID NO: 248200 - RNA, 32 nt, Homo Sapiens
uguggagagaauagauaauuuguguguuugca

SEQ ID NO: 248201 - RNA, 32 nt, Homo Sapiens
gaagggugucagcagagcacacggcaugagga

SEQ ID NO: 248202 - RNA, 32 nt, Homo Sapiens
uccuggccgggcagacaggcccggggggcguc

SEQ ID NO: 248203 - RNA, 32 nt, Homo Sapiens
aacaucguggcuuuccacggacacuuugcuga

SEQ ID NO: 248204 - RNA, 32 nt, Homo Sapiens
aaccauuuuaauuuuugacucuaaucagacuu

SEQ ID NO: 248205 - RNA, 32 nt, Homo Sapiens
aaagcccaccagcaacauaauuuuaaagccuu

SEQ ID NO: 248206 - RNA, 32 nt, Homo Sapiens
uguggacuuugagcacacuuuacacaagaauc

SEQ ID NO: 248207 - RNA, 32 nt, Homo Sapiens
aacaguauuucugguguauauuuuaauguuuu

SEQ ID NO: 248208 - RNA, 32 nt, Homo Sapiens
aaagauaauuuucuuuucauuuuuaagugaga

SEQ ID NO: 248209 - RNA, 32 nt, Homo Sapiens
uauguccugugagauguguaucaguguuuaug

SEQ ID NO: 248210 - RNA, 32 nt, Homo Sapiens
gugggcgcagagggcgggcuggcugcggggcg

SEQ ID NO: 248211 - RNA, 32 nt, Homo Sapiens
aacgaaacagcgaguuuuuggccaacgucagc

SEQ ID NO: 248212 - RNA, 29 nt, Homo Sapiens
ccuuguucuuugugaucuauaaaauuaaa

SEQ ID NO: 248213 - RNA, 32 nt, Homo Sapiens
uuccaggcuggcgugcagcaucagcaucccua

SEQ ID NO: 248214 - RNA, 32 nt, Homo Sapiens
aggcauuuucccuuuaugaagauguucaguca

SEQ ID NO: 248215 - RNA, 32 nt, Homo Sapiens
agaacauuuuuccucauuuuaucaaauccucu

SEQ ID NO: 248216 - RNA, 32 nt, Homo Sapiens
cuuaggaguaaaacaauauacuuuacagggug

SEQ ID NO: 248217 - RNA, 32 nt, Homo Sapiens
agggaucucuaccauggccgacuccucuguaa

SEQ ID NO: 248218 - RNA, 32 nt, Homo Sapiens
aggggugguuugggggcgcucaggguuacacu

SEQ ID NO: 248219 - RNA, 32 nt, Homo Sapiens
ucauauugguauauccuuuucuguguuuacag

SEQ ID NO: 248220 - RNA, 32 nt, Homo Sapiens
cagcgggguugggagaggcaugugagggcgaa

SEQ ID NO: 248221 - RNA, 32 nt, Homo Sapiens
cuguccugccacccagccccagccagggcuca

SEQ ID NO: 248222 - RNA, 32 nt, Homo Sapiens
uauuucuuaguuggaagaaauaaacucacaaa

SEQ ID NO: 248223 - RNA, 32 nt, Homo Sapiens
agagugggucacauuuguuagccacggaaaca

SEQ ID NO: 248224 - RNA, 32 nt, Homo Sapiens
accaaaauaugaaaaugggaaauguuuaauua

SEQ ID NO: 248225 - RNA, 32 nt, Homo Sapiens
acacacacacacacuggcacagggaggcuaca

SEQ ID NO: 248226 - RNA, 32 nt, Homo Sapiens
ggcacaggcugacacuaggagcugcucuccuu

SEQ ID NO: 248227 - RNA, 32 nt, Homo Sapiens
aggaaucugggccugcuucucggauuacacac

SEQ ID NO: 248228 - RNA, 32 nt, Homo Sapiens
gcagcucccucccacaccccgccuggccaaga

SEQ ID NO: 248229 - RNA, 32 nt, Homo Sapiens
ugucccagagugcgguuguacauccuccccac

SEQ ID NO: 248230 - RNA, 32 nt, Homo Sapiens
uuucuacuuuuguauguguuugaaauuucaau

SEQ ID NO: 248231 - RNA, 32 nt, Homo Sapiens
uuauggccaagcccuacccggccagcagucgc

SEQ ID NO: 248232 - RNA, 32 nt, Homo Sapiens
cagcauucuuugcggcagcuguggccuaagcg

SEQ ID NO: 248233 - RNA, 32 nt, Homo Sapiens
cucacugcucacacgcugccuccucagcagcc

SEQ ID NO: 248234 - RNA, 32 nt, Homo Sapiens
ccaaggccgucgggccggcgcuuucagcuguc

SEQ ID NO: 248235 - RNA, 32 nt, Homo Sapiens
gccccgcccuccccgcgugugcgccaggcuug

SEQ ID NO: 248236 - RNA, 32 nt, Homo Sapiens
caggcccuuggcccccggggccgggacagggg

SEQ ID NO: 248237 - RNA, 32 nt, Homo Sapiens
cucauuaacuuuugacugaauuacaauuacuc

SEQ ID NO: 248238 - RNA, 30 nt, Homo Sapiens
cucccaugacuugccauuauaauuaaaacu

SEQ ID NO: 248239 - RNA, 32 nt, Homo Sapiens
cugggaguaaaauaauggauaugagaagcucu

SEQ ID NO: 248240 - RNA, 32 nt, Homo Sapiens
uccucuuccuucuccuucuugucaaagacaua

SEQ ID NO: 248241 - RNA, 32 nt, Homo Sapiens
cacucuugguucugacacgaaggcaccccgug

SEQ ID NO: 248242 - RNA, 32 nt, Homo Sapiens
gagagggugggaguggguccaaugcacuuugu

SEQ ID NO: 248243 - RNA, 32 nt, Homo Sapiens
acggccccgucuucugccuccuccuccgucgc

SEQ ID NO: 248244 - RNA, 32 nt, Homo Sapiens
auuuuaaaaucguauucuauuuuggggguugu

SEQ ID NO: 248245 - RNA, 32 nt, Homo Sapiens
gcuacaagaguaggaagaagguaaucggcaag

SEQ ID NO: 248246 - RNA, 32 nt, Homo Sapiens
gcgcacuagcccucgcgccgcacgggacacga

SEQ ID NO: 248247 - RNA, 32 nt, Homo Sapiens
ucccacagaccgcuccuccucacccucuaccu

SEQ ID NO: 248248 - RNA, 32 nt, Homo Sapiens
caucaauaauauuguauauuaaggggaucaga

SEQ ID NO: 248249 - RNA, 30 nt, Homo Sapiens
ggaggguccguuccgggcucggugcgacug

SEQ ID NO: 248250 - RNA, 32 nt, Homo Sapiens
agcuaccauuuucaaccguccuuguuaucuag

SEQ ID NO: 248251 - RNA, 32 nt, Homo Sapiens
ugguccgugaaggacggccucaggccuuggca

SEQ ID NO: 248252 - RNA, 32 nt, Homo Sapiens
ccacacccggugcccacaucccgccgccgccg

SEQ ID NO: 248253 - RNA, 32 nt, Homo Sapiens
gauccuauuaauuuauaugcugauauuguacu

SEQ ID NO: 248254 - RNA, 32 nt, Homo Sapiens
guugggggcuggccagcugcucguccgcccua

SEQ ID NO: 248255 - RNA, 32 nt, Homo Sapiens
uacuauguguggaauuucuuuuucacaccauc

SEQ ID NO: 248256 - RNA, 32 nt, Homo Sapiens
ucaucuguaaauauuucugugauugcaccuuu

SEQ ID NO: 248257 - RNA, 32 nt, Homo Sapiens
aaagauugguuaaaagcuuugguuucuaguaa

SEQ ID NO: 248258 - RNA, 32 nt, Homo Sapiens
ggggagcagcguuugauccccccugccuauca

SEQ ID NO: 248259 - RNA, 32 nt, Homo Sapiens
uugacuuucauacauacuguaugggaagauua

SEQ ID NO: 248260 - RNA, 32 nt, Homo Sapiens
ucuucucucucugacacacacacacacacaca

SEQ ID NO: 248261 - RNA, 27 nt, Homo Sapiens
ccaugucgcucacugucgucagcaugg

SEQ ID NO: 248262 - RNA, 32 nt, Homo Sapiens
aacugaacauucaggugauauuuuaaauuuuc

SEQ ID NO: 248263 - RNA, 32 nt, Homo Sapiens
gcccgagauuccccagcgacgugguguugcag

SEQ ID NO: 248264 - RNA, 32 nt, Homo Sapiens
aaacacucauuccuaaugagccuccuucccau

SEQ ID NO: 248265 - RNA, 32 nt, Homo Sapiens
uuaguuuggaauggggaagaaccaggucgaua

SEQ ID NO: 248266 - RNA, 32 nt, Homo Sapiens
uagcugggacuacaggcgugcgccaccaugcc

SEQ ID NO: 248267 - RNA, 25 nt, Homo Sapiens
auggagcgcgcgccgcccgacgggc

SEQ ID NO: 248268 - RNA, 32 nt, Homo Sapiens
auaggaaaaugaagcacagaauuacucagucu

SEQ ID NO: 248269 - RNA, 30 nt, Homo Sapiens
cagggaccaggugccacccuucuggacacc

SEQ ID NO: 248270 - RNA, 32 nt, Homo Sapiens
agcucagguuucccggggcggggggcaagcag

SEQ ID NO: 248271 - RNA, 32 nt, Homo Sapiens
uuggcuuuuacuucuuuuuuauauguaaauaa

SEQ ID NO: 248272 - RNA, 29 nt, Homo Sapiens
auccuuuucauuuucagagauaacauaaa

SEQ ID NO: 248273 - RNA, 30 nt, Homo Sapiens
uucucccucccacugggggaauccucccua

SEQ ID NO: 248274 - RNA, 30 nt, Homo Sapiens
gacauucuggacugcaaaacaguucuacua

SEQ ID NO: 248275 - RNA, 32 nt, Homo Sapiens
augccuacaucauauuccuuaccucuuuuggg

SEQ ID NO: 248276 - RNA, 32 nt, Homo Sapiens
cucccaggaggagggauucccuggcuuugaua

SEQ ID NO: 248277 - RNA, 32 nt, Homo Sapiens
ucugacaccuaacaugagacguggcaugugag

SEQ ID NO: 248278 - RNA, 32 nt, Homo Sapiens
cuggaauucuacucuucacuuacugcauugac

SEQ ID NO: 248279 - RNA, 32 nt, Homo Sapiens
aggacggcuggugucccccgcggccugcgaug

SEQ ID NO: 248280 - RNA, 32 nt, Homo Sapiens
gaagggaggugggagcucuugcucuccugguc

SEQ ID NO: 248281 - RNA, 32 nt, Homo Sapiens
auucagauccugacaaucaguggaagguccca

SEQ ID NO: 248282 - RNA, 32 nt, Homo Sapiens
gguuuucucuccaucacccccuguucucuagu

SEQ ID NO: 248283 - RNA, 32 nt, Homo Sapiens
agauauuaauuuucuucaguguucaggcaauu

SEQ ID NO: 248284 - RNA, 32 nt, Homo Sapiens
uguccgccgggcgcaggggccgaccgcacgca

SEQ ID NO: 248285 - RNA, 32 nt, Homo Sapiens
aaucugugaggaaguuuaaucuuccaaagagu

SEQ ID NO: 248286 - RNA, 32 nt, Homo Sapiens
cuagccagaaaagcaaguggcaagaggauuau

SEQ ID NO: 248287 - RNA, 32 nt, Homo Sapiens
augauacauaauaucugagcaguuaauaggcu

SEQ ID NO: 248288 - RNA, 32 nt, Homo Sapiens
ugaaauaauauuugagucuuucugcucaaaga

SEQ ID NO: 248289 - RNA, 32 nt, Homo Sapiens
guuaguuuuuauuuuauuuuugcacuucguca

SEQ ID NO: 248290 - RNA, 31 nt, Homo Sapiens
cccugccagccccagagggaguggcgagccc

SEQ ID NO: 248291 - RNA, 32 nt, Homo Sapiens
agaacuugguggcaagggccuugguggcguuc

SEQ ID NO: 248292 - RNA, 32 nt, Homo Sapiens
gacaacugugagcauuccacaccuggaccgug

SEQ ID NO: 248293 - RNA, 30 nt, Homo Sapiens
aggcagagaacuacuuaugagucuguagac

SEQ ID NO: 248294 - RNA, 32 nt, Homo Sapiens
gccauuggucugagggggcgggccccaacagc

SEQ ID NO: 248295 - RNA, 32 nt, Homo Sapiens
ccuuguuuaugacaagagaacuucugggggcg

SEQ ID NO: 248296 - RNA, 32 nt, Homo Sapiens
uaggaguucuuuggggcuucugugacuuggga

SEQ ID NO: 248297 - RNA, 32 nt, Homo Sapiens
cccugcaccugccuagcugccuuccugggaga

SEQ ID NO: 248298 - RNA, 32 nt, Homo Sapiens
cucacugcauccuccgccucccggguucaagu

SEQ ID NO: 248299 - RNA, 32 nt, Homo Sapiens
agcaauguuggcuacauguauuauuaaagagg

SEQ ID NO: 248300 - RNA, 30 nt, Homo Sapiens
uccccgcccgcgcagcagaccccgagcugc

SEQ ID NO: 248301 - RNA, 27 nt, Homo Sapiens
cagagaguccucaccagcccccugccg

SEQ ID NO: 248302 - RNA, 32 nt, Homo Sapiens
aggaugggggagagggggaggggugguacuug

SEQ ID NO: 248303 - RNA, 32 nt, Homo Sapiens
uuggcguccacugcgcggcugcacccugcccc

SEQ ID NO: 248304 - RNA, 32 nt, Homo Sapiens
caucuugugcacuacaaacaaacaaucccaag

SEQ ID NO: 248305 - RNA, 32 nt, Homo Sapiens
uuuccccaaaaauugacuuagauauuaaaaau

SEQ ID NO: 248306 - RNA, 32 nt, Homo Sapiens
uucauuuucuggggaaggcaggaggcagaaag

SEQ ID NO: 248307 - RNA, 32 nt, Homo Sapiens
uaaguagaaaaauuaaguugcagaaugaaaaa

SEQ ID NO: 248308 - RNA, 32 nt, Homo Sapiens
uggggccguggcgcccaggcugugggccgugg

SEQ ID NO: 248309 - RNA, 32 nt, Homo Sapiens
aggcuguaccucuggaggaguucuagguuugg

SEQ ID NO: 248310 - RNA, 32 nt, Homo Sapiens
guggugauauacagccauggcuccauagugga

SEQ ID NO: 248311 - RNA, 32 nt, Homo Sapiens
agcucuucacucuugcagcaucagagaguuca

SEQ ID NO: 248312 - RNA, 32 nt, Homo Sapiens
aguauaaauuuaaaacagaaacaucaaggugu

SEQ ID NO: 248313 - RNA, 32 nt, Homo Sapiens
cauucugcggccugguucugcaaggaaccagg

SEQ ID NO: 248314 - RNA, 32 nt, Homo Sapiens
gcaugugacaagccacguccccucccaccucu

SEQ ID NO: 248315 - RNA, 32 nt, Homo Sapiens
ccgcuucggggaggaggacgcugaggaggcgc

SEQ ID NO: 248316 - RNA, 32 nt, Homo Sapiens
cauugcuguuuaccucuuugcugauaaauuug

SEQ ID NO: 248317 - RNA, 32 nt, Homo Sapiens
gcauauuaaaaugugaaauuuugcguaaaaaa

SEQ ID NO: 248318 - RNA, 32 nt, Homo Sapiens
caaaaaucauuaugauccaaauuaaaaugguu

SEQ ID NO: 248319 - RNA, 32 nt, Homo Sapiens
ggaggggcuccucacuucucagauggggcggu

SEQ ID NO: 248320 - RNA, 27 nt, Homo Sapiens
agauggcggcggccgcagaguugucgc

SEQ ID NO: 248321 - RNA, 32 nt, Homo Sapiens
ucauucaaauguuaccuaaaauuuaugguguc

SEQ ID NO: 248322 - RNA, 32 nt, Homo Sapiens
ggagggcgccaaggggcggggagcgggcgugc

SEQ ID NO: 248323 - RNA, 32 nt, Homo Sapiens
aguguucugggugauaauuuugaauugauacc

SEQ ID NO: 248324 - RNA, 32 nt, Homo Sapiens
ccgugcggccccaucauccaggccacgcacca

SEQ ID NO: 248325 - RNA, 32 nt, Homo Sapiens
cugucagacugauguagaaugaguuaagcuac

SEQ ID NO: 248326 - RNA, 32 nt, Homo Sapiens
guauuuacuuagagcuuuuucuuaaaucugaa

SEQ ID NO: 248327 - RNA, 32 nt, Homo Sapiens
gggcuagucaaucccagcugucucggaccagg

SEQ ID NO: 248328 - RNA, 32 nt, Homo Sapiens
ccuggugcagagcuugagucuggccagcgggu

SEQ ID NO: 248329 - RNA, 32 nt, Homo Sapiens
uuucgugaaauagauuaaauauuuucucucua

SEQ ID NO: 248330 - RNA, 32 nt, Homo Sapiens
auacaaauugacugagugcaguauuagauuuc

SEQ ID NO: 248331 - RNA, 32 nt, Homo Sapiens
ggugagaggaggaguuagagcuggucguuuug

SEQ ID NO: 248332 - RNA, 32 nt, Homo Sapiens
gauguuaaugaaacauuucaaaacacugaugu

SEQ ID NO: 248333 - RNA, 32 nt, Homo Sapiens
guguuuggaacuguugaaaugccaaguuuucu

SEQ ID NO: 248334 - RNA, 32 nt, Homo Sapiens
aaguugcugggguggagaagggcuagcccacc

SEQ ID NO: 248335 - RNA, 32 nt, Homo Sapiens
aacccaccaaaaccaagauggcgacaaaagug

SEQ ID NO: 248336 - RNA, 32 nt, Homo Sapiens
gcuagugacaaugaaugucagaacugccaaag

SEQ ID NO: 248337 - RNA, 32 nt, Homo Sapiens
uuuccaggcucuugauagggugucacugcaug

SEQ ID NO: 248338 - RNA, 32 nt, Homo Sapiens
gacugacggcgccggccgccccugcccgucgc

SEQ ID NO: 248339 - RNA, 32 nt, Homo Sapiens
aaugcccgcuuaauauuaucagagccgagccu

SEQ ID NO: 248340 - RNA, 32 nt, Homo Sapiens
ggagaaauuagaaaacaaaacgaacucugguu

SEQ ID NO: 248341 - RNA, 32 nt, Homo Sapiens
ccuccgaaggcacaaaacuccuugucauagcg

SEQ ID NO: 248342 - RNA, 32 nt, Homo Sapiens
gccggcuagggggcgccgcgccccucacacca

SEQ ID NO: 248343 - RNA, 32 nt, Homo Sapiens
cuccucauucccauccugucacuugcagcaga

SEQ ID NO: 248344 - RNA, 27 nt, Homo Sapiens
ccauggaugaugauaucgccgcgcucg

SEQ ID NO: 248345 - RNA, 32 nt, Homo Sapiens
ggcuggugcccggcccagggugcccagcgggg

SEQ ID NO: 248346 - RNA, 31 nt, Homo Sapiens
ucucgagccugcugccugcucccccgcccca

SEQ ID NO: 248347 - RNA, 32 nt, Homo Sapiens
gggugagggagcagcacagacaaaagguggca

SEQ ID NO: 248348 - RNA, 31 nt, Homo Sapiens
gcccgagugggccccacccuggguucugaag

SEQ ID NO: 248349 - RNA, 32 nt, Homo Sapiens
ugccccggaguagcugcaggugccccggaaua

SEQ ID NO: 248350 - RNA, 32 nt, Homo Sapiens
uuuuaacauuguagucauuuguacuuugauau

SEQ ID NO: 248351 - RNA, 32 nt, Homo Sapiens
aauuagaauuaauuuaauugaauucaucuaaa

SEQ ID NO: 248352 - RNA, 32 nt, Homo Sapiens
uugccagauaaaauauaggcuacucagcuaaa

SEQ ID NO: 248353 - RNA, 32 nt, Homo Sapiens
uugagaguuuugcucugucacccaggcuggag

SEQ ID NO: 248354 - RNA, 32 nt, Homo Sapiens
cuacugaugcuguuuguuguacugagagcacg

SEQ ID NO: 248355 - RNA, 32 nt, Homo Sapiens
uugucgguuugugagggguguuugaugacuuu

SEQ ID NO: 248356 - RNA, 32 nt, Homo Sapiens
gcgggcucgcgucauccugcccccgcugcgau

SEQ ID NO: 248357 - RNA, 32 nt, Homo Sapiens
gcgucaggccgcgacgagggcgcugagacaaa

SEQ ID NO: 248358 - RNA, 32 nt, Homo Sapiens
caacaguagauuuauucuuuuagccugcacaa

SEQ ID NO: 248359 - RNA, 32 nt, Homo Sapiens
uagguguguguuagggugcagcaccggccguc

SEQ ID NO: 248360 - RNA, 32 nt, Homo Sapiens
gugcauuugcugucacaauaaaguauauuuug

SEQ ID NO: 248361 - RNA, 32 nt, Homo Sapiens
cuuuguaguagaaagaaaguuaaugaaacuga

SEQ ID NO: 248362 - RNA, 32 nt, Homo Sapiens
guguuugacacuaagaaaauagcaagagugug

SEQ ID NO: 248363 - RNA, 32 nt, Homo Sapiens
uuuggaugccucucuguuggggccuggggcug

SEQ ID NO: 248364 - RNA, 32 nt, Homo Sapiens
gcauagaagcagccuucugaucugaggacccc

SEQ ID NO: 248365 - RNA, 32 nt, Homo Sapiens
cugagccgggccccgggaccgaaguuuggcgg

SEQ ID NO: 248366 - RNA, 32 nt, Homo Sapiens
uggucccuccguuggacuguccugcggagaga

SEQ ID NO: 248367 - RNA, 32 nt, Homo Sapiens
caagauccucccagcuuucucucuacauguag

SEQ ID NO: 248368 - RNA, 32 nt, Homo Sapiens
gcauuuagccucaaaagcauguaguaccaagc

SEQ ID NO: 248369 - RNA, 32 nt, Homo Sapiens
cucccgccgucuccucugcauaagaaggggaa

SEQ ID NO: 248370 - RNA, 32 nt, Homo Sapiens
gagcagcaccgcccuuucccagcugcacucgc

SEQ ID NO: 248371 - RNA, 32 nt, Homo Sapiens
ugcugucacugacuuugugcaggccaaggacc

SEQ ID NO: 248372 - RNA, 32 nt, Homo Sapiens
caugggaguaccuuuacuuaagcucuaaaguu

SEQ ID NO: 248373 - RNA, 32 nt, Homo Sapiens
uacaggagaagcuuggcgaggugaaggagucg

SEQ ID NO: 248374 - RNA, 32 nt, Homo Sapiens
ccagaguggccuggcagcuuugccagaggcug

SEQ ID NO: 248375 - RNA, 32 nt, Homo Sapiens
uuggggggaaaggucagcucagugcuguucca

SEQ ID NO: 248376 - RNA, 32 nt, Homo Sapiens
uuuaucccaaacuuuuucagaucuagaauucg

SEQ ID NO: 248377 - RNA, 32 nt, Homo Sapiens
uauuuucacaguguucugauugcucucacagc

SEQ ID NO: 248378 - RNA, 32 nt, Homo Sapiens
ggacagggcuagggcauuuggccaggauggcc

SEQ ID NO: 248379 - RNA, 32 nt, Homo Sapiens
aucuguucaaccauucuugauaaguuaucuga

SEQ ID NO: 248380 - RNA, 32 nt, Homo Sapiens
cccuggugggggauuggggaucuguguuuagc

SEQ ID NO: 248381 - RNA, 32 nt, Homo Sapiens
gacaguacugucaucugcauuauaacggacug

SEQ ID NO: 248382 - RNA, 32 nt, Homo Sapiens
uguugacuagaguggauaguuuucuguuuaaa

SEQ ID NO: 248383 - RNA, 32 nt, Homo Sapiens
gccagccgccgcagcccucggccugcacgcag

SEQ ID NO: 248384 - RNA, 32 nt, Homo Sapiens
gggggcaugcaaaugcaaauggucaauucaga

SEQ ID NO: 248385 - RNA, 32 nt, Homo Sapiens
gucuagaaaugaauuuaagaugugaucucuug

SEQ ID NO: 248386 - RNA, 32 nt, Homo Sapiens
cuuguacauauguggauagcuauguauaaaag

SEQ ID NO: 248387 - RNA, 32 nt, Homo Sapiens
cgugaacccgggagucgagaucgcgccacugc

SEQ ID NO: 248388 - RNA, 32 nt, Homo Sapiens
uucuaugccuuuacccaucucaucuccaucca

SEQ ID NO: 248389 - RNA, 32 nt, Homo Sapiens
cgacucaaaaucaacuaucagugaugacagga

SEQ ID NO: 248390 - RNA, 32 nt, Homo Sapiens
aauaccagaaggaaacaaauauugaaaaguau

SEQ ID NO: 248391 - RNA, 32 nt, Homo Sapiens
acaggcucuggcagugcagaucugcugauccu

SEQ ID NO: 248392 - RNA, 30 nt, Homo Sapiens
cuccggagggucaagagauuucgagcacgc

SEQ ID NO: 248393 - RNA, 32 nt, Homo Sapiens
uguccugugaauggaagcaaagugcuggauug

SEQ ID NO: 248394 - RNA, 32 nt, Homo Sapiens
ggaauaaauuaaaaacaguauuugggggagaa

SEQ ID NO: 248395 - RNA, 32 nt, Homo Sapiens
aaccugcuggaacgcagugguguuuucagggc

SEQ ID NO: 248396 - RNA, 32 nt, Homo Sapiens
guaggguuuggacagacccacccccagccuug

SEQ ID NO: 248397 - RNA, 32 nt, Homo Sapiens
guaauuuuuaaagagcaacuaucaccaaaaaa

SEQ ID NO: 248398 - RNA, 32 nt, Homo Sapiens
cggucuucacuguccauuccaacagcaggagc

SEQ ID NO: 248399 - RNA, 32 nt, Homo Sapiens
auggcuuuguuuuuguuuuucuuuuguaccua

SEQ ID NO: 248400 - RNA, 32 nt, Homo Sapiens
cucggccuggcagauagcagaggcagcaggcc

SEQ ID NO: 248401 - RNA, 32 nt, Homo Sapiens
uugcugccaagaucauauucuaaugugaaaug

SEQ ID NO: 248402 - RNA, 32 nt, Homo Sapiens
cugggcagccaguuucacccucgcacaggcug

SEQ ID NO: 248403 - RNA, 32 nt, Homo Sapiens
agaggugcauuuagaaaauaugcaauaaauug

SEQ ID NO: 248404 - RNA, 32 nt, Homo Sapiens
gagaccguaaauuuauguuguauuaagccacu

SEQ ID NO: 248405 - RNA, 32 nt, Homo Sapiens
aacuagucuagugguucaauaaaggugcugaa

SEQ ID NO: 248406 - RNA, 32 nt, Homo Sapiens
acgaagucagaagaucaaaaccagccuggcca

SEQ ID NO: 248407 - RNA, 32 nt, Homo Sapiens
agagcagagggagagggccaggcuccagacuc

SEQ ID NO: 248408 - RNA, 32 nt, Homo Sapiens
aacagauuuugcaggacuggcuugcagaagga

SEQ ID NO: 248409 - RNA, 32 nt, Homo Sapiens
ugccuuuuuuuaacgggaaaaacaaguucauu

SEQ ID NO: 248410 - RNA, 32 nt, Homo Sapiens
gcucggaucugugcucagagccgggaucccuc

SEQ ID NO: 248411 - RNA, 32 nt, Homo Sapiens
cggaagggacccaccaagagcacaugugaguu

SEQ ID NO: 248412 - RNA, 32 nt, Homo Sapiens
acuugcuagguuucauaauuuaaaagagucaa

SEQ ID NO: 248413 - RNA, 32 nt, Homo Sapiens
aaaagguagauaacuguuuaaaaaauacaugu

SEQ ID NO: 248414 - RNA, 32 nt, Homo Sapiens
ggcggccgaggguuuccgcgcccgggacgcgu

SEQ ID NO: 248415 - RNA, 32 nt, Homo Sapiens
aguucguuuggcaggcacacacaguggcauaa

SEQ ID NO: 248416 - RNA, 32 nt, Homo Sapiens
acccccaucgccccugcccccggcggcggccu

SEQ ID NO: 248417 - RNA, 32 nt, Homo Sapiens
cucaagagaaaguuguugaauauaauccuuag

SEQ ID NO: 248418 - RNA, 32 nt, Homo Sapiens
auguaguugucuccagagcuuaaauauaauuu

SEQ ID NO: 248419 - RNA, 32 nt, Homo Sapiens
cauuuugcagaaaaauagcggaggcacaccca

SEQ ID NO: 248420 - RNA, 32 nt, Homo Sapiens
agccggggcuuugcccugcugcuguccucucg

SEQ ID NO: 248421 - RNA, 32 nt, Homo Sapiens
ucuccccaccaccagcagccugugcaauauuu

SEQ ID NO: 248422 - RNA, 32 nt, Homo Sapiens
gcauagggcuccuggggcaccaagggagagag

SEQ ID NO: 248423 - RNA, 32 nt, Homo Sapiens
auaauauggaaauaccuuagacucuugacuug

SEQ ID NO: 248424 - RNA, 32 nt, Homo Sapiens
ugaggaggcguagucgccgccggcugugcccc

SEQ ID NO: 248425 - RNA, 32 nt, Homo Sapiens
cuuuuuaauauaaauuacgacucucaaaccca

SEQ ID NO: 248426 - RNA, 31 nt, Homo Sapiens
cuccagccccacugccugcccaagcacagug

SEQ ID NO: 248427 - RNA, 32 nt, Homo Sapiens
ugaccuucuuugauccuugaaaaugggaacuu

SEQ ID NO: 248428 - RNA, 32 nt, Homo Sapiens
ccucgaguccuuuggguuucagauuguucagu

SEQ ID NO: 248429 - RNA, 32 nt, Homo Sapiens
cucuccgggcccagcucuucuuccugguugcg

SEQ ID NO: 248430 - RNA, 32 nt, Homo Sapiens
agggccucuccgucucggccccgggaccccgc

SEQ ID NO: 248431 - RNA, 32 nt, Homo Sapiens
ggaaauagcggcugcuucuuuuccaaggacuu

SEQ ID NO: 248432 - RNA, 32 nt, Homo Sapiens
cuucuagcaaggaaauucaagauucuugaagu

SEQ ID NO: 248433 - RNA, 32 nt, Homo Sapiens
gcagaagaaaugccuccccaggucugucucug

SEQ ID NO: 248434 - RNA, 32 nt, Homo Sapiens
cugccgcccucccuccaauccuucuuuuccac

SEQ ID NO: 248435 - RNA, 32 nt, Homo Sapiens
ccugauaguuaccuaaagugacacuuaaaugu

SEQ ID NO: 248436 - RNA, 32 nt, Homo Sapiens
aucuuuuucuucacauuuugcacauccuucaa

SEQ ID NO: 248437 - RNA, 32 nt, Homo Sapiens
cucgggcgcgaccugcuggugcgcgccggaug

SEQ ID NO: 248438 - RNA, 32 nt, Homo Sapiens
uuccuggcagugagguucccaggccguauuuc

SEQ ID NO: 248439 - RNA, 32 nt, Homo Sapiens
ugaaacugcauaagugaaaaucuuacaacagg

SEQ ID NO: 248440 - RNA, 32 nt, Homo Sapiens
acuuacuacaccauucuuuggcgaaggcuauu

SEQ ID NO: 248441 - RNA, 32 nt, Homo Sapiens
acucucaugcuucagcucuuggauuuguuguu

SEQ ID NO: 248442 - RNA, 32 nt, Homo Sapiens
uaaccgcucuucugcuuucuguuucuauguau

SEQ ID NO: 248443 - RNA, 32 nt, Homo Sapiens
ccaguuuggaucccuucaagacuuugucacag

SEQ ID NO: 248444 - RNA, 32 nt, Homo Sapiens
gaaaggguaggucaaggcagcgguggaaggaa

SEQ ID NO: 248445 - RNA, 32 nt, Homo Sapiens
uucccucucugggucuccagaaaaggacacug

SEQ ID NO: 248446 - RNA, 32 nt, Homo Sapiens
aaagaggaaguggcaccccuccccucaccaca

SEQ ID NO: 248447 - RNA, 32 nt, Homo Sapiens
acagcacuugugucugcagauuauuuaagugg

SEQ ID NO: 248448 - RNA, 31 nt, Homo Sapiens
aguagugugccacaccccagagccuucuuag

SEQ ID NO: 248449 - RNA, 32 nt, Homo Sapiens
uacucacgcaccccgcuuugcacaccacagag

SEQ ID NO: 248450 - RNA, 32 nt, Homo Sapiens
uuuaaucaaccucaguugacaaggugcucaga

SEQ ID NO: 248451 - RNA, 32 nt, Homo Sapiens
uguguguuggaacaccaagguugcaugagcug

SEQ ID NO: 248452 - RNA, 32 nt, Homo Sapiens
cguaggaggaagauggcgguggagucgcgcgu

SEQ ID NO: 248453 - RNA, 32 nt, Homo Sapiens
ggcuugagggugggcaaaggggugugggcuag

SEQ ID NO: 248454 - RNA, 32 nt, Homo Sapiens
guuaguggaagccccagagcagcccggcccac

SEQ ID NO: 248455 - RNA, 32 nt, Homo Sapiens
ucuaagcaggcaccgccuccacucgcagcccc

SEQ ID NO: 248456 - RNA, 32 nt, Homo Sapiens
uugagagguguuuggugacucuaggucauuga

SEQ ID NO: 248457 - RNA, 32 nt, Homo Sapiens
ccuggcuaugcgcuccagcugcacaaggcagc

SEQ ID NO: 248458 - RNA, 32 nt, Homo Sapiens
cugaggucgggaguuugagaccacccugauca

SEQ ID NO: 248459 - RNA, 28 nt, Homo Sapiens
ucugggcuuacaggacagcgugugugac

SEQ ID NO: 248460 - RNA, 32 nt, Homo Sapiens
ugggaugggaagcucgaccugggaugggaagc

SEQ ID NO: 248461 - RNA, 32 nt, Homo Sapiens
ccccgccgagaccaagaggcccucacucugac

SEQ ID NO: 248462 - RNA, 32 nt, Homo Sapiens
uuauaaaaacaaaaacaaaaccagcugcuacu

SEQ ID NO: 248463 - RNA, 32 nt, Homo Sapiens
aagaaauugugaaaaaugagcuuguaaauacu

SEQ ID NO: 248464 - RNA, 32 nt, Homo Sapiens
aaucuguaauggccaagaacuucuacuucgau

SEQ ID NO: 248465 - RNA, 32 nt, Homo Sapiens
gucgccuggcguucugauucgcccgcccgggc

SEQ ID NO: 248466 - RNA, 32 nt, Homo Sapiens
cugguagagccucgcuggccccgcgccccgga

SEQ ID NO: 248467 - RNA, 32 nt, Homo Sapiens
aaaaaucuaauuagaauuuccaaauaaaacag

SEQ ID NO: 248468 - RNA, 32 nt, Homo Sapiens
cuguguuugaguuucuggcugaaaauggugaa

SEQ ID NO: 248469 - RNA, 32 nt, Homo Sapiens
cccuucuugcccuccacccccauaagauugug

SEQ ID NO: 248470 - RNA, 32 nt, Homo Sapiens
aaguauguuaggcuuccaccaaaguccucaau

SEQ ID NO: 248471 - RNA, 31 nt, Homo Sapiens
guucacaaugggguuuuuaaaaacgguuuug

SEQ ID NO: 248472 - RNA, 32 nt, Homo Sapiens
cuugcugcagaaucauuuuguaucauguaugg

SEQ ID NO: 248473 - RNA, 32 nt, Homo Sapiens
ggguucgcugagccaaagcaucagguggcgug

SEQ ID NO: 248474 - RNA, 31 nt, Homo Sapiens
gggcuggggccccagaaucuggauuucuagc

SEQ ID NO: 248475 - RNA, 32 nt, Homo Sapiens
gcauaaauaauuuuguuuuaaucuuuuuguuu

SEQ ID NO: 248476 - RNA, 32 nt, Homo Sapiens
uuuccaggggguauauggucagggcuccccaa

SEQ ID NO: 248477 - RNA, 32 nt, Homo Sapiens
cugaagguaacuacuuuuuucauauuuggagu

SEQ ID NO: 248478 - RNA, 32 nt, Homo Sapiens
uuucugaaucuuuguaaugcucuuccacccug

SEQ ID NO: 248479 - RNA, 32 nt, Homo Sapiens
uguacugcagccccgcgccagcugguggggaa

SEQ ID NO: 248480 - RNA, 30 nt, Homo Sapiens
aaagauauuaagccugccuacuucuacaau

SEQ ID NO: 248481 - RNA, 32 nt, Homo Sapiens
auugaaaguuucuauuugguugauaaaaggaa

SEQ ID NO: 248482 - RNA, 32 nt, Homo Sapiens
ucuccguguggcggccccggagcaggcgggcg

SEQ ID NO: 248483 - RNA, 32 nt, Homo Sapiens
ggcggcugcgguguuucaccggggaaaggcuc

SEQ ID NO: 248484 - RNA, 32 nt, Homo Sapiens
caucucaggggaggcaguggcaccucccucuc

SEQ ID NO: 248485 - RNA, 32 nt, Homo Sapiens
ucuugguugaggaaacaaacaugacccuaaau

SEQ ID NO: 248486 - RNA, 32 nt, Homo Sapiens
uggaccuuuggggaggggggaguuuuuaguuu

SEQ ID NO: 248487 - RNA, 32 nt, Homo Sapiens
cuccccagcuccgccucuguccucgcuccacg

SEQ ID NO: 248488 - RNA, 32 nt, Homo Sapiens
uugaggguaaagcuacugucuuucuuaagagu

SEQ ID NO: 248489 - RNA, 32 nt, Homo Sapiens
caugcuuugcuuaauguacuccaggcuucuuc

SEQ ID NO: 248490 - RNA, 32 nt, Homo Sapiens
ggcucugugaaugcagacaugcagcauggcca

SEQ ID NO: 248491 - RNA, 32 nt, Homo Sapiens
cagauuggauauugggaagcaaauuugggugu

SEQ ID NO: 248492 - RNA, 32 nt, Homo Sapiens
aucucuagcuacaaaaggaaccacuggcucaa

SEQ ID NO: 248493 - RNA, 32 nt, Homo Sapiens
cgccggugcagccgcagcgcgcggaggaaccc

SEQ ID NO: 248494 - RNA, 32 nt, Homo Sapiens
cuccacugcaacaugagaaugggacaacagaa

SEQ ID NO: 248495 - RNA, 32 nt, Homo Sapiens
gggaaaaugguggcauaacugaaaauaugaag

SEQ ID NO: 248496 - RNA, 32 nt, Homo Sapiens
gcaagcacccgaggcuccugcugcugcgcacg

SEQ ID NO: 248497 - RNA, 32 nt, Homo Sapiens
cugguuuguguguuacgcacacacacgugcac

SEQ ID NO: 248498 - RNA, 32 nt, Homo Sapiens
uuguguuuuguuuauccaugcuauagaacaag

SEQ ID NO: 248499 - RNA, 32 nt, Homo Sapiens
ugggaauaauuuccuccaggaagcacacauga

SEQ ID NO: 248500 - RNA, 32 nt, Homo Sapiens
auauguuuacaaguuguagcaguugggggaaa

SEQ ID NO: 248501 - RNA, 32 nt, Homo Sapiens
aaccaguugucauggcaugugccuguaauccc

SEQ ID NO: 248502 - RNA, 32 nt, Homo Sapiens
cccgccuuucccuguucccuucuaagcacguu

SEQ ID NO: 248503 - RNA, 32 nt, Homo Sapiens
cucacuuccagcccagccugggcccgcagacc

SEQ ID NO: 248504 - RNA, 32 nt, Homo Sapiens
gaaaaauguaagaaaaucauuguuuuaaucua

SEQ ID NO: 248505 - RNA, 32 nt, Homo Sapiens
uuauaaaggucuuaggggaaaagccagagcuu

SEQ ID NO: 248506 - RNA, 32 nt, Homo Sapiens
cagaggcaaggcugcugcagcuccgcuggcug

SEQ ID NO: 248507 - RNA, 30 nt, Homo Sapiens
uuugugaauauccaggaagaacuuagagga

SEQ ID NO: 248508 - RNA, 32 nt, Homo Sapiens
uaaguaucuagaggaagaaaacaaagacauga

SEQ ID NO: 248509 - RNA, 32 nt, Homo Sapiens
guggagcccagcugcugcagcccagggcucuc

SEQ ID NO: 248510 - RNA, 32 nt, Homo Sapiens
cuuugccaaacacaacccugauuucagagcag

SEQ ID NO: 248511 - RNA, 32 nt, Homo Sapiens
aguggugcgaucucaacucacugcaaccucca

SEQ ID NO: 248512 - RNA, 32 nt, Homo Sapiens
acaaaauaaaacaaaaaaaaggaaggaaaaaa

SEQ ID NO: 248513 - RNA, 30 nt, Homo Sapiens
uggcuauggauaauucauaugcuuucaauc

SEQ ID NO: 248514 - RNA, 32 nt, Homo Sapiens
gcgcggaggaggaggcggcggcgucgguggcg

SEQ ID NO: 248515 - RNA, 32 nt, Homo Sapiens
aaaucaacaaaauuauuucgaagucaauuagg

SEQ ID NO: 248516 - RNA, 31 nt, Homo Sapiens
cauuuguauugagcuacaaguuggaaagcca

SEQ ID NO: 248517 - RNA, 30 nt, Homo Sapiens
gguagaccacuugaugccaugucuguauuc

SEQ ID NO: 248518 - RNA, 32 nt, Homo Sapiens
ggugcucuccuuugcccucccugcccagcagc

SEQ ID NO: 248519 - RNA, 32 nt, Homo Sapiens
gauggagagcgcgggcgcgccuuccuucgcug

SEQ ID NO: 248520 - RNA, 32 nt, Homo Sapiens
gccucccggugcgaccccggcugcgacucgga

SEQ ID NO: 248521 - RNA, 32 nt, Homo Sapiens
cuuguauauuuggcagauuaaacuugacauua

SEQ ID NO: 248522 - RNA, 32 nt, Homo Sapiens
gcuuacagagauucuuucugcugucacucaau

SEQ ID NO: 248523 - RNA, 32 nt, Homo Sapiens
gugcuuuccagaauaauaugaaguaucuaaaa

SEQ ID NO: 248524 - RNA, 32 nt, Homo Sapiens
acauuaaaaaauuucaucuaggcuaggugcag

SEQ ID NO: 248525 - RNA, 32 nt, Homo Sapiens
cacguguucuccccggugcccggggcucccac

SEQ ID NO: 248526 - RNA, 27 nt, Homo Sapiens
uucugagcuauuuucugguauggaaaa

SEQ ID NO: 248527 - RNA, 32 nt, Homo Sapiens
uuucuuggauuucccauuaaaaauagucuugu

SEQ ID NO: 248528 - RNA, 32 nt, Homo Sapiens
cauuauuaggccuauuugauagaugauacuga

SEQ ID NO: 248529 - RNA, 32 nt, Homo Sapiens
gcacggaagacauaugcuugugagacaaaggu

SEQ ID NO: 248530 - RNA, 32 nt, Homo Sapiens
uagcagagauggauagcuucuuugucagcaau

SEQ ID NO: 248531 - RNA, 32 nt, Homo Sapiens
uaguaugaaagauaagaaaaucuccauguugu

SEQ ID NO: 248532 - RNA, 32 nt, Homo Sapiens
gcggggauacucaaagccaacagcuggaguca

SEQ ID NO: 248533 - RNA, 32 nt, Homo Sapiens
cuucgccucccucucuugggugacaucaaaca

SEQ ID NO: 248534 - RNA, 32 nt, Homo Sapiens
uuaacuaauauuaaaaguuggggaacauaaaa

SEQ ID NO: 248535 - RNA, 32 nt, Homo Sapiens
ucguaccaaacuuuuccgcccugggcucggga

SEQ ID NO: 248536 - RNA, 32 nt, Homo Sapiens
cagcaauacuaagggaagaaacaaaguugaac

SEQ ID NO: 248537 - RNA, 32 nt, Homo Sapiens
gccccaggguggcaggggcauuauagccuggu

SEQ ID NO: 248538 - RNA, 32 nt, Homo Sapiens
uucuauuuucuguaauguuuaaguaugauguu

SEQ ID NO: 248539 - RNA, 32 nt, Homo Sapiens
uugacuauuucugagucaucuaguggcuccaa

SEQ ID NO: 248540 - RNA, 32 nt, Homo Sapiens
gggcaggcucugcgcaucugcuccuggcaugg

SEQ ID NO: 248541 - RNA, 32 nt, Homo Sapiens
agcucuccaugucgcuguugccgcccgcaccu

SEQ ID NO: 248542 - RNA, 32 nt, Homo Sapiens
cuccuccccucgcccucggccugguucugcag

SEQ ID NO: 248543 - RNA, 32 nt, Homo Sapiens
ugccaauggugcccagcccuggggcagggaag

SEQ ID NO: 248544 - RNA, 32 nt, Homo Sapiens
gagugucaguuauuauuuacuauuacgugcua

SEQ ID NO: 248545 - RNA, 32 nt, Homo Sapiens
agggauauaacuccuuggucagugauuuuauu

SEQ ID NO: 248546 - RNA, 32 nt, Homo Sapiens
ugccccucaaaauaaguuaaaacgaaugaaaa

SEQ ID NO: 248547 - RNA, 32 nt, Homo Sapiens
ccaugaguccggagagcaucaagaugacccac

SEQ ID NO: 248548 - RNA, 32 nt, Homo Sapiens
aggcgaggagggggcugugaguccucagaggc

SEQ ID NO: 248549 - RNA, 32 nt, Homo Sapiens
gucccuucccucuaauuccccaucccuagaua

SEQ ID NO: 248550 - RNA, 32 nt, Homo Sapiens
uuguagcccuucugcccuuaaaugcuuccuug

SEQ ID NO: 248551 - RNA, 32 nt, Homo Sapiens
aaccuuaaaaauugaguugauguccuuauagg

SEQ ID NO: 248552 - RNA, 32 nt, Homo Sapiens
gcuguaacccucaguucaaaaaauggacuggc

SEQ ID NO: 248553 - RNA, 32 nt, Homo Sapiens
ugcacacauacacaggcauacaugcaugcaca

SEQ ID NO: 248554 - RNA, 32 nt, Homo Sapiens
gcuccccgcaucugcgggcuguagagcgcugg

SEQ ID NO: 248555 - RNA, 32 nt, Homo Sapiens
gcaagcgcgcgaugcagcgggcggcggcgcug

SEQ ID NO: 248556 - RNA, 32 nt, Homo Sapiens
uccguaugucaguguaucuggauacacgagga

SEQ ID NO: 248557 - RNA, 32 nt, Homo Sapiens
guaaucuauggccaacgauguuagaaccuagc

SEQ ID NO: 248558 - RNA, 32 nt, Homo Sapiens
ugguugaaguuccaauggaauugugccauuuu

SEQ ID NO: 248559 - RNA, 32 nt, Homo Sapiens
caggaagagggaagaacggggacgacuuugug

SEQ ID NO: 248560 - RNA, 32 nt, Homo Sapiens
auacauccacagaguugugcaagcauugccac

SEQ ID NO: 248561 - RNA, 32 nt, Homo Sapiens
gggugagugcagccacugugggcgcaaauucc

SEQ ID NO: 248562 - RNA, 32 nt, Homo Sapiens
ugaaggcuaagcuggcggugcugcuggugacg

SEQ ID NO: 248563 - RNA, 32 nt, Homo Sapiens
cuucuccuuggccacuucuuccuugcgucucc

SEQ ID NO: 248564 - RNA, 32 nt, Homo Sapiens
acagcugugcgcgcccacaggcucugggggcg

SEQ ID NO: 248565 - RNA, 32 nt, Homo Sapiens
gguguuccguguacaagcgacuuacucauguc

SEQ ID NO: 248566 - RNA, 27 nt, Homo Sapiens
cccaaguccuucuccauucucccaacc

SEQ ID NO: 248567 - RNA, 32 nt, Homo Sapiens
uaguuucuuuuuucuuuuuuuuuggagaugga

SEQ ID NO: 248568 - RNA, 32 nt, Homo Sapiens
ucacucuagagcaucuugaccaaguugagaag

SEQ ID NO: 248569 - RNA, 32 nt, Homo Sapiens
uaugugcccuugaagccuuuugaaagaauugc

SEQ ID NO: 248570 - RNA, 32 nt, Homo Sapiens
auaaguauucuauuggggaggaaagguaacuc

SEQ ID NO: 248571 - RNA, 32 nt, Homo Sapiens
acgagcucagcuggcaguuaccaccguguuag

SEQ ID NO: 248572 - RNA, 32 nt, Homo Sapiens
uugaaagauuuauauaugaugaauucuggaua

SEQ ID NO: 248573 - RNA, 32 nt, Homo Sapiens
cuagguuaucuagguuauugaucaagauuucu

SEQ ID NO: 248574 - RNA, 32 nt, Homo Sapiens
ccuuagcuccaucagcuuuguacccucacacg

SEQ ID NO: 248575 - RNA, 32 nt, Homo Sapiens
cccaaaggugguuugcuuuugcugggguaaaa

SEQ ID NO: 248576 - RNA, 32 nt, Homo Sapiens
gugggccacucgcugcagaaauguagaugaau

SEQ ID NO: 248577 - RNA, 32 nt, Homo Sapiens
gguacuucacccuguuuguuacagaaaagugg

SEQ ID NO: 248578 - RNA, 29 nt, Homo Sapiens
caggaugcuuguucucuuucuccugggca

SEQ ID NO: 248579 - RNA, 30 nt, Homo Sapiens
uaaucagacaagcuugaauauuguuuuugc

SEQ ID NO: 248580 - RNA, 32 nt, Homo Sapiens
uccauccaugaccuucguuucauuucuucuca

SEQ ID NO: 248581 - RNA, 32 nt, Homo Sapiens
cccugccucagccgccucccccacgcucuuca

SEQ ID NO: 248582 - RNA, 32 nt, Homo Sapiens
aaaacugcauguuaaucauuuuccuaagcugu

SEQ ID NO: 248583 - RNA, 32 nt, Homo Sapiens
uguuguuuaaaauaaaaguaccuauugaacau

SEQ ID NO: 248584 - RNA, 32 nt, Homo Sapiens
uaaaaacuggguuaaucaagucucgguaaguc

SEQ ID NO: 248585 - RNA, 32 nt, Homo Sapiens
ccaggguccuccacccucccccugaccacaua

SEQ ID NO: 248586 - RNA, 32 nt, Homo Sapiens
ggagucucucugccucaaccacucucucugcc

SEQ ID NO: 248587 - RNA, 32 nt, Homo Sapiens
auuuuagcccagugaggccugugcuggacuuc

SEQ ID NO: 248588 - RNA, 30 nt, Homo Sapiens
ggccuagggaggcgcgcggcagcccucacu

SEQ ID NO: 248589 - RNA, 31 nt, Homo Sapiens
uuuguaucagucaugaaaguccuguuaggua

SEQ ID NO: 248590 - RNA, 32 nt, Homo Sapiens
agcuucagaaagugccagugaacucuuggucc

SEQ ID NO: 248591 - RNA, 32 nt, Homo Sapiens
ugagaaacugggaaaaguuggucaggcgcagu

SEQ ID NO: 248592 - RNA, 32 nt, Homo Sapiens
cacguauguguauuuuuaaauuucaugccuuu

SEQ ID NO: 248593 - RNA, 32 nt, Homo Sapiens
cccgcacucugcgccucuccucgccuuucucg

SEQ ID NO: 248594 - RNA, 32 nt, Homo Sapiens
cgcuccggguccgggggcgagcggucacgugg

SEQ ID NO: 248595 - RNA, 32 nt, Homo Sapiens
aaaauuaaaguguuuaaauuugagaucaagga

SEQ ID NO: 248596 - RNA, 32 nt, Homo Sapiens
ccuccccggcuaugacgcccccggcccgugcu

SEQ ID NO: 248597 - RNA, 32 nt, Homo Sapiens
guuuuuccacuuuaccuucaugauuuaaggaa

SEQ ID NO: 248598 - RNA, 32 nt, Homo Sapiens
cuacaguagacagaauugguaauagcaacuuu

SEQ ID NO: 248599 - RNA, 32 nt, Homo Sapiens
ugucccugcccccgagguugucacugcaaauc

SEQ ID NO: 248600 - RNA, 32 nt, Homo Sapiens
aaguagaagauaaacuuuuuauucauaaacca

SEQ ID NO: 248601 - RNA, 32 nt, Homo Sapiens
cugguacccguaaaaguugugggauugugacc

SEQ ID NO: 248602 - RNA, 32 nt, Homo Sapiens
gcucccgccccagccuggcccagggugaagga

SEQ ID NO: 248603 - RNA, 32 nt, Homo Sapiens
uucucaaaaauauguuaaaacaaacuaaauua

SEQ ID NO: 248604 - RNA, 32 nt, Homo Sapiens
gacacauagccgccagaccucuucccagucug

SEQ ID NO: 248605 - RNA, 32 nt, Homo Sapiens
aauugcaugcaaacuagacugaaaugauacaa

SEQ ID NO: 248606 - RNA, 32 nt, Homo Sapiens
aacuccgccucccagguucaagcgaugcucau

SEQ ID NO: 248607 - RNA, 32 nt, Homo Sapiens
cugcucacugggagaagaagaguuccugcgca

SEQ ID NO: 248608 - RNA, 32 nt, Homo Sapiens
auauuugaacucucuuuguacuuggagggcac

SEQ ID NO: 248609 - RNA, 32 nt, Homo Sapiens
caggcuuccaccuggcggccaaugcuuguuug

SEQ ID NO: 248610 - RNA, 32 nt, Homo Sapiens
ggcacuacauaaccucucugguaacuccuuga

SEQ ID NO: 248611 - RNA, 32 nt, Homo Sapiens
gggaggacaguggaaggagggagagguucagg

SEQ ID NO: 248612 - RNA, 32 nt, Homo Sapiens
gucacaaugcagugaccucacuggccuguggu

SEQ ID NO: 248613 - RNA, 32 nt, Homo Sapiens
uuaaaaugcuaaauagauacaaacucaauuuu

SEQ ID NO: 248614 - RNA, 32 nt, Homo Sapiens
auggguggagaagaagcagagauacguuuuug

SEQ ID NO: 248615 - RNA, 32 nt, Homo Sapiens
aauaugccccucggggaucuccuggucugggg

SEQ ID NO: 248616 - RNA, 32 nt, Homo Sapiens
ccaucccccuaugggcucccagccccuugcac

SEQ ID NO: 248617 - RNA, 32 nt, Homo Sapiens
cgucagcaugacagaccuccagcauccacgca

SEQ ID NO: 248618 - RNA, 32 nt, Homo Sapiens
agagcagccaucuuuuaaguggggcuguauca

SEQ ID NO: 248619 - RNA, 32 nt, Homo Sapiens
gcuggccugcgguggagggaucaguugccccc

SEQ ID NO: 248620 - RNA, 32 nt, Homo Sapiens
ugggggagcagugagggcagggggagucacag

SEQ ID NO: 248621 - RNA, 32 nt, Homo Sapiens
uugcaccucauaggugaugaucaugaggggga

SEQ ID NO: 248622 - RNA, 32 nt, Homo Sapiens
ucucagccacccaaguagcugggacuacaggu

SEQ ID NO: 248623 - RNA, 32 nt, Homo Sapiens
uuuuguccucuuuguuaugcuuggaagcuccc

SEQ ID NO: 248624 - RNA, 32 nt, Homo Sapiens
aguauuacauguuagggauuuauuuuugucug

SEQ ID NO: 248625 - RNA, 32 nt, Homo Sapiens
agucagggagcagcggcggcagagacagggcc

SEQ ID NO: 248626 - RNA, 32 nt, Homo Sapiens
ucucugcuauuuacagaaguuucuucaguagg

SEQ ID NO: 248627 - RNA, 32 nt, Homo Sapiens
uauaaauaaaaauuaaauuuuguaaauuucug

SEQ ID NO: 248628 - RNA, 32 nt, Homo Sapiens
cauucaucuaaccucccucaccugcuugggcg

SEQ ID NO: 248629 - RNA, 32 nt, Homo Sapiens
auuaaacacagauagguuuaugcuggaaaaaa

SEQ ID NO: 248630 - RNA, 32 nt, Homo Sapiens
uuuccauauuguuaauuuuauaccaaaauguu

SEQ ID NO: 248631 - RNA, 32 nt, Homo Sapiens
agccaggccucccaggcugcucuccacguccc

SEQ ID NO: 248632 - RNA, 32 nt, Homo Sapiens
ugcuccccaucccgccuccugccggguuucag

SEQ ID NO: 248633 - RNA, 32 nt, Homo Sapiens
gccaggcaggucuuguccugguccuggccaca

SEQ ID NO: 248634 - RNA, 32 nt, Homo Sapiens
gagagaagaugagagggaaugguggauuugcg

SEQ ID NO: 248635 - RNA, 32 nt, Homo Sapiens
aauauuuugguuaaaaucauguuuguggccga

SEQ ID NO: 248636 - RNA, 32 nt, Homo Sapiens
ggcgugcaccucaaggaccuggugucccugca

SEQ ID NO: 248637 - RNA, 32 nt, Homo Sapiens
ugccuuaauccugugacccagccccuuacacc

SEQ ID NO: 248638 - RNA, 32 nt, Homo Sapiens
uuccugaaucaucagcugugggcaucaggccc

SEQ ID NO: 248639 - RNA, 32 nt, Homo Sapiens
ggcacguucgcgccgcgccgcggagggaggcu

SEQ ID NO: 248640 - RNA, 27 nt, Homo Sapiens
gccgaguccuucugcugccugucccgc

SEQ ID NO: 248641 - RNA, 32 nt, Homo Sapiens
ucugcuuccuucccuucuuagcuggcucaggg

SEQ ID NO: 248642 - RNA, 32 nt, Homo Sapiens
cugacggaggggcucccugggccuggugcugg

SEQ ID NO: 248643 - RNA, 32 nt, Homo Sapiens
ccacgcccucaacucaaguccccucccagauc

SEQ ID NO: 248644 - RNA, 32 nt, Homo Sapiens
gacuccuaguccuggagugacuguguacgaga

SEQ ID NO: 248645 - RNA, 32 nt, Homo Sapiens
uaacaaugaagaacagaaguaaucugauuagu

SEQ ID NO: 248646 - RNA, 32 nt, Homo Sapiens
cgcuacuugggaaacucacucuggccacuccu

SEQ ID NO: 248647 - RNA, 32 nt, Homo Sapiens
cucugcugccugcagagcugacagcugcugcc

SEQ ID NO: 248648 - RNA, 32 nt, Homo Sapiens
ccuauagacacacacacacacacacacaauuu

SEQ ID NO: 248649 - RNA, 32 nt, Homo Sapiens
cuaaagagagugacaaaugcuuccuuaauguc

SEQ ID NO: 248650 - RNA, 32 nt, Homo Sapiens
auguuuauccgaaaucaaaaugagauuggaua

SEQ ID NO: 248651 - RNA, 32 nt, Homo Sapiens
ugcccucugcuccucaguuuguucacuccaau

SEQ ID NO: 248652 - RNA, 32 nt, Homo Sapiens
gaggacuccuauuuccucuucuacccuggccu

SEQ ID NO: 248653 - RNA, 32 nt, Homo Sapiens
aauaaacccuggcuaccacguagcccuugauc

SEQ ID NO: 248654 - RNA, 32 nt, Homo Sapiens
guagagaaaauaauauaaacaaauauggugug

SEQ ID NO: 248655 - RNA, 32 nt, Homo Sapiens
gaaaauacagaaaaacauaaaggaaaaaacuc

SEQ ID NO: 248656 - RNA, 32 nt, Homo Sapiens
cucccagguucaagcuauucuacugccucagc

SEQ ID NO: 248657 - RNA, 32 nt, Homo Sapiens
agugagggcugcuagaggggcugggccucucu

SEQ ID NO: 248658 - RNA, 32 nt, Homo Sapiens
gguccaauauaaaaguuccauuuuugccauua

SEQ ID NO: 248659 - RNA, 32 nt, Homo Sapiens
caucuuuucuuugcccucugugcuuugaaagc

SEQ ID NO: 248660 - RNA, 32 nt, Homo Sapiens
ugccuuuauuuucucucguugccuccuugguu

SEQ ID NO: 248661 - RNA, 32 nt, Homo Sapiens
cccaaccucccacuccucccuccucgcguucu

SEQ ID NO: 248662 - RNA, 32 nt, Homo Sapiens
aggaagaaugaacgaauggugauucagaggga

SEQ ID NO: 248663 - RNA, 32 nt, Homo Sapiens
ucuucuuuacuuuuagcuucuaacauuccaga

SEQ ID NO: 248664 - RNA, 32 nt, Homo Sapiens
uucugccugggccccaggcccugccuguguug

SEQ ID NO: 248665 - RNA, 32 nt, Homo Sapiens
acauuuuuuauuaucaaaaaagaguaguguau

SEQ ID NO: 248666 - RNA, 32 nt, Homo Sapiens
aagauaaagcaucuucuuuugggaggggggua

SEQ ID NO: 248667 - RNA, 32 nt, Homo Sapiens
aacacugauuccaaucccuccuccuuuuuuaa

SEQ ID NO: 248668 - RNA, 32 nt, Homo Sapiens
gugaagcaucugccauggggaagugcuguuug

SEQ ID NO: 248669 - RNA, 32 nt, Homo Sapiens
uucucaguucccucucuucccacuaagccgug

SEQ ID NO: 248670 - RNA, 32 nt, Homo Sapiens
ugcccgggagacggcccgcucuucucccccuc

SEQ ID NO: 248671 - RNA, 32 nt, Homo Sapiens
ggagcgccgcgugguuagcgucggcggcuuuu

SEQ ID NO: 248672 - RNA, 32 nt, Homo Sapiens
caaaauaaggcacagcuuuaauucauuauuga

SEQ ID NO: 248673 - RNA, 32 nt, Homo Sapiens
ccggccgaguucgcgggcagggggcgccggga

SEQ ID NO: 248674 - RNA, 31 nt, Homo Sapiens
aauuauuuuuugacuuucucaaauaaguuuu

SEQ ID NO: 248675 - RNA, 32 nt, Homo Sapiens
gagugagaaaacaaaauuaucuuccuuuccaa

SEQ ID NO: 248676 - RNA, 32 nt, Homo Sapiens
ccugcagaggaugaugacuucucugaggagcu

SEQ ID NO: 248677 - RNA, 32 nt, Homo Sapiens
auggagaaagacugaaaguuaauaucuuaagu

SEQ ID NO: 248678 - RNA, 32 nt, Homo Sapiens
ccuccuuucuuugccaacacuagcagggacag

SEQ ID NO: 248679 - RNA, 32 nt, Homo Sapiens
ugggaggaauaaugccggcgucuuccggaacc

SEQ ID NO: 248680 - RNA, 32 nt, Homo Sapiens
auaugagaaauucauguacauuuuauauuuuc

SEQ ID NO: 248681 - RNA, 30 nt, Homo Sapiens
acaaugugcaguggcauguggaagaaaaga

SEQ ID NO: 248682 - RNA, 32 nt, Homo Sapiens
caccaccguguggcugcccgggcggguacacg

SEQ ID NO: 248683 - RNA, 32 nt, Homo Sapiens
cagcggcggcggcggcagcugcagcagcagca

SEQ ID NO: 248684 - RNA, 32 nt, Homo Sapiens
cccuagguagccagggaaaggcucauuuauuu

SEQ ID NO: 248685 - RNA, 32 nt, Homo Sapiens
gcugacggccucugcuccuuccgcggguuucc

SEQ ID NO: 248686 - RNA, 30 nt, Homo Sapiens
uggcugugcugugcuguggaccagcugugu

SEQ ID NO: 248687 - RNA, 32 nt, Homo Sapiens
ccuaaacuuaaauuucaagacgguauaggcuu

SEQ ID NO: 248688 - RNA, 32 nt, Homo Sapiens
caaaauauuaaaccuggaccugaucaagcauc

SEQ ID NO: 248689 - RNA, 32 nt, Homo Sapiens
gaggcacgucggcugcugaugucuaaugaguc

SEQ ID NO: 248690 - RNA, 32 nt, Homo Sapiens
guaaaauaaugccaaccuagauaaugcuauaa

SEQ ID NO: 248691 - RNA, 32 nt, Homo Sapiens
ucauaaauauuuauuaggggacccucaacaug

SEQ ID NO: 248692 - RNA, 32 nt, Homo Sapiens
ugugcuguggguuuuccaagccucauauuuga

SEQ ID NO: 248693 - RNA, 32 nt, Homo Sapiens
cacacacccugccuagccaccccgccgcggcc

SEQ ID NO: 248694 - RNA, 32 nt, Homo Sapiens
aaauucggguggccgcggggacccgggcgacg

SEQ ID NO: 248695 - RNA, 28 nt, Homo Sapiens
uccgcaguuuuuccaccaagcgagauau

SEQ ID NO: 248696 - RNA, 32 nt, Homo Sapiens
guaaccacagaaaagcaaagucaguguacacu

SEQ ID NO: 248697 - RNA, 32 nt, Homo Sapiens
gccccacccgcaccuccucacccauccagccu

SEQ ID NO: 248698 - RNA, 32 nt, Homo Sapiens
cugccuuggcuucggugcuucuccagggcagc

SEQ ID NO: 248699 - RNA, 27 nt, Homo Sapiens
gcgagguccuucugggggcuccuccga

SEQ ID NO: 248700 - RNA, 32 nt, Homo Sapiens
acaguuagacccaaggccuaugcugaggucua

SEQ ID NO: 248701 - RNA, 32 nt, Homo Sapiens
acgggcugcuccacugcuucaggaaggacaug

SEQ ID NO: 248702 - RNA, 32 nt, Homo Sapiens
gagccagccccggccccaacccuaccuccaag

SEQ ID NO: 248703 - RNA, 32 nt, Homo Sapiens
uccggcagcagcugcuggccugugccggggug

SEQ ID NO: 248704 - RNA, 32 nt, Homo Sapiens
cuccuagagacagaagcaggcuggagguaagg

SEQ ID NO: 248705 - RNA, 32 nt, Homo Sapiens
uuuucugaauauggauacauguuacuuuugau

SEQ ID NO: 248706 - RNA, 32 nt, Homo Sapiens
caugaaacccaccacugguccugcgacccacu

SEQ ID NO: 248707 - RNA, 32 nt, Homo Sapiens
accagaacccuucuuccuguggcacuccccac

SEQ ID NO: 248708 - RNA, 32 nt, Homo Sapiens
ucuaaucacaguguuucuaaauguaaaaagug

SEQ ID NO: 248709 - RNA, 32 nt, Homo Sapiens
gcgcugggcccuuccccuccccacuuuccugg

SEQ ID NO: 248710 - RNA, 31 nt, Homo Sapiens
cucccugggcggcagaaccauguuggacuuc

SEQ ID NO: 248711 - RNA, 32 nt, Homo Sapiens
uguagauauaaguggaaucaggccuggugugg

SEQ ID NO: 248712 - RNA, 32 nt, Homo Sapiens
uugagaaggggaggauaaguaggcugggaaac

SEQ ID NO: 248713 - RNA, 32 nt, Homo Sapiens
gucaucuaagggagcucauggugcugucugcc

SEQ ID NO: 248714 - RNA, 32 nt, Homo Sapiens
accuugcuguaaagauuuuguaauaaaauggu

SEQ ID NO: 248715 - RNA, 32 nt, Homo Sapiens
augaaaauucuuaacuaaacuauacauguaau

SEQ ID NO: 248716 - RNA, 32 nt, Homo Sapiens
caaaggccccacuuccccauaccaucaccuug

SEQ ID NO: 248717 - RNA, 32 nt, Homo Sapiens
gagacgccgcugugacgccgccggcgggaagg

SEQ ID NO: 248718 - RNA, 32 nt, Homo Sapiens
gcuucauugccugccucaucucuugacucucc

SEQ ID NO: 248719 - RNA, 32 nt, Homo Sapiens
ucaaaguaccuccagccuccucauacgcacag

SEQ ID NO: 248720 - RNA, 32 nt, Homo Sapiens
cccgcggccagcugggucuccggggacccugg

SEQ ID NO: 248721 - RNA, 32 nt, Homo Sapiens
gaguggugcuacugccuaggaaguaacacgug

SEQ ID NO: 248722 - RNA, 32 nt, Homo Sapiens
caaagauucguacauagcaagaaacuaagaua

SEQ ID NO: 248723 - RNA, 32 nt, Homo Sapiens
gguccuuccuccagcuggccccgggcugggca

SEQ ID NO: 248724 - RNA, 32 nt, Homo Sapiens
cagaggagccauguccugcugcuucugcaaaa

SEQ ID NO: 248725 - RNA, 32 nt, Homo Sapiens
uccccccgcagggcuauggcgugugcucggug

SEQ ID NO: 248726 - RNA, 32 nt, Homo Sapiens
gccguggaggcgccagcugccuguucuuaccu

SEQ ID NO: 248727 - RNA, 32 nt, Homo Sapiens
guacuguugaauucuguaaauaguuauaucuc

SEQ ID NO: 248728 - RNA, 32 nt, Homo Sapiens
ccuucugugggaaaggaaacaggugcugagcc

SEQ ID NO: 248729 - RNA, 29 nt, Homo Sapiens
cagugguggggacagcgaugccaagagcc

SEQ ID NO: 248730 - RNA, 32 nt, Homo Sapiens
ccccagccccacugugaagucaguccugcaug

SEQ ID NO: 248731 - RNA, 32 nt, Homo Sapiens
agcggccccccgcacagccacccguggggugc

SEQ ID NO: 248732 - RNA, 32 nt, Homo Sapiens
gaagcuucguauuuuucuugguuucacacuca

SEQ ID NO: 248733 - RNA, 32 nt, Homo Sapiens
ucugcccuuuuggacagaggccuuguuugggg

SEQ ID NO: 248734 - RNA, 32 nt, Homo Sapiens
cacuuucaccuuuuauuuuuuauuccuuccuu

SEQ ID NO: 248735 - RNA, 32 nt, Homo Sapiens
cuguaguuucguggccucuuuugauuauaacu

SEQ ID NO: 248736 - RNA, 32 nt, Homo Sapiens
ggaucuguaguucgggaagcaggagcaggguc

SEQ ID NO: 248737 - RNA, 32 nt, Homo Sapiens
agacgagccgugcaggcugaaaaaauggcgcc

SEQ ID NO: 248738 - RNA, 32 nt, Homo Sapiens
cggaguucaucgugcagacgugcuccuacaug

SEQ ID NO: 248739 - RNA, 32 nt, Homo Sapiens
cacugucagagaugagcccacccccacccuuc

SEQ ID NO: 248740 - RNA, 32 nt, Homo Sapiens
uucaauguacaauuauuuuuuacuacagaucg

SEQ ID NO: 248741 - RNA, 32 nt, Homo Sapiens
cccccggcucugccgugcauucccgggcggcu

SEQ ID NO: 248742 - RNA, 32 nt, Homo Sapiens
gaauuuggccccagcuguuugccuuugacucc

SEQ ID NO: 248743 - RNA, 32 nt, Homo Sapiens
ccuuugucucauauaaugcuuuucauauugaa

SEQ ID NO: 248744 - RNA, 32 nt, Homo Sapiens
cacacacacacacacacacacacacacaccaa

SEQ ID NO: 248745 - RNA, 32 nt, Homo Sapiens
uccagaggucgcccagcuccggcgcugacggg

SEQ ID NO: 248746 - RNA, 32 nt, Homo Sapiens
cuuguccuggguguugagggugucacgagccc

SEQ ID NO: 248747 - RNA, 32 nt, Homo Sapiens
cacguggcagcagucgcugaucucccagcuga

SEQ ID NO: 248748 - RNA, 32 nt, Homo Sapiens
gaaaagcuccccagugauucuaaugggcagcu

SEQ ID NO: 248749 - RNA, 32 nt, Homo Sapiens
aaaauaaugaauuuggacuaguagaaaauuau

SEQ ID NO: 248750 - RNA, 32 nt, Homo Sapiens
gccgucauagguguggucaucauccucuccug

SEQ ID NO: 248751 - RNA, 32 nt, Homo Sapiens
uaucuauuaugugucucuuccaucacucucca

SEQ ID NO: 248752 - RNA, 32 nt, Homo Sapiens
cguaagugcagagagaccuuugaaaauauuaa

SEQ ID NO: 248753 - RNA, 32 nt, Homo Sapiens
aacugacuugauucuucagaauuugcuuauua

SEQ ID NO: 248754 - RNA, 32 nt, Homo Sapiens
ggugauugccagccagauaggauccugcaaaa

SEQ ID NO: 248755 - RNA, 32 nt, Homo Sapiens
uguaaggggaacagaaacauuuuuguucuuau

SEQ ID NO: 248756 - RNA, 32 nt, Homo Sapiens
accucugcguggcgggcgucagugugaggaga

SEQ ID NO: 248757 - RNA, 32 nt, Homo Sapiens
uuuuuuuuuuuauuuaaacaaacauacacuuc

SEQ ID NO: 248758 - RNA, 32 nt, Homo Sapiens
gggagguggagcuucaggaugccugcuguguu

SEQ ID NO: 248759 - RNA, 32 nt, Homo Sapiens
ccuuuacuuuuuuguaauauuuucauaauaua

SEQ ID NO: 248760 - RNA, 32 nt, Homo Sapiens
cuccucugccagcaccuugcuccccacugccc

SEQ ID NO: 248761 - RNA, 32 nt, Homo Sapiens
uuguagccguuagcugcaggugugucuuucca

SEQ ID NO: 248762 - RNA, 32 nt, Homo Sapiens
gugggcggguggcagggucauggaggacgcug

SEQ ID NO: 248763 - RNA, 30 nt, Homo Sapiens
agcgggccacuugcugaugggcuaagcuug

SEQ ID NO: 248764 - RNA, 32 nt, Homo Sapiens
gaucacuugagcccaggaggucuaggcugcag

SEQ ID NO: 248765 - RNA, 32 nt, Homo Sapiens
auaaagagacugggcuuuagccgggcauggug

SEQ ID NO: 248766 - RNA, 32 nt, Homo Sapiens
uucaacuguauauaauaaacacuuaugaugac

SEQ ID NO: 248767 - RNA, 32 nt, Homo Sapiens
ugcagcugagggagcaucauggcaguguuucu

SEQ ID NO: 248768 - RNA, 32 nt, Homo Sapiens
cucagcaccacaagagcagaucucugccagca

SEQ ID NO: 248769 - RNA, 32 nt, Homo Sapiens
acaauucugucaaagauaaguaaaaguuaauu

SEQ ID NO: 248770 - RNA, 32 nt, Homo Sapiens
ccccguguccacucacugaagucccuucccuu

SEQ ID NO: 248771 - RNA, 30 nt, Homo Sapiens
ccucugcuugacugcaucuaacuguucauc

SEQ ID NO: 248772 - RNA, 32 nt, Homo Sapiens
ggauuaaaaaauauucagaaauguauuggggg

SEQ ID NO: 248773 - RNA, 32 nt, Homo Sapiens
uucuaugugucaugcauauuggaaguacacua

SEQ ID NO: 248774 - RNA, 32 nt, Homo Sapiens
uguguguccggaauugguggguucuuggucuc

SEQ ID NO: 248775 - RNA, 32 nt, Homo Sapiens
uaaucucuggacuuaacuuucaggaaacaaaa

SEQ ID NO: 248776 - RNA, 32 nt, Homo Sapiens
cggcuccuccccgcgccgcgaggccgcgaccu

SEQ ID NO: 248777 - RNA, 32 nt, Homo Sapiens
uggugugcaccuguaguaaucccagcuacuca

SEQ ID NO: 248778 - RNA, 32 nt, Homo Sapiens
gaaagcuuuggaaaaccaaauuuguaauauca

SEQ ID NO: 248779 - RNA, 32 nt, Homo Sapiens
gcagguaggaaacauucacagaugaagacagc

SEQ ID NO: 248780 - RNA, 32 nt, Homo Sapiens
ugccaagagcacgcggcugugcugcuccaccg

SEQ ID NO: 248781 - RNA, 32 nt, Homo Sapiens
uauaugaccacagcugcagaucaguucuuagc

SEQ ID NO: 248782 - RNA, 32 nt, Homo Sapiens
caguaguuguugaaaaagacgucuauuguuca

SEQ ID NO: 248783 - RNA, 32 nt, Homo Sapiens
gcucccaccucggcgucucgucucucgcccgc

SEQ ID NO: 248784 - RNA, 31 nt, Homo Sapiens
aaagaaagaaacacucacagaagcgucugug

SEQ ID NO: 248785 - RNA, 32 nt, Homo Sapiens
cauucucaucauccucgcuggaugccauaggg

SEQ ID NO: 248786 - RNA, 32 nt, Homo Sapiens
uuuugacacaccacugaugccaagugucuggg

SEQ ID NO: 248787 - RNA, 32 nt, Homo Sapiens
ucucaggaaaauugugaaaauaaucagcagcc

SEQ ID NO: 248788 - RNA, 32 nt, Homo Sapiens
cguggcgguggcggcagcggcgguuaggggau

SEQ ID NO: 248789 - RNA, 32 nt, Homo Sapiens
ucuugggguauaugacuguccuguuuccccca

SEQ ID NO: 248790 - RNA, 32 nt, Homo Sapiens
acauagcaggaacacaguugcugauaagccau

SEQ ID NO: 248791 - RNA, 32 nt, Homo Sapiens
uucccucuguccaucaccccucauuaaaauau

SEQ ID NO: 248792 - RNA, 32 nt, Homo Sapiens
ccaccgucccgcgcucccuucgcugcacgggc

SEQ ID NO: 248793 - RNA, 32 nt, Homo Sapiens
ggucgcgggagcgggagggaggcgcugccggg

SEQ ID NO: 248794 - RNA, 32 nt, Homo Sapiens
uguggugacaccuagugaccagccugggaaau

SEQ ID NO: 248795 - RNA, 32 nt, Homo Sapiens
gcguaucacggccaccugagcucccugauuga

SEQ ID NO: 248796 - RNA, 32 nt, Homo Sapiens
ucucccuuuucacagcacuccuuugccccaga

SEQ ID NO: 248797 - RNA, 32 nt, Homo Sapiens
auuuucuaaguagauuuuuuuauauuaacaaa

SEQ ID NO: 248798 - RNA, 32 nt, Homo Sapiens
agaaggcuaagagauggugaagagacugcaug

SEQ ID NO: 248799 - RNA, 32 nt, Homo Sapiens
aaggugaaaccccgucucuacugaaaauacaa

SEQ ID NO: 248800 - RNA, 31 nt, Homo Sapiens
uaguguuaaaacaugaaaaugcuggugagcu

SEQ ID NO: 248801 - RNA, 32 nt, Homo Sapiens
ugcgaauguuucccugucccugauuucucgau

SEQ ID NO: 248802 - RNA, 32 nt, Homo Sapiens
cagcccaccugccuaacugggaacacaaggca

SEQ ID NO: 248803 - RNA, 32 nt, Homo Sapiens
gggcauuaggaacggccuggccccacaaauca

SEQ ID NO: 248804 - RNA, 32 nt, Homo Sapiens
cucuuaaccccucaauaaaguguuacauuucu

SEQ ID NO: 248805 - RNA, 32 nt, Homo Sapiens
accaaaauauuuuuggugggucuuuuuaugga

SEQ ID NO: 248806 - RNA, 32 nt, Homo Sapiens
cccgagcgcgagcggagacgaugcagcggaga

SEQ ID NO: 248807 - RNA, 28 nt, Homo Sapiens
ggccgggggcggccgcaugggccuuguc

SEQ ID NO: 248808 - RNA, 32 nt, Homo Sapiens
uguuaaaaucaggagaucugggguggggccua

SEQ ID NO: 248809 - RNA, 28 nt, Homo Sapiens
aacauggcggcggcggguguugugagcg

SEQ ID NO: 248810 - RNA, 32 nt, Homo Sapiens
ucugcccaacuguguagcaucugcauugccca

SEQ ID NO: 248811 - RNA, 32 nt, Homo Sapiens
ccuccgacaccucggcuggggaaaccgaggcc

SEQ ID NO: 248812 - RNA, 30 nt, Homo Sapiens
acgaaaggcaggcgggcuguguacugggcc

SEQ ID NO: 248813 - RNA, 32 nt, Homo Sapiens
gggcaccagcgcuggggugcugccuucacccu

SEQ ID NO: 248814 - RNA, 32 nt, Homo Sapiens
cuuucaauucguuuuucucucuuuuccucuug

SEQ ID NO: 248815 - RNA, 32 nt, Homo Sapiens
caagggaccugccaccccuguauggggucagg

SEQ ID NO: 248816 - RNA, 32 nt, Homo Sapiens
acuacauauuggaaauuuuuuauuuuucuaaa

SEQ ID NO: 248817 - RNA, 32 nt, Homo Sapiens
cuugcugggccaagcugcagcggcgcugucuu

SEQ ID NO: 248818 - RNA, 32 nt, Homo Sapiens
cugcauggaggcaacagcauuuccaagaugua

SEQ ID NO: 248819 - RNA, 32 nt, Homo Sapiens
auccugugauaagccagaggcucuggggggug

SEQ ID NO: 248820 - RNA, 32 nt, Homo Sapiens
uacugcgaaguuggugucaucaucggaacugg

SEQ ID NO: 248821 - RNA, 32 nt, Homo Sapiens
caccacccugaacgcacaaucuccagugcagg

SEQ ID NO: 248822 - RNA, 32 nt, Homo Sapiens
caggggucucaaguggaaauaaacccucgugg

SEQ ID NO: 248823 - RNA, 32 nt, Homo Sapiens
uagggcccaagccugguccgcgcgcgcccccu

SEQ ID NO: 248824 - RNA, 32 nt, Homo Sapiens
uaacucuacauagaaacugaacaucaagaacc

SEQ ID NO: 248825 - RNA, 32 nt, Homo Sapiens
cuuuccagaugaugauucagaagcuaauuuua

SEQ ID NO: 248826 - RNA, 32 nt, Homo Sapiens
ucaagucagagguaaaccggucaguuacagaa

SEQ ID NO: 248827 - RNA, 32 nt, Homo Sapiens
ggggaccaaccucaggagaugcugggucccag

SEQ ID NO: 248828 - RNA, 32 nt, Homo Sapiens
acccuucaggugguucccuugugcaccguuca

SEQ ID NO: 248829 - RNA, 30 nt, Homo Sapiens
aaaggcgacggcggcggcgcggaggagggu

SEQ ID NO: 248830 - RNA, 32 nt, Homo Sapiens
aguuucaguacuggcauagaauuuaaauguca

SEQ ID NO: 248831 - RNA, 32 nt, Homo Sapiens
ccuggacucaggaaacaggaacccugggagua

SEQ ID NO: 248832 - RNA, 32 nt, Homo Sapiens
gcaaacuucuauuccagacuucagauuuccau

SEQ ID NO: 248833 - RNA, 32 nt, Homo Sapiens
agguuucccgauuuuuucaggucuucugcuca

SEQ ID NO: 248834 - RNA, 32 nt, Homo Sapiens
gacaccgucagcccgacagucucuccauaugc

SEQ ID NO: 248835 - RNA, 32 nt, Homo Sapiens
ggauuugaaauuugcccuaaccaagagucaca

SEQ ID NO: 248836 - RNA, 32 nt, Homo Sapiens
ggggggaggggagggguucguacaggagcaau

SEQ ID NO: 248837 - RNA, 32 nt, Homo Sapiens
uuaauguauacugaauuauaggaauccaauua

SEQ ID NO: 248838 - RNA, 32 nt, Homo Sapiens
cagcgggccaggcccgcaccccggccucaggg

SEQ ID NO: 248839 - RNA, 32 nt, Homo Sapiens
aguguuuuuaaauuuucuuuuaaaauuguuua

SEQ ID NO: 248840 - RNA, 32 nt, Homo Sapiens
cucuccaucugucuguccauguguguguccau

SEQ ID NO: 248841 - RNA, 32 nt, Homo Sapiens
ccaaaaucugauuagaaguauaaggugcucug

SEQ ID NO: 248842 - RNA, 32 nt, Homo Sapiens
uaaaauuggaaugugagacauguugcugugac

SEQ ID NO: 248843 - RNA, 32 nt, Homo Sapiens
gggggcgcuuuagggacuggacuugcagugua

SEQ ID NO: 248844 - RNA, 32 nt, Homo Sapiens
ucagaucccguccaaagugccucccaugccua

SEQ ID NO: 248845 - RNA, 32 nt, Homo Sapiens
cugaggacggugagacggccgcggcggcggcg

SEQ ID NO: 248846 - RNA, 32 nt, Homo Sapiens
gcggcgggcgccacguggaaaagcaggugaua

SEQ ID NO: 248847 - RNA, 32 nt, Homo Sapiens
aguggucucaucuccuuccuuaaucuuccugg

SEQ ID NO: 248848 - RNA, 32 nt, Homo Sapiens
cagcagugaucccagguccuccaauuaauacu

SEQ ID NO: 248849 - RNA, 32 nt, Homo Sapiens
uggcagcgucuucguccgggacuccucucagg

SEQ ID NO: 248850 - RNA, 32 nt, Homo Sapiens
uuggccgcuggcagcaucacugagcaggaagc

SEQ ID NO: 248851 - RNA, 32 nt, Homo Sapiens
uucagcaugggcccaggaaugccaaggagaca

SEQ ID NO: 248852 - RNA, 32 nt, Homo Sapiens
ccguugggccgcgaacgcagccgccacgccgg

SEQ ID NO: 248853 - RNA, 32 nt, Homo Sapiens
gugguaggggcacugacccaccccuacgcccc

SEQ ID NO: 248854 - RNA, 32 nt, Homo Sapiens
cuguagcugcccggcgcggcgccgcccugcgc

SEQ ID NO: 248855 - RNA, 32 nt, Homo Sapiens
gcuugggcgagggcuugggccaggcgcgcggg

SEQ ID NO: 248856 - RNA, 32 nt, Homo Sapiens
cauagguaggucugaacaacugccgcaagacc

SEQ ID NO: 248857 - RNA, 32 nt, Homo Sapiens
augcuaauugaaaaguaccaggugauacauag

SEQ ID NO: 248858 - RNA, 32 nt, Homo Sapiens
uccucagaggaugguccuuuaacauagccaga

SEQ ID NO: 248859 - RNA, 32 nt, Homo Sapiens
ccucuaccaaaauaauuuuauuuucugcagca

SEQ ID NO: 248860 - RNA, 32 nt, Homo Sapiens
acacauacccucacuggggaaccugaaagucu

SEQ ID NO: 248861 - RNA, 32 nt, Homo Sapiens
agaguucaggcagggcacagccaggcccuggu

SEQ ID NO: 248862 - RNA, 32 nt, Homo Sapiens
ggggcuuuucagugaacuaaccagggauuguu

SEQ ID NO: 248863 - RNA, 32 nt, Homo Sapiens
gcaaaagcccugcuccggccaagccucagccc

SEQ ID NO: 248864 - RNA, 32 nt, Homo Sapiens
aauuaguguuugaaaagauucuuaauagcugg

SEQ ID NO: 248865 - RNA, 32 nt, Homo Sapiens
gccuuugccguggcccuguccuguuuaguucu

SEQ ID NO: 248866 - RNA, 32 nt, Homo Sapiens
cucuucccauccccaccaccuuguaaguucua

SEQ ID NO: 248867 - RNA, 32 nt, Homo Sapiens
ccggaguccccucccugggugggaugcucacu

SEQ ID NO: 248868 - RNA, 32 nt, Homo Sapiens
uggcuaggcagacggggccgggagcggcgcgc

SEQ ID NO: 248869 - RNA, 32 nt, Homo Sapiens
ggagugaaggucacgccgcggcgcgauugacu

SEQ ID NO: 248870 - RNA, 32 nt, Homo Sapiens
aacaagugagguuuuucuugacuauaaguuuu

SEQ ID NO: 248871 - RNA, 32 nt, Homo Sapiens
cuggagggauaaaacaucucggcaccuaguaa

SEQ ID NO: 248872 - RNA, 32 nt, Homo Sapiens
uuucaauaucauuccuguaguuucaaaucuga

SEQ ID NO: 248873 - RNA, 32 nt, Homo Sapiens
agcaccaacaggcugagagauuuuaaagagac

SEQ ID NO: 248874 - RNA, 32 nt, Homo Sapiens
ucaacauuuuccccccacuccucccuugaucu

SEQ ID NO: 248875 - RNA, 32 nt, Homo Sapiens
gggaaaaaauacacagcacuccccaccuuucu

SEQ ID NO: 248876 - RNA, 32 nt, Homo Sapiens
uauguagacauuauacaugguugguugucucu

SEQ ID NO: 248877 - RNA, 32 nt, Homo Sapiens
ggcuccgccuccuggcccccagccaguucuca

SEQ ID NO: 248878 - RNA, 32 nt, Homo Sapiens
augacggugccgguccgcggcuucucgcugcu

SEQ ID NO: 248879 - RNA, 32 nt, Homo Sapiens
ucccuguuugcuggccagcaggguuuguggcc

SEQ ID NO: 248880 - RNA, 32 nt, Homo Sapiens
gaacucucgcuuucuuuuuaauccccugcauc

SEQ ID NO: 248881 - RNA, 32 nt, Homo Sapiens
gcccccgcccccacccccgccccuggucucuc

SEQ ID NO: 248882 - RNA, 32 nt, Homo Sapiens
gggcugccggugcccuccgcaggccgggccuc

SEQ ID NO: 248883 - RNA, 30 nt, Homo Sapiens
gucucgggugccgccgugggucccgacgcg

SEQ ID NO: 248884 - RNA, 32 nt, Homo Sapiens
uucgaucagauauagaagaugaacaacuagca

SEQ ID NO: 248885 - RNA, 32 nt, Homo Sapiens
guucaucauuggcccucauuccaagcacuuua

SEQ ID NO: 248886 - RNA, 32 nt, Homo Sapiens
gaaaauguucaagauuugcugcucuuggacgu

SEQ ID NO: 248887 - RNA, 32 nt, Homo Sapiens
ggaauacucuuugaacaagcucugcuaaaacc

SEQ ID NO: 248888 - RNA, 32 nt, Homo Sapiens
ugguuguggaagugggggcgccagaguagugu

SEQ ID NO: 248889 - RNA, 32 nt, Homo Sapiens
gcuaaagaguccggggggaaccaagagccugg

SEQ ID NO: 248890 - RNA, 32 nt, Homo Sapiens
uauugugaaaaugaaucuguuaugauaaagaa

SEQ ID NO: 248891 - RNA, 32 nt, Homo Sapiens
uugagaauauuuuuggugaauuacuuuguugu

SEQ ID NO: 248892 - RNA, 32 nt, Homo Sapiens
aucauuuccauuuuauagaaauccagaggagu

SEQ ID NO: 248893 - RNA, 32 nt, Homo Sapiens
acgcccaucucuggggguccugccaucucuuu

SEQ ID NO: 248894 - RNA, 32 nt, Homo Sapiens
gugucgccccuaccccaucccacagccauuuu

SEQ ID NO: 248895 - RNA, 32 nt, Homo Sapiens
ucaucuguucgagaggucuuugaaaccucuca

SEQ ID NO: 248896 - RNA, 32 nt, Homo Sapiens
aguucgcgccgcccucucaccccucccuuccc

SEQ ID NO: 248897 - RNA, 32 nt, Homo Sapiens
acuugccccccuccccaaaaaaccauggauga

SEQ ID NO: 248898 - RNA, 32 nt, Homo Sapiens
uggggaucucgacucagacaagauggugacaa

SEQ ID NO: 248899 - RNA, 32 nt, Homo Sapiens
ccacugccuucagcugacgucacagcugacaa

SEQ ID NO: 248900 - RNA, 32 nt, Homo Sapiens
uuucuuccugguguacaagccuuuaaagacuu

SEQ ID NO: 248901 - RNA, 32 nt, Homo Sapiens
agacuccgcgcaaucacauacuguauauagac

SEQ ID NO: 248902 - RNA, 32 nt, Homo Sapiens
cuuuggugcaugaaaaacuguacaaugagguu

SEQ ID NO: 248903 - RNA, 32 nt, Homo Sapiens
ccuuuauacacuucgauaacccuaacgaacag

SEQ ID NO: 248904 - RNA, 32 nt, Homo Sapiens
acaucaagguuugacagggaugagauaccugu

SEQ ID NO: 248905 - RNA, 32 nt, Homo Sapiens
cgcagugcuuucugcccguguuuuuggcucag

SEQ ID NO: 248906 - RNA, 32 nt, Homo Sapiens
uguguauuuggaaaaauaauuguaacguaauu

SEQ ID NO: 248907 - RNA, 32 nt, Homo Sapiens
gacgaaccaggguggaagcgccaggagcagcu

SEQ ID NO: 248908 - RNA, 32 nt, Homo Sapiens
cuagacccuggaaggcaggggacugcgagcug

SEQ ID NO: 248909 - RNA, 32 nt, Homo Sapiens
gacaaauuaauuuaauugcaugugcuagggaa

SEQ ID NO: 248910 - RNA, 32 nt, Homo Sapiens
uccgugaaacucgaggagccucugccagcagc

SEQ ID NO: 248911 - RNA, 32 nt, Homo Sapiens
ccuggugccugccccaggaggaugagcauuug

SEQ ID NO: 248912 - RNA, 32 nt, Homo Sapiens
aagucagugaaggaaaucuacauccgcgguug

SEQ ID NO: 248913 - RNA, 32 nt, Homo Sapiens
ggggcaggcuacuggggugggguagcuuucgg

SEQ ID NO: 248914 - RNA, 28 nt, Homo Sapiens
cuguuaauggcgaaagaauggaagcgaa

SEQ ID NO: 248915 - RNA, 32 nt, Homo Sapiens
gauaguucauuuaaagcccccaucccugcaag

SEQ ID NO: 248916 - RNA, 32 nt, Homo Sapiens
cagacuuucuucuccuuuucccucucaccuaa

SEQ ID NO: 248917 - RNA, 32 nt, Homo Sapiens
agcacagauaauggcauuauucuuauaauugu

SEQ ID NO: 248918 - RNA, 32 nt, Homo Sapiens
cagacugaagcaauuucacuuccacuggggag

SEQ ID NO: 248919 - RNA, 32 nt, Homo Sapiens
gacaccacggggcuugggguccaggucccagu

SEQ ID NO: 248920 - RNA, 32 nt, Homo Sapiens
aaagaagcuggguguacacugaaaaaucauug

SEQ ID NO: 248921 - RNA, 32 nt, Homo Sapiens
cuuccccgggucgccgucauggccgcggaggu

SEQ ID NO: 248922 - RNA, 32 nt, Homo Sapiens
uuuggccugugcuacuaaacaagaagccuaug

SEQ ID NO: 248923 - RNA, 32 nt, Homo Sapiens
uugcagcuagucccugcaaaccuugaugaugg

SEQ ID NO: 248924 - RNA, 32 nt, Homo Sapiens
ugugaguucuguaucuucucacauucuguaua

SEQ ID NO: 248925 - RNA, 32 nt, Homo Sapiens
aggcuugaccugccccaccccauccccgcggu

SEQ ID NO: 248926 - RNA, 32 nt, Homo Sapiens
cccaggggcugccgcgggacucggggcgcagc

SEQ ID NO: 248927 - RNA, 32 nt, Homo Sapiens
uagagguuacugucacaucauagauuuaacau

SEQ ID NO: 248928 - RNA, 32 nt, Homo Sapiens
auuacuaugugagccuuuauuuccuucagaua

SEQ ID NO: 248929 - RNA, 32 nt, Homo Sapiens
cucaggccgccgcagccccggcgaacccacug

SEQ ID NO: 248930 - RNA, 32 nt, Homo Sapiens
aaagguuuaaaaguagaggaaaauauucaaaa

SEQ ID NO: 248931 - RNA, 32 nt, Homo Sapiens
ccucacagacacacucaggaucaaugcuuugc

SEQ ID NO: 248932 - RNA, 32 nt, Homo Sapiens
aaauguauauauauuuuaaaaugccugaggaa

SEQ ID NO: 248933 - RNA, 32 nt, Homo Sapiens
guugccucuagcacugugcaaacucugcaaga

SEQ ID NO: 248934 - RNA, 32 nt, Homo Sapiens
ugucacugcuuguuaugcaucauuucaggagu

SEQ ID NO: 248935 - RNA, 32 nt, Homo Sapiens
cugugacaccuucuuuggggcucugcaguucc

SEQ ID NO: 248936 - RNA, 32 nt, Homo Sapiens
guugugguucuggccuucuccauucuccucca

SEQ ID NO: 248937 - RNA, 32 nt, Homo Sapiens
uugugguccagccccaggccuccgucggugcu

SEQ ID NO: 248938 - RNA, 32 nt, Homo Sapiens
gaaaucugugagagggaauggggugggagaug

SEQ ID NO: 248939 - RNA, 32 nt, Homo Sapiens
ugcauggguggccuugcacagagcaguuaggg

SEQ ID NO: 248940 - RNA, 32 nt, Homo Sapiens
guacgugcacccuggggcagugucucaccgua

SEQ ID NO: 248941 - RNA, 32 nt, Homo Sapiens
agaugaaaguauuacaaauuuaaaagaauuug

SEQ ID NO: 248942 - RNA, 32 nt, Homo Sapiens
ugauguuuuuaaaaucuuauuaaaguuucaaa

SEQ ID NO: 248943 - RNA, 29 nt, Homo Sapiens
acugcagugacuuuugccggaaaguggag

SEQ ID NO: 248944 - RNA, 32 nt, Homo Sapiens
aaucuguugcugucaucauuaacgguauauga

SEQ ID NO: 248945 - RNA, 32 nt, Homo Sapiens
uggagcccugucagcaccauccccaccccgag

SEQ ID NO: 248946 - RNA, 32 nt, Homo Sapiens
gacuccaggaggagcagaagagggaucccacg

SEQ ID NO: 248947 - RNA, 32 nt, Homo Sapiens
uggaagccgccgcaucugacugucccagggug

SEQ ID NO: 248948 - RNA, 32 nt, Homo Sapiens
ugagacacguaugaaauuuaaacuuuccggua

SEQ ID NO: 248949 - RNA, 32 nt, Homo Sapiens
uaaaguaaaugaauaccuaugauuguauguuu

SEQ ID NO: 248950 - RNA, 31 nt, Homo Sapiens
ggaccuacuggaacuggucaagauugcccgc

SEQ ID NO: 248951 - RNA, 32 nt, Homo Sapiens
auuaguugucacuuuggugaaauggagcgugg

SEQ ID NO: 248952 - RNA, 32 nt, Homo Sapiens
aaggaagagaucuacaaaauaguggugguggu

SEQ ID NO: 248953 - RNA, 32 nt, Homo Sapiens
ccagaccugcccccaggagcgcagcaguucgg

SEQ ID NO: 248954 - RNA, 32 nt, Homo Sapiens
aaaaucuacugaaaauguguaaucauugaaga

SEQ ID NO: 248955 - RNA, 32 nt, Homo Sapiens
gcacuggagcagcugccuaucuuaagagucca

SEQ ID NO: 248956 - RNA, 32 nt, Homo Sapiens
cuuuuuaaugcuguuaacuuaaaauuacaaua

SEQ ID NO: 248957 - RNA, 32 nt, Homo Sapiens
cacagcagaaaagagagcaccugugaagaaau

SEQ ID NO: 248958 - RNA, 32 nt, Homo Sapiens
gauuccacagaaaaaaguaaaacuugcugcug

SEQ ID NO: 248959 - RNA, 32 nt, Homo Sapiens
uuucuguuuucuagguaaggcuuauuuuugau

SEQ ID NO: 248960 - RNA, 32 nt, Homo Sapiens
gcagaccugaggaauaaauguguguugucaag

SEQ ID NO: 248961 - RNA, 32 nt, Homo Sapiens
gauugaacuucuacaagaaguacaacucaggg

SEQ ID NO: 248962 - RNA, 32 nt, Homo Sapiens
uuuuaguaaguaccuuaguugaauaaaagcac

SEQ ID NO: 248963 - RNA, 32 nt, Homo Sapiens
agagaaaagcuacaauuuuuaaagcucuuugu

SEQ ID NO: 248964 - RNA, 30 nt, Homo Sapiens
ggaugggcggggcgcgcggccguuagcgcg

SEQ ID NO: 248965 - RNA, 32 nt, Homo Sapiens
gaccaggcacagugacucaugccuguaauccc

SEQ ID NO: 248966 - RNA, 32 nt, Homo Sapiens
gcucugagacgcggccccggcggcggcggcag

SEQ ID NO: 248967 - RNA, 32 nt, Homo Sapiens
aggcucccucccucacuaggccccuggcuacu

SEQ ID NO: 248968 - RNA, 32 nt, Homo Sapiens
gcacacgagcaucuucccugaaagcucagaaa

SEQ ID NO: 248969 - RNA, 32 nt, Homo Sapiens
uuuuuccuugccccuuuccaagugguuuucaa

SEQ ID NO: 248970 - RNA, 32 nt, Homo Sapiens
uuuuuuuuuuuuuuuucuuuuuuaacauguug

SEQ ID NO: 248971 - RNA, 32 nt, Homo Sapiens
cauccucccucccccagccaccacccucaggu

SEQ ID NO: 248972 - RNA, 32 nt, Homo Sapiens
caauggaagaacuugcauuuuuauggaacuca

SEQ ID NO: 248973 - RNA, 32 nt, Homo Sapiens
aauaaaugucuccuucuguguucuguaauaug

SEQ ID NO: 248974 - RNA, 32 nt, Homo Sapiens
cgggcccccgcgcgucgcgccauggacucgga

SEQ ID NO: 248975 - RNA, 32 nt, Homo Sapiens
cuccuaguuuguuugcugccauuugaacucau

SEQ ID NO: 248976 - RNA, 32 nt, Homo Sapiens
uuggaaaaauacuuuuucaaaaacuacagcuu

SEQ ID NO: 248977 - RNA, 31 nt, Homo Sapiens
gccaccacuuguuuugguccaagggcagaaa

SEQ ID NO: 248978 - RNA, 32 nt, Homo Sapiens
aacccgggagacggcgcuugcagugagccgag

SEQ ID NO: 248979 - RNA, 32 nt, Homo Sapiens
ccccagcugcuguuccuccccaucacccagcc

SEQ ID NO: 248980 - RNA, 32 nt, Homo Sapiens
acaaaauuaacgauugccuucaguuuguguug

SEQ ID NO: 248981 - RNA, 32 nt, Homo Sapiens
aaaauugguaaugucauuuacaagccucucac

SEQ ID NO: 248982 - RNA, 32 nt, Homo Sapiens
aagauacagagaugugugaaaacaaguaauag

SEQ ID NO: 248983 - RNA, 32 nt, Homo Sapiens
cgccucccaucccgcuuagcgcucuggacaga

SEQ ID NO: 248984 - RNA, 32 nt, Homo Sapiens
aacugcucgcucgcucaccucccuccucugca

SEQ ID NO: 248985 - RNA, 32 nt, Homo Sapiens
ugacuauuuaaaaagaaaaaaguagcucucca

SEQ ID NO: 248986 - RNA, 32 nt, Homo Sapiens
uagggaaugcaagcuucucagcaaacaaccuc

SEQ ID NO: 248987 - RNA, 32 nt, Homo Sapiens
agagauaaaaauccagugaaaacacaucaauc

SEQ ID NO: 248988 - RNA, 32 nt, Homo Sapiens
gggaugggaagagcaggaaaagaagcugaaac

SEQ ID NO: 248989 - RNA, 32 nt, Homo Sapiens
uuaaacagugcuuuuuuguuacacaggagggc

SEQ ID NO: 248990 - RNA, 32 nt, Homo Sapiens
uuuucugaaaauaaagugauggauccucuagc

SEQ ID NO: 248991 - RNA, 32 nt, Homo Sapiens
ccucagucaucuugacuucaaaucucaaccug

SEQ ID NO: 248992 - RNA, 32 nt, Homo Sapiens
ggggguagaagcugucuggaggcccggccaga

SEQ ID NO: 248993 - RNA, 32 nt, Homo Sapiens
ugccuuuuucuuuucuuuuuaaaaauuuuaag

SEQ ID NO: 248994 - RNA, 30 nt, Homo Sapiens
ggcggggcucauggcucccaucuuggcccc

SEQ ID NO: 248995 - RNA, 32 nt, Homo Sapiens
guuaaaaaaaauuuuaaugaagaaaguggaaa

SEQ ID NO: 248996 - RNA, 32 nt, Homo Sapiens
cagcugaaagugaugaauuuuacuucuggaaa

SEQ ID NO: 248997 - RNA, 32 nt, Homo Sapiens
cuuuugaguuaaugcugaaaucauuuaagacu

SEQ ID NO: 248998 - RNA, 32 nt, Homo Sapiens
uagucuuggagccgcacaggguuggugguacc

SEQ ID NO: 248999 - RNA, 32 nt, Homo Sapiens
ugaaaaccaaaaugacaucuuuuuaaagcuua

SEQ ID NO: 249000 - RNA, 32 nt, Homo Sapiens
ucucuauuucaaguacacuuauccuuugguau

SEQ ID NO: 249001 - RNA, 32 nt, Homo Sapiens
augauuuuuuaaaagcuguuauguugaauuca

SEQ ID NO: 249002 - RNA, 32 nt, Homo Sapiens
uuacagaugcuguugggaaguuaucaauaaaa

SEQ ID NO: 249003 - RNA, 32 nt, Homo Sapiens
aaggccucuggcugccuaucugagggcucggc

SEQ ID NO: 249004 - RNA, 32 nt, Homo Sapiens
aacuucuucacaagucauacugucccaacaag

SEQ ID NO: 249005 - RNA, 32 nt, Homo Sapiens
cucauagaacacacuuccggaaacaguggggg

SEQ ID NO: 249006 - RNA, 31 nt, Homo Sapiens
cucucucugccggugucugcucuaacagcug

SEQ ID NO: 249007 - RNA, 32 nt, Homo Sapiens
uuauugaguccuccucuuugcugaucccuucc

SEQ ID NO: 249008 - RNA, 32 nt, Homo Sapiens
uggaagcugccuguccuucucccugugcuuaa

SEQ ID NO: 249009 - RNA, 32 nt, Homo Sapiens
ggggacaacagacuuucugaccagagaacugg

SEQ ID NO: 249010 - RNA, 32 nt, Homo Sapiens
aagggccagagaguaaauauuuuaggcuuugc

SEQ ID NO: 249011 - RNA, 32 nt, Homo Sapiens
ugagagcauuuaucuguaaauauguuuguccu

SEQ ID NO: 249012 - RNA, 32 nt, Homo Sapiens
guucugaauuucuuuuguuuccuuuuuuccuu

SEQ ID NO: 249013 - RNA, 32 nt, Homo Sapiens
guaaauaagaaauguauuuaaauuaaaaggga

SEQ ID NO: 249014 - RNA, 32 nt, Homo Sapiens
aaauaaacgaaacauuuagacaauggcuauau

SEQ ID NO: 249015 - RNA, 32 nt, Homo Sapiens
cuuggagacuaaaagcaguggacuuaaucggu

SEQ ID NO: 249016 - RNA, 28 nt, Homo Sapiens
cagauggggcggcucccgggaagcgggg

SEQ ID NO: 249017 - RNA, 32 nt, Homo Sapiens
cugcugcagguggcguaucaucguacacacuc

SEQ ID NO: 249018 - RNA, 32 nt, Homo Sapiens
uagucaggcaugguggugggcgccuguaauuc

SEQ ID NO: 249019 - RNA, 32 nt, Homo Sapiens
caggauaagcgacuucugugaggcugagagag

SEQ ID NO: 249020 - RNA, 32 nt, Homo Sapiens
ccacgagaugagacggaacugccgugagaucc

SEQ ID NO: 249021 - RNA, 32 nt, Homo Sapiens
uuguuacaaguguuaaugacauuuucauuaau

SEQ ID NO: 249022 - RNA, 32 nt, Homo Sapiens
cucugagccggggcuccuuccaggagcugaaa

SEQ ID NO: 249023 - RNA, 32 nt, Homo Sapiens
ucuucaaaggacaaugggaaacuguaaaguag

SEQ ID NO: 249024 - RNA, 32 nt, Homo Sapiens
gguggaaagggagguuaaaggagggaacacaa

SEQ ID NO: 249025 - RNA, 32 nt, Homo Sapiens
guuuuuaaaaauauuucuuaaacaugcugucc

SEQ ID NO: 249026 - RNA, 32 nt, Homo Sapiens
uacccaccauucucuucucuacuucucugagg

SEQ ID NO: 249027 - RNA, 30 nt, Homo Sapiens
uuugagacuggcccugccuaaccucuacca

SEQ ID NO: 249028 - RNA, 32 nt, Homo Sapiens
uuauauuaccagacauaaaaguacagugcagu

SEQ ID NO: 249029 - RNA, 32 nt, Homo Sapiens
auauucaaucaagguuuaauagauagggcugg

SEQ ID NO: 249030 - RNA, 32 nt, Homo Sapiens
gggaagcggcgcccggagacccgccccggccc

SEQ ID NO: 249031 - RNA, 32 nt, Homo Sapiens
uguuggcuucugaaguggucagggccauggcu

SEQ ID NO: 249032 - RNA, 32 nt, Homo Sapiens
gauugaaaaugaauugaaugccuaguagagua

SEQ ID NO: 249033 - RNA, 32 nt, Homo Sapiens
ugcccgggggcaauuguuuaaaggcauuuugu

SEQ ID NO: 249034 - RNA, 32 nt, Homo Sapiens
guugaagaucuuuuugugugcuuauuuaccau

SEQ ID NO: 249035 - RNA, 32 nt, Homo Sapiens
ugcuuccagggagaggcagggcagccaggggc

SEQ ID NO: 249036 - RNA, 32 nt, Homo Sapiens
cacauucccucauaugcacaagcccaccaacc

SEQ ID NO: 249037 - RNA, 32 nt, Homo Sapiens
ugaacauguggaagaaaaucagugggauucug

SEQ ID NO: 249038 - RNA, 32 nt, Homo Sapiens
ucuucauauaucuauucagcaguaugccauau

SEQ ID NO: 249039 - RNA, 32 nt, Homo Sapiens
uggaugaugaacugcuguugguugcuauugac

SEQ ID NO: 249040 - RNA, 32 nt, Homo Sapiens
cccucacuggccuccccacuuccacucacacc

SEQ ID NO: 249041 - RNA, 31 nt, Homo Sapiens
augcucccgccucagauucaaacacaguuuu

SEQ ID NO: 249042 - RNA, 32 nt, Homo Sapiens
gccugugcccugcgggcagccgugccgagaug

SEQ ID NO: 249043 - RNA, 32 nt, Homo Sapiens
auuuuuuuuucuccuuuuuuuuuucuuuuuaa

SEQ ID NO: 249044 - RNA, 32 nt, Homo Sapiens
ggucccagaguggcugcaccacuuccaggguu

SEQ ID NO: 249045 - RNA, 32 nt, Homo Sapiens
gugguuuggcauuguaccuggguacaggaagc

SEQ ID NO: 249046 - RNA, 32 nt, Homo Sapiens
gacucauaguguccaugauggauggagcuggc

SEQ ID NO: 249047 - RNA, 32 nt, Homo Sapiens
auauggcugaggaugccauguuugcucuaaau

SEQ ID NO: 249048 - RNA, 32 nt, Homo Sapiens
agggaacugggaagagaaggaggggaacuuaa

SEQ ID NO: 249049 - RNA, 32 nt, Homo Sapiens
cccugaucucaacucguggcacuaacuuggaa

SEQ ID NO: 249050 - RNA, 32 nt, Homo Sapiens
ggcugcacauucagcuuagaaguggaccuggc

SEQ ID NO: 249051 - RNA, 32 nt, Homo Sapiens
gcugcggcggaacggcuguugguuucugcugg

SEQ ID NO: 249052 - RNA, 32 nt, Homo Sapiens
ggcaaauaacaaagcaaaccaauauaauuaua

SEQ ID NO: 249053 - RNA, 30 nt, Homo Sapiens
auugccaggaccugcggcggcggcggcggc

SEQ ID NO: 249054 - RNA, 32 nt, Homo Sapiens
uuauagcuucucugcuggugcugccuucuaga

SEQ ID NO: 249055 - RNA, 32 nt, Homo Sapiens
uucucauuaauuucccauuuugucuacuuuua

SEQ ID NO: 249056 - RNA, 32 nt, Homo Sapiens
uucagugucaacacugagaauuggggcucuug

SEQ ID NO: 249057 - RNA, 32 nt, Homo Sapiens
gcagcgccagccccagcaacacugaggccgcc

SEQ ID NO: 249058 - RNA, 32 nt, Homo Sapiens
gugccuuuuuauuaauuguucagcuuuguaca

SEQ ID NO: 249059 - RNA, 32 nt, Homo Sapiens
ugaaggcuuucagggccuccagcccucucacu

SEQ ID NO: 249060 - RNA, 32 nt, Homo Sapiens
agacaggaaucucaaaaacaaacaaacaaaaa

SEQ ID NO: 249061 - RNA, 32 nt, Homo Sapiens
guaguaaggaagcgccuuuugcuggagggcaa

SEQ ID NO: 249062 - RNA, 32 nt, Homo Sapiens
ccuaauccacuuaaauucaacauuggugaaaa

SEQ ID NO: 249063 - RNA, 32 nt, Homo Sapiens
auccccuccagaugggcugguggcuugcacug

SEQ ID NO: 249064 - RNA, 32 nt, Homo Sapiens
ccccaaguguuuccugacacgcaucuuugcuu

SEQ ID NO: 249065 - RNA, 32 nt, Homo Sapiens
aagaagguggcuuaucaaguggguuuguagua

SEQ ID NO: 249066 - RNA, 32 nt, Homo Sapiens
uugcuucuccauuuuucauuugcuuuauuucu

SEQ ID NO: 249067 - RNA, 32 nt, Homo Sapiens
uuucagggaagacagaccaaaaauaucuccug

SEQ ID NO: 249068 - RNA, 32 nt, Homo Sapiens
uuguacccgcggcgcgcugcggcccguggcgc

SEQ ID NO: 249069 - RNA, 32 nt, Homo Sapiens
augaggucaggagaucgagaccaugcuggcua

SEQ ID NO: 249070 - RNA, 32 nt, Homo Sapiens
gcaggggggcgcggcugggcggugcagcuccg

SEQ ID NO: 249071 - RNA, 32 nt, Homo Sapiens
uuccauuccagaaagacccccauucuuccuuu

SEQ ID NO: 249072 - RNA, 32 nt, Homo Sapiens
augccaguauaugacuucucuuucuccguggu

SEQ ID NO: 249073 - RNA, 32 nt, Homo Sapiens
ucagagcaucucaaaggacuacaggguccuuu

SEQ ID NO: 249074 - RNA, 32 nt, Homo Sapiens
ccugcacugugcacgcuccucuucccaagguc

SEQ ID NO: 249075 - RNA, 30 nt, Homo Sapiens
uuguugggcaggcguauugcccccaguucc

SEQ ID NO: 249076 - RNA, 32 nt, Homo Sapiens
gaguacuaggugggaggauauggaaauuugcu

SEQ ID NO: 249077 - RNA, 32 nt, Homo Sapiens
ccagagucaaagaaagcagagaaggauuuaac

SEQ ID NO: 249078 - RNA, 32 nt, Homo Sapiens
uaaaaaugguggugcuucugcugcuauaacgu

SEQ ID NO: 249079 - RNA, 32 nt, Homo Sapiens
cuggaguucagcagugaugcuuuuuaguuuua

SEQ ID NO: 249080 - RNA, 32 nt, Homo Sapiens
uaaggaacuuaucuauggauauuaguaacauu

SEQ ID NO: 249081 - RNA, 32 nt, Homo Sapiens
ucucuagccugccugggaaugaaugaagcucu

SEQ ID NO: 249082 - RNA, 32 nt, Homo Sapiens
ccaaaagcggcuuuugguucggcgcagagaga

SEQ ID NO: 249083 - RNA, 32 nt, Homo Sapiens
ggugcccggcgaccuggcacccgcgccuggau

SEQ ID NO: 249084 - RNA, 32 nt, Homo Sapiens
cuuuggccugaagaaauaaaacuugguggucc

SEQ ID NO: 249085 - RNA, 32 nt, Homo Sapiens
ucuguggugaauggguggccuaugauggaugg

SEQ ID NO: 249086 - RNA, 27 nt, Homo Sapiens
accaugauuucauucagccccuccaca

SEQ ID NO: 249087 - RNA, 32 nt, Homo Sapiens
guuuuuuaguagaacugaauguucaagcauug

SEQ ID NO: 249088 - RNA, 32 nt, Homo Sapiens
gucuccccagggcuccucccccugcacaacac

SEQ ID NO: 249089 - RNA, 29 nt, Homo Sapiens
caauaucugacuuucauuccugagugaaa

SEQ ID NO: 249090 - RNA, 32 nt, Homo Sapiens
uauacaauuuaaaauccugugauuggacaggc

SEQ ID NO: 249091 - RNA, 32 nt, Homo Sapiens
gcccuuuggaaaaaaaucauucuggcguccac

SEQ ID NO: 249092 - RNA, 32 nt, Homo Sapiens
guagaaagagcagaagggaaacaucaugggaa

SEQ ID NO: 249093 - RNA, 32 nt, Homo Sapiens
ccccggcuaguuucccuggagagaggccuagc

SEQ ID NO: 249094 - RNA, 32 nt, Homo Sapiens
cauuacugcgguucuuccuguaagggggcucc

SEQ ID NO: 249095 - RNA, 32 nt, Homo Sapiens
uuacuuuuugccaaaaucaacauauaaugaag

SEQ ID NO: 249096 - RNA, 32 nt, Homo Sapiens
gugcuggcccagcagaccugcuggccagcgcc

SEQ ID NO: 249097 - RNA, 32 nt, Homo Sapiens
cauuccuuccugugucccagagcuucacuggu

SEQ ID NO: 249098 - RNA, 32 nt, Homo Sapiens
cugcucuccaucaaaucacuuccacuuuccug

SEQ ID NO: 249099 - RNA, 32 nt, Homo Sapiens
gaagcgcgggucccgcaugagccccggcggug

SEQ ID NO: 249100 - RNA, 32 nt, Homo Sapiens
gacaguuuacuuugccgacuugccauguuuuu

SEQ ID NO: 249101 - RNA, 32 nt, Homo Sapiens
uuuuuagcagagacaugcaacaacaacacaca

SEQ ID NO: 249102 - RNA, 32 nt, Homo Sapiens
accuucucucgcggccgggggaccgcagcgcg

SEQ ID NO: 249103 - RNA, 32 nt, Homo Sapiens
gcugguaccugggugggcaauggccaccaugu

SEQ ID NO: 249104 - RNA, 32 nt, Homo Sapiens
gaaggaauggccaguucaaaagaauaguagaa

SEQ ID NO: 249105 - RNA, 32 nt, Homo Sapiens
uuccuggacaaggcccccugccuuugccucac

SEQ ID NO: 249106 - RNA, 32 nt, Homo Sapiens
gggcuggaacagagcagccggccucuguccca

SEQ ID NO: 249107 - RNA, 32 nt, Homo Sapiens
uacacagaaggcauccaaaaccacgggauugg

SEQ ID NO: 249108 - RNA, 32 nt, Homo Sapiens
uuuuguuaauaaacuguuuuggaauuaauggc

SEQ ID NO: 249109 - RNA, 32 nt, Homo Sapiens
uuaacuacugaauaaugcuaccaggaugcuaa

SEQ ID NO: 249110 - RNA, 32 nt, Homo Sapiens
cgcagcggcgcccugggacgcggcgcucuccc

SEQ ID NO: 249111 - RNA, 32 nt, Homo Sapiens
gauaggagggcacaacuccagcucugaagaag

SEQ ID NO: 249112 - RNA, 32 nt, Homo Sapiens
aguuauugaugagagggaaaagauugacuggg

SEQ ID NO: 249113 - RNA, 32 nt, Homo Sapiens
auuggccagagguaggaauguggggagaagga

SEQ ID NO: 249114 - RNA, 32 nt, Homo Sapiens
gcagggcaccuguuagaaucagagcugcagga

SEQ ID NO: 249115 - RNA, 32 nt, Homo Sapiens
ggaaaacaguuugggggaguaaaaaguauuag

SEQ ID NO: 249116 - RNA, 32 nt, Homo Sapiens
cucgaggcagaggucauguucccagccaagag

SEQ ID NO: 249117 - RNA, 32 nt, Homo Sapiens
gggaaggggggugcccuggguugggucaguga

SEQ ID NO: 249118 - RNA, 32 nt, Homo Sapiens
gaccuugcaccuugcaccuucgcagcgcccug

SEQ ID NO: 249119 - RNA, 32 nt, Homo Sapiens
uguggggaggcgacgcaggggcggcggagagc

SEQ ID NO: 249120 - RNA, 32 nt, Homo Sapiens
cacaaguggaauuuaauacauaaaagagaaaa

SEQ ID NO: 249121 - RNA, 32 nt, Homo Sapiens
aaagaagagucuuuauaauuuuguuugucaga

SEQ ID NO: 249122 - RNA, 32 nt, Homo Sapiens
uguggagggaggcgagacauguuggcaguaau

SEQ ID NO: 249123 - RNA, 32 nt, Homo Sapiens
cgcggccagccggccaggcuccccucggcaaa

SEQ ID NO: 249124 - RNA, 32 nt, Homo Sapiens
cugcuccgcccgcucccgcucccgaucucuga

SEQ ID NO: 249125 - RNA, 32 nt, Homo Sapiens
gauggugggugccuguaaucccagauacucag

SEQ ID NO: 249126 - RNA, 32 nt, Homo Sapiens
uagaagaguugaaaagggaaagcaaaacuccu

SEQ ID NO: 249127 - RNA, 32 nt, Homo Sapiens
acucacuuucccuugugucaagacauuucucu

SEQ ID NO: 249128 - RNA, 32 nt, Homo Sapiens
auguagaugguauaacauuugaaaauauuguc

SEQ ID NO: 249129 - RNA, 32 nt, Homo Sapiens
aacgugcagaaaaaagcagagcuacauggcug

SEQ ID NO: 249130 - RNA, 32 nt, Homo Sapiens
ugccugugcccuacauuaaacccggcguuugu

SEQ ID NO: 249131 - RNA, 32 nt, Homo Sapiens
aagaaggaagcaguagcugagcaccugcccuc

SEQ ID NO: 249132 - RNA, 31 nt, Homo Sapiens
cagcgggagcgcagcucagcugggcuggaac

SEQ ID NO: 249133 - RNA, 32 nt, Homo Sapiens
uucagccaacauuagugaaacaaaaucaguga

SEQ ID NO: 249134 - RNA, 32 nt, Homo Sapiens
cuuggaccgagaccaggccggcgaccaccagg

SEQ ID NO: 249135 - RNA, 32 nt, Homo Sapiens
acuagaauauucaacuccauauggaaaaucau

SEQ ID NO: 249136 - RNA, 32 nt, Homo Sapiens
augggauuagggaucuccugcuguugguccua

SEQ ID NO: 249137 - RNA, 32 nt, Homo Sapiens
cauuuuuuguuucuugguguuguuauggcaag

SEQ ID NO: 249138 - RNA, 32 nt, Homo Sapiens
guaaccgaacaccaggccucccugcccccucc

SEQ ID NO: 249139 - RNA, 32 nt, Homo Sapiens
cugaaagcagucuggucuauagaguuauggau

SEQ ID NO: 249140 - RNA, 32 nt, Homo Sapiens
auuaaacuucucauuucuuuuaaauauguaug

SEQ ID NO: 249141 - RNA, 32 nt, Homo Sapiens
ucaccuccaggacuuucucguuuuccaccuug

SEQ ID NO: 249142 - RNA, 32 nt, Homo Sapiens
auggggguuagcacuggcucucguucucaccg

SEQ ID NO: 249143 - RNA, 32 nt, Homo Sapiens
ggagggagaaauuuauuuucuggguaggagua

SEQ ID NO: 249144 - RNA, 32 nt, Homo Sapiens
accgaggggggccugugcucgugcccacgcac

SEQ ID NO: 249145 - RNA, 31 nt, Homo Sapiens
gugugguggcacugccagccgacugcugaca

SEQ ID NO: 249146 - RNA, 32 nt, Homo Sapiens
caggggcggggcggggccccccugggaccucu

SEQ ID NO: 249147 - RNA, 32 nt, Homo Sapiens
cguggcggcuucuguccgcuccgcggagggaa

SEQ ID NO: 249148 - RNA, 32 nt, Homo Sapiens
agauguguugauguuugccauguucaacuagu

SEQ ID NO: 249149 - RNA, 32 nt, Homo Sapiens
auggaaaagggaggcagggugggcuuccguuc

SEQ ID NO: 249150 - RNA, 32 nt, Homo Sapiens
uaccugauauauauacaauuaaaauaucugua

SEQ ID NO: 249151 - RNA, 32 nt, Homo Sapiens
aagcgggguccucagcugggggccucggggua

SEQ ID NO: 249152 - RNA, 32 nt, Homo Sapiens
agcaaauacucacuaccacaaauaagaacauu

SEQ ID NO: 249153 - RNA, 32 nt, Homo Sapiens
ucuccauuuuuccaccccguccuuacccuagg

SEQ ID NO: 249154 - RNA, 32 nt, Homo Sapiens
gaggagacggacuguagacaaugagauuaagc

SEQ ID NO: 249155 - RNA, 32 nt, Homo Sapiens
ccagguguuugcuuaugcacuuauaaaaugau

SEQ ID NO: 249156 - RNA, 32 nt, Homo Sapiens
ggccuagcugcugccucccaauggccuuugua

SEQ ID NO: 249157 - RNA, 32 nt, Homo Sapiens
guauugcugucaucaguguggcacucuguccu

SEQ ID NO: 249158 - RNA, 32 nt, Homo Sapiens
guaaagcagagguagcauauuucugagaaauu

SEQ ID NO: 249159 - RNA, 32 nt, Homo Sapiens
ugugcuuauauccuuccacccuugacugccaa

SEQ ID NO: 249160 - RNA, 32 nt, Homo Sapiens
uguacaguagauuuuccaaauguaauaaacuu

SEQ ID NO: 249161 - RNA, 32 nt, Homo Sapiens
ugcagccagggugaggccucuguggaccccua

SEQ ID NO: 249162 - RNA, 32 nt, Homo Sapiens
ucccacagccuuccucccccagccugagugac

SEQ ID NO: 249163 - RNA, 32 nt, Homo Sapiens
uguguguauaucuauuuauuuauaaaaauauu

SEQ ID NO: 249164 - RNA, 32 nt, Homo Sapiens
cagagaagaaugaaacaaaacagaacuggcau

SEQ ID NO: 249165 - RNA, 32 nt, Homo Sapiens
uguccuccuuggcauccaagugagcgcaucuc

SEQ ID NO: 249166 - RNA, 32 nt, Homo Sapiens
auuuuuaauuuuaaggcuccaggaaagaaagg

SEQ ID NO: 249167 - RNA, 32 nt, Homo Sapiens
cagccuggugccuggggugcugagcuagugag

SEQ ID NO: 249168 - RNA, 32 nt, Homo Sapiens
auaugauucugcuuuuaccaugccccugagca

SEQ ID NO: 249169 - RNA, 32 nt, Homo Sapiens
gccugguugaaaugaaauuuguagcaucugau

SEQ ID NO: 249170 - RNA, 32 nt, Homo Sapiens
gccgccaggccgcgacuuggccccuguuuucc

SEQ ID NO: 249171 - RNA, 32 nt, Homo Sapiens
cuuucaccaaaggagcccagugguuucugugg

SEQ ID NO: 249172 - RNA, 32 nt, Homo Sapiens
acaggauagauuaugaucucgguccccaucca

SEQ ID NO: 249173 - RNA, 32 nt, Homo Sapiens
uucaacccuuaguguaagccacuuccugccac

SEQ ID NO: 249174 - RNA, 32 nt, Homo Sapiens
agcauaauuuaauagcauugucuuaaaauaca

SEQ ID NO: 249175 - RNA, 32 nt, Homo Sapiens
acugccacacccacgaggcggugcuggcugug

SEQ ID NO: 249176 - RNA, 32 nt, Homo Sapiens
cugccacuccccacccccagccucugccggcu

SEQ ID NO: 249177 - RNA, 32 nt, Homo Sapiens
cucccgcgcucugcggcggcaagccccuugga

SEQ ID NO: 249178 - RNA, 32 nt, Homo Sapiens
uccccaccaaaauugggauuguucuaaacaau

SEQ ID NO: 249179 - RNA, 32 nt, Homo Sapiens
gagaacagugcaacaaaugccagcauugccau

SEQ ID NO: 249180 - RNA, 32 nt, Homo Sapiens
gucaggcugggggacuuguuugaaagaaagag

SEQ ID NO: 249181 - RNA, 32 nt, Homo Sapiens
gucuuccagcuuucuucugcuuuuucaagauu

SEQ ID NO: 249182 - RNA, 32 nt, Homo Sapiens
ggccguggggagugggggccagugccugcagc

SEQ ID NO: 249183 - RNA, 32 nt, Homo Sapiens
gaauagaaaugaauucuuggagauacucaugc

SEQ ID NO: 249184 - RNA, 32 nt, Homo Sapiens
cccaggagagcucugagcucuggccaacaacu

SEQ ID NO: 249185 - RNA, 32 nt, Homo Sapiens
uaaucccugagcuaugucuccuccaaccgugc

SEQ ID NO: 249186 - RNA, 32 nt, Homo Sapiens
uuuuaaguccugcaguuuuucuuuaaucugaa

SEQ ID NO: 249187 - RNA, 32 nt, Homo Sapiens
gccucgcagccuccaggggacacgccaugacu

SEQ ID NO: 249188 - RNA, 32 nt, Homo Sapiens
uuuaagggaaaaaauaggcauucucaucuuag

SEQ ID NO: 249189 - RNA, 32 nt, Homo Sapiens
ucaaaccaaaggaaaaguguugcuagacaaaa

SEQ ID NO: 249190 - RNA, 32 nt, Homo Sapiens
cgccgcaggaccgcgcgccccuuggcggcuga

SEQ ID NO: 249191 - RNA, 32 nt, Homo Sapiens
auaauaauugguuggcagcucggacugcugaa

SEQ ID NO: 249192 - RNA, 32 nt, Homo Sapiens
aggccccaggcacagagcugccugcucccucc

SEQ ID NO: 249193 - RNA, 32 nt, Homo Sapiens
gguggcggcggcgacggcggcgcggaggcgaa

SEQ ID NO: 249194 - RNA, 32 nt, Homo Sapiens
uaacccauaccccacaccugcccagcucuggc

SEQ ID NO: 249195 - RNA, 32 nt, Homo Sapiens
ugcaggcccagcuggaggacgagcaggcgcag

SEQ ID NO: 249196 - RNA, 32 nt, Homo Sapiens
gaggccucaggaggccagccugccaugagagc

SEQ ID NO: 249197 - RNA, 32 nt, Homo Sapiens
auuccaguuccgaaagcucucucgccuucgua

SEQ ID NO: 249198 - RNA, 32 nt, Homo Sapiens
uuaagggaaauauuuguaccacuuccaaacuu

SEQ ID NO: 249199 - RNA, 32 nt, Homo Sapiens
gccugagccgggggaagccaggcggcccgggu

SEQ ID NO: 249200 - RNA, 32 nt, Homo Sapiens
uggccuccauccaugcagacaaguauagcuac

SEQ ID NO: 249201 - RNA, 32 nt, Homo Sapiens
guaagaagggaaggugggugggcaccugagag

SEQ ID NO: 249202 - RNA, 32 nt, Homo Sapiens
uuauuaaaggugguccuuccuaccucuguggu

SEQ ID NO: 249203 - RNA, 32 nt, Homo Sapiens
gugcuguauuucuguguuuuguagaagucaca

SEQ ID NO: 249204 - RNA, 32 nt, Homo Sapiens
cccuucuagagccuaaauuuguugcccgaguu

SEQ ID NO: 249205 - RNA, 32 nt, Homo Sapiens
gguggaagcaggacaccuggaacugcggcaaa

SEQ ID NO: 249206 - RNA, 32 nt, Homo Sapiens
ucacccauucccugccuucucuaggaacccug

SEQ ID NO: 249207 - RNA, 32 nt, Homo Sapiens
gguugaaaaaagugaaaagaauauuuucaaca

SEQ ID NO: 249208 - RNA, 32 nt, Homo Sapiens
uuuuuuuuuuuuucuuuuuugagacggagauu

SEQ ID NO: 249209 - RNA, 32 nt, Homo Sapiens
uggguugcuugugaacuucuacucauuuccua

SEQ ID NO: 249210 - RNA, 32 nt, Homo Sapiens
aaaguggaggcuccugaugcaggcugcagacc

SEQ ID NO: 249211 - RNA, 32 nt, Homo Sapiens
aucucagagauuaaguuauauauuaaaagcuu

SEQ ID NO: 249212 - RNA, 32 nt, Homo Sapiens
uuaaggagaacuaauaacuuuuuccauguauc

SEQ ID NO: 249213 - RNA, 32 nt, Homo Sapiens
cuuauuauguaaaaugauacaauccuguugga

SEQ ID NO: 249214 - RNA, 32 nt, Homo Sapiens
acaucguggcggugccgucugagcuguagcgg

SEQ ID NO: 249215 - RNA, 32 nt, Homo Sapiens
gaucacaccuuauuuuuuccuugucauaaaug

SEQ ID NO: 249216 - RNA, 32 nt, Homo Sapiens
gccccucaccucaggaccccagagggaccagc

SEQ ID NO: 249217 - RNA, 32 nt, Homo Sapiens
augagguguacuuuauacuuugaugaaggcua

SEQ ID NO: 249218 - RNA, 30 nt, Homo Sapiens
ugggguucgcggggcggcggguagaguuga

SEQ ID NO: 249219 - RNA, 32 nt, Homo Sapiens
ucuacuuccacuggucccacugcagcugccca

SEQ ID NO: 249220 - RNA, 32 nt, Homo Sapiens
gacuauugaugaaaaucugcuaauuacagcag

SEQ ID NO: 249221 - RNA, 32 nt, Homo Sapiens
gugggagaggguuaauugguauucucauggcc

SEQ ID NO: 249222 - RNA, 32 nt, Homo Sapiens
ugugcauuuguuauggaaauuuaauucauaug

SEQ ID NO: 249223 - RNA, 32 nt, Homo Sapiens
uauuuguuuauaacuuuaaaagaguagaagau

SEQ ID NO: 249224 - RNA, 32 nt, Homo Sapiens
ugagggagggucagggaugugugacaccagca

SEQ ID NO: 249225 - RNA, 32 nt, Homo Sapiens
uucccauggcaaauaauuuuuacaauacugcu

SEQ ID NO: 249226 - RNA, 32 nt, Homo Sapiens
auacaggguuucacccuguuagccaggauggu

SEQ ID NO: 249227 - RNA, 30 nt, Homo Sapiens
cccguguugcccgugcguugcugcagacca

SEQ ID NO: 249228 - RNA, 32 nt, Homo Sapiens
uuaaauugcgaaaaacaugacucugaguccaa

SEQ ID NO: 249229 - RNA, 29 nt, Homo Sapiens
uuuuauauauguauguauacucauauaga

SEQ ID NO: 249230 - RNA, 32 nt, Homo Sapiens
uugaucaggcuggucaugaacuccugaccuca

SEQ ID NO: 249231 - RNA, 32 nt, Homo Sapiens
acuggcagucguuguugguauuguugcagcau

SEQ ID NO: 249232 - RNA, 32 nt, Homo Sapiens
aggagagacacagggacaaucagaccagcguc

SEQ ID NO: 249233 - RNA, 32 nt, Homo Sapiens
agguccuccaucccaacagccaugcccgcauu

SEQ ID NO: 249234 - RNA, 32 nt, Homo Sapiens
gauuccucccaaauauaaaggcauauggaaca

SEQ ID NO: 249235 - RNA, 32 nt, Homo Sapiens
ccugcauggugccgccgagcccgggguggagg

SEQ ID NO: 249236 - RNA, 32 nt, Homo Sapiens
cuaaaugguuugcaugagagccaccuggggua

SEQ ID NO: 249237 - RNA, 32 nt, Homo Sapiens
ggggcuccuggaaggaggaagaggcucuccac

SEQ ID NO: 249238 - RNA, 32 nt, Homo Sapiens
gguaauucuuauuugcaaguggguuauguguu

SEQ ID NO: 249239 - RNA, 32 nt, Homo Sapiens
ccuaaaagcagccaccaauuaagaaagccaca

SEQ ID NO: 249240 - RNA, 32 nt, Homo Sapiens
caucagcagcaaggguuacgggauugcccugc

SEQ ID NO: 249241 - RNA, 32 nt, Homo Sapiens
aggaagacggaguccgagccucgggggcuccu

SEQ ID NO: 249242 - RNA, 32 nt, Homo Sapiens
ugacaagaagcccacugccugauucacauaag

SEQ ID NO: 249243 - RNA, 32 nt, Homo Sapiens
uuucuguucuaccuaggucucuaauugcuugg

SEQ ID NO: 249244 - RNA, 32 nt, Homo Sapiens
cucuugagugaaugcaccuuguugggucacgu

SEQ ID NO: 249245 - RNA, 32 nt, Homo Sapiens
aaggaaguuuuaggaacuuaaauugauuuaug

SEQ ID NO: 249246 - RNA, 28 nt, Homo Sapiens
aauauaguuacaggcaaagggaacgaga

SEQ ID NO: 249247 - RNA, 32 nt, Homo Sapiens
gcucaaggcgcccucuggcccgggcccgggcc

SEQ ID NO: 249248 - RNA, 32 nt, Homo Sapiens
uuauuuaaugaaaugucauggcucuguucaua

SEQ ID NO: 249249 - RNA, 32 nt, Homo Sapiens
gauuuaucaucuauaacuucaaaccuauuugu

SEQ ID NO: 249250 - RNA, 32 nt, Homo Sapiens
aaaaagaguggaccaaaacacugcacacagug

SEQ ID NO: 249251 - RNA, 27 nt, Homo Sapiens
acaagucccuuuaacugguauaugauu

SEQ ID NO: 249252 - RNA, 32 nt, Homo Sapiens
cgccccguuaccccuugcccccggccccgccc

SEQ ID NO: 249253 - RNA, 32 nt, Homo Sapiens
ccaaugugugggaaagauuugcucuuaauucu

SEQ ID NO: 249254 - RNA, 32 nt, Homo Sapiens
cgagcgcugaugggaaaggaacaaagagggaa

SEQ ID NO: 249255 - RNA, 32 nt, Homo Sapiens
aguauugcaacaggggugcaauuuaaggcuau

SEQ ID NO: 249256 - RNA, 32 nt, Homo Sapiens
cugccagaauuaaguuaaucugauguucaugu

SEQ ID NO: 249257 - RNA, 32 nt, Homo Sapiens
ucccuaagucacuuuccuuauguaucaucuaa

SEQ ID NO: 249258 - RNA, 32 nt, Homo Sapiens
agcauaaaaaucaugccuuuauaaucuuagca

SEQ ID NO: 249259 - RNA, 32 nt, Homo Sapiens
uuaaaauauuuuacuugauuguauacauagac

SEQ ID NO: 249260 - RNA, 32 nt, Homo Sapiens
auucucuucacaguagcaggcuuaccaauuuc

SEQ ID NO: 249261 - RNA, 32 nt, Homo Sapiens
ccucugccucaaagacucuuguccucuugucc

SEQ ID NO: 249262 - RNA, 32 nt, Homo Sapiens
ugagcacgcagauccaugagcuggaggauaac

SEQ ID NO: 249263 - RNA, 30 nt, Homo Sapiens
ggugcagagaagcuggacuucugugggccc

SEQ ID NO: 249264 - RNA, 29 nt, Homo Sapiens
uguguuuugaauuuuuauuuucuaaugca

SEQ ID NO: 249265 - RNA, 32 nt, Homo Sapiens
caugucauacaaggugugaauuugagcacagu

SEQ ID NO: 249266 - RNA, 32 nt, Homo Sapiens
uguuuaucuaucuuuguggaaaacagauaaug

SEQ ID NO: 249267 - RNA, 32 nt, Homo Sapiens
gggaggcaacaggagcucuguggugucugugg

SEQ ID NO: 249268 - RNA, 32 nt, Homo Sapiens
cacauaagaaacaguauugaaaaaucccacgc

SEQ ID NO: 249269 - RNA, 32 nt, Homo Sapiens
cgccagccagccacgggccugauuccagagga

SEQ ID NO: 249270 - RNA, 30 nt, Homo Sapiens
ugggccggagguggcuauggaggauuuugg

SEQ ID NO: 249271 - RNA, 32 nt, Homo Sapiens
agaauugacaauguuuaaguaaugguggaauc

SEQ ID NO: 249272 - RNA, 32 nt, Homo Sapiens
cagguguuaauauaauacuaaggauaaagcuu

SEQ ID NO: 249273 - RNA, 32 nt, Homo Sapiens
cccaguggccuccuggccggcccgacacggcc

SEQ ID NO: 249274 - RNA, 32 nt, Homo Sapiens
aaaggcucuuaggguaaugagauggauggugg

SEQ ID NO: 249275 - RNA, 32 nt, Homo Sapiens
acaguuuacugauuuagccagugaagagaaag

SEQ ID NO: 249276 - RNA, 32 nt, Homo Sapiens
ccugugccggugcccggggcaugaggggccug

SEQ ID NO: 249277 - RNA, 32 nt, Homo Sapiens
gagcucaggcugcuguggaucccggcgcauca

SEQ ID NO: 249278 - RNA, 32 nt, Homo Sapiens
uaccuuaagucucccccucuuuuauccuugcc

SEQ ID NO: 249279 - RNA, 32 nt, Homo Sapiens
ccuguuggagauguggaaauaaaaaccaccua

SEQ ID NO: 249280 - RNA, 32 nt, Homo Sapiens
uuugaccgcacgaacgcacgcccugccccagc

SEQ ID NO: 249281 - RNA, 32 nt, Homo Sapiens
guguuggaugggagugggagggggcuggagcg

SEQ ID NO: 249282 - RNA, 32 nt, Homo Sapiens
gauuaguacugaagagcagcuaaggcaccugc

SEQ ID NO: 249283 - RNA, 31 nt, Homo Sapiens
gacccgccacccuggaagccccgcgcacaca

SEQ ID NO: 249284 - RNA, 32 nt, Homo Sapiens
agugccagaagcugccuccgugguuuggucac

SEQ ID NO: 249285 - RNA, 32 nt, Homo Sapiens
agugcggagaccaaugggaggcacucuuggcc

SEQ ID NO: 249286 - RNA, 32 nt, Homo Sapiens
auugggaauugaauucaaggugacuagaaaga

SEQ ID NO: 249287 - RNA, 32 nt, Homo Sapiens
gccagugucauucaaagauguggcuguggauu

SEQ ID NO: 249288 - RNA, 32 nt, Homo Sapiens
uaccaagugcugucuugaugacugcugauuuu

SEQ ID NO: 249289 - RNA, 32 nt, Homo Sapiens
acugugaaaacacaaccguuauggucuuuguc

SEQ ID NO: 249290 - RNA, 31 nt, Homo Sapiens
ugggccaugagcccaagaaguggcccaucuc

SEQ ID NO: 249291 - RNA, 32 nt, Homo Sapiens
guaagcagaggucaugagacauuuguauaaug

SEQ ID NO: 249292 - RNA, 32 nt, Homo Sapiens
ugcagaguugggagugacuccagagccuccag

SEQ ID NO: 249293 - RNA, 32 nt, Homo Sapiens
uaaaggggaugauuuuuaaccaaaggaauaua

SEQ ID NO: 249294 - RNA, 32 nt, Homo Sapiens
gcgccggcucacggacuucucgcccaacuccc

SEQ ID NO: 249295 - RNA, 32 nt, Homo Sapiens
aauuagcagcgaagcucgcgggcgcuggcggg

SEQ ID NO: 249296 - RNA, 32 nt, Homo Sapiens
gccugucuccagggcugcugcggcccagcccc

SEQ ID NO: 249297 - RNA, 32 nt, Homo Sapiens
gcacguggccagcuggggagaugcugugagcu

SEQ ID NO: 249298 - RNA, 32 nt, Homo Sapiens
cugagcccacccagagguuguuggaguucagc

SEQ ID NO: 249299 - RNA, 32 nt, Homo Sapiens
uuguucccaggguggcgccugcucuccaucca

SEQ ID NO: 249300 - RNA, 32 nt, Homo Sapiens
cuggguggaggaagaagugguggagccucagg

SEQ ID NO: 249301 - RNA, 32 nt, Homo Sapiens
guccugcagggccuggggcuucccuuccucau

SEQ ID NO: 249302 - RNA, 32 nt, Homo Sapiens
ugguuauccaaauccuaaggggagcuacagcc

SEQ ID NO: 249303 - RNA, 28 nt, Homo Sapiens
cucaugggacgccuguguucucauggga

SEQ ID NO: 249304 - RNA, 32 nt, Homo Sapiens
ggagcagaaugggaagaggacuuagugagaau

SEQ ID NO: 249305 - RNA, 32 nt, Homo Sapiens
aggaccaagugggcccgaggcggacgugagaa

SEQ ID NO: 249306 - RNA, 32 nt, Homo Sapiens
cugggauugacaaaaugugucugcugaaaugc

SEQ ID NO: 249307 - RNA, 32 nt, Homo Sapiens
uugauuuaacacacucagguagaauauuuuua

SEQ ID NO: 249308 - RNA, 32 nt, Homo Sapiens
ggacguagcucuuuccaaaaucugcaagaauu

SEQ ID NO: 249309 - RNA, 32 nt, Homo Sapiens
ugcccauuccacaaauacaagugaaauaguga

SEQ ID NO: 249310 - RNA, 32 nt, Homo Sapiens
uuucacaaauuucaagagucacuacacuaaag

SEQ ID NO: 249311 - RNA, 32 nt, Homo Sapiens
uaaucugcaauugugcagaaaauccacagaac

SEQ ID NO: 249312 - RNA, 32 nt, Homo Sapiens
caaagcagauaaaaucuacuccaaauuauuuu

SEQ ID NO: 249313 - RNA, 32 nt, Homo Sapiens
guuaaacaaaaauaaaauuacauguguuuucg

SEQ ID NO: 249314 - RNA, 32 nt, Homo Sapiens
ugcauggccucgugacccccagccucccuuag

SEQ ID NO: 249315 - RNA, 32 nt, Homo Sapiens
ugauaggagacggggaggccaacccuucucug

SEQ ID NO: 249316 - RNA, 32 nt, Homo Sapiens
gucuuggucuucagcccucuuauccugauuua

SEQ ID NO: 249317 - RNA, 32 nt, Homo Sapiens
agggaggggguggaagaggaggacuaaacuca

SEQ ID NO: 249318 - RNA, 32 nt, Homo Sapiens
gggaaguggaggaaccacuguccgccugcgga

SEQ ID NO: 249319 - RNA, 32 nt, Homo Sapiens
ggugucagccaccgcacccagccuggaguggc

SEQ ID NO: 249320 - RNA, 32 nt, Homo Sapiens
auuggaacucauauacugcuaguuagaaugua

SEQ ID NO: 249321 - RNA, 32 nt, Homo Sapiens
cauuugcucaggugcuggccagccuccggagc

SEQ ID NO: 249322 - RNA, 32 nt, Homo Sapiens
agacuccaguugucccucuccuccuaccugug

SEQ ID NO: 249323 - RNA, 32 nt, Homo Sapiens
uuguguuaacugcacaaauuguagagcauuug

SEQ ID NO: 249324 - RNA, 32 nt, Homo Sapiens
uguaauauuucugauuuuucagaauauuugca

SEQ ID NO: 249325 - RNA, 32 nt, Homo Sapiens
uuucuuaaacacauuuuauauuacugaacaac

SEQ ID NO: 249326 - RNA, 32 nt, Homo Sapiens
aaccuaaugggaagaggaaaaugggaaacaau

SEQ ID NO: 249327 - RNA, 32 nt, Homo Sapiens
uuagguaaacuucagcacuuugggaggccgag

SEQ ID NO: 249328 - RNA, 32 nt, Homo Sapiens
aacagugucagcaccuuguuggauugugcugu

SEQ ID NO: 249329 - RNA, 32 nt, Homo Sapiens
gaggccugaggguggguuuagaagccagaugu

SEQ ID NO: 249330 - RNA, 32 nt, Homo Sapiens
uguuuuauauauauuuaaucuuauucaaugga

SEQ ID NO: 249331 - RNA, 32 nt, Homo Sapiens
uccacagcucugggcuuccucggagaccccug

SEQ ID NO: 249332 - RNA, 32 nt, Homo Sapiens
cuaggaccugauuuaaagugaauuucaaguga

SEQ ID NO: 249333 - RNA, 32 nt, Homo Sapiens
gguccucgcucgccucgcgccgguaguuuugg

SEQ ID NO: 249334 - RNA, 32 nt, Homo Sapiens
uaguugguauggaaaacauuuuucuuauuuuu

SEQ ID NO: 249335 - RNA, 32 nt, Homo Sapiens
ucaguuuaauagguuucucaccaaguuguaug

SEQ ID NO: 249336 - RNA, 32 nt, Homo Sapiens
ugaaacuugaggaaacaagauacauacuacug

SEQ ID NO: 249337 - RNA, 32 nt, Homo Sapiens
ucaaaaacaaaaaacgguagauucaaaauaga

SEQ ID NO: 249338 - RNA, 32 nt, Homo Sapiens
ggguaaggaggugcuuuuuuaaaaucguucau

SEQ ID NO: 249339 - RNA, 32 nt, Homo Sapiens
cggaggagguggaggaggcggcggcggcggcg

SEQ ID NO: 249340 - RNA, 32 nt, Homo Sapiens
uggugagccuagcccugggacaucaggagacu

SEQ ID NO: 249341 - RNA, 32 nt, Homo Sapiens
ggaaggagagcgccagcucugggcuggacauc

SEQ ID NO: 249342 - RNA, 32 nt, Homo Sapiens
gugcugugcagggcucccggaggacaggaccu

SEQ ID NO: 249343 - RNA, 32 nt, Homo Sapiens
gaacaugaaaggagccgacaaaaguugcuucc

SEQ ID NO: 249344 - RNA, 32 nt, Homo Sapiens
ugcaagaaaaaguuaauuuaaaaauguaaugg

SEQ ID NO: 249345 - RNA, 32 nt, Homo Sapiens
ucuuccuccuucccccagccagccagcugucc

SEQ ID NO: 249346 - RNA, 28 nt, Homo Sapiens
gaauaaauauuuuccuccuuucuaugga

SEQ ID NO: 249347 - RNA, 32 nt, Homo Sapiens
gggaggacuuguuuuucuguuuuagaauaguu

SEQ ID NO: 249348 - RNA, 32 nt, Homo Sapiens
ugcgaacaucagacugacuugcuggcgucaag

SEQ ID NO: 249349 - RNA, 32 nt, Homo Sapiens
agcuggaguuaggucauuugauuuuauacucu

SEQ ID NO: 249350 - RNA, 32 nt, Homo Sapiens
cugugucuccauccaaaucucaucuuaaauug

SEQ ID NO: 249351 - RNA, 32 nt, Homo Sapiens
uuccuguucaccccuaacccagccccuaagca

SEQ ID NO: 249352 - RNA, 32 nt, Homo Sapiens
agcccccuggggauggaccccauucauucauc

SEQ ID NO: 249353 - RNA, 32 nt, Homo Sapiens
ggcagggaucaggacuggagggggcggagccu

SEQ ID NO: 249354 - RNA, 32 nt, Homo Sapiens
ugcgagacguugagcugcggaagaugagucca

SEQ ID NO: 249355 - RNA, 32 nt, Homo Sapiens
uccugucgccaaggcucgacugagagaaguca

SEQ ID NO: 249356 - RNA, 32 nt, Homo Sapiens
aaagaauguuuaaagcuuuuuaaaagacuuca

SEQ ID NO: 249357 - RNA, 32 nt, Homo Sapiens
ucccggggccgcgcagcggccucucgucuacu

SEQ ID NO: 249358 - RNA, 32 nt, Homo Sapiens
uucuggacucgugcccccacucccgggugcug

SEQ ID NO: 249359 - RNA, 32 nt, Homo Sapiens
ugugggugacugugucauuucuccuacugcca

SEQ ID NO: 249360 - RNA, 32 nt, Homo Sapiens
cagaaucaaaccuuuuuauauuuuauacugca

SEQ ID NO: 249361 - RNA, 32 nt, Homo Sapiens
gccgagagggggcugggccacccccuccccuc

SEQ ID NO: 249362 - RNA, 32 nt, Homo Sapiens
auaggacaauucuauuuguugaccauuucuac

SEQ ID NO: 249363 - RNA, 32 nt, Homo Sapiens
ugaagcaggagcagggcguggagagcgagccg

SEQ ID NO: 249364 - RNA, 32 nt, Homo Sapiens
agccggggagacccuccucucuguggagggga

SEQ ID NO: 249365 - RNA, 32 nt, Homo Sapiens
uguauauaacuacuucuaaucuaaucacuaga

SEQ ID NO: 249366 - RNA, 32 nt, Homo Sapiens
gagcuccagcgggaaccaccccugcccaaccu

SEQ ID NO: 249367 - RNA, 32 nt, Homo Sapiens
cggcuagcccucgccucugccauccgauacua

SEQ ID NO: 249368 - RNA, 32 nt, Homo Sapiens
ugcaaggugaacacuuccuucuagggagcacc

SEQ ID NO: 249369 - RNA, 32 nt, Homo Sapiens
cauucuuccgccuuccuuguuuucuccaaaac

SEQ ID NO: 249370 - RNA, 32 nt, Homo Sapiens
cguugaggccgcguugggcgguucagacucag

SEQ ID NO: 249371 - RNA, 31 nt, Homo Sapiens
uccagaccaugcauguaguccacuccagaaa

SEQ ID NO: 249372 - RNA, 32 nt, Homo Sapiens
ucuaugaaauuaaaacagaaaaucagaacauu

SEQ ID NO: 249373 - RNA, 32 nt, Homo Sapiens
uucuccucugaccugccuguaccacguggguc

SEQ ID NO: 249374 - RNA, 32 nt, Homo Sapiens
gggaauacagcaugcgccacuacaccuggcua

SEQ ID NO: 249375 - RNA, 32 nt, Homo Sapiens
gauuuugcaccacuuuuuuguuacugugacca

SEQ ID NO: 249376 - RNA, 32 nt, Homo Sapiens
auuccugucccagcugauaggguaucugagaa

SEQ ID NO: 249377 - RNA, 32 nt, Homo Sapiens
ccucaccacccagcugcagcccaggaggcaca

SEQ ID NO: 249378 - RNA, 29 nt, Homo Sapiens
ucucccacauaugaguggaacuuacaugu

SEQ ID NO: 249379 - RNA, 32 nt, Homo Sapiens
augacaaauggaacuuucuaaaaguuauguua

SEQ ID NO: 249380 - RNA, 32 nt, Homo Sapiens
aagcggcucuccagcccuuccguccuucccca

SEQ ID NO: 249381 - RNA, 32 nt, Homo Sapiens
ggguggugggagucugggggacccagcccaac

SEQ ID NO: 249382 - RNA, 32 nt, Homo Sapiens
caccucccgccagcauucccaugccggaugau

SEQ ID NO: 249383 - RNA, 32 nt, Homo Sapiens
cuacccuuugaccaaaugucuuucucugcaac

SEQ ID NO: 249384 - RNA, 32 nt, Homo Sapiens
gaccuuugcagccucccugccuuagaucccac

SEQ ID NO: 249385 - RNA, 32 nt, Homo Sapiens
aaacuguuuacauccuucccacuacacaguug

SEQ ID NO: 249386 - RNA, 32 nt, Homo Sapiens
ccaccaccgccagcugccagcaccgcuacaga

SEQ ID NO: 249387 - RNA, 32 nt, Homo Sapiens
gauaguauaaaauacauagaaaacacaaguaa

SEQ ID NO: 249388 - RNA, 32 nt, Homo Sapiens
gcucuaccaggagggagugagaucuggggaca

SEQ ID NO: 249389 - RNA, 32 nt, Homo Sapiens
acucagaggagaggagcccaccccucccagga

SEQ ID NO: 249390 - RNA, 32 nt, Homo Sapiens
cccuucaccuccccgcccuuucuuagagugca

SEQ ID NO: 249391 - RNA, 32 nt, Homo Sapiens
ggccacaaggcacagucuucugagcgagugcu

SEQ ID NO: 249392 - RNA, 32 nt, Homo Sapiens
uacaauaaauuuuauucuuuuaaaaaaaaaaa

SEQ ID NO: 249393 - RNA, 32 nt, Homo Sapiens
gcuuggcggcggugucgacuucuacgacgucg

SEQ ID NO: 249394 - RNA, 32 nt, Homo Sapiens
gcgggcaaggaccagggcgagcccuggagcgc

SEQ ID NO: 249395 - RNA, 32 nt, Homo Sapiens
cgagaccagccugguccacauggcaaaacccc

SEQ ID NO: 249396 - RNA, 32 nt, Homo Sapiens
ggcucaggguggcgcggcugcugcucacugug

SEQ ID NO: 249397 - RNA, 32 nt, Homo Sapiens
aacuacuauuuuuuuucuuuuuccauuauuau

SEQ ID NO: 249398 - RNA, 32 nt, Homo Sapiens
aagucuguuuaaaauaaaaaagaauguuuucu

SEQ ID NO: 249399 - RNA, 32 nt, Homo Sapiens
gaaauacaaaaauuguacacaucuuauagcug

SEQ ID NO: 249400 - RNA, 32 nt, Homo Sapiens
cuucuuggugaguuauugugggaaaaauccug

SEQ ID NO: 249401 - RNA, 32 nt, Homo Sapiens
cuggcaguccccagccucccagcaucugugag

SEQ ID NO: 249402 - RNA, 32 nt, Homo Sapiens
gugcugucauauuuugguaucagaguuacauu

SEQ ID NO: 249403 - RNA, 32 nt, Homo Sapiens
ggcaucagagggaagggaggcuggggcugcag

SEQ ID NO: 249404 - RNA, 32 nt, Homo Sapiens
ucgucuacccaccaccuggagcccccgcaguc

SEQ ID NO: 249405 - RNA, 32 nt, Homo Sapiens
gguuggcugggccagcugcgccgcggcucaca

SEQ ID NO: 249406 - RNA, 32 nt, Homo Sapiens
uuaggcucugcuguuucucacccuuggaugau

SEQ ID NO: 249407 - RNA, 32 nt, Homo Sapiens
gaugcagucugcuggaucacagagagguugug

SEQ ID NO: 249408 - RNA, 32 nt, Homo Sapiens
ugaucagaggaugcauauuauucagcaucaga

SEQ ID NO: 249409 - RNA, 32 nt, Homo Sapiens
caugggcuucccgcccggggccgcgcaggccu

SEQ ID NO: 249410 - RNA, 32 nt, Homo Sapiens
ucacagugccgggucuucguuucuuaaaguug

SEQ ID NO: 249411 - RNA, 32 nt, Homo Sapiens
uccccagccacgaguaugccacagggggcuuu

SEQ ID NO: 249412 - RNA, 32 nt, Homo Sapiens
acaaugaaaaguuuauuuuaaacauuguuuaa

SEQ ID NO: 249413 - RNA, 32 nt, Homo Sapiens
guuacuuuuccacagcugcuucuuuuugcuca

SEQ ID NO: 249414 - RNA, 32 nt, Homo Sapiens
cuccccccgcaugugggugcccccacuccccc

SEQ ID NO: 249415 - RNA, 32 nt, Homo Sapiens
ucucgggccgcacaugcacgccgcagcaccag

SEQ ID NO: 249416 - RNA, 32 nt, Homo Sapiens
ggugggggauaaaauguaagauauucuuuagc

SEQ ID NO: 249417 - RNA, 32 nt, Homo Sapiens
agaaaggcaagggccgugcugcugcugggcgg

SEQ ID NO: 249418 - RNA, 32 nt, Homo Sapiens
aaaucccagcuuucccaaagucccuguggaug

SEQ ID NO: 249419 - RNA, 32 nt, Homo Sapiens
aagcuguuauuuacuguaguuguagauguauu

SEQ ID NO: 249420 - RNA, 32 nt, Homo Sapiens
gucugugacaauguauaugcaagugguaugug

SEQ ID NO: 249421 - RNA, 32 nt, Homo Sapiens
gcagcugggaggagguggugacgguggcaacg

SEQ ID NO: 249422 - RNA, 32 nt, Homo Sapiens
cggugcuggugccuugggaccugggggaaugg

SEQ ID NO: 249423 - RNA, 32 nt, Homo Sapiens
uggaagagaggcagaucaggaugucagcguga

SEQ ID NO: 249424 - RNA, 32 nt, Homo Sapiens
acuccccagcugucggcaguacucaguggaag

SEQ ID NO: 249425 - RNA, 32 nt, Homo Sapiens
cccuccccagccagcccuucccuggccccgcc

SEQ ID NO: 249426 - RNA, 32 nt, Homo Sapiens
ucacucucucccucagcaccugcccugcugga

SEQ ID NO: 249427 - RNA, 32 nt, Homo Sapiens
auuagaggaaagacauggaacacacagguagu

SEQ ID NO: 249428 - RNA, 32 nt, Homo Sapiens
aauuugagguaacauaccauauuuuaucaauu

SEQ ID NO: 249429 - RNA, 32 nt, Homo Sapiens
accuuaccccaggcccggguuccaggagccgc

SEQ ID NO: 249430 - RNA, 32 nt, Homo Sapiens
aaaacaguauacugacaacuguuuacaagaaa

SEQ ID NO: 249431 - RNA, 32 nt, Homo Sapiens
cguuccucuucccugugucaucuucuuaauua

SEQ ID NO: 249432 - RNA, 32 nt, Homo Sapiens
gagacgcagcagccuguguccuccagggccuc

SEQ ID NO: 249433 - RNA, 32 nt, Homo Sapiens
ggguugcucaacgccccgccucauuggaaaac

SEQ ID NO: 249434 - RNA, 26 nt, Homo Sapiens
uucaauaaauuuuuucuuuaaauuuc

SEQ ID NO: 249435 - RNA, 32 nt, Homo Sapiens
cagcuuguaggagguuuguacggaugugcuuu

SEQ ID NO: 249436 - RNA, 29 nt, Homo Sapiens
ucacggaugacuuucugcggaauagacgu

SEQ ID NO: 249437 - RNA, 32 nt, Homo Sapiens
cugcccauggguccugggcacccaggccugcc

SEQ ID NO: 249438 - RNA, 32 nt, Homo Sapiens
cugucuuugcugcaauuuugaaauaaaaugcc

SEQ ID NO: 249439 - RNA, 31 nt, Homo Sapiens
cgcuggagggcggagcgggcggcagacccgg

SEQ ID NO: 249440 - RNA, 32 nt, Homo Sapiens
agacaaacacuuagccaccucugugcuccagg

SEQ ID NO: 249441 - RNA, 32 nt, Homo Sapiens
auuggacugauucuuacccagcccuggucaag

SEQ ID NO: 249442 - RNA, 32 nt, Homo Sapiens
agggcauggggccgcgguucuggggcggcccg

SEQ ID NO: 249443 - RNA, 32 nt, Homo Sapiens
gaggaguuaaucuugucucuucucacagguuu

SEQ ID NO: 249444 - RNA, 32 nt, Homo Sapiens
aggaaucugugcauagaaugccauaugcagag

SEQ ID NO: 249445 - RNA, 32 nt, Homo Sapiens
aggggacucugcaguggggucgggaagugagu

SEQ ID NO: 249446 - RNA, 32 nt, Homo Sapiens
cugcccaggcugcccagccuguccuugugucg

SEQ ID NO: 249447 - RNA, 32 nt, Homo Sapiens
gcugggccacagguccgagaucggggguugga

SEQ ID NO: 249448 - RNA, 32 nt, Homo Sapiens
agcgggcgccgucggcggcuggcccugucggc

SEQ ID NO: 249449 - RNA, 32 nt, Homo Sapiens
ugacacuuguacacuagguaauaaaauugauu

SEQ ID NO: 249450 - RNA, 31 nt, Homo Sapiens
cagggagcgagacagcugccccgugacggaa

SEQ ID NO: 249451 - RNA, 32 nt, Homo Sapiens
cuuuacuucuaaagaaguuagcuugaacugag

SEQ ID NO: 249452 - RNA, 32 nt, Homo Sapiens
uggucaaacuuguuuucuuuuuauaacucaug

SEQ ID NO: 249453 - RNA, 31 nt, Homo Sapiens
gcucaagggaucugccugccucggccuccca

SEQ ID NO: 249454 - RNA, 32 nt, Homo Sapiens
ccuacgccacuggaaacacacccaccgcaacc

SEQ ID NO: 249455 - RNA, 32 nt, Homo Sapiens
ugguguccacaagcuuccagguugggguugga

SEQ ID NO: 249456 - RNA, 32 nt, Homo Sapiens
ccuaucugguaguuggagaccugagcuguagg

SEQ ID NO: 249457 - RNA, 32 nt, Homo Sapiens
aacagacgagacugagguuaaacaucagaaaa

SEQ ID NO: 249458 - RNA, 32 nt, Homo Sapiens
uagggacauuuugacaccccccuucccaaaug

SEQ ID NO: 249459 - RNA, 32 nt, Homo Sapiens
cagccacgacccgccugguuaggcugcacgcg

SEQ ID NO: 249460 - RNA, 32 nt, Homo Sapiens
uaauguuuggagacauaaugaaagcgauuaac

SEQ ID NO: 249461 - RNA, 32 nt, Homo Sapiens
cagcugagaaaggaagcagauaauaagggccu

SEQ ID NO: 249462 - RNA, 32 nt, Homo Sapiens
uaauuuauaauuuugaucgaguuucuuaaaag

SEQ ID NO: 249463 - RNA, 32 nt, Homo Sapiens
cacgcguccgcggacgcgugggcgcgcgggag

SEQ ID NO: 249464 - RNA, 32 nt, Homo Sapiens
gaaggucaauaaauuauuagagauuuucucuu

SEQ ID NO: 249465 - RNA, 32 nt, Homo Sapiens
ucccaaauaaagucaagaguaaaauucagaua

SEQ ID NO: 249466 - RNA, 32 nt, Homo Sapiens
cuucggagggaaauuguaaauccuguguuuca

SEQ ID NO: 249467 - RNA, 32 nt, Homo Sapiens
agcaagugagacuuucuguuucccauuguaag

SEQ ID NO: 249468 - RNA, 32 nt, Homo Sapiens
gauaacucagaaucuugauaaacacuuaauau

SEQ ID NO: 249469 - RNA, 32 nt, Homo Sapiens
gggccagccacggggacucagcccuuguuucu

SEQ ID NO: 249470 - RNA, 32 nt, Homo Sapiens
ucguaaacccguccggggccggccaauuugca

SEQ ID NO: 249471 - RNA, 32 nt, Homo Sapiens
caagguuaacuggcaaugagggccgugggucu

SEQ ID NO: 249472 - RNA, 32 nt, Homo Sapiens
uucugcuucuguucuguucuugcaauaacaau

SEQ ID NO: 249473 - RNA, 32 nt, Homo Sapiens
ggggugauugaaauguuuuguauuuugaucug

SEQ ID NO: 249474 - RNA, 32 nt, Homo Sapiens
agucaacauuguuaugcugaaugugcucucaa

SEQ ID NO: 249475 - RNA, 32 nt, Homo Sapiens
ucagaaaagaucgggcccagcacaggcagcgu

SEQ ID NO: 249476 - RNA, 32 nt, Homo Sapiens
uguccugugcuuuguggacgcugcugugugcu

SEQ ID NO: 249477 - RNA, 32 nt, Homo Sapiens
ggcgagggcacgcccgcgucagucgccuccgg

SEQ ID NO: 249478 - RNA, 32 nt, Homo Sapiens
gacuaaaauaaaaugcuaaaucuuaaaagaaa

SEQ ID NO: 249479 - RNA, 31 nt, Homo Sapiens
uguuuuuauuugacuggacacuugaagcuug

SEQ ID NO: 249480 - RNA, 32 nt, Homo Sapiens
ccagcuucucuucucaucaaggaggcagagac

SEQ ID NO: 249481 - RNA, 32 nt, Homo Sapiens
auaguuuucaccucugagaauuacaaugugag

SEQ ID NO: 249482 - RNA, 32 nt, Homo Sapiens
cacugccuccucccaugcacgugguagagagu

SEQ ID NO: 249483 - RNA, 32 nt, Homo Sapiens
ggacagaaauuugagggaggggaacaaagaau

SEQ ID NO: 249484 - RNA, 32 nt, Homo Sapiens
auuugaaauggcaaacaacuccuuaaguuuuu

SEQ ID NO: 249485 - RNA, 32 nt, Homo Sapiens
acuguauuacaauuaguauucuaaaggcagaa

SEQ ID NO: 249486 - RNA, 32 nt, Homo Sapiens
gggagaaggaaggggaggacagacguucacac

SEQ ID NO: 249487 - RNA, 32 nt, Homo Sapiens
uuuagcuuauuguaguauacuuccaccagaca

SEQ ID NO: 249488 - RNA, 32 nt, Homo Sapiens
ugggugggcagcucucugggccuucagaaccu

SEQ ID NO: 249489 - RNA, 32 nt, Homo Sapiens
agagagggauauacaaggucacauuucagaca

SEQ ID NO: 249490 - RNA, 32 nt, Homo Sapiens
caggcgauccacccccaccucggcuucccaaa

SEQ ID NO: 249491 - RNA, 32 nt, Homo Sapiens
gccgcccgugccaucuggcccgggggugacuu

SEQ ID NO: 249492 - RNA, 32 nt, Homo Sapiens
ucgucgggcuccuccugugacagucgcagugc

SEQ ID NO: 249493 - RNA, 32 nt, Homo Sapiens
ucauggugugguaauauaugcauauagaagcu

SEQ ID NO: 249494 - RNA, 28 nt, Homo Sapiens
guaccuuugucuaaucaacguuuccacu

SEQ ID NO: 249495 - RNA, 32 nt, Homo Sapiens
guaucaauugcuuuaaaacuguuguaaguaca

SEQ ID NO: 249496 - RNA, 32 nt, Homo Sapiens
gucgagcugugcucgggugcugccagcugcuc

SEQ ID NO: 249497 - RNA, 32 nt, Homo Sapiens
aaaugcauauccugagccaucggugaaacuaa

SEQ ID NO: 249498 - RNA, 32 nt, Homo Sapiens
acugaagaucuagcaauggccuuaauuagcaa

SEQ ID NO: 249499 - RNA, 32 nt, Homo Sapiens
ugucaucuuuggcuucgcucaccacccgggcu

SEQ ID NO: 249500 - RNA, 30 nt, Homo Sapiens
agucgggccguucuguuccaagagauaacc

SEQ ID NO: 249501 - RNA, 32 nt, Homo Sapiens
guugcugugaagguauuuuguagaugugauca

SEQ ID NO: 249502 - RNA, 32 nt, Homo Sapiens
cgggagccaauaaaguuggugaaaaucaaaaa

SEQ ID NO: 249503 - RNA, 32 nt, Homo Sapiens
ccuuagucaauaccaguauuuuuccagugaga

SEQ ID NO: 249504 - RNA, 32 nt, Homo Sapiens
uuagcagaacagauaucucugcucauucucuu

SEQ ID NO: 249505 - RNA, 32 nt, Homo Sapiens
ccaggaccucugaggugcaucuauguccugca

SEQ ID NO: 249506 - RNA, 32 nt, Homo Sapiens
uaauguuaaaaauuauuccuuauucaauguau

SEQ ID NO: 249507 - RNA, 32 nt, Homo Sapiens
gucggcggggacgggcuuggcgcggaccgcac

SEQ ID NO: 249508 - RNA, 30 nt, Homo Sapiens
ccagcauggcugccacugcugcugugaguc

SEQ ID NO: 249509 - RNA, 32 nt, Homo Sapiens
uuugucaauuaagaauaauuuaaaaagaagca

SEQ ID NO: 249510 - RNA, 32 nt, Homo Sapiens
uguuauccaacuguauauuguuuacuuuauug

SEQ ID NO: 249511 - RNA, 28 nt, Homo Sapiens
gagauggaucgguaccugcugcugguga

SEQ ID NO: 249512 - RNA, 32 nt, Homo Sapiens
ccauggaggucuggacuaccccugccccaccg

SEQ ID NO: 249513 - RNA, 31 nt, Homo Sapiens
aaagggcaagagguccucugaaccuauccac

SEQ ID NO: 249514 - RNA, 31 nt, Homo Sapiens
agccccgcaaggucccaggggucuuggcugu

SEQ ID NO: 249515 - RNA, 32 nt, Homo Sapiens
uuuuuuguacagcauucaugugugauauuuuc

SEQ ID NO: 249516 - RNA, 32 nt, Homo Sapiens
gaagacgcugauuagagagaaaacagagggug

SEQ ID NO: 249517 - RNA, 32 nt, Homo Sapiens
gggugguggcacccggcucacccugagagcag

SEQ ID NO: 249518 - RNA, 29 nt, Homo Sapiens
ucaucugugacuuaaucuguuguaguggu

SEQ ID NO: 249519 - RNA, 32 nt, Homo Sapiens
agagcagcaccuacccccuccuccuuuccaca

SEQ ID NO: 249520 - RNA, 32 nt, Homo Sapiens
agaagucagcccacacaagacaucagagaaca

SEQ ID NO: 249521 - RNA, 30 nt, Homo Sapiens
uuuccugucugugccgcauucuccauggcc

SEQ ID NO: 249522 - RNA, 32 nt, Homo Sapiens
uucauuaaaaacaucgugaaugaaauuaaaag

SEQ ID NO: 249523 - RNA, 32 nt, Homo Sapiens
caacaaaaacaucucuuaaaaaugcugggaug

SEQ ID NO: 249524 - RNA, 32 nt, Homo Sapiens
gaagggaaugaugcugaguuuuagacaucuac

SEQ ID NO: 249525 - RNA, 32 nt, Homo Sapiens
gaugaggcuggcuggcggggcgggcagcaugg

SEQ ID NO: 249526 - RNA, 32 nt, Homo Sapiens
ccgcuuugcccccaaacagugcacuugccggc

SEQ ID NO: 249527 - RNA, 32 nt, Homo Sapiens
augagcuggugggggcuguagggguaaccagg

SEQ ID NO: 249528 - RNA, 32 nt, Homo Sapiens
gcaguggcgagggcucugggaggugugccgag

SEQ ID NO: 249529 - RNA, 32 nt, Homo Sapiens
gacagcgcgccagcugaagcgggcgcacggcu

SEQ ID NO: 249530 - RNA, 32 nt, Homo Sapiens
ugggauguggagguugcagugagccaagauug

SEQ ID NO: 249531 - RNA, 32 nt, Homo Sapiens
auuaagaaaaucuauuuuguaacuuucucuau

SEQ ID NO: 249532 - RNA, 32 nt, Homo Sapiens
cccuucaccccggccugugacacacacagccc

SEQ ID NO: 249533 - RNA, 32 nt, Homo Sapiens
cagaagccccucccuucaaggaucucaccuuc

SEQ ID NO: 249534 - RNA, 32 nt, Homo Sapiens
ggaagguccccggcccccacagcccucugggg

SEQ ID NO: 249535 - RNA, 32 nt, Homo Sapiens
caaauguguuuaaaaaccaucuacacauuuau

SEQ ID NO: 249536 - RNA, 32 nt, Homo Sapiens
cucuucaucauauauauaguuaugcauacaua

SEQ ID NO: 249537 - RNA, 32 nt, Homo Sapiens
cagccucugaucccuuggccaagcaggaggga

SEQ ID NO: 249538 - RNA, 32 nt, Homo Sapiens
aaacaaauguuuuuauuaaauguuucauugac

SEQ ID NO: 249539 - RNA, 32 nt, Homo Sapiens
uaaagaacaccauaaacuuaggcagagguccc

SEQ ID NO: 249540 - RNA, 32 nt, Homo Sapiens
acuugcagaaaaggagcgcaaggcagaggcuc

SEQ ID NO: 249541 - RNA, 32 nt, Homo Sapiens
cgugccccggaggcaggcgccagcggggcgac

SEQ ID NO: 249542 - RNA, 32 nt, Homo Sapiens
agccucccuccccacacccgccccugugcucu

SEQ ID NO: 249543 - RNA, 32 nt, Homo Sapiens
uugacacuauauauuucuuaauaaaauaauuc

SEQ ID NO: 249544 - RNA, 32 nt, Homo Sapiens
aauuuuuauuuuuuauuuuuccguucuagugg

SEQ ID NO: 249545 - RNA, 32 nt, Homo Sapiens
caugcuccauucucacuguacuugguauugua

SEQ ID NO: 249546 - RNA, 32 nt, Homo Sapiens
acgaggucacacggcccggggcugcuugucug

SEQ ID NO: 249547 - RNA, 32 nt, Homo Sapiens
gcugcggcgggugugggagguggcgacggccg

SEQ ID NO: 249548 - RNA, 32 nt, Homo Sapiens
gugcugggauuauaggcaugcgccaccaugcc

SEQ ID NO: 249549 - RNA, 32 nt, Homo Sapiens
uucaaauggggauggugaucccugcccuuucu

SEQ ID NO: 249550 - RNA, 32 nt, Homo Sapiens
cccacccacaugcccugggcaggugacccaag

SEQ ID NO: 249551 - RNA, 32 nt, Homo Sapiens
cgcgugcccgccccuucuccccggccgcaccc

SEQ ID NO: 249552 - RNA, 32 nt, Homo Sapiens
gaagcaaaauuaacagacucaucagauucuga

SEQ ID NO: 249553 - RNA, 32 nt, Homo Sapiens
cggcuggcgagcgcgcgccuggcgauuagaac

SEQ ID NO: 249554 - RNA, 32 nt, Homo Sapiens
auuaggccuggccaccucugugcuucuuguga

SEQ ID NO: 249555 - RNA, 32 nt, Homo Sapiens
aggccggacagaggggcuguuaggacagcaaa

SEQ ID NO: 249556 - RNA, 32 nt, Homo Sapiens
augucagugacauuucauaguuucaaaagucc

SEQ ID NO: 249557 - RNA, 32 nt, Homo Sapiens
agacaaaugcaaaccaaagcaacuuaguaaaa

SEQ ID NO: 249558 - RNA, 27 nt, Homo Sapiens
aaagugcuaaucuucagccucaaaguc

SEQ ID NO: 249559 - RNA, 32 nt, Homo Sapiens
cagagccgugccacgcucuccgcggaguuggu

SEQ ID NO: 249560 - RNA, 32 nt, Homo Sapiens
uaaaguuuauuuuaagcacuaucguaccaaau

SEQ ID NO: 249561 - RNA, 32 nt, Homo Sapiens
ucugccuggcuugccugcuucugcccuuucca

SEQ ID NO: 249562 - RNA, 32 nt, Homo Sapiens
uccccaggaaaaguguccccccugagcuccua

SEQ ID NO: 249563 - RNA, 32 nt, Homo Sapiens
uccccucgucucaggccauuggaccaccccug

SEQ ID NO: 249564 - RNA, 32 nt, Homo Sapiens
uaagcuguguguguccucuguauuauuguuau

SEQ ID NO: 249565 - RNA, 32 nt, Homo Sapiens
ugcugucccgcacucccccagccagcugauga

SEQ ID NO: 249566 - RNA, 32 nt, Homo Sapiens
cuacuccguaucucugagagccaggcgugaac

SEQ ID NO: 249567 - RNA, 32 nt, Homo Sapiens
uguaagaccugccuuucaccuucugccaugac

SEQ ID NO: 249568 - RNA, 32 nt, Homo Sapiens
gacuccgucucccagaaaucaacguggaccag

SEQ ID NO: 249569 - RNA, 32 nt, Homo Sapiens
guggaggcuucccucacuuccacagcaucauu

SEQ ID NO: 249570 - RNA, 32 nt, Homo Sapiens
gcaagcucauagcacauguuuuacaaagaaac

SEQ ID NO: 249571 - RNA, 32 nt, Homo Sapiens
ucuaaaugacuucugaccuggaccuuuacuga

SEQ ID NO: 249572 - RNA, 32 nt, Homo Sapiens
cugcugcgggcucugccuuggugucaugccug

SEQ ID NO: 249573 - RNA, 32 nt, Homo Sapiens
uccuggauucaagugaucccccugccucagcc

SEQ ID NO: 249574 - RNA, 32 nt, Homo Sapiens
uaagcuauuuucaaaacaggacuuggucaggg

SEQ ID NO: 249575 - RNA, 31 nt, Homo Sapiens
ucucauggcaaccccgcaggaaaccaucaag

SEQ ID NO: 249576 - RNA, 32 nt, Homo Sapiens
aauuaucuauagaguaaguaugcuaaucuuga

SEQ ID NO: 249577 - RNA, 32 nt, Homo Sapiens
ucgcguccuccuccccaccuucucucccgaag

SEQ ID NO: 249578 - RNA, 32 nt, Homo Sapiens
cauuuaauugguuuuuauuucuuuugauuuuc

SEQ ID NO: 249579 - RNA, 32 nt, Homo Sapiens
uggaaaaauaaaccagugaacaauauuuuucu

SEQ ID NO: 249580 - RNA, 32 nt, Homo Sapiens
ccagaggggccaggcgggaggugguggcggag

SEQ ID NO: 249581 - RNA, 32 nt, Homo Sapiens
gugcgcugcaggcuggagcugcggcuccgagg

SEQ ID NO: 249582 - RNA, 32 nt, Homo Sapiens
aagugacauuuuaaauugauauuuuaaacucu

SEQ ID NO: 249583 - RNA, 32 nt, Homo Sapiens
ggggacuggagggcagggguccuucugcccug

SEQ ID NO: 249584 - RNA, 32 nt, Homo Sapiens
ucccuggagcuuggucucgggaugccaacuug

SEQ ID NO: 249585 - RNA, 32 nt, Homo Sapiens
auugaggaggugugcaguucgcugcucccugc

SEQ ID NO: 249586 - RNA, 32 nt, Homo Sapiens
ggggccuccggccugcacgaggagggcagagu

SEQ ID NO: 249587 - RNA, 32 nt, Homo Sapiens
agcguggggcgggcaggcagggguuagugaaa

SEQ ID NO: 249588 - RNA, 32 nt, Homo Sapiens
gguggacaugccagagagaaaagcaguagagg

SEQ ID NO: 249589 - RNA, 32 nt, Homo Sapiens
gggccucuuccacugugaucuccuccagggcu

SEQ ID NO: 249590 - RNA, 32 nt, Homo Sapiens
agugggcuugacugggcagagccgagccggcu

SEQ ID NO: 249591 - RNA, 32 nt, Homo Sapiens
gugacauuugcccuagccuaagaguagcaggu

SEQ ID NO: 249592 - RNA, 32 nt, Homo Sapiens
gcccucaaauagaauauuauuccuccuccucu

SEQ ID NO: 249593 - RNA, 32 nt, Homo Sapiens
cggggcaaccgcggcgccuccuccgugucggc

SEQ ID NO: 249594 - RNA, 32 nt, Homo Sapiens
gagugacccgauuuuccaggugcgucagucac

SEQ ID NO: 249595 - RNA, 32 nt, Homo Sapiens
agaguccauuuuccuuccuggggccauugggg

SEQ ID NO: 249596 - RNA, 32 nt, Homo Sapiens
uccuaggcuggacagcaaugggcugcaauuag

SEQ ID NO: 249597 - RNA, 32 nt, Homo Sapiens
uugugaagauuaaauaaauacauguaaagcau

SEQ ID NO: 249598 - RNA, 32 nt, Homo Sapiens
uucguuuucaagguucugacaaacaccuggca

SEQ ID NO: 249599 - RNA, 32 nt, Homo Sapiens
ucuuugggacucggcaggagcguguuaacucu

SEQ ID NO: 249600 - RNA, 32 nt, Homo Sapiens
aaagccccacccaggcccccaucugggaugau

SEQ ID NO: 249601 - RNA, 32 nt, Homo Sapiens
uucaguauaugauggguauuuacauuugaaca

SEQ ID NO: 249602 - RNA, 30 nt, Homo Sapiens
cccucuucauggaugggggaacucagaucc

SEQ ID NO: 249603 - RNA, 32 nt, Homo Sapiens
ucccucccuggcccucaggcccuccuuccagg

SEQ ID NO: 249604 - RNA, 32 nt, Homo Sapiens
cuacgccuucuggguucacgugauucucuugc

SEQ ID NO: 249605 - RNA, 32 nt, Homo Sapiens
aagccauacaaauuauuucagucuuccauuag

SEQ ID NO: 249606 - RNA, 32 nt, Homo Sapiens
cgggacuuaauuaaauacaacuuuuuccuuuc

SEQ ID NO: 249607 - RNA, 32 nt, Homo Sapiens
agauguggcaggagaaagaaagaaaacgggcc

SEQ ID NO: 249608 - RNA, 32 nt, Homo Sapiens
cugauucacaugcacuggaguuaauuagucuu

SEQ ID NO: 249609 - RNA, 32 nt, Homo Sapiens
aguccauguuggccacuaacugcuacauaauu

SEQ ID NO: 249610 - RNA, 27 nt, Homo Sapiens
uuuuuuguccucagccccagcagccgc

SEQ ID NO: 249611 - RNA, 32 nt, Homo Sapiens
gaugcacauggacacaccccaaacacgcacag

SEQ ID NO: 249612 - RNA, 32 nt, Homo Sapiens
gggggcgguucccccaugcuguucuagugaua

SEQ ID NO: 249613 - RNA, 32 nt, Homo Sapiens
ccauuuaguauaacuguauauuuuaaauuaua

SEQ ID NO: 249614 - RNA, 32 nt, Homo Sapiens
ucccauuuucuccucaguucacuccaaccagg

SEQ ID NO: 249615 - RNA, 32 nt, Homo Sapiens
aacugcgaggaggagcuuuacgacuucucggu

SEQ ID NO: 249616 - RNA, 32 nt, Homo Sapiens
cacaguuuggaaagauucucugcuuucccaga

SEQ ID NO: 249617 - RNA, 32 nt, Homo Sapiens
cuauuucuguagauguaaauauuguuaacaua

SEQ ID NO: 249618 - RNA, 32 nt, Homo Sapiens
agccuccaguaauucagaacaugacuguauuu

SEQ ID NO: 249619 - RNA, 32 nt, Homo Sapiens
cgggggcugugacugugcucucaaccaccugc

SEQ ID NO: 249620 - RNA, 32 nt, Homo Sapiens
agcaaagcagugcaacucucuuuggaugcucg

SEQ ID NO: 249621 - RNA, 32 nt, Homo Sapiens
gccggcccgcggcgaggacgaccugcccgucu

SEQ ID NO: 249622 - RNA, 32 nt, Homo Sapiens
ggaauggagacagcggcagaaaacacugcaga

SEQ ID NO: 249623 - RNA, 32 nt, Homo Sapiens
aagccgcuccucccgcgcccccgcccccagcc

SEQ ID NO: 249624 - RNA, 32 nt, Homo Sapiens
cccuuccgucuucucccucauccuuuccaaac

SEQ ID NO: 249625 - RNA, 32 nt, Homo Sapiens
ugggggccuggccacuuccuugcuucucaagc

SEQ ID NO: 249626 - RNA, 32 nt, Homo Sapiens
cagacagaaaucagaugcuuccauguauucag

SEQ ID NO: 249627 - RNA, 32 nt, Homo Sapiens
cucccucugcugucaccuugcucagccauccc

SEQ ID NO: 249628 - RNA, 32 nt, Homo Sapiens
uuauucugaaauuuuuucaggcauuucauaga

SEQ ID NO: 249629 - RNA, 32 nt, Homo Sapiens
ggacgagugucuuuaaggaguaguccugaaag

SEQ ID NO: 249630 - RNA, 32 nt, Homo Sapiens
aucagaaggaaauuauuuagguuguaaugcac

SEQ ID NO: 249631 - RNA, 32 nt, Homo Sapiens
gcagacggacugacggacgggcccgugcuucu

SEQ ID NO: 249632 - RNA, 32 nt, Homo Sapiens
aggcuaaauucauaugaaaauaaaauugaaaa

SEQ ID NO: 249633 - RNA, 32 nt, Homo Sapiens
cuuagccauuagagagagguccugcuaaagau

SEQ ID NO: 249634 - RNA, 32 nt, Homo Sapiens
aaugacucuuggagucaagagaucuggaaauc

SEQ ID NO: 249635 - RNA, 32 nt, Homo Sapiens
cuguggugguuugucgcuaaggaggcaacagu

SEQ ID NO: 249636 - RNA, 32 nt, Homo Sapiens
agaguggugccuuacucuguuuuuucugauau

SEQ ID NO: 249637 - RNA, 32 nt, Homo Sapiens
ugauccaaaaauaagugauaaugaaaaccacu

SEQ ID NO: 249638 - RNA, 32 nt, Homo Sapiens
ugaauguguaucuauuugagucuggaaauaac

SEQ ID NO: 249639 - RNA, 32 nt, Homo Sapiens
aggauucuauagacugauaggcccuauccaca

SEQ ID NO: 249640 - RNA, 32 nt, Homo Sapiens
uguucugugacuucauugaaaaucuuuacaau

SEQ ID NO: 249641 - RNA, 32 nt, Homo Sapiens
gaguuucgcucuugucccccaggcuggagugg

SEQ ID NO: 249642 - RNA, 32 nt, Homo Sapiens
cggccgccggagcagcucccgcggcggagcag

SEQ ID NO: 249643 - RNA, 32 nt, Homo Sapiens
aacugacguagacucaaaaaccccaagcaauu

SEQ ID NO: 249644 - RNA, 32 nt, Homo Sapiens
cuuuuuaaaauaaguaaccacaauuaaguugu

SEQ ID NO: 249645 - RNA, 32 nt, Homo Sapiens
guuuaucuguaacuguuauccaaacaaauuaa

SEQ ID NO: 249646 - RNA, 32 nt, Homo Sapiens
aucuccagucuccucccgggggcccccagccc

SEQ ID NO: 249647 - RNA, 32 nt, Homo Sapiens
caguuuugauuucaucucccaaggucuucuuu

SEQ ID NO: 249648 - RNA, 32 nt, Homo Sapiens
ugacaaugaugaugauaaugaugaugacgacg

SEQ ID NO: 249649 - RNA, 32 nt, Homo Sapiens
cuccugacagcagugagaagaucugcaccguc

SEQ ID NO: 249650 - RNA, 32 nt, Homo Sapiens
uuuuugauucuuagcugcuaccagcuaguucu

SEQ ID NO: 249651 - RNA, 32 nt, Homo Sapiens
gguaggagggucagagagaucugaagaugcug

SEQ ID NO: 249652 - RNA, 32 nt, Homo Sapiens
caaacaaauggaagagaagagaaaggacaugg

SEQ ID NO: 249653 - RNA, 32 nt, Homo Sapiens
uggauauaauauuucuuaaaacaaaaguaagg

SEQ ID NO: 249654 - RNA, 32 nt, Homo Sapiens
ugccgcugcacuccagccuggcgacaaagcac

SEQ ID NO: 249655 - RNA, 32 nt, Homo Sapiens
gggagucucacggggccccaggcuuauucaga

SEQ ID NO: 249656 - RNA, 32 nt, Homo Sapiens
cgcgcacacacaaacacacacacacacagagg

SEQ ID NO: 249657 - RNA, 32 nt, Homo Sapiens
guuggaugagcaaaccacuuuggaucaguuca

SEQ ID NO: 249658 - RNA, 32 nt, Homo Sapiens
uggcuuacaccuguagucccaggcacuuuggg

SEQ ID NO: 249659 - RNA, 32 nt, Homo Sapiens
caugacaacuuccaaagccuuccaaacccaaa

SEQ ID NO: 249660 - RNA, 30 nt, Homo Sapiens
cagggucuggaaaugggggcugcaggcuug

SEQ ID NO: 249661 - RNA, 32 nt, Homo Sapiens
ggacugugugccccugguggagguggacgaca

SEQ ID NO: 249662 - RNA, 32 nt, Homo Sapiens
aguaauggaaaacgguuauccaccaaaaguga

SEQ ID NO: 249663 - RNA, 32 nt, Homo Sapiens
uaauauccagcaucuguaaggaauuuaaacaa

SEQ ID NO: 249664 - RNA, 32 nt, Homo Sapiens
aauuuauuuugcuaccucuuugaaaaccugca

SEQ ID NO: 249665 - RNA, 32 nt, Homo Sapiens
gcgcggagcugcugggcgccgcuugggcucgc

SEQ ID NO: 249666 - RNA, 32 nt, Homo Sapiens
cuguggacuccaugccuccaauaaaagguagu

SEQ ID NO: 249667 - RNA, 32 nt, Homo Sapiens
uuaacuuuuuucugugcagauaauguugaaag

SEQ ID NO: 249668 - RNA, 32 nt, Homo Sapiens
aaaacuagaaucucuauagacagcaucaaugc

SEQ ID NO: 249669 - RNA, 29 nt, Homo Sapiens
ggauuucuagugaugguuauggaaagggu

SEQ ID NO: 249670 - RNA, 32 nt, Homo Sapiens
cugugugguggggggcccaggaugcugccagg

SEQ ID NO: 249671 - RNA, 32 nt, Homo Sapiens
ugggugguuaacugacuauuaaguguaaccua

SEQ ID NO: 249672 - RNA, 32 nt, Homo Sapiens
ugguacccccaucacccagggcguggagauga

SEQ ID NO: 249673 - RNA, 32 nt, Homo Sapiens
gccaggccccgugcugggucccagggaugcag

SEQ ID NO: 249674 - RNA, 32 nt, Homo Sapiens
gcccacccguucgccccucccccugccccguu

SEQ ID NO: 249675 - RNA, 32 nt, Homo Sapiens
ggagagcugaacagaugaccccugcccagauc

SEQ ID NO: 249676 - RNA, 32 nt, Homo Sapiens
gcgugcagguagccggccggccgggggucgcg

SEQ ID NO: 249677 - RNA, 32 nt, Homo Sapiens
cgucggcggccgcggccggggacggugugaga

SEQ ID NO: 249678 - RNA, 32 nt, Homo Sapiens
ugucugacugcaagcugacaaugccacucugg

SEQ ID NO: 249679 - RNA, 32 nt, Homo Sapiens
ccugggccucagcaugcugcugcagugauggc

SEQ ID NO: 249680 - RNA, 32 nt, Homo Sapiens
ccgggcgacgucggaggcccugccgggaaccc

SEQ ID NO: 249681 - RNA, 32 nt, Homo Sapiens
aucaagcuuuggcaggggagugaggcagccag

SEQ ID NO: 249682 - RNA, 32 nt, Homo Sapiens
uuuguaaagcaaugucugccuaguuuauuguc

SEQ ID NO: 249683 - RNA, 32 nt, Homo Sapiens
agacuuggggacgacagcccucaucggcgucu

SEQ ID NO: 249684 - RNA, 32 nt, Homo Sapiens
cgagacucagccgugggaaauaugagugagca

SEQ ID NO: 249685 - RNA, 32 nt, Homo Sapiens
cccugucaccucaucaccucauuacuaaagcu

SEQ ID NO: 249686 - RNA, 32 nt, Homo Sapiens
uuccgggagccgcacgguccccucuccuuccc

SEQ ID NO: 249687 - RNA, 32 nt, Homo Sapiens
uuaugauaaaguggaaauacauuacgaugaag

SEQ ID NO: 249688 - RNA, 32 nt, Homo Sapiens
uaaauaacuaaauuuuguuuacaauaugaguu

SEQ ID NO: 249689 - RNA, 32 nt, Homo Sapiens
cagauauauggauaaacuuucuuaacaaaccc

SEQ ID NO: 249690 - RNA, 32 nt, Homo Sapiens
uaaccaaugcccagcacacucgcucugcucca

SEQ ID NO: 249691 - RNA, 32 nt, Homo Sapiens
acgaggucaggaguucgagaccagccugacca

SEQ ID NO: 249692 - RNA, 32 nt, Homo Sapiens
agcaaggcacauauagaagaagaaauuucugg

SEQ ID NO: 249693 - RNA, 31 nt, Homo Sapiens
uaauuuaccauuaucaccugagcuaaaggaa

SEQ ID NO: 249694 - RNA, 32 nt, Homo Sapiens
gaggcuguagaaaggggagaaugucaaggaag

SEQ ID NO: 249695 - RNA, 32 nt, Homo Sapiens
cagguggugcugcuacucgggaggaagcagag

SEQ ID NO: 249696 - RNA, 32 nt, Homo Sapiens
ucccagguccugcagcuugugcucugcccagc

SEQ ID NO: 249697 - RNA, 32 nt, Homo Sapiens
cggcagggacagcugccagaccacgggcaggg

SEQ ID NO: 249698 - RNA, 31 nt, Homo Sapiens
ugugcugguagagauuuuaauccugauuuuu

SEQ ID NO: 249699 - RNA, 32 nt, Homo Sapiens
ugacuuaucgcggcaucgcccagcgguugccg

SEQ ID NO: 249700 - RNA, 32 nt, Homo Sapiens
ucacauucccucugcuggucugugcuggucuc

SEQ ID NO: 249701 - RNA, 32 nt, Homo Sapiens
aaugggaggcugccuuccuucccaaucucccu

SEQ ID NO: 249702 - RNA, 32 nt, Homo Sapiens
cccccucugugccuuuucugcaggugcuaaua

SEQ ID NO: 249703 - RNA, 32 nt, Homo Sapiens
uccuucuuagcuaucauugcuuccuccucccc

SEQ ID NO: 249704 - RNA, 32 nt, Homo Sapiens
ucacaaggucaguaaugcugcaggaaaagcaa

SEQ ID NO: 249705 - RNA, 32 nt, Homo Sapiens
guuguuuuacuuccucacugucagccuaaaua

SEQ ID NO: 249706 - RNA, 32 nt, Homo Sapiens
agggaagguaaagccgugugucuggguggcug

SEQ ID NO: 249707 - RNA, 32 nt, Homo Sapiens
cauugugugucauuucucaucaucaguagucc

SEQ ID NO: 249708 - RNA, 32 nt, Homo Sapiens
ucaguucuguuguuuaugauuccacuuaacaa

SEQ ID NO: 249709 - RNA, 32 nt, Homo Sapiens
aguuucggggguacugggcgggguacucguga

SEQ ID NO: 249710 - RNA, 32 nt, Homo Sapiens
uggcuaauuuuuguauuuuuaguagaggaugg

SEQ ID NO: 249711 - RNA, 32 nt, Homo Sapiens
ucuuuuuaucugcaguugauugaaucuaugga

SEQ ID NO: 249712 - RNA, 32 nt, Homo Sapiens
uaggaugcagcaugccuucaggagacacugcu

SEQ ID NO: 249713 - RNA, 32 nt, Homo Sapiens
gcccgcccuggccccaggagaaugaaccagcc

SEQ ID NO: 249714 - RNA, 32 nt, Homo Sapiens
agaaaucuuuggcugcugcagcuagccgcuuc

SEQ ID NO: 249715 - RNA, 32 nt, Homo Sapiens
gcacaugcuuaaauaucaaagcaguugucauu

SEQ ID NO: 249716 - RNA, 30 nt, Homo Sapiens
cgggggccgccgcagcaccauggcgaccac

SEQ ID NO: 249717 - RNA, 32 nt, Homo Sapiens
gaaguggcaaggcaauggaaauucuaccugca

SEQ ID NO: 249718 - RNA, 32 nt, Homo Sapiens
ugucaaguuuugggggugggcuguggggagau

SEQ ID NO: 249719 - RNA, 32 nt, Homo Sapiens
agagugaucuuucccaagagaaggggaagcac

SEQ ID NO: 249720 - RNA, 32 nt, Homo Sapiens
auaaggcacacuugcuaugugaaacaguaugg

SEQ ID NO: 249721 - RNA, 32 nt, Homo Sapiens
cucauuuucuaaaagcauuauuacauuuuuug

SEQ ID NO: 249722 - RNA, 32 nt, Homo Sapiens
ccuauuauugauguaaaaguuauuuaaauaaa

SEQ ID NO: 249723 - RNA, 32 nt, Homo Sapiens
cuuccauuucuacuguauaaacaaauuagcaa

SEQ ID NO: 249724 - RNA, 32 nt, Homo Sapiens
guuuugacaaaauaaauuuacugaacuugggc

SEQ ID NO: 249725 - RNA, 32 nt, Homo Sapiens
aaaagaacaaaauaaccuaguucucagaaaga

SEQ ID NO: 249726 - RNA, 32 nt, Homo Sapiens
ggcuggcacaggaggaggagcccgggcgggcg

SEQ ID NO: 249727 - RNA, 32 nt, Homo Sapiens
guaagcauuauguuuguuaauacauauuuauu

SEQ ID NO: 249728 - RNA, 32 nt, Homo Sapiens
ucucacagugucucaggccacugcgccaccgc

SEQ ID NO: 249729 - RNA, 32 nt, Homo Sapiens
ugucacuuuuuuucuuuuucuuuuucuuucuu

SEQ ID NO: 249730 - RNA, 32 nt, Homo Sapiens
gguccuggccugugccgccgccgcccccagcg

SEQ ID NO: 249731 - RNA, 32 nt, Homo Sapiens
ucccauccacacucacgcaaaaaccgcgaugc

SEQ ID NO: 249732 - RNA, 32 nt, Homo Sapiens
uuaaacuguauauacuguuuuguagccuacau

SEQ ID NO: 249733 - RNA, 32 nt, Homo Sapiens
acgugccaggacacuuccugugugccugcagu

SEQ ID NO: 249734 - RNA, 32 nt, Homo Sapiens
gcauggaggcucaugccuguaauccuagcagc

SEQ ID NO: 249735 - RNA, 32 nt, Homo Sapiens
uccucgcucgccucgcgccgguaguuuugggc

SEQ ID NO: 249736 - RNA, 32 nt, Homo Sapiens
gaauucaguuuagccucaggaaacucauauug

SEQ ID NO: 249737 - RNA, 32 nt, Homo Sapiens
cacacccauuagcagucacuucucacucucuc

SEQ ID NO: 249738 - RNA, 32 nt, Homo Sapiens
ggauggagggcgccgcgcgcccugcccgcugc

SEQ ID NO: 249739 - RNA, 32 nt, Homo Sapiens
cugcuuggcaggaaagauauuccucuuuaaug

SEQ ID NO: 249740 - RNA, 32 nt, Homo Sapiens
gaaaccucuguuuacuguguggcacccaggca

SEQ ID NO: 249741 - RNA, 32 nt, Homo Sapiens
uagauuugugguguuccuaggccaaacuggau

SEQ ID NO: 249742 - RNA, 32 nt, Homo Sapiens
guuucagauucuuuuuagaaaugucauuauuc

SEQ ID NO: 249743 - RNA, 32 nt, Homo Sapiens
agauacuaaaauucaugacaguuuuuuguuug

SEQ ID NO: 249744 - RNA, 32 nt, Homo Sapiens
ccgggaagggaagucagggucuggggcccaaa

SEQ ID NO: 249745 - RNA, 32 nt, Homo Sapiens
aaccaagcacaccauagccuuaacugaauauu

SEQ ID NO: 249746 - RNA, 32 nt, Homo Sapiens
aggcuuaggggaaagagcuuguccuaucucag

SEQ ID NO: 249747 - RNA, 30 nt, Homo Sapiens
ucgcggcgcgcgccaccggggaaggagcgg

SEQ ID NO: 249748 - RNA, 32 nt, Homo Sapiens
uguccccaguuacucuaaccguuauuucauuu

SEQ ID NO: 249749 - RNA, 32 nt, Homo Sapiens
agcgagagggagaggcgagaguaaggcgccca

SEQ ID NO: 249750 - RNA, 32 nt, Homo Sapiens
aggggcuggggaagaucuguccugcaccaucu

SEQ ID NO: 249751 - RNA, 32 nt, Homo Sapiens
cuccuccacacccgagucccagccccgcgucc

SEQ ID NO: 249752 - RNA, 32 nt, Homo Sapiens
gcugucgcaccucagcggggugcacauguuau

SEQ ID NO: 249753 - RNA, 32 nt, Homo Sapiens
gauucuuuuacuacacuuuuuaugagaacaag

SEQ ID NO: 249754 - RNA, 32 nt, Homo Sapiens
gaagccucauuucuuuucuccauggaaaagga

SEQ ID NO: 249755 - RNA, 32 nt, Homo Sapiens
agccaccagcucuccacguuccccucauagca

SEQ ID NO: 249756 - RNA, 32 nt, Homo Sapiens
cagguuuuaaauaguuuguaaauuuucaguuu

SEQ ID NO: 249757 - RNA, 32 nt, Homo Sapiens
uugaaauucaacaugcuucauauuauaaccaa

SEQ ID NO: 249758 - RNA, 32 nt, Homo Sapiens
cuuuuuaaaaauuuuuaauuuuauuuuaauua

SEQ ID NO: 249759 - RNA, 32 nt, Homo Sapiens
gcucuucccugaagcuuucucagaacauugcu

SEQ ID NO: 249760 - RNA, 32 nt, Homo Sapiens
gggacccaucugcuccuccagccaacuccugu

SEQ ID NO: 249761 - RNA, 32 nt, Homo Sapiens
auuacuucaaccaaaagcaacggggagauguu

SEQ ID NO: 249762 - RNA, 32 nt, Homo Sapiens
ucacgcgcgggcccgccacggccuucaccgcc

SEQ ID NO: 249763 - RNA, 32 nt, Homo Sapiens
cugcuggcucagugcuggcugaauggggggca

SEQ ID NO: 249764 - RNA, 32 nt, Homo Sapiens
caccuuaaaaauugacacagaguuuacuaaua

SEQ ID NO: 249765 - RNA, 32 nt, Homo Sapiens
cagaaggagacggcgucgacgucugacuggac

SEQ ID NO: 249766 - RNA, 32 nt, Homo Sapiens
cccugucucuuaaaaaacgaugaugaugaaca

SEQ ID NO: 249767 - RNA, 32 nt, Homo Sapiens
ucuaauuuuggccacuuuggcuguuuucuuca

SEQ ID NO: 249768 - RNA, 32 nt, Homo Sapiens
cuuuccauauauugugauacaaacuuuugaau

SEQ ID NO: 249769 - RNA, 32 nt, Homo Sapiens
ggucagggucuucuugcgacccggccccgcuc

SEQ ID NO: 249770 - RNA, 32 nt, Homo Sapiens
ggacacuccagaugugguuggaagcauaagug

SEQ ID NO: 249771 - RNA, 29 nt, Homo Sapiens
gacuuugaggguguauauuuucugugcag

SEQ ID NO: 249772 - RNA, 31 nt, Homo Sapiens
acuuggcuuagaagaaagucaaaacuccuuc

SEQ ID NO: 249773 - RNA, 32 nt, Homo Sapiens
auccuauccaacaaaaucuuauuccuuaguau

SEQ ID NO: 249774 - RNA, 32 nt, Homo Sapiens
uguacuuugugagauccaccccugcccgcaaa

SEQ ID NO: 249775 - RNA, 32 nt, Homo Sapiens
agacgcgccggcguuggccgcugcugcuagca

SEQ ID NO: 249776 - RNA, 32 nt, Homo Sapiens
ucuuaucugaagacuggacuguuguuuuagaa

SEQ ID NO: 249777 - RNA, 32 nt, Homo Sapiens
aucaugaaagaacaauuagaaaaaauccaaau

SEQ ID NO: 249778 - RNA, 32 nt, Homo Sapiens
uuuagggaaaauggagcagagaagagcuguga

SEQ ID NO: 249779 - RNA, 32 nt, Homo Sapiens
ggggggcugcuaaagcgagauguuggguuagg

SEQ ID NO: 249780 - RNA, 32 nt, Homo Sapiens
gagaaggcauuugagaccauugagagagauga

SEQ ID NO: 249781 - RNA, 32 nt, Homo Sapiens
cgcgagauccgccccggccuccccgagagcga

SEQ ID NO: 249782 - RNA, 32 nt, Homo Sapiens
uccaggacgaucccgugcugcaggugcuaaga

SEQ ID NO: 249783 - RNA, 32 nt, Homo Sapiens
ucucagggcucagaugagucuguugcauuuga

SEQ ID NO: 249784 - RNA, 32 nt, Homo Sapiens
aacccccaccccacccaggagcugaggcugau

SEQ ID NO: 249785 - RNA, 32 nt, Homo Sapiens
gccccgggcgcggcgcaggcuccaaagaagaa

SEQ ID NO: 249786 - RNA, 32 nt, Homo Sapiens
caaaugaaaaauuuuguagauaccauaucccc

SEQ ID NO: 249787 - RNA, 32 nt, Homo Sapiens
aauugcauuuaucugaauuaaucuuggaguga

SEQ ID NO: 249788 - RNA, 32 nt, Homo Sapiens
cagcagcggccgcggccgcggugggcacgcac

SEQ ID NO: 249789 - RNA, 32 nt, Homo Sapiens
aguuuuucagccuagcccagacuucuuaucuu

SEQ ID NO: 249790 - RNA, 31 nt, Homo Sapiens
ucagugugggacaucggcagagccuugagaa

SEQ ID NO: 249791 - RNA, 32 nt, Homo Sapiens
augcaagcucaccaagguccccucucaguccc

SEQ ID NO: 249792 - RNA, 32 nt, Homo Sapiens
cucuuuacacugugucucucuggcucucuggc

SEQ ID NO: 249793 - RNA, 32 nt, Homo Sapiens
ccucccuuuuuaaagcacuuucuaaagcccuc

SEQ ID NO: 249794 - RNA, 32 nt, Homo Sapiens
gugaggaggaggaggagccuugguccaugcug

SEQ ID NO: 249795 - RNA, 32 nt, Homo Sapiens
gaacuucaauuucagugacgccaagcuugaug

SEQ ID NO: 249796 - RNA, 32 nt, Homo Sapiens
uuagaccaagacaaacuacacaggguauuaaa

SEQ ID NO: 249797 - RNA, 32 nt, Homo Sapiens
gcugcaaagggaggauuucugcgcggggugug

SEQ ID NO: 249798 - RNA, 32 nt, Homo Sapiens
ccuccgcccccucuccucgcguaguccggccc

SEQ ID NO: 249799 - RNA, 32 nt, Homo Sapiens
aaggaaaguggaaaacugaaccaguuaucuga

SEQ ID NO: 249800 - RNA, 32 nt, Homo Sapiens
aaacuacauuauaaaccuuguugccuucaccc

SEQ ID NO: 249801 - RNA, 32 nt, Homo Sapiens
gcaaguaaacauuccucugcucaccucccaac

SEQ ID NO: 249802 - RNA, 32 nt, Homo Sapiens
gacugcugagggugggccaacagcccagagcu

SEQ ID NO: 249803 - RNA, 32 nt, Homo Sapiens
caggacaagugcaaccgggagcccagcaaggg

SEQ ID NO: 249804 - RNA, 32 nt, Homo Sapiens
aaggccugcugaccgcgccgagcgccgagcug

SEQ ID NO: 249805 - RNA, 32 nt, Homo Sapiens
aagucguuuaauguggugcuaaaaaguaaagg

SEQ ID NO: 249806 - RNA, 32 nt, Homo Sapiens
acuauaucaugaugaauugaaaugaagauaaa

SEQ ID NO: 249807 - RNA, 32 nt, Homo Sapiens
uuuuagaagacuucuguaaauaaggcaagguu

SEQ ID NO: 249808 - RNA, 32 nt, Homo Sapiens
ugauuucuuuugcuuuugucaguaauggaauc

SEQ ID NO: 249809 - RNA, 32 nt, Homo Sapiens
cgcuccaggcgacagcauugcagacgccauua

SEQ ID NO: 249810 - RNA, 32 nt, Homo Sapiens
ucaagaaaauaacaucuguuuuuuguaacguu

SEQ ID NO: 249811 - RNA, 32 nt, Homo Sapiens
ggcucggcguccccgugcaccacggcuggagu

SEQ ID NO: 249812 - RNA, 31 nt, Homo Sapiens
agagauuauuugacuucccaggaauuuucug

SEQ ID NO: 249813 - RNA, 32 nt, Homo Sapiens
uguuccggccgaucccaccucuucucgacccu

SEQ ID NO: 249814 - RNA, 32 nt, Homo Sapiens
cgcuggugaacaggacccgucgccaugggccg

SEQ ID NO: 249815 - RNA, 32 nt, Homo Sapiens
caaggcugcccccuuccucaccuacuucggac

SEQ ID NO: 249816 - RNA, 32 nt, Homo Sapiens
ugagucacugguuuuauaagguuguuuuuacc

SEQ ID NO: 249817 - RNA, 32 nt, Homo Sapiens
auuuuggguuuuucacauuucacgcuaaggag

SEQ ID NO: 249818 - RNA, 32 nt, Homo Sapiens
accuggucccggcagccgggccccagggccgu

SEQ ID NO: 249819 - RNA, 32 nt, Homo Sapiens
caguguuguucccucggccaucgucguggacu

SEQ ID NO: 249820 - RNA, 32 nt, Homo Sapiens
gcuuucuggaggaggaggggacccgcugcgcg

SEQ ID NO: 249821 - RNA, 32 nt, Homo Sapiens
uuuaagcaaaaaaaaaucauuacagaucuaug

SEQ ID NO: 249822 - RNA, 31 nt, Homo Sapiens
aagggcucauagguccaacuaacugaaagcc

SEQ ID NO: 249823 - RNA, 32 nt, Homo Sapiens
acagagaggaggaggagggagaaauggccacc

SEQ ID NO: 249824 - RNA, 32 nt, Homo Sapiens
gcagcuggaaaagggucuugggaaauaugaau

SEQ ID NO: 249825 - RNA, 28 nt, Homo Sapiens
cggauggggcggcuggccuggcagaggg

SEQ ID NO: 249826 - RNA, 32 nt, Homo Sapiens
cuuuugguuuuccuacuuacucuucuucugug

SEQ ID NO: 249827 - RNA, 32 nt, Homo Sapiens
cacaaaaagugccugccugugcucucucccuc

SEQ ID NO: 249828 - RNA, 32 nt, Homo Sapiens
gauccaucuguuuuuguuguuguuguuguuuu

SEQ ID NO: 249829 - RNA, 32 nt, Homo Sapiens
cucuuggcucuuugggucuuucccggguacac

SEQ ID NO: 249830 - RNA, 32 nt, Homo Sapiens
accuacugagggugggccugggaagggaccgc

SEQ ID NO: 249831 - RNA, 32 nt, Homo Sapiens
uggcacguuucaggcaggauuccuccuucauu

SEQ ID NO: 249832 - RNA, 32 nt, Homo Sapiens
auaucucauuuaguuauuuguuuacuguuggc

SEQ ID NO: 249833 - RNA, 32 nt, Homo Sapiens
ucaggagcuauggccggggcggugucucgcac

SEQ ID NO: 249834 - RNA, 32 nt, Homo Sapiens
gccgggugguggcgggagcagcgggagcagcc

SEQ ID NO: 249835 - RNA, 32 nt, Homo Sapiens
ucuccaccucggagccccacgaccucagagcc

SEQ ID NO: 249836 - RNA, 27 nt, Homo Sapiens
cuccccucccucuucagcuucccagac

SEQ ID NO: 249837 - RNA, 32 nt, Homo Sapiens
ugcguagaagucuggaacguuuuuucuuagag

SEQ ID NO: 249838 - RNA, 32 nt, Homo Sapiens
acugcccagcaagccagucuggcacugccagg

SEQ ID NO: 249839 - RNA, 32 nt, Homo Sapiens
gcuugaggacaagggauuuucuuuugaaucag

SEQ ID NO: 249840 - RNA, 32 nt, Homo Sapiens
caauuuagacuuuuuaaaccaagcauugaaua

SEQ ID NO: 249841 - RNA, 32 nt, Homo Sapiens
agccgagauugugccacugcacaccggccugg

SEQ ID NO: 249842 - RNA, 32 nt, Homo Sapiens
gcggugagagcuugcuccugcuccaguugcgg

SEQ ID NO: 249843 - RNA, 32 nt, Homo Sapiens
ugagauauuuuuguuuauagaauugaagguuc

SEQ ID NO: 249844 - RNA, 32 nt, Homo Sapiens
cccaaaggccccaccuguucauucuaccccau

SEQ ID NO: 249845 - RNA, 32 nt, Homo Sapiens
uaacucacaccuguaaaccuaacacuuuggga

SEQ ID NO: 249846 - RNA, 32 nt, Homo Sapiens
caauaugaaaaacaauuagagcaguuaaacaa

SEQ ID NO: 249847 - RNA, 32 nt, Homo Sapiens
ccugcagcugggugcugccagcagcuugcagg

SEQ ID NO: 249848 - RNA, 32 nt, Homo Sapiens
ggaagcuacuaaaagaucuaauuugaaaaacu

SEQ ID NO: 249849 - RNA, 32 nt, Homo Sapiens
ccagcauccugcaacacccacugcuggaaauc

SEQ ID NO: 249850 - RNA, 32 nt, Homo Sapiens
ucauaaauagcacgugugucuucuuugcagug

SEQ ID NO: 249851 - RNA, 32 nt, Homo Sapiens
cuauauagauauguauuuauuauaucauaaac

SEQ ID NO: 249852 - RNA, 32 nt, Homo Sapiens
uccuuccuguucucuggagaucuugcagaaaa

SEQ ID NO: 249853 - RNA, 32 nt, Homo Sapiens
gccuugagucgguuucuguuucucuggaggga

SEQ ID NO: 249854 - RNA, 32 nt, Homo Sapiens
gggaggggccgggcccggggucccaacucgca

SEQ ID NO: 249855 - RNA, 32 nt, Homo Sapiens
uggcugccacuacuccuccgagaauucagacc

SEQ ID NO: 249856 - RNA, 32 nt, Homo Sapiens
ucccccaaugaaauacacaaguaaacauucca

SEQ ID NO: 249857 - RNA, 32 nt, Homo Sapiens
gcgaugaagcaucuuaaaguuugccuaaagca

SEQ ID NO: 249858 - RNA, 32 nt, Homo Sapiens
gaagucugcccccauguuucagucaccucccu

SEQ ID NO: 249859 - RNA, 32 nt, Homo Sapiens
gcagaagcuggguuuauggucccuguccucuu

SEQ ID NO: 249860 - RNA, 32 nt, Homo Sapiens
ugcauccagauaugucuguguuacuauggcuu

SEQ ID NO: 249861 - RNA, 32 nt, Homo Sapiens
aaagagauaucuuggagguaaaacugauaaac

SEQ ID NO: 249862 - RNA, 32 nt, Homo Sapiens
auaauggucuaagccucccaauagggauaaau

SEQ ID NO: 249863 - RNA, 32 nt, Homo Sapiens
gugaagguggguggaguugaccagagaaaggg

SEQ ID NO: 249864 - RNA, 32 nt, Homo Sapiens
uguaucugguccuuccuccccagcuuuugugu

SEQ ID NO: 249865 - RNA, 32 nt, Homo Sapiens
aauuuugaaauuuuggagcauuuuggauuuuc

SEQ ID NO: 249866 - RNA, 31 nt, Homo Sapiens
cgcaugcuccgucgccugcccgcccuggccg

SEQ ID NO: 249867 - RNA, 32 nt, Homo Sapiens
auguacauuuauucauagauagauaaguauca

SEQ ID NO: 249868 - RNA, 32 nt, Homo Sapiens
gacuauguuguaauaucaaacaauacaaggaa

SEQ ID NO: 249869 - RNA, 32 nt, Homo Sapiens
uuuaacuuuuugauuuguauaauagaaaacug

SEQ ID NO: 249870 - RNA, 32 nt, Homo Sapiens
cguggccgcuggcuggcuggacaggcgggugu

SEQ ID NO: 249871 - RNA, 32 nt, Homo Sapiens
ugcacucagaacuucacuguaccugggauuuu

SEQ ID NO: 249872 - RNA, 32 nt, Homo Sapiens
aauacuauaugauguacauuuuucuguuuucc

SEQ ID NO: 249873 - RNA, 32 nt, Homo Sapiens
aguguacaauucaaaaucaugcaauguuucac

SEQ ID NO: 249874 - RNA, 32 nt, Homo Sapiens
ccagugaaaaggaaagcuggacuuaaauaauc

SEQ ID NO: 249875 - RNA, 32 nt, Homo Sapiens
guccugugucugaccugucauuucauagccug

SEQ ID NO: 249876 - RNA, 32 nt, Homo Sapiens
ccuagggaauggggaacccgcucucccagacc

SEQ ID NO: 249877 - RNA, 32 nt, Homo Sapiens
cuaguuuuguugucuuuuuuuuucucagucuu

SEQ ID NO: 249878 - RNA, 32 nt, Homo Sapiens
ggaguacaagauaacacacacacacacacaca

SEQ ID NO: 249879 - RNA, 32 nt, Homo Sapiens
agugagcauccacgucaaugucauucucuucu

SEQ ID NO: 249880 - RNA, 32 nt, Homo Sapiens
ggaggacagcgcgucggcugcgguucucucuc

SEQ ID NO: 249881 - RNA, 32 nt, Homo Sapiens
uaauaauuaaaauaaaguugauauccugucuu

SEQ ID NO: 249882 - RNA, 32 nt, Homo Sapiens
cuccuguguucgcgcccgugccuccucucaca

SEQ ID NO: 249883 - RNA, 32 nt, Homo Sapiens
cacccugcuucuugcccugcuguguguggcug

SEQ ID NO: 249884 - RNA, 32 nt, Homo Sapiens
ugucuccauuuucucacugauggccugagagg

SEQ ID NO: 249885 - RNA, 32 nt, Homo Sapiens
ugcaguagggcuguuuaccauuggaagcaagg

SEQ ID NO: 249886 - RNA, 32 nt, Homo Sapiens
aauuaacuuuuucuuuugauaaguaugauauu

SEQ ID NO: 249887 - RNA, 32 nt, Homo Sapiens
agaggugguggggcuugguuauacugguagag

SEQ ID NO: 249888 - RNA, 32 nt, Homo Sapiens
aaaagaccaaaauaaaccacgugaagauggga

SEQ ID NO: 249889 - RNA, 32 nt, Homo Sapiens
cccacugcacuccagccugggcgacagaacaa

SEQ ID NO: 249890 - RNA, 32 nt, Homo Sapiens
uuccuugcugcuaagucagaucagauuugcua

SEQ ID NO: 249891 - RNA, 32 nt, Homo Sapiens
gucaccccauucaaaucagcugaugccuauga

SEQ ID NO: 249892 - RNA, 32 nt, Homo Sapiens
cacaaccaaagacaacucauggccuccuuugg

SEQ ID NO: 249893 - RNA, 32 nt, Homo Sapiens
acaguguugaaaagacaaaauauuuucuggaa

SEQ ID NO: 249894 - RNA, 31 nt, Homo Sapiens
aauccauguaagaaaaaauaauuguugaaga

SEQ ID NO: 249895 - RNA, 32 nt, Homo Sapiens
uuaagcggccucugggguguuggggaaauacu

SEQ ID NO: 249896 - RNA, 32 nt, Homo Sapiens
uggaaugcagcccagacaccugugcuccuggc

SEQ ID NO: 249897 - RNA, 32 nt, Homo Sapiens
aguuggucucaaacuccugaccucaagugauc

SEQ ID NO: 249898 - RNA, 32 nt, Homo Sapiens
gcggacagacugccauggcugaccaucggcgc

SEQ ID NO: 249899 - RNA, 32 nt, Homo Sapiens
guaauaaaaaauuuaaaaauauugugguauga

SEQ ID NO: 249900 - RNA, 32 nt, Homo Sapiens
ggccggcggcuccuccucccacucugcuccuc

SEQ ID NO: 249901 - RNA, 32 nt, Homo Sapiens
ggcucggcgccucggcgggagccaugaccucg

SEQ ID NO: 249902 - RNA, 32 nt, Homo Sapiens
aagccaacuagaggauguuguauuuugcacau

SEQ ID NO: 249903 - RNA, 32 nt, Homo Sapiens
ucuuugugugacgaugacccaggcuccaacaa

SEQ ID NO: 249904 - RNA, 32 nt, Homo Sapiens
ggcaggucccuccgccacccccggcccgguuc

SEQ ID NO: 249905 - RNA, 32 nt, Homo Sapiens
aucugaaaaauauucuugaacuaucuccaaaa

SEQ ID NO: 249906 - RNA, 32 nt, Homo Sapiens
gccgaagacucgcgggggcgccagggcgggga

SEQ ID NO: 249907 - RNA, 32 nt, Homo Sapiens
gcacuuagaacagugccuggaacauaaaaaca

SEQ ID NO: 249908 - RNA, 32 nt, Homo Sapiens
agaguacgucuucgggucuaccccuaaucaca

SEQ ID NO: 249909 - RNA, 32 nt, Homo Sapiens
cagagggaggccggcugcuuccugcccccacc

SEQ ID NO: 249910 - RNA, 32 nt, Homo Sapiens
uagggaacaaaauaaaauccuuuguuaaaacu

SEQ ID NO: 249911 - RNA, 32 nt, Homo Sapiens
cuauuaacuaaauagaaucuguuuacaaaaau

SEQ ID NO: 249912 - RNA, 32 nt, Homo Sapiens
cuuugaggauucucuucaguacaaguuuucua

SEQ ID NO: 249913 - RNA, 32 nt, Homo Sapiens
aacacuaaaacaauucuuaguaugagacaaaa

SEQ ID NO: 249914 - RNA, 32 nt, Homo Sapiens
aaugccuaagucaggucacauugucuucuucc

SEQ ID NO: 249915 - RNA, 32 nt, Homo Sapiens
caacagaaucccgaugaggacuucagcugagu

SEQ ID NO: 249916 - RNA, 32 nt, Homo Sapiens
ucgggccagccccuccucuccccgccuucugg

SEQ ID NO: 249917 - RNA, 32 nt, Homo Sapiens
gccccuccgcggcucccccuuccacuacccac

SEQ ID NO: 249918 - RNA, 32 nt, Homo Sapiens
cacaggucugucaucccauaggccaccacaca

SEQ ID NO: 249919 - RNA, 32 nt, Homo Sapiens
uuuuuauggugacacaaauguauauuuugcua

SEQ ID NO: 249920 - RNA, 32 nt, Homo Sapiens
cgggaugauaugcuugccauuuucucacugga

SEQ ID NO: 249921 - RNA, 32 nt, Homo Sapiens
uccagccggggggacggcguuccccagucgcc

SEQ ID NO: 249922 - RNA, 32 nt, Homo Sapiens
gcuuccucagaauauuaacgacggucccagca

SEQ ID NO: 249923 - RNA, 32 nt, Homo Sapiens
caccuguccugcagugggccuguguggguuau

SEQ ID NO: 249924 - RNA, 32 nt, Homo Sapiens
caguuccacccagcugcaggugccagcacggc

SEQ ID NO: 249925 - RNA, 32 nt, Homo Sapiens
cucauugcucuuagcaucauuuuuuagagguu

SEQ ID NO: 249926 - RNA, 32 nt, Homo Sapiens
aagugccaacugggaagaagaugagcugagug

SEQ ID NO: 249927 - RNA, 32 nt, Homo Sapiens
cuugcucccagcugugcugucgccccacuacc

SEQ ID NO: 249928 - RNA, 32 nt, Homo Sapiens
cuucgugcuuaaauguuuuuauauuaugaacc

SEQ ID NO: 249929 - RNA, 32 nt, Homo Sapiens
cccucaagguaaacuuauaacuuauaauuuga

SEQ ID NO: 249930 - RNA, 32 nt, Homo Sapiens
uggcaggaucagccuucaguucuggguugauu

SEQ ID NO: 249931 - RNA, 32 nt, Homo Sapiens
gagcccggaaccacucuuugugccgcagcuuc

SEQ ID NO: 249932 - RNA, 32 nt, Homo Sapiens
accuguccagcccugcccuguguugggcaccg

SEQ ID NO: 249933 - RNA, 32 nt, Homo Sapiens
cgugccggaccccucccuuccauccuccucuc

SEQ ID NO: 249934 - RNA, 32 nt, Homo Sapiens
caaaaccacagugagauagcaccucaccccca

SEQ ID NO: 249935 - RNA, 32 nt, Homo Sapiens
caucuuucuuauuauuuuucugcauuugaugu

SEQ ID NO: 249936 - RNA, 32 nt, Homo Sapiens
ggucucaaacuccugaccucagguaaucugcc

SEQ ID NO: 249937 - RNA, 32 nt, Homo Sapiens
ccgcaccaggacugcgccugcuggagccaucc

SEQ ID NO: 249938 - RNA, 30 nt, Homo Sapiens
cugaggaagaagcuugaguucugacucacu

SEQ ID NO: 249939 - RNA, 32 nt, Homo Sapiens
uggucggugguugggugugggcagucaucagu

SEQ ID NO: 249940 - RNA, 32 nt, Homo Sapiens
ucaccaacccucaacgacucagaacacauaau

SEQ ID NO: 249941 - RNA, 32 nt, Homo Sapiens
agagaagcccagacuuccuucccuggagugua

SEQ ID NO: 249942 - RNA, 32 nt, Homo Sapiens
cuccagaaggugccgguacugaagaugcucca

SEQ ID NO: 249943 - RNA, 32 nt, Homo Sapiens
cagcggcggcgaaggcgggcggcggccuacag

SEQ ID NO: 249944 - RNA, 32 nt, Homo Sapiens
caacacucaguccuuccacacuuccaccccca

SEQ ID NO: 249945 - RNA, 29 nt, Homo Sapiens
ccucuuuauaaaugcuucuuguaagcucc

SEQ ID NO: 249946 - RNA, 32 nt, Homo Sapiens
ggcacgaggggaccccggcggcagacgcaggu

SEQ ID NO: 249947 - RNA, 32 nt, Homo Sapiens
aaggcggagagagcucgcgucucgcucggcuu

SEQ ID NO: 249948 - RNA, 32 nt, Homo Sapiens
uucucccugauggucuuuauagcuuugcauua

SEQ ID NO: 249949 - RNA, 32 nt, Homo Sapiens
uuugcuuuuugcuuguguacaaacccagauug

SEQ ID NO: 249950 - RNA, 32 nt, Homo Sapiens
ucuccaguuccacuuggcgcccccucccacaa

SEQ ID NO: 249951 - RNA, 32 nt, Homo Sapiens
uugcagcacuuuguaaaugaugagauugcuuc

SEQ ID NO: 249952 - RNA, 32 nt, Homo Sapiens
acuuaaacuuugcuuuuuguuuuaauuuuaau

SEQ ID NO: 249953 - RNA, 32 nt, Homo Sapiens
acugccuuuggggcuccugggcucauuuggau

SEQ ID NO: 249954 - RNA, 32 nt, Homo Sapiens
ugcggggcagggccuuccugguuuuguacacu

SEQ ID NO: 249955 - RNA, 32 nt, Homo Sapiens
cuccacauccagagcugccucccuuuaaucca

SEQ ID NO: 249956 - RNA, 32 nt, Homo Sapiens
gcguccaagacuggggcccacccuucucacca

SEQ ID NO: 249957 - RNA, 32 nt, Homo Sapiens
cacuuggaaacacaauaauaguauuaacuaac

SEQ ID NO: 249958 - RNA, 32 nt, Homo Sapiens
uaauacuagagcauugguucugacauucauug

SEQ ID NO: 249959 - RNA, 32 nt, Homo Sapiens
aaccuccaaaauuuccuagcugcacaaagaaa

SEQ ID NO: 249960 - RNA, 32 nt, Homo Sapiens
aagcgauuccaagaacgugugauggugugaac

SEQ ID NO: 249961 - RNA, 31 nt, Homo Sapiens
agcgcccuauagcagaaaccauagauaagcg

SEQ ID NO: 249962 - RNA, 32 nt, Homo Sapiens
guaccacaagauaugucauagguaucuuuaaa

SEQ ID NO: 249963 - RNA, 32 nt, Homo Sapiens
gaaacugcaaauaaaauagauacgaugcaauc

SEQ ID NO: 249964 - RNA, 32 nt, Homo Sapiens
uuucugggggucggcucccagaccgagauggc

SEQ ID NO: 249965 - RNA, 32 nt, Homo Sapiens
uccgauuccagaauauguuggaauuucagacu

SEQ ID NO: 249966 - RNA, 32 nt, Homo Sapiens
uuuuacuaaagagaaaaaugugaguggaaaaa

SEQ ID NO: 249967 - RNA, 32 nt, Homo Sapiens
agcacaggaguccccugggcucccucaggcuc

SEQ ID NO: 249968 - RNA, 32 nt, Homo Sapiens
ugcccagcccaggcucugggaauauugagaua

SEQ ID NO: 249969 - RNA, 31 nt, Homo Sapiens
cugugggagccccauggagcggcuacccagg

SEQ ID NO: 249970 - RNA, 31 nt, Homo Sapiens
cauggccuugguaaagguuagcagacuggug

SEQ ID NO: 249971 - RNA, 32 nt, Homo Sapiens
gcuacuuggaaaggaagguuugaaagagugag

SEQ ID NO: 249972 - RNA, 32 nt, Homo Sapiens
gaggcaaaauaccacauggcuucucccgcaua

SEQ ID NO: 249973 - RNA, 32 nt, Homo Sapiens
gaagcuaauccggagaacccaggccagagccu

SEQ ID NO: 249974 - RNA, 32 nt, Homo Sapiens
cuccccagcucugcccucuggguccacaugag

SEQ ID NO: 249975 - RNA, 32 nt, Homo Sapiens
ggauuauauugcuugacuucuaccucagaauc

SEQ ID NO: 249976 - RNA, 32 nt, Homo Sapiens
gaagaaauguuacuuuuuaacuuuauacucag

SEQ ID NO: 249977 - RNA, 32 nt, Homo Sapiens
uauauuuaauugugucauauuaaacuucugau

SEQ ID NO: 249978 - RNA, 32 nt, Homo Sapiens
cucuaccuauuaugaacuacgguguguuaaac

SEQ ID NO: 249979 - RNA, 32 nt, Homo Sapiens
aaacucagacugaaugaauuugaaaggguggg

SEQ ID NO: 249980 - RNA, 32 nt, Homo Sapiens
ugaugcugaccaggaagcacaaggcugagagc

SEQ ID NO: 249981 - RNA, 32 nt, Homo Sapiens
cgcgagggcuccuggggacgaggagugugggg

SEQ ID NO: 249982 - RNA, 32 nt, Homo Sapiens
ugacgcccagcuuggcucccccugcccgagcu

SEQ ID NO: 249983 - RNA, 32 nt, Homo Sapiens
aaagaaaaaacuaagaagaacaaugaaccuuu

SEQ ID NO: 249984 - RNA, 32 nt, Homo Sapiens
gggugcauauguacagaagauuaagacagaga

SEQ ID NO: 249985 - RNA, 32 nt, Homo Sapiens
gauuuagggaaacgguggcagaugagugggag

SEQ ID NO: 249986 - RNA, 32 nt, Homo Sapiens
uauccuggcuaagaacuauuuuucucagguuc

SEQ ID NO: 249987 - RNA, 32 nt, Homo Sapiens
aaacaagaucauaguauuucagucaugguguc

SEQ ID NO: 249988 - RNA, 32 nt, Homo Sapiens
gguggcucaggcuguucuuccuccuccuagaa

SEQ ID NO: 249989 - RNA, 32 nt, Homo Sapiens
acggcagcggcauggcggccggguguaagacg

SEQ ID NO: 249990 - RNA, 32 nt, Homo Sapiens
ccccaacugcugucugcucagguguagcccgc

SEQ ID NO: 249991 - RNA, 32 nt, Homo Sapiens
ccuucuugaaccugguggcccccguuggaacu

SEQ ID NO: 249992 - RNA, 32 nt, Homo Sapiens
ucacuccuuucuggaucucucauuggacucaa

SEQ ID NO: 249993 - RNA, 29 nt, Homo Sapiens
gaacauauauguauguauuaauguauaua

SEQ ID NO: 249994 - RNA, 32 nt, Homo Sapiens
uuucauccacacucaggagcagaggaacucuc

SEQ ID NO: 249995 - RNA, 32 nt, Homo Sapiens
guuucaaauggcacuaucuucuuuucaguacu

SEQ ID NO: 249996 - RNA, 32 nt, Homo Sapiens
ucaauauguauccaugggacuuugaagauccu

SEQ ID NO: 249997 - RNA, 32 nt, Homo Sapiens
gauaacugcauaaguaaugacuuucagugcag

SEQ ID NO: 249998 - RNA, 32 nt, Homo Sapiens
caugcaaaucagaaauuuuaucucuaaguaca

SEQ ID NO: 249999 - RNA, 32 nt, Homo Sapiens
gcugaagaagcaguuucucagacacaacaucu

SEQ ID NO: 250000 - RNA, 32 nt, Homo Sapiens
augaacagacaaguaaaagacaugacagcgau

SEQ ID NO: 250001 - RNA, 32 nt, Homo Sapiens
guggcugcuuaagggagccuauggcuacauug

SEQ ID NO: 250002 - RNA, 32 nt, Homo Sapiens
cauauuaaugaaaagugccauaaacugaaaaa

SEQ ID NO: 250003 - RNA, 31 nt, Homo Sapiens
gugugagugcguaugaaagugugugucugcu

SEQ ID NO: 250004 - RNA, 32 nt, Homo Sapiens
ggaagggcccuguggugccgccgcccuuccuu

SEQ ID NO: 250005 - RNA, 32 nt, Homo Sapiens
caucauuacacagauaugucauuuucauuagu

SEQ ID NO: 250006 - RNA, 32 nt, Homo Sapiens
aaggaacauaucucugaucuggguaauuugua

SEQ ID NO: 250007 - RNA, 32 nt, Homo Sapiens
caaaaucugauaaucaugucuaaccaaguaau

SEQ ID NO: 250008 - RNA, 32 nt, Homo Sapiens
guguugaucaggaggcguccacagcauuguuc

SEQ ID NO: 250009 - RNA, 32 nt, Homo Sapiens
caucuggucggauuuuaacuauucuaauaggu

SEQ ID NO: 250010 - RNA, 32 nt, Homo Sapiens
uuucaggcuuuucucugucuuccaugucuuga

SEQ ID NO: 250011 - RNA, 30 nt, Homo Sapiens
ugaauggcugcuaggaccuuuagugcuccc

SEQ ID NO: 250012 - RNA, 32 nt, Homo Sapiens
ugcuuuguucuuccuucugcaccuccuucuua

SEQ ID NO: 250013 - RNA, 32 nt, Homo Sapiens
uguccacuaagcacugcacaaacaagcaauca

SEQ ID NO: 250014 - RNA, 32 nt, Homo Sapiens
cccuaucaguguucuucaguauguccaauugu

SEQ ID NO: 250015 - RNA, 32 nt, Homo Sapiens
gccuccugggacaggggcccaggccaaggugg

SEQ ID NO: 250016 - RNA, 32 nt, Homo Sapiens
uugcccagcuccggcccacacucuccugcugc

SEQ ID NO: 250017 - RNA, 32 nt, Homo Sapiens
gccgccgcgggccugcugagcuccggagcgcg

SEQ ID NO: 250018 - RNA, 32 nt, Homo Sapiens
aaaauuaugauguaaagugaaauaucaagaac

SEQ ID NO: 250019 - RNA, 32 nt, Homo Sapiens
uggaacauuuagaaacaaaacugacuucaggc

SEQ ID NO: 250020 - RNA, 32 nt, Homo Sapiens
gucuaagacaugaauucucaccacuaaagucc

SEQ ID NO: 250021 - RNA, 32 nt, Homo Sapiens
auugguuuucuuuuuguuuuaagcuaaacauc

SEQ ID NO: 250022 - RNA, 32 nt, Homo Sapiens
gucugaggcacaugggagugggaccagcagaa

SEQ ID NO: 250023 - RNA, 32 nt, Homo Sapiens
aggcaguuacuuaaugugauuuuuaacccuua

SEQ ID NO: 250024 - RNA, 32 nt, Homo Sapiens
guuuuugcuagucccacccccauuuuagccua

SEQ ID NO: 250025 - RNA, 32 nt, Homo Sapiens
gagccagacagaggagauaaacacgcacgcuc

SEQ ID NO: 250026 - RNA, 32 nt, Homo Sapiens
uuuuugaaaaauuuauacuagaaagugguaua

SEQ ID NO: 250027 - RNA, 32 nt, Homo Sapiens
ccuuuauauucagugaugcuuaccuaacugau

SEQ ID NO: 250028 - RNA, 32 nt, Homo Sapiens
cugucaccaaggaaacgcuaccucucuguccc

SEQ ID NO: 250029 - RNA, 29 nt, Homo Sapiens
aaugguuguagggacugaaagcugaguug

SEQ ID NO: 250030 - RNA, 32 nt, Homo Sapiens
cugucuuguuucuucuuuauguuucuuuuacu

SEQ ID NO: 250031 - RNA, 32 nt, Homo Sapiens
caucugcucaggugucccgggcgccuuggcga

SEQ ID NO: 250032 - RNA, 32 nt, Homo Sapiens
gagccccugccagccaccugcaccugcugccc

SEQ ID NO: 250033 - RNA, 32 nt, Homo Sapiens
gacugauaaaaugcucucuucuaugaauugug

SEQ ID NO: 250034 - RNA, 32 nt, Homo Sapiens
auuccgcgggagaggaggagcaggcaacugaa

SEQ ID NO: 250035 - RNA, 32 nt, Homo Sapiens
uugcucggaaguuggucuaaagcagagguugg

SEQ ID NO: 250036 - RNA, 32 nt, Homo Sapiens
uuuuaaaggauagaaauaaacagccauaugaa

SEQ ID NO: 250037 - RNA, 32 nt, Homo Sapiens
gccuuuucuggugggauauuaaggcccuggug

SEQ ID NO: 250038 - RNA, 32 nt, Homo Sapiens
uccgccucccuugcccuucccccgcccccgga

SEQ ID NO: 250039 - RNA, 32 nt, Homo Sapiens
gagaauguaaaauaaaccuggacacaagggcc

SEQ ID NO: 250040 - RNA, 32 nt, Homo Sapiens
guauguauggaauguuaugauaggacacagua

SEQ ID NO: 250041 - RNA, 32 nt, Homo Sapiens
ugacuucagggugaacuugguuuuuggacaag

SEQ ID NO: 250042 - RNA, 32 nt, Homo Sapiens
ugccaagagccccgugcauccaggcggccaag

SEQ ID NO: 250043 - RNA, 32 nt, Homo Sapiens
ucucaugcugaaucacauccauggugagcauu

SEQ ID NO: 250044 - RNA, 29 nt, Homo Sapiens
acaagauucauagacugaaagcuguugac

SEQ ID NO: 250045 - RNA, 32 nt, Homo Sapiens
uuggacaugcuuuugcagacaguccuuaaugc

SEQ ID NO: 250046 - RNA, 32 nt, Homo Sapiens
guacaaaugucugacaaauaagugcucuugug

SEQ ID NO: 250047 - RNA, 32 nt, Homo Sapiens
uggcauguauucuuuucagucuuuuguguuug

SEQ ID NO: 250048 - RNA, 32 nt, Homo Sapiens
agaagaaaggauugauucaagaaagacuauaa

SEQ ID NO: 250049 - RNA, 32 nt, Homo Sapiens
ugccacugucauaaccaauaccaugaaugaau

SEQ ID NO: 250050 - RNA, 32 nt, Homo Sapiens
ugcagugauucuuggauuguuuucucauguau

SEQ ID NO: 250051 - RNA, 32 nt, Homo Sapiens
gcaaccugaaaacaaaucauguuuuugacuua

SEQ ID NO: 250052 - RNA, 32 nt, Homo Sapiens
ggacaaagaacaaaaugaaaaccccccacgau

SEQ ID NO: 250053 - RNA, 32 nt, Homo Sapiens
agauaugacgcccgcugcucuccgcggucccc

SEQ ID NO: 250054 - RNA, 32 nt, Homo Sapiens
ggaaagucaaggaaaccuugcugcuaaguaga

SEQ ID NO: 250055 - RNA, 32 nt, Homo Sapiens
acuacuuccagaagcaguugaauagaaugcuc

SEQ ID NO: 250056 - RNA, 32 nt, Homo Sapiens
uuugugcagguacuuuucugccugcagaaggc

SEQ ID NO: 250057 - RNA, 32 nt, Homo Sapiens
gagcucaggccuucgcagcauucuuggguggg

SEQ ID NO: 250058 - RNA, 32 nt, Homo Sapiens
auaaguuggucuuagguuguauacagguguca

SEQ ID NO: 250059 - RNA, 32 nt, Homo Sapiens
guaggaguuucauuuaaagugaggauaauuuu

SEQ ID NO: 250060 - RNA, 32 nt, Homo Sapiens
uaaccaaaccuggucccacgggccagcucuca

SEQ ID NO: 250061 - RNA, 32 nt, Homo Sapiens
ugcacuaaggucuuauaguccaaacuuucucu

SEQ ID NO: 250062 - RNA, 32 nt, Homo Sapiens
aagggaaccugcuuccucucccuuccaaagac

SEQ ID NO: 250063 - RNA, 32 nt, Homo Sapiens
cuguaggacucacacaugacuccaacgggauu

SEQ ID NO: 250064 - RNA, 32 nt, Homo Sapiens
ccagggaggagcugggcugcugagagccuagu

SEQ ID NO: 250065 - RNA, 32 nt, Homo Sapiens
cuugggagaaaggcccuguuucccuggaacug

SEQ ID NO: 250066 - RNA, 32 nt, Homo Sapiens
uauguauccgcaugugugcaugugaguauguu

SEQ ID NO: 250067 - RNA, 32 nt, Homo Sapiens
uuguaaauuuucucuuuuuucuaaaaauaaau

SEQ ID NO: 250068 - RNA, 32 nt, Homo Sapiens
uaaauggcagagcuaagagucaaauccagguc

SEQ ID NO: 250069 - RNA, 32 nt, Homo Sapiens
auuuaaauauccacagugguagggcacacacu

SEQ ID NO: 250070 - RNA, 32 nt, Homo Sapiens
uaaguuuuucucuuuuucagacaaauuacuga

SEQ ID NO: 250071 - RNA, 32 nt, Homo Sapiens
uauggcuuuuuugcuucagggugucuggaaaa

SEQ ID NO: 250072 - RNA, 32 nt, Homo Sapiens
cuuuuaaaaugaagacauuuggguguuucaug

SEQ ID NO: 250073 - RNA, 32 nt, Homo Sapiens
cuugaguguuuguacucauggucuuguucucg

SEQ ID NO: 250074 - RNA, 32 nt, Homo Sapiens
ucaucaucacugacacguccuuguuaucugga

SEQ ID NO: 250075 - RNA, 32 nt, Homo Sapiens
gggagcaaagggacauaugcgagugacuugag

SEQ ID NO: 250076 - RNA, 32 nt, Homo Sapiens
acacuuugaagcaaauacaauucacagcacag

SEQ ID NO: 250077 - RNA, 32 nt, Homo Sapiens
uucugguuccuuaaguuuuucaaguuauccuu

SEQ ID NO: 250078 - RNA, 32 nt, Homo Sapiens
aagcucccugucacccagccaugguguggucc

SEQ ID NO: 250079 - RNA, 32 nt, Homo Sapiens
aauauugacaauuuucuuucugcacauuuuaa

SEQ ID NO: 250080 - RNA, 30 nt, Homo Sapiens
uguuuuuuugaaaugggggaauuugcuguu

SEQ ID NO: 250081 - RNA, 32 nt, Homo Sapiens
ggggcuggaagaggacugacuccacagaguca

SEQ ID NO: 250082 - RNA, 32 nt, Homo Sapiens
agggguuccuuucaauaagaucccaccagugc

SEQ ID NO: 250083 - RNA, 31 nt, Homo Sapiens
uauggaauggaacaugagguauauaucuuug

SEQ ID NO: 250084 - RNA, 32 nt, Homo Sapiens
guguaagaugcaauuaaaauagauggaagaca

SEQ ID NO: 250085 - RNA, 32 nt, Homo Sapiens
cuggaggagaaggaccugaagugugaugaguu

SEQ ID NO: 250086 - RNA, 32 nt, Homo Sapiens
ugcacagcccacucuaagauccuguccacugc

SEQ ID NO: 250087 - RNA, 32 nt, Homo Sapiens
agauacuaaaacaaacaaaacuuuggaccaaa

SEQ ID NO: 250088 - RNA, 32 nt, Homo Sapiens
accaccggccccaggccccggcaagaucccca

SEQ ID NO: 250089 - RNA, 32 nt, Homo Sapiens
aacgcggugagggggcugucagggcgacuggc

SEQ ID NO: 250090 - RNA, 32 nt, Homo Sapiens
gaaggcaacaacauauagaggguggaagaaua

SEQ ID NO: 250091 - RNA, 32 nt, Homo Sapiens
aucugcagcguccagcugggggaugccugccu

SEQ ID NO: 250092 - RNA, 32 nt, Homo Sapiens
gcucugagacacagcacccagccuucucgcac

SEQ ID NO: 250093 - RNA, 32 nt, Homo Sapiens
gaaugacaguauuggugacuagcuuuuuuguu

SEQ ID NO: 250094 - RNA, 32 nt, Homo Sapiens
gacaauaaugaaauggaguuuauauuuguuau

SEQ ID NO: 250095 - RNA, 32 nt, Homo Sapiens
acaguugauuuaggaagucacacaaugacacu

SEQ ID NO: 250096 - RNA, 32 nt, Homo Sapiens
acggaucaauagacuguacuuauuuuccaaua

SEQ ID NO: 250097 - RNA, 32 nt, Homo Sapiens
acaggcugcaccaugaagccagcccuccugcc

SEQ ID NO: 250098 - RNA, 32 nt, Homo Sapiens
aauguuucuuguauucugaaacuggaaacuga

SEQ ID NO: 250099 - RNA, 32 nt, Homo Sapiens
aauuauggagccagacugagccucgaagguac

SEQ ID NO: 250100 - RNA, 32 nt, Homo Sapiens
aacuuuggaagggcaaacauauuucuuaauga

SEQ ID NO: 250101 - RNA, 32 nt, Homo Sapiens
ccugacuuucccagcccuuugguuugugggua

SEQ ID NO: 250102 - RNA, 32 nt, Homo Sapiens
aacucaaauaaucaccacuucgaccaucucuu

SEQ ID NO: 250103 - RNA, 32 nt, Homo Sapiens
uuauucuggugcccaauugagagaccuugaga

SEQ ID NO: 250104 - RNA, 32 nt, Homo Sapiens
gaccccuaaaagggagcagcucugccagguca

SEQ ID NO: 250105 - RNA, 32 nt, Homo Sapiens
gccauggagagcccagagggcacagguggcug

SEQ ID NO: 250106 - RNA, 32 nt, Homo Sapiens
auggacauuucugagccaguuccauguuaccg

SEQ ID NO: 250107 - RNA, 32 nt, Homo Sapiens
uuugagaacuguucuuuuuuuuucuugugugu

SEQ ID NO: 250108 - RNA, 32 nt, Homo Sapiens
agcgacgcggcgauggcuccgcgggcacuccc

SEQ ID NO: 250109 - RNA, 32 nt, Homo Sapiens
gaaauuuaaugagaauuucuacaauuaaugga

SEQ ID NO: 250110 - RNA, 32 nt, Homo Sapiens
agaaugacuuccucagucccaagcugaaacuc

SEQ ID NO: 250111 - RNA, 32 nt, Homo Sapiens
ugugucuuuugaaugcagaaaacaaggucgug

SEQ ID NO: 250112 - RNA, 32 nt, Homo Sapiens
gcccaugccuugcucuuaauuuuuuggccuua

SEQ ID NO: 250113 - RNA, 30 nt, Homo Sapiens
cgccgguggggcggcugaucgcggaggauc

SEQ ID NO: 250114 - RNA, 32 nt, Homo Sapiens
acaaagggaacaaaugaauuuuugguuauauu

SEQ ID NO: 250115 - RNA, 32 nt, Homo Sapiens
cacacgcagacacauccccacagaccucacua

SEQ ID NO: 250116 - RNA, 32 nt, Homo Sapiens
agacagaguuuccuuuuggaugaugagaaugu

SEQ ID NO: 250117 - RNA, 32 nt, Homo Sapiens
guuuaagaaaaauuacuuaacuugugagacau

SEQ ID NO: 250118 - RNA, 32 nt, Homo Sapiens
aaugauucaguuucuucagagugguaauugua

SEQ ID NO: 250119 - RNA, 32 nt, Homo Sapiens
uuucuauacaacaaaauuauguccuccugccu

SEQ ID NO: 250120 - RNA, 32 nt, Homo Sapiens
caggugggcuccugggagggugaugaagcaga

SEQ ID NO: 250121 - RNA, 32 nt, Homo Sapiens
ugugaauggagagcuucagcuaagaggaggcu

SEQ ID NO: 250122 - RNA, 32 nt, Homo Sapiens
ucauuuuggaauucauuugccauccacagccu

SEQ ID NO: 250123 - RNA, 32 nt, Homo Sapiens
gccauuaucuucuuucugggugucuuaucaag

SEQ ID NO: 250124 - RNA, 32 nt, Homo Sapiens
auuuaauaaccaaaaguaucuaagguaacaac

SEQ ID NO: 250125 - RNA, 32 nt, Homo Sapiens
ggcuugaccugggugcgcuuucuggacagacu

SEQ ID NO: 250126 - RNA, 32 nt, Homo Sapiens
aagaaauaaaaauaauagcugggugugguggc

SEQ ID NO: 250127 - RNA, 32 nt, Homo Sapiens
agggagaagauaaauaguuccacaccugaaga

SEQ ID NO: 250128 - RNA, 32 nt, Homo Sapiens
gguaucugccuggccggcucccccagccccau

SEQ ID NO: 250129 - RNA, 32 nt, Homo Sapiens
acuggaaggcgcugggccuggaccucugccac

SEQ ID NO: 250130 - RNA, 32 nt, Homo Sapiens
cucuaccaaacaaacaaacaaacaaacaaaca

SEQ ID NO: 250131 - RNA, 32 nt, Homo Sapiens
acagcaggacguuugggggccuucuuucagca

SEQ ID NO: 250132 - RNA, 32 nt, Homo Sapiens
uacagcuguacuuuccagaucuucuaugugac

SEQ ID NO: 250133 - RNA, 32 nt, Homo Sapiens
ugaaaccccgguuuccuucaacguccacauuc

SEQ ID NO: 250134 - RNA, 32 nt, Homo Sapiens
ccacauucaaagcuauccugggcugcaugcag

SEQ ID NO: 250135 - RNA, 32 nt, Homo Sapiens
uagauccugugcuuuacucugagacucgagag

SEQ ID NO: 250136 - RNA, 32 nt, Homo Sapiens
gacacuugcucuguccccgccauguacaacgg

SEQ ID NO: 250137 - RNA, 32 nt, Homo Sapiens
uccacgcgcggccuggcggcggcggccacucu

SEQ ID NO: 250138 - RNA, 32 nt, Homo Sapiens
cccagcugccccaggacccccggaagccccgc

SEQ ID NO: 250139 - RNA, 32 nt, Homo Sapiens
aauccaguucccucuuguagagccacaggguu

SEQ ID NO: 250140 - RNA, 32 nt, Homo Sapiens
gaucccagccucgcggcccccggguugguggu

SEQ ID NO: 250141 - RNA, 32 nt, Homo Sapiens
uagcuaaccucccugcccucugaggagccauc

SEQ ID NO: 250142 - RNA, 32 nt, Homo Sapiens
ugucuguaaaaugauuuuuucugguuuuaaag

SEQ ID NO: 250143 - RNA, 32 nt, Homo Sapiens
aggaggccgagguggguggaucaugaggucag

SEQ ID NO: 250144 - RNA, 32 nt, Homo Sapiens
cacuggccuggggacagcugcugcucugauga

SEQ ID NO: 250145 - RNA, 32 nt, Homo Sapiens
uuuaaaucaaggaaaaucauuaacuacaucag

SEQ ID NO: 250146 - RNA, 32 nt, Homo Sapiens
guuuggaacugggaggaagaaaacaugaugga

SEQ ID NO: 250147 - RNA, 32 nt, Homo Sapiens
auaugaaaauuugaauuaaacugcagaauguu

SEQ ID NO: 250148 - RNA, 32 nt, Homo Sapiens
gaaggaggauggggaggcagggcugggggcuu

SEQ ID NO: 250149 - RNA, 32 nt, Homo Sapiens
agcgcgggguggggcuucgggaccccggggau

SEQ ID NO: 250150 - RNA, 32 nt, Homo Sapiens
cugaagagcugcucacaggaggcggcggcggc

SEQ ID NO: 250151 - RNA, 32 nt, Homo Sapiens
cuuggacgcccggcucuguccugugugcgcug

SEQ ID NO: 250152 - RNA, 32 nt, Homo Sapiens
ucucccagguucuccuucacccccugcagagc

SEQ ID NO: 250153 - RNA, 32 nt, Homo Sapiens
ugauguauaauauuauacuauuaauggaauau

SEQ ID NO: 250154 - RNA, 31 nt, Homo Sapiens
acucccugaaacacuauuaauagcucugccg

SEQ ID NO: 250155 - RNA, 32 nt, Homo Sapiens
cuuuggacucccuggaggaggaggugggcucc

SEQ ID NO: 250156 - RNA, 32 nt, Homo Sapiens
gugugucagcuccuuccacaccugauuagaac

SEQ ID NO: 250157 - RNA, 32 nt, Homo Sapiens
gaauuauuucuuaugcuuuuuacuacaaacaa

SEQ ID NO: 250158 - RNA, 32 nt, Homo Sapiens
ccggcuggcaagggaccugaacaggaagauga

SEQ ID NO: 250159 - RNA, 32 nt, Homo Sapiens
ggauagcucaacaggaaguaaaugucccucuc

SEQ ID NO: 250160 - RNA, 31 nt, Homo Sapiens
ccgcagccugcccgccugccccgcccaucug

SEQ ID NO: 250161 - RNA, 32 nt, Homo Sapiens
uacuuuccaccgcgcccggccagggcugucuu

SEQ ID NO: 250162 - RNA, 32 nt, Homo Sapiens
cccagccaaagggcugggaggggaagugauga

SEQ ID NO: 250163 - RNA, 32 nt, Homo Sapiens
agggguaagagcuggcuucuguagccaccugu

SEQ ID NO: 250164 - RNA, 32 nt, Homo Sapiens
cagauggugcuguguccugugucacgucaccu

SEQ ID NO: 250165 - RNA, 32 nt, Homo Sapiens
ugaugaaugugacaccacccacagaaugcauu

SEQ ID NO: 250166 - RNA, 32 nt, Homo Sapiens
acucccacugucaucagcuuucaccuuggauu

SEQ ID NO: 250167 - RNA, 32 nt, Homo Sapiens
cccuccuccucuucuucuuccacacccacagc

SEQ ID NO: 250168 - RNA, 32 nt, Homo Sapiens
ccugcucugcaccccagaaaaccucuuuguuu

SEQ ID NO: 250169 - RNA, 32 nt, Homo Sapiens
uuucuggagagcuguugggacucauccagugc

SEQ ID NO: 250170 - RNA, 32 nt, Homo Sapiens
aggcccgcggaugggagaaaccagagaugcca

SEQ ID NO: 250171 - RNA, 32 nt, Homo Sapiens
ugaaggaaugucuucaaucauauuuuaguggg

SEQ ID NO: 250172 - RNA, 32 nt, Homo Sapiens
cuuccccgcauuccaggcuccucccucccucu

SEQ ID NO: 250173 - RNA, 32 nt, Homo Sapiens
gacaguugauaaaaguuccauccauagcauau

SEQ ID NO: 250174 - RNA, 30 nt, Homo Sapiens
ugucugcaacuaaugggagcaagauaguac

SEQ ID NO: 250175 - RNA, 32 nt, Homo Sapiens
augaugaagaacuucaggauagaggaaaauca

SEQ ID NO: 250176 - RNA, 32 nt, Homo Sapiens
cuggaaccgcuaaaccaggaaucaguaauuug

SEQ ID NO: 250177 - RNA, 32 nt, Homo Sapiens
uggcugauguuuuuauuuuacucauccugacu

SEQ ID NO: 250178 - RNA, 32 nt, Homo Sapiens
agccgcugcgcuccuccccuggcggcgccucc

SEQ ID NO: 250179 - RNA, 32 nt, Homo Sapiens
aacuagugguggcucugagaaggggaggaccu

SEQ ID NO: 250180 - RNA, 32 nt, Homo Sapiens
ucuguggagaauaaagcaccuauguacugagc

SEQ ID NO: 250181 - RNA, 32 nt, Homo Sapiens
cuggggaucacagccucaccccugccccugug

SEQ ID NO: 250182 - RNA, 32 nt, Homo Sapiens
guuaugugcauggccauguguuuguaggugca

SEQ ID NO: 250183 - RNA, 32 nt, Homo Sapiens
ggagacccgaacuuguuccauuccuacauucg

SEQ ID NO: 250184 - RNA, 32 nt, Homo Sapiens
gcuaaugauaguuauucuauaaucuccacaag

SEQ ID NO: 250185 - RNA, 32 nt, Homo Sapiens
gacugcccggcccagccuuggaggaagacuuc

SEQ ID NO: 250186 - RNA, 32 nt, Homo Sapiens
agcccagauagucaaggcuacugugagcuaug

SEQ ID NO: 250187 - RNA, 32 nt, Homo Sapiens
cauuuguguuauuuucagucagggcuucuuag

SEQ ID NO: 250188 - RNA, 32 nt, Homo Sapiens
cugcagaggccggccguccgguuuggcucacc

SEQ ID NO: 250189 - RNA, 32 nt, Homo Sapiens
caagcaaguccucucucaccuuucaccugaag

SEQ ID NO: 250190 - RNA, 32 nt, Homo Sapiens
ugugauuuacccuuuuuuaucuauuacucuag

SEQ ID NO: 250191 - RNA, 32 nt, Homo Sapiens
ccugccugcccccagggcuaauccagaggugg

SEQ ID NO: 250192 - RNA, 32 nt, Homo Sapiens
acaaggucaggagaucgagaccagccugacca

SEQ ID NO: 250193 - RNA, 32 nt, Homo Sapiens
ggaucuuuccucuaccagguggcacucaugaa

SEQ ID NO: 250194 - RNA, 32 nt, Homo Sapiens
cugcuuauuaaaccuccuucuggaccuauugc

SEQ ID NO: 250195 - RNA, 32 nt, Homo Sapiens
aauuuuguuucaaauacaguauauugucuauu

SEQ ID NO: 250196 - RNA, 32 nt, Homo Sapiens
cucaccuucuauucuguaugauguauuugguu

SEQ ID NO: 250197 - RNA, 32 nt, Homo Sapiens
ccagaaugggaggcacggaagccccucccggg

SEQ ID NO: 250198 - RNA, 32 nt, Homo Sapiens
ggaggcacggccugggccugcucucugggcug

SEQ ID NO: 250199 - RNA, 32 nt, Homo Sapiens
gcuggccccaggcacacuccucaucaauucuc

SEQ ID NO: 250200 - RNA, 32 nt, Homo Sapiens
ucccgcaccccacgugcccugcgcgccugggg

SEQ ID NO: 250201 - RNA, 32 nt, Homo Sapiens
aucauacaucuucucuuuccuuguuuuccucu

SEQ ID NO: 250202 - RNA, 32 nt, Homo Sapiens
gcaccagccaguguuucccagcccagaguuua

SEQ ID NO: 250203 - RNA, 32 nt, Homo Sapiens
uugacuuuugaaaacaaaauaugaaaagaauc

SEQ ID NO: 250204 - RNA, 30 nt, Homo Sapiens
ugugcgggcgcuggggcgggucccaggucu

SEQ ID NO: 250205 - RNA, 32 nt, Homo Sapiens
uguauaugaaacaaaauaaauggagauaauuu

SEQ ID NO: 250206 - RNA, 32 nt, Homo Sapiens
agcacugcaauaaacauacaugugcauguguc

SEQ ID NO: 250207 - RNA, 32 nt, Homo Sapiens
uuccuccugguggagacaguggauugacaggu

SEQ ID NO: 250208 - RNA, 32 nt, Homo Sapiens
agaaaguccaaggggagugucauuguucuaga

SEQ ID NO: 250209 - RNA, 32 nt, Homo Sapiens
ggacugcuuaucauugaggaucuuugggagau

SEQ ID NO: 250210 - RNA, 32 nt, Homo Sapiens
ggaaacugcaggaugccugagggucucagggg

SEQ ID NO: 250211 - RNA, 32 nt, Homo Sapiens
auggguuguuuagcuuuuuguuuucuuuguac

SEQ ID NO: 250212 - RNA, 32 nt, Homo Sapiens
cccagcuggagggacaugagugucccugggcc

SEQ ID NO: 250213 - RNA, 32 nt, Homo Sapiens
cuaugcacuucugagcuuuucuuaacaaaugc

SEQ ID NO: 250214 - RNA, 32 nt, Homo Sapiens
uugauugcuuuguugggggccuggccacuucc

SEQ ID NO: 250215 - RNA, 32 nt, Homo Sapiens
uucuccccacuuuuauccuugucccucuuuag

SEQ ID NO: 250216 - RNA, 32 nt, Homo Sapiens
ucagcuucggcuacugccuggaggaagaagcg

SEQ ID NO: 250217 - RNA, 32 nt, Homo Sapiens
ccuggaggaaacacuguaaauuuuccaagccu

SEQ ID NO: 250218 - RNA, 32 nt, Homo Sapiens
ccagguuggacgcagcugcugcugcccugacu

SEQ ID NO: 250219 - RNA, 32 nt, Homo Sapiens
acauuugaagauggcagaacugucucccccuu

SEQ ID NO: 250220 - RNA, 32 nt, Homo Sapiens
cagcagcugcccgugcaggcccggacucuccc

SEQ ID NO: 250221 - RNA, 32 nt, Homo Sapiens
uucaggaggaggaggggagugcucugaagacc

SEQ ID NO: 250222 - RNA, 32 nt, Homo Sapiens
caccgucggaagcgcaguugcagcagccgucg

SEQ ID NO: 250223 - RNA, 32 nt, Homo Sapiens
ccccaaauuuucuucuaugccuuaggcuucga

SEQ ID NO: 250224 - RNA, 32 nt, Homo Sapiens
gauguaugaugaguguugugauuggaacugau

SEQ ID NO: 250225 - RNA, 32 nt, Homo Sapiens
cgggcguccuuuccccgcuucuucccaccucg

SEQ ID NO: 250226 - RNA, 32 nt, Homo Sapiens
cucuuggaggauguggaacaucugaaggucaa

SEQ ID NO: 250227 - RNA, 32 nt, Homo Sapiens
guaaggggcuagugugauagggagaggggugg

SEQ ID NO: 250228 - RNA, 32 nt, Homo Sapiens
auaguuuauaaaauguauuacuuaagguauua

SEQ ID NO: 250229 - RNA, 32 nt, Homo Sapiens
gucagcccuguucgcagcuacggcgaggaggg

SEQ ID NO: 250230 - RNA, 32 nt, Homo Sapiens
uugacuccauggcaauaagauaccaaaguaua

SEQ ID NO: 250231 - RNA, 32 nt, Homo Sapiens
ugccucccucccucagcccggcugggacuguc

SEQ ID NO: 250232 - RNA, 32 nt, Homo Sapiens
cuauggcauggccuuaucgauugcagugggaa

SEQ ID NO: 250233 - RNA, 32 nt, Homo Sapiens
uguauuguucuucuuccuucagcuagagagaa

SEQ ID NO: 250234 - RNA, 32 nt, Homo Sapiens
aaaauacaaaaauuagcugagugugguagugu

SEQ ID NO: 250235 - RNA, 32 nt, Homo Sapiens
ggcagagcccucgcgguccccaucagcacugu

SEQ ID NO: 250236 - RNA, 32 nt, Homo Sapiens
cccccuuuggccccuuucccugacugucaagg

SEQ ID NO: 250237 - RNA, 32 nt, Homo Sapiens
cgcuggacacgcugcgcgcgcgucccugcgcg

SEQ ID NO: 250238 - RNA, 32 nt, Homo Sapiens
caucugccuguggucagcucucagacggcagg

SEQ ID NO: 250239 - RNA, 32 nt, Homo Sapiens
ucauggauuuuucucuuuccucauggaugauc

SEQ ID NO: 250240 - RNA, 32 nt, Homo Sapiens
cuccccgccccgagccccagucagcccgucuu

SEQ ID NO: 250241 - RNA, 32 nt, Homo Sapiens
ggagggcaccuccuuuucugugcuuucuuccc

SEQ ID NO: 250242 - RNA, 32 nt, Homo Sapiens
gagcccaucuucuguacugcuacaaguuccuu

SEQ ID NO: 250243 - RNA, 32 nt, Homo Sapiens
uuauuuauaucuuguuauuaauguuucuucuc

SEQ ID NO: 250244 - RNA, 32 nt, Homo Sapiens
auauaucauguuucugugaaaauguauuauga

SEQ ID NO: 250245 - RNA, 32 nt, Homo Sapiens
ugagacagaguuuaccucccaagcuggagucc

SEQ ID NO: 250246 - RNA, 32 nt, Homo Sapiens
cacuuaaaaugaaugguaaaagaucaaaaugc

SEQ ID NO: 250247 - RNA, 32 nt, Homo Sapiens
uguggaaagcuacuaguacauugaccagcgcu

SEQ ID NO: 250248 - RNA, 32 nt, Homo Sapiens
acuuuuaaggacccugggagcugugcuagaga

SEQ ID NO: 250249 - RNA, 32 nt, Homo Sapiens
gcgucuggcuggagccgaggauggguccucca

SEQ ID NO: 250250 - RNA, 32 nt, Homo Sapiens
gguuucaccauguuggccaggcuggucuaaaa

SEQ ID NO: 250251 - RNA, 32 nt, Homo Sapiens
uauaaaaaaugaauuaguacuggcgaggacua

SEQ ID NO: 250252 - RNA, 32 nt, Homo Sapiens
uaaaaagaacagaaauuuagucucucgugguu

SEQ ID NO: 250253 - RNA, 32 nt, Homo Sapiens
gaggcgugguccccggccucugauggaguggg

SEQ ID NO: 250254 - RNA, 32 nt, Homo Sapiens
aagcaaacagagcuuaauugacuggaauaauc

SEQ ID NO: 250255 - RNA, 32 nt, Homo Sapiens
aagugacuucuggucgucugcacugcuacauu

SEQ ID NO: 250256 - RNA, 28 nt, Homo Sapiens
gccauggcguccccggccaucgggcagc

SEQ ID NO: 250257 - RNA, 32 nt, Homo Sapiens
ucccugcuucuccccuuugucaucucugaucu

SEQ ID NO: 250258 - RNA, 32 nt, Homo Sapiens
ccugguggaaaacaagcccauucagcugaacu

SEQ ID NO: 250259 - RNA, 32 nt, Homo Sapiens
gugaggagcugcuggcuugcagugcgcgugca

SEQ ID NO: 250260 - RNA, 32 nt, Homo Sapiens
cacagagauggagaagcagggacaugcugaga

SEQ ID NO: 250261 - RNA, 32 nt, Homo Sapiens
ccauugcaaccucagcugauacaaccacaauu

SEQ ID NO: 250262 - RNA, 32 nt, Homo Sapiens
uacuauaaugaaagauauuuucauacucucaa

SEQ ID NO: 250263 - RNA, 32 nt, Homo Sapiens
aucgcaugguaauucuauuauuuuuagcuuuu

SEQ ID NO: 250264 - RNA, 32 nt, Homo Sapiens
accuuugucaggcuuuuugacaggucauuuca

SEQ ID NO: 250265 - RNA, 32 nt, Homo Sapiens
ccccgccugccagcuccagacagggccaucac

SEQ ID NO: 250266 - RNA, 32 nt, Homo Sapiens
cauacggacuggccucucuacuguacugggug

SEQ ID NO: 250267 - RNA, 32 nt, Homo Sapiens
cuuuacaagggagaagacaacagaaagaggga

SEQ ID NO: 250268 - RNA, 32 nt, Homo Sapiens
auuuuugcauguuuuucuuaauuccauggcca

SEQ ID NO: 250269 - RNA, 32 nt, Homo Sapiens
aagaaaccaacccugccaacaccuugaucuug

SEQ ID NO: 250270 - RNA, 32 nt, Homo Sapiens
ccucuguaacagcugggguuccaggcaugguu

SEQ ID NO: 250271 - RNA, 32 nt, Homo Sapiens
cuuuaaaaaguacauaaacccaugaguccaua

SEQ ID NO: 250272 - RNA, 32 nt, Homo Sapiens
ugaccuugccucgcccucccccagugcuccag

SEQ ID NO: 250273 - RNA, 32 nt, Homo Sapiens
uguuacauuuuugcuuuuaaccaauuaaagaa

SEQ ID NO: 250274 - RNA, 32 nt, Homo Sapiens
uuuugaaaaagguaaguugcugauuaagucua

SEQ ID NO: 250275 - RNA, 28 nt, Homo Sapiens
guacagggaugucggaggaugcucagug

SEQ ID NO: 250276 - RNA, 32 nt, Homo Sapiens
uguuuuacacgguggcugcaccauuuuacauu

SEQ ID NO: 250277 - RNA, 32 nt, Homo Sapiens
uccucccuuuuauuuuuugucucuuuuaagau

SEQ ID NO: 250278 - RNA, 32 nt, Homo Sapiens
ccagggccaccguuggccccagcugugccuug

SEQ ID NO: 250279 - RNA, 28 nt, Homo Sapiens
acacagccuuuuaccaggaugacugaac

SEQ ID NO: 250280 - RNA, 32 nt, Homo Sapiens
cagggcugcaagcagcacagaauguuauccuu

SEQ ID NO: 250281 - RNA, 32 nt, Homo Sapiens
gauauugaaugaugugauacaaauugauaguc

SEQ ID NO: 250282 - RNA, 32 nt, Homo Sapiens
uuccaugacaccugccggcaguagcccccacg

SEQ ID NO: 250283 - RNA, 32 nt, Homo Sapiens
ccaaggcggauggaaggacggaugcuucuuuc

SEQ ID NO: 250284 - RNA, 32 nt, Homo Sapiens
gcuacaacauaaacacaucuagguucuuguuc

SEQ ID NO: 250285 - RNA, 32 nt, Homo Sapiens
uaucacaccaaaacuaugcaauugguacaugg

SEQ ID NO: 250286 - RNA, 32 nt, Homo Sapiens
caaaggaugccauuuuacauuuaggaucagga

SEQ ID NO: 250287 - RNA, 32 nt, Homo Sapiens
agcaguacuggggaauuuuguacaauaaaaaa

SEQ ID NO: 250288 - RNA, 32 nt, Homo Sapiens
augaugcugcugaauuugaauugggaucguau

SEQ ID NO: 250289 - RNA, 32 nt, Homo Sapiens
auagcucuuucauagacuugugcuacaagaag

SEQ ID NO: 250290 - RNA, 32 nt, Homo Sapiens
uaaagaauaaaggggaaagaaacuacuuuaga

SEQ ID NO: 250291 - RNA, 32 nt, Homo Sapiens
ucccuaacagugaaaagagagaagggagacuc

SEQ ID NO: 250292 - RNA, 32 nt, Homo Sapiens
uagacgccucgucuccucccgugucccucuuc

SEQ ID NO: 250293 - RNA, 32 nt, Homo Sapiens
cucucuuccaugaacguggccccuacaaaaac

SEQ ID NO: 250294 - RNA, 32 nt, Homo Sapiens
cagccagcauacacaaaaauuaaugcuuacag

SEQ ID NO: 250295 - RNA, 32 nt, Homo Sapiens
ugguaaauauccucccugcauggcuuuauccu

SEQ ID NO: 250296 - RNA, 32 nt, Homo Sapiens
gaguuagaaguggcagugggacaggagcggaa

SEQ ID NO: 250297 - RNA, 32 nt, Homo Sapiens
cuuuuucuaucaccuuauguccucuaccauuu

SEQ ID NO: 250298 - RNA, 32 nt, Homo Sapiens
guugaaaauauguguaccguuuaaagaaaaag

SEQ ID NO: 250299 - RNA, 32 nt, Homo Sapiens
gcccccguccaccaugcgagccaggcuccagg

SEQ ID NO: 250300 - RNA, 31 nt, Homo Sapiens
ccucggcugccggcggcuccgacaucaugcu

SEQ ID NO: 250301 - RNA, 32 nt, Homo Sapiens
caucugugaagaagggucauggauggugaggu

SEQ ID NO: 250302 - RNA, 30 nt, Homo Sapiens
gcggcgggcaggcgcccgggagaugcggag

SEQ ID NO: 250303 - RNA, 32 nt, Homo Sapiens
acuuuuucuuuuuuacggaauucaucaucaga

SEQ ID NO: 250304 - RNA, 32 nt, Homo Sapiens
uuuccgaguuugauguucuguaaguguaaaau

SEQ ID NO: 250305 - RNA, 32 nt, Homo Sapiens
ugcccauccaccgguugaccgcccaucugccu

SEQ ID NO: 250306 - RNA, 32 nt, Homo Sapiens
uauaucuccuaaugcuaucccuccccccuccc

SEQ ID NO: 250307 - RNA, 32 nt, Homo Sapiens
gaagcucacagguuuuuuccuguaauuacugu

SEQ ID NO: 250308 - RNA, 32 nt, Homo Sapiens
uuuggugagaacaguaauggaaaaugguguug

SEQ ID NO: 250309 - RNA, 32 nt, Homo Sapiens
guggcugucucacccuugcuugcaaaacagau

SEQ ID NO: 250310 - RNA, 32 nt, Homo Sapiens
uaauggagauaguucugcagaagcugaagaac

SEQ ID NO: 250311 - RNA, 32 nt, Homo Sapiens
auguguaaaaauuuuugccuguacuaucauau

SEQ ID NO: 250312 - RNA, 32 nt, Homo Sapiens
acgccgucagcugagaagagugaggcagcgcc

SEQ ID NO: 250313 - RNA, 32 nt, Homo Sapiens
gacuuggguucaguuaguguacagcgggggcu

SEQ ID NO: 250314 - RNA, 32 nt, Homo Sapiens
uuuugggcaaagggcuugugucuucaggggca

SEQ ID NO: 250315 - RNA, 32 nt, Homo Sapiens
cggccucugccagcugccuucccugccagaga

SEQ ID NO: 250316 - RNA, 32 nt, Homo Sapiens
gcgucugcugcagucuggcugcggucgaacug

SEQ ID NO: 250317 - RNA, 32 nt, Homo Sapiens
aauuuuaaucuuguggauaccuuuauacucuu

SEQ ID NO: 250318 - RNA, 32 nt, Homo Sapiens
aggccagccagcacugugcugcacaacuccag

SEQ ID NO: 250319 - RNA, 32 nt, Homo Sapiens
gcaccuucuaguuguacaaaauguuaaagacg

SEQ ID NO: 250320 - RNA, 29 nt, Homo Sapiens
cuaggcuugaagauuuggaagaaauaaua

SEQ ID NO: 250321 - RNA, 32 nt, Homo Sapiens
gucugcauuuuucuuuagaacucagaacaccc

SEQ ID NO: 250322 - RNA, 32 nt, Homo Sapiens
ugauuucuaucaaacauuuaagaagcaaauuc

SEQ ID NO: 250323 - RNA, 32 nt, Homo Sapiens
gcugugcucuguaucucuguuuuucuuccugg

SEQ ID NO: 250324 - RNA, 32 nt, Homo Sapiens
cuaccacugucaaacuuagcccguuuacaaca

SEQ ID NO: 250325 - RNA, 30 nt, Homo Sapiens
ggcgggucggugccgccgggucccaggugc

SEQ ID NO: 250326 - RNA, 32 nt, Homo Sapiens
uuggggcuguauuuuugaaauacucuacaaga

SEQ ID NO: 250327 - RNA, 32 nt, Homo Sapiens
ugucgccugcccgcccgcccucauggaccccg

SEQ ID NO: 250328 - RNA, 31 nt, Homo Sapiens
aguaaaaauaaaaaacagugucauuuucauu

SEQ ID NO: 250329 - RNA, 32 nt, Homo Sapiens
uaaguggagcggcuaccguuaugcaucuauca

SEQ ID NO: 250330 - RNA, 32 nt, Homo Sapiens
ucgaugcuccacguaggagcuggcucggcugc

SEQ ID NO: 250331 - RNA, 32 nt, Homo Sapiens
ccguucccuggccgcggccgcuucuccaggac

SEQ ID NO: 250332 - RNA, 32 nt, Homo Sapiens
uucucaaauguuuuccauaauacuguuugcgc

SEQ ID NO: 250333 - RNA, 32 nt, Homo Sapiens
aaguuauaucaucagaaaauuagcucugguua

SEQ ID NO: 250334 - RNA, 32 nt, Homo Sapiens
ugaaagacaaugaaaaaugguuuuguaugacu

SEQ ID NO: 250335 - RNA, 32 nt, Homo Sapiens
acaaagaaaaagacuucugcaggaaauagggu

SEQ ID NO: 250336 - RNA, 32 nt, Homo Sapiens
cuggaacagcuggguucagcuuuugcagggug

SEQ ID NO: 250337 - RNA, 26 nt, Homo Sapiens
caugcaggggcccugggugcugcugc

SEQ ID NO: 250338 - RNA, 32 nt, Homo Sapiens
aaagccugucuccucacccacccccagcccua

SEQ ID NO: 250339 - RNA, 32 nt, Homo Sapiens
cugcccugaaacaaaauucuugcaaccuuacc

SEQ ID NO: 250340 - RNA, 32 nt, Homo Sapiens
acuugggggcuuugcuguugauccacuuuagc

SEQ ID NO: 250341 - RNA, 32 nt, Homo Sapiens
cccaggcccacagaugagucacuggagaacaa

SEQ ID NO: 250342 - RNA, 27 nt, Homo Sapiens
gaauaucauuaauuucuuuguaaccaa

SEQ ID NO: 250343 - RNA, 32 nt, Homo Sapiens
cagaaccggcgcgggcgcccgccgcgggucug

SEQ ID NO: 250344 - RNA, 32 nt, Homo Sapiens
cauuuaacacuaacaauuuagacuuuuuaaac

SEQ ID NO: 250345 - RNA, 32 nt, Homo Sapiens
auuuaaaaaaagacauauuuaagaaagaagau

SEQ ID NO: 250346 - RNA, 32 nt, Homo Sapiens
gguuuagaugcacuuuuucuuuugagaguaag

SEQ ID NO: 250347 - RNA, 32 nt, Homo Sapiens
uuauaucuguauaaaaaugaaugucaaaaugu

SEQ ID NO: 250348 - RNA, 32 nt, Homo Sapiens
acccagacacacuggccgaacuucugaucagg

SEQ ID NO: 250349 - RNA, 32 nt, Homo Sapiens
gugcaaugugcacuucuguuuuacuugccauu

SEQ ID NO: 250350 - RNA, 32 nt, Homo Sapiens
aauauuuaaaagacagaacaagaaagcaugua

SEQ ID NO: 250351 - RNA, 32 nt, Homo Sapiens
ggagagacccaccguggagcagaccacucaga

SEQ ID NO: 250352 - RNA, 32 nt, Homo Sapiens
cgaggacgcgccugcgcagaggcggcagcacc

SEQ ID NO: 250353 - RNA, 32 nt, Homo Sapiens
ccaucauggugccagucuaggaccccauucuc

SEQ ID NO: 250354 - RNA, 32 nt, Homo Sapiens
gaaaauacugaaugacugcuaagaauuaaccu

SEQ ID NO: 250355 - RNA, 32 nt, Homo Sapiens
acccuccccucccacacccccaaucuaccugg

SEQ ID NO: 250356 - RNA, 32 nt, Homo Sapiens
uuuccccacagaacauugucuuucuggugucu

SEQ ID NO: 250357 - RNA, 32 nt, Homo Sapiens
uaguggugaacuuuagaggaaaaggaaguaau

SEQ ID NO: 250358 - RNA, 32 nt, Homo Sapiens
uucgaagucccucucuuuugccaacccucauu

SEQ ID NO: 250359 - RNA, 32 nt, Homo Sapiens
uucuaaauucauucuuuuucuacuucaccuga

SEQ ID NO: 250360 - RNA, 32 nt, Homo Sapiens
ucacgauagcuaaacaguacuuaaauagcggu

SEQ ID NO: 250361 - RNA, 32 nt, Homo Sapiens
auaaugaaaauauuguguaauauuuucugcaa

SEQ ID NO: 250362 - RNA, 32 nt, Homo Sapiens
aacuccuaguuauaauuuugaugcaaccaagu

SEQ ID NO: 250363 - RNA, 32 nt, Homo Sapiens
cuccaggaaggggaguucuggguggaggagga

SEQ ID NO: 250364 - RNA, 32 nt, Homo Sapiens
aauagagaauuuauuucuuuuaaaaauaaagc

SEQ ID NO: 250365 - RNA, 32 nt, Homo Sapiens
uucugggagcuccucccccuucugggagcucc

SEQ ID NO: 250366 - RNA, 32 nt, Homo Sapiens
uguggcaaaauauuuuuguaauuauuuucuaa

SEQ ID NO: 250367 - RNA, 31 nt, Homo Sapiens
gggcggggggcggugauagggucucgcucug

SEQ ID NO: 250368 - RNA, 32 nt, Homo Sapiens
ccaucagccagacaugucuagggugagaccag

SEQ ID NO: 250369 - RNA, 32 nt, Homo Sapiens
aaaaaggauuaagaaggaaggauugaaacuca

SEQ ID NO: 250370 - RNA, 32 nt, Homo Sapiens
uccaagacuuucuccaggacuccaccuaaggu

SEQ ID NO: 250371 - RNA, 32 nt, Homo Sapiens
uuaaacuacuuuuucagcaucacuucaccugu

SEQ ID NO: 250372 - RNA, 32 nt, Homo Sapiens
caaugaaaugaauuaaaguggaccaauagggc

SEQ ID NO: 250373 - RNA, 32 nt, Homo Sapiens
cagguaaugcauccugagugaaccuccaggga

SEQ ID NO: 250374 - RNA, 32 nt, Homo Sapiens
acaaggucaaggaagcuagagucugaaaaacg

SEQ ID NO: 250375 - RNA, 32 nt, Homo Sapiens
aaaaccccgguggcacaaaaaccuggugaggc

SEQ ID NO: 250376 - RNA, 32 nt, Homo Sapiens
aucacagaagugaaaugaaaacaaaauuauaa

SEQ ID NO: 250377 - RNA, 32 nt, Homo Sapiens
cucccuuccucccgggaugaccucaggacucu

SEQ ID NO: 250378 - RNA, 32 nt, Homo Sapiens
cacgccuagcuaauuucuguauuuuuaguaga

SEQ ID NO: 250379 - RNA, 32 nt, Homo Sapiens
cuggccggagcaccagacccucugauccugga

SEQ ID NO: 250380 - RNA, 32 nt, Homo Sapiens
ugcacaggagucaaagagaugucuuuauaucu

SEQ ID NO: 250381 - RNA, 32 nt, Homo Sapiens
ccugauccgggcccguuggcggcgucacugac

SEQ ID NO: 250382 - RNA, 32 nt, Homo Sapiens
aaugacauuuacugccuaucagaaacggcaaa

SEQ ID NO: 250383 - RNA, 32 nt, Homo Sapiens
uuuuuuuaaaggaaacaaacagacaacaaaaa

SEQ ID NO: 250384 - RNA, 32 nt, Homo Sapiens
gcuagugguuugaaaauaauaauguacugacu

SEQ ID NO: 250385 - RNA, 32 nt, Homo Sapiens
cuccgucucaaaaacaaacaaacaaaaaccuu

SEQ ID NO: 250386 - RNA, 32 nt, Homo Sapiens
ugcugucgccccacuaccuuacaugcuacuug

SEQ ID NO: 250387 - RNA, 32 nt, Homo Sapiens
cccaucuccacucaggaguggugcugagguuu

SEQ ID NO: 250388 - RNA, 32 nt, Homo Sapiens
uuaaaaaacaguucucuagaaagaacuguuau

SEQ ID NO: 250389 - RNA, 32 nt, Homo Sapiens
cuguagauucagguaauacaaacuauauauaa

SEQ ID NO: 250390 - RNA, 32 nt, Homo Sapiens
cguacuacaugguaccaauuaugcagaucaac

SEQ ID NO: 250391 - RNA, 32 nt, Homo Sapiens
ucaaggggaucuuuaaccucuuuaaccuuugu

SEQ ID NO: 250392 - RNA, 32 nt, Homo Sapiens
ugucuggccucuuuuugcucagcccucagcac

SEQ ID NO: 250393 - RNA, 32 nt, Homo Sapiens
gagccgccgggcgugagacgcggucccucggu

SEQ ID NO: 250394 - RNA, 32 nt, Homo Sapiens
agauucaguuuagagauaaauguuaacaguaa

SEQ ID NO: 250395 - RNA, 32 nt, Homo Sapiens
ucuuucuucuaaaaguugccagugccacuuuu

SEQ ID NO: 250396 - RNA, 32 nt, Homo Sapiens
gaacguuuauuuccgaggaagagaaugcugag

SEQ ID NO: 250397 - RNA, 32 nt, Homo Sapiens
cuuugaagcucuuccuuuugcacauacggcuu

SEQ ID NO: 250398 - RNA, 32 nt, Homo Sapiens
cagcugaaaaccagaaggcaucugaggagaau

SEQ ID NO: 250399 - RNA, 32 nt, Homo Sapiens
cucugcugcucuccagaggaaguuauuguccc

SEQ ID NO: 250400 - RNA, 32 nt, Homo Sapiens
gcgucccagagacucccucacccaggcaggcu

SEQ ID NO: 250401 - RNA, 32 nt, Homo Sapiens
caccaggggcuggagggcaggggaggggauga

SEQ ID NO: 250402 - RNA, 32 nt, Homo Sapiens
uggaaaccgagggaacccugggucuugggaag

SEQ ID NO: 250403 - RNA, 32 nt, Homo Sapiens
uaguuuuacuuguggcuuaucuaguuagaacu

SEQ ID NO: 250404 - RNA, 29 nt, Homo Sapiens
guguauguauguauguacuuuagcauuac

SEQ ID NO: 250405 - RNA, 32 nt, Homo Sapiens
gaaaugagguggauagucugccugcugcggua

SEQ ID NO: 250406 - RNA, 32 nt, Homo Sapiens
ccagccuccccuccccuggggacgccaaggag

SEQ ID NO: 250407 - RNA, 32 nt, Homo Sapiens
uccauuaaagaugauuauuugaggauaauugu

SEQ ID NO: 250408 - RNA, 32 nt, Homo Sapiens
ugcuuccgccuccccuucuccugcuucuccag

SEQ ID NO: 250409 - RNA, 32 nt, Homo Sapiens
ggcuggcaaacauuuuaucauugucagaauuu

SEQ ID NO: 250410 - RNA, 32 nt, Homo Sapiens
uucgugcaugcaaauccagggauuuagguuuu

SEQ ID NO: 250411 - RNA, 32 nt, Homo Sapiens
ugagguuucuaaaagaagguagauuucuacag

SEQ ID NO: 250412 - RNA, 32 nt, Homo Sapiens
ucaacugcagccccuccuccucgggcacagac

SEQ ID NO: 250413 - RNA, 32 nt, Homo Sapiens
aguucuaacuuacuuucauccuauuuugcauc

SEQ ID NO: 250414 - RNA, 32 nt, Homo Sapiens
ucugggggcagcugugccugcugcccucucug

SEQ ID NO: 250415 - RNA, 32 nt, Homo Sapiens
ugaaaucaggcccauucuucccucuguguuug

SEQ ID NO: 250416 - RNA, 32 nt, Homo Sapiens
aaauucuuggacaauuuuguauggaaacuuga

SEQ ID NO: 250417 - RNA, 32 nt, Homo Sapiens
agcaggccaauagaaaugcaauauuuuuaauu

SEQ ID NO: 250418 - RNA, 32 nt, Homo Sapiens
ucugguggcaggcagacaaucaacaaguaagc

SEQ ID NO: 250419 - RNA, 32 nt, Homo Sapiens
gacacauucccauugguaacaauugcucacca

SEQ ID NO: 250420 - RNA, 32 nt, Homo Sapiens
auccuccccccgcauaccacccccagucaaaa

SEQ ID NO: 250421 - RNA, 32 nt, Homo Sapiens
auggcauucauuaaaaucuuuacuauguacaa

SEQ ID NO: 250422 - RNA, 32 nt, Homo Sapiens
cugucucccgccacccacaccagcugucccac

SEQ ID NO: 250423 - RNA, 32 nt, Homo Sapiens
cggguagcgcggcgcgcaggcuccucggaacg

SEQ ID NO: 250424 - RNA, 32 nt, Homo Sapiens
gagcaaauauauuauuaagauggguuggagga

SEQ ID NO: 250425 - RNA, 32 nt, Homo Sapiens
ugaugaaacuggggugcucaaaggauuuaaag

SEQ ID NO: 250426 - RNA, 32 nt, Homo Sapiens
ucgccagggcucuaagacagcgagccauguuc

SEQ ID NO: 250427 - RNA, 32 nt, Homo Sapiens
auacuggacagucuuaacaauuuuauaaguua

SEQ ID NO: 250428 - RNA, 32 nt, Homo Sapiens
caccagaaccugcauacgucaccuggaaaacu

SEQ ID NO: 250429 - RNA, 32 nt, Homo Sapiens
aaaaguagucggagaaggagcggcgacucagg

SEQ ID NO: 250430 - RNA, 32 nt, Homo Sapiens
ugcucgucaaagacauuuauguuucuuuuaca

SEQ ID NO: 250431 - RNA, 32 nt, Homo Sapiens
uucugaugaaaauaaaguuguuucucccucca

SEQ ID NO: 250432 - RNA, 32 nt, Homo Sapiens
uuccccugcccccucaguuuuccacuuuuggg

SEQ ID NO: 250433 - RNA, 32 nt, Homo Sapiens
ucucccgcgcggugcuggacaacccgcaccgu

SEQ ID NO: 250434 - RNA, 32 nt, Homo Sapiens
uccgggagcacaccguuuccuguugcucaggg

SEQ ID NO: 250435 - RNA, 32 nt, Homo Sapiens
guuucucuuuugcaauagaacgucauggacca

SEQ ID NO: 250436 - RNA, 32 nt, Homo Sapiens
aacuuuaguacacaucagcaucaccuggaggg

SEQ ID NO: 250437 - RNA, 32 nt, Homo Sapiens
cacugcgcuccagccuggguggcagagagaga

SEQ ID NO: 250438 - RNA, 32 nt, Homo Sapiens
cacugucuguuguuuaccuaccguagcuuuuu

SEQ ID NO: 250439 - RNA, 32 nt, Homo Sapiens
guuguuccaaacaaaaugaugaacuuugauuu

SEQ ID NO: 250440 - RNA, 32 nt, Homo Sapiens
cuggcaggcagcuccaccugcugccccagugc

SEQ ID NO: 250441 - RNA, 32 nt, Homo Sapiens
ucuguuucaaggagauuuacugcuauuuuauu

SEQ ID NO: 250442 - RNA, 32 nt, Homo Sapiens
guuacagcacaaaacccacucuuuuagaauag

SEQ ID NO: 250443 - RNA, 32 nt, Homo Sapiens
gggcucggccgacaacgucacugugauggugg

SEQ ID NO: 250444 - RNA, 32 nt, Homo Sapiens
ucauuuuacccccaccucccaagccccaagag

SEQ ID NO: 250445 - RNA, 32 nt, Homo Sapiens
ugaacuuacacuguauauuuugcaauaguuac

SEQ ID NO: 250446 - RNA, 32 nt, Homo Sapiens
cauuugguucagaacgagcauuuaacucugcc

SEQ ID NO: 250447 - RNA, 32 nt, Homo Sapiens
uguauuuguuugcaauuuugggguaagacuuu

SEQ ID NO: 250448 - RNA, 32 nt, Homo Sapiens
cacaucuacacccccaagcacacacacauggu

SEQ ID NO: 250449 - RNA, 30 nt, Homo Sapiens
aucguguccugugcugaagauguuuccgga

SEQ ID NO: 250450 - RNA, 32 nt, Homo Sapiens
cucucucccuccccacuccuagcugcuccagg

SEQ ID NO: 250451 - RNA, 31 nt, Homo Sapiens
aaaaagaaauaaaaccaguccuccucagccc

SEQ ID NO: 250452 - RNA, 32 nt, Homo Sapiens
aaaauaacuguuuauuugaugucagguacauc

SEQ ID NO: 250453 - RNA, 27 nt, Homo Sapiens
ggugcuuaauaaaugucugcucaacug

SEQ ID NO: 250454 - RNA, 32 nt, Homo Sapiens
cagugcaguguaaagauggccucgcgcugagc

SEQ ID NO: 250455 - RNA, 32 nt, Homo Sapiens
gagcagcuccagcaggauggcggcuccagcgu

SEQ ID NO: 250456 - RNA, 32 nt, Homo Sapiens
uggcuggccgggcugaggggcuccucacuucc

SEQ ID NO: 250457 - RNA, 32 nt, Homo Sapiens
ucggaggagagaagaaagugcaacguggggag

SEQ ID NO: 250458 - RNA, 32 nt, Homo Sapiens
agaagcugcaacauguguggacagugggcuuu

SEQ ID NO: 250459 - RNA, 32 nt, Homo Sapiens
guuucacuauguauaaauuuuacuucaaaaua

SEQ ID NO: 250460 - RNA, 32 nt, Homo Sapiens
ggaauucauuuucuuuucguuucauguuuaau

SEQ ID NO: 250461 - RNA, 32 nt, Homo Sapiens
aaaguaaaaaucauuaucauggcuacaaaguc

SEQ ID NO: 250462 - RNA, 30 nt, Homo Sapiens
ggcuuccgcgggccgccgccggcccugaaa

SEQ ID NO: 250463 - RNA, 32 nt, Homo Sapiens
uagaaucucuggaugugcacugucagucaugu

SEQ ID NO: 250464 - RNA, 32 nt, Homo Sapiens
ucuagugacaaugaagggacacauggcuaugu

SEQ ID NO: 250465 - RNA, 32 nt, Homo Sapiens
auaguagaggggaagaaauuauagaaaacaaa

SEQ ID NO: 250466 - RNA, 32 nt, Homo Sapiens
caaaugacugguugagguuuuuuugaacauuu

SEQ ID NO: 250467 - RNA, 32 nt, Homo Sapiens
auccaugccaccucacaggguuagcgugagga

SEQ ID NO: 250468 - RNA, 32 nt, Homo Sapiens
gaaugcuuaaaauaaaauagaaugcuugagag

SEQ ID NO: 250469 - RNA, 32 nt, Homo Sapiens
gaaacaccuuacagacaucucuguaaaacaga

SEQ ID NO: 250470 - RNA, 32 nt, Homo Sapiens
ugaaaauucuaaagagaaaauauuuuaaaaga

SEQ ID NO: 250471 - RNA, 32 nt, Homo Sapiens
uuccucgggaugccacucugugcccaggacgg

SEQ ID NO: 250472 - RNA, 32 nt, Homo Sapiens
caagggaaacucccacccucaauauccucagu

SEQ ID NO: 250473 - RNA, 32 nt, Homo Sapiens
ggucucuugcauuucagucuuaccaaaaauca

SEQ ID NO: 250474 - RNA, 32 nt, Homo Sapiens
uuucucaggaaguggcucugccaggcaggacu

SEQ ID NO: 250475 - RNA, 32 nt, Homo Sapiens
uuguguugaaucaaaaucacauuggguuaugu

SEQ ID NO: 250476 - RNA, 32 nt, Homo Sapiens
ugacauuuuuauugacuuucuacuguuugagg

SEQ ID NO: 250477 - RNA, 32 nt, Homo Sapiens
uauacuaaaagcuccuacugugaugugaaaug

SEQ ID NO: 250478 - RNA, 32 nt, Homo Sapiens
uccuguggugguuuuucuccauuuuuuaaaau

SEQ ID NO: 250479 - RNA, 31 nt, Homo Sapiens
guggcuggaaugguggcaggagugggcacca

SEQ ID NO: 250480 - RNA, 30 nt, Homo Sapiens
guauaguauaaaagaagaauaugcaauauu

SEQ ID NO: 250481 - RNA, 32 nt, Homo Sapiens
aguccgccugccggcagaaugucccuggcugc

SEQ ID NO: 250482 - RNA, 32 nt, Homo Sapiens
cgccucagcccggcggcggcggcggccgaaca

SEQ ID NO: 250483 - RNA, 32 nt, Homo Sapiens
caagcaaguaauuuucucccaagcugauuuua

SEQ ID NO: 250484 - RNA, 32 nt, Homo Sapiens
ugugaguuuuggguuuuaauucucaagagcca

SEQ ID NO: 250485 - RNA, 32 nt, Homo Sapiens
cgagcgcggcagucgcgccggcgcugggcgag

SEQ ID NO: 250486 - RNA, 32 nt, Homo Sapiens
agccuggccagcugcucagaccagcuugcaga

SEQ ID NO: 250487 - RNA, 32 nt, Homo Sapiens
gcagguuucuugugcuggccgcgcucgccgga

SEQ ID NO: 250488 - RNA, 32 nt, Homo Sapiens
uccucccuggccauguggcuuauuuugccauc

SEQ ID NO: 250489 - RNA, 32 nt, Homo Sapiens
ggacaacucuggaaacaagccuauuuccucca

SEQ ID NO: 250490 - RNA, 32 nt, Homo Sapiens
ccggccaccaaaauggcgccgggucggcgcau

SEQ ID NO: 250491 - RNA, 32 nt, Homo Sapiens
acacagaaaaugguauaaaauaugagaacgaa

SEQ ID NO: 250492 - RNA, 32 nt, Homo Sapiens
uacugcugacaguaguuuauuaugucaguaua

SEQ ID NO: 250493 - RNA, 32 nt, Homo Sapiens
uccacuugacuucaggcagcagauugucuaga

SEQ ID NO: 250494 - RNA, 32 nt, Homo Sapiens
ccacgcccaccucagcuccugcucccacacag

SEQ ID NO: 250495 - RNA, 32 nt, Homo Sapiens
cagacccuauucuccugccucauuuucccccu

SEQ ID NO: 250496 - RNA, 32 nt, Homo Sapiens
auguauuagugucaacuuuuaacuuuugggcg

SEQ ID NO: 250497 - RNA, 32 nt, Homo Sapiens
auggacuuguuccuuuguaauagugcaauuug

SEQ ID NO: 250498 - RNA, 32 nt, Homo Sapiens
ugcuucuucagggacccggcccugcccugccg

SEQ ID NO: 250499 - RNA, 32 nt, Homo Sapiens
aaaauaaugcaaaagagauuuguuguaaaagc

SEQ ID NO: 250500 - RNA, 32 nt, Homo Sapiens
cgcaagugaaagauuguuuacaaacuuccuga

SEQ ID NO: 250501 - RNA, 32 nt, Homo Sapiens
uacaguggagagccaguacaucuuaacuacug

SEQ ID NO: 250502 - RNA, 32 nt, Homo Sapiens
aaggagguucagccccuucucugggauguggu

SEQ ID NO: 250503 - RNA, 32 nt, Homo Sapiens
aaguuuuccauuuuccaaguccaagggcacaa

SEQ ID NO: 250504 - RNA, 32 nt, Homo Sapiens
auuaaaagaauauuuuaacuuccuuggacuca

SEQ ID NO: 250505 - RNA, 26 nt, Homo Sapiens
gauggauuucgggucuuuggagaccg

SEQ ID NO: 250506 - RNA, 32 nt, Homo Sapiens
acuggcuguugaccaccagacaccugaccgca

SEQ ID NO: 250507 - RNA, 32 nt, Homo Sapiens
cagcaggggaagaucuaugggcaugggaggug

SEQ ID NO: 250508 - RNA, 32 nt, Homo Sapiens
gaggaagauggcggcuccgggcggcucggggu

SEQ ID NO: 250509 - RNA, 32 nt, Homo Sapiens
ccuguaggaaauggugaagcauagcucugggu

SEQ ID NO: 250510 - RNA, 31 nt, Homo Sapiens
cccuaagugccccagaauugggaaacuauuc

SEQ ID NO: 250511 - RNA, 32 nt, Homo Sapiens
auuugagaucagagagcaccacagggcuggcu

SEQ ID NO: 250512 - RNA, 32 nt, Homo Sapiens
cugacgucgaggaaagccagccgugcuguggg

SEQ ID NO: 250513 - RNA, 32 nt, Homo Sapiens
caucuccagggugacacggugugccugugaca

SEQ ID NO: 250514 - RNA, 32 nt, Homo Sapiens
aacagcuguuugcugaagcaucaggugcccgg

SEQ ID NO: 250515 - RNA, 32 nt, Homo Sapiens
auaaccugaucguuuccuucacagcaagaauu

SEQ ID NO: 250516 - RNA, 32 nt, Homo Sapiens
caccagccaugaauucagugaacucuuuucuc

SEQ ID NO: 250517 - RNA, 32 nt, Homo Sapiens
cauuaaugcuaucucccuguguacuguuucuc

SEQ ID NO: 250518 - RNA, 32 nt, Homo Sapiens
ccuggauccugaaauagaggcuaaauuacuca

SEQ ID NO: 250519 - RNA, 32 nt, Homo Sapiens
ggaugggcaccucggggcucccgccucacugg

SEQ ID NO: 250520 - RNA, 32 nt, Homo Sapiens
uguucucacacagaggggcccuggacggaggc

SEQ ID NO: 250521 - RNA, 32 nt, Homo Sapiens
ggcuugucuccauggaugacguccagaaggau

SEQ ID NO: 250522 - RNA, 32 nt, Homo Sapiens
ggcaaacccagcuguacagcuucucagacaag

SEQ ID NO: 250523 - RNA, 28 nt, Homo Sapiens
gcugggguuacaggcgugagccaccgca

SEQ ID NO: 250524 - RNA, 32 nt, Homo Sapiens
agaaggggcaggcuggcugggaaacucagccc

SEQ ID NO: 250525 - RNA, 31 nt, Homo Sapiens
aaaauacuuuaugagcagcaagauugcuuua

SEQ ID NO: 250526 - RNA, 32 nt, Homo Sapiens
aaccuaacagaaaaacuaaaauuagaggacag

SEQ ID NO: 250527 - RNA, 32 nt, Homo Sapiens
aguuuaaaacaguaugucucagauuccaguuc

SEQ ID NO: 250528 - RNA, 32 nt, Homo Sapiens
ggguggggagcuuuuggggaggacaggucgca

SEQ ID NO: 250529 - RNA, 32 nt, Homo Sapiens
cuuucucccucaucggcccggcgcugauuccu

SEQ ID NO: 250530 - RNA, 32 nt, Homo Sapiens
cacagauacacacacacacacacacacacaca

SEQ ID NO: 250531 - RNA, 32 nt, Homo Sapiens
gugcagguguauauuugugguaaaacgaaaua

SEQ ID NO: 250532 - RNA, 32 nt, Homo Sapiens
uuucuaagaaaauaaacauuuuacuguuuuua

SEQ ID NO: 250533 - RNA, 32 nt, Homo Sapiens
aaaaagaacaauuuucaauuuucagaaaugaa

SEQ ID NO: 250534 - RNA, 32 nt, Homo Sapiens
auacacuacauuucuuuuuuauuauuaugaag

SEQ ID NO: 250535 - RNA, 32 nt, Homo Sapiens
ccacccccuccugcauuguucuuccagcccuc

SEQ ID NO: 250536 - RNA, 32 nt, Homo Sapiens
agccagcccugugcuccucccucccccaacac

SEQ ID NO: 250537 - RNA, 32 nt, Homo Sapiens
uaacaggugggagggguuuugcucuccuuacg

SEQ ID NO: 250538 - RNA, 32 nt, Homo Sapiens
uugcaucugaggacuuguuuucuuuuucuuua

SEQ ID NO: 250539 - RNA, 32 nt, Homo Sapiens
ccaugaaauaccaugauaugccugacguuaua

SEQ ID NO: 250540 - RNA, 32 nt, Homo Sapiens
augcgugugcaaacagcaacaaugacaaacau

SEQ ID NO: 250541 - RNA, 32 nt, Homo Sapiens
gcggcggugguggcuuguggugcggccucacc

SEQ ID NO: 250542 - RNA, 32 nt, Homo Sapiens
agaauaacacuggcuuuggguagugccauggc

SEQ ID NO: 250543 - RNA, 32 nt, Homo Sapiens
gggaugcagccagcuggccugcacugggugug

SEQ ID NO: 250544 - RNA, 32 nt, Homo Sapiens
uuagcucuguacuccuaauuaagggacaugua

SEQ ID NO: 250545 - RNA, 32 nt, Homo Sapiens
cucagcuucccagauagcugggccacaggcgu

SEQ ID NO: 250546 - RNA, 32 nt, Homo Sapiens
aauauuacuguuuauuucuguuucucauaugg

SEQ ID NO: 250547 - RNA, 32 nt, Homo Sapiens
uguuuguguuauuguucaaucuucaguuguaa

SEQ ID NO: 250548 - RNA, 32 nt, Homo Sapiens
ugggaaaacagggauuaacgaggggcaaggaa

SEQ ID NO: 250549 - RNA, 32 nt, Homo Sapiens
cauguggcaauguuaaaagagcauuuacagca

SEQ ID NO: 250550 - RNA, 32 nt, Homo Sapiens
acugugucacuuugagggccugucucugggga

SEQ ID NO: 250551 - RNA, 32 nt, Homo Sapiens
augagggaggcccuuugugggucuguggcugg

SEQ ID NO: 250552 - RNA, 32 nt, Homo Sapiens
cauugaauucucagggcaccucuucuuccccu

SEQ ID NO: 250553 - RNA, 32 nt, Homo Sapiens
uacaacuucaacaaaaucaaguccuacuucaa

SEQ ID NO: 250554 - RNA, 32 nt, Homo Sapiens
ggcaggagaaucacuugaacucggggggcaga

SEQ ID NO: 250555 - RNA, 30 nt, Homo Sapiens
auauauguauaaauaaaauaucugcgccag

SEQ ID NO: 250556 - RNA, 32 nt, Homo Sapiens
agacacaauaauuuaaauuugauguuaaucga

SEQ ID NO: 250557 - RNA, 32 nt, Homo Sapiens
cuccaggcaccgccugcccccagcgugggggu

SEQ ID NO: 250558 - RNA, 32 nt, Homo Sapiens
ggccgccccacuuuccggcauaacuuuuuaga

SEQ ID NO: 250559 - RNA, 32 nt, Homo Sapiens
ugguguuucuucacuagagguuuugcugucug

SEQ ID NO: 250560 - RNA, 32 nt, Homo Sapiens
aacacugaacaaaggcuucacuuguccucauc

SEQ ID NO: 250561 - RNA, 32 nt, Homo Sapiens
guauauuuuuuucuguuuuucuaaaugacccg

SEQ ID NO: 250562 - RNA, 32 nt, Homo Sapiens
aaucuuacaagucugcuugauuguacuuuaca

SEQ ID NO: 250563 - RNA, 32 nt, Homo Sapiens
gugacauuaaugaagaaaauuucucaugccag

SEQ ID NO: 250564 - RNA, 32 nt, Homo Sapiens
gcagagcaagauacgaugaucagggaauguaa

SEQ ID NO: 250565 - RNA, 32 nt, Homo Sapiens
gacagguguaaugaaauuaucaacuggcacaa

SEQ ID NO: 250566 - RNA, 32 nt, Homo Sapiens
ccucgugcccgcacugcacgccgcccuccgcc

SEQ ID NO: 250567 - RNA, 32 nt, Homo Sapiens
aggguggcucugccaguccccgcgcgccuggg

SEQ ID NO: 250568 - RNA, 32 nt, Homo Sapiens
agggaagugagaaucacaaaacacauuacuca

SEQ ID NO: 250569 - RNA, 32 nt, Homo Sapiens
gaaagcaggaggaggugguggcggcgggaaga

SEQ ID NO: 250570 - RNA, 32 nt, Homo Sapiens
guuacucuuuacauacuguuuauuuuuguuag

SEQ ID NO: 250571 - RNA, 32 nt, Homo Sapiens
cagcagaaguguuuuucuuuuuuuaaugaaca

SEQ ID NO: 250572 - RNA, 32 nt, Homo Sapiens
acacauuggagaguacucugugcggagcugaa

SEQ ID NO: 250573 - RNA, 32 nt, Homo Sapiens
gaccaucaguuauugugugauaucagacacca

SEQ ID NO: 250574 - RNA, 32 nt, Homo Sapiens
aaucaauucauuccccaagaaauauccuauuu

SEQ ID NO: 250575 - RNA, 32 nt, Homo Sapiens
ggaacagaggauggagcuaagcagcaaagggc

SEQ ID NO: 250576 - RNA, 32 nt, Homo Sapiens
cuugaauggcccgggcgcgcgcggucgugugg

SEQ ID NO: 250577 - RNA, 32 nt, Homo Sapiens
cacaggccaggcugagggcaucuggagugccu

SEQ ID NO: 250578 - RNA, 32 nt, Homo Sapiens
aguguaggcaccccggcccagcagcccagcag

SEQ ID NO: 250579 - RNA, 32 nt, Homo Sapiens
agugggcaaaaauuauuuucucaauuuuacug

SEQ ID NO: 250580 - RNA, 32 nt, Homo Sapiens
uacucgagaagcugagauagggucaccugagc

SEQ ID NO: 250581 - RNA, 32 nt, Homo Sapiens
cucuaacccccuccccucgcugcugggcccca

SEQ ID NO: 250582 - RNA, 32 nt, Homo Sapiens
ccuuuucccuguugugccaccauucauuuaag

SEQ ID NO: 250583 - RNA, 32 nt, Homo Sapiens
uccaguguucaagugcagaaaucuuuggcuuu

SEQ ID NO: 250584 - RNA, 32 nt, Homo Sapiens
ugagccccaccccgaaugccagcccuucuucc

SEQ ID NO: 250585 - RNA, 32 nt, Homo Sapiens
uuuggcacucccucugaccccgcgaugagugu

SEQ ID NO: 250586 - RNA, 32 nt, Homo Sapiens
cccggaggcgcugggcggcugugggcugcagg

SEQ ID NO: 250587 - RNA, 32 nt, Homo Sapiens
auaaauauacuggcucuuucucaaggccagag

SEQ ID NO: 250588 - RNA, 32 nt, Homo Sapiens
cacuugaauguguuuuaaaggcuaauuaucag

SEQ ID NO: 250589 - RNA, 32 nt, Homo Sapiens
guucaaaaaugauaaguaaucuggauaccuuu

SEQ ID NO: 250590 - RNA, 32 nt, Homo Sapiens
cauccugaaaaacaaaacccaguguuugcaca

SEQ ID NO: 250591 - RNA, 32 nt, Homo Sapiens
cugagccuccuggccuggcccccaccggugca

SEQ ID NO: 250592 - RNA, 32 nt, Homo Sapiens
uuaucuugcuauaaguucgaugacaccgugaa

SEQ ID NO: 250593 - RNA, 29 nt, Homo Sapiens
aaccugaccuccaucaguuuaacgaucuc

SEQ ID NO: 250594 - RNA, 32 nt, Homo Sapiens
ucagguuuugaaggcuugauuuuguggugggu

SEQ ID NO: 250595 - RNA, 32 nt, Homo Sapiens
aagauaccccagcauuggggaaggcaggguuu

SEQ ID NO: 250596 - RNA, 32 nt, Homo Sapiens
ccccaucuguuaaaugagagaauagaguaugg

SEQ ID NO: 250597 - RNA, 32 nt, Homo Sapiens
cccagggaagagaaugaggaccacguggacuc

SEQ ID NO: 250598 - RNA, 32 nt, Homo Sapiens
uggugagacaggccagcgugcaugacagugga

SEQ ID NO: 250599 - RNA, 32 nt, Homo Sapiens
gggguuaacuucagccaggauugauggcagcu

SEQ ID NO: 250600 - RNA, 32 nt, Homo Sapiens
uguuuuguaaaaaagauauauuuuugaguuac

SEQ ID NO: 250601 - RNA, 32 nt, Homo Sapiens
ucucacucggugccgcugccuaggggcuguag

SEQ ID NO: 250602 - RNA, 32 nt, Homo Sapiens
uugccuccuugaccacacuggggugggugggc

SEQ ID NO: 250603 - RNA, 30 nt, Homo Sapiens
gcugagaacuucggcggcccagaaggggag

SEQ ID NO: 250604 - RNA, 32 nt, Homo Sapiens
uacacacaggcaaauguaaguauuuuaaauag

SEQ ID NO: 250605 - RNA, 32 nt, Homo Sapiens
gcggcuccgggaagauggcggcccgggcgggu

SEQ ID NO: 250606 - RNA, 32 nt, Homo Sapiens
caccuccccuccccccgccagccgccaaagac

SEQ ID NO: 250607 - RNA, 32 nt, Homo Sapiens
ugggcugagguuuuuauaccaaaccuggaagc

SEQ ID NO: 250608 - RNA, 32 nt, Homo Sapiens
auaagguuuucaaacaucugaggcaugauaaa

SEQ ID NO: 250609 - RNA, 32 nt, Homo Sapiens
caucucacguacccccaucugagaccucuugg

SEQ ID NO: 250610 - RNA, 32 nt, Homo Sapiens
aagguuuuacacagcaaaggaaaccaugacaa

SEQ ID NO: 250611 - RNA, 32 nt, Homo Sapiens
guaauaaagcagccucauuuaauucuggauaa

SEQ ID NO: 250612 - RNA, 32 nt, Homo Sapiens
ccguggcgccugguguucggcgcgagcccggc

SEQ ID NO: 250613 - RNA, 32 nt, Homo Sapiens
ucaaguggggcaaucgcugguggagguggcgg

SEQ ID NO: 250614 - RNA, 32 nt, Homo Sapiens
uuggccugggaacuucuuggaacuuuaacucc

SEQ ID NO: 250615 - RNA, 32 nt, Homo Sapiens
aguuuuuaauacuguauuaugugaaaucuaac

SEQ ID NO: 250616 - RNA, 32 nt, Homo Sapiens
cccacuccccucgcgccgcgggucccgggaac

SEQ ID NO: 250617 - RNA, 32 nt, Homo Sapiens
ggaaguauucuauugcagucaugauuuauuuu

SEQ ID NO: 250618 - RNA, 32 nt, Homo Sapiens
cuauaaauguugucuuuuuuauauuuuuauga

SEQ ID NO: 250619 - RNA, 32 nt, Homo Sapiens
cgcagugugggaaaggaauguggaaugagaac

SEQ ID NO: 250620 - RNA, 32 nt, Homo Sapiens
uccucauggaacuggcagggguccggcccuuc

SEQ ID NO: 250621 - RNA, 32 nt, Homo Sapiens
gaaauggguuucuggaggaaagaucagcacag

SEQ ID NO: 250622 - RNA, 32 nt, Homo Sapiens
gacuuuuauaugcugaaacuacaguggccagu

SEQ ID NO: 250623 - RNA, 27 nt, Homo Sapiens
gguccagcugccuucagccccccuccc

SEQ ID NO: 250624 - RNA, 32 nt, Homo Sapiens
uauucuacugaauauaauuuaagcaaugggcu

SEQ ID NO: 250625 - RNA, 32 nt, Homo Sapiens
ucucaguauagauugccaguauuguuaagagu

SEQ ID NO: 250626 - RNA, 32 nt, Homo Sapiens
augcaggucauuacuguaaguuuuccauuuuu

SEQ ID NO: 250627 - RNA, 32 nt, Homo Sapiens
cagagacgucccgcaggcggagguaggccgcg

SEQ ID NO: 250628 - RNA, 32 nt, Homo Sapiens
guuuuuaacucauuuuaaaugauguguaugca

SEQ ID NO: 250629 - RNA, 32 nt, Homo Sapiens
uuaaauugggguuaccuauaauaauacaauuu

SEQ ID NO: 250630 - RNA, 32 nt, Homo Sapiens
uggagagcagugcagggucauccccagacgug

SEQ ID NO: 250631 - RNA, 32 nt, Homo Sapiens
gaaagucaggugguaugcccuacugggaagau

SEQ ID NO: 250632 - RNA, 32 nt, Homo Sapiens
ucuagcuggcaauguuucuaaaacuuucacug

SEQ ID NO: 250633 - RNA, 32 nt, Homo Sapiens
agccgcuaccagggggucagagggaucggaag

SEQ ID NO: 250634 - RNA, 32 nt, Homo Sapiens
uggaaccgggauggcgacgucuacacugaguc

SEQ ID NO: 250635 - RNA, 32 nt, Homo Sapiens
uacuucgcgggcccgcccguaggccggggaga

SEQ ID NO: 250636 - RNA, 31 nt, Homo Sapiens
ugggcagcaaagaaaggguguauugauaaug

SEQ ID NO: 250637 - RNA, 32 nt, Homo Sapiens
caaagucgggaggcaaagcggcugggucacca

SEQ ID NO: 250638 - RNA, 32 nt, Homo Sapiens
auaguggcacuagucaccuuaaguagauuaca

SEQ ID NO: 250639 - RNA, 32 nt, Homo Sapiens
cuggacugcccucuccuucuuggugauucaaa

SEQ ID NO: 250640 - RNA, 32 nt, Homo Sapiens
ugaaauagugguuguggaacaguagaaaacca

SEQ ID NO: 250641 - RNA, 32 nt, Homo Sapiens
caaccucugaagaccucuauucauguggcccu

SEQ ID NO: 250642 - RNA, 32 nt, Homo Sapiens
agguucgugcgcgucugguggcggcggcguga

SEQ ID NO: 250643 - RNA, 32 nt, Homo Sapiens
gauccgcccgccggcucccccucccccgaucc

SEQ ID NO: 250644 - RNA, 32 nt, Homo Sapiens
augcagugggcuuuucugggagaaaguuauuc

SEQ ID NO: 250645 - RNA, 27 nt, Homo Sapiens
aaacuucccucucccagcccccgaggc

SEQ ID NO: 250646 - RNA, 32 nt, Homo Sapiens
agagauaaaauauuguaccauuaaacuuuaau

SEQ ID NO: 250647 - RNA, 32 nt, Homo Sapiens
ggaaagacuaccagcucugucuuucuacccuc

SEQ ID NO: 250648 - RNA, 32 nt, Homo Sapiens
cugggugcagcggggaggagcagaugagcugg

SEQ ID NO: 250649 - RNA, 32 nt, Homo Sapiens
gccuaugauguaaaaugaaaugcuucugagca

SEQ ID NO: 250650 - RNA, 32 nt, Homo Sapiens
augcauacacagacacaagacacacacgcuca

SEQ ID NO: 250651 - RNA, 32 nt, Homo Sapiens
aauauacagggagaagacauguugcaauacaa

SEQ ID NO: 250652 - RNA, 32 nt, Homo Sapiens
uguauauuuccacagcauccuagccuucccca

SEQ ID NO: 250653 - RNA, 32 nt, Homo Sapiens
gugagcccauaaaacaguauuuuuuagaaguu

SEQ ID NO: 250654 - RNA, 32 nt, Homo Sapiens
gggaauaagaaaggccgagagaaggcggacag

SEQ ID NO: 250655 - RNA, 32 nt, Homo Sapiens
uguuugagaauucugauccaaaacuuuaguug

SEQ ID NO: 250656 - RNA, 32 nt, Homo Sapiens
gaaaaaacaucaaaaaacaauuagcauuggac

SEQ ID NO: 250657 - RNA, 32 nt, Homo Sapiens
cgcagcccgaccccggccgccaguccagccgc

SEQ ID NO: 250658 - RNA, 32 nt, Homo Sapiens
ucccugucguucaugauagacacaaugaaauc

SEQ ID NO: 250659 - RNA, 32 nt, Homo Sapiens
auucaggacaacauggauggaauuggagggca

SEQ ID NO: 250660 - RNA, 32 nt, Homo Sapiens
aaaacagugucugaugaggaguguuuccaaca

SEQ ID NO: 250661 - RNA, 32 nt, Homo Sapiens
uugcuugggugcagcggcugggggguggggac

SEQ ID NO: 250662 - RNA, 32 nt, Homo Sapiens
caguauaauuauguuucugccuaugauguuga

SEQ ID NO: 250663 - RNA, 30 nt, Homo Sapiens
gagugagagaagcaaguugcaugagugcau

SEQ ID NO: 250664 - RNA, 32 nt, Homo Sapiens
ccuagcugauuguuguggucaaugaaauaccc

SEQ ID NO: 250665 - RNA, 32 nt, Homo Sapiens
gagagcaagauggagcccaagauggaacccaa

SEQ ID NO: 250666 - RNA, 32 nt, Homo Sapiens
gcugucugagucauggggcgccuagucaaaau

SEQ ID NO: 250667 - RNA, 32 nt, Homo Sapiens
agauaaaggauaacuuuuuacgguuuuaaaag

SEQ ID NO: 250668 - RNA, 32 nt, Homo Sapiens
aaaaucagcuuucaaaaggagcuuaggaacaa

SEQ ID NO: 250669 - RNA, 30 nt, Homo Sapiens
cuguuccuggacugcugcuggcuggcgagg

SEQ ID NO: 250670 - RNA, 31 nt, Homo Sapiens
caaugucaguucugugucccaaauaaaugua

SEQ ID NO: 250671 - RNA, 28 nt, Homo Sapiens
acuucucagaaaaaacauuugaaaacaa

SEQ ID NO: 250672 - RNA, 32 nt, Homo Sapiens
ugaaccucucaaaguauguuuuccauucuucc

SEQ ID NO: 250673 - RNA, 32 nt, Homo Sapiens
gccggcgguagacgaggacgccaacagcagcg

SEQ ID NO: 250674 - RNA, 32 nt, Homo Sapiens
agcuggauauugugauaccuccgaggauucag

SEQ ID NO: 250675 - RNA, 32 nt, Homo Sapiens
agcuccuuucccuggaagaggaauccagugaa

SEQ ID NO: 250676 - RNA, 30 nt, Homo Sapiens
cuucagcauguaauuggggaaacccucgcg

SEQ ID NO: 250677 - RNA, 32 nt, Homo Sapiens
gaccuaacccaccauagucaauccaagacuag

SEQ ID NO: 250678 - RNA, 32 nt, Homo Sapiens
aaauagggauaccaugggacaaacagugaaug

SEQ ID NO: 250679 - RNA, 30 nt, Homo Sapiens
acaggcugugcgcagcagccccaggaccuc

SEQ ID NO: 250680 - RNA, 32 nt, Homo Sapiens
acagagagaaccucuuccacuuuuacuuuucg

SEQ ID NO: 250681 - RNA, 32 nt, Homo Sapiens
cacauaaguguuagccagcagcuccagaaaaa

SEQ ID NO: 250682 - RNA, 32 nt, Homo Sapiens
ucccacagccccacccccuagggcugcaguuu

SEQ ID NO: 250683 - RNA, 26 nt, Homo Sapiens
uucuaauaaaccaaucuuucuguaaa

SEQ ID NO: 250684 - RNA, 32 nt, Homo Sapiens
ucuacugccagcugucccacccuaccugcaaa

SEQ ID NO: 250685 - RNA, 32 nt, Homo Sapiens
gaagcccugccuggaugcauggagcagaugga

SEQ ID NO: 250686 - RNA, 30 nt, Homo Sapiens
aggaggaauaucccucuaccuugggacugg

SEQ ID NO: 250687 - RNA, 32 nt, Homo Sapiens
ucggcgcuuccaccccagugcagccuuccccu

SEQ ID NO: 250688 - RNA, 32 nt, Homo Sapiens
cauggccggggccuacgacgcgccaccccccg

SEQ ID NO: 250689 - RNA, 32 nt, Homo Sapiens
gcccagcuccagccucccgguggccucugcag

SEQ ID NO: 250690 - RNA, 32 nt, Homo Sapiens
agaaaagagcaacguuaaagugaggcuguacc

SEQ ID NO: 250691 - RNA, 32 nt, Homo Sapiens
auggaaccgaggggagggcgccacggauuugc

SEQ ID NO: 250692 - RNA, 32 nt, Homo Sapiens
gaagguaugggcagaagcuguaaguggucccu

SEQ ID NO: 250693 - RNA, 32 nt, Homo Sapiens
ccccuugguguugggcuuugcagcucacaccc

SEQ ID NO: 250694 - RNA, 32 nt, Homo Sapiens
cugccggcccacaggcccaucccggcggggca

SEQ ID NO: 250695 - RNA, 32 nt, Homo Sapiens
cuaaauuaaaauaaaaucuuagaaaaaguagg

SEQ ID NO: 250696 - RNA, 32 nt, Homo Sapiens
ccgcaaggaggaggagugccaggcaggggcug

SEQ ID NO: 250697 - RNA, 29 nt, Homo Sapiens
augaaaauggacuuuuauuuucucucugu

SEQ ID NO: 250698 - RNA, 32 nt, Homo Sapiens
acagugggcaccuucccccagcccuggcuggg

SEQ ID NO: 250699 - RNA, 32 nt, Homo Sapiens
ugaugucagaaacuuuaaauuuuuaaaaggcu

SEQ ID NO: 250700 - RNA, 32 nt, Homo Sapiens
guuucuaugauguggcagaaaugggcuuggcu

SEQ ID NO: 250701 - RNA, 32 nt, Homo Sapiens
ccaucggguuaccaugguaauccaccaggcaa

SEQ ID NO: 250702 - RNA, 32 nt, Homo Sapiens
agcauccuggcugcuggggcuacuucauuccc

SEQ ID NO: 250703 - RNA, 32 nt, Homo Sapiens
aggggguggguucucccugaugaccagguucu

SEQ ID NO: 250704 - RNA, 27 nt, Homo Sapiens
gacuggucggucuucagcaccgggggu

SEQ ID NO: 250705 - RNA, 31 nt, Homo Sapiens
uguaacucuugagacaaguccacugugaccu

SEQ ID NO: 250706 - RNA, 32 nt, Homo Sapiens
cugcagauacugaagguuuuguuuccuucuug

SEQ ID NO: 250707 - RNA, 32 nt, Homo Sapiens
caccuugugggaacuggguccagggaaccaac

SEQ ID NO: 250708 - RNA, 32 nt, Homo Sapiens
ggagggugcaggggagggcacggcgccgcuug

SEQ ID NO: 250709 - RNA, 32 nt, Homo Sapiens
uccagcggccucccgcgccgcaaccuccuccu

SEQ ID NO: 250710 - RNA, 32 nt, Homo Sapiens
ugagaauaggaaagauuccgccugcuuaccug

SEQ ID NO: 250711 - RNA, 32 nt, Homo Sapiens
uuuuggggguggcauuugcauccugcugugga

SEQ ID NO: 250712 - RNA, 32 nt, Homo Sapiens
cugcaucccccauuuuauugcaucaaaaauug

SEQ ID NO: 250713 - RNA, 32 nt, Homo Sapiens
gggucgggaaaggccaccugucccacuccuac

SEQ ID NO: 250714 - RNA, 32 nt, Homo Sapiens
ggccuggagaggggaggcaggggccccugugc

SEQ ID NO: 250715 - RNA, 32 nt, Homo Sapiens
aaggucucuugccucccugaggaccuguauac

SEQ ID NO: 250716 - RNA, 29 nt, Homo Sapiens
acauauguauguaugaugcuuuucauccc

SEQ ID NO: 250717 - RNA, 32 nt, Homo Sapiens
agagagggggaagaguggucugagcacgaguu

SEQ ID NO: 250718 - RNA, 32 nt, Homo Sapiens
guuaaaggaugaggagugagucauaaggggga

SEQ ID NO: 250719 - RNA, 32 nt, Homo Sapiens
aaaaagaaaaauaccguguuacacacauuugc

SEQ ID NO: 250720 - RNA, 32 nt, Homo Sapiens
acuucucccacugugugauggcgacaagauug

SEQ ID NO: 250721 - RNA, 32 nt, Homo Sapiens
agaaugaccccucacccuccccgcgcuuucca

SEQ ID NO: 250722 - RNA, 32 nt, Homo Sapiens
gaccccacccucgggggcuuucggcucccaca

SEQ ID NO: 250723 - RNA, 32 nt, Homo Sapiens
ccuaggagggugggggcgggaaggaggggcaa

SEQ ID NO: 250724 - RNA, 32 nt, Homo Sapiens
accugggagcagcuuccccuggagaugcuggu

SEQ ID NO: 250725 - RNA, 31 nt, Homo Sapiens
uuucccucucccccuccccaaacacaccaag

SEQ ID NO: 250726 - RNA, 32 nt, Homo Sapiens
ggggccguggugacucacgggcagggaggcga

SEQ ID NO: 250727 - RNA, 32 nt, Homo Sapiens
gaagaaaauuuaauuauuuguuugccucaugc

SEQ ID NO: 250728 - RNA, 32 nt, Homo Sapiens
uuuucaaaugucagcuuaaaauugguaauuga

SEQ ID NO: 250729 - RNA, 32 nt, Homo Sapiens
caaacuccccucccaaaucaacugaaaaagcu

SEQ ID NO: 250730 - RNA, 32 nt, Homo Sapiens
gaaagggagagccaccugguacuuguccaccc

SEQ ID NO: 250731 - RNA, 32 nt, Homo Sapiens
caccugcgcgucccggcccggccccgggcucu

SEQ ID NO: 250732 - RNA, 32 nt, Homo Sapiens
ccuguaccuuggagguccauucacaugggaaa

SEQ ID NO: 250733 - RNA, 32 nt, Homo Sapiens
aagacuccugcugccuggaccuucgucagcuu

SEQ ID NO: 250734 - RNA, 32 nt, Homo Sapiens
cguccggugucaagccccggcgcaggcuugcu

SEQ ID NO: 250735 - RNA, 32 nt, Homo Sapiens
cgccccacuguuuccacccauccccuuagcca

SEQ ID NO: 250736 - RNA, 32 nt, Homo Sapiens
cauuaauucaaugaaauggauugguaagaugu

SEQ ID NO: 250737 - RNA, 32 nt, Homo Sapiens
auugucccaucccaccacuaccuuuuucucaa

SEQ ID NO: 250738 - RNA, 32 nt, Homo Sapiens
cccugccccuccccgcuuccugaccucugaag

SEQ ID NO: 250739 - RNA, 32 nt, Homo Sapiens
gccagacgacgccagcgaccccggccucucgg

SEQ ID NO: 250740 - RNA, 32 nt, Homo Sapiens
cuugauaccaaaaucuggcacacacacacaca

SEQ ID NO: 250741 - RNA, 32 nt, Homo Sapiens
aauauuuuaagugauauguuuaugaugucauc

SEQ ID NO: 250742 - RNA, 32 nt, Homo Sapiens
acuaguuaauaaaucuuaaugaaacuuuccau

SEQ ID NO: 250743 - RNA, 32 nt, Homo Sapiens
uaacuguuggucuuacuaaaaugguaauauuu

SEQ ID NO: 250744 - RNA, 32 nt, Homo Sapiens
cagccccggcccggcgcccgcgggccauuguc

SEQ ID NO: 250745 - RNA, 32 nt, Homo Sapiens
agagaacaccaaucccauccacacucacgcaa

SEQ ID NO: 250746 - RNA, 32 nt, Homo Sapiens
uaggcuuaaaugcaauauuccugguauuauuu

SEQ ID NO: 250747 - RNA, 32 nt, Homo Sapiens
aauggcaguccuggaggcagggggugaggggc

SEQ ID NO: 250748 - RNA, 32 nt, Homo Sapiens
auggaacaguucuauaugauuaugaugauuac

SEQ ID NO: 250749 - RNA, 32 nt, Homo Sapiens
gauuucaggaccaugggccugugcuguuuaca

SEQ ID NO: 250750 - RNA, 32 nt, Homo Sapiens
ccaaagugcugggauuacagcgaagagccaca

SEQ ID NO: 250751 - RNA, 32 nt, Homo Sapiens
cagaaauuugagggaggggaacaaagaauacu

SEQ ID NO: 250752 - RNA, 32 nt, Homo Sapiens
guguuccaggacuggguguucugcuggucucc

SEQ ID NO: 250753 - RNA, 32 nt, Homo Sapiens
ugaagccuuuccccacuuuucauuucauauuc

SEQ ID NO: 250754 - RNA, 32 nt, Homo Sapiens
ggaauaaagauuguuugacucuggagaggaga

SEQ ID NO: 250755 - RNA, 32 nt, Homo Sapiens
cuuuuugccaucucacccuguuuacaugccau

SEQ ID NO: 250756 - RNA, 32 nt, Homo Sapiens
ucagcaccccuccaguuuugccugagaagggg

SEQ ID NO: 250757 - RNA, 32 nt, Homo Sapiens
cgcccagagugucaaggcugguaugaucagug

SEQ ID NO: 250758 - RNA, 32 nt, Homo Sapiens
gggaagcgcagccacccgccugcgucuggggu

SEQ ID NO: 250759 - RNA, 32 nt, Homo Sapiens
ucggccgccagcccuccacaccucaucugccu

SEQ ID NO: 250760 - RNA, 32 nt, Homo Sapiens
cauacaauuuuuaauugugcuguaaaaguuaa

SEQ ID NO: 250761 - RNA, 32 nt, Homo Sapiens
aguuugaagguucagacuuaaaccugaauugg

SEQ ID NO: 250762 - RNA, 31 nt, Homo Sapiens
ggcugggagccccagacaccgacacccugag

SEQ ID NO: 250763 - RNA, 32 nt, Homo Sapiens
uacuucaaauugucuguuaaauuuauuaugcc

SEQ ID NO: 250764 - RNA, 32 nt, Homo Sapiens
uuuuuaaaaguucuguggauagauggcaguga

SEQ ID NO: 250765 - RNA, 32 nt, Homo Sapiens
uggagcccgagguccccgcgcggcccgggccu

SEQ ID NO: 250766 - RNA, 32 nt, Homo Sapiens
gucacuccagcaucucuguaaaauaauuggaa

SEQ ID NO: 250767 - RNA, 32 nt, Homo Sapiens
cauggaaaauuccacgaggcucauucucagua

SEQ ID NO: 250768 - RNA, 32 nt, Homo Sapiens
acaugcucaaggaagaugcagccccuuccucc

SEQ ID NO: 250769 - RNA, 32 nt, Homo Sapiens
guauggcagaaucuagcaugaugccuugaaau

SEQ ID NO: 250770 - RNA, 32 nt, Homo Sapiens
gucuggcccccuccuccggguuaggggagcaa

SEQ ID NO: 250771 - RNA, 32 nt, Homo Sapiens
cuuugcucucugaaaccuacauuccgucaguu

SEQ ID NO: 250772 - RNA, 32 nt, Homo Sapiens
aagccaguucccugccccuggucuggucuccc

SEQ ID NO: 250773 - RNA, 28 nt, Homo Sapiens
aucaugggcacacgcuccuucugcccga

SEQ ID NO: 250774 - RNA, 32 nt, Homo Sapiens
cacuuccuguuggucugucucuucccaccuuc

SEQ ID NO: 250775 - RNA, 32 nt, Homo Sapiens
ugggacccagaucuccucuccuccagaaaacc

SEQ ID NO: 250776 - RNA, 32 nt, Homo Sapiens
aucuugcuauauauggcaagguaaaggcgaac

SEQ ID NO: 250777 - RNA, 32 nt, Homo Sapiens
guuggaggaaggcugacagagaaggucuccuc

SEQ ID NO: 250778 - RNA, 32 nt, Homo Sapiens
gaagaaggccaguacagccugaacuuccacaa

SEQ ID NO: 250779 - RNA, 32 nt, Homo Sapiens
gugcuuguaaauaaauaaggucaugacucuaa

SEQ ID NO: 250780 - RNA, 32 nt, Homo Sapiens
ugcucauuuucagaauaacuuuccaggaagag

SEQ ID NO: 250781 - RNA, 32 nt, Homo Sapiens
gggaguuuugauugcauauuuuguuauaguuc

SEQ ID NO: 250782 - RNA, 32 nt, Homo Sapiens
uugggccagccgggcugcugcagacagacagg

SEQ ID NO: 250783 - RNA, 32 nt, Homo Sapiens
acuucagaguaggacagcaggcugggaagaug

SEQ ID NO: 250784 - RNA, 32 nt, Homo Sapiens
uggcugggaggacuugggagggggauggggac

SEQ ID NO: 250785 - RNA, 32 nt, Homo Sapiens
gcagaugcugcugccgccacggcggcggcggc

SEQ ID NO: 250786 - RNA, 32 nt, Homo Sapiens
gagccaguggugcugagguauccaacagggca

SEQ ID NO: 250787 - RNA, 32 nt, Homo Sapiens
aggcaucuccaaguuagacucuaugcagcauc

SEQ ID NO: 250788 - RNA, 32 nt, Homo Sapiens
aaguuuuguauauaagcaguagauacagauug

SEQ ID NO: 250789 - RNA, 32 nt, Homo Sapiens
ugaggcugguccccuccucugcuuuagccccg

SEQ ID NO: 250790 - RNA, 32 nt, Homo Sapiens
cccaccuccugcucccucccccucgcccacca

SEQ ID NO: 250791 - RNA, 32 nt, Homo Sapiens
uguggcacccucuguauacuuccuccuccuuc

SEQ ID NO: 250792 - RNA, 32 nt, Homo Sapiens
auaauagaagauuguuagucuugcuugauggu

SEQ ID NO: 250793 - RNA, 32 nt, Homo Sapiens
accugccaugcagcugagagccaagcccugcu

SEQ ID NO: 250794 - RNA, 32 nt, Homo Sapiens
aaacugugugacuacuucucagagcaccuggg

SEQ ID NO: 250795 - RNA, 32 nt, Homo Sapiens
ugauaaacugaugauucuuaaucaagauuguu

SEQ ID NO: 250796 - RNA, 32 nt, Homo Sapiens
uuacauagguaggcuugugccauggugguuug

SEQ ID NO: 250797 - RNA, 32 nt, Homo Sapiens
uacuguuuuuaaaguucaugaucaucuggaau

SEQ ID NO: 250798 - RNA, 32 nt, Homo Sapiens
uuucugcucaaauaauacucuuaucgaaaaug

SEQ ID NO: 250799 - RNA, 32 nt, Homo Sapiens
ugcugaacuccagccaucaacacggugggagg

SEQ ID NO: 250800 - RNA, 32 nt, Homo Sapiens
aaacuggaaacacucugaacccugccaucuug

SEQ ID NO: 250801 - RNA, 32 nt, Homo Sapiens
agggauaaggugggacaauggggggugggggu

SEQ ID NO: 250802 - RNA, 32 nt, Homo Sapiens
agucggcccuagacacccacgacucgcagggu

SEQ ID NO: 250803 - RNA, 32 nt, Homo Sapiens
aacaaauauguaaacaaaaauaaaaugguaaa

SEQ ID NO: 250804 - RNA, 32 nt, Homo Sapiens
auuugaacaaagugagaaugaacuuuuguuuc

SEQ ID NO: 250805 - RNA, 32 nt, Homo Sapiens
aaaaugaaaaauaccaucaagauacaugaaaa

SEQ ID NO: 250806 - RNA, 32 nt, Homo Sapiens
guuguacaauguguugaccaucgcaggggugg

SEQ ID NO: 250807 - RNA, 32 nt, Homo Sapiens
acaagauggugauuccugacauuccuuggcug

SEQ ID NO: 250808 - RNA, 32 nt, Homo Sapiens
cuggaguccaggcagccuggcuccugaauccu

SEQ ID NO: 250809 - RNA, 29 nt, Homo Sapiens
cucaguguuucuagauuccagacccugcu

SEQ ID NO: 250810 - RNA, 32 nt, Homo Sapiens
cccgcgcugcgcauccccgcggacgccacagc

SEQ ID NO: 250811 - RNA, 32 nt, Homo Sapiens
ccauuccauuguggaagcugggccaggugcca

SEQ ID NO: 250812 - RNA, 32 nt, Homo Sapiens
gauuuaggguaucugguagaagaaauuucuaa

SEQ ID NO: 250813 - RNA, 32 nt, Homo Sapiens
cugggcgguuuccauuugaaugcugugaaauu

SEQ ID NO: 250814 - RNA, 32 nt, Homo Sapiens
gcgacuagcggcagcgacgcggcuaaaagcga

SEQ ID NO: 250815 - RNA, 32 nt, Homo Sapiens
gaggaugccugccuggacccuguugguggcug

SEQ ID NO: 250816 - RNA, 32 nt, Homo Sapiens
ccugaccacuguauuuaauacuguaccuuguu

SEQ ID NO: 250817 - RNA, 32 nt, Homo Sapiens
guucaauuuuaaaaacugucuucuuuauuuaa

SEQ ID NO: 250818 - RNA, 32 nt, Homo Sapiens
caauggagagguaagacagaccacaaacuagu

SEQ ID NO: 250819 - RNA, 32 nt, Homo Sapiens
aaauaagcuauguauuaaaucugucuccaguu

SEQ ID NO: 250820 - RNA, 32 nt, Homo Sapiens
cgcgggucugaauggaagggucgaggucgucg

SEQ ID NO: 250821 - RNA, 32 nt, Homo Sapiens
ggcagcaggagcaggaggagcgugaacgagaa

SEQ ID NO: 250822 - RNA, 32 nt, Homo Sapiens
cuacucaguuuauaaagcaguuccacaccaug

SEQ ID NO: 250823 - RNA, 32 nt, Homo Sapiens
cauucuuucggucuucuguuugccucacuggu

SEQ ID NO: 250824 - RNA, 32 nt, Homo Sapiens
gcugguggccgccgcugcugccccagcuggag

SEQ ID NO: 250825 - RNA, 32 nt, Homo Sapiens
cggcaggcucaggugcagccgcugcucaaaga

SEQ ID NO: 250826 - RNA, 32 nt, Homo Sapiens
caggguuuagggguaguguuucccauuaaucu

SEQ ID NO: 250827 - RNA, 32 nt, Homo Sapiens
cacaacaucucauccuacaaaaguuaagaagc

SEQ ID NO: 250828 - RNA, 32 nt, Homo Sapiens
ugaggggggagguaguuuaauuuuaugggcuc

SEQ ID NO: 250829 - RNA, 32 nt, Homo Sapiens
guccgggcuggagccgaggccggagcagcugu

SEQ ID NO: 250830 - RNA, 31 nt, Homo Sapiens
ugggccuauuugacuucugagugaagcaaaa

SEQ ID NO: 250831 - RNA, 31 nt, Homo Sapiens
gacaggguuucacuguguuagccaggauggu

SEQ ID NO: 250832 - RNA, 32 nt, Homo Sapiens
gccacagagucuuugcacauccugcucuuucc

SEQ ID NO: 250833 - RNA, 32 nt, Homo Sapiens
gcgggcgggggcggggugugaggcgcugcgga

SEQ ID NO: 250834 - RNA, 32 nt, Homo Sapiens
ucuaggccugcucugcccuugccguggggaag

SEQ ID NO: 250835 - RNA, 32 nt, Homo Sapiens
acaucucuauuuuuuauuuauuacaaugauuu

SEQ ID NO: 250836 - RNA, 32 nt, Homo Sapiens
cgcggcuuccugccacugucccggcccggcca

SEQ ID NO: 250837 - RNA, 32 nt, Homo Sapiens
gcggacugggacuuggcuuucuccggauaagc

SEQ ID NO: 250838 - RNA, 32 nt, Homo Sapiens
aaaaaaugcacaacaugcuaagaucaaagcaa

SEQ ID NO: 250839 - RNA, 32 nt, Homo Sapiens
cugccucugugccuauggguugcacuucuucc

SEQ ID NO: 250840 - RNA, 32 nt, Homo Sapiens
cuaucacucuggcugguugggcugguccuuag

SEQ ID NO: 250841 - RNA, 32 nt, Homo Sapiens
gcagguaaugaaaauuaauuauuguuaauucg

SEQ ID NO: 250842 - RNA, 32 nt, Homo Sapiens
cucgacccccagacagggcggcccguauuaaa

SEQ ID NO: 250843 - RNA, 32 nt, Homo Sapiens
uuuuguaccuaaguggauauagauaacugcau

SEQ ID NO: 250844 - RNA, 32 nt, Homo Sapiens
uggaaaaauaccuuguauuugauaaaaaucca

SEQ ID NO: 250845 - RNA, 32 nt, Homo Sapiens
cucuucugauuuauauuuuuuauuauaauuau

SEQ ID NO: 250846 - RNA, 32 nt, Homo Sapiens
uccagguucugcagcaccaggcagaugaugca

SEQ ID NO: 250847 - RNA, 32 nt, Homo Sapiens
auuguacauauggauuuuuuuauuguuuagau

SEQ ID NO: 250848 - RNA, 32 nt, Homo Sapiens
ucuacugcagggcgcacuggggugucucgggg

SEQ ID NO: 250849 - RNA, 32 nt, Homo Sapiens
gagcccuacagacaggcauguguagaaggcaa

SEQ ID NO: 250850 - RNA, 32 nt, Homo Sapiens
cggccaccccguucccuccccagcuuccugcc

SEQ ID NO: 250851 - RNA, 32 nt, Homo Sapiens
caagcggaccagcuccauggauuccccaggag

SEQ ID NO: 250852 - RNA, 32 nt, Homo Sapiens
uccuccuccccucagcccccagccuccaggcc

SEQ ID NO: 250853 - RNA, 30 nt, Homo Sapiens
ccuccaggcaggccgggcuggaccgcguga

SEQ ID NO: 250854 - RNA, 32 nt, Homo Sapiens
acacuauucuugauuuucuuugaaaggcuuua

SEQ ID NO: 250855 - RNA, 32 nt, Homo Sapiens
caggaaugaggcuuccuugguuuccaugucug

SEQ ID NO: 250856 - RNA, 32 nt, Homo Sapiens
ugcugugaugaccaauuuugugaauaaaaugu

SEQ ID NO: 250857 - RNA, 30 nt, Homo Sapiens
gggaaaggagguggugucccuaauuguuuu

SEQ ID NO: 250858 - RNA, 32 nt, Homo Sapiens
gacacacugcccguguucaaggggcugcucgg

SEQ ID NO: 250859 - RNA, 32 nt, Homo Sapiens
cuuggugaucucuggaggaagaguguugccuu

SEQ ID NO: 250860 - RNA, 32 nt, Homo Sapiens
ugguagaacugaauuccuuccuccccugucuc

SEQ ID NO: 250861 - RNA, 32 nt, Homo Sapiens
gcugaggcggguggaucacaaggucaggagau

SEQ ID NO: 250862 - RNA, 32 nt, Homo Sapiens
ccugagcccacuuuccccaucucaucacagau

SEQ ID NO: 250863 - RNA, 32 nt, Homo Sapiens
uuagaguccagucggaggaaagggaggagggg

SEQ ID NO: 250864 - RNA, 32 nt, Homo Sapiens
gaauucggcacgacgggguucuggccaugaag

SEQ ID NO: 250865 - RNA, 32 nt, Homo Sapiens
uucuuuuuauuaugacuaugcccuucgcaaca

SEQ ID NO: 250866 - RNA, 32 nt, Homo Sapiens
ggccagugccugaaaacgcucacugaugauga

SEQ ID NO: 250867 - RNA, 32 nt, Homo Sapiens
ggggugguucuuuuccuucuccuccgccagag

SEQ ID NO: 250868 - RNA, 32 nt, Homo Sapiens
gcgugcgggacaguuauguuuccuugccccgu

SEQ ID NO: 250869 - RNA, 32 nt, Homo Sapiens
ugucagcggauaaacgcucuccccucggcucc

SEQ ID NO: 250870 - RNA, 32 nt, Homo Sapiens
uguugauucuaccuguguucuguuccagcgaa

SEQ ID NO: 250871 - RNA, 32 nt, Homo Sapiens
cuuacauaaaaugacauauuuguauauaacca

SEQ ID NO: 250872 - RNA, 32 nt, Homo Sapiens
uggcaucuccuggguggaggccaggcagggcu

SEQ ID NO: 250873 - RNA, 32 nt, Homo Sapiens
ggacaugcaauaaaauuuaaaaaauaaauaaa

SEQ ID NO: 250874 - RNA, 32 nt, Homo Sapiens
uggaauauuucugaggaauaaugguuuaauua

SEQ ID NO: 250875 - RNA, 28 nt, Homo Sapiens
cugaggcacgagaaucauuugaacccag

SEQ ID NO: 250876 - RNA, 32 nt, Homo Sapiens
ccggaccuggggagaggguggguggagcuugg

SEQ ID NO: 250877 - RNA, 27 nt, Homo Sapiens
cacauccuccuugacagcccccagaag

SEQ ID NO: 250878 - RNA, 32 nt, Homo Sapiens
ccauguugugaugcccuugaaguaaaauggag

SEQ ID NO: 250879 - RNA, 32 nt, Homo Sapiens
caacagugucggagaguggcugcugguccaag

SEQ ID NO: 250880 - RNA, 32 nt, Homo Sapiens
guuuauagaucacugcccuuuuugaaaucacc

SEQ ID NO: 250881 - RNA, 32 nt, Homo Sapiens
cuccuccucuugcuccuccucggcguacgguc

SEQ ID NO: 250882 - RNA, 32 nt, Homo Sapiens
cugaugaaagauacaccacagggugagagcau

SEQ ID NO: 250883 - RNA, 32 nt, Homo Sapiens
augaagcaggaucaaugaugggauaaaaauca

SEQ ID NO: 250884 - RNA, 32 nt, Homo Sapiens
agaauuugaaauggguugacuggccauucuca

SEQ ID NO: 250885 - RNA, 32 nt, Homo Sapiens
uaaaaacggacaucuccaccguggguggcucc

SEQ ID NO: 250886 - RNA, 32 nt, Homo Sapiens
uccuucccuuccuuuuuccccaaggucgcugg

SEQ ID NO: 250887 - RNA, 29 nt, Homo Sapiens
aauaaaguuccuuuauauuucugucccau

SEQ ID NO: 250888 - RNA, 32 nt, Homo Sapiens
uccccucgggggugggguagugcucagcuccc

SEQ ID NO: 250889 - RNA, 32 nt, Homo Sapiens
auuccguuuuguuuguuuuuugaaauauagcu

SEQ ID NO: 250890 - RNA, 32 nt, Homo Sapiens
cacccaagggucgucuucugcugcugaccccc

SEQ ID NO: 250891 - RNA, 32 nt, Homo Sapiens
aggaggaggaggagccgugaugggcuagcgac

SEQ ID NO: 250892 - RNA, 32 nt, Homo Sapiens
guuacugguaccaagacuacuagggaaaugcc

SEQ ID NO: 250893 - RNA, 32 nt, Homo Sapiens
agcggcugcuccuggcggcucugcggccguca

SEQ ID NO: 250894 - RNA, 32 nt, Homo Sapiens
uguauuaaguaaauaaauaaguaaauaaccaa

SEQ ID NO: 250895 - RNA, 32 nt, Homo Sapiens
ugaagagcuauggugaaacaccacugaagcau

SEQ ID NO: 250896 - RNA, 32 nt, Homo Sapiens
uguuucuguaguuaaaauuguuuucuuggugu

SEQ ID NO: 250897 - RNA, 32 nt, Homo Sapiens
gcugacccauucuccugggauuucccaggcca

SEQ ID NO: 250898 - RNA, 32 nt, Homo Sapiens
ucguguuuauacugcaccuugguuguugaugu

SEQ ID NO: 250899 - RNA, 32 nt, Homo Sapiens
guuauaacagaaaacugacagagaaguaauaa

SEQ ID NO: 250900 - RNA, 32 nt, Homo Sapiens
gggaugaagaacucuauuuugaggauucugug

SEQ ID NO: 250901 - RNA, 32 nt, Homo Sapiens
caggauuggggauaagucuugaggucuccccg

SEQ ID NO: 250902 - RNA, 32 nt, Homo Sapiens
cucuugucaacuggcugcaaaauacacuagug

SEQ ID NO: 250903 - RNA, 32 nt, Homo Sapiens
gacccgaaagagaauguauuuacacucaugcu

SEQ ID NO: 250904 - RNA, 32 nt, Homo Sapiens
aaccuggcuuucucaugcaacuucugugaagc

SEQ ID NO: 250905 - RNA, 32 nt, Homo Sapiens
ccuucccccucccccagccacuccccagccag

SEQ ID NO: 250906 - RNA, 32 nt, Homo Sapiens
cauuggugucuccuccagcccccuccauugcu

SEQ ID NO: 250907 - RNA, 32 nt, Homo Sapiens
agggcuuccuuccugccuccaggaccaauaaa

SEQ ID NO: 250908 - RNA, 32 nt, Homo Sapiens
gcccccugcccggcuccgcggcgcggaggaug

SEQ ID NO: 250909 - RNA, 32 nt, Homo Sapiens
ugggcgccugaggcugcccccacgccggcggc

SEQ ID NO: 250910 - RNA, 29 nt, Homo Sapiens
caagauggcgaguaaagagauguuugaag

SEQ ID NO: 250911 - RNA, 32 nt, Homo Sapiens
aaauguuauuuauuuagcauagacauuaaaga

SEQ ID NO: 250912 - RNA, 32 nt, Homo Sapiens
ccucucucuuggggcgcccacccggcccggcu

SEQ ID NO: 250913 - RNA, 32 nt, Homo Sapiens
uuuuaagaaaauaaaaagauuauccuuccaaa

SEQ ID NO: 250914 - RNA, 32 nt, Homo Sapiens
ucgguuuugugauucaaaauguacuauguguu

SEQ ID NO: 250915 - RNA, 32 nt, Homo Sapiens
acgcucaccacccugacccuccuuccagagca

SEQ ID NO: 250916 - RNA, 32 nt, Homo Sapiens
gaacacauuuuucuaaccuuagaaaauaccua

SEQ ID NO: 250917 - RNA, 32 nt, Homo Sapiens
uccuggggaaccucggccccagcccugccucc

SEQ ID NO: 250918 - RNA, 32 nt, Homo Sapiens
cuggcggcugcugucuggccccgggagaccag

SEQ ID NO: 250919 - RNA, 32 nt, Homo Sapiens
agacaaaaagaaccuuaccucccccacaauac

SEQ ID NO: 250920 - RNA, 32 nt, Homo Sapiens
ccuguccuuccccaacuccccagcuccaagag

SEQ ID NO: 250921 - RNA, 32 nt, Homo Sapiens
ggggacuguuuuacucugauacuaccuggaua

SEQ ID NO: 250922 - RNA, 32 nt, Homo Sapiens
ucaauaggcuuaaugaaagaggucuuucuugc

SEQ ID NO: 250923 - RNA, 32 nt, Homo Sapiens
gcagcucccgacgcaauggacccggcgcuggc

SEQ ID NO: 250924 - RNA, 32 nt, Homo Sapiens
ggucucagauuuaauuacaggaugacagccuu

SEQ ID NO: 250925 - RNA, 30 nt, Homo Sapiens
auacuggagaagcuuugaccaauuugacuu

SEQ ID NO: 250926 - RNA, 32 nt, Homo Sapiens
gcagaggauggaaaguugaugcccaguaagac

SEQ ID NO: 250927 - RNA, 32 nt, Homo Sapiens
uaaagaaaagggaaacaaaaaaaaucgaauaa

SEQ ID NO: 250928 - RNA, 32 nt, Homo Sapiens
acgaacgagaaaaagaaggaaaucagaucgag

SEQ ID NO: 250929 - RNA, 32 nt, Homo Sapiens
gcugggccagagggggucuuaguaaugugcua

SEQ ID NO: 250930 - RNA, 32 nt, Homo Sapiens
uaucauuuucucuacaucauagauaaggacau

SEQ ID NO: 250931 - RNA, 32 nt, Homo Sapiens
aguuuccccguccaaaggcucucuuccaaaac

SEQ ID NO: 250932 - RNA, 32 nt, Homo Sapiens
cuguugcaaaguauuguggccgagcugcagcu

SEQ ID NO: 250933 - RNA, 32 nt, Homo Sapiens
augauacauguaaauguacaaacuuuagaaag

SEQ ID NO: 250934 - RNA, 32 nt, Homo Sapiens
acaggcccgcggcuccuccagcacacugacuc

SEQ ID NO: 250935 - RNA, 27 nt, Homo Sapiens
uucuuccauuaauucuggaaaaaacgu

SEQ ID NO: 250936 - RNA, 32 nt, Homo Sapiens
cuucuuuuuuaaacucuugcuguaaaagaugg

SEQ ID NO: 250937 - RNA, 32 nt, Homo Sapiens
gcccugcugccccccucugccaggcgcuagac

SEQ ID NO: 250938 - RNA, 32 nt, Homo Sapiens
cacaaaaguaggcauuugauaaauggcucuuu

SEQ ID NO: 250939 - RNA, 29 nt, Homo Sapiens
agccuccguggcuggguacgggagcgcuu

SEQ ID NO: 250940 - RNA, 32 nt, Homo Sapiens
cucaggcagugcuuccuuccagaugggcuauc

SEQ ID NO: 250941 - RNA, 32 nt, Homo Sapiens
cgccaucugauccccaugccuagcagagugcu

SEQ ID NO: 250942 - RNA, 32 nt, Homo Sapiens
gaggugcacacaauaacuuagcacuaauccgc

SEQ ID NO: 250943 - RNA, 32 nt, Homo Sapiens
guguccugguaauuccucuccaggccagaaua

SEQ ID NO: 250944 - RNA, 32 nt, Homo Sapiens
cgccucuccgucuacacccccacaacaggggu

SEQ ID NO: 250945 - RNA, 32 nt, Homo Sapiens
cugcuccauuacugaggcugugacgauccugg

SEQ ID NO: 250946 - RNA, 32 nt, Homo Sapiens
gguuuucuuuuuucuuuuuucuuuuuuuuggu

SEQ ID NO: 250947 - RNA, 32 nt, Homo Sapiens
ccuugugcagaagacuaguuacacuuaauggg

SEQ ID NO: 250948 - RNA, 32 nt, Homo Sapiens
uuucaccuuuuuuuuucuuuuaauccuuuugg

SEQ ID NO: 250949 - RNA, 32 nt, Homo Sapiens
caucgcccuggccuacuucuuccugugguucc

SEQ ID NO: 250950 - RNA, 32 nt, Homo Sapiens
agauaaaugaugcaaaggccacacacacagga

SEQ ID NO: 250951 - RNA, 32 nt, Homo Sapiens
gccggcauccccacgcccccagcccagccugc

SEQ ID NO: 250952 - RNA, 32 nt, Homo Sapiens
cagucuccccagguccgccagcagccgguuca

SEQ ID NO: 250953 - RNA, 32 nt, Homo Sapiens
ugccuuguccaugccguuucccaacagggaug

SEQ ID NO: 250954 - RNA, 32 nt, Homo Sapiens
uggcuguggccuguuuuccuuugaccccacac

SEQ ID NO: 250955 - RNA, 31 nt, Homo Sapiens
cauuugucaggacuacucgugagacggagaa

SEQ ID NO: 250956 - RNA, 32 nt, Homo Sapiens
gaguuagaaagagauuguccucuuccugucac

SEQ ID NO: 250957 - RNA, 32 nt, Homo Sapiens
gaacaagagcugggguggagggggcggggacc

SEQ ID NO: 250958 - RNA, 32 nt, Homo Sapiens
ucaucucuaggaaaggagaaagagacuaccua

SEQ ID NO: 250959 - RNA, 32 nt, Homo Sapiens
auguuuuuucuuuuccuuguggccaaaccagu

SEQ ID NO: 250960 - RNA, 32 nt, Homo Sapiens
ccucuccggccccgcgcucugccgccccucag

SEQ ID NO: 250961 - RNA, 32 nt, Homo Sapiens
cugagaaugaaaaucuaaaugauugaaguuuu

SEQ ID NO: 250962 - RNA, 32 nt, Homo Sapiens
gcccugcccccgcuccugccaggaccuguccc

SEQ ID NO: 250963 - RNA, 28 nt, Homo Sapiens
caguaggggcggccgggcagaggugccc

SEQ ID NO: 250964 - RNA, 32 nt, Homo Sapiens
gguggcagccaucuccuucucggcaucauggc

SEQ ID NO: 250965 - RNA, 32 nt, Homo Sapiens
gcggccccguccggcccgggcuggcauggguu

SEQ ID NO: 250966 - RNA, 32 nt, Homo Sapiens
augguuguggggauugugggcucaacucaaga

SEQ ID NO: 250967 - RNA, 32 nt, Homo Sapiens
cacugcacuccagccugggcgacagagacucc

SEQ ID NO: 250968 - RNA, 32 nt, Homo Sapiens
aauuuacgcuuagucuaucaaacaagaaaugc

SEQ ID NO: 250969 - RNA, 32 nt, Homo Sapiens
ccggacgccccggcccccgggcccgucacacu

SEQ ID NO: 250970 - RNA, 32 nt, Homo Sapiens
ugcccugcucugcuuccugggggcuucagcaa

SEQ ID NO: 250971 - RNA, 32 nt, Homo Sapiens
aggaauggccugcuaggagaugcagugagccc

SEQ ID NO: 250972 - RNA, 32 nt, Homo Sapiens
cugaaggcuuugggcuggccuauaaggcccug

SEQ ID NO: 250973 - RNA, 32 nt, Homo Sapiens
ccaaagccugaagccaggugggugugggcagg

SEQ ID NO: 250974 - RNA, 32 nt, Homo Sapiens
gaccuccagagcauccagagccucuguccugc

SEQ ID NO: 250975 - RNA, 32 nt, Homo Sapiens
aaaauuugucucugagagacuauacauuccaa

SEQ ID NO: 250976 - RNA, 32 nt, Homo Sapiens
agauuccauuugguccucuccuuccuggaagg

SEQ ID NO: 250977 - RNA, 32 nt, Homo Sapiens
acgccauccgcuccuaauuuuccuccugccgg

SEQ ID NO: 250978 - RNA, 32 nt, Homo Sapiens
augaaauggauuucuucagcucuucuuaggaa

SEQ ID NO: 250979 - RNA, 32 nt, Homo Sapiens
acagccaguuuagagaaauacauguuguaaau

SEQ ID NO: 250980 - RNA, 32 nt, Homo Sapiens
cgaccuggaguuugugacgcugugauggucua

SEQ ID NO: 250981 - RNA, 32 nt, Homo Sapiens
auugaugccagcugcuccauggaccaggcccu

SEQ ID NO: 250982 - RNA, 32 nt, Homo Sapiens
aagagacuggaacaguuuccauggugcuggag

SEQ ID NO: 250983 - RNA, 32 nt, Homo Sapiens
cauuuaccaggauucccguagggcguuuugua

SEQ ID NO: 250984 - RNA, 32 nt, Homo Sapiens
uguacaaaauauuugucuuuuacaauuuuuuu

SEQ ID NO: 250985 - RNA, 32 nt, Homo Sapiens
cgcccucugaucgccgaucaccucugagaccc

SEQ ID NO: 250986 - RNA, 30 nt, Homo Sapiens
aacgaaaagcagaaccaugagucugauggc

SEQ ID NO: 250987 - RNA, 32 nt, Homo Sapiens
gagaagucucaaagaaauauaccacgugaggg

SEQ ID NO: 250988 - RNA, 32 nt, Homo Sapiens
uuguucgcuucugauacuaagagcagcacggu

SEQ ID NO: 250989 - RNA, 32 nt, Homo Sapiens
uaaccccgccgcugccggcgucgccgcaccag

SEQ ID NO: 250990 - RNA, 32 nt, Homo Sapiens
ucacuuucagagcgauuaacuaucuugcaucu

SEQ ID NO: 250991 - RNA, 32 nt, Homo Sapiens
gaccaaauauauauuucacaauauuacaaaga

SEQ ID NO: 250992 - RNA, 32 nt, Homo Sapiens
ucguuguggggagcuuccgcucuugggacaua

SEQ ID NO: 250993 - RNA, 32 nt, Homo Sapiens
cuuuaaggagcgcagaauugucaugaaaauau

SEQ ID NO: 250994 - RNA, 32 nt, Homo Sapiens
agaugaucugauuuggaaauaggaucauuaca

SEQ ID NO: 250995 - RNA, 32 nt, Homo Sapiens
ccccacgccgugugucacgggcuagggcggcg

SEQ ID NO: 250996 - RNA, 32 nt, Homo Sapiens
ccucugcagauagagcugggagaugccuguug

SEQ ID NO: 250997 - RNA, 32 nt, Homo Sapiens
uaaaaaacaacaacaguagugugcaaggugag

SEQ ID NO: 250998 - RNA, 32 nt, Homo Sapiens
ggugacgcacaaaagcuugaaguagaaaaugc

SEQ ID NO: 250999 - RNA, 32 nt, Homo Sapiens
cagcugaggccaugcccuccccagggaccguc

SEQ ID NO: 251000 - RNA, 32 nt, Homo Sapiens
acccggguguaacagugacccguuucugugug

SEQ ID NO: 251001 - RNA, 32 nt, Homo Sapiens
uuggaggaacuuagugucacgcacaaaugggg

SEQ ID NO: 251002 - RNA, 32 nt, Homo Sapiens
agaaggggaguacagcucucuggaacaugagg

SEQ ID NO: 251003 - RNA, 32 nt, Homo Sapiens
guauaauuaccacuauuuuaaauaauucaguu

SEQ ID NO: 251004 - RNA, 32 nt, Homo Sapiens
uuuuagcccacuuugugaacuccauugugcuu

SEQ ID NO: 251005 - RNA, 32 nt, Homo Sapiens
acguaggccucaggucucgggccucaggucuc

SEQ ID NO: 251006 - RNA, 29 nt, Homo Sapiens
gacuagccuggacagcauggcaaaacccu

SEQ ID NO: 251007 - RNA, 32 nt, Homo Sapiens
agagccgcccccuccccuccccgccucgcgcu

SEQ ID NO: 251008 - RNA, 32 nt, Homo Sapiens
agguuauuagcaugcauauugaguuugcccuu

SEQ ID NO: 251009 - RNA, 32 nt, Homo Sapiens
uuaggaccuuugcauuugauaaaaaaaaaaua

SEQ ID NO: 251010 - RNA, 32 nt, Homo Sapiens
gggaugagccgggccaggucccgccccuccgc

SEQ ID NO: 251011 - RNA, 32 nt, Homo Sapiens
uccuggauuaucuaggugggcgcaauuugauc

SEQ ID NO: 251012 - RNA, 32 nt, Homo Sapiens
ugggugugccuggccugggacugaggggucca

SEQ ID NO: 251013 - RNA, 32 nt, Homo Sapiens
acacuuuaaaaagcaacauguaaaugauugga

SEQ ID NO: 251014 - RNA, 32 nt, Homo Sapiens
uccuagccgagaccgguaagccgaagcccuug

SEQ ID NO: 251015 - RNA, 32 nt, Homo Sapiens
augcccagaacaagacagaacaauugggugag

SEQ ID NO: 251016 - RNA, 32 nt, Homo Sapiens
cuggucaguagaaagggaaaccccaacccuuu

SEQ ID NO: 251017 - RNA, 32 nt, Homo Sapiens
cauuucccagacagccuugcggcggcccgggc

SEQ ID NO: 251018 - RNA, 32 nt, Homo Sapiens
cccuuuccaucuccuuuccccgcggaaacaac

SEQ ID NO: 251019 - RNA, 32 nt, Homo Sapiens
uauucuguaaauuauuuaauuuugucaagaug

SEQ ID NO: 251020 - RNA, 32 nt, Homo Sapiens
ucuggggcugcaccccacucccuguuugacgg

SEQ ID NO: 251021 - RNA, 32 nt, Homo Sapiens
cacggggcaggaccuuccuuccacggagccug

SEQ ID NO: 251022 - RNA, 32 nt, Homo Sapiens
cuuugccuuaaaucugauacaagaggucaaug

SEQ ID NO: 251023 - RNA, 32 nt, Homo Sapiens
uagggccgcgcgccguggccgcgucccacucc

SEQ ID NO: 251024 - RNA, 32 nt, Homo Sapiens
cagucccagaauuggaauauuaagccauggaa

SEQ ID NO: 251025 - RNA, 32 nt, Homo Sapiens
ucgcuguaucagcugauggccaucgcgccucc

SEQ ID NO: 251026 - RNA, 32 nt, Homo Sapiens
cagauuuguauauaaugucauuuuuacggaaa

SEQ ID NO: 251027 - RNA, 32 nt, Homo Sapiens
cauggagcugucaucacucaacaaaaaaccga

SEQ ID NO: 251028 - RNA, 32 nt, Homo Sapiens
cggcgggaggggaaacgugcgcggccgaaggg

SEQ ID NO: 251029 - RNA, 32 nt, Homo Sapiens
ggaaacaacaaaauaaaaccaacccaaguaaa

SEQ ID NO: 251030 - RNA, 27 nt, Homo Sapiens
cagggggugcaucucagcccccucuuu

SEQ ID NO: 251031 - RNA, 32 nt, Homo Sapiens
cgcgucucgguccucgcgucgccccgccccac

SEQ ID NO: 251032 - RNA, 32 nt, Homo Sapiens
cuagagaaggucggagucuuuuuaggaguaga

SEQ ID NO: 251033 - RNA, 32 nt, Homo Sapiens
acucuauuggcaauugauagaguauuacccac

SEQ ID NO: 251034 - RNA, 32 nt, Homo Sapiens
acaaggucaggaguuugagaucagccuggcca

SEQ ID NO: 251035 - RNA, 32 nt, Homo Sapiens
cccuacagcccuggaggccgcugcugaccagc

SEQ ID NO: 251036 - RNA, 32 nt, Homo Sapiens
cuggcgguggaagcgccuccagugugcaugag

SEQ ID NO: 251037 - RNA, 32 nt, Homo Sapiens
uugaaaauggaagagggaaacaacaaugaaga

SEQ ID NO: 251038 - RNA, 32 nt, Homo Sapiens
agucccccguccggccagccgccccguccggg

SEQ ID NO: 251039 - RNA, 32 nt, Homo Sapiens
caaaauuugagaaugcauaaaaaacacauugc

SEQ ID NO: 251040 - RNA, 32 nt, Homo Sapiens
uagagcuguucgccggggcgccugcagagccc

SEQ ID NO: 251041 - RNA, 31 nt, Homo Sapiens
agcuguggccacugccucccggcacuguggc

SEQ ID NO: 251042 - RNA, 32 nt, Homo Sapiens
aaugaaagugacaaauuuuaaauuuucucuaa

SEQ ID NO: 251043 - RNA, 32 nt, Homo Sapiens
ggcguagccccgcucuccugagagcucggagc

SEQ ID NO: 251044 - RNA, 32 nt, Homo Sapiens
acggcccaguuuuaaccucuaguauccaugac

SEQ ID NO: 251045 - RNA, 32 nt, Homo Sapiens
guucguggguucucgcggaccuuuuuccgugu

SEQ ID NO: 251046 - RNA, 32 nt, Homo Sapiens
aacauggugcaucuguggauagaacgccaccc

SEQ ID NO: 251047 - RNA, 32 nt, Homo Sapiens
ccgcggcggcagcagcagcagacucaagaaug

SEQ ID NO: 251048 - RNA, 32 nt, Homo Sapiens
gugaaggacaauuuauuauacuuuaugaccca

SEQ ID NO: 251049 - RNA, 32 nt, Homo Sapiens
uugacgcuuggguugguuuugaauagaccgcu

SEQ ID NO: 251050 - RNA, 32 nt, Homo Sapiens
gugcacauugaccccugacaccugcaagcaua

SEQ ID NO: 251051 - RNA, 32 nt, Homo Sapiens
ucccugaugggggacaggauuuggccacacug

SEQ ID NO: 251052 - RNA, 32 nt, Homo Sapiens
ccccauccggcuggcaggagggggcucugacg

SEQ ID NO: 251053 - RNA, 32 nt, Homo Sapiens
uauggcuggauuuugggggcuugcucccaaaa

SEQ ID NO: 251054 - RNA, 32 nt, Homo Sapiens
guugcuaccaaacacagcacucuaguuucucu

SEQ ID NO: 251055 - RNA, 32 nt, Homo Sapiens
ggaaagaaagagauuaauguauauuuucuccu

SEQ ID NO: 251056 - RNA, 32 nt, Homo Sapiens
gaggccgaggccugggccaagcccggagccgc

SEQ ID NO: 251057 - RNA, 32 nt, Homo Sapiens
caucccuagaaagagggaaggagcaggagacg

SEQ ID NO: 251058 - RNA, 32 nt, Homo Sapiens
ccauuguuuucuccagagagaaugugcuauau

SEQ ID NO: 251059 - RNA, 32 nt, Homo Sapiens
caauggggugccuacuaugugcgagacauugg

SEQ ID NO: 251060 - RNA, 32 nt, Homo Sapiens
gcagcgaggcacuggaugcugcugcugugcuc

SEQ ID NO: 251061 - RNA, 32 nt, Homo Sapiens
gggaugaaaucccacauccucccaagugacug

SEQ ID NO: 251062 - RNA, 32 nt, Homo Sapiens
aaauaugaauguuuaagacaacuuacugcaag

SEQ ID NO: 251063 - RNA, 32 nt, Homo Sapiens
cuaagauccagccccagaauccuggaggagca

SEQ ID NO: 251064 - RNA, 32 nt, Homo Sapiens
caauguaagaaacagccguguguggugaucca

SEQ ID NO: 251065 - RNA, 32 nt, Homo Sapiens
aggaggguggcuugcuuugcuuccuugucuaa

SEQ ID NO: 251066 - RNA, 32 nt, Homo Sapiens
ugucuaagcuccgacaagacugugacuuccuc

SEQ ID NO: 251067 - RNA, 32 nt, Homo Sapiens
uggauggaccagcagagggcacucucacccac

SEQ ID NO: 251068 - RNA, 32 nt, Homo Sapiens
auacugugaaacaaauugaaaacauugccucu

SEQ ID NO: 251069 - RNA, 32 nt, Homo Sapiens
acugacugucgggcuuuaaaaagggaagaaac

SEQ ID NO: 251070 - RNA, 32 nt, Homo Sapiens
cauucacauggguuaaagaagauggaaacuga

SEQ ID NO: 251071 - RNA, 32 nt, Homo Sapiens
cauggaccuacauccccagcagaugggggugg

SEQ ID NO: 251072 - RNA, 32 nt, Homo Sapiens
gaauauuucuguuacucaguacuugcaaaaac

SEQ ID NO: 251073 - RNA, 32 nt, Homo Sapiens
uuggggugcaugggggugccccgggcacagug

SEQ ID NO: 251074 - RNA, 32 nt, Homo Sapiens
cucucugucacccaagcuggaaugcaauggca

SEQ ID NO: 251075 - RNA, 32 nt, Homo Sapiens
aguagaucacagcagaguuaccacugauaaga

SEQ ID NO: 251076 - RNA, 32 nt, Homo Sapiens
aguugugcuucuuuucccuggaaaguucuuuc

SEQ ID NO: 251077 - RNA, 32 nt, Homo Sapiens
ccucgucgcgaccggcccgggccgcaggacgc

SEQ ID NO: 251078 - RNA, 32 nt, Homo Sapiens
ucaggacagggccaggugcagggcucucccuc

SEQ ID NO: 251079 - RNA, 32 nt, Homo Sapiens
uguaaggugcacguuuccugaugugacgcacu

SEQ ID NO: 251080 - RNA, 32 nt, Homo Sapiens
ucuuuuuguuuuaugcuucucgaugauccuuu

SEQ ID NO: 251081 - RNA, 32 nt, Homo Sapiens
aggagugugaaaauaaaaaucucuuuucaugc

SEQ ID NO: 251082 - RNA, 32 nt, Homo Sapiens
uaguuguuucccuucacuuucagucuuccaca

SEQ ID NO: 251083 - RNA, 32 nt, Homo Sapiens
uuaagugucuaggcuucucauuagcgccaacu

SEQ ID NO: 251084 - RNA, 32 nt, Homo Sapiens
cacacccacuccagcccucugccccaguuuuc

SEQ ID NO: 251085 - RNA, 32 nt, Homo Sapiens
uuccaccuuucugaauggaaagagguuuucac

SEQ ID NO: 251086 - RNA, 32 nt, Homo Sapiens
ccugcagcuuggcuggccccagggaucugugg

SEQ ID NO: 251087 - RNA, 32 nt, Homo Sapiens
gcugcgaugccuucugaugugcuugaggugac

SEQ ID NO: 251088 - RNA, 32 nt, Homo Sapiens
gcacgccggccgcgcccacgugaccgguccgg

SEQ ID NO: 251089 - RNA, 32 nt, Homo Sapiens
agucuuucuuaaaauguuuagagcaaguauag

SEQ ID NO: 251090 - RNA, 32 nt, Homo Sapiens
aaagggaacgagccagugaugcccgcaugaac

SEQ ID NO: 251091 - RNA, 32 nt, Homo Sapiens
acuaaaacuuucuuccucuuuggacugaauac

SEQ ID NO: 251092 - RNA, 32 nt, Homo Sapiens
aaggguccugucaucccucauggccaccccgc

SEQ ID NO: 251093 - RNA, 32 nt, Homo Sapiens
ccauggguccagaaaugggaaagggaauugcu

SEQ ID NO: 251094 - RNA, 32 nt, Homo Sapiens
aauguaaaagcauugaaguaaauguuucuuuu

SEQ ID NO: 251095 - RNA, 31 nt, Homo Sapiens
ccccacuucccgcucuggccaagggcugucu

SEQ ID NO: 251096 - RNA, 32 nt, Homo Sapiens
ugcuaaaauucagguauuacugaauuagcguu

SEQ ID NO: 251097 - RNA, 32 nt, Homo Sapiens
uuucugcuugacucacugccaucugcuuugaa

SEQ ID NO: 251098 - RNA, 32 nt, Homo Sapiens
uuuuggaagcuacuguuuuuaaaaagggagac

SEQ ID NO: 251099 - RNA, 32 nt, Homo Sapiens
auucugacauauauuuguuuauaaaauuccuu

SEQ ID NO: 251100 - RNA, 27 nt, Homo Sapiens
aaaucugaauacauuucauacauauca

SEQ ID NO: 251101 - RNA, 32 nt, Homo Sapiens
gagccacucugcacugcgggcuaaacauguuu

SEQ ID NO: 251102 - RNA, 32 nt, Homo Sapiens
agguuucucauguuguaaauguaguaaugcuu

SEQ ID NO: 251103 - RNA, 32 nt, Homo Sapiens
ggcacguacuuugugaccaggauggugccgag

SEQ ID NO: 251104 - RNA, 32 nt, Homo Sapiens
uuuccuuuacccaggaaaucuccggagccaac

SEQ ID NO: 251105 - RNA, 32 nt, Homo Sapiens
uauacauacacacacacacacacacaccuuuc

SEQ ID NO: 251106 - RNA, 32 nt, Homo Sapiens
ggggagaggacgucucugcgggcccccuucac

SEQ ID NO: 251107 - RNA, 32 nt, Homo Sapiens
gauauuaacuugaaauuuccaguguccuaaga

SEQ ID NO: 251108 - RNA, 32 nt, Homo Sapiens
uucaugugcuccuggagaagggcuugcaccag

SEQ ID NO: 251109 - RNA, 32 nt, Homo Sapiens
cauugagaauucaaauccucuuuuguauuguu

SEQ ID NO: 251110 - RNA, 32 nt, Homo Sapiens
ucuuucccucuuucuucaggaaugaauuggga

SEQ ID NO: 251111 - RNA, 32 nt, Homo Sapiens
aaaacgaaucauaauuauugacacuuauuggg

SEQ ID NO: 251112 - RNA, 32 nt, Homo Sapiens
cuuucccccuuaccugcccugcugccugcaca

SEQ ID NO: 251113 - RNA, 32 nt, Homo Sapiens
acagcuacauauucccucugagcauugcccug

SEQ ID NO: 251114 - RNA, 26 nt, Homo Sapiens
gauggccgccgcggagacccagucgc

SEQ ID NO: 251115 - RNA, 32 nt, Homo Sapiens
cuguuuucuguaugucugauacuagaaacuaa

SEQ ID NO: 251116 - RNA, 32 nt, Homo Sapiens
aguucaacugcgacgcucucacugacgcgugc

SEQ ID NO: 251117 - RNA, 29 nt, Homo Sapiens
uuuuuauagacuuuauauuuuuccuuuug

SEQ ID NO: 251118 - RNA, 32 nt, Homo Sapiens
ugcugcugcuccuggguggacccggggcugcc

SEQ ID NO: 251119 - RNA, 32 nt, Homo Sapiens
cacuugcucccugccaacuuucuggagaggug

SEQ ID NO: 251120 - RNA, 32 nt, Homo Sapiens
auguuccuccagaauucauaugcugaagccuc

SEQ ID NO: 251121 - RNA, 32 nt, Homo Sapiens
gccaaggcgggugcuggaagccagacggaaca

SEQ ID NO: 251122 - RNA, 32 nt, Homo Sapiens
uaaagagaucaauguauuuuauuuuaucaacu

SEQ ID NO: 251123 - RNA, 32 nt, Homo Sapiens
uaauaaaaucauaaugcauuuugggugggaca

SEQ ID NO: 251124 - RNA, 32 nt, Homo Sapiens
cucgaaaccuugaaggcaugcugcugguuaga

SEQ ID NO: 251125 - RNA, 32 nt, Homo Sapiens
aauauggccacaacauugccagcaaauacugc

SEQ ID NO: 251126 - RNA, 32 nt, Homo Sapiens
ggcucggcugcgccagcuccggccgcugcccg

SEQ ID NO: 251127 - RNA, 32 nt, Homo Sapiens
gguggcagcugaugaaaauauccaaaagauga

SEQ ID NO: 251128 - RNA, 32 nt, Homo Sapiens
uguucuuucucuuuccaaacaaauaguuaaau

SEQ ID NO: 251129 - RNA, 32 nt, Homo Sapiens
aaagcaggugguggagacguugacuacucacc

SEQ ID NO: 251130 - RNA, 32 nt, Homo Sapiens
uuaggcaaaaacaggagguaaagaaauagcca

SEQ ID NO: 251131 - RNA, 32 nt, Homo Sapiens
uuagcagaagaacaaacugaagaacagaccca

SEQ ID NO: 251132 - RNA, 32 nt, Homo Sapiens
gggagcuggaccgcaguguccaggcuggacac

SEQ ID NO: 251133 - RNA, 32 nt, Homo Sapiens
gccacugagauuguguucugcauaauauuugg

SEQ ID NO: 251134 - RNA, 32 nt, Homo Sapiens
gugcagugguucacgccuguauucccagcauu

SEQ ID NO: 251135 - RNA, 32 nt, Homo Sapiens
ccuguauugcucggcccggggaguuucgcccc

SEQ ID NO: 251136 - RNA, 32 nt, Homo Sapiens
auuuguauucacugucacuuuuucucauguuc

SEQ ID NO: 251137 - RNA, 32 nt, Homo Sapiens
aaaaccauaaaauaaauuuuuauaaggaauac

SEQ ID NO: 251138 - RNA, 32 nt, Homo Sapiens
uuuauuuguaaauuauauacauguacuacugu

SEQ ID NO: 251139 - RNA, 32 nt, Homo Sapiens
ggagcugaugacccucaugaugccuggugaca

SEQ ID NO: 251140 - RNA, 32 nt, Homo Sapiens
cuuuauggcagacauugugcuagugcuuuuau

SEQ ID NO: 251141 - RNA, 32 nt, Homo Sapiens
ucauaaaaaaucaaguuuuaagguuauauuuu

SEQ ID NO: 251142 - RNA, 32 nt, Homo Sapiens
cccaagaccaucuggaggauccaacaagccca

SEQ ID NO: 251143 - RNA, 32 nt, Homo Sapiens
ccccagagccccagcaucccuugcucacaccu

SEQ ID NO: 251144 - RNA, 32 nt, Homo Sapiens
ggcucggagcugccuuccugcugccuuggggc

SEQ ID NO: 251145 - RNA, 32 nt, Homo Sapiens
cuccgucucccuccccgggcagcggcggcgcg

SEQ ID NO: 251146 - RNA, 31 nt, Homo Sapiens
ccgaccaugcccagccugcugcugcuguuca

SEQ ID NO: 251147 - RNA, 32 nt, Homo Sapiens
aaauauuguaaaaauaucuucaccuguguuag

SEQ ID NO: 251148 - RNA, 32 nt, Homo Sapiens
agcacagagggagagguucaggagucaggucu

SEQ ID NO: 251149 - RNA, 32 nt, Homo Sapiens
ggacaguugacagcuuuuuuuuuuuccauaua

SEQ ID NO: 251150 - RNA, 32 nt, Homo Sapiens
gcgguauuuguugggucggcggcgucagggau

SEQ ID NO: 251151 - RNA, 32 nt, Homo Sapiens
ugcacacccgcacuaccugcacuucucgcaca

SEQ ID NO: 251152 - RNA, 32 nt, Homo Sapiens
cuguccuccugcccacccacacugacggcauc

SEQ ID NO: 251153 - RNA, 32 nt, Homo Sapiens
ccuccuuccccucccucucucauggcugggug

SEQ ID NO: 251154 - RNA, 32 nt, Homo Sapiens
ugaaguuggaaauccuuuuuauugguguuuag

SEQ ID NO: 251155 - RNA, 32 nt, Homo Sapiens
gucgcgcugggggugggcgcgcgcugaggcgg

SEQ ID NO: 251156 - RNA, 32 nt, Homo Sapiens
ccaauauucuuagauauuuagagcaucaccuu

SEQ ID NO: 251157 - RNA, 27 nt, Homo Sapiens
ggcuuguuuuucuucagcauuuacuug

SEQ ID NO: 251158 - RNA, 32 nt, Homo Sapiens
uucugggauuccagcccuccuggagccuuuug

SEQ ID NO: 251159 - RNA, 32 nt, Homo Sapiens
aaacaacaugugucuucuggaacuucaggcuu

SEQ ID NO: 251160 - RNA, 32 nt, Homo Sapiens
agccgcaccuggagaagcugacccugggcauc

SEQ ID NO: 251161 - RNA, 32 nt, Homo Sapiens
gcuucccguggcggcccucacagaaggcgcgu

SEQ ID NO: 251162 - RNA, 29 nt, Homo Sapiens
auaguugggggacaggggucuggguuugg

SEQ ID NO: 251163 - RNA, 32 nt, Homo Sapiens
aggcgcccccauuccggaccagcccucgggag

SEQ ID NO: 251164 - RNA, 32 nt, Homo Sapiens
agaaguuugccuuuauucuacuccauccacau

SEQ ID NO: 251165 - RNA, 32 nt, Homo Sapiens
augcuguuuuaacuuguaaauauauauguaua

SEQ ID NO: 251166 - RNA, 32 nt, Homo Sapiens
agccucuugaucaccagcacgaccauacuguu

SEQ ID NO: 251167 - RNA, 32 nt, Homo Sapiens
aucuuagugaucccuccugcugucucuuuccu

SEQ ID NO: 251168 - RNA, 32 nt, Homo Sapiens
augaaucgcuaauaaaagccaauuagaucuuu

SEQ ID NO: 251169 - RNA, 32 nt, Homo Sapiens
agguaggugaugcucugaugcugcugccucuu

SEQ ID NO: 251170 - RNA, 32 nt, Homo Sapiens
ugggagguggagguugcagugaguggagaucg

SEQ ID NO: 251171 - RNA, 32 nt, Homo Sapiens
cuccuccagcuccgccaucuugcgugagguac

SEQ ID NO: 251172 - RNA, 32 nt, Homo Sapiens
uugucuuuucuaccucuuucucuugcagugau

SEQ ID NO: 251173 - RNA, 32 nt, Homo Sapiens
caagcuucgcauccucguuuuauuuuugguua

SEQ ID NO: 251174 - RNA, 32 nt, Homo Sapiens
ccaggcugagggucgguccggaggcggguggg

SEQ ID NO: 251175 - RNA, 32 nt, Homo Sapiens
ggucuguacaagcugcugccgcacucggagua

SEQ ID NO: 251176 - RNA, 32 nt, Homo Sapiens
ggggcgauccuucuccugcuccccuuacacgc

SEQ ID NO: 251177 - RNA, 32 nt, Homo Sapiens
cuaaccauccccaacuccaugggguucgagac

SEQ ID NO: 251178 - RNA, 32 nt, Homo Sapiens
aagacgagaacaaagacucugagaaaagcaca

SEQ ID NO: 251179 - RNA, 32 nt, Homo Sapiens
guggccugaguagaagaucaaaccagccacac

SEQ ID NO: 251180 - RNA, 32 nt, Homo Sapiens
cccugucucgcacagugucccaggacccugcg

SEQ ID NO: 251181 - RNA, 31 nt, Homo Sapiens
ggggugagcgagccccggccccgcgcgcagu

SEQ ID NO: 251182 - RNA, 32 nt, Homo Sapiens
cgcuccgcggcgggccauggccaacgucucua

SEQ ID NO: 251183 - RNA, 32 nt, Homo Sapiens
ggaacuauagagcuaccagacauauccugcuc

SEQ ID NO: 251184 - RNA, 29 nt, Homo Sapiens
gaacagccugggcaacauggcaaaacccu

SEQ ID NO: 251185 - RNA, 32 nt, Homo Sapiens
gcauggcucuugacaagguuuucuauagggca

SEQ ID NO: 251186 - RNA, 32 nt, Homo Sapiens
uaacauuaauaaauuuauugauuccauugcuu

SEQ ID NO: 251187 - RNA, 32 nt, Homo Sapiens
aggggcagucuccucaguauccaggauucaau

SEQ ID NO: 251188 - RNA, 32 nt, Homo Sapiens
cuuggagaaggggcccuguggagcagggacuc

SEQ ID NO: 251189 - RNA, 32 nt, Homo Sapiens
gggcggccgcggcucugggcgacccgcugggu

SEQ ID NO: 251190 - RNA, 32 nt, Homo Sapiens
aauuacauuauguucuuugcauguucuaaagu

SEQ ID NO: 251191 - RNA, 32 nt, Homo Sapiens
gggccucaaaauaccauaguagcugcuugaua

SEQ ID NO: 251192 - RNA, 32 nt, Homo Sapiens
uccucugugcuguauuugccaaugaaagugga

SEQ ID NO: 251193 - RNA, 32 nt, Homo Sapiens
gggcuguuuuaacaucuuugaaguauggcuug

SEQ ID NO: 251194 - RNA, 32 nt, Homo Sapiens
cuuuggcaucccaacuaacaauaaagaguagg

SEQ ID NO: 251195 - RNA, 32 nt, Homo Sapiens
gugggggagaagcugaaagaccaagacucuuc

SEQ ID NO: 251196 - RNA, 32 nt, Homo Sapiens
guuguuucuaugaaacaaacauauuuaguuca

SEQ ID NO: 251197 - RNA, 32 nt, Homo Sapiens
uuugagcagcgaagagucuuugagcugaauga

SEQ ID NO: 251198 - RNA, 32 nt, Homo Sapiens
cacggugcugucccaagccagcccuuaggaga

SEQ ID NO: 251199 - RNA, 32 nt, Homo Sapiens
gucaggccuccccgcucugugcuaccugcggc

SEQ ID NO: 251200 - RNA, 32 nt, Homo Sapiens
ggagggcccgucuggccguguagcccgccccg

SEQ ID NO: 251201 - RNA, 28 nt, Homo Sapiens
gugguugcaauaaagacagauacguccc

SEQ ID NO: 251202 - RNA, 32 nt, Homo Sapiens
ucauguuaaaagaccaucuccuguaaaacuga

SEQ ID NO: 251203 - RNA, 32 nt, Homo Sapiens
caucuacaaccacaaacaccacaacggccgcc

SEQ ID NO: 251204 - RNA, 32 nt, Homo Sapiens
auuuccuuuaccauacauuauugcaaauuaau

SEQ ID NO: 251205 - RNA, 32 nt, Homo Sapiens
cagcagagaaaauaaaugugccuugagagacc

SEQ ID NO: 251206 - RNA, 32 nt, Homo Sapiens
ggucugcaccucuggaagguagagaagcggcg

SEQ ID NO: 251207 - RNA, 32 nt, Homo Sapiens
aaccuuuuucuuuauuccauguucuauauaag

SEQ ID NO: 251208 - RNA, 32 nt, Homo Sapiens
uuuuuguuucccuuugguaauuuucaaauauu

SEQ ID NO: 251209 - RNA, 32 nt, Homo Sapiens
augaaggaaugccuaaaaguuaccacagacug

SEQ ID NO: 251210 - RNA, 32 nt, Homo Sapiens
uaaacacaaaccaaauacuccaggguuuugac

SEQ ID NO: 251211 - RNA, 32 nt, Homo Sapiens
ugcauuguaauauuuuuaacauccugugacuu

SEQ ID NO: 251212 - RNA, 32 nt, Homo Sapiens
ggagaagucgcaccguugcagaguggugccgc

SEQ ID NO: 251213 - RNA, 32 nt, Homo Sapiens
cuggugcuggaggugucagugauggcuugguu

SEQ ID NO: 251214 - RNA, 32 nt, Homo Sapiens
cagagaccccaccgcucccuccccuggccccc

SEQ ID NO: 251215 - RNA, 32 nt, Homo Sapiens
cuuguucccacgacaaaggaacaucauauuuu

SEQ ID NO: 251216 - RNA, 32 nt, Homo Sapiens
aggcaucuggcagaggcgggucgggcugggcc

SEQ ID NO: 251217 - RNA, 32 nt, Homo Sapiens
cuugcuucagaauugaaauggaaggggggugu

SEQ ID NO: 251218 - RNA, 32 nt, Homo Sapiens
acaauggcaggggacagaaugugcauggagug

SEQ ID NO: 251219 - RNA, 32 nt, Homo Sapiens
gcaucgcuccccuucaaccaaccgcguugaug

SEQ ID NO: 251220 - RNA, 32 nt, Homo Sapiens
ccacuaaguauauauuguaaauuuaaugaaca

SEQ ID NO: 251221 - RNA, 32 nt, Homo Sapiens
gugggucugaagauggucaagucuguuugccu

SEQ ID NO: 251222 - RNA, 32 nt, Homo Sapiens
cgagcgagagagcggcgcgggccgggccaugg

SEQ ID NO: 251223 - RNA, 32 nt, Homo Sapiens
gagggggcggcaaccgggggccccacggucuc

SEQ ID NO: 251224 - RNA, 32 nt, Homo Sapiens
ccuccaaacaacagaauucugugcagcagacg

SEQ ID NO: 251225 - RNA, 32 nt, Homo Sapiens
caagaauguacauuuucuuuuuagaaaaccaa

SEQ ID NO: 251226 - RNA, 32 nt, Homo Sapiens
auccaucugccucggccucccaacgugcugga

SEQ ID NO: 251227 - RNA, 32 nt, Homo Sapiens
agcaguuuaacccugaaauucauuaugucuaa

SEQ ID NO: 251228 - RNA, 32 nt, Homo Sapiens
ccaacuuuucccuucucaguuccucucucgaa

SEQ ID NO: 251229 - RNA, 32 nt, Homo Sapiens
aguccuuggcuugccuuuuccuccuccucaca

SEQ ID NO: 251230 - RNA, 32 nt, Homo Sapiens
aaggaugucaaagaacggcacuuuuucuaaag

SEQ ID NO: 251231 - RNA, 32 nt, Homo Sapiens
uucuccuggcucagccucccaaguagcuggga

SEQ ID NO: 251232 - RNA, 32 nt, Homo Sapiens
gagccgugcgccagggcagggcccgugccuua

SEQ ID NO: 251233 - RNA, 32 nt, Homo Sapiens
uauuauggaaauaauacacagauaucuuccuu

SEQ ID NO: 251234 - RNA, 31 nt, Homo Sapiens
cuccccagcugccagaaccaggcugagcgca

SEQ ID NO: 251235 - RNA, 32 nt, Homo Sapiens
aaucuccuuggauguuugugggaaaugcagau

SEQ ID NO: 251236 - RNA, 32 nt, Homo Sapiens
aacuguuuucccuugagauuuccuucuccuau

SEQ ID NO: 251237 - RNA, 32 nt, Homo Sapiens
uucggaccagccuggccaacguggugaaaccu

SEQ ID NO: 251238 - RNA, 32 nt, Homo Sapiens
ucacagcacuguaccugaccucuuacagugau

SEQ ID NO: 251239 - RNA, 32 nt, Homo Sapiens
gacuucauacuuugaagaauugauguaugccu

SEQ ID NO: 251240 - RNA, 32 nt, Homo Sapiens
auucuaaagggagguauguuuugcgggauggg

SEQ ID NO: 251241 - RNA, 32 nt, Homo Sapiens
cugugucuaggcaggcaagagaauugaaauga

SEQ ID NO: 251242 - RNA, 32 nt, Homo Sapiens
ccuuggcgcuauggaggagcccggggcuaccc

SEQ ID NO: 251243 - RNA, 32 nt, Homo Sapiens
uuucaaagguuucuggcucacccaggaauuca

SEQ ID NO: 251244 - RNA, 32 nt, Homo Sapiens
caauaauuauccaacagcaugcuugguggcuc

SEQ ID NO: 251245 - RNA, 32 nt, Homo Sapiens
gagguccugcgcgcuucaauccugcaggcagc

SEQ ID NO: 251246 - RNA, 32 nt, Homo Sapiens
aaauggcagcuagagguuuugauaggaaguau

SEQ ID NO: 251247 - RNA, 32 nt, Homo Sapiens
aucucuuuacuuuguaauccuaugcauuuuac

SEQ ID NO: 251248 - RNA, 32 nt, Homo Sapiens
uguuuuuaugaccaaagcaguuucuugucaau

SEQ ID NO: 251249 - RNA, 32 nt, Homo Sapiens
aauguguuggugccugagacaccaaauggaag

SEQ ID NO: 251250 - RNA, 32 nt, Homo Sapiens
gguccugguucaggagugaaaugccaccuccu

SEQ ID NO: 251251 - RNA, 32 nt, Homo Sapiens
uuauguuagaaauaagacaaccccagccaauc

SEQ ID NO: 251252 - RNA, 32 nt, Homo Sapiens
uuuugugaugacaaaaucaucuuuauggccag

SEQ ID NO: 251253 - RNA, 32 nt, Homo Sapiens
agcagccugaacuggcuggggcauccggaagg

SEQ ID NO: 251254 - RNA, 32 nt, Homo Sapiens
agucaguauucuuaaauaaaauuuauaauuga

SEQ ID NO: 251255 - RNA, 32 nt, Homo Sapiens
cacgacgcggacgcgccugcggcccggggagc

SEQ ID NO: 251256 - RNA, 31 nt, Homo Sapiens
acuucauuaagguuucauucaguguagcaau

SEQ ID NO: 251257 - RNA, 30 nt, Homo Sapiens
uauaauuaaaaguuguuuuucuuaaaaaaa

SEQ ID NO: 251258 - RNA, 32 nt, Homo Sapiens
uuuaaacggugcucagaaaacgugcuaaacuu

SEQ ID NO: 251259 - RNA, 32 nt, Homo Sapiens
ugacauuggauagaacaugggauacuuuagaa

SEQ ID NO: 251260 - RNA, 32 nt, Homo Sapiens
cagacuuugaggagggaagggggaagugaagg

SEQ ID NO: 251261 - RNA, 32 nt, Homo Sapiens
uccguggaugucucugccuuaagggaauugga

SEQ ID NO: 251262 - RNA, 32 nt, Homo Sapiens
uguauagccaagacaaucuuaagcaaaaagaa

SEQ ID NO: 251263 - RNA, 32 nt, Homo Sapiens
cacggggccgucugucuggaccacgugugcac

SEQ ID NO: 251264 - RNA, 31 nt, Homo Sapiens
cucagccuccacagccugccccgcacccagc

SEQ ID NO: 251265 - RNA, 32 nt, Homo Sapiens
aauuugggggaaaauuuagaaauauaauugac

SEQ ID NO: 251266 - RNA, 32 nt, Homo Sapiens
uuccugcggguuggccuggccgugccgauccu

SEQ ID NO: 251267 - RNA, 32 nt, Homo Sapiens
gauaaauaauugguuuggccacagcaagcugc

SEQ ID NO: 251268 - RNA, 32 nt, Homo Sapiens
gaggcccuggggaauuuggaggcaucaugagc

SEQ ID NO: 251269 - RNA, 32 nt, Homo Sapiens
acuuucuucuucaucuuuccauuuacugauau

SEQ ID NO: 251270 - RNA, 32 nt, Homo Sapiens
uuucaggaugucauuuucaaaaugcgggaugg

SEQ ID NO: 251271 - RNA, 32 nt, Homo Sapiens
ucaucccaaacacuaaacaugauugaugggua

SEQ ID NO: 251272 - RNA, 32 nt, Homo Sapiens
ugcccuugaaagauaggaugaugaucaaguug

SEQ ID NO: 251273 - RNA, 32 nt, Homo Sapiens
gccugccuggauugcaccuuucugcccuuucc

SEQ ID NO: 251274 - RNA, 32 nt, Homo Sapiens
acuuagacgcugaguuucgguuuucuaaggaa

SEQ ID NO: 251275 - RNA, 32 nt, Homo Sapiens
uuugcugccccucuccccuaccuggcccauuc

SEQ ID NO: 251276 - RNA, 32 nt, Homo Sapiens
gcgagucggcccgaggccuccggggacugccg

SEQ ID NO: 251277 - RNA, 32 nt, Homo Sapiens
gcaccaaggggaggaaacaaggaucuggucag

SEQ ID NO: 251278 - RNA, 32 nt, Homo Sapiens
ccucaacuucuugccugguugccagaccaauc

SEQ ID NO: 251279 - RNA, 32 nt, Homo Sapiens
cuuuuuuucuuuucuuuuugauuuuucugaca

SEQ ID NO: 251280 - RNA, 32 nt, Homo Sapiens
cuacuuugccugaguucuucuacccccgcagu

SEQ ID NO: 251281 - RNA, 32 nt, Homo Sapiens
cuggcguggggccagcuccccccgcgcgccca

SEQ ID NO: 251282 - RNA, 32 nt, Homo Sapiens
aauuuccuccaaguacuugggcugucuuacug

SEQ ID NO: 251283 - RNA, 30 nt, Homo Sapiens
agcuggagccgaggcggcggcgggacgcgg

SEQ ID NO: 251284 - RNA, 32 nt, Homo Sapiens
uggccuauuuuuguucaauaaagauuguuaca

SEQ ID NO: 251285 - RNA, 32 nt, Homo Sapiens
aggcggcgagaccgcagaauucccguacugau

SEQ ID NO: 251286 - RNA, 32 nt, Homo Sapiens
aucugcaccugccucucuguccuggccagggg

SEQ ID NO: 251287 - RNA, 32 nt, Homo Sapiens
cacucagcgggaagggggcuggcaucgccacg

SEQ ID NO: 251288 - RNA, 32 nt, Homo Sapiens
aggcaugaagcacguuggccaguuuuccucaa

SEQ ID NO: 251289 - RNA, 32 nt, Homo Sapiens
gcuaauccagcauuuguggauagcugcaaacu

SEQ ID NO: 251290 - RNA, 32 nt, Homo Sapiens
uaacaaaauaaucagauuuuugccuagcacuc

SEQ ID NO: 251291 - RNA, 32 nt, Homo Sapiens
ccacuguguuacuauauguuguaaccaggagc

SEQ ID NO: 251292 - RNA, 32 nt, Homo Sapiens
aagaagaggagaaaagcaauccuccugauugu

SEQ ID NO: 251293 - RNA, 32 nt, Homo Sapiens
auaaguaggauuuuuguuuuguuuugcauuuu

SEQ ID NO: 251294 - RNA, 31 nt, Homo Sapiens
aucuugaaauaaaacaauguguuugauucac

SEQ ID NO: 251295 - RNA, 32 nt, Homo Sapiens
ggccagccccuuggggacccugguaccccagc

SEQ ID NO: 251296 - RNA, 32 nt, Homo Sapiens
cgcaguguaagaagagcagcugucagggcggg

SEQ ID NO: 251297 - RNA, 32 nt, Homo Sapiens
uaagaucuuuguccucuuucuccuuguauuug

SEQ ID NO: 251298 - RNA, 32 nt, Homo Sapiens
uuauuaucccucucacaaaggcacaaauacag

SEQ ID NO: 251299 - RNA, 32 nt, Homo Sapiens
uggauuuuguauuuuaagauccagaaauacuu

SEQ ID NO: 251300 - RNA, 32 nt, Homo Sapiens
aucacacacaucacaucaccagugccaaaaug

SEQ ID NO: 251301 - RNA, 32 nt, Homo Sapiens
gaccaucugcugcaguuaccacagcaacugac

SEQ ID NO: 251302 - RNA, 32 nt, Homo Sapiens
acccaggcucugcucaggcugggaggcagagg

SEQ ID NO: 251303 - RNA, 32 nt, Homo Sapiens
ccucuggcaggcaggcagcuguacccaagcug

SEQ ID NO: 251304 - RNA, 32 nt, Homo Sapiens
auggagcuaacauuuucagagauacagcuucu

SEQ ID NO: 251305 - RNA, 32 nt, Homo Sapiens
uggcccuucaucuauuuaaucauagcuacaua

SEQ ID NO: 251306 - RNA, 32 nt, Homo Sapiens
agccuggcaggugacgucaggguccuucacag

SEQ ID NO: 251307 - RNA, 32 nt, Homo Sapiens
guuccacucacagauuucuucuuauugcccag

SEQ ID NO: 251308 - RNA, 32 nt, Homo Sapiens
ucuuaagggcaccauuucgcucucccaccgua

SEQ ID NO: 251309 - RNA, 32 nt, Homo Sapiens
cagcgaccugagcagcaggcaagaugcugaaa

SEQ ID NO: 251310 - RNA, 32 nt, Homo Sapiens
uaguguuuagcuugucuauuugccauaucuau

SEQ ID NO: 251311 - RNA, 32 nt, Homo Sapiens
cagccucaggugguccugaugacaugugccca

SEQ ID NO: 251312 - RNA, 32 nt, Homo Sapiens
uugauugauguguucagagcuaaauuaagagg

SEQ ID NO: 251313 - RNA, 32 nt, Homo Sapiens
caugucccggaauuccucucucucaugguucu

SEQ ID NO: 251314 - RNA, 32 nt, Homo Sapiens
agaccugcauuuggcaggaagauguaugcuuu

SEQ ID NO: 251315 - RNA, 28 nt, Homo Sapiens
ucuuaguugucuacuuuguuugaacacu

SEQ ID NO: 251316 - RNA, 32 nt, Homo Sapiens
aaaaauaaaaauuauuauugauuuuauauuuc

SEQ ID NO: 251317 - RNA, 32 nt, Homo Sapiens
uggaaauagaaagccaggaguggcugucccca

SEQ ID NO: 251318 - RNA, 32 nt, Homo Sapiens
agacucugcccugcugcagaccucggugugga

SEQ ID NO: 251319 - RNA, 32 nt, Homo Sapiens
aucuuuauuauagcgucauuuuuguggucaua

SEQ ID NO: 251320 - RNA, 32 nt, Homo Sapiens
ccagggccgaggaggugccuggagugcccacc

SEQ ID NO: 251321 - RNA, 32 nt, Homo Sapiens
gaagaaaaucagacuauauauuguagacuaug

SEQ ID NO: 251322 - RNA, 32 nt, Homo Sapiens
cuuugucaugguucuuaaauguuuauacugua

SEQ ID NO: 251323 - RNA, 32 nt, Homo Sapiens
ucaaagauucagagauuggcuuuugucaucca

SEQ ID NO: 251324 - RNA, 32 nt, Homo Sapiens
aguguggcaaagugggaaaaagcacagauccu

SEQ ID NO: 251325 - RNA, 32 nt, Homo Sapiens
agucuuugucuuugcagcaagcaaaugaaauu

SEQ ID NO: 251326 - RNA, 32 nt, Homo Sapiens
gagacuggauuuuuguuuuuuauguugugugu

SEQ ID NO: 251327 - RNA, 32 nt, Homo Sapiens
uagccauaacugugcauagaaaaauaauuauc

SEQ ID NO: 251328 - RNA, 32 nt, Homo Sapiens
uccccuuagagguaguuagcauggauuauauu

SEQ ID NO: 251329 - RNA, 32 nt, Homo Sapiens
gugauuuuccugcuacugcuacugcugcugcu

SEQ ID NO: 251330 - RNA, 32 nt, Homo Sapiens
agccugcaugcgccguggggcgccccaggacc

SEQ ID NO: 251331 - RNA, 32 nt, Homo Sapiens
ucucuugugaggauggaggccgugccaccccg

SEQ ID NO: 251332 - RNA, 32 nt, Homo Sapiens
gaauuuuauuuaaacuugaaaaugacuuugcc

SEQ ID NO: 251333 - RNA, 32 nt, Homo Sapiens
ccucgccgcgucucgccacgggcucugccagc

SEQ ID NO: 251334 - RNA, 32 nt, Homo Sapiens
ucuuuugcauuaccauguaaaauuuagacauu

SEQ ID NO: 251335 - RNA, 32 nt, Homo Sapiens
uguggagaagggccuguugacauccugaaugu

SEQ ID NO: 251336 - RNA, 32 nt, Homo Sapiens
aguauuuuugcacuucacaaauuaaugaccau

SEQ ID NO: 251337 - RNA, 31 nt, Homo Sapiens
uauagcugaugcagaaaguccagccaguuua

SEQ ID NO: 251338 - RNA, 32 nt, Homo Sapiens
cuuccuguuucuuuccaaauuauaaguagcua

SEQ ID NO: 251339 - RNA, 32 nt, Homo Sapiens
ugaaaaaauuguagacuuucaaaucaguuagg

SEQ ID NO: 251340 - RNA, 32 nt, Homo Sapiens
agcuugcccccgcuuagccccgcugagcuugg

SEQ ID NO: 251341 - RNA, 32 nt, Homo Sapiens
cgugccucgcuccgcuucuccuccguaaccau

SEQ ID NO: 251342 - RNA, 32 nt, Homo Sapiens
caacugcaucugaguaagauaagauuuucuaa

SEQ ID NO: 251343 - RNA, 32 nt, Homo Sapiens
gucauaaguggaagaaaaagccaagcauagug

SEQ ID NO: 251344 - RNA, 32 nt, Homo Sapiens
cucgccaccagugccuuucuccccucagcacc

SEQ ID NO: 251345 - RNA, 32 nt, Homo Sapiens
gaacagaaaaggacagguuaauuccaauuguu

SEQ ID NO: 251346 - RNA, 32 nt, Homo Sapiens
gggaagauggcggacucgguggcuagccgaug

SEQ ID NO: 251347 - RNA, 32 nt, Homo Sapiens
ccagaauaauccuugagagaaaaggaaucaug

SEQ ID NO: 251348 - RNA, 31 nt, Homo Sapiens
ucaacgccauccugccugcccugagccgcug

SEQ ID NO: 251349 - RNA, 30 nt, Homo Sapiens
ggagggcgcgcgcacugcuaggaagugcug

SEQ ID NO: 251350 - RNA, 30 nt, Homo Sapiens
auggaggaggcucuugaugaucccaggucu

SEQ ID NO: 251351 - RNA, 32 nt, Homo Sapiens
cagccuuaucuaaaaauaaaaagagaagccau

SEQ ID NO: 251352 - RNA, 32 nt, Homo Sapiens
ugcuuuucuagcuauuugaaaauauaaaaugu

SEQ ID NO: 251353 - RNA, 32 nt, Homo Sapiens
gauucaaaacccaugauauaaaauaacugcug

SEQ ID NO: 251354 - RNA, 32 nt, Homo Sapiens
agcgcgucgggaggcccggcugcuggccaggc

SEQ ID NO: 251355 - RNA, 32 nt, Homo Sapiens
ugaccugacaccugccgcugcuugaguggaca

SEQ ID NO: 251356 - RNA, 32 nt, Homo Sapiens
uuagaagcuacuaaaggguguuggggaugcuu

SEQ ID NO: 251357 - RNA, 32 nt, Homo Sapiens
ccuuggcuccccccggccucccucccaccccu

SEQ ID NO: 251358 - RNA, 32 nt, Homo Sapiens
uuccugccuucuucuuuuugcuguuguuucua

SEQ ID NO: 251359 - RNA, 32 nt, Homo Sapiens
aaucauaacuaaaacauugaaaacagaacaaa

SEQ ID NO: 251360 - RNA, 32 nt, Homo Sapiens
ugacaaagaacaauggauagauuaccaaacag

SEQ ID NO: 251361 - RNA, 32 nt, Homo Sapiens
uccccuccucuuuccccuccccaggcccaggc

SEQ ID NO: 251362 - RNA, 32 nt, Homo Sapiens
aaccgaugacuuauuaaucucuaauuuuuugg

SEQ ID NO: 251363 - RNA, 32 nt, Homo Sapiens
auucuugcagaguuuuccaaacaucagucauu

SEQ ID NO: 251364 - RNA, 32 nt, Homo Sapiens
gcucugcuauuuucuguauauuucauguugua

SEQ ID NO: 251365 - RNA, 32 nt, Homo Sapiens
augugccaaacgggaggccccgggcccccgcc

SEQ ID NO: 251366 - RNA, 32 nt, Homo Sapiens
gcuugggagcagaaacagaaaguacaugaugg

SEQ ID NO: 251367 - RNA, 32 nt, Homo Sapiens
acuucauagguuaugccuggacuugaacucug

SEQ ID NO: 251368 - RNA, 30 nt, Homo Sapiens
agugagagaaggcuugauguguauaaaaga

SEQ ID NO: 251369 - RNA, 32 nt, Homo Sapiens
ccauggcccucccucuccccugacgcacccuc

SEQ ID NO: 251370 - RNA, 32 nt, Homo Sapiens
uauaccacaucccacagcccggguccccaguc

SEQ ID NO: 251371 - RNA, 32 nt, Homo Sapiens
acgcacacaccacacacauacacacacgcauu

SEQ ID NO: 251372 - RNA, 32 nt, Homo Sapiens
gaugcagaauacugcgucuauaggagugggac

SEQ ID NO: 251373 - RNA, 32 nt, Homo Sapiens
ucagcgaccgggcccuucuccaccuccugcca

SEQ ID NO: 251374 - RNA, 32 nt, Homo Sapiens
aaaacauguuucccuacaccucuugcauucca

SEQ ID NO: 251375 - RNA, 32 nt, Homo Sapiens
guggccugccagcacagccagugccaucaggg

SEQ ID NO: 251376 - RNA, 32 nt, Homo Sapiens
acuaggagaggggggccaagguccugcucaac

SEQ ID NO: 251377 - RNA, 32 nt, Homo Sapiens
auggcgaaaccccgucuguaauaaaaauacaa

SEQ ID NO: 251378 - RNA, 32 nt, Homo Sapiens
gggaaucccucccccuucgccccagcccccca

SEQ ID NO: 251379 - RNA, 32 nt, Homo Sapiens
gugcagccuggcagcggcggcgcugcgcugug

SEQ ID NO: 251380 - RNA, 32 nt, Homo Sapiens
aacucaagguuaacauuuauuucaugucagua

SEQ ID NO: 251381 - RNA, 32 nt, Homo Sapiens
ccugccagccuggaguucuuccugugcuccuu

SEQ ID NO: 251382 - RNA, 32 nt, Homo Sapiens
uuccaaguccagucuucuuccauccuguggcu

SEQ ID NO: 251383 - RNA, 32 nt, Homo Sapiens
cuucucagccccacccaggcaagcccuggauc

SEQ ID NO: 251384 - RNA, 32 nt, Homo Sapiens
aacugcagggccgcuucuggggccuggaccac

SEQ ID NO: 251385 - RNA, 32 nt, Homo Sapiens
cgagaaccacucagaguuuacucuguacgaau

SEQ ID NO: 251386 - RNA, 32 nt, Homo Sapiens
ucucucgaacaaaacagcaaagggaaugccag

SEQ ID NO: 251387 - RNA, 32 nt, Homo Sapiens
gguccccugggcuguguagacccgguguccca

SEQ ID NO: 251388 - RNA, 32 nt, Homo Sapiens
ugcuuaccuucccguuucuccucugccccugg

SEQ ID NO: 251389 - RNA, 32 nt, Homo Sapiens
cauugguuaggaccuuuuuuccucucagggaa

SEQ ID NO: 251390 - RNA, 32 nt, Homo Sapiens
gcagggugagagauucuaacgacuggaugcug

SEQ ID NO: 251391 - RNA, 32 nt, Homo Sapiens
uucccccacaacaagccuuguuuguuccgaua

SEQ ID NO: 251392 - RNA, 32 nt, Homo Sapiens
augagaucagggccugcccccuggggaucaca

SEQ ID NO: 251393 - RNA, 32 nt, Homo Sapiens
ugcggugagcgcggccgggacgccgcgucggg

SEQ ID NO: 251394 - RNA, 32 nt, Homo Sapiens
agccccgcgaauccggccccaaccucgggaac

SEQ ID NO: 251395 - RNA, 32 nt, Homo Sapiens
aaaagguuuugugagcacuaacuauuggcaga

SEQ ID NO: 251396 - RNA, 32 nt, Homo Sapiens
uccgccugaagccacuaaaaccucugagaacu

SEQ ID NO: 251397 - RNA, 32 nt, Homo Sapiens
auccagcccucccuccccagguccuuccuacc

SEQ ID NO: 251398 - RNA, 32 nt, Homo Sapiens
uauauucuuacagauaucacaaacagggaaga

SEQ ID NO: 251399 - RNA, 32 nt, Homo Sapiens
agcgccugcucgcugugcccccggguuaugac

SEQ ID NO: 251400 - RNA, 32 nt, Homo Sapiens
gagaguguugagugugguacauuaacucucca

SEQ ID NO: 251401 - RNA, 32 nt, Homo Sapiens
aaccugugugucaaugcagaaggucuggagac

SEQ ID NO: 251402 - RNA, 32 nt, Homo Sapiens
agugaaaaauuccuuaaguguuauauaagaaa

SEQ ID NO: 251403 - RNA, 32 nt, Homo Sapiens
ccggacuggugcccuccucacucccaccugca

SEQ ID NO: 251404 - RNA, 32 nt, Homo Sapiens
gagcauuauagcagaacgaauccuggaauggg

SEQ ID NO: 251405 - RNA, 32 nt, Homo Sapiens
aagaggggcaguggguugggguuguuuuuacu

SEQ ID NO: 251406 - RNA, 32 nt, Homo Sapiens
gugugaagugguggcuugcugcuguaaucuuu

SEQ ID NO: 251407 - RNA, 32 nt, Homo Sapiens
cccaggagaagcugggcugugugguaccaaca

SEQ ID NO: 251408 - RNA, 32 nt, Homo Sapiens
caccagauuucacuuuugauccuuccagcucc

SEQ ID NO: 251409 - RNA, 32 nt, Homo Sapiens
gccuauggaacuaguggauccaaacugaucca

SEQ ID NO: 251410 - RNA, 32 nt, Homo Sapiens
ucugcucccuggauggggaggacuagaaagcu

SEQ ID NO: 251411 - RNA, 32 nt, Homo Sapiens
agcuggggcagagccugcugcagcccaacucu

SEQ ID NO: 251412 - RNA, 32 nt, Homo Sapiens
ggccuuccuaagucccgacucccuguccucua

SEQ ID NO: 251413 - RNA, 32 nt, Homo Sapiens
agcucucccgcggcgcuucugcaggaggcagc

SEQ ID NO: 251414 - RNA, 32 nt, Homo Sapiens
gguccuuucugugcacuaugaacgcuucuuuc

SEQ ID NO: 251415 - RNA, 32 nt, Homo Sapiens
cgugggcccagcccggcccaggcagcaauggg

SEQ ID NO: 251416 - RNA, 31 nt, Homo Sapiens
ugcuucugucuccaauauuaaaccauuuucc

SEQ ID NO: 251417 - RNA, 32 nt, Homo Sapiens
auaacauucaaagugucagauuccuugggagu

SEQ ID NO: 251418 - RNA, 32 nt, Homo Sapiens
gcuggggaugcauccaaagugguugucugaga

SEQ ID NO: 251419 - RNA, 32 nt, Homo Sapiens
agccacagugauuggagaugucuuuggcuuug

SEQ ID NO: 251420 - RNA, 32 nt, Homo Sapiens
cucuggggggcuaccuccaguacucuguccuc

SEQ ID NO: 251421 - RNA, 32 nt, Homo Sapiens
cacuuuaaagacaugaaugaacucacucugga

SEQ ID NO: 251422 - RNA, 32 nt, Homo Sapiens
aaucgugaauaaggcagacauggucucugcuc

SEQ ID NO: 251423 - RNA, 32 nt, Homo Sapiens
gagaacggagagccagugugcugugugucacg

SEQ ID NO: 251424 - RNA, 32 nt, Homo Sapiens
gcagugugcccagaguaaccacuuuuuuccuu

SEQ ID NO: 251425 - RNA, 32 nt, Homo Sapiens
ugaaauagaaggacuuuuuuccccuugaaaaa

SEQ ID NO: 251426 - RNA, 30 nt, Homo Sapiens
auaaggggugguauugaugagcaugaggga

SEQ ID NO: 251427 - RNA, 32 nt, Homo Sapiens
aaaccauugcaccagacucagaauagcuccaa

SEQ ID NO: 251428 - RNA, 32 nt, Homo Sapiens
acuuagaaggguuuuucugaauugucuagauc

SEQ ID NO: 251429 - RNA, 32 nt, Homo Sapiens
acuuggagucacagcaaaguucucuuccucuu

SEQ ID NO: 251430 - RNA, 32 nt, Homo Sapiens
gaucuuuuggugccaagcaugugcuauguuag

SEQ ID NO: 251431 - RNA, 32 nt, Homo Sapiens
auugcugcuaauucuaauucugaugaugacuc

SEQ ID NO: 251432 - RNA, 32 nt, Homo Sapiens
gcugugggucgcgugaugcgcaugucacggag

SEQ ID NO: 251433 - RNA, 32 nt, Homo Sapiens
agcucaccuucuggggcucuucugggaaaaua

SEQ ID NO: 251434 - RNA, 32 nt, Homo Sapiens
ggcugugguauucuaacagauccuuuuaagaa

SEQ ID NO: 251435 - RNA, 30 nt, Homo Sapiens
ugguggcgcgcgccuguaaucccaguuacu

SEQ ID NO: 251436 - RNA, 32 nt, Homo Sapiens
aauuuuguaugaaaaaucaaugucaaguacca

SEQ ID NO: 251437 - RNA, 31 nt, Homo Sapiens
uaugccugaaacacuccaaagggggugcuga

SEQ ID NO: 251438 - RNA, 32 nt, Homo Sapiens
uccugguauggaacgugagcucccgugacaug

SEQ ID NO: 251439 - RNA, 32 nt, Homo Sapiens
ucuuaguugggucucuuguucccuuuguacca

SEQ ID NO: 251440 - RNA, 32 nt, Homo Sapiens
acugcuaugcaaaccccaaaggguuggcggcu

SEQ ID NO: 251441 - RNA, 32 nt, Homo Sapiens
ggcuggggugagagucaagucuggccaggugc

SEQ ID NO: 251442 - RNA, 32 nt, Homo Sapiens
cccccgccaagagcggcugcgccuggucucug

SEQ ID NO: 251443 - RNA, 32 nt, Homo Sapiens
cuaaccucuaaaggcaugcuuagaggucaagg

SEQ ID NO: 251444 - RNA, 32 nt, Homo Sapiens
gggacugggguuucugggguccauucucugag

SEQ ID NO: 251445 - RNA, 32 nt, Homo Sapiens
cucuuugcucgcgucugcgcccgugggcccag

SEQ ID NO: 251446 - RNA, 32 nt, Homo Sapiens
gcuccccggcgcccagcagcagaggccaccgc

SEQ ID NO: 251447 - RNA, 32 nt, Homo Sapiens
ccugauuucuuacuuuggcuuuccugguggca

SEQ ID NO: 251448 - RNA, 32 nt, Homo Sapiens
gggcccgggaggagguguagcgcggcgagccc

SEQ ID NO: 251449 - RNA, 32 nt, Homo Sapiens
gucccuggauguugcugaaacucucgagauca

SEQ ID NO: 251450 - RNA, 32 nt, Homo Sapiens
uaguuuguucuuuugugaaaccagaaugagaa

SEQ ID NO: 251451 - RNA, 32 nt, Homo Sapiens
acugugccucaacgguucggcuccucaacaga

SEQ ID NO: 251452 - RNA, 32 nt, Homo Sapiens
caacuauuuaugcugguaaaacaaaugcuguu

SEQ ID NO: 251453 - RNA, 32 nt, Homo Sapiens
acauagcccaaggaggcaccacaggucuaugu

SEQ ID NO: 251454 - RNA, 32 nt, Homo Sapiens
uaaucuggaucgucuuuuuuuuuuuuuuuuuu

SEQ ID NO: 251455 - RNA, 32 nt, Homo Sapiens
acauuugcacuguguccuagagagccucuaug

SEQ ID NO: 251456 - RNA, 32 nt, Homo Sapiens
cugugcaagcuuucuuuuuaucauuaggaaau

SEQ ID NO: 251457 - RNA, 32 nt, Homo Sapiens
ccaagaugggauuucccugcugacuaugugag

SEQ ID NO: 251458 - RNA, 32 nt, Homo Sapiens
agaagaaaguuacuaucucugggauguuuacu

SEQ ID NO: 251459 - RNA, 32 nt, Homo Sapiens
uccuccaggaaauauaaugauuucugggaaca

SEQ ID NO: 251460 - RNA, 32 nt, Homo Sapiens
accggaacaaggagaccccugcccagaguugg

SEQ ID NO: 251461 - RNA, 32 nt, Homo Sapiens
auuuuagggcuuuguuauuuaacuuauuucaa

SEQ ID NO: 251462 - RNA, 32 nt, Homo Sapiens
agcucacagugucaaagcugccuuugcuuuua

SEQ ID NO: 251463 - RNA, 32 nt, Homo Sapiens
cagaacccaagcagaaacugccaaauguaauu

SEQ ID NO: 251464 - RNA, 32 nt, Homo Sapiens
gaugcagaauucaauuaauaaaauuugagccu

SEQ ID NO: 251465 - RNA, 32 nt, Homo Sapiens
ugcucaccuuguucagaagagaauaaaccagu

SEQ ID NO: 251466 - RNA, 32 nt, Homo Sapiens
ucauauaaugaaaauacauuaugaaaacagau

SEQ ID NO: 251467 - RNA, 32 nt, Homo Sapiens
cuuuugccugacggacccuguugccugcuccu

SEQ ID NO: 251468 - RNA, 31 nt, Homo Sapiens
uucuauggauacuauuaaaugucucaaauug

SEQ ID NO: 251469 - RNA, 32 nt, Homo Sapiens
cacuucauguugucuguaaagguguucugugg

SEQ ID NO: 251470 - RNA, 32 nt, Homo Sapiens
auugcuuuuucauuuucuuagcagugucucuc

SEQ ID NO: 251471 - RNA, 32 nt, Homo Sapiens
aacggcgcgccgggcgaccacggaugggugcu

SEQ ID NO: 251472 - RNA, 29 nt, Homo Sapiens
uguaucauauguaaauacugugaggugau

SEQ ID NO: 251473 - RNA, 32 nt, Homo Sapiens
cuaccuaggagcagggggaggggggugggguc

SEQ ID NO: 251474 - RNA, 32 nt, Homo Sapiens
gggcgcgcagcccucguuccgccgagagccgg

SEQ ID NO: 251475 - RNA, 32 nt, Homo Sapiens
uaacucagaaaaguaaagacaggaaauaacuc

SEQ ID NO: 251476 - RNA, 32 nt, Homo Sapiens
acaaggagguggggguacaaauccucagcucc

SEQ ID NO: 251477 - RNA, 32 nt, Homo Sapiens
uuggacagaaaagaaggcucuggauuuaagcg

SEQ ID NO: 251478 - RNA, 32 nt, Homo Sapiens
ggucgcugauaccccugagguacccaucaaaa

SEQ ID NO: 251479 - RNA, 31 nt, Homo Sapiens
cccgaaaugagggagcccagcuggggucuuu

SEQ ID NO: 251480 - RNA, 32 nt, Homo Sapiens
uuguggaugauuauuuucccugcaacaucucc

SEQ ID NO: 251481 - RNA, 32 nt, Homo Sapiens
gugaacuguggcuguauaugcaugcucauugu

SEQ ID NO: 251482 - RNA, 32 nt, Homo Sapiens
cucuggauggaaacuuccaucuuacuugguua

SEQ ID NO: 251483 - RNA, 32 nt, Homo Sapiens
aggcugaaaauauuuuuuaacuccucaaauac

SEQ ID NO: 251484 - RNA, 32 nt, Homo Sapiens
gccuguuucuggagccucuucugcaccuagga

SEQ ID NO: 251485 - RNA, 32 nt, Homo Sapiens
aaucaguuauuuucuucagcuuuaauuucaua

SEQ ID NO: 251486 - RNA, 32 nt, Homo Sapiens
guucagaaggcacacucugccaugcugagcuc

SEQ ID NO: 251487 - RNA, 32 nt, Homo Sapiens
uuucuuacugccccccagcugcacugugcccc

SEQ ID NO: 251488 - RNA, 30 nt, Homo Sapiens
ucaaauuuaaaauaaauuacuggacugugg

SEQ ID NO: 251489 - RNA, 32 nt, Homo Sapiens
gaaugucaagacaagauacuuauuaccaugac

SEQ ID NO: 251490 - RNA, 32 nt, Homo Sapiens
caaucagagccuguggggacugggccaggaau

SEQ ID NO: 251491 - RNA, 32 nt, Homo Sapiens
caugaagagcucuucaugcauucuuugcaaag

SEQ ID NO: 251492 - RNA, 26 nt, Homo Sapiens
gauggcggggagcggcguccgccaag

SEQ ID NO: 251493 - RNA, 32 nt, Homo Sapiens
cagcguccacacucagagggccugggccacag

SEQ ID NO: 251494 - RNA, 32 nt, Homo Sapiens
acuuaaagaggguuguaaaaauauuaaaagua

SEQ ID NO: 251495 - RNA, 32 nt, Homo Sapiens
augguggcauuugguccauggugggagaaaga

SEQ ID NO: 251496 - RNA, 32 nt, Homo Sapiens
aaggacagaagugcaauuuagcuuaaaugggu

SEQ ID NO: 251497 - RNA, 32 nt, Homo Sapiens
ucacccaggaggaguggggccagcuggaccua

SEQ ID NO: 251498 - RNA, 32 nt, Homo Sapiens
gcgcgggcgaugcaggcuccgcgagcggcacc

SEQ ID NO: 251499 - RNA, 32 nt, Homo Sapiens
ugaaucaucgcucgcagcggcggcgcccgcag

SEQ ID NO: 251500 - RNA, 32 nt, Homo Sapiens
gaauuccgcuccggccgcaggaucuccccaag

SEQ ID NO: 251501 - RNA, 32 nt, Homo Sapiens
agggaggggguccauguccuucccucccccac

SEQ ID NO: 251502 - RNA, 32 nt, Homo Sapiens
agucauaaauacuuuaaauacaaagccaacaa

SEQ ID NO: 251503 - RNA, 32 nt, Homo Sapiens
cuggagccugggccaggcccagcccaucugug

SEQ ID NO: 251504 - RNA, 32 nt, Homo Sapiens
acacgcggcgccccgccaggccuuagggcccg

SEQ ID NO: 251505 - RNA, 32 nt, Homo Sapiens
ccauggauccucuggcugggaagccacugacc

SEQ ID NO: 251506 - RNA, 32 nt, Homo Sapiens
gcuugccaccuggucaccagaccuccaaauau

SEQ ID NO: 251507 - RNA, 32 nt, Homo Sapiens
ccaagaagauggaucaaggaaugggcuucuga

SEQ ID NO: 251508 - RNA, 27 nt, Homo Sapiens
acccagggccucuucagcucuuuguag

SEQ ID NO: 251509 - RNA, 32 nt, Homo Sapiens
uucuccuuuuuacaaaaacaaacauagaagaa

SEQ ID NO: 251510 - RNA, 32 nt, Homo Sapiens
uccuaugagagaauaauguaaugaauguagga

SEQ ID NO: 251511 - RNA, 32 nt, Homo Sapiens
caccggcauggcgcuccggggcuucugcagcg

SEQ ID NO: 251512 - RNA, 32 nt, Homo Sapiens
cucacaauagagaauguaacauaacagacauc

SEQ ID NO: 251513 - RNA, 32 nt, Homo Sapiens
gggcuccaugccucuggaggccucuggcccuc

SEQ ID NO: 251514 - RNA, 28 nt, Homo Sapiens
ugugcuucagcgaccaggauggccaggc

SEQ ID NO: 251515 - RNA, 32 nt, Homo Sapiens
agcaaauuucucaagacuauagacugaacugu

SEQ ID NO: 251516 - RNA, 32 nt, Homo Sapiens
aagguccagagucuuggugccuccaugaaaca

SEQ ID NO: 251517 - RNA, 32 nt, Homo Sapiens
cuacauauauguauauuaaaacugcacugcca

SEQ ID NO: 251518 - RNA, 31 nt, Homo Sapiens
ccguggcugccggcgcucgugugcaccggcg

SEQ ID NO: 251519 - RNA, 32 nt, Homo Sapiens
uaaaguauucaacaauuucaauaaaagauaaa

SEQ ID NO: 251520 - RNA, 32 nt, Homo Sapiens
ugccuguaaccucagcacuuugggaggcugag

SEQ ID NO: 251521 - RNA, 32 nt, Homo Sapiens
cguaagacuucucguggccaugugucucaccc

SEQ ID NO: 251522 - RNA, 32 nt, Homo Sapiens
ugguuuucuuugaccucaagauugacaaugaa

SEQ ID NO: 251523 - RNA, 31 nt, Homo Sapiens
cauggaaaauaaaaguuguaucauucuuuuu

SEQ ID NO: 251524 - RNA, 32 nt, Homo Sapiens
caggggcccagccccagcuguuggcuacauga

SEQ ID NO: 251525 - RNA, 32 nt, Homo Sapiens
ccuaggcucacucugggaccaguuccugccac

SEQ ID NO: 251526 - RNA, 32 nt, Homo Sapiens
ucgcgccgcucccagcaucggggccgcuagcc

SEQ ID NO: 251527 - RNA, 32 nt, Homo Sapiens
gaaggcaaucugggaauggguuggauggggag

SEQ ID NO: 251528 - RNA, 32 nt, Homo Sapiens
ccccacagagaauggggaaggaaggcugcggg

SEQ ID NO: 251529 - RNA, 32 nt, Homo Sapiens
uuuguguguuucaguuaacuuacuacauucga

SEQ ID NO: 251530 - RNA, 32 nt, Homo Sapiens
acuaggaggagcuucuuuuguagaagccagaa

SEQ ID NO: 251531 - RNA, 32 nt, Homo Sapiens
uaggccugugccacccgcugccugcaggaaga

SEQ ID NO: 251532 - RNA, 30 nt, Homo Sapiens
auuuugaggggcgaugcagccacucacuag

SEQ ID NO: 251533 - RNA, 32 nt, Homo Sapiens
cuugaccuugugcauuauagcauuccauuagc

SEQ ID NO: 251534 - RNA, 32 nt, Homo Sapiens
cgauguucagaauugaaaauguggagauagaa

SEQ ID NO: 251535 - RNA, 32 nt, Homo Sapiens
cagcucugccagcucagaggaccagcuauauc

SEQ ID NO: 251536 - RNA, 32 nt, Homo Sapiens
gucauaagccaggaaaugaaacaaaggaaaac

SEQ ID NO: 251537 - RNA, 32 nt, Homo Sapiens
cucucggcuucaaggcgcugcugcugcucggg

SEQ ID NO: 251538 - RNA, 32 nt, Homo Sapiens
ugcccguaauuucugcacuuugggagacugag

SEQ ID NO: 251539 - RNA, 32 nt, Homo Sapiens
aguguuuccuguuucuggaauuccuuguuagg

SEQ ID NO: 251540 - RNA, 32 nt, Homo Sapiens
uaauuagaaaaaguacaauaaaauuaauucac

SEQ ID NO: 251541 - RNA, 32 nt, Homo Sapiens
gcaaagaauguuucaucaaauguauauuuucu

SEQ ID NO: 251542 - RNA, 32 nt, Homo Sapiens
ucuaugccuucugcaccaagaagaagugaaug

SEQ ID NO: 251543 - RNA, 32 nt, Homo Sapiens
uuuuugcaucccugcccuugccugcagacuga

SEQ ID NO: 251544 - RNA, 32 nt, Homo Sapiens
uuucagaaaauaaaagcagagauaacacuucc

SEQ ID NO: 251545 - RNA, 32 nt, Homo Sapiens
uaaucucaucacauuauccugcugcuugcuuu

SEQ ID NO: 251546 - RNA, 32 nt, Homo Sapiens
cacgcagcuggguagauauacagcugucacaa

SEQ ID NO: 251547 - RNA, 32 nt, Homo Sapiens
uaaggcaccaaaagaccaccugagcagggagg

SEQ ID NO: 251548 - RNA, 32 nt, Homo Sapiens
uggccuaaaaauuaaaagagaucgauauuaaa

SEQ ID NO: 251549 - RNA, 32 nt, Homo Sapiens
uagucuaugcaacuagcaaaaaucugcauaau

SEQ ID NO: 251550 - RNA, 32 nt, Homo Sapiens
accuucuuuuucucuugacuuugacagcacau

SEQ ID NO: 251551 - RNA, 32 nt, Homo Sapiens
cuuuuuaaaaaauuaguuuuggggcuggaugu

SEQ ID NO: 251552 - RNA, 32 nt, Homo Sapiens
cuguacuguaaauuucuaauuuaucacuguac

SEQ ID NO: 251553 - RNA, 32 nt, Homo Sapiens
gcgggacgcgccgcggucgggaugacgugagc

SEQ ID NO: 251554 - RNA, 32 nt, Homo Sapiens
cacgcacgacggccgcagcaucuccugccagc

SEQ ID NO: 251555 - RNA, 32 nt, Homo Sapiens
ggcagcagcggugagcgcgagccccggagccc

SEQ ID NO: 251556 - RNA, 32 nt, Homo Sapiens
guauagauugucaucauaugauuaccacauuu

SEQ ID NO: 251557 - RNA, 32 nt, Homo Sapiens
caugcccagcugacaagacuaauuuuuuaucc

SEQ ID NO: 251558 - RNA, 32 nt, Homo Sapiens
ccuuucuuuuuuucuuuauauagugcagauau

SEQ ID NO: 251559 - RNA, 32 nt, Homo Sapiens
auucugaacaaaucgguuucugauaagccgug

SEQ ID NO: 251560 - RNA, 32 nt, Homo Sapiens
aauguuuacugauauuuguugaaguccuacaa

SEQ ID NO: 251561 - RNA, 32 nt, Homo Sapiens
aagcagccuucugaucugaggaccccugcaga

SEQ ID NO: 251562 - RNA, 32 nt, Homo Sapiens
uggucuguagaaauguuuuuaaagauuaggga

SEQ ID NO: 251563 - RNA, 32 nt, Homo Sapiens
cuuuaauccugguggucuugccuucugauuuu

SEQ ID NO: 251564 - RNA, 32 nt, Homo Sapiens
uccgacgccgcuuacucagagcccuggccucc

SEQ ID NO: 251565 - RNA, 32 nt, Homo Sapiens
agaagaagcuggaagagcuagagcuugacgag

SEQ ID NO: 251566 - RNA, 32 nt, Homo Sapiens
uguguggguggggacuagggggaugccugaau

SEQ ID NO: 251567 - RNA, 32 nt, Homo Sapiens
agcugacuuucacugugagucauuccaucauu

SEQ ID NO: 251568 - RNA, 32 nt, Homo Sapiens
aaugucuucugugccaugggagagcacaacag

SEQ ID NO: 251569 - RNA, 32 nt, Homo Sapiens
agaugccacucccagcacaugauaagaagugg

SEQ ID NO: 251570 - RNA, 32 nt, Homo Sapiens
acaacuaaucuuucccaucaacucugugugaa

SEQ ID NO: 251571 - RNA, 32 nt, Homo Sapiens
cuucugggcuccuuugcucaguugccccagga

SEQ ID NO: 251572 - RNA, 31 nt, Homo Sapiens
ccuggcuggcgcugccugccucuccgcacuc

SEQ ID NO: 251573 - RNA, 32 nt, Homo Sapiens
gcgcgcgcccacaggacgcccgggguugggua

SEQ ID NO: 251574 - RNA, 32 nt, Homo Sapiens
uuuacuaguguaaugacaguaaaauuacuuca

SEQ ID NO: 251575 - RNA, 32 nt, Homo Sapiens
auacguauaugauguauuuuuaguucagugau

SEQ ID NO: 251576 - RNA, 32 nt, Homo Sapiens
uaauguuugucaaaaauguaucaaaauucauc

SEQ ID NO: 251577 - RNA, 32 nt, Homo Sapiens
caggaggagggagaggacagagccacugcaga

SEQ ID NO: 251578 - RNA, 32 nt, Homo Sapiens
ggauccugcccggcugcagggcucuggauggg

SEQ ID NO: 251579 - RNA, 32 nt, Homo Sapiens
ucccuuagggcuuaucacaccguucuccccag

SEQ ID NO: 251580 - RNA, 31 nt, Homo Sapiens
gaacugaacauaucuugucuuagcacccagg

SEQ ID NO: 251581 - RNA, 31 nt, Homo Sapiens
gauuugugugggcuaaaagugcuuguacuua

SEQ ID NO: 251582 - RNA, 32 nt, Homo Sapiens
uccgcuccugcgcgccagacagcgcuccaucu

SEQ ID NO: 251583 - RNA, 32 nt, Homo Sapiens
gcaaacaaaaucaugcacaauggugaaaagug

SEQ ID NO: 251584 - RNA, 32 nt, Homo Sapiens
cuuagugguaugucucuuuaaguuuugauuaa

SEQ ID NO: 251585 - RNA, 32 nt, Homo Sapiens
aggcccgggaugccaguggcuucuggagcagc

SEQ ID NO: 251586 - RNA, 32 nt, Homo Sapiens
aauuuucaacauuuauacuuuaacuguucuaa

SEQ ID NO: 251587 - RNA, 32 nt, Homo Sapiens
cacuucaucuucucagcucccauuucuacucu

SEQ ID NO: 251588 - RNA, 32 nt, Homo Sapiens
ccacucuugcgucacagcacaaacuaccaaau

SEQ ID NO: 251589 - RNA, 32 nt, Homo Sapiens
auauuuaaugguuaagggacuugucccaaguc

SEQ ID NO: 251590 - RNA, 32 nt, Homo Sapiens
uuagaauauauuaaaucguuagaggagcaaca

SEQ ID NO: 251591 - RNA, 32 nt, Homo Sapiens
ggccugcuggagcugcugcagccgcacguguu

SEQ ID NO: 251592 - RNA, 32 nt, Homo Sapiens
guacaucccacaccccacccucccuucccuuc

SEQ ID NO: 251593 - RNA, 32 nt, Homo Sapiens
guuaauauugugaagaaaaauaaaguacagug

SEQ ID NO: 251594 - RNA, 32 nt, Homo Sapiens
aaaauacaaaaauuagccagguguggagguac

SEQ ID NO: 251595 - RNA, 32 nt, Homo Sapiens
aaaauacaaaaauuagccugguguggugguac

SEQ ID NO: 251596 - RNA, 32 nt, Homo Sapiens
cuuuauauuguauuaacagccagcauucaaaa

SEQ ID NO: 251597 - RNA, 32 nt, Homo Sapiens
uguguugguuuaucuuuaggcgugguggaggg

SEQ ID NO: 251598 - RNA, 32 nt, Homo Sapiens
uggggaggggguaagggagccagccaacucgg

SEQ ID NO: 251599 - RNA, 32 nt, Homo Sapiens
ucuuucuguccccacguuguggcaccugaaga

SEQ ID NO: 251600 - RNA, 32 nt, Homo Sapiens
ggcggcggggccugggucccccuccugcacgc

SEQ ID NO: 251601 - RNA, 32 nt, Homo Sapiens
gugccaggaaugcugcgcugcugcugcugcgc

SEQ ID NO: 251602 - RNA, 32 nt, Homo Sapiens
uaaggggaaaccgaggcucacagcgaggaacu

SEQ ID NO: 251603 - RNA, 32 nt, Homo Sapiens
ccgugcgcggguggagcucaguaggaccacgg

SEQ ID NO: 251604 - RNA, 32 nt, Homo Sapiens
ccaucaucuucagcauuuggccucaacaguug

SEQ ID NO: 251605 - RNA, 32 nt, Homo Sapiens
gagguucaaugagaugguggcauuuugagaau

SEQ ID NO: 251606 - RNA, 32 nt, Homo Sapiens
gaucugcaggcacaacuccagauguuccgagc

SEQ ID NO: 251607 - RNA, 32 nt, Homo Sapiens
ggcaggaguauuuuuguauuagaagaggccua

SEQ ID NO: 251608 - RNA, 32 nt, Homo Sapiens
ugcaauauuuaguuucauccagcucuuaugaa

SEQ ID NO: 251609 - RNA, 32 nt, Homo Sapiens
aaguauuccucgggauguuuuuauauaaauua

SEQ ID NO: 251610 - RNA, 32 nt, Homo Sapiens
gaaggaaacaaauguguauaaacugcugucaa

SEQ ID NO: 251611 - RNA, 32 nt, Homo Sapiens
gaguauaaauguuuuaaauugcauugucccua

SEQ ID NO: 251612 - RNA, 32 nt, Homo Sapiens
uagaacaucagcagaggggcccugccccuccg

SEQ ID NO: 251613 - RNA, 32 nt, Homo Sapiens
ggcgucugggcaggguucgggugcggcccucc

SEQ ID NO: 251614 - RNA, 32 nt, Homo Sapiens
gagcaauuaagaaaacaaaaacagaaacacau

SEQ ID NO: 251615 - RNA, 32 nt, Homo Sapiens
cuuagaucuguuucuuuuuucagacauucaaa

SEQ ID NO: 251616 - RNA, 32 nt, Homo Sapiens
uuagauuuuuaaaauuucaaauccuaaaucac

SEQ ID NO: 251617 - RNA, 32 nt, Homo Sapiens
caugcacgguguggcccuccccggugcuguca

SEQ ID NO: 251618 - RNA, 32 nt, Homo Sapiens
aggugguggggacccauggucuguggaacugg

SEQ ID NO: 251619 - RNA, 32 nt, Homo Sapiens
uugccuuccuucccggcagcuucgccacucuc

SEQ ID NO: 251620 - RNA, 32 nt, Homo Sapiens
aaacaacuaaugagaaaagaaaaggaauuuua

SEQ ID NO: 251621 - RNA, 32 nt, Homo Sapiens
gaacuuggcuauacugaaaucuguuauuuuag

SEQ ID NO: 251622 - RNA, 32 nt, Homo Sapiens
cccgccggcgcgcgcacgacuugagaccugcc

SEQ ID NO: 251623 - RNA, 32 nt, Homo Sapiens
aacugcggaacaagagguugugagaaucuaag

SEQ ID NO: 251624 - RNA, 32 nt, Homo Sapiens
caguucauguucgacaauauuccuugaugaca

SEQ ID NO: 251625 - RNA, 32 nt, Homo Sapiens
ggacacccuuuaauaccuuucagauauuuuuu

SEQ ID NO: 251626 - RNA, 32 nt, Homo Sapiens
caucuuuuaaacagaaugacugaucuaaagau

SEQ ID NO: 251627 - RNA, 32 nt, Homo Sapiens
gaagcugagagaagaggaaaagaggaguggcc

SEQ ID NO: 251628 - RNA, 32 nt, Homo Sapiens
uucccugcccuucucugugcucuuagacccag

SEQ ID NO: 251629 - RNA, 32 nt, Homo Sapiens
uaaguauuaaaauuauccaaauuaaauccuua

SEQ ID NO: 251630 - RNA, 32 nt, Homo Sapiens
uagucuugcuugaugguaaagucuuggauuau

SEQ ID NO: 251631 - RNA, 32 nt, Homo Sapiens
cuggauucuuugcaugccacauagcaggauuc

SEQ ID NO: 251632 - RNA, 32 nt, Homo Sapiens
caauguuaaguaccagaguauuaggcuacaua

SEQ ID NO: 251633 - RNA, 32 nt, Homo Sapiens
agggcuaagcuuaugaaggaaugccuccuuug

SEQ ID NO: 251634 - RNA, 32 nt, Homo Sapiens
agucccugcauugcgcgcgacccggcggcggg

SEQ ID NO: 251635 - RNA, 32 nt, Homo Sapiens
gccgcccgcuggcgggggagcagcgcggucga

SEQ ID NO: 251636 - RNA, 32 nt, Homo Sapiens
uucugauacuuauuuauaacauuguaaaugau

SEQ ID NO: 251637 - RNA, 32 nt, Homo Sapiens
uacaaaguuggucaaaaccaucuuucaaagca

SEQ ID NO: 251638 - RNA, 32 nt, Homo Sapiens
uccccugccucccagcccggcugugagugcuc

SEQ ID NO: 251639 - RNA, 32 nt, Homo Sapiens
cucaaaauccaaguuauuaaucuuauguguuu

SEQ ID NO: 251640 - RNA, 32 nt, Homo Sapiens
aacagaaugccaacccaaagagucaucuugca

SEQ ID NO: 251641 - RNA, 32 nt, Homo Sapiens
gcccgcggaccgaugcugccggcggccgcucg

SEQ ID NO: 251642 - RNA, 32 nt, Homo Sapiens
uaaugacucugcaauggccucuaagugcucaa

SEQ ID NO: 251643 - RNA, 32 nt, Homo Sapiens
caauauaaauuguuguuuuucuuuauaugcuu

SEQ ID NO: 251644 - RNA, 32 nt, Homo Sapiens
agaaagaggagcuguaaaaggcugucugugau

SEQ ID NO: 251645 - RNA, 32 nt, Homo Sapiens
ugaaucccagcuuuugagucugacaaaaucag

SEQ ID NO: 251646 - RNA, 32 nt, Homo Sapiens
uuagauugucuccugguauguuuaaaauuuug

SEQ ID NO: 251647 - RNA, 32 nt, Homo Sapiens
uuauuaaucacguaugguucacagauaauucu

SEQ ID NO: 251648 - RNA, 32 nt, Homo Sapiens
agugacgucugcuuggcaucuugagauuguua

SEQ ID NO: 251649 - RNA, 32 nt, Homo Sapiens
accaucccaaaugcaagcagccaggcccagga

SEQ ID NO: 251650 - RNA, 32 nt, Homo Sapiens
ccaaccugggggauugauacgaccggggaaaa

SEQ ID NO: 251651 - RNA, 32 nt, Homo Sapiens
ggaaagguaggaagaagagguaauuuuuacug

SEQ ID NO: 251652 - RNA, 31 nt, Homo Sapiens
uuugcuuuugguaaugugauguugauguucu

SEQ ID NO: 251653 - RNA, 32 nt, Homo Sapiens
accaguggugugaagagaagugaauguugugc

SEQ ID NO: 251654 - RNA, 32 nt, Homo Sapiens
caaaccugcuauuucagcacuccuguuuuuaa

SEQ ID NO: 251655 - RNA, 32 nt, Homo Sapiens
agagacagagacagcaagaaaagcagagauaa

SEQ ID NO: 251656 - RNA, 32 nt, Homo Sapiens
aacugcaugcauuuauacugaccaauguacac

SEQ ID NO: 251657 - RNA, 32 nt, Homo Sapiens
gccuggcuuuccccggccaccccagccgcccu

SEQ ID NO: 251658 - RNA, 28 nt, Homo Sapiens
agcguggggcggcugcaguggcggcgug

SEQ ID NO: 251659 - RNA, 32 nt, Homo Sapiens
auuugcacauauauuuguacucaacauuucau

SEQ ID NO: 251660 - RNA, 32 nt, Homo Sapiens
cauguuaaacacauugaaacauaaccuauguu

SEQ ID NO: 251661 - RNA, 29 nt, Homo Sapiens
gcuggugugacuuauaaggagaauuugca

SEQ ID NO: 251662 - RNA, 32 nt, Homo Sapiens
ccggcuggggucggcgggacccgcgggccaug

SEQ ID NO: 251663 - RNA, 32 nt, Homo Sapiens
cauuccgcauucucccguccucccugagcgcu

SEQ ID NO: 251664 - RNA, 32 nt, Homo Sapiens
aggagacagacggcagcaaacaaaaucaugca

SEQ ID NO: 251665 - RNA, 32 nt, Homo Sapiens
ugauguacaucuguagcaaagcucuuggagaa

SEQ ID NO: 251666 - RNA, 32 nt, Homo Sapiens
cuuucccuggugaacucuggcuuuuuauccuc

SEQ ID NO: 251667 - RNA, 32 nt, Homo Sapiens
ucgagcagcuggauccccgcggccggacuccc

SEQ ID NO: 251668 - RNA, 32 nt, Homo Sapiens
augaaccauuuucaaguuucuguucuuccaug

SEQ ID NO: 251669 - RNA, 32 nt, Homo Sapiens
caacagugccagguuccagcgugcguuccaag

SEQ ID NO: 251670 - RNA, 32 nt, Homo Sapiens
aaggguagaaguucuaaugucuguuagcuacc

SEQ ID NO: 251671 - RNA, 32 nt, Homo Sapiens
uuugcccuaccuugaacuugcccugcagaguc

SEQ ID NO: 251672 - RNA, 32 nt, Homo Sapiens
gaaaaaucacgacuucugagacuuugggaguu

SEQ ID NO: 251673 - RNA, 32 nt, Homo Sapiens
uuuuaauuuuauucauuuuuuccuuugccauu

SEQ ID NO: 251674 - RNA, 32 nt, Homo Sapiens
auugacuucuauuuuccuuaaucaaaccagcu

SEQ ID NO: 251675 - RNA, 32 nt, Homo Sapiens
uguguuguuuucuuuuuuuuuaaauuaugaau

SEQ ID NO: 251676 - RNA, 32 nt, Homo Sapiens
cucccuuucugucucugccugaauagagcaug

SEQ ID NO: 251677 - RNA, 32 nt, Homo Sapiens
ccugcuuucuucauggcaugugcacaucugac

SEQ ID NO: 251678 - RNA, 32 nt, Homo Sapiens
ucucugaagaucuggacugaggacccugcuac

SEQ ID NO: 251679 - RNA, 32 nt, Homo Sapiens
accucucacccucuccuucccgggaggcccug

SEQ ID NO: 251680 - RNA, 32 nt, Homo Sapiens
cuccauucugaggguuucaucgucagguggga

SEQ ID NO: 251681 - RNA, 32 nt, Homo Sapiens
ugaugucacagaggggucaagauacagucaua

SEQ ID NO: 251682 - RNA, 32 nt, Homo Sapiens
cggugccucggugacgaccgugucccugccgu

SEQ ID NO: 251683 - RNA, 32 nt, Homo Sapiens
uuuaaaaaauaugaauccaaucaauaaauggu

SEQ ID NO: 251684 - RNA, 32 nt, Homo Sapiens
uguggggccuaaaggugcugcaggagcuuuca

SEQ ID NO: 251685 - RNA, 32 nt, Homo Sapiens
accacagacacacacacgcacacacacacaca

SEQ ID NO: 251686 - RNA, 32 nt, Homo Sapiens
cuaccccugccaacgcggccaagagcccccug

SEQ ID NO: 251687 - RNA, 32 nt, Homo Sapiens
agcucacguaagcaucucuggugugcaguauu

SEQ ID NO: 251688 - RNA, 32 nt, Homo Sapiens
uaguccauuucccuucuagcuccuucuguucu

SEQ ID NO: 251689 - RNA, 32 nt, Homo Sapiens
ugucuccauuuuauagauuaguuucuuucuaa

SEQ ID NO: 251690 - RNA, 32 nt, Homo Sapiens
aacauuaaaaacagcagcuuuaugauagagaa

SEQ ID NO: 251691 - RNA, 32 nt, Homo Sapiens
guauugugagagaauggaagcaaccaacaaau

SEQ ID NO: 251692 - RNA, 32 nt, Homo Sapiens
cgccccgcuucucuuauucguguuaggugccc

SEQ ID NO: 251693 - RNA, 32 nt, Homo Sapiens
cuuuuccagccccggccccggccccugcagcc

SEQ ID NO: 251694 - RNA, 32 nt, Homo Sapiens
guuuccagcgcuucccgagguaggcgugagaa

SEQ ID NO: 251695 - RNA, 32 nt, Homo Sapiens
caaagaagaaauacaaaugaccaagaagcaca

SEQ ID NO: 251696 - RNA, 32 nt, Homo Sapiens
ucacaguauauacaacaggcagcggauugucu

SEQ ID NO: 251697 - RNA, 32 nt, Homo Sapiens
uggaaaaaaaauacuagccuagcuggucauuu

SEQ ID NO: 251698 - RNA, 32 nt, Homo Sapiens
ggauaucagguggguacccuccaauuccauuu

SEQ ID NO: 251699 - RNA, 32 nt, Homo Sapiens
uccuaucuuuagucacuuuguacaggaugaua

SEQ ID NO: 251700 - RNA, 32 nt, Homo Sapiens
acuaugaauuaaacauucacauauccagucua

SEQ ID NO: 251701 - RNA, 32 nt, Homo Sapiens
gcggugggcuggcgguugcgcuccucagaucg

SEQ ID NO: 251702 - RNA, 32 nt, Homo Sapiens
uggccacuucuuccuugcgucucccugcaugc

SEQ ID NO: 251703 - RNA, 32 nt, Homo Sapiens
acuguuuaccuucugguccccggagccauggg

SEQ ID NO: 251704 - RNA, 32 nt, Homo Sapiens
uuuguugccaacauccuguuuaccaaaagugu

SEQ ID NO: 251705 - RNA, 32 nt, Homo Sapiens
uaauuaacaaaguaaaacaagaucacacccug

SEQ ID NO: 251706 - RNA, 32 nt, Homo Sapiens
cuugucccgcguuuuggagaccauaucuggag

SEQ ID NO: 251707 - RNA, 32 nt, Homo Sapiens
gaaucugagguaucaaacacacacaggauacc

SEQ ID NO: 251708 - RNA, 32 nt, Homo Sapiens
cuuaagacacauauggaaaacaauaugguaga

SEQ ID NO: 251709 - RNA, 32 nt, Homo Sapiens
cacagacacacacagagggacagccccaugag

SEQ ID NO: 251710 - RNA, 32 nt, Homo Sapiens
aaggccuuuguccccccacuucucgcugcucu

SEQ ID NO: 251711 - RNA, 27 nt, Homo Sapiens
aguguguucccccucagccccuccggc

SEQ ID NO: 251712 - RNA, 32 nt, Homo Sapiens
uuuuaaggaagugcucuuuauguaucuaacag

SEQ ID NO: 251713 - RNA, 32 nt, Homo Sapiens
uguccaguguugcauuugaauaugucuguuuc

SEQ ID NO: 251714 - RNA, 32 nt, Homo Sapiens
ggcacgaggggcggcguaggggcggaggucgc

SEQ ID NO: 251715 - RNA, 32 nt, Homo Sapiens
cagauucagucuccagaggguauucagaucau

SEQ ID NO: 251716 - RNA, 32 nt, Homo Sapiens
uaauuucuuguacauguauauuacuuguucuu

SEQ ID NO: 251717 - RNA, 32 nt, Homo Sapiens
gccguggguccguaggagggacaguaccucac

SEQ ID NO: 251718 - RNA, 32 nt, Homo Sapiens
uuccgcugcccccauuccuucuccauacaugg

SEQ ID NO: 251719 - RNA, 32 nt, Homo Sapiens
caguggugcuuuuguaccuagguuuuauguga

SEQ ID NO: 251720 - RNA, 32 nt, Homo Sapiens
guggucccacccaggaagggagggagcugagg

SEQ ID NO: 251721 - RNA, 32 nt, Homo Sapiens
acacauaagaauguucuuaaugcuuuaguaau

SEQ ID NO: 251722 - RNA, 32 nt, Homo Sapiens
aggcagaggagaaguuugaagaugcauaugag

SEQ ID NO: 251723 - RNA, 32 nt, Homo Sapiens
acaauuaugggugugaccuggaugcgcugggc

SEQ ID NO: 251724 - RNA, 32 nt, Homo Sapiens
cccgcgcggagcauggauccgggcugggggca

SEQ ID NO: 251725 - RNA, 29 nt, Homo Sapiens
cugggccuguggugccugccgagugguca

SEQ ID NO: 251726 - RNA, 32 nt, Homo Sapiens
acacuguacaggcccucccuccccuuggccuc

SEQ ID NO: 251727 - RNA, 32 nt, Homo Sapiens
caagaaagcauuacccgcccucggggggucgg

SEQ ID NO: 251728 - RNA, 32 nt, Homo Sapiens
cuccucaacuguaauucuauuuuuaauaauaa

SEQ ID NO: 251729 - RNA, 32 nt, Homo Sapiens
ggccauuaugaguggggcccucugcucaggcu

SEQ ID NO: 251730 - RNA, 32 nt, Homo Sapiens
caggaaaugaccaagcucacacaugcuggcug

SEQ ID NO: 251731 - RNA, 32 nt, Homo Sapiens
ccccaagccacaucugccccgucccccgcccc

SEQ ID NO: 251732 - RNA, 32 nt, Homo Sapiens
caguagcgccuggcgcccccggcgcgcaaggc

SEQ ID NO: 251733 - RNA, 32 nt, Homo Sapiens
cuguucgcucugcggaguggcucgccagcgaa

SEQ ID NO: 251734 - RNA, 32 nt, Homo Sapiens
acgcggcagcggggcugggccugugcggcggc

SEQ ID NO: 251735 - RNA, 32 nt, Homo Sapiens
ugucccacccccacccgaucauaccuuccccc

SEQ ID NO: 251736 - RNA, 32 nt, Homo Sapiens
cucacucugacgggcccgcgcgcacgauggcc

SEQ ID NO: 251737 - RNA, 32 nt, Homo Sapiens
agaagaggaaauggcauggaaucacugccucc

SEQ ID NO: 251738 - RNA, 28 nt, Homo Sapiens
ugaaggaaagauuuguacuacaguucuu

SEQ ID NO: 251739 - RNA, 32 nt, Homo Sapiens
cacauccagggaagaggagugucgguaguucu

SEQ ID NO: 251740 - RNA, 32 nt, Homo Sapiens
uguugaagaugaauucuugaauucugccugcc

SEQ ID NO: 251741 - RNA, 32 nt, Homo Sapiens
gcuccggcgcuggucucuggcuucgaagucug

SEQ ID NO: 251742 - RNA, 32 nt, Homo Sapiens
uaaagaaugcuggguguugcauuucuggaccc

SEQ ID NO: 251743 - RNA, 32 nt, Homo Sapiens
ucagaccauuuucuuuucuugggagccagugg

SEQ ID NO: 251744 - RNA, 32 nt, Homo Sapiens
gugcauggucggggcaggaacuggugcaugga

SEQ ID NO: 251745 - RNA, 32 nt, Homo Sapiens
cuuggggggugaugagggcagcagccagcccu

SEQ ID NO: 251746 - RNA, 32 nt, Homo Sapiens
auagagggucaaagguucaaucaauaaaaaua

SEQ ID NO: 251747 - RNA, 32 nt, Homo Sapiens
ccaagacacucaugccacucuggcucugaagg

SEQ ID NO: 251748 - RNA, 32 nt, Homo Sapiens
aguggaggcuuaucuguugggaggaagacagc

SEQ ID NO: 251749 - RNA, 32 nt, Homo Sapiens
uguggcccaggcuggccuugaacucuugggcu

SEQ ID NO: 251750 - RNA, 32 nt, Homo Sapiens
augaauuccugagcaccuuguuuuucuuccaa

SEQ ID NO: 251751 - RNA, 32 nt, Homo Sapiens
cauaccuuuguuuuaaaauauuuuauacuuac

SEQ ID NO: 251752 - RNA, 32 nt, Homo Sapiens
uauacacuuguacauuuuuuaauacucugauu

SEQ ID NO: 251753 - RNA, 32 nt, Homo Sapiens
cagcugcugguggcuugggacaucaguggggc

SEQ ID NO: 251754 - RNA, 32 nt, Homo Sapiens
uguacaugucaacucguaaaucugauuaaauu

SEQ ID NO: 251755 - RNA, 32 nt, Homo Sapiens
cucagggcgcggggccggcggcggcgaacgag

SEQ ID NO: 251756 - RNA, 32 nt, Homo Sapiens
caggauggagugcaguggcuauucacagguuu

SEQ ID NO: 251757 - RNA, 32 nt, Homo Sapiens
aacacaguuccgaggcauucagagcaucagag

SEQ ID NO: 251758 - RNA, 32 nt, Homo Sapiens
ggccagaggcgaguccugcggagugguagcgc

SEQ ID NO: 251759 - RNA, 32 nt, Homo Sapiens
cuucccaguccugccugaacagcccucucucu

SEQ ID NO: 251760 - RNA, 32 nt, Homo Sapiens
cuuggcuugugcuuuauucaaacuaaugugaa

SEQ ID NO: 251761 - RNA, 32 nt, Homo Sapiens
ccuuuuccccagacuuuuuaucuccuaugcau

SEQ ID NO: 251762 - RNA, 32 nt, Homo Sapiens
uuagucuaaugauugggcacaaugaggauuua

SEQ ID NO: 251763 - RNA, 32 nt, Homo Sapiens
gaggcucagagggagaaaggggcuugccaagg

SEQ ID NO: 251764 - RNA, 32 nt, Homo Sapiens
gcugggcccgcaccccaugucccuugucacug

SEQ ID NO: 251765 - RNA, 32 nt, Homo Sapiens
aaacaaggagcucaguggauaaaccauaccuc

SEQ ID NO: 251766 - RNA, 32 nt, Homo Sapiens
gacgccgccgcucguccguccucccguccguu

SEQ ID NO: 251767 - RNA, 32 nt, Homo Sapiens
caccucucucugaguagccuccugucuucccu

SEQ ID NO: 251768 - RNA, 32 nt, Homo Sapiens
aaauccucauuuccacucaacaucaagauaag

SEQ ID NO: 251769 - RNA, 32 nt, Homo Sapiens
gugcgcucccugcucccacgggccggucagcc

SEQ ID NO: 251770 - RNA, 32 nt, Homo Sapiens
ccuugucugcaccacccgccuccugccuccaa

SEQ ID NO: 251771 - RNA, 32 nt, Homo Sapiens
cucugggcaugggguggacauggcaggucagc

SEQ ID NO: 251772 - RNA, 32 nt, Homo Sapiens
aaggacacagcccguccuccccugccugccug

SEQ ID NO: 251773 - RNA, 32 nt, Homo Sapiens
uguggauucuccuuguaguccagaucuacuau

SEQ ID NO: 251774 - RNA, 32 nt, Homo Sapiens
gucaucgagcagcucccccuccccuugcuaca

SEQ ID NO: 251775 - RNA, 32 nt, Homo Sapiens
aaugcuacuuggauaauaucuacaugaauauu

SEQ ID NO: 251776 - RNA, 32 nt, Homo Sapiens
cgauccaaaugccgugugucaccaaccccgcu

SEQ ID NO: 251777 - RNA, 32 nt, Homo Sapiens
ugucccaaugaauugaauuucaaauaugaauc

SEQ ID NO: 251778 - RNA, 32 nt, Homo Sapiens
aaaccgugcauucuguaguuucuuccuuucag

SEQ ID NO: 251779 - RNA, 32 nt, Homo Sapiens
gcucugagucucugcuugaggaccagaggaaa

SEQ ID NO: 251780 - RNA, 32 nt, Homo Sapiens
uaaaguccccguucaaaaaaucuccuacccac

SEQ ID NO: 251781 - RNA, 32 nt, Homo Sapiens
uccuagcccucauuuuaauuauguacaucugu

SEQ ID NO: 251782 - RNA, 32 nt, Homo Sapiens
cugcgccggccgcgaggccacggagagcucgc

SEQ ID NO: 251783 - RNA, 32 nt, Homo Sapiens
uggaguugcacuuaaccuuguaacuuuguuug

SEQ ID NO: 251784 - RNA, 32 nt, Homo Sapiens
cuaaaauacuguacaaaauuguuuuuucacac

SEQ ID NO: 251785 - RNA, 32 nt, Homo Sapiens
uauuuauauuacagacucaauuuuacaaaauu

SEQ ID NO: 251786 - RNA, 32 nt, Homo Sapiens
aaauggggcugagacccccggcugggggcaga

SEQ ID NO: 251787 - RNA, 32 nt, Homo Sapiens
caugggauucauuuuucuuaaauuuuggacuu

SEQ ID NO: 251788 - RNA, 32 nt, Homo Sapiens
gagauguacaccaugugugucaaccgccugug

SEQ ID NO: 251789 - RNA, 32 nt, Homo Sapiens
gcgcagggacgccggccuccagcuggugugug

SEQ ID NO: 251790 - RNA, 32 nt, Homo Sapiens
ccucggcccaacccgagaaccggggacgugcc

SEQ ID NO: 251791 - RNA, 32 nt, Homo Sapiens
gccaccgcccagagacccaagcugccuccccu

SEQ ID NO: 251792 - RNA, 32 nt, Homo Sapiens
uauuugcaugggauugguccuugaauaaaauu

SEQ ID NO: 251793 - RNA, 32 nt, Homo Sapiens
cagcccagcauccacauagucuacacagagcu

SEQ ID NO: 251794 - RNA, 32 nt, Homo Sapiens
uaguugauaauuaaaguguauuuugaaugaca

SEQ ID NO: 251795 - RNA, 32 nt, Homo Sapiens
ucuuuugccggucagggcuggcacgcagggga

SEQ ID NO: 251796 - RNA, 32 nt, Homo Sapiens
cgagugccggccugggccugccaggcagaggc

SEQ ID NO: 251797 - RNA, 32 nt, Homo Sapiens
ggcgaaagaggguaauaaccagacacaaacug

SEQ ID NO: 251798 - RNA, 32 nt, Homo Sapiens
ccugagggugcaccgagaaaagaaaggcugac

SEQ ID NO: 251799 - RNA, 32 nt, Homo Sapiens
gcaccuccucugcggcagcugcgccucgcaag

SEQ ID NO: 251800 - RNA, 32 nt, Homo Sapiens
uuuuaagaccucugaaggcaagugaaggaugc

SEQ ID NO: 251801 - RNA, 32 nt, Homo Sapiens
ccccggggccuggccgccaccaugggcuucga

SEQ ID NO: 251802 - RNA, 32 nt, Homo Sapiens
acacaggucuggguuuucacuccacaugaagg

SEQ ID NO: 251803 - RNA, 32 nt, Homo Sapiens
uauucacuagugugucccacccgccagcccca

SEQ ID NO: 251804 - RNA, 32 nt, Homo Sapiens
gagccaaguccucucccuucagaucaguuacu

SEQ ID NO: 251805 - RNA, 32 nt, Homo Sapiens
uucuugcccuuaagugcuuuugcugcuauuuu

SEQ ID NO: 251806 - RNA, 32 nt, Homo Sapiens
ugggccugugcggcggccgccggagcgcuuug

SEQ ID NO: 251807 - RNA, 32 nt, Homo Sapiens
uauagaccaccaccacccacucacacucugcc

SEQ ID NO: 251808 - RNA, 32 nt, Homo Sapiens
cauaacuaaaauuaaguauauauauuuuggcu

SEQ ID NO: 251809 - RNA, 32 nt, Homo Sapiens
aaugcagacaagacaguuaucagauaauggcu

SEQ ID NO: 251810 - RNA, 32 nt, Homo Sapiens
ugauuguguuuuaaaaagugaguacaugagau

SEQ ID NO: 251811 - RNA, 32 nt, Homo Sapiens
guggauggaagaaaauaaaauaacaaaugaaa

SEQ ID NO: 251812 - RNA, 32 nt, Homo Sapiens
accagccaccccaucccuccccuacccaucug

SEQ ID NO: 251813 - RNA, 32 nt, Homo Sapiens
ggugacaucguggaagaccaguugggcccaag

SEQ ID NO: 251814 - RNA, 32 nt, Homo Sapiens
cuugagauucaaaagaaaaagcuggauaaauu

SEQ ID NO: 251815 - RNA, 32 nt, Homo Sapiens
uccuguacacgacguuugggcagucugcauuc

SEQ ID NO: 251816 - RNA, 32 nt, Homo Sapiens
accagagggccagaguuuggggugcugacgca

SEQ ID NO: 251817 - RNA, 32 nt, Homo Sapiens
gccgggaagucgucgcuacucugguggaacuc

SEQ ID NO: 251818 - RNA, 32 nt, Homo Sapiens
ugaaagaguucgcagggaaguauggcguguga

SEQ ID NO: 251819 - RNA, 32 nt, Homo Sapiens
gugcccaagccuggucguguugccaggagugg

SEQ ID NO: 251820 - RNA, 32 nt, Homo Sapiens
agcccgcccagcccgacgccuacuggcccgcg

SEQ ID NO: 251821 - RNA, 32 nt, Homo Sapiens
gcgaucuuucuuagucccacucaccccacuca

SEQ ID NO: 251822 - RNA, 32 nt, Homo Sapiens
ucccuggaucacgacgcugcagagcaccuuug

SEQ ID NO: 251823 - RNA, 32 nt, Homo Sapiens
cccacucccggaggaggagaacaaagaaacga

SEQ ID NO: 251824 - RNA, 32 nt, Homo Sapiens
auacuggcagauacacuugugacugaaccaug

SEQ ID NO: 251825 - RNA, 32 nt, Homo Sapiens
auacuuguaacccagcacuuugggaagccgag

SEQ ID NO: 251826 - RNA, 32 nt, Homo Sapiens
uuaaauugccuuauauuuuuaaugauuuaaug

SEQ ID NO: 251827 - RNA, 32 nt, Homo Sapiens
uuuuuaaaaaauuuauuuacuggaacugaaag

SEQ ID NO: 251828 - RNA, 32 nt, Homo Sapiens
uguaggcugguguuguugcuucccucccagga

SEQ ID NO: 251829 - RNA, 32 nt, Homo Sapiens
gaugcggccggggcugcgcgguggugaugcga

SEQ ID NO: 251830 - RNA, 32 nt, Homo Sapiens
cagggaucuucaggaacuucugaccucaccaa

SEQ ID NO: 251831 - RNA, 32 nt, Homo Sapiens
ccacccugccccacccaucugaacacucauua

SEQ ID NO: 251832 - RNA, 32 nt, Homo Sapiens
gagaacuuggaauuaacuuauggcuaccuauu

SEQ ID NO: 251833 - RNA, 32 nt, Homo Sapiens
cuugacccugucacuugcuggcugugaaacca

SEQ ID NO: 251834 - RNA, 32 nt, Homo Sapiens
agagggaaauaccaaauaaacauccgagguug

SEQ ID NO: 251835 - RNA, 32 nt, Homo Sapiens
uucacagcggguggggaaacacacacagcucc

SEQ ID NO: 251836 - RNA, 32 nt, Homo Sapiens
gccguuggugcacacaaaauauccugggcaaa

SEQ ID NO: 251837 - RNA, 32 nt, Homo Sapiens
uucugccugugcagcgggugcugcugguaaca

SEQ ID NO: 251838 - RNA, 32 nt, Homo Sapiens
uuaauaugaaaauggacaggaaagaagcauuu

SEQ ID NO: 251839 - RNA, 32 nt, Homo Sapiens
ggcccaaaccugacauggacaagcauuguuug

SEQ ID NO: 251840 - RNA, 32 nt, Homo Sapiens
ccuccuuauggaauaguucccagucuacuagc

SEQ ID NO: 251841 - RNA, 32 nt, Homo Sapiens
ccuccccuagugggcucugggguuccaccaac

SEQ ID NO: 251842 - RNA, 32 nt, Homo Sapiens
gcuaacccagcuugcuccuggguuccacggcg

SEQ ID NO: 251843 - RNA, 32 nt, Homo Sapiens
ucuucguuauuuaucugacccucuaacuccau

SEQ ID NO: 251844 - RNA, 32 nt, Homo Sapiens
ugcaguaccucaccagggagcauuccaguauc

SEQ ID NO: 251845 - RNA, 25 nt, Homo Sapiens
augcugcugcugccccugcugcugc

SEQ ID NO: 251846 - RNA, 32 nt, Homo Sapiens
uuuggggagagcuggcagugugcggagcugau

SEQ ID NO: 251847 - RNA, 32 nt, Homo Sapiens
ccaaaccuguucugucccacuggccagccauc

SEQ ID NO: 251848 - RNA, 32 nt, Homo Sapiens
caacuuuugguacuuugugcugauugucccag

SEQ ID NO: 251849 - RNA, 32 nt, Homo Sapiens
uccuagaccuggaggccuggaacagccagccg

SEQ ID NO: 251850 - RNA, 29 nt, Homo Sapiens
uuuugauaaaguuauguuuuuggauacaa

SEQ ID NO: 251851 - RNA, 32 nt, Homo Sapiens
gagccccauauucgagccccguggaaucccgc

SEQ ID NO: 251852 - RNA, 32 nt, Homo Sapiens
agacugcuaggugggaagggguccugggaaaa

SEQ ID NO: 251853 - RNA, 32 nt, Homo Sapiens
auuacaucgcauagaaaucaauaauuuguggu

SEQ ID NO: 251854 - RNA, 32 nt, Homo Sapiens
cagccccugcuccuccucccagggagccaacu

SEQ ID NO: 251855 - RNA, 32 nt, Homo Sapiens
gcucuucccagccucuccggcgcgcuccaagg

SEQ ID NO: 251856 - RNA, 32 nt, Homo Sapiens
gagggaggggagauggaggcccgguggagcga

SEQ ID NO: 251857 - RNA, 32 nt, Homo Sapiens
aaaaucugagauauagaagagacuggugcugc

SEQ ID NO: 251858 - RNA, 32 nt, Homo Sapiens
gaaaaaugcaagauuuauaugcaugaaguuaa

SEQ ID NO: 251859 - RNA, 31 nt, Homo Sapiens
ugugauguuuuguuuugauagauuauaucuu

SEQ ID NO: 251860 - RNA, 32 nt, Homo Sapiens
gaugucgucugcuuacggaagcgcugaaagac

SEQ ID NO: 251861 - RNA, 32 nt, Homo Sapiens
aauucuuucauauggaaagagcuaguacaauc

SEQ ID NO: 251862 - RNA, 32 nt, Homo Sapiens
accccguggaccugggcgccccgggaaggucc

SEQ ID NO: 251863 - RNA, 32 nt, Homo Sapiens
ggguggccgcgugccggcuccaggaagccgga

SEQ ID NO: 251864 - RNA, 32 nt, Homo Sapiens
uacuguugcuccaggcagacaaggcugacaag

SEQ ID NO: 251865 - RNA, 32 nt, Homo Sapiens
augucaucuaaccauuaagucaugugugaaca

SEQ ID NO: 251866 - RNA, 32 nt, Homo Sapiens
uuguguacuguaaagaauuuagcuguaucaaa

SEQ ID NO: 251867 - RNA, 32 nt, Homo Sapiens
acugaaugaaauuuauaaauauaaaagauuac

SEQ ID NO: 251868 - RNA, 32 nt, Homo Sapiens
uuuuauuuacacaauaaaauguuauuaaagau

SEQ ID NO: 251869 - RNA, 32 nt, Homo Sapiens
ggcgggagugagaggagaagggagagagcugu

SEQ ID NO: 251870 - RNA, 32 nt, Homo Sapiens
uucccuuacuucuccccuuccccucccccucc

SEQ ID NO: 251871 - RNA, 32 nt, Homo Sapiens
augguuuggcuguguccccacucagaucucau

SEQ ID NO: 251872 - RNA, 32 nt, Homo Sapiens
gaacccugaaggcagcaggacucucagcccgu

SEQ ID NO: 251873 - RNA, 26 nt, Homo Sapiens
cauggcggaucugaagcacagcagcu

SEQ ID NO: 251874 - RNA, 32 nt, Homo Sapiens
guugggacacagaccacauauuuggacggcag

SEQ ID NO: 251875 - RNA, 32 nt, Homo Sapiens
uugagggaaaauuuuuacugauucacaaaaag

SEQ ID NO: 251876 - RNA, 32 nt, Homo Sapiens
accugggacuuccuaaacuuuccaaaaccuuc

SEQ ID NO: 251877 - RNA, 32 nt, Homo Sapiens
uuaguuuuggaacuguaucugaguaacagagg

SEQ ID NO: 251878 - RNA, 32 nt, Homo Sapiens
ucuugcugagucaucaucaucaucaucaucau

SEQ ID NO: 251879 - RNA, 32 nt, Homo Sapiens
agcugcuacaccuggguaggagagaggcaggc

SEQ ID NO: 251880 - RNA, 32 nt, Homo Sapiens
gucccuccugccuuccuucucuucccaagccc

SEQ ID NO: 251881 - RNA, 32 nt, Homo Sapiens
aagugguagccaccccaccccugcagggcagu

SEQ ID NO: 251882 - RNA, 32 nt, Homo Sapiens
aauauuuauuuuuucauuugguaaugggaggg

SEQ ID NO: 251883 - RNA, 32 nt, Homo Sapiens
uaauuauaccuucuuuccuuguuagguaguua

SEQ ID NO: 251884 - RNA, 32 nt, Homo Sapiens
ggcggcggcggcucaggcuccucggggcgugg

SEQ ID NO: 251885 - RNA, 32 nt, Homo Sapiens
uaugaucuuuugcagcaaaaucucacuuugua

SEQ ID NO: 251886 - RNA, 32 nt, Homo Sapiens
gagccggcacccgacgccgcaccaggcugcag

SEQ ID NO: 251887 - RNA, 32 nt, Homo Sapiens
cugaaagggcuuuauguuacaauauucuuuau

SEQ ID NO: 251888 - RNA, 32 nt, Homo Sapiens
uuauaaugagagauugggcagcaaagggggcc

SEQ ID NO: 251889 - RNA, 32 nt, Homo Sapiens
gguugugcuuuacuccacgcaucaauaaauaa

SEQ ID NO: 251890 - RNA, 32 nt, Homo Sapiens
acugcaauucaaaagaaaacaccucauguuuu

SEQ ID NO: 251891 - RNA, 32 nt, Homo Sapiens
ucaucucuucagguucucaugauaccaccuuu

SEQ ID NO: 251892 - RNA, 32 nt, Homo Sapiens
uagggcacagaaaauugcagaacaucggagaa

SEQ ID NO: 251893 - RNA, 32 nt, Homo Sapiens
cugaaacaagcuugugcuaagauggaaagggc

SEQ ID NO: 251894 - RNA, 32 nt, Homo Sapiens
ugaaugcugccauaauagaaaacuauauucuu

SEQ ID NO: 251895 - RNA, 32 nt, Homo Sapiens
aacgcccccuuucccucucccccucccgcucg

SEQ ID NO: 251896 - RNA, 32 nt, Homo Sapiens
aggauuuucuuacugguuucuacugaagggga

SEQ ID NO: 251897 - RNA, 32 nt, Homo Sapiens
gagugccuagcaugcauacuuccuuugugcgc

SEQ ID NO: 251898 - RNA, 32 nt, Homo Sapiens
aaagggccaagugauccaguucuagcgucauc

SEQ ID NO: 251899 - RNA, 32 nt, Homo Sapiens
cuuggauuauucugcagguucaucucagaccc

SEQ ID NO: 251900 - RNA, 32 nt, Homo Sapiens
uuucccuuacacaagugccuucacagguagca

SEQ ID NO: 251901 - RNA, 32 nt, Homo Sapiens
ugagaagaagcaucgagggcgaggggaauaug

SEQ ID NO: 251902 - RNA, 32 nt, Homo Sapiens
aggaagaggagaaaaacccuauugucggccug

SEQ ID NO: 251903 - RNA, 32 nt, Homo Sapiens
uuccgaguccgaaaggucccugaguagauugg

SEQ ID NO: 251904 - RNA, 32 nt, Homo Sapiens
gccauucucucuacucuuuucuuaauuuuucc

SEQ ID NO: 251905 - RNA, 32 nt, Homo Sapiens
ugauuuuguaaauuuugcugcaucuugagaag

SEQ ID NO: 251906 - RNA, 32 nt, Homo Sapiens
guggcuguggucuacagaauuguuucauauaa

SEQ ID NO: 251907 - RNA, 32 nt, Homo Sapiens
caguguauccucaggacagauaggacagauag

SEQ ID NO: 251908 - RNA, 32 nt, Homo Sapiens
ccccagcccggccaguggugccaggcagcuug

SEQ ID NO: 251909 - RNA, 32 nt, Homo Sapiens
cccuuggaucacuguuauugaaaugucuuauu

SEQ ID NO: 251910 - RNA, 32 nt, Homo Sapiens
cccuuagcaagugcgcaaccagucaggaucuc

SEQ ID NO: 251911 - RNA, 32 nt, Homo Sapiens
agggucagaaacacaaaauaucuuaccuaagg

SEQ ID NO: 251912 - RNA, 32 nt, Homo Sapiens
cagaucucccaguaauuuuucuuauuuagccc

SEQ ID NO: 251913 - RNA, 32 nt, Homo Sapiens
uaguauagguagauuuuaaauguaagcuuuca

SEQ ID NO: 251914 - RNA, 30 nt, Homo Sapiens
ugccacuggagccccgcgggucucccggug

SEQ ID NO: 251915 - RNA, 32 nt, Homo Sapiens
ccauccagucucccaacuuguauuaaagacag

SEQ ID NO: 251916 - RNA, 32 nt, Homo Sapiens
uggauuuuaaacacuguuggaagaagaguuuu

SEQ ID NO: 251917 - RNA, 32 nt, Homo Sapiens
guuucccagcuccucagaugauuccagugggc

SEQ ID NO: 251918 - RNA, 32 nt, Homo Sapiens
ucuuggucacagcucuagccacagcagaagga

SEQ ID NO: 251919 - RNA, 32 nt, Homo Sapiens
guugcuucugucugcugaauagggcuuuguaa

SEQ ID NO: 251920 - RNA, 32 nt, Homo Sapiens
auuuggucaaugauuuuaucgguggaggucua

SEQ ID NO: 251921 - RNA, 32 nt, Homo Sapiens
ccccucccaccugacuucaucuacgccucggc

SEQ ID NO: 251922 - RNA, 32 nt, Homo Sapiens
uccagcuggccccugcugcugccucccguccu

SEQ ID NO: 251923 - RNA, 32 nt, Homo Sapiens
ucuccucgcugcuuaggcuccgcggccuccaa

SEQ ID NO: 251924 - RNA, 32 nt, Homo Sapiens
cugcagccacaaaguugagacuucugaacgug

SEQ ID NO: 251925 - RNA, 32 nt, Homo Sapiens
ucuaaccccugccugcagggucugggggaggu

SEQ ID NO: 251926 - RNA, 32 nt, Homo Sapiens
cccugggcaccuccugauguccugcgagguca

SEQ ID NO: 251927 - RNA, 32 nt, Homo Sapiens
gcuuuuguggccaaagcuaguguuauggucaa

SEQ ID NO: 251928 - RNA, 32 nt, Homo Sapiens
ucuuccuuuacuauguauaccuucaccgugua

SEQ ID NO: 251929 - RNA, 32 nt, Homo Sapiens
gaaggggaaggggucguaucacuuugucucuc

SEQ ID NO: 251930 - RNA, 32 nt, Homo Sapiens
gcacgagggcgcgggcggcggugacaucacgg

SEQ ID NO: 251931 - RNA, 32 nt, Homo Sapiens
cugagauggaauugauaacauggucuuaacuc

SEQ ID NO: 251932 - RNA, 32 nt, Homo Sapiens
cacagcugcaugccgaccuugucccaccggga

SEQ ID NO: 251933 - RNA, 32 nt, Homo Sapiens
guacuuuugggaauguuauagauugaucauuc

SEQ ID NO: 251934 - RNA, 32 nt, Homo Sapiens
caccuuccagagaagcuauuccaggucucaac

SEQ ID NO: 251935 - RNA, 32 nt, Homo Sapiens
agagaguacucuuacauuaacacauuuuaguu

SEQ ID NO: 251936 - RNA, 32 nt, Homo Sapiens
acccacucaggagacagugagagugaaaaggu

SEQ ID NO: 251937 - RNA, 32 nt, Homo Sapiens
ugccugucaccaucagcucagcuuccucuagg

SEQ ID NO: 251938 - RNA, 30 nt, Homo Sapiens
ucuucguggcccugcggcggcagaagcaag

SEQ ID NO: 251939 - RNA, 32 nt, Homo Sapiens
caccuuaucuuaaagcacuuacagauaggccu

SEQ ID NO: 251940 - RNA, 32 nt, Homo Sapiens
gugugguggccucagcugaaugccuccugugg

SEQ ID NO: 251941 - RNA, 32 nt, Homo Sapiens
gccuucauacugaguucugggcccuucugcaa

SEQ ID NO: 251942 - RNA, 32 nt, Homo Sapiens
ucaaaccaguuguacagccugauguaggacuu

SEQ ID NO: 251943 - RNA, 32 nt, Homo Sapiens
gcaggggcgaggggagcagggcggggugacgc

SEQ ID NO: 251944 - RNA, 32 nt, Homo Sapiens
uucacauaaaucuucugaaagcuccaugucag

SEQ ID NO: 251945 - RNA, 32 nt, Homo Sapiens
cccuggccugccuggagccccggagcuccugg

SEQ ID NO: 251946 - RNA, 27 nt, Homo Sapiens
aaaguguccuucuugcucccccucaau

SEQ ID NO: 251947 - RNA, 32 nt, Homo Sapiens
uaccccaugucucaccacgaugauggagcuac

SEQ ID NO: 251948 - RNA, 32 nt, Homo Sapiens
cucuuggcuccagcccccacccgaaaguggac

SEQ ID NO: 251949 - RNA, 32 nt, Homo Sapiens
ucucccccggcggcgugugcauuggcucuuca

SEQ ID NO: 251950 - RNA, 32 nt, Homo Sapiens
augugcugccgcccaaccugcucuagugcuuc

SEQ ID NO: 251951 - RNA, 31 nt, Homo Sapiens
uaaacucaagauggaaaguccaguccaaggu

SEQ ID NO: 251952 - RNA, 32 nt, Homo Sapiens
ccacucuugucugugggaaccacacaucuugc

SEQ ID NO: 251953 - RNA, 32 nt, Homo Sapiens
cuaggccaaaucuauuuuuguaaaaaugcuca

SEQ ID NO: 251954 - RNA, 32 nt, Homo Sapiens
uaucuuuaaaaacguuuaaaagacuauacuuu

SEQ ID NO: 251955 - RNA, 32 nt, Homo Sapiens
aggggcggccccaccagccccggcugagcuga

SEQ ID NO: 251956 - RNA, 32 nt, Homo Sapiens
acaaauuccacccgccccaggacccccgcacc

SEQ ID NO: 251957 - RNA, 32 nt, Homo Sapiens
ggcaacugcaggucuugggacuugucagccuc

SEQ ID NO: 251958 - RNA, 32 nt, Homo Sapiens
uguguuaaauguuuacaguguuauuuuguauc

SEQ ID NO: 251959 - RNA, 32 nt, Homo Sapiens
cuaccucuggggcaccacggacuccccuuggc

SEQ ID NO: 251960 - RNA, 32 nt, Homo Sapiens
uuaucagcuuugaaaacuuauccugguuuugg

SEQ ID NO: 251961 - RNA, 32 nt, Homo Sapiens
cuuugguuaugaaacauguggaguguauuaag

SEQ ID NO: 251962 - RNA, 32 nt, Homo Sapiens
ccgcagcgcagacuggcggagaaggagaggaa

SEQ ID NO: 251963 - RNA, 32 nt, Homo Sapiens
uagggcccgccagcuaggcuacacccaucaug

SEQ ID NO: 251964 - RNA, 32 nt, Homo Sapiens
aucacgugggccgcgcgaccaaugguggaggc

SEQ ID NO: 251965 - RNA, 32 nt, Homo Sapiens
uuagaauugcaacauuugaauuuuggagggac

SEQ ID NO: 251966 - RNA, 32 nt, Homo Sapiens
aacggccccuugagagcuccccggccccuguc

SEQ ID NO: 251967 - RNA, 32 nt, Homo Sapiens
ccucacuuuucugcauccauguacuccuuugg

SEQ ID NO: 251968 - RNA, 32 nt, Homo Sapiens
ggcucccggcaagucgccgccggagcccccca

SEQ ID NO: 251969 - RNA, 31 nt, Homo Sapiens
cgccauugcaccccagccugggcaaugagug

SEQ ID NO: 251970 - RNA, 32 nt, Homo Sapiens
cgccggcugcgcaaacgacgcgggagagagcc

SEQ ID NO: 251971 - RNA, 32 nt, Homo Sapiens
ccccccugaaaacaacccucagacgccacauc

SEQ ID NO: 251972 - RNA, 32 nt, Homo Sapiens
ccugccagccgggaacacggaggggaaggagg

SEQ ID NO: 251973 - RNA, 32 nt, Homo Sapiens
cgccugucacccaauaucuccagccgcgcagu

SEQ ID NO: 251974 - RNA, 32 nt, Homo Sapiens
ugugguggugacucauuuccaugccauugugg

SEQ ID NO: 251975 - RNA, 30 nt, Homo Sapiens
cgugcugccguuccggccacgccgugaagc

SEQ ID NO: 251976 - RNA, 32 nt, Homo Sapiens
acuccuuaaauccacaugaaaacuacuguaac

SEQ ID NO: 251977 - RNA, 32 nt, Homo Sapiens
gcgcggaggugcggcggggagugggagccggc

SEQ ID NO: 251978 - RNA, 32 nt, Homo Sapiens
uugcauuauugcuguucaaugauaccuuccau

SEQ ID NO: 251979 - RNA, 32 nt, Homo Sapiens
cuuuaaaacuuccaaugguucccagaggucua

SEQ ID NO: 251980 - RNA, 32 nt, Homo Sapiens
acaaaaacccucaguagagacaagcgggaagg

SEQ ID NO: 251981 - RNA, 32 nt, Homo Sapiens
agggccguccuguuccuccccgggacuccaga

SEQ ID NO: 251982 - RNA, 32 nt, Homo Sapiens
uccgagcgucucucuuggucucuguggguagg

SEQ ID NO: 251983 - RNA, 32 nt, Homo Sapiens
cccucagggaaccugaauggggggaaaaaaug

SEQ ID NO: 251984 - RNA, 32 nt, Homo Sapiens
cugcuccgacaccgcgcccccuggacagccgc

SEQ ID NO: 251985 - RNA, 32 nt, Homo Sapiens
aggcaugucauugaauggcugcggcuauguuc

SEQ ID NO: 251986 - RNA, 30 nt, Homo Sapiens
agucucauugcucgcugacuuggaggcuag

SEQ ID NO: 251987 - RNA, 32 nt, Homo Sapiens
ccaacccugugcuugcagaaacauaugcugug

SEQ ID NO: 251988 - RNA, 32 nt, Homo Sapiens
uuauugcaggggauugggaggggggcgggaaa

SEQ ID NO: 251989 - RNA, 32 nt, Homo Sapiens
auuucuaaaaauugaaugccaaaguacaagua

SEQ ID NO: 251990 - RNA, 32 nt, Homo Sapiens
gaauauauuugcgucgaucaaauaauugcuuc

SEQ ID NO: 251991 - RNA, 32 nt, Homo Sapiens
cgcccacaagaucuagaaauagccucaaaaag

SEQ ID NO: 251992 - RNA, 32 nt, Homo Sapiens
ccugaaggcuuguguggugcugccuuuuaaau

SEQ ID NO: 251993 - RNA, 32 nt, Homo Sapiens
auagaugauuuucaguuuguggugaaauucca

SEQ ID NO: 251994 - RNA, 32 nt, Homo Sapiens
caacuuuagagcuggccuuggcugggagagga

SEQ ID NO: 251995 - RNA, 32 nt, Homo Sapiens
ugacacuggagcugcgccggaggucggggaac

SEQ ID NO: 251996 - RNA, 32 nt, Homo Sapiens
cuaagcacauucagggaagaguaauguaauug

SEQ ID NO: 251997 - RNA, 32 nt, Homo Sapiens
agcaccgacccggugccgccggagcuggcccu

SEQ ID NO: 251998 - RNA, 32 nt, Homo Sapiens
ccucugcccucccggguuuaagcaguucuccu

SEQ ID NO: 251999 - RNA, 32 nt, Homo Sapiens
cucaggcguccugguccuguccugguacccac

SEQ ID NO: 252000 - RNA, 32 nt, Homo Sapiens
aagcuuacauuuuuugucaaguuaccgaugcu

SEQ ID NO: 252001 - RNA, 32 nt, Homo Sapiens
acgagguagcgguggccugcagcggccuccuc

SEQ ID NO: 252002 - RNA, 32 nt, Homo Sapiens
uugaaugagcccgccgagcccgggccgccguc

SEQ ID NO: 252003 - RNA, 30 nt, Homo Sapiens
ggaggaugcugagggucccaccccgcuggu

SEQ ID NO: 252004 - RNA, 32 nt, Homo Sapiens
uuucuguaauggaaucuuuacaauucccaaaa

SEQ ID NO: 252005 - RNA, 32 nt, Homo Sapiens
cagugaguucccagcccucccucucucuugac

SEQ ID NO: 252006 - RNA, 32 nt, Homo Sapiens
uuuauuuucacaaguaaaaauggcuuuuuauu

SEQ ID NO: 252007 - RNA, 32 nt, Homo Sapiens
aaugauguaagaaaaugcaagaggcucaacuu

SEQ ID NO: 252008 - RNA, 32 nt, Homo Sapiens
agccugaccaacauggugaaaccccgucuuua

SEQ ID NO: 252009 - RNA, 32 nt, Homo Sapiens
agccugaccaacacggugaaaccccgucucua

SEQ ID NO: 252010 - RNA, 32 nt, Homo Sapiens
gcugcacgcgggcaaggacggcaccaugcccc

SEQ ID NO: 252011 - RNA, 32 nt, Homo Sapiens
cuuuuagaaauuauguuaacuaugauauuaau

SEQ ID NO: 252012 - RNA, 32 nt, Homo Sapiens
augaucucggcucccugcaaucuccaccuccc

SEQ ID NO: 252013 - RNA, 32 nt, Homo Sapiens
uagccaagggaaggcaugacagacuguaccug

SEQ ID NO: 252014 - RNA, 32 nt, Homo Sapiens
aacggccgucgucaugguuacuggccccuagg

SEQ ID NO: 252015 - RNA, 32 nt, Homo Sapiens
aaauuauggaaaugaauaauuuugcuaacaac

SEQ ID NO: 252016 - RNA, 32 nt, Homo Sapiens
gaaaaaucaaaauaaaauucuauuuuauaaau

SEQ ID NO: 252017 - RNA, 32 nt, Homo Sapiens
ucaauaaaaauauuuuauucaaaaaacagucu

SEQ ID NO: 252018 - RNA, 32 nt, Homo Sapiens
gaccccucagcaccacccauucuccucauccc

SEQ ID NO: 252019 - RNA, 32 nt, Homo Sapiens
augagggcuggcugccguuuucugggcugaug

SEQ ID NO: 252020 - RNA, 32 nt, Homo Sapiens
acugguuugaguuuaccaaagagugacuuauc

SEQ ID NO: 252021 - RNA, 32 nt, Homo Sapiens
ucauugggaaaggacagcuuugauaaugucca

SEQ ID NO: 252022 - RNA, 32 nt, Homo Sapiens
uaauuuguugauaaguuuacauaaacagaaau

SEQ ID NO: 252023 - RNA, 32 nt, Homo Sapiens
caagaaccuucacuauuuuuuauuucuaaaua

SEQ ID NO: 252024 - RNA, 32 nt, Homo Sapiens
agaaaugggaagacuugguugugcaguaacug

SEQ ID NO: 252025 - RNA, 31 nt, Homo Sapiens
cucugcuugaggagaaagucuaguucauugc

SEQ ID NO: 252026 - RNA, 32 nt, Homo Sapiens
cugcagcauucccauugaagccaagaacaaaa

SEQ ID NO: 252027 - RNA, 32 nt, Homo Sapiens
gcgcugugcagagguagccguggaaggcggcu

SEQ ID NO: 252028 - RNA, 32 nt, Homo Sapiens
uuugccuuggguggagcugggggugguccuag

SEQ ID NO: 252029 - RNA, 32 nt, Homo Sapiens
uucacuuugggguugguucucagccauccaag

SEQ ID NO: 252030 - RNA, 32 nt, Homo Sapiens
uuguuuuuuguuuuuuuuuuuaaguagaaauu

SEQ ID NO: 252031 - RNA, 31 nt, Homo Sapiens
aaggauuucagccagaugccauagacccuca

SEQ ID NO: 252032 - RNA, 32 nt, Homo Sapiens
gcagcuucagccuccgccgccuccucagcccu

SEQ ID NO: 252033 - RNA, 32 nt, Homo Sapiens
ugcuugauaacaucaugcuugguucaaacgac

SEQ ID NO: 252034 - RNA, 32 nt, Homo Sapiens
cgaucgggccguguccgccgcggcccugcgag

SEQ ID NO: 252035 - RNA, 32 nt, Homo Sapiens
ggugacccacguggcucuguguguuuuuaaaa

SEQ ID NO: 252036 - RNA, 32 nt, Homo Sapiens
ucccuguuuccguggaggaaggcagacuucag

SEQ ID NO: 252037 - RNA, 32 nt, Homo Sapiens
gagaagccgccgcagaggaaaagcaggugccg

SEQ ID NO: 252038 - RNA, 32 nt, Homo Sapiens
cauuuggaauggguauuuuucuguuucaugau

SEQ ID NO: 252039 - RNA, 32 nt, Homo Sapiens
gcgcgucggaacagggcgggaggcggcggcgc

SEQ ID NO: 252040 - RNA, 32 nt, Homo Sapiens
ucauuugguggccauggauccaacgugcucuu

SEQ ID NO: 252041 - RNA, 32 nt, Homo Sapiens
uugcggcgaugucguguuggagggaugaagau

SEQ ID NO: 252042 - RNA, 32 nt, Homo Sapiens
ugugggaucuggggagagcggcuggagaaaga

SEQ ID NO: 252043 - RNA, 32 nt, Homo Sapiens
gauugucagaucuaaacuuauauucuugcugg

SEQ ID NO: 252044 - RNA, 32 nt, Homo Sapiens
gcaucggauggagacgggcgcuuuucgacgag

SEQ ID NO: 252045 - RNA, 32 nt, Homo Sapiens
auacuuucauguauuuucaugaugguagauau

SEQ ID NO: 252046 - RNA, 32 nt, Homo Sapiens
acucacccaucccacugacaccaugaagccug

SEQ ID NO: 252047 - RNA, 32 nt, Homo Sapiens
ggaccguguuuaauuugguugcuggugaucau

SEQ ID NO: 252048 - RNA, 32 nt, Homo Sapiens
uaaaacguauuuuaacgauguuagaauaagac

SEQ ID NO: 252049 - RNA, 32 nt, Homo Sapiens
acuugcucuuuuuuccucccauuuuagcagcc

SEQ ID NO: 252050 - RNA, 32 nt, Homo Sapiens
caccuugauuggggaagauaugcaaauacuuu

SEQ ID NO: 252051 - RNA, 32 nt, Homo Sapiens
gagcuucuggggaugcagguccaccgagcccc

SEQ ID NO: 252052 - RNA, 32 nt, Homo Sapiens
gggaggcagccugagccccagcccacaugcca

SEQ ID NO: 252053 - RNA, 32 nt, Homo Sapiens
gucugauuugcacuauuggaggaggacuaaag

SEQ ID NO: 252054 - RNA, 32 nt, Homo Sapiens
cuccuagaggagaggaaagggagucauuaaca

SEQ ID NO: 252055 - RNA, 32 nt, Homo Sapiens
gaggagccccauuuuaggucuuucuuuuaggu

SEQ ID NO: 252056 - RNA, 32 nt, Homo Sapiens
uccucccaaucccacaccuccuguuugccagg

SEQ ID NO: 252057 - RNA, 32 nt, Homo Sapiens
uguauuugucacuugcuguuaagguagaacaa

SEQ ID NO: 252058 - RNA, 32 nt, Homo Sapiens
uagugccuuucuugucuugauuguauggucag

SEQ ID NO: 252059 - RNA, 32 nt, Homo Sapiens
uaauuuucuaaagauagcacuaacaucagcuc

SEQ ID NO: 252060 - RNA, 32 nt, Homo Sapiens
cagaugaaugugugugguaagaucuuuaguaa

SEQ ID NO: 252061 - RNA, 32 nt, Homo Sapiens
ccgcaaucaaacaugaaagagcguuuuugccu

SEQ ID NO: 252062 - RNA, 32 nt, Homo Sapiens
gucaccaucccaugauaugaaagugucauuua

SEQ ID NO: 252063 - RNA, 32 nt, Homo Sapiens
ucuggcucucaguccccgccucgcggggggug

SEQ ID NO: 252064 - RNA, 32 nt, Homo Sapiens
ucccgcccccuuacccgccccggagcgggaag

SEQ ID NO: 252065 - RNA, 32 nt, Homo Sapiens
uccacaggagauccacauaauuccuagcacug

SEQ ID NO: 252066 - RNA, 32 nt, Homo Sapiens
aaaacuaauuacuucauaaauuauuacagcua

SEQ ID NO: 252067 - RNA, 32 nt, Homo Sapiens
cuccacggggaccccagcgucuuccccagccc

SEQ ID NO: 252068 - RNA, 32 nt, Homo Sapiens
cuuucucaggguguucuuguccucaucuaccc

SEQ ID NO: 252069 - RNA, 32 nt, Homo Sapiens
ucccgggccgagagggccacggcggcggccau

SEQ ID NO: 252070 - RNA, 32 nt, Homo Sapiens
uacaguggccagguuuugugcuuauuuauugg

SEQ ID NO: 252071 - RNA, 32 nt, Homo Sapiens
cagcccuccgccagcccuguuccgccucacug

SEQ ID NO: 252072 - RNA, 32 nt, Homo Sapiens
cucuaaacaaaacagaaauuugaaagcucaag

SEQ ID NO: 252073 - RNA, 32 nt, Homo Sapiens
uggcagggaccgggccccacccugccccagug

SEQ ID NO: 252074 - RNA, 32 nt, Homo Sapiens
aaggagggaagcaauuguuagcccuuaugcag

SEQ ID NO: 252075 - RNA, 32 nt, Homo Sapiens
gacggagccagacuucggaacggguguccugc

SEQ ID NO: 252076 - RNA, 32 nt, Homo Sapiens
augauuucuguuuuccucugcugcccuguaau

SEQ ID NO: 252077 - RNA, 32 nt, Homo Sapiens
acaccugaccagccccuccccccaggcucagg

SEQ ID NO: 252078 - RNA, 32 nt, Homo Sapiens
ucuuuguggggcuuggcguggagcaggcggug

SEQ ID NO: 252079 - RNA, 32 nt, Homo Sapiens
cuccaccugaagauuaucggcuauagagaaua

SEQ ID NO: 252080 - RNA, 32 nt, Homo Sapiens
uaccucauugggccugugauguuaacauuucg

SEQ ID NO: 252081 - RNA, 32 nt, Homo Sapiens
ccuuuugccaaccuaaggaaugacacagagca

SEQ ID NO: 252082 - RNA, 32 nt, Homo Sapiens
ggcacggcugugcuccuccccugcucccagcc

SEQ ID NO: 252083 - RNA, 32 nt, Homo Sapiens
gcgagggcccgggcccgggggaucccaggcca

SEQ ID NO: 252084 - RNA, 32 nt, Homo Sapiens
cauauugauuuugucuaagauguaaaaauuug

SEQ ID NO: 252085 - RNA, 32 nt, Homo Sapiens
cugccacacaccuuuacacccccuccuauaga

SEQ ID NO: 252086 - RNA, 32 nt, Homo Sapiens
gcuauuguuucuuuucagaguguugcagauuu

SEQ ID NO: 252087 - RNA, 30 nt, Homo Sapiens
gaccugcgcgcgcuccgcgaggccgacuuc

SEQ ID NO: 252088 - RNA, 32 nt, Homo Sapiens
gccacaggcccugccaccccccugcccuucau

SEQ ID NO: 252089 - RNA, 32 nt, Homo Sapiens
uagagggauuaaagauaaaaauuuuggcugga

SEQ ID NO: 252090 - RNA, 32 nt, Homo Sapiens
accagguucgguuugagcagguccuucaggca

SEQ ID NO: 252091 - RNA, 32 nt, Homo Sapiens
auuuuaaacugggcauuaagaagaaaugcacu

SEQ ID NO: 252092 - RNA, 32 nt, Homo Sapiens
ccucagccccagagacgccgccgcggcggagu

SEQ ID NO: 252093 - RNA, 32 nt, Homo Sapiens
ggagugugaccccgugcuugcacgggacacgu

SEQ ID NO: 252094 - RNA, 32 nt, Homo Sapiens
ugacagcuuucagguuuccagauuagacaguc

SEQ ID NO: 252095 - RNA, 32 nt, Homo Sapiens
uuuaaugauauuugaaacuaaucuuagcauug

SEQ ID NO: 252096 - RNA, 32 nt, Homo Sapiens
uauuuuaguuaaucuuuuuuuugucuuuuagc

SEQ ID NO: 252097 - RNA, 32 nt, Homo Sapiens
ucuuccuccuuuuuuccaaugugcuugauguc

SEQ ID NO: 252098 - RNA, 32 nt, Homo Sapiens
cccaccagccccacaggugcugugcuuugugc

SEQ ID NO: 252099 - RNA, 32 nt, Homo Sapiens
cuguuaugaauguuuaccaucagcauuauuuu

SEQ ID NO: 252100 - RNA, 32 nt, Homo Sapiens
uccugccaccugcugcugcugcugcugcuaau

SEQ ID NO: 252101 - RNA, 32 nt, Homo Sapiens
auagauaguagauccugcaguacuuuaagcau

SEQ ID NO: 252102 - RNA, 32 nt, Homo Sapiens
ugcagccccaucuccuccuccucccccagacc

SEQ ID NO: 252103 - RNA, 32 nt, Homo Sapiens
uuaaugugaugauguguagacugaagagcuag

SEQ ID NO: 252104 - RNA, 32 nt, Homo Sapiens
acccccagaugcuuuauauaaaaaagaucagu

SEQ ID NO: 252105 - RNA, 32 nt, Homo Sapiens
guggagcccgucuguuccuucuggggugugcg

SEQ ID NO: 252106 - RNA, 32 nt, Homo Sapiens
uauuccuuugcagugcagcugcccuguagauu

SEQ ID NO: 252107 - RNA, 32 nt, Homo Sapiens
ucuggugcagcugcucccccuccaccugaguu

SEQ ID NO: 252108 - RNA, 32 nt, Homo Sapiens
aggcucccagcaggcuacuuugaagggaacaa

SEQ ID NO: 252109 - RNA, 32 nt, Homo Sapiens
cccgaagccacuuuuuguaugcuuauggcaau

SEQ ID NO: 252110 - RNA, 32 nt, Homo Sapiens
cugagucaacuuucgcuggggaaaaccuaugg

SEQ ID NO: 252111 - RNA, 32 nt, Homo Sapiens
ccacaggagugccccacagacccgcuggacca

SEQ ID NO: 252112 - RNA, 32 nt, Homo Sapiens
uggggauacuggucagagcauaaagaaaacaa

SEQ ID NO: 252113 - RNA, 32 nt, Homo Sapiens
cuaaauucuccuguccucccccuucgaaacgc

SEQ ID NO: 252114 - RNA, 32 nt, Homo Sapiens
ggccccugcauucucgcuuuuccacguggccg

SEQ ID NO: 252115 - RNA, 30 nt, Homo Sapiens
agguuauugcuaauggguuaaugcaccagc

SEQ ID NO: 252116 - RNA, 32 nt, Homo Sapiens
acagcccggccccugcccugcaccaggccacu

SEQ ID NO: 252117 - RNA, 32 nt, Homo Sapiens
gcgccccgggugggcuuuggggcugcggcacu

SEQ ID NO: 252118 - RNA, 32 nt, Homo Sapiens
ggucccugaagcccgcgccccgggccagcaag

SEQ ID NO: 252119 - RNA, 32 nt, Homo Sapiens
cagccugggcgacagagugagagucugucuca

SEQ ID NO: 252120 - RNA, 31 nt, Homo Sapiens
acaacagacaggaaaaaacuguuaacucugg

SEQ ID NO: 252121 - RNA, 32 nt, Homo Sapiens
gcgggcggggaagaggauggagacuguggcgu

SEQ ID NO: 252122 - RNA, 32 nt, Homo Sapiens
agucaggguggcuuuuccccugacuguguccg

SEQ ID NO: 252123 - RNA, 32 nt, Homo Sapiens
guggcgaugagcucagccuguugaggcaugga

SEQ ID NO: 252124 - RNA, 32 nt, Homo Sapiens
uagucuuuacuuugcuauuaacuagcugugug

SEQ ID NO: 252125 - RNA, 32 nt, Homo Sapiens
gaaguggguuccggugguggcagaggugcuug

SEQ ID NO: 252126 - RNA, 32 nt, Homo Sapiens
ccugcgugggugccaaguuccacacaugauuu

SEQ ID NO: 252127 - RNA, 32 nt, Homo Sapiens
ccaggcugcccccugccccgcacaccucucuc

SEQ ID NO: 252128 - RNA, 32 nt, Homo Sapiens
uccuuaaaacaaaacaaaaaccaaaaaaguca

SEQ ID NO: 252129 - RNA, 32 nt, Homo Sapiens
caugaaaaguaccaauggcacugcacagugau

SEQ ID NO: 252130 - RNA, 32 nt, Homo Sapiens
aagauggagaggauugaccagaggaauaacuu

SEQ ID NO: 252131 - RNA, 32 nt, Homo Sapiens
uaaacacccgcggguugcccuggcaaauguca

SEQ ID NO: 252132 - RNA, 32 nt, Homo Sapiens
ccagcuaccugggggagggcuugccacuggaa

SEQ ID NO: 252133 - RNA, 32 nt, Homo Sapiens
ugaucaagaaauuuaaaacaacaacaacaaca

SEQ ID NO: 252134 - RNA, 30 nt, Homo Sapiens
uaaaacuggagacugggggaaagugacuac

SEQ ID NO: 252135 - RNA, 32 nt, Homo Sapiens
gaauuguuacagugaauaugucuuaauacagg

SEQ ID NO: 252136 - RNA, 32 nt, Homo Sapiens
gccuauaaucccaauacuuuaggaggccaagg

SEQ ID NO: 252137 - RNA, 32 nt, Homo Sapiens
ccccuaggcugcgucgggcaugcuuggaagcu

SEQ ID NO: 252138 - RNA, 32 nt, Homo Sapiens
uuucuauaacacauuuauuuaaguauauaaca

SEQ ID NO: 252139 - RNA, 32 nt, Homo Sapiens
cuccgucgccguucuccucuugucuacgugcu

SEQ ID NO: 252140 - RNA, 32 nt, Homo Sapiens
agggcuggcccauggcuucacacugggcucag

SEQ ID NO: 252141 - RNA, 32 nt, Homo Sapiens
gcuuauuuuuucugccaaaaaucuuaaccaca

SEQ ID NO: 252142 - RNA, 32 nt, Homo Sapiens
gguuucaccauguuggccaggcuggucuccau

SEQ ID NO: 252143 - RNA, 32 nt, Homo Sapiens
uggcauagagaauacacauauaaaaacaauau

SEQ ID NO: 252144 - RNA, 32 nt, Homo Sapiens
acaggccggcgcccagauccccaucgagcggc

SEQ ID NO: 252145 - RNA, 32 nt, Homo Sapiens
ugagccaccgugccaggccuguuuuguuuguu

SEQ ID NO: 252146 - RNA, 32 nt, Homo Sapiens
caagaaagccccacagcucuggagggcucuga

SEQ ID NO: 252147 - RNA, 32 nt, Homo Sapiens
ugcuccucggggugggggaggguauccggcuu

SEQ ID NO: 252148 - RNA, 32 nt, Homo Sapiens
cuacuacucuccugcccuuucuccucuuaaua

SEQ ID NO: 252149 - RNA, 27 nt, Homo Sapiens
gugaucuuccccuucagccuccuaugu

SEQ ID NO: 252150 - RNA, 32 nt, Homo Sapiens
gagaagaaaauauuguugaaauuaacaaugau

SEQ ID NO: 252151 - RNA, 32 nt, Homo Sapiens
ggggccgggcggggccagcggcgcauuagcgc

SEQ ID NO: 252152 - RNA, 32 nt, Homo Sapiens
cuucuccccugacaccaguagagaaaugcacu

SEQ ID NO: 252153 - RNA, 32 nt, Homo Sapiens
cccccagggaucugggguggucagggcucagg

SEQ ID NO: 252154 - RNA, 32 nt, Homo Sapiens
cucucucacacacacacacacacacacacaca

SEQ ID NO: 252155 - RNA, 32 nt, Homo Sapiens
ccuucugagcucuucacacguaaugcaaaaac

SEQ ID NO: 252156 - RNA, 32 nt, Homo Sapiens
uucuagugaugaugguucacguuggggugauu

SEQ ID NO: 252157 - RNA, 32 nt, Homo Sapiens
gccagcaucacuguuguauuuuggggucauua

SEQ ID NO: 252158 - RNA, 32 nt, Homo Sapiens
caaagaugucacacaguugccauccacugcuu

SEQ ID NO: 252159 - RNA, 32 nt, Homo Sapiens
gcggccauuucccccagugccgcaacuugcug

SEQ ID NO: 252160 - RNA, 32 nt, Homo Sapiens
gggugaaucugggcgagcugguugaguccaug

SEQ ID NO: 252161 - RNA, 32 nt, Homo Sapiens
cucaauaaaagcuuguuaauugauggaccaca

SEQ ID NO: 252162 - RNA, 32 nt, Homo Sapiens
aaacuuugauguaucaauguuaacugcuauau

SEQ ID NO: 252163 - RNA, 32 nt, Homo Sapiens
cuugauggcuggaagccuucgcacccuggcgc

SEQ ID NO: 252164 - RNA, 32 nt, Homo Sapiens
agacaucgaggaacagaagaaaguaauuauag

SEQ ID NO: 252165 - RNA, 32 nt, Homo Sapiens
ccuggauuauggcauuuaaauaaaagcuugau

SEQ ID NO: 252166 - RNA, 32 nt, Homo Sapiens
cuuuuuuauauguuuuaaauguugcuggauuu

SEQ ID NO: 252167 - RNA, 32 nt, Homo Sapiens
ccuccuuugaggaugcccggggucucccacag

SEQ ID NO: 252168 - RNA, 32 nt, Homo Sapiens
uucacuguccgucuucacggauuagcugugcu

SEQ ID NO: 252169 - RNA, 32 nt, Homo Sapiens
augacuucuggguaccagauucuuauaggagu

SEQ ID NO: 252170 - RNA, 32 nt, Homo Sapiens
aaaucgcuuuugcuggugcaaaguauauuaau

SEQ ID NO: 252171 - RNA, 32 nt, Homo Sapiens
caacgaucauaucuguaugccucauuuuauuc

SEQ ID NO: 252172 - RNA, 32 nt, Homo Sapiens
cucgcgcccccgagacaaagaggagagaaagu

SEQ ID NO: 252173 - RNA, 32 nt, Homo Sapiens
gccguggcuggcucuggcgagagagcaccgag

SEQ ID NO: 252174 - RNA, 32 nt, Homo Sapiens
cugggggcaucggcaaggccaagcugcgcagc

SEQ ID NO: 252175 - RNA, 32 nt, Homo Sapiens
auuuucccacugauaguugauuuuugaggcau

SEQ ID NO: 252176 - RNA, 32 nt, Homo Sapiens
ggacaaagacauucgaagacugcgggacuuuc

SEQ ID NO: 252177 - RNA, 32 nt, Homo Sapiens
aaggccaccccccagguccccuggaugaugug

SEQ ID NO: 252178 - RNA, 32 nt, Homo Sapiens
ugguuuuugguuuuugggucagggcuucacug

SEQ ID NO: 252179 - RNA, 32 nt, Homo Sapiens
gcaaaugacuacugcaccuggacagccuccuc

SEQ ID NO: 252180 - RNA, 32 nt, Homo Sapiens
gggaucgaucuggccugguggugauucuccag

SEQ ID NO: 252181 - RNA, 32 nt, Homo Sapiens
gggggagcccccagccuggggcagcccagcag

SEQ ID NO: 252182 - RNA, 32 nt, Homo Sapiens
ccugagaacugggaggaagcuggagaaaagau

SEQ ID NO: 252183 - RNA, 32 nt, Homo Sapiens
ggcuccaaguucccagcuccacacucacccca

SEQ ID NO: 252184 - RNA, 32 nt, Homo Sapiens
caucuuuuucuuuucuuaauaagggacguuuc

SEQ ID NO: 252185 - RNA, 32 nt, Homo Sapiens
acagggugggaguggcccgagcaguggcucaa

SEQ ID NO: 252186 - RNA, 32 nt, Homo Sapiens
aaaauuacuuggauuaauguguuaaucuuccu

SEQ ID NO: 252187 - RNA, 32 nt, Homo Sapiens
ucuguccccauccuucacuccuccucaagcuc

SEQ ID NO: 252188 - RNA, 32 nt, Homo Sapiens
caagcccaggaccaccacuuauaggguacagg

SEQ ID NO: 252189 - RNA, 32 nt, Homo Sapiens
cccuauuucagagucuucuccucucucugauc

SEQ ID NO: 252190 - RNA, 32 nt, Homo Sapiens
ugaauuuaaauauuuucuuuuuagcuuugaaa

SEQ ID NO: 252191 - RNA, 32 nt, Homo Sapiens
uagaggcagacaaaggcagaaaaaauaaagag

SEQ ID NO: 252192 - RNA, 32 nt, Homo Sapiens
cuuaaauaauacauauuuguauuuucaaacuu

SEQ ID NO: 252193 - RNA, 32 nt, Homo Sapiens
gacuuaaacaaauccuugccuuggcugccaga

SEQ ID NO: 252194 - RNA, 32 nt, Homo Sapiens
uuuuaagacagagcagaaaacucuuagauacu

SEQ ID NO: 252195 - RNA, 32 nt, Homo Sapiens
uaaauuuuauagagaagaaauuuuauuguacu

SEQ ID NO: 252196 - RNA, 32 nt, Homo Sapiens
agcuggcagcugucauucaggaccccaacccc

SEQ ID NO: 252197 - RNA, 32 nt, Homo Sapiens
gugugacaggggaaccguagacuuuauauaug

SEQ ID NO: 252198 - RNA, 32 nt, Homo Sapiens
uugcaaauauauugacauuagagugaaaacuc

SEQ ID NO: 252199 - RNA, 32 nt, Homo Sapiens
uauuucucagacuuaaauuugauuaugucccc

SEQ ID NO: 252200 - RNA, 32 nt, Homo Sapiens
aauguaaaaagucugagagaaacuacuuaggg

SEQ ID NO: 252201 - RNA, 32 nt, Homo Sapiens
cuccccagcccggcucccguggucgcugaggc

SEQ ID NO: 252202 - RNA, 32 nt, Homo Sapiens
cuugccaggcuucuccucucuccugccacugg

SEQ ID NO: 252203 - RNA, 31 nt, Homo Sapiens
guggagagggcggugggaggcgugugccuga

SEQ ID NO: 252204 - RNA, 32 nt, Homo Sapiens
uuggaaaaaaaauuauauauauauucuccuuu

SEQ ID NO: 252205 - RNA, 32 nt, Homo Sapiens
ugcagcuggauuuagcuugcaagcugccaagu

SEQ ID NO: 252206 - RNA, 32 nt, Homo Sapiens
cuugggugaacaggccuucacgaugaccagag

SEQ ID NO: 252207 - RNA, 32 nt, Homo Sapiens
ggguuauuaauuuaauaaaauucaucaucagg

SEQ ID NO: 252208 - RNA, 32 nt, Homo Sapiens
guguccccacccaaaucucaacuugaacugua

SEQ ID NO: 252209 - RNA, 32 nt, Homo Sapiens
uccugggaaggggggugucuagagcccaggaa

SEQ ID NO: 252210 - RNA, 32 nt, Homo Sapiens
cuucgaccacacgcgccgcucggucaccucag

SEQ ID NO: 252211 - RNA, 32 nt, Homo Sapiens
gcaacccaagcacugcuucccaccgggugaug

SEQ ID NO: 252212 - RNA, 32 nt, Homo Sapiens
auaaguauacacauuuuuuaaauuacccagaa

SEQ ID NO: 252213 - RNA, 32 nt, Homo Sapiens
gcaccaggaaacaaagaugccuccccagcccu

SEQ ID NO: 252214 - RNA, 32 nt, Homo Sapiens
acaauacaauuucaaagagaacccacauuugu

SEQ ID NO: 252215 - RNA, 32 nt, Homo Sapiens
cccugggcucccuggcagcuguuggcaucucg

SEQ ID NO: 252216 - RNA, 32 nt, Homo Sapiens
aggacucaccucugcggguuguugugaggauu

SEQ ID NO: 252217 - RNA, 32 nt, Homo Sapiens
cucaugcuucuuggcagccucuccaggcccag

SEQ ID NO: 252218 - RNA, 32 nt, Homo Sapiens
uucccuucugaggaagacccaccccuccgccu

SEQ ID NO: 252219 - RNA, 30 nt, Homo Sapiens
ugucaaggcaggccgggcuccagggcuccc

SEQ ID NO: 252220 - RNA, 32 nt, Homo Sapiens
uuccacccaagagcucuucuacaagaaagcac

SEQ ID NO: 252221 - RNA, 32 nt, Homo Sapiens
gagcguugccccucccucucccaacucucuac

SEQ ID NO: 252222 - RNA, 32 nt, Homo Sapiens
ggauguggacugcagugcugcagugccaggua

SEQ ID NO: 252223 - RNA, 32 nt, Homo Sapiens
uuuuuaagacagagauucaguuugucacccag

SEQ ID NO: 252224 - RNA, 32 nt, Homo Sapiens
cgcaguccuugaccgagggaaucucucugugu

SEQ ID NO: 252225 - RNA, 32 nt, Homo Sapiens
ccucacuccgcggcccgccaggacccggcccc

SEQ ID NO: 252226 - RNA, 32 nt, Homo Sapiens
uauuuuaaaauagcucuuucucauuuuuagag

SEQ ID NO: 252227 - RNA, 32 nt, Homo Sapiens
cuggagccauuugguaugagguauuaauuuag

SEQ ID NO: 252228 - RNA, 32 nt, Homo Sapiens
ccggugugguggcgcgcaccuguggcuuagcu

SEQ ID NO: 252229 - RNA, 32 nt, Homo Sapiens
cuaaaacauugaaaacagaacaaaugagaaaa

SEQ ID NO: 252230 - RNA, 32 nt, Homo Sapiens
ugcuuggaggaggcuccuggugucugaaacgg

SEQ ID NO: 252231 - RNA, 30 nt, Homo Sapiens
ugcggccagcccgugccaguggagugggcu

SEQ ID NO: 252232 - RNA, 32 nt, Homo Sapiens
cagagagcgcuuuugucugcaauggcagcagg

SEQ ID NO: 252233 - RNA, 32 nt, Homo Sapiens
cgucuucugcaccugucccccacugccucucu

SEQ ID NO: 252234 - RNA, 32 nt, Homo Sapiens
cgggcaggaacccacaauuccaaauacaaacg

SEQ ID NO: 252235 - RNA, 32 nt, Homo Sapiens
ucccagcuuucuugcuugccuucugugcaaua

SEQ ID NO: 252236 - RNA, 32 nt, Homo Sapiens
ggcaguuggugauaguuuuacuuugguacaaa

SEQ ID NO: 252237 - RNA, 32 nt, Homo Sapiens
acccaaguaauuuaaaaguaauauguuaccua

SEQ ID NO: 252238 - RNA, 32 nt, Homo Sapiens
cagagagaaaucacucgcccuucugagaggcc

SEQ ID NO: 252239 - RNA, 32 nt, Homo Sapiens
cggccaugagagagagcggaaggagcagcuga

SEQ ID NO: 252240 - RNA, 32 nt, Homo Sapiens
ugagauaaagcacagggugguuucacucuccu

SEQ ID NO: 252241 - RNA, 32 nt, Homo Sapiens
agucccuacauauuuaugccgcguuuccagcc

SEQ ID NO: 252242 - RNA, 32 nt, Homo Sapiens
uccauuuguuauuguguuuguuaacaacccuu

SEQ ID NO: 252243 - RNA, 32 nt, Homo Sapiens
ccgauuugaaagauucaagggagaaagauuaa

SEQ ID NO: 252244 - RNA, 32 nt, Homo Sapiens
gaacauaagaauuuuuuauaaguagaaagaau

SEQ ID NO: 252245 - RNA, 32 nt, Homo Sapiens
uauccugauaaggaagaauguucuuguuacuu

SEQ ID NO: 252246 - RNA, 32 nt, Homo Sapiens
acggccacggugccgccguccacgucagcuca

SEQ ID NO: 252247 - RNA, 32 nt, Homo Sapiens
ggcggaggcggagcaggcgccaugucagcccg

SEQ ID NO: 252248 - RNA, 32 nt, Homo Sapiens
ucgcccggcuccuggugcuccccagccgccgg

SEQ ID NO: 252249 - RNA, 32 nt, Homo Sapiens
gaucucacagagcagaucagcgcgggugucca

SEQ ID NO: 252250 - RNA, 32 nt, Homo Sapiens
ccauuuugacaaacagcuuucaggcguaaauc

SEQ ID NO: 252251 - RNA, 32 nt, Homo Sapiens
guuaaaacaaaacauggaugucugggucccgc

SEQ ID NO: 252252 - RNA, 32 nt, Homo Sapiens
ugacgcaucuucuuuuucugccuguagagaug

SEQ ID NO: 252253 - RNA, 32 nt, Homo Sapiens
uuccuuuccuuccccuaagauguuuccagggc

SEQ ID NO: 252254 - RNA, 32 nt, Homo Sapiens
ccccuguaaucccagcacuuugggugggugag

SEQ ID NO: 252255 - RNA, 32 nt, Homo Sapiens
acugccacauucuccuacuuucuauuagagga

SEQ ID NO: 252256 - RNA, 32 nt, Homo Sapiens
auucacgcuuaaacaaccaaccgguaaccacc

SEQ ID NO: 252257 - RNA, 32 nt, Homo Sapiens
ggccgcccggcggucccagaccauccuagcaa

SEQ ID NO: 252258 - RNA, 32 nt, Homo Sapiens
gggcgcggguggcgcgcgugugugugaagggg

SEQ ID NO: 252259 - RNA, 32 nt, Homo Sapiens
uauugaauuuuuccugguacgaagacagauau

SEQ ID NO: 252260 - RNA, 32 nt, Homo Sapiens
caaggaccaugaaacuccugcugcuggcucuu

SEQ ID NO: 252261 - RNA, 32 nt, Homo Sapiens
aguagcugagauuacaggcgcccgccaccacg

SEQ ID NO: 252262 - RNA, 28 nt, Homo Sapiens
acuuaaagguugaacauuauaaagaagc

SEQ ID NO: 252263 - RNA, 32 nt, Homo Sapiens
ggugguuuuuuuuuuuuuuuuaacauacagaa

SEQ ID NO: 252264 - RNA, 32 nt, Homo Sapiens
aaauuccacauaucagugauacaauuucuugc

SEQ ID NO: 252265 - RNA, 32 nt, Homo Sapiens
caaaggugcugacaucuaugugcuagcugccu

SEQ ID NO: 252266 - RNA, 30 nt, Homo Sapiens
guuuuugucugugcauguguaucuccauuu

SEQ ID NO: 252267 - RNA, 32 nt, Homo Sapiens
ggacauaauaauauugaauaguaauuaccuuu

SEQ ID NO: 252268 - RNA, 32 nt, Homo Sapiens
gugugagaaaaauaaacagcucuggagucuug

SEQ ID NO: 252269 - RNA, 32 nt, Homo Sapiens
ccgguuuccagagcacgucuccaggcuucgac

SEQ ID NO: 252270 - RNA, 32 nt, Homo Sapiens
ggccgcggugacucaugccuauaaucccccag

SEQ ID NO: 252271 - RNA, 32 nt, Homo Sapiens
caggcauccccuggcagagagccccguccugg

SEQ ID NO: 252272 - RNA, 29 nt, Homo Sapiens
auauuuucuaaauauucauugacuaaaca

SEQ ID NO: 252273 - RNA, 32 nt, Homo Sapiens
ucuacuaaaaauacaaaaaauuagcuggaugu

SEQ ID NO: 252274 - RNA, 32 nt, Homo Sapiens
gguuuccuggguaaugugacaccugcagaaac

SEQ ID NO: 252275 - RNA, 32 nt, Homo Sapiens
uagaccaacuuaacacugaacccauuacuuuu

SEQ ID NO: 252276 - RNA, 32 nt, Homo Sapiens
ugguccuguggcacccccuaccucuguucugc

SEQ ID NO: 252277 - RNA, 32 nt, Homo Sapiens
gacaaguguaugguauccaaucauaguauguu

SEQ ID NO: 252278 - RNA, 32 nt, Homo Sapiens
ggggcuggagguugagcgcccgggccagcacc

SEQ ID NO: 252279 - RNA, 32 nt, Homo Sapiens
gucacuuccuucugccuuccaacccucaccuu

SEQ ID NO: 252280 - RNA, 32 nt, Homo Sapiens
gugcaggaaccagagcgagagcuuuugggguc

SEQ ID NO: 252281 - RNA, 32 nt, Homo Sapiens
guauuugaauauauuuuagaaucaaauugagg

SEQ ID NO: 252282 - RNA, 32 nt, Homo Sapiens
aaagcucuggucaacagcacugauucuuaacc

SEQ ID NO: 252283 - RNA, 32 nt, Homo Sapiens
gcaaccuggugccccccguggagcuggccaac

SEQ ID NO: 252284 - RNA, 32 nt, Homo Sapiens
gcagaaauaaagauguucuuugaaaccaacga

SEQ ID NO: 252285 - RNA, 32 nt, Homo Sapiens
acuauuuuuuaaauccagaaaucuuuguacug

SEQ ID NO: 252286 - RNA, 32 nt, Homo Sapiens
gugcuugugcuugguuguucagggccauuuca

SEQ ID NO: 252287 - RNA, 32 nt, Homo Sapiens
guguugccuucuugcaucuccacacauuuccc

SEQ ID NO: 252288 - RNA, 32 nt, Homo Sapiens
cugcuaggccccaguucuuccuccuucccccu

SEQ ID NO: 252289 - RNA, 32 nt, Homo Sapiens
ugaacguuuacuugauuuagaagauaauguga

SEQ ID NO: 252290 - RNA, 32 nt, Homo Sapiens
cggcggcggccgcggagggacgaugcgcgagu

SEQ ID NO: 252291 - RNA, 32 nt, Homo Sapiens
ccacgcguccggagcuggaggaggcggcgggc

SEQ ID NO: 252292 - RNA, 32 nt, Homo Sapiens
cuauaagcuuaagucuuaauucuggaaauuuu

SEQ ID NO: 252293 - RNA, 32 nt, Homo Sapiens
auuuuuuaaugucauuuuuguuuuuaauauuu

SEQ ID NO: 252294 - RNA, 32 nt, Homo Sapiens
gugcauagcuacucacacugugacacggacac

SEQ ID NO: 252295 - RNA, 32 nt, Homo Sapiens
cacggggccggcagccgcuccacggagucccc

SEQ ID NO: 252296 - RNA, 32 nt, Homo Sapiens
gaccuguccuucggcgcgggacuuucggcggg

SEQ ID NO: 252297 - RNA, 32 nt, Homo Sapiens
gcgagcuaggcggcagcggcgcggcgcgggcu

SEQ ID NO: 252298 - RNA, 32 nt, Homo Sapiens
cucuguuguauauacuggugaugcaucuaauu

SEQ ID NO: 252299 - RNA, 32 nt, Homo Sapiens
cuaaaaacaaacaaacaaaaaaaacaauucuu

SEQ ID NO: 252300 - RNA, 32 nt, Homo Sapiens
gcauacagaaaaguagagaggacgaaccucca

SEQ ID NO: 252301 - RNA, 32 nt, Homo Sapiens
ugauauuguuguaauuucuacuuuauuucaaa

SEQ ID NO: 252302 - RNA, 32 nt, Homo Sapiens
cggcgugucggucuucaggcgccugaugaguu

SEQ ID NO: 252303 - RNA, 32 nt, Homo Sapiens
uuuauuccugcuuuugaggacaguugggcuau

SEQ ID NO: 252304 - RNA, 31 nt, Homo Sapiens
gugucucugcauugccugccuuuuugccuuc

SEQ ID NO: 252305 - RNA, 32 nt, Homo Sapiens
auguuguacuuuguagggacaaaugugcauuu

SEQ ID NO: 252306 - RNA, 32 nt, Homo Sapiens
uuccaugaugacuggauguugaauuuugugaa

SEQ ID NO: 252307 - RNA, 32 nt, Homo Sapiens
gagugucgccuggaagucugggggccauucca

SEQ ID NO: 252308 - RNA, 32 nt, Homo Sapiens
uauuguaaaggaacuaugugggaugcauuugg

SEQ ID NO: 252309 - RNA, 30 nt, Homo Sapiens
cccucgggccgccugccgccgucaugaggc

SEQ ID NO: 252310 - RNA, 32 nt, Homo Sapiens
ggcuggaguguagugguaugaucauagcucac

SEQ ID NO: 252311 - RNA, 32 nt, Homo Sapiens
cccaggaaggcaccccuuucccugcaggcuag

SEQ ID NO: 252312 - RNA, 32 nt, Homo Sapiens
uuuuugcacuguaacuauaauaccucuuaauu

SEQ ID NO: 252313 - RNA, 32 nt, Homo Sapiens
ccuggugggagcucugcuggcuccugucugaa

SEQ ID NO: 252314 - RNA, 32 nt, Homo Sapiens
ugccuuuguuucuuuuuauucuuacggaugaa

SEQ ID NO: 252315 - RNA, 32 nt, Homo Sapiens
gguacccuccaugcccuucuguaauaaauauc

SEQ ID NO: 252316 - RNA, 32 nt, Homo Sapiens
aguuguuucuuacuucuuuucucucuuauuua

SEQ ID NO: 252317 - RNA, 32 nt, Homo Sapiens
ucggacacccaggagcucuauucuugccccua

SEQ ID NO: 252318 - RNA, 32 nt, Homo Sapiens
cagcgacgucgaggcgcucaugguugcaggcg

SEQ ID NO: 252319 - RNA, 32 nt, Homo Sapiens
aggacgaggaagaggacuuugggggacgggcu

SEQ ID NO: 252320 - RNA, 30 nt, Homo Sapiens
auaauauucagcuggggggaaauagacuga

SEQ ID NO: 252321 - RNA, 32 nt, Homo Sapiens
aaauacuguaaauaaacuuuuuuucuaacaau

SEQ ID NO: 252322 - RNA, 32 nt, Homo Sapiens
ugggaggaaugggaagugugguuggcccacua

SEQ ID NO: 252323 - RNA, 32 nt, Homo Sapiens
acuguccuggggacuugaauccaccuuucuca

SEQ ID NO: 252324 - RNA, 32 nt, Homo Sapiens
ccaaagugcagggauuacaagugugggccacu

SEQ ID NO: 252325 - RNA, 32 nt, Homo Sapiens
gggcgacagaggcagcagcagcccgaggccug

SEQ ID NO: 252326 - RNA, 32 nt, Homo Sapiens
auauuauuacuguugauaauucuuauuuugug

SEQ ID NO: 252327 - RNA, 32 nt, Homo Sapiens
uugacucaugggacccuguccuccucacuggg

SEQ ID NO: 252328 - RNA, 32 nt, Homo Sapiens
ugugugccugccccgcugcgauggagguccua

SEQ ID NO: 252329 - RNA, 31 nt, Homo Sapiens
gcuucacaagaggucaugccucugcagggaa

SEQ ID NO: 252330 - RNA, 32 nt, Homo Sapiens
ucacacucauggcuaccagugggccugcuggg

SEQ ID NO: 252331 - RNA, 32 nt, Homo Sapiens
cccgcucuccuccgagacccaggcugagccca

SEQ ID NO: 252332 - RNA, 32 nt, Homo Sapiens
aggaggaggaggaggaggaaggcaaagccccu

SEQ ID NO: 252333 - RNA, 32 nt, Homo Sapiens
gauggaugaguggcuucuucuccaccuagauu

SEQ ID NO: 252334 - RNA, 31 nt, Homo Sapiens
gaagagccacggagagucucccuuuaucuuc

SEQ ID NO: 252335 - RNA, 32 nt, Homo Sapiens
gugggcuuuuugcauggagaacauuuuggggc

SEQ ID NO: 252336 - RNA, 32 nt, Homo Sapiens
uucauuuacagcucuggaacacuuuggggcug

SEQ ID NO: 252337 - RNA, 32 nt, Homo Sapiens
cuccucggcuggcuguccacccgccccugccc

SEQ ID NO: 252338 - RNA, 32 nt, Homo Sapiens
accaacccggucuuugugaugugugaagccuu

SEQ ID NO: 252339 - RNA, 32 nt, Homo Sapiens
cucucagaggaugauuauuccagucuauucuc

SEQ ID NO: 252340 - RNA, 32 nt, Homo Sapiens
ucccuauagaaaguggauaaaagauauaccaa

SEQ ID NO: 252341 - RNA, 32 nt, Homo Sapiens
aagacugagaccuguuaauccaaaaugcacca

SEQ ID NO: 252342 - RNA, 32 nt, Homo Sapiens
uacucugaagcaguaacaguggcauguuuccu

SEQ ID NO: 252343 - RNA, 32 nt, Homo Sapiens
auggaucugauccuccgaagcacagcagagau

SEQ ID NO: 252344 - RNA, 32 nt, Homo Sapiens
gaggauaaucuuacagauauuauaggaauuuc

SEQ ID NO: 252345 - RNA, 32 nt, Homo Sapiens
ucuugucuuacagaauccuuacaagcacccug

SEQ ID NO: 252346 - RNA, 32 nt, Homo Sapiens
accucagcagagcuccugggccugcugccugc

SEQ ID NO: 252347 - RNA, 32 nt, Homo Sapiens
uucccugugaccucugcaguacuccuuagccu

SEQ ID NO: 252348 - RNA, 29 nt, Homo Sapiens
gcucaauaaaguuaaguuuuucuucauua

SEQ ID NO: 252349 - RNA, 27 nt, Homo Sapiens
ugcacauccuucuuggcuuccuggccg

SEQ ID NO: 252350 - RNA, 32 nt, Homo Sapiens
caauggacccucggggacccaaguggggcuuu

SEQ ID NO: 252351 - RNA, 32 nt, Homo Sapiens
caucugucaacgcuccucuucuccccuccucc

SEQ ID NO: 252352 - RNA, 32 nt, Homo Sapiens
uuguucugacuccacgugccugcccggccucc

SEQ ID NO: 252353 - RNA, 32 nt, Homo Sapiens
aaucuuuaauuucaaugaacauuacagcauau

SEQ ID NO: 252354 - RNA, 32 nt, Homo Sapiens
aauauuucauuuagcuuuuuuauuuuaauaca

SEQ ID NO: 252355 - RNA, 32 nt, Homo Sapiens
uuacauucaaggaugccucuguggccuucacc

SEQ ID NO: 252356 - RNA, 32 nt, Homo Sapiens
cccugugaccucggugacaccuggacaagguu

SEQ ID NO: 252357 - RNA, 32 nt, Homo Sapiens
uaauuccuaccuugacugugugcaucauuugu

SEQ ID NO: 252358 - RNA, 32 nt, Homo Sapiens
ggcaaauggcccagcucugccuguguuuuucu

SEQ ID NO: 252359 - RNA, 32 nt, Homo Sapiens
aucuaaauuuaccuuauuaguguuaccaaaug

SEQ ID NO: 252360 - RNA, 32 nt, Homo Sapiens
gggaaggaggaguggcaacauggcgucuucgg

SEQ ID NO: 252361 - RNA, 30 nt, Homo Sapiens
uguaaugguaucccuguuuuauuucugaua

SEQ ID NO: 252362 - RNA, 32 nt, Homo Sapiens
ucagagaguucgcuuagcuggagcaggugaug

SEQ ID NO: 252363 - RNA, 32 nt, Homo Sapiens
cauucccauuacuccuucuggcuguuacacuu

SEQ ID NO: 252364 - RNA, 32 nt, Homo Sapiens
auagcuccucccucacaguggcccauuuaggc

SEQ ID NO: 252365 - RNA, 32 nt, Homo Sapiens
aauggguagaauaaagauuugauguggucugg

SEQ ID NO: 252366 - RNA, 32 nt, Homo Sapiens
uggauggcugugaagcaaaaccaggagcccug

SEQ ID NO: 252367 - RNA, 32 nt, Homo Sapiens
ucuuauacccucggguuccucccaggagcucu

SEQ ID NO: 252368 - RNA, 32 nt, Homo Sapiens
aaucuaaaauuucaaaagaugaguuuccaauc

SEQ ID NO: 252369 - RNA, 32 nt, Homo Sapiens
aagggcaucuucuggggcauccucccaggguc

SEQ ID NO: 252370 - RNA, 32 nt, Homo Sapiens
gacuaaauauaaaaaacauuuucuugaauggc

SEQ ID NO: 252371 - RNA, 32 nt, Homo Sapiens
aacucacucugugcuuuuuuuuuuuucuguua

SEQ ID NO: 252372 - RNA, 32 nt, Homo Sapiens
uggugggagaugauuggaucacagggguggau

SEQ ID NO: 252373 - RNA, 32 nt, Homo Sapiens
gcaaagaugugggguuaauguugugaguguua

SEQ ID NO: 252374 - RNA, 32 nt, Homo Sapiens
ugucuccugggcuguggucucaucucaacguu

SEQ ID NO: 252375 - RNA, 32 nt, Homo Sapiens
gcaaaugacuauuuauaccaguaugcauauaa

SEQ ID NO: 252376 - RNA, 32 nt, Homo Sapiens
cuugguuauagaacaugguaaauauuuauuac

SEQ ID NO: 252377 - RNA, 32 nt, Homo Sapiens
gagagcuuggugaaggugucuccaucaccacc

SEQ ID NO: 252378 - RNA, 32 nt, Homo Sapiens
acaggaccaggggauuuccaugauguuuucca

SEQ ID NO: 252379 - RNA, 32 nt, Homo Sapiens
uagcccaucucuaucauaccuauuuucuccgc

SEQ ID NO: 252380 - RNA, 32 nt, Homo Sapiens
cggucacgugggcauggcgucugggggcgggg

SEQ ID NO: 252381 - RNA, 32 nt, Homo Sapiens
gaaguugugagauauuggauguguggcuauuu

SEQ ID NO: 252382 - RNA, 32 nt, Homo Sapiens
cuggaaccucaucccugcacagaugaggaaac

SEQ ID NO: 252383 - RNA, 32 nt, Homo Sapiens
ggguuuugucauuguugauguuauuguugcuu

SEQ ID NO: 252384 - RNA, 32 nt, Homo Sapiens
caggucggggguguggucgucaugcuguccgu

SEQ ID NO: 252385 - RNA, 32 nt, Homo Sapiens
agcagccccgccccggccucucgggagccgug

SEQ ID NO: 252386 - RNA, 32 nt, Homo Sapiens
uuauccacuuuauuuugugucauugacaaaag

SEQ ID NO: 252387 - RNA, 32 nt, Homo Sapiens
cugaguguaaacuacaugguagguugugaagg

SEQ ID NO: 252388 - RNA, 32 nt, Homo Sapiens
gagccaguacuuuuuaaagagauaguacuuuu

SEQ ID NO: 252389 - RNA, 32 nt, Homo Sapiens
cagccgccuggacaccgccgccgccacugcga

SEQ ID NO: 252390 - RNA, 32 nt, Homo Sapiens
gagagagagugaugcaagcugcugcaaagcug

SEQ ID NO: 252391 - RNA, 31 nt, Homo Sapiens
cuuguguauugauggcaguccacucuguuuu

SEQ ID NO: 252392 - RNA, 32 nt, Homo Sapiens
ucuuccugacuucuaucaugcgucucuacaau

SEQ ID NO: 252393 - RNA, 32 nt, Homo Sapiens
gccaaaauucuaugaugagugaccuuccccag

SEQ ID NO: 252394 - RNA, 32 nt, Homo Sapiens
cugccacccccucccugcugucaggagaggau

SEQ ID NO: 252395 - RNA, 32 nt, Homo Sapiens
ugaaaaguggauaaacagaacauuuauaagug

SEQ ID NO: 252396 - RNA, 32 nt, Homo Sapiens
auuggaaagacuauaacacaccucugaguaga

SEQ ID NO: 252397 - RNA, 32 nt, Homo Sapiens
ggagcaggcagacaccguuaagcgcugugcua

SEQ ID NO: 252398 - RNA, 32 nt, Homo Sapiens
uauacuaaauuaacaguaauaccucaaaacug

SEQ ID NO: 252399 - RNA, 32 nt, Homo Sapiens
cggagggaaggaugagaagcaaugcaaaguga

SEQ ID NO: 252400 - RNA, 32 nt, Homo Sapiens
gaacaagaggagaaagcagagauaaaacgcuu

SEQ ID NO: 252401 - RNA, 29 nt, Homo Sapiens
uuuuccauauguauuucuaaauggauaaa

SEQ ID NO: 252402 - RNA, 32 nt, Homo Sapiens
uaagaaauguuuuuauuuucucuaucaacagu

SEQ ID NO: 252403 - RNA, 32 nt, Homo Sapiens
uuucaucacaagcuugaauauuuaaauucugu

SEQ ID NO: 252404 - RNA, 32 nt, Homo Sapiens
ccacugugaugaugagccaagcaauuuggagc

SEQ ID NO: 252405 - RNA, 32 nt, Homo Sapiens
ggaaggcuguggacccccaucuccagggggcc

SEQ ID NO: 252406 - RNA, 32 nt, Homo Sapiens
cacacaccaccccugauccagcccucacccac

SEQ ID NO: 252407 - RNA, 29 nt, Homo Sapiens
uuccuuauagugauggaagugaagcauuc

SEQ ID NO: 252408 - RNA, 31 nt, Homo Sapiens
uccucagugugaguccucagagccuccaucu

SEQ ID NO: 252409 - RNA, 32 nt, Homo Sapiens
uguggcauuacauguucuuccaucuccccagc

SEQ ID NO: 252410 - RNA, 32 nt, Homo Sapiens
gcuaccggccucagccagggccccacaguuug

SEQ ID NO: 252411 - RNA, 32 nt, Homo Sapiens
auauacaaugucaacuuuuuagauguuucacc

SEQ ID NO: 252412 - RNA, 32 nt, Homo Sapiens
uacaaaggaaggaggagggaagagacuuagga

SEQ ID NO: 252413 - RNA, 32 nt, Homo Sapiens
guugaaauagaauaaggaaauaaaaugauaca

SEQ ID NO: 252414 - RNA, 32 nt, Homo Sapiens
acccuucugacugccuuccauccacucucacc

SEQ ID NO: 252415 - RNA, 32 nt, Homo Sapiens
ugagccaccacgcccugccaauaaaaagauua

SEQ ID NO: 252416 - RNA, 32 nt, Homo Sapiens
gagaauaauaauuuauaccacauagaguagcu

SEQ ID NO: 252417 - RNA, 32 nt, Homo Sapiens
accuaaagacuacaccaaaauaacucuuagug

SEQ ID NO: 252418 - RNA, 31 nt, Homo Sapiens
cguggccugggcugccugcgcccaccccgcu

SEQ ID NO: 252419 - RNA, 32 nt, Homo Sapiens
agaagaagccccacgggagccaggaugggacu

SEQ ID NO: 252420 - RNA, 32 nt, Homo Sapiens
cgggccaucuucauugccaugaguguucggac

SEQ ID NO: 252421 - RNA, 32 nt, Homo Sapiens
ugguccgcgccugccugcccagcccgcggaac

SEQ ID NO: 252422 - RNA, 32 nt, Homo Sapiens
ccagggugucaggaaggcaggggugccagguc

SEQ ID NO: 252423 - RNA, 32 nt, Homo Sapiens
uuaggccaggacuuuuaccaccuggagcuagu

SEQ ID NO: 252424 - RNA, 32 nt, Homo Sapiens
gcauuuugcaagaugagcacaaacuuucuggg

SEQ ID NO: 252425 - RNA, 32 nt, Homo Sapiens
uguccaauuuaaaggauuugauuaaacauaaa

SEQ ID NO: 252426 - RNA, 32 nt, Homo Sapiens
uuuuccugucccaagaggucuuuaacaauauu

SEQ ID NO: 252427 - RNA, 32 nt, Homo Sapiens
ccuuuucaacgaaacuaacaaaaagaagaacc

SEQ ID NO: 252428 - RNA, 32 nt, Homo Sapiens
caccuggcccacacucuccuccccugaucccc

SEQ ID NO: 252429 - RNA, 32 nt, Homo Sapiens
ggcagcucuauucuugcagagccauagcagga

SEQ ID NO: 252430 - RNA, 32 nt, Homo Sapiens
gcugacccuccagagcuuuguuuaccagcccc

SEQ ID NO: 252431 - RNA, 32 nt, Homo Sapiens
uacuauuuuuaaaauuccuguugaguuucuuu

SEQ ID NO: 252432 - RNA, 32 nt, Homo Sapiens
ucggcgucucaacagucuccaguguccacgcg

SEQ ID NO: 252433 - RNA, 32 nt, Homo Sapiens
gcgggagccagacuguccagggaaacagccuc

SEQ ID NO: 252434 - RNA, 32 nt, Homo Sapiens
cagacccccagcugggcccugcucaccccuug

SEQ ID NO: 252435 - RNA, 32 nt, Homo Sapiens
gggauuuaauauauuuugaauauaauggguau

SEQ ID NO: 252436 - RNA, 32 nt, Homo Sapiens
guauagcuuuuaaauuuuaaagcauuugguaa

SEQ ID NO: 252437 - RNA, 32 nt, Homo Sapiens
agcagagggaggccucuugccugagggauuaa

SEQ ID NO: 252438 - RNA, 32 nt, Homo Sapiens
cacuaaaaaguacauguaaaaguacauuugau

SEQ ID NO: 252439 - RNA, 32 nt, Homo Sapiens
ggaccuaggcuccucuuacccccgucuaggug

SEQ ID NO: 252440 - RNA, 32 nt, Homo Sapiens
uuauaaaagaucuggucuggauuauggaauuu

SEQ ID NO: 252441 - RNA, 32 nt, Homo Sapiens
aaguccaugguaguuuucaauuuugccauacu

SEQ ID NO: 252442 - RNA, 32 nt, Homo Sapiens
aggaaccugacaaccauguguacaccagggcu

SEQ ID NO: 252443 - RNA, 32 nt, Homo Sapiens
cucuuaugggcuggguucuacccaggugcuag

SEQ ID NO: 252444 - RNA, 32 nt, Homo Sapiens
aaaaauuaaggaauuuuuaacuuuucacaaaa

SEQ ID NO: 252445 - RNA, 32 nt, Homo Sapiens
acaagguucuucccuuuuacauacugcugucu

SEQ ID NO: 252446 - RNA, 31 nt, Homo Sapiens
gugacauucugcagcuaguccacuacuccaa

SEQ ID NO: 252447 - RNA, 32 nt, Homo Sapiens
gagccccccaaagaggccccgccccggcccug

SEQ ID NO: 252448 - RNA, 32 nt, Homo Sapiens
aauuauuuaauuugcauuaucuguaaaaugua

SEQ ID NO: 252449 - RNA, 32 nt, Homo Sapiens
cuucuaaccauccucugaaaaaacagaaaaaa

SEQ ID NO: 252450 - RNA, 29 nt, Homo Sapiens
agagugucauauguauuuaaguuguguau

SEQ ID NO: 252451 - RNA, 32 nt, Homo Sapiens
caaagcugcccccacccccaccccugcccccg

SEQ ID NO: 252452 - RNA, 30 nt, Homo Sapiens
acaacgaauauccuuuuucuaaaucagauc

SEQ ID NO: 252453 - RNA, 31 nt, Homo Sapiens
aggcggcagccccaggaaaaugcuagagaug

SEQ ID NO: 252454 - RNA, 32 nt, Homo Sapiens
uccugcaaagaugggcggcagcugcucagcau

SEQ ID NO: 252455 - RNA, 32 nt, Homo Sapiens
aaaugcaggaggaaagcugugcucuguggugg

SEQ ID NO: 252456 - RNA, 32 nt, Homo Sapiens
uuuucaccaaaauauaguuugcacuuuuuaau

SEQ ID NO: 252457 - RNA, 32 nt, Homo Sapiens
cggccgauucggugcugcucggcgaccacgug

SEQ ID NO: 252458 - RNA, 32 nt, Homo Sapiens
gauacgccgggcgcaggcgcagaagccgcgcc

SEQ ID NO: 252459 - RNA, 32 nt, Homo Sapiens
cccggaggcccuaggagcuggugcugcccccg

SEQ ID NO: 252460 - RNA, 32 nt, Homo Sapiens
caggaggggcuccagcagcuccagcccagagc

SEQ ID NO: 252461 - RNA, 32 nt, Homo Sapiens
auccuuggcaggaaagcagggauuguguucau

SEQ ID NO: 252462 - RNA, 32 nt, Homo Sapiens
cauauacuguauauauugaaacaaucugaaug

SEQ ID NO: 252463 - RNA, 32 nt, Homo Sapiens
gggcuccaccccagccccgcccaggcugcugc

SEQ ID NO: 252464 - RNA, 32 nt, Homo Sapiens
gcaaaacguaccucaaaccagacaaagccuug

SEQ ID NO: 252465 - RNA, 32 nt, Homo Sapiens
ccugugcugucucccggcaucuccucacuauc

SEQ ID NO: 252466 - RNA, 32 nt, Homo Sapiens
ucucuuucgccugcacacuuggaacucagcaa

SEQ ID NO: 252467 - RNA, 32 nt, Homo Sapiens
agcggacaaccugggaacacauccugguguau

SEQ ID NO: 252468 - RNA, 32 nt, Homo Sapiens
cucuaauggagaaaaaucuaauuauagcaaga

SEQ ID NO: 252469 - RNA, 32 nt, Homo Sapiens
agcuuguuucuuuuccaucuauucaagugugu

SEQ ID NO: 252470 - RNA, 32 nt, Homo Sapiens
aaauggcuuuaaagcuugguguuacuuuucuu

SEQ ID NO: 252471 - RNA, 32 nt, Homo Sapiens
cuuauaauagcauuuucaguacuucucauaaa

SEQ ID NO: 252472 - RNA, 32 nt, Homo Sapiens
caggggaggcugggucugggggugcgugaccc

SEQ ID NO: 252473 - RNA, 29 nt, Homo Sapiens
caaaaguguaaauuauauuuccuaugccu

SEQ ID NO: 252474 - RNA, 32 nt, Homo Sapiens
agagauggaagaggagacacagacacaaagca

SEQ ID NO: 252475 - RNA, 32 nt, Homo Sapiens
ggagacucagaaggggaagcauugggaaacca

SEQ ID NO: 252476 - RNA, 32 nt, Homo Sapiens
gugcauuuuuaaauuuccucuacuuaauuugu

SEQ ID NO: 252477 - RNA, 32 nt, Homo Sapiens
uugcgggcgggcgggcgguauguggcgccugg

SEQ ID NO: 252478 - RNA, 32 nt, Homo Sapiens
ucacaugugacaaagggccagcagucuaccug

SEQ ID NO: 252479 - RNA, 32 nt, Homo Sapiens
agauaccugcuguucucagcuccagcuucaaa

SEQ ID NO: 252480 - RNA, 32 nt, Homo Sapiens
gaguagucuuugacagugcuuauuugauacug

SEQ ID NO: 252481 - RNA, 32 nt, Homo Sapiens
gggugugaggagaggagccgcuguuuuucacu

SEQ ID NO: 252482 - RNA, 32 nt, Homo Sapiens
auuaaaaguugauuuuuuuucuugauaguauu

SEQ ID NO: 252483 - RNA, 32 nt, Homo Sapiens
cuuguccaauuuuauccaaaaucuucaaguua

SEQ ID NO: 252484 - RNA, 32 nt, Homo Sapiens
cgucccuccgcgggacccucccguugggacaa

SEQ ID NO: 252485 - RNA, 32 nt, Homo Sapiens
aaacuugaaaagguguuugcuccaucaaauuc

SEQ ID NO: 252486 - RNA, 28 nt, Homo Sapiens
gacccuagcucuuuccuuuuuuuuuuuu

SEQ ID NO: 252487 - RNA, 32 nt, Homo Sapiens
ugccagcccacccaccagagggugggaaccug

SEQ ID NO: 252488 - RNA, 32 nt, Homo Sapiens
agcgucucgcuugcgccccgggcccgcggcgc

SEQ ID NO: 252489 - RNA, 32 nt, Homo Sapiens
agcccgggaaaggagaaugcugcuugucaccu

SEQ ID NO: 252490 - RNA, 32 nt, Homo Sapiens
gacacaaaguuaaacaaacaaacaaaaaacac

SEQ ID NO: 252491 - RNA, 32 nt, Homo Sapiens
uuccuuuaaaauuuacacgugggaaacauuug

SEQ ID NO: 252492 - RNA, 32 nt, Homo Sapiens
caaaguagaucaugcauagagugugauguaug

SEQ ID NO: 252493 - RNA, 32 nt, Homo Sapiens
cuuguguucucuucauuugucuguaaaaauuu

SEQ ID NO: 252494 - RNA, 32 nt, Homo Sapiens
aggcucacucacagaggguggugcugaugcug

SEQ ID NO: 252495 - RNA, 32 nt, Homo Sapiens
gcaggucgagaccgaggugagcucugaacgcc

SEQ ID NO: 252496 - RNA, 32 nt, Homo Sapiens
uuaaaguaugccuauuaacaguuucugcagua

SEQ ID NO: 252497 - RNA, 32 nt, Homo Sapiens
uuauuguuugucggccuguguauauuaaauga

SEQ ID NO: 252498 - RNA, 32 nt, Homo Sapiens
caggcucguggcggucggucagcggggcguuc

SEQ ID NO: 252499 - RNA, 32 nt, Homo Sapiens
uccccuaccaggagagggccuggggcucuugc

SEQ ID NO: 252500 - RNA, 32 nt, Homo Sapiens
cagaccccggcgggcuguggcaggagggcggc

SEQ ID NO: 252501 - RNA, 32 nt, Homo Sapiens
gaucauccguaccccaaaccucaacaucaaac

SEQ ID NO: 252502 - RNA, 32 nt, Homo Sapiens
cagucacaaagucuggaaaaguuuacauuuug

SEQ ID NO: 252503 - RNA, 32 nt, Homo Sapiens
uuugauguuacagauuuaauacaguuuauuuu

SEQ ID NO: 252504 - RNA, 32 nt, Homo Sapiens
caaccugcauacuuugagucuccauccccaga

SEQ ID NO: 252505 - RNA, 32 nt, Homo Sapiens
aacauuucauuguacaaguauuacaaccauau

SEQ ID NO: 252506 - RNA, 32 nt, Homo Sapiens
aagaaaaauaaaagcucugcaauuagcagcaa

SEQ ID NO: 252507 - RNA, 32 nt, Homo Sapiens
uugucuuugguaguuuuuugcacuaacuucag

SEQ ID NO: 252508 - RNA, 32 nt, Homo Sapiens
ucccucaccuucccuccaccgccagccccaga

SEQ ID NO: 252509 - RNA, 32 nt, Homo Sapiens
agcuguggcaaugugagccugauuccucagcc

SEQ ID NO: 252510 - RNA, 32 nt, Homo Sapiens
gcaggaaauggcacccucccuuuucggugaug

SEQ ID NO: 252511 - RNA, 32 nt, Homo Sapiens
cuacccuaccucggggaccugguggcagcggc

SEQ ID NO: 252512 - RNA, 32 nt, Homo Sapiens
gggagagcgggcgggggagcucgcgccgagga

SEQ ID NO: 252513 - RNA, 32 nt, Homo Sapiens
cccaugcaucuggaaaucuaauuuagaguugu

SEQ ID NO: 252514 - RNA, 32 nt, Homo Sapiens
ggcucuggcgccuggugacuucucccuccccg

SEQ ID NO: 252515 - RNA, 32 nt, Homo Sapiens
ucuucaauuucuugccuauucaaguuuuuuug

SEQ ID NO: 252516 - RNA, 32 nt, Homo Sapiens
gucucacccugcugcugcuccucccucuuccc

SEQ ID NO: 252517 - RNA, 32 nt, Homo Sapiens
ucuccggaugggcgcaccugcugcucagggca

SEQ ID NO: 252518 - RNA, 31 nt, Homo Sapiens
uuuauucauuugaggaugucuuauaaagacu

SEQ ID NO: 252519 - RNA, 32 nt, Homo Sapiens
gagcugcuggcacagcaguucuggcccuggac

SEQ ID NO: 252520 - RNA, 32 nt, Homo Sapiens
gccaaucagcugagggugucauguguggaaaa

SEQ ID NO: 252521 - RNA, 31 nt, Homo Sapiens
cuuccaucuggcugcacuccaaggcccccuc

SEQ ID NO: 252522 - RNA, 32 nt, Homo Sapiens
uccgcuguguuacuggccgccgccagggucgc

SEQ ID NO: 252523 - RNA, 32 nt, Homo Sapiens
gggucugccaggucccaccuccucuguccccc

SEQ ID NO: 252524 - RNA, 32 nt, Homo Sapiens
ugcguagagcagccuggggucccgucuagggc

SEQ ID NO: 252525 - RNA, 32 nt, Homo Sapiens
gggccgcguuggcgcgcacgcgccugagcgug

SEQ ID NO: 252526 - RNA, 32 nt, Homo Sapiens
acacagcaccacagugaauccagaccaaccuu

SEQ ID NO: 252527 - RNA, 32 nt, Homo Sapiens
uggggaagccauuucagacaagacaggagaga

SEQ ID NO: 252528 - RNA, 32 nt, Homo Sapiens
gacuauuugggaguggcgacagggaaugggag

SEQ ID NO: 252529 - RNA, 32 nt, Homo Sapiens
ccuguaugacgccugcggcugcgacucggggg

SEQ ID NO: 252530 - RNA, 32 nt, Homo Sapiens
agaacauugggaaucaugguuuguuugcauua

SEQ ID NO: 252531 - RNA, 32 nt, Homo Sapiens
acugggucuugaccccuggaauuuaagaaauu

SEQ ID NO: 252532 - RNA, 32 nt, Homo Sapiens
cucuuaggucuaaugauauuuuaugcaaacag

SEQ ID NO: 252533 - RNA, 32 nt, Homo Sapiens
uuuguaaacugggcugcuauaagguuggaguu

SEQ ID NO: 252534 - RNA, 32 nt, Homo Sapiens
uggguuuugagcgcccugcaggaagccacugg

SEQ ID NO: 252535 - RNA, 32 nt, Homo Sapiens
ggcuucccgucccucacgcgggcccgccccau

SEQ ID NO: 252536 - RNA, 32 nt, Homo Sapiens
gucuccaauucuucauauucuaaugggaaagu

SEQ ID NO: 252537 - RNA, 32 nt, Homo Sapiens
gagaguaacaauaaaguauucaugauuuuuca

SEQ ID NO: 252538 - RNA, 32 nt, Homo Sapiens
aguacuuugcauauaauaagcauucaacaaaa

SEQ ID NO: 252539 - RNA, 32 nt, Homo Sapiens
uuuuuguuguucuauuugauucuugcaucuuu

SEQ ID NO: 252540 - RNA, 32 nt, Homo Sapiens
cuccuguguguggcuggaaaacuuuuuuguuu

SEQ ID NO: 252541 - RNA, 32 nt, Homo Sapiens
gucagggacuccuggggccuggguggccccuu

SEQ ID NO: 252542 - RNA, 32 nt, Homo Sapiens
caggagacggggaucagaguuuuuacgacaau

SEQ ID NO: 252543 - RNA, 32 nt, Homo Sapiens
ggacaucaaggacaccugaggggucaggauau

SEQ ID NO: 252544 - RNA, 32 nt, Homo Sapiens
guaucgcgcccgccgcgcguccccggagccgc

SEQ ID NO: 252545 - RNA, 32 nt, Homo Sapiens
ucuuaaucuaagaaaauuauguauuuuuguca

SEQ ID NO: 252546 - RNA, 32 nt, Homo Sapiens
gcggcggcgagggcugagcgcgggagcugccu

SEQ ID NO: 252547 - RNA, 32 nt, Homo Sapiens
ccuuggacucgucuuuuucuugcaauauuuuu

SEQ ID NO: 252548 - RNA, 32 nt, Homo Sapiens
caaacggacaaagggucaaagggaugcagaga

SEQ ID NO: 252549 - RNA, 32 nt, Homo Sapiens
cauccuugugcaaagauugaugguagagagcu

SEQ ID NO: 252550 - RNA, 32 nt, Homo Sapiens
gcgguugcugucagcugauucccgggguuggu

SEQ ID NO: 252551 - RNA, 32 nt, Homo Sapiens
auuaaucacaguguauuaguauuuguuacauu

SEQ ID NO: 252552 - RNA, 32 nt, Homo Sapiens
auaaaauguaauaaaugccaaauaauguaacu

SEQ ID NO: 252553 - RNA, 32 nt, Homo Sapiens
cgggaccugccagaggagcuggccuggcucug

SEQ ID NO: 252554 - RNA, 32 nt, Homo Sapiens
acaaggucaggaguucgagaccauccugucua

SEQ ID NO: 252555 - RNA, 31 nt, Homo Sapiens
ggguauuuggggagaaaguaacuacuuuggc

SEQ ID NO: 252556 - RNA, 32 nt, Homo Sapiens
gcggauucuccuuccuccugcuacugauacca

SEQ ID NO: 252557 - RNA, 32 nt, Homo Sapiens
gugcaucuccuucuccucucugccugccuccu

SEQ ID NO: 252558 - RNA, 32 nt, Homo Sapiens
cuaauagcccaggucuuaauugccuuuagcag

SEQ ID NO: 252559 - RNA, 32 nt, Homo Sapiens
uauacucugaccagccagggccagggcagaga

SEQ ID NO: 252560 - RNA, 32 nt, Homo Sapiens
auagguaaacauuaauaggacuuuuuaaaaaa

SEQ ID NO: 252561 - RNA, 31 nt, Homo Sapiens
cuccugaagcacucucucagagcauacugcu

SEQ ID NO: 252562 - RNA, 32 nt, Homo Sapiens
ucagugugaugaagauuggcaccccagacacc

SEQ ID NO: 252563 - RNA, 32 nt, Homo Sapiens
ccuggccaagauggugaaauccugucucuaau

SEQ ID NO: 252564 - RNA, 26 nt, Homo Sapiens
caugagcagcgcagccggcccagacc

SEQ ID NO: 252565 - RNA, 31 nt, Homo Sapiens
accucucgggcuccggcuccccgcgcgcaag

SEQ ID NO: 252566 - RNA, 32 nt, Homo Sapiens
agcagguuuggcugcgcgggggccgcgcgucg

SEQ ID NO: 252567 - RNA, 32 nt, Homo Sapiens
gugcuuuccccagcaccccagagccagucggg

SEQ ID NO: 252568 - RNA, 32 nt, Homo Sapiens
cguucccacccacaccuucgacgcgacgccua

SEQ ID NO: 252569 - RNA, 32 nt, Homo Sapiens
gugcggaggagguacccccaccccuggcacag

SEQ ID NO: 252570 - RNA, 32 nt, Homo Sapiens
ucuguauacuguauccauuuucuagagaaccc

SEQ ID NO: 252571 - RNA, 32 nt, Homo Sapiens
ggaacgaaccccggcgggcccugccagacgca

SEQ ID NO: 252572 - RNA, 32 nt, Homo Sapiens
ggucgauggauuuaccccuggacccauaaguc

SEQ ID NO: 252573 - RNA, 32 nt, Homo Sapiens
acagaaacacagagaaggcuagguaugagagg

SEQ ID NO: 252574 - RNA, 32 nt, Homo Sapiens
acugcuuauauauauuugauuguaaaaacaaa

SEQ ID NO: 252575 - RNA, 32 nt, Homo Sapiens
gaaagaccaaaauuaaacuccuggaucuucac

SEQ ID NO: 252576 - RNA, 32 nt, Homo Sapiens
uuguaacauuuuaaaaauguuuugccauagcu

SEQ ID NO: 252577 - RNA, 32 nt, Homo Sapiens
ugaaucacucuuuacagaaaauguaggaaacc

SEQ ID NO: 252578 - RNA, 32 nt, Homo Sapiens
gcuuucucuucagacuuuuccuucaucaucug

SEQ ID NO: 252579 - RNA, 32 nt, Homo Sapiens
gggccgugcccccauuuuccguacauggugaa

SEQ ID NO: 252580 - RNA, 32 nt, Homo Sapiens
gaccgaguguggugggggugcuaaggccaacu

SEQ ID NO: 252581 - RNA, 32 nt, Homo Sapiens
aagaguccggccuggcuucccccaggaccgag

SEQ ID NO: 252582 - RNA, 32 nt, Homo Sapiens
cagaccacccuccugcugggaaaacugccagg

SEQ ID NO: 252583 - RNA, 32 nt, Homo Sapiens
gaggguuugugauugucaccauuuacugauga

SEQ ID NO: 252584 - RNA, 32 nt, Homo Sapiens
ugggacgcacgcggguggacgaggggaccgau

SEQ ID NO: 252585 - RNA, 32 nt, Homo Sapiens
gcgaagugcugcauuggaagaagugcuugaua

SEQ ID NO: 252586 - RNA, 28 nt, Homo Sapiens
auuguguaugucuauauguguuuaaagc

SEQ ID NO: 252587 - RNA, 32 nt, Homo Sapiens
gccgccugagccccgcucggccuugggaacac

SEQ ID NO: 252588 - RNA, 32 nt, Homo Sapiens
gggccacauuugcaugagacauggcugucuca

SEQ ID NO: 252589 - RNA, 32 nt, Homo Sapiens
gccaccugcacuuuucccucacccaccacgca

SEQ ID NO: 252590 - RNA, 32 nt, Homo Sapiens
ggggguaacuucuuggcaguuuuucaguguuc

SEQ ID NO: 252591 - RNA, 32 nt, Homo Sapiens
guuuuuacugucaauguauauugcaaggugaa

SEQ ID NO: 252592 - RNA, 32 nt, Homo Sapiens
aaacggaaaagccucuuaggcuguugucagug

SEQ ID NO: 252593 - RNA, 32 nt, Homo Sapiens
ucugcuggggacgguaguugcuuuucucucuc

SEQ ID NO: 252594 - RNA, 32 nt, Homo Sapiens
cuuagccaccgccgccgccaucgccaccaugg

SEQ ID NO: 252595 - RNA, 31 nt, Homo Sapiens
ugaacugagccccagcgggcuggcgggccuu

SEQ ID NO: 252596 - RNA, 32 nt, Homo Sapiens
ugugcuuagaaaaagaggugagaguagugguu

SEQ ID NO: 252597 - RNA, 32 nt, Homo Sapiens
gaaccccgaccuguagcaacacgccgcugccc

SEQ ID NO: 252598 - RNA, 31 nt, Homo Sapiens
uucccaaaagggcuuaaacagaauuaagguc

SEQ ID NO: 252599 - RNA, 31 nt, Homo Sapiens
cacuagcaagagguuggagggccggaagagg

SEQ ID NO: 252600 - RNA, 32 nt, Homo Sapiens
ucacacuggcccagccccucacacugccccac

SEQ ID NO: 252601 - RNA, 32 nt, Homo Sapiens
uucuugcagacaccccaccugugccccuauca

SEQ ID NO: 252602 - RNA, 32 nt, Homo Sapiens
cuagcacugauuuugaggaaaaggaggaucag

SEQ ID NO: 252603 - RNA, 32 nt, Homo Sapiens
agcaugauauugucugaugacccaaacugccc

SEQ ID NO: 252604 - RNA, 32 nt, Homo Sapiens
uguugcaaaaaauuauuguauuuuuaacuuaa

SEQ ID NO: 252605 - RNA, 32 nt, Homo Sapiens
caaauagcacgcugaauuuagggcuaugacaa

SEQ ID NO: 252606 - RNA, 32 nt, Homo Sapiens
cuaaagagggaagauaaagaggcucccaaccu

SEQ ID NO: 252607 - RNA, 32 nt, Homo Sapiens
cuuauuaagaucccucuuucuucuuuaggauu

SEQ ID NO: 252608 - RNA, 32 nt, Homo Sapiens
cuagauuuuaaaccucauuacacugaacaaga

SEQ ID NO: 252609 - RNA, 32 nt, Homo Sapiens
agggaccaguacaaacucauggccaaucagcu

SEQ ID NO: 252610 - RNA, 32 nt, Homo Sapiens
ucccucaucuucugacccuggguucugggcug

SEQ ID NO: 252611 - RNA, 32 nt, Homo Sapiens
aguccugagguccugcagccccggccccuccu

SEQ ID NO: 252612 - RNA, 32 nt, Homo Sapiens
uccccugccccccaagccagccagacccagac

SEQ ID NO: 252613 - RNA, 32 nt, Homo Sapiens
aagagucucuccagccucacagaugcuggccu

SEQ ID NO: 252614 - RNA, 32 nt, Homo Sapiens
guugcuaugaagagguagcagaugaaucucau

SEQ ID NO: 252615 - RNA, 32 nt, Homo Sapiens
gagcugggagccugggguggacaggaccauac

SEQ ID NO: 252616 - RNA, 32 nt, Homo Sapiens
auuauguagcagauguuuuucuuaaucuagca

SEQ ID NO: 252617 - RNA, 32 nt, Homo Sapiens
ggggaccuucuuccagaugccuucccaguugu

SEQ ID NO: 252618 - RNA, 32 nt, Homo Sapiens
aaaacuacuagaucauaugguauugugauuuu

SEQ ID NO: 252619 - RNA, 32 nt, Homo Sapiens
uccauuuggggauauugucauaucagcacaua

SEQ ID NO: 252620 - RNA, 31 nt, Homo Sapiens
guuguguuucaacggaaagugcugucuuaaa

SEQ ID NO: 252621 - RNA, 32 nt, Homo Sapiens
cagagguugcuguacccuucgcugaugugcug

SEQ ID NO: 252622 - RNA, 32 nt, Homo Sapiens
gccgagcuccgcugccggcccuggacacucgg

SEQ ID NO: 252623 - RNA, 32 nt, Homo Sapiens
cgcgggcugcgccuccucgccaugggcccccu

SEQ ID NO: 252624 - RNA, 32 nt, Homo Sapiens
ucugaagaagcagcauacuaagaaaaauaagg

SEQ ID NO: 252625 - RNA, 32 nt, Homo Sapiens
aauguuugaagaagggccccaugauuucauuu

SEQ ID NO: 252626 - RNA, 32 nt, Homo Sapiens
ugauuucucuaugucuaguaaguucuaaaaau

SEQ ID NO: 252627 - RNA, 32 nt, Homo Sapiens
guuuuagccuacuggaauagacagggaccaca

SEQ ID NO: 252628 - RNA, 32 nt, Homo Sapiens
cccgaccagccccuuccaacccagucaucaug

SEQ ID NO: 252629 - RNA, 32 nt, Homo Sapiens
cccauccaacuggccugcagagcugcccuuga

SEQ ID NO: 252630 - RNA, 32 nt, Homo Sapiens
aucgguccuggcuggucuuguuuauuuugucc

SEQ ID NO: 252631 - RNA, 32 nt, Homo Sapiens
cccucccaggcccuguccccagccccuccugc

SEQ ID NO: 252632 - RNA, 32 nt, Homo Sapiens
guuucuucugcgccucaggcugcuggggccuc

SEQ ID NO: 252633 - RNA, 32 nt, Homo Sapiens
cagcagccacugaacucccccaucccagggcu

SEQ ID NO: 252634 - RNA, 32 nt, Homo Sapiens
gauguggaggagcagugccaaucgggcagaag

SEQ ID NO: 252635 - RNA, 27 nt, Homo Sapiens
cacacccaccucuccagccccccgcau

SEQ ID NO: 252636 - RNA, 32 nt, Homo Sapiens
aaaauacaguguaaaacaaagugaagaacaag

SEQ ID NO: 252637 - RNA, 32 nt, Homo Sapiens
gggcaucgcucuuccucacaccacgagucuga

SEQ ID NO: 252638 - RNA, 31 nt, Homo Sapiens
uuauuucccugauuaggaaaguuucuuuaaa

SEQ ID NO: 252639 - RNA, 32 nt, Homo Sapiens
uccugaacuuuucuuucuuccaucaugcucug

SEQ ID NO: 252640 - RNA, 32 nt, Homo Sapiens
uucuguucuguguucugaaauccuggguagag

SEQ ID NO: 252641 - RNA, 32 nt, Homo Sapiens
cagugauauucucccagaauguacuuaucuua

SEQ ID NO: 252642 - RNA, 32 nt, Homo Sapiens
cucuguguucuuccccaggucccaugagcuau

SEQ ID NO: 252643 - RNA, 32 nt, Homo Sapiens
gguuauguaaaaaugaaauuuuuuagacacag

SEQ ID NO: 252644 - RNA, 32 nt, Homo Sapiens
cuuuguaccucccuccucucccucacucaugu

SEQ ID NO: 252645 - RNA, 32 nt, Homo Sapiens
guauuuuuuaaaaaaaucauguuaauaagcau

SEQ ID NO: 252646 - RNA, 32 nt, Homo Sapiens
aagcggcucgggcugcggcuggcucagagugc

SEQ ID NO: 252647 - RNA, 31 nt, Homo Sapiens
gacaugaguagcugucugggauaugucaugu

SEQ ID NO: 252648 - RNA, 32 nt, Homo Sapiens
ugauguaaaaacaaguuugaaaugcauuuugg

SEQ ID NO: 252649 - RNA, 32 nt, Homo Sapiens
aucaaagcccaguucaccuccucccccaaaca

SEQ ID NO: 252650 - RNA, 32 nt, Homo Sapiens
cacugcacuccagccugggugacaagagcgaa

SEQ ID NO: 252651 - RNA, 32 nt, Homo Sapiens
cuauuaauauuuuggucuguuuccugccaagg

SEQ ID NO: 252652 - RNA, 32 nt, Homo Sapiens
gaucaugcaguuuggaaguuuucauguacuga

SEQ ID NO: 252653 - RNA, 32 nt, Homo Sapiens
ccagccacagaaagaaacagaagagugagaag

SEQ ID NO: 252654 - RNA, 32 nt, Homo Sapiens
gagccccagggaggcggaucugggccccgaga

SEQ ID NO: 252655 - RNA, 32 nt, Homo Sapiens
cauaaauguauucagucuuuuauucuuuauaa

SEQ ID NO: 252656 - RNA, 32 nt, Homo Sapiens
ccgauggucaccugcgcccaccugggccggcg

SEQ ID NO: 252657 - RNA, 32 nt, Homo Sapiens
gggcgccccagccggccgcgaucgcgggauuu

SEQ ID NO: 252658 - RNA, 32 nt, Homo Sapiens
cuugcgcaggcugcaacccuggugugcugggc

SEQ ID NO: 252659 - RNA, 32 nt, Homo Sapiens
uguaauugaaagauuuucuauuuugccacaca

SEQ ID NO: 252660 - RNA, 32 nt, Homo Sapiens
ucaucuguaaaauggggcuuguccuauauauu

SEQ ID NO: 252661 - RNA, 32 nt, Homo Sapiens
cuccugugacaggccuucugugcccagcguuu

SEQ ID NO: 252662 - RNA, 31 nt, Homo Sapiens
ugugcacccccagcccugccccuuggccgca

SEQ ID NO: 252663 - RNA, 30 nt, Homo Sapiens
gcaccaugguuucggcggcagcccccagcc

SEQ ID NO: 252664 - RNA, 32 nt, Homo Sapiens
cccugugaccuugccucgcccucccccagugc

SEQ ID NO: 252665 - RNA, 32 nt, Homo Sapiens
aguuuacaagacaggaggaaagagagaaagca

SEQ ID NO: 252666 - RNA, 28 nt, Homo Sapiens
aagucacuacauuaacauuugaaucagu

SEQ ID NO: 252667 - RNA, 32 nt, Homo Sapiens
uaaaguccaugauuuuuguacaguguuuuuua

SEQ ID NO: 252668 - RNA, 32 nt, Homo Sapiens
acuacuacuacuacuguucaguuuuuuaaaag

SEQ ID NO: 252669 - RNA, 32 nt, Homo Sapiens
agcagguuuuccccccauauuuuaccuaaagu

SEQ ID NO: 252670 - RNA, 32 nt, Homo Sapiens
ugguugaacugggcagaaugguuuguucuauu

SEQ ID NO: 252671 - RNA, 32 nt, Homo Sapiens
uggucagugcagaggugcccccugcagauguu

SEQ ID NO: 252672 - RNA, 32 nt, Homo Sapiens
uccucugccaccuguccugcagugggccugug

SEQ ID NO: 252673 - RNA, 30 nt, Homo Sapiens
gaagcugauguuacucacaagaguaaauag

SEQ ID NO: 252674 - RNA, 32 nt, Homo Sapiens
gcuccugaccaaagacgauacagcuuggcacu

SEQ ID NO: 252675 - RNA, 31 nt, Homo Sapiens
ggugagaaggccacucucacaucugaguguu

SEQ ID NO: 252676 - RNA, 32 nt, Homo Sapiens
aaaguuuugugaaugaguuaaauaucauugau

SEQ ID NO: 252677 - RNA, 32 nt, Homo Sapiens
aacacacugaacaauagauacuguauguucuu

SEQ ID NO: 252678 - RNA, 32 nt, Homo Sapiens
ccggcccucccuggcgccccagcccagugccc

SEQ ID NO: 252679 - RNA, 32 nt, Homo Sapiens
uuuaucauuaggaaacaaaaagaauuuagaag

SEQ ID NO: 252680 - RNA, 32 nt, Homo Sapiens
gggcaagcugggccuggagccgagggcagugg

SEQ ID NO: 252681 - RNA, 32 nt, Homo Sapiens
uuuuuuuuaccagcuuuguuuacagacccaaa

SEQ ID NO: 252682 - RNA, 32 nt, Homo Sapiens
ccagaaucaagcauaaaugccagacacggcga

SEQ ID NO: 252683 - RNA, 32 nt, Homo Sapiens
gguuucaccguguuggccaggcuggucuccga

SEQ ID NO: 252684 - RNA, 32 nt, Homo Sapiens
gccaguugaaacaaaauucuaucaacauauaa

SEQ ID NO: 252685 - RNA, 32 nt, Homo Sapiens
cgcuguucgcggccuuccuggugacggagcug

SEQ ID NO: 252686 - RNA, 32 nt, Homo Sapiens
cugggagcuccguggguacucagggcuggcag

SEQ ID NO: 252687 - RNA, 31 nt, Homo Sapiens
aacugaacaaauuaccuauaacggauuugau

SEQ ID NO: 252688 - RNA, 32 nt, Homo Sapiens
gaaccaagggagaggaaggagcaagccacagu

SEQ ID NO: 252689 - RNA, 32 nt, Homo Sapiens
gccuuacagccugcccuggccgucacucccca

SEQ ID NO: 252690 - RNA, 32 nt, Homo Sapiens
acauuuuuacagucuguaagucauuugaugcu

SEQ ID NO: 252691 - RNA, 32 nt, Homo Sapiens
uugugacaacacucacagaucuaguaaguagg

SEQ ID NO: 252692 - RNA, 32 nt, Homo Sapiens
gggcagguggcucagccaguucugccucugac

SEQ ID NO: 252693 - RNA, 32 nt, Homo Sapiens
gcucugagaacaaacaaauuaagguacagcau

SEQ ID NO: 252694 - RNA, 32 nt, Homo Sapiens
aauauuaaugauauuaagcuccauucaauaag

SEQ ID NO: 252695 - RNA, 31 nt, Homo Sapiens
gacucgugggcggugucuuccccccuugcga

SEQ ID NO: 252696 - RNA, 32 nt, Homo Sapiens
acauaugcaagcgcaguggcugucugauaaga

SEQ ID NO: 252697 - RNA, 29 nt, Homo Sapiens
aaauuuaaaagcuuauauuuucuaacuug

SEQ ID NO: 252698 - RNA, 32 nt, Homo Sapiens
gcgcggggcccggcgcggccgucucggccuca

SEQ ID NO: 252699 - RNA, 30 nt, Homo Sapiens
uaacuguggggcgacgugcugaggagagag

SEQ ID NO: 252700 - RNA, 32 nt, Homo Sapiens
gugggcucgggcgggagccggcugaggcgcgg

SEQ ID NO: 252701 - RNA, 32 nt, Homo Sapiens
uaggacagcaggcccaagucugcacaucccag

SEQ ID NO: 252702 - RNA, 32 nt, Homo Sapiens
ugauacauaaaauuauuuuaagcauuuuauca

SEQ ID NO: 252703 - RNA, 32 nt, Homo Sapiens
cugguuuuaaguaguuuguuucuacuuguuua

SEQ ID NO: 252704 - RNA, 32 nt, Homo Sapiens
uugagagagaauaaagguuauguuugucuuac

SEQ ID NO: 252705 - RNA, 32 nt, Homo Sapiens
gcuauaccguagucaaaccaaugcaguauugu

SEQ ID NO: 252706 - RNA, 32 nt, Homo Sapiens
uaauaguguuuccaccucauauccuuuucuuu

SEQ ID NO: 252707 - RNA, 32 nt, Homo Sapiens
cuccucugcuucuccuuucuccgcugcuauag

SEQ ID NO: 252708 - RNA, 32 nt, Homo Sapiens
uugcuuugguauucugcuuccacaugugccag

SEQ ID NO: 252709 - RNA, 32 nt, Homo Sapiens
guggacauuuuucaucccuuaagccauagaga

SEQ ID NO: 252710 - RNA, 32 nt, Homo Sapiens
acugccaucucuagagcagaguggaggccugg

SEQ ID NO: 252711 - RNA, 32 nt, Homo Sapiens
uccccgcgggagcccccagcaugguugacuau

SEQ ID NO: 252712 - RNA, 32 nt, Homo Sapiens
ccuguccgccucugcgggaccauggaguggua

SEQ ID NO: 252713 - RNA, 32 nt, Homo Sapiens
auauaucuuuagagagaagauauuuuaaaaag

SEQ ID NO: 252714 - RNA, 32 nt, Homo Sapiens
cgccuguaaucccagcacuuugggaggacgaa

SEQ ID NO: 252715 - RNA, 32 nt, Homo Sapiens
guguuucucccucucacugucugagaguuuag

SEQ ID NO: 252716 - RNA, 32 nt, Homo Sapiens
cggagggagaggggcgggcaggaaccggggcu

SEQ ID NO: 252717 - RNA, 32 nt, Homo Sapiens
ucuagcacgaguuuuucuucuuuagauugcau

SEQ ID NO: 252718 - RNA, 32 nt, Homo Sapiens
ugcccgcccucccccacguggccccuugaccc

SEQ ID NO: 252719 - RNA, 32 nt, Homo Sapiens
aagcgcccacuggcaggagcgagggcggggcg

SEQ ID NO: 252720 - RNA, 32 nt, Homo Sapiens
gacggagguggaucggacccaaggcuggugcc

SEQ ID NO: 252721 - RNA, 32 nt, Homo Sapiens
guuuuauaugaaauaugcaaguaaaucuuauc

SEQ ID NO: 252722 - RNA, 32 nt, Homo Sapiens
cuccaccuugcucuucuuucugagaguuggcu

SEQ ID NO: 252723 - RNA, 32 nt, Homo Sapiens
ccagagucucgugugugccgaccacaggagcc

SEQ ID NO: 252724 - RNA, 32 nt, Homo Sapiens
ucuuucugcauaauguugauuauaaauccucu

SEQ ID NO: 252725 - RNA, 32 nt, Homo Sapiens
acgucugggguccuguggggcccccacaaugg

SEQ ID NO: 252726 - RNA, 32 nt, Homo Sapiens
caucuacaagguguuguggccacaucauugcu

SEQ ID NO: 252727 - RNA, 32 nt, Homo Sapiens
gccgccggggcuguaggcgccaaggccauguc

SEQ ID NO: 252728 - RNA, 32 nt, Homo Sapiens
ucauuggaugggaggaggaagaaaaaguccca

SEQ ID NO: 252729 - RNA, 32 nt, Homo Sapiens
cuaacaagugucgaguccccaaggcugggggc

SEQ ID NO: 252730 - RNA, 32 nt, Homo Sapiens
uacuuuuuugaaaaucuaguucuauguaauau

SEQ ID NO: 252731 - RNA, 32 nt, Homo Sapiens
aagaugagaagcuggaauagagcagaaaacag

SEQ ID NO: 252732 - RNA, 32 nt, Homo Sapiens
ugggugagcuggccccaccucgccugcagccu

SEQ ID NO: 252733 - RNA, 32 nt, Homo Sapiens
ucacuaggggccgccucugucaucucacuaga

SEQ ID NO: 252734 - RNA, 32 nt, Homo Sapiens
acuugcuuugaagaaucagauuucgacucggu

SEQ ID NO: 252735 - RNA, 32 nt, Homo Sapiens
uuuuaaaauucauacagaaccaaaaaagagcc

SEQ ID NO: 252736 - RNA, 27 nt, Homo Sapiens
aaaagcacuuucuucagcauucugagu

SEQ ID NO: 252737 - RNA, 32 nt, Homo Sapiens
augcuguacuuuucuucaguccuccucuccuu

SEQ ID NO: 252738 - RNA, 31 nt, Homo Sapiens
uucgcggagcgcagccgagccggccauggcg

SEQ ID NO: 252739 - RNA, 32 nt, Homo Sapiens
uuguuuuauaugcuuuuaagaauguagauugu

SEQ ID NO: 252740 - RNA, 32 nt, Homo Sapiens
ugcccuccccuucccccaccgccccgcuggcu

SEQ ID NO: 252741 - RNA, 32 nt, Homo Sapiens
gaacuuugaugaugaguuugccaaacuucagg

SEQ ID NO: 252742 - RNA, 32 nt, Homo Sapiens
cauugccaagagaauaauugcauuuuaaaccc

SEQ ID NO: 252743 - RNA, 32 nt, Homo Sapiens
gcgucugccguggacagcgaagucugcgguuc

SEQ ID NO: 252744 - RNA, 32 nt, Homo Sapiens
agggacggcucacagggcuuggaccggagaga

SEQ ID NO: 252745 - RNA, 32 nt, Homo Sapiens
uguuacuguugcacugauguccggagagacag

SEQ ID NO: 252746 - RNA, 32 nt, Homo Sapiens
agaccuaccucaaacacacuguuuccacccuc

SEQ ID NO: 252747 - RNA, 32 nt, Homo Sapiens
ccucucugcagcuccuucuccaaucucauggu

SEQ ID NO: 252748 - RNA, 32 nt, Homo Sapiens
gaguaccugcugcuguaucuuggaagaugaca

SEQ ID NO: 252749 - RNA, 32 nt, Homo Sapiens
gguggcuuauggcagauuuuuccuccuucaaa

SEQ ID NO: 252750 - RNA, 32 nt, Homo Sapiens
cagugagccaugguugcaccacuacacuguag

SEQ ID NO: 252751 - RNA, 32 nt, Homo Sapiens
gcaaguccgagggcucuuauucuuauuuaaga

SEQ ID NO: 252752 - RNA, 32 nt, Homo Sapiens
uggagggcauuuggugucauaagauggcaugu

SEQ ID NO: 252753 - RNA, 32 nt, Homo Sapiens
guggaaagaguguaaaacuuuuguccgugcgc

SEQ ID NO: 252754 - RNA, 32 nt, Homo Sapiens
uuuaguuucagcaguccucaccaccaccauau

SEQ ID NO: 252755 - RNA, 32 nt, Homo Sapiens
ccccuacccacccacacccccuugccccauuu

SEQ ID NO: 252756 - RNA, 32 nt, Homo Sapiens
ucucugcacagcuacacagcgaccccgccccc

SEQ ID NO: 252757 - RNA, 32 nt, Homo Sapiens
cuguuccauccuguuauauuugcugugaggaa

SEQ ID NO: 252758 - RNA, 32 nt, Homo Sapiens
ugggucuccccggccugagggugcucccgcag

SEQ ID NO: 252759 - RNA, 32 nt, Homo Sapiens
ucucucccauucuccgagcuuguccucagaga

SEQ ID NO: 252760 - RNA, 32 nt, Homo Sapiens
auccuaaaacaauaggguuuagguuguguguc

SEQ ID NO: 252761 - RNA, 32 nt, Homo Sapiens
uuuugccuuucuggacaggaccaauguauauc

SEQ ID NO: 252762 - RNA, 32 nt, Homo Sapiens
ccagugggcuccuggggggcccugccuugagg

SEQ ID NO: 252763 - RNA, 32 nt, Homo Sapiens
gucuuuguugaugcugaggccgggccaugggc

SEQ ID NO: 252764 - RNA, 32 nt, Homo Sapiens
cuugaagccucucuccuucucugccuacaaag

SEQ ID NO: 252765 - RNA, 32 nt, Homo Sapiens
cuggaggaaccagacgcaaacaacgcagaguu

SEQ ID NO: 252766 - RNA, 32 nt, Homo Sapiens
agaaagcggugacuucaccucauggagcccgg

SEQ ID NO: 252767 - RNA, 32 nt, Homo Sapiens
ggauggaaguugggcuggaugaucuccaaagu

SEQ ID NO: 252768 - RNA, 32 nt, Homo Sapiens
agccauaauaauaauuugcacuuauauagcac

SEQ ID NO: 252769 - RNA, 32 nt, Homo Sapiens
cgagccuccgcggagaggcaacggcgggcggc

SEQ ID NO: 252770 - RNA, 32 nt, Homo Sapiens
cuccuagggggacaaggcucucucccgagggg

SEQ ID NO: 252771 - RNA, 32 nt, Homo Sapiens
ucagcccccucccccaucucagucccucugcc

SEQ ID NO: 252772 - RNA, 32 nt, Homo Sapiens
gcuugaauauuuuuauauuucaccuccucccc

SEQ ID NO: 252773 - RNA, 32 nt, Homo Sapiens
uggauugaggcacuuuugcuuuuguguuaaau

SEQ ID NO: 252774 - RNA, 32 nt, Homo Sapiens
gagcgucugcaccuuggcugcgccgccugugc

SEQ ID NO: 252775 - RNA, 32 nt, Homo Sapiens
ggagugccaagccccaagaugcuguugucccc

SEQ ID NO: 252776 - RNA, 32 nt, Homo Sapiens
aaaagcucugcacugccauguaugaaagucuc

SEQ ID NO: 252777 - RNA, 32 nt, Homo Sapiens
uaaugggauuagaaacaaacaaaacucuuaag

SEQ ID NO: 252778 - RNA, 32 nt, Homo Sapiens
uacagaaugacgauacaaaugccaaugaccag

SEQ ID NO: 252779 - RNA, 32 nt, Homo Sapiens
caccuguucugcuguuguguccugccauucuc

SEQ ID NO: 252780 - RNA, 32 nt, Homo Sapiens
gaugaacucuuuagaacgcauuacuguuaagc

SEQ ID NO: 252781 - RNA, 32 nt, Homo Sapiens
uaucuuuuccuccuuaaauguuucauacaauu

SEQ ID NO: 252782 - RNA, 32 nt, Homo Sapiens
ugcaaagcaacagccuucauaagauuucagua

SEQ ID NO: 252783 - RNA, 32 nt, Homo Sapiens
ugcaggagccgcggcagccgccguccuugcac

SEQ ID NO: 252784 - RNA, 32 nt, Homo Sapiens
cucugcuccuuaaauccccaaaagcaccacuc

SEQ ID NO: 252785 - RNA, 32 nt, Homo Sapiens
uuucauuuucccuuuggcugaauauuucaauu

SEQ ID NO: 252786 - RNA, 32 nt, Homo Sapiens
uuugaccuuuuggcuguaguuacauauuacag

SEQ ID NO: 252787 - RNA, 32 nt, Homo Sapiens
cuuucagucuccaagcacuuugaauccauuuu

SEQ ID NO: 252788 - RNA, 32 nt, Homo Sapiens
uuuguaagggaagagcuaagugcagacaaagc

SEQ ID NO: 252789 - RNA, 32 nt, Homo Sapiens
ggcagccaguccagcucuugcuuccucuggcc

SEQ ID NO: 252790 - RNA, 32 nt, Homo Sapiens
gagcuagggcaaacagcagauauucagacuuu

SEQ ID NO: 252791 - RNA, 32 nt, Homo Sapiens
uuuguuucguuuccucugcugucuucuccaga

SEQ ID NO: 252792 - RNA, 32 nt, Homo Sapiens
guccauuguuuuuauuguccugaguugucuua

SEQ ID NO: 252793 - RNA, 32 nt, Homo Sapiens
auguuuuaaaaucuauaacauaaagaauaagg

SEQ ID NO: 252794 - RNA, 32 nt, Homo Sapiens
acagguucguaggcagaagagacuugccuugu

SEQ ID NO: 252795 - RNA, 32 nt, Homo Sapiens
agugcugggauuacaagggugagccaccaugc

SEQ ID NO: 252796 - RNA, 32 nt, Homo Sapiens
aaggaucuccucuggaagagacuaucagcggc

SEQ ID NO: 252797 - RNA, 32 nt, Homo Sapiens
auaagugaaaauaaaaugucauauucuuuucu

SEQ ID NO: 252798 - RNA, 32 nt, Homo Sapiens
uucacaguccucacugcacuaaaauuaaauug

SEQ ID NO: 252799 - RNA, 32 nt, Homo Sapiens
gcucugcguucuguaguggcgcugcuugggcc

SEQ ID NO: 252800 - RNA, 32 nt, Homo Sapiens
ugguagccaucuuugcaggaaccaugcaacuu

SEQ ID NO: 252801 - RNA, 32 nt, Homo Sapiens
gagagccugugcugugaacccccuucaauggg

SEQ ID NO: 252802 - RNA, 32 nt, Homo Sapiens
ugucgcucaagacgcuggccuaugaguuguga

SEQ ID NO: 252803 - RNA, 32 nt, Homo Sapiens
uuuccuuagacccgccaggucaaguuagccgc

SEQ ID NO: 252804 - RNA, 32 nt, Homo Sapiens
agggcagccaggggcugcucaucacccagucc

SEQ ID NO: 252805 - RNA, 32 nt, Homo Sapiens
ggcagcuccgagggcaccuccgguucuccccc

SEQ ID NO: 252806 - RNA, 32 nt, Homo Sapiens
gcggcgacugcagcugcacggcguccagcagc

SEQ ID NO: 252807 - RNA, 31 nt, Homo Sapiens
gaaauugucucugguuucagaaacuuuuccu

SEQ ID NO: 252808 - RNA, 32 nt, Homo Sapiens
ugaauguagagaugccaccucccucucucuga

SEQ ID NO: 252809 - RNA, 32 nt, Homo Sapiens
uaaauugagacauaaaauauuuuuugugaauu

SEQ ID NO: 252810 - RNA, 32 nt, Homo Sapiens
ugaugugguacaacuggaggaguuagcuacuu

SEQ ID NO: 252811 - RNA, 32 nt, Homo Sapiens
uuuuagucuucagauauuuuuguuuuggucag

SEQ ID NO: 252812 - RNA, 32 nt, Homo Sapiens
gggcagugaugaugacuucugaaacaaaauuu

SEQ ID NO: 252813 - RNA, 32 nt, Homo Sapiens
ccugcacauuguauauuuguuuaaaaauauuc

SEQ ID NO: 252814 - RNA, 32 nt, Homo Sapiens
agauguggcaggcaugucaucgacagcacaga

SEQ ID NO: 252815 - RNA, 32 nt, Homo Sapiens
ucaucuugcccagagaagagccaggauaugag

SEQ ID NO: 252816 - RNA, 32 nt, Homo Sapiens
cgugugcuccccuccaccuggacggcgagcgc

SEQ ID NO: 252817 - RNA, 32 nt, Homo Sapiens
ucaguuuuucuuuuuucuuuauuuuaaauauu

SEQ ID NO: 252818 - RNA, 32 nt, Homo Sapiens
gccgucuccgucucggugucccggccccuaca

SEQ ID NO: 252819 - RNA, 32 nt, Homo Sapiens
gccuucuuuuuucuuuccugcucagguuauuc

SEQ ID NO: 252820 - RNA, 32 nt, Homo Sapiens
caccugagcccuggggacccuuggagaaauua

SEQ ID NO: 252821 - RNA, 32 nt, Homo Sapiens
gucccagugcagagggccuggagcacggauug

SEQ ID NO: 252822 - RNA, 32 nt, Homo Sapiens
ugcagggggaccuggaacauggaugggagugg

SEQ ID NO: 252823 - RNA, 32 nt, Homo Sapiens
gucagucuacucccuucuuccuccccccaaac

SEQ ID NO: 252824 - RNA, 32 nt, Homo Sapiens
gcugagcaaccucuucagcugggaaggccgca

SEQ ID NO: 252825 - RNA, 32 nt, Homo Sapiens
uacauugguaauggaaagagcaugggaguuug

SEQ ID NO: 252826 - RNA, 32 nt, Homo Sapiens
guccgcgcgcagcucccucagcuucgcagcgc

SEQ ID NO: 252827 - RNA, 32 nt, Homo Sapiens
agcacccacugggacaggguggcugagaacca

SEQ ID NO: 252828 - RNA, 32 nt, Homo Sapiens
uauaguuauauagauaaagagauacgaauuuc

SEQ ID NO: 252829 - RNA, 32 nt, Homo Sapiens
ccccucuccuugcacccauaccucuuuguacc

SEQ ID NO: 252830 - RNA, 32 nt, Homo Sapiens
uaccuugccuauuuuuaauauuauuaaagccu

SEQ ID NO: 252831 - RNA, 32 nt, Homo Sapiens
ggcccagccuaggcccgggguggccacaccac

SEQ ID NO: 252832 - RNA, 32 nt, Homo Sapiens
ucgccacgcugcagcaggccguggucaugagc

SEQ ID NO: 252833 - RNA, 32 nt, Homo Sapiens
uccagggcacugggcugugccuggaaggcgag

SEQ ID NO: 252834 - RNA, 32 nt, Homo Sapiens
gcgcuggaacccauggacacggcguauccccg

SEQ ID NO: 252835 - RNA, 32 nt, Homo Sapiens
cugaaccccccgcuuucaaacaaguuuucaaa

SEQ ID NO: 252836 - RNA, 32 nt, Homo Sapiens
ugggaagauugugaccugccagcuucaggaug

SEQ ID NO: 252837 - RNA, 32 nt, Homo Sapiens
ccucuggacgcuguccuguguguagcacucag

SEQ ID NO: 252838 - RNA, 32 nt, Homo Sapiens
auugccuccacuuuucugcaccccccugcucc

SEQ ID NO: 252839 - RNA, 32 nt, Homo Sapiens
ggagaaggggagagacaggucgcccagagagu

SEQ ID NO: 252840 - RNA, 29 nt, Homo Sapiens
uggacuuggagacagaggggccucuuggc

SEQ ID NO: 252841 - RNA, 32 nt, Homo Sapiens
aguuccuaugacugagucuccaaacugguuuc

SEQ ID NO: 252842 - RNA, 32 nt, Homo Sapiens
ccugacgccucccagucaucaucuccagaacu

SEQ ID NO: 252843 - RNA, 32 nt, Homo Sapiens
uugcagugucucuaaaggaggcaaauugguuu

SEQ ID NO: 252844 - RNA, 32 nt, Homo Sapiens
aaaagcuccacccaaugacuucugcuuccauc

SEQ ID NO: 252845 - RNA, 32 nt, Homo Sapiens
agaguacugggauuacaggcucuuucuuuuua

SEQ ID NO: 252846 - RNA, 32 nt, Homo Sapiens
gagugagucuuagcauuuaaguuauacaguug

SEQ ID NO: 252847 - RNA, 32 nt, Homo Sapiens
uuauuuucacuuuaauugcuguuaucaugggc

SEQ ID NO: 252848 - RNA, 32 nt, Homo Sapiens
uacuauuauuuuucacuuauaagugggaguua

SEQ ID NO: 252849 - RNA, 32 nt, Homo Sapiens
aaaaauacauauauuuuuacuauaguaugaga

SEQ ID NO: 252850 - RNA, 32 nt, Homo Sapiens
uuucaauauaaaaucaguauaaaaagugugaa

SEQ ID NO: 252851 - RNA, 32 nt, Homo Sapiens
ugucaaucagagccccgugucuggagucacug

SEQ ID NO: 252852 - RNA, 32 nt, Homo Sapiens
acaucgugaacaguuugcagugggcuaugguu

SEQ ID NO: 252853 - RNA, 31 nt, Homo Sapiens
ccucuuggcgcgacgcugccccgcgaggagg

SEQ ID NO: 252854 - RNA, 32 nt, Homo Sapiens
gaguuccgauuuguccaguccaaacuggguua

SEQ ID NO: 252855 - RNA, 32 nt, Homo Sapiens
gcuccggaagcagacacaggccaggccugggc

SEQ ID NO: 252856 - RNA, 32 nt, Homo Sapiens
gcuuacagccugcaagagcaucagagcugacc

SEQ ID NO: 252857 - RNA, 31 nt, Homo Sapiens
acuuagagucugugaaaacaggcaaggagcc

SEQ ID NO: 252858 - RNA, 32 nt, Homo Sapiens
aaucuguuuuguagaaacaggaucucacuaua

SEQ ID NO: 252859 - RNA, 32 nt, Homo Sapiens
cuuuggaggcgaggacccgagcgaguguaggg

SEQ ID NO: 252860 - RNA, 32 nt, Homo Sapiens
cccggguggcgguggcagcugcgaaacccagg

SEQ ID NO: 252861 - RNA, 32 nt, Homo Sapiens
cucacacugaccaagggccugugcugcccacu

SEQ ID NO: 252862 - RNA, 32 nt, Homo Sapiens
uuauucggcggcccgcggcggaccauggcccu

SEQ ID NO: 252863 - RNA, 32 nt, Homo Sapiens
cucuagggcugcucgcugcugcuguggccugc

SEQ ID NO: 252864 - RNA, 32 nt, Homo Sapiens
ccugcaggcuccaugcaccucccuucccuccc

SEQ ID NO: 252865 - RNA, 32 nt, Homo Sapiens
uguguaaaucauacaggauuuuguggguauug

SEQ ID NO: 252866 - RNA, 29 nt, Homo Sapiens
ugggaagggagacagaggcggcggcggcu

SEQ ID NO: 252867 - RNA, 32 nt, Homo Sapiens
cuuuauuuucgcugaaggaacuguguugggac

SEQ ID NO: 252868 - RNA, 32 nt, Homo Sapiens
cuugggacaaugaggaaaauuauauuucacug

SEQ ID NO: 252869 - RNA, 32 nt, Homo Sapiens
gcugacuuucacuuauacaguacauuucuaua

SEQ ID NO: 252870 - RNA, 32 nt, Homo Sapiens
ugugagugacagagccuggaucugaacgcuga

SEQ ID NO: 252871 - RNA, 32 nt, Homo Sapiens
uccaaggcacugaaucccaagcccuuaauccc

SEQ ID NO: 252872 - RNA, 30 nt, Homo Sapiens
accacaagguucgagccgccgggcccgaca

SEQ ID NO: 252873 - RNA, 32 nt, Homo Sapiens
acugauccuggagaucgagaccauccuggcua

SEQ ID NO: 252874 - RNA, 32 nt, Homo Sapiens
cuuccccacugggugugcuggugcuggcgcug

SEQ ID NO: 252875 - RNA, 32 nt, Homo Sapiens
cagaagguauaccugggaagauaccagcuuuu

SEQ ID NO: 252876 - RNA, 32 nt, Homo Sapiens
gugugucuugugcugcagagggaagcaccugg

SEQ ID NO: 252877 - RNA, 32 nt, Homo Sapiens
cucuugggucccuuuuucaagcugauuuccug

SEQ ID NO: 252878 - RNA, 32 nt, Homo Sapiens
augggccaaaaaugacgcuuguccagcaguuu

SEQ ID NO: 252879 - RNA, 32 nt, Homo Sapiens
uucuagcaugugaagcacuugggggcagcagg

SEQ ID NO: 252880 - RNA, 32 nt, Homo Sapiens
ggcagccguccggggccgccacucuccucggc

SEQ ID NO: 252881 - RNA, 32 nt, Homo Sapiens
cgccaggagacggaccgcaaguccagcguacc

SEQ ID NO: 252882 - RNA, 32 nt, Homo Sapiens
cauugggggaaaaaugucuuucguucguggaa

SEQ ID NO: 252883 - RNA, 32 nt, Homo Sapiens
gcaccugcccagccccaccucagcccaucuug

SEQ ID NO: 252884 - RNA, 32 nt, Homo Sapiens
auagggccgacccaagacaucugcucaugaag

SEQ ID NO: 252885 - RNA, 32 nt, Homo Sapiens
gccagaugcuuggccuggugggaccagggcuc

SEQ ID NO: 252886 - RNA, 32 nt, Homo Sapiens
gugccuguagaugacauggugaaaauauuuga

SEQ ID NO: 252887 - RNA, 29 nt, Homo Sapiens
gauggaaauguguuccugccggagucuga

SEQ ID NO: 252888 - RNA, 32 nt, Homo Sapiens
ucgcaggagagcagagcagagaacugugggga

SEQ ID NO: 252889 - RNA, 32 nt, Homo Sapiens
gcugauauacgaugauaauaacugcauuucgu

SEQ ID NO: 252890 - RNA, 32 nt, Homo Sapiens
cggccagcaggaagaaacucagagggaacuga

SEQ ID NO: 252891 - RNA, 32 nt, Homo Sapiens
cacuguggaagacagugcggugauuccucaag

SEQ ID NO: 252892 - RNA, 32 nt, Homo Sapiens
gaaauaaagcuacuacauauauaugccaguau

SEQ ID NO: 252893 - RNA, 32 nt, Homo Sapiens
cuuuggacagauuuaaagacuaggcacagcca

SEQ ID NO: 252894 - RNA, 32 nt, Homo Sapiens
gugacggagcggcggugcgcgcggcagggccc

SEQ ID NO: 252895 - RNA, 32 nt, Homo Sapiens
ccugcguacauggcugcccuguguguuccagu

SEQ ID NO: 252896 - RNA, 32 nt, Homo Sapiens
agccaaagaaaauaaaccuuaggagggagaag

SEQ ID NO: 252897 - RNA, 32 nt, Homo Sapiens
uccccaccugguacaugauacaugaccccagg

SEQ ID NO: 252898 - RNA, 32 nt, Homo Sapiens
cccacaaaaaucagcacuccuuuauggauaca

SEQ ID NO: 252899 - RNA, 32 nt, Homo Sapiens
ucgguuucaugucccgccaggcgaaggaugac

SEQ ID NO: 252900 - RNA, 32 nt, Homo Sapiens
ugggacucaauuguauuuuuuauuucagucac

SEQ ID NO: 252901 - RNA, 32 nt, Homo Sapiens
cucacacuuuugcuugaauuuaauacagacau

SEQ ID NO: 252902 - RNA, 32 nt, Homo Sapiens
ugcuugggccuggcccaguggcggguccuagg

SEQ ID NO: 252903 - RNA, 32 nt, Homo Sapiens
cacaaaagugcagacuuauauuugagaauuaa

SEQ ID NO: 252904 - RNA, 32 nt, Homo Sapiens
cagcuucuguuucuccuucuaucaaggcuuca

SEQ ID NO: 252905 - RNA, 32 nt, Homo Sapiens
acaugggauaaauuguuggaaaaaauacccag

SEQ ID NO: 252906 - RNA, 32 nt, Homo Sapiens
cccagaauuuuguuccaccaugguuaguuauu

SEQ ID NO: 252907 - RNA, 32 nt, Homo Sapiens
acucaaguguuugguacaaggaucuacuauga

SEQ ID NO: 252908 - RNA, 32 nt, Homo Sapiens
cucugucgccgggaacuggcgagguaguuccu

SEQ ID NO: 252909 - RNA, 32 nt, Homo Sapiens
gaggcugugaccuguuagauaauuagauuaua

SEQ ID NO: 252910 - RNA, 32 nt, Homo Sapiens
acacaugggugggaagguggacaggcuaaccu

SEQ ID NO: 252911 - RNA, 32 nt, Homo Sapiens
gagugggacacugcaacccagcccagacccaa

SEQ ID NO: 252912 - RNA, 32 nt, Homo Sapiens
gcucauacagcuuugaagcagcagcaggagcc

SEQ ID NO: 252913 - RNA, 32 nt, Homo Sapiens
uuuuuguuuuugcugcaauugcuuauguuauc

SEQ ID NO: 252914 - RNA, 32 nt, Homo Sapiens
uagaucuugccagcuaaagacuugugauacca

SEQ ID NO: 252915 - RNA, 32 nt, Homo Sapiens
cucugugcagcugccgcccgggcuugcgcugg

SEQ ID NO: 252916 - RNA, 32 nt, Homo Sapiens
ucggcugcccgcgccggccucucaguugggaa

SEQ ID NO: 252917 - RNA, 32 nt, Homo Sapiens
gagaagaagcauaugaggcaugguauuuuagg

SEQ ID NO: 252918 - RNA, 32 nt, Homo Sapiens
ggcugcaccagugggaguggcuccacccuucc

SEQ ID NO: 252919 - RNA, 32 nt, Homo Sapiens
ggagacgcucgagucugcgucccggcccucag

SEQ ID NO: 252920 - RNA, 32 nt, Homo Sapiens
acacccagccgucauuggaguuuuuuugaggg

SEQ ID NO: 252921 - RNA, 32 nt, Homo Sapiens
cgccccugcccuaccccagagcccuggagcag

SEQ ID NO: 252922 - RNA, 32 nt, Homo Sapiens
gggucgcggacgcucgccgccggccauagcuc

SEQ ID NO: 252923 - RNA, 32 nt, Homo Sapiens
cacaugacagaaggacuggaaugccaugaacu

SEQ ID NO: 252924 - RNA, 32 nt, Homo Sapiens
uuuucacuuaggagaucagcauuugcccugau

SEQ ID NO: 252925 - RNA, 32 nt, Homo Sapiens
ucucuuaauguaacuacuaaaggagagguaga

SEQ ID NO: 252926 - RNA, 32 nt, Homo Sapiens
aucaccuguccuuccuggaaucucuaaaguuu

SEQ ID NO: 252927 - RNA, 32 nt, Homo Sapiens
acaguaaggaguuuuucuauauuuucacaguu

SEQ ID NO: 252928 - RNA, 31 nt, Homo Sapiens
gcaaguggaguacagaaccaggagccucuuc

SEQ ID NO: 252929 - RNA, 32 nt, Homo Sapiens
gggagcgacgacgugcaagaccaagagaccca

SEQ ID NO: 252930 - RNA, 32 nt, Homo Sapiens
auauaugcaguguggugcacauuuucacagaa

SEQ ID NO: 252931 - RNA, 32 nt, Homo Sapiens
ccagaucguuucccaaguuuggcgauuugcug

SEQ ID NO: 252932 - RNA, 32 nt, Homo Sapiens
caccucacccgccgcugccaccaucuccucug

SEQ ID NO: 252933 - RNA, 32 nt, Homo Sapiens
aauuuuuguaaugguucuuaauaauuuuugua

SEQ ID NO: 252934 - RNA, 32 nt, Homo Sapiens
ggccgggagcugcgggcgcccgggcgcccgag

SEQ ID NO: 252935 - RNA, 32 nt, Homo Sapiens
cucugugaugugauagcuuauauccuagggag

SEQ ID NO: 252936 - RNA, 32 nt, Homo Sapiens
uguguacaguguuaaucugauuuuauaaaucu

SEQ ID NO: 252937 - RNA, 32 nt, Homo Sapiens
ccagggugaugacagaguugccaggcacuuug

SEQ ID NO: 252938 - RNA, 32 nt, Homo Sapiens
auggggcugcugcugcugcugcucccaggcug

SEQ ID NO: 252939 - RNA, 32 nt, Homo Sapiens
gagcgccgcggggagcgccgcgggaagcgcau

SEQ ID NO: 252940 - RNA, 32 nt, Homo Sapiens
uucaguauguuggcauuacuuggaccugguuu

SEQ ID NO: 252941 - RNA, 32 nt, Homo Sapiens
acccuagggaccagaaggagccaggaguaaag

SEQ ID NO: 252942 - RNA, 32 nt, Homo Sapiens
ggucaugcuggcugucuggggucugcauuuuc

SEQ ID NO: 252943 - RNA, 32 nt, Homo Sapiens
guagguggauuucaggaccaugggccugugcu

SEQ ID NO: 252944 - RNA, 32 nt, Homo Sapiens
uacuaaaguauuuuuaaaaaucaaggaagaaa

SEQ ID NO: 252945 - RNA, 32 nt, Homo Sapiens
guggcaccuggaaugccagugaaacagaaccg

SEQ ID NO: 252946 - RNA, 32 nt, Homo Sapiens
ugcagauucucaggaccaaaaugugggugauu

SEQ ID NO: 252947 - RNA, 32 nt, Homo Sapiens
ggaaaucucuuucuccucccccgccccuccgc

SEQ ID NO: 252948 - RNA, 32 nt, Homo Sapiens
uuuaccccaauuuccuuauuuguuuuuaaacc

SEQ ID NO: 252949 - RNA, 32 nt, Homo Sapiens
gguuucccugggccucaguccuccccacccuc

SEQ ID NO: 252950 - RNA, 32 nt, Homo Sapiens
cggcccggcggggcgauggaggcgcugcucuc

SEQ ID NO: 252951 - RNA, 32 nt, Homo Sapiens
acuaggaguucacguggggcuuguuuaaacag

SEQ ID NO: 252952 - RNA, 32 nt, Homo Sapiens
gggcaccccccuccgcgccugcgcugugcccc

SEQ ID NO: 252953 - RNA, 32 nt, Homo Sapiens
uccuucaggacagcugcugugcauuagauauu

SEQ ID NO: 252954 - RNA, 32 nt, Homo Sapiens
agagccuggggguggggggacugccuugucuc

SEQ ID NO: 252955 - RNA, 32 nt, Homo Sapiens
gggcgaggagaggcaggggugugugccccggu

SEQ ID NO: 252956 - RNA, 32 nt, Homo Sapiens
agcugaauuccccuucacggaccugaagccua

SEQ ID NO: 252957 - RNA, 32 nt, Homo Sapiens
cguggcggggaaauggcugugcggugcgggac

SEQ ID NO: 252958 - RNA, 30 nt, Homo Sapiens
cuaacucccugugcugcaguuucuuuaugu

SEQ ID NO: 252959 - RNA, 32 nt, Homo Sapiens
uaaacauuguucuuauuuuaaaauuaacacua

SEQ ID NO: 252960 - RNA, 32 nt, Homo Sapiens
gcuggaagaugguggccagcucugccagggca

SEQ ID NO: 252961 - RNA, 32 nt, Homo Sapiens
uuugaccuggcugccuggcccaggagcaguga

SEQ ID NO: 252962 - RNA, 32 nt, Homo Sapiens
cuguuagcuggguuuacaugugauguuuuagu

SEQ ID NO: 252963 - RNA, 32 nt, Homo Sapiens
gggcggcgacuacgacggcguugauaucggug

SEQ ID NO: 252964 - RNA, 32 nt, Homo Sapiens
cugaaauaaaagacaucuccuaaaaaaaaaaa

SEQ ID NO: 252965 - RNA, 32 nt, Homo Sapiens
cauauauauguauuuuuaaauaguauugcugc

SEQ ID NO: 252966 - RNA, 32 nt, Homo Sapiens
uagucugagggaaaugucuuuauuguccauua

SEQ ID NO: 252967 - RNA, 28 nt, Homo Sapiens
cgaauggagggcaugaggaugaccuuug

SEQ ID NO: 252968 - RNA, 32 nt, Homo Sapiens
auguggagcucuucuuuuaguggauuaucuau

SEQ ID NO: 252969 - RNA, 32 nt, Homo Sapiens
agcugggcgaguaucuggaggagcuggaucag

SEQ ID NO: 252970 - RNA, 32 nt, Homo Sapiens
ccaguggcgccucagcucugcggugccgaggc

SEQ ID NO: 252971 - RNA, 32 nt, Homo Sapiens
cuuaucaaaagugauugugaaaacagugucuu

SEQ ID NO: 252972 - RNA, 32 nt, Homo Sapiens
uaugauaguauuuggaaaucaggccuuuggga

SEQ ID NO: 252973 - RNA, 32 nt, Homo Sapiens
gcccgcaggagcucagagcaucgcugggccug

SEQ ID NO: 252974 - RNA, 32 nt, Homo Sapiens
ggcuacuccugcccagcgugguggggcagcag

SEQ ID NO: 252975 - RNA, 32 nt, Homo Sapiens
ucagaacuucggggguguggaggaggugcggc

SEQ ID NO: 252976 - RNA, 32 nt, Homo Sapiens
gcccauccgagcucagcacuggaaguguuagu

SEQ ID NO: 252977 - RNA, 32 nt, Homo Sapiens
cuucagcucccucugaagccugggacucccac

SEQ ID NO: 252978 - RNA, 32 nt, Homo Sapiens
auucaucaggacuuguauuagcagguucuggc

SEQ ID NO: 252979 - RNA, 32 nt, Homo Sapiens
guacccaucacuguuggucuacacccaguuug

SEQ ID NO: 252980 - RNA, 30 nt, Homo Sapiens
gcuccuggaggcggcggcgggagcgcaggg

SEQ ID NO: 252981 - RNA, 32 nt, Homo Sapiens
acgcggccauggccgagcucccggggcccuuu

SEQ ID NO: 252982 - RNA, 32 nt, Homo Sapiens
accacagaaaucaccugagugucaauugaaaa

SEQ ID NO: 252983 - RNA, 32 nt, Homo Sapiens
acucggccaagggcgacagccaacugcuguga

SEQ ID NO: 252984 - RNA, 32 nt, Homo Sapiens
uaagggaugcucaggucagacuggccucuucu

SEQ ID NO: 252985 - RNA, 32 nt, Homo Sapiens
gcaccagcccgggccgcgcccgggaccucauu

SEQ ID NO: 252986 - RNA, 32 nt, Homo Sapiens
agaacgcugccucuccucuggauuggucucag

SEQ ID NO: 252987 - RNA, 32 nt, Homo Sapiens
guggaagauucuguuuuccuguggggaaaaug

SEQ ID NO: 252988 - RNA, 32 nt, Homo Sapiens
ugauauuaaucagacuaauuucgaacuaaaga

SEQ ID NO: 252989 - RNA, 32 nt, Homo Sapiens
uccguugggugguguucgggcggccgccaggc

SEQ ID NO: 252990 - RNA, 28 nt, Homo Sapiens
aagauggcggcgguggcuggaucugggg

SEQ ID NO: 252991 - RNA, 32 nt, Homo Sapiens
acccauuuuaaaaaaccauuugaaaguagaca

SEQ ID NO: 252992 - RNA, 32 nt, Homo Sapiens
accuaaaagaguagucuuaacacauuacuaac

SEQ ID NO: 252993 - RNA, 32 nt, Homo Sapiens
uuacuggaggcuauuuaaauaaaauguaagac

SEQ ID NO: 252994 - RNA, 32 nt, Homo Sapiens
uucuccucccccagaaaggaccucaaccacac

SEQ ID NO: 252995 - RNA, 32 nt, Homo Sapiens
uacagcggccccaagggcagcuacuucggcua

SEQ ID NO: 252996 - RNA, 32 nt, Homo Sapiens
ccgcccgcgccgcgaccggccggugaagccca

SEQ ID NO: 252997 - RNA, 32 nt, Homo Sapiens
ucuagaacuuugccuuuuuuuuuuuuuuuuuu

SEQ ID NO: 252998 - RNA, 32 nt, Homo Sapiens
agucacccuaaaaugcuucacaugguuaaaaa

SEQ ID NO: 252999 - RNA, 32 nt, Homo Sapiens
ggccaagagccggagaaaguccugcugguggg

SEQ ID NO: 253000 - RNA, 32 nt, Homo Sapiens
uguccaacagcucauuggcucccuuuguauga

SEQ ID NO: 253001 - RNA, 32 nt, Homo Sapiens
gccaagagggugggagguggggggcauuuaga

SEQ ID NO: 253002 - RNA, 32 nt, Homo Sapiens
gggguugggggcgggcggggagcugccucggg

SEQ ID NO: 253003 - RNA, 32 nt, Homo Sapiens
gaccgguguucgcaucgcuggcucgccccuug

SEQ ID NO: 253004 - RNA, 32 nt, Homo Sapiens
aagcagagggcaucuuuuucucuccuacaguc

SEQ ID NO: 253005 - RNA, 32 nt, Homo Sapiens
uuugccaucaaauaaacugaguacugacacca

SEQ ID NO: 253006 - RNA, 32 nt, Homo Sapiens
gccagagggucucaggaaggucuggaggucac

SEQ ID NO: 253007 - RNA, 32 nt, Homo Sapiens
guccacggguggcaggaauucagaggcuggcc

SEQ ID NO: 253008 - RNA, 32 nt, Homo Sapiens
aggcuuugaucaccuuuaaaguaaauucccug

SEQ ID NO: 253009 - RNA, 32 nt, Homo Sapiens
aggaacucuacacuucucuccuccacucugag

SEQ ID NO: 253010 - RNA, 32 nt, Homo Sapiens
aagacuucaaggaacuaagguacaauaagugu

SEQ ID NO: 253011 - RNA, 32 nt, Homo Sapiens
guacuucagguggaauucguccuuuucaucuu

SEQ ID NO: 253012 - RNA, 32 nt, Homo Sapiens
uuuagaagcuuuaugaaacaauguccuucauu

SEQ ID NO: 253013 - RNA, 32 nt, Homo Sapiens
ugaaacuucuauuugugugaauauauucaaau

SEQ ID NO: 253014 - RNA, 32 nt, Homo Sapiens
cuggcccgccgggaccugggacuugugccaca

SEQ ID NO: 253015 - RNA, 32 nt, Homo Sapiens
ccagaaacaaaguugagagaacuccaugcugg

SEQ ID NO: 253016 - RNA, 32 nt, Homo Sapiens
gaggaagccggggcucuuucuuucuguaacuc

SEQ ID NO: 253017 - RNA, 32 nt, Homo Sapiens
gaucgagaagcccacacugccagugaaaaagc

SEQ ID NO: 253018 - RNA, 32 nt, Homo Sapiens
cuuuguuaacugugucauuacagcaaaauacu

SEQ ID NO: 253019 - RNA, 32 nt, Homo Sapiens
cccucucaggugggcuuuuucucauggagauc

SEQ ID NO: 253020 - RNA, 32 nt, Homo Sapiens
gggccgcgaugagcuuccugagccgacagcag

SEQ ID NO: 253021 - RNA, 32 nt, Homo Sapiens
cauaucguccugaauacacacacacacacaca

SEQ ID NO: 253022 - RNA, 32 nt, Homo Sapiens
guacaaucaagugggggauuuucaugcugaac

SEQ ID NO: 253023 - RNA, 32 nt, Homo Sapiens
cccuggaaaaggaguucgcuggccauuggcua

SEQ ID NO: 253024 - RNA, 32 nt, Homo Sapiens
acaguuugauaaagguggcauuacauuuugaa

SEQ ID NO: 253025 - RNA, 32 nt, Homo Sapiens
acaccucgaaauaaaaaaugugaauacugcuc

SEQ ID NO: 253026 - RNA, 32 nt, Homo Sapiens
acccuggcucugcggcuuuguccaguucaaaa

SEQ ID NO: 253027 - RNA, 32 nt, Homo Sapiens
gaggggccgugcggccggacguccucggggug

SEQ ID NO: 253028 - RNA, 30 nt, Homo Sapiens
cgagaagauggcggcggcgggggaagcagc

SEQ ID NO: 253029 - RNA, 32 nt, Homo Sapiens
uccucuuggucccagggcggggcagggaauuc

SEQ ID NO: 253030 - RNA, 32 nt, Homo Sapiens
cggcugucguccccggccgacagggcuggacg

SEQ ID NO: 253031 - RNA, 32 nt, Homo Sapiens
cauuuggacccauaguuuauuuauagagagca

SEQ ID NO: 253032 - RNA, 32 nt, Homo Sapiens
cuccugaagcucccuccuccacggagagcgcu

SEQ ID NO: 253033 - RNA, 32 nt, Homo Sapiens
ccaccaagcucauacagggaaccacacccaac

SEQ ID NO: 253034 - RNA, 32 nt, Homo Sapiens
ccacagggccucuucccuguaggccuguucac

SEQ ID NO: 253035 - RNA, 32 nt, Homo Sapiens
ccgaggcgggcagaugucuugagaucaggagu

SEQ ID NO: 253036 - RNA, 32 nt, Homo Sapiens
auaauacacuuuccuuguuuuacgucaacauu

SEQ ID NO: 253037 - RNA, 32 nt, Homo Sapiens
caagugcuguuuugaagugcagauuuccauua

SEQ ID NO: 253038 - RNA, 32 nt, Homo Sapiens
gaaguuccaauuuuucagugcuuuacaaauaa

SEQ ID NO: 253039 - RNA, 32 nt, Homo Sapiens
guguaauuuuuggcaaguugcuuucuuugccu

SEQ ID NO: 253040 - RNA, 32 nt, Homo Sapiens
ucagccggacauuuuaauuugaaccauguauc

SEQ ID NO: 253041 - RNA, 32 nt, Homo Sapiens
gggauuggaugguuuaucacuucuuucuuucu

SEQ ID NO: 253042 - RNA, 32 nt, Homo Sapiens
cagcaguaaaagacucauuggaagaaugcgaa

SEQ ID NO: 253043 - RNA, 32 nt, Homo Sapiens
caggccccuggugugaggucuuucuuuugcuu

SEQ ID NO: 253044 - RNA, 32 nt, Homo Sapiens
guuuuuuguuuuuuuuuuuuuaagacaaaguu

SEQ ID NO: 253045 - RNA, 29 nt, Homo Sapiens
gcagucuaaaguuuguuuuaaauucuaaa

SEQ ID NO: 253046 - RNA, 32 nt, Homo Sapiens
ucagagaacuuccccuaccucccccauggcug

SEQ ID NO: 253047 - RNA, 27 nt, Homo Sapiens
ugccuguccuucuacucagcuguuacc

SEQ ID NO: 253048 - RNA, 32 nt, Homo Sapiens
uguggagcagugcccaucccagcccguuucug

SEQ ID NO: 253049 - RNA, 32 nt, Homo Sapiens
cccauccaccgccagcuucccuucacuccccu

SEQ ID NO: 253050 - RNA, 32 nt, Homo Sapiens
acagagaugauuaacauggccccuaccugacg

SEQ ID NO: 253051 - RNA, 32 nt, Homo Sapiens
aaccuuggcaaaauaaacuuucuaaauuaacu

SEQ ID NO: 253052 - RNA, 32 nt, Homo Sapiens
agucugucucaaagcucuauauguuuacauau

SEQ ID NO: 253053 - RNA, 32 nt, Homo Sapiens
ucagcaccugcggucgcaaaccaaccucaugc

SEQ ID NO: 253054 - RNA, 32 nt, Homo Sapiens
gggcuccaggccuuggcuggccccacaucgcc

SEQ ID NO: 253055 - RNA, 32 nt, Homo Sapiens
aauucuccugccucggccuccuuuaguaggug

SEQ ID NO: 253056 - RNA, 32 nt, Homo Sapiens
uauccaucuguuuauuucuauaccuuucaaua

SEQ ID NO: 253057 - RNA, 32 nt, Homo Sapiens
uucuauuuauucugucuuucuccucccacacu

SEQ ID NO: 253058 - RNA, 32 nt, Homo Sapiens
uugaaugagggccggaggccaugaugaaaagg

SEQ ID NO: 253059 - RNA, 32 nt, Homo Sapiens
cguuggcacaugccaccuggcaaaggacccuu

SEQ ID NO: 253060 - RNA, 32 nt, Homo Sapiens
acccuuggcuucuccuucuccuacucccuguc

SEQ ID NO: 253061 - RNA, 32 nt, Homo Sapiens
uuccuuccucucacucggccucauggaggggc

SEQ ID NO: 253062 - RNA, 32 nt, Homo Sapiens
acugaaugaaagacaucagaugcaaaagguca

SEQ ID NO: 253063 - RNA, 31 nt, Homo Sapiens
uuuauuugaaacacuuuucuggcucuguuag

SEQ ID NO: 253064 - RNA, 32 nt, Homo Sapiens
cccaaccccuaccaccugagaaaaacgaucuu

SEQ ID NO: 253065 - RNA, 32 nt, Homo Sapiens
gcagaaaaguuccugagggcggaaaaguugca

SEQ ID NO: 253066 - RNA, 30 nt, Homo Sapiens
gaagagcugagaguuucugagucugugagc

SEQ ID NO: 253067 - RNA, 32 nt, Homo Sapiens
gggaaugcuggguagaagcuguuuuaauuccc

SEQ ID NO: 253068 - RNA, 32 nt, Homo Sapiens
cuccaaagaugaugauggguuguggggaguca

SEQ ID NO: 253069 - RNA, 32 nt, Homo Sapiens
ucucgggcggggguguugcgguggcucugagg

SEQ ID NO: 253070 - RNA, 32 nt, Homo Sapiens
guugggggaagggacauuaagaauaauucuca

SEQ ID NO: 253071 - RNA, 32 nt, Homo Sapiens
ugcagagggcgcaucccgccucuuccuccgcc

SEQ ID NO: 253072 - RNA, 32 nt, Homo Sapiens
cgcgcuccccugggcgccccacggcagccuca

SEQ ID NO: 253073 - RNA, 32 nt, Homo Sapiens
gaugccuggguugcaggcccugcuuguggugg

SEQ ID NO: 253074 - RNA, 32 nt, Homo Sapiens
auguuuuguucaaaguuguaguucuugugcau

SEQ ID NO: 253075 - RNA, 32 nt, Homo Sapiens
cuggcccugccagcugccugcgucguugggcc

SEQ ID NO: 253076 - RNA, 32 nt, Homo Sapiens
aaaaagugguuuugaccagagaggcccagaug

SEQ ID NO: 253077 - RNA, 32 nt, Homo Sapiens
auacaaaacacacacacacacacacacacaca

SEQ ID NO: 253078 - RNA, 32 nt, Homo Sapiens
ugccagagcagcucaggguggagcagcugcag

SEQ ID NO: 253079 - RNA, 32 nt, Homo Sapiens
gaguccacaucccagacagcucacugcagaca

SEQ ID NO: 253080 - RNA, 32 nt, Homo Sapiens
agcugagauugugccacuguacuccauccugg

SEQ ID NO: 253081 - RNA, 32 nt, Homo Sapiens
ccuggaauauuuuugcccuuuauccuucaagg

SEQ ID NO: 253082 - RNA, 32 nt, Homo Sapiens
ggguggccagcaggcuggcagcuccagacccc

SEQ ID NO: 253083 - RNA, 32 nt, Homo Sapiens
cguggaauccuccagauccccuggaccugaga

SEQ ID NO: 253084 - RNA, 32 nt, Homo Sapiens
auacuuagcaguuggggauuaaaccauccuug

SEQ ID NO: 253085 - RNA, 32 nt, Homo Sapiens
cauguacauggucugcucucauuuauucauuc

SEQ ID NO: 253086 - RNA, 32 nt, Homo Sapiens
cucagcuccgcggucguccuccaggucugugc

SEQ ID NO: 253087 - RNA, 32 nt, Homo Sapiens
guucaauacuacuacuguugucaccauuuaug

SEQ ID NO: 253088 - RNA, 32 nt, Homo Sapiens
cuggagaagaggaaaaggaagaagcuauuuca

SEQ ID NO: 253089 - RNA, 32 nt, Homo Sapiens
guccuccccuccccacccucacccaccugcca

SEQ ID NO: 253090 - RNA, 32 nt, Homo Sapiens
gguuguaaaaauuuuugaggcagaagcugagg

SEQ ID NO: 253091 - RNA, 32 nt, Homo Sapiens
cacuuguccccccacacccguccaccugccca

SEQ ID NO: 253092 - RNA, 32 nt, Homo Sapiens
gucccacagcucuggaggcuggaagccaagau

SEQ ID NO: 253093 - RNA, 32 nt, Homo Sapiens
agugcacaaaaaugugguuguagauguugcuc

SEQ ID NO: 253094 - RNA, 32 nt, Homo Sapiens
augggagcugucugggauguugauccuugaga

SEQ ID NO: 253095 - RNA, 32 nt, Homo Sapiens
agggaaguugaccggcaucccagaugugggga

SEQ ID NO: 253096 - RNA, 32 nt, Homo Sapiens
guauauguacugcauuugcuuuauccagucua

SEQ ID NO: 253097 - RNA, 32 nt, Homo Sapiens
uuagcuggaguuacaaggcagccaacaaugau

SEQ ID NO: 253098 - RNA, 31 nt, Homo Sapiens
ggcacuccauggagaaagggcuccagcugac

SEQ ID NO: 253099 - RNA, 32 nt, Homo Sapiens
aaugacucagaauggauuaacaugaaaguuau

SEQ ID NO: 253100 - RNA, 32 nt, Homo Sapiens
ggccgguagcagccggaagugccagaccggag

SEQ ID NO: 253101 - RNA, 29 nt, Homo Sapiens
cugggauuauguuguaguuuaacauuuug

SEQ ID NO: 253102 - RNA, 32 nt, Homo Sapiens
agaauaugcaugauuuuaaaucugugauaaug

SEQ ID NO: 253103 - RNA, 32 nt, Homo Sapiens
cauuaauccauauguggacuagugaugaauag

SEQ ID NO: 253104 - RNA, 32 nt, Homo Sapiens
acuuggcugugggcagacuacucuucaauaag

SEQ ID NO: 253105 - RNA, 32 nt, Homo Sapiens
uggucccugcuggcccuuggugacgggucgcc

SEQ ID NO: 253106 - RNA, 32 nt, Homo Sapiens
ucagcucccagcucggugccugcccggauucc

SEQ ID NO: 253107 - RNA, 32 nt, Homo Sapiens
gcucugggcgagccuccuccccagcccccacc

SEQ ID NO: 253108 - RNA, 32 nt, Homo Sapiens
gccggaacgguacccccuccccaccguccugu

SEQ ID NO: 253109 - RNA, 32 nt, Homo Sapiens
ugggcucugugcuagggauggugaagaauggg

SEQ ID NO: 253110 - RNA, 32 nt, Homo Sapiens
ugauguggcaggcugcuucagcagugacgucu

SEQ ID NO: 253111 - RNA, 32 nt, Homo Sapiens
gcuuccaggcagaacagcugcagagaguuugg

SEQ ID NO: 253112 - RNA, 32 nt, Homo Sapiens
aaggcaaggggagggagcagaagcacuuaugu

SEQ ID NO: 253113 - RNA, 32 nt, Homo Sapiens
gucccuacucccgagcccccagccucacccac

SEQ ID NO: 253114 - RNA, 32 nt, Homo Sapiens
guucauauuuuugucuuguucuuccaauuggu

SEQ ID NO: 253115 - RNA, 31 nt, Homo Sapiens
cuaacugcccccugccugcuccggcacugcc

SEQ ID NO: 253116 - RNA, 32 nt, Homo Sapiens
uucuuuuucuaauuccaaauaaacuugcaaga

SEQ ID NO: 253117 - RNA, 32 nt, Homo Sapiens
cugaagcggcgguaccggugcuggcggcggca

SEQ ID NO: 253118 - RNA, 32 nt, Homo Sapiens
uuccuauguuccccccauuuccugauuuguau

SEQ ID NO: 253119 - RNA, 32 nt, Homo Sapiens
gagucucuggucucugccuucaggcccaugga

SEQ ID NO: 253120 - RNA, 32 nt, Homo Sapiens
agcaaucugcccgccucugccucccaaggugc

SEQ ID NO: 253121 - RNA, 32 nt, Homo Sapiens
gcaacccaccucccacccuccuccucuucucc

SEQ ID NO: 253122 - RNA, 32 nt, Homo Sapiens
gaggaauguucccaccucccgacgggacgugc

SEQ ID NO: 253123 - RNA, 32 nt, Homo Sapiens
cgcagucgggaccaucgccggagccugaggac

SEQ ID NO: 253124 - RNA, 32 nt, Homo Sapiens
uuggaaauuguaaaauguuauagauuguugcc

SEQ ID NO: 253125 - RNA, 32 nt, Homo Sapiens
cgcagacgcacagagcucggcgcggcccccgu

SEQ ID NO: 253126 - RNA, 32 nt, Homo Sapiens
cagcucucugcccucccugcugccguggcuuu

SEQ ID NO: 253127 - RNA, 32 nt, Homo Sapiens
uauuccagaacagauuuuucaguuauauaagu

SEQ ID NO: 253128 - RNA, 32 nt, Homo Sapiens
ugcccaggguuuugccccaaguccucauuuaa

SEQ ID NO: 253129 - RNA, 32 nt, Homo Sapiens
gcccccggccccagccgaucgggggcuccugg

SEQ ID NO: 253130 - RNA, 32 nt, Homo Sapiens
uccagcgcccccuguggugugugagagaaagc

SEQ ID NO: 253131 - RNA, 32 nt, Homo Sapiens
gacaggguuuuccaacccccagccucuugacu

SEQ ID NO: 253132 - RNA, 32 nt, Homo Sapiens
guggucugggaccgggacaacaaaguccaucc

SEQ ID NO: 253133 - RNA, 32 nt, Homo Sapiens
ggaauccgccaccacacccuccacacaccagc

SEQ ID NO: 253134 - RNA, 32 nt, Homo Sapiens
cagcccggccagcagucccuucugggacagcc

SEQ ID NO: 253135 - RNA, 32 nt, Homo Sapiens
gggcacugaggguggcacagcacaggccugca

SEQ ID NO: 253136 - RNA, 32 nt, Homo Sapiens
cccuaaaacauuggugggggagcuacacaaug

SEQ ID NO: 253137 - RNA, 32 nt, Homo Sapiens
cagguggaaaauuuauauucucagaagccaac

SEQ ID NO: 253138 - RNA, 32 nt, Homo Sapiens
ggcguggcacgccgcccgcucagaaagcgcgg

SEQ ID NO: 253139 - RNA, 32 nt, Homo Sapiens
cacaggcaugacugggaucccguguaccgagu

SEQ ID NO: 253140 - RNA, 32 nt, Homo Sapiens
caaaugaaauuuaaaagcaaauguaaaagugu

SEQ ID NO: 253141 - RNA, 32 nt, Homo Sapiens
acgagaucaggagaucgagaccacccuggcua

SEQ ID NO: 253142 - RNA, 32 nt, Homo Sapiens
cacuugcuagauugcuuuagucuaaaucuagc

SEQ ID NO: 253143 - RNA, 32 nt, Homo Sapiens
aauguuuucuuacaaaauucucuuuuuauuga

SEQ ID NO: 253144 - RNA, 32 nt, Homo Sapiens
cccucccccgccugggcuucacuuccuuuccu

SEQ ID NO: 253145 - RNA, 32 nt, Homo Sapiens
uuacgaagguggcagcugacagacgugggcuc

SEQ ID NO: 253146 - RNA, 32 nt, Homo Sapiens
guagaggucaguggugaugccucuugcugcuc

SEQ ID NO: 253147 - RNA, 32 nt, Homo Sapiens
caaaaacaagaaaaaacugugagagauugugu

SEQ ID NO: 253148 - RNA, 32 nt, Homo Sapiens
ugcucuuuuuuggcagggaguggggaugagau

SEQ ID NO: 253149 - RNA, 32 nt, Homo Sapiens
agagaggaaaauuccacaucccaccagaagac

SEQ ID NO: 253150 - RNA, 32 nt, Homo Sapiens
aggacucggcgcgccuuucccgcggccugcgg

SEQ ID NO: 253151 - RNA, 32 nt, Homo Sapiens
auguugguccuaaucuuaauuuuuuuuccucu

SEQ ID NO: 253152 - RNA, 32 nt, Homo Sapiens
uggaugucucugacaaagugugucucaaaaau

SEQ ID NO: 253153 - RNA, 32 nt, Homo Sapiens
ccaagugauuuugauguauucuaauuuugaga

SEQ ID NO: 253154 - RNA, 32 nt, Homo Sapiens
uucagaugagauuaguucauuuagaccuuaaa

SEQ ID NO: 253155 - RNA, 32 nt, Homo Sapiens
ccaaacuuaggaucccucccagccccagcccu

SEQ ID NO: 253156 - RNA, 32 nt, Homo Sapiens
ucugccccugucagggcucgguccucagagua

SEQ ID NO: 253157 - RNA, 32 nt, Homo Sapiens
agggcuuguggcucugguguuagguucagggg

SEQ ID NO: 253158 - RNA, 32 nt, Homo Sapiens
aaauauauuuaguuuuauagcagaagcagcuc

SEQ ID NO: 253159 - RNA, 32 nt, Homo Sapiens
uacaaaaaacaaaaaacaaaaacaauagcagg

SEQ ID NO: 253160 - RNA, 32 nt, Homo Sapiens
agucacuuauuaaaggauuaugcugauggaaa

SEQ ID NO: 253161 - RNA, 32 nt, Homo Sapiens
ggugggaaggucggugaggggcccgagguggc

SEQ ID NO: 253162 - RNA, 32 nt, Homo Sapiens
uuggaaggcagacuugggacgcuuugugggga

SEQ ID NO: 253163 - RNA, 32 nt, Homo Sapiens
acuauucaaauuguaguaaaucuuaaaguuuu

SEQ ID NO: 253164 - RNA, 32 nt, Homo Sapiens
ccacacaagccuuauguucucaucucaaaaau

SEQ ID NO: 253165 - RNA, 32 nt, Homo Sapiens
uugaacacaaauaguuugaucagcuuucagaa

SEQ ID NO: 253166 - RNA, 32 nt, Homo Sapiens
cccuguggguggcacugggugcaugugcccug

SEQ ID NO: 253167 - RNA, 32 nt, Homo Sapiens
aaaauaucuauuuuggcagguuucugugccuu

SEQ ID NO: 253168 - RNA, 32 nt, Homo Sapiens
aaugcgcuucagcccccgagggcccccaguau

SEQ ID NO: 253169 - RNA, 32 nt, Homo Sapiens
auauggcucuaguacaauaugggauaaugaau

SEQ ID NO: 253170 - RNA, 32 nt, Homo Sapiens
ggaacauggcuggccugguaagggggucccug

SEQ ID NO: 253171 - RNA, 32 nt, Homo Sapiens
gaacuugccaaugggaaauucauccgaguggc

SEQ ID NO: 253172 - RNA, 32 nt, Homo Sapiens
uagucguaaaauuuauccuucaaaaaucugca

SEQ ID NO: 253173 - RNA, 32 nt, Homo Sapiens
ccauaauauggaugccagugaacuuauuguga

SEQ ID NO: 253174 - RNA, 32 nt, Homo Sapiens
cacacaaggcuaauauuuuguauuuuaguaga

SEQ ID NO: 253175 - RNA, 32 nt, Homo Sapiens
guuuuagcuaguccucaauuugguccaugucc

SEQ ID NO: 253176 - RNA, 32 nt, Homo Sapiens
uagguguugcuuaaucugccucauggccaaag

SEQ ID NO: 253177 - RNA, 32 nt, Homo Sapiens
cauagguagguaagagacaaaugguugcauuc

SEQ ID NO: 253178 - RNA, 32 nt, Homo Sapiens
ugugucccuuucuccuuccugaccuuccucag

SEQ ID NO: 253179 - RNA, 32 nt, Homo Sapiens
cucucggcgucccaguccggucccgggcggag

SEQ ID NO: 253180 - RNA, 32 nt, Homo Sapiens
uccaggacuacaaugucuuuauuuuuaacugu

SEQ ID NO: 253181 - RNA, 30 nt, Homo Sapiens
gacccaugucagccccacuggaugccgccc

SEQ ID NO: 253182 - RNA, 32 nt, Homo Sapiens
gguggguuuuguugcuuucacacucuauccac

SEQ ID NO: 253183 - RNA, 32 nt, Homo Sapiens
acuucuuuuuaaaguaucuacuguguaacagg

SEQ ID NO: 253184 - RNA, 32 nt, Homo Sapiens
aagaugaccaucagccagcaagaguuuggccg

SEQ ID NO: 253185 - RNA, 32 nt, Homo Sapiens
cauguucccuggauuuuguauuuuuugauaaa

SEQ ID NO: 253186 - RNA, 32 nt, Homo Sapiens
agccucugccagcagccgcucggcgccugccu

SEQ ID NO: 253187 - RNA, 32 nt, Homo Sapiens
cccuucggacauuucucagacaucucccaagu

SEQ ID NO: 253188 - RNA, 32 nt, Homo Sapiens
uucuuuuuaaaguguuucuguuauuaacaaac

SEQ ID NO: 253189 - RNA, 32 nt, Homo Sapiens
uacucguguuaguccauuuucacgcugcugau

SEQ ID NO: 253190 - RNA, 32 nt, Homo Sapiens
acaguagaaaucaaguaucuuuuucauugucu

SEQ ID NO: 253191 - RNA, 32 nt, Homo Sapiens
uacguaugcaacaaagauauuccaucaugcau

SEQ ID NO: 253192 - RNA, 32 nt, Homo Sapiens
guaucaaaggguacuugguacuuaguuugcau

SEQ ID NO: 253193 - RNA, 32 nt, Homo Sapiens
cacauuccaggucaucgucuucugucagucau

SEQ ID NO: 253194 - RNA, 32 nt, Homo Sapiens
ucaguuuaucuuucucccacuccacuuuuccu

SEQ ID NO: 253195 - RNA, 32 nt, Homo Sapiens
gucuuggcacaacucuggauagauugcaggug

SEQ ID NO: 253196 - RNA, 32 nt, Homo Sapiens
uuuugaagaauuuuuauaucaaauauaccgua

SEQ ID NO: 253197 - RNA, 32 nt, Homo Sapiens
ccaagccucgcaccuccgcuccacagcagucc

SEQ ID NO: 253198 - RNA, 32 nt, Homo Sapiens
uccuccuguugaccagugagucgguggcuucu

SEQ ID NO: 253199 - RNA, 28 nt, Homo Sapiens
ggcuggaguugcugaccaagcaauaggc

SEQ ID NO: 253200 - RNA, 32 nt, Homo Sapiens
cuuccagaagcaguuguuguaauuaggaccca

SEQ ID NO: 253201 - RNA, 32 nt, Homo Sapiens
cucagaccgucggcggucucuguccgcuucgg

SEQ ID NO: 253202 - RNA, 32 nt, Homo Sapiens
ggucugaaaccuggucuuacuguccaugugug

SEQ ID NO: 253203 - RNA, 32 nt, Homo Sapiens
aaaaggcggcacccagcuccucaaucgaagca

SEQ ID NO: 253204 - RNA, 32 nt, Homo Sapiens
ccuuugugcugcggcggcggcuucucgagucc

SEQ ID NO: 253205 - RNA, 32 nt, Homo Sapiens
gacuggggccacugggucuuaagaggagcugu

SEQ ID NO: 253206 - RNA, 32 nt, Homo Sapiens
acguuccgggcaaaugccagggcccgcaccga

SEQ ID NO: 253207 - RNA, 32 nt, Homo Sapiens
guuaaugucaucuuugcucauguguuauaagc

SEQ ID NO: 253208 - RNA, 32 nt, Homo Sapiens
cgagcgucacgguggggaugcugcuggcugcg

SEQ ID NO: 253209 - RNA, 32 nt, Homo Sapiens
gggaggccaauguggguggaucaugaggucag

SEQ ID NO: 253210 - RNA, 32 nt, Homo Sapiens
uggauagacagagaagaagacggcauuccagg

SEQ ID NO: 253211 - RNA, 32 nt, Homo Sapiens
uucaaauacauuucauuuccuguuacccagau

SEQ ID NO: 253212 - RNA, 32 nt, Homo Sapiens
ccacaggggcagggagaagagaaggcauuagu

SEQ ID NO: 253213 - RNA, 32 nt, Homo Sapiens
ccuuggauuuuaaugucagggauggaaaaacu

SEQ ID NO: 253214 - RNA, 32 nt, Homo Sapiens
uuuucuaagaaaccaccauuugguauucaguc

SEQ ID NO: 253215 - RNA, 32 nt, Homo Sapiens
ucacauuugaacuacauaaugaaugaugguua

SEQ ID NO: 253216 - RNA, 32 nt, Homo Sapiens
gugaaacuggauuaaacuuaaucuaaauggaa

SEQ ID NO: 253217 - RNA, 32 nt, Homo Sapiens
ggcugaaaugagccagugccccaggucugcug

SEQ ID NO: 253218 - RNA, 32 nt, Homo Sapiens
guguuaguuccauggguguggcuggucauggu

SEQ ID NO: 253219 - RNA, 32 nt, Homo Sapiens
gugacgauggaaggcggcuacgacauuuugca

SEQ ID NO: 253220 - RNA, 32 nt, Homo Sapiens
uaccuuaaagauaacuuuuuaaauucugaaga

SEQ ID NO: 253221 - RNA, 27 nt, Homo Sapiens
caggacuuccucuucagccuaaaagaa

SEQ ID NO: 253222 - RNA, 32 nt, Homo Sapiens
gcagaacuugggcugguuuucuuucuucccau

SEQ ID NO: 253223 - RNA, 32 nt, Homo Sapiens
uaaaauaacuaaaauguuccucuuaaugugau

SEQ ID NO: 253224 - RNA, 32 nt, Homo Sapiens
uuccuggaaaauuauaggugcccagcuaagac

SEQ ID NO: 253225 - RNA, 32 nt, Homo Sapiens
agcaguggcaaccccuuuuggccagggccagg

SEQ ID NO: 253226 - RNA, 32 nt, Homo Sapiens
gaggccgaggucccucaguccuccccuguccc

SEQ ID NO: 253227 - RNA, 32 nt, Homo Sapiens
guagccucgguagguggcuauuagagcucuac

SEQ ID NO: 253228 - RNA, 32 nt, Homo Sapiens
acacaaggucugucagaaucuaccacagcauu

SEQ ID NO: 253229 - RNA, 32 nt, Homo Sapiens
gcccagauggaaagacguuuuugugcuguggg

SEQ ID NO: 253230 - RNA, 32 nt, Homo Sapiens
ucaaggaauccuccugccccagccucucagau

SEQ ID NO: 253231 - RNA, 32 nt, Homo Sapiens
gcccgaaagccgccucccccucccagacccga

SEQ ID NO: 253232 - RNA, 32 nt, Homo Sapiens
uccaccggcugcacaggcacaaacucccccac

SEQ ID NO: 253233 - RNA, 32 nt, Homo Sapiens
accgaaggcucggucuuaauucccccaccugu

SEQ ID NO: 253234 - RNA, 32 nt, Homo Sapiens
aagccaagaaaagaagcugcccaggugaccag

SEQ ID NO: 253235 - RNA, 32 nt, Homo Sapiens
gguuucacagcuuuucaguuacaguuggucug

SEQ ID NO: 253236 - RNA, 32 nt, Homo Sapiens
acuuucccuuccuuuaaaguacucagggagcc

SEQ ID NO: 253237 - RNA, 30 nt, Homo Sapiens
cacguucuuguuccgauacucugagaagug

SEQ ID NO: 253238 - RNA, 32 nt, Homo Sapiens
gccccggaggccggugugggcgugaccugcag

SEQ ID NO: 253239 - RNA, 32 nt, Homo Sapiens
auuccuuccuuccuuacagcucauggauuuag

SEQ ID NO: 253240 - RNA, 32 nt, Homo Sapiens
aauuagccgggcgugguggggugcgcuuguaa

SEQ ID NO: 253241 - RNA, 32 nt, Homo Sapiens
aguuugaguuuaggaguaagaacauaucucag

SEQ ID NO: 253242 - RNA, 30 nt, Homo Sapiens
ccaaguucuuucgggaccggcaggagcugc

SEQ ID NO: 253243 - RNA, 32 nt, Homo Sapiens
cccacuguuaccagaagcugcucuaggaguuc

SEQ ID NO: 253244 - RNA, 31 nt, Homo Sapiens
ucauacuugaaggucaacagagccugccauc

SEQ ID NO: 253245 - RNA, 32 nt, Homo Sapiens
aacaaaaugaauucugggaauccacagcucug

SEQ ID NO: 253246 - RNA, 32 nt, Homo Sapiens
cuuccuuccuuaacauacaacaugagucccga

SEQ ID NO: 253247 - RNA, 32 nt, Homo Sapiens
ucuuuucucuacagcuuguuuucauuuccuuu

SEQ ID NO: 253248 - RNA, 32 nt, Homo Sapiens
uuuugggagugggguuugaugaucucggugca

SEQ ID NO: 253249 - RNA, 32 nt, Homo Sapiens
uccaguccugcucucuacccagcccaucuugc

SEQ ID NO: 253250 - RNA, 32 nt, Homo Sapiens
auggacacagacccacacauguuuacagaacu

SEQ ID NO: 253251 - RNA, 32 nt, Homo Sapiens
gcaagaagauugggggcuguauggaugacaag

SEQ ID NO: 253252 - RNA, 32 nt, Homo Sapiens
ucggucgcuugcuguuauguugcuucuuaaaa

SEQ ID NO: 253253 - RNA, 32 nt, Homo Sapiens
aaggacagcuccggcagcagguccucgcuggg

SEQ ID NO: 253254 - RNA, 32 nt, Homo Sapiens
aggaggccgaguggcugccggaggagcaugcg

SEQ ID NO: 253255 - RNA, 32 nt, Homo Sapiens
ccauguugccucgucagacucuugguggcuuu

SEQ ID NO: 253256 - RNA, 32 nt, Homo Sapiens
gccuuguuuggucucauacuuaauuuucuuuu

SEQ ID NO: 253257 - RNA, 32 nt, Homo Sapiens
cgaucuagggccagcugcagagggcucucucu

SEQ ID NO: 253258 - RNA, 32 nt, Homo Sapiens
ugcagcugaugauguaaauauuuuguacagua

SEQ ID NO: 253259 - RNA, 32 nt, Homo Sapiens
auaacaggagauggaacaggacuuuaccagua

SEQ ID NO: 253260 - RNA, 32 nt, Homo Sapiens
cccuguuccgccucacuggguguggccuggcu

SEQ ID NO: 253261 - RNA, 32 nt, Homo Sapiens
acuggauaaaauguuaauuggggguagggaaa

SEQ ID NO: 253262 - RNA, 32 nt, Homo Sapiens
auagucccgccgccuccuccuccaccuccucc

SEQ ID NO: 253263 - RNA, 32 nt, Homo Sapiens
uguguuuauuuauugccuuguuucuuuuucaa

SEQ ID NO: 253264 - RNA, 32 nt, Homo Sapiens
ugagggaagggagaggagaggaacaagggccu

SEQ ID NO: 253265 - RNA, 32 nt, Homo Sapiens
ccagugacuucgugguaaauguaacucagugu

SEQ ID NO: 253266 - RNA, 32 nt, Homo Sapiens
uuauuucacuuaaccuaaugaccuccaguucc

SEQ ID NO: 253267 - RNA, 27 nt, Homo Sapiens
cauauuucuucuuucagccccaaucca

SEQ ID NO: 253268 - RNA, 32 nt, Homo Sapiens
aaggguugggccgcagguuucgccagugcucg

SEQ ID NO: 253269 - RNA, 32 nt, Homo Sapiens
uccuuuggggguaugauguggaagcugguuuc

SEQ ID NO: 253270 - RNA, 32 nt, Homo Sapiens
ugaaaaauuuaaauggagaaugauuuaaaaac

SEQ ID NO: 253271 - RNA, 32 nt, Homo Sapiens
gguggggugugguggcucaugccuguaauccu

SEQ ID NO: 253272 - RNA, 32 nt, Homo Sapiens
ccucccgugcuccucucgcccauggaauuaau

SEQ ID NO: 253273 - RNA, 32 nt, Homo Sapiens
agcuuucccagccccagcguuuugggucuucu

SEQ ID NO: 253274 - RNA, 32 nt, Homo Sapiens
cagauaaaauuuccuuauguucugcuguuaug

SEQ ID NO: 253275 - RNA, 32 nt, Homo Sapiens
uagugagccuacuggcuccuggcagcggcuuu

SEQ ID NO: 253276 - RNA, 32 nt, Homo Sapiens
gcgcuuuccucuccggcacccggcgggcgccc

SEQ ID NO: 253277 - RNA, 32 nt, Homo Sapiens
ggaagaggucauaucccuucccugccccucgc

SEQ ID NO: 253278 - RNA, 32 nt, Homo Sapiens
cccagcuacuucggggacugaggugggaggau

SEQ ID NO: 253279 - RNA, 32 nt, Homo Sapiens
caagcacaggaagaggcugggggacuagaaag

SEQ ID NO: 253280 - RNA, 32 nt, Homo Sapiens
accaaggagagccaccccugcuuucuggccau

SEQ ID NO: 253281 - RNA, 32 nt, Homo Sapiens
ggccucuaaagcugaggccuggcucagagccu

SEQ ID NO: 253282 - RNA, 32 nt, Homo Sapiens
uuuauacuuugaugaaggcuaagguguaccua

SEQ ID NO: 253283 - RNA, 32 nt, Homo Sapiens
aaggccugggguccugcucaccccccuuugcu

SEQ ID NO: 253284 - RNA, 32 nt, Homo Sapiens
gggugcccaagcccuugcugggccugcgcgug

SEQ ID NO: 253285 - RNA, 32 nt, Homo Sapiens
ggauucggggagaggcuggguggagcuuggcc

SEQ ID NO: 253286 - RNA, 32 nt, Homo Sapiens
agggcggugaaggcguucaaaggucgggaagg

SEQ ID NO: 253287 - RNA, 32 nt, Homo Sapiens
acauauauuauaaauauaaccuuuguguaacc

SEQ ID NO: 253288 - RNA, 32 nt, Homo Sapiens
agcuuuguucuuucgcucuuugcaauaaaucu

SEQ ID NO: 253289 - RNA, 32 nt, Homo Sapiens
ucccugccccucugcuggcacagccugggcaa

SEQ ID NO: 253290 - RNA, 32 nt, Homo Sapiens
ccugcugaaaaaauaaccuuuuuacccauuau

SEQ ID NO: 253291 - RNA, 32 nt, Homo Sapiens
cuuugcccacgccgcuguugcugcugacucca

SEQ ID NO: 253292 - RNA, 32 nt, Homo Sapiens
ugccgagccugccuguguccuacagaugcaca

SEQ ID NO: 253293 - RNA, 32 nt, Homo Sapiens
aagggagggcucugcggguggcggcggcgcgg

SEQ ID NO: 253294 - RNA, 32 nt, Homo Sapiens
ggugcaagagcugucugaaaaggucagagcaa

SEQ ID NO: 253295 - RNA, 32 nt, Homo Sapiens
ugagcgucuccauggccugccugagccccucg

SEQ ID NO: 253296 - RNA, 32 nt, Homo Sapiens
gggaacugcuacaacuaacaaacauuuguuuc

SEQ ID NO: 253297 - RNA, 32 nt, Homo Sapiens
cucccuuuuaauccuggcugucgagaaacagc

SEQ ID NO: 253298 - RNA, 32 nt, Homo Sapiens
ugucuucaagaugcaauacuuuucuuagauaa

SEQ ID NO: 253299 - RNA, 29 nt, Homo Sapiens
aguuccuugacuuuccucgaauuucauua

SEQ ID NO: 253300 - RNA, 32 nt, Homo Sapiens
uaauuucauuuuaauuaauuauaggaaagaag

SEQ ID NO: 253301 - RNA, 32 nt, Homo Sapiens
uauuuaauguauuuauucuuguauguuuuuuc

SEQ ID NO: 253302 - RNA, 32 nt, Homo Sapiens
uccucgagccugggggcgcucagauugcuuug

SEQ ID NO: 253303 - RNA, 32 nt, Homo Sapiens
guuagaagggaaggaaggaaagaucaaggaac

SEQ ID NO: 253304 - RNA, 31 nt, Homo Sapiens
uuucagugggagguuuuugguuuggagacau

SEQ ID NO: 253305 - RNA, 32 nt, Homo Sapiens
augauugaaccacuucuagaaacucugauuua

SEQ ID NO: 253306 - RNA, 32 nt, Homo Sapiens
cuaagaugacuuauaagaaauaaaagaaguaa

SEQ ID NO: 253307 - RNA, 32 nt, Homo Sapiens
guacguuugugauuuuuggucauuacuugaaa

SEQ ID NO: 253308 - RNA, 29 nt, Homo Sapiens
auugucuugacuuucgucuucaguugaau

SEQ ID NO: 253309 - RNA, 32 nt, Homo Sapiens
ccuaaagaugcauugaaugcuuggaagaaugc

SEQ ID NO: 253310 - RNA, 32 nt, Homo Sapiens
gagaggaaguaaucaaccuuuacuucccaagc

SEQ ID NO: 253311 - RNA, 32 nt, Homo Sapiens
cagguacaggccggcgccagccgugccucacc

SEQ ID NO: 253312 - RNA, 32 nt, Homo Sapiens
aaaccuagauacaugcaguaaaaacuaggaga

SEQ ID NO: 253313 - RNA, 32 nt, Homo Sapiens
cagcuuguucuucucaccaaacaggugaagcc

SEQ ID NO: 253314 - RNA, 32 nt, Homo Sapiens
uggaugccgcugggccggcugccucgcaucgc

SEQ ID NO: 253315 - RNA, 32 nt, Homo Sapiens
ccccaucucccucuccccaccaagacagcccc

SEQ ID NO: 253316 - RNA, 32 nt, Homo Sapiens
uuucuacuuacuuuuccaaaaucauuuaaccc

SEQ ID NO: 253317 - RNA, 32 nt, Homo Sapiens
uguuuagcauauaaacaagaaauaaccauaaa

SEQ ID NO: 253318 - RNA, 32 nt, Homo Sapiens
aaaguagaugagacuucuccaagcugcuucac

SEQ ID NO: 253319 - RNA, 32 nt, Homo Sapiens
cgaucgccguguuuggucgauagaauccccag

SEQ ID NO: 253320 - RNA, 32 nt, Homo Sapiens
cauguuaagaauaaguuuuguuuugaugcaua

SEQ ID NO: 253321 - RNA, 32 nt, Homo Sapiens
ucuuugaggcuaugacccaggacugauagaua

SEQ ID NO: 253322 - RNA, 32 nt, Homo Sapiens
gagcuucgcucuugcugcuccccugaggugaa

SEQ ID NO: 253323 - RNA, 32 nt, Homo Sapiens
aauuuucagagagaaauagauaaaacacgcca

SEQ ID NO: 253324 - RNA, 32 nt, Homo Sapiens
aaaagaaucuucugaggccucagcauuuuauc

SEQ ID NO: 253325 - RNA, 32 nt, Homo Sapiens
ucaacacaucaucuuaaguggugcuggauggg

SEQ ID NO: 253326 - RNA, 30 nt, Homo Sapiens
guuuucacccguaggaccgaaguguuuugu

SEQ ID NO: 253327 - RNA, 32 nt, Homo Sapiens
cccucacccagcccggcccccacccuguccag

SEQ ID NO: 253328 - RNA, 32 nt, Homo Sapiens
ccuuccuucuuuccucccuuuaauauaaggga

SEQ ID NO: 253329 - RNA, 32 nt, Homo Sapiens
gcuauucuuuugcuaucaggaaguuucgagga

SEQ ID NO: 253330 - RNA, 32 nt, Homo Sapiens
uaccaaaaggcuuucaguuuuuagucagaaau

SEQ ID NO: 253331 - RNA, 32 nt, Homo Sapiens
gugacauucugacacugcccaaggcaacucac

SEQ ID NO: 253332 - RNA, 32 nt, Homo Sapiens
uccugcaucccauaaaucaugccuagauuacu

SEQ ID NO: 253333 - RNA, 32 nt, Homo Sapiens
cagaagcucccagcugaccagacacugccugg

SEQ ID NO: 253334 - RNA, 28 nt, Homo Sapiens
auggauaggaguuuucauuugaaggaua

SEQ ID NO: 253335 - RNA, 32 nt, Homo Sapiens
gcuaauaggagucaaugcugacagccauagac

SEQ ID NO: 253336 - RNA, 32 nt, Homo Sapiens
uuuaguagagaccagguuuauccauguugguc

SEQ ID NO: 253337 - RNA, 32 nt, Homo Sapiens
guaguaucaaaggaggcucuagguuuugucua

SEQ ID NO: 253338 - RNA, 32 nt, Homo Sapiens
auuuuucuuccauuuuucuccucucuuaggag

SEQ ID NO: 253339 - RNA, 32 nt, Homo Sapiens
ugucccagccuggccuguggcugcccuccauc

SEQ ID NO: 253340 - RNA, 32 nt, Homo Sapiens
gccucacuaauuucccaaaaagauaugguugg

SEQ ID NO: 253341 - RNA, 30 nt, Homo Sapiens
uucccacuucccgcggggccggcgccgcgc

SEQ ID NO: 253342 - RNA, 32 nt, Homo Sapiens
cggccaucuccgacccggggcgcguguucccc

SEQ ID NO: 253343 - RNA, 32 nt, Homo Sapiens
gcuucaccucgcgggcuccgaaugcggggagc

SEQ ID NO: 253344 - RNA, 32 nt, Homo Sapiens
caaaccaggagcucagcugcaggaggcaggau

SEQ ID NO: 253345 - RNA, 32 nt, Homo Sapiens
cugacuuuucacaacuaacagccaacacauug

SEQ ID NO: 253346 - RNA, 32 nt, Homo Sapiens
ccuagagcuaugcacaccccugccccaguuua

SEQ ID NO: 253347 - RNA, 32 nt, Homo Sapiens
caagcagaaaugaauccacauucuauccuuua

SEQ ID NO: 253348 - RNA, 32 nt, Homo Sapiens
aauucuucuccuccuucacaucagaauggaag

SEQ ID NO: 253349 - RNA, 32 nt, Homo Sapiens
ggcucccuugacguuuggcagaugaaaaacaa

SEQ ID NO: 253350 - RNA, 32 nt, Homo Sapiens
gaaagcccaaugugucauuguuuacuuguccu

SEQ ID NO: 253351 - RNA, 32 nt, Homo Sapiens
cgucaucauggcaacaguggguuccuccuucu

SEQ ID NO: 253352 - RNA, 32 nt, Homo Sapiens
auuauaccaauucacuauuuuauuuuuuaaug

SEQ ID NO: 253353 - RNA, 32 nt, Homo Sapiens
caguggcuuggcgacauucuucugggaaacuu

SEQ ID NO: 253354 - RNA, 32 nt, Homo Sapiens
gguccuuuuauccccaggaaucaauaauuuuu

SEQ ID NO: 253355 - RNA, 32 nt, Homo Sapiens
cacccugccuccucgggcuccacucgucugcc

SEQ ID NO: 253356 - RNA, 32 nt, Homo Sapiens
ucaguccuugguuuccucucucaggauuaacc

SEQ ID NO: 253357 - RNA, 29 nt, Homo Sapiens
uguuggguaggagggaagcaaaaaagggc

SEQ ID NO: 253358 - RNA, 32 nt, Homo Sapiens
guuuuauuggccaguuaaucauugugguugaa

SEQ ID NO: 253359 - RNA, 32 nt, Homo Sapiens
cgggucuccgacccaggagaucgauucagcag

SEQ ID NO: 253360 - RNA, 32 nt, Homo Sapiens
cucauagagucuuuugccaugauuuauggugu

SEQ ID NO: 253361 - RNA, 32 nt, Homo Sapiens
uuugaacuagaucuggauucucuuuuuaguaa

SEQ ID NO: 253362 - RNA, 32 nt, Homo Sapiens
agaaaggaccagcuuugagcuccaucaagggu

SEQ ID NO: 253363 - RNA, 32 nt, Homo Sapiens
uuccuccaauacugaaggucucucugcggcgc

SEQ ID NO: 253364 - RNA, 32 nt, Homo Sapiens
cuguguguuagugucaucaucuguaagucagg

SEQ ID NO: 253365 - RNA, 32 nt, Homo Sapiens
uggagaaacagggauuaaaaauaaggauaaac

SEQ ID NO: 253366 - RNA, 32 nt, Homo Sapiens
ugacugccuccugcugccccuaguccggggca

SEQ ID NO: 253367 - RNA, 32 nt, Homo Sapiens
aaccaccacaaccuggcugugcgucugucccu

SEQ ID NO: 253368 - RNA, 32 nt, Homo Sapiens
cuuaccacaaaacaggaugugugagguaaugc

SEQ ID NO: 253369 - RNA, 32 nt, Homo Sapiens
gucauaugaauuucagugauauuuucauccau

SEQ ID NO: 253370 - RNA, 32 nt, Homo Sapiens
uuuuucuuacacagcauauuaagggaauauaa

SEQ ID NO: 253371 - RNA, 32 nt, Homo Sapiens
ugggauuauccaguucccaagagacccugcac

SEQ ID NO: 253372 - RNA, 32 nt, Homo Sapiens
gcccugccacuacuaugcucuaccuuugguga

SEQ ID NO: 253373 - RNA, 32 nt, Homo Sapiens
acccuugaaagcuuaugggaccauugugaaaa

SEQ ID NO: 253374 - RNA, 32 nt, Homo Sapiens
aggaaguuguacaccagcuuccguaauuuccu

SEQ ID NO: 253375 - RNA, 32 nt, Homo Sapiens
cggccggcagagcggcgucggcgggguuggcc

SEQ ID NO: 253376 - RNA, 28 nt, Homo Sapiens
cagcugggccgcggcgcuccgaccuccg

SEQ ID NO: 253377 - RNA, 32 nt, Homo Sapiens
acuagugcagccacuccugggggcugugggga

SEQ ID NO: 253378 - RNA, 32 nt, Homo Sapiens
gguauggacaauucuuuuuuuuuuuuuuuuuu

SEQ ID NO: 253379 - RNA, 32 nt, Homo Sapiens
gagccaccauacccggcccacucuuuuguaau

SEQ ID NO: 253380 - RNA, 32 nt, Homo Sapiens
uccaaaaguuaccccacacaaaaguuacugag

SEQ ID NO: 253381 - RNA, 32 nt, Homo Sapiens
ugcccuuugucaaaaugugaugcacauaagca

SEQ ID NO: 253382 - RNA, 32 nt, Homo Sapiens
uucccccaggcaguccugaggacccaggagca

SEQ ID NO: 253383 - RNA, 31 nt, Homo Sapiens
uucuucuauugaguuuaggaauugcggcacg

SEQ ID NO: 253384 - RNA, 32 nt, Homo Sapiens
ugagaaaccagccgaccggcccugccccucuu

SEQ ID NO: 253385 - RNA, 32 nt, Homo Sapiens
cgagccacccagggaaaaugggcuugacgagg

SEQ ID NO: 253386 - RNA, 32 nt, Homo Sapiens
ugugucuggcccccacccacugcccauccccc

SEQ ID NO: 253387 - RNA, 32 nt, Homo Sapiens
cccuagcgucgcgcagggucggggacugcgcg

SEQ ID NO: 253388 - RNA, 32 nt, Homo Sapiens
ucacauuuucaucaucagcuacaggauuagaa

SEQ ID NO: 253389 - RNA, 32 nt, Homo Sapiens
uuuauacaauacugagccauuugcugcauuuc

SEQ ID NO: 253390 - RNA, 32 nt, Homo Sapiens
uguucauagagaaggagggcugucugagauuc

SEQ ID NO: 253391 - RNA, 32 nt, Homo Sapiens
gagacagggucucacuauauugcucaggcugg

SEQ ID NO: 253392 - RNA, 32 nt, Homo Sapiens
cgcgcgcaggggcugcggagcggcaggaugca

SEQ ID NO: 253393 - RNA, 32 nt, Homo Sapiens
gaggccuccaugagggccaaaugugccauggg

SEQ ID NO: 253394 - RNA, 32 nt, Homo Sapiens
uguacaacauuuucauuuuuuaugcuucuuga

SEQ ID NO: 253395 - RNA, 32 nt, Homo Sapiens
accaggcuauguuuucuugcaucguaaacuuc

SEQ ID NO: 253396 - RNA, 32 nt, Homo Sapiens
aagcccucuaucuccuucuaauccuucaaccc

SEQ ID NO: 253397 - RNA, 32 nt, Homo Sapiens
cagccacccuuugacagcuaccucuggacauc

SEQ ID NO: 253398 - RNA, 32 nt, Homo Sapiens
ccagguucaagcgguucuccugccuaagccuc

SEQ ID NO: 253399 - RNA, 32 nt, Homo Sapiens
gccagcaagagguggagcugccagccugaggu

SEQ ID NO: 253400 - RNA, 32 nt, Homo Sapiens
uugccccaugaggagcugcugcugcucacuga

SEQ ID NO: 253401 - RNA, 32 nt, Homo Sapiens
ggaucugggugccggcaucuccagccagcccu

SEQ ID NO: 253402 - RNA, 32 nt, Homo Sapiens
guaagaggcucaagacaugcugauuugcauuu

SEQ ID NO: 253403 - RNA, 32 nt, Homo Sapiens
ggaggccgcagagggaaaaaacaaaacguaac

SEQ ID NO: 253404 - RNA, 32 nt, Homo Sapiens
agcagagcggguggagcuggucagcccggcug

SEQ ID NO: 253405 - RNA, 32 nt, Homo Sapiens
gauuucaccauguuuuccaggcuggucucgag

SEQ ID NO: 253406 - RNA, 32 nt, Homo Sapiens
gguuggaggcagccuuccuuggauuuacucau

SEQ ID NO: 253407 - RNA, 32 nt, Homo Sapiens
gaaugaccaaauaacuauguauauugaucugc

SEQ ID NO: 253408 - RNA, 32 nt, Homo Sapiens
ggucagaaaauauuaagcaaguagaagugugg

SEQ ID NO: 253409 - RNA, 32 nt, Homo Sapiens
ggggcgacugccagcccucaccccgccucggg

SEQ ID NO: 253410 - RNA, 32 nt, Homo Sapiens
aguuaaaaacuuauuucagauuuuucucaucu

SEQ ID NO: 253411 - RNA, 32 nt, Homo Sapiens
ccaugggccccgggccugcgggugucaagucc

SEQ ID NO: 253412 - RNA, 31 nt, Homo Sapiens
aggagucaaugcugacagccauagaccuucc

SEQ ID NO: 253413 - RNA, 32 nt, Homo Sapiens
uagcuauuacaauuugauaguuauguucagcu

SEQ ID NO: 253414 - RNA, 32 nt, Homo Sapiens
gcacagguuugaauaggaaaaauguauucuau

SEQ ID NO: 253415 - RNA, 32 nt, Homo Sapiens
caguccauaucugugaggccagcaaauauuuu

SEQ ID NO: 253416 - RNA, 32 nt, Homo Sapiens
uccccuguguuuacgcgccccauccugugugu

SEQ ID NO: 253417 - RNA, 32 nt, Homo Sapiens
ggaggcgagccggagcccgagcacuagcagca

SEQ ID NO: 253418 - RNA, 32 nt, Homo Sapiens
gaggagccugaagauucucagguuuuaaagac

SEQ ID NO: 253419 - RNA, 32 nt, Homo Sapiens
gagcccgcccuucgccucccagccccucaaga

SEQ ID NO: 253420 - RNA, 32 nt, Homo Sapiens
cucgcuauccucaaaauaugccguguguaugc

SEQ ID NO: 253421 - RNA, 32 nt, Homo Sapiens
aggaggaagaggaggagaagguagcuacagca

SEQ ID NO: 253422 - RNA, 32 nt, Homo Sapiens
gcagcccaccccacccaagauucagacacaag

SEQ ID NO: 253423 - RNA, 32 nt, Homo Sapiens
gaacccggaauuaagaucgccaagucccggau

SEQ ID NO: 253424 - RNA, 32 nt, Homo Sapiens
cuuugcugcccagguauguaucuauaguuggc

SEQ ID NO: 253425 - RNA, 32 nt, Homo Sapiens
uuauuaaacuaaaacuguguggaaaagguuga

SEQ ID NO: 253426 - RNA, 32 nt, Homo Sapiens
ggugcauuugguuuucuguugggugaaugcgg

SEQ ID NO: 253427 - RNA, 32 nt, Homo Sapiens
uacaggcgugagucaccacaccuggcccaugg

SEQ ID NO: 253428 - RNA, 32 nt, Homo Sapiens
ggcggcgucugcuggcccggcgcggccccagc

SEQ ID NO: 253429 - RNA, 32 nt, Homo Sapiens
ggguagcuggggauugggcccucuuucuccca

SEQ ID NO: 253430 - RNA, 32 nt, Homo Sapiens
guucugcacaacaguauuguaauuguaaugga

SEQ ID NO: 253431 - RNA, 32 nt, Homo Sapiens
gagcugggcauaugcugcuugagauucauggg

SEQ ID NO: 253432 - RNA, 32 nt, Homo Sapiens
ccacaaccucccugcuggucucccagcuucua

SEQ ID NO: 253433 - RNA, 32 nt, Homo Sapiens
uuagcaccuggcacuaggcggagagaggcggu

SEQ ID NO: 253434 - RNA, 32 nt, Homo Sapiens
ccggcauccaccucuggugggguuggugaaaa

SEQ ID NO: 253435 - RNA, 32 nt, Homo Sapiens
cacugccuuggccccaggaaggggccauaggu

SEQ ID NO: 253436 - RNA, 32 nt, Homo Sapiens
ugaaccagauacccccuagaaaauuauacuau

SEQ ID NO: 253437 - RNA, 32 nt, Homo Sapiens
ugccuuuaaucccagcacuuugggaggccaag

SEQ ID NO: 253438 - RNA, 32 nt, Homo Sapiens
agauggagccagcaggcugguagccuggcagc

SEQ ID NO: 253439 - RNA, 32 nt, Homo Sapiens
uuccuaguugguuuuucuaggccuggugugag

SEQ ID NO: 253440 - RNA, 32 nt, Homo Sapiens
gucuccaagguccucuaggagcucaggggugg

SEQ ID NO: 253441 - RNA, 32 nt, Homo Sapiens
auucuuuguuuuuuauuuuuuauuuuugagac

SEQ ID NO: 253442 - RNA, 32 nt, Homo Sapiens
ggccuuaaucacacucuggauggauaggacag

SEQ ID NO: 253443 - RNA, 32 nt, Homo Sapiens
agcagacagggccagacugggguguggggggc

SEQ ID NO: 253444 - RNA, 32 nt, Homo Sapiens
ugccaucccuccccggacuccggcuccggcuc

SEQ ID NO: 253445 - RNA, 32 nt, Homo Sapiens
ugagaugaggggauccuggggcuuugccugca

SEQ ID NO: 253446 - RNA, 28 nt, Homo Sapiens
uacagggaaguuuaaauguguuugugua

SEQ ID NO: 253447 - RNA, 32 nt, Homo Sapiens
aaugcucaggcauugaauauccacaagcauca

SEQ ID NO: 253448 - RNA, 32 nt, Homo Sapiens
gccucugcucaugcgcaggccacaaccgggcu

SEQ ID NO: 253449 - RNA, 32 nt, Homo Sapiens
ggcaagccagacagcugggccggagcagccgc

SEQ ID NO: 253450 - RNA, 32 nt, Homo Sapiens
caccgccuccugccucucuccucucuccccag

SEQ ID NO: 253451 - RNA, 30 nt, Homo Sapiens
agaagagagaagcccgagggggcugagcau

SEQ ID NO: 253452 - RNA, 32 nt, Homo Sapiens
ugaugaugaugaugauaacuagaacuccaggu

SEQ ID NO: 253453 - RNA, 32 nt, Homo Sapiens
uguagccauucuggggcgccugauggugcucc

SEQ ID NO: 253454 - RNA, 32 nt, Homo Sapiens
ucggcccggcccugcacuggccgcccggcagg

SEQ ID NO: 253455 - RNA, 32 nt, Homo Sapiens
gcaaggcgaaggaggcaugacaauggcacgug

SEQ ID NO: 253456 - RNA, 32 nt, Homo Sapiens
aauuuuagcuguuucagcaucaauccaacuua

SEQ ID NO: 253457 - RNA, 32 nt, Homo Sapiens
ucugagcaaccucuccugggggccacuucuug

SEQ ID NO: 253458 - RNA, 32 nt, Homo Sapiens
cccccuuccaucucugacuuaagcaaaagaaa

SEQ ID NO: 253459 - RNA, 32 nt, Homo Sapiens
acaggcgaacccgacgcagaagaguccaccac

SEQ ID NO: 253460 - RNA, 32 nt, Homo Sapiens
aacagggaaugaacaugaguuuuuguaacgug

SEQ ID NO: 253461 - RNA, 32 nt, Homo Sapiens
caugcaccccugagccagcagggcaucuugga

SEQ ID NO: 253462 - RNA, 32 nt, Homo Sapiens
uggagggauccuaagagcauuuuuguggguaa

SEQ ID NO: 253463 - RNA, 32 nt, Homo Sapiens
cagggugggcuuuguggucccaccaagaagcu

SEQ ID NO: 253464 - RNA, 32 nt, Homo Sapiens
guggcguggagauucuuuuuuauuaauuugag

SEQ ID NO: 253465 - RNA, 30 nt, Homo Sapiens
ugaugggauaucccugccuagaucuuucag

SEQ ID NO: 253466 - RNA, 32 nt, Homo Sapiens
uuccguaaagauugcuuuugcuauuuuugaaa

SEQ ID NO: 253467 - RNA, 32 nt, Homo Sapiens
ugcugcguuugcggcgggaggugguggccgcg

SEQ ID NO: 253468 - RNA, 32 nt, Homo Sapiens
uuuuaugugaauggaaucauauaguaugucuu

SEQ ID NO: 253469 - RNA, 32 nt, Homo Sapiens
ucagaauaguggcuagcuucaaaccugacaag

SEQ ID NO: 253470 - RNA, 32 nt, Homo Sapiens
uccccagauaccuggcaggugugugcacagag

SEQ ID NO: 253471 - RNA, 32 nt, Homo Sapiens
cucggccuccucucucccuccucccaccaagg

SEQ ID NO: 253472 - RNA, 32 nt, Homo Sapiens
cucugauguuuaggaaguggugucagcagaga

SEQ ID NO: 253473 - RNA, 32 nt, Homo Sapiens
aacccaggcacuuuaaacuucuauagaaaaga

SEQ ID NO: 253474 - RNA, 32 nt, Homo Sapiens
uuguuggaaccaaaaugggaacauuaaacaaa

SEQ ID NO: 253475 - RNA, 32 nt, Homo Sapiens
ucuauaagaacaaaauauuaauuaagguauag

SEQ ID NO: 253476 - RNA, 32 nt, Homo Sapiens
cacagccagcagagccggggacugcagugcuu

SEQ ID NO: 253477 - RNA, 32 nt, Homo Sapiens
agauauuagaauaaaauuuauuuucuacugua

SEQ ID NO: 253478 - RNA, 32 nt, Homo Sapiens
uuaaaaauuguuaaauaccguuuucaugaaag

SEQ ID NO: 253479 - RNA, 32 nt, Homo Sapiens
aguaauugugucucuccuuucacggggacuug

SEQ ID NO: 253480 - RNA, 32 nt, Homo Sapiens
aggcucuggggccagcagccccugcgccaaca

SEQ ID NO: 253481 - RNA, 32 nt, Homo Sapiens
auuuauaaauggugauaaaauuccuuggcuaa

SEQ ID NO: 253482 - RNA, 32 nt, Homo Sapiens
gauggccccgguggcccuccccucaauuccac

SEQ ID NO: 253483 - RNA, 32 nt, Homo Sapiens
uagaacuaucugguggccccaagccccaaugc

SEQ ID NO: 253484 - RNA, 32 nt, Homo Sapiens
ccauguccuuguuccuuguuugagacugggcu

SEQ ID NO: 253485 - RNA, 32 nt, Homo Sapiens
ugcuuacuauaaauaugggaauuuuucacaaa

SEQ ID NO: 253486 - RNA, 32 nt, Homo Sapiens
aacccagacaugcugcugcugcugcugcugcu

SEQ ID NO: 253487 - RNA, 32 nt, Homo Sapiens
cuuccuuuuccuguuucuuaauuuuugucuuc

SEQ ID NO: 253488 - RNA, 32 nt, Homo Sapiens
ggauacagaacuuccauucuuuagucauucca

SEQ ID NO: 253489 - RNA, 32 nt, Homo Sapiens
aguuguuugugauuuuuggcuuucucuggucg

SEQ ID NO: 253490 - RNA, 32 nt, Homo Sapiens
ggggcauugugacagcugaggaccugaacaac

SEQ ID NO: 253491 - RNA, 32 nt, Homo Sapiens
cggcgcuggagagggggcgcugagcuguuggg

SEQ ID NO: 253492 - RNA, 32 nt, Homo Sapiens
auaaugcugucucagcuguauuuccaguaaca

SEQ ID NO: 253493 - RNA, 32 nt, Homo Sapiens
guggcaugcaugugucucaucauccuuucaaa

SEQ ID NO: 253494 - RNA, 32 nt, Homo Sapiens
cauuuugauaguguuauugucuguauuuuguu

SEQ ID NO: 253495 - RNA, 32 nt, Homo Sapiens
aaccaguuacugcugcagacccagcucgugga

SEQ ID NO: 253496 - RNA, 32 nt, Homo Sapiens
ucucaggagccagaugaucugaagaugaugcu

SEQ ID NO: 253497 - RNA, 32 nt, Homo Sapiens
ggggccccaucccuuaguuuccacugccuccu

SEQ ID NO: 253498 - RNA, 32 nt, Homo Sapiens
ggucaucuugauggaauuguguuuuaaaguuu

SEQ ID NO: 253499 - RNA, 32 nt, Homo Sapiens
agcucaggagggugggugggagcugcaguggg

SEQ ID NO: 253500 - RNA, 32 nt, Homo Sapiens
ucgagcccgcggcgccauggcucacgucggcu

SEQ ID NO: 253501 - RNA, 32 nt, Homo Sapiens
cuguccacagggccgccuccuccugcggcccg

SEQ ID NO: 253502 - RNA, 32 nt, Homo Sapiens
gcucugucugaccagcagcuugggauuggcgg

SEQ ID NO: 253503 - RNA, 32 nt, Homo Sapiens
gaaaucuccugcugcuggccgaagucuuuuuu

SEQ ID NO: 253504 - RNA, 31 nt, Homo Sapiens
agugagaccagcacucucaaacacuggaacu

SEQ ID NO: 253505 - RNA, 32 nt, Homo Sapiens
agcagccauggccaggaaagcauuccauaccc

SEQ ID NO: 253506 - RNA, 30 nt, Homo Sapiens
augggguuucacguuguuagccaggauggu

SEQ ID NO: 253507 - RNA, 32 nt, Homo Sapiens
gugccgaggacacguuaaacgaacaggauggg

SEQ ID NO: 253508 - RNA, 32 nt, Homo Sapiens
caguuguuuuaaggcuuaauuaaugaaaugcc

SEQ ID NO: 253509 - RNA, 32 nt, Homo Sapiens
agguaucagugcauuauuaaaugaauauuuaa

SEQ ID NO: 253510 - RNA, 32 nt, Homo Sapiens
uucauaaauuuaugguucucaggccugacucu

SEQ ID NO: 253511 - RNA, 31 nt, Homo Sapiens
ccccagacggccaccacacugaggccacacg

SEQ ID NO: 253512 - RNA, 32 nt, Homo Sapiens
gacacuaugggaggagggcaagaguacaccaa

SEQ ID NO: 253513 - RNA, 32 nt, Homo Sapiens
cuagauuaacagcccuccacuccagauggaua

SEQ ID NO: 253514 - RNA, 32 nt, Homo Sapiens
ugcucuguuguccaggcuggagggcagugaca

SEQ ID NO: 253515 - RNA, 32 nt, Homo Sapiens
uaaaggaagaaccaaaagccaaguuaaagcug

SEQ ID NO: 253516 - RNA, 32 nt, Homo Sapiens
aaauuauucgcucccccguccuccccuccccu

SEQ ID NO: 253517 - RNA, 32 nt, Homo Sapiens
gaaaauggacauuuucuggcuugucauucugu

SEQ ID NO: 253518 - RNA, 32 nt, Homo Sapiens
acuuugcuaugaaaagaaaacacuguauuccu

SEQ ID NO: 253519 - RNA, 32 nt, Homo Sapiens
cugcuaugugcaaauguaguauauuauuuacu

SEQ ID NO: 253520 - RNA, 32 nt, Homo Sapiens
gcgacucggucccaggucggcgggcggcgcgc

SEQ ID NO: 253521 - RNA, 32 nt, Homo Sapiens
uauuucaaacuuuugaaagaucuuugcagugu

SEQ ID NO: 253522 - RNA, 32 nt, Homo Sapiens
guugccccgagcuguuuuguguguaaugaagu

SEQ ID NO: 253523 - RNA, 32 nt, Homo Sapiens
aguaguugauguugugugcuguaaaggauuuu

SEQ ID NO: 253524 - RNA, 32 nt, Homo Sapiens
uuuggcugauguaacauaaacaucuucugugg

SEQ ID NO: 253525 - RNA, 29 nt, Homo Sapiens
accaaugguaggcaaaucccagcaaacug

SEQ ID NO: 253526 - RNA, 32 nt, Homo Sapiens
gugcggccuggggccagggcggugccgccaag

SEQ ID NO: 253527 - RNA, 32 nt, Homo Sapiens
uccuuuucuuugucagacgucuccaugcucug

SEQ ID NO: 253528 - RNA, 32 nt, Homo Sapiens
ggcgggggaggcagcgugagcagccggaggag

SEQ ID NO: 253529 - RNA, 32 nt, Homo Sapiens
gacuugauucaaaagaaaauguuauaagaugc

SEQ ID NO: 253530 - RNA, 32 nt, Homo Sapiens
gcaguggugauuggcuucgguugucaucugug

SEQ ID NO: 253531 - RNA, 32 nt, Homo Sapiens
ccccagcccaacccgagcccgacagccacugc

SEQ ID NO: 253532 - RNA, 32 nt, Homo Sapiens
gcucuaugauuuuuuuuuuuuacauuaggagg

SEQ ID NO: 253533 - RNA, 32 nt, Homo Sapiens
gauuuuuuuuuuucuuuuuuuucuuuaguguu

SEQ ID NO: 253534 - RNA, 32 nt, Homo Sapiens
cagcagccgccagcugaccucaccguccaggc

SEQ ID NO: 253535 - RNA, 29 nt, Homo Sapiens
ccaauuuggaguuucagauguaacaaaga

SEQ ID NO: 253536 - RNA, 32 nt, Homo Sapiens
aguguguaucuaacagaaaaaauauauauacc

SEQ ID NO: 253537 - RNA, 32 nt, Homo Sapiens
acugaaaguauuuaaauguuugccaaaaacaa

SEQ ID NO: 253538 - RNA, 32 nt, Homo Sapiens
cagcucuggugccugcccucuggugcgagcug

SEQ ID NO: 253539 - RNA, 32 nt, Homo Sapiens
aauauuaaaaauuuaauucagguucucuuaau

SEQ ID NO: 253540 - RNA, 32 nt, Homo Sapiens
gauuuggauaaaacuauuuuagugcauugaca

SEQ ID NO: 253541 - RNA, 32 nt, Homo Sapiens
gaaauuuaaaucaagaaaaaauuucugacgcu

SEQ ID NO: 253542 - RNA, 32 nt, Homo Sapiens
uuccccuaaaauuauaugcuggcuuuuaauuu

SEQ ID NO: 253543 - RNA, 32 nt, Homo Sapiens
gcuggccaugcgccagucuguggagagugaca

SEQ ID NO: 253544 - RNA, 32 nt, Homo Sapiens
ucugugaugagguuccagcuuacuucuauucg

SEQ ID NO: 253545 - RNA, 32 nt, Homo Sapiens
gugcugcugcauucaugguuagaagcuuucca

SEQ ID NO: 253546 - RNA, 32 nt, Homo Sapiens
cauuuccuguuaugaaauuuccacauuuugaa

SEQ ID NO: 253547 - RNA, 27 nt, Homo Sapiens
auaaaguccuucuguaguuuaucuucu

SEQ ID NO: 253548 - RNA, 32 nt, Homo Sapiens
uuccuccgccccaugcccagccuugcuuccgg

SEQ ID NO: 253549 - RNA, 32 nt, Homo Sapiens
cugguugcagcaugcuugaaaucugggaugug

SEQ ID NO: 253550 - RNA, 32 nt, Homo Sapiens
ggacaggccugccugcgugcugggacaugucu

SEQ ID NO: 253551 - RNA, 32 nt, Homo Sapiens
aaaguuguauauauuuaaugcugugcaacugc

SEQ ID NO: 253552 - RNA, 32 nt, Homo Sapiens
uggcccuaaacauguaaauaaucuuguaggug

SEQ ID NO: 253553 - RNA, 32 nt, Homo Sapiens
ucuggagucuggauguugcucuguaaagaccu

SEQ ID NO: 253554 - RNA, 32 nt, Homo Sapiens
aacugcguccccacccugaugcauuggccggu

SEQ ID NO: 253555 - RNA, 32 nt, Homo Sapiens
aauagugcuuugugacauaccaucucuuaccu

SEQ ID NO: 253556 - RNA, 32 nt, Homo Sapiens
gggcuguguggucaugucccacagcaagcuuu

SEQ ID NO: 253557 - RNA, 32 nt, Homo Sapiens
gcuaaucuaaaaaacuggugauauuuaauaug

SEQ ID NO: 253558 - RNA, 32 nt, Homo Sapiens
gcggacgugucugggcugugcggccgccuagg

SEQ ID NO: 253559 - RNA, 32 nt, Homo Sapiens
aucgaaaggagaaagauacaugaccgugugug

SEQ ID NO: 253560 - RNA, 32 nt, Homo Sapiens
uggacacagcugagaaaaucccugcccucaug

SEQ ID NO: 253561 - RNA, 32 nt, Homo Sapiens
uuggagagaaguuuaaaugcuuuacuguuggg

SEQ ID NO: 253562 - RNA, 32 nt, Homo Sapiens
uaccaagaagagggagcugaaaaggaaaauuu

SEQ ID NO: 253563 - RNA, 32 nt, Homo Sapiens
gcgggggucugcgcucucccgagcggccgcgc

SEQ ID NO: 253564 - RNA, 32 nt, Homo Sapiens
uaagugccgccugacccuuguacacuaggagc

SEQ ID NO: 253565 - RNA, 32 nt, Homo Sapiens
guauucaccuccacugcccccaggggcugugg

SEQ ID NO: 253566 - RNA, 32 nt, Homo Sapiens
gggagucccagggcucacccagauucagaggu

SEQ ID NO: 253567 - RNA, 32 nt, Homo Sapiens
caaauucuuuuaauucaacgggugcuuuacau

SEQ ID NO: 253568 - RNA, 32 nt, Homo Sapiens
cugccugggaugagaccaaucuauagggacgu

SEQ ID NO: 253569 - RNA, 32 nt, Homo Sapiens
acaugaaacaccuggcugugaaaacaaaacaa

SEQ ID NO: 253570 - RNA, 32 nt, Homo Sapiens
cuccguggcgcggaagacccgagccugccggg

SEQ ID NO: 253571 - RNA, 32 nt, Homo Sapiens
uccaugaauguuaaaauguacaggugggauug

SEQ ID NO: 253572 - RNA, 32 nt, Homo Sapiens
cugcaccaucccggcguucgcgugugccgccg

SEQ ID NO: 253573 - RNA, 31 nt, Homo Sapiens
caaggaagcuuccugucuccaaggggauuuu

SEQ ID NO: 253574 - RNA, 31 nt, Homo Sapiens
acggcagccgagguuuuuaaugagauucuuu

SEQ ID NO: 253575 - RNA, 32 nt, Homo Sapiens
cguggcuuuccacggacacuuugcugaccgcg

SEQ ID NO: 253576 - RNA, 32 nt, Homo Sapiens
gggcucuuuuucugugaggguacuugaagggc

SEQ ID NO: 253577 - RNA, 32 nt, Homo Sapiens
uacugguguuauuguucaagagugagaucuug

SEQ ID NO: 253578 - RNA, 32 nt, Homo Sapiens
cuugguugguguuggcaacaaacaggagcuuc

SEQ ID NO: 253579 - RNA, 32 nt, Homo Sapiens
uguaccuagaggccauucuggaugcugccaug

SEQ ID NO: 253580 - RNA, 32 nt, Homo Sapiens
auaagauuaagaaaaugauacugggaauuuuc

SEQ ID NO: 253581 - RNA, 32 nt, Homo Sapiens
ggaggagaccaucaaaugaauuauaucacugu

SEQ ID NO: 253582 - RNA, 32 nt, Homo Sapiens
auccuccuacccaaaaaggggucaauugucca

SEQ ID NO: 253583 - RNA, 32 nt, Homo Sapiens
accguguagauauacuuuauuguauaaguaga

SEQ ID NO: 253584 - RNA, 32 nt, Homo Sapiens
auacugcggucuuuuuacucguucuaucugau

SEQ ID NO: 253585 - RNA, 32 nt, Homo Sapiens
agucaacaagcaccuuccucuccacagaagca

SEQ ID NO: 253586 - RNA, 32 nt, Homo Sapiens
ggccggggcugagacuccggggagcgcccgcg

SEQ ID NO: 253587 - RNA, 32 nt, Homo Sapiens
augguaaaaaucagugaauguuuguugaauga

SEQ ID NO: 253588 - RNA, 32 nt, Homo Sapiens
cagucagcgcuuauuuaccaucaagcaaucca

SEQ ID NO: 253589 - RNA, 32 nt, Homo Sapiens
aaccacgcgcgggcugcccgcggcacggcggg

SEQ ID NO: 253590 - RNA, 27 nt, Homo Sapiens
caauacuccuucuuccuucaggucccu

SEQ ID NO: 253591 - RNA, 32 nt, Homo Sapiens
ucauuucugccagcuucuuaugguccugaggc

SEQ ID NO: 253592 - RNA, 32 nt, Homo Sapiens
uacagcucuuccuccaccccagcccccucacc

SEQ ID NO: 253593 - RNA, 32 nt, Homo Sapiens
ugugcuuugccgggaggagcggcggccgcagc

SEQ ID NO: 253594 - RNA, 32 nt, Homo Sapiens
aguguuagcaguguuaugcuaugucuauauaa

SEQ ID NO: 253595 - RNA, 32 nt, Homo Sapiens
ggcguccggcagccgagcgcacguucuuucgg

SEQ ID NO: 253596 - RNA, 32 nt, Homo Sapiens
ggcuaccuacuucuuaaauuccguuuguggac

SEQ ID NO: 253597 - RNA, 32 nt, Homo Sapiens
ggagaagcagugccuucccucucguguggggu

SEQ ID NO: 253598 - RNA, 32 nt, Homo Sapiens
acugcugaacuuuuaacaaacacuacaacaua

SEQ ID NO: 253599 - RNA, 32 nt, Homo Sapiens
uuuaaagaacagaaacuuuuccaauuaaaaaa

SEQ ID NO: 253600 - RNA, 32 nt, Homo Sapiens
uuucggagcggauggucagagaugaacagcag

SEQ ID NO: 253601 - RNA, 31 nt, Homo Sapiens
agauuuuguugaugacauuagauuaguaguu

SEQ ID NO: 253602 - RNA, 32 nt, Homo Sapiens
agggauccgauuaugacaggcugacccagcug

SEQ ID NO: 253603 - RNA, 32 nt, Homo Sapiens
uggagaccauccuggcuaacccggugaaaccc

SEQ ID NO: 253604 - RNA, 32 nt, Homo Sapiens
aaguguuuaccaagccguuggucuccuaaggg

SEQ ID NO: 253605 - RNA, 32 nt, Homo Sapiens
uuaccaaugaauuguacaacaauguaaaaaua

SEQ ID NO: 253606 - RNA, 32 nt, Homo Sapiens
ugguaggccccgcucugccugcuccgaucuuu

SEQ ID NO: 253607 - RNA, 32 nt, Homo Sapiens
cacccacauuggaaggagucuuucuuuagaac

SEQ ID NO: 253608 - RNA, 32 nt, Homo Sapiens
gaauugaagaacuccaaaagccugggaagaau

SEQ ID NO: 253609 - RNA, 32 nt, Homo Sapiens
gccaccccaaccagccccucucccagacucag

SEQ ID NO: 253610 - RNA, 32 nt, Homo Sapiens
uuccccaucuuuuccucgcauuuuuucaccau

SEQ ID NO: 253611 - RNA, 32 nt, Homo Sapiens
uugauccaugaaccagaaccacagggcgguau

SEQ ID NO: 253612 - RNA, 32 nt, Homo Sapiens
guuuuuauuguuaacucuugucuauuuuuguc

SEQ ID NO: 253613 - RNA, 31 nt, Homo Sapiens
ccuguacaagaggugucuuugcuugguuugg

SEQ ID NO: 253614 - RNA, 32 nt, Homo Sapiens
uucccuuuuuucuggagucuugagggccagag

SEQ ID NO: 253615 - RNA, 32 nt, Homo Sapiens
aagcacuaaaaauauacauugccgaaucucuu

SEQ ID NO: 253616 - RNA, 32 nt, Homo Sapiens
auccaggaugacccuggagagaccagaggggg

SEQ ID NO: 253617 - RNA, 32 nt, Homo Sapiens
uaaaagaaaauaauucuuacaucaucuuuugc

SEQ ID NO: 253618 - RNA, 31 nt, Homo Sapiens
cuguagaaauaaagacgguuuaaaucugaaa

SEQ ID NO: 253619 - RNA, 32 nt, Homo Sapiens
cugacuuucuucauagacccaucuucugcugg

SEQ ID NO: 253620 - RNA, 32 nt, Homo Sapiens
cacagaauacuaagcagccauaaaaaagaaaa

SEQ ID NO: 253621 - RNA, 32 nt, Homo Sapiens
ugccuuugcauaaaguugauuaaauaaauauu

SEQ ID NO: 253622 - RNA, 32 nt, Homo Sapiens
ucuguaugaaugccugugcuuaaaaccaggag

SEQ ID NO: 253623 - RNA, 32 nt, Homo Sapiens
aaguaccaauucguaguacauguaugguacuc

SEQ ID NO: 253624 - RNA, 32 nt, Homo Sapiens
aguugcaggaggagagguggauggcaauguga

SEQ ID NO: 253625 - RNA, 32 nt, Homo Sapiens
caggacauggcucugaagacucacucuuugga

SEQ ID NO: 253626 - RNA, 32 nt, Homo Sapiens
gagcuggaacauuugucuucuguccucagacu

SEQ ID NO: 253627 - RNA, 32 nt, Homo Sapiens
gaauuuucaauccucaaauuagcaucacuuga

SEQ ID NO: 253628 - RNA, 32 nt, Homo Sapiens
uaagcagugaucccagguagauaaucauauua

SEQ ID NO: 253629 - RNA, 32 nt, Homo Sapiens
uguacgacaaaauaaauuguaaagagugacug

SEQ ID NO: 253630 - RNA, 32 nt, Homo Sapiens
aacuuggugaagaacaagauagagacucaucu

SEQ ID NO: 253631 - RNA, 32 nt, Homo Sapiens
agaaagucacauuuaggguuuauuuuuuacac

SEQ ID NO: 253632 - RNA, 32 nt, Homo Sapiens
ggggcaggucauuuggaaauaaagaaugugau

SEQ ID NO: 253633 - RNA, 32 nt, Homo Sapiens
ggcagcaaggccaccugggcccugucucccag

SEQ ID NO: 253634 - RNA, 32 nt, Homo Sapiens
augccucucccauuuuagugguagcauuuugu

SEQ ID NO: 253635 - RNA, 28 nt, Homo Sapiens
uagaaggggcggccgccuccaggacuga

SEQ ID NO: 253636 - RNA, 32 nt, Homo Sapiens
cuaaagaaacuuuuauacuaggcuucuuaguu

SEQ ID NO: 253637 - RNA, 32 nt, Homo Sapiens
cucguugccaagcuccuccuguccccuuguuc

SEQ ID NO: 253638 - RNA, 32 nt, Homo Sapiens
uguaauuaaaauuguauauacguuuuagucaa

SEQ ID NO: 253639 - RNA, 32 nt, Homo Sapiens
uugauaccuuuuuaggaaaugugcauaccacu

SEQ ID NO: 253640 - RNA, 32 nt, Homo Sapiens
ccuggugccgugggagccacccccaggugcug

SEQ ID NO: 253641 - RNA, 32 nt, Homo Sapiens
aggaaagaacuucagcugacuccacggggauc

SEQ ID NO: 253642 - RNA, 32 nt, Homo Sapiens
gaaaaugugcuaauguggcagugacuguaaaa

SEQ ID NO: 253643 - RNA, 32 nt, Homo Sapiens
auaaugucacgaaggauuaagguaaagaugag

SEQ ID NO: 253644 - RNA, 32 nt, Homo Sapiens
caugguagcauuaaugaaaguuuaccaagagg

SEQ ID NO: 253645 - RNA, 32 nt, Homo Sapiens
ccccaaggcuccuggagccuguucggcucagg

SEQ ID NO: 253646 - RNA, 32 nt, Homo Sapiens
ugcugacgagagacagcccacccccagccugc

SEQ ID NO: 253647 - RNA, 30 nt, Homo Sapiens
ucugugagaagaaugccaaaugucacaguu

SEQ ID NO: 253648 - RNA, 32 nt, Homo Sapiens
uauuuuaguuugcauauauuuucacuguuuuu

SEQ ID NO: 253649 - RNA, 32 nt, Homo Sapiens
acagaguugaaguuguuuuuucaacuucuuuu

SEQ ID NO: 253650 - RNA, 32 nt, Homo Sapiens
ucgcgggugggaggagaggcacgccgggguuc

SEQ ID NO: 253651 - RNA, 32 nt, Homo Sapiens
uugugaaaugaauugagaagcuauccaucuca

SEQ ID NO: 253652 - RNA, 32 nt, Homo Sapiens
gaaggagcugggaggaccuaggcggccguucc

SEQ ID NO: 253653 - RNA, 31 nt, Homo Sapiens
uuccugcugggggagggaggaguccacgcau

SEQ ID NO: 253654 - RNA, 32 nt, Homo Sapiens
cuccugcaucugguuggucuuuauugagcacc

SEQ ID NO: 253655 - RNA, 32 nt, Homo Sapiens
agcccuccuaccccggcccgacgcucggcccg

SEQ ID NO: 253656 - RNA, 32 nt, Homo Sapiens
ugauaugccacuuuuagauagcuaauccccag

SEQ ID NO: 253657 - RNA, 30 nt, Homo Sapiens
ucauaaugaugauauuuagguugcauaucg

SEQ ID NO: 253658 - RNA, 32 nt, Homo Sapiens
cucccuaucccaggccuguguaaacgccagga

SEQ ID NO: 253659 - RNA, 32 nt, Homo Sapiens
cacugccuuaccccugcugcugcaguggugug

SEQ ID NO: 253660 - RNA, 32 nt, Homo Sapiens
ccauuguaucuaggaaguaacuaacuuguuuu

SEQ ID NO: 253661 - RNA, 32 nt, Homo Sapiens
uguauacauguuuuauuuuaaauuguacgaaa

SEQ ID NO: 253662 - RNA, 32 nt, Homo Sapiens
aaacauccucauuuuuaaaugucugcuuuacc

SEQ ID NO: 253663 - RNA, 32 nt, Homo Sapiens
aggaagggacacggaggccgcccucgccccgc

SEQ ID NO: 253664 - RNA, 32 nt, Homo Sapiens
gaaaccauccuuguuacuugcaugucuaaccc

SEQ ID NO: 253665 - RNA, 29 nt, Homo Sapiens
cuggguuggggacagagagcagagaggcc

SEQ ID NO: 253666 - RNA, 32 nt, Homo Sapiens
aacauuuauaggguuucucaccaguauggauu

SEQ ID NO: 253667 - RNA, 32 nt, Homo Sapiens
gaguaccuuucugcauauacuggauuguacuu

SEQ ID NO: 253668 - RNA, 32 nt, Homo Sapiens
uuagauguggaggucagaguggaagcaggugu

SEQ ID NO: 253669 - RNA, 32 nt, Homo Sapiens
guagggauagacagggaagcagugcugggaag

SEQ ID NO: 253670 - RNA, 32 nt, Homo Sapiens
gaauggaaaaagaauggaaacuuugcaugguu

SEQ ID NO: 253671 - RNA, 32 nt, Homo Sapiens
gugauguauugucuuccaguugcaauacaaau

SEQ ID NO: 253672 - RNA, 32 nt, Homo Sapiens
cuauacuugguugaugguuagaaccuugucgu

SEQ ID NO: 253673 - RNA, 32 nt, Homo Sapiens
guccccuggcuggccuggcuuuuggguucaag

SEQ ID NO: 253674 - RNA, 32 nt, Homo Sapiens
ggaagccacugggguguaaaauuuguucuuuu

SEQ ID NO: 253675 - RNA, 32 nt, Homo Sapiens
ccaagccauuccugggggauuccugggagcca

SEQ ID NO: 253676 - RNA, 32 nt, Homo Sapiens
aaacaagcauucaagcacuuuuacaaaauuac

SEQ ID NO: 253677 - RNA, 30 nt, Homo Sapiens
ucaucucuggacugcaacggucuucuugug

SEQ ID NO: 253678 - RNA, 32 nt, Homo Sapiens
gucucuuacuuuccuuuccccagcccagggug

SEQ ID NO: 253679 - RNA, 32 nt, Homo Sapiens
ugguauuuuugaugcugcuuccaauuuuaaaa

SEQ ID NO: 253680 - RNA, 32 nt, Homo Sapiens
uguauuuugguuagaagauauuauuaaaugca

SEQ ID NO: 253681 - RNA, 32 nt, Homo Sapiens
acaguguguuuguaaauauauaggaacguuuc

SEQ ID NO: 253682 - RNA, 32 nt, Homo Sapiens
caucuacaacuucagcugggcacuggcagcau

SEQ ID NO: 253683 - RNA, 32 nt, Homo Sapiens
gcggggaaguggucgcagugucugcgaccggg

SEQ ID NO: 253684 - RNA, 32 nt, Homo Sapiens
ugaggggauguguaggaguggagcaugaaaca

SEQ ID NO: 253685 - RNA, 32 nt, Homo Sapiens
cucugugaauggcguccuguaccugcagaugg

SEQ ID NO: 253686 - RNA, 32 nt, Homo Sapiens
aguccccggccgcgcggagccgggaugcacug

SEQ ID NO: 253687 - RNA, 32 nt, Homo Sapiens
gcccccgggaugcgcgcgcgagcccucgccuc

SEQ ID NO: 253688 - RNA, 32 nt, Homo Sapiens
augauuuauagcacaaccuuuccaauaauccc

SEQ ID NO: 253689 - RNA, 32 nt, Homo Sapiens
ccugagguccccucgucccauccagcuaccac

SEQ ID NO: 253690 - RNA, 32 nt, Homo Sapiens
caaauuugauuucaaagagcaaugcaucuucu

SEQ ID NO: 253691 - RNA, 32 nt, Homo Sapiens
ugaugacacuuccaaagguaugcaagauggcc

SEQ ID NO: 253692 - RNA, 32 nt, Homo Sapiens
cacugcaaccuccuccuccuggauucaagcaa

SEQ ID NO: 253693 - RNA, 32 nt, Homo Sapiens
gcaaugugaaagucaagaaguacaccucaucu

SEQ ID NO: 253694 - RNA, 32 nt, Homo Sapiens
cagauuugaaaagaacagaaggacugaagacc

SEQ ID NO: 253695 - RNA, 32 nt, Homo Sapiens
uguagcugcccggcgcggcgccgcccugcgcg

SEQ ID NO: 253696 - RNA, 32 nt, Homo Sapiens
agcccaaauggcaggcaucucauauguggcau

SEQ ID NO: 253697 - RNA, 32 nt, Homo Sapiens
ccucucuccgcgcgcacccccaacccgccccc

SEQ ID NO: 253698 - RNA, 32 nt, Homo Sapiens
agcugggagaugccuguugugugugucugcac

SEQ ID NO: 253699 - RNA, 32 nt, Homo Sapiens
cuccagucaccaugugaaguuccuugcuuccc

SEQ ID NO: 253700 - RNA, 32 nt, Homo Sapiens
aaaaaaaaaaauuuaguguaacuucaaagacu

SEQ ID NO: 253701 - RNA, 32 nt, Homo Sapiens
ggcgggcccggcgugcucaucaucucugcccc

SEQ ID NO: 253702 - RNA, 32 nt, Homo Sapiens
agauuacccuccaugauguggaugggccugau

SEQ ID NO: 253703 - RNA, 32 nt, Homo Sapiens
uguccguagcagcagugguucuucucgccuuc

SEQ ID NO: 253704 - RNA, 32 nt, Homo Sapiens
ggucuuugaauuauaugucuaauucuaugugu

SEQ ID NO: 253705 - RNA, 32 nt, Homo Sapiens
cccauuaauauuauguaacauaaaccacuugc

SEQ ID NO: 253706 - RNA, 32 nt, Homo Sapiens
gggggagugggaagguaggugggaaaugacaa

SEQ ID NO: 253707 - RNA, 32 nt, Homo Sapiens
cauauuuuccacaacuaaaaugugcauuauuu

SEQ ID NO: 253708 - RNA, 32 nt, Homo Sapiens
uacuccuacagcagcugcgucuccaacguuga

SEQ ID NO: 253709 - RNA, 32 nt, Homo Sapiens
acgcacacacugggccugggccagggccccag

SEQ ID NO: 253710 - RNA, 32 nt, Homo Sapiens
ugggccagggcgacguugaugacucaggaucu

SEQ ID NO: 253711 - RNA, 32 nt, Homo Sapiens
auagcaaacucacuuugacauuuuggaaauaa

SEQ ID NO: 253712 - RNA, 32 nt, Homo Sapiens
caugaggacugugaggggaggaggcggagccg

SEQ ID NO: 253713 - RNA, 32 nt, Homo Sapiens
cucgccccccagcgcgcccgggcccgagagga

SEQ ID NO: 253714 - RNA, 32 nt, Homo Sapiens
gaaguggacuaaggauuaaguaggaugucaac

SEQ ID NO: 253715 - RNA, 32 nt, Homo Sapiens
agacaagccugggaaacauagcaagaucucau

SEQ ID NO: 253716 - RNA, 32 nt, Homo Sapiens
cauuucuaaaauguucaucuuuuaaaagaucu

SEQ ID NO: 253717 - RNA, 32 nt, Homo Sapiens
gucuaguuaggacaagaauaguucauuuauuc

SEQ ID NO: 253718 - RNA, 32 nt, Homo Sapiens
cccaugaaagguggcuccacggucccagcgac

SEQ ID NO: 253719 - RNA, 32 nt, Homo Sapiens
auguaagguucuuauuggaacccaggcuccag

SEQ ID NO: 253720 - RNA, 32 nt, Homo Sapiens
cgccgggccccaaccagaggccccaccagugc

SEQ ID NO: 253721 - RNA, 31 nt, Homo Sapiens
gaacauuugaacaugaaugcuguuuguggua

SEQ ID NO: 253722 - RNA, 28 nt, Homo Sapiens
gcgauagcauaggcaaaggcccuugggc

SEQ ID NO: 253723 - RNA, 32 nt, Homo Sapiens
cgaccaccgcccggcgcgagccugcccccagc

SEQ ID NO: 253724 - RNA, 32 nt, Homo Sapiens
caagcucaccgccugaacacggagauugucuu

SEQ ID NO: 253725 - RNA, 32 nt, Homo Sapiens
uuugcuuccuuguaucucugccaagaccucuu

SEQ ID NO: 253726 - RNA, 32 nt, Homo Sapiens
ucccacccugaacaacgagccuuuucacccuu

SEQ ID NO: 253727 - RNA, 32 nt, Homo Sapiens
gauguaucacuauuagguaccaagugaguggg

SEQ ID NO: 253728 - RNA, 32 nt, Homo Sapiens
ccagccuuccagguggggucuccggaggcccu

SEQ ID NO: 253729 - RNA, 32 nt, Homo Sapiens
aagcuccuuuuggagaugauauaggaugugaa

SEQ ID NO: 253730 - RNA, 32 nt, Homo Sapiens
uauauaaaauucaaauuuuggugucuguuaau

SEQ ID NO: 253731 - RNA, 32 nt, Homo Sapiens
uuaguaaauguaauucuuacaacugacuauaa

SEQ ID NO: 253732 - RNA, 32 nt, Homo Sapiens
agaaaggaaaagacauuaucagggccuggaaa

SEQ ID NO: 253733 - RNA, 32 nt, Homo Sapiens
aguagaggggccugggggcuuccaaggcccca

SEQ ID NO: 253734 - RNA, 32 nt, Homo Sapiens
auucuuacuuuggggucaggaacuugaaggga

SEQ ID NO: 253735 - RNA, 32 nt, Homo Sapiens
acuggcuauuuucucuucucgccguagugccg

SEQ ID NO: 253736 - RNA, 32 nt, Homo Sapiens
aaggaagagcgcagacgcggaucgcgaauggg

SEQ ID NO: 253737 - RNA, 32 nt, Homo Sapiens
auugagcuaaaaaugcucaacuucugcuuuau

SEQ ID NO: 253738 - RNA, 32 nt, Homo Sapiens
auuaggauucaagggaaaucugcaugaagcca

SEQ ID NO: 253739 - RNA, 32 nt, Homo Sapiens
uauuugaagagccugagaaaucuuaucccguu

SEQ ID NO: 253740 - RNA, 32 nt, Homo Sapiens
gggaaaagucacagaagcuugcugggcuuugu

SEQ ID NO: 253741 - RNA, 32 nt, Homo Sapiens
gugaaauguaaauaaacuuauuuuuuuuaaaa

SEQ ID NO: 253742 - RNA, 32 nt, Homo Sapiens
uuaugaaaaaucauuauuuuuaguguaguuca

SEQ ID NO: 253743 - RNA, 32 nt, Homo Sapiens
ccuguuucuccuuuucuguugucgaguaaaau

SEQ ID NO: 253744 - RNA, 32 nt, Homo Sapiens
agccagagaaauuuaaaauuaccaacauccuu

SEQ ID NO: 253745 - RNA, 32 nt, Homo Sapiens
ugacugaaaugaaauauaaauaaaauauuuuc

SEQ ID NO: 253746 - RNA, 32 nt, Homo Sapiens
acaccacagguacuuguuucuuucucagaagg

SEQ ID NO: 253747 - RNA, 32 nt, Homo Sapiens
aggaaacuaggaugccucuuaaggucuugguc

SEQ ID NO: 253748 - RNA, 32 nt, Homo Sapiens
gcccaggcucuccuuucgcuuggcgugggcuu

SEQ ID NO: 253749 - RNA, 32 nt, Homo Sapiens
ccccagcuggaaccuggcagaggccuuaggac

SEQ ID NO: 253750 - RNA, 32 nt, Homo Sapiens
cuucccuuccccagcccugccaggccuuaacc

SEQ ID NO: 253751 - RNA, 32 nt, Homo Sapiens
uccuccucaagcccccaaggcccuucggcggg

SEQ ID NO: 253752 - RNA, 32 nt, Homo Sapiens
cgggagagcuaguggaugauggugccaauaac

SEQ ID NO: 253753 - RNA, 32 nt, Homo Sapiens
ugauuaugucaacauguuucugauguggcauu

SEQ ID NO: 253754 - RNA, 32 nt, Homo Sapiens
ggagcggcgagucccggggcggugccugucuc

SEQ ID NO: 253755 - RNA, 32 nt, Homo Sapiens
ucauguugcagcacagaagauuuuucaucguu

SEQ ID NO: 253756 - RNA, 32 nt, Homo Sapiens
agcgcgggagacgacgcgggggucuugcggag

SEQ ID NO: 253757 - RNA, 32 nt, Homo Sapiens
gacugccuuucuguaaaauuggaugccuagua

SEQ ID NO: 253758 - RNA, 32 nt, Homo Sapiens
cuccaaggguccccggcucuacccuccaguua

SEQ ID NO: 253759 - RNA, 32 nt, Homo Sapiens
gaguuugagguucauugucauuauggccacag

SEQ ID NO: 253760 - RNA, 32 nt, Homo Sapiens
gcuccguagagcuacacgcugcuucacaagca

SEQ ID NO: 253761 - RNA, 32 nt, Homo Sapiens
ggaggcucugaagcggcugcugcaccgcgggg

SEQ ID NO: 253762 - RNA, 32 nt, Homo Sapiens
cuaauagauuuauguuucuucaauuuaaauuu

SEQ ID NO: 253763 - RNA, 32 nt, Homo Sapiens
guuccacgacacgcuccccugccgccccgccu

SEQ ID NO: 253764 - RNA, 32 nt, Homo Sapiens
aggaagguguguggagauucuaaucccaacaa

SEQ ID NO: 253765 - RNA, 32 nt, Homo Sapiens
ucuuuucuuuugcuagaaaauuagucaggagg

SEQ ID NO: 253766 - RNA, 32 nt, Homo Sapiens
uacaaugugaaaauacaaugugaaauguacaa

SEQ ID NO: 253767 - RNA, 32 nt, Homo Sapiens
ucagcccucaggugcaguggcccuacccagcc

SEQ ID NO: 253768 - RNA, 32 nt, Homo Sapiens
uagagacccagcuuuauucaccugacuguuuc

SEQ ID NO: 253769 - RNA, 32 nt, Homo Sapiens
gcaaaggaauccauguaguagauauccucugc

SEQ ID NO: 253770 - RNA, 32 nt, Homo Sapiens
cuguuuauauuugcuuuuccuguuuuguaacc

SEQ ID NO: 253771 - RNA, 32 nt, Homo Sapiens
aauuccuggacacuuucuucucuucauucuua

SEQ ID NO: 253772 - RNA, 32 nt, Homo Sapiens
aacauacugaaacuauuuauauuuucuuuuuu

SEQ ID NO: 253773 - RNA, 32 nt, Homo Sapiens
gccaggcugucaacugugcauagaguccgugg

SEQ ID NO: 253774 - RNA, 32 nt, Homo Sapiens
ggaugauguauuccaagugcugaaagugaaug

SEQ ID NO: 253775 - RNA, 32 nt, Homo Sapiens
cugagcucgcgucugccacaugagaugggccu

SEQ ID NO: 253776 - RNA, 32 nt, Homo Sapiens
gaacaggagggagagagguggacaggcagagu

SEQ ID NO: 253777 - RNA, 32 nt, Homo Sapiens
aaauaaagugauucaaugggaauauuaauugc

SEQ ID NO: 253778 - RNA, 32 nt, Homo Sapiens
uuaguggacaagggaagggggaggcccagggc

SEQ ID NO: 253779 - RNA, 32 nt, Homo Sapiens
ugucuagccuggaugccuggguugcaggcccu

SEQ ID NO: 253780 - RNA, 32 nt, Homo Sapiens
aaacacagacugaacugcaguacuuuuccuua

SEQ ID NO: 253781 - RNA, 32 nt, Homo Sapiens
gagggcaccgccccgcuccccccaccaggaca

SEQ ID NO: 253782 - RNA, 32 nt, Homo Sapiens
aaaugcaugugugauuugaauuuuauaauugu

SEQ ID NO: 253783 - RNA, 32 nt, Homo Sapiens
aagcauaaauauaaaaagcaauauaguacuua

SEQ ID NO: 253784 - RNA, 32 nt, Homo Sapiens
uugaaggcauucuccagauucuuuuuaaaaga

SEQ ID NO: 253785 - RNA, 32 nt, Homo Sapiens
ucugcuccauccaucacccauuuacccaucuc

SEQ ID NO: 253786 - RNA, 32 nt, Homo Sapiens
gcuuguuuugucccggacucggugccccugua

SEQ ID NO: 253787 - RNA, 32 nt, Homo Sapiens
acuuaaagaaugggagaaaauauuugcaaagu

SEQ ID NO: 253788 - RNA, 32 nt, Homo Sapiens
uggcaccucaaagcugggagccaggcccugga

SEQ ID NO: 253789 - RNA, 32 nt, Homo Sapiens
cguuguuuacuuugcaaaauuugugacuuuua

SEQ ID NO: 253790 - RNA, 32 nt, Homo Sapiens
agccugcgcugacuuccccgagacgcgccgcg

SEQ ID NO: 253791 - RNA, 32 nt, Homo Sapiens
gagucuagaugugguuaaauuuugacuucugg

SEQ ID NO: 253792 - RNA, 32 nt, Homo Sapiens
uucuucccagucacuuuuuuuuuucucacugc

SEQ ID NO: 253793 - RNA, 32 nt, Homo Sapiens
cacccacccagcugucuggcccgauuccugcu

SEQ ID NO: 253794 - RNA, 32 nt, Homo Sapiens
cugcagucaccaucuucagaccacuccagagc

SEQ ID NO: 253795 - RNA, 31 nt, Homo Sapiens
ccuuuuaucagcuccauuugaguuaaacaau

SEQ ID NO: 253796 - RNA, 28 nt, Homo Sapiens
ggagaaauggcgaaugucauacacauga

SEQ ID NO: 253797 - RNA, 32 nt, Homo Sapiens
ggcgggcgggucacgaggucaagagauggaga

SEQ ID NO: 253798 - RNA, 32 nt, Homo Sapiens
gaaguuagggcgccggagcccgggccuggaac

SEQ ID NO: 253799 - RNA, 32 nt, Homo Sapiens
ggcauuucucaaccaucucucagcaguuauug

SEQ ID NO: 253800 - RNA, 32 nt, Homo Sapiens
uaugcuccaagcauguaaagaaaagaucgcag

SEQ ID NO: 253801 - RNA, 32 nt, Homo Sapiens
acuuagagaaaguuuuucuguuauaaaaauua

SEQ ID NO: 253802 - RNA, 32 nt, Homo Sapiens
cuauuguaggcaucuguaaauucuguuguagg

SEQ ID NO: 253803 - RNA, 32 nt, Homo Sapiens
augaauaaugccuuuguaaccacaacuuucac

SEQ ID NO: 253804 - RNA, 32 nt, Homo Sapiens
gacuuuuugucaacgaaauugguuuugauccc

SEQ ID NO: 253805 - RNA, 32 nt, Homo Sapiens
ugggauucggagccccgucgaauuugggggug

SEQ ID NO: 253806 - RNA, 32 nt, Homo Sapiens
guaaaagguccauuuuauuuauuuuugaauug

SEQ ID NO: 253807 - RNA, 32 nt, Homo Sapiens
aaucuagcccgggaaccgaguugcgggagugc

SEQ ID NO: 253808 - RNA, 32 nt, Homo Sapiens
gaccgcagccccuuggacuggugcuggggauu

SEQ ID NO: 253809 - RNA, 32 nt, Homo Sapiens
ugaaacaauuauuguacacuaacauauuuaga

SEQ ID NO: 253810 - RNA, 32 nt, Homo Sapiens
cguaaaacaccuguaacuagcuuuuuuaauuu

SEQ ID NO: 253811 - RNA, 32 nt, Homo Sapiens
uguacugagagacaaaaggaaaucacugaggc

SEQ ID NO: 253812 - RNA, 32 nt, Homo Sapiens
cucacuaugcuucaagguuuuucuuuagcagc

SEQ ID NO: 253813 - RNA, 32 nt, Homo Sapiens
gcucuccaggacuggaaaaagugcugcuauuu

SEQ ID NO: 253814 - RNA, 32 nt, Homo Sapiens
cauccuacuucaucagagaauucacaguggaa

SEQ ID NO: 253815 - RNA, 32 nt, Homo Sapiens
cugcguggagcacuuaaaguccagccuccagg

SEQ ID NO: 253816 - RNA, 32 nt, Homo Sapiens
ucauuuacauauuuuugucuuguugaucauua

SEQ ID NO: 253817 - RNA, 32 nt, Homo Sapiens
cuuccugucagugcccgagggacggugggaca

SEQ ID NO: 253818 - RNA, 32 nt, Homo Sapiens
agguccucauuucuccaagaaagagauggugu

SEQ ID NO: 253819 - RNA, 32 nt, Homo Sapiens
ccuccuucagcugccccuccccggcgcggggg

SEQ ID NO: 253820 - RNA, 32 nt, Homo Sapiens
cauagcccaagccaacuuguaucuuggugaua

SEQ ID NO: 253821 - RNA, 32 nt, Homo Sapiens
aauucaaggcuuuuaauacagucacuacacaa

SEQ ID NO: 253822 - RNA, 32 nt, Homo Sapiens
aauuuuuauacaagaacaccaauauacccccu

SEQ ID NO: 253823 - RNA, 32 nt, Homo Sapiens
uucuuaucugugauaaaucuauagaaagaauu

SEQ ID NO: 253824 - RNA, 32 nt, Homo Sapiens
ucauguuuauugucacaaaaccauuauuuaua

SEQ ID NO: 253825 - RNA, 32 nt, Homo Sapiens
guuagugcaauuuuguuuuucuuaaugccagu

SEQ ID NO: 253826 - RNA, 32 nt, Homo Sapiens
cacaugagcagggugagaggugaggcaagguu

SEQ ID NO: 253827 - RNA, 32 nt, Homo Sapiens
aucaccacaaaaccugauguuuuaaaugugcu

SEQ ID NO: 253828 - RNA, 32 nt, Homo Sapiens
ugggguugaaaucauuugaaaaugacuaagau

SEQ ID NO: 253829 - RNA, 32 nt, Homo Sapiens
gcucuuggauucaucucaucucauggaaugau

SEQ ID NO: 253830 - RNA, 32 nt, Homo Sapiens
gaguguccagcgguggcccaccucuuccuccc

SEQ ID NO: 253831 - RNA, 32 nt, Homo Sapiens
agagacucuuggggccggggucgggcacucca

SEQ ID NO: 253832 - RNA, 32 nt, Homo Sapiens
cgucugaacugugggagggaagugcuaacagc

SEQ ID NO: 253833 - RNA, 32 nt, Homo Sapiens
caggaaaguguuuuaauacaggguucaguauu

SEQ ID NO: 253834 - RNA, 32 nt, Homo Sapiens
ucauuggcgucacagugguuggauaugucgca

SEQ ID NO: 253835 - RNA, 32 nt, Homo Sapiens
cgccacugcauuccagccugggugacugagcg

SEQ ID NO: 253836 - RNA, 32 nt, Homo Sapiens
gccuugcagacaccaccacaugggcucugcuc

SEQ ID NO: 253837 - RNA, 32 nt, Homo Sapiens
ucuccaggugaagaggggguggaaacugcaag

SEQ ID NO: 253838 - RNA, 32 nt, Homo Sapiens
gaagagaucauguuauuucacucuucauguau

SEQ ID NO: 253839 - RNA, 32 nt, Homo Sapiens
uggagggcugaggucgggagggugguguguac

SEQ ID NO: 253840 - RNA, 32 nt, Homo Sapiens
uucaaaacaaucauagagaaggcagacacaaa

SEQ ID NO: 253841 - RNA, 32 nt, Homo Sapiens
gucuggccccuacaacuugaggucaguugcuc

SEQ ID NO: 253842 - RNA, 32 nt, Homo Sapiens
gugugagauuauuugcaauaauucauagguuc

SEQ ID NO: 253843 - RNA, 32 nt, Homo Sapiens
gaugcagcuccuugugggccuaccaggcuugg

SEQ ID NO: 253844 - RNA, 32 nt, Homo Sapiens
cugaguguuguccuggggcucuuuggaacgcc

SEQ ID NO: 253845 - RNA, 32 nt, Homo Sapiens
uaugaauauuccugauagaauaugcugacaag

SEQ ID NO: 253846 - RNA, 32 nt, Homo Sapiens
augaaucuauaaguaguaaaucagaaaguaac

SEQ ID NO: 253847 - RNA, 32 nt, Homo Sapiens
gcugccucggaacugugacacccccaucuucg

SEQ ID NO: 253848 - RNA, 32 nt, Homo Sapiens
agcagacuuuugugaacaaaaauuauaacauu

SEQ ID NO: 253849 - RNA, 32 nt, Homo Sapiens
aggccaccacccugcgaaucugcacgcgggcg

SEQ ID NO: 253850 - RNA, 32 nt, Homo Sapiens
uggacucccugaguuuguuaaaauaguagaag

SEQ ID NO: 253851 - RNA, 32 nt, Homo Sapiens
agggacacacgaucggggcaaguucugcuggc

SEQ ID NO: 253852 - RNA, 32 nt, Homo Sapiens
caggagcuuaugaagcacuuuaagaaagaaaa

SEQ ID NO: 253853 - RNA, 32 nt, Homo Sapiens
agcagagcagaguggggaggcggcaagaggac

SEQ ID NO: 253854 - RNA, 32 nt, Homo Sapiens
cagcccuuccguccuuccccagccgcucuugu

SEQ ID NO: 253855 - RNA, 32 nt, Homo Sapiens
uuugaugccuuagaagcugcuaucuugacuga

SEQ ID NO: 253856 - RNA, 32 nt, Homo Sapiens
gcccaggguaagggcuguugagguaccuuaag

SEQ ID NO: 253857 - RNA, 32 nt, Homo Sapiens
ggacaccaagggcccauuuccuccccucucua

SEQ ID NO: 253858 - RNA, 32 nt, Homo Sapiens
acggacauuacaccauugaugaggugaaauuu

SEQ ID NO: 253859 - RNA, 32 nt, Homo Sapiens
uuuuauugcagaagcuaaaaagcuaaaguacc

SEQ ID NO: 253860 - RNA, 32 nt, Homo Sapiens
ggccgcggaggugggacgcgaugcaguggccg

SEQ ID NO: 253861 - RNA, 32 nt, Homo Sapiens
ucucucucucucucuuuuuuuuuuagagacag

SEQ ID NO: 253862 - RNA, 32 nt, Homo Sapiens
gugaccagaagugcugaugaccucagggaaaa

SEQ ID NO: 253863 - RNA, 32 nt, Homo Sapiens
ugugacaucauaucugauaaccagaggucugg

SEQ ID NO: 253864 - RNA, 32 nt, Homo Sapiens
auuagucuucacaguuaugggauuguuauacu

SEQ ID NO: 253865 - RNA, 32 nt, Homo Sapiens
agcgauucaaggacauaaaucuucauucuuuu

SEQ ID NO: 253866 - RNA, 28 nt, Homo Sapiens
agaagguggcggccgcuggaaggaggcc

SEQ ID NO: 253867 - RNA, 32 nt, Homo Sapiens
ggguugagcuuagugauccucucucaaaccac

SEQ ID NO: 253868 - RNA, 32 nt, Homo Sapiens
auuuuccuggaaagacugauuguuuuauggug

SEQ ID NO: 253869 - RNA, 32 nt, Homo Sapiens
cgucgccaccgcagccgcccgagaggagcugg

SEQ ID NO: 253870 - RNA, 32 nt, Homo Sapiens
gaucucaaaaauaaauauaaauaucaaaaaag

SEQ ID NO: 253871 - RNA, 32 nt, Homo Sapiens
gagcggaggcugggcuuggccaggggcccgaa

SEQ ID NO: 253872 - RNA, 32 nt, Homo Sapiens
agcccccaccccagcccaccuggcucuuuguu

SEQ ID NO: 253873 - RNA, 32 nt, Homo Sapiens
ucuguagcuuuuugaccuaagaucucagcaau

SEQ ID NO: 253874 - RNA, 32 nt, Homo Sapiens
gagacggcucacguuccagcgugugcaugagc

SEQ ID NO: 253875 - RNA, 32 nt, Homo Sapiens
gaucuccugagcucaggaguucgagaccaccc

SEQ ID NO: 253876 - RNA, 29 nt, Homo Sapiens
aaaaaacuaguauguggaaagcuauggga

SEQ ID NO: 253877 - RNA, 32 nt, Homo Sapiens
auguuauuuuuaaacauuccauuugaacagua

SEQ ID NO: 253878 - RNA, 32 nt, Homo Sapiens
cauuuaauuuucaaaucacuguuggugccuaa

SEQ ID NO: 253879 - RNA, 32 nt, Homo Sapiens
ccaggccucacucagaggcaugagguggcgcg

SEQ ID NO: 253880 - RNA, 31 nt, Homo Sapiens
acaaacgaagaaaaacagguagauuuaaaau

SEQ ID NO: 253881 - RNA, 32 nt, Homo Sapiens
uaccuaaaaugguauaagauuuaucaauugua

SEQ ID NO: 253882 - RNA, 32 nt, Homo Sapiens
agcuuuauuugcuguaucaucaucaucaguau

SEQ ID NO: 253883 - RNA, 32 nt, Homo Sapiens
ucuccucaagcucgaccccccauccccaggau

SEQ ID NO: 253884 - RNA, 32 nt, Homo Sapiens
ggaaucuggaagaauuacuaugcugaauccua

SEQ ID NO: 253885 - RNA, 32 nt, Homo Sapiens
cccgcacggcggcuacggccuaggugagcggc

SEQ ID NO: 253886 - RNA, 32 nt, Homo Sapiens
uguuuuaacuucaggcaaaaucuuuaaccacu

SEQ ID NO: 253887 - RNA, 32 nt, Homo Sapiens
ggauucgugcgcgguaagaagcugcgcgguag

SEQ ID NO: 253888 - RNA, 32 nt, Homo Sapiens
cucuacacuaaaauauaaacaaaauaaaaaga

SEQ ID NO: 253889 - RNA, 32 nt, Homo Sapiens
cacugcaacuucugccuuccagguucaagcga

SEQ ID NO: 253890 - RNA, 32 nt, Homo Sapiens
cacuggaggaagagcgccugugcuguggucuu

SEQ ID NO: 253891 - RNA, 32 nt, Homo Sapiens
ccacacaccacuuuuugauugggaaugcugaa

SEQ ID NO: 253892 - RNA, 32 nt, Homo Sapiens
gcacauccaaaaauucugggucuuuucaguau

SEQ ID NO: 253893 - RNA, 32 nt, Homo Sapiens
ccgugccccuccccgcuguccucuuggcccca

SEQ ID NO: 253894 - RNA, 32 nt, Homo Sapiens
cuucagcgcgcccuguugcuucugcuagccua

SEQ ID NO: 253895 - RNA, 32 nt, Homo Sapiens
aagugugcagaucaccugagguccggagacca

SEQ ID NO: 253896 - RNA, 32 nt, Homo Sapiens
uuugaagccaucucuguucugcaggugagagg

SEQ ID NO: 253897 - RNA, 32 nt, Homo Sapiens
cuuuucggacagccaguaauucccgggcaagg

SEQ ID NO: 253898 - RNA, 31 nt, Homo Sapiens
ucuuuucauuugaauauuuaaauuuuauggu

SEQ ID NO: 253899 - RNA, 32 nt, Homo Sapiens
auaucgcugaauucuuuuucucagcaaggaac

SEQ ID NO: 253900 - RNA, 32 nt, Homo Sapiens
ccccaacuuucccacacauauuccugucuagu

SEQ ID NO: 253901 - RNA, 32 nt, Homo Sapiens
cagcucuugcugucagauacgcauccaagaag

SEQ ID NO: 253902 - RNA, 32 nt, Homo Sapiens
ucgguuuuugaaaaacauaauggaaauaaaac

SEQ ID NO: 253903 - RNA, 32 nt, Homo Sapiens
ucucucucuuaagccccauuugaaaggcuaga

SEQ ID NO: 253904 - RNA, 31 nt, Homo Sapiens
ugugguuuugagaccaccugaguuggaaccg

SEQ ID NO: 253905 - RNA, 32 nt, Homo Sapiens
gcucuguucuuagccuccugugcugcgugucc

SEQ ID NO: 253906 - RNA, 32 nt, Homo Sapiens
aauguuaauguucgaguuuucuuaucuugugu

SEQ ID NO: 253907 - RNA, 32 nt, Homo Sapiens
cguaguauauucaugauucaguguagaaugua

SEQ ID NO: 253908 - RNA, 32 nt, Homo Sapiens
cggauccaagacuccuucaccuccccccgcau

SEQ ID NO: 253909 - RNA, 30 nt, Homo Sapiens
aagcugggccggcgcgcggggucggcggag

SEQ ID NO: 253910 - RNA, 32 nt, Homo Sapiens
auuacauuuuuaaaugaaauuuucaaaguggc

SEQ ID NO: 253911 - RNA, 32 nt, Homo Sapiens
caccaagcccuacucucuaguuuuccauauaa

SEQ ID NO: 253912 - RNA, 32 nt, Homo Sapiens
gagaguauuaugagggaggccgaggacuucau

SEQ ID NO: 253913 - RNA, 32 nt, Homo Sapiens
uugggaaaccaucaucacuagaggccuuugcu

SEQ ID NO: 253914 - RNA, 32 nt, Homo Sapiens
cacaucuaaggugacuaacaaugacaaaggcc

SEQ ID NO: 253915 - RNA, 32 nt, Homo Sapiens
ugcuucuguaguucacaaauguuacauuucag

SEQ ID NO: 253916 - RNA, 32 nt, Homo Sapiens
cccgggaccccgcucgucuuccuugggccgag

SEQ ID NO: 253917 - RNA, 32 nt, Homo Sapiens
gccccgucccgggaaccacuggcacuccuugg

SEQ ID NO: 253918 - RNA, 32 nt, Homo Sapiens
ggagagcgggcucccagcgcuggguaggggcc

SEQ ID NO: 253919 - RNA, 28 nt, Homo Sapiens
uguugaggaaagcugcauuugaaccaaa

SEQ ID NO: 253920 - RNA, 32 nt, Homo Sapiens
ccgggaccgacggcugggggcugccgagcggc

SEQ ID NO: 253921 - RNA, 32 nt, Homo Sapiens
aacuuacaggagguuaggggggaaauauuacu

SEQ ID NO: 253922 - RNA, 32 nt, Homo Sapiens
cugcacguguacacaugacuaggauaggcagg

SEQ ID NO: 253923 - RNA, 32 nt, Homo Sapiens
uaaaauguuccucugcucuuugaaaguaagag

SEQ ID NO: 253924 - RNA, 32 nt, Homo Sapiens
agggaacagcaggugucaaggcuggcagcagu

SEQ ID NO: 253925 - RNA, 31 nt, Homo Sapiens
ucugcuuguaguacucucaguccugauguca

SEQ ID NO: 253926 - RNA, 32 nt, Homo Sapiens
caaagaaggcacaacaccauauggaaaagcaa

SEQ ID NO: 253927 - RNA, 32 nt, Homo Sapiens
agcugggugugguggcgggcgugugucguccc

SEQ ID NO: 253928 - RNA, 32 nt, Homo Sapiens
uuccuuuuugggagcugaaaaauuuccgguaa

SEQ ID NO: 253929 - RNA, 32 nt, Homo Sapiens
ggugagccggcguguccuggggagaugcugcc

SEQ ID NO: 253930 - RNA, 32 nt, Homo Sapiens
accugccaacuacuccugcagccccacccaga

SEQ ID NO: 253931 - RNA, 32 nt, Homo Sapiens
gagugcaucucuucuuuccuuuagucuucaca

SEQ ID NO: 253932 - RNA, 32 nt, Homo Sapiens
gcgugggugucugcuacuuccccaucuuuaaa

SEQ ID NO: 253933 - RNA, 32 nt, Homo Sapiens
agccucacccucaaguagaagcaguguuuucu

SEQ ID NO: 253934 - RNA, 32 nt, Homo Sapiens
uguuuguaacuuaaaauuuuuaaugaaggaua

SEQ ID NO: 253935 - RNA, 32 nt, Homo Sapiens
uuuuaaaaaucaaaacaaaaaauaccacagcu

SEQ ID NO: 253936 - RNA, 32 nt, Homo Sapiens
acaggaucucaaccuuucuuugacuggauuac

SEQ ID NO: 253937 - RNA, 32 nt, Homo Sapiens
uggucaaagaaacgagauaauuccuagaucuc

SEQ ID NO: 253938 - RNA, 32 nt, Homo Sapiens
guuucagaauacugggcucaauacuaacauaa

SEQ ID NO: 253939 - RNA, 30 nt, Homo Sapiens
gccccacuggggcugcuccguccggaaccu

SEQ ID NO: 253940 - RNA, 32 nt, Homo Sapiens
uuuuaacauacagaauuuuaaauaccacaacu

SEQ ID NO: 253941 - RNA, 32 nt, Homo Sapiens
auuucucaugcgucuuuuuuuuuuuuuugagc

SEQ ID NO: 253942 - RNA, 32 nt, Homo Sapiens
ucaauuugcuguccuuguuuuagguucuuuug

SEQ ID NO: 253943 - RNA, 32 nt, Homo Sapiens
cccgccuugugcccugcggccacacauacuuc

SEQ ID NO: 253944 - RNA, 32 nt, Homo Sapiens
uagaacauauccuccagagacuuggcuuaauu

SEQ ID NO: 253945 - RNA, 31 nt, Homo Sapiens
ugcuggccacggagacucugcuccugcaugg

SEQ ID NO: 253946 - RNA, 32 nt, Homo Sapiens
aaacaugguaguguucauggguaaauauuuuc

SEQ ID NO: 253947 - RNA, 32 nt, Homo Sapiens
aaaacaccaaggaaauaucaaagaacacaacg

SEQ ID NO: 253948 - RNA, 32 nt, Homo Sapiens
agcagcucggacucagcucccggagcaaccca

SEQ ID NO: 253949 - RNA, 32 nt, Homo Sapiens
uuuuuguuuuucugcuuuagacuugaaaagag

SEQ ID NO: 253950 - RNA, 32 nt, Homo Sapiens
gauuggucuaugaaacaucaguucuugauccu

SEQ ID NO: 253951 - RNA, 32 nt, Homo Sapiens
ugaccccagcaguuagggacuggcugcauagc

SEQ ID NO: 253952 - RNA, 32 nt, Homo Sapiens
uguaaaucaucuuuuuacauuuguuuguaaac

SEQ ID NO: 253953 - RNA, 32 nt, Homo Sapiens
ggguuuuacaaagucguugccuuaaugcaugu

SEQ ID NO: 253954 - RNA, 32 nt, Homo Sapiens
cuuacccugugcugugaauguaacagugggcc

SEQ ID NO: 253955 - RNA, 32 nt, Homo Sapiens
cagcucagagcccagggucaggaguucguuca

SEQ ID NO: 253956 - RNA, 32 nt, Homo Sapiens
auauacuguauauauaaaaaucuugagauggu

SEQ ID NO: 253957 - RNA, 32 nt, Homo Sapiens
ggccuaauauccagcaucuauaggacgcuuac

SEQ ID NO: 253958 - RNA, 32 nt, Homo Sapiens
uaaaaaguuuucuuguuuaggcaauuugguaa

SEQ ID NO: 253959 - RNA, 32 nt, Homo Sapiens
ccccugaauaaaccucaauugcuggagugggg

SEQ ID NO: 253960 - RNA, 32 nt, Homo Sapiens
uggccuucaaggacuggaauccugccaagggc

SEQ ID NO: 253961 - RNA, 32 nt, Homo Sapiens
ugugcacccucuauuauaucacucguaugucu

SEQ ID NO: 253962 - RNA, 32 nt, Homo Sapiens
cauuugcaaaguucuauggcugucaccuuaau

SEQ ID NO: 253963 - RNA, 32 nt, Homo Sapiens
cccccaaguccuccuccgccuccuccucucug

SEQ ID NO: 253964 - RNA, 32 nt, Homo Sapiens
gacuccuccucucuccuucgaaagagccgaca

SEQ ID NO: 253965 - RNA, 32 nt, Homo Sapiens
gucuggucuguccucccuguugauuggucugg

SEQ ID NO: 253966 - RNA, 32 nt, Homo Sapiens
agcacuuugaggggcggaggugggcggaucac

SEQ ID NO: 253967 - RNA, 32 nt, Homo Sapiens
acauggcaucccggugaaagaaagcccuaacc

SEQ ID NO: 253968 - RNA, 32 nt, Homo Sapiens
aauaccaaccucaccaacaucugcagaauggg

SEQ ID NO: 253969 - RNA, 32 nt, Homo Sapiens
aaggugccaggggcuccgggcggccgggcggg

SEQ ID NO: 253970 - RNA, 32 nt, Homo Sapiens
gaugccuuacaaaagaaaacaucuuuucuaau

SEQ ID NO: 253971 - RNA, 32 nt, Homo Sapiens
ccuguauuguucauagaacuuuucuuaaaaaa

SEQ ID NO: 253972 - RNA, 32 nt, Homo Sapiens
agugugcaugugguugucauuuuuauuucacc

SEQ ID NO: 253973 - RNA, 32 nt, Homo Sapiens
agaucagccugggcaguauagcaagaccccau

SEQ ID NO: 253974 - RNA, 32 nt, Homo Sapiens
aaggaaauagaacagucugcugggagucagac

SEQ ID NO: 253975 - RNA, 32 nt, Homo Sapiens
cuauaagguucaaaguuuugcuucaacuuuuu

SEQ ID NO: 253976 - RNA, 31 nt, Homo Sapiens
cuucgcagacccggccaaccagaggcgaggu

SEQ ID NO: 253977 - RNA, 32 nt, Homo Sapiens
cucagcccaggcgcccgcccccgcccccgccg

SEQ ID NO: 253978 - RNA, 32 nt, Homo Sapiens
acaacgagggaagaaggaaccagaccuuagug

SEQ ID NO: 253979 - RNA, 32 nt, Homo Sapiens
aaggguggccuguggccuccccguccuccugc

SEQ ID NO: 253980 - RNA, 32 nt, Homo Sapiens
gacgcccaccgccccuuucccuccgcugccag

SEQ ID NO: 253981 - RNA, 32 nt, Homo Sapiens
cuguuuucaaaaaaccugaauggaacaaccug

SEQ ID NO: 253982 - RNA, 32 nt, Homo Sapiens
uucagggccugccuggcaccucagguacuggg

SEQ ID NO: 253983 - RNA, 32 nt, Homo Sapiens
guuuugaaccaucagagcuuggacuuuucuga

SEQ ID NO: 253984 - RNA, 32 nt, Homo Sapiens
ccagugucaucucuggagaaguccagccuuuu

SEQ ID NO: 253985 - RNA, 32 nt, Homo Sapiens
ggaggccaaucggcggcgguugcgaccugcug

SEQ ID NO: 253986 - RNA, 32 nt, Homo Sapiens
accguggcgggggcgggcagggguucccauuu

SEQ ID NO: 253987 - RNA, 32 nt, Homo Sapiens
gaggcaggauguaucugugauaucuggaccuc

SEQ ID NO: 253988 - RNA, 32 nt, Homo Sapiens
agcaaacacuaguggaacuuggagcauugugg

SEQ ID NO: 253989 - RNA, 32 nt, Homo Sapiens
ggaauaggagaugccagagcugcuuuagcuga

SEQ ID NO: 253990 - RNA, 32 nt, Homo Sapiens
ccccauggaucugaacuuuucauuuuaaaaac

SEQ ID NO: 253991 - RNA, 32 nt, Homo Sapiens
guggagucaccaugcugagucgcccuucucag

SEQ ID NO: 253992 - RNA, 32 nt, Homo Sapiens
ucugagaggcuugagaguguugccagguggag

SEQ ID NO: 253993 - RNA, 32 nt, Homo Sapiens
cagucuugcauucuguuugucucgugggggga

SEQ ID NO: 253994 - RNA, 32 nt, Homo Sapiens
gaauaucaguuuuagaauaguuucucuggugg

SEQ ID NO: 253995 - RNA, 32 nt, Homo Sapiens
uacccuucagcuuugaccccaacaccgcagcu

SEQ ID NO: 253996 - RNA, 32 nt, Homo Sapiens
gagauccuugguggucccagccucccaguccc

SEQ ID NO: 253997 - RNA, 32 nt, Homo Sapiens
auuacaaaaaaauuauuucuacacugacagga

SEQ ID NO: 253998 - RNA, 32 nt, Homo Sapiens
ccagcagcacaggccgcagagcccaggagaug

SEQ ID NO: 253999 - RNA, 31 nt, Homo Sapiens
gggaggaaggagucggggacggccucaaacu

SEQ ID NO: 254000 - RNA, 32 nt, Homo Sapiens
ggagguccccugccccucccccugcucaaagg

SEQ ID NO: 254001 - RNA, 32 nt, Homo Sapiens
gucaagccaagagcuacuugcccgaagguacg

SEQ ID NO: 254002 - RNA, 32 nt, Homo Sapiens
auccuguuaaucagaaucaugggggagaacau

SEQ ID NO: 254003 - RNA, 32 nt, Homo Sapiens
agucaggggagagggcacaggcauagagggaa

SEQ ID NO: 254004 - RNA, 32 nt, Homo Sapiens
acggcauuccuaccccucccccauucccagcu

SEQ ID NO: 254005 - RNA, 32 nt, Homo Sapiens
ccaugcagggggcuccuggggguggggaggug

SEQ ID NO: 254006 - RNA, 32 nt, Homo Sapiens
uaagcuuugccagcugcugcuggaucacagcu

SEQ ID NO: 254007 - RNA, 32 nt, Homo Sapiens
gugccaggcacguuacuagcugcuacauacug

SEQ ID NO: 254008 - RNA, 32 nt, Homo Sapiens
cacaccuagcuaauuuuuguauuuuuuguaga

SEQ ID NO: 254009 - RNA, 32 nt, Homo Sapiens
cuugauaucuucuguuuucccauugcaguuga

SEQ ID NO: 254010 - RNA, 32 nt, Homo Sapiens
gccgagcgcacgccuugccgccgccccgcaga

SEQ ID NO: 254011 - RNA, 32 nt, Homo Sapiens
gugguaagucuuuuuucuuagauugcgcuaaa

SEQ ID NO: 254012 - RNA, 32 nt, Homo Sapiens
gguucgggacaaaguugcccaaccuaguggug

SEQ ID NO: 254013 - RNA, 32 nt, Homo Sapiens
uuuuggaauuuuguuuguuggcaaauucugug

SEQ ID NO: 254014 - RNA, 32 nt, Homo Sapiens
ugccugagggaagaugccuaguagaggaaagc

SEQ ID NO: 254015 - RNA, 32 nt, Homo Sapiens
ggaauauagaaagugcucaauuaacugacauu

SEQ ID NO: 254016 - RNA, 32 nt, Homo Sapiens
uaccccauacccaguggcagagguguucuuua

SEQ ID NO: 254017 - RNA, 32 nt, Homo Sapiens
acaaaaguauaaaugaauauuuuaaugccaca

SEQ ID NO: 254018 - RNA, 32 nt, Homo Sapiens
cugggaucagcggcgagaagcggggcggaguc

SEQ ID NO: 254019 - RNA, 32 nt, Homo Sapiens
aaagaaaauuuaucucuuuuuauaaacuuaag

SEQ ID NO: 254020 - RNA, 32 nt, Homo Sapiens
gucucauguuacagagcuuccauuacauauua

SEQ ID NO: 254021 - RNA, 32 nt, Homo Sapiens
cagguuucuacaaauaggguaauuguaaauuu

SEQ ID NO: 254022 - RNA, 32 nt, Homo Sapiens
uccgugauugcaaauuaugaccucaaauucca

SEQ ID NO: 254023 - RNA, 32 nt, Homo Sapiens
augcauuuaggcauuguagagaucugaaauag

SEQ ID NO: 254024 - RNA, 32 nt, Homo Sapiens
guuuuguugcuuaggauaugaauggcugagcg

SEQ ID NO: 254025 - RNA, 32 nt, Homo Sapiens
cauggucuagcaugcaucuuguagaaacaagg

SEQ ID NO: 254026 - RNA, 32 nt, Homo Sapiens
ggcuguguggcggcuccgcgguucgcaggucg

SEQ ID NO: 254027 - RNA, 32 nt, Homo Sapiens
uuccacaguuuuuuccgcagacuucuuucugc

SEQ ID NO: 254028 - RNA, 32 nt, Homo Sapiens
cacugcccccuggugggcguccauaacacuau

SEQ ID NO: 254029 - RNA, 32 nt, Homo Sapiens
auggauuacugauggauucuucucagcacuua

SEQ ID NO: 254030 - RNA, 32 nt, Homo Sapiens
cucggccacuggaaaaucccacagggguauau

SEQ ID NO: 254031 - RNA, 32 nt, Homo Sapiens
cugaauaguuugauggggcgccgggcggauga

SEQ ID NO: 254032 - RNA, 32 nt, Homo Sapiens
ucauauaacaauauaucuuaaugaguaagucc

SEQ ID NO: 254033 - RNA, 32 nt, Homo Sapiens
gacaauauacuguauuaauaaaacagacuaaa

SEQ ID NO: 254034 - RNA, 32 nt, Homo Sapiens
uucccccgcccggccgcaccauaaagcgcccg

SEQ ID NO: 254035 - RNA, 32 nt, Homo Sapiens
ucgucgagggcuccuccaccaccggccggcuc

SEQ ID NO: 254036 - RNA, 32 nt, Homo Sapiens
gccuggucauggcuuccagcuuuucgaaucug

SEQ ID NO: 254037 - RNA, 32 nt, Homo Sapiens
uagguaauauaauguauggguuuucuauuggu

SEQ ID NO: 254038 - RNA, 32 nt, Homo Sapiens
uuugcacguggggacaggauuugccaguucac

SEQ ID NO: 254039 - RNA, 32 nt, Homo Sapiens
cucuaaaacaaaccaccugaccaagagggaag

SEQ ID NO: 254040 - RNA, 32 nt, Homo Sapiens
cuauuauuuucagaauaauaauaaaacaagaa

SEQ ID NO: 254041 - RNA, 32 nt, Homo Sapiens
gucuggccgggcgggggccugaagcacggcgg

SEQ ID NO: 254042 - RNA, 32 nt, Homo Sapiens
ugcagcuucccucuccucuuuuuuauuuuuga

SEQ ID NO: 254043 - RNA, 32 nt, Homo Sapiens
acccacacaaagugcaacaagaaucauugucc

SEQ ID NO: 254044 - RNA, 32 nt, Homo Sapiens
aggagaaguaaggcccuggagugccaggagcc

SEQ ID NO: 254045 - RNA, 32 nt, Homo Sapiens
gccacucccaugcacaguucugcacagugucu

SEQ ID NO: 254046 - RNA, 32 nt, Homo Sapiens
gagcuauuucagccacaugaaaagcaucggaa

SEQ ID NO: 254047 - RNA, 32 nt, Homo Sapiens
guuagaaugcaagcagcuuaaaaacuacccau

SEQ ID NO: 254048 - RNA, 32 nt, Homo Sapiens
gugaggacaaagugaaaagacaccaucuauga

SEQ ID NO: 254049 - RNA, 32 nt, Homo Sapiens
gcucugcucagggcccauuucaucucuggcag

SEQ ID NO: 254050 - RNA, 32 nt, Homo Sapiens
auuuuauuaaaaaacaaacaaacaaacaaaaa

SEQ ID NO: 254051 - RNA, 32 nt, Homo Sapiens
uuauaugaauauuuguuuuuuauaguuuaaaa

SEQ ID NO: 254052 - RNA, 32 nt, Homo Sapiens
auuuuaaacuuucaaaaacugcuaaaacaggu

SEQ ID NO: 254053 - RNA, 32 nt, Homo Sapiens
gaggaggccuccuggguuuguccagugccuac

SEQ ID NO: 254054 - RNA, 32 nt, Homo Sapiens
cccggacuacagcacggaaggacccccgaucc

SEQ ID NO: 254055 - RNA, 32 nt, Homo Sapiens
gaagagagaagcugucuguacuuuggggacua

SEQ ID NO: 254056 - RNA, 32 nt, Homo Sapiens
ggucacgaugaaaugucugcguguuuucucaa

SEQ ID NO: 254057 - RNA, 29 nt, Homo Sapiens
cgccucaaaaauaaaaaauaaaaaauaaa

SEQ ID NO: 254058 - RNA, 29 nt, Homo Sapiens
uccaaggaaaguuuauacucuuuuuguaa

SEQ ID NO: 254059 - RNA, 32 nt, Homo Sapiens
cuaccgaaucuggguuugguuugguuuuauuu

SEQ ID NO: 254060 - RNA, 32 nt, Homo Sapiens
cgccugccuguggucaggcauuccucacuccc

SEQ ID NO: 254061 - RNA, 32 nt, Homo Sapiens
cugaugaauuugcagaucaaucuccuggaaac

SEQ ID NO: 254062 - RNA, 32 nt, Homo Sapiens
gcacggccugggggcgcacggugcggcgccgg

SEQ ID NO: 254063 - RNA, 32 nt, Homo Sapiens
ucucauuuuuauugcuuuuucccacgucccac

SEQ ID NO: 254064 - RNA, 32 nt, Homo Sapiens
caaccuguauauauauugcauucgugcugacu

SEQ ID NO: 254065 - RNA, 32 nt, Homo Sapiens
gcaggccaggccugggucuggagccguccugg

SEQ ID NO: 254066 - RNA, 32 nt, Homo Sapiens
augucaggcauuugaugccucaauaucagaaa

SEQ ID NO: 254067 - RNA, 32 nt, Homo Sapiens
acgagaaagcugcccaugagaaagauauggaa

SEQ ID NO: 254068 - RNA, 32 nt, Homo Sapiens
cccacccggcccggcugagcccugccccaccc

SEQ ID NO: 254069 - RNA, 32 nt, Homo Sapiens
gacuuuggacucucuuagggccccuguugaua

SEQ ID NO: 254070 - RNA, 32 nt, Homo Sapiens
gaaauguggugacacccauuucacaaggacag

SEQ ID NO: 254071 - RNA, 32 nt, Homo Sapiens
uggccacuggcacuugccugcugcuuggagug

SEQ ID NO: 254072 - RNA, 32 nt, Homo Sapiens
gucauuagaaaugaguaguguuaaugauccau

SEQ ID NO: 254073 - RNA, 32 nt, Homo Sapiens
uguuauuauuuguccaaucaagcaaagcacca

SEQ ID NO: 254074 - RNA, 32 nt, Homo Sapiens
gcgcuccauggugcuggcgaggaggcuggugg

SEQ ID NO: 254075 - RNA, 32 nt, Homo Sapiens
ccaagcagccccgcccucuuccccucaacccc

SEQ ID NO: 254076 - RNA, 32 nt, Homo Sapiens
gggcagcaggcugcacugaggaccgugagcuc

SEQ ID NO: 254077 - RNA, 32 nt, Homo Sapiens
agagacgaauauuguuucccugcuagccucag

SEQ ID NO: 254078 - RNA, 32 nt, Homo Sapiens
augaaaauaaauuucuuuuuuaugucgugaga

SEQ ID NO: 254079 - RNA, 32 nt, Homo Sapiens
gugggaggggaggggaugagggggcaccuggg

SEQ ID NO: 254080 - RNA, 32 nt, Homo Sapiens
gauugcugggggugggggcucaggagacagaa

SEQ ID NO: 254081 - RNA, 32 nt, Homo Sapiens
agcucccagggccagagcagcaucucucuucu

SEQ ID NO: 254082 - RNA, 32 nt, Homo Sapiens
gaaauccaagaaccauauuagauggauaggau

SEQ ID NO: 254083 - RNA, 32 nt, Homo Sapiens
ugcugccgcaggagggcaggccgcaagugggg

SEQ ID NO: 254084 - RNA, 32 nt, Homo Sapiens
cugggcugagaggggagggggcggcggcggcc

SEQ ID NO: 254085 - RNA, 32 nt, Homo Sapiens
ggccugggugccggcuccugcaggcugggauc

SEQ ID NO: 254086 - RNA, 32 nt, Homo Sapiens
aaacguuccauuucuuuuuucccucauuuuug

SEQ ID NO: 254087 - RNA, 32 nt, Homo Sapiens
aggcaagaaaaaacacagcuaggcuaagucaa

SEQ ID NO: 254088 - RNA, 32 nt, Homo Sapiens
ugcuuguuuggcaaauaauuuacuuaaauuuu

SEQ ID NO: 254089 - RNA, 31 nt, Homo Sapiens
uuuugacuugguaagcaaguauuaggcuuug

SEQ ID NO: 254090 - RNA, 32 nt, Homo Sapiens
guuugcagguugcugugccugauucacagugu

SEQ ID NO: 254091 - RNA, 32 nt, Homo Sapiens
uuaagauuuugagcauuuuuacguacuugagc

SEQ ID NO: 254092 - RNA, 32 nt, Homo Sapiens
cccucgcucgucucagcccagcccuggaagac

SEQ ID NO: 254093 - RNA, 32 nt, Homo Sapiens
uggaugaaacaggcccuugaguugggagccug

SEQ ID NO: 254094 - RNA, 32 nt, Homo Sapiens
cacccccagccccucggcacagcccuccugug

SEQ ID NO: 254095 - RNA, 31 nt, Homo Sapiens
caggaggcaauuugccugccuuguacaaaag

SEQ ID NO: 254096 - RNA, 32 nt, Homo Sapiens
uucuuuugaagaauagagugguauuuagaaaa

SEQ ID NO: 254097 - RNA, 32 nt, Homo Sapiens
ucaauuaaacggauuccaccggacuuugugau

SEQ ID NO: 254098 - RNA, 32 nt, Homo Sapiens
gucccugcuagucaagagggugaggcaggaga

SEQ ID NO: 254099 - RNA, 32 nt, Homo Sapiens
uacuggaucauaugauaacucuguuuuaauuu

SEQ ID NO: 254100 - RNA, 32 nt, Homo Sapiens
aacucccccacccaggacggcugugaugaggu

SEQ ID NO: 254101 - RNA, 32 nt, Homo Sapiens
ucaccaaauaaucuuaccucuagucuacuuac

SEQ ID NO: 254102 - RNA, 32 nt, Homo Sapiens
ggaauuucacuuuuucauccaccacccucccc

SEQ ID NO: 254103 - RNA, 31 nt, Homo Sapiens
cuucccacaaagaauauagaugauaguagau

SEQ ID NO: 254104 - RNA, 32 nt, Homo Sapiens
agcagccuuauuucuuuuuuuguacaaacaaa

SEQ ID NO: 254105 - RNA, 32 nt, Homo Sapiens
gccaagaagugaggccugggggugggggaggg

SEQ ID NO: 254106 - RNA, 32 nt, Homo Sapiens
aaccuuaaugaaaucccuaauaaaacucagug

SEQ ID NO: 254107 - RNA, 32 nt, Homo Sapiens
gacugaaauauguuuugguggggaugggacgg

SEQ ID NO: 254108 - RNA, 32 nt, Homo Sapiens
cccagagaacugggcugggcccuaugggauug

SEQ ID NO: 254109 - RNA, 32 nt, Homo Sapiens
uuaaaaggagucaggagcuuuuauauauaagg

SEQ ID NO: 254110 - RNA, 32 nt, Homo Sapiens
cuggaagaauaaaugucuguuguuuuaaaaaa

SEQ ID NO: 254111 - RNA, 32 nt, Homo Sapiens
gcggccgcagccccccaccugggcccucgguc

SEQ ID NO: 254112 - RNA, 32 nt, Homo Sapiens
ggccgagcgcagccgccuccgccaccgaugcg

SEQ ID NO: 254113 - RNA, 32 nt, Homo Sapiens
aggacccgcccauuucucggcaguacugugaa

SEQ ID NO: 254114 - RNA, 32 nt, Homo Sapiens
cuaagagggucuuuuugacuaaggccagccug

SEQ ID NO: 254115 - RNA, 32 nt, Homo Sapiens
aguaaccaugugacuacuaacgugguauauug

SEQ ID NO: 254116 - RNA, 32 nt, Homo Sapiens
ccucccccagaccuccaccuccuccagacccc

SEQ ID NO: 254117 - RNA, 32 nt, Homo Sapiens
ccccuucccugccuauggugucgcuuggcuaa

SEQ ID NO: 254118 - RNA, 32 nt, Homo Sapiens
accguuuuaaacaagugcccagugcaauuucu

SEQ ID NO: 254119 - RNA, 32 nt, Homo Sapiens
cugguuacacugcuugaauccugucaguccua

SEQ ID NO: 254120 - RNA, 32 nt, Homo Sapiens
uuuggaaaccauccugaaaggcccggggagcc

SEQ ID NO: 254121 - RNA, 32 nt, Homo Sapiens
ugaauugugggaagagggugcagcacuggacc

SEQ ID NO: 254122 - RNA, 32 nt, Homo Sapiens
aggcggguggaucaccugaggacaggaguuca

SEQ ID NO: 254123 - RNA, 32 nt, Homo Sapiens
aaucuggagguagccgaccugaggacauggcu

SEQ ID NO: 254124 - RNA, 32 nt, Homo Sapiens
uuggggguuuauuggaggagucuuaaaaacuu

SEQ ID NO: 254125 - RNA, 32 nt, Homo Sapiens
gccccugucuucuuggcgugguuuauaugucc

SEQ ID NO: 254126 - RNA, 32 nt, Homo Sapiens
aaauauuucaugauaauauacaucucagacuu

SEQ ID NO: 254127 - RNA, 32 nt, Homo Sapiens
gaagaaagauuagaaaaauuucaacuguaggu

SEQ ID NO: 254128 - RNA, 32 nt, Homo Sapiens
uccuuucuugauauccuuuuuaucucuugguu

SEQ ID NO: 254129 - RNA, 31 nt, Homo Sapiens
uucaccaugucugacgaggaaguugaacagg

SEQ ID NO: 254130 - RNA, 32 nt, Homo Sapiens
gucuagacggggaaagacauggacccuagaac

SEQ ID NO: 254131 - RNA, 32 nt, Homo Sapiens
aguguggaagcagaaggcuuuuuuaacucauc

SEQ ID NO: 254132 - RNA, 32 nt, Homo Sapiens
uauacccagaaguggaauugcuggaucauaug

SEQ ID NO: 254133 - RNA, 32 nt, Homo Sapiens
guuucuuguguguuuuuauagaagugguguuu

SEQ ID NO: 254134 - RNA, 32 nt, Homo Sapiens
guacaaaagauacuuaaaagggcuccuggggu

SEQ ID NO: 254135 - RNA, 32 nt, Homo Sapiens
aguugcuccaugaagaugcguugaagaaaugg

SEQ ID NO: 254136 - RNA, 32 nt, Homo Sapiens
cgcuccugcaggccccgcagccgcccgccugc

SEQ ID NO: 254137 - RNA, 32 nt, Homo Sapiens
ugcagugccugccugccuauggaauggagcug

SEQ ID NO: 254138 - RNA, 32 nt, Homo Sapiens
gcucuuuccuucccaccuuuccuggccugcag

SEQ ID NO: 254139 - RNA, 32 nt, Homo Sapiens
gcucagugaaacacugaagcuaaugggauguu

SEQ ID NO: 254140 - RNA, 32 nt, Homo Sapiens
ccccucggaggcuguauaguccuccuuagaga

SEQ ID NO: 254141 - RNA, 32 nt, Homo Sapiens
aaagauaugaauggaaagucuuuggauggaaa

SEQ ID NO: 254142 - RNA, 31 nt, Homo Sapiens
gaucacuuucgcuaaugauccacucccugcu

SEQ ID NO: 254143 - RNA, 32 nt, Homo Sapiens
auuauagaccucuaguagcugaaaugcaagac

SEQ ID NO: 254144 - RNA, 32 nt, Homo Sapiens
agggggaggacuggaccgcgaggucagauuag

SEQ ID NO: 254145 - RNA, 32 nt, Homo Sapiens
gccaccgcgccuggccgaggcugcuggaaucu

SEQ ID NO: 254146 - RNA, 32 nt, Homo Sapiens
agacaugggacuguuugcaauaccauauggaa

SEQ ID NO: 254147 - RNA, 30 nt, Homo Sapiens
gcgguaagagguggcggcgggcagagggug

SEQ ID NO: 254148 - RNA, 32 nt, Homo Sapiens
uuaccugacucugucagagugauuccagcagc

SEQ ID NO: 254149 - RNA, 32 nt, Homo Sapiens
agcggcugggcgggccuggccgggccagcgga

SEQ ID NO: 254150 - RNA, 32 nt, Homo Sapiens
gugacacgccccucggucccucacuggcacuu

SEQ ID NO: 254151 - RNA, 32 nt, Homo Sapiens
uuuuuuaaaaauuuuuguuccugguuuccaaa

SEQ ID NO: 254152 - RNA, 32 nt, Homo Sapiens
cucagcccuuucccuuuucugaaagcuguucc

SEQ ID NO: 254153 - RNA, 32 nt, Homo Sapiens
gagucccuggaaagaugaugcaaagaaaguca

SEQ ID NO: 254154 - RNA, 32 nt, Homo Sapiens
caacaagucaauccaagucagcccguuaagga

SEQ ID NO: 254155 - RNA, 32 nt, Homo Sapiens
uuauagcuccaaaaacaaaaauauacuuguau

SEQ ID NO: 254156 - RNA, 25 nt, Homo Sapiens
augaccagaaaagagaaggacuggg

SEQ ID NO: 254157 - RNA, 32 nt, Homo Sapiens
uucugcauuagauuugaugacucuuuuucugc

SEQ ID NO: 254158 - RNA, 32 nt, Homo Sapiens
gggcagcagcgggcgcgcgggucagcgcucag

SEQ ID NO: 254159 - RNA, 32 nt, Homo Sapiens
guucucaggcugccuccugggucagguuuucc

SEQ ID NO: 254160 - RNA, 32 nt, Homo Sapiens
agcggccguccgggcguccgccuccguccccu

SEQ ID NO: 254161 - RNA, 32 nt, Homo Sapiens
uguaugucaugagaaggcuaaauaucaguguu

SEQ ID NO: 254162 - RNA, 32 nt, Homo Sapiens
gggcugcucccuccucugcucccccgccagau

SEQ ID NO: 254163 - RNA, 32 nt, Homo Sapiens
cacuccauggggucaucuccaugccugagagg

SEQ ID NO: 254164 - RNA, 32 nt, Homo Sapiens
cucagauccagguccuuggagggaaaaggagg

SEQ ID NO: 254165 - RNA, 31 nt, Homo Sapiens
gaugugggcacgccucagagccagaaguuua

SEQ ID NO: 254166 - RNA, 32 nt, Homo Sapiens
gggcccgcuuucugccgagaugccgaagguca

SEQ ID NO: 254167 - RNA, 31 nt, Homo Sapiens
ggcagcaacaggaggaacucgaggccgagca

SEQ ID NO: 254168 - RNA, 32 nt, Homo Sapiens
acuaaaauauucuuaccacuuaaaagagcaag

SEQ ID NO: 254169 - RNA, 32 nt, Homo Sapiens
aagacaaaaauaggaaguugugucagaggagu

SEQ ID NO: 254170 - RNA, 32 nt, Homo Sapiens
acaggaauuucuguuagcaauauguuagcaag

SEQ ID NO: 254171 - RNA, 32 nt, Homo Sapiens
gcuccccaccuuuccuuccagcccuuggaauc

SEQ ID NO: 254172 - RNA, 32 nt, Homo Sapiens
cuacucuagaggccauuuaaaaguauguauuu

SEQ ID NO: 254173 - RNA, 32 nt, Homo Sapiens
uuuguuacuucauacuggaacuuuuaaaaaga

SEQ ID NO: 254174 - RNA, 32 nt, Homo Sapiens
ucuccugcgugucucugacaucucucacuucc

SEQ ID NO: 254175 - RNA, 32 nt, Homo Sapiens
uguguuuuuuucugcuuuguuuuuucaguuug

SEQ ID NO: 254176 - RNA, 32 nt, Homo Sapiens
cuguuccuggggacccgcugggccuuuggucu

SEQ ID NO: 254177 - RNA, 32 nt, Homo Sapiens
gccuuaaaaaaaaaagugcuugaaagagaagg

SEQ ID NO: 254178 - RNA, 32 nt, Homo Sapiens
cacucauggaagccccucuacugcuuaugaag

SEQ ID NO: 254179 - RNA, 32 nt, Homo Sapiens
acccaggggaccuccuuucagaugaacuggga

SEQ ID NO: 254180 - RNA, 32 nt, Homo Sapiens
cagaggccggagaacggccacuggugugggag

SEQ ID NO: 254181 - RNA, 32 nt, Homo Sapiens
gcccagcgcucgccacgcucagugcccguuuu

SEQ ID NO: 254182 - RNA, 29 nt, Homo Sapiens
caagggcuaaauuuauauuuuuuggaaau

SEQ ID NO: 254183 - RNA, 32 nt, Homo Sapiens
accugcccugucaccucaucaccucauuacua

SEQ ID NO: 254184 - RNA, 32 nt, Homo Sapiens
ccauauaaaaauucuucccacgaaaaaaaaaa

SEQ ID NO: 254185 - RNA, 32 nt, Homo Sapiens
ggcagggacucugucuugcuuaccauuguagc

SEQ ID NO: 254186 - RNA, 32 nt, Homo Sapiens
ccuggcaccaaaaucagauuguuuucacaguu

SEQ ID NO: 254187 - RNA, 32 nt, Homo Sapiens
cuccucucagauuccuucucgacacagcaccc

SEQ ID NO: 254188 - RNA, 32 nt, Homo Sapiens
ggugugaggaggggcgggagugaugacggggu

SEQ ID NO: 254189 - RNA, 32 nt, Homo Sapiens
gugauccgcccauguuggccucccaaagugcu

SEQ ID NO: 254190 - RNA, 32 nt, Homo Sapiens
agauguguaaguguuuuuuuuaaaaucacaug

SEQ ID NO: 254191 - RNA, 32 nt, Homo Sapiens
uuggucauucagaagcagauuauuuaauuucc

SEQ ID NO: 254192 - RNA, 32 nt, Homo Sapiens
gagggcuguagggaaccccuggaggacacuaa

SEQ ID NO: 254193 - RNA, 32 nt, Homo Sapiens
gcuuggcccuccuccucgcccacggcgccuca

SEQ ID NO: 254194 - RNA, 32 nt, Homo Sapiens
cuucucaguggccagcagguuccugggaggcc

SEQ ID NO: 254195 - RNA, 32 nt, Homo Sapiens
ccaccaguuagcgacagcgcccgccccucuga

SEQ ID NO: 254196 - RNA, 30 nt, Homo Sapiens
cuucgggcgcccgagcccgcaaugucgggc

SEQ ID NO: 254197 - RNA, 32 nt, Homo Sapiens
gucagggcagcucuuucugggguguuuuaaau

SEQ ID NO: 254198 - RNA, 32 nt, Homo Sapiens
agcaagaguuuuuauuaugauguaauaccagu

SEQ ID NO: 254199 - RNA, 32 nt, Homo Sapiens
agacugcuugcugcggcagagacgccagaggu

SEQ ID NO: 254200 - RNA, 32 nt, Homo Sapiens
aggugaugcuguucuuauuguaaaaggaaagu

SEQ ID NO: 254201 - RNA, 32 nt, Homo Sapiens
aaggaggcuugugucacuuuuacaaccagcga

SEQ ID NO: 254202 - RNA, 32 nt, Homo Sapiens
ccccuccacacuguuggcucuggccgaagcuc

SEQ ID NO: 254203 - RNA, 32 nt, Homo Sapiens
cgcgcgccgcggcuccuguugacccgguccgc

SEQ ID NO: 254204 - RNA, 32 nt, Homo Sapiens
aauaucagcucauuuuaaaagucuuugcagug

SEQ ID NO: 254205 - RNA, 32 nt, Homo Sapiens
uuugaaagcuuauuugauagauaauguuuaga

SEQ ID NO: 254206 - RNA, 32 nt, Homo Sapiens
uugcuguuguuugcagcgucagggugucagca

SEQ ID NO: 254207 - RNA, 32 nt, Homo Sapiens
ucaauguuauuuaauuacauuugguuuuccgu

SEQ ID NO: 254208 - RNA, 32 nt, Homo Sapiens
accuggccgccagcugacgcccugguggucac

SEQ ID NO: 254209 - RNA, 32 nt, Homo Sapiens
gugggcugcagagugggcucccugccccucuc

SEQ ID NO: 254210 - RNA, 32 nt, Homo Sapiens
uuccacccagucucccucccccgucccugccc

SEQ ID NO: 254211 - RNA, 31 nt, Homo Sapiens
uccgcgccaugggccgcaggagggcagcgcg

SEQ ID NO: 254212 - RNA, 32 nt, Homo Sapiens
uaaaagcagagauguuucugugucaugcccaa

SEQ ID NO: 254213 - RNA, 32 nt, Homo Sapiens
ucucacaggcauggccaccuccaguucggcau

SEQ ID NO: 254214 - RNA, 32 nt, Homo Sapiens
cacugauaacaaguccugaacuccuuuuuugu

SEQ ID NO: 254215 - RNA, 32 nt, Homo Sapiens
ccggguuuguggcugcuuggcuccacacgugg

SEQ ID NO: 254216 - RNA, 32 nt, Homo Sapiens
auggcuacuuggagaaugagccgcugaugcug

SEQ ID NO: 254217 - RNA, 32 nt, Homo Sapiens
uuaucgaaucuaaaagugacuacuguuaauau

SEQ ID NO: 254218 - RNA, 32 nt, Homo Sapiens
ugagcuuccuuccccagcuuugcugccugaga

SEQ ID NO: 254219 - RNA, 32 nt, Homo Sapiens
uguauuuggccauuugauuacauuucaggauu

SEQ ID NO: 254220 - RNA, 32 nt, Homo Sapiens
cccuuccugcuaauguguaaaauacauacuug

SEQ ID NO: 254221 - RNA, 32 nt, Homo Sapiens
cgccgcagcgcccgcaccgcgauaaaaagggc

SEQ ID NO: 254222 - RNA, 32 nt, Homo Sapiens
ccccaaggccccagcuucccucugcaccccca

SEQ ID NO: 254223 - RNA, 32 nt, Homo Sapiens
aucuugggaaagguguuugugacuuuucagag

SEQ ID NO: 254224 - RNA, 32 nt, Homo Sapiens
uuucuuuuucauagggguggaacuugcacagc

SEQ ID NO: 254225 - RNA, 32 nt, Homo Sapiens
ugucccccugucagcugccuccagaagggaag

SEQ ID NO: 254226 - RNA, 32 nt, Homo Sapiens
uuuggccauuaaucuuuuuuauuuaaaaauuu

SEQ ID NO: 254227 - RNA, 32 nt, Homo Sapiens
augcuaucuaaccauaguucauguuaggggaa

SEQ ID NO: 254228 - RNA, 32 nt, Homo Sapiens
gccccaccuggcugaggcgccacccuucuuca

SEQ ID NO: 254229 - RNA, 32 nt, Homo Sapiens
gcaaaacccagucugcccuugggauuccaaac

SEQ ID NO: 254230 - RNA, 32 nt, Homo Sapiens
accuuugcaucuuuugugucuuucuuaucaug

SEQ ID NO: 254231 - RNA, 32 nt, Homo Sapiens
uguaucaagucuuaauuguauuuuaaauugaa

SEQ ID NO: 254232 - RNA, 32 nt, Homo Sapiens
aggagggaaugggccuggugccacucuguucc

SEQ ID NO: 254233 - RNA, 32 nt, Homo Sapiens
caaacugugaggucaaggggccugcuggguua

SEQ ID NO: 254234 - RNA, 32 nt, Homo Sapiens
acugggcagugguggucaguuuuuacugcaaa

SEQ ID NO: 254235 - RNA, 32 nt, Homo Sapiens
auucccuuuuaggugaggguugguaagggguu

SEQ ID NO: 254236 - RNA, 30 nt, Homo Sapiens
ccgucugcguccugcauccaucucccuguu

SEQ ID NO: 254237 - RNA, 32 nt, Homo Sapiens
acggauucaaagacuuauuuugaaaguuggaa

SEQ ID NO: 254238 - RNA, 32 nt, Homo Sapiens
uaaugaauauauuugccuauauucucccuaca

SEQ ID NO: 254239 - RNA, 32 nt, Homo Sapiens
aaauugaagugucuucuguucccaaggaagcu

SEQ ID NO: 254240 - RNA, 32 nt, Homo Sapiens
gagagagcacagcugugacuuccuccuaacug

SEQ ID NO: 254241 - RNA, 32 nt, Homo Sapiens
guucuacugcucuccuucuuaagaaggguggg

SEQ ID NO: 254242 - RNA, 32 nt, Homo Sapiens
uuauguuuggacuugacaaaaauguaugcaaa

SEQ ID NO: 254243 - RNA, 32 nt, Homo Sapiens
gggcugaaucaagggauuccuggcuuuagaaa

SEQ ID NO: 254244 - RNA, 29 nt, Homo Sapiens
aggccagggcgacagaggacucgggaguc

SEQ ID NO: 254245 - RNA, 32 nt, Homo Sapiens
augaggcagguuugaagagaugucaagaaucc

SEQ ID NO: 254246 - RNA, 32 nt, Homo Sapiens
caaggguaugauggauauacuucuuucuugcu

SEQ ID NO: 254247 - RNA, 32 nt, Homo Sapiens
ugucacuguuaauuucugggcugcugagguuc

SEQ ID NO: 254248 - RNA, 32 nt, Homo Sapiens
gcagggcaaggcugucugggacaggcuuggcc

SEQ ID NO: 254249 - RNA, 32 nt, Homo Sapiens
uucugugcccccggcccggccaccgacggccg

SEQ ID NO: 254250 - RNA, 32 nt, Homo Sapiens
gagcaugcgcgaggccgcaccggccaaucucc

SEQ ID NO: 254251 - RNA, 32 nt, Homo Sapiens
cccugucccuggauaaugcaguauuucaagac

SEQ ID NO: 254252 - RNA, 32 nt, Homo Sapiens
caccucugaccucuccuuuccucguccugggc

SEQ ID NO: 254253 - RNA, 32 nt, Homo Sapiens
agcucuuuugcagauagcacauucaguagccu

SEQ ID NO: 254254 - RNA, 32 nt, Homo Sapiens
ggcggaggggccgcuccaggccccacagagca

SEQ ID NO: 254255 - RNA, 32 nt, Homo Sapiens
uauucuuuacuuuuuuaauauguugggauuuu

SEQ ID NO: 254256 - RNA, 32 nt, Homo Sapiens
aauacaaguuaagguaucugguaucugcaugu

SEQ ID NO: 254257 - RNA, 32 nt, Homo Sapiens
agcaggggcuucgggccacgcuucucuuggcg

SEQ ID NO: 254258 - RNA, 32 nt, Homo Sapiens
cguccugcgggaaguggcgggcacgaucgcaa

SEQ ID NO: 254259 - RNA, 32 nt, Homo Sapiens
cacacagcauaauucaaugucuauuuugguug

SEQ ID NO: 254260 - RNA, 32 nt, Homo Sapiens
guauaagacagagcacgaaaggcauuuuuacu

SEQ ID NO: 254261 - RNA, 32 nt, Homo Sapiens
auuuuuaauauccaauuuuuuaauagaaaaau

SEQ ID NO: 254262 - RNA, 32 nt, Homo Sapiens
uggcuccuugaacuuuuggccgccaugugcuu

SEQ ID NO: 254263 - RNA, 32 nt, Homo Sapiens
accuuggcaaaauaaacuuucuaaauuaacug

SEQ ID NO: 254264 - RNA, 32 nt, Homo Sapiens
ccaggcguuccuuccacuucugcacgucuucc

SEQ ID NO: 254265 - RNA, 32 nt, Homo Sapiens
uuagacagugaagucuuaauugucaauauuau

SEQ ID NO: 254266 - RNA, 32 nt, Homo Sapiens
cuaaggcacuuuuaaagauacucuguaagaac

SEQ ID NO: 254267 - RNA, 32 nt, Homo Sapiens
cacuguacuccagccugggugacagagcaaga

SEQ ID NO: 254268 - RNA, 32 nt, Homo Sapiens
cacuguacuccagccuaggugacaaagcaaga

SEQ ID NO: 254269 - RNA, 32 nt, Homo Sapiens
cacugcacuccagucugggugacagagcaaga

SEQ ID NO: 254270 - RNA, 32 nt, Homo Sapiens
ucgcaggccggcgggcgggccggagggcugca

SEQ ID NO: 254271 - RNA, 32 nt, Homo Sapiens
gucuguaguuuauaugcuuaguuguugccuau

SEQ ID NO: 254272 - RNA, 32 nt, Homo Sapiens
ugaccucggaagcauuuccacagaugguguca

SEQ ID NO: 254273 - RNA, 32 nt, Homo Sapiens
cucccagguucaagcaauucuccuuccucagc

SEQ ID NO: 254274 - RNA, 32 nt, Homo Sapiens
agaaaucaccgucuucuccaucgcucacgcug

SEQ ID NO: 254275 - RNA, 32 nt, Homo Sapiens
ccugcgcccccucccccuucccggguucugac

SEQ ID NO: 254276 - RNA, 32 nt, Homo Sapiens
cccuucaggugaggcccuuuucugccuucuuu

SEQ ID NO: 254277 - RNA, 32 nt, Homo Sapiens
aguuuauuccuccuaauuaucacacaccuccu

SEQ ID NO: 254278 - RNA, 27 nt, Homo Sapiens
guccuccucacagagagcucagagaug

SEQ ID NO: 254279 - RNA, 32 nt, Homo Sapiens
uguagauuauaaauaaaagcaaaaccgccaca

SEQ ID NO: 254280 - RNA, 32 nt, Homo Sapiens
auagugcuuucaaauacaccuuuuugaucauu

SEQ ID NO: 254281 - RNA, 32 nt, Homo Sapiens
gagaaaaucuuuucuuuuuuuuaaucccaucc

SEQ ID NO: 254282 - RNA, 32 nt, Homo Sapiens
uugcagcaaggcaaagaguguggggcgucucu

SEQ ID NO: 254283 - RNA, 32 nt, Homo Sapiens
ucauuagaagaucacauaaaaaugaagcagca

SEQ ID NO: 254284 - RNA, 32 nt, Homo Sapiens
uauuugcuuuuuagacggaagcuccucagucu

SEQ ID NO: 254285 - RNA, 32 nt, Homo Sapiens
agcaacggagguucagcuccgccugcagggac

SEQ ID NO: 254286 - RNA, 32 nt, Homo Sapiens
aacuauuuaauaaauuugauaaauauaaaaaa

SEQ ID NO: 254287 - RNA, 32 nt, Homo Sapiens
caggcacaaaaauagcaucucgagaaauaccc

SEQ ID NO: 254288 - RNA, 32 nt, Homo Sapiens
gcucccugucugugucccagccacgcagggcc

SEQ ID NO: 254289 - RNA, 32 nt, Homo Sapiens
ugagccccaagcaccgagacgaagggcgaaag

SEQ ID NO: 254290 - RNA, 32 nt, Homo Sapiens
aaaauagaguguucuuuuuuuuaggacuuaga

SEQ ID NO: 254291 - RNA, 32 nt, Homo Sapiens
gaggcaggccccaggcucugcuucuuggugac

SEQ ID NO: 254292 - RNA, 32 nt, Homo Sapiens
agguggagcgggcgggcuggcugcugaggacg

SEQ ID NO: 254293 - RNA, 32 nt, Homo Sapiens
uuuuaagauggcaugugcuuugaaaagaagau

SEQ ID NO: 254294 - RNA, 30 nt, Homo Sapiens
gggcucuuuauggugggggaaggaaggauu

SEQ ID NO: 254295 - RNA, 32 nt, Homo Sapiens
ugaaaucauuuucuuuacuuuucugaaccaua

SEQ ID NO: 254296 - RNA, 32 nt, Homo Sapiens
gggggcuuuuucuccugagcagagaggcccaa

SEQ ID NO: 254297 - RNA, 32 nt, Homo Sapiens
cauaaaaacaauuuuaguggcuguuuuacuaa

SEQ ID NO: 254298 - RNA, 32 nt, Homo Sapiens
gcugauuuuuuaaauaaaauagagucuggaau

SEQ ID NO: 254299 - RNA, 32 nt, Homo Sapiens
ucgcacgucugcuucccugaugaaggcuccug

SEQ ID NO: 254300 - RNA, 32 nt, Homo Sapiens
gcuaagaaugguuuuuacaucuuuaaaugguu

SEQ ID NO: 254301 - RNA, 32 nt, Homo Sapiens
guggugcaaccucggcucacugcaaccuuugc

SEQ ID NO: 254302 - RNA, 32 nt, Homo Sapiens
auuuccuugggguggguuggucugucauuacc

SEQ ID NO: 254303 - RNA, 32 nt, Homo Sapiens
cagacaccagggaaacaacagcacaccaggca

SEQ ID NO: 254304 - RNA, 32 nt, Homo Sapiens
accuuuuaaaauuuuuaaauggcauuucagcc

SEQ ID NO: 254305 - RNA, 32 nt, Homo Sapiens
uaauuuauuauuaauaaucauguuugucaaug

SEQ ID NO: 254306 - RNA, 32 nt, Homo Sapiens
auggcugaaguucguaaagaugauguuguaac

SEQ ID NO: 254307 - RNA, 32 nt, Homo Sapiens
gaccagauauucuccugugugcuccucaaagg

SEQ ID NO: 254308 - RNA, 32 nt, Homo Sapiens
gauggugcuggugaauugcucugcucugucug

SEQ ID NO: 254309 - RNA, 32 nt, Homo Sapiens
cuugaauuaguuuuauuuuucuuaacuuuaaa

SEQ ID NO: 254310 - RNA, 29 nt, Homo Sapiens
uguauugugacuuuuacuguuauauuaau

SEQ ID NO: 254311 - RNA, 32 nt, Homo Sapiens
caguaccuggggagguuagauguguguuucag

SEQ ID NO: 254312 - RNA, 32 nt, Homo Sapiens
gauuuaccaauccuuggaugaagugcuuggga

SEQ ID NO: 254313 - RNA, 32 nt, Homo Sapiens
cugcccacccagugggcaccccguagauggga

SEQ ID NO: 254314 - RNA, 32 nt, Homo Sapiens
aagugauuuugcucucuuccaaucuaaaccug

SEQ ID NO: 254315 - RNA, 32 nt, Homo Sapiens
auacaaaaaaucagcugggcguggugguguga

SEQ ID NO: 254316 - RNA, 32 nt, Homo Sapiens
aaaauaugaaaagagaaaaauauuuuaauuua

SEQ ID NO: 254317 - RNA, 32 nt, Homo Sapiens
ucaccgccgcgcgcucugacgccggcauaagg

SEQ ID NO: 254318 - RNA, 32 nt, Homo Sapiens
aaauggaucccgguucuguaggaugucacaca

SEQ ID NO: 254319 - RNA, 32 nt, Homo Sapiens
agaaagcaggagacacagcgggcaguagaaga

SEQ ID NO: 254320 - RNA, 32 nt, Homo Sapiens
uuucccuuucccuuaaucaacucuccuuugau

SEQ ID NO: 254321 - RNA, 32 nt, Homo Sapiens
aucugaaacuaaaguugguagaaaaguuauuu

SEQ ID NO: 254322 - RNA, 32 nt, Homo Sapiens
uuuaaaccaagucauugggacuuagcgucuuu

SEQ ID NO: 254323 - RNA, 32 nt, Homo Sapiens
augcuucaaaaauauuuggcuaaaggaugaca

SEQ ID NO: 254324 - RNA, 27 nt, Homo Sapiens
ugguuuggcuguuucagcccccagagu

SEQ ID NO: 254325 - RNA, 32 nt, Homo Sapiens
aggguucucacgcuuuggcugucuggacuuuu

SEQ ID NO: 254326 - RNA, 32 nt, Homo Sapiens
gcgcaguguauuuuaauacggcccaugucauu

SEQ ID NO: 254327 - RNA, 32 nt, Homo Sapiens
caugcaccaaaauaaacuuuacuguguguacc

SEQ ID NO: 254328 - RNA, 32 nt, Homo Sapiens
agugguauuauauuuuaaccuuuuacauuauu

SEQ ID NO: 254329 - RNA, 32 nt, Homo Sapiens
uuacuguccuacagaguggcagcaaauaaaac

SEQ ID NO: 254330 - RNA, 32 nt, Homo Sapiens
agcugccuuuucugccaucagcuuuguuaccu

SEQ ID NO: 254331 - RNA, 32 nt, Homo Sapiens
aaaauaugacagaaccuguuuauuuaaaauaa

SEQ ID NO: 254332 - RNA, 32 nt, Homo Sapiens
acugcugaaaaauuuuaucaaaaguuacugga

SEQ ID NO: 254333 - RNA, 32 nt, Homo Sapiens
auggcgcagggcuugguaaacccccuccccac

SEQ ID NO: 254334 - RNA, 32 nt, Homo Sapiens
ggcacgaggggaagagacugcagguuguagau

SEQ ID NO: 254335 - RNA, 30 nt, Homo Sapiens
gggggagagaagcauuuugaugauaucuau

SEQ ID NO: 254336 - RNA, 32 nt, Homo Sapiens
ggaccacccagcuggucagacucugauguugg

SEQ ID NO: 254337 - RNA, 32 nt, Homo Sapiens
uagguaauauuuuccucauuucuuuacugcug

SEQ ID NO: 254338 - RNA, 32 nt, Homo Sapiens
gaguccauuaaaccucuuuuucucuauaaauu

SEQ ID NO: 254339 - RNA, 32 nt, Homo Sapiens
ccaguucggccucugaggaaaacgggcguucg

SEQ ID NO: 254340 - RNA, 32 nt, Homo Sapiens
acagugagguccugggggccugaccucccccu

SEQ ID NO: 254341 - RNA, 32 nt, Homo Sapiens
caagaacuccaccagcagccucaacaacagaa

SEQ ID NO: 254342 - RNA, 32 nt, Homo Sapiens
agcccugggcggccauguggacagagcuggga

SEQ ID NO: 254343 - RNA, 32 nt, Homo Sapiens
gucuuuuugauccaugaaugaaguuacccugg

SEQ ID NO: 254344 - RNA, 32 nt, Homo Sapiens
uguguggggacuguccgcaccgggaugcgacu

SEQ ID NO: 254345 - RNA, 32 nt, Homo Sapiens
gcgagccgagggaaccuggggguggggaggag

SEQ ID NO: 254346 - RNA, 32 nt, Homo Sapiens
cacagccccuccggggcgggaccggccagcgg

SEQ ID NO: 254347 - RNA, 32 nt, Homo Sapiens
uguuccuagugaaagaggcagcuugaaacuga

SEQ ID NO: 254348 - RNA, 32 nt, Homo Sapiens
ccgggcccuguuuccuuggacggggcugggga

SEQ ID NO: 254349 - RNA, 32 nt, Homo Sapiens
gaaauccuccaaggacucuugucagcuguguu

SEQ ID NO: 254350 - RNA, 32 nt, Homo Sapiens
gggacuuuuuguugauaauccaaauacucaaa

SEQ ID NO: 254351 - RNA, 32 nt, Homo Sapiens
gggaccagcuggagguagcccaggaggcagug

SEQ ID NO: 254352 - RNA, 32 nt, Homo Sapiens
gggcagaaggauugugcagauugucaacucca

SEQ ID NO: 254353 - RNA, 32 nt, Homo Sapiens
ucggucccgcgcugcgcauccccgcggacgcc

SEQ ID NO: 254354 - RNA, 32 nt, Homo Sapiens
uguuggggaugaugagaagaaaugauuuggga

SEQ ID NO: 254355 - RNA, 32 nt, Homo Sapiens
gacccuaggcaccaccgcauggagcgggacga

SEQ ID NO: 254356 - RNA, 32 nt, Homo Sapiens
cugaaagcauaaaagaaaaaucuaggccgggu

SEQ ID NO: 254357 - RNA, 32 nt, Homo Sapiens
ggucucaaacuccuggccucaagcaauccucc

SEQ ID NO: 254358 - RNA, 31 nt, Homo Sapiens
accuggaacauauauaguuaguacuugaugu

SEQ ID NO: 254359 - RNA, 32 nt, Homo Sapiens
caggcccucccucuacucuuccuguccuaaaa

SEQ ID NO: 254360 - RNA, 32 nt, Homo Sapiens
gaggccggagagcuggugacuuuggggacagg

SEQ ID NO: 254361 - RNA, 32 nt, Homo Sapiens
cagccuggcuccuggcgcgcaccucugcuccc

SEQ ID NO: 254362 - RNA, 32 nt, Homo Sapiens
cugagccgugccagccggcggaccucaggcgg

SEQ ID NO: 254363 - RNA, 32 nt, Homo Sapiens
uccucacacucaccacggcgcuccaucccgcg

SEQ ID NO: 254364 - RNA, 32 nt, Homo Sapiens
gcccccucauuucacaagaagaagaaugaagu

SEQ ID NO: 254365 - RNA, 32 nt, Homo Sapiens
cugccagugcaccagcaguuuaggugugauga

SEQ ID NO: 254366 - RNA, 32 nt, Homo Sapiens
gcgcagaggaggaggcaggcggcggccccggu

SEQ ID NO: 254367 - RNA, 32 nt, Homo Sapiens
aaagauauuuaagcuaaaauuuucucagccac

SEQ ID NO: 254368 - RNA, 32 nt, Homo Sapiens
aguccuuguggaauaagauucccuuuaaaaac

SEQ ID NO: 254369 - RNA, 31 nt, Homo Sapiens
gcugcuccacccucccccagacacagcccag

SEQ ID NO: 254370 - RNA, 32 nt, Homo Sapiens
agggcaaaaauuguauuauuucuuaccaagua

SEQ ID NO: 254371 - RNA, 32 nt, Homo Sapiens
ggacagcucccuccuguuuucugagcugccac

SEQ ID NO: 254372 - RNA, 32 nt, Homo Sapiens
cagacgcggaaaccggguggcagcgcccagcc

SEQ ID NO: 254373 - RNA, 32 nt, Homo Sapiens
uaugguuucuaaaaucucagcugagaacuuca

SEQ ID NO: 254374 - RNA, 32 nt, Homo Sapiens
gauuggggacgccaguaucagaauggcggcgg

SEQ ID NO: 254375 - RNA, 32 nt, Homo Sapiens
ccacacuucuagcuaccuuguuuuuaucguuu

SEQ ID NO: 254376 - RNA, 32 nt, Homo Sapiens
cagcagcacacaauauacucauguaacaagcc

SEQ ID NO: 254377 - RNA, 32 nt, Homo Sapiens
gcaggccgugugggugcccggcgugagggauc

SEQ ID NO: 254378 - RNA, 31 nt, Homo Sapiens
gcuugaacaaauuggaaacacauaugcuucu

SEQ ID NO: 254379 - RNA, 32 nt, Homo Sapiens
aagaggacuguaguuuaauacuuuuuacccaa

SEQ ID NO: 254380 - RNA, 32 nt, Homo Sapiens
gucaugagaggaagaaacaagaaugcaagugu

SEQ ID NO: 254381 - RNA, 32 nt, Homo Sapiens
uaguccugugucaucacugcagcgguccucag

SEQ ID NO: 254382 - RNA, 32 nt, Homo Sapiens
agggcgguggcgcccgcgggaccugcgacugc

SEQ ID NO: 254383 - RNA, 32 nt, Homo Sapiens
cugagaugggagacuuuuuuguuuuucauuuu

SEQ ID NO: 254384 - RNA, 32 nt, Homo Sapiens
cccacccacaugccgaaggguggccaggcagg

SEQ ID NO: 254385 - RNA, 32 nt, Homo Sapiens
uuuuauuaggcucagugacauaaaaaggaucc

SEQ ID NO: 254386 - RNA, 32 nt, Homo Sapiens
cgaggaugcuggggcccugcagugcgcucuag

SEQ ID NO: 254387 - RNA, 32 nt, Homo Sapiens
uuuaaaaucugguaacuccaugaugaaaagaa

SEQ ID NO: 254388 - RNA, 32 nt, Homo Sapiens
uuaguuaacacacauauaucugauggcaccua

SEQ ID NO: 254389 - RNA, 32 nt, Homo Sapiens
ggaggcuggugcucacuguccaggccucagac

SEQ ID NO: 254390 - RNA, 32 nt, Homo Sapiens
caagcacaggccuggaggaggggaacgagagg

SEQ ID NO: 254391 - RNA, 32 nt, Homo Sapiens
uuuuggcaaaauaaauaacuuaugguaaucug

SEQ ID NO: 254392 - RNA, 32 nt, Homo Sapiens
ccccugggagugugugccagccaggcucugug

SEQ ID NO: 254393 - RNA, 32 nt, Homo Sapiens
gcuggaccggacgacugugcucucuuagcucu

SEQ ID NO: 254394 - RNA, 32 nt, Homo Sapiens
gguucuuuucuucuuuuuuuuauaucagaaug

SEQ ID NO: 254395 - RNA, 32 nt, Homo Sapiens
uggagagaguuuuuucugggguucugaaaagg

SEQ ID NO: 254396 - RNA, 32 nt, Homo Sapiens
cuuccugcccaggggacguggcgcugucggug

SEQ ID NO: 254397 - RNA, 32 nt, Homo Sapiens
ugcagcaacagguccacuuugcucuccagucu

SEQ ID NO: 254398 - RNA, 32 nt, Homo Sapiens
ggauuggguuuucucuuucccaugugaacuuc

SEQ ID NO: 254399 - RNA, 32 nt, Homo Sapiens
ucucauggagggccuucagaugagugcuauag

SEQ ID NO: 254400 - RNA, 32 nt, Homo Sapiens
uaauuauuugaaagcaacugaacaauggagcc

SEQ ID NO: 254401 - RNA, 32 nt, Homo Sapiens
ugggaggccccggacgggguagcaccccccau

SEQ ID NO: 254402 - RNA, 32 nt, Homo Sapiens
uuuggggauugauguuacugcacuauacuuuu

SEQ ID NO: 254403 - RNA, 32 nt, Homo Sapiens
ccauuucugcuguggcgccggagggucuugcu

SEQ ID NO: 254404 - RNA, 32 nt, Homo Sapiens
gcuggaaggggaggggcgccaggugaggcggc

SEQ ID NO: 254405 - RNA, 32 nt, Homo Sapiens
auaaacagaagucugacugccuuauuugaugu

SEQ ID NO: 254406 - RNA, 32 nt, Homo Sapiens
ccgaucgggcuaggccggcggccucgcucccu

SEQ ID NO: 254407 - RNA, 32 nt, Homo Sapiens
gcgagggugcguggugcgcggcggcggcggaa

SEQ ID NO: 254408 - RNA, 32 nt, Homo Sapiens
gccggcguggggcguagcagcggccguauuau

SEQ ID NO: 254409 - RNA, 32 nt, Homo Sapiens
ugaaggauucuacaauagucauauauuuuuau

SEQ ID NO: 254410 - RNA, 30 nt, Homo Sapiens
aggccaugagguggcauguuuucaaagaac

SEQ ID NO: 254411 - RNA, 32 nt, Homo Sapiens
aaucagaaacacacauccaagaaagggucacu

SEQ ID NO: 254412 - RNA, 30 nt, Homo Sapiens
aaaaugucucuuguggcccaucuuacugga

SEQ ID NO: 254413 - RNA, 32 nt, Homo Sapiens
ugugauggggccauuggacggcagcugccugc

SEQ ID NO: 254414 - RNA, 32 nt, Homo Sapiens
gcuaugagauagcaacaaaaaaugcauaguua

SEQ ID NO: 254415 - RNA, 31 nt, Homo Sapiens
uaacaucuugguaucauuguggguaaguaga

SEQ ID NO: 254416 - RNA, 32 nt, Homo Sapiens
auuuaaaaaaacaaacaaaauccuuccuuuua

SEQ ID NO: 254417 - RNA, 32 nt, Homo Sapiens
gggaaaggaguagaaaaagcaguaacugacaa

SEQ ID NO: 254418 - RNA, 32 nt, Homo Sapiens
ugugagcguucauauguuaccuaauguguauu

SEQ ID NO: 254419 - RNA, 32 nt, Homo Sapiens
uuguuugaagaagcuauauaaaaguuauuuuu

SEQ ID NO: 254420 - RNA, 32 nt, Homo Sapiens
ucgagcuccucgguagcccccgggcagggagg

SEQ ID NO: 254421 - RNA, 32 nt, Homo Sapiens
ucuaauuugacccuaaaaucuauguguuuuag

SEQ ID NO: 254422 - RNA, 32 nt, Homo Sapiens
ugaacacuaaaauuauucugucuggguauuug

SEQ ID NO: 254423 - RNA, 32 nt, Homo Sapiens
auggcaguguucuccucuggggccugauccac

SEQ ID NO: 254424 - RNA, 32 nt, Homo Sapiens
cguuuauagggaagaagucaagagaaggggaa

SEQ ID NO: 254425 - RNA, 32 nt, Homo Sapiens
agcggagaaggccugggggcgaggaacaagac

SEQ ID NO: 254426 - RNA, 32 nt, Homo Sapiens
ccugaccugccaguacaugacaguguccaggu

SEQ ID NO: 254427 - RNA, 32 nt, Homo Sapiens
ggcucugggggccccaguccccggcagcucuu

SEQ ID NO: 254428 - RNA, 32 nt, Homo Sapiens
gcagaacaaugcaucugacaugugcgaugcau

SEQ ID NO: 254429 - RNA, 32 nt, Homo Sapiens
cuggacagaggcccuuuggcuguaauauuugu

SEQ ID NO: 254430 - RNA, 32 nt, Homo Sapiens
aaauacugguuauuauuuaauuuuauaucccu

SEQ ID NO: 254431 - RNA, 32 nt, Homo Sapiens
acguccucagaauccagcuguuacucguccgc

SEQ ID NO: 254432 - RNA, 32 nt, Homo Sapiens
ucuggagauggagcgagcugugccgcucgcgg

SEQ ID NO: 254433 - RNA, 32 nt, Homo Sapiens
ccaucucccuacgacaauuugcugccccuccc

SEQ ID NO: 254434 - RNA, 32 nt, Homo Sapiens
gagaccuuuuuggaggccuccaagcugcugcu

SEQ ID NO: 254435 - RNA, 32 nt, Homo Sapiens
uuuauaaacaacaucaaaauggcagaaccauu

SEQ ID NO: 254436 - RNA, 32 nt, Homo Sapiens
agccuccccuccccaccccaugcagcccccag

SEQ ID NO: 254437 - RNA, 32 nt, Homo Sapiens
accagccugggcaacauagugagacccaaucu

SEQ ID NO: 254438 - RNA, 32 nt, Homo Sapiens
aaaaaugcacacggucuuugacccagcaauuc

SEQ ID NO: 254439 - RNA, 32 nt, Homo Sapiens
gaggaagaaaaaagguuagggaagugucaacu

SEQ ID NO: 254440 - RNA, 32 nt, Homo Sapiens
ugcccccggaggaggcagggcggccgugccuu

SEQ ID NO: 254441 - RNA, 32 nt, Homo Sapiens
ucggcugcuaccccccuggggugugugucugu

SEQ ID NO: 254442 - RNA, 32 nt, Homo Sapiens
uucuuucuuuccuuuuuuuuuauuuuuuaauu

SEQ ID NO: 254443 - RNA, 32 nt, Homo Sapiens
acuaugacaaggaaacaucagaauuacuaauc

SEQ ID NO: 254444 - RNA, 32 nt, Homo Sapiens
uccguccccccuccucuccccgugggcgcaga

SEQ ID NO: 254445 - RNA, 32 nt, Homo Sapiens
guuggcagauauauuucauacuggagaacaag

SEQ ID NO: 254446 - RNA, 32 nt, Homo Sapiens
aaaauggggacgucgggagcauucucuggaca

SEQ ID NO: 254447 - RNA, 32 nt, Homo Sapiens
gcucugugagcagcugacuagucaccccgggu

SEQ ID NO: 254448 - RNA, 32 nt, Homo Sapiens
ucuuaauaaaacagauauugugagauucaaaa

SEQ ID NO: 254449 - RNA, 32 nt, Homo Sapiens
gccagucuaguuccugaugacccaggcugccu

SEQ ID NO: 254450 - RNA, 32 nt, Homo Sapiens
auuuccuccagcugccacuccuugcuucgugu

SEQ ID NO: 254451 - RNA, 32 nt, Homo Sapiens
ucauggaugcucuuuauggaugacccuuuaca

SEQ ID NO: 254452 - RNA, 32 nt, Homo Sapiens
auacauuuuuaaaagaaaacuaaaggaaaaca

SEQ ID NO: 254453 - RNA, 31 nt, Homo Sapiens
aggccucuauuagccauuccugacugauaca

SEQ ID NO: 254454 - RNA, 32 nt, Homo Sapiens
ucuuaggacaccuuaacacucuuaaaaguuau

SEQ ID NO: 254455 - RNA, 32 nt, Homo Sapiens
ggaggcaggagccccagggccggcuuguguuu

SEQ ID NO: 254456 - RNA, 32 nt, Homo Sapiens
accacugcacuccagccugggcgacagaauga

SEQ ID NO: 254457 - RNA, 32 nt, Homo Sapiens
uccacccccguccgccauccugcccaccacca

SEQ ID NO: 254458 - RNA, 32 nt, Homo Sapiens
ucucugagggggugggggugcugcucucuccg

SEQ ID NO: 254459 - RNA, 32 nt, Homo Sapiens
gcccacgaccugccgcgccgaggagcggcauc

SEQ ID NO: 254460 - RNA, 32 nt, Homo Sapiens
gugauugucuuugaaucugaaucagccagucu

SEQ ID NO: 254461 - RNA, 32 nt, Homo Sapiens
gaggacugcugagacgcaugaagaaguggaga

SEQ ID NO: 254462 - RNA, 32 nt, Homo Sapiens
ccuuucagcacguaucuccuaaaaaccaagau

SEQ ID NO: 254463 - RNA, 32 nt, Homo Sapiens
cacgaauugcagcugucugaagggcagucaca

SEQ ID NO: 254464 - RNA, 32 nt, Homo Sapiens
gcugucuccgcggaagucagggcggcuggauu

SEQ ID NO: 254465 - RNA, 32 nt, Homo Sapiens
cauuggugcgagggauugaauaaagaaacaaa

SEQ ID NO: 254466 - RNA, 32 nt, Homo Sapiens
ugggucuuucccuugacuucuuguuucaauua

SEQ ID NO: 254467 - RNA, 32 nt, Homo Sapiens
ugggcugauuugaccuccgacucauugguugu

SEQ ID NO: 254468 - RNA, 32 nt, Homo Sapiens
uccagguucccuccccgccacagugaaauaaa

SEQ ID NO: 254469 - RNA, 32 nt, Homo Sapiens
ggcgagauuucgggggcggggcggggggcggg

SEQ ID NO: 254470 - RNA, 32 nt, Homo Sapiens
uucucuuggcucuuugggucuuucccggguac

SEQ ID NO: 254471 - RNA, 32 nt, Homo Sapiens
cugggcucuucucuggccuccucaccagggca

SEQ ID NO: 254472 - RNA, 31 nt, Homo Sapiens
gccacucggcacugggccaccugccccugcu

SEQ ID NO: 254473 - RNA, 32 nt, Homo Sapiens
uggagugggccaacacuauccagccacucuga

SEQ ID NO: 254474 - RNA, 32 nt, Homo Sapiens
ucuguaugggacaaaaguuucuuaagauaaaa

SEQ ID NO: 254475 - RNA, 32 nt, Homo Sapiens
ugaaaauaauaauaccugaggacccaugggaa

SEQ ID NO: 254476 - RNA, 32 nt, Homo Sapiens
uuccagccauuaaauguaaaagcccuccugag

SEQ ID NO: 254477 - RNA, 32 nt, Homo Sapiens
gcaccgacacccugggguggcgcuggccaggc

SEQ ID NO: 254478 - RNA, 32 nt, Homo Sapiens
cgcuccgggcacgucgggcagccucgggcccu

SEQ ID NO: 254479 - RNA, 32 nt, Homo Sapiens
agccaccagggccccaggcucguuuuccuuua

SEQ ID NO: 254480 - RNA, 32 nt, Homo Sapiens
uaucucacacucaugcauuguccucuuuuuau

SEQ ID NO: 254481 - RNA, 32 nt, Homo Sapiens
gugacccugugcuuagugagcaauagugauug

SEQ ID NO: 254482 - RNA, 32 nt, Homo Sapiens
cuuucuacggugccgcagccgugugccucuuc

SEQ ID NO: 254483 - RNA, 32 nt, Homo Sapiens
cacgcacagcacgcccggggccugcaggagaa

SEQ ID NO: 254484 - RNA, 30 nt, Homo Sapiens
ucgugggggaagcuugggccugaacagcag

SEQ ID NO: 254485 - RNA, 32 nt, Homo Sapiens
caauauuucugucuccagucuaccacuuccac

SEQ ID NO: 254486 - RNA, 32 nt, Homo Sapiens
ccagggcccuccccagcugugcccaucugcaa

SEQ ID NO: 254487 - RNA, 32 nt, Homo Sapiens
ccuauaaugagccguugugcuccagccugggc

SEQ ID NO: 254488 - RNA, 32 nt, Homo Sapiens
guauguuuuguaacaaauacuguggccugaua

SEQ ID NO: 254489 - RNA, 32 nt, Homo Sapiens
aaauguugagcaauguuaacuguuaacacugc

SEQ ID NO: 254490 - RNA, 32 nt, Homo Sapiens
ugcccucgacagcuuuaccucccccggacccu

SEQ ID NO: 254491 - RNA, 32 nt, Homo Sapiens
ccuuuauagcgaagcaaaaaacacaagacccu

SEQ ID NO: 254492 - RNA, 32 nt, Homo Sapiens
uucaaauguggauuuuuaaauauuuuaauuac

SEQ ID NO: 254493 - RNA, 31 nt, Homo Sapiens
ucugcgcugccggcccggcgcgggguccgga

SEQ ID NO: 254494 - RNA, 32 nt, Homo Sapiens
uaccuuccuaaaucgaauagucuaaaugaauc

SEQ ID NO: 254495 - RNA, 27 nt, Homo Sapiens
uacacagcagucuucagcccccuggaa

SEQ ID NO: 254496 - RNA, 32 nt, Homo Sapiens
gugauauaaaauguuugauauaggcaguacuu

SEQ ID NO: 254497 - RNA, 32 nt, Homo Sapiens
ugccugaucuucucugcccccggggccagacc

SEQ ID NO: 254498 - RNA, 32 nt, Homo Sapiens
cggcaggaagcaggugcccuccccagcgucac

SEQ ID NO: 254499 - RNA, 32 nt, Homo Sapiens
cuggauaaauuaaaaucugagguuaaugaaau

SEQ ID NO: 254500 - RNA, 31 nt, Homo Sapiens
cagccugggcgacagaaccagacuccgucuc

SEQ ID NO: 254501 - RNA, 32 nt, Homo Sapiens
ccgaagaucgcacuggaagauuuuauaaaaga

SEQ ID NO: 254502 - RNA, 32 nt, Homo Sapiens
auccaagaaauauuugaguaaaaucccuuguu

SEQ ID NO: 254503 - RNA, 32 nt, Homo Sapiens
uaagugcaggagucccuguccuaagauggcag

SEQ ID NO: 254504 - RNA, 32 nt, Homo Sapiens
gacuuaauuuuuucuucaauuuuuaaguaaac

SEQ ID NO: 254505 - RNA, 31 nt, Homo Sapiens
guagcugagccccagagccucucuggaagag

SEQ ID NO: 254506 - RNA, 32 nt, Homo Sapiens
ggaaaggggugaauucacugggucauggaagg

SEQ ID NO: 254507 - RNA, 32 nt, Homo Sapiens
ugagguggucacaugagaagugauaccuguua

SEQ ID NO: 254508 - RNA, 32 nt, Homo Sapiens
uuaauaaagggcauuugggcagacacacugug

SEQ ID NO: 254509 - RNA, 32 nt, Homo Sapiens
ggugagcacacugucuccugcuggcauucacc

SEQ ID NO: 254510 - RNA, 32 nt, Homo Sapiens
uuuaaaaaacaaaccccaguaaauauaauuuc

SEQ ID NO: 254511 - RNA, 32 nt, Homo Sapiens
agggagaggaagaucgggagagcuggcuaccg

SEQ ID NO: 254512 - RNA, 32 nt, Homo Sapiens
aggccacaggaguggauagcuguuuucaccua

SEQ ID NO: 254513 - RNA, 32 nt, Homo Sapiens
cacgucuucuaaaaggggcauauuuuauauua

SEQ ID NO: 254514 - RNA, 32 nt, Homo Sapiens
caaguccuuuuggaagcuggcagagcuauauu

SEQ ID NO: 254515 - RNA, 32 nt, Homo Sapiens
cagccuguuggacccgcucuggaccaacccug

SEQ ID NO: 254516 - RNA, 32 nt, Homo Sapiens
uuaaauuuuuauuuucuuucacucuguauuaa

SEQ ID NO: 254517 - RNA, 32 nt, Homo Sapiens
uagaauuacaguguucucuguuagugucaagg

SEQ ID NO: 254518 - RNA, 32 nt, Homo Sapiens
cucaccuuccccccaacgccacggccaaggca

SEQ ID NO: 254519 - RNA, 32 nt, Homo Sapiens
gcuccaggcccacugugccgggaccccugcac

SEQ ID NO: 254520 - RNA, 32 nt, Homo Sapiens
acucugggccuggccauauggcuugguuuggc

SEQ ID NO: 254521 - RNA, 32 nt, Homo Sapiens
auuuccuuucuuuucuauuuuagauaccugga

SEQ ID NO: 254522 - RNA, 32 nt, Homo Sapiens
uaguccgucucgccgcgcaagcgcccuaggcu

SEQ ID NO: 254523 - RNA, 32 nt, Homo Sapiens
uauguaacgaacccaacaaugaagauacaguu

SEQ ID NO: 254524 - RNA, 32 nt, Homo Sapiens
aggccuacugucagccucguggcagccuaaac

SEQ ID NO: 254525 - RNA, 32 nt, Homo Sapiens
ggccgcacuccagccugcccuucgugaguuuc

SEQ ID NO: 254526 - RNA, 32 nt, Homo Sapiens
ggcuuuuccggggcccgggagccaaccgaggg

SEQ ID NO: 254527 - RNA, 32 nt, Homo Sapiens
uauuuuauauugaauucuacuaacauauccug

SEQ ID NO: 254528 - RNA, 32 nt, Homo Sapiens
gaagauaaugcauuuauaagcauuuuaaaauu

SEQ ID NO: 254529 - RNA, 32 nt, Homo Sapiens
uggcgguggcugcggcgacggcagaggcgaag

SEQ ID NO: 254530 - RNA, 32 nt, Homo Sapiens
acaauauaaaauggcauuguuauagaaucccu

SEQ ID NO: 254531 - RNA, 32 nt, Homo Sapiens
aguacugaaaauugauauuauuuuccuuuucu

SEQ ID NO: 254532 - RNA, 32 nt, Homo Sapiens
caggccauuucugcaagcaauguaugacccca

SEQ ID NO: 254533 - RNA, 32 nt, Homo Sapiens
guggggccucaucuccucccugugcugcucug

SEQ ID NO: 254534 - RNA, 32 nt, Homo Sapiens
aaauugccccccaacguaguuuuuacacccca

SEQ ID NO: 254535 - RNA, 32 nt, Homo Sapiens
ccuuccccacccaccaacccucagggcaaagc

SEQ ID NO: 254536 - RNA, 32 nt, Homo Sapiens
cauguuuaauguaugagaaaaauauuuaccaa

SEQ ID NO: 254537 - RNA, 32 nt, Homo Sapiens
aagcuagcggcagcagggagccaggcagauua

SEQ ID NO: 254538 - RNA, 32 nt, Homo Sapiens
uacgaagugagccgcagcuccuacguguaccu

SEQ ID NO: 254539 - RNA, 32 nt, Homo Sapiens
auuguaauagguuuuacccaguuuuagaaaag

SEQ ID NO: 254540 - RNA, 32 nt, Homo Sapiens
gcggcucucggguugcggugaagaaugucagc

SEQ ID NO: 254541 - RNA, 32 nt, Homo Sapiens
ugaaggggaauagcacagggaugugugcuuuu

SEQ ID NO: 254542 - RNA, 32 nt, Homo Sapiens
gugcguuucuucaaaauucugcuuucuucaac

SEQ ID NO: 254543 - RNA, 32 nt, Homo Sapiens
uugaagugcuaacaucagaaucaaacuuaaag

SEQ ID NO: 254544 - RNA, 32 nt, Homo Sapiens
ccagagccuccccgcgcggaccccgcugcagu

SEQ ID NO: 254545 - RNA, 32 nt, Homo Sapiens
gagcucuagaucuccuucacauacuucacuau

SEQ ID NO: 254546 - RNA, 32 nt, Homo Sapiens
agcgccaagcaaccuggguccaaauaaaaacu

SEQ ID NO: 254547 - RNA, 32 nt, Homo Sapiens
ggcuuccuucucacccuucucuccauaaguau

SEQ ID NO: 254548 - RNA, 32 nt, Homo Sapiens
ccaccgaucugugcagagugggugugggagug

SEQ ID NO: 254549 - RNA, 32 nt, Homo Sapiens
aauaauaauagcugacauuugcugaugacaug

SEQ ID NO: 254550 - RNA, 32 nt, Homo Sapiens
gcgcgggaggcaugaaguugggcgcgcacggg

SEQ ID NO: 254551 - RNA, 32 nt, Homo Sapiens
gucuuaagcauuaauauugaauuuauauagaa

SEQ ID NO: 254552 - RNA, 32 nt, Homo Sapiens
auuuuuucccuguuuuaguuauacagguuggu

SEQ ID NO: 254553 - RNA, 32 nt, Homo Sapiens
gcgcagcucugcaaaaguuucugcucgggauc

SEQ ID NO: 254554 - RNA, 32 nt, Homo Sapiens
agacgaagggaaggguagccagggagggaguc

SEQ ID NO: 254555 - RNA, 27 nt, Homo Sapiens
ucagacucugucuucagcucgggcccc

SEQ ID NO: 254556 - RNA, 32 nt, Homo Sapiens
gaaauacaucagaaaauucauacugaagagaa

SEQ ID NO: 254557 - RNA, 32 nt, Homo Sapiens
auggugccuccugcccucuccucucucaggag

SEQ ID NO: 254558 - RNA, 31 nt, Homo Sapiens
aguuuucauuugaguacccaaauacacaaaa

SEQ ID NO: 254559 - RNA, 32 nt, Homo Sapiens
acccauagcuuccaugagaacagcaggguagu

SEQ ID NO: 254560 - RNA, 32 nt, Homo Sapiens
gauccaaggcugugagcaaacacuggacaaau

SEQ ID NO: 254561 - RNA, 32 nt, Homo Sapiens
gccgaggucuuaggugaacuucagcucuuucu

SEQ ID NO: 254562 - RNA, 32 nt, Homo Sapiens
cuucucucuccagccaucaccgcugugguugu

SEQ ID NO: 254563 - RNA, 32 nt, Homo Sapiens
acccgcucccuagccccggcccggcccucccc

SEQ ID NO: 254564 - RNA, 32 nt, Homo Sapiens
gugggguguggggaguggggcuggcuggagaa

SEQ ID NO: 254565 - RNA, 32 nt, Homo Sapiens
uauugcauuuauauguaccguaggcuuuguau

SEQ ID NO: 254566 - RNA, 32 nt, Homo Sapiens
uauuuuccugugaaaaugccuaccacaaagaa

SEQ ID NO: 254567 - RNA, 32 nt, Homo Sapiens
cccacggaggacaacauggcaacaucuaccca

SEQ ID NO: 254568 - RNA, 32 nt, Homo Sapiens
agcagccguuuguccccaccguuacaggagau

SEQ ID NO: 254569 - RNA, 32 nt, Homo Sapiens
gaagcuuccucuccucggggggcacaagcuuc

SEQ ID NO: 254570 - RNA, 30 nt, Homo Sapiens
uugucuguagucccugacaagaguaauuau

SEQ ID NO: 254571 - RNA, 32 nt, Homo Sapiens
gcuucuacauguuuagcaacacggcugaucuu

SEQ ID NO: 254572 - RNA, 32 nt, Homo Sapiens
uccgccucccuggccuggcucaaccgagugcc

SEQ ID NO: 254573 - RNA, 32 nt, Homo Sapiens
auuuugccaucccaucuccuccaucuaaguaa

SEQ ID NO: 254574 - RNA, 32 nt, Homo Sapiens
aauaggggcagagcucagauaugagucaaggc

SEQ ID NO: 254575 - RNA, 32 nt, Homo Sapiens
uuugcuuuguguuggcaaccacuucuaguaag

SEQ ID NO: 254576 - RNA, 32 nt, Homo Sapiens
uggauuggugguagggcggggcgggccacagu

SEQ ID NO: 254577 - RNA, 32 nt, Homo Sapiens
aagaugacaaguuagggagagaucagagguca

SEQ ID NO: 254578 - RNA, 32 nt, Homo Sapiens
gaggcuguaugccuaugggguuauggaaccuu

SEQ ID NO: 254579 - RNA, 32 nt, Homo Sapiens
gcuaggcacaccugggugggugguagagcagu

SEQ ID NO: 254580 - RNA, 31 nt, Homo Sapiens
ucuauuuucccccaaggaaaguccuugcaca

SEQ ID NO: 254581 - RNA, 32 nt, Homo Sapiens
caggugggguggcaaagcuaccuggaauggau

SEQ ID NO: 254582 - RNA, 32 nt, Homo Sapiens
ugggccucgcccuuccucucccuccagguuua

SEQ ID NO: 254583 - RNA, 32 nt, Homo Sapiens
ccugcaauuuaaaugguauggucuggaugaug

SEQ ID NO: 254584 - RNA, 32 nt, Homo Sapiens
uuuacccugugucuugacuucucugagaguug

SEQ ID NO: 254585 - RNA, 32 nt, Homo Sapiens
gcucggcuuucccccugcaccuuucccacccu

SEQ ID NO: 254586 - RNA, 32 nt, Homo Sapiens
ucggaucaacuggcagucguuguugguauugu

SEQ ID NO: 254587 - RNA, 32 nt, Homo Sapiens
ugauucuuucuggacucuuuggcagaugguuu

SEQ ID NO: 254588 - RNA, 32 nt, Homo Sapiens
ugggacaguaaguucugucuggcacaagcagg

SEQ ID NO: 254589 - RNA, 32 nt, Homo Sapiens
ucaggacccagcccagcuuguuguguagcacc

SEQ ID NO: 254590 - RNA, 32 nt, Homo Sapiens
ggaaugucucaaagcuuuuuacugauucuuau

SEQ ID NO: 254591 - RNA, 32 nt, Homo Sapiens
acauuaaguauuucaucuuaguuucuuguggu

SEQ ID NO: 254592 - RNA, 32 nt, Homo Sapiens
gggcuuucucuuugguuucucaucacauuugu

SEQ ID NO: 254593 - RNA, 32 nt, Homo Sapiens
auaugauguaaauagcaggaaacuauaaaugg

SEQ ID NO: 254594 - RNA, 32 nt, Homo Sapiens
aaagggaagcuguggguccacauucccuucag

SEQ ID NO: 254595 - RNA, 32 nt, Homo Sapiens
gguuuuacugcuuuuccagacacaaggcugcu

SEQ ID NO: 254596 - RNA, 32 nt, Homo Sapiens
caccgcgcucagcgcccaccgccgggcuuccc

SEQ ID NO: 254597 - RNA, 32 nt, Homo Sapiens
ggguccccagggugggagagcggcuccgcggc

SEQ ID NO: 254598 - RNA, 32 nt, Homo Sapiens
agccaugccucccccugccccagccgcuccuu

SEQ ID NO: 254599 - RNA, 32 nt, Homo Sapiens
ggaagcucauggacaagguucucagggaaguu

SEQ ID NO: 254600 - RNA, 32 nt, Homo Sapiens
cuuuuaacauugguuuaacaaaccauagaggc

SEQ ID NO: 254601 - RNA, 32 nt, Homo Sapiens
ggcagaguggugucauuccauguaaaguuagg

SEQ ID NO: 254602 - RNA, 32 nt, Homo Sapiens
aaaggcaguuccucuucuccagugcccuccuu

SEQ ID NO: 254603 - RNA, 32 nt, Homo Sapiens
aauguuuuauugcauugauaauguuucuguug

SEQ ID NO: 254604 - RNA, 32 nt, Homo Sapiens
uucuuuagccaauacuacaacaaugcaguccu

SEQ ID NO: 254605 - RNA, 32 nt, Homo Sapiens
caucugcauuccuuagaaucugcauaacagcu

SEQ ID NO: 254606 - RNA, 32 nt, Homo Sapiens
uauaacccuaaaaacgccauacuuuaaauugu

SEQ ID NO: 254607 - RNA, 32 nt, Homo Sapiens
cggcucccgggcggcgccgagcggagcggauc

SEQ ID NO: 254608 - RNA, 32 nt, Homo Sapiens
caaauaaaucaaaugauuaaauuauauguucc

SEQ ID NO: 254609 - RNA, 32 nt, Homo Sapiens
cccaaauaguauacauuguaccuaguaaauac

SEQ ID NO: 254610 - RNA, 32 nt, Homo Sapiens
cccagauggcuguauucacauguagguuuggg

SEQ ID NO: 254611 - RNA, 32 nt, Homo Sapiens
gcauucauuuuuacucuucucuaauauggguc

SEQ ID NO: 254612 - RNA, 32 nt, Homo Sapiens
aaguuuuuauuuuuuccaaacuagugcaugua

SEQ ID NO: 254613 - RNA, 32 nt, Homo Sapiens
gcgggcgcccucgggccccacccugccaagcu

SEQ ID NO: 254614 - RNA, 32 nt, Homo Sapiens
ccccuuuugcccuguuuuuuggagagggugua

SEQ ID NO: 254615 - RNA, 32 nt, Homo Sapiens
cauaaaucuaggugguuuuguuuacuucuauu

SEQ ID NO: 254616 - RNA, 32 nt, Homo Sapiens
gaugggggaaccgggcggcgagacggcggcag

SEQ ID NO: 254617 - RNA, 32 nt, Homo Sapiens
cggguaaaguaccaccugcuacucagaaagcu

SEQ ID NO: 254618 - RNA, 32 nt, Homo Sapiens
aucaugucauauuuuaucaucuggaauuuauu

SEQ ID NO: 254619 - RNA, 32 nt, Homo Sapiens
ugggguccacacuccuggacagggcugaggag

SEQ ID NO: 254620 - RNA, 32 nt, Homo Sapiens
auuacuucaaaauaaaaaguugaaaacaaaaa

SEQ ID NO: 254621 - RNA, 32 nt, Homo Sapiens
augcuuuuuccauuuuaauuguauugcugcca

SEQ ID NO: 254622 - RNA, 32 nt, Homo Sapiens
auaaaugggugcuaauugauaauggaaauaau

SEQ ID NO: 254623 - RNA, 32 nt, Homo Sapiens
ucauugugccuuaugauggaccucugauucua

SEQ ID NO: 254624 - RNA, 32 nt, Homo Sapiens
gaccaaggaccgagacacagacauggaaggac

SEQ ID NO: 254625 - RNA, 32 nt, Homo Sapiens
gacggugcucugaugaggccaggccgacugga

SEQ ID NO: 254626 - RNA, 32 nt, Homo Sapiens
gaaugaagagcagcaguaaaagaaauaucuag

SEQ ID NO: 254627 - RNA, 32 nt, Homo Sapiens
ugugaggcaauacauuucuguuguuuaagcca

SEQ ID NO: 254628 - RNA, 32 nt, Homo Sapiens
gagagaggcgugguccccggccucugauggag

SEQ ID NO: 254629 - RNA, 32 nt, Homo Sapiens
ggccgcccuugguggggguagcgggggcagag

SEQ ID NO: 254630 - RNA, 32 nt, Homo Sapiens
gggguuuuauugagugguggagguggaacuca

SEQ ID NO: 254631 - RNA, 32 nt, Homo Sapiens
auguuagaauauauuucuuauacuaggaaucu

SEQ ID NO: 254632 - RNA, 32 nt, Homo Sapiens
ccccagcuggcuuuuccagguugugauagccc

SEQ ID NO: 254633 - RNA, 32 nt, Homo Sapiens
gagcaugaaaauauagaaugauuaucucagag

SEQ ID NO: 254634 - RNA, 32 nt, Homo Sapiens
gcuuguggaagacaagucuguggcuuggugag

SEQ ID NO: 254635 - RNA, 32 nt, Homo Sapiens
ggcuccgggaagauggcggcccgggcggguuu

SEQ ID NO: 254636 - RNA, 32 nt, Homo Sapiens
gacggucaacaucuggacucacuuccugccca

SEQ ID NO: 254637 - RNA, 32 nt, Homo Sapiens
cauuggcaagaagagcaagagaaggcagagga

SEQ ID NO: 254638 - RNA, 32 nt, Homo Sapiens
aacacucggagguggcgguggaucuuacuccu

SEQ ID NO: 254639 - RNA, 32 nt, Homo Sapiens
uugcuggaacuaaauaugcaauggaucaugag

SEQ ID NO: 254640 - RNA, 31 nt, Homo Sapiens
uuggacagaaagaaaagaaacuugguguuag

SEQ ID NO: 254641 - RNA, 32 nt, Homo Sapiens
gaacgcaggcggacgcucucggguuuaccugc

SEQ ID NO: 254642 - RNA, 32 nt, Homo Sapiens
aagcucuuauuuccagugccaagcccccagag

SEQ ID NO: 254643 - RNA, 32 nt, Homo Sapiens
gugucacuggaaccacagcccuuuuucauuuu

SEQ ID NO: 254644 - RNA, 32 nt, Homo Sapiens
cguaauguuucaucuguggauuugaugacaac

SEQ ID NO: 254645 - RNA, 32 nt, Homo Sapiens
uugggaaggguccauggaucgcggcccaguuc

SEQ ID NO: 254646 - RNA, 32 nt, Homo Sapiens
cucggugaggacugcaccuuaaccugggcacu

SEQ ID NO: 254647 - RNA, 32 nt, Homo Sapiens
uaguguaggcuuuacuuagcuuaucaauuugu

SEQ ID NO: 254648 - RNA, 32 nt, Homo Sapiens
uguggcuuggacuuacguuuauugucaagggg

SEQ ID NO: 254649 - RNA, 32 nt, Homo Sapiens
gcuccuccugcagccccuccucaccugggcuc

SEQ ID NO: 254650 - RNA, 32 nt, Homo Sapiens
guuuuauauaauuucuaaauguuuaacauuug

SEQ ID NO: 254651 - RNA, 31 nt, Homo Sapiens
ccagcgggggcgguggcggugacaccacaca

SEQ ID NO: 254652 - RNA, 32 nt, Homo Sapiens
cgguccaaccccuucauccccagcugcuccua

SEQ ID NO: 254653 - RNA, 32 nt, Homo Sapiens
ucuguaauauaaauguaguaaacuuguacuau

SEQ ID NO: 254654 - RNA, 32 nt, Homo Sapiens
cucccaccccuacaugaggucaaaucccugga

SEQ ID NO: 254655 - RNA, 32 nt, Homo Sapiens
aagugcggugggagggggcucugcgguuuugg

SEQ ID NO: 254656 - RNA, 32 nt, Homo Sapiens
cugcaaaauaccugugcagaaaacauugugug

SEQ ID NO: 254657 - RNA, 32 nt, Homo Sapiens
ggcacgaggggcggccuggcccgggaccugcu

SEQ ID NO: 254658 - RNA, 32 nt, Homo Sapiens
auuuuuaagggggaaaagcagcuccccauacg

SEQ ID NO: 254659 - RNA, 32 nt, Homo Sapiens
gugcuguuccuacuccacccuccccuggugau

SEQ ID NO: 254660 - RNA, 32 nt, Homo Sapiens
cuccaguuuggcuguggagacuugagcaagcc

SEQ ID NO: 254661 - RNA, 32 nt, Homo Sapiens
ugcaugcaaucaaccucuuuuguaaauggaaa

SEQ ID NO: 254662 - RNA, 32 nt, Homo Sapiens
gcugugcggcggucccgcgcccggcgauguuc

SEQ ID NO: 254663 - RNA, 32 nt, Homo Sapiens
ccggcacccgcagccugcagccugcagcccgc

SEQ ID NO: 254664 - RNA, 32 nt, Homo Sapiens
ugggccuguccccgccgagccgcggcccuguc

SEQ ID NO: 254665 - RNA, 32 nt, Homo Sapiens
cugcuuuucccagauagcaccuacccaaccca

SEQ ID NO: 254666 - RNA, 32 nt, Homo Sapiens
cagagggcgaggcccuccagcgggggacauuc

SEQ ID NO: 254667 - RNA, 32 nt, Homo Sapiens
augugggcagcuguuuaacauggcugagcccu

SEQ ID NO: 254668 - RNA, 32 nt, Homo Sapiens
auagaaaaaaauuuuuauaaucaucaaaaugu

SEQ ID NO: 254669 - RNA, 32 nt, Homo Sapiens
ccaaaucacagagggaagcaacaugauuaaaa

SEQ ID NO: 254670 - RNA, 30 nt, Homo Sapiens
uagagaggaggugggaacagaagagagaag

SEQ ID NO: 254671 - RNA, 32 nt, Homo Sapiens
acgggcaaauuuccuccuugcuguucuugcga

SEQ ID NO: 254672 - RNA, 32 nt, Homo Sapiens
ugggucgcacccagcuaccgcaccgugaccuc

SEQ ID NO: 254673 - RNA, 32 nt, Homo Sapiens
cucccuagacugaguucuggcagcuccccgag

SEQ ID NO: 254674 - RNA, 32 nt, Homo Sapiens
gguagcggcggcggcgggaggggcggccugag

SEQ ID NO: 254675 - RNA, 32 nt, Homo Sapiens
uuauuuuguuuacuuuuuugcuuucuuguuua

SEQ ID NO: 254676 - RNA, 32 nt, Homo Sapiens
cacccccauuguucugcauccuguucccuguu

SEQ ID NO: 254677 - RNA, 32 nt, Homo Sapiens
aaaaaauaauuuccauguaaguuaccagaaag

SEQ ID NO: 254678 - RNA, 32 nt, Homo Sapiens
uuauguaaugaaaaacaaauagcauccuucuu

SEQ ID NO: 254679 - RNA, 32 nt, Homo Sapiens
aaauagugaagauacgucuagccagaccuaau

SEQ ID NO: 254680 - RNA, 32 nt, Homo Sapiens
aguccacaucuucucaguguuuuagcuguuuu

SEQ ID NO: 254681 - RNA, 32 nt, Homo Sapiens
aguuuauaaaucucacagacaagccuuaaaga

SEQ ID NO: 254682 - RNA, 32 nt, Homo Sapiens
aguggaaucuuacugucaucuggacagcuguu

SEQ ID NO: 254683 - RNA, 31 nt, Homo Sapiens
gggucgcugcaacucgcuccaggccuccgga

SEQ ID NO: 254684 - RNA, 32 nt, Homo Sapiens
cuuagauuucugcaugagaaucagcugaccca

SEQ ID NO: 254685 - RNA, 32 nt, Homo Sapiens
aagaacauucucaaaacguaaauagguaucua

SEQ ID NO: 254686 - RNA, 32 nt, Homo Sapiens
ccaacacgcugagacuguggggcgucagcaaa

SEQ ID NO: 254687 - RNA, 32 nt, Homo Sapiens
ugacauugcugcgcucggggggcuccaggcag

SEQ ID NO: 254688 - RNA, 30 nt, Homo Sapiens
ugauucuuggauuguuuucucauguauuug

SEQ ID NO: 254689 - RNA, 32 nt, Homo Sapiens
cucgugcgggcagcugcgggcgcaccuggacc

SEQ ID NO: 254690 - RNA, 32 nt, Homo Sapiens
uccaaugaacgauguuagauuuuacacagaac

SEQ ID NO: 254691 - RNA, 32 nt, Homo Sapiens
augagguuggacaagaugccacugcuuuucuu

SEQ ID NO: 254692 - RNA, 32 nt, Homo Sapiens
agcgcggcggggacgcggggaccgcccggauc

SEQ ID NO: 254693 - RNA, 32 nt, Homo Sapiens
uuuugaaaacaucagauuugcugugguauggg

SEQ ID NO: 254694 - RNA, 32 nt, Homo Sapiens
uaaucccaacugggugcaguggcucacgccug

SEQ ID NO: 254695 - RNA, 32 nt, Homo Sapiens
auggaaaaguauauuucucgauguacauuuua

SEQ ID NO: 254696 - RNA, 32 nt, Homo Sapiens
uuggaaccuuggaaaugaccaggccaagacuc

SEQ ID NO: 254697 - RNA, 32 nt, Homo Sapiens
uguuuaaacgcaaagcuuuguaaaagccacaa

SEQ ID NO: 254698 - RNA, 32 nt, Homo Sapiens
uaccuagaagauagguuaaggaaauauauuau

SEQ ID NO: 254699 - RNA, 32 nt, Homo Sapiens
aguaggcccuccccucccuaaaucugcuuccg

SEQ ID NO: 254700 - RNA, 32 nt, Homo Sapiens
acacgagaggccgggugugguggcccaugccu

SEQ ID NO: 254701 - RNA, 32 nt, Homo Sapiens
cucccuggggacggggcuccccuggacagagg

SEQ ID NO: 254702 - RNA, 32 nt, Homo Sapiens
gggccgggccgagcccgggggcgcuuucgcac

SEQ ID NO: 254703 - RNA, 32 nt, Homo Sapiens
aaaaaacagccuucuuuuuucuuuccugcuca

SEQ ID NO: 254704 - RNA, 32 nt, Homo Sapiens
ggcauguugguuuugucucucuuucuuuucuc

SEQ ID NO: 254705 - RNA, 32 nt, Homo Sapiens
ccaauguuuuauucgguuucugguuuccccac

SEQ ID NO: 254706 - RNA, 32 nt, Homo Sapiens
ccuggagccgcugugcgccgcccgcgagaacg

SEQ ID NO: 254707 - RNA, 31 nt, Homo Sapiens
ggacaguggaaagagugcagagccucugccu

SEQ ID NO: 254708 - RNA, 32 nt, Homo Sapiens
uuauuuucuguccccacccccaccccccucaa

SEQ ID NO: 254709 - RNA, 32 nt, Homo Sapiens
uucuuacagaaaguaaaaaggcugauguuuca

SEQ ID NO: 254710 - RNA, 32 nt, Homo Sapiens
cccguucacauuuuuguauuuuguuuaaauua

SEQ ID NO: 254711 - RNA, 32 nt, Homo Sapiens
caugauauccuuauuucucaccacuaggacau

SEQ ID NO: 254712 - RNA, 32 nt, Homo Sapiens
auuaauaugugaaggaaaauguuuucaaaggu

SEQ ID NO: 254713 - RNA, 32 nt, Homo Sapiens
agauucaucugcacaaauacgugguggucuac

SEQ ID NO: 254714 - RNA, 32 nt, Homo Sapiens
uggagagguauguguguguaaauauaaagguc

SEQ ID NO: 254715 - RNA, 32 nt, Homo Sapiens
uacuuggcugaauuuccauauaguuuuuacug

SEQ ID NO: 254716 - RNA, 32 nt, Homo Sapiens
ucuuaaguuuuuuguucagcuacuucacacug

SEQ ID NO: 254717 - RNA, 32 nt, Homo Sapiens
aggaaaauauuguggaaggaccucuuuguugc

SEQ ID NO: 254718 - RNA, 32 nt, Homo Sapiens
gacugagaggggccugacuucugcugggacag

SEQ ID NO: 254719 - RNA, 32 nt, Homo Sapiens
cccuggaggagcucccagucugauggggggau

SEQ ID NO: 254720 - RNA, 32 nt, Homo Sapiens
cuguggucaauacuugcauuuaauuagacgaa

SEQ ID NO: 254721 - RNA, 32 nt, Homo Sapiens
cauucagacugccagcacuuugcuaucuacag

SEQ ID NO: 254722 - RNA, 31 nt, Homo Sapiens
agaccuggccuggcaucaggaguccaaaccu

SEQ ID NO: 254723 - RNA, 32 nt, Homo Sapiens
aaaaugucuuguuaaugauuuucauguugauu

SEQ ID NO: 254724 - RNA, 32 nt, Homo Sapiens
ggccgcgcuguccaggugugcggccgccugag

SEQ ID NO: 254725 - RNA, 32 nt, Homo Sapiens
ccuucacucggccaugcucccgcggccccugc

SEQ ID NO: 254726 - RNA, 32 nt, Homo Sapiens
acucaggcccagcaaugaccucugcucauuuu

SEQ ID NO: 254727 - RNA, 32 nt, Homo Sapiens
ccaacaucugucacccugcagcuccuuuacag

SEQ ID NO: 254728 - RNA, 32 nt, Homo Sapiens
cagccagagguauuacugcugagcccugcaag

SEQ ID NO: 254729 - RNA, 32 nt, Homo Sapiens
ccaccccauuuucuccggcugccuggccgggu

SEQ ID NO: 254730 - RNA, 32 nt, Homo Sapiens
aguugcccagcuuggaguugucugucacgcac

SEQ ID NO: 254731 - RNA, 32 nt, Homo Sapiens
uucugguccuccaaagauugaaagcuuaauaa

SEQ ID NO: 254732 - RNA, 32 nt, Homo Sapiens
gggucaugccucacacuucacaucagaauuuc

SEQ ID NO: 254733 - RNA, 32 nt, Homo Sapiens
caaugggaaauacuacuccuguaauuccuacc

SEQ ID NO: 254734 - RNA, 32 nt, Homo Sapiens
aucuaccccguggauucaaucuucuuaucaga

SEQ ID NO: 254735 - RNA, 32 nt, Homo Sapiens
ccagcccggcuguguccccggcgccccggacc

SEQ ID NO: 254736 - RNA, 32 nt, Homo Sapiens
agguuuuauauuguacuuuuccuccauuacuu

SEQ ID NO: 254737 - RNA, 32 nt, Homo Sapiens
ucuguuuauccauuuuaguagcuuuuaaauau

SEQ ID NO: 254738 - RNA, 32 nt, Homo Sapiens
cgcuucuacaacccuccugggaccccgaagag

SEQ ID NO: 254739 - RNA, 32 nt, Homo Sapiens
uggggaguaucauuguuuuuguacaaaaaccg

SEQ ID NO: 254740 - RNA, 32 nt, Homo Sapiens
uuuauagcucaucacugugccuuuuuuucuuu

SEQ ID NO: 254741 - RNA, 32 nt, Homo Sapiens
uggguccuguccagcccuccccucuccugcac

SEQ ID NO: 254742 - RNA, 31 nt, Homo Sapiens
aacauucugaaaaaucucagagaacugaacc

SEQ ID NO: 254743 - RNA, 32 nt, Homo Sapiens
uggccaugaugggacaggaggccaaacacauc

SEQ ID NO: 254744 - RNA, 30 nt, Homo Sapiens
agcucugucugugugggugcucacaggagg

SEQ ID NO: 254745 - RNA, 32 nt, Homo Sapiens
cuguguaccaauaacaugcaugcauuguacca

SEQ ID NO: 254746 - RNA, 32 nt, Homo Sapiens
caccgggucgacggagcaaggaucugggcuuu

SEQ ID NO: 254747 - RNA, 32 nt, Homo Sapiens
gaaaugggaggaugaagaggcuagaaucaucu

SEQ ID NO: 254748 - RNA, 32 nt, Homo Sapiens
uuuuuacuuuuguuuauuuuuaugguaacugc

SEQ ID NO: 254749 - RNA, 32 nt, Homo Sapiens
aaagcaaaacaucacauuccagucugaagugc

SEQ ID NO: 254750 - RNA, 32 nt, Homo Sapiens
aauagauggauuuguaucaauaccaaauagcu

SEQ ID NO: 254751 - RNA, 32 nt, Homo Sapiens
uaccucguguuccuccucccucuauuacuguu

SEQ ID NO: 254752 - RNA, 32 nt, Homo Sapiens
ucaggccgccuagcugccccuuugccagguua

SEQ ID NO: 254753 - RNA, 32 nt, Homo Sapiens
ugccucugcuugcuuucucacccaugucuggu

SEQ ID NO: 254754 - RNA, 31 nt, Homo Sapiens
ugucagagggcgguuuugagcuuucuauaag

SEQ ID NO: 254755 - RNA, 32 nt, Homo Sapiens
auauuuuaaaauguaauguuacuuaugaaaag

SEQ ID NO: 254756 - RNA, 31 nt, Homo Sapiens
aaguuuuccacauaaugaaaguccuucugau

SEQ ID NO: 254757 - RNA, 32 nt, Homo Sapiens
gagcagucugcacaugcuucugucugagugca

SEQ ID NO: 254758 - RNA, 32 nt, Homo Sapiens
ucauuauuauuaugauuauuauuuugagaugg

SEQ ID NO: 254759 - RNA, 32 nt, Homo Sapiens
gaccuucacagcaccugccccucacaccucca

SEQ ID NO: 254760 - RNA, 32 nt, Homo Sapiens
cggaaaugggacgucuuccuuaacaucugcaa

SEQ ID NO: 254761 - RNA, 32 nt, Homo Sapiens
aucuauauuuuugucucuaagagaucaaguaa

SEQ ID NO: 254762 - RNA, 32 nt, Homo Sapiens
uaagaaacuucaugcuggccugugugauacaa

SEQ ID NO: 254763 - RNA, 32 nt, Homo Sapiens
uugcuucucagcucagcugugccaggaucuug

SEQ ID NO: 254764 - RNA, 32 nt, Homo Sapiens
uuauuuacauacaacuaaauaaauguuguccu

SEQ ID NO: 254765 - RNA, 32 nt, Homo Sapiens
ccugcuugcauucauccccuccuccucaucuc

SEQ ID NO: 254766 - RNA, 32 nt, Homo Sapiens
gugaugagaaagaucaaagcaugcauacaauu

SEQ ID NO: 254767 - RNA, 32 nt, Homo Sapiens
aagacccacuucuauuugguuuauuccguucu

SEQ ID NO: 254768 - RNA, 32 nt, Homo Sapiens
augccuuacuggaaacuuuguuuacuugucug

SEQ ID NO: 254769 - RNA, 32 nt, Homo Sapiens
uaaucuuuuaccacuuugggguugcuuuuuuc

SEQ ID NO: 254770 - RNA, 32 nt, Homo Sapiens
ucuugugcauuacuccucucccuccuuuguua

SEQ ID NO: 254771 - RNA, 32 nt, Homo Sapiens
ccauaugacccugggcuuuucuuucuugggag

SEQ ID NO: 254772 - RNA, 32 nt, Homo Sapiens
uuaacaacauucuauuugcucuuuguauauuu

SEQ ID NO: 254773 - RNA, 32 nt, Homo Sapiens
uuagggcgugaugagaguuaggagagucaaug

SEQ ID NO: 254774 - RNA, 32 nt, Homo Sapiens
uaggaggaaaaggaaagcguuuuuguagccca

SEQ ID NO: 254775 - RNA, 32 nt, Homo Sapiens
guuaauuuuuuguuuuuugucucagcaucagu

SEQ ID NO: 254776 - RNA, 29 nt, Homo Sapiens
gaagaugccccgcugcccggcgcucauuc

SEQ ID NO: 254777 - RNA, 28 nt, Homo Sapiens
caugggaccgguuucaggaugacuaacc

SEQ ID NO: 254778 - RNA, 32 nt, Homo Sapiens
caacaacaacaaaaacaaaaaugugcuguuca

SEQ ID NO: 254779 - RNA, 32 nt, Homo Sapiens
guuuaaauuuuuucuccuuccugggauaaauu

SEQ ID NO: 254780 - RNA, 32 nt, Homo Sapiens
aauaagugauauaaaacauguaaagcuuaguu

SEQ ID NO: 254781 - RNA, 32 nt, Homo Sapiens
guugugguauguguuugaugcuauaaagcuca

SEQ ID NO: 254782 - RNA, 32 nt, Homo Sapiens
agcuccccuagcauccccuccucccgcccauc

SEQ ID NO: 254783 - RNA, 32 nt, Homo Sapiens
ucgccgaggggcccgcgccgccgccagagccu

SEQ ID NO: 254784 - RNA, 32 nt, Homo Sapiens
uacaggaggagcugcguugggucagagcuggu

SEQ ID NO: 254785 - RNA, 32 nt, Homo Sapiens
accaaauuucuuuucuagauaaaaauauguau

SEQ ID NO: 254786 - RNA, 32 nt, Homo Sapiens
aagacuuuuggaaggaaaauacuggcaaaucc

SEQ ID NO: 254787 - RNA, 32 nt, Homo Sapiens
cugguguuguuggcguuagcggcagcggcggc

SEQ ID NO: 254788 - RNA, 32 nt, Homo Sapiens
accucuggccccagcaccccaccaggacuggu

SEQ ID NO: 254789 - RNA, 32 nt, Homo Sapiens
ugauaggauauaguaauagcgguggucagaca

SEQ ID NO: 254790 - RNA, 32 nt, Homo Sapiens
gucuaaaaccauuuuaugauauugccaaaaug

SEQ ID NO: 254791 - RNA, 32 nt, Homo Sapiens
ccaggauggaggaggaggaccccauaaucugc

SEQ ID NO: 254792 - RNA, 32 nt, Homo Sapiens
uguaccccgaccaccuugggcacauguucuca

SEQ ID NO: 254793 - RNA, 32 nt, Homo Sapiens
uaggaaaaauaaaaacagagcucuaaaauccc

SEQ ID NO: 254794 - RNA, 32 nt, Homo Sapiens
aguguuaccuuacuauuuuguuuacaagauag

SEQ ID NO: 254795 - RNA, 32 nt, Homo Sapiens
aagucaucaguuccauugugucaccacuaccu

SEQ ID NO: 254796 - RNA, 32 nt, Homo Sapiens
gguugcgcgugcccugugagaccgccaagaug

SEQ ID NO: 254797 - RNA, 32 nt, Homo Sapiens
cuagguggccuccuuugguuucugagcaauaa

SEQ ID NO: 254798 - RNA, 32 nt, Homo Sapiens
gcugcuuccagagcccucugggagcuauauac

SEQ ID NO: 254799 - RNA, 32 nt, Homo Sapiens
agggacccuucgagaucaucacuuccuugccc

SEQ ID NO: 254800 - RNA, 31 nt, Homo Sapiens
ugccuguagccccagcuacuugggaggcuga

SEQ ID NO: 254801 - RNA, 32 nt, Homo Sapiens
gccccuuaucucauggaaagugccaauuuacu

SEQ ID NO: 254802 - RNA, 32 nt, Homo Sapiens
uucuggucuucuccugggcuccacucagggga

SEQ ID NO: 254803 - RNA, 32 nt, Homo Sapiens
augcucagcuggaccacugggcccucacacag

SEQ ID NO: 254804 - RNA, 32 nt, Homo Sapiens
aucacgcagggcaacguggaggcgcugacacg

SEQ ID NO: 254805 - RNA, 32 nt, Homo Sapiens
ggggcagguguugguuuuuguuucuugcauuu

SEQ ID NO: 254806 - RNA, 32 nt, Homo Sapiens
gaguggaguucuggaggaauguuuaccagaca

SEQ ID NO: 254807 - RNA, 31 nt, Homo Sapiens
cccggcagugacugccugugcccggugcugu

SEQ ID NO: 254808 - RNA, 32 nt, Homo Sapiens
cuuugggugucugcuugccacuuccuaagaau

SEQ ID NO: 254809 - RNA, 32 nt, Homo Sapiens
aucgaugccccgcccccgccccacagccaacc

SEQ ID NO: 254810 - RNA, 32 nt, Homo Sapiens
gccgcacccgcggccaggcggagccaaagaug

SEQ ID NO: 254811 - RNA, 32 nt, Homo Sapiens
uuuguauuuucagaucuccuuggagcaguaga

SEQ ID NO: 254812 - RNA, 32 nt, Homo Sapiens
acugguaucagcagccuguguaaccccuuucc

SEQ ID NO: 254813 - RNA, 32 nt, Homo Sapiens
cacaccaccagccccagggagcuucccugcua

SEQ ID NO: 254814 - RNA, 32 nt, Homo Sapiens
agaagggagagagguuuagacauauggcagga

SEQ ID NO: 254815 - RNA, 32 nt, Homo Sapiens
uccagauuuucuuuuuagcucaucugccccag

SEQ ID NO: 254816 - RNA, 32 nt, Homo Sapiens
auccuggcgcagaaccuaccugaugcgguucc

SEQ ID NO: 254817 - RNA, 32 nt, Homo Sapiens
auuuuaagacaaaacaaacaaacaaaaaaaaa

SEQ ID NO: 254818 - RNA, 32 nt, Homo Sapiens
caacugaaaaagaaacuagaaauguccuaauu

SEQ ID NO: 254819 - RNA, 31 nt, Homo Sapiens
auauuggucauugccuugccaaacaggagcu

SEQ ID NO: 254820 - RNA, 29 nt, Homo Sapiens
agguucuagaguuucagaaacaaaagaaa

SEQ ID NO: 254821 - RNA, 32 nt, Homo Sapiens
acaaaaaaaauugcaguacauaaaauuucugg

SEQ ID NO: 254822 - RNA, 32 nt, Homo Sapiens
aagauuuucaguauauaaaggcgcaugcuaua

SEQ ID NO: 254823 - RNA, 32 nt, Homo Sapiens
cuccaaguucccuagcgggccccucagggaga

SEQ ID NO: 254824 - RNA, 32 nt, Homo Sapiens
cagguacuacgacaauaagauagggaguggaa

SEQ ID NO: 254825 - RNA, 32 nt, Homo Sapiens
cucccucccgaggggccgcgcgcacgggagga

SEQ ID NO: 254826 - RNA, 32 nt, Homo Sapiens
accugugccuccccgguucgagcgguucuccu

SEQ ID NO: 254827 - RNA, 32 nt, Homo Sapiens
gugguaaauaucuauguuacauguagauuaua

SEQ ID NO: 254828 - RNA, 32 nt, Homo Sapiens
ugccaucuacugaguuccuaugaucugccugg

SEQ ID NO: 254829 - RNA, 32 nt, Homo Sapiens
cacaguggcugagacugaaugaaaggugagcu

SEQ ID NO: 254830 - RNA, 30 nt, Homo Sapiens
guuccugggggcgaucgccagucacccauc

SEQ ID NO: 254831 - RNA, 32 nt, Homo Sapiens
ucucugauucuuuacacccccgccucaauccu

SEQ ID NO: 254832 - RNA, 32 nt, Homo Sapiens
gucccaacuugcugcugucaccaccaaacuca

SEQ ID NO: 254833 - RNA, 32 nt, Homo Sapiens
uccuggucaacagccaucuuuucagcaguugc

SEQ ID NO: 254834 - RNA, 32 nt, Homo Sapiens
gccaccuggcacuggugacuacagacguucuc

SEQ ID NO: 254835 - RNA, 32 nt, Homo Sapiens
gguggaaggaaaguacacagaacuagacgcac

SEQ ID NO: 254836 - RNA, 32 nt, Homo Sapiens
gccuguuuucuuuauuaguccaaaggaaaaca

SEQ ID NO: 254837 - RNA, 32 nt, Homo Sapiens
gcgcgugccaggggcgcuagggaacugcggag

SEQ ID NO: 254838 - RNA, 32 nt, Homo Sapiens
agagcacacagcagaauggguggucacagugu

SEQ ID NO: 254839 - RNA, 31 nt, Homo Sapiens
gcugccagggcggugucugagccugccggcg

SEQ ID NO: 254840 - RNA, 32 nt, Homo Sapiens
ucccacuguauauuaauugagguuacagaaag

SEQ ID NO: 254841 - RNA, 32 nt, Homo Sapiens
gggaagaucgccuggacguggagccagcaucg

SEQ ID NO: 254842 - RNA, 32 nt, Homo Sapiens
ugauuaggaaaugugaggggcaacagauguga

SEQ ID NO: 254843 - RNA, 32 nt, Homo Sapiens
cugacccgcaggccgccgcgggccgcagagcc

SEQ ID NO: 254844 - RNA, 32 nt, Homo Sapiens
gaggcacaaccuggacccaggcagccucuuuc

SEQ ID NO: 254845 - RNA, 32 nt, Homo Sapiens
acagaugaaaauuacauaaauaaaacauucuc

SEQ ID NO: 254846 - RNA, 32 nt, Homo Sapiens
cuacuaccccccaccccucuacuuccuggugu

SEQ ID NO: 254847 - RNA, 32 nt, Homo Sapiens
acugaauggaauguauuuuuaagagaauaaag

SEQ ID NO: 254848 - RNA, 32 nt, Homo Sapiens
uugggacagcgucuucgcugcugcuggauagu

SEQ ID NO: 254849 - RNA, 32 nt, Homo Sapiens
cacgagcgccgucggcuccgcggcgccgccgu

SEQ ID NO: 254850 - RNA, 32 nt, Homo Sapiens
acccgcgcgccggacgccagugaccgcgaugg

SEQ ID NO: 254851 - RNA, 32 nt, Homo Sapiens
cugucauccagaaaaugugucagcaugcauag

SEQ ID NO: 254852 - RNA, 32 nt, Homo Sapiens
aguuugguuuugucuuuuuuuauuuggcaagu

SEQ ID NO: 254853 - RNA, 32 nt, Homo Sapiens
gugccuaagcauugcacagguuuccgaagacg

SEQ ID NO: 254854 - RNA, 32 nt, Homo Sapiens
gggucagcauaggauaaaccagcaaaaccuua

SEQ ID NO: 254855 - RNA, 32 nt, Homo Sapiens
uaugcguaauuuaauggggucuguaaauacug

SEQ ID NO: 254856 - RNA, 32 nt, Homo Sapiens
ggcggaggagggggugccauggccgggcagca

SEQ ID NO: 254857 - RNA, 32 nt, Homo Sapiens
ccaccacgagccagcugccagccuagcuuuuu

SEQ ID NO: 254858 - RNA, 32 nt, Homo Sapiens
uugcagugagcugagaucccaccacugcacuc

SEQ ID NO: 254859 - RNA, 32 nt, Homo Sapiens
uagagaaagcaucuucugcagaggaagcacuu

SEQ ID NO: 254860 - RNA, 32 nt, Homo Sapiens
aaagguuuagccaagaggaaauuuuggcauga

SEQ ID NO: 254861 - RNA, 32 nt, Homo Sapiens
agagaagacugugauucuagcauauuaucaga

SEQ ID NO: 254862 - RNA, 32 nt, Homo Sapiens
guaauuuucuguuaagcuccauuugccaguuu

SEQ ID NO: 254863 - RNA, 29 nt, Homo Sapiens
cuaaccuguagcuucagaggccagucugg

SEQ ID NO: 254864 - RNA, 32 nt, Homo Sapiens
cuuuuguccucacugcuuucuaauggggaggg

SEQ ID NO: 254865 - RNA, 32 nt, Homo Sapiens
ggcgccgggaggaggacaccagcggagcccug

SEQ ID NO: 254866 - RNA, 32 nt, Homo Sapiens
aagggagaucauagugaguuaauuugauauuc

SEQ ID NO: 254867 - RNA, 32 nt, Homo Sapiens
ugaguauaucuagggcgggugggcggguagca

SEQ ID NO: 254868 - RNA, 32 nt, Homo Sapiens
aaauaguauagcaaaaugaucuuccaaaccug

SEQ ID NO: 254869 - RNA, 32 nt, Homo Sapiens
cauuccccaucccacccccagguuuccugcag

SEQ ID NO: 254870 - RNA, 32 nt, Homo Sapiens
caagcccuuuuacagcucuuggcauuuuccuc

SEQ ID NO: 254871 - RNA, 32 nt, Homo Sapiens
auuacagcugauugcagccuugaccuucccag

SEQ ID NO: 254872 - RNA, 32 nt, Homo Sapiens
uagagagcaguagggcccaggcuggugcagcc

SEQ ID NO: 254873 - RNA, 32 nt, Homo Sapiens
gcgguggacuccgacccggcgcaacauggccg

SEQ ID NO: 254874 - RNA, 32 nt, Homo Sapiens
uaaugaugcuuaccaugguuaauguuuuggaa

SEQ ID NO: 254875 - RNA, 32 nt, Homo Sapiens
aaacaaacaaacaaacaaaaacagaacauucu

SEQ ID NO: 254876 - RNA, 32 nt, Homo Sapiens
gggaugaugagccgcacagaccucacuaguug

SEQ ID NO: 254877 - RNA, 32 nt, Homo Sapiens
guugauggacauuuggguuguuuccaguguuu

SEQ ID NO: 254878 - RNA, 32 nt, Homo Sapiens
cauucccuagucauccugugccucaccacagc

SEQ ID NO: 254879 - RNA, 32 nt, Homo Sapiens
gggcucggccccacugacccuggacgaugaga

SEQ ID NO: 254880 - RNA, 32 nt, Homo Sapiens
ccuucugcccuucagccuccuccagcugggcc

SEQ ID NO: 254881 - RNA, 32 nt, Homo Sapiens
uuuuauuuuuuauuuuuuuuuauuuugagacg

SEQ ID NO: 254882 - RNA, 32 nt, Homo Sapiens
ccugugagaccuuguuuguccucuucccugcc

SEQ ID NO: 254883 - RNA, 32 nt, Homo Sapiens
guuuccaaaugugagcaucagaauuaauuugg

SEQ ID NO: 254884 - RNA, 32 nt, Homo Sapiens
aguccugaaaauggcacagaaaugguaucaag

SEQ ID NO: 254885 - RNA, 32 nt, Homo Sapiens
cauccugcugccaaggguggacacggcugcag

SEQ ID NO: 254886 - RNA, 32 nt, Homo Sapiens
caugcuucugcuuuucugcugucuuuguuacu

SEQ ID NO: 254887 - RNA, 25 nt, Homo Sapiens
auggcccgccucuucagcccccggc

SEQ ID NO: 254888 - RNA, 32 nt, Homo Sapiens
cuggucaccaaaaaaggaaacugagcaaauuc

SEQ ID NO: 254889 - RNA, 32 nt, Homo Sapiens
cacacacacacacacacacacacacacacucu

SEQ ID NO: 254890 - RNA, 32 nt, Homo Sapiens
ccccagauagccucgggugcugccuguaguca

SEQ ID NO: 254891 - RNA, 32 nt, Homo Sapiens
uuaaugaauuuauguuuacuugauauggaaaa

SEQ ID NO: 254892 - RNA, 31 nt, Homo Sapiens
ccgccuaugugagccauccugagaugucugu

SEQ ID NO: 254893 - RNA, 32 nt, Homo Sapiens
uuaagaggaaaauaaugacauguauaguauac

SEQ ID NO: 254894 - RNA, 32 nt, Homo Sapiens
gcagagagggaucugcagauacaggcuuggcg

SEQ ID NO: 254895 - RNA, 32 nt, Homo Sapiens
aacucaaugcaaauucaacaguuguauuugga

SEQ ID NO: 254896 - RNA, 32 nt, Homo Sapiens
uaucauagccaauaugcagauuuuaaacagca

SEQ ID NO: 254897 - RNA, 32 nt, Homo Sapiens
aaaagaucuaaagaucuuuuauuuucaucuuu

SEQ ID NO: 254898 - RNA, 32 nt, Homo Sapiens
ggcugucugcgccuuccacgccccccaggacg

SEQ ID NO: 254899 - RNA, 31 nt, Homo Sapiens
gaaauugaacaaauauaauacuggucacucg

SEQ ID NO: 254900 - RNA, 32 nt, Homo Sapiens
ucuucuggcccagaagacaaacuuuuccaaau

SEQ ID NO: 254901 - RNA, 32 nt, Homo Sapiens
cuuacacuggacgcccacugcuccucagcguc

SEQ ID NO: 254902 - RNA, 32 nt, Homo Sapiens
ccgccgcauccaccuccuccgccgccugcgac

SEQ ID NO: 254903 - RNA, 32 nt, Homo Sapiens
cuuccucugcgccggacuuggugcgucuaaga

SEQ ID NO: 254904 - RNA, 32 nt, Homo Sapiens
gcuuuaagugaauggaaugaauguguuugaau

SEQ ID NO: 254905 - RNA, 32 nt, Homo Sapiens
cagcagcuaaaauaaagcaggcagaaguugga

SEQ ID NO: 254906 - RNA, 32 nt, Homo Sapiens
cgauuccgagggugacugggcuacagcuucua

SEQ ID NO: 254907 - RNA, 32 nt, Homo Sapiens
cuguuuacaagaggaaacaagauggaauaaaa

SEQ ID NO: 254908 - RNA, 32 nt, Homo Sapiens
ucugucaggggagaggcuccagaaccuggguu

SEQ ID NO: 254909 - RNA, 31 nt, Homo Sapiens
ggcuuggcgggcccugcacucggagcagccg

SEQ ID NO: 254910 - RNA, 32 nt, Homo Sapiens
cucagagccaagggggcagagggcuuucagcg

SEQ ID NO: 254911 - RNA, 32 nt, Homo Sapiens
auuuuuaucucaccuccacuaggacuuugacc

SEQ ID NO: 254912 - RNA, 32 nt, Homo Sapiens
gcuggacagggaggagagcggcuguggagaaa

SEQ ID NO: 254913 - RNA, 32 nt, Homo Sapiens
caaaaaucagccaggugaaguuucacacaauc

SEQ ID NO: 254914 - RNA, 32 nt, Homo Sapiens
gugagguuaugaagcugcugaagagcuuuggu

SEQ ID NO: 254915 - RNA, 32 nt, Homo Sapiens
accuccgccucccagguucaagccauucucau

SEQ ID NO: 254916 - RNA, 32 nt, Homo Sapiens
ccaucucccagccccuaugguuucacauagac

SEQ ID NO: 254917 - RNA, 32 nt, Homo Sapiens
gacugaggaucagagaggcugcaugcgugccu

SEQ ID NO: 254918 - RNA, 32 nt, Homo Sapiens
cgggcagaggaggaggugcggcggcggcggcg

SEQ ID NO: 254919 - RNA, 32 nt, Homo Sapiens
ccucuucgugggcuacguguccgugaacuucc

SEQ ID NO: 254920 - RNA, 32 nt, Homo Sapiens
aaguacuauaucauccaagaaauauuugagua

SEQ ID NO: 254921 - RNA, 32 nt, Homo Sapiens
cagaaaaggugauguuaugacuucuugaaaag

SEQ ID NO: 254922 - RNA, 32 nt, Homo Sapiens
gcggcucagggcggggcuggccccacccccau

SEQ ID NO: 254923 - RNA, 32 nt, Homo Sapiens
uauucuacugaauugcaauuuauuaaauauuc

SEQ ID NO: 254924 - RNA, 32 nt, Homo Sapiens
gaaagugaggaugauuugguagcuuuauuggg

SEQ ID NO: 254925 - RNA, 32 nt, Homo Sapiens
aacauucaauuccagagaaccaaaaaucccac

SEQ ID NO: 254926 - RNA, 32 nt, Homo Sapiens
ucuagaagaacaagaaauggaaauagugacuc

SEQ ID NO: 254927 - RNA, 32 nt, Homo Sapiens
guugauuuggguucccucugggcccgggccac

SEQ ID NO: 254928 - RNA, 32 nt, Homo Sapiens
cccgcuccagcaucccagcuccugcacucucg

SEQ ID NO: 254929 - RNA, 32 nt, Homo Sapiens
cgugauccagagcugcugcugcucacugccag

SEQ ID NO: 254930 - RNA, 30 nt, Homo Sapiens
uguaagucacaggcugcagaaucuccuugg

SEQ ID NO: 254931 - RNA, 32 nt, Homo Sapiens
ugccuauaaucccagcacuuugggaagccggg

SEQ ID NO: 254932 - RNA, 32 nt, Homo Sapiens
caaggguccagagauagcggcggccgccccca

SEQ ID NO: 254933 - RNA, 32 nt, Homo Sapiens
ucuggugagucuuggcggcagcagccaucaua

SEQ ID NO: 254934 - RNA, 32 nt, Homo Sapiens
cagcuccugccagggcuguuaccguuguuuuc

SEQ ID NO: 254935 - RNA, 32 nt, Homo Sapiens
gugcauucuggcaacugacauacuugauggag

SEQ ID NO: 254936 - RNA, 32 nt, Homo Sapiens
uuuuuacuggggugggggaaucuaugcaagga

SEQ ID NO: 254937 - RNA, 32 nt, Homo Sapiens
cacccggcgcgggacgcagagcugcgagagaa

SEQ ID NO: 254938 - RNA, 32 nt, Homo Sapiens
ucuuggaccugccaccaucacuuucuggguca

SEQ ID NO: 254939 - RNA, 32 nt, Homo Sapiens
acuggaauguuuuugugucaguguuuucugua

SEQ ID NO: 254940 - RNA, 32 nt, Homo Sapiens
cagcaaaguggcauaaaaaucaccugguaagu

SEQ ID NO: 254941 - RNA, 31 nt, Homo Sapiens
ugaagccaagccacaucaagguuugacaggg

SEQ ID NO: 254942 - RNA, 32 nt, Homo Sapiens
cuacguuauccuguuucccugugccuaccaaa

SEQ ID NO: 254943 - RNA, 32 nt, Homo Sapiens
cacagaaacacccagaauaauguuugaugaaa

SEQ ID NO: 254944 - RNA, 32 nt, Homo Sapiens
augaggaggaagaagagggcuguggucauaca

SEQ ID NO: 254945 - RNA, 32 nt, Homo Sapiens
ugccauuuccccuccuucuucucuccauguug

SEQ ID NO: 254946 - RNA, 32 nt, Homo Sapiens
aaaaguggauuuacauuuuuuauuuuuaaaaa

SEQ ID NO: 254947 - RNA, 32 nt, Homo Sapiens
uauucccagcaguaaccacuuccauuaaugug

SEQ ID NO: 254948 - RNA, 32 nt, Homo Sapiens
cacugggaagaccccugggagaaucugaaucu

SEQ ID NO: 254949 - RNA, 32 nt, Homo Sapiens
gccgcaggagugauuuggagaacaaugcaugu

SEQ ID NO: 254950 - RNA, 32 nt, Homo Sapiens
gggggcguucgcugcgcucggagcggcguccc

SEQ ID NO: 254951 - RNA, 32 nt, Homo Sapiens
ggugcgucugucgggggcgcgcucggguaccu

SEQ ID NO: 254952 - RNA, 32 nt, Homo Sapiens
cggagcucuugcgaccccgccaggacccgaac

SEQ ID NO: 254953 - RNA, 32 nt, Homo Sapiens
ccccucuuucccuucugagauucuuuccuugu

SEQ ID NO: 254954 - RNA, 32 nt, Homo Sapiens
ugcaguuaagugaaaagaaaaauccagccucc

SEQ ID NO: 254955 - RNA, 32 nt, Homo Sapiens
uuucccacuccucuucaaccgucagcgacacc

SEQ ID NO: 254956 - RNA, 32 nt, Homo Sapiens
gcuauuuuccucccuuucucuguaccucuaag

SEQ ID NO: 254957 - RNA, 32 nt, Homo Sapiens
uggagugucaagaaucauggaaguaacaucug

SEQ ID NO: 254958 - RNA, 32 nt, Homo Sapiens
cuuucacgucaucauagacuucauacuggaga

SEQ ID NO: 254959 - RNA, 32 nt, Homo Sapiens
ucugauguugcauaauacaaucaaauuacuag

SEQ ID NO: 254960 - RNA, 32 nt, Homo Sapiens
gacacuuaggagcugccuggacugcaggcaac

SEQ ID NO: 254961 - RNA, 32 nt, Homo Sapiens
uauggcgucggcgagcgcggcccgcggcgccg

SEQ ID NO: 254962 - RNA, 32 nt, Homo Sapiens
uaugccacaauuuguuuaucuguucaucuaca

SEQ ID NO: 254963 - RNA, 31 nt, Homo Sapiens
agaaccagcuggccaaccagaaguggggcca

SEQ ID NO: 254964 - RNA, 32 nt, Homo Sapiens
aggaaagcagcggagcugaccgugccagcauu

SEQ ID NO: 254965 - RNA, 32 nt, Homo Sapiens
ucggcucgcucggcuccggugcgcgccgaggc

SEQ ID NO: 254966 - RNA, 32 nt, Homo Sapiens
uaguuguucagcaacugucuuauuuaaugggg

SEQ ID NO: 254967 - RNA, 32 nt, Homo Sapiens
gagcaugacuuuauacagauuguuauguaaau

SEQ ID NO: 254968 - RNA, 32 nt, Homo Sapiens
guccagccaagagcucuucaucugcuacaaga

SEQ ID NO: 254969 - RNA, 32 nt, Homo Sapiens
ggguccccgcggcuggggcucauggaacugcg

SEQ ID NO: 254970 - RNA, 32 nt, Homo Sapiens
cgggcaugaagauguuugcagaaauguuguuu

SEQ ID NO: 254971 - RNA, 32 nt, Homo Sapiens
aaggcagccggggcagccauugguggugucaa

SEQ ID NO: 254972 - RNA, 30 nt, Homo Sapiens
ugguguucuguuuugggggaaaaauuggca

SEQ ID NO: 254973 - RNA, 32 nt, Homo Sapiens
auuuuccuuuggacuguucaagcaaaaaaggu

SEQ ID NO: 254974 - RNA, 32 nt, Homo Sapiens
agcucugcugaggaagaccaaagcagcacucg

SEQ ID NO: 254975 - RNA, 32 nt, Homo Sapiens
ugacccagaaaaguggcuugcuuggacaccca

SEQ ID NO: 254976 - RNA, 32 nt, Homo Sapiens
gcuuuuguggcggcgcccgcgcucgcaggcca

SEQ ID NO: 254977 - RNA, 32 nt, Homo Sapiens
gaacuguugggaggcucagaugagaugcuaua

SEQ ID NO: 254978 - RNA, 30 nt, Homo Sapiens
aauaugcaucaggagaacaagaguaaaccc

SEQ ID NO: 254979 - RNA, 32 nt, Homo Sapiens
uuaacgucgguaguucugcuuuauuaaaaugc

SEQ ID NO: 254980 - RNA, 32 nt, Homo Sapiens
gcgccagguggaccacgugaucgagcgcagca

SEQ ID NO: 254981 - RNA, 32 nt, Homo Sapiens
uuucuguuguuauaaugcguaaagauauugaa

SEQ ID NO: 254982 - RNA, 32 nt, Homo Sapiens
aucuucaagacucagcccuuugaaagauuuag

SEQ ID NO: 254983 - RNA, 32 nt, Homo Sapiens
gauuuagauaaaauuuagucuuuguuaucaca

SEQ ID NO: 254984 - RNA, 32 nt, Homo Sapiens
gucggggugugugucuacaagcacggggcuuc

SEQ ID NO: 254985 - RNA, 31 nt, Homo Sapiens
cagcccagcuguccccagccccgcgccucuc

SEQ ID NO: 254986 - RNA, 32 nt, Homo Sapiens
ccgcagggcggguuuccaggccugccacggcc

SEQ ID NO: 254987 - RNA, 32 nt, Homo Sapiens
aaauaguauuacaugauuuaugguagcucugg

SEQ ID NO: 254988 - RNA, 32 nt, Homo Sapiens
ggggcgaggaccgagcgcccaaggcugggaga

SEQ ID NO: 254989 - RNA, 32 nt, Homo Sapiens
cccgccugcucuuuccucccccgccaggugug

SEQ ID NO: 254990 - RNA, 32 nt, Homo Sapiens
ugaacauaauuucaagaggaggauuuauaaaa

SEQ ID NO: 254991 - RNA, 32 nt, Homo Sapiens
cccagaggugggccgaggcggcugggcuggac

SEQ ID NO: 254992 - RNA, 32 nt, Homo Sapiens
acugcggggaggggcggggggagggagggauu

SEQ ID NO: 254993 - RNA, 32 nt, Homo Sapiens
guguggaaagcuagugccaagaauauuguuau

SEQ ID NO: 254994 - RNA, 32 nt, Homo Sapiens
uaaaaucaaaaauuaggaaaucuuggagggag

SEQ ID NO: 254995 - RNA, 32 nt, Homo Sapiens
aacuccaaccucucggccccaucgccccaccg

SEQ ID NO: 254996 - RNA, 32 nt, Homo Sapiens
uccuagacacagagccaggccggguggaaaac

SEQ ID NO: 254997 - RNA, 32 nt, Homo Sapiens
gauucauuugaaaagaccuugaaaccaaauau

SEQ ID NO: 254998 - RNA, 32 nt, Homo Sapiens
aaaaauggagaauggauagugaggcgugauca

SEQ ID NO: 254999 - RNA, 32 nt, Homo Sapiens
aaauacuucuucaucuucuugucuagguuuua

SEQ ID NO: 255000 - RNA, 28 nt, Homo Sapiens
agcaugcugaugaauagaucuaagaguu

SEQ ID NO: 255001 - RNA, 32 nt, Homo Sapiens
uggcuccugccaggcaacgagcagcaucuggc

SEQ ID NO: 255002 - RNA, 32 nt, Homo Sapiens
cuaauagagccucuuaaccaagacugcuggau

SEQ ID NO: 255003 - RNA, 32 nt, Homo Sapiens
cagcccaccgacaaaauggauuuggaucuacu

SEQ ID NO: 255004 - RNA, 29 nt, Homo Sapiens
uaccucacagugauguugugaggacaugu

SEQ ID NO: 255005 - RNA, 32 nt, Homo Sapiens
aguggcggccgcggcgguggcggagacugugg

SEQ ID NO: 255006 - RNA, 32 nt, Homo Sapiens
aagcccuuuucuucuuuuuuuggggagucggu

SEQ ID NO: 255007 - RNA, 32 nt, Homo Sapiens
ucugugccuucuuuuuaccacccucuugauug

SEQ ID NO: 255008 - RNA, 32 nt, Homo Sapiens
gaugagaggagaagucuuggcuucgcuuuuga

SEQ ID NO: 255009 - RNA, 32 nt, Homo Sapiens
cgccgccauuuucuugcuguccgccgucugca

SEQ ID NO: 255010 - RNA, 32 nt, Homo Sapiens
ucucggacucgggcugcggcgucagccuucuu

SEQ ID NO: 255011 - RNA, 32 nt, Homo Sapiens
uguucuuauuuccuauugugagcauuauaaag

SEQ ID NO: 255012 - RNA, 32 nt, Homo Sapiens
cugauuuucuaaaauaugcaucaagugcauaa

SEQ ID NO: 255013 - RNA, 32 nt, Homo Sapiens
agccuucccccuccugcuggacacagagacac

SEQ ID NO: 255014 - RNA, 32 nt, Homo Sapiens
cgaccgaggaggaggagcgcucugcccggccg

SEQ ID NO: 255015 - RNA, 30 nt, Homo Sapiens
acuaaggcgcccggugaagcugggagcuuc

SEQ ID NO: 255016 - RNA, 32 nt, Homo Sapiens
aaugugcgcagaccaguuaccaaacuaggaua

SEQ ID NO: 255017 - RNA, 32 nt, Homo Sapiens
gacguaagcaauaaagggaauguuagacgugu

SEQ ID NO: 255018 - RNA, 32 nt, Homo Sapiens
gcgcagccaucgggaaggucauucagccaacc

SEQ ID NO: 255019 - RNA, 32 nt, Homo Sapiens
ucgagucucgagagggccacggggugguuuuu

SEQ ID NO: 255020 - RNA, 32 nt, Homo Sapiens
ccauccccacuuuugcuccuuggauacuuugc

SEQ ID NO: 255021 - RNA, 32 nt, Homo Sapiens
aagaaugagaaugaaauacuuaaagguuuuau

SEQ ID NO: 255022 - RNA, 32 nt, Homo Sapiens
uagcagagggccuuggccaacacauaagccuu

SEQ ID NO: 255023 - RNA, 32 nt, Homo Sapiens
gugaguggagagaggagaggcaacgaaguccu

SEQ ID NO: 255024 - RNA, 32 nt, Homo Sapiens
ggugcagguucaguuuauauggaaaugcaaac

SEQ ID NO: 255025 - RNA, 32 nt, Homo Sapiens
uacaggucuaauuauauauacauauuuauaca

SEQ ID NO: 255026 - RNA, 32 nt, Homo Sapiens
uuugugcuuuuguuuuuuuuuauggugcuuaa

SEQ ID NO: 255027 - RNA, 32 nt, Homo Sapiens
gcggcagcuagcgggagccgggacgccggugc

SEQ ID NO: 255028 - RNA, 32 nt, Homo Sapiens
agaaaaccgagccaucaagaagcuugccuuga

SEQ ID NO: 255029 - RNA, 32 nt, Homo Sapiens
uucgagaccagccugcccaacauggugaaacc

SEQ ID NO: 255030 - RNA, 32 nt, Homo Sapiens
augccacaaccugggcuccuggcuacagcagg

SEQ ID NO: 255031 - RNA, 32 nt, Homo Sapiens
uugcacaguuuauccagaucugugcagcagcu

SEQ ID NO: 255032 - RNA, 32 nt, Homo Sapiens
gcuccugccucccaaaguccaugucugccucc

SEQ ID NO: 255033 - RNA, 32 nt, Homo Sapiens
gacaaacugucauucaacaauuagcuccagga

SEQ ID NO: 255034 - RNA, 32 nt, Homo Sapiens
uggugagaggggccuagcucgcugccgacaga

SEQ ID NO: 255035 - RNA, 32 nt, Homo Sapiens
uucugagauaaguuugaagaaaucacaacauc

SEQ ID NO: 255036 - RNA, 32 nt, Homo Sapiens
uguuccaguuugaagaccaaucaaauauauua

SEQ ID NO: 255037 - RNA, 32 nt, Homo Sapiens
gguuucaccauguugguuaggcuggucucaaa

SEQ ID NO: 255038 - RNA, 32 nt, Homo Sapiens
uugcucuucccucccccucaucacaguggccu

SEQ ID NO: 255039 - RNA, 32 nt, Homo Sapiens
ugccuucucccucuucucuugccugaucaucu

SEQ ID NO: 255040 - RNA, 32 nt, Homo Sapiens
cuaaaaguccguuaguggaggcacgaagcuga

SEQ ID NO: 255041 - RNA, 32 nt, Homo Sapiens
aguauggagauuaccaggcagaugauaccgaa

SEQ ID NO: 255042 - RNA, 32 nt, Homo Sapiens
aucuaaaucaucaaaacagaauccccacccca

SEQ ID NO: 255043 - RNA, 32 nt, Homo Sapiens
cucggauuguuaaauuacauggauaugauccu

SEQ ID NO: 255044 - RNA, 32 nt, Homo Sapiens
uaaguacuuuagcuucuuucugcagccauuuc

SEQ ID NO: 255045 - RNA, 32 nt, Homo Sapiens
cccggccuccucugcaggggcugcuggcagga

SEQ ID NO: 255046 - RNA, 32 nt, Homo Sapiens
ggacaccgugcgggcucaggagcuccccagau

SEQ ID NO: 255047 - RNA, 32 nt, Homo Sapiens
aucuaggaugauuuucccccuugcaguuaugu

SEQ ID NO: 255048 - RNA, 32 nt, Homo Sapiens
gggggggccuuaauuuuaaaaauauugcauua

SEQ ID NO: 255049 - RNA, 32 nt, Homo Sapiens
ugucaccagagccuacugcugcucuccacuca

SEQ ID NO: 255050 - RNA, 32 nt, Homo Sapiens
aaaaucucagguguagcaauacucugauuugu

SEQ ID NO: 255051 - RNA, 32 nt, Homo Sapiens
uacccuaaauuaaucuguauuaccuuuuuucc

SEQ ID NO: 255052 - RNA, 32 nt, Homo Sapiens
augcauaaacgauuauacuacauuaauuuuuu

SEQ ID NO: 255053 - RNA, 32 nt, Homo Sapiens
acaugugaaaagaauagaagcuaagguuuaga

SEQ ID NO: 255054 - RNA, 32 nt, Homo Sapiens
ccuccguagaagagggugcugguccugcccuu

SEQ ID NO: 255055 - RNA, 32 nt, Homo Sapiens
gacagcuuuuugaaagccgagcuguuucugaa

SEQ ID NO: 255056 - RNA, 32 nt, Homo Sapiens
uccuuggcccugcuucccugugucucaugcac

SEQ ID NO: 255057 - RNA, 32 nt, Homo Sapiens
ugauggugggucuggucaugauaacaaaagua

SEQ ID NO: 255058 - RNA, 32 nt, Homo Sapiens
acaaacuucuuaccaaagaaaaugaaaagauc

SEQ ID NO: 255059 - RNA, 32 nt, Homo Sapiens
agaccccccuccccaucccagcgcaucgcguc

SEQ ID NO: 255060 - RNA, 32 nt, Homo Sapiens
aaaaacugaccuauugauaaaacuauaaauuu

SEQ ID NO: 255061 - RNA, 32 nt, Homo Sapiens
aaaggugacacagucuucaaguuuaggauccc

SEQ ID NO: 255062 - RNA, 32 nt, Homo Sapiens
ugccuucaggcccugcgccgccuccggagucc

SEQ ID NO: 255063 - RNA, 31 nt, Homo Sapiens
guuuuuaucuuauuguaauagaugagcauau

SEQ ID NO: 255064 - RNA, 32 nt, Homo Sapiens
auaccucgcuguccggcccccaccccagccuc

SEQ ID NO: 255065 - RNA, 32 nt, Homo Sapiens
gagccgccuagagcacaaguccugcuagucgc

SEQ ID NO: 255066 - RNA, 32 nt, Homo Sapiens
cauccccgcucgccgcgcccgccgccgcgaug

SEQ ID NO: 255067 - RNA, 32 nt, Homo Sapiens
ccuugucggccacauucuggagcccggcagac

SEQ ID NO: 255068 - RNA, 32 nt, Homo Sapiens
caauuugcacagcccaguggcuuaaacaccau

SEQ ID NO: 255069 - RNA, 32 nt, Homo Sapiens
aaaauuuauuuuuguuguuguagcucuggauu

SEQ ID NO: 255070 - RNA, 32 nt, Homo Sapiens
gauguuugucucuaguugucuguguauaauau

SEQ ID NO: 255071 - RNA, 31 nt, Homo Sapiens
aaggacuuggagguggcaggaguccgagccc

SEQ ID NO: 255072 - RNA, 32 nt, Homo Sapiens
caucuucaaaaauacugagacaugggcaggau

SEQ ID NO: 255073 - RNA, 32 nt, Homo Sapiens
agcccgagucgccgccggcgucggugccguca

SEQ ID NO: 255074 - RNA, 32 nt, Homo Sapiens
cugucagcauauauuuugugaagagugcauga

SEQ ID NO: 255075 - RNA, 32 nt, Homo Sapiens
uuuuuaaaaaugcagaacuaagauuuuugacu

SEQ ID NO: 255076 - RNA, 32 nt, Homo Sapiens
aucgauuuuuaaaaauuaaaucaaccuugcuu

SEQ ID NO: 255077 - RNA, 32 nt, Homo Sapiens
cugggcacgugggggacagagguggccgggac

SEQ ID NO: 255078 - RNA, 32 nt, Homo Sapiens
cccccagcgagucccaccuggaccucuucaaa

SEQ ID NO: 255079 - RNA, 32 nt, Homo Sapiens
gcgcgagaccucuggugaaagaaaagauguug

SEQ ID NO: 255080 - RNA, 32 nt, Homo Sapiens
gccuuaauuacauuuaaugccuuacugcuuua

SEQ ID NO: 255081 - RNA, 32 nt, Homo Sapiens
aggugcaaaaauuuuaaugcuagucaguaugc

SEQ ID NO: 255082 - RNA, 32 nt, Homo Sapiens
aaccagccagggccugugcugcuggagcgggc

SEQ ID NO: 255083 - RNA, 32 nt, Homo Sapiens
ugggagcacgggugggggguggguaagcagau

SEQ ID NO: 255084 - RNA, 32 nt, Homo Sapiens
gucuggagcagaagguuacgcaauggcugcga

SEQ ID NO: 255085 - RNA, 32 nt, Homo Sapiens
guuacaucauauuaaauaaaauguagcagaac

SEQ ID NO: 255086 - RNA, 32 nt, Homo Sapiens
ccacagaagccuagggcagaccaagaagaaag

SEQ ID NO: 255087 - RNA, 32 nt, Homo Sapiens
cuaaaauaagaaacgugauaagaauauagaug

SEQ ID NO: 255088 - RNA, 32 nt, Homo Sapiens
uggguguugauaggaaucuguacaauauguug

SEQ ID NO: 255089 - RNA, 31 nt, Homo Sapiens
cuauccaaauaaaaauaacaucauuguauua

SEQ ID NO: 255090 - RNA, 32 nt, Homo Sapiens
caccuuugcuagugaggccaagagagccugug

SEQ ID NO: 255091 - RNA, 32 nt, Homo Sapiens
gccgcguuuccagccgcugggugaggagcuac

SEQ ID NO: 255092 - RNA, 32 nt, Homo Sapiens
uggggaaggcuuucagcugauuugcagaaguu

SEQ ID NO: 255093 - RNA, 32 nt, Homo Sapiens
ugcaggcucugcugcuggcucagggcagccgc

SEQ ID NO: 255094 - RNA, 32 nt, Homo Sapiens
caaguuggaggucuaagugcgagggggcuggg

SEQ ID NO: 255095 - RNA, 32 nt, Homo Sapiens
aacucauuuauuauuucuucuuuguucuuaag

SEQ ID NO: 255096 - RNA, 29 nt, Homo Sapiens
uacauguaaaguuuuuacaguucuuacac

SEQ ID NO: 255097 - RNA, 31 nt, Homo Sapiens
ucauugaugggcaaccaacuggaccgcauca

SEQ ID NO: 255098 - RNA, 32 nt, Homo Sapiens
gaugucuaaaaauuaaaguuauuuugggaaua

SEQ ID NO: 255099 - RNA, 32 nt, Homo Sapiens
aggaggcugcaccucccucgcgucugugccug

SEQ ID NO: 255100 - RNA, 32 nt, Homo Sapiens
cagcaaguucccuucuccuuucucucccccgg

SEQ ID NO: 255101 - RNA, 32 nt, Homo Sapiens
ccuuccucguucaucacccucagucagugccc

SEQ ID NO: 255102 - RNA, 32 nt, Homo Sapiens
ggcauuccuggcugucacuuggagccaacagu

SEQ ID NO: 255103 - RNA, 27 nt, Homo Sapiens
uuaguguccuucuuaacagacucaaac

SEQ ID NO: 255104 - RNA, 32 nt, Homo Sapiens
aauaagguuaagugauaugugauucauaacaa

SEQ ID NO: 255105 - RNA, 32 nt, Homo Sapiens
ugucaggcccgucggagcugccugcagcacau

SEQ ID NO: 255106 - RNA, 32 nt, Homo Sapiens
cagagcgagucuuuugcauccuguuccagucc

SEQ ID NO: 255107 - RNA, 27 nt, Homo Sapiens
aaacagucuuucuucagaauugucagg

SEQ ID NO: 255108 - RNA, 32 nt, Homo Sapiens
gucccaggucccggcccggagcuauggagcgg

SEQ ID NO: 255109 - RNA, 32 nt, Homo Sapiens
uuaaacuucuauuucucggguaaauuuuuugg

SEQ ID NO: 255110 - RNA, 32 nt, Homo Sapiens
cuacucugcccccuuccugcacacccuugcgc

SEQ ID NO: 255111 - RNA, 32 nt, Homo Sapiens
uagggggugggaggaaagaaaccugggcuaga

SEQ ID NO: 255112 - RNA, 32 nt, Homo Sapiens
ugccgcccgugccaucuggcccgggggugacu

SEQ ID NO: 255113 - RNA, 32 nt, Homo Sapiens
agccagccccagacccagccccgguggcugaa

SEQ ID NO: 255114 - RNA, 32 nt, Homo Sapiens
augugggggacggugauuguuggcuccaguua

SEQ ID NO: 255115 - RNA, 32 nt, Homo Sapiens
ccaugccgggagccgcgccgguggccagcggu

SEQ ID NO: 255116 - RNA, 32 nt, Homo Sapiens
gggggaggcugggcccggggccucuggcgcga

SEQ ID NO: 255117 - RNA, 32 nt, Homo Sapiens
ggaguagauauuggucugugauugguggaaug

SEQ ID NO: 255118 - RNA, 32 nt, Homo Sapiens
cuggugaggggaccucuuggugauuccuggau

SEQ ID NO: 255119 - RNA, 32 nt, Homo Sapiens
gcugcuucugcccgagcccgcggccucacgcg

SEQ ID NO: 255120 - RNA, 32 nt, Homo Sapiens
agucaguucuccugcacuuccuccucauguag

SEQ ID NO: 255121 - RNA, 32 nt, Homo Sapiens
gcugggccgcgaacaccucacuauugauggug

SEQ ID NO: 255122 - RNA, 32 nt, Homo Sapiens
acugcuggcucuucuucccuuuguauuugugu

SEQ ID NO: 255123 - RNA, 32 nt, Homo Sapiens
uguguguugcuuuguauguaguucuuggccua

SEQ ID NO: 255124 - RNA, 32 nt, Homo Sapiens
aauuacagguuugggagucagaggaauggacu

SEQ ID NO: 255125 - RNA, 32 nt, Homo Sapiens
agcuuuaaucuagccuaauuuauuuuuccccu

SEQ ID NO: 255126 - RNA, 32 nt, Homo Sapiens
acagcagccccagguggagggcuggucucccu

SEQ ID NO: 255127 - RNA, 32 nt, Homo Sapiens
ccauaaauugguuagcugggaccuccucacug

SEQ ID NO: 255128 - RNA, 32 nt, Homo Sapiens
cgccauggagggcgaggacguggaagacgacc

SEQ ID NO: 255129 - RNA, 32 nt, Homo Sapiens
acauaacauauagagguaauagauaggugaua

SEQ ID NO: 255130 - RNA, 32 nt, Homo Sapiens
agcagugaguucugagggagacugcuagagga

SEQ ID NO: 255131 - RNA, 32 nt, Homo Sapiens
gaagcacacgagaucagagcaucugacugccc

SEQ ID NO: 255132 - RNA, 32 nt, Homo Sapiens
cccacauugggggacagggccgggccugggcu

SEQ ID NO: 255133 - RNA, 32 nt, Homo Sapiens
ccugacccuccugguccaucccacccaagucc

SEQ ID NO: 255134 - RNA, 32 nt, Homo Sapiens
aaagcaaaacaaacagcaauaacaauauuauu

SEQ ID NO: 255135 - RNA, 32 nt, Homo Sapiens
gggcucgggaugauuuauauucaacugaaccc

SEQ ID NO: 255136 - RNA, 32 nt, Homo Sapiens
augcggggcgggggcggggggcggggacguag

SEQ ID NO: 255137 - RNA, 32 nt, Homo Sapiens
aacaucuguccccaagccagcuccacugccca

SEQ ID NO: 255138 - RNA, 32 nt, Homo Sapiens
caggacaggaccaggcuguccccuggaagaau

SEQ ID NO: 255139 - RNA, 32 nt, Homo Sapiens
acaacgcccuccccaggccccccuaagcugcu

SEQ ID NO: 255140 - RNA, 32 nt, Homo Sapiens
agaaugugacggauucgacucuauucauuuuc

SEQ ID NO: 255141 - RNA, 32 nt, Homo Sapiens
acggcucucgcagcccgaggagggucaggcgc

SEQ ID NO: 255142 - RNA, 32 nt, Homo Sapiens
agauccucugcugacuccauauggaggccuca

SEQ ID NO: 255143 - RNA, 32 nt, Homo Sapiens
agcccagcccacagcaggacaagcaacucuug

SEQ ID NO: 255144 - RNA, 32 nt, Homo Sapiens
aaccccugccagccagaagggguguccugcag

SEQ ID NO: 255145 - RNA, 32 nt, Homo Sapiens
aaugcauaguuuggcagaaaaaucagccguuc

SEQ ID NO: 255146 - RNA, 32 nt, Homo Sapiens
gaaaggaauucuagcaaaguuauucuguaaau

SEQ ID NO: 255147 - RNA, 32 nt, Homo Sapiens
cuuguaccugggaagcgcagguugcagugagc

SEQ ID NO: 255148 - RNA, 32 nt, Homo Sapiens
cuccagcuggaacaagaggugguguggcuccu

SEQ ID NO: 255149 - RNA, 32 nt, Homo Sapiens
uuuuggucaacagccguuuuucuaguuccaag

SEQ ID NO: 255150 - RNA, 32 nt, Homo Sapiens
cugccagccuccuccuucucccgcccuccuca

SEQ ID NO: 255151 - RNA, 32 nt, Homo Sapiens
gcugccuuaucccagggcugucaccuagagag

SEQ ID NO: 255152 - RNA, 32 nt, Homo Sapiens
gcagcccugcggucccuuugccgcccguuccc

SEQ ID NO: 255153 - RNA, 32 nt, Homo Sapiens
uuuguuguuuuccaucucauuucccuuccauc

SEQ ID NO: 255154 - RNA, 32 nt, Homo Sapiens
caauccuacaaaauaaaaguaaaauguugaac

SEQ ID NO: 255155 - RNA, 32 nt, Homo Sapiens
uuuuuauaugcuugguaagagauggaagucac

SEQ ID NO: 255156 - RNA, 32 nt, Homo Sapiens
auggugguuugcaccuguuccugaagucaaac

SEQ ID NO: 255157 - RNA, 32 nt, Homo Sapiens
ggauuguaacaaggaauuuccuuuuccuacaa

SEQ ID NO: 255158 - RNA, 32 nt, Homo Sapiens
uccagugcagcugcagaagagaaaugggauug

SEQ ID NO: 255159 - RNA, 32 nt, Homo Sapiens
acccccaucucuacugaaaauacagaauuagc

SEQ ID NO: 255160 - RNA, 32 nt, Homo Sapiens
auugucagaaccuggugaguuguuuugaacag

SEQ ID NO: 255161 - RNA, 32 nt, Homo Sapiens
cugcagcuuaaaacaagcaaaauacacagaug

SEQ ID NO: 255162 - RNA, 32 nt, Homo Sapiens
uggaaucgaauuucgacagggauuggaacaug

SEQ ID NO: 255163 - RNA, 32 nt, Homo Sapiens
cuuguaucuauuaaauguauaccuauuagcau

SEQ ID NO: 255164 - RNA, 32 nt, Homo Sapiens
gcccuggugcugccccacaaccacguggccgc

SEQ ID NO: 255165 - RNA, 32 nt, Homo Sapiens
gcuuggccacucagugcagcugcgauuaaccc

SEQ ID NO: 255166 - RNA, 32 nt, Homo Sapiens
cuauaaaauauuuguuaggacuucaaauuauu

SEQ ID NO: 255167 - RNA, 32 nt, Homo Sapiens
aaguuaaaagggauccggggcugagggcaggg

SEQ ID NO: 255168 - RNA, 32 nt, Homo Sapiens
aaaguuaucuagagguaaaaccacuauaaaaa

SEQ ID NO: 255169 - RNA, 32 nt, Homo Sapiens
cacaaaguguaaaggcacugcuuagauuaguu

SEQ ID NO: 255170 - RNA, 32 nt, Homo Sapiens
ugaugaugaugaugaugaaaacuaaggauuuu

SEQ ID NO: 255171 - RNA, 32 nt, Homo Sapiens
uaucucuugauguaaccaucuucuuucuccag

SEQ ID NO: 255172 - RNA, 32 nt, Homo Sapiens
aacugguauguggggugguucacaguucuaau

SEQ ID NO: 255173 - RNA, 32 nt, Homo Sapiens
aucaucugugcguuccuguguagagaacaucc

SEQ ID NO: 255174 - RNA, 32 nt, Homo Sapiens
auucaguauaaaauauggagauaagagugggg

SEQ ID NO: 255175 - RNA, 32 nt, Homo Sapiens
ccagucaggauucaauccuugauacacagcaa

SEQ ID NO: 255176 - RNA, 32 nt, Homo Sapiens
auauuuacauagucuguaaacuagaaaguguu

SEQ ID NO: 255177 - RNA, 32 nt, Homo Sapiens
uuugaccucacagugacccucaaauacacugg

SEQ ID NO: 255178 - RNA, 32 nt, Homo Sapiens
agugcuauuuucuuauuuuuaaucaaauaacu

SEQ ID NO: 255179 - RNA, 32 nt, Homo Sapiens
agagccgcaucccuuccccagccccuguguua

SEQ ID NO: 255180 - RNA, 32 nt, Homo Sapiens
gaucggguaucugggcccggcgcggagccugc

SEQ ID NO: 255181 - RNA, 32 nt, Homo Sapiens
gagugggcgcgggacagugcgcggcgccccgc

SEQ ID NO: 255182 - RNA, 32 nt, Homo Sapiens
acaaaagagcugaagaauaaaaauaugcuguc

SEQ ID NO: 255183 - RNA, 32 nt, Homo Sapiens
cgugcccaaacccaccaguuuaaaacggugug

SEQ ID NO: 255184 - RNA, 32 nt, Homo Sapiens
gcuuagccgaguaaggagugagcggcuuuuca

SEQ ID NO: 255185 - RNA, 32 nt, Homo Sapiens
gggaggacaggcgaagcgcgcgucuggggccg

SEQ ID NO: 255186 - RNA, 32 nt, Homo Sapiens
gcuccugccaguccuguuguccugucaucauc

SEQ ID NO: 255187 - RNA, 32 nt, Homo Sapiens
aaaaauaaauauauuuuuggaaaaaaaaaaaa

SEQ ID NO: 255188 - RNA, 32 nt, Homo Sapiens
ggcacgaggggcgggagucgccggggcuucuu

SEQ ID NO: 255189 - RNA, 32 nt, Homo Sapiens
gcagagugguggccggggccagggccggggug

SEQ ID NO: 255190 - RNA, 32 nt, Homo Sapiens
agguggacgggcggcagucaagcgccggcguu

SEQ ID NO: 255191 - RNA, 32 nt, Homo Sapiens
acauggauggaauuggagggcauauguuaagu

SEQ ID NO: 255192 - RNA, 32 nt, Homo Sapiens
ucugagcgcugagggaggggagcgugcguagg

SEQ ID NO: 255193 - RNA, 32 nt, Homo Sapiens
ugugaugcaauaaaauuuaaaauaaauuucug

SEQ ID NO: 255194 - RNA, 32 nt, Homo Sapiens
cgcacuccagcaugggugacagagugagaucc

SEQ ID NO: 255195 - RNA, 32 nt, Homo Sapiens
aucacuucuaguuuacaggugagggaaccaag

SEQ ID NO: 255196 - RNA, 32 nt, Homo Sapiens
cggacugcgcccggcaguggcuucgcgggcga

SEQ ID NO: 255197 - RNA, 32 nt, Homo Sapiens
gcuggguugucuuuaaacaacccuaaauacac

SEQ ID NO: 255198 - RNA, 32 nt, Homo Sapiens
caccuugcuguaacauuugaacuuucacaaga

SEQ ID NO: 255199 - RNA, 32 nt, Homo Sapiens
agcuuucaaacacacaugcacacagcacaauu

SEQ ID NO: 255200 - RNA, 32 nt, Homo Sapiens
ucuuccuuucccuuugguuaauccugcauggg

SEQ ID NO: 255201 - RNA, 32 nt, Homo Sapiens
gcggugcaggaggcccguggaacuuggagggc

SEQ ID NO: 255202 - RNA, 32 nt, Homo Sapiens
uuugcuaauguuccagcaacacugcuauuaua

SEQ ID NO: 255203 - RNA, 32 nt, Homo Sapiens
aaugaaacgccuuugucuuuucucagguugua

SEQ ID NO: 255204 - RNA, 32 nt, Homo Sapiens
ggugcagugacccagggccuugccagagcucc

SEQ ID NO: 255205 - RNA, 29 nt, Homo Sapiens
gaggacccgguccggcgcagucuucaaug

SEQ ID NO: 255206 - RNA, 32 nt, Homo Sapiens
cacugggaagggguuacugagagcacaaggcu

SEQ ID NO: 255207 - RNA, 32 nt, Homo Sapiens
uauccaaaaacauugggaucaacugggcuuua

SEQ ID NO: 255208 - RNA, 32 nt, Homo Sapiens
ccuuguuugaaauaaacuuagcagagucacuu

SEQ ID NO: 255209 - RNA, 32 nt, Homo Sapiens
uuaaacuagguccacuaucaacaggcuacuua

SEQ ID NO: 255210 - RNA, 28 nt, Homo Sapiens
uucccgggccagaaaccgaggugaaacc

SEQ ID NO: 255211 - RNA, 32 nt, Homo Sapiens
cuggggucccgcggccgcuucuucaucucagg

SEQ ID NO: 255212 - RNA, 32 nt, Homo Sapiens
acugauggauauauuuuguguacauguuucuc

SEQ ID NO: 255213 - RNA, 32 nt, Homo Sapiens
aguggugcugcuaccuuguauguuuacauaau

SEQ ID NO: 255214 - RNA, 32 nt, Homo Sapiens
gagaauuucuucaauguuccugcuuucuuaac

SEQ ID NO: 255215 - RNA, 32 nt, Homo Sapiens
acaaauaucugcugaguuccuaucaagcacca

SEQ ID NO: 255216 - RNA, 32 nt, Homo Sapiens
agguuccgcaugcccaggccuggccaggggag

SEQ ID NO: 255217 - RNA, 32 nt, Homo Sapiens
uaaaauuugacugcccugcuggguuucagacu

SEQ ID NO: 255218 - RNA, 32 nt, Homo Sapiens
auauauugcauucgugcugacuuuguuauccc

SEQ ID NO: 255219 - RNA, 32 nt, Homo Sapiens
uacccggaagcaggaguucaagccgcagcugg

SEQ ID NO: 255220 - RNA, 32 nt, Homo Sapiens
ggccgggcccgguggcucccgccuguaauccc

SEQ ID NO: 255221 - RNA, 32 nt, Homo Sapiens
cuuggugucguuucccucccaacagagcuggg

SEQ ID NO: 255222 - RNA, 32 nt, Homo Sapiens
aaggguuccuccaucugcccagaugggagaau

SEQ ID NO: 255223 - RNA, 32 nt, Homo Sapiens
cucucggccaacggagcugcgcggcgggugac

SEQ ID NO: 255224 - RNA, 32 nt, Homo Sapiens
gacagccuuugccuuaaaugcaguaugacagg

SEQ ID NO: 255225 - RNA, 32 nt, Homo Sapiens
cacagcagauuggaacagauguuguaguauau

SEQ ID NO: 255226 - RNA, 32 nt, Homo Sapiens
gguuuuagaaaugugauuuucuucuuuugacc

SEQ ID NO: 255227 - RNA, 32 nt, Homo Sapiens
cuccccuuuccacagccuccaccccugacccc

SEQ ID NO: 255228 - RNA, 32 nt, Homo Sapiens
aaacauucuauuugauuuuaagcaaaauguau

SEQ ID NO: 255229 - RNA, 32 nt, Homo Sapiens
cacuuuuguaaaguacagcaaaaccuacaggu

SEQ ID NO: 255230 - RNA, 32 nt, Homo Sapiens
cagguuuuagcauugucuuguucugucccuuc

SEQ ID NO: 255231 - RNA, 32 nt, Homo Sapiens
cgucagggagaggggacgccagacacacggcc

SEQ ID NO: 255232 - RNA, 32 nt, Homo Sapiens
aguguuucucgaucagaaauugccuuggguug

SEQ ID NO: 255233 - RNA, 32 nt, Homo Sapiens
uccagaaagacgcacuccuggaccacaaccgg

SEQ ID NO: 255234 - RNA, 32 nt, Homo Sapiens
uacagugguauaaacuuuuuauucucaguuua

SEQ ID NO: 255235 - RNA, 31 nt, Homo Sapiens
gccggacccucagucgcuccaggcccccuca

SEQ ID NO: 255236 - RNA, 32 nt, Homo Sapiens
aggaggcuaguccaccacacuucggcuccgcu

SEQ ID NO: 255237 - RNA, 32 nt, Homo Sapiens
cgagcccuugcgccuggacuugugcucaccgc

SEQ ID NO: 255238 - RNA, 32 nt, Homo Sapiens
ggaucuggggacgaggucacccuggauugagg

SEQ ID NO: 255239 - RNA, 32 nt, Homo Sapiens
ugacaagagucuuuuuacuuuaugcuggauga

SEQ ID NO: 255240 - RNA, 32 nt, Homo Sapiens
ccucucugcccccaccuccacaaagcccagac

SEQ ID NO: 255241 - RNA, 32 nt, Homo Sapiens
aaggcagaacuuuuggaaaaacaaagacuguu

SEQ ID NO: 255242 - RNA, 32 nt, Homo Sapiens
gggugcugcgcggcggccgugauggcugguga

SEQ ID NO: 255243 - RNA, 32 nt, Homo Sapiens
uuaguucaggcccuugacuucucuaagcuucu

SEQ ID NO: 255244 - RNA, 32 nt, Homo Sapiens
aggccuccggugcggcugcaaugcugagcucc

SEQ ID NO: 255245 - RNA, 32 nt, Homo Sapiens
uccucaggcugcuggaggaaaacugagacuca

SEQ ID NO: 255246 - RNA, 32 nt, Homo Sapiens
ggcggacagaaggcgccaggggcgcgcguccc

SEQ ID NO: 255247 - RNA, 32 nt, Homo Sapiens
ucuccagggcucaguuugucuaucuccaaaau

SEQ ID NO: 255248 - RNA, 32 nt, Homo Sapiens
agagaacucuccugggaggcugugggugagcc

SEQ ID NO: 255249 - RNA, 32 nt, Homo Sapiens
ucuaugggauuuuguuacauuauucugaaugg

SEQ ID NO: 255250 - RNA, 32 nt, Homo Sapiens
guggcuggagggccugggggcugugggaaagu

SEQ ID NO: 255251 - RNA, 32 nt, Homo Sapiens
gcuuggcugccagcuccgcggcccgggcaaaa

SEQ ID NO: 255252 - RNA, 32 nt, Homo Sapiens
gugugggggguuucaaggguguguuaggaaca

SEQ ID NO: 255253 - RNA, 31 nt, Homo Sapiens
ugauauuuuugagccauucuauuguguucua

SEQ ID NO: 255254 - RNA, 32 nt, Homo Sapiens
caagaccguuuaucauuuuuuauuuaaaaaaa

SEQ ID NO: 255255 - RNA, 32 nt, Homo Sapiens
caggggaguccgugguggggcuggggccgggg

SEQ ID NO: 255256 - RNA, 32 nt, Homo Sapiens
gugaucaggacaaaaguguuagguucccauga

SEQ ID NO: 255257 - RNA, 32 nt, Homo Sapiens
ggaaccaaaccccugcagauacuaagggcuga

SEQ ID NO: 255258 - RNA, 32 nt, Homo Sapiens
uuuugaaauuguucuuuuuauuuucagggaua

SEQ ID NO: 255259 - RNA, 32 nt, Homo Sapiens
uuggauggugucuuccucuccucagccgagaa

SEQ ID NO: 255260 - RNA, 32 nt, Homo Sapiens
acucuggggcuucuccucuccuggagcccagg

SEQ ID NO: 255261 - RNA, 32 nt, Homo Sapiens
gaauuccgcggcugcacuggcggcagcuggag

SEQ ID NO: 255262 - RNA, 32 nt, Homo Sapiens
aaaugugauggauuucuuaaucauauuuauuu

SEQ ID NO: 255263 - RNA, 32 nt, Homo Sapiens
cgugaccccaguguacccuccuccccacacag

SEQ ID NO: 255264 - RNA, 32 nt, Homo Sapiens
cuuggagaguccggccccgaggaggccauggc

SEQ ID NO: 255265 - RNA, 32 nt, Homo Sapiens
ggcacacccacccucaaucugggugggcauca

SEQ ID NO: 255266 - RNA, 32 nt, Homo Sapiens
acaucuaugugcuuggacaacgggaugaaaag

SEQ ID NO: 255267 - RNA, 32 nt, Homo Sapiens
gggugggcgggggguggggcuggcagggaauu

SEQ ID NO: 255268 - RNA, 32 nt, Homo Sapiens
aaacuguacuuuguacccucacauacaaaggg

SEQ ID NO: 255269 - RNA, 32 nt, Homo Sapiens
aauucagaagaccccugacucaucauuugugg

SEQ ID NO: 255270 - RNA, 28 nt, Homo Sapiens
gauaugcugcugcugcugcugcugcccc

SEQ ID NO: 255271 - RNA, 32 nt, Homo Sapiens
cgggccggccgcggccguagccgugugaacgc

SEQ ID NO: 255272 - RNA, 32 nt, Homo Sapiens
gccgauggauuugaguuuuucuaaagaauauu

SEQ ID NO: 255273 - RNA, 32 nt, Homo Sapiens
ucccggcggccgagcccuccuccccgcggcug

SEQ ID NO: 255274 - RNA, 32 nt, Homo Sapiens
agcaucgugucuggcguuguggggaugaacuu

SEQ ID NO: 255275 - RNA, 32 nt, Homo Sapiens
aagcaucuauguccaguaucugugaaaugaug

SEQ ID NO: 255276 - RNA, 32 nt, Homo Sapiens
ggacugcgcggcuggcucuccucuaguauggc

SEQ ID NO: 255277 - RNA, 32 nt, Homo Sapiens
gguuaaguccccggccgugacccaggcccggg

SEQ ID NO: 255278 - RNA, 32 nt, Homo Sapiens
uggaggcagccucaaugcugaaaauggagccu

SEQ ID NO: 255279 - RNA, 32 nt, Homo Sapiens
uaacaacauggcuuucuuauuuuguuugaauu

SEQ ID NO: 255280 - RNA, 32 nt, Homo Sapiens
ggcacaaaauguaucugaagugguuugaggau

SEQ ID NO: 255281 - RNA, 32 nt, Homo Sapiens
cccuggcucugcaaugggcacugggaugagcc

SEQ ID NO: 255282 - RNA, 32 nt, Homo Sapiens
ggcuugcuuagauuacuauauuucauaguuaa

SEQ ID NO: 255283 - RNA, 32 nt, Homo Sapiens
cuguagccuuuggagaccuauaauuuugaaca

SEQ ID NO: 255284 - RNA, 32 nt, Homo Sapiens
ugacccugcccccacuugccauaaaacuuagc

SEQ ID NO: 255285 - RNA, 32 nt, Homo Sapiens
ccugccccuuccccggccaagcccaacuccgg

SEQ ID NO: 255286 - RNA, 32 nt, Homo Sapiens
gaaguggugcugccaucggaucuuuucaaccu

SEQ ID NO: 255287 - RNA, 32 nt, Homo Sapiens
gcuaccugcccagccccucccccaacaagauc

SEQ ID NO: 255288 - RNA, 32 nt, Homo Sapiens
aaauuagccagguugguggcgcaugccuguaa

SEQ ID NO: 255289 - RNA, 31 nt, Homo Sapiens
accgcccgcccuucccugccccgggcuccuc

SEQ ID NO: 255290 - RNA, 32 nt, Homo Sapiens
auccugggccugagaacacaggaaugauucau

SEQ ID NO: 255291 - RNA, 32 nt, Homo Sapiens
ugagugcccagaccccaauccacagcucuggg

SEQ ID NO: 255292 - RNA, 29 nt, Homo Sapiens
ggggauguggagggguagugaccugcgcc

SEQ ID NO: 255293 - RNA, 32 nt, Homo Sapiens
gccacugaccucagggccgaaggggagguggu

SEQ ID NO: 255294 - RNA, 32 nt, Homo Sapiens
uagaucaauauuuuuauuucccuuuuuugcug

SEQ ID NO: 255295 - RNA, 32 nt, Homo Sapiens
acugauaaaacaaaacagaagucagacaaugu

SEQ ID NO: 255296 - RNA, 32 nt, Homo Sapiens
guguuauugcuuuuaacuuaccauaguuuuac

SEQ ID NO: 255297 - RNA, 32 nt, Homo Sapiens
cggaggggaaagggccgcgucccccgcgcgcg

SEQ ID NO: 255298 - RNA, 32 nt, Homo Sapiens
auuugaaugggucuuuccccugggccuuaucc

SEQ ID NO: 255299 - RNA, 32 nt, Homo Sapiens
gaacaaaacuguggaucauugcccucaacaug

SEQ ID NO: 255300 - RNA, 32 nt, Homo Sapiens
agagcucagaucuuauuauacaucagagaauc

SEQ ID NO: 255301 - RNA, 32 nt, Homo Sapiens
ggcgcugggagagggcggagggggaggcggcg

SEQ ID NO: 255302 - RNA, 32 nt, Homo Sapiens
gcugccgcagggaggccgcccgggccaggcga

SEQ ID NO: 255303 - RNA, 32 nt, Homo Sapiens
uuggaauuuccacuuaaauggcuauacaacaa

SEQ ID NO: 255304 - RNA, 32 nt, Homo Sapiens
cagcacuuccgaaaggcauuuuugauccauuu

SEQ ID NO: 255305 - RNA, 32 nt, Homo Sapiens
uuuugaaacgcuugcacagcauggucucaguu

SEQ ID NO: 255306 - RNA, 32 nt, Homo Sapiens
ccguuaaauauguauuuaaaacaugaagaacu

SEQ ID NO: 255307 - RNA, 32 nt, Homo Sapiens
uccucagcgcaggggacgccgucuuccucugg

SEQ ID NO: 255308 - RNA, 32 nt, Homo Sapiens
ucccuucgaggagcccucugaugugaggaggg

SEQ ID NO: 255309 - RNA, 32 nt, Homo Sapiens
cuugugaugcgaaggccgaggcugggagaggu

SEQ ID NO: 255310 - RNA, 32 nt, Homo Sapiens
aucaaaucaaauuccacagggauuggugacca

SEQ ID NO: 255311 - RNA, 32 nt, Homo Sapiens
cucagucaagacagacauccuggcguacuuga

SEQ ID NO: 255312 - RNA, 32 nt, Homo Sapiens
ggaaaauggacuguuucugaccagagacacuu

SEQ ID NO: 255313 - RNA, 32 nt, Homo Sapiens
ggcggggccgacggggcccgagcccaugccga

SEQ ID NO: 255314 - RNA, 32 nt, Homo Sapiens
agugcuugaagaaaugccaccuacagguugug

SEQ ID NO: 255315 - RNA, 32 nt, Homo Sapiens
agcagagacgggcugggcuggcacucacccac

SEQ ID NO: 255316 - RNA, 32 nt, Homo Sapiens
ccuacuuuuagaagugcagcucuguuaggagc

SEQ ID NO: 255317 - RNA, 32 nt, Homo Sapiens
cuugauggcaagaaccauguaacugguuuuug

SEQ ID NO: 255318 - RNA, 32 nt, Homo Sapiens
aggucucucgguuuccucaucugcugccucuc

SEQ ID NO: 255319 - RNA, 32 nt, Homo Sapiens
caaaucaacuuccauuuggauuguagguguga

SEQ ID NO: 255320 - RNA, 32 nt, Homo Sapiens
aggcucgggagagggcaggggccugccaaggc

SEQ ID NO: 255321 - RNA, 32 nt, Homo Sapiens
ucgacgcuauggaggagcccggugcuaccccu

SEQ ID NO: 255322 - RNA, 27 nt, Homo Sapiens
cugaccauguucuucaguucuuaauua

SEQ ID NO: 255323 - RNA, 32 nt, Homo Sapiens
aucaaauuauggacacaugaaagggggcaguu

SEQ ID NO: 255324 - RNA, 32 nt, Homo Sapiens
acuuugcgccgcguccggcgcugcugcugcgc

SEQ ID NO: 255325 - RNA, 32 nt, Homo Sapiens
acaugcuguuggguuuuaauucucuaauuauu

SEQ ID NO: 255326 - RNA, 32 nt, Homo Sapiens
aacaucagggauuuguguguggaauaacugga

SEQ ID NO: 255327 - RNA, 32 nt, Homo Sapiens
gugaucuaugucugcugccuggcuccuagaug

SEQ ID NO: 255328 - RNA, 32 nt, Homo Sapiens
gaugguucuuugcauagaguacuguguguaau

SEQ ID NO: 255329 - RNA, 32 nt, Homo Sapiens
ugcaaagacaaaacaauuaggucacaggauac

SEQ ID NO: 255330 - RNA, 31 nt, Homo Sapiens
ugcugcugcgcugcaaaaccauagcagauuu

SEQ ID NO: 255331 - RNA, 32 nt, Homo Sapiens
agaugagccuacugccucacaacagccuccac

SEQ ID NO: 255332 - RNA, 32 nt, Homo Sapiens
gugcccaguggccucggcagccgugucugcgu

SEQ ID NO: 255333 - RNA, 32 nt, Homo Sapiens
gucuuccugccuucgucucgcuccaucaccgc

SEQ ID NO: 255334 - RNA, 32 nt, Homo Sapiens
aucaccccagucuuaauuuuuaaaagacuuuu

SEQ ID NO: 255335 - RNA, 32 nt, Homo Sapiens
ucagugaaggucggggucagacacagacagag

SEQ ID NO: 255336 - RNA, 32 nt, Homo Sapiens
aaagcaaacaggucugggaggcaguucuguug

SEQ ID NO: 255337 - RNA, 32 nt, Homo Sapiens
ucgcacucguacuuaccggcgugcgccagcgu

SEQ ID NO: 255338 - RNA, 32 nt, Homo Sapiens
gaucggcuccgaagccgacccggcgccccugc

SEQ ID NO: 255339 - RNA, 32 nt, Homo Sapiens
uagaguuucuuugucucucaucuaaaguauau

SEQ ID NO: 255340 - RNA, 32 nt, Homo Sapiens
caguugugaaaagccaguguuggccguucccc

SEQ ID NO: 255341 - RNA, 32 nt, Homo Sapiens
uucccuuggcccggcugucccaaccaagcugc

SEQ ID NO: 255342 - RNA, 32 nt, Homo Sapiens
ucauagauuuaaacuuuuauuuuuacuuaucu

SEQ ID NO: 255343 - RNA, 32 nt, Homo Sapiens
agggaucauuggcaucuuugguaauggaggga

SEQ ID NO: 255344 - RNA, 32 nt, Homo Sapiens
gggcuuggccccagccuccaucuucgucucuc

SEQ ID NO: 255345 - RNA, 32 nt, Homo Sapiens
uaaaaagucaggaaacaacagaugcuggagag

SEQ ID NO: 255346 - RNA, 32 nt, Homo Sapiens
cucaagugacaggaaacguuugauuuuguuuu

SEQ ID NO: 255347 - RNA, 32 nt, Homo Sapiens
aaaacccacgguuuuucuuuuuuucuuuuuuu

SEQ ID NO: 255348 - RNA, 32 nt, Homo Sapiens
uaaauucuauagaaauaaaaccucagaugagu

SEQ ID NO: 255349 - RNA, 32 nt, Homo Sapiens
uucuggagagaaugggaggauuccagaggggc

SEQ ID NO: 255350 - RNA, 32 nt, Homo Sapiens
acacccagcagcagcgcacgccuccgaagccu

SEQ ID NO: 255351 - RNA, 32 nt, Homo Sapiens
ccaucucaggcacuucugcaucacggaagacc

SEQ ID NO: 255352 - RNA, 32 nt, Homo Sapiens
ucggcaugaccucucccuccccuggccacgug

SEQ ID NO: 255353 - RNA, 32 nt, Homo Sapiens
aaucaguuauauuuaucuguaccuucuuugcu

SEQ ID NO: 255354 - RNA, 32 nt, Homo Sapiens
ccuaagucccuuucucaguuugcaauaaucuu

SEQ ID NO: 255355 - RNA, 32 nt, Homo Sapiens
ggaguuggaucucuggauuguguuaugucagu

SEQ ID NO: 255356 - RNA, 32 nt, Homo Sapiens
cuccccaggcuggugcucuccuccugugccca

SEQ ID NO: 255357 - RNA, 32 nt, Homo Sapiens
aaacugaggaagaacuuggcugaggaguaccu

SEQ ID NO: 255358 - RNA, 32 nt, Homo Sapiens
uguuccuggaggcucccgucagggucagccca

SEQ ID NO: 255359 - RNA, 32 nt, Homo Sapiens
caucaguacagcauuuucaacauauuggcaac

SEQ ID NO: 255360 - RNA, 32 nt, Homo Sapiens
guuauagcaggaggagaaaaacaagccauuuu

SEQ ID NO: 255361 - RNA, 27 nt, Homo Sapiens
ucugccuuuucauucugguauaauuaa

SEQ ID NO: 255362 - RNA, 32 nt, Homo Sapiens
ggggcgcacagggaggggcggaugcugccacc

SEQ ID NO: 255363 - RNA, 32 nt, Homo Sapiens
uuccuuucccuucccuucuccacuggccagcu

SEQ ID NO: 255364 - RNA, 32 nt, Homo Sapiens
ugugauuauuuuuuacuuuugucauuuuucau

SEQ ID NO: 255365 - RNA, 32 nt, Homo Sapiens
cagcagcaagcacuucucuuagggcugacggu

SEQ ID NO: 255366 - RNA, 32 nt, Homo Sapiens
aggaggaggcuguggcugcagagccuggagga

SEQ ID NO: 255367 - RNA, 32 nt, Homo Sapiens
acaggguagagguuggguguguguacgggagu

SEQ ID NO: 255368 - RNA, 32 nt, Homo Sapiens
aacgucgaucuccuccucccccgccccgcauc

SEQ ID NO: 255369 - RNA, 32 nt, Homo Sapiens
ccccuuacgacggcgcccgggccaggaauguu

SEQ ID NO: 255370 - RNA, 32 nt, Homo Sapiens
auacuucaguuguuaugaaaucuuuaaagaaa

SEQ ID NO: 255371 - RNA, 32 nt, Homo Sapiens
auuuucuaauuucagacaaacacacacucagc

SEQ ID NO: 255372 - RNA, 32 nt, Homo Sapiens
accuuaggaaagggcuucucaugagcucugcu

SEQ ID NO: 255373 - RNA, 32 nt, Homo Sapiens
cuaauaauguugucguuguugcuaucugauuu

SEQ ID NO: 255374 - RNA, 32 nt, Homo Sapiens
cccaaaguagccagcuggucuucagcaaaaaa

SEQ ID NO: 255375 - RNA, 32 nt, Homo Sapiens
ugggagcuggcgcccggccaccccccacagcc

SEQ ID NO: 255376 - RNA, 32 nt, Homo Sapiens
acgggccccaccguccuccccaccccggggcg

SEQ ID NO: 255377 - RNA, 32 nt, Homo Sapiens
ccccuuuuccauguuccuaagaauggagaaca

SEQ ID NO: 255378 - RNA, 32 nt, Homo Sapiens
cauuucaugauuuuuguaguugacaugaaguc

SEQ ID NO: 255379 - RNA, 32 nt, Homo Sapiens
ggaggggcgggugacggggagcggccuccagu

SEQ ID NO: 255380 - RNA, 32 nt, Homo Sapiens
ccaccuauuucugaagacccaggucccccggu

SEQ ID NO: 255381 - RNA, 32 nt, Homo Sapiens
gagccagcugucugaccacauuccuacccuga

SEQ ID NO: 255382 - RNA, 32 nt, Homo Sapiens
ucaauggagccccggaucccaagcccugcauu

SEQ ID NO: 255383 - RNA, 32 nt, Homo Sapiens
ucauccuggcauguuuuguuuacaauagcuuu

SEQ ID NO: 255384 - RNA, 32 nt, Homo Sapiens
ugaugagaaagauggaaucgauuuuuaaauuu

SEQ ID NO: 255385 - RNA, 32 nt, Homo Sapiens
ucagugugaggagagccaggaggcaggugcug

SEQ ID NO: 255386 - RNA, 32 nt, Homo Sapiens
cuguucuggguguugaccacuccagagaaguu

SEQ ID NO: 255387 - RNA, 32 nt, Homo Sapiens
auccaggcuggagcggcugugccagagggucc

SEQ ID NO: 255388 - RNA, 32 nt, Homo Sapiens
gcgcagccuggcgccgcgggacugaagcucga

SEQ ID NO: 255389 - RNA, 31 nt, Homo Sapiens
gaagacccaaagaaauuuaauauuagcuuaa

SEQ ID NO: 255390 - RNA, 32 nt, Homo Sapiens
auuuggugugucucagaaaaucgcgcucaguu

SEQ ID NO: 255391 - RNA, 32 nt, Homo Sapiens
cccuucccagcgcuccucgcgcugugugcggc

SEQ ID NO: 255392 - RNA, 32 nt, Homo Sapiens
gcuuuaacuuuacuuugaaguguuucugaaau

SEQ ID NO: 255393 - RNA, 32 nt, Homo Sapiens
ugugcucugcccgugaccgccccccgccccau

SEQ ID NO: 255394 - RNA, 32 nt, Homo Sapiens
ggcacagaugagagacagaggcagagaaguua

SEQ ID NO: 255395 - RNA, 32 nt, Homo Sapiens
uaggauaauaggcaauuuuaaaacagacuccu

SEQ ID NO: 255396 - RNA, 32 nt, Homo Sapiens
gauugaucuucagggcuguuuuuguuccugcc

SEQ ID NO: 255397 - RNA, 32 nt, Homo Sapiens
ucugggaccugccggccucccgggccagcugc

SEQ ID NO: 255398 - RNA, 32 nt, Homo Sapiens
augacuggaaagggcccguugugcugaaaucc

SEQ ID NO: 255399 - RNA, 32 nt, Homo Sapiens
agucugaaauuuguuuuuucucucuuucuuuc

SEQ ID NO: 255400 - RNA, 32 nt, Homo Sapiens
guagaugguauuuuaaacagguacauuuuuac

SEQ ID NO: 255401 - RNA, 32 nt, Homo Sapiens
aauuuggcagacacuuuuuuuuuuuuuugaaa

SEQ ID NO: 255402 - RNA, 32 nt, Homo Sapiens
ugccucugugccccuucucucaucucuuagcu

SEQ ID NO: 255403 - RNA, 32 nt, Homo Sapiens
gcauaaaugcaaacacacaaagguauaauuuu

SEQ ID NO: 255404 - RNA, 32 nt, Homo Sapiens
ccucggcagucguggaaaccaagccccacacu

SEQ ID NO: 255405 - RNA, 32 nt, Homo Sapiens
gugaucugccccaccuuggccucccaaagugc

SEQ ID NO: 255406 - RNA, 32 nt, Homo Sapiens
agaugugcaccugaggugagacuucguccagc

SEQ ID NO: 255407 - RNA, 32 nt, Homo Sapiens
ugugagccggagagcugcuugcugagccaaau

SEQ ID NO: 255408 - RNA, 32 nt, Homo Sapiens
ugaggcuggcccccuccucugcuuuagccccg

SEQ ID NO: 255409 - RNA, 32 nt, Homo Sapiens
guaaaaugcaccuuguauugcauaagaagcau

SEQ ID NO: 255410 - RNA, 32 nt, Homo Sapiens
augaacauugaaaaaugagacaauauauccau

SEQ ID NO: 255411 - RNA, 32 nt, Homo Sapiens
auauauauaugaauaaaugaauauauuuuuaa

SEQ ID NO: 255412 - RNA, 32 nt, Homo Sapiens
uuuauacauugaaggaagaaaagaaggaagca

SEQ ID NO: 255413 - RNA, 32 nt, Homo Sapiens
aggcacguuucaucugucagcucacuccagcu

SEQ ID NO: 255414 - RNA, 32 nt, Homo Sapiens
aacccgaagauaaguggaaaagagcuugucca

SEQ ID NO: 255415 - RNA, 32 nt, Homo Sapiens
caaaggcaaugggaagcucaauguugcucagu

SEQ ID NO: 255416 - RNA, 31 nt, Homo Sapiens
ggcaggagggcggagcgaggauguccuuucc

SEQ ID NO: 255417 - RNA, 32 nt, Homo Sapiens
gcucuacccuuaccuuucccagcagcaaguuc

SEQ ID NO: 255418 - RNA, 32 nt, Homo Sapiens
caucaucauuguggugacccacugcuucagcu

SEQ ID NO: 255419 - RNA, 32 nt, Homo Sapiens
gcuuacacugaagagggaggacgggagaggag

SEQ ID NO: 255420 - RNA, 32 nt, Homo Sapiens
auuccagccccgagcgggacagcgcggcgggg

SEQ ID NO: 255421 - RNA, 32 nt, Homo Sapiens
agcggagugcugcggggugcugcuggagugcc

SEQ ID NO: 255422 - RNA, 32 nt, Homo Sapiens
uauucauaauaauguuaauuucaauaaaugac

SEQ ID NO: 255423 - RNA, 32 nt, Homo Sapiens
guuccagagucuuuuuggccagaucaaaauuc

SEQ ID NO: 255424 - RNA, 32 nt, Homo Sapiens
gaccuucuggcacaauaaaggcuucacuuucg

SEQ ID NO: 255425 - RNA, 32 nt, Homo Sapiens
agccuaucuaauuucuuuaguuuucuauuugc

SEQ ID NO: 255426 - RNA, 32 nt, Homo Sapiens
aagcaaagacuuucuuuuuuuucuggcucuuu

SEQ ID NO: 255427 - RNA, 32 nt, Homo Sapiens
uuaccaaaagugucuguacagcagccauccaa

SEQ ID NO: 255428 - RNA, 32 nt, Homo Sapiens
agacuucggugauucugccacucacuccgucg

SEQ ID NO: 255429 - RNA, 32 nt, Homo Sapiens
accccucuugcuuugcaaauaguuuuuuguuu

SEQ ID NO: 255430 - RNA, 32 nt, Homo Sapiens
accagaguacuugguaucuggaugaaucgaca

SEQ ID NO: 255431 - RNA, 31 nt, Homo Sapiens
agugacagcggagagaaccaggcagcccaga

SEQ ID NO: 255432 - RNA, 32 nt, Homo Sapiens
auuaauccacuaaacuggucuucuucaagaga

SEQ ID NO: 255433 - RNA, 32 nt, Homo Sapiens
auuacagcgcgugcaucuccggcuagccgccg

SEQ ID NO: 255434 - RNA, 32 nt, Homo Sapiens
uacgggugggaccucucgguguccuucgggaa

SEQ ID NO: 255435 - RNA, 32 nt, Homo Sapiens
ucugccaucugacagcucccagaggguucugg

SEQ ID NO: 255436 - RNA, 32 nt, Homo Sapiens
cgccucaguaccucggcgggaccgccaugguu

SEQ ID NO: 255437 - RNA, 32 nt, Homo Sapiens
acagucaaauacuuuagagcaaaacaaauuuu

SEQ ID NO: 255438 - RNA, 32 nt, Homo Sapiens
gauguucacuccaaauacacuacagaauuuag

SEQ ID NO: 255439 - RNA, 32 nt, Homo Sapiens
uccgugggucugugaagaggucggcggccccu

SEQ ID NO: 255440 - RNA, 32 nt, Homo Sapiens
cucccuccccaggcaccacuggaccaauuacc

SEQ ID NO: 255441 - RNA, 32 nt, Homo Sapiens
acuacuucuugguuaaaaggccacugguagag

SEQ ID NO: 255442 - RNA, 32 nt, Homo Sapiens
caaaccuagugauacauaaaauuaaagccugu

SEQ ID NO: 255443 - RNA, 32 nt, Homo Sapiens
ggaagagaaacuugcagugaaaaggaguuuuu

SEQ ID NO: 255444 - RNA, 32 nt, Homo Sapiens
auucaugaaaauguauuccuuuaaaauauugu

SEQ ID NO: 255445 - RNA, 32 nt, Homo Sapiens
ccccaaccccauccccaccuccacuucagaac

SEQ ID NO: 255446 - RNA, 32 nt, Homo Sapiens
gucuaugugcaugugcacacacacucaaacau

SEQ ID NO: 255447 - RNA, 32 nt, Homo Sapiens
ccccugcaugcccugaaccccugggugggugg

SEQ ID NO: 255448 - RNA, 32 nt, Homo Sapiens
guaggggccaaggggaaagagaccggcauucg

SEQ ID NO: 255449 - RNA, 32 nt, Homo Sapiens
aaggagacaguuuauuuuuuuauucuaugugc

SEQ ID NO: 255450 - RNA, 32 nt, Homo Sapiens
acuucagagucuucuuccaagagcugguggaa

SEQ ID NO: 255451 - RNA, 32 nt, Homo Sapiens
gucuuucuuucugcuaugagaauagcauaucc

SEQ ID NO: 255452 - RNA, 32 nt, Homo Sapiens
cccgcugcccucgggccgggcugggucgagcu

SEQ ID NO: 255453 - RNA, 32 nt, Homo Sapiens
caggggcucuggagagaggggggugagggugg

SEQ ID NO: 255454 - RNA, 30 nt, Homo Sapiens
uauuuugagaagcucugauuuugcuucuuc

SEQ ID NO: 255455 - RNA, 32 nt, Homo Sapiens
ugagucuuccaucuuuggucuuuuucgaucau

SEQ ID NO: 255456 - RNA, 32 nt, Homo Sapiens
uuuggcaaaccugguauccugcagccgagcau

SEQ ID NO: 255457 - RNA, 32 nt, Homo Sapiens
agaaaaacggaggauuaaaaccacaagucguu

SEQ ID NO: 255458 - RNA, 32 nt, Homo Sapiens
acaggcacgacaagcauagaaacauccuaaac

SEQ ID NO: 255459 - RNA, 32 nt, Homo Sapiens
gguuagcgccagcagggcugcacgccacaggc

SEQ ID NO: 255460 - RNA, 32 nt, Homo Sapiens
cagaguacuaugacaaggaaacaucagaauua

SEQ ID NO: 255461 - RNA, 32 nt, Homo Sapiens
aauacuauuuaguggauggcaguaucuucaug

SEQ ID NO: 255462 - RNA, 32 nt, Homo Sapiens
gcucacgugauuauggaggcgguuaaauccca

SEQ ID NO: 255463 - RNA, 32 nt, Homo Sapiens
uucucgcugcgcagccuccagggcccgaggug

SEQ ID NO: 255464 - RNA, 32 nt, Homo Sapiens
gggauaggcaggaaaguuggggaccaggccug

SEQ ID NO: 255465 - RNA, 32 nt, Homo Sapiens
gguccgcguuccuccgccccaccauggcucgg

SEQ ID NO: 255466 - RNA, 32 nt, Homo Sapiens
agucucaggaggagaaggagcaagaaaaggag

SEQ ID NO: 255467 - RNA, 32 nt, Homo Sapiens
cuagccucaggggucugagcuccagcuccuuu

SEQ ID NO: 255468 - RNA, 32 nt, Homo Sapiens
ugccaugguggguguccuggggccugugcgga

SEQ ID NO: 255469 - RNA, 32 nt, Homo Sapiens
gacuaaagugguuuuguaaaucucagcuauau

SEQ ID NO: 255470 - RNA, 32 nt, Homo Sapiens
gagcucccgggcccggccgccaggcgccucua

SEQ ID NO: 255471 - RNA, 32 nt, Homo Sapiens
cacugccccuggccugagagccaggguuuaaa

SEQ ID NO: 255472 - RNA, 32 nt, Homo Sapiens
agaaccagugacucacacuucucaguccuggg

SEQ ID NO: 255473 - RNA, 32 nt, Homo Sapiens
uggccgagcaaggcgcggggccccggucuaca

SEQ ID NO: 255474 - RNA, 32 nt, Homo Sapiens
cgcgccgagcccgccugagaccgcgcugaccu

SEQ ID NO: 255475 - RNA, 32 nt, Homo Sapiens
uggcagugcugggccuggcugagggcccugug

SEQ ID NO: 255476 - RNA, 32 nt, Homo Sapiens
cuacccuggacagcgcaucgccgcccgcccgg

SEQ ID NO: 255477 - RNA, 32 nt, Homo Sapiens
aagaauuagaagauauuaaacaguucaagaaa

SEQ ID NO: 255478 - RNA, 32 nt, Homo Sapiens
acaggcuuguaggcagaaggggcuugcccugu

SEQ ID NO: 255479 - RNA, 32 nt, Homo Sapiens
gaugaugaagaaucuggacgauuacguuucaa

SEQ ID NO: 255480 - RNA, 32 nt, Homo Sapiens
uuauaauuguagaacggacauuauuauaauau

SEQ ID NO: 255481 - RNA, 32 nt, Homo Sapiens
ccuugaacacugggggaggggacauugaacaa

SEQ ID NO: 255482 - RNA, 28 nt, Homo Sapiens
uaagccauugugauuaggaugacugaua

SEQ ID NO: 255483 - RNA, 32 nt, Homo Sapiens
gagcauagggucuggaacaccaggcugagguc

SEQ ID NO: 255484 - RNA, 32 nt, Homo Sapiens
gcccucccaugcucccuaccuguccccucaca

SEQ ID NO: 255485 - RNA, 32 nt, Homo Sapiens
uguuuagaaguacguuuuugcauuauucauau

SEQ ID NO: 255486 - RNA, 32 nt, Homo Sapiens
caaaugcagauauauauuacagacaaauacuc

SEQ ID NO: 255487 - RNA, 32 nt, Homo Sapiens
uuguuuuguuuuaacaaaauuagcugaagaag

SEQ ID NO: 255488 - RNA, 32 nt, Homo Sapiens
aagauaaaaccuguuguuugcauauuauguuu

SEQ ID NO: 255489 - RNA, 32 nt, Homo Sapiens
uuuuuccuaggucaagcuguguagaagucauu

SEQ ID NO: 255490 - RNA, 32 nt, Homo Sapiens
cccugagaccaaagcacaaaacagcaugcagg

SEQ ID NO: 255491 - RNA, 32 nt, Homo Sapiens
ggcugaggguaaggaaaagaagagacuaggaa

SEQ ID NO: 255492 - RNA, 32 nt, Homo Sapiens
ugcgagcagacgugccuggagaugaacgccac

SEQ ID NO: 255493 - RNA, 32 nt, Homo Sapiens
ggagcguggacagucacuguacacuuguauaa

SEQ ID NO: 255494 - RNA, 32 nt, Homo Sapiens
ucggcccuggcuccagcuccggcuccggcgag

SEQ ID NO: 255495 - RNA, 32 nt, Homo Sapiens
gcugcuauauauaaguguuuguccauauggga

SEQ ID NO: 255496 - RNA, 32 nt, Homo Sapiens
cuuuuuuugcucaguuucugguaauucagaga

SEQ ID NO: 255497 - RNA, 32 nt, Homo Sapiens
auccgggagaggggcgggcgccauugugcuuc

SEQ ID NO: 255498 - RNA, 32 nt, Homo Sapiens
ugacugaggccugcuucccccucccccuccug

SEQ ID NO: 255499 - RNA, 32 nt, Homo Sapiens
gauucuaugaauuguaggaguauuaaagacca

SEQ ID NO: 255500 - RNA, 32 nt, Homo Sapiens
cggugcaggaggccgggcaggggugcggaggg

SEQ ID NO: 255501 - RNA, 31 nt, Homo Sapiens
acccuuuuuuguugcuguucaguguuaaucc

SEQ ID NO: 255502 - RNA, 32 nt, Homo Sapiens
uuucuuauucuauuugccugcaguugccucac

SEQ ID NO: 255503 - RNA, 32 nt, Homo Sapiens
ucacccccaaucccuugcagccaggccacaau

SEQ ID NO: 255504 - RNA, 32 nt, Homo Sapiens
gcuccuccccaauugcucccagccccauuggu

SEQ ID NO: 255505 - RNA, 32 nt, Homo Sapiens
ccugggcuuaggcugaggcgggcccugugcug

SEQ ID NO: 255506 - RNA, 32 nt, Homo Sapiens
gugaaacggaagcucauagaggugagaaaacu

SEQ ID NO: 255507 - RNA, 32 nt, Homo Sapiens
cgccgccugcucugcggggucauggugugcuu

SEQ ID NO: 255508 - RNA, 32 nt, Homo Sapiens
ucaaaguggaaaggaucacagauuuuugguag

SEQ ID NO: 255509 - RNA, 32 nt, Homo Sapiens
acaaaaauacuguaagucucaauuaacagcag

SEQ ID NO: 255510 - RNA, 32 nt, Homo Sapiens
ggagucugcuucauuucuaucauuccauuuuu

SEQ ID NO: 255511 - RNA, 32 nt, Homo Sapiens
aguugcuuguagucuguaaauuuaaaacagcu

SEQ ID NO: 255512 - RNA, 31 nt, Homo Sapiens
cgggagaugugccgggcggggggcccggguu

SEQ ID NO: 255513 - RNA, 32 nt, Homo Sapiens
uacaaaauaauuuuaauguauuaacucauacu

SEQ ID NO: 255514 - RNA, 32 nt, Homo Sapiens
caauguauauguacuucaaaacaucauguugu

SEQ ID NO: 255515 - RNA, 32 nt, Homo Sapiens
ugucaaaaugucugcagcaguuugucaauaaa

SEQ ID NO: 255516 - RNA, 32 nt, Homo Sapiens
ggcaugagcugcugugcccagccucaauuauu

SEQ ID NO: 255517 - RNA, 32 nt, Homo Sapiens
uaggcuaccaaaacauagaugacagaaggagg

SEQ ID NO: 255518 - RNA, 31 nt, Homo Sapiens
uggggccggcacugcucagggucgcgcgccc

SEQ ID NO: 255519 - RNA, 32 nt, Homo Sapiens
auauucucacaguuuuuccccaggaagucugg

SEQ ID NO: 255520 - RNA, 32 nt, Homo Sapiens
cuucuucguggcccgcgacagugcggccaccu

SEQ ID NO: 255521 - RNA, 32 nt, Homo Sapiens
caugccaggaggagccccuguggucacggcau

SEQ ID NO: 255522 - RNA, 32 nt, Homo Sapiens
agcugccagugcuacaauuaaugaagcaaaac

SEQ ID NO: 255523 - RNA, 32 nt, Homo Sapiens
cuauuuggcccacguuuuacaaaccugaguca

SEQ ID NO: 255524 - RNA, 32 nt, Homo Sapiens
cugcuggagagggagaucaaggcgcuccugac

SEQ ID NO: 255525 - RNA, 32 nt, Homo Sapiens
uuucuaaaaguaccuugaaaugauagagaugu

SEQ ID NO: 255526 - RNA, 32 nt, Homo Sapiens
guuccucugcaaaggcggguuacucuguuggg

SEQ ID NO: 255527 - RNA, 32 nt, Homo Sapiens
aacaacaggaaaucuuuuuuuuguuguuuuua

SEQ ID NO: 255528 - RNA, 32 nt, Homo Sapiens
uuugggaagacgggggcgccagagcagguagg

SEQ ID NO: 255529 - RNA, 31 nt, Homo Sapiens
uaaccguguaacacgugaaggcagugcucac

SEQ ID NO: 255530 - RNA, 32 nt, Homo Sapiens
caucuucuuuucuacccacccccuccccgccc

SEQ ID NO: 255531 - RNA, 32 nt, Homo Sapiens
uugggaauuuugcuuuuugucuucccuucuac

SEQ ID NO: 255532 - RNA, 32 nt, Homo Sapiens
aauuaaaaaaagacaaaauaaaaaaaaaaaaa

SEQ ID NO: 255533 - RNA, 32 nt, Homo Sapiens
uugaccaucuggucccaggagcucaggaggag

SEQ ID NO: 255534 - RNA, 32 nt, Homo Sapiens
cuuuuguauuuucagaucuccuuggagcagua

SEQ ID NO: 255535 - RNA, 32 nt, Homo Sapiens
aaauuaaauucaaaaccaaaaacaagucacaa

SEQ ID NO: 255536 - RNA, 32 nt, Homo Sapiens
auucagauucagauaaaguuccacuuaggucu

SEQ ID NO: 255537 - RNA, 32 nt, Homo Sapiens
cuuucccucccucugccaaggacucauggcca

SEQ ID NO: 255538 - RNA, 32 nt, Homo Sapiens
ucaaaaagcagagagggaaaaacggagaguga

SEQ ID NO: 255539 - RNA, 32 nt, Homo Sapiens
gucccaggaagagggauucccugacuuugaua

SEQ ID NO: 255540 - RNA, 32 nt, Homo Sapiens
gugcccaguguagguccagcguguuuccugag

SEQ ID NO: 255541 - RNA, 32 nt, Homo Sapiens
agacaggucaggcugcuuuuucuucauugcuu

SEQ ID NO: 255542 - RNA, 32 nt, Homo Sapiens
aagucgccacccaaauaaaaccacauuccugc

SEQ ID NO: 255543 - RNA, 32 nt, Homo Sapiens
ccucgagccaacaaaaccaagucucuagguuc

SEQ ID NO: 255544 - RNA, 32 nt, Homo Sapiens
caucggcucuggccuggcacugcuaggcaugg

SEQ ID NO: 255545 - RNA, 32 nt, Homo Sapiens
uaccucccccucccccaaccaacuggaagcug

SEQ ID NO: 255546 - RNA, 32 nt, Homo Sapiens
ggggcucggcgacgagggccucuacaccugcu

SEQ ID NO: 255547 - RNA, 32 nt, Homo Sapiens
uuauagcuuuuccuuuuuuuuauuugagaagg

SEQ ID NO: 255548 - RNA, 32 nt, Homo Sapiens
aagaaucaaggaugcugugcaaggguuuauca

SEQ ID NO: 255549 - RNA, 32 nt, Homo Sapiens
gcaggucacaaaugaccuaguuucauuuuaag

SEQ ID NO: 255550 - RNA, 32 nt, Homo Sapiens
aggccuccaaaauuccuucucuuuuucuuucu

SEQ ID NO: 255551 - RNA, 32 nt, Homo Sapiens
acuagaaagcuacggaaccugcaaugcggccg

SEQ ID NO: 255552 - RNA, 32 nt, Homo Sapiens
guauuuuaacaauuaaaugccuauuuuguuau

SEQ ID NO: 255553 - RNA, 32 nt, Homo Sapiens
gggcaagaggacugaggccagagcaaggccaa

SEQ ID NO: 255554 - RNA, 32 nt, Homo Sapiens
uauuacccagcauggcaaccacaguuaauaau

SEQ ID NO: 255555 - RNA, 32 nt, Homo Sapiens
uggccaccugcaccagcgucagggcccagggu

SEQ ID NO: 255556 - RNA, 32 nt, Homo Sapiens
gcacucaaggacauuuacauuuaugaugacca

SEQ ID NO: 255557 - RNA, 32 nt, Homo Sapiens
aagcuaaaucaucaaagaaugcaauuuccaua

SEQ ID NO: 255558 - RNA, 32 nt, Homo Sapiens
ugguuuugucuaggcagccucuggccaggcuc

SEQ ID NO: 255559 - RNA, 32 nt, Homo Sapiens
cccugagcugcaacagaagacugaauggagcu

SEQ ID NO: 255560 - RNA, 32 nt, Homo Sapiens
caguuuuugucucaguucugcugcugauguac

SEQ ID NO: 255561 - RNA, 32 nt, Homo Sapiens
ucuuuugugguaccaauagcagaguugaguag

SEQ ID NO: 255562 - RNA, 32 nt, Homo Sapiens
uucuaacauagcauaaagauuuggacagaccu

SEQ ID NO: 255563 - RNA, 32 nt, Homo Sapiens
aacugcuguuuuaugucauacucuguguaauc

SEQ ID NO: 255564 - RNA, 32 nt, Homo Sapiens
aucuucagaaaaggaagcaggcaugguccugg

SEQ ID NO: 255565 - RNA, 32 nt, Homo Sapiens
uguugcuacuaaaaauacaaaaauuggcuggg

SEQ ID NO: 255566 - RNA, 32 nt, Homo Sapiens
agacaagaugaaauuugaguuuguuuuggaag

SEQ ID NO: 255567 - RNA, 32 nt, Homo Sapiens
caggugcuggaacaggcccuggccccuacuug

SEQ ID NO: 255568 - RNA, 32 nt, Homo Sapiens
gagggaucgggagugauggagaugcauacaga

SEQ ID NO: 255569 - RNA, 32 nt, Homo Sapiens
aggaggaaggcacuaagacuacagaugagacc

SEQ ID NO: 255570 - RNA, 32 nt, Homo Sapiens
aaguuuugagauaaguuuuguuucaauuagaa

SEQ ID NO: 255571 - RNA, 32 nt, Homo Sapiens
gcuaagugguauccgagguucuuaauaugaga

SEQ ID NO: 255572 - RNA, 32 nt, Homo Sapiens
gcucagcccuguacauauaccugucccucucu

SEQ ID NO: 255573 - RNA, 32 nt, Homo Sapiens
cgggcgaugaggggccggcguugaccgggaag

SEQ ID NO: 255574 - RNA, 32 nt, Homo Sapiens
uuuuugaaagaaaacccuuugguuucauugug

SEQ ID NO: 255575 - RNA, 32 nt, Homo Sapiens
ggccugugggccgccaguccauacggugcugu

SEQ ID NO: 255576 - RNA, 32 nt, Homo Sapiens
guguccugcccccaaaauucauguccgcccag

SEQ ID NO: 255577 - RNA, 32 nt, Homo Sapiens
ugcccugguuuccugcccugggaggcagugau

SEQ ID NO: 255578 - RNA, 32 nt, Homo Sapiens
gguucuuccggaacugguuuagcuugcccgca

SEQ ID NO: 255579 - RNA, 32 nt, Homo Sapiens
cgagcuacuuccgcccugcgggcccccacgcc

SEQ ID NO: 255580 - RNA, 32 nt, Homo Sapiens
uggcuaauuuuuguauuuuugguagagauggg

SEQ ID NO: 255581 - RNA, 32 nt, Homo Sapiens
ugggcaguggccugggaaugggguggauugug

SEQ ID NO: 255582 - RNA, 32 nt, Homo Sapiens
uuguuagcuaacauuuaaauucuuuuugugac

SEQ ID NO: 255583 - RNA, 32 nt, Homo Sapiens
uugucgccgggcgggccaggagcagcgcggac

SEQ ID NO: 255584 - RNA, 32 nt, Homo Sapiens
gcuuccagagcagaagugacugugcaagaagg

SEQ ID NO: 255585 - RNA, 32 nt, Homo Sapiens
cuugauagugagccaguaucucuaaggaaagg

SEQ ID NO: 255586 - RNA, 32 nt, Homo Sapiens
uccaccccugucauucacuuccaauuuuaccc

SEQ ID NO: 255587 - RNA, 32 nt, Homo Sapiens
guguggaagacaguguauaacacguaguuugg

SEQ ID NO: 255588 - RNA, 32 nt, Homo Sapiens
augguuaaggcagaauaaugacuaaaauaugu

SEQ ID NO: 255589 - RNA, 32 nt, Homo Sapiens
gagcugauggcuccgagacuggucaggagccc

SEQ ID NO: 255590 - RNA, 32 nt, Homo Sapiens
agccugagcggaggcucggccgugggccggga

SEQ ID NO: 255591 - RNA, 32 nt, Homo Sapiens
agaaaaacaggaauccgugauuuuauaccaga

SEQ ID NO: 255592 - RNA, 32 nt, Homo Sapiens
ccauagggcauaauuugcaucucaaaucugag

SEQ ID NO: 255593 - RNA, 32 nt, Homo Sapiens
cuacccuagagccugggaccuggccauccucu

SEQ ID NO: 255594 - RNA, 32 nt, Homo Sapiens
cucacugcaaccuccgccucccagguucaacu

SEQ ID NO: 255595 - RNA, 32 nt, Homo Sapiens
gugaguuugaaaaagaaaaucuccagcaagca

SEQ ID NO: 255596 - RNA, 32 nt, Homo Sapiens
uccagcccuggccaucuuggacuucuggagcu

SEQ ID NO: 255597 - RNA, 32 nt, Homo Sapiens
aucuccgacccggggcgcguguuccccccggc

SEQ ID NO: 255598 - RNA, 32 nt, Homo Sapiens
ggucccgcuucgagacgcggcgcgguccaggc

SEQ ID NO: 255599 - RNA, 32 nt, Homo Sapiens
uaaccuuuugggggagcuuucuaaaucucaca

SEQ ID NO: 255600 - RNA, 32 nt, Homo Sapiens
guguaaaugcaaaaagucauaaaauucaccuc

SEQ ID NO: 255601 - RNA, 32 nt, Homo Sapiens
accuuucuugguuugacgugcaauaaagaagc

SEQ ID NO: 255602 - RNA, 32 nt, Homo Sapiens
caaagagaaugaaacuuuugcaccauuuucag

SEQ ID NO: 255603 - RNA, 32 nt, Homo Sapiens
cagauagagccaggugcagccuggacaacaug

SEQ ID NO: 255604 - RNA, 32 nt, Homo Sapiens
auggguuacaaccaucacuagaucacaguagu

SEQ ID NO: 255605 - RNA, 32 nt, Homo Sapiens
caccgccugcucugcuggccgcuaccugcagc

SEQ ID NO: 255606 - RNA, 32 nt, Homo Sapiens
uacuguuaaaauugaggucacauauuuucuuu

SEQ ID NO: 255607 - RNA, 32 nt, Homo Sapiens
gccaucuuccauugccgccgcgggugugcggu

SEQ ID NO: 255608 - RNA, 32 nt, Homo Sapiens
uuacugugcaggggaaagggauggaucgauac

SEQ ID NO: 255609 - RNA, 32 nt, Homo Sapiens
ccuccggcaucuuuuccuggugaguguuucuc

SEQ ID NO: 255610 - RNA, 32 nt, Homo Sapiens
uggugauacagcucuggcuuucugagcacacu

SEQ ID NO: 255611 - RNA, 32 nt, Homo Sapiens
aauaucagacugcgaaucaccgggaacgguuc

SEQ ID NO: 255612 - RNA, 32 nt, Homo Sapiens
ggcagauggaggagggauuguaauggcggcag

SEQ ID NO: 255613 - RNA, 32 nt, Homo Sapiens
ugguguuucagaagcugaacuucugaccaaga

SEQ ID NO: 255614 - RNA, 32 nt, Homo Sapiens
ugacucgugucuguaucauacaaguacaaaua

SEQ ID NO: 255615 - RNA, 32 nt, Homo Sapiens
uggcgcgcacgcgcagcuccgcuuccgggagc

SEQ ID NO: 255616 - RNA, 32 nt, Homo Sapiens
auaagggauuuauguuuuucaaagagcuaacu

SEQ ID NO: 255617 - RNA, 32 nt, Homo Sapiens
aauagcauaauuaacuuguuaagcaaguaugg

SEQ ID NO: 255618 - RNA, 32 nt, Homo Sapiens
uacauugugaauuguguaacaaaaacauguuc

SEQ ID NO: 255619 - RNA, 31 nt, Homo Sapiens
cuacaggcgcccaccaccacaguuggcuaau

SEQ ID NO: 255620 - RNA, 32 nt, Homo Sapiens
guuucaccaguguuggccaggcuggucucgaa

SEQ ID NO: 255621 - RNA, 32 nt, Homo Sapiens
ccaauuuaguguccuuccaccugugagccaag

SEQ ID NO: 255622 - RNA, 32 nt, Homo Sapiens
aaguucucauuucucuccaacagacugugcua

SEQ ID NO: 255623 - RNA, 32 nt, Homo Sapiens
cacuauuacugauauggugacugagucaacaa

SEQ ID NO: 255624 - RNA, 32 nt, Homo Sapiens
ccgccuccugggcgagacccagcaguggacag

SEQ ID NO: 255625 - RNA, 31 nt, Homo Sapiens
aauucuuugugcucuuuagagaaguugugga

SEQ ID NO: 255626 - RNA, 32 nt, Homo Sapiens
aggcauuugaagcagaauauagaguggucuca

SEQ ID NO: 255627 - RNA, 32 nt, Homo Sapiens
ccauuguuaguagucauucuagaugaauuggg

SEQ ID NO: 255628 - RNA, 32 nt, Homo Sapiens
cggaguuguuuagaugugaucuggcaaugcua

SEQ ID NO: 255629 - RNA, 32 nt, Homo Sapiens
uaaacgaucauuugugaccucagacacucucu

SEQ ID NO: 255630 - RNA, 32 nt, Homo Sapiens
ccuccuucagcacaacgucacccauugggcaa

SEQ ID NO: 255631 - RNA, 32 nt, Homo Sapiens
ugacacugggucccucucaucuccaugggaac

SEQ ID NO: 255632 - RNA, 32 nt, Homo Sapiens
uuauuaaaacaaaagugugaauaguguucaca

SEQ ID NO: 255633 - RNA, 32 nt, Homo Sapiens
gaaacuuccaagauggaaacuuugucuuuccc

SEQ ID NO: 255634 - RNA, 32 nt, Homo Sapiens
cguuuuuuaccaguuuauaucacggucuucau

SEQ ID NO: 255635 - RNA, 32 nt, Homo Sapiens
gaaaccugacuucugacgacaccaugagccug

SEQ ID NO: 255636 - RNA, 32 nt, Homo Sapiens
aagcgagggcgggggaggagcggagcgggcug

SEQ ID NO: 255637 - RNA, 32 nt, Homo Sapiens
ggcggugaggccugguccacgugcgucccuuc

SEQ ID NO: 255638 - RNA, 32 nt, Homo Sapiens
acuuuuuauugaacaacucaaguuuuaaaaaa

SEQ ID NO: 255639 - RNA, 32 nt, Homo Sapiens
uuugguucuucauuuuaauguagaaaaucaaa

SEQ ID NO: 255640 - RNA, 32 nt, Homo Sapiens
aacauaaucuucugccuucucaugauccaacu

SEQ ID NO: 255641 - RNA, 32 nt, Homo Sapiens
cuggcaggccccaaggcccaggcagcuuuuug

SEQ ID NO: 255642 - RNA, 32 nt, Homo Sapiens
cuaggaaccugguuaagcaagcacuaaucucu

SEQ ID NO: 255643 - RNA, 32 nt, Homo Sapiens
auuaauauuauuagcaugaaauuuuuacuuca

SEQ ID NO: 255644 - RNA, 32 nt, Homo Sapiens
ggccgugagcucuauuucuacccaggcugcug

SEQ ID NO: 255645 - RNA, 32 nt, Homo Sapiens
ugguguagaaucuguuauuauuaucauuauua

SEQ ID NO: 255646 - RNA, 32 nt, Homo Sapiens
gccacggcccgagggggcgcccgcaguggaca

SEQ ID NO: 255647 - RNA, 30 nt, Homo Sapiens
ccguguguccucaucugcggcaggcaggag

SEQ ID NO: 255648 - RNA, 32 nt, Homo Sapiens
aaggaaaaugacuucaguauagauuuguuuuu

SEQ ID NO: 255649 - RNA, 32 nt, Homo Sapiens
gccgggagaccacagagcugcuuccccagccg

SEQ ID NO: 255650 - RNA, 32 nt, Homo Sapiens
agccuuuccccuccccuccacuucuuggguaa

SEQ ID NO: 255651 - RNA, 32 nt, Homo Sapiens
cagaugaacguuggaaauagaugagaaaugga

SEQ ID NO: 255652 - RNA, 32 nt, Homo Sapiens
guccuuagugaaguccacauuauucucugugg

SEQ ID NO: 255653 - RNA, 32 nt, Homo Sapiens
acccuuaaaggcggcgggaggggagggaggga

SEQ ID NO: 255654 - RNA, 32 nt, Homo Sapiens
guuguaaucuggcauuaacuuauuuucuauau

SEQ ID NO: 255655 - RNA, 32 nt, Homo Sapiens
agagaagcacaccaggggcgcccucugccuuc

SEQ ID NO: 255656 - RNA, 32 nt, Homo Sapiens
gggauggcccugggcguggcacuuccuuccuu

SEQ ID NO: 255657 - RNA, 32 nt, Homo Sapiens
ucugcuuuaaacauuucuuucagauguuagcg

SEQ ID NO: 255658 - RNA, 32 nt, Homo Sapiens
uuaaggcaccaagucaaaguuacucuguugua

SEQ ID NO: 255659 - RNA, 32 nt, Homo Sapiens
agaauuacaccaucggaccccuggcucugagg

SEQ ID NO: 255660 - RNA, 32 nt, Homo Sapiens
uuggcgccucuguccuggcccgggagccgcag

SEQ ID NO: 255661 - RNA, 32 nt, Homo Sapiens
ugcaccccuggcccugcucugggcuucagugg

SEQ ID NO: 255662 - RNA, 32 nt, Homo Sapiens
ugccggcgguugcagguacugggugcucuugg

SEQ ID NO: 255663 - RNA, 32 nt, Homo Sapiens
ccugaggccucccagucaugcuucuuauuaag

SEQ ID NO: 255664 - RNA, 32 nt, Homo Sapiens
ggcaacuccgcgcggcggcccggccgagggag

SEQ ID NO: 255665 - RNA, 32 nt, Homo Sapiens
ggucuccacaggcgcccucccuccgcgcccuc

SEQ ID NO: 255666 - RNA, 32 nt, Homo Sapiens
ugcuuuauacuucuuuuuaguucauugguuuu

SEQ ID NO: 255667 - RNA, 32 nt, Homo Sapiens
gcgacaggaugggaaagaaaaagcccuaauua

SEQ ID NO: 255668 - RNA, 32 nt, Homo Sapiens
cugugugagugagcgcaugugcgcauuuauga

SEQ ID NO: 255669 - RNA, 32 nt, Homo Sapiens
uggaggauccugaggugggugaugcugaaagc

SEQ ID NO: 255670 - RNA, 32 nt, Homo Sapiens
cugcggccaaagaacauggaaaagcaugagug

SEQ ID NO: 255671 - RNA, 32 nt, Homo Sapiens
uaauucaggagcuuagaggauucuucaaagag

SEQ ID NO: 255672 - RNA, 32 nt, Homo Sapiens
ugcaagagccuggcugggaagcacggggauga

SEQ ID NO: 255673 - RNA, 30 nt, Homo Sapiens
aacgcuuucuuugagggggaaagagucaaa

SEQ ID NO: 255674 - RNA, 32 nt, Homo Sapiens
gccucugacuuccuccuccccuggguucugac

SEQ ID NO: 255675 - RNA, 32 nt, Homo Sapiens
agaggaggggagagacccuggccaggcuggag

SEQ ID NO: 255676 - RNA, 32 nt, Homo Sapiens
guggcgggggaauagcggcggcagcagcccca

SEQ ID NO: 255677 - RNA, 32 nt, Homo Sapiens
uuucccagcguuauuucuuaauacuugagugu

SEQ ID NO: 255678 - RNA, 32 nt, Homo Sapiens
ggauugauagaguguugcaaaaguauagauua

SEQ ID NO: 255679 - RNA, 32 nt, Homo Sapiens
gucagucccagaguuuggcaaguccucugcuc

SEQ ID NO: 255680 - RNA, 32 nt, Homo Sapiens
gggcggggugaccccucacccgcuguggacuc

SEQ ID NO: 255681 - RNA, 32 nt, Homo Sapiens
ccaaugucauacugccuugauuaguguagugu

SEQ ID NO: 255682 - RNA, 32 nt, Homo Sapiens
auuuaaagcauuaauuaaugacagaacaagga

SEQ ID NO: 255683 - RNA, 32 nt, Homo Sapiens
caaaggccgggaggaggcgcgcgacgcgaccu

SEQ ID NO: 255684 - RNA, 32 nt, Homo Sapiens
guuuauuguaaaagagagucuaauguuaagaa

SEQ ID NO: 255685 - RNA, 32 nt, Homo Sapiens
guaagaccuguuguuuuggaaggucugcucca

SEQ ID NO: 255686 - RNA, 32 nt, Homo Sapiens
aacuugcucccucgccauuggcuggccugguc

SEQ ID NO: 255687 - RNA, 32 nt, Homo Sapiens
cugggaacagagcaacagucucucugggucua

SEQ ID NO: 255688 - RNA, 32 nt, Homo Sapiens
caggcaaaacaaaaaauaaaagauauccaaau

SEQ ID NO: 255689 - RNA, 32 nt, Homo Sapiens
gugcgccguggcgcggcccggcugacagguuc

SEQ ID NO: 255690 - RNA, 32 nt, Homo Sapiens
aacaaggcuguaaauaaaugcagauguagaua

SEQ ID NO: 255691 - RNA, 32 nt, Homo Sapiens
ccgacgcucugcccggcugcugccgcugagga

SEQ ID NO: 255692 - RNA, 32 nt, Homo Sapiens
cugaaacuaggggcaaggauauguaaaguaca

SEQ ID NO: 255693 - RNA, 32 nt, Homo Sapiens
gccuugaagaacuccgauauuuauguuugggu

SEQ ID NO: 255694 - RNA, 32 nt, Homo Sapiens
aauaaacauagggagcagucagacacagggag

SEQ ID NO: 255695 - RNA, 32 nt, Homo Sapiens
ggggccuucagggaagccuggguguggcccgg

SEQ ID NO: 255696 - RNA, 32 nt, Homo Sapiens
agaccucccucauucuuuuugucucuucuuuu

SEQ ID NO: 255697 - RNA, 32 nt, Homo Sapiens
aggagaauuuaaagguauuuuuuaaaauucua

SEQ ID NO: 255698 - RNA, 32 nt, Homo Sapiens
auuaagugcuaaggaaagagggcuuacaaaau

SEQ ID NO: 255699 - RNA, 32 nt, Homo Sapiens
ccgcgggcgaggaggaggggucgccgcgagcc

SEQ ID NO: 255700 - RNA, 32 nt, Homo Sapiens
ggggcuccggugccccgcgccaggcugcagcu

SEQ ID NO: 255701 - RNA, 32 nt, Homo Sapiens
aggacucuugagggccgcuccucccccgcaga

SEQ ID NO: 255702 - RNA, 32 nt, Homo Sapiens
aagguuucucuggauagcacaccucugaaugu

SEQ ID NO: 255703 - RNA, 32 nt, Homo Sapiens
ucgccccgacgcaccccccgcguauuucgggg

SEQ ID NO: 255704 - RNA, 32 nt, Homo Sapiens
agcauggaagcaguccagagucuaggcaauuu

SEQ ID NO: 255705 - RNA, 32 nt, Homo Sapiens
uucauagaaaucauuucuaguuacagaaaaau

SEQ ID NO: 255706 - RNA, 32 nt, Homo Sapiens
gaccugucgucucucccacccccuccccaaag

SEQ ID NO: 255707 - RNA, 32 nt, Homo Sapiens
uacuuggaagacugaggugaaagaauugcuug

SEQ ID NO: 255708 - RNA, 29 nt, Homo Sapiens
augcguuacuguaugaaccacaaaacagc

SEQ ID NO: 255709 - RNA, 32 nt, Homo Sapiens
aaaguauauuuugauuaucaguuucuuagcaa

SEQ ID NO: 255710 - RNA, 32 nt, Homo Sapiens
cagcaggcaccuguauugcagggcuccgacug

SEQ ID NO: 255711 - RNA, 32 nt, Homo Sapiens
uaugucagauguuuuuucauucauuaucagga

SEQ ID NO: 255712 - RNA, 28 nt, Homo Sapiens
augaugguggcuacucugaggauccuuu

SEQ ID NO: 255713 - RNA, 32 nt, Homo Sapiens
uaguaaaaaaaauuaaauugaaguaguaaaug

SEQ ID NO: 255714 - RNA, 32 nt, Homo Sapiens
uaaucuuaugaguagauuguaaugaaaucauu

SEQ ID NO: 255715 - RNA, 32 nt, Homo Sapiens
uuauggccaaauaaaauuguauuauguguuua

SEQ ID NO: 255716 - RNA, 32 nt, Homo Sapiens
uggcaaaggacagcuggaaaagaaacucuauc

SEQ ID NO: 255717 - RNA, 32 nt, Homo Sapiens
uuucuaaaauuccaccugaaagccaaaagaua

SEQ ID NO: 255718 - RNA, 32 nt, Homo Sapiens
acccaaaguaagacauguuagauggggguuau

SEQ ID NO: 255719 - RNA, 32 nt, Homo Sapiens
cccuagagcccucuccucccucugucccucuc

SEQ ID NO: 255720 - RNA, 32 nt, Homo Sapiens
uguguacuuagucuaaguacauuuucaaagug

SEQ ID NO: 255721 - RNA, 32 nt, Homo Sapiens
acaaauaguguagguaucuggguuuauauacu

SEQ ID NO: 255722 - RNA, 32 nt, Homo Sapiens
cuugacuguccagaugaaauaguuuuucagcc

SEQ ID NO: 255723 - RNA, 32 nt, Homo Sapiens
uggaggauguuggggcucugaccccaggagug

SEQ ID NO: 255724 - RNA, 29 nt, Homo Sapiens
ugggcugugacuuuuccuccugcccucag

SEQ ID NO: 255725 - RNA, 32 nt, Homo Sapiens
acccuucuacccuguuucuaugaguuugacua

SEQ ID NO: 255726 - RNA, 32 nt, Homo Sapiens
guaucuuguuuuuaugugugaaugaagccuug

SEQ ID NO: 255727 - RNA, 32 nt, Homo Sapiens
ucucccccugcccauugccugcuugaggggca

SEQ ID NO: 255728 - RNA, 32 nt, Homo Sapiens
gugcucgucgccgcgcuccuggaccggggccg

SEQ ID NO: 255729 - RNA, 32 nt, Homo Sapiens
auaaacaauuacauggaauuuucauaggcaaa

SEQ ID NO: 255730 - RNA, 32 nt, Homo Sapiens
uugcggagcggucgcuggggccccagcuguac

SEQ ID NO: 255731 - RNA, 32 nt, Homo Sapiens
uggauuauaauggucucuagcaaauguguggu

SEQ ID NO: 255732 - RNA, 32 nt, Homo Sapiens
gcgcguggccauccagcuccccgggggcguug

SEQ ID NO: 255733 - RNA, 30 nt, Homo Sapiens
cuguugcgcgcgcggugucaccuugggcgc

SEQ ID NO: 255734 - RNA, 32 nt, Homo Sapiens
gccuagcagccaggcccggcccagggagcuac

SEQ ID NO: 255735 - RNA, 32 nt, Homo Sapiens
uuuucaacuuuuugcccuuccuuucuuuaaag

SEQ ID NO: 255736 - RNA, 32 nt, Homo Sapiens
ccccagcggcugaaccugaccggagcagucag

SEQ ID NO: 255737 - RNA, 32 nt, Homo Sapiens
uaaaaggugagcuaagccuccucgguguuucu

SEQ ID NO: 255738 - RNA, 32 nt, Homo Sapiens
ugcuccugacuaaccucaaggauccugagucu

SEQ ID NO: 255739 - RNA, 32 nt, Homo Sapiens
ucccgauacaacacgugcugcuccauccugcc

SEQ ID NO: 255740 - RNA, 32 nt, Homo Sapiens
accaucugccagucuauuggagguggaacaaa

SEQ ID NO: 255741 - RNA, 32 nt, Homo Sapiens
auuucaacagcaugaaugugguucuguacagu

SEQ ID NO: 255742 - RNA, 32 nt, Homo Sapiens
gaguccgaauccucuucccacccagcccgcgc

SEQ ID NO: 255743 - RNA, 32 nt, Homo Sapiens
aaaucugaguauauauuuacaugucuuuuuaa

SEQ ID NO: 255744 - RNA, 32 nt, Homo Sapiens
cugcccccacccagccuaaaauaaagagcuca

SEQ ID NO: 255745 - RNA, 32 nt, Homo Sapiens
gggcgccccgccggucacuuccgcgcggacac

SEQ ID NO: 255746 - RNA, 32 nt, Homo Sapiens
uccuggcuaauuuuuguauuuucaguagagac

SEQ ID NO: 255747 - RNA, 32 nt, Homo Sapiens
caagacgcguagcagcacacacuucacaaagc

SEQ ID NO: 255748 - RNA, 32 nt, Homo Sapiens
acauaggccuuuuuaaauuugcuuugcugaaa

SEQ ID NO: 255749 - RNA, 32 nt, Homo Sapiens
uggcaagguccuucccugggaaucaccacucg

SEQ ID NO: 255750 - RNA, 30 nt, Homo Sapiens
gacgcccccgcgcagcgcgagcgccucagc

SEQ ID NO: 255751 - RNA, 32 nt, Homo Sapiens
cgggaggggcaucaguccacgugcaagcaggu

SEQ ID NO: 255752 - RNA, 32 nt, Homo Sapiens
cccaggcagagcaaaggggguugucaccaccc

SEQ ID NO: 255753 - RNA, 32 nt, Homo Sapiens
agccugugguggccuggugcacagggcuagaa

SEQ ID NO: 255754 - RNA, 32 nt, Homo Sapiens
gccguaagauaaacuggaaauauuugggcguc

SEQ ID NO: 255755 - RNA, 32 nt, Homo Sapiens
ugcagucaaucuccaggggaaaaguuaacaag

SEQ ID NO: 255756 - RNA, 32 nt, Homo Sapiens
ccuuuugccuuuuuuuuuuuuaaauauuaugu

SEQ ID NO: 255757 - RNA, 32 nt, Homo Sapiens
uaaaauacugaauauaugaguuuuucaguuuu

SEQ ID NO: 255758 - RNA, 32 nt, Homo Sapiens
uaaccguuuuguuuuucucauauuaugaccuu

SEQ ID NO: 255759 - RNA, 32 nt, Homo Sapiens
agucccgcgggccgugcgcggugcugugccgc

SEQ ID NO: 255760 - RNA, 32 nt, Homo Sapiens
uccaggcuccccuaaagaauagcaaaucagug

SEQ ID NO: 255761 - RNA, 30 nt, Homo Sapiens
gagggggugggaaugggggauguggagacu

SEQ ID NO: 255762 - RNA, 32 nt, Homo Sapiens
cggaucacgacgcucuggcccgggccacgcag

SEQ ID NO: 255763 - RNA, 32 nt, Homo Sapiens
uauaaccccccuccuuuuccuuauggcuugcc

SEQ ID NO: 255764 - RNA, 32 nt, Homo Sapiens
uccugucugauccugagacaccuguagauuga

SEQ ID NO: 255765 - RNA, 32 nt, Homo Sapiens
uugcagugagcugagaucccgccacugcacuc

SEQ ID NO: 255766 - RNA, 32 nt, Homo Sapiens
agccaugaaaggaaacaggggugcggcuugag

SEQ ID NO: 255767 - RNA, 32 nt, Homo Sapiens
uugaggaaggagaggagaggguggcaaugaug

SEQ ID NO: 255768 - RNA, 32 nt, Homo Sapiens
uauuucucacuuuauacuacuucuucagaaaa

SEQ ID NO: 255769 - RNA, 32 nt, Homo Sapiens
caccgcccaggccccaggggagcugugcagac

SEQ ID NO: 255770 - RNA, 32 nt, Homo Sapiens
uauauuauauauaaugcaaagaaagguaaaug

SEQ ID NO: 255771 - RNA, 32 nt, Homo Sapiens
gggcgccuucagcgccagccucuucgcuccgu

SEQ ID NO: 255772 - RNA, 32 nt, Homo Sapiens
cugaacucagaauaaaggaaaucauagagaaa

SEQ ID NO: 255773 - RNA, 32 nt, Homo Sapiens
gccuguggugcuguggagauguguguaguggu

SEQ ID NO: 255774 - RNA, 32 nt, Homo Sapiens
ggcuuggccagcugccgaagcuucucgugcug

SEQ ID NO: 255775 - RNA, 32 nt, Homo Sapiens
ucugcuuuccagaaacaaaauuccugcagugg

SEQ ID NO: 255776 - RNA, 32 nt, Homo Sapiens
uugugaaaaugguuauguuuauuuauuacaau

SEQ ID NO: 255777 - RNA, 32 nt, Homo Sapiens
ccucggcuuugccagcgccgccugcgaggcgg

SEQ ID NO: 255778 - RNA, 29 nt, Homo Sapiens
gccugagggguccgggcacggccauacgc

SEQ ID NO: 255779 - RNA, 32 nt, Homo Sapiens
gguugguuagaggguuuaauauuuucugcaau

SEQ ID NO: 255780 - RNA, 32 nt, Homo Sapiens
uccaagcccagccccggcacuagaaccuugcu

SEQ ID NO: 255781 - RNA, 32 nt, Homo Sapiens
gugaacagucagugcgaauuugaaagaagaaa

SEQ ID NO: 255782 - RNA, 32 nt, Homo Sapiens
gaacagacuuacuaaaaucaaacgagacggau

SEQ ID NO: 255783 - RNA, 32 nt, Homo Sapiens
aggugauccgucugcuuuggccucccaaagug

SEQ ID NO: 255784 - RNA, 32 nt, Homo Sapiens
ugugcuucuuugaguaggggguagaagacaga

SEQ ID NO: 255785 - RNA, 32 nt, Homo Sapiens
augcagaguucccuagagagacuugcacugau

SEQ ID NO: 255786 - RNA, 32 nt, Homo Sapiens
cacugcgcggccccgcucucuucaccguguau

SEQ ID NO: 255787 - RNA, 32 nt, Homo Sapiens
uucuuuuuucuuuuuaaauaaaaggagguuca

SEQ ID NO: 255788 - RNA, 32 nt, Homo Sapiens
ccaaagcagccaccccaccuccucucguguug

SEQ ID NO: 255789 - RNA, 32 nt, Homo Sapiens
agucauacaccuguaacugaaauaccaaacug

SEQ ID NO: 255790 - RNA, 32 nt, Homo Sapiens
uuguuuuuucuguguucuaagaacucaggcaa

SEQ ID NO: 255791 - RNA, 32 nt, Homo Sapiens
gguugguuuuaaauaaagugcacgcuauuuua

SEQ ID NO: 255792 - RNA, 30 nt, Homo Sapiens
cuggagccgcccgugccuccaggggccaag

SEQ ID NO: 255793 - RNA, 32 nt, Homo Sapiens
cagaaacagcaaauagauauuccucuacccuu

SEQ ID NO: 255794 - RNA, 32 nt, Homo Sapiens
uggguguugucauggcccaugucacauuggca

SEQ ID NO: 255795 - RNA, 32 nt, Homo Sapiens
ggucuggaacaccaggcugagguccugaucag

SEQ ID NO: 255796 - RNA, 32 nt, Homo Sapiens
gagguuacugaauacuccaagucaagauagcu

SEQ ID NO: 255797 - RNA, 32 nt, Homo Sapiens
aaugcauauaugucuucuuuugaaauguguuc

SEQ ID NO: 255798 - RNA, 32 nt, Homo Sapiens
gugugcagccgaugaugaccaagauuaaaaca

SEQ ID NO: 255799 - RNA, 32 nt, Homo Sapiens
uugacagcuucaguaagaucucaagagagcga

SEQ ID NO: 255800 - RNA, 32 nt, Homo Sapiens
cacuaggacggcuagaauaaaauagauaauaa

SEQ ID NO: 255801 - RNA, 32 nt, Homo Sapiens
aguauaaaccuaaauaaugaucuauuagauuc

SEQ ID NO: 255802 - RNA, 32 nt, Homo Sapiens
guccuccccuccacccgcacaugggggucgcu

SEQ ID NO: 255803 - RNA, 31 nt, Homo Sapiens
uguugcccucaggucgcucccgggcgcggac

SEQ ID NO: 255804 - RNA, 32 nt, Homo Sapiens
gagagggagagcuucuuuagguuccugguaag

SEQ ID NO: 255805 - RNA, 32 nt, Homo Sapiens
gggaucacaugcugcccuuuuccucuccaccu

SEQ ID NO: 255806 - RNA, 32 nt, Homo Sapiens
ucgggaggccgcugcgcugcagggccucgcgg

SEQ ID NO: 255807 - RNA, 32 nt, Homo Sapiens
ggccucgcuuccucgccgcgggcuccgcugca

SEQ ID NO: 255808 - RNA, 32 nt, Homo Sapiens
cacgcccucccucucccaggcccgagauguga

SEQ ID NO: 255809 - RNA, 32 nt, Homo Sapiens
uuggagagaggaggcaggugucugcaugcuac

SEQ ID NO: 255810 - RNA, 32 nt, Homo Sapiens
auagcagcaaacugaggcuuuguaccccacgg

SEQ ID NO: 255811 - RNA, 32 nt, Homo Sapiens
cugccuccggugccgcuggcgaccgcugagcc

SEQ ID NO: 255812 - RNA, 32 nt, Homo Sapiens
cuccacccacugagaccccuuucugucugcga

SEQ ID NO: 255813 - RNA, 32 nt, Homo Sapiens
aaguacuguauauagguguacuuugcuucuca

SEQ ID NO: 255814 - RNA, 32 nt, Homo Sapiens
accacagcuccuuuuccagagcauuccaguca

SEQ ID NO: 255815 - RNA, 32 nt, Homo Sapiens
uggaggagcuggaggagaagggguuaauccgu

SEQ ID NO: 255816 - RNA, 32 nt, Homo Sapiens
uggagcccuggauucuggugcuauagcuccug

SEQ ID NO: 255817 - RNA, 32 nt, Homo Sapiens
guaccuccaagcauaaugauacguccacacac

SEQ ID NO: 255818 - RNA, 32 nt, Homo Sapiens
cgcccaccccugacgccgcggaccgcagcucc

SEQ ID NO: 255819 - RNA, 32 nt, Homo Sapiens
ccguccguggaugagccacagaaccucuucca

SEQ ID NO: 255820 - RNA, 32 nt, Homo Sapiens
gaagcugcgcuccgaguggccuuggaggacgg

SEQ ID NO: 255821 - RNA, 32 nt, Homo Sapiens
auuuugaagaacucccauaaguuucugcugcu

SEQ ID NO: 255822 - RNA, 32 nt, Homo Sapiens
ccccgauggcguccggccucagcccucuuccu

SEQ ID NO: 255823 - RNA, 32 nt, Homo Sapiens
uuauuggacuuccauuuggaaucauaugggau

SEQ ID NO: 255824 - RNA, 32 nt, Homo Sapiens
uuggagugaagauagcaagguuuugaagcaua

SEQ ID NO: 255825 - RNA, 32 nt, Homo Sapiens
ccugggcaagcgccagcuccccucagggcuaa

SEQ ID NO: 255826 - RNA, 32 nt, Homo Sapiens
agccgggugcaaugacucaugccuguaauccc

SEQ ID NO: 255827 - RNA, 32 nt, Homo Sapiens
uguagccagaagaaaaucagguccuggcuccc

SEQ ID NO: 255828 - RNA, 32 nt, Homo Sapiens
caaaacauucuauacgaccuacuugauacagu

SEQ ID NO: 255829 - RNA, 32 nt, Homo Sapiens
gcaaaaaccuuaugaaaucaacuguguucuag

SEQ ID NO: 255830 - RNA, 32 nt, Homo Sapiens
aacagaaaacaauuuguaauuaauuauauuac

SEQ ID NO: 255831 - RNA, 32 nt, Homo Sapiens
cuaagaaggcauuuaguuuugaaaauauuuug

SEQ ID NO: 255832 - RNA, 32 nt, Homo Sapiens
ugcuuuacauccucgaccaacggcugcgggcc

SEQ ID NO: 255833 - RNA, 32 nt, Homo Sapiens
uacauuuuacacacuguacacauaagccaaaa

SEQ ID NO: 255834 - RNA, 32 nt, Homo Sapiens
accauccccaaccgcggcggccgagauccacu

SEQ ID NO: 255835 - RNA, 32 nt, Homo Sapiens
agcgcugucuaggcacacggcaaggccuuagu

SEQ ID NO: 255836 - RNA, 32 nt, Homo Sapiens
auuucgugaacagccuuuuaucuccaagcgga

SEQ ID NO: 255837 - RNA, 32 nt, Homo Sapiens
ccgccgccugcgccaggauggaguucgugaaa

SEQ ID NO: 255838 - RNA, 32 nt, Homo Sapiens
gccgcucaccgcuugcgggcgccgggcauggg

SEQ ID NO: 255839 - RNA, 28 nt, Homo Sapiens
ggcuuaggggcuaccacuggaugauggc

SEQ ID NO: 255840 - RNA, 32 nt, Homo Sapiens
gccugcuugccagcaccccgcuaccagggacc

SEQ ID NO: 255841 - RNA, 32 nt, Homo Sapiens
augucacauaauuauagcauuaacaccagggg

SEQ ID NO: 255842 - RNA, 32 nt, Homo Sapiens
uaggugaaauucacauaacauaaaguuaacca

SEQ ID NO: 255843 - RNA, 32 nt, Homo Sapiens
augaaccuugaacaucaaauaucggguacuac

SEQ ID NO: 255844 - RNA, 31 nt, Homo Sapiens
uguuuccucaauguuaaauugaaaaagaaau

SEQ ID NO: 255845 - RNA, 32 nt, Homo Sapiens
ccuguuggcaucacagccccaaggcuggggga

SEQ ID NO: 255846 - RNA, 32 nt, Homo Sapiens
ccucucagcucgccgaggaggcacgcuagagc

SEQ ID NO: 255847 - RNA, 32 nt, Homo Sapiens
uccagggcugugcuguggcugcugcggucagg

SEQ ID NO: 255848 - RNA, 32 nt, Homo Sapiens
uacucuuauaugcuggacugcauucacacaug

SEQ ID NO: 255849 - RNA, 32 nt, Homo Sapiens
cccgccacuccugaaccccgucgaggggcucu

SEQ ID NO: 255850 - RNA, 32 nt, Homo Sapiens
gcccugugcccuccaaauucacaggggguacc

SEQ ID NO: 255851 - RNA, 32 nt, Homo Sapiens
aacaaacaucuucaacucuguuuucuguaugg

SEQ ID NO: 255852 - RNA, 32 nt, Homo Sapiens
ucacuaauuguugaauuuuacuguauauucau

SEQ ID NO: 255853 - RNA, 32 nt, Homo Sapiens
uuccauuguccucauugguguagggcuuccug

SEQ ID NO: 255854 - RNA, 32 nt, Homo Sapiens
ucccugcuuguucucgcucaucugggcaggug

SEQ ID NO: 255855 - RNA, 32 nt, Homo Sapiens
cuccacacuauaaagccugaauugugaagauc

SEQ ID NO: 255856 - RNA, 32 nt, Homo Sapiens
caaaauugaagaauguaaagacuugaacauau

SEQ ID NO: 255857 - RNA, 32 nt, Homo Sapiens
uacuuacugauuuuucuuuucuuuaaauuggu

SEQ ID NO: 255858 - RNA, 32 nt, Homo Sapiens
uuagaguugauugauggaaaaagcagacagga

SEQ ID NO: 255859 - RNA, 32 nt, Homo Sapiens
uugagauuauuccuguuugaaagguggugcau

SEQ ID NO: 255860 - RNA, 32 nt, Homo Sapiens
ugccucagaugcauccuccccuucucuuuucu

SEQ ID NO: 255861 - RNA, 32 nt, Homo Sapiens
caacugugaaagggggugaugaucuucaccuc

SEQ ID NO: 255862 - RNA, 32 nt, Homo Sapiens
gcucagaggagucgcugcugcagccgccacuc

SEQ ID NO: 255863 - RNA, 32 nt, Homo Sapiens
uccuaauuucugcuuccccagccuaagcaggg

SEQ ID NO: 255864 - RNA, 32 nt, Homo Sapiens
cccauucugauccaguucaccaguagguugga

SEQ ID NO: 255865 - RNA, 32 nt, Homo Sapiens
cccuauccguaugaacaggggcccguuucugg

SEQ ID NO: 255866 - RNA, 32 nt, Homo Sapiens
gugccugauuucauuaggaaauccauucuguu

SEQ ID NO: 255867 - RNA, 32 nt, Homo Sapiens
aacuuucuuauguguguucuuuuuaaaaauuu

SEQ ID NO: 255868 - RNA, 32 nt, Homo Sapiens
ggaaaaaugggauacaugacuaggaaauggag

SEQ ID NO: 255869 - RNA, 32 nt, Homo Sapiens
gagcaucugaccaaccucaauuaccuguacuu

SEQ ID NO: 255870 - RNA, 32 nt, Homo Sapiens
cagcccuugugcuuuuauaaaugucaggcaug

SEQ ID NO: 255871 - RNA, 32 nt, Homo Sapiens
gaagauaguuuauuauagucuguacuucaguu

SEQ ID NO: 255872 - RNA, 32 nt, Homo Sapiens
aaaagggcguccccacacucuaggugauagga

SEQ ID NO: 255873 - RNA, 32 nt, Homo Sapiens
auuggaauuuccacuuaaauggcuauacaaca

SEQ ID NO: 255874 - RNA, 32 nt, Homo Sapiens
gggagcuugcucuucccucccccucaucacag

SEQ ID NO: 255875 - RNA, 32 nt, Homo Sapiens
uaaaaaucaaggauucagucaaacuaagcagg

SEQ ID NO: 255876 - RNA, 32 nt, Homo Sapiens
uacaagagcuagaaaacugaagaugucgucug

SEQ ID NO: 255877 - RNA, 32 nt, Homo Sapiens
gcuguccuccggggucaagaaaagcauggaaa

SEQ ID NO: 255878 - RNA, 32 nt, Homo Sapiens
ggcccaggcuccuggggacaguggcccaggac

SEQ ID NO: 255879 - RNA, 30 nt, Homo Sapiens
agggcaggcguuccgagccucuuccugagc

SEQ ID NO: 255880 - RNA, 32 nt, Homo Sapiens
uccaucaaauugaacaaucuguuguaauuuaa

SEQ ID NO: 255881 - RNA, 32 nt, Homo Sapiens
gagaugugugcagagugagaccucuggccugc

SEQ ID NO: 255882 - RNA, 32 nt, Homo Sapiens
gagccuccuggcugcuugggguuccaguaaau

SEQ ID NO: 255883 - RNA, 32 nt, Homo Sapiens
gcagccuccgcggcuaucccgggaguccugcu

SEQ ID NO: 255884 - RNA, 32 nt, Homo Sapiens
aucccagaugacccaagaaugcuugcuauuuc

SEQ ID NO: 255885 - RNA, 32 nt, Homo Sapiens
cuccccuuccuccucugccacccagugccuuc

SEQ ID NO: 255886 - RNA, 32 nt, Homo Sapiens
aguugugacccauuuuacucuggauaagggca

SEQ ID NO: 255887 - RNA, 32 nt, Homo Sapiens
cccaucugucccuccgucugcccaccggccuc

SEQ ID NO: 255888 - RNA, 32 nt, Homo Sapiens
cauucuccauggcacuauuccuucaucuacug

SEQ ID NO: 255889 - RNA, 30 nt, Homo Sapiens
uccaaguuuaucucuaccaagaguauaaug

SEQ ID NO: 255890 - RNA, 32 nt, Homo Sapiens
uaauucucauuguaaaaauaauuauaugccaa

SEQ ID NO: 255891 - RNA, 32 nt, Homo Sapiens
gaguggcccugccuccuguccuccccgggguu

SEQ ID NO: 255892 - RNA, 32 nt, Homo Sapiens
uaccugugccagaauuagaaaaggggguugga

SEQ ID NO: 255893 - RNA, 32 nt, Homo Sapiens
aaauacaaaaauuauguuuaagggucauagug

SEQ ID NO: 255894 - RNA, 32 nt, Homo Sapiens
ggacugcccccuccuggagcagcuccugggcu

SEQ ID NO: 255895 - RNA, 32 nt, Homo Sapiens
ugguuuaggauuacuuagauuguguuccugaa

SEQ ID NO: 255896 - RNA, 29 nt, Homo Sapiens
gugaaaauauguauucuccaagggaagac

SEQ ID NO: 255897 - RNA, 32 nt, Homo Sapiens
cuccacuucacgucacaaaaacguuuggagcu

SEQ ID NO: 255898 - RNA, 32 nt, Homo Sapiens
gcacuucuuucaucaaaaugaucauccaucuu

SEQ ID NO: 255899 - RNA, 32 nt, Homo Sapiens
ccucccgcccccagcccgagcccgccuuccag

SEQ ID NO: 255900 - RNA, 32 nt, Homo Sapiens
ggcgccaaacccagcccuucucuaaccacccu

SEQ ID NO: 255901 - RNA, 32 nt, Homo Sapiens
aggccgacuucuggggggccugucugggagcu

SEQ ID NO: 255902 - RNA, 32 nt, Homo Sapiens
cgccauggggaugauugcuucucuaggcuccu

SEQ ID NO: 255903 - RNA, 32 nt, Homo Sapiens
gaaaagaugcuugaugcccagccccguuuuaa

SEQ ID NO: 255904 - RNA, 32 nt, Homo Sapiens
aucagcauuuuucuuuagucauuuaagaauuu

SEQ ID NO: 255905 - RNA, 32 nt, Homo Sapiens
agggcuuugaaggcacagaaaccuggcgacuc

SEQ ID NO: 255906 - RNA, 32 nt, Homo Sapiens
ggaggcgccggcugcuggccaacgcagggcag

SEQ ID NO: 255907 - RNA, 32 nt, Homo Sapiens
cuucaggaggcgucggaugcgcggcgggucuu

SEQ ID NO: 255908 - RNA, 30 nt, Homo Sapiens
uuuagggucuucggccccggcucuggcguc

SEQ ID NO: 255909 - RNA, 32 nt, Homo Sapiens
ugguggucccuaagccgggccgcggccggugc

SEQ ID NO: 255910 - RNA, 32 nt, Homo Sapiens
gcuggacauaugcuggcugugugggguagagg

SEQ ID NO: 255911 - RNA, 32 nt, Homo Sapiens
ugaaugcuaugaaauugauauuuuuucuggaa

SEQ ID NO: 255912 - RNA, 32 nt, Homo Sapiens
cgccaucucuaggauuugauuguggagagcau

SEQ ID NO: 255913 - RNA, 32 nt, Homo Sapiens
aacuugucacuuuaauuugauauuuuuauuuu

SEQ ID NO: 255914 - RNA, 32 nt, Homo Sapiens
auggaggcuuugcauagauucccugagcagga

SEQ ID NO: 255915 - RNA, 32 nt, Homo Sapiens
cgcccguggagcccugggccuguugacccacc

SEQ ID NO: 255916 - RNA, 32 nt, Homo Sapiens
agugguguuucaucauguuucccaggcugguc

SEQ ID NO: 255917 - RNA, 32 nt, Homo Sapiens
agauucacaagacagcacuuugauucuauguu

SEQ ID NO: 255918 - RNA, 32 nt, Homo Sapiens
agaggcugugaacagggagaugggggaggggg

SEQ ID NO: 255919 - RNA, 32 nt, Homo Sapiens
gugauguagacagaacgggccuugaagagaau

SEQ ID NO: 255920 - RNA, 32 nt, Homo Sapiens
accccagccaccgccagccugagaccaggugu

SEQ ID NO: 255921 - RNA, 32 nt, Homo Sapiens
aaagaaagccuuuugacagcuacaugacuuac

SEQ ID NO: 255922 - RNA, 32 nt, Homo Sapiens
uuccuuuuccuccgaagcugcugauucauccc

SEQ ID NO: 255923 - RNA, 32 nt, Homo Sapiens
caguccggugccccccgugccggagcgcaggg

SEQ ID NO: 255924 - RNA, 32 nt, Homo Sapiens
cuuacacucugcaggcugcagcggcagcucca

SEQ ID NO: 255925 - RNA, 32 nt, Homo Sapiens
uggucuucccugaagcaucuccagggcuggag

SEQ ID NO: 255926 - RNA, 32 nt, Homo Sapiens
ggccuuuuuuuuuuucuuuuuaucuuuuaucu

SEQ ID NO: 255927 - RNA, 32 nt, Homo Sapiens
aaauuugaaaauuggcaggugcacuuucuuga

SEQ ID NO: 255928 - RNA, 32 nt, Homo Sapiens
agcagacacugcaacagaugccuccuagaaaa

SEQ ID NO: 255929 - RNA, 32 nt, Homo Sapiens
aagguuagaaaagaaaguuggaaugcaacuua

SEQ ID NO: 255930 - RNA, 32 nt, Homo Sapiens
agcaccggccgcggcucccccuggacggggcg

SEQ ID NO: 255931 - RNA, 32 nt, Homo Sapiens
guggguacaccugagcccacucuugcacaugu

SEQ ID NO: 255932 - RNA, 32 nt, Homo Sapiens
gagcacguugugaagcaucccagccucguguu

SEQ ID NO: 255933 - RNA, 32 nt, Homo Sapiens
uuuauucuagaauauguauucuauucacaaga

SEQ ID NO: 255934 - RNA, 32 nt, Homo Sapiens
acaagcugccagccagaccucugucugucccu

SEQ ID NO: 255935 - RNA, 32 nt, Homo Sapiens
uuuaacuccacagaccaagacuggaguaagac

SEQ ID NO: 255936 - RNA, 32 nt, Homo Sapiens
gguguccuggaucucaugacuccagcagcacc

SEQ ID NO: 255937 - RNA, 32 nt, Homo Sapiens
aguuggaaaaggaagaaagccagagcugucua

SEQ ID NO: 255938 - RNA, 32 nt, Homo Sapiens
agcuugagcgcggcggcggcguuguucaguca

SEQ ID NO: 255939 - RNA, 32 nt, Homo Sapiens
cacuacuuuauuucuuuuuucauccagguguu

SEQ ID NO: 255940 - RNA, 32 nt, Homo Sapiens
acuucugugacuucauugaaaaucugcacaau

SEQ ID NO: 255941 - RNA, 32 nt, Homo Sapiens
aaguggccguccccgccgggcucgaaccucug

SEQ ID NO: 255942 - RNA, 32 nt, Homo Sapiens
agagaaaccugagugacgacgugguggaggaa

SEQ ID NO: 255943 - RNA, 32 nt, Homo Sapiens
gauuuucgacuucagugaugcguuugugcuga

SEQ ID NO: 255944 - RNA, 32 nt, Homo Sapiens
aaccuuccuuugauaggacaaagcagauacua

SEQ ID NO: 255945 - RNA, 32 nt, Homo Sapiens
gauucagucauacacacauacacacacuaaca

SEQ ID NO: 255946 - RNA, 32 nt, Homo Sapiens
acauuuaaagauuuaaagugccuuaucaaaua

SEQ ID NO: 255947 - RNA, 32 nt, Homo Sapiens
agcgcuuuugaaaaauacauauauuuuuacua

SEQ ID NO: 255948 - RNA, 32 nt, Homo Sapiens
ggcuguuauagcagaaaauccagcuuucugaa

SEQ ID NO: 255949 - RNA, 32 nt, Homo Sapiens
gaccaugccggggugcugccugggcaggccau

SEQ ID NO: 255950 - RNA, 32 nt, Homo Sapiens
cgcccccgcuuccagauccccggccccggcug

SEQ ID NO: 255951 - RNA, 31 nt, Homo Sapiens
gcacagcugggccccauugaaagugagacca

SEQ ID NO: 255952 - RNA, 32 nt, Homo Sapiens
auccuggaagagacucggggccccccagccuc

SEQ ID NO: 255953 - RNA, 32 nt, Homo Sapiens
aggcuggagugcagugacaugaucuccgcuca

SEQ ID NO: 255954 - RNA, 32 nt, Homo Sapiens
gcagaaaaaaugucuguaaauauguuuuuaaa

SEQ ID NO: 255955 - RNA, 32 nt, Homo Sapiens
cugacgggcccggaccauggggugcugcccgg

SEQ ID NO: 255956 - RNA, 32 nt, Homo Sapiens
aacgauggagccagcucugcauuauccgaggu

SEQ ID NO: 255957 - RNA, 32 nt, Homo Sapiens
gaugaauggcaggcccaccucccccacaucgg

SEQ ID NO: 255958 - RNA, 32 nt, Homo Sapiens
uguaacagcagaugaaaauugauaaaacccaa

SEQ ID NO: 255959 - RNA, 32 nt, Homo Sapiens
gcaguccuagccccaaaccagcccagagcagg

SEQ ID NO: 255960 - RNA, 32 nt, Homo Sapiens
caggaacucccucucuucucgguagcuuugaa

SEQ ID NO: 255961 - RNA, 32 nt, Homo Sapiens
gcagccgacagccccaccuggccaauagcagg

SEQ ID NO: 255962 - RNA, 32 nt, Homo Sapiens
ccacuuauucuagggcacacaaacacuauuuu

SEQ ID NO: 255963 - RNA, 30 nt, Homo Sapiens
cuugggcugcccgugcuucgugcuuuggac

SEQ ID NO: 255964 - RNA, 32 nt, Homo Sapiens
uuuaaauauguaacuucagggauucaaucccc

SEQ ID NO: 255965 - RNA, 32 nt, Homo Sapiens
uuacugcccucuugcgugccccggccaccccc

SEQ ID NO: 255966 - RNA, 32 nt, Homo Sapiens
caaaggcaagcacuuguggguuuuuguuuugu

SEQ ID NO: 255967 - RNA, 32 nt, Homo Sapiens
cauccuauaucuguuuguuuucuguuucuucc

SEQ ID NO: 255968 - RNA, 32 nt, Homo Sapiens
cacagaguuacuuuucccucuuuccuagaauu

SEQ ID NO: 255969 - RNA, 32 nt, Homo Sapiens
gugccaucuaaugugguagccacuuggcacac

SEQ ID NO: 255970 - RNA, 32 nt, Homo Sapiens
gggaggcccggugccggcggccagggaagguc

SEQ ID NO: 255971 - RNA, 32 nt, Homo Sapiens
gaaaaggaauaccggaaacuacaggaagaagu

SEQ ID NO: 255972 - RNA, 32 nt, Homo Sapiens
uugcugacaaugaauauauuauacagcaguuu

SEQ ID NO: 255973 - RNA, 32 nt, Homo Sapiens
ccacuucuuuucuccuuccuccaggcaagaag

SEQ ID NO: 255974 - RNA, 32 nt, Homo Sapiens
gaggaaauuccacagcuauuuacaacugcuau

SEQ ID NO: 255975 - RNA, 32 nt, Homo Sapiens
ugugucaguuauuauauuuauguuugcacaau

SEQ ID NO: 255976 - RNA, 32 nt, Homo Sapiens
aaaauaaaaauauaugccaaagauuuucuugg

SEQ ID NO: 255977 - RNA, 32 nt, Homo Sapiens
cauucacuaggucauuuaauucuuaaacaaau

SEQ ID NO: 255978 - RNA, 32 nt, Homo Sapiens
uggaugccagagucagcuuucaagauacauuu

SEQ ID NO: 255979 - RNA, 32 nt, Homo Sapiens
ccucugugccugaguucucccuguugucucaa

SEQ ID NO: 255980 - RNA, 32 nt, Homo Sapiens
agauguaaguuuuagagaaugagauucuccau

SEQ ID NO: 255981 - RNA, 32 nt, Homo Sapiens
gcucuggggcggcgagacuggcugggaggagg

SEQ ID NO: 255982 - RNA, 32 nt, Homo Sapiens
ucaucauacucuagaaucuugucugucacuca

SEQ ID NO: 255983 - RNA, 32 nt, Homo Sapiens
uuucucacagaaagaauaguaguuagguuccc

SEQ ID NO: 255984 - RNA, 32 nt, Homo Sapiens
gggagggagagagcuucagggaugagguggcg

SEQ ID NO: 255985 - RNA, 32 nt, Homo Sapiens
ccaccuccucaggaagaccccgcagcucuccc

SEQ ID NO: 255986 - RNA, 32 nt, Homo Sapiens
acugccuugggucagaauggcuagagaaccga

SEQ ID NO: 255987 - RNA, 32 nt, Homo Sapiens
agauucuuaugacaccauuaagaaauuccaac

SEQ ID NO: 255988 - RNA, 32 nt, Homo Sapiens
gguacuacuuuuuauaauagagaaugugguug

SEQ ID NO: 255989 - RNA, 32 nt, Homo Sapiens
uuuccagacaccuccggcccacacagccguuc

SEQ ID NO: 255990 - RNA, 32 nt, Homo Sapiens
aacucgcggccuuauuucugccuuuaaucucc

SEQ ID NO: 255991 - RNA, 32 nt, Homo Sapiens
cccugccuaaacuuauugcuguucccacaaag

SEQ ID NO: 255992 - RNA, 32 nt, Homo Sapiens
uugcuggagucgcuagggagaaagggguuaga

SEQ ID NO: 255993 - RNA, 32 nt, Homo Sapiens
uugaauuaccuaaaauauuguuuaccaaaaag

SEQ ID NO: 255994 - RNA, 32 nt, Homo Sapiens
aauggcauaguauguauuugcauauuaccuac

SEQ ID NO: 255995 - RNA, 32 nt, Homo Sapiens
gaagggccagccuagccugcagcccucccuug

SEQ ID NO: 255996 - RNA, 32 nt, Homo Sapiens
ggccggacacaagcucaagguacggcugcccc

SEQ ID NO: 255997 - RNA, 32 nt, Homo Sapiens
gccauuucagaauuuagagaguuuaaugaaug

SEQ ID NO: 255998 - RNA, 32 nt, Homo Sapiens
caggcagccgguggagagggacgcggcggacg

SEQ ID NO: 255999 - RNA, 32 nt, Homo Sapiens
uggaucuucuggagaagugcuguuguucaaca

SEQ ID NO: 256000 - RNA, 32 nt, Homo Sapiens
ccgacggcagcgacgagcgcggcugcggaggg

SEQ ID NO: 256001 - RNA, 32 nt, Homo Sapiens
ugggagaaaauauuugcaaacuaugcaucuga

SEQ ID NO: 256002 - RNA, 32 nt, Homo Sapiens
gccaugcauuaccaugcacuaauucaaucaca

SEQ ID NO: 256003 - RNA, 32 nt, Homo Sapiens
uucaaauaaaaagagaggaagaaaaacuaucu

SEQ ID NO: 256004 - RNA, 32 nt, Homo Sapiens
gccaugccaagagcaacguguaaaggaacaga

SEQ ID NO: 256005 - RNA, 32 nt, Homo Sapiens
gccauugccuccaccuccaccacagccugccc

SEQ ID NO: 256006 - RNA, 32 nt, Homo Sapiens
gggaauugauuucacaguuuguuaccuuagua

SEQ ID NO: 256007 - RNA, 32 nt, Homo Sapiens
ucuugacaagcacuuuuugaauaucucaagag

SEQ ID NO: 256008 - RNA, 32 nt, Homo Sapiens
augcuuaucccucucucuaccugugacaaaau

SEQ ID NO: 256009 - RNA, 32 nt, Homo Sapiens
cugcugcagacccagcucguggaccggcugca

SEQ ID NO: 256010 - RNA, 32 nt, Homo Sapiens
cguacacagugcagcaccaggugcugggcucg

SEQ ID NO: 256011 - RNA, 32 nt, Homo Sapiens
aagccaaaaauauuuccgugagguuuuuaacu

SEQ ID NO: 256012 - RNA, 32 nt, Homo Sapiens
aucuggcauuucucuucaguuaucuuauaugu

SEQ ID NO: 256013 - RNA, 32 nt, Homo Sapiens
ugauacaguggaaacguacuuuucuagagauu

SEQ ID NO: 256014 - RNA, 32 nt, Homo Sapiens
aagugauucuucugccucaaccucccaaguag

SEQ ID NO: 256015 - RNA, 32 nt, Homo Sapiens
gucaggaggggagggugcugggccugacaugg

SEQ ID NO: 256016 - RNA, 32 nt, Homo Sapiens
uuuuagauucuaaaguuucacaguagaaagga

SEQ ID NO: 256017 - RNA, 32 nt, Homo Sapiens
gucuagauacauauuucuauuaauacacauuu

SEQ ID NO: 256018 - RNA, 32 nt, Homo Sapiens
cugaauaaucuguaugguuuauacaguuugug

SEQ ID NO: 256019 - RNA, 32 nt, Homo Sapiens
caccagaacugagacuccuaagguagaggccu

SEQ ID NO: 256020 - RNA, 32 nt, Homo Sapiens
ugggacuccgcgggggcggggguagcuggagc

SEQ ID NO: 256021 - RNA, 32 nt, Homo Sapiens
aauggagcagaagaagucaaacaaagaagaag

SEQ ID NO: 256022 - RNA, 28 nt, Homo Sapiens
uggauggggcggcuggccaggcgggggg

SEQ ID NO: 256023 - RNA, 32 nt, Homo Sapiens
uggcaaagcaauaaaaagcaaguuuucaauga

SEQ ID NO: 256024 - RNA, 32 nt, Homo Sapiens
ugcaggggaaaggacugccccccaugcaccau

SEQ ID NO: 256025 - RNA, 32 nt, Homo Sapiens
cugggcuggggagcagaaaacacacuuggaac

SEQ ID NO: 256026 - RNA, 32 nt, Homo Sapiens
ccgcccucuuccccucaaccccggcccaggcc

SEQ ID NO: 256027 - RNA, 32 nt, Homo Sapiens
aauuuuuuaaauaguuucugaauaaacacuug

SEQ ID NO: 256028 - RNA, 32 nt, Homo Sapiens
ugagaaggacuggaaugcuucuccgggcagga

SEQ ID NO: 256029 - RNA, 32 nt, Homo Sapiens
ccucuauuuggaugcccuuccaguuuugcaca

SEQ ID NO: 256030 - RNA, 32 nt, Homo Sapiens
aucgcaugccccagccuuuccauccugggauc

SEQ ID NO: 256031 - RNA, 32 nt, Homo Sapiens
ccuuccauauauauuuacugaauggcuacuau

SEQ ID NO: 256032 - RNA, 32 nt, Homo Sapiens
gaugaaauuuaguucagccacagucuuacaga

SEQ ID NO: 256033 - RNA, 32 nt, Homo Sapiens
caaccagauggacgccagacaggcagacauca

SEQ ID NO: 256034 - RNA, 32 nt, Homo Sapiens
cuuccaaaaagauuuucagaaaauauuaugug

SEQ ID NO: 256035 - RNA, 32 nt, Homo Sapiens
caaacacaugugcaugcacacacacacauaca

SEQ ID NO: 256036 - RNA, 32 nt, Homo Sapiens
aauguauauuugcugcaaagagaaaccacuuu

SEQ ID NO: 256037 - RNA, 32 nt, Homo Sapiens
gucuaaggaauauuuuggaaucaaauaugcag

SEQ ID NO: 256038 - RNA, 32 nt, Homo Sapiens
gugaaacacacagauaauaggaacaaaaugua

SEQ ID NO: 256039 - RNA, 32 nt, Homo Sapiens
aagaaggaagagugaggggucuguccaugggg

SEQ ID NO: 256040 - RNA, 32 nt, Homo Sapiens
aauugugcaaaugaaagaaaugucaugguaua

SEQ ID NO: 256041 - RNA, 32 nt, Homo Sapiens
ggugguuccuuccacgucucugaccucacccu

SEQ ID NO: 256042 - RNA, 32 nt, Homo Sapiens
uuucccuucccauuuuuuuguuuuuaagagau

SEQ ID NO: 256043 - RNA, 27 nt, Homo Sapiens
agcccucucuucuucagaggcccccug

SEQ ID NO: 256044 - RNA, 32 nt, Homo Sapiens
ccaguuuugucaaaagugcacucauaucaugg

SEQ ID NO: 256045 - RNA, 32 nt, Homo Sapiens
gcaagaagcuuugcuuuuuccuguuccuauug

SEQ ID NO: 256046 - RNA, 32 nt, Homo Sapiens
cucugcacuccagccugggugacaagagugag

SEQ ID NO: 256047 - RNA, 32 nt, Homo Sapiens
uuuccugggggaugugcacggcagcuugagcc

SEQ ID NO: 256048 - RNA, 30 nt, Homo Sapiens
uuauuccucuauuaguucuauaggagugau

SEQ ID NO: 256049 - RNA, 32 nt, Homo Sapiens
aggccauuucuuuugguuuauuuaaguguaga

SEQ ID NO: 256050 - RNA, 30 nt, Homo Sapiens
ccuagccccgcgaugccgccggcgaguggc

SEQ ID NO: 256051 - RNA, 32 nt, Homo Sapiens
aacuaaaaaugguaucaaaguaacaguggaaa

SEQ ID NO: 256052 - RNA, 32 nt, Homo Sapiens
cuugcucagaugccuggcagggcuggguggcg

SEQ ID NO: 256053 - RNA, 31 nt, Homo Sapiens
uauaagauccauugauguccaaauaauacca

SEQ ID NO: 256054 - RNA, 32 nt, Homo Sapiens
ggaggaugcaggauugggcuugggccuggguc

SEQ ID NO: 256055 - RNA, 32 nt, Homo Sapiens
ugcucccaccucuccuucucuuucccugaaaa

SEQ ID NO: 256056 - RNA, 32 nt, Homo Sapiens
gggguccgcucccccggacuggcccugcccac

SEQ ID NO: 256057 - RNA, 32 nt, Homo Sapiens
gggaauuguuuuuauaaaaacauugaaauauu

SEQ ID NO: 256058 - RNA, 32 nt, Homo Sapiens
agggaagugcuguauauuaaaugcaugugaau

SEQ ID NO: 256059 - RNA, 32 nt, Homo Sapiens
uuccucuucuucugccccuucaacugcaggcu

SEQ ID NO: 256060 - RNA, 32 nt, Homo Sapiens
agaccuggaacaagauucugccaucucuguga

SEQ ID NO: 256061 - RNA, 32 nt, Homo Sapiens
ggauacauucgaaagcagcuaugaaacaugca

SEQ ID NO: 256062 - RNA, 32 nt, Homo Sapiens
ucaccuguaggacaguuuaucagucaacuacc

SEQ ID NO: 256063 - RNA, 32 nt, Homo Sapiens
aucccuuccauaacagguacuuugaaggcaag

SEQ ID NO: 256064 - RNA, 32 nt, Homo Sapiens
ccuccuccucuuccagcaaggaacgcaccgaa

SEQ ID NO: 256065 - RNA, 32 nt, Homo Sapiens
gucuguacgggaagaggcagagggaggcagcc

SEQ ID NO: 256066 - RNA, 32 nt, Homo Sapiens
uagcgucaccucaggucuggggaagucugugc

SEQ ID NO: 256067 - RNA, 32 nt, Homo Sapiens
guccuaguauaauuguugcauuuuaaauaaca

SEQ ID NO: 256068 - RNA, 32 nt, Homo Sapiens
gccaccaggaucagccaggagggcguucuuag

SEQ ID NO: 256069 - RNA, 32 nt, Homo Sapiens
guuuaauauuuaaggggaaaagagacuaauuu

SEQ ID NO: 256070 - RNA, 32 nt, Homo Sapiens
ccacauuucuaaaaucuuauaguucuaggcac

SEQ ID NO: 256071 - RNA, 32 nt, Homo Sapiens
uccagcuucgaugauguggguguccugcagaa

SEQ ID NO: 256072 - RNA, 32 nt, Homo Sapiens
auacuuucgaaaguaagaagaguuucuucaag

SEQ ID NO: 256073 - RNA, 32 nt, Homo Sapiens
acuuuuucaucccacaacuuuaauuccuguaa

SEQ ID NO: 256074 - RNA, 32 nt, Homo Sapiens
aacacaugauaccagcagcaacugaaaaugaa

SEQ ID NO: 256075 - RNA, 32 nt, Homo Sapiens
aaauaaaugcccaaaauguagaacuuuaacca

SEQ ID NO: 256076 - RNA, 32 nt, Homo Sapiens
uuuucugggaugugguauuggugcuuuguguc

SEQ ID NO: 256077 - RNA, 32 nt, Homo Sapiens
gguggaguucccucuccaucuucacccacuuc

SEQ ID NO: 256078 - RNA, 32 nt, Homo Sapiens
agcaccuacugugugcuaggaacuugaaugug

SEQ ID NO: 256079 - RNA, 32 nt, Homo Sapiens
aguggaaccagcugccccugcuucacaccucu

SEQ ID NO: 256080 - RNA, 32 nt, Homo Sapiens
cggagaggggacugcggucagcugcguccacu

SEQ ID NO: 256081 - RNA, 32 nt, Homo Sapiens
uauuaaugaguaagugagauaauuauaacaug

SEQ ID NO: 256082 - RNA, 32 nt, Homo Sapiens
uuuagauagagacuuuagacccugcccugcag

SEQ ID NO: 256083 - RNA, 32 nt, Homo Sapiens
cuccaaucuucgcuccuccaaucuccgcuccu

SEQ ID NO: 256084 - RNA, 32 nt, Homo Sapiens
gccauccuuacggaguuuggcggccgcuucga

SEQ ID NO: 256085 - RNA, 32 nt, Homo Sapiens
aacaccuauccagcuucuggcuccugggaaaa

SEQ ID NO: 256086 - RNA, 32 nt, Homo Sapiens
ggaccaggguuuucuuuuuuuuuuuuuuuuuu

SEQ ID NO: 256087 - RNA, 32 nt, Homo Sapiens
uucacgccgggcgaaggacccggcgcugcgcu

SEQ ID NO: 256088 - RNA, 31 nt, Homo Sapiens
acaacgcgguggucccugccccacaaugcaa

SEQ ID NO: 256089 - RNA, 32 nt, Homo Sapiens
ccuguggcccuggccucagguccugcuggggu

SEQ ID NO: 256090 - RNA, 32 nt, Homo Sapiens
uauagaucuucauagacuaugaaaguauuuuu

SEQ ID NO: 256091 - RNA, 32 nt, Homo Sapiens
accucacuggucuguggacagcagcagaaaug

SEQ ID NO: 256092 - RNA, 32 nt, Homo Sapiens
cauagcaaaauaaagcacuugaaaggaaacaa

SEQ ID NO: 256093 - RNA, 32 nt, Homo Sapiens
gccuguuccucauagauggcaccaucuugugu

SEQ ID NO: 256094 - RNA, 32 nt, Homo Sapiens
gccgagccgagccgagccccagcuccagcaag

SEQ ID NO: 256095 - RNA, 32 nt, Homo Sapiens
ugguaaagaccgaguuagucuaucucucuuug

SEQ ID NO: 256096 - RNA, 32 nt, Homo Sapiens
gcaagcagcagccggagcugccaagcgucagg

SEQ ID NO: 256097 - RNA, 32 nt, Homo Sapiens
cauauucaccauaauuuuuuuauuuuuuaaua

SEQ ID NO: 256098 - RNA, 32 nt, Homo Sapiens
aaugaggaggcuuggcgugcugccgccauggc

SEQ ID NO: 256099 - RNA, 32 nt, Homo Sapiens
uaucuauugcaaaaagauauuucaaaccuaaa

SEQ ID NO: 256100 - RNA, 32 nt, Homo Sapiens
uugcggucaggaguucgagaucagccugacca

SEQ ID NO: 256101 - RNA, 32 nt, Homo Sapiens
ugagcacagauaaugucuuuuaauccaaaggu

SEQ ID NO: 256102 - RNA, 32 nt, Homo Sapiens
cagcaccccccuccccacaacuagggaaaagu

SEQ ID NO: 256103 - RNA, 32 nt, Homo Sapiens
uuccgggagcccagucuaacucgauucuuccc

SEQ ID NO: 256104 - RNA, 27 nt, Homo Sapiens
gccuuggccugugacagcccccaggcc

SEQ ID NO: 256105 - RNA, 32 nt, Homo Sapiens
aaauuagcugggugugguggugcaugccugug

SEQ ID NO: 256106 - RNA, 32 nt, Homo Sapiens
aaauuagcugggugugguggugcgugccugua

SEQ ID NO: 256107 - RNA, 32 nt, Homo Sapiens
uagauccaucagaccuuuuuccccucauuagg

SEQ ID NO: 256108 - RNA, 32 nt, Homo Sapiens
aacuagaggucauuauguucaaugaaauaugu

SEQ ID NO: 256109 - RNA, 28 nt, Homo Sapiens
cgggcggggcggccgccguauuuauuug

SEQ ID NO: 256110 - RNA, 32 nt, Homo Sapiens
cagaauggaagaaguucauagaugaacgauua

SEQ ID NO: 256111 - RNA, 32 nt, Homo Sapiens
gagcgcggaagagccagagcugcgagcgccug

SEQ ID NO: 256112 - RNA, 32 nt, Homo Sapiens
gggggugcagagcccaccuggguaccugaccc

SEQ ID NO: 256113 - RNA, 32 nt, Homo Sapiens
agggcucgggaucgaccggcccggggcgccga

SEQ ID NO: 256114 - RNA, 32 nt, Homo Sapiens
gccaaacagcccaaugugcgauucuugccaac

SEQ ID NO: 256115 - RNA, 32 nt, Homo Sapiens
acaaauuggcuaagaaucauggcucuguagcc

SEQ ID NO: 256116 - RNA, 32 nt, Homo Sapiens
agccggcagcggcgcgggaggccgugcggcac

SEQ ID NO: 256117 - RNA, 32 nt, Homo Sapiens
ggaccuggagccgcugugcgccgcccgcgaga

SEQ ID NO: 256118 - RNA, 32 nt, Homo Sapiens
acaccgugcgcugcuccgcguccaggcccgcg

SEQ ID NO: 256119 - RNA, 32 nt, Homo Sapiens
acauacauauauauacuauauauggaugaaac

SEQ ID NO: 256120 - RNA, 32 nt, Homo Sapiens
agacaugauggggggugcagggggcugugggc

SEQ ID NO: 256121 - RNA, 32 nt, Homo Sapiens
uccuggagaagaauucuugcccuccccucucu

SEQ ID NO: 256122 - RNA, 32 nt, Homo Sapiens
agaaagaugcuguuuugcacuaucuugauuug

SEQ ID NO: 256123 - RNA, 32 nt, Homo Sapiens
ugccaccccuucccucccuccgcagcacaaga

SEQ ID NO: 256124 - RNA, 31 nt, Homo Sapiens
ucccagcugccggugugaccaagaugaccca

SEQ ID NO: 256125 - RNA, 32 nt, Homo Sapiens
uugccgggaaccugcucugugcugggaaccug

SEQ ID NO: 256126 - RNA, 32 nt, Homo Sapiens
gccacugcauuccacagccuguagaaguccuc

SEQ ID NO: 256127 - RNA, 32 nt, Homo Sapiens
guacuuugcaguuaacagugauauuuugaagg

SEQ ID NO: 256128 - RNA, 32 nt, Homo Sapiens
acuaaauaaugaaucugcaauguuguugagug

SEQ ID NO: 256129 - RNA, 32 nt, Homo Sapiens
aauaauaaugacgauaauacuucuuuuccaca

SEQ ID NO: 256130 - RNA, 32 nt, Homo Sapiens
uuuuuuuuucuuucauuuuuuauuuaauuucu

SEQ ID NO: 256131 - RNA, 32 nt, Homo Sapiens
ggugacuggcaggcccgggccccacgguaccu

SEQ ID NO: 256132 - RNA, 32 nt, Homo Sapiens
cucccucacccugcuccccacccaggcagggc

SEQ ID NO: 256133 - RNA, 32 nt, Homo Sapiens
uuuauuagucccugccagcagcuguccucccu

SEQ ID NO: 256134 - RNA, 32 nt, Homo Sapiens
gguuaccauuuucuuuuugucauuggcuuagg

SEQ ID NO: 256135 - RNA, 32 nt, Homo Sapiens
ccagagagucccggacgccgccggucggugcc

SEQ ID NO: 256136 - RNA, 32 nt, Homo Sapiens
uuucccccacuacugcagcaccuccaggccug

SEQ ID NO: 256137 - RNA, 32 nt, Homo Sapiens
auuccuuggggucagauuuuuaaaguuacuuu

SEQ ID NO: 256138 - RNA, 32 nt, Homo Sapiens
gccuauacagcuucugucucaauagggucaga

SEQ ID NO: 256139 - RNA, 32 nt, Homo Sapiens
aggacccccaguccugccccccaggagcacaa

SEQ ID NO: 256140 - RNA, 32 nt, Homo Sapiens
auuguugagagaaaagccuucccaguuaugua

SEQ ID NO: 256141 - RNA, 32 nt, Homo Sapiens
uuauagugguggcuggcaagaaggaagcaguu

SEQ ID NO: 256142 - RNA, 32 nt, Homo Sapiens
gcaccgaucgccggagggacagacacacgacc

SEQ ID NO: 256143 - RNA, 32 nt, Homo Sapiens
aggggggaauugucagaggcauuugaaucaaa

SEQ ID NO: 256144 - RNA, 32 nt, Homo Sapiens
ccaguugccuaauggucacuuucugacuccag

SEQ ID NO: 256145 - RNA, 32 nt, Homo Sapiens
ggcuccacccccaccccucccccuucuagcca

SEQ ID NO: 256146 - RNA, 32 nt, Homo Sapiens
agcagaugauucgagcagcauuuguuucuccc

SEQ ID NO: 256147 - RNA, 28 nt, Homo Sapiens
gccauggagcagccuguguuccugauga

SEQ ID NO: 256148 - RNA, 30 nt, Homo Sapiens
cccggagaggaccgcgaugaguccacuuca

SEQ ID NO: 256149 - RNA, 32 nt, Homo Sapiens
augcuuccugaauaaaaaggagccaaaguuga

SEQ ID NO: 256150 - RNA, 31 nt, Homo Sapiens
caccguaucuguucuauccucaucuaaauac

SEQ ID NO: 256151 - RNA, 32 nt, Homo Sapiens
agagauggucuaaaucagcugcaucccauuug

SEQ ID NO: 256152 - RNA, 32 nt, Homo Sapiens
gacugcccaaccuggugaguggcggggcggcc

SEQ ID NO: 256153 - RNA, 32 nt, Homo Sapiens
aacauccuuuggggguaaaugauucuuaggug

SEQ ID NO: 256154 - RNA, 32 nt, Homo Sapiens
agccucauucuauuuaacuuugcucucagaug

SEQ ID NO: 256155 - RNA, 32 nt, Homo Sapiens
gaaugaaauuuucaaaguacuagaucaccuua

SEQ ID NO: 256156 - RNA, 32 nt, Homo Sapiens
gaggcuuuguuauaaggcaacccccgguauau

SEQ ID NO: 256157 - RNA, 32 nt, Homo Sapiens
caccccgcggcgugaucccugcucuuaggugc

SEQ ID NO: 256158 - RNA, 32 nt, Homo Sapiens
ugaaaugcuccaucaugaagacuugcuucccc

SEQ ID NO: 256159 - RNA, 32 nt, Homo Sapiens
cccacggcucugcaggaucagggcucgggcag

SEQ ID NO: 256160 - RNA, 32 nt, Homo Sapiens
ucaccccggccgcccuggcaucggggcugaag

SEQ ID NO: 256161 - RNA, 32 nt, Homo Sapiens
uggauaaacugggaaaaauggggucucuuggg

SEQ ID NO: 256162 - RNA, 32 nt, Homo Sapiens
cgcgagucccgcagccgccgcgcccgggcaau

SEQ ID NO: 256163 - RNA, 32 nt, Homo Sapiens
ucauuugccuuuugcaccuuuccugaugcuuc

SEQ ID NO: 256164 - RNA, 32 nt, Homo Sapiens
ccugccaugcucuccaaaccacuuuuugcagc

SEQ ID NO: 256165 - RNA, 32 nt, Homo Sapiens
aucuuauuauaccagcaguuuuauuuauucaa

SEQ ID NO: 256166 - RNA, 32 nt, Homo Sapiens
ggcagcacucugugguggucagcccucagagc

SEQ ID NO: 256167 - RNA, 32 nt, Homo Sapiens
uuguuaggccgucccggagacccggucgggag

SEQ ID NO: 256168 - RNA, 32 nt, Homo Sapiens
ggcacguuucaggcaggauuccuccuucauuc

SEQ ID NO: 256169 - RNA, 32 nt, Homo Sapiens
aagagggagggaaggcagagcaaccaaucaag

SEQ ID NO: 256170 - RNA, 32 nt, Homo Sapiens
aaaaagucuaugugcaaguaucaggucccaug

SEQ ID NO: 256171 - RNA, 32 nt, Homo Sapiens
auuuuuuuuucuucuuuuccuuugugagcuga

SEQ ID NO: 256172 - RNA, 32 nt, Homo Sapiens
agagcgucuaaccagacuaauguugcugauug

SEQ ID NO: 256173 - RNA, 32 nt, Homo Sapiens
aaaaggccugaaggagaaggguggagugagau

SEQ ID NO: 256174 - RNA, 32 nt, Homo Sapiens
agggggcuggugggguggaggaugcugagugg

SEQ ID NO: 256175 - RNA, 32 nt, Homo Sapiens
ugguaaaaacaaaauaaauagaugaauaaaua

SEQ ID NO: 256176 - RNA, 31 nt, Homo Sapiens
ggcacgaggcccugccugccccgggcggcca

SEQ ID NO: 256177 - RNA, 32 nt, Homo Sapiens
cugcaucucugcccaaugccacuuccucgcaa

SEQ ID NO: 256178 - RNA, 32 nt, Homo Sapiens
ugcugugagcgcggagucgcggcggguagggc

SEQ ID NO: 256179 - RNA, 32 nt, Homo Sapiens
gcauguguuccccagcacauuacccaggccag

SEQ ID NO: 256180 - RNA, 32 nt, Homo Sapiens
ccuguguguucuugauuguuccaauuaucauu

SEQ ID NO: 256181 - RNA, 32 nt, Homo Sapiens
cggccucgggcacaacuuucugcccagaaaaa

SEQ ID NO: 256182 - RNA, 32 nt, Homo Sapiens
ccagauccgggccccaggcugcugccgcuuuu

SEQ ID NO: 256183 - RNA, 27 nt, Homo Sapiens
caauguugccugaguucucuucugcau

SEQ ID NO: 256184 - RNA, 32 nt, Homo Sapiens
cccgcggaugcuuuuccaucccaagugccugc

SEQ ID NO: 256185 - RNA, 32 nt, Homo Sapiens
ugagccuuucccuuuccuaaaacuucuaacaa

SEQ ID NO: 256186 - RNA, 30 nt, Homo Sapiens
ggacagcccugcucuuaguaggugcugcag

SEQ ID NO: 256187 - RNA, 32 nt, Homo Sapiens
uggcaaaguuacuacuggaaaaacacuauaag

SEQ ID NO: 256188 - RNA, 31 nt, Homo Sapiens
aggcuggagccccaggugcaguggcucuugu

SEQ ID NO: 256189 - RNA, 32 nt, Homo Sapiens
ucagguggccccaguucaaucucccgcugcug

SEQ ID NO: 256190 - RNA, 32 nt, Homo Sapiens
gccaagagggccgagaguaucucagcaccuag

SEQ ID NO: 256191 - RNA, 32 nt, Homo Sapiens
uacccuguuaagucaaaauuuauuuuccagga

SEQ ID NO: 256192 - RNA, 32 nt, Homo Sapiens
ccaucauuguacuaacagaagucuguacuauu

SEQ ID NO: 256193 - RNA, 32 nt, Homo Sapiens
agcguuuuuuaaauugucuuauaucuuugcuu

SEQ ID NO: 256194 - RNA, 32 nt, Homo Sapiens
ccaaagaauaagugucuuucugguguuuuauu

SEQ ID NO: 256195 - RNA, 32 nt, Homo Sapiens
acuuagcagcagcagaguaagccuccaaaaag

SEQ ID NO: 256196 - RNA, 32 nt, Homo Sapiens
agaggaugagaggaagguguuaguuccaucag

SEQ ID NO: 256197 - RNA, 32 nt, Homo Sapiens
ucccucaacaagcucacccccaaucccuugca

SEQ ID NO: 256198 - RNA, 32 nt, Homo Sapiens
aagcaauuaggauauaacaaaacuacuuaacc

SEQ ID NO: 256199 - RNA, 32 nt, Homo Sapiens
cgcgcaaggccuuuccaguccugggcaucgac

SEQ ID NO: 256200 - RNA, 32 nt, Homo Sapiens
uaggacgacuauaguuaagaacauuauauucc

SEQ ID NO: 256201 - RNA, 32 nt, Homo Sapiens
ugauucuaaaagacuaugcaauuaaaaccgca

SEQ ID NO: 256202 - RNA, 29 nt, Homo Sapiens
guagcuucuauccccaaaggcaaagaaac

SEQ ID NO: 256203 - RNA, 32 nt, Homo Sapiens
gugcuuggccgucccugccauuagcgcguaac

SEQ ID NO: 256204 - RNA, 32 nt, Homo Sapiens
uguucugaauuuccuuuucuuggcuuguuucu

SEQ ID NO: 256205 - RNA, 32 nt, Homo Sapiens
ucacacccagccgccucuuccuccucccuucg

SEQ ID NO: 256206 - RNA, 32 nt, Homo Sapiens
cccgcgaaccccgcucgcugccggcugcccag

SEQ ID NO: 256207 - RNA, 31 nt, Homo Sapiens
ggagcgcgcggcugccugcguccauggucua

SEQ ID NO: 256208 - RNA, 32 nt, Homo Sapiens
ccuuuucucguuagccuccucuugcccugauu

SEQ ID NO: 256209 - RNA, 32 nt, Homo Sapiens
cgggcgcauccucauugcagugcggcggcccu

SEQ ID NO: 256210 - RNA, 32 nt, Homo Sapiens
ucuguuuuaagggguauguuguaaucuaaagu

SEQ ID NO: 256211 - RNA, 32 nt, Homo Sapiens
gggagcugggcuuggguccagcugcuccaggu

SEQ ID NO: 256212 - RNA, 32 nt, Homo Sapiens
gggaaaugggagcacaguacugggaaauggga

SEQ ID NO: 256213 - RNA, 32 nt, Homo Sapiens
gucuugcccuuuggccaacagauuucuugucc

SEQ ID NO: 256214 - RNA, 32 nt, Homo Sapiens
cuguggggguccgugugagcaggcccaccugg

SEQ ID NO: 256215 - RNA, 32 nt, Homo Sapiens
auauaaaaugguucugauuuauuuucagccag

SEQ ID NO: 256216 - RNA, 32 nt, Homo Sapiens
cuucugggccccacagucugggccuuggguau

SEQ ID NO: 256217 - RNA, 32 nt, Homo Sapiens
aucauuugaaugccuggggucugccuccgccu

SEQ ID NO: 256218 - RNA, 32 nt, Homo Sapiens
uacuguagguguuaugagaggacccauagggu

SEQ ID NO: 256219 - RNA, 32 nt, Homo Sapiens
auuacgggugugagccgccgcgccgagcaugg

SEQ ID NO: 256220 - RNA, 32 nt, Homo Sapiens
uauggaaaaugggaaggugauugaguuugaca

SEQ ID NO: 256221 - RNA, 32 nt, Homo Sapiens
ucugugcauccacugugccgugggacauaugu

SEQ ID NO: 256222 - RNA, 32 nt, Homo Sapiens
auuaaaguaaaauuauucccugaauuguuuga

SEQ ID NO: 256223 - RNA, 32 nt, Homo Sapiens
cgagucccgaccccugcccccgcagccugccu

SEQ ID NO: 256224 - RNA, 32 nt, Homo Sapiens
agaauuuaaaauguguuaccuuagaaauaaug

SEQ ID NO: 256225 - RNA, 28 nt, Homo Sapiens
ggccgggccgccgcuccgaggugaaggc

SEQ ID NO: 256226 - RNA, 32 nt, Homo Sapiens
gagccucagcauggcuggcagcgcggcugaca

SEQ ID NO: 256227 - RNA, 27 nt, Homo Sapiens
uguaccuggcccuucagccccuaugug

SEQ ID NO: 256228 - RNA, 32 nt, Homo Sapiens
ggucaggcugcuuuuucuucauugcuuggauu

SEQ ID NO: 256229 - RNA, 32 nt, Homo Sapiens
uacauuuauuaaucaauugcuacauguacuaa

SEQ ID NO: 256230 - RNA, 32 nt, Homo Sapiens
cagcuucccuccagccucuccuccauucccua

SEQ ID NO: 256231 - RNA, 32 nt, Homo Sapiens
caaguccuugaacuuuguuccucccccacaau

SEQ ID NO: 256232 - RNA, 32 nt, Homo Sapiens
cgcgucugcuggacgcgggagacgccagcgag

SEQ ID NO: 256233 - RNA, 28 nt, Homo Sapiens
uucuaaguuacaggcagagugggacuga

SEQ ID NO: 256234 - RNA, 32 nt, Homo Sapiens
cuacaucugccuguguacacacacaacuuuuu

SEQ ID NO: 256235 - RNA, 32 nt, Homo Sapiens
gccuuuguucugaaguguccaggccggccuug

SEQ ID NO: 256236 - RNA, 32 nt, Homo Sapiens
gccugcggaggccagcagcagccagauugcca

SEQ ID NO: 256237 - RNA, 29 nt, Homo Sapiens
uuggcuaccuaggccuggccugcaugggc

SEQ ID NO: 256238 - RNA, 32 nt, Homo Sapiens
uuugcagaaguacccagaacuguguccaaggu

SEQ ID NO: 256239 - RNA, 32 nt, Homo Sapiens
caucucugacagagcgggacagaauggauauu

SEQ ID NO: 256240 - RNA, 32 nt, Homo Sapiens
uugcauuuaauuccuuuuauuuggaggguuuu

SEQ ID NO: 256241 - RNA, 32 nt, Homo Sapiens
caggcccccuccccaucccacccccgccgccu

SEQ ID NO: 256242 - RNA, 32 nt, Homo Sapiens
ggugauucuaguuaaucugggauuagggucag

SEQ ID NO: 256243 - RNA, 32 nt, Homo Sapiens
caguggaggccgagagaucuggaaucgggguc

SEQ ID NO: 256244 - RNA, 32 nt, Homo Sapiens
aacuggucauauaugacagucuacugcauaaa

SEQ ID NO: 256245 - RNA, 32 nt, Homo Sapiens
caccaggccucccuccuccccuccuacucccu

SEQ ID NO: 256246 - RNA, 32 nt, Homo Sapiens
cuucaaaaauacugagacaugggcaggaucaa

SEQ ID NO: 256247 - RNA, 32 nt, Homo Sapiens
cuuccaaguauuuuucuaauguuuugcauuuc

SEQ ID NO: 256248 - RNA, 32 nt, Homo Sapiens
ccuucccacuuccuuccaggaccuccauuggc

SEQ ID NO: 256249 - RNA, 32 nt, Homo Sapiens
accagcgccuccccgcuucgcgcugcccucgg

SEQ ID NO: 256250 - RNA, 32 nt, Homo Sapiens
uuucuuugcaggaggagaagagaaggggugca

SEQ ID NO: 256251 - RNA, 32 nt, Homo Sapiens
acuuggucucaaaaaauaaauaaaauaaaaua

SEQ ID NO: 256252 - RNA, 28 nt, Homo Sapiens
gccauggcucugcggaggcugggggccg

SEQ ID NO: 256253 - RNA, 32 nt, Homo Sapiens
aaccaaaugcuguuuaugauacaguuuaguag

SEQ ID NO: 256254 - RNA, 32 nt, Homo Sapiens
auaaaguauuaccuuuuggaauuaaaagccac

SEQ ID NO: 256255 - RNA, 32 nt, Homo Sapiens
auaccgaaaccagucgucuuuacugugcugcc

SEQ ID NO: 256256 - RNA, 32 nt, Homo Sapiens
auugucuguaauaguuuuauauuguuuuauau

SEQ ID NO: 256257 - RNA, 32 nt, Homo Sapiens
gcgcgcacucccuguuucuccuccuccuggcu

SEQ ID NO: 256258 - RNA, 32 nt, Homo Sapiens
ucuuauuuauugauuuuaaaaguuuuacaugu

SEQ ID NO: 256259 - RNA, 32 nt, Homo Sapiens
cucuuguauguacauauaaaaauaaauuuugc

SEQ ID NO: 256260 - RNA, 32 nt, Homo Sapiens
aauaauguucuucccacaaauaaucaugcuuu

SEQ ID NO: 256261 - RNA, 32 nt, Homo Sapiens
cucaguuggacuccauagcagaugaaauggag

SEQ ID NO: 256262 - RNA, 32 nt, Homo Sapiens
uauuugcauacuuaugcaauaagauaaaggua

SEQ ID NO: 256263 - RNA, 32 nt, Homo Sapiens
aggcugugggugcaggggacaccuguggaggg

SEQ ID NO: 256264 - RNA, 28 nt, Homo Sapiens
cuccgcacaccuguggugccugccaccc

SEQ ID NO: 256265 - RNA, 27 nt, Homo Sapiens
uuccaauaaagucuuugaauuaauguc

SEQ ID NO: 256266 - RNA, 32 nt, Homo Sapiens
ucaccucggggggcugcccucaaugugggagu

SEQ ID NO: 256267 - RNA, 32 nt, Homo Sapiens
gggcgccuuccgaaagcccucuggauugaggc

SEQ ID NO: 256268 - RNA, 32 nt, Homo Sapiens
cauguaauuuuuaaguuuuauuuuaaugaauu

SEQ ID NO: 256269 - RNA, 32 nt, Homo Sapiens
ugugcuucaugacccguuguacagacggagga

SEQ ID NO: 256270 - RNA, 32 nt, Homo Sapiens
guuucaacugaauuuguaauuaacucugaauu

SEQ ID NO: 256271 - RNA, 32 nt, Homo Sapiens
ccgugaguugagauuggaccacugcucuccag

SEQ ID NO: 256272 - RNA, 32 nt, Homo Sapiens
auuugcauuuuagccgcacccccugagccguc

SEQ ID NO: 256273 - RNA, 32 nt, Homo Sapiens
auaguuggagggcauggagggaaucaaagugu

SEQ ID NO: 256274 - RNA, 32 nt, Homo Sapiens
aucuggcugggaugugaagggcagcacucccu

SEQ ID NO: 256275 - RNA, 32 nt, Homo Sapiens
cucuaucacacacacacacacacacacacaca

SEQ ID NO: 256276 - RNA, 32 nt, Homo Sapiens
cucaaguugcugucugguugucgucuaaaaag

SEQ ID NO: 256277 - RNA, 32 nt, Homo Sapiens
gccagcuugcagaggagcaagcuaguagaaau

SEQ ID NO: 256278 - RNA, 32 nt, Homo Sapiens
aauaucacaacaaccuagggaggaggugcuac

SEQ ID NO: 256279 - RNA, 32 nt, Homo Sapiens
gucccggcagagggcgcgcggucgcccugucg

SEQ ID NO: 256280 - RNA, 32 nt, Homo Sapiens
ucucaaauugccugacaugaagaggagucuaa

SEQ ID NO: 256281 - RNA, 32 nt, Homo Sapiens
cucgcccaggggaagggcgcgcaggcgggcac

SEQ ID NO: 256282 - RNA, 32 nt, Homo Sapiens
ucagacgagacacccuaacucuugcucacucc

SEQ ID NO: 256283 - RNA, 32 nt, Homo Sapiens
gucgguccaggacgaggcgggcaugcggcugu

SEQ ID NO: 256284 - RNA, 32 nt, Homo Sapiens
cggcaugggcgucucccgcgggcccuccgccg

SEQ ID NO: 256285 - RNA, 32 nt, Homo Sapiens
cucuguuggagcuguaagcagaugaacccaag

SEQ ID NO: 256286 - RNA, 32 nt, Homo Sapiens
cuuuuaucauauuuauacugcuguccaaucuu

SEQ ID NO: 256287 - RNA, 32 nt, Homo Sapiens
cguuccaguggcggcacguccuuggcgucucu

SEQ ID NO: 256288 - RNA, 32 nt, Homo Sapiens
cuccucccucuuuuccucuggaugcacucuga

SEQ ID NO: 256289 - RNA, 30 nt, Homo Sapiens
agccuggagaagcugaugcuuugcuucaaa

SEQ ID NO: 256290 - RNA, 32 nt, Homo Sapiens
aaugggggcuccuuggggccagcccagugugg

SEQ ID NO: 256291 - RNA, 32 nt, Homo Sapiens
uuggccuguugcuucuagggguugccugugcu

SEQ ID NO: 256292 - RNA, 32 nt, Homo Sapiens
uugauuuaauuuggucacuagaaaugcggcau

SEQ ID NO: 256293 - RNA, 32 nt, Homo Sapiens
aagaacaaaauauauauaacauacuacuugga

SEQ ID NO: 256294 - RNA, 32 nt, Homo Sapiens
ccaccgcgcgcccggucgugcuaaucacuuug

SEQ ID NO: 256295 - RNA, 32 nt, Homo Sapiens
caguauacugauuugguauuuauuuaaaaauu

SEQ ID NO: 256296 - RNA, 32 nt, Homo Sapiens
uuguuuggcuuaaaaaucacuaaaacgcagcc

SEQ ID NO: 256297 - RNA, 32 nt, Homo Sapiens
uuggggagaucuugagaguccugaagcaggca

SEQ ID NO: 256298 - RNA, 32 nt, Homo Sapiens
ggcuggcugcagugacgugcaccuguacucag

SEQ ID NO: 256299 - RNA, 32 nt, Homo Sapiens
auacaauugcaaaagaugaguuuaaaaaauua

SEQ ID NO: 256300 - RNA, 32 nt, Homo Sapiens
ccaggcugucucgaacuccuaacaucaggcga

SEQ ID NO: 256301 - RNA, 32 nt, Homo Sapiens
cuaggagcugguggugcuccucauggaaccuu

SEQ ID NO: 256302 - RNA, 32 nt, Homo Sapiens
agcuggucaguuacuggaguacauguuacuaa

SEQ ID NO: 256303 - RNA, 32 nt, Homo Sapiens
ggauggaaagacuaggagagccugggauccuc

SEQ ID NO: 256304 - RNA, 30 nt, Homo Sapiens
accccgaauaucccaucucagcccugucuc

SEQ ID NO: 256305 - RNA, 32 nt, Homo Sapiens
ucucucuuuccacaguacaaacauccauccuu

SEQ ID NO: 256306 - RNA, 32 nt, Homo Sapiens
ccaucccaccaccuuggagcugucauagagau

SEQ ID NO: 256307 - RNA, 32 nt, Homo Sapiens
uuuuuuaaaaauuuguuguaaacugcauguuu

SEQ ID NO: 256308 - RNA, 32 nt, Homo Sapiens
ccaggcacguggguuguuuucucccuggacuu

SEQ ID NO: 256309 - RNA, 32 nt, Homo Sapiens
cuggcgcucagcucccucuggcggccgggcug

SEQ ID NO: 256310 - RNA, 32 nt, Homo Sapiens
ugagaguauauaguccaguccagguaccggaa

SEQ ID NO: 256311 - RNA, 32 nt, Homo Sapiens
ucaaaauuccgucuucaagaagaaacacccgu

SEQ ID NO: 256312 - RNA, 32 nt, Homo Sapiens
ugggggauugguccguguggugaugugucuca

SEQ ID NO: 256313 - RNA, 32 nt, Homo Sapiens
gggugagugagauaaccaaugccaaacuuuuu

SEQ ID NO: 256314 - RNA, 32 nt, Homo Sapiens
gggagguugaggcggaggagcgcgcguucggg

SEQ ID NO: 256315 - RNA, 32 nt, Homo Sapiens
gccccccagggccaccgcuucuuucuugaucc

SEQ ID NO: 256316 - RNA, 32 nt, Homo Sapiens
acagcggcuggauggcagacaaaccuaugauu

SEQ ID NO: 256317 - RNA, 32 nt, Homo Sapiens
ccucaauccuucaauaaaauguuuccagagcc

SEQ ID NO: 256318 - RNA, 32 nt, Homo Sapiens
ucccuuccccagaucugcuccuccccuuucac

SEQ ID NO: 256319 - RNA, 32 nt, Homo Sapiens
cguccucgguccccagggcgcagcuguugggg

SEQ ID NO: 256320 - RNA, 32 nt, Homo Sapiens
ugguucaagaagcaccucaaaggucuucaccu

SEQ ID NO: 256321 - RNA, 32 nt, Homo Sapiens
ccuugaaucacagauaguuggagaugaaaagg

SEQ ID NO: 256322 - RNA, 32 nt, Homo Sapiens
ccuuugcucuguuuuucucuucaggcucugga

SEQ ID NO: 256323 - RNA, 30 nt, Homo Sapiens
cuuuccugggucugcaucccagugggccuc

SEQ ID NO: 256324 - RNA, 32 nt, Homo Sapiens
accaccaaaaauacuauggagagcuacacugc

SEQ ID NO: 256325 - RNA, 32 nt, Homo Sapiens
cccggcccgggcggcgcgacgggaggaugagc

SEQ ID NO: 256326 - RNA, 32 nt, Homo Sapiens
cgcgccuccgcggggguggguguccggcagcc

SEQ ID NO: 256327 - RNA, 32 nt, Homo Sapiens
agacucugaugaugauuaagcucaauaauucu

SEQ ID NO: 256328 - RNA, 32 nt, Homo Sapiens
cacaaagacccuaucucugagcgcugcagccu

SEQ ID NO: 256329 - RNA, 32 nt, Homo Sapiens
augaucccaacacuucaucauccaccaccucc

SEQ ID NO: 256330 - RNA, 32 nt, Homo Sapiens
ugacagucaugcgacaucuacauccgcaucaa

SEQ ID NO: 256331 - RNA, 32 nt, Homo Sapiens
gcagauacccugacuagccagcccucuacucc

SEQ ID NO: 256332 - RNA, 32 nt, Homo Sapiens
ccgcuuuugucaacuauccucugggcaaaggu

SEQ ID NO: 256333 - RNA, 32 nt, Homo Sapiens
ugggaagacagagugcagaaauaagcaugaag

SEQ ID NO: 256334 - RNA, 32 nt, Homo Sapiens
gucagaacagagccuuugauuuuuauuauggu

SEQ ID NO: 256335 - RNA, 30 nt, Homo Sapiens
cuaccuuuggacugccuuccuugggggucu

SEQ ID NO: 256336 - RNA, 32 nt, Homo Sapiens
uagcccagagggugggagccuaaggaagcgug

SEQ ID NO: 256337 - RNA, 32 nt, Homo Sapiens
uucugaaguuauauuuccuauaccauuuccgu

SEQ ID NO: 256338 - RNA, 32 nt, Homo Sapiens
aguuuugcaaaauaaaauuaauuuuguaagua

SEQ ID NO: 256339 - RNA, 32 nt, Homo Sapiens
uaucggcaacuaaaagucuaugcacauccuca

SEQ ID NO: 256340 - RNA, 32 nt, Homo Sapiens
acacagggcuggggcucugugcccccaacuca

SEQ ID NO: 256341 - RNA, 32 nt, Homo Sapiens
gucugucgugcaccgaugagaacucuccuuau

SEQ ID NO: 256342 - RNA, 32 nt, Homo Sapiens
uaauguauguaggagcugcaguucuuguggaa

SEQ ID NO: 256343 - RNA, 32 nt, Homo Sapiens
gagggcgggccagggggcgcacacggggguug

SEQ ID NO: 256344 - RNA, 32 nt, Homo Sapiens
uuuacauguaauggaaacaugaaaaaguuuua

SEQ ID NO: 256345 - RNA, 32 nt, Homo Sapiens
gguaguaaucuggggguucagauggguagcac

SEQ ID NO: 256346 - RNA, 32 nt, Homo Sapiens
augccauauuucuuuuucagguaaauguaguc

SEQ ID NO: 256347 - RNA, 32 nt, Homo Sapiens
cucgcagccauggcggccgccgcgcucccagc

SEQ ID NO: 256348 - RNA, 32 nt, Homo Sapiens
cacugcaacuucugccacccagguucaagcaa

SEQ ID NO: 256349 - RNA, 32 nt, Homo Sapiens
gcuccagcugccuuaggaggagucacagcaua

SEQ ID NO: 256350 - RNA, 32 nt, Homo Sapiens
cccgggcagcaugaagaccgccgagaacauca

SEQ ID NO: 256351 - RNA, 32 nt, Homo Sapiens
ugguaggcagaaggaaauacuuggcagcaaag

SEQ ID NO: 256352 - RNA, 32 nt, Homo Sapiens
gagggaacacugggguuuaggaccacaacuca

SEQ ID NO: 256353 - RNA, 32 nt, Homo Sapiens
ccuaauucaucaacguaacaaacaaagcuauu

SEQ ID NO: 256354 - RNA, 32 nt, Homo Sapiens
gcuuucauuuuuccagauggcuucagaaguag

SEQ ID NO: 256355 - RNA, 32 nt, Homo Sapiens
aaggcauauuggaaugaucuaucccucugaaa

SEQ ID NO: 256356 - RNA, 32 nt, Homo Sapiens
gcucuccccccuccccgacacacacucacagg

SEQ ID NO: 256357 - RNA, 32 nt, Homo Sapiens
cauccugagcagccucuuuucuaggaucaaua

SEQ ID NO: 256358 - RNA, 32 nt, Homo Sapiens
uaaauacuaaaauaaacuaugaaugaaucuca

SEQ ID NO: 256359 - RNA, 32 nt, Homo Sapiens
agcagguucuggcggcagcgccgggucugcug

SEQ ID NO: 256360 - RNA, 32 nt, Homo Sapiens
cgggaugcagagagaccccuagcuccucgcga

SEQ ID NO: 256361 - RNA, 32 nt, Homo Sapiens
cugaggcggaaucgcggcuggcggcgggggga

SEQ ID NO: 256362 - RNA, 31 nt, Homo Sapiens
uugguguguaacauuagugggugcucaggaa

SEQ ID NO: 256363 - RNA, 32 nt, Homo Sapiens
ggauaaguguuucaaggcaaccuuuucugcac

SEQ ID NO: 256364 - RNA, 32 nt, Homo Sapiens
auauuauuugacucuaucaaaagucucuccuu

SEQ ID NO: 256365 - RNA, 32 nt, Homo Sapiens
acacccugguuuggagcugggaggaagaaggg

SEQ ID NO: 256366 - RNA, 32 nt, Homo Sapiens
caucgcaggccugggaggaaagugggcgcaga

SEQ ID NO: 256367 - RNA, 32 nt, Homo Sapiens
acugugagcaggauccuggggccgaggcugca

SEQ ID NO: 256368 - RNA, 32 nt, Homo Sapiens
aauacauuacgaugaaguggaaagagcaaaca

SEQ ID NO: 256369 - RNA, 32 nt, Homo Sapiens
aaaaacuaaugugaguuuaauuuuaaaaccuu

SEQ ID NO: 256370 - RNA, 32 nt, Homo Sapiens
aacuucuuuucucuucuacauugacacacaga

SEQ ID NO: 256371 - RNA, 32 nt, Homo Sapiens
guguucuuaagugaaugaaauuuucaaaguac

SEQ ID NO: 256372 - RNA, 32 nt, Homo Sapiens
ggaaagugggagaggacugagagugaggcaag

SEQ ID NO: 256373 - RNA, 27 nt, Homo Sapiens
gucuauuuauucuucagcuugcccuua

SEQ ID NO: 256374 - RNA, 32 nt, Homo Sapiens
uucaaucacugucauuauucuaauccuacucc

SEQ ID NO: 256375 - RNA, 32 nt, Homo Sapiens
uuuugccaaaagacaaaaaaaaaaaaaaaaaa

SEQ ID NO: 256376 - RNA, 31 nt, Homo Sapiens
gcgcggucgggccccuucgucaggagacgcg

SEQ ID NO: 256377 - RNA, 32 nt, Homo Sapiens
agugaguccuuaccgccucccuacccagcggc

SEQ ID NO: 256378 - RNA, 32 nt, Homo Sapiens
acuauagaucauaguuauuauacaaugguagu

SEQ ID NO: 256379 - RNA, 32 nt, Homo Sapiens
agccacccuucccacucccccaucguggggca

SEQ ID NO: 256380 - RNA, 32 nt, Homo Sapiens
ccuuggaaccccuguuugaugagacauuugaa

SEQ ID NO: 256381 - RNA, 27 nt, Homo Sapiens
cucaauuccuucuucaacgccaucucc

SEQ ID NO: 256382 - RNA, 31 nt, Homo Sapiens
gcugugggugcaguggcgccaagggcucuug

SEQ ID NO: 256383 - RNA, 32 nt, Homo Sapiens
cauuugggggcaaaugucuuaugauuugauua

SEQ ID NO: 256384 - RNA, 32 nt, Homo Sapiens
uuacauguuuuaaaauauauggagcuuucuug

SEQ ID NO: 256385 - RNA, 32 nt, Homo Sapiens
cucgacgugggcccgcagagccggggacagag

SEQ ID NO: 256386 - RNA, 32 nt, Homo Sapiens
gaggccagcgcugaacgucuccagggccggag

SEQ ID NO: 256387 - RNA, 32 nt, Homo Sapiens
uuugaaauaaugaaugcauugaaaauagcauu

SEQ ID NO: 256388 - RNA, 32 nt, Homo Sapiens
guaguuauuaaacauucuguggauauuuguga

SEQ ID NO: 256389 - RNA, 32 nt, Homo Sapiens
uaccgaauccugaaaccauggugggauguguu

SEQ ID NO: 256390 - RNA, 32 nt, Homo Sapiens
cgugagauaagcacgugccauuagcuauuaag

SEQ ID NO: 256391 - RNA, 32 nt, Homo Sapiens
agccgcugaagaggagcugggcgccggccgcc

SEQ ID NO: 256392 - RNA, 32 nt, Homo Sapiens
gucgcccagacaauggagacauccucuccucu

SEQ ID NO: 256393 - RNA, 32 nt, Homo Sapiens
gccgccccgagcuccccaagccuucgagagcg

SEQ ID NO: 256394 - RNA, 32 nt, Homo Sapiens
gcagagugggaagcuuccugggggaccucagc

SEQ ID NO: 256395 - RNA, 32 nt, Homo Sapiens
auggggaaguuccagcugagcagagcccucca

SEQ ID NO: 256396 - RNA, 32 nt, Homo Sapiens
uuuccugcagcgcgugcgugcugcgcuacuga

SEQ ID NO: 256397 - RNA, 32 nt, Homo Sapiens
gguguagcacaccagcauggcacauguauaca

SEQ ID NO: 256398 - RNA, 31 nt, Homo Sapiens
gaauuaucaguggcuuugccacuaguaaaug

SEQ ID NO: 256399 - RNA, 32 nt, Homo Sapiens
cuucucccucuucuuuguaacuaacaaaacca

SEQ ID NO: 256400 - RNA, 32 nt, Homo Sapiens
ccacaauuuuaaaagaugcaguaaucuuccaa

SEQ ID NO: 256401 - RNA, 32 nt, Homo Sapiens
cuuuaaguccuacagcacuuugcccuguuuuc

SEQ ID NO: 256402 - RNA, 32 nt, Homo Sapiens
agguuacuguccccggcgcguccucuguugcc

SEQ ID NO: 256403 - RNA, 32 nt, Homo Sapiens
cuguuucaucuuaaaaauauguauauuuuuau

SEQ ID NO: 256404 - RNA, 32 nt, Homo Sapiens
aucagccuuagaacaagaaccuuaccuucaag

SEQ ID NO: 256405 - RNA, 29 nt, Homo Sapiens
ugccauggaugccaccaagcuggaguacg

SEQ ID NO: 256406 - RNA, 32 nt, Homo Sapiens
uucuacgcaacacuaauuaaagcuuguaccug

SEQ ID NO: 256407 - RNA, 32 nt, Homo Sapiens
uuauuuuguccauggcaucucuaaugaaaaca

SEQ ID NO: 256408 - RNA, 32 nt, Homo Sapiens
caguuccuggucgcacauccacguucauuuaa

SEQ ID NO: 256409 - RNA, 32 nt, Homo Sapiens
auugaaauaacuaaaaacuaucugaaaguaua

SEQ ID NO: 256410 - RNA, 32 nt, Homo Sapiens
uaagagcaguggcagcagcaucucugaacauu

SEQ ID NO: 256411 - RNA, 32 nt, Homo Sapiens
ggcuguuuccuccuccucccccagaugucccc

SEQ ID NO: 256412 - RNA, 32 nt, Homo Sapiens
ugugcugccacggcaggcccaggccagccagu

SEQ ID NO: 256413 - RNA, 32 nt, Homo Sapiens
agcccggcccuaucuuuuuuaaaauuaaaaau

SEQ ID NO: 256414 - RNA, 32 nt, Homo Sapiens
uuacaugggccagggcaggaaugccacuccag

SEQ ID NO: 256415 - RNA, 32 nt, Homo Sapiens
guuaaaagucacugugcauuuauucucagcau

SEQ ID NO: 256416 - RNA, 32 nt, Homo Sapiens
cccauucggaagcugcugaucaccaguuucaa

SEQ ID NO: 256417 - RNA, 32 nt, Homo Sapiens
aucccagccugaccaauguccacagccaggga

SEQ ID NO: 256418 - RNA, 32 nt, Homo Sapiens
ccaaaucuucgcugccuaugugcggaaaacug

SEQ ID NO: 256419 - RNA, 32 nt, Homo Sapiens
acagggcuccagcccuacagggacucugcggu

SEQ ID NO: 256420 - RNA, 32 nt, Homo Sapiens
gagagaagggaagugaaaaguagaguaacucc

SEQ ID NO: 256421 - RNA, 32 nt, Homo Sapiens
uuccugguaaaguuacauugucugcaccuuug

SEQ ID NO: 256422 - RNA, 32 nt, Homo Sapiens
gugagggagauggauuaaugugaguaacagga

SEQ ID NO: 256423 - RNA, 32 nt, Homo Sapiens
ccucauuuuggcagaagcugggcuugguagua

SEQ ID NO: 256424 - RNA, 32 nt, Homo Sapiens
cugcccacaacaccccagcuugcugccagcaa

SEQ ID NO: 256425 - RNA, 32 nt, Homo Sapiens
ggcuuaggcaggaagccagguccccaaagucg

SEQ ID NO: 256426 - RNA, 32 nt, Homo Sapiens
uucaggaccggcacuucuuaauguuuguggcu

SEQ ID NO: 256427 - RNA, 32 nt, Homo Sapiens
gcaggcaggaaauuccaucuggacugguccua

SEQ ID NO: 256428 - RNA, 32 nt, Homo Sapiens
accccgcggccggccuggcuucacuggcgccc

SEQ ID NO: 256429 - RNA, 32 nt, Homo Sapiens
acaguucagaaaucaucccacaguguugcuuu

SEQ ID NO: 256430 - RNA, 31 nt, Homo Sapiens
cauggcaagcgcggccugcccgggcccuggg

SEQ ID NO: 256431 - RNA, 32 nt, Homo Sapiens
gaggagccgggcgcggcgacacgcggccaugg

SEQ ID NO: 256432 - RNA, 32 nt, Homo Sapiens
cccgccagccgauuuccagccgucagggucac

SEQ ID NO: 256433 - RNA, 32 nt, Homo Sapiens
uccuuauaagaucauuuuaauuuuaguugagu

SEQ ID NO: 256434 - RNA, 32 nt, Homo Sapiens
ucagcuucuuuguuaauacacccaugcuaaau

SEQ ID NO: 256435 - RNA, 32 nt, Homo Sapiens
cacaaauuggcuaaaaguacugauccauuauc

SEQ ID NO: 256436 - RNA, 32 nt, Homo Sapiens
aaaagggcggcuuuccucauggaaggagagga

SEQ ID NO: 256437 - RNA, 32 nt, Homo Sapiens
ucacauuuucccuucccugaagaucuagugaa

SEQ ID NO: 256438 - RNA, 32 nt, Homo Sapiens
uuuucucuauuucacaaaauccaaacuuugcc

SEQ ID NO: 256439 - RNA, 32 nt, Homo Sapiens
aaacuauaaaauguauaaauaauuugcaaauc

SEQ ID NO: 256440 - RNA, 32 nt, Homo Sapiens
agccaagggcuuuuccccucugagcucuggga

SEQ ID NO: 256441 - RNA, 32 nt, Homo Sapiens
ggagccccgcggcggccugaacccugccuccc

SEQ ID NO: 256442 - RNA, 32 nt, Homo Sapiens
uuggaaauggauaaacagaaaugugaucauug

SEQ ID NO: 256443 - RNA, 32 nt, Homo Sapiens
uucagagcagggagggaacuugccagagacca

SEQ ID NO: 256444 - RNA, 32 nt, Homo Sapiens
gcauuauuaauauauaccagaugcaacuuauc

SEQ ID NO: 256445 - RNA, 32 nt, Homo Sapiens
gacagaugaagauguagagagaacaagagaca

SEQ ID NO: 256446 - RNA, 32 nt, Homo Sapiens
cucuaguucuuuguucauagcccaguagaccu

SEQ ID NO: 256447 - RNA, 32 nt, Homo Sapiens
cauugcccaagcagugacugcguugcauacau

SEQ ID NO: 256448 - RNA, 32 nt, Homo Sapiens
aagugcauuguuuucaggaaucaaaagauaaa

SEQ ID NO: 256449 - RNA, 32 nt, Homo Sapiens
uacacaugaaauacuuaaacaauauaacugaa

SEQ ID NO: 256450 - RNA, 32 nt, Homo Sapiens
cagauccaagccugggggaucccgggaaagcg

SEQ ID NO: 256451 - RNA, 32 nt, Homo Sapiens
caagauugccgggaagcuccugggggaugcuc

SEQ ID NO: 256452 - RNA, 32 nt, Homo Sapiens
ccaauguuguaccuguauccccaauaauacag

SEQ ID NO: 256453 - RNA, 32 nt, Homo Sapiens
aacucaauaccauagcacuuugcauaggcaaa

SEQ ID NO: 256454 - RNA, 32 nt, Homo Sapiens
cgaggcgggaaguggcgggcggagucccgggu

SEQ ID NO: 256455 - RNA, 32 nt, Homo Sapiens
auucuguuuacuaucuuuaagagugagaacaa

SEQ ID NO: 256456 - RNA, 32 nt, Homo Sapiens
uaaugucaagcaauuuuauauuagccagagau

SEQ ID NO: 256457 - RNA, 32 nt, Homo Sapiens
uaugcuugauaaacuuugaauuaaauacaguu

SEQ ID NO: 256458 - RNA, 32 nt, Homo Sapiens
ccaugcagugauuccagccaccagccaucuca

SEQ ID NO: 256459 - RNA, 32 nt, Homo Sapiens
gggagcuccgaggggcccgggucgccagggcu

SEQ ID NO: 256460 - RNA, 32 nt, Homo Sapiens
agcuuguguauauaauuguguuguauagucuc

SEQ ID NO: 256461 - RNA, 32 nt, Homo Sapiens
guuauugagcauucgcuguguaccaagugcug

SEQ ID NO: 256462 - RNA, 32 nt, Homo Sapiens
agcgggauccaccccaggacgucgggucgcug

SEQ ID NO: 256463 - RNA, 32 nt, Homo Sapiens
acauggaaauacacugauacaauaggcaaaag

SEQ ID NO: 256464 - RNA, 32 nt, Homo Sapiens
gaggggcgugaggaggggaggggcuguggacu

SEQ ID NO: 256465 - RNA, 32 nt, Homo Sapiens
guugcgggggcggccauucccccacucuuaaa

SEQ ID NO: 256466 - RNA, 32 nt, Homo Sapiens
agaggguggaggccgagaagggugggcggcgg

SEQ ID NO: 256467 - RNA, 32 nt, Homo Sapiens
agaugucagccauuucaaugucuugggaaaca

SEQ ID NO: 256468 - RNA, 32 nt, Homo Sapiens
cacagugaacacacucguguacauaucaagag

SEQ ID NO: 256469 - RNA, 32 nt, Homo Sapiens
uccaccacggcauccgccacucugccaccagc

SEQ ID NO: 256470 - RNA, 32 nt, Homo Sapiens
ccuuucuccaugaauauaaguuccaugugaac

SEQ ID NO: 256471 - RNA, 31 nt, Homo Sapiens
uggcucacccucugccugcccuguccuuccc

SEQ ID NO: 256472 - RNA, 32 nt, Homo Sapiens
gccagcaucccuugucccgcggccggcucaga

SEQ ID NO: 256473 - RNA, 32 nt, Homo Sapiens
uacugacuuaggagcauaacuuaccuguaauu

SEQ ID NO: 256474 - RNA, 32 nt, Homo Sapiens
ucacucaugcuuauuuccuguaauggacaaac

SEQ ID NO: 256475 - RNA, 32 nt, Homo Sapiens
ccauuuauauuuguuucaauuguuugauacug

SEQ ID NO: 256476 - RNA, 32 nt, Homo Sapiens
ggaaagggguaggggugggggguguugaugac

SEQ ID NO: 256477 - RNA, 32 nt, Homo Sapiens
aaaccccgucucuauuaaaaaauagaaaaaau

SEQ ID NO: 256478 - RNA, 31 nt, Homo Sapiens
cucuucauaaauuguagcguuuuauguuuuc

SEQ ID NO: 256479 - RNA, 32 nt, Homo Sapiens
agggaacucugcagcagggggugacugacaca

SEQ ID NO: 256480 - RNA, 32 nt, Homo Sapiens
uggguggaugccuggacuccagugugccugug

SEQ ID NO: 256481 - RNA, 32 nt, Homo Sapiens
auguaguaguaauauugcuguuuauuaaugcu

SEQ ID NO: 256482 - RNA, 32 nt, Homo Sapiens
cugcucauuucccagcccucuucuucucaagc

SEQ ID NO: 256483 - RNA, 32 nt, Homo Sapiens
agcaaagauugugccacuacacuccagccugg

SEQ ID NO: 256484 - RNA, 32 nt, Homo Sapiens
aagugagagccagcagcaaaaacuacauuuug

SEQ ID NO: 256485 - RNA, 32 nt, Homo Sapiens
ugccuccaacugggaugagauuguugauaacu

SEQ ID NO: 256486 - RNA, 32 nt, Homo Sapiens
accaggagggacugcugugcucucccuucucg

SEQ ID NO: 256487 - RNA, 32 nt, Homo Sapiens
aagugccuuaggauagcuugggaugagaugug

SEQ ID NO: 256488 - RNA, 32 nt, Homo Sapiens
cucaguccaucccaagccaucccuggaagguu

SEQ ID NO: 256489 - RNA, 31 nt, Homo Sapiens
uuuggggcgcugaccgcuccaagcagcgcgg

SEQ ID NO: 256490 - RNA, 32 nt, Homo Sapiens
ggcugccgugcagccaggcagaggcgaggaag

SEQ ID NO: 256491 - RNA, 32 nt, Homo Sapiens
auguguaaaaauuugaauuugaggccaguggg

SEQ ID NO: 256492 - RNA, 32 nt, Homo Sapiens
gcugccuccauuuugccuuguuuguuaguuug

SEQ ID NO: 256493 - RNA, 32 nt, Homo Sapiens
uaaugaaagggggauuaauuucaguaggaagu

SEQ ID NO: 256494 - RNA, 30 nt, Homo Sapiens
auauucaguggucuuuucaagaguaaacca

SEQ ID NO: 256495 - RNA, 32 nt, Homo Sapiens
uaucauaaaaauuuaccagucugaauagaucu

SEQ ID NO: 256496 - RNA, 32 nt, Homo Sapiens
aucuugaaaauauugaagaauuuguuuuaggu

SEQ ID NO: 256497 - RNA, 32 nt, Homo Sapiens
acagaaaauucugaauuuuaacaauuacuuua

SEQ ID NO: 256498 - RNA, 32 nt, Homo Sapiens
ucaaaaacacaguguuuuuguaaagugugguc

SEQ ID NO: 256499 - RNA, 32 nt, Homo Sapiens
guauggcucagcuaauaaaggcgcacaugacu

SEQ ID NO: 256500 - RNA, 32 nt, Homo Sapiens
agcuugugugaguucuuuuuuauuuaaugauu

SEQ ID NO: 256501 - RNA, 32 nt, Homo Sapiens
cucgccuucuguauauaauuggggugaauguu

SEQ ID NO: 256502 - RNA, 32 nt, Homo Sapiens
cgggccccaagccgugccgcuccgcucgcccg

SEQ ID NO: 256503 - RNA, 32 nt, Homo Sapiens
ugggcgugguggcucaugccuguaaucccacc

SEQ ID NO: 256504 - RNA, 32 nt, Homo Sapiens
gaaagauguucccuuccuucacuguagugcca

SEQ ID NO: 256505 - RNA, 32 nt, Homo Sapiens
acaaguggcgcggcgcaggagccgccgccagu

SEQ ID NO: 256506 - RNA, 32 nt, Homo Sapiens
uuccagccccuucucuccccagccguugcccc

SEQ ID NO: 256507 - RNA, 32 nt, Homo Sapiens
agaaugaauuguagugcucuuuaauucagcua

SEQ ID NO: 256508 - RNA, 32 nt, Homo Sapiens
uggcuccggcccggguguucgcuguccacgga

SEQ ID NO: 256509 - RNA, 32 nt, Homo Sapiens
gaccuggcgagggagggacugagcgccagccc

SEQ ID NO: 256510 - RNA, 32 nt, Homo Sapiens
gcuacuugggaauaaagggcuuuuugaggggg

SEQ ID NO: 256511 - RNA, 32 nt, Homo Sapiens
uuacucuggguccgcgccaccuuuaaagcuca

SEQ ID NO: 256512 - RNA, 32 nt, Homo Sapiens
ucuaguuauuuaucaggcuauuucuacugaug

SEQ ID NO: 256513 - RNA, 32 nt, Homo Sapiens
ucuuuuuaauaaaucuauccugaaagcuauau

SEQ ID NO: 256514 - RNA, 32 nt, Homo Sapiens
caaguuucagaauuaaaaauaagcauuauuuc

SEQ ID NO: 256515 - RNA, 32 nt, Homo Sapiens
gucauuuguguagaugaguaauuaaaaaauau

SEQ ID NO: 256516 - RNA, 32 nt, Homo Sapiens
gggccucucacccccuaaccccgcccccccgc

SEQ ID NO: 256517 - RNA, 32 nt, Homo Sapiens
uggaguuuugcuugucacccaggcuggagugc

SEQ ID NO: 256518 - RNA, 32 nt, Homo Sapiens
aaagaaucaacaaaauaaugcucuugaagcag

SEQ ID NO: 256519 - RNA, 32 nt, Homo Sapiens
gacuagauaaccucuaagaauuuuccacuucu

SEQ ID NO: 256520 - RNA, 32 nt, Homo Sapiens
gcagggcccccgcuucgcccuggagccucuuc

SEQ ID NO: 256521 - RNA, 32 nt, Homo Sapiens
aguuacuuuguaaaaaauuugcuauacaaacc

SEQ ID NO: 256522 - RNA, 32 nt, Homo Sapiens
augccacugaucugugaacccccuuccuguca

SEQ ID NO: 256523 - RNA, 32 nt, Homo Sapiens
ccauggcucuguagacgccagcuccucagcac

SEQ ID NO: 256524 - RNA, 32 nt, Homo Sapiens
cacccacucugcacuggggcguuuccuacugc

SEQ ID NO: 256525 - RNA, 32 nt, Homo Sapiens
ggcuaagaaccucagcccuggggacuucaccu

SEQ ID NO: 256526 - RNA, 32 nt, Homo Sapiens
aagaaaaugcuucaggugucuagggguauccu

SEQ ID NO: 256527 - RNA, 32 nt, Homo Sapiens
cagaaaugucuggguguuuuauuugcagagaa

SEQ ID NO: 256528 - RNA, 32 nt, Homo Sapiens
uuccuugacccugggaaaugucuacaaauguc

SEQ ID NO: 256529 - RNA, 32 nt, Homo Sapiens
aacaaaaaacaaaaaacaggggccaauaaauu

SEQ ID NO: 256530 - RNA, 32 nt, Homo Sapiens
ggauuucuucucagccuuccagcccuuuccag

SEQ ID NO: 256531 - RNA, 32 nt, Homo Sapiens
caaauuagcaaagaagcagugaaaacaggcuu

SEQ ID NO: 256532 - RNA, 32 nt, Homo Sapiens
aacacagcucuuuaacaugguucagguacaca

SEQ ID NO: 256533 - RNA, 28 nt, Homo Sapiens
uggagggaccuugccaggaugaaccccc

SEQ ID NO: 256534 - RNA, 32 nt, Homo Sapiens
ccgcaggcucugcggggugggcagcucccggg

SEQ ID NO: 256535 - RNA, 32 nt, Homo Sapiens
cagugagcaggaccagcugccuuucucaccac

SEQ ID NO: 256536 - RNA, 32 nt, Homo Sapiens
gccaugacuggaugcgcccccaucucgggggc

SEQ ID NO: 256537 - RNA, 32 nt, Homo Sapiens
ggaucuggugccuccagacaugugcacaugag

SEQ ID NO: 256538 - RNA, 31 nt, Homo Sapiens
cuguuuuggcaguucugccaggcaagcccug

SEQ ID NO: 256539 - RNA, 32 nt, Homo Sapiens
auguuaguuucaucagaaacuuaaaacauaga

SEQ ID NO: 256540 - RNA, 32 nt, Homo Sapiens
aggaaauagagggggagaaggaagguauguac

SEQ ID NO: 256541 - RNA, 32 nt, Homo Sapiens
cuugcgaaggcacagauuccccguccacagcu

SEQ ID NO: 256542 - RNA, 32 nt, Homo Sapiens
gcacacaauguguaguaaacuaucauaggauu

SEQ ID NO: 256543 - RNA, 32 nt, Homo Sapiens
gagggcacuggaggaguguugcaggcaucacc

SEQ ID NO: 256544 - RNA, 31 nt, Homo Sapiens
uauaaucccagcacuuugggaguccaaggug

SEQ ID NO: 256545 - RNA, 32 nt, Homo Sapiens
cuggguuccccauuuuuacuauuaagaagacc

SEQ ID NO: 256546 - RNA, 32 nt, Homo Sapiens
augggaaguauguuuucaaguguggggaggau

SEQ ID NO: 256547 - RNA, 32 nt, Homo Sapiens
cuugucuguacauaugaccauguuucuugaca

SEQ ID NO: 256548 - RNA, 32 nt, Homo Sapiens
uaaacagaauaaaauugaacaaauuagggggu

SEQ ID NO: 256549 - RNA, 32 nt, Homo Sapiens
uguuggcccagggcguuaaauucacagauuuu

SEQ ID NO: 256550 - RNA, 32 nt, Homo Sapiens
gcggcggcgggggucgggugaggcgcaaaagg

SEQ ID NO: 256551 - RNA, 32 nt, Homo Sapiens
acuuuaaacaauuuggauauuggaaugcaguc

SEQ ID NO: 256552 - RNA, 32 nt, Homo Sapiens
ccccagcccuccccaccugcucaccaauucca

SEQ ID NO: 256553 - RNA, 32 nt, Homo Sapiens
ucgcgugugucgcucuccuccagcguggugug

SEQ ID NO: 256554 - RNA, 32 nt, Homo Sapiens
acaaacacacggaccaauaaacaaagaagcga

SEQ ID NO: 256555 - RNA, 30 nt, Homo Sapiens
uggcuagggagccgcgcgggcucauggcgg

SEQ ID NO: 256556 - RNA, 32 nt, Homo Sapiens
ccaugugauaugggcccaacaccuggaugaug

SEQ ID NO: 256557 - RNA, 32 nt, Homo Sapiens
ggggagcuccgucucaccggccacccgccguc

SEQ ID NO: 256558 - RNA, 32 nt, Homo Sapiens
gaggugggcacuuuaagggaugauuaugucau

SEQ ID NO: 256559 - RNA, 32 nt, Homo Sapiens
cagccacgcgcagcggcuccgcggggucucgg

SEQ ID NO: 256560 - RNA, 32 nt, Homo Sapiens
gggguagugggaggagaacggucagaaucaaa

SEQ ID NO: 256561 - RNA, 32 nt, Homo Sapiens
ggucaggaaugggagaagugucagacacuaga

SEQ ID NO: 256562 - RNA, 32 nt, Homo Sapiens
cagcugugaccggcugcuccagaagaaguggg

SEQ ID NO: 256563 - RNA, 29 nt, Homo Sapiens
aacauuuguaauaguucuauaaagacuau

SEQ ID NO: 256564 - RNA, 32 nt, Homo Sapiens
accagcucugcagugucccauccacccucaca

SEQ ID NO: 256565 - RNA, 32 nt, Homo Sapiens
ucgcaccacugcacgcacuccagccuggguga

SEQ ID NO: 256566 - RNA, 32 nt, Homo Sapiens
cuccuaggccagggccugucccugccccuaac

SEQ ID NO: 256567 - RNA, 32 nt, Homo Sapiens
caccaaaguuaugucaagccccauugguccca

SEQ ID NO: 256568 - RNA, 32 nt, Homo Sapiens
uuguauugaaauguuauaucaauacaucauuu

SEQ ID NO: 256569 - RNA, 31 nt, Homo Sapiens
aauaaugcugcugcuacuccaaggcacacua

SEQ ID NO: 256570 - RNA, 32 nt, Homo Sapiens
gguuuacuguguugaguuggcauuguacagaa

SEQ ID NO: 256571 - RNA, 32 nt, Homo Sapiens
aaaccccacuuggauaugauagauaguauucu

SEQ ID NO: 256572 - RNA, 32 nt, Homo Sapiens
ucucugcuggaggaagcgaggaggcggccggc

SEQ ID NO: 256573 - RNA, 32 nt, Homo Sapiens
acuugggagagccaggcaagucucauugaaua

SEQ ID NO: 256574 - RNA, 32 nt, Homo Sapiens
uuuaagaauggcaacugguggguguuaccuuc

SEQ ID NO: 256575 - RNA, 32 nt, Homo Sapiens
gaaaagggccccagcguccucuugucaccgac

SEQ ID NO: 256576 - RNA, 32 nt, Homo Sapiens
augguacauuuuauguuauguguauuuuacca

SEQ ID NO: 256577 - RNA, 32 nt, Homo Sapiens
ucagugaauuuugauguaaauaaaauaucuuu

SEQ ID NO: 256578 - RNA, 32 nt, Homo Sapiens
ggaguuauuuuuuauuuccauguucuaagaag

SEQ ID NO: 256579 - RNA, 32 nt, Homo Sapiens
ccacuuuaucuaaaugauauuagccaggaucc

SEQ ID NO: 256580 - RNA, 32 nt, Homo Sapiens
acucaguuccugcucucauccuccccugcccu

SEQ ID NO: 256581 - RNA, 32 nt, Homo Sapiens
uguauuaaguuuuuuccuuucaguuuuaggug

SEQ ID NO: 256582 - RNA, 32 nt, Homo Sapiens
agugccaggagcuaauggagccaggccugaca

SEQ ID NO: 256583 - RNA, 32 nt, Homo Sapiens
cuggcccaagccgccaucucccgccucauaca

SEQ ID NO: 256584 - RNA, 32 nt, Homo Sapiens
agucgcuguucgcucugcgaguggcucgccag

SEQ ID NO: 256585 - RNA, 32 nt, Homo Sapiens
uugucuuguucugucccuuccacuucuaacuc

SEQ ID NO: 256586 - RNA, 32 nt, Homo Sapiens
aggcgauccacccccaccucggcuucccaaag

SEQ ID NO: 256587 - RNA, 32 nt, Homo Sapiens
uuggccaagugugcuuggaugaucucuaagau

SEQ ID NO: 256588 - RNA, 32 nt, Homo Sapiens
ccccaguguugcauuuccuggcugaggaaggg

SEQ ID NO: 256589 - RNA, 32 nt, Homo Sapiens
cagcuaacauauauuaauaccuuuguaacucu

SEQ ID NO: 256590 - RNA, 32 nt, Homo Sapiens
acacagcccucaccccagcacagccagcaagg

SEQ ID NO: 256591 - RNA, 32 nt, Homo Sapiens
auccuuugugggaaaacucugguuucauuaaa

SEQ ID NO: 256592 - RNA, 32 nt, Homo Sapiens
uggcuuuuuuccaaauuggcuaauggaucaaa

SEQ ID NO: 256593 - RNA, 32 nt, Homo Sapiens
gaagacguggagcugugcgugccucgcugggc

SEQ ID NO: 256594 - RNA, 32 nt, Homo Sapiens
cuccccggagagcgacuguguagaaaggauuu

SEQ ID NO: 256595 - RNA, 32 nt, Homo Sapiens
cagagucucgcuguguugccaaggcuggagug

SEQ ID NO: 256596 - RNA, 30 nt, Homo Sapiens
gcguggagggcgcagcacuggagcggggga

SEQ ID NO: 256597 - RNA, 32 nt, Homo Sapiens
gugucuuugguggggauggggaggccuauucc

SEQ ID NO: 256598 - RNA, 32 nt, Homo Sapiens
aucuggagcaacagcugggaaauaucauuaau

SEQ ID NO: 256599 - RNA, 32 nt, Homo Sapiens
auuuuucuuuuggaaaugugccuuauguuaaa

SEQ ID NO: 256600 - RNA, 32 nt, Homo Sapiens
agaauuuuauggcauucacuuccauacuucuc

SEQ ID NO: 256601 - RNA, 32 nt, Homo Sapiens
aaugcaaggaggggaagaaagucacagcacug

SEQ ID NO: 256602 - RNA, 32 nt, Homo Sapiens
gcuuuuggggagggugcaccagggccacccca

SEQ ID NO: 256603 - RNA, 32 nt, Homo Sapiens
cuuuauauuucuuauagucuuaauuuuguuau

SEQ ID NO: 256604 - RNA, 32 nt, Homo Sapiens
aaaauauaaaagaucacauauacugauuuuaa

SEQ ID NO: 256605 - RNA, 32 nt, Homo Sapiens
gcgccggaccccagcccgccguccagcgcugg

SEQ ID NO: 256606 - RNA, 32 nt, Homo Sapiens
ucgaggucggugccgaagcgguguuccccgcc

SEQ ID NO: 256607 - RNA, 32 nt, Homo Sapiens
uuugaaauacucaggauggggagagguuuauu

SEQ ID NO: 256608 - RNA, 32 nt, Homo Sapiens
ggagauuuuguaguuaauuuuaauuuuggcua

SEQ ID NO: 256609 - RNA, 32 nt, Homo Sapiens
ugggucacuaauuaucucaaaauauuucauac

SEQ ID NO: 256610 - RNA, 32 nt, Homo Sapiens
aauuacaaggcaugcaaacaaacaagaaagua

SEQ ID NO: 256611 - RNA, 32 nt, Homo Sapiens
ugagccacuauaagaacuagcucccauagucc

SEQ ID NO: 256612 - RNA, 32 nt, Homo Sapiens
uccuggagaaaacagugauguggaucuuauca

SEQ ID NO: 256613 - RNA, 32 nt, Homo Sapiens
caucuuccuagccccagagccuggcaacagcc

SEQ ID NO: 256614 - RNA, 32 nt, Homo Sapiens
gccuccugcgccccgccgagcuggcggaugga

SEQ ID NO: 256615 - RNA, 32 nt, Homo Sapiens
ggccuguguggcaacugugcuauuuaucauca

SEQ ID NO: 256616 - RNA, 32 nt, Homo Sapiens
ccgccguuugguuuccuauguuuucuuucccu

SEQ ID NO: 256617 - RNA, 32 nt, Homo Sapiens
uccugaggcuggggcuuuugugccaggagugg

SEQ ID NO: 256618 - RNA, 32 nt, Homo Sapiens
caaaagguuccacagaacuagucugcgcuuac

SEQ ID NO: 256619 - RNA, 32 nt, Homo Sapiens
acgaaaugccuaaaaaugugccaggcaugcuc

SEQ ID NO: 256620 - RNA, 32 nt, Homo Sapiens
aagaaagaaaaauuaaauugguaguaaaauau

SEQ ID NO: 256621 - RNA, 32 nt, Homo Sapiens
agcagcaggucccaggucgcuggccggcucug

SEQ ID NO: 256622 - RNA, 32 nt, Homo Sapiens
uucuacuuugccaguuauuucagacagcacua

SEQ ID NO: 256623 - RNA, 32 nt, Homo Sapiens
gcuaagagagggaaagugacuuacucauaacc

SEQ ID NO: 256624 - RNA, 32 nt, Homo Sapiens
ucccaagccauaagaccauauuugcagaacau

SEQ ID NO: 256625 - RNA, 32 nt, Homo Sapiens
aucagcuggguugauuguguggguuagauaga

SEQ ID NO: 256626 - RNA, 32 nt, Homo Sapiens
gcuccugggaugcacuggcuacucccuuaguc

SEQ ID NO: 256627 - RNA, 32 nt, Homo Sapiens
gggcucccacccagaagcagaggggcugggcu

SEQ ID NO: 256628 - RNA, 31 nt, Homo Sapiens
agaacuccuuggaugaaguccacuggggcca

SEQ ID NO: 256629 - RNA, 32 nt, Homo Sapiens
uggugggagagaaaggugcgugugagacagga

SEQ ID NO: 256630 - RNA, 32 nt, Homo Sapiens
aaagacgagaggaccuucgaggaggauuuaug

SEQ ID NO: 256631 - RNA, 32 nt, Homo Sapiens
aaacuugaggaugugcggugcauaaaggggcu

SEQ ID NO: 256632 - RNA, 32 nt, Homo Sapiens
ccgugcaguccauggcuagacgcgccggacag

SEQ ID NO: 256633 - RNA, 32 nt, Homo Sapiens
ucugccugucuccuuccaccuccuucccagag

SEQ ID NO: 256634 - RNA, 32 nt, Homo Sapiens
cgaguucaucuacuccaaccuccacauuuuac

SEQ ID NO: 256635 - RNA, 32 nt, Homo Sapiens
uagaaauaaaagacaaaaggacaucacucuua

SEQ ID NO: 256636 - RNA, 32 nt, Homo Sapiens
uaacgucauugcuauuuuuuuaacauccucuu

SEQ ID NO: 256637 - RNA, 32 nt, Homo Sapiens
uagaacuggucauagaggaagagcuagaaauc

SEQ ID NO: 256638 - RNA, 32 nt, Homo Sapiens
acaacacaagauuuuuuaaagauggaaucaga

SEQ ID NO: 256639 - RNA, 32 nt, Homo Sapiens
gcuggccugccaggaccuuccacccuggggcc

SEQ ID NO: 256640 - RNA, 32 nt, Homo Sapiens
uggacgugcuagccauuuccagugucccaacu

SEQ ID NO: 256641 - RNA, 32 nt, Homo Sapiens
ccagggccuggcuggguccagcggcucuggga

SEQ ID NO: 256642 - RNA, 32 nt, Homo Sapiens
uguccccagaaagcagcugcugugaucauggg

SEQ ID NO: 256643 - RNA, 32 nt, Homo Sapiens
gcaacacugcuguccacaugaccuccauuucc

SEQ ID NO: 256644 - RNA, 32 nt, Homo Sapiens
ucucgugcaaacgauauggaugcagcuaacca

SEQ ID NO: 256645 - RNA, 32 nt, Homo Sapiens
cgggcaggaccccgucuccccaggugucggag

SEQ ID NO: 256646 - RNA, 32 nt, Homo Sapiens
gucuuuaaaaauuaaguggaagaagaauuacu

SEQ ID NO: 256647 - RNA, 32 nt, Homo Sapiens
cuggaccccccucuuucuccuuggcugcagug

SEQ ID NO: 256648 - RNA, 32 nt, Homo Sapiens
ggcugagcagguagagaaugugaauguccauc

SEQ ID NO: 256649 - RNA, 30 nt, Homo Sapiens
uauagauggaugcagaggcugaagauaaaa

SEQ ID NO: 256650 - RNA, 32 nt, Homo Sapiens
caguggcuuuaaacugcagauaaguuaaauau

SEQ ID NO: 256651 - RNA, 32 nt, Homo Sapiens
aaaccacaacgcuguuucaagcuuuagucuua

SEQ ID NO: 256652 - RNA, 32 nt, Homo Sapiens
ugagggcugguguucauuaauacuguuuucua

SEQ ID NO: 256653 - RNA, 32 nt, Homo Sapiens
aacugguuguacaaucaugauguuaguaacag

SEQ ID NO: 256654 - RNA, 32 nt, Homo Sapiens
cagagccccgcagccccuggggcccccggagc

SEQ ID NO: 256655 - RNA, 32 nt, Homo Sapiens
uguucauaccugagcaaagucuacacaggagu

SEQ ID NO: 256656 - RNA, 32 nt, Homo Sapiens
aaggaccgcuggccccgccaggcggccgaccu

SEQ ID NO: 256657 - RNA, 32 nt, Homo Sapiens
cuugugcuggguucugucucauuaucaccuca

SEQ ID NO: 256658 - RNA, 32 nt, Homo Sapiens
aggagagcuggcaggaggaaaagcggguucga

SEQ ID NO: 256659 - RNA, 32 nt, Homo Sapiens
uaggaugugguaauuagcuuguaaccagggua

SEQ ID NO: 256660 - RNA, 32 nt, Homo Sapiens
gguuggcucgcggguaggcggccccgcccccc

SEQ ID NO: 256661 - RNA, 32 nt, Homo Sapiens
acuuggcuggaacacuccaucaauucuuugcc

SEQ ID NO: 256662 - RNA, 29 nt, Homo Sapiens
uuuagccggggacacaccauccugcucgc

SEQ ID NO: 256663 - RNA, 32 nt, Homo Sapiens
auguauagggacaaaaaguagauucauguuug

SEQ ID NO: 256664 - RNA, 32 nt, Homo Sapiens
gaguuuuauuguuauugguguuuaccugaaua

SEQ ID NO: 256665 - RNA, 32 nt, Homo Sapiens
ccaguggcccgggccaguucaggccgccuccc

SEQ ID NO: 256666 - RNA, 32 nt, Homo Sapiens
cuuccuuccauccuauuccccagucacgaaag

SEQ ID NO: 256667 - RNA, 32 nt, Homo Sapiens
ugacagcagacacuggucucuaccugcggccc

SEQ ID NO: 256668 - RNA, 32 nt, Homo Sapiens
aggcagcggugcccgcuggcccgggguugaga

SEQ ID NO: 256669 - RNA, 32 nt, Homo Sapiens
auaaauacaguacuccacuuccuuucauauua

SEQ ID NO: 256670 - RNA, 32 nt, Homo Sapiens
gguuucgccauguuggccaggcuggucucgaa

SEQ ID NO: 256671 - RNA, 32 nt, Homo Sapiens
gauuucgccguguuggccaggcuggucucgaa

SEQ ID NO: 256672 - RNA, 32 nt, Homo Sapiens
gguuucaccauguuggccaggcuggucucgga

SEQ ID NO: 256673 - RNA, 32 nt, Homo Sapiens
auggugguuugcacuuggguucugguggcgca

SEQ ID NO: 256674 - RNA, 32 nt, Homo Sapiens
agcaaguauuuaauucagguauuuucaaguuu

SEQ ID NO: 256675 - RNA, 32 nt, Homo Sapiens
uuguagggcauaaugccuuguuuaauguccau

SEQ ID NO: 256676 - RNA, 31 nt, Homo Sapiens
caucaccaagccaacucgccugacuuccauu

SEQ ID NO: 256677 - RNA, 32 nt, Homo Sapiens
gcuguguguuuucaagagaacaauagagugcg

SEQ ID NO: 256678 - RNA, 32 nt, Homo Sapiens
auuggggccagagcugggggagggaugagaac

SEQ ID NO: 256679 - RNA, 32 nt, Homo Sapiens
uuagaucagcuggcagauguguuugugggcua

SEQ ID NO: 256680 - RNA, 32 nt, Homo Sapiens
gaugggggaggcugucccacucccagcucugg

SEQ ID NO: 256681 - RNA, 32 nt, Homo Sapiens
aguaccucaccaacggcaucaugugcacgcuc

SEQ ID NO: 256682 - RNA, 32 nt, Homo Sapiens
cuguaucugcugaauuauuaaugccacuauag

SEQ ID NO: 256683 - RNA, 32 nt, Homo Sapiens
guggcaaaucucuauuaggaaauauucuguaa

SEQ ID NO: 256684 - RNA, 32 nt, Homo Sapiens
ugagccuggcuccccaggagggcccccagaca

SEQ ID NO: 256685 - RNA, 32 nt, Homo Sapiens
uuuuggaggggaggggguagccaggaaggaaa

SEQ ID NO: 256686 - RNA, 32 nt, Homo Sapiens
agcaggcaggguggagcgaaggagcuccuuag

SEQ ID NO: 256687 - RNA, 31 nt, Homo Sapiens
uucucaucuaccucagcuacaaaggcaacau

SEQ ID NO: 256688 - RNA, 32 nt, Homo Sapiens
gggugaaggcggcgcuggaggcgugggucagg

SEQ ID NO: 256689 - RNA, 32 nt, Homo Sapiens
agcagggcuggggaagaaauggcaaacuaggg

SEQ ID NO: 256690 - RNA, 32 nt, Homo Sapiens
ggaacccuggaagggagggaggcccaugggag

SEQ ID NO: 256691 - RNA, 32 nt, Homo Sapiens
cugaggcgccgcgcggccaggcagcgggucca

SEQ ID NO: 256692 - RNA, 32 nt, Homo Sapiens
ccggggguccugggaccgcgggaugggaacuc

SEQ ID NO: 256693 - RNA, 30 nt, Homo Sapiens
ccuauggccguucuuuuccacccuguuucu

SEQ ID NO: 256694 - RNA, 30 nt, Homo Sapiens
uggcucuguguccgcaccuaacucuuaucu

SEQ ID NO: 256695 - RNA, 32 nt, Homo Sapiens
ggcuaagaaauagacagucaggcuacuaaaau

SEQ ID NO: 256696 - RNA, 32 nt, Homo Sapiens
cucagcagggcuggucaccucccaucccguaa

SEQ ID NO: 256697 - RNA, 32 nt, Homo Sapiens
ccauaagaacagagccuggaacuguccaggau

SEQ ID NO: 256698 - RNA, 32 nt, Homo Sapiens
cuuguuggugucacgcccacuuugccaggucc

SEQ ID NO: 256699 - RNA, 32 nt, Homo Sapiens
ugguguugcaaauagaagauucagcugguagu

SEQ ID NO: 256700 - RNA, 32 nt, Homo Sapiens
gguggaguuaguauauagguccaagcucuuuu

SEQ ID NO: 256701 - RNA, 32 nt, Homo Sapiens
uuccuuuuaaauuuauauagaucuaaugaaca

SEQ ID NO: 256702 - RNA, 32 nt, Homo Sapiens
uuccuuuuuuuuuuuuuuuuuaauauuuuuua

SEQ ID NO: 256703 - RNA, 32 nt, Homo Sapiens
cguucuucagcguaccguguugucagaugauu

SEQ ID NO: 256704 - RNA, 32 nt, Homo Sapiens
aaguaauuaaaauaaaucuacauaaagaacca

SEQ ID NO: 256705 - RNA, 32 nt, Homo Sapiens
aggcacgcauggccauggagcacgggaacgug

SEQ ID NO: 256706 - RNA, 32 nt, Homo Sapiens
uuucacaccagucacacauuauagaaauuacu

SEQ ID NO: 256707 - RNA, 32 nt, Homo Sapiens
cagcccauuucccaguagucugccuugcccug

SEQ ID NO: 256708 - RNA, 32 nt, Homo Sapiens
aagagugcgaugccccuuugccuuugcauccu

SEQ ID NO: 256709 - RNA, 32 nt, Homo Sapiens
ugaaccuagagcggugacaugaaaauaaagcu

SEQ ID NO: 256710 - RNA, 32 nt, Homo Sapiens
gugccucagaucugcuguagccagugcagacc

SEQ ID NO: 256711 - RNA, 32 nt, Homo Sapiens
gauauuaaaauuggaagagacuucaaagacug

SEQ ID NO: 256712 - RNA, 32 nt, Homo Sapiens
ugggguccguccccggcucgcgcagaccucuc

SEQ ID NO: 256713 - RNA, 32 nt, Homo Sapiens
agugccuucagcgcagagcguggaugcucugg

SEQ ID NO: 256714 - RNA, 32 nt, Homo Sapiens
aucagaucuauuacaaauauauaucggaguga

SEQ ID NO: 256715 - RNA, 28 nt, Homo Sapiens
ccagcccuggcuacccggaugaagaggu

SEQ ID NO: 256716 - RNA, 32 nt, Homo Sapiens
gcagcugcgggccgcggugaaccuggcggagc

SEQ ID NO: 256717 - RNA, 32 nt, Homo Sapiens
aagggagaggaguaacagccagacacagccag

SEQ ID NO: 256718 - RNA, 32 nt, Homo Sapiens
aagcccuguugacacaggucuuuccuaaggcu

SEQ ID NO: 256719 - RNA, 32 nt, Homo Sapiens
ucgcccagauaaaggaggaaaagggaaaggca

SEQ ID NO: 256720 - RNA, 32 nt, Homo Sapiens
cgcgaauggaacucgcggcagcucauuaacgg

SEQ ID NO: 256721 - RNA, 32 nt, Homo Sapiens
caucuccauuugaucaucuccuccaaugagga

SEQ ID NO: 256722 - RNA, 32 nt, Homo Sapiens
uuccgagguaagaauuuuauggucaucuggga

SEQ ID NO: 256723 - RNA, 32 nt, Homo Sapiens
ggcuggggaccgagggcuccccugccucuguu

SEQ ID NO: 256724 - RNA, 32 nt, Homo Sapiens
gguucuuuaaaaugggauuuuagagccucggg

SEQ ID NO: 256725 - RNA, 32 nt, Homo Sapiens
accgcgcccccgcagacacgugccuggacucc

SEQ ID NO: 256726 - RNA, 32 nt, Homo Sapiens
gcugcuucaaaaaguacuuacuuuuuaaacca

SEQ ID NO: 256727 - RNA, 32 nt, Homo Sapiens
guagaugagaagcuaucuuuacgacggguagc

SEQ ID NO: 256728 - RNA, 29 nt, Homo Sapiens
auuaccccguuuuucagagacgagaggua

SEQ ID NO: 256729 - RNA, 32 nt, Homo Sapiens
cccaagcccagcccaccucccucccccggccc

SEQ ID NO: 256730 - RNA, 32 nt, Homo Sapiens
agggacaaggaucuuaacccaaaguacgagaa

SEQ ID NO: 256731 - RNA, 32 nt, Homo Sapiens
gaugugaugcuggagaucuacagccaccugcu

SEQ ID NO: 256732 - RNA, 32 nt, Homo Sapiens
cauagaaaaugaaaaucguuugaccauuuauc

SEQ ID NO: 256733 - RNA, 32 nt, Homo Sapiens
uugcuggugcuaaccuuauauuucauaguguu

SEQ ID NO: 256734 - RNA, 32 nt, Homo Sapiens
gaacacucaaaauaaacucagugcucaaaggg

SEQ ID NO: 256735 - RNA, 31 nt, Homo Sapiens
agccagaagccaaggcccugaguuggcagug

SEQ ID NO: 256736 - RNA, 32 nt, Homo Sapiens
aaccugaaaauauuaaaacuuuuuucccucuc

SEQ ID NO: 256737 - RNA, 32 nt, Homo Sapiens
uucccacacuucuggccuuguuucucacccac

SEQ ID NO: 256738 - RNA, 32 nt, Homo Sapiens
gcccggcgcuuuccccgcaagauggacgguuu

SEQ ID NO: 256739 - RNA, 32 nt, Homo Sapiens
uuaguuaaaauugauuucuucucauuaggauc

SEQ ID NO: 256740 - RNA, 32 nt, Homo Sapiens
agacgcugccgguaacggcgucgguccguggc

SEQ ID NO: 256741 - RNA, 32 nt, Homo Sapiens
ucccagggggagaguggguguguaccuugugc

SEQ ID NO: 256742 - RNA, 32 nt, Homo Sapiens
agagaccuaagcauagaauuggaaggagcaaa

SEQ ID NO: 256743 - RNA, 32 nt, Homo Sapiens
uggaccuucaaagggcuuuguauuuuacaccu

SEQ ID NO: 256744 - RNA, 32 nt, Homo Sapiens
gagaauggccaugauuuuuagagccagucaaa

SEQ ID NO: 256745 - RNA, 32 nt, Homo Sapiens
caccuccccacacagagcuguccccacugccc

SEQ ID NO: 256746 - RNA, 32 nt, Homo Sapiens
gcaggcugcccgagccagcaguggcaacgcgc

SEQ ID NO: 256747 - RNA, 32 nt, Homo Sapiens
cacgauccccuccuaagaaaauguaggugcuc

SEQ ID NO: 256748 - RNA, 32 nt, Homo Sapiens
acuguggcauccugcacccauccucaccccuc

SEQ ID NO: 256749 - RNA, 32 nt, Homo Sapiens
gcacucccaguagaccaggagcuccgggaggc

SEQ ID NO: 256750 - RNA, 32 nt, Homo Sapiens
uugugagcccugggcuuaggagucaccauggc

SEQ ID NO: 256751 - RNA, 32 nt, Homo Sapiens
uacugugggaaugugugaaauaauuggauuuu

SEQ ID NO: 256752 - RNA, 32 nt, Homo Sapiens
gugauggcgggugggcagcgggcggcgggcuc

SEQ ID NO: 256753 - RNA, 32 nt, Homo Sapiens
guccagaagcugaauuagauagacuuuccacc

SEQ ID NO: 256754 - RNA, 32 nt, Homo Sapiens
gauggugcccagcaccaacaguuuuaguggcc

SEQ ID NO: 256755 - RNA, 32 nt, Homo Sapiens
uugcauuucuuugcuuaauauuacagaaccag

SEQ ID NO: 256756 - RNA, 32 nt, Homo Sapiens
guaaagaacuacaauauaaacuaguuggugua

SEQ ID NO: 256757 - RNA, 32 nt, Homo Sapiens
uuuaacagcaaccaauaacggauuguaaagug

SEQ ID NO: 256758 - RNA, 31 nt, Homo Sapiens
caucuggcgccgcgucugccccgcgugcucg

SEQ ID NO: 256759 - RNA, 32 nt, Homo Sapiens
ggcagaggcgaagggagccggaucgccgaccu

SEQ ID NO: 256760 - RNA, 32 nt, Homo Sapiens
ggaauuugccuacuuaccuauaaacagcucac

SEQ ID NO: 256761 - RNA, 32 nt, Homo Sapiens
augaugacauggucuuauuuuaucuauuaacc

SEQ ID NO: 256762 - RNA, 32 nt, Homo Sapiens
cccggagccgacggcgcuggggcccaaggggc

SEQ ID NO: 256763 - RNA, 32 nt, Homo Sapiens
gccccggccccucgucuccccgcacccggagc

SEQ ID NO: 256764 - RNA, 32 nt, Homo Sapiens
agccggggaccgggaauguggaggcgggaauu

SEQ ID NO: 256765 - RNA, 32 nt, Homo Sapiens
ccaaauguaggcaccuggcuccuccuugcucc

SEQ ID NO: 256766 - RNA, 32 nt, Homo Sapiens
uucauguuuucccugauuuuuaucuucucacc

SEQ ID NO: 256767 - RNA, 32 nt, Homo Sapiens
agguuauaaccugguaccagcagacuuugcag

SEQ ID NO: 256768 - RNA, 32 nt, Homo Sapiens
aagagccugggcaacauagugagaccccaucu

SEQ ID NO: 256769 - RNA, 32 nt, Homo Sapiens
gcuccucucgaaccccucuuuggcugccccag

SEQ ID NO: 256770 - RNA, 32 nt, Homo Sapiens
agacgucuuaaggguguuuuuguuuguuuuaa

SEQ ID NO: 256771 - RNA, 32 nt, Homo Sapiens
ccgccccgcgcgcccgccccgcugcgcuaacu

SEQ ID NO: 256772 - RNA, 31 nt, Homo Sapiens
acugauauugccucugagggaguccaacugu

SEQ ID NO: 256773 - RNA, 32 nt, Homo Sapiens
gccucugggccaugccaggccagagcaguggc

SEQ ID NO: 256774 - RNA, 32 nt, Homo Sapiens
guagccaucauuccuuuauuuauuuucauuuu

SEQ ID NO: 256775 - RNA, 32 nt, Homo Sapiens
uguuuuuguauauaagacugcuuccaccugaa

SEQ ID NO: 256776 - RNA, 32 nt, Homo Sapiens
uauaauuuucugucuuuuuuuuuuuuuuugua

SEQ ID NO: 256777 - RNA, 32 nt, Homo Sapiens
ggcaguuuguaucucucucuugacuaauagaa

SEQ ID NO: 256778 - RNA, 32 nt, Homo Sapiens
accccacuuucuuccuuccccagcuccacuaa

SEQ ID NO: 256779 - RNA, 32 nt, Homo Sapiens
uguaucagugcuguuaauuugcuguugccuca

SEQ ID NO: 256780 - RNA, 32 nt, Homo Sapiens
gccagaacaccgugggcuguuacuugcuuuga

SEQ ID NO: 256781 - RNA, 32 nt, Homo Sapiens
cugucaucuuucagccucuuugacuuacucua

SEQ ID NO: 256782 - RNA, 32 nt, Homo Sapiens
ugugguuuacucugccacagucuaaugucauu

SEQ ID NO: 256783 - RNA, 32 nt, Homo Sapiens
agggcggucgagcccgcggcgccauggcucac

SEQ ID NO: 256784 - RNA, 32 nt, Homo Sapiens
auuuuacugugcuuuuauucuaccucaaacac

SEQ ID NO: 256785 - RNA, 32 nt, Homo Sapiens
agcuaggccgggggcgucaggacgacggagcg

SEQ ID NO: 256786 - RNA, 32 nt, Homo Sapiens
agacauuguuaacauuaaaaaauauuuuaaag

SEQ ID NO: 256787 - RNA, 32 nt, Homo Sapiens
ccagucuguugcugcuccaugguggggccaag

SEQ ID NO: 256788 - RNA, 32 nt, Homo Sapiens
guauuauucacauuuuuuguuacagaaucuau

SEQ ID NO: 256789 - RNA, 32 nt, Homo Sapiens
cucuacccauucucuuucugucucguguguau

SEQ ID NO: 256790 - RNA, 32 nt, Homo Sapiens
ggcuaauuuuuuucuuuuuuugagacagaguc

SEQ ID NO: 256791 - RNA, 32 nt, Homo Sapiens
accccuaagugggcugggagccaggcagggcc

SEQ ID NO: 256792 - RNA, 32 nt, Homo Sapiens
guugggccucaggcagggagggggguggggac

SEQ ID NO: 256793 - RNA, 32 nt, Homo Sapiens
ggcucauggcaacgugugucuuucucuggaca

SEQ ID NO: 256794 - RNA, 32 nt, Homo Sapiens
acccagauauguuuuucuaucauuugaaaccu

SEQ ID NO: 256795 - RNA, 32 nt, Homo Sapiens
acaccaccccuauccccugccucccccucuca

SEQ ID NO: 256796 - RNA, 32 nt, Homo Sapiens
agaaauguuuuaacugacuuuggaucuucauc

SEQ ID NO: 256797 - RNA, 32 nt, Homo Sapiens
gcgcaagcauuccagcagccacccagaccaug

SEQ ID NO: 256798 - RNA, 32 nt, Homo Sapiens
acccugcucggcugcguagugcgcuccccgcc

SEQ ID NO: 256799 - RNA, 32 nt, Homo Sapiens
accguaaaccacagacgcucuccagguucuca

SEQ ID NO: 256800 - RNA, 32 nt, Homo Sapiens
uuggacaagacgcagcugaaucucuaagugau

SEQ ID NO: 256801 - RNA, 32 nt, Homo Sapiens
uauuuuauguauaucuauauacacaaauaugu

SEQ ID NO: 256802 - RNA, 32 nt, Homo Sapiens
auaugcagcaauguaauuuuacauugaucugc

SEQ ID NO: 256803 - RNA, 32 nt, Homo Sapiens
acugcaugagaggguuccuuccagcuucacca

SEQ ID NO: 256804 - RNA, 32 nt, Homo Sapiens
uuccgccugggauuuuguuuugucuguucccu

SEQ ID NO: 256805 - RNA, 32 nt, Homo Sapiens
cuaucuaccugccuugucccuguucuggggga

SEQ ID NO: 256806 - RNA, 32 nt, Homo Sapiens
aagccgcgccuauuccccggccugcagcgucc

SEQ ID NO: 256807 - RNA, 32 nt, Homo Sapiens
aaccugggggccacagguuagacucuagagga

SEQ ID NO: 256808 - RNA, 32 nt, Homo Sapiens
aaauuuuacauaaaaguugugcucuuaauaaa

SEQ ID NO: 256809 - RNA, 32 nt, Homo Sapiens
ccucccugccagcacucccccuucaccccaca

SEQ ID NO: 256810 - RNA, 32 nt, Homo Sapiens
cuucauuuuuugcugaugguucccccucgucc

SEQ ID NO: 256811 - RNA, 32 nt, Homo Sapiens
uggagugccccgagauacuagccaguuauaug

SEQ ID NO: 256812 - RNA, 32 nt, Homo Sapiens
acugucuuggugacauucagcuccucauuacu

SEQ ID NO: 256813 - RNA, 28 nt, Homo Sapiens
aaugugguugacuguauguguuugaguu

SEQ ID NO: 256814 - RNA, 32 nt, Homo Sapiens
cucagccuuccuaucaucccacgugucuaccc

SEQ ID NO: 256815 - RNA, 32 nt, Homo Sapiens
cgugacggccacagggucugcccgcugcacgu

SEQ ID NO: 256816 - RNA, 32 nt, Homo Sapiens
ggccacaaggccaguggcaccugccagagggg

SEQ ID NO: 256817 - RNA, 32 nt, Homo Sapiens
cuucuggaguucucugcaguucugggaucaaa

SEQ ID NO: 256818 - RNA, 32 nt, Homo Sapiens
uguucuacacaccacacacuaggccauuuuca

SEQ ID NO: 256819 - RNA, 32 nt, Homo Sapiens
ccguguggccuggaggagcccgagggagugcc

SEQ ID NO: 256820 - RNA, 32 nt, Homo Sapiens
ggggggcagagggcgagucggcggcggcgagg

SEQ ID NO: 256821 - RNA, 32 nt, Homo Sapiens
ggaaucaguaauuugacggcaguguccuuggc

SEQ ID NO: 256822 - RNA, 32 nt, Homo Sapiens
cgugaagaaggugccacagagauggaaggaga

SEQ ID NO: 256823 - RNA, 32 nt, Homo Sapiens
uauuuuauacugacuguauauuuuaaaguaua

SEQ ID NO: 256824 - RNA, 30 nt, Homo Sapiens
ugggccaguuucccugccuuauuuuaccug

SEQ ID NO: 256825 - RNA, 32 nt, Homo Sapiens
uucuucaguaucgacaaagauuacauucugag

SEQ ID NO: 256826 - RNA, 32 nt, Homo Sapiens
cugcugucagaccaaccccgggcccccaucau

SEQ ID NO: 256827 - RNA, 32 nt, Homo Sapiens
augaaaacuuuaaaacagaaguauggguagcu

SEQ ID NO: 256828 - RNA, 32 nt, Homo Sapiens
acuccuaggcuucucccaaacccaggcccuuc

SEQ ID NO: 256829 - RNA, 32 nt, Homo Sapiens
uacuuuuguaucuauuugacauuuuccauuaa

SEQ ID NO: 256830 - RNA, 32 nt, Homo Sapiens
cuggggcagagcggggagcugcagcacagcaa

SEQ ID NO: 256831 - RNA, 32 nt, Homo Sapiens
caagugaucuguucuugguauuuuguuuuguu

SEQ ID NO: 256832 - RNA, 32 nt, Homo Sapiens
ccacugccguggcggcggcugcccuccucaca

SEQ ID NO: 256833 - RNA, 32 nt, Homo Sapiens
uguggcagugaugacugaagacuuuauuaaaa

SEQ ID NO: 256834 - RNA, 32 nt, Homo Sapiens
aaaucagaagacugaggaguugaaagaccagu

SEQ ID NO: 256835 - RNA, 32 nt, Homo Sapiens
uccuggauauugugagagauccaaaguuuagu

SEQ ID NO: 256836 - RNA, 32 nt, Homo Sapiens
gccccggcgccgggcauccuggggaugugcug

SEQ ID NO: 256837 - RNA, 32 nt, Homo Sapiens
gcguggggguggcaaugcaaggcacugaggcc

SEQ ID NO: 256838 - RNA, 32 nt, Homo Sapiens
uuccccuccccgcuccuaaugguacgugggua

SEQ ID NO: 256839 - RNA, 32 nt, Homo Sapiens
uacaguaaauguuugugauguuuccaaugcug

SEQ ID NO: 256840 - RNA, 32 nt, Homo Sapiens
auuguauguaaucaauaaaaccacucuuaugu

SEQ ID NO: 256841 - RNA, 32 nt, Homo Sapiens
uguucuccggguguggccucagcccucagaac

SEQ ID NO: 256842 - RNA, 31 nt, Homo Sapiens
ugggaucauuugagcuuaaaaaauacugggg

SEQ ID NO: 256843 - RNA, 32 nt, Homo Sapiens
ugauaguaagugaguucucaugagaucugacg

SEQ ID NO: 256844 - RNA, 32 nt, Homo Sapiens
ugcagucaggugggcggugugucuuuccagaa

SEQ ID NO: 256845 - RNA, 32 nt, Homo Sapiens
augcuagauaaacuuuucuuuuaucuucccuu

SEQ ID NO: 256846 - RNA, 32 nt, Homo Sapiens
caucacgcccgguaccugcucccggccgcugc

SEQ ID NO: 256847 - RNA, 32 nt, Homo Sapiens
cuagccagugaacauaauucuuauuacuagac

SEQ ID NO: 256848 - RNA, 32 nt, Homo Sapiens
cugaaauauaaaauguguuuacuguaaaauau

SEQ ID NO: 256849 - RNA, 32 nt, Homo Sapiens
aaccuguugucccuaccuggugacggauggcu

SEQ ID NO: 256850 - RNA, 32 nt, Homo Sapiens
aacaaaggcaaguuaagagaaacuuuauacau

SEQ ID NO: 256851 - RNA, 32 nt, Homo Sapiens
ugagcugcaauaacaggaacaugagacuucgc

SEQ ID NO: 256852 - RNA, 32 nt, Homo Sapiens
uucuucugccucagucucccaaguagcuggga

SEQ ID NO: 256853 - RNA, 32 nt, Homo Sapiens
aucuuccccagcagccaccuccucugagaucc

SEQ ID NO: 256854 - RNA, 32 nt, Homo Sapiens
acugugguauugagacaugaugagaagccguu

SEQ ID NO: 256855 - RNA, 30 nt, Homo Sapiens
cgguuccuggguggcggcggcauggaggcg

SEQ ID NO: 256856 - RNA, 32 nt, Homo Sapiens
uuucuccaggaugccaacugcacuagcugugu

SEQ ID NO: 256857 - RNA, 32 nt, Homo Sapiens
accccccuccccccggccccaagccccugugu

SEQ ID NO: 256858 - RNA, 32 nt, Homo Sapiens
acugucugucuccaucgucucauccuccuuuc

SEQ ID NO: 256859 - RNA, 32 nt, Homo Sapiens
aacuagaaagaugaaaacuuuuacauuuuucu

SEQ ID NO: 256860 - RNA, 32 nt, Homo Sapiens
uacaucaucuuauuuugguuuuauaccaauaa

SEQ ID NO: 256861 - RNA, 32 nt, Homo Sapiens
ccaacuuccugacgaggcuacaaaggcuccgc

SEQ ID NO: 256862 - RNA, 32 nt, Homo Sapiens
cuguggcugaccucugccccagcccucuuucu

SEQ ID NO: 256863 - RNA, 32 nt, Homo Sapiens
uuuagccauucuuaucuccucccuucagaucc

SEQ ID NO: 256864 - RNA, 32 nt, Homo Sapiens
uguuauaacaaggacucguucauguauauaag

SEQ ID NO: 256865 - RNA, 29 nt, Homo Sapiens
ggagcccgcggcagguggacgccgccggu

SEQ ID NO: 256866 - RNA, 32 nt, Homo Sapiens
cagaccagccccagcccuuuauuccucuccau

SEQ ID NO: 256867 - RNA, 32 nt, Homo Sapiens
caaagacugcuaaagaauaaaacuguuaaaga

SEQ ID NO: 256868 - RNA, 32 nt, Homo Sapiens
cagccccuugcugucauccccucccccaaccu

SEQ ID NO: 256869 - RNA, 32 nt, Homo Sapiens
acguuauacugaaauuaaauguuuauaauuua

SEQ ID NO: 256870 - RNA, 32 nt, Homo Sapiens
gugaaggacgccgacgggguccucugccggua

SEQ ID NO: 256871 - RNA, 32 nt, Homo Sapiens
acagcagcuguccgccaggaugcaugugcucu

SEQ ID NO: 256872 - RNA, 32 nt, Homo Sapiens
aaggauagaaaacuaaaauuauaggguagccu

SEQ ID NO: 256873 - RNA, 32 nt, Homo Sapiens
ugguucuacuacauguugcauuauuacaaaau

SEQ ID NO: 256874 - RNA, 32 nt, Homo Sapiens
auaauuggauacucauucuucccuucaaaacc

SEQ ID NO: 256875 - RNA, 32 nt, Homo Sapiens
accugugucccccaccuccacccucaacccau

SEQ ID NO: 256876 - RNA, 32 nt, Homo Sapiens
ggaaaagagaagagaaucuaaaaaauaaacca

SEQ ID NO: 256877 - RNA, 32 nt, Homo Sapiens
agucugauucagaaaauaauuguaauguucau

SEQ ID NO: 256878 - RNA, 32 nt, Homo Sapiens
ggccuggaggccggaggcucuccugagugucu

SEQ ID NO: 256879 - RNA, 32 nt, Homo Sapiens
uuauucaccuuaucgugccgcuucauggaagc

SEQ ID NO: 256880 - RNA, 32 nt, Homo Sapiens
uuagaaugcagauuauacuaauauccugaaau

SEQ ID NO: 256881 - RNA, 32 nt, Homo Sapiens
ucugggguguggaaauggucuaaaaccuauug

SEQ ID NO: 256882 - RNA, 32 nt, Homo Sapiens
ccgccgggcuccuggggcuguggccgaaaggu

SEQ ID NO: 256883 - RNA, 32 nt, Homo Sapiens
caaugacaagcacuuuacuuucacggugguuu

SEQ ID NO: 256884 - RNA, 32 nt, Homo Sapiens
uguuauaauuaauuguauaccuguguauguaa

SEQ ID NO: 256885 - RNA, 32 nt, Homo Sapiens
aaaauacauauuugggacucuuauuaucaagg

SEQ ID NO: 256886 - RNA, 32 nt, Homo Sapiens
aaugccaucugauaaaaaagaauagaaaugga

SEQ ID NO: 256887 - RNA, 32 nt, Homo Sapiens
agagagaaaaagauaaaugcuucauuucuguu

SEQ ID NO: 256888 - RNA, 32 nt, Homo Sapiens
uucuccaaacucccguccccaggccacacaga

SEQ ID NO: 256889 - RNA, 32 nt, Homo Sapiens
agccuaucuuagugccaacugcuuuuuauuuu

SEQ ID NO: 256890 - RNA, 32 nt, Homo Sapiens
gaucagcuugauacaagaacuacugauuucaa

SEQ ID NO: 256891 - RNA, 32 nt, Homo Sapiens
uggcaaauauauauuuucacuaacuaaaaaaa

SEQ ID NO: 256892 - RNA, 32 nt, Homo Sapiens
gggaaggaggucgagcugggcuugcguggggg

SEQ ID NO: 256893 - RNA, 32 nt, Homo Sapiens
caacgcucaggguccaugaguaccucaggcug

SEQ ID NO: 256894 - RNA, 32 nt, Homo Sapiens
gaauuaaucuuaauuuuguauuuuuuccugua

SEQ ID NO: 256895 - RNA, 32 nt, Homo Sapiens
uaugaggaaguugccaucuuuacuuccaggag

SEQ ID NO: 256896 - RNA, 32 nt, Homo Sapiens
cucauugcaagccccaagcacugagccagcag

SEQ ID NO: 256897 - RNA, 32 nt, Homo Sapiens
ucgcccgcgcagcaacggccucaauagcgcca

SEQ ID NO: 256898 - RNA, 32 nt, Homo Sapiens
aaccaagggagaaaaagacugagaugugaagg

SEQ ID NO: 256899 - RNA, 32 nt, Homo Sapiens
agucuuucuaacugaauacuuguuuuauagaa

SEQ ID NO: 256900 - RNA, 32 nt, Homo Sapiens
auucaguuuaacugaaauuugcugcugauaug

SEQ ID NO: 256901 - RNA, 32 nt, Homo Sapiens
cccggcacccucgagggccggcuagggcgugc

SEQ ID NO: 256902 - RNA, 32 nt, Homo Sapiens
gcuguggauuugggggcacuuugugggagacu

SEQ ID NO: 256903 - RNA, 32 nt, Homo Sapiens
gauccacacaaagaaauggucuacaccagaaa

SEQ ID NO: 256904 - RNA, 29 nt, Homo Sapiens
gggcgguggggacagauguugacacaaau

SEQ ID NO: 256905 - RNA, 32 nt, Homo Sapiens
gagaaccacggugaaagugcugcucuaggccc

SEQ ID NO: 256906 - RNA, 32 nt, Homo Sapiens
uauccgugaggaugugcugcaggugcacaaag

SEQ ID NO: 256907 - RNA, 32 nt, Homo Sapiens
ggcgcuugagaggacgcggggcugcgcaaaug

SEQ ID NO: 256908 - RNA, 32 nt, Homo Sapiens
ccaggagaugagagagaaggucgaguagguga

SEQ ID NO: 256909 - RNA, 32 nt, Homo Sapiens
gcaauaccaaaauaaaccuagaaauauuguuu

SEQ ID NO: 256910 - RNA, 32 nt, Homo Sapiens
gccuuccagaucuggcuccagggucaccaccu

SEQ ID NO: 256911 - RNA, 32 nt, Homo Sapiens
agcugugucugugccaguaugccggaaucuca

SEQ ID NO: 256912 - RNA, 32 nt, Homo Sapiens
gcaaacuucuaaaaagcaacaaacuacuaaac

SEQ ID NO: 256913 - RNA, 32 nt, Homo Sapiens
caaacuguugacuuguaaaaucaauaaagucu

SEQ ID NO: 256914 - RNA, 32 nt, Homo Sapiens
guccagugugaucugccuggaucuugcugcau

SEQ ID NO: 256915 - RNA, 32 nt, Homo Sapiens
uggggguccagggcuggugcugcucuucccuc

SEQ ID NO: 256916 - RNA, 32 nt, Homo Sapiens
cuucccgccucccgucuccgagcuucuuaaac

SEQ ID NO: 256917 - RNA, 32 nt, Homo Sapiens
gcccggcccagcugcagccacccuucucaucu

SEQ ID NO: 256918 - RNA, 32 nt, Homo Sapiens
ggccccuugucuaugaucuuuuuagcuugauu

SEQ ID NO: 256919 - RNA, 32 nt, Homo Sapiens
ccccagccuuggggcucuggcuccccccggcg

SEQ ID NO: 256920 - RNA, 32 nt, Homo Sapiens
cugcacagaugaacaccaugagcuugcuggaa

SEQ ID NO: 256921 - RNA, 32 nt, Homo Sapiens
cccaguaaccaccuauuuauuuuaccucuuuc

SEQ ID NO: 256922 - RNA, 32 nt, Homo Sapiens
gucacaguauacauugguaauaaaauauuucc

SEQ ID NO: 256923 - RNA, 30 nt, Homo Sapiens
agccuguaucaccuguguaaguugguauuu

SEQ ID NO: 256924 - RNA, 32 nt, Homo Sapiens
gacaggcaugcgccaccacgcccugauaauuu

SEQ ID NO: 256925 - RNA, 32 nt, Homo Sapiens
caaugggaagcagacaauaacuucuuaaagga

SEQ ID NO: 256926 - RNA, 32 nt, Homo Sapiens
uauaucuguauauauuggcuagcaaaugugcc

SEQ ID NO: 256927 - RNA, 32 nt, Homo Sapiens
uaauuugugggaaggaguaggcaaagaauaug

SEQ ID NO: 256928 - RNA, 32 nt, Homo Sapiens
auuuucauauguuuuucuuuuauuucuucauu

SEQ ID NO: 256929 - RNA, 32 nt, Homo Sapiens
acaggccuguguuccugggcugauggccacag

SEQ ID NO: 256930 - RNA, 32 nt, Homo Sapiens
gaaaggaaagaaggaacaauuauuaggcucuc

SEQ ID NO: 256931 - RNA, 32 nt, Homo Sapiens
ugacuguagaacuuauucucuguaggccaaau

SEQ ID NO: 256932 - RNA, 32 nt, Homo Sapiens
gauuucuugucuuuuuuuuuuauuucuuacuu

SEQ ID NO: 256933 - RNA, 32 nt, Homo Sapiens
uggaggggagggauggagagaauaggaaucuu

SEQ ID NO: 256934 - RNA, 32 nt, Homo Sapiens
cucagcaccuuaaauuguuggccugaaguggu

SEQ ID NO: 256935 - RNA, 32 nt, Homo Sapiens
uaaacgaggccacaaaucaugcuuguuaauaa

SEQ ID NO: 256936 - RNA, 32 nt, Homo Sapiens
uucggggagacggaggccacgcucagcaggaa

SEQ ID NO: 256937 - RNA, 32 nt, Homo Sapiens
acaaugcaucugacaugugcgaugcaucccca

SEQ ID NO: 256938 - RNA, 32 nt, Homo Sapiens
agacuaacaauaaccuccuccaaaaaauaacu

SEQ ID NO: 256939 - RNA, 32 nt, Homo Sapiens
aaaaaauuagaacauuuaccgaugcuggaccc

SEQ ID NO: 256940 - RNA, 32 nt, Homo Sapiens
ccgagcgccggcugcuggggcugcugaggcgg

SEQ ID NO: 256941 - RNA, 32 nt, Homo Sapiens
ugucuguguaauuauuuugcucuuugauuaaa

SEQ ID NO: 256942 - RNA, 32 nt, Homo Sapiens
ugugaauagccacugcacucuagucuggggaa

SEQ ID NO: 256943 - RNA, 32 nt, Homo Sapiens
uacagaccaaaauccacuugucagcaggagca

SEQ ID NO: 256944 - RNA, 32 nt, Homo Sapiens
ugguuuaguaaaguugauaccugguuauaaau

SEQ ID NO: 256945 - RNA, 32 nt, Homo Sapiens
aucuuuccuuagaugaauaaaugaaaguuuua

SEQ ID NO: 256946 - RNA, 32 nt, Homo Sapiens
aagugaaguauuuuucaaagaaugcaguuauu

SEQ ID NO: 256947 - RNA, 32 nt, Homo Sapiens
gggcagucauaagcucuguuucccccucuccc

SEQ ID NO: 256948 - RNA, 32 nt, Homo Sapiens
cguggagccugccuggucucuggggguguuga

SEQ ID NO: 256949 - RNA, 32 nt, Homo Sapiens
gaacuuuacugacuuucccuggaggccagagg

SEQ ID NO: 256950 - RNA, 32 nt, Homo Sapiens
aagccaggcagacacuguccagagaggccucu

SEQ ID NO: 256951 - RNA, 32 nt, Homo Sapiens
cugcaauccaaauguauccauucuggcugaag

SEQ ID NO: 256952 - RNA, 32 nt, Homo Sapiens
uuacugggacgccacgccaagaauggacugcc

SEQ ID NO: 256953 - RNA, 32 nt, Homo Sapiens
aaccuccccuucaccuucuccuccaccugcua

SEQ ID NO: 256954 - RNA, 32 nt, Homo Sapiens
cgugugcccccaggacuuugccucuacagcau

SEQ ID NO: 256955 - RNA, 32 nt, Homo Sapiens
agcaaagacauucugcucagggucaccauggg

SEQ ID NO: 256956 - RNA, 32 nt, Homo Sapiens
gaggguggacgaagcucucuccagaaagacau

SEQ ID NO: 256957 - RNA, 32 nt, Homo Sapiens
agucgcguuccuccccuaccccgccccgccac

SEQ ID NO: 256958 - RNA, 32 nt, Homo Sapiens
ugcagaccgcucucccguccagcccuaagccu

SEQ ID NO: 256959 - RNA, 32 nt, Homo Sapiens
agaauaacaaaauaagauuuguuguccauugu

SEQ ID NO: 256960 - RNA, 32 nt, Homo Sapiens
cagguaucagugaacgaaaucaaacaauauuu

SEQ ID NO: 256961 - RNA, 32 nt, Homo Sapiens
ugugccacugagcgucccacugcugcugggca

SEQ ID NO: 256962 - RNA, 32 nt, Homo Sapiens
ugucucaaaaaaguuaauuaauuuauagauca

SEQ ID NO: 256963 - RNA, 32 nt, Homo Sapiens
guggcuuuugcagcucuggacacgcgggugca

SEQ ID NO: 256964 - RNA, 32 nt, Homo Sapiens
aggugcaggcucccggccccagcuucucuggu

SEQ ID NO: 256965 - RNA, 32 nt, Homo Sapiens
ugcauuuccuucccuuugcacagcuugaagaa

SEQ ID NO: 256966 - RNA, 32 nt, Homo Sapiens
aaacacuuauuuacaguuacuaguuuauuaua

SEQ ID NO: 256967 - RNA, 32 nt, Homo Sapiens
ucacugaggggaggauggggcacauucuaguc

SEQ ID NO: 256968 - RNA, 32 nt, Homo Sapiens
aaacgagauugugguuacuguugugcucccca

SEQ ID NO: 256969 - RNA, 32 nt, Homo Sapiens
gcugcaucuucccacaguggcuucacagaccc

SEQ ID NO: 256970 - RNA, 32 nt, Homo Sapiens
ucagaccagagaaggggugugcaugcgccuac

SEQ ID NO: 256971 - RNA, 32 nt, Homo Sapiens
guggaaggggagaggaacucgaaagcacagcu

SEQ ID NO: 256972 - RNA, 32 nt, Homo Sapiens
ggccaggcgcgguggcucaggccuguaauccc

SEQ ID NO: 256973 - RNA, 32 nt, Homo Sapiens
agauuaaccuacucuggacauuucauauaucu

SEQ ID NO: 256974 - RNA, 32 nt, Homo Sapiens
ggcagggggcggcugcagcugcugccuccacu

SEQ ID NO: 256975 - RNA, 32 nt, Homo Sapiens
cacgaggcaacgcuuacuauccaccggguaac

SEQ ID NO: 256976 - RNA, 32 nt, Homo Sapiens
agacacaguuugcucugucacccaggcuggag

SEQ ID NO: 256977 - RNA, 32 nt, Homo Sapiens
cggaugguggacagaucggggaggagaggagg

SEQ ID NO: 256978 - RNA, 32 nt, Homo Sapiens
uccggaagaugcugaggaugacagcuuuuagc

SEQ ID NO: 256979 - RNA, 32 nt, Homo Sapiens
uaaugaauguguuguacugguauaaagguaga

SEQ ID NO: 256980 - RNA, 32 nt, Homo Sapiens
ugaguucagguguuaugccugauuccuucauc

SEQ ID NO: 256981 - RNA, 32 nt, Homo Sapiens
gcaaggcagcagccuucccagccagcccuugu

SEQ ID NO: 256982 - RNA, 32 nt, Homo Sapiens
caugucggagaccagcagaaauggcuccaaaa

SEQ ID NO: 256983 - RNA, 32 nt, Homo Sapiens
guauuucaaguuuuuuuuuuuauaagcaaugu

SEQ ID NO: 256984 - RNA, 32 nt, Homo Sapiens
ugauuuauucuccuuucaccuuguuuucuuca

SEQ ID NO: 256985 - RNA, 32 nt, Homo Sapiens
gguaaaacaauugcuuuuuuuuuuuuuugcau

SEQ ID NO: 256986 - RNA, 32 nt, Homo Sapiens
gagagagacaccuggucacccaggcugcagaa

SEQ ID NO: 256987 - RNA, 32 nt, Homo Sapiens
uauauguucaaauauaagcgcuuuauguauau

SEQ ID NO: 256988 - RNA, 30 nt, Homo Sapiens
ccggagggcaggcggacucgcccugucggu

SEQ ID NO: 256989 - RNA, 30 nt, Homo Sapiens
auuuugcaaaauauauauuauuugaguuuc

SEQ ID NO: 256990 - RNA, 32 nt, Homo Sapiens
ucacaaauuuaaauccaaguguucuaaggaca

SEQ ID NO: 256991 - RNA, 32 nt, Homo Sapiens
uugaaccuggggauuguugggaagcucugccu

SEQ ID NO: 256992 - RNA, 32 nt, Homo Sapiens
ggcaaagugucugcaucuucguccagcgaccc

SEQ ID NO: 256993 - RNA, 32 nt, Homo Sapiens
agucuaguucccuacagaaaacccaaggagug

SEQ ID NO: 256994 - RNA, 32 nt, Homo Sapiens
cagauugagaaccucggggacuugagccuucu

SEQ ID NO: 256995 - RNA, 32 nt, Homo Sapiens
gaaauguucaguaaugaaaaaauauauccaau

SEQ ID NO: 256996 - RNA, 32 nt, Homo Sapiens
auguaggcuccuccaagaagucucccaugauc

SEQ ID NO: 256997 - RNA, 32 nt, Homo Sapiens
aaggaggccuggacuuccccucccagcaccuu

SEQ ID NO: 256998 - RNA, 32 nt, Homo Sapiens
cuauguauuuccuauaaugaugucugauauuu

SEQ ID NO: 256999 - RNA, 32 nt, Homo Sapiens
acuugcgcgcggagccgagcucuuguugagcu

SEQ ID NO: 257000 - RNA, 32 nt, Homo Sapiens
cuacuucccucacccacuuuggccuccguuca

SEQ ID NO: 257001 - RNA, 32 nt, Homo Sapiens
uccaauucauuuuaacacuuguccuguuucuu

SEQ ID NO: 257002 - RNA, 32 nt, Homo Sapiens
aaucucugccccggucugauguuuccuacagg

SEQ ID NO: 257003 - RNA, 32 nt, Homo Sapiens
gcccacaguuuuucuuuuuaaaggugguuuuc

SEQ ID NO: 257004 - RNA, 32 nt, Homo Sapiens
auuacuuuucuuuuuuaagucuacuuuuaaaa

SEQ ID NO: 257005 - RNA, 32 nt, Homo Sapiens
gggccgucgccagccccggcccgggcucgaga

SEQ ID NO: 257006 - RNA, 32 nt, Homo Sapiens
cacgaggugugaaugacagagguggugccauc

SEQ ID NO: 257007 - RNA, 32 nt, Homo Sapiens
gccacauccugccgggguuccggagcgccgcc

SEQ ID NO: 257008 - RNA, 32 nt, Homo Sapiens
ugaugacuccuacuccauuguuuaccccaaag

SEQ ID NO: 257009 - RNA, 32 nt, Homo Sapiens
agccuggagcagccucuccuguccacagccag

SEQ ID NO: 257010 - RNA, 32 nt, Homo Sapiens
gggcagugggcaugaaucuacuuuuuaaaaau

SEQ ID NO: 257011 - RNA, 32 nt, Homo Sapiens
caucaccucccucucuggccucagcagcagug

SEQ ID NO: 257012 - RNA, 32 nt, Homo Sapiens
uagcuggugcuggccugaggcagggcaggaaa

SEQ ID NO: 257013 - RNA, 32 nt, Homo Sapiens
gggggaaagggagggcgagcccuugggaugcc

SEQ ID NO: 257014 - RNA, 32 nt, Homo Sapiens
uggaggccuucaaaauacaaauauagucuaaa

SEQ ID NO: 257015 - RNA, 32 nt, Homo Sapiens
ggguaccaagcagcugcacagucggugccugg

SEQ ID NO: 257016 - RNA, 32 nt, Homo Sapiens
gcagcaggccccagaggcuucucugcaccucu

SEQ ID NO: 257017 - RNA, 32 nt, Homo Sapiens
ggaugugcuuugguguacugaggugucugaug

SEQ ID NO: 257018 - RNA, 32 nt, Homo Sapiens
gagcagcuccgcgccggcccugagagacuaag

SEQ ID NO: 257019 - RNA, 32 nt, Homo Sapiens
aaaaaaaaaaaauuauuaaaaaaaaaaaaaaa

SEQ ID NO: 257020 - RNA, 32 nt, Homo Sapiens
agcgauuuuuauuuuuuaagugucucuuccuu

SEQ ID NO: 257021 - RNA, 32 nt, Homo Sapiens
guaugagacauuacuguuuuaauguuugcuuu

SEQ ID NO: 257022 - RNA, 32 nt, Homo Sapiens
uugcaucaaacacuuagguaccugccugauua

SEQ ID NO: 257023 - RNA, 32 nt, Homo Sapiens
uccacugcuucuuuuuccugugccuuuuuaac

SEQ ID NO: 257024 - RNA, 32 nt, Homo Sapiens
agucaggcccaggaugaggaacaaagagggac

SEQ ID NO: 257025 - RNA, 32 nt, Homo Sapiens
gagcauuucucuaacguuuauuacaauuagga

SEQ ID NO: 257026 - RNA, 32 nt, Homo Sapiens
gggcuggggccagcugcagggcugcagcgcug

SEQ ID NO: 257027 - RNA, 32 nt, Homo Sapiens
agcugucuggcuguauaacucuuacaguaguc

SEQ ID NO: 257028 - RNA, 32 nt, Homo Sapiens
ccccccacccccagccccgucuccgccuccca

SEQ ID NO: 257029 - RNA, 32 nt, Homo Sapiens
ggcugggcaugguggcucaugacuauaguagu

SEQ ID NO: 257030 - RNA, 32 nt, Homo Sapiens
gcgggcgccagguuccagcggcggcggcggca

SEQ ID NO: 257031 - RNA, 32 nt, Homo Sapiens
agacccgcgcccuccgccagccgggcgcaccc

SEQ ID NO: 257032 - RNA, 32 nt, Homo Sapiens
gaccugccaaggccugggggagcccgccagcc

SEQ ID NO: 257033 - RNA, 32 nt, Homo Sapiens
cagaguccccaguguccccuccccuccaucuc

SEQ ID NO: 257034 - RNA, 32 nt, Homo Sapiens
uauagguuaugaugaagugaauagacauauca

SEQ ID NO: 257035 - RNA, 32 nt, Homo Sapiens
ucgcucccggagagccgagccgagcgccggcg

SEQ ID NO: 257036 - RNA, 32 nt, Homo Sapiens
uugcuuuugggagacuggaaaagggaagguga

SEQ ID NO: 257037 - RNA, 32 nt, Homo Sapiens
caaagauccagaagcagaucucacuggucaua

SEQ ID NO: 257038 - RNA, 32 nt, Homo Sapiens
ugcacggggcgccccgccaaggaggcaccugg

SEQ ID NO: 257039 - RNA, 32 nt, Homo Sapiens
cuacuugaaaauaauaaaguggcauuucuuua

SEQ ID NO: 257040 - RNA, 32 nt, Homo Sapiens
aaaagcaguccgucuggauuuguuugcccagg

SEQ ID NO: 257041 - RNA, 28 nt, Homo Sapiens
gacgagugagcuaccaggaagaggggcg

SEQ ID NO: 257042 - RNA, 32 nt, Homo Sapiens
accugauguuuccugacugcuuucuccuuccu

SEQ ID NO: 257043 - RNA, 32 nt, Homo Sapiens
ccugggaccugccuucuguccuggccgggcca

SEQ ID NO: 257044 - RNA, 32 nt, Homo Sapiens
ggaucccuuucugacgggaaagaaaggcgcua

SEQ ID NO: 257045 - RNA, 32 nt, Homo Sapiens
ggcucuuccgccugugguucccaccaugcucc

SEQ ID NO: 257046 - RNA, 32 nt, Homo Sapiens
agucuuauccacguugggauccuuggccuugg

SEQ ID NO: 257047 - RNA, 32 nt, Homo Sapiens
uuauuaggaggaccagcagcucuuaguccauu

SEQ ID NO: 257048 - RNA, 32 nt, Homo Sapiens
ccagaaagaaaagauagacugauuuguauuug

SEQ ID NO: 257049 - RNA, 32 nt, Homo Sapiens
uuuggaaaggauuaagcugagaucuaaauuuc

SEQ ID NO: 257050 - RNA, 32 nt, Homo Sapiens
cggcuuguguugugacauuuaacacaagauuu

SEQ ID NO: 257051 - RNA, 32 nt, Homo Sapiens
aauuuauuaggggaaaguuuguagcuuuuauu

SEQ ID NO: 257052 - RNA, 32 nt, Homo Sapiens
ucgcugccuggcggccuuuccccgagccgagc

SEQ ID NO: 257053 - RNA, 32 nt, Homo Sapiens
aggaggaagcuagaggaaaaauggaaaugcag

SEQ ID NO: 257054 - RNA, 32 nt, Homo Sapiens
ucuuaaagccccaggccagaacuucuugggag

SEQ ID NO: 257055 - RNA, 29 nt, Homo Sapiens
augccuucguguuuucugagcagaaugua

SEQ ID NO: 257056 - RNA, 32 nt, Homo Sapiens
aguguacaauauauuuuuauacugugacuuaa

SEQ ID NO: 257057 - RNA, 32 nt, Homo Sapiens
cguggccgaggcgggcggcuccuucgaccugc

SEQ ID NO: 257058 - RNA, 32 nt, Homo Sapiens
ccgggcagcggggacacguaccggcccaagcg

SEQ ID NO: 257059 - RNA, 32 nt, Homo Sapiens
uaggcugaaccuugagucccccugcuuuuugg

SEQ ID NO: 257060 - RNA, 32 nt, Homo Sapiens
uguucccccuucacccuucucuguuaaccuug

SEQ ID NO: 257061 - RNA, 32 nt, Homo Sapiens
guguaaaaugucauuuuguuuggaauguuaag

SEQ ID NO: 257062 - RNA, 32 nt, Homo Sapiens
acugccuugacaugaggaccagcaaguuuauu

SEQ ID NO: 257063 - RNA, 32 nt, Homo Sapiens
ggggugccagcaucgugcaagcucugucauaa

SEQ ID NO: 257064 - RNA, 32 nt, Homo Sapiens
cgcccgagucccgcggccccaguggcgccuca

SEQ ID NO: 257065 - RNA, 32 nt, Homo Sapiens
ggacucuuccucucaucaguacuauugucaaa

SEQ ID NO: 257066 - RNA, 32 nt, Homo Sapiens
agguauauuaaagaaugaaaucuuugguuacu

SEQ ID NO: 257067 - RNA, 32 nt, Homo Sapiens
aaacacuugcccuuuuuccugggauguaacua

SEQ ID NO: 257068 - RNA, 32 nt, Homo Sapiens
gaaaugaccgaccugauguguguuauaaccca

SEQ ID NO: 257069 - RNA, 32 nt, Homo Sapiens
gcuuccugccagcaaagaugaguaaugucuca

SEQ ID NO: 257070 - RNA, 32 nt, Homo Sapiens
caucccugugugcugcagcaucaccacggccu

SEQ ID NO: 257071 - RNA, 32 nt, Homo Sapiens
ggcaguucggagagauuuuucuuaaggaagca

SEQ ID NO: 257072 - RNA, 32 nt, Homo Sapiens
gaguguuucugggccaggauccgggccccugc

SEQ ID NO: 257073 - RNA, 32 nt, Homo Sapiens
uaccaccccccgccccccacccaggaucauuc

SEQ ID NO: 257074 - RNA, 30 nt, Homo Sapiens
agcuucaucugugcugcaaacucucaucag

SEQ ID NO: 257075 - RNA, 32 nt, Homo Sapiens
aaucgcagcggcggcggcagcggcgggagaag

SEQ ID NO: 257076 - RNA, 32 nt, Homo Sapiens
uagcuggagcagcuccuuccccuuugcugaua

SEQ ID NO: 257077 - RNA, 32 nt, Homo Sapiens
uuguggcggcgcccgcgcucgcaggccacucu

SEQ ID NO: 257078 - RNA, 32 nt, Homo Sapiens
uaccugauagucuguguacagcauuguuuugu

SEQ ID NO: 257079 - RNA, 32 nt, Homo Sapiens
ucauuucccguguguuuccauuuccuucugaa

SEQ ID NO: 257080 - RNA, 32 nt, Homo Sapiens
cuggugcauaugcuuuuuccacgagugucugu

SEQ ID NO: 257081 - RNA, 32 nt, Homo Sapiens
cuccucccgagcucccaguaggauguccagac

SEQ ID NO: 257082 - RNA, 32 nt, Homo Sapiens
auugcagggggcggggguuggaggcuggggac

SEQ ID NO: 257083 - RNA, 32 nt, Homo Sapiens
gaauuccuaaacuuuaaaaugguacugucugc

SEQ ID NO: 257084 - RNA, 32 nt, Homo Sapiens
caguuccccaggcuccuccuccaaaugccagc

SEQ ID NO: 257085 - RNA, 32 nt, Homo Sapiens
gaccucaggugauccgcccacuuuggccuccc

SEQ ID NO: 257086 - RNA, 32 nt, Homo Sapiens
ccaccaccacaaaagcacccaggccgccgccu

SEQ ID NO: 257087 - RNA, 32 nt, Homo Sapiens
ccucaagucucaccaguucugcucucccauca

SEQ ID NO: 257088 - RNA, 32 nt, Homo Sapiens
ucagccuuuggacaggacccagcccugcaccg

SEQ ID NO: 257089 - RNA, 32 nt, Homo Sapiens
ccaccccccuccccaacucccucucugugcau

SEQ ID NO: 257090 - RNA, 32 nt, Homo Sapiens
uuacaauaaaagcaacuuuuaauuguauagau

SEQ ID NO: 257091 - RNA, 32 nt, Homo Sapiens
cacacaggugaccccaggacucuggcccucug

SEQ ID NO: 257092 - RNA, 32 nt, Homo Sapiens
uaugcaaagagauguacugcauuuuaccccca

SEQ ID NO: 257093 - RNA, 32 nt, Homo Sapiens
ugcugguuuuuaaaugugcaucaagaaagacu

SEQ ID NO: 257094 - RNA, 32 nt, Homo Sapiens
uaaaauuguuaaguugugcauuacuguauuuu

SEQ ID NO: 257095 - RNA, 32 nt, Homo Sapiens
guguucugcuuuucuuuucagauuguugaaau

SEQ ID NO: 257096 - RNA, 32 nt, Homo Sapiens
caguagaagaacuuaaaaauuuguucacauua

SEQ ID NO: 257097 - RNA, 32 nt, Homo Sapiens
ugauaaaagcuacuugcuucauuacaauuuca

SEQ ID NO: 257098 - RNA, 30 nt, Homo Sapiens
gggagaggcaggcgucaguggcugcgccuc

SEQ ID NO: 257099 - RNA, 32 nt, Homo Sapiens
uaucuuaguugaaggacuugggaaauacuauc

SEQ ID NO: 257100 - RNA, 32 nt, Homo Sapiens
ggccgggcacgguggcucaugccuguaguccc

SEQ ID NO: 257101 - RNA, 32 nt, Homo Sapiens
augugacucucccaggccccagaauagcuccu

SEQ ID NO: 257102 - RNA, 32 nt, Homo Sapiens
cagcaaaguuugggagcuacugauggacaugu

SEQ ID NO: 257103 - RNA, 32 nt, Homo Sapiens
uuuuguaguguucuauacuaacagcuaguaag

SEQ ID NO: 257104 - RNA, 32 nt, Homo Sapiens
gucccagggucuuccugucacccaggcuggag

SEQ ID NO: 257105 - RNA, 32 nt, Homo Sapiens
cacaggacacuuccuuguugucuuuuguggaa

SEQ ID NO: 257106 - RNA, 32 nt, Homo Sapiens
gcugccuguggcggggguggccgcguguacca

SEQ ID NO: 257107 - RNA, 32 nt, Homo Sapiens
aacugcaucuggauguguuuuuauuauacaau

SEQ ID NO: 257108 - RNA, 32 nt, Homo Sapiens
uauucuuuuucuacucaaagugccaaaggcua

SEQ ID NO: 257109 - RNA, 30 nt, Homo Sapiens
aucaccgccacugccaccccucccagacug

SEQ ID NO: 257110 - RNA, 32 nt, Homo Sapiens
ugcacuuuaaacaauuuggauauuggaaugca

SEQ ID NO: 257111 - RNA, 32 nt, Homo Sapiens
gugucuuagauauauuuuaaauagaaaauaag

SEQ ID NO: 257112 - RNA, 32 nt, Homo Sapiens
acucucaggcaaccccaccucccccucucccu

SEQ ID NO: 257113 - RNA, 32 nt, Homo Sapiens
ucugaaauauccaaaaaauuaaccugaagcag

SEQ ID NO: 257114 - RNA, 32 nt, Homo Sapiens
uuuucuuauauauacauaccuaugauaaaauu

SEQ ID NO: 257115 - RNA, 32 nt, Homo Sapiens
caggcgguguauaaaaacuaaugucaguuuaa

SEQ ID NO: 257116 - RNA, 27 nt, Homo Sapiens
guggcucgcuucuucagugccccgcug

SEQ ID NO: 257117 - RNA, 32 nt, Homo Sapiens
guuguuauuguggcuuuuuuuuuuuuuuaacc

SEQ ID NO: 257118 - RNA, 32 nt, Homo Sapiens
guaaugaagaacccaagcuacaguucaguuau

SEQ ID NO: 257119 - RNA, 32 nt, Homo Sapiens
cggccucgcccugcccgcccucaugggcaccg

SEQ ID NO: 257120 - RNA, 32 nt, Homo Sapiens
cggccaucgugcugcgcagccugggcgcuugg

SEQ ID NO: 257121 - RNA, 32 nt, Homo Sapiens
uagggaaaugaaaaucaaaaccacaaugagau

SEQ ID NO: 257122 - RNA, 32 nt, Homo Sapiens
ggagcuauccugaagggugaugaugaggguua

SEQ ID NO: 257123 - RNA, 32 nt, Homo Sapiens
agacacuguggcagugagucauccucuaauuu

SEQ ID NO: 257124 - RNA, 32 nt, Homo Sapiens
uuugugaagacacgugggcgggaugggcgcag

SEQ ID NO: 257125 - RNA, 32 nt, Homo Sapiens
cugucaaccucucuuuucuccuccauggcugu

SEQ ID NO: 257126 - RNA, 25 nt, Homo Sapiens
auggcggaggauguuuccucagcgg

SEQ ID NO: 257127 - RNA, 32 nt, Homo Sapiens
cccaccucggccccgggcuccgaagcggcucg

SEQ ID NO: 257128 - RNA, 32 nt, Homo Sapiens
cuuucuuucugcucuggugggacugcccaguu

SEQ ID NO: 257129 - RNA, 32 nt, Homo Sapiens
gggccggggaggagcgcaaacucauccuuuau

SEQ ID NO: 257130 - RNA, 32 nt, Homo Sapiens
aaaacuaccgggcuggcagggcggcgggcgcg

SEQ ID NO: 257131 - RNA, 30 nt, Homo Sapiens
ucagcaggcaggcuggggaggccaguguug

SEQ ID NO: 257132 - RNA, 32 nt, Homo Sapiens
uucuugugaacuaauguugugaauuuuuguau

SEQ ID NO: 257133 - RNA, 32 nt, Homo Sapiens
caaguacuuauuucacauauuaacucaugggc

SEQ ID NO: 257134 - RNA, 32 nt, Homo Sapiens
cgucuggccuccugggcacugcuugccuggcc

SEQ ID NO: 257135 - RNA, 32 nt, Homo Sapiens
ucuacuuauuugcguauggaauaaaaagggac

SEQ ID NO: 257136 - RNA, 32 nt, Homo Sapiens
gcuggaugaccgggagagccggagcccaggaa

SEQ ID NO: 257137 - RNA, 32 nt, Homo Sapiens
agaaucagguuuuccguaguagauaaagacuc

SEQ ID NO: 257138 - RNA, 32 nt, Homo Sapiens
caccggcggccccucugccucgcggaaaagcc

SEQ ID NO: 257139 - RNA, 32 nt, Homo Sapiens
caaaaaauauuuuucagcaaguuuacauguau

SEQ ID NO: 257140 - RNA, 32 nt, Homo Sapiens
aaccaaggaaaggguucuuuaagaacauuccc

SEQ ID NO: 257141 - RNA, 32 nt, Homo Sapiens
cgaccuuccucucuguccuccccucccaccug

SEQ ID NO: 257142 - RNA, 32 nt, Homo Sapiens
agcugauuuuaaugacguuuucaacugguuuu

SEQ ID NO: 257143 - RNA, 32 nt, Homo Sapiens
cccaugggcgcagcagcacacccagcucccau

SEQ ID NO: 257144 - RNA, 32 nt, Homo Sapiens
uaacagcucacuccacuguuucccuggaggug

SEQ ID NO: 257145 - RNA, 31 nt, Homo Sapiens
gcaaguggagcacaguguccauagaccuaga

SEQ ID NO: 257146 - RNA, 32 nt, Homo Sapiens
ugaauggucucagcuugagaccauuucaaacu

SEQ ID NO: 257147 - RNA, 31 nt, Homo Sapiens
ugggcaaggcacugcccucucugugccuugg

SEQ ID NO: 257148 - RNA, 32 nt, Homo Sapiens
gccgggccgggcccggcccuggagaugguccc

SEQ ID NO: 257149 - RNA, 32 nt, Homo Sapiens
uugaauauuuuauauuguuauauccugacaag

SEQ ID NO: 257150 - RNA, 32 nt, Homo Sapiens
gaugccuaaaauguuuucuauuuaaaaauuac

SEQ ID NO: 257151 - RNA, 32 nt, Homo Sapiens
uguguugcuugggcuccugggagcugcaguug

SEQ ID NO: 257152 - RNA, 32 nt, Homo Sapiens
agugggagaacaaaauuaaaagaacugagaag

SEQ ID NO: 257153 - RNA, 32 nt, Homo Sapiens
uuuucccuucaguuccucuccuguuccuuugg

SEQ ID NO: 257154 - RNA, 32 nt, Homo Sapiens
aaauuggggaagaaugcaauuaaugaaagacc

SEQ ID NO: 257155 - RNA, 32 nt, Homo Sapiens
gcauccugguucugcccuuccuuagcuggcug

SEQ ID NO: 257156 - RNA, 32 nt, Homo Sapiens
cuucauaaacacaagaacacuuuaauuuuucg

SEQ ID NO: 257157 - RNA, 32 nt, Homo Sapiens
guaggcgcccagucguggacugucccacucug

SEQ ID NO: 257158 - RNA, 32 nt, Homo Sapiens
cugagaggccccggcaggucccggcccggcgg

SEQ ID NO: 257159 - RNA, 32 nt, Homo Sapiens
acuguuaacucuucuuaauuccuauaguccuc

SEQ ID NO: 257160 - RNA, 32 nt, Homo Sapiens
gacaaucagugcaagaggaaaaccaagcagug

SEQ ID NO: 257161 - RNA, 32 nt, Homo Sapiens
ggagacccuggccacaguuccaugaaucuuug

SEQ ID NO: 257162 - RNA, 32 nt, Homo Sapiens
guggaucuagcggcggcgaggaggcggguccc

SEQ ID NO: 257163 - RNA, 32 nt, Homo Sapiens
gaaacacuaauggccaaguguacauuugauuu

SEQ ID NO: 257164 - RNA, 32 nt, Homo Sapiens
accagaguuccugacccagccgagaacaaacc

SEQ ID NO: 257165 - RNA, 32 nt, Homo Sapiens
caaaaaaucugugcccucguggaauugacguu

SEQ ID NO: 257166 - RNA, 32 nt, Homo Sapiens
uuggugaagagugcacauuggaccucaaggcg

SEQ ID NO: 257167 - RNA, 32 nt, Homo Sapiens
uucuugcggaaauuauagcuauauuaaaagug

SEQ ID NO: 257168 - RNA, 32 nt, Homo Sapiens
aauauuauuaaaucauugugcucuguagccuu

SEQ ID NO: 257169 - RNA, 32 nt, Homo Sapiens
accuggucucauuccccuccccacaccuaccc

SEQ ID NO: 257170 - RNA, 32 nt, Homo Sapiens
cagaggagggaccacauuccccugccuugccc

SEQ ID NO: 257171 - RNA, 32 nt, Homo Sapiens
gguuguuuuuuuuuuucuuuuuugguuuuuug

SEQ ID NO: 257172 - RNA, 32 nt, Homo Sapiens
ccagcuccgcuccgccuuggguuccggcagaa

SEQ ID NO: 257173 - RNA, 32 nt, Homo Sapiens
aaaagucagagccccaccuccaccuuagucuc

SEQ ID NO: 257174 - RNA, 32 nt, Homo Sapiens
ccaaagcgcucgccccgcaggguccaaaggcc

SEQ ID NO: 257175 - RNA, 32 nt, Homo Sapiens
gcgcgggucaggggcggccgcggaggcggaag

SEQ ID NO: 257176 - RNA, 32 nt, Homo Sapiens
gacggcugagagcuauuuggcccaaggcuggg

SEQ ID NO: 257177 - RNA, 31 nt, Homo Sapiens
guuuuggccauuaagauuuuccccagcccuc

SEQ ID NO: 257178 - RNA, 32 nt, Homo Sapiens
auuucugugaguuuuguacgaaaaucagccuc

SEQ ID NO: 257179 - RNA, 32 nt, Homo Sapiens
gagaaaaucagcaugaguacuacaggccaagu

SEQ ID NO: 257180 - RNA, 32 nt, Homo Sapiens
ugaguggcacgcugguggggcagcucuugucu

SEQ ID NO: 257181 - RNA, 32 nt, Homo Sapiens
uauuauauaaauuuaucaagaauaaaaaugcc

SEQ ID NO: 257182 - RNA, 32 nt, Homo Sapiens
auuaugcccuccuggggcuccugugaggugga

SEQ ID NO: 257183 - RNA, 32 nt, Homo Sapiens
guguuaaaggaauaaggaaucuaugaaggaca

SEQ ID NO: 257184 - RNA, 32 nt, Homo Sapiens
gaggagccggugcccggcacagccccgccggc

SEQ ID NO: 257185 - RNA, 32 nt, Homo Sapiens
aagggggcgccgggccgcucuagccggugagg

SEQ ID NO: 257186 - RNA, 32 nt, Homo Sapiens
cugugguccuccccuccugacccaggccucug

SEQ ID NO: 257187 - RNA, 32 nt, Homo Sapiens
aacaggaccccagucccuuuccccucagccaa

SEQ ID NO: 257188 - RNA, 32 nt, Homo Sapiens
cccucccccuggagcucccgcuccucagcugc

SEQ ID NO: 257189 - RNA, 32 nt, Homo Sapiens
auuaaugaaguaguuucaaacaacgcggucau

SEQ ID NO: 257190 - RNA, 32 nt, Homo Sapiens
ucacccucgauggugcccucgaccuguccucc

SEQ ID NO: 257191 - RNA, 32 nt, Homo Sapiens
cuguucuguuuggcacuuguauuuaauucuuc

SEQ ID NO: 257192 - RNA, 31 nt, Homo Sapiens
ugcagaaacaaucuacauguauaucauagcu

SEQ ID NO: 257193 - RNA, 31 nt, Homo Sapiens
cagugagcaaauuguguauuuauguuuauca

SEQ ID NO: 257194 - RNA, 32 nt, Homo Sapiens
cggcacagugguugguaauggaauaaaggaug

SEQ ID NO: 257195 - RNA, 32 nt, Homo Sapiens
gcauacuguauuuuauaugugugcacauuuau

SEQ ID NO: 257196 - RNA, 32 nt, Homo Sapiens
auuaaaccuguugaaaugauaauuauguaaag

SEQ ID NO: 257197 - RNA, 32 nt, Homo Sapiens
guugacaaaugccaaauagaaaaccacuuggc

SEQ ID NO: 257198 - RNA, 32 nt, Homo Sapiens
uagaaauuuaaaagccuguugauucaagaacu

SEQ ID NO: 257199 - RNA, 32 nt, Homo Sapiens
ucaccuggagacuaagaaauuaaguuuuguuu

SEQ ID NO: 257200 - RNA, 32 nt, Homo Sapiens
accccaucuggugccuggcccagggccugaaa

SEQ ID NO: 257201 - RNA, 32 nt, Homo Sapiens
cggaggggccacccucccagcugacccagccu

SEQ ID NO: 257202 - RNA, 32 nt, Homo Sapiens
cggcgcugacggguguggaccgcggacgucgc

SEQ ID NO: 257203 - RNA, 32 nt, Homo Sapiens
cagcggaggcagcugggauuccggccucgcac

SEQ ID NO: 257204 - RNA, 32 nt, Homo Sapiens
ugcaucccugucauucguuucacggcauccag

SEQ ID NO: 257205 - RNA, 32 nt, Homo Sapiens
uguaaucucuucaucuuuuucuuucucucuga

SEQ ID NO: 257206 - RNA, 32 nt, Homo Sapiens
cuuguaggcacauuagcuccgcucauguuccc

SEQ ID NO: 257207 - RNA, 32 nt, Homo Sapiens
uuuacaagugguuaaaacauagcuuucuuccc

SEQ ID NO: 257208 - RNA, 32 nt, Homo Sapiens
auccuccugcuuuaaccuuuccuacuucaaaa

SEQ ID NO: 257209 - RNA, 32 nt, Homo Sapiens
aaaagccggggccaccccggcccaggacggga

SEQ ID NO: 257210 - RNA, 32 nt, Homo Sapiens
gaaguggcauuugggcugaccugggaagggug

SEQ ID NO: 257211 - RNA, 32 nt, Homo Sapiens
aaauaaaaucuaugacucuacuuugaucuguc

SEQ ID NO: 257212 - RNA, 32 nt, Homo Sapiens
uuugaaauagaguauaacugaaugcagagaau

SEQ ID NO: 257213 - RNA, 32 nt, Homo Sapiens
gcaccaaucagacuuccuccuccaccuggagc

SEQ ID NO: 257214 - RNA, 32 nt, Homo Sapiens
ugugaaauuuuucaguuuaaaaauuacuuuca

SEQ ID NO: 257215 - RNA, 32 nt, Homo Sapiens
cucuuccaaagucuaaauaaauuaaugauguu

SEQ ID NO: 257216 - RNA, 32 nt, Homo Sapiens
gucuuuaaaauuguuguaaaucucuguaugca

SEQ ID NO: 257217 - RNA, 32 nt, Homo Sapiens
aaacccagaacugacuucaaaggcagcuucug

SEQ ID NO: 257218 - RNA, 32 nt, Homo Sapiens
cagcagguugcaggacaaaugcuucaguccgc

SEQ ID NO: 257219 - RNA, 32 nt, Homo Sapiens
aaaaaguaaaccaaacaaaacgaaugaaaaac

SEQ ID NO: 257220 - RNA, 32 nt, Homo Sapiens
aagcagcucccugaccccggggaucggcgguc

SEQ ID NO: 257221 - RNA, 32 nt, Homo Sapiens
aggcuuuaauugcauuggcuguuucuuauggu

SEQ ID NO: 257222 - RNA, 32 nt, Homo Sapiens
aggcuguaucucugcccugccaaccuugacaa

SEQ ID NO: 257223 - RNA, 32 nt, Homo Sapiens
uaacagauguucuguacagaguaaugagaugu

SEQ ID NO: 257224 - RNA, 32 nt, Homo Sapiens
cacagugccuggcacauggugagccacagcua

SEQ ID NO: 257225 - RNA, 32 nt, Homo Sapiens
ugguuccuaaaauugcguauagaauuaaggca

SEQ ID NO: 257226 - RNA, 32 nt, Homo Sapiens
gcucaggaugcugcuccggcugcuggaggccc

SEQ ID NO: 257227 - RNA, 32 nt, Homo Sapiens
uucugagccaaggguuggggaagccugucuag

SEQ ID NO: 257228 - RNA, 32 nt, Homo Sapiens
ccacaggccggaagccgcagggggcaccgugg

SEQ ID NO: 257229 - RNA, 32 nt, Homo Sapiens
gcucuauagagaauauaucuuuuauauauugc

SEQ ID NO: 257230 - RNA, 32 nt, Homo Sapiens
guggacccuccauuuuaccucuuuacccuguc

SEQ ID NO: 257231 - RNA, 32 nt, Homo Sapiens
ucggugcaggcuggagaagagaaggcaaguug

SEQ ID NO: 257232 - RNA, 32 nt, Homo Sapiens
ucugcaggcugucucuccaggcacgggguguc

SEQ ID NO: 257233 - RNA, 32 nt, Homo Sapiens
gugggccacguguagcugggaggccggcagga

SEQ ID NO: 257234 - RNA, 32 nt, Homo Sapiens
cugggagcauuaaaaguggugaucuguuacag

SEQ ID NO: 257235 - RNA, 32 nt, Homo Sapiens
ggaggaggccggggcgggagugggggcuguca

SEQ ID NO: 257236 - RNA, 32 nt, Homo Sapiens
aacauugucauuuuuucuuagaacuucagcug

SEQ ID NO: 257237 - RNA, 32 nt, Homo Sapiens
uauuaagagaccaaaacugagaaacuagaauu

SEQ ID NO: 257238 - RNA, 32 nt, Homo Sapiens
acauaaaugcaaacauaugaauuugcuuuagg

SEQ ID NO: 257239 - RNA, 32 nt, Homo Sapiens
aguuuaugagagagcauagccaagggacguug

SEQ ID NO: 257240 - RNA, 32 nt, Homo Sapiens
aaaccuguuucauguguuauaaaggccagcuu

SEQ ID NO: 257241 - RNA, 32 nt, Homo Sapiens
cugaugccugcaggcaccaccccauauggguu

SEQ ID NO: 257242 - RNA, 32 nt, Homo Sapiens
ugcccuccccuuuuucgggacucuguauuccc

SEQ ID NO: 257243 - RNA, 32 nt, Homo Sapiens
ccagccaucacuuuuccaacuaguccuuagag

SEQ ID NO: 257244 - RNA, 32 nt, Homo Sapiens
aaacaaaaaucuuuuuucaaauguagugcugg

SEQ ID NO: 257245 - RNA, 32 nt, Homo Sapiens
auggugauagauuuuuuacuauuuaaauaagg

SEQ ID NO: 257246 - RNA, 32 nt, Homo Sapiens
agggccuauaucuauauuauaaauaaauacaa

SEQ ID NO: 257247 - RNA, 32 nt, Homo Sapiens
auguacauuguuacagggcugcuuccuaaaga

SEQ ID NO: 257248 - RNA, 32 nt, Homo Sapiens
uccacaucuguuccucaaugugugacauuggu

SEQ ID NO: 257249 - RNA, 32 nt, Homo Sapiens
ggcggcaacucuuuucuccuucccgucgcuca

SEQ ID NO: 257250 - RNA, 32 nt, Homo Sapiens
ccuggcucuaugcacaaaggaaguggcaacug

SEQ ID NO: 257251 - RNA, 32 nt, Homo Sapiens
ccucugaggagaaaagcccauagcuugaaagu

SEQ ID NO: 257252 - RNA, 32 nt, Homo Sapiens
cuuuaaaaguuccgaguugaaacugaaggcuc

SEQ ID NO: 257253 - RNA, 23 nt, Homo Sapiens
gugcuggauaucucuuguuuucc

SEQ ID NO: 257254 - RNA, 30 nt, Homo Sapiens
ggucugugcagguucgcgggucgcuggcgg

SEQ ID NO: 257255 - RNA, 32 nt, Homo Sapiens
gaagugacuuuucugauagaaaucugaagguc

SEQ ID NO: 257256 - RNA, 32 nt, Homo Sapiens
gcagggcggaucuggugaucaugggagccaga

SEQ ID NO: 257257 - RNA, 32 nt, Homo Sapiens
aggggagacaaagggagccgagacccuggaug

SEQ ID NO: 257258 - RNA, 32 nt, Homo Sapiens
cugucuacggcagcuauuccagaggcaacaac

SEQ ID NO: 257259 - RNA, 32 nt, Homo Sapiens
ggcacauuaugaggagggaaacaaaggaggcu

SEQ ID NO: 257260 - RNA, 32 nt, Homo Sapiens
aggcccugaauggcuggucuccagcgguuggc

SEQ ID NO: 257261 - RNA, 31 nt, Homo Sapiens
agguggccggucgggcuggaagggcggggau

SEQ ID NO: 257262 - RNA, 32 nt, Homo Sapiens
ggaaggcagcagccuucagccucucuggccca

SEQ ID NO: 257263 - RNA, 32 nt, Homo Sapiens
uggcuacuuuauggaguccugaagauacacag

SEQ ID NO: 257264 - RNA, 32 nt, Homo Sapiens
acaaacaaacaaaaaacauacuuagccagauu

SEQ ID NO: 257265 - RNA, 32 nt, Homo Sapiens
ggacuuggcggguccccuugacacacuggagg

SEQ ID NO: 257266 - RNA, 32 nt, Homo Sapiens
cuggcaaggugcccuccuggccugggacugcu

SEQ ID NO: 257267 - RNA, 27 nt, Homo Sapiens
cuucaacccuucuucucucaguuccug

SEQ ID NO: 257268 - RNA, 31 nt, Homo Sapiens
gggcgguuucccccauauuguucuuguggua

SEQ ID NO: 257269 - RNA, 32 nt, Homo Sapiens
ucuaacuuuuuauauugucauuauuauuguug

SEQ ID NO: 257270 - RNA, 32 nt, Homo Sapiens
auuugauuuauuauuugaguguuguuggacca

SEQ ID NO: 257271 - RNA, 32 nt, Homo Sapiens
cauuuuacugucaagacauuucuucggcauuc

SEQ ID NO: 257272 - RNA, 32 nt, Homo Sapiens
gguauuauaaauaacaugugacuccuuaaugg

SEQ ID NO: 257273 - RNA, 32 nt, Homo Sapiens
ggaggcggcggcgggugagcucaacuucgcac

SEQ ID NO: 257274 - RNA, 32 nt, Homo Sapiens
uaugaaguucaaggcaaaauaguauuuucuau

SEQ ID NO: 257275 - RNA, 32 nt, Homo Sapiens
aacauagauaauaguguaaaucagauauaauu

SEQ ID NO: 257276 - RNA, 32 nt, Homo Sapiens
ucccuuagugaauuuugucuccugcuuggaaa

SEQ ID NO: 257277 - RNA, 32 nt, Homo Sapiens
gcucagucaccaucucaaccuuaugucaccuc

SEQ ID NO: 257278 - RNA, 32 nt, Homo Sapiens
agugcaguuccaacaauauuuucuuugccuga

SEQ ID NO: 257279 - RNA, 32 nt, Homo Sapiens
gaaaugcagauaauguuuacuuugaaaacaaa

SEQ ID NO: 257280 - RNA, 32 nt, Homo Sapiens
cuacucaugcgugagauggguguacaaacuca

SEQ ID NO: 257281 - RNA, 32 nt, Homo Sapiens
cgcguuugccagucagucucuccggaccugcc

SEQ ID NO: 257282 - RNA, 32 nt, Homo Sapiens
augccucauugauuauuuucuuuuggauuccu

SEQ ID NO: 257283 - RNA, 32 nt, Homo Sapiens
ccuuccuaauuuccugcuccagggcaguaaac

SEQ ID NO: 257284 - RNA, 32 nt, Homo Sapiens
uguuuuacguucguuguuguuuguguacuuuu

SEQ ID NO: 257285 - RNA, 32 nt, Homo Sapiens
cuguugggcuguggagauagugccagggugcg

SEQ ID NO: 257286 - RNA, 32 nt, Homo Sapiens
cugauaaagauuuaauuuauuaaauuuccuua

SEQ ID NO: 257287 - RNA, 32 nt, Homo Sapiens
cuaccaagccauggcagaggcccgcacauccc

SEQ ID NO: 257288 - RNA, 32 nt, Homo Sapiens
ucugaaaugugauuuguuaagauucuuaaauu

SEQ ID NO: 257289 - RNA, 32 nt, Homo Sapiens
agccaguuucccuuuuguugaucuacuugacc

SEQ ID NO: 257290 - RNA, 32 nt, Homo Sapiens
aggguuuguugaacaauagaaaccuguaaagc

SEQ ID NO: 257291 - RNA, 32 nt, Homo Sapiens
guguguguagcaugugcugaggaagcacgugc

SEQ ID NO: 257292 - RNA, 32 nt, Homo Sapiens
ggcagauguccccuccucuccacccccgacgc

SEQ ID NO: 257293 - RNA, 32 nt, Homo Sapiens
ccacagagggcuuagaauugcagggcgagcca

SEQ ID NO: 257294 - RNA, 32 nt, Homo Sapiens
cuucuguuucuguuuaccagcuucccagcaac

SEQ ID NO: 257295 - RNA, 32 nt, Homo Sapiens
gucucuggccccacagagguguaagaucauua

SEQ ID NO: 257296 - RNA, 32 nt, Homo Sapiens
ccaggcuggagccuggauucgaggggaggagg

SEQ ID NO: 257297 - RNA, 32 nt, Homo Sapiens
uuauuuccaaauagaauggacucggucuguua

SEQ ID NO: 257298 - RNA, 32 nt, Homo Sapiens
gugauuuauguggcuuuuuuuuuuuuauaagu

SEQ ID NO: 257299 - RNA, 32 nt, Homo Sapiens
aguccacguggauauaaugauaucuauauuuu

SEQ ID NO: 257300 - RNA, 32 nt, Homo Sapiens
caagcugcgggugggauggcucagucccugca

SEQ ID NO: 257301 - RNA, 32 nt, Homo Sapiens
accaguggcucccugaagggcuuuuguuacca

SEQ ID NO: 257302 - RNA, 32 nt, Homo Sapiens
aucuguguaagacacgugcaacagacugccuu

SEQ ID NO: 257303 - RNA, 32 nt, Homo Sapiens
gacucagacaagauggugacaaugccuugagu

SEQ ID NO: 257304 - RNA, 32 nt, Homo Sapiens
cuuuuuggcagagcccccuccacucaccuuug

SEQ ID NO: 257305 - RNA, 32 nt, Homo Sapiens
acuuggggccugcaauggcuguguguacacua

SEQ ID NO: 257306 - RNA, 32 nt, Homo Sapiens
ugagagcgccgcgccacacccggcagggccgc

SEQ ID NO: 257307 - RNA, 32 nt, Homo Sapiens
aaauuuaucuaaagaaauaacuucuauuacug

SEQ ID NO: 257308 - RNA, 32 nt, Homo Sapiens
ucggucccgagcucgcguccagguggccaggc

SEQ ID NO: 257309 - RNA, 32 nt, Homo Sapiens
cccggccccucccugcccuccauucagggaga

SEQ ID NO: 257310 - RNA, 32 nt, Homo Sapiens
cugcugucuugagacuccauccagccccaggc

SEQ ID NO: 257311 - RNA, 32 nt, Homo Sapiens
uggauaugcuguuuaguuuuuacaacauagua

SEQ ID NO: 257312 - RNA, 32 nt, Homo Sapiens
gugauagaggaugacuucccaguuucaccaaa

SEQ ID NO: 257313 - RNA, 32 nt, Homo Sapiens
agggccugguccaugauggagucagguuuggg

SEQ ID NO: 257314 - RNA, 32 nt, Homo Sapiens
agaauggagucuuuucuguuauuguauuuaaa

SEQ ID NO: 257315 - RNA, 32 nt, Homo Sapiens
auugcuaggacgaugaggcuacaggaaaguga

SEQ ID NO: 257316 - RNA, 32 nt, Homo Sapiens
gccagacagacugacaaacaaacagccccaac

SEQ ID NO: 257317 - RNA, 32 nt, Homo Sapiens
uuauacugauugcacaccccccgcucaaacaa

SEQ ID NO: 257318 - RNA, 32 nt, Homo Sapiens
aguagaacagagcuuucuuuuagaaaauugag

SEQ ID NO: 257319 - RNA, 32 nt, Homo Sapiens
gccgauugucuucaggagucauccccugggcu

SEQ ID NO: 257320 - RNA, 32 nt, Homo Sapiens
ucuacccaccucagccuccuguguagcuggga

SEQ ID NO: 257321 - RNA, 32 nt, Homo Sapiens
ugcuucuccagggaccucucuccgggggcucc

SEQ ID NO: 257322 - RNA, 30 nt, Homo Sapiens
ucguugagggucggcggcgggcgaggagcg

SEQ ID NO: 257323 - RNA, 32 nt, Homo Sapiens
gguucuuccacacagcgccuguagaagagagc

SEQ ID NO: 257324 - RNA, 32 nt, Homo Sapiens
ugugcgguugguauuuuguauggcaucuuuuu

SEQ ID NO: 257325 - RNA, 30 nt, Homo Sapiens
uuaacaggcaggcaaggggugcggggacca

SEQ ID NO: 257326 - RNA, 32 nt, Homo Sapiens
ggcucuuuuuaucacucacauuuuacagguga

SEQ ID NO: 257327 - RNA, 32 nt, Homo Sapiens
uccuuccuuguaccucagcacucuggggguca

SEQ ID NO: 257328 - RNA, 32 nt, Homo Sapiens
uacugggauuacaggcucuuucuuuuuaaaca

SEQ ID NO: 257329 - RNA, 32 nt, Homo Sapiens
uuuccucauaaccaagcauuuaugauauauua

SEQ ID NO: 257330 - RNA, 32 nt, Homo Sapiens
acguuuucuuucccuuuaguuuguuugcuguc

SEQ ID NO: 257331 - RNA, 32 nt, Homo Sapiens
ggguaucuauacucacagcuuuugcgcucaaa

SEQ ID NO: 257332 - RNA, 31 nt, Homo Sapiens
cgugcgcgggcggucgcuaccugcggccgag

SEQ ID NO: 257333 - RNA, 32 nt, Homo Sapiens
ggcggccgcucccgcuggagccggagcccgag

SEQ ID NO: 257334 - RNA, 32 nt, Homo Sapiens
gcaguuccccccacccucaccccaucucuuua

SEQ ID NO: 257335 - RNA, 32 nt, Homo Sapiens
gaaaagaaggcacaauaguuuucgacacugga

SEQ ID NO: 257336 - RNA, 32 nt, Homo Sapiens
uuaggaggagccuggguuuaucgacgagaucu

SEQ ID NO: 257337 - RNA, 32 nt, Homo Sapiens
auggucuccccugccccagggcacauaagagc

SEQ ID NO: 257338 - RNA, 32 nt, Homo Sapiens
uuguucucauagaauaaaaaacagaacugaac

SEQ ID NO: 257339 - RNA, 32 nt, Homo Sapiens
cugaaggcgagggguggaggaggccccagcac

SEQ ID NO: 257340 - RNA, 32 nt, Homo Sapiens
ucuguauuguaagaaggcuggugcuccugaaa

SEQ ID NO: 257341 - RNA, 32 nt, Homo Sapiens
ggguccggcuuucggugacuagacgguccgca

SEQ ID NO: 257342 - RNA, 32 nt, Homo Sapiens
auugcagauauguuuuaaagacaaagauccau

SEQ ID NO: 257343 - RNA, 32 nt, Homo Sapiens
gccuuaucgcucuucacaccugccuuaggucu

SEQ ID NO: 257344 - RNA, 32 nt, Homo Sapiens
uuacagagaaugccuguuuuucacugucuagc

SEQ ID NO: 257345 - RNA, 32 nt, Homo Sapiens
aaggaaagaaacaaaggagagauccaggacuc

SEQ ID NO: 257346 - RNA, 32 nt, Homo Sapiens
uuccgcccaucccccuccggaucccucuguuc

SEQ ID NO: 257347 - RNA, 32 nt, Homo Sapiens
gaggagcccccgcuggucccucugggcaugcu

SEQ ID NO: 257348 - RNA, 32 nt, Homo Sapiens
uucagacauucagugggcaaguaaauuaugga

SEQ ID NO: 257349 - RNA, 32 nt, Homo Sapiens
ugcacaccggugcccgccacaugccaacccuc

SEQ ID NO: 257350 - RNA, 32 nt, Homo Sapiens
cugauaacaaaccuaguaaaucaucaaaauga

SEQ ID NO: 257351 - RNA, 32 nt, Homo Sapiens
cuucuugaucuggguguaaacauuuugugaaa

SEQ ID NO: 257352 - RNA, 32 nt, Homo Sapiens
auguuugugggaaggaaggagaugugcggaag

SEQ ID NO: 257353 - RNA, 32 nt, Homo Sapiens
ggccgggggcgguggcucacgccuguaauccc

SEQ ID NO: 257354 - RNA, 32 nt, Homo Sapiens
gagccccaggguuaucaguugcuggcugugcc

SEQ ID NO: 257355 - RNA, 32 nt, Homo Sapiens
cggugggggaaguuccuggggcgguggcuggg

SEQ ID NO: 257356 - RNA, 32 nt, Homo Sapiens
gcugggaagugggaccugggggugguuggacc

SEQ ID NO: 257357 - RNA, 32 nt, Homo Sapiens
cucuguuuacaccauaagauguuccgcaugug

SEQ ID NO: 257358 - RNA, 32 nt, Homo Sapiens
guccuugucuggguaccucccgaggggagucu

SEQ ID NO: 257359 - RNA, 32 nt, Homo Sapiens
ccagcccgguccugaggauccuccucaccaug

SEQ ID NO: 257360 - RNA, 32 nt, Homo Sapiens
uuuuuuaaacaaugauuaaauugaauguguaa

SEQ ID NO: 257361 - RNA, 32 nt, Homo Sapiens
uguccaucuuauauuucuuuuuuuuuuuuaau

SEQ ID NO: 257362 - RNA, 32 nt, Homo Sapiens
gcugaaugugggcccgguguugccagauccuu

SEQ ID NO: 257363 - RNA, 32 nt, Homo Sapiens
aggggcaggggugagggugggggugggggucc

SEQ ID NO: 257364 - RNA, 32 nt, Homo Sapiens
ugaccguggagcaaagggccugcgaggggauc

SEQ ID NO: 257365 - RNA, 32 nt, Homo Sapiens
cacccaacacccucccucuuucugggguuugg

SEQ ID NO: 257366 - RNA, 32 nt, Homo Sapiens
cccccgaggucccagcacucacacugcggggc

SEQ ID NO: 257367 - RNA, 32 nt, Homo Sapiens
gccuaccucacagagguaucaugaagauagca

SEQ ID NO: 257368 - RNA, 32 nt, Homo Sapiens
cacuugggacacuugaggaagaaacagaaacc

SEQ ID NO: 257369 - RNA, 32 nt, Homo Sapiens
auuuauuuuuaauuucuaaaaauagagauagg

SEQ ID NO: 257370 - RNA, 32 nt, Homo Sapiens
cauguacgguggcucacgccuauaaucccagc

SEQ ID NO: 257371 - RNA, 31 nt, Homo Sapiens
cccccgcgggagccccugccccacgcuaaua

SEQ ID NO: 257372 - RNA, 32 nt, Homo Sapiens
accagauuucuuucuuuuuuaaggcugaauag

SEQ ID NO: 257373 - RNA, 30 nt, Homo Sapiens
ccagccggcgcuugcgcgguggcacgggcg

SEQ ID NO: 257374 - RNA, 32 nt, Homo Sapiens
agcgccccgggccgcguccgccccgucccaca

SEQ ID NO: 257375 - RNA, 32 nt, Homo Sapiens
ccucugcccuggauugguuggcaaacuauagg

SEQ ID NO: 257376 - RNA, 32 nt, Homo Sapiens
agaugucaugagguacccuuugugucaccagc

SEQ ID NO: 257377 - RNA, 30 nt, Homo Sapiens
ccggggccuaggcgcgcggaccugcgagcg

SEQ ID NO: 257378 - RNA, 32 nt, Homo Sapiens
gaaacaucgcaggauaaugauacuuauugaaa

SEQ ID NO: 257379 - RNA, 32 nt, Homo Sapiens
acagucuggagggagagugcagacacacaccg

SEQ ID NO: 257380 - RNA, 32 nt, Homo Sapiens
cugacuucucagaaauugccaacuagcaggca

SEQ ID NO: 257381 - RNA, 32 nt, Homo Sapiens
ggcucaguccccaacggcuggcaagacucagg

SEQ ID NO: 257382 - RNA, 32 nt, Homo Sapiens
ggcugggccggggcaccagucggguuugguuu

SEQ ID NO: 257383 - RNA, 32 nt, Homo Sapiens
guuuuucuccuucuccuucccaggaaggucuu

SEQ ID NO: 257384 - RNA, 32 nt, Homo Sapiens
ccaagggaggcuuggcggcuguggaggcgagu

SEQ ID NO: 257385 - RNA, 32 nt, Homo Sapiens
uaagaaaaaggaauauuaauggcugugacuga

SEQ ID NO: 257386 - RNA, 32 nt, Homo Sapiens
ucaagggaaguaccuaagaagauauagagugu

SEQ ID NO: 257387 - RNA, 32 nt, Homo Sapiens
cccuaauaacauauauuuauuauauuaaauga

SEQ ID NO: 257388 - RNA, 32 nt, Homo Sapiens
gcgggggcggcaccgcuccccugugacugcau

SEQ ID NO: 257389 - RNA, 32 nt, Homo Sapiens
aagcuaccaaagagaaagauguuguaaucaua

SEQ ID NO: 257390 - RNA, 32 nt, Homo Sapiens
gcggaggcggugaugucggugcagguuguguc

SEQ ID NO: 257391 - RNA, 32 nt, Homo Sapiens
cacaaggcaaaacaagagcaaacaagucuguc

SEQ ID NO: 257392 - RNA, 32 nt, Homo Sapiens
caucauuugauaaguuggauguuccauuacau

SEQ ID NO: 257393 - RNA, 32 nt, Homo Sapiens
aucaucuucagcauuuggccucaacaguugcc

SEQ ID NO: 257394 - RNA, 32 nt, Homo Sapiens
cgcccaggaccaggacuauccccugcucaagc

SEQ ID NO: 257395 - RNA, 29 nt, Homo Sapiens
cuacaaacugaugagugaaaugcuauggg

SEQ ID NO: 257396 - RNA, 32 nt, Homo Sapiens
gaaguaaagagaagucaauuccuucuuccuca

SEQ ID NO: 257397 - RNA, 32 nt, Homo Sapiens
auguugcuuccacagcaacuggaugaugcuua

SEQ ID NO: 257398 - RNA, 30 nt, Homo Sapiens
cgugcgugccagugcgcgggucucgggauc

SEQ ID NO: 257399 - RNA, 31 nt, Homo Sapiens
cgcuucucucuuggaaaguccagucucuccu

SEQ ID NO: 257400 - RNA, 32 nt, Homo Sapiens
ccccgcccgccaucgccgucgccauguugugg

SEQ ID NO: 257401 - RNA, 30 nt, Homo Sapiens
agcggcgucugugcuuguggaggugucggc

SEQ ID NO: 257402 - RNA, 32 nt, Homo Sapiens
uugaucuacaacuuauauaguuuucugauuau

SEQ ID NO: 257403 - RNA, 32 nt, Homo Sapiens
uagggaaggggagugggguccaagugacagcu

SEQ ID NO: 257404 - RNA, 32 nt, Homo Sapiens
accugugaauccacagcagaacagcuguucac

SEQ ID NO: 257405 - RNA, 32 nt, Homo Sapiens
guuauuaaugaaauacucuuuuauuuuggaua

SEQ ID NO: 257406 - RNA, 32 nt, Homo Sapiens
ccccuuugcucuucuuuucccuccuuaaaaga

SEQ ID NO: 257407 - RNA, 32 nt, Homo Sapiens
guaaaacaagcugccuggagagcagcuguacc

SEQ ID NO: 257408 - RNA, 32 nt, Homo Sapiens
uuauaaacuaauggcauaaaugucuggagcca

SEQ ID NO: 257409 - RNA, 32 nt, Homo Sapiens
cuggaugcguggcaccaacuggucaaugggug

SEQ ID NO: 257410 - RNA, 32 nt, Homo Sapiens
uuuguauaauguguauaguuuaugucaagggc

SEQ ID NO: 257411 - RNA, 32 nt, Homo Sapiens
ccuugauaacucucuugucuuuacugggaagc

SEQ ID NO: 257412 - RNA, 32 nt, Homo Sapiens
ucuggauguauaagucugugugucagguacag

SEQ ID NO: 257413 - RNA, 32 nt, Homo Sapiens
uaacacucauuucuucuccuccaaaaguuuau

SEQ ID NO: 257414 - RNA, 32 nt, Homo Sapiens
ccaugagaaauaucagaguaaaacuuucuaga

SEQ ID NO: 257415 - RNA, 32 nt, Homo Sapiens
ggcuccagcgcgucucucuccucccccucagc

SEQ ID NO: 257416 - RNA, 32 nt, Homo Sapiens
ccuguguauguggugacuuccuuugugucugc

SEQ ID NO: 257417 - RNA, 32 nt, Homo Sapiens
aaguucauuuguuuacagggucgggaaugucu

SEQ ID NO: 257418 - RNA, 32 nt, Homo Sapiens
uagacaaaaaauagggaugaucacucuuagac

SEQ ID NO: 257419 - RNA, 32 nt, Homo Sapiens
guuauguggcaaauugugcagaguaguuuauu

SEQ ID NO: 257420 - RNA, 32 nt, Homo Sapiens
cacugccuggggacucgccugacucgcucucu

SEQ ID NO: 257421 - RNA, 31 nt, Homo Sapiens
agcgcggggagcgccucgacggccggagcuc

SEQ ID NO: 257422 - RNA, 32 nt, Homo Sapiens
gggaucuuuuucuuuuuuuuuaagucucacaa

SEQ ID NO: 257423 - RNA, 32 nt, Homo Sapiens
cauggccacccggggcagcugcccucagccaa

SEQ ID NO: 257424 - RNA, 32 nt, Homo Sapiens
ccuccuuccuuccgccgccgcagccagcccga

SEQ ID NO: 257425 - RNA, 32 nt, Homo Sapiens
augagacgaugaugaagcuuguccuggaagac

SEQ ID NO: 257426 - RNA, 28 nt, Homo Sapiens
caucagggggcuaccaccaugauuccgc

SEQ ID NO: 257427 - RNA, 32 nt, Homo Sapiens
uauaaaggaggaggagacaauauuuuuucaaa

SEQ ID NO: 257428 - RNA, 32 nt, Homo Sapiens
gaggccagccuggcccugagcugcuggauaca

SEQ ID NO: 257429 - RNA, 32 nt, Homo Sapiens
uccccuugcccgcuccuucaggucucagcggc

SEQ ID NO: 257430 - RNA, 32 nt, Homo Sapiens
caacaguuuucugaaaugauauuucaaauugc

SEQ ID NO: 257431 - RNA, 32 nt, Homo Sapiens
ggucgggcgcgguggcucacgccuguaauccc

SEQ ID NO: 257432 - RNA, 32 nt, Homo Sapiens
cgccgccgcucgccgcucgccacucuccaccc

SEQ ID NO: 257433 - RNA, 32 nt, Homo Sapiens
ucccggugcucuucuguuucucagucuucgcg

SEQ ID NO: 257434 - RNA, 32 nt, Homo Sapiens
cuugggggacuguuguuucucaucuggaauca

SEQ ID NO: 257435 - RNA, 32 nt, Homo Sapiens
ucccaucggcgcccaccaccccaaccuguucc

SEQ ID NO: 257436 - RNA, 32 nt, Homo Sapiens
uuuagaucuuuuauuucuuucaaaaaaaauuu

SEQ ID NO: 257437 - RNA, 32 nt, Homo Sapiens
auucugugacuugucuuggugugcuagccuac

SEQ ID NO: 257438 - RNA, 32 nt, Homo Sapiens
gcucuuguuguccaggcuagagugcaauggca

SEQ ID NO: 257439 - RNA, 32 nt, Homo Sapiens
caucuuuuucaagucuuuuccauccacaguug

SEQ ID NO: 257440 - RNA, 32 nt, Homo Sapiens
uucauuaaauguuugagugauguuccuacuug

SEQ ID NO: 257441 - RNA, 32 nt, Homo Sapiens
aaauuggugauuaugguaauauggucauguga

SEQ ID NO: 257442 - RNA, 32 nt, Homo Sapiens
cugggcucggauccggccccggcccccucggc

SEQ ID NO: 257443 - RNA, 32 nt, Homo Sapiens
cauuaaaauuaaaagcaaaaccacaagaaggg

SEQ ID NO: 257444 - RNA, 30 nt, Homo Sapiens
aaagaaugacuugccaccauauccacuagg

SEQ ID NO: 257445 - RNA, 32 nt, Homo Sapiens
ugaagaaugacugacccagauuuuagauguau

SEQ ID NO: 257446 - RNA, 32 nt, Homo Sapiens
caagauggggccugggcaugcgcaggaggagc

SEQ ID NO: 257447 - RNA, 32 nt, Homo Sapiens
cauacuugcauucuuuuggcaguucugauaag

SEQ ID NO: 257448 - RNA, 31 nt, Homo Sapiens
cccgcugcagcuucucgcggagguauucggc

SEQ ID NO: 257449 - RNA, 32 nt, Homo Sapiens
cuuucuuucccuuuugcgcgcguucgauaugc

SEQ ID NO: 257450 - RNA, 32 nt, Homo Sapiens
uuuuaagaacuaaauauugcacauuaauaaau

SEQ ID NO: 257451 - RNA, 32 nt, Homo Sapiens
ugguuaaaguaguaaaguuugaccagauuaag

SEQ ID NO: 257452 - RNA, 32 nt, Homo Sapiens
guauccuuuuuucuccuuccccuagccuauug

SEQ ID NO: 257453 - RNA, 32 nt, Homo Sapiens
aagcugugaaacaaaaucaaugaggucacuaa

SEQ ID NO: 257454 - RNA, 30 nt, Homo Sapiens
ucgccggccccgggugcggguccuguuagg

SEQ ID NO: 257455 - RNA, 32 nt, Homo Sapiens
cgccgggggccuggcccggcccgcacucagac

SEQ ID NO: 257456 - RNA, 32 nt, Homo Sapiens
gucucuagguacugaggcaggaacuggucucu

SEQ ID NO: 257457 - RNA, 32 nt, Homo Sapiens
cuaccucccccuccaucucuagauaaguguca

SEQ ID NO: 257458 - RNA, 32 nt, Homo Sapiens
ccaaguagcugagacuacaggugugcgccacc

SEQ ID NO: 257459 - RNA, 32 nt, Homo Sapiens
ccugaccucgggugauccgcgccccgcggccu

SEQ ID NO: 257460 - RNA, 32 nt, Homo Sapiens
uuauuuuauugcaucaaugaauuaaaacaaaa

SEQ ID NO: 257461 - RNA, 32 nt, Homo Sapiens
uaaaugagugccuacuaugugcugggcucgag

SEQ ID NO: 257462 - RNA, 32 nt, Homo Sapiens
auuuuccccccucucuucagguugggcgcguu

SEQ ID NO: 257463 - RNA, 32 nt, Homo Sapiens
ucucagugcgaggcuucaccccugccaggcaa

SEQ ID NO: 257464 - RNA, 32 nt, Homo Sapiens
augugacacugugggugaaauguucuacacac

SEQ ID NO: 257465 - RNA, 32 nt, Homo Sapiens
gcggaagccaucuuauugcuaccagcugugug

SEQ ID NO: 257466 - RNA, 32 nt, Homo Sapiens
gccaugcauugaccauuaaaugcauuuuaaua

SEQ ID NO: 257467 - RNA, 29 nt, Homo Sapiens
aguguauaguguuucagugggggagaagc

SEQ ID NO: 257468 - RNA, 32 nt, Homo Sapiens
uagaagcccacuggaaggucuuccagacacuu

SEQ ID NO: 257469 - RNA, 32 nt, Homo Sapiens
aauuaugaauaggaugcaaauuuuauagcccc

SEQ ID NO: 257470 - RNA, 32 nt, Homo Sapiens
ugauuuaaagcacuuuuaaaucuuauccugcc

SEQ ID NO: 257471 - RNA, 32 nt, Homo Sapiens
gucccggagcccuggaccgugcuggcagcugg

SEQ ID NO: 257472 - RNA, 32 nt, Homo Sapiens
aauuuucuuuucucacagggagauaaucauaa

SEQ ID NO: 257473 - RNA, 32 nt, Homo Sapiens
uuuugaaggguggacauuaggguagggugagg

SEQ ID NO: 257474 - RNA, 32 nt, Homo Sapiens
ccgcaccacagugccaaugcuugucagacaca

SEQ ID NO: 257475 - RNA, 32 nt, Homo Sapiens
caaauugucggaggcuuuugucaccuggagac

SEQ ID NO: 257476 - RNA, 32 nt, Homo Sapiens
aagugucgauucaggaagggugucucaggaug

SEQ ID NO: 257477 - RNA, 32 nt, Homo Sapiens
ugcaugaagauaauguaaagguuuuuauuaaa

SEQ ID NO: 257478 - RNA, 32 nt, Homo Sapiens
ccagguucccugcauuugaacucugaaggaua

SEQ ID NO: 257479 - RNA, 32 nt, Homo Sapiens
aaauacugucaaauggaaaauaaaauaaguua

SEQ ID NO: 257480 - RNA, 32 nt, Homo Sapiens
uccagaaaucauauuacaagauuuuaauucaa

SEQ ID NO: 257481 - RNA, 32 nt, Homo Sapiens
ccugcgcgguaaccccaccacuccugaagccu

SEQ ID NO: 257482 - RNA, 32 nt, Homo Sapiens
gacuuuaggcccggcgcaguggcucaugccug

SEQ ID NO: 257483 - RNA, 32 nt, Homo Sapiens
uaagagagaucugugcagcugcgccucagggg

SEQ ID NO: 257484 - RNA, 32 nt, Homo Sapiens
auuggagagaguaacuuuuuaauucuguuguu

SEQ ID NO: 257485 - RNA, 32 nt, Homo Sapiens
cucaggaaggauccggcccgucuccggaggca

SEQ ID NO: 257486 - RNA, 32 nt, Homo Sapiens
agagccagucccgcccuuuacagagcagcccu

SEQ ID NO: 257487 - RNA, 32 nt, Homo Sapiens
gagguucuuguacaacuuggccuaguucacgu

SEQ ID NO: 257488 - RNA, 32 nt, Homo Sapiens
ccugaggaacuugauuuuucugucccuggauc

SEQ ID NO: 257489 - RNA, 32 nt, Homo Sapiens
gcuugucucaaaaaccauuacaaaaucuuaac

SEQ ID NO: 257490 - RNA, 32 nt, Homo Sapiens
gcgucgaaggagaucaagugaaccuucuacaa

SEQ ID NO: 257491 - RNA, 32 nt, Homo Sapiens
uucuagcugaaggugauugaaaaggaaaagag

SEQ ID NO: 257492 - RNA, 32 nt, Homo Sapiens
aacaggaucacacuguacccccugccugccuu

SEQ ID NO: 257493 - RNA, 32 nt, Homo Sapiens
uggacuuaaucaugcuaacaaacugaaaaauc

SEQ ID NO: 257494 - RNA, 32 nt, Homo Sapiens
accacgggcugccugcuuuugguugggacagu

SEQ ID NO: 257495 - RNA, 32 nt, Homo Sapiens
uaaaauuuccuuauguucugcuguuauguuug

SEQ ID NO: 257496 - RNA, 32 nt, Homo Sapiens
acaggcucauuucgcaacuuaaccaaggguca

SEQ ID NO: 257497 - RNA, 32 nt, Homo Sapiens
uagugggcauuuugacaacauggcuucuccuu

SEQ ID NO: 257498 - RNA, 32 nt, Homo Sapiens
aaaauaagguuugccuaaggcuuuuugcuuuu

SEQ ID NO: 257499 - RNA, 32 nt, Homo Sapiens
ggccugccaaaauauguuaaguauugugcuac

SEQ ID NO: 257500 - RNA, 32 nt, Homo Sapiens
ccaucaaaaaaccaccuguaaauuaccaaugu

SEQ ID NO: 257501 - RNA, 32 nt, Homo Sapiens
agacuugugcugcgugcggcuccggagcucug

SEQ ID NO: 257502 - RNA, 32 nt, Homo Sapiens
gaagcugggcgcgcgugggcgcggcggugcug

SEQ ID NO: 257503 - RNA, 32 nt, Homo Sapiens
caugagagggugggagggcccagggagggcuu

SEQ ID NO: 257504 - RNA, 32 nt, Homo Sapiens
caggcuguuucucuaggcuggaugcugucagg

SEQ ID NO: 257505 - RNA, 32 nt, Homo Sapiens
uuuagcagugaacacuugcuuguuuucuuaaa

SEQ ID NO: 257506 - RNA, 32 nt, Homo Sapiens
gaggaaagugaacaguaucuucauuuuaguau

SEQ ID NO: 257507 - RNA, 32 nt, Homo Sapiens
cccagccucccuccccagagcagaagucccgc

SEQ ID NO: 257508 - RNA, 32 nt, Homo Sapiens
caaaggauuugagauauaaaucaaauuuuaca

SEQ ID NO: 257509 - RNA, 32 nt, Homo Sapiens
uccuaaauguuuuaauuguaccauaguguuuu

SEQ ID NO: 257510 - RNA, 32 nt, Homo Sapiens
aaauggauguuuucaugaugacaacagaauca

SEQ ID NO: 257511 - RNA, 32 nt, Homo Sapiens
gcccgcggcuccugggccucccaggcucgucc

SEQ ID NO: 257512 - RNA, 32 nt, Homo Sapiens
aggauggauaccauggcauauguuaaaagcgu

SEQ ID NO: 257513 - RNA, 32 nt, Homo Sapiens
gggggaacccgcccggcucccggcagugucuc

SEQ ID NO: 257514 - RNA, 32 nt, Homo Sapiens
ugccuccugcagggauucuuccugcuuagcuu

SEQ ID NO: 257515 - RNA, 32 nt, Homo Sapiens
acaaugaccuccccgucccaccucacugccau

SEQ ID NO: 257516 - RNA, 32 nt, Homo Sapiens
aaccgaaacucuccaaccaaaaaucaauaaca

SEQ ID NO: 257517 - RNA, 32 nt, Homo Sapiens
ccugcugugggaaagguggggaagaaggggau

SEQ ID NO: 257518 - RNA, 32 nt, Homo Sapiens
cugccugagaaccuauccuccucccccacccc

SEQ ID NO: 257519 - RNA, 32 nt, Homo Sapiens
uagagcuuuuucuaaggcuuucgguugcuggu

SEQ ID NO: 257520 - RNA, 32 nt, Homo Sapiens
aaauucaucuuucaaaagguuacacaaaauua

SEQ ID NO: 257521 - RNA, 32 nt, Homo Sapiens
agacaccaggcccguucugugcucuggaggcu

SEQ ID NO: 257522 - RNA, 32 nt, Homo Sapiens
auauuugaauaaaaaaugaaucauuuccaaaa

SEQ ID NO: 257523 - RNA, 32 nt, Homo Sapiens
gagacuucuggaagaaggugggaaagaaaucc

SEQ ID NO: 257524 - RNA, 32 nt, Homo Sapiens
ccagcugcguccucugggccacgcuccacuug

SEQ ID NO: 257525 - RNA, 32 nt, Homo Sapiens
ccccaucugucccacacgcucccuggggcucu

SEQ ID NO: 257526 - RNA, 32 nt, Homo Sapiens
agggcuaaagauuguucuucuggguaagagcu

SEQ ID NO: 257527 - RNA, 32 nt, Homo Sapiens
uacagacuuugaugaaauggcaaguucuuccc

SEQ ID NO: 257528 - RNA, 32 nt, Homo Sapiens
acggccugggguugcugcccgucagucucgaa

SEQ ID NO: 257529 - RNA, 32 nt, Homo Sapiens
cauaaccaaaaauuaaauugaaacaaaauguc

SEQ ID NO: 257530 - RNA, 32 nt, Homo Sapiens
gccggcggaaagggucuuugcugcugcgcccg

SEQ ID NO: 257531 - RNA, 32 nt, Homo Sapiens
aaccuguuugacgcuaauuaaaacagagccug

SEQ ID NO: 257532 - RNA, 32 nt, Homo Sapiens
ucuugcugauccucuggggcugccgggccugg

SEQ ID NO: 257533 - RNA, 28 nt, Homo Sapiens
cugggaguggcuaccgcagguaguuucu

SEQ ID NO: 257534 - RNA, 32 nt, Homo Sapiens
uagcggccgaaggggcgggcucgcggggucuc

SEQ ID NO: 257535 - RNA, 32 nt, Homo Sapiens
gggaaccuacuacucccugggccuuagucucc

SEQ ID NO: 257536 - RNA, 32 nt, Homo Sapiens
auaucuaauuuggauucuguuucaugcaaauu

SEQ ID NO: 257537 - RNA, 32 nt, Homo Sapiens
ggaggaggggccggcacccaccccuggguggg

SEQ ID NO: 257538 - RNA, 32 nt, Homo Sapiens
ccuuucgcuuccuccucagguuuuccagggcu

SEQ ID NO: 257539 - RNA, 32 nt, Homo Sapiens
aaacaggugacaggcugcuuucgugacuugau

SEQ ID NO: 257540 - RNA, 32 nt, Homo Sapiens
ugaccacauucuuuuuguauccaaauagugcu

SEQ ID NO: 257541 - RNA, 32 nt, Homo Sapiens
uuuggaugcaagauaagauuaaguuucuggag

SEQ ID NO: 257542 - RNA, 32 nt, Homo Sapiens
uuccuuagaacagacauuuagguaucucaggu

SEQ ID NO: 257543 - RNA, 32 nt, Homo Sapiens
aaauagaaaaucugaacagaucaauaaugagu

SEQ ID NO: 257544 - RNA, 32 nt, Homo Sapiens
uaacuuuuauuacagucaauuuugaggauauu

SEQ ID NO: 257545 - RNA, 32 nt, Homo Sapiens
gacgcggagcgauggcccgcgcggccgcaggg

SEQ ID NO: 257546 - RNA, 32 nt, Homo Sapiens
gauucuuggccauauccuaacaugcaagggcc

SEQ ID NO: 257547 - RNA, 32 nt, Homo Sapiens
cccugaggccccagaacuaucuuuucgguugu

SEQ ID NO: 257548 - RNA, 32 nt, Homo Sapiens
cgcggguuuccggcugccuguacugggcgugc

SEQ ID NO: 257549 - RNA, 31 nt, Homo Sapiens
ugaaagugaaacauacuggguuucuguaagu

SEQ ID NO: 257550 - RNA, 32 nt, Homo Sapiens
cuuccauccggggugcucuggugcuggguuac

SEQ ID NO: 257551 - RNA, 32 nt, Homo Sapiens
cugauacugcuauuuugaaaccuggaggaugg

SEQ ID NO: 257552 - RNA, 32 nt, Homo Sapiens
accggcgcgguuuuugucagcuuacuccggcc

SEQ ID NO: 257553 - RNA, 32 nt, Homo Sapiens
guaugcggcggccggcuucccagcgugggagg

SEQ ID NO: 257554 - RNA, 32 nt, Homo Sapiens
uaggcccaaaagacaacuuaagaucaaaauau

SEQ ID NO: 257555 - RNA, 32 nt, Homo Sapiens
uuccuuguacuaucccuaugaggcauaauuau

SEQ ID NO: 257556 - RNA, 32 nt, Homo Sapiens
ggcagcauuucccuuuuccccuccuuugccuu

SEQ ID NO: 257557 - RNA, 32 nt, Homo Sapiens
ugucaugauggguuguucucuuucuuauuguu

SEQ ID NO: 257558 - RNA, 32 nt, Homo Sapiens
aggagggccuuggccuggcacggcugugcucc

SEQ ID NO: 257559 - RNA, 32 nt, Homo Sapiens
ugggggcacgggaggcugcgccggcacgcccu

SEQ ID NO: 257560 - RNA, 32 nt, Homo Sapiens
cccugcugaaccccaacggccccuuuguccug

SEQ ID NO: 257561 - RNA, 31 nt, Homo Sapiens
uagacauaaugaaacaucagagccagcuaag

SEQ ID NO: 257562 - RNA, 32 nt, Homo Sapiens
aaccacugcaaucaaugugucauaugucuuuu

SEQ ID NO: 257563 - RNA, 32 nt, Homo Sapiens
cucaacuccugccacaauguacaggaugcaac

SEQ ID NO: 257564 - RNA, 32 nt, Homo Sapiens
ucaaugucaauauauacuccuacauauaaaau

SEQ ID NO: 257565 - RNA, 32 nt, Homo Sapiens
cgggcucacgucgcggccgccuuugcgcucuc

SEQ ID NO: 257566 - RNA, 32 nt, Homo Sapiens
cacacuucuuugaauuacucuucaugggccca

SEQ ID NO: 257567 - RNA, 29 nt, Homo Sapiens
cggucauggaguuuauaccagcugcccug

SEQ ID NO: 257568 - RNA, 32 nt, Homo Sapiens
aagacauuuuuggaaggggacacgugacagcc

SEQ ID NO: 257569 - RNA, 32 nt, Homo Sapiens
aguguauuccgucuuccaaguuaccaaucaua

SEQ ID NO: 257570 - RNA, 32 nt, Homo Sapiens
aaagcacuaggauacaaaugaagcuuaauuac

SEQ ID NO: 257571 - RNA, 32 nt, Homo Sapiens
gucugccagccugcagcucuccugcuugacac

SEQ ID NO: 257572 - RNA, 32 nt, Homo Sapiens
aagcaccugccgaccucguccucccccugcca

SEQ ID NO: 257573 - RNA, 32 nt, Homo Sapiens
auuucauuuagaguucucuaucucuaaauauu

SEQ ID NO: 257574 - RNA, 32 nt, Homo Sapiens
uucacccccagagcuuccuaauccuguuuuca

SEQ ID NO: 257575 - RNA, 32 nt, Homo Sapiens
cuuuggacugguuuuuacuucccgacuucugg

SEQ ID NO: 257576 - RNA, 32 nt, Homo Sapiens
cgagcagcacgcucggagccgccgcgcgccaa

SEQ ID NO: 257577 - RNA, 32 nt, Homo Sapiens
cugcuguccacccacaccccagcaguccucug

SEQ ID NO: 257578 - RNA, 32 nt, Homo Sapiens
aacuacgucaagaggcugugauugcgcucccu

SEQ ID NO: 257579 - RNA, 32 nt, Homo Sapiens
uaucugugggaagagaauagacucuauuuucu

SEQ ID NO: 257580 - RNA, 32 nt, Homo Sapiens
ggagggaagacacccgugcgccucgcucccuc

SEQ ID NO: 257581 - RNA, 32 nt, Homo Sapiens
gggaggauggccugggcugcggguggggcgcg

SEQ ID NO: 257582 - RNA, 32 nt, Homo Sapiens
cuccaccgacagccaggcacugggcagcacgc

SEQ ID NO: 257583 - RNA, 32 nt, Homo Sapiens
ccggaggaagagagaguuuaccaagagagaug

SEQ ID NO: 257584 - RNA, 32 nt, Homo Sapiens
aauaugugaaacaguaaauaugaaagaacuug

SEQ ID NO: 257585 - RNA, 32 nt, Homo Sapiens
guggguugcaggaggaggagcugggcagggcc

SEQ ID NO: 257586 - RNA, 29 nt, Homo Sapiens
agauauuuuuguauguaauauaggcaaua

SEQ ID NO: 257587 - RNA, 32 nt, Homo Sapiens
ccagagaaugacguggauccagcaaauaguau

SEQ ID NO: 257588 - RNA, 32 nt, Homo Sapiens
aguccaaauauguuuauauuuaaauauacgug

SEQ ID NO: 257589 - RNA, 32 nt, Homo Sapiens
aacuucaucuauuucaaauauuuuaugcagua

SEQ ID NO: 257590 - RNA, 32 nt, Homo Sapiens
agccagaucuggaccgcugagguuuuuaaaaa

SEQ ID NO: 257591 - RNA, 32 nt, Homo Sapiens
aucacauuuuuggggggaaagucuuaugaaug

SEQ ID NO: 257592 - RNA, 32 nt, Homo Sapiens
uuucuucucaacagcuuauccaaauguuccgu

SEQ ID NO: 257593 - RNA, 32 nt, Homo Sapiens
ucuccucccuaaaauuuuaaauguagaaaagu

SEQ ID NO: 257594 - RNA, 32 nt, Homo Sapiens
auacuuguacuguauguucagaaauuuuagga

SEQ ID NO: 257595 - RNA, 32 nt, Homo Sapiens
aggaggcucaggccagggacccgcccagcucu

SEQ ID NO: 257596 - RNA, 32 nt, Homo Sapiens
ggugaaaaagaaaacaaacaaacaacaacaac

SEQ ID NO: 257597 - RNA, 32 nt, Homo Sapiens
cgccuguaaccccagcacuuugggaggccaag

SEQ ID NO: 257598 - RNA, 32 nt, Homo Sapiens
gcauauccaucucaaucauuuaucauuucuuu

SEQ ID NO: 257599 - RNA, 32 nt, Homo Sapiens
acaugcucuugagggacgagaaugugaacgug

SEQ ID NO: 257600 - RNA, 32 nt, Homo Sapiens
cccgaccucaggugaucugccugccucagccu

SEQ ID NO: 257601 - RNA, 32 nt, Homo Sapiens
uaaaugcucacaguuaaaucugacccaguaaa

SEQ ID NO: 257602 - RNA, 32 nt, Homo Sapiens
gccgugggcucggcccggacccggcauucgga

SEQ ID NO: 257603 - RNA, 32 nt, Homo Sapiens
guccccgccccgacugugaaugaaaggcgggc

SEQ ID NO: 257604 - RNA, 32 nt, Homo Sapiens
cacugcgcuccagccugggugacagagugaga

SEQ ID NO: 257605 - RNA, 32 nt, Homo Sapiens
aaggagagaggauaagaagggaaaguucacaa

SEQ ID NO: 257606 - RNA, 32 nt, Homo Sapiens
ggccacagggcagcugcaggccacagugucca

SEQ ID NO: 257607 - RNA, 32 nt, Homo Sapiens
ggcucugucauuuaucucugugacuucgggcu

SEQ ID NO: 257608 - RNA, 32 nt, Homo Sapiens
ucccaccucuccccaaaccccugcaucccugu

SEQ ID NO: 257609 - RNA, 32 nt, Homo Sapiens
uccauacuguuguuucacuuucuggauagugu

SEQ ID NO: 257610 - RNA, 32 nt, Homo Sapiens
ggggcuggcuccugaagggccugggagggucc

SEQ ID NO: 257611 - RNA, 32 nt, Homo Sapiens
aaucagagaggaauaaaagacauuuuauauuu

SEQ ID NO: 257612 - RNA, 32 nt, Homo Sapiens
uugaaaagcagcuuugaaaaacaaagacagag

SEQ ID NO: 257613 - RNA, 32 nt, Homo Sapiens
accucggcgcuugggcgcucagucgcaggagg

SEQ ID NO: 257614 - RNA, 32 nt, Homo Sapiens
gccucguggagcucgccccuccccucagccug

SEQ ID NO: 257615 - RNA, 32 nt, Homo Sapiens
agccacagaacucagucugaaucuggaaucuc

SEQ ID NO: 257616 - RNA, 32 nt, Homo Sapiens
accgcgugaguuaagauuuaauucauagguuu

SEQ ID NO: 257617 - RNA, 32 nt, Homo Sapiens
cgcaggcugcgcgcucccucgcagcagccggg

SEQ ID NO: 257618 - RNA, 32 nt, Homo Sapiens
ucaggcaagugacuucgccuccccucacuggu

SEQ ID NO: 257619 - RNA, 31 nt, Homo Sapiens
agcuauuaauacucaaauugaguuaaaauga

SEQ ID NO: 257620 - RNA, 32 nt, Homo Sapiens
gggcuggcgagggugggggugggcaagggaug

SEQ ID NO: 257621 - RNA, 30 nt, Homo Sapiens
uuaaaacaaaaauaaaucuaguuuagcacu

SEQ ID NO: 257622 - RNA, 27 nt, Homo Sapiens
gccccucacuccugcagcccccuccuc

SEQ ID NO: 257623 - RNA, 32 nt, Homo Sapiens
accccugcggugggcgugggugucaccagggc

SEQ ID NO: 257624 - RNA, 28 nt, Homo Sapiens
ccuuuggggcggccggcccgggaggguc

SEQ ID NO: 257625 - RNA, 32 nt, Homo Sapiens
ugaguggcacaccagagccaucugcagggaag

SEQ ID NO: 257626 - RNA, 32 nt, Homo Sapiens
ggacaaaguuccuggggugcaagggcagucca

SEQ ID NO: 257627 - RNA, 32 nt, Homo Sapiens
cacuaacuauuggcagaaacugcauuugcaaa

SEQ ID NO: 257628 - RNA, 32 nt, Homo Sapiens
auaguuuuuauggaccaaggaacuuguauauu

SEQ ID NO: 257629 - RNA, 32 nt, Homo Sapiens
gaguggcggccgcggcgguggcggagacugug

SEQ ID NO: 257630 - RNA, 32 nt, Homo Sapiens
uggauaugcggugcuuugaugugcuggcucug

SEQ ID NO: 257631 - RNA, 32 nt, Homo Sapiens
ggcugucagggccauaguagcucccuuuggag

SEQ ID NO: 257632 - RNA, 32 nt, Homo Sapiens
agaaaagucaacaaauacauacuuagugguaa

SEQ ID NO: 257633 - RNA, 32 nt, Homo Sapiens
ccgagccaacuuuccugcguccaugcagcccc

SEQ ID NO: 257634 - RNA, 32 nt, Homo Sapiens
ucuggccuggugccggcccaguguuuccucag

SEQ ID NO: 257635 - RNA, 32 nt, Homo Sapiens
guagauguagguucuuaagagaucacaggcug

SEQ ID NO: 257636 - RNA, 32 nt, Homo Sapiens
acaucuguucuuccauacgaaauagguuaggc

SEQ ID NO: 257637 - RNA, 32 nt, Homo Sapiens
gcccccagcccuccccgcaguggaagugaauc

SEQ ID NO: 257638 - RNA, 32 nt, Homo Sapiens
uuuuauaaauauauauuuuaucagacaucaug

SEQ ID NO: 257639 - RNA, 32 nt, Homo Sapiens
ucuggccgccucagcguccgcccucaggcccg

SEQ ID NO: 257640 - RNA, 32 nt, Homo Sapiens
gaaaacacauaaauaaaacuacaugcaccauc

SEQ ID NO: 257641 - RNA, 32 nt, Homo Sapiens
uuuucuaaaccuuuuuuuuuuaauauacauau

SEQ ID NO: 257642 - RNA, 32 nt, Homo Sapiens
uggaagacaaugagaggagacgauguuaaaga

SEQ ID NO: 257643 - RNA, 32 nt, Homo Sapiens
uaugugauuucccccacccaucugaguuccag

SEQ ID NO: 257644 - RNA, 32 nt, Homo Sapiens
ucugcuuugacaaagaaaaugacauuggggag

SEQ ID NO: 257645 - RNA, 32 nt, Homo Sapiens
gagucaauuaaaccucuuuucuuuauaaauua

SEQ ID NO: 257646 - RNA, 32 nt, Homo Sapiens
cccuucuugggucugaguuccuauuauaggua

SEQ ID NO: 257647 - RNA, 32 nt, Homo Sapiens
uucuguacaucauagauuucauucuggugaga

SEQ ID NO: 257648 - RNA, 32 nt, Homo Sapiens
ggacaugccgugguggagaacacaccuguggc

SEQ ID NO: 257649 - RNA, 32 nt, Homo Sapiens
cuagcgcccuccccccaccccgccgucucccc

SEQ ID NO: 257650 - RNA, 32 nt, Homo Sapiens
caguuucaugucuugugauuuauuuucucccu

SEQ ID NO: 257651 - RNA, 32 nt, Homo Sapiens
aggaaccucccucgggccugcuccaucaggga

SEQ ID NO: 257652 - RNA, 32 nt, Homo Sapiens
gacaccccucauggccaaccguuacaccaugg

SEQ ID NO: 257653 - RNA, 32 nt, Homo Sapiens
aaaaaacacuguaucagcauagccuuucugua

SEQ ID NO: 257654 - RNA, 32 nt, Homo Sapiens
gucugugauguucccaccugcuucuguagaaa

SEQ ID NO: 257655 - RNA, 32 nt, Homo Sapiens
uacccuauaugcuaaaugacuaccacagcaau

SEQ ID NO: 257656 - RNA, 32 nt, Homo Sapiens
ccuccgucccgccgcgccacuucgccugccuc

SEQ ID NO: 257657 - RNA, 32 nt, Homo Sapiens
uaggugggcccuugaaggggagcccaacucgu

SEQ ID NO: 257658 - RNA, 32 nt, Homo Sapiens
ugccgcccggcccuucccuccacagcucuccu

SEQ ID NO: 257659 - RNA, 27 nt, Homo Sapiens
ucgauguccuucucccgugcccuauug

SEQ ID NO: 257660 - RNA, 32 nt, Homo Sapiens
acauagaagaacuauuaagaagauagaauugu

SEQ ID NO: 257661 - RNA, 32 nt, Homo Sapiens
ccaugaacguucuugucuguguacaguuuuua

SEQ ID NO: 257662 - RNA, 32 nt, Homo Sapiens
cacugaguggguuugaugugguggaugcuggc

SEQ ID NO: 257663 - RNA, 29 nt, Homo Sapiens
cggagggcgaguauggggacgccgcggag

SEQ ID NO: 257664 - RNA, 32 nt, Homo Sapiens
ggacaccaugcagcggcugaacaucggcuacg

SEQ ID NO: 257665 - RNA, 32 nt, Homo Sapiens
ugcaaauaaaaagaaugggaccuaaacucgug

SEQ ID NO: 257666 - RNA, 32 nt, Homo Sapiens
auauuuuuauauauuuuugacuuuuuaaaagu

SEQ ID NO: 257667 - RNA, 32 nt, Homo Sapiens
ggccuaagcucugcggcagagcccuugacccu

SEQ ID NO: 257668 - RNA, 32 nt, Homo Sapiens
gcgagcucggcuuccucaacauggcugcgccc

SEQ ID NO: 257669 - RNA, 32 nt, Homo Sapiens
aaauaagcugggugcaguggcucacgccucua

SEQ ID NO: 257670 - RNA, 32 nt, Homo Sapiens
uucaauuccccgcuccugggcuuccuggugug

SEQ ID NO: 257671 - RNA, 32 nt, Homo Sapiens
ggaagcuuacaauuuucuucucucucuuuugu

SEQ ID NO: 257672 - RNA, 27 nt, Homo Sapiens
ugaugagaucaucaagguugcucgaca

SEQ ID NO: 257673 - RNA, 32 nt, Homo Sapiens
uuuaaucuacugacaaguugcucuaguaaccc

SEQ ID NO: 257674 - RNA, 32 nt, Homo Sapiens
auuggcgcgggccgcagccagcgcacccagac

SEQ ID NO: 257675 - RNA, 32 nt, Homo Sapiens
ccgccugccugccugccacugaggguucccag

SEQ ID NO: 257676 - RNA, 32 nt, Homo Sapiens
uuuuucuugcuguguguccaaacucugguuag

SEQ ID NO: 257677 - RNA, 32 nt, Homo Sapiens
agcuccgccucccggguucacgccauucugcg

SEQ ID NO: 257678 - RNA, 32 nt, Homo Sapiens
gggcaggggcuggagccgcgggaccagcgccu

SEQ ID NO: 257679 - RNA, 32 nt, Homo Sapiens
gcccacucaugagcuaugccaacgaagccuuc

SEQ ID NO: 257680 - RNA, 32 nt, Homo Sapiens
gccaaaagcaggcucgaauuucccuccaccac

SEQ ID NO: 257681 - RNA, 32 nt, Homo Sapiens
aggggcagauuucauaacaacaucucaaaaau

SEQ ID NO: 257682 - RNA, 32 nt, Homo Sapiens
cggccagaggccaugcugcugcugcucacgcu

SEQ ID NO: 257683 - RNA, 32 nt, Homo Sapiens
uuuuuuaaaaacagagagaaagagagacaggg

SEQ ID NO: 257684 - RNA, 32 nt, Homo Sapiens
uucaaccgccuggcccccugagggcugggucu

SEQ ID NO: 257685 - RNA, 32 nt, Homo Sapiens
cauuucuugaauguugaguauuacaacaucac

SEQ ID NO: 257686 - RNA, 32 nt, Homo Sapiens
gauaugggugaaaggagacauaaaauuagcaa

SEQ ID NO: 257687 - RNA, 32 nt, Homo Sapiens
uuggcaagcugaugguacuuuuugcauaaucu

SEQ ID NO: 257688 - RNA, 32 nt, Homo Sapiens
acccguggccccagcucacucauugcccucag

SEQ ID NO: 257689 - RNA, 32 nt, Homo Sapiens
gcuccugcccaggcugcccugcccagcgccuc

SEQ ID NO: 257690 - RNA, 32 nt, Homo Sapiens
uuuccuauucuuuucaaguuaaauaaauuaug

SEQ ID NO: 257691 - RNA, 32 nt, Homo Sapiens
cccaguagugcuggucacccuccggcaucugu

SEQ ID NO: 257692 - RNA, 32 nt, Homo Sapiens
cagaagguguugccaggggcccagaugcccug

SEQ ID NO: 257693 - RNA, 32 nt, Homo Sapiens
uucacugccccggcuggucccaagggucagga

SEQ ID NO: 257694 - RNA, 31 nt, Homo Sapiens
ugcuuuauuuaguugaaauaaaaucagcauu

SEQ ID NO: 257695 - RNA, 32 nt, Homo Sapiens
gaccugcuuucuuuucuccucagucuugcauu

SEQ ID NO: 257696 - RNA, 32 nt, Homo Sapiens
gcugcucuguccacauuccauccaccaaagca

SEQ ID NO: 257697 - RNA, 32 nt, Homo Sapiens
agacuucugugcuauggagacuuggaaaguga

SEQ ID NO: 257698 - RNA, 32 nt, Homo Sapiens
uuugucacuggaauuuuauuuauuuuuuaguu

SEQ ID NO: 257699 - RNA, 32 nt, Homo Sapiens
caggggauccuucucaucuccuggacccucca

SEQ ID NO: 257700 - RNA, 32 nt, Homo Sapiens
aagucuuguaaauguagcuggaccccacgugc

SEQ ID NO: 257701 - RNA, 32 nt, Homo Sapiens
ggcuccgccucccggguucccgccauucuccu

SEQ ID NO: 257702 - RNA, 32 nt, Homo Sapiens
cugcucacugggcccgagccugaacugagccc

SEQ ID NO: 257703 - RNA, 32 nt, Homo Sapiens
ugggcacgccuggccacgcuuuaccgacugcu

SEQ ID NO: 257704 - RNA, 32 nt, Homo Sapiens
ugcccagcauguucccaaaucugugcuggaca

SEQ ID NO: 257705 - RNA, 32 nt, Homo Sapiens
aguucuaccuguaaaacaaauauuuugagacu

SEQ ID NO: 257706 - RNA, 32 nt, Homo Sapiens
gggauaugaaguggagccacuccagcagugag

SEQ ID NO: 257707 - RNA, 32 nt, Homo Sapiens
acggcagaaagauaaucagacuuucuuuuuac

SEQ ID NO: 257708 - RNA, 32 nt, Homo Sapiens
aguuuugaacaccugaaauuguaaucacugaa

SEQ ID NO: 257709 - RNA, 32 nt, Homo Sapiens
accauguauuuuguaaauaauaaaauaguauc

SEQ ID NO: 257710 - RNA, 29 nt, Homo Sapiens
uaaauuuggggacagauucagucuugccu

SEQ ID NO: 257711 - RNA, 32 nt, Homo Sapiens
ggugagauugaauaaugcuugaugcagaaucg

SEQ ID NO: 257712 - RNA, 32 nt, Homo Sapiens
uccccacuccgucucuggagcccaccagggaa

SEQ ID NO: 257713 - RNA, 32 nt, Homo Sapiens
ccauuuugagucuaaccgagacucaucaaagc

SEQ ID NO: 257714 - RNA, 32 nt, Homo Sapiens
gccacuuucuuugcugucugcagcauuuaaaa

SEQ ID NO: 257715 - RNA, 32 nt, Homo Sapiens
aaggacaaaaggaagcacuguggcuauaccca

SEQ ID NO: 257716 - RNA, 32 nt, Homo Sapiens
uaucaauacuaaaaucuuaucuauagauccuu

SEQ ID NO: 257717 - RNA, 32 nt, Homo Sapiens
uuucagaaggaaugguaccagcuccucuuugu

SEQ ID NO: 257718 - RNA, 32 nt, Homo Sapiens
aaaaagaguuauaucauuuggguuaaaggucu

SEQ ID NO: 257719 - RNA, 32 nt, Homo Sapiens
gaaaauuggguuacccugaggacucuugcuua

SEQ ID NO: 257720 - RNA, 32 nt, Homo Sapiens
acuccugguucugcugggccuguggcugccac

SEQ ID NO: 257721 - RNA, 32 nt, Homo Sapiens
guguagaugauuaacugacuuuuuaauauuuu

SEQ ID NO: 257722 - RNA, 32 nt, Homo Sapiens
agggaccgcgcgcgccgcggccucgcucuggg

SEQ ID NO: 257723 - RNA, 32 nt, Homo Sapiens
uuccuuccuucauuuuaaauauugucauuaca

SEQ ID NO: 257724 - RNA, 32 nt, Homo Sapiens
accacagucgggaaacaagcauagaaauggaa

SEQ ID NO: 257725 - RNA, 32 nt, Homo Sapiens
ugaaggaggagcuucggggugucggcugggcu

SEQ ID NO: 257726 - RNA, 32 nt, Homo Sapiens
guccuucugcugucucuggggcgagucuugga

SEQ ID NO: 257727 - RNA, 32 nt, Homo Sapiens
acacuagcaaagacauggaaucaaccuaaaug

SEQ ID NO: 257728 - RNA, 30 nt, Homo Sapiens
ugcugcagaugggggaggagccauaagccu

SEQ ID NO: 257729 - RNA, 32 nt, Homo Sapiens
gagaugaugcaugaugcccuccccucagcgca

SEQ ID NO: 257730 - RNA, 32 nt, Homo Sapiens
gcgagccuccugcccuggcccggcgcugcggc

SEQ ID NO: 257731 - RNA, 32 nt, Homo Sapiens
gcccccggcccuccccucucaggcggagccaa

SEQ ID NO: 257732 - RNA, 32 nt, Homo Sapiens
cuuucuucuaucuauuagaauuaugaacaucu

SEQ ID NO: 257733 - RNA, 32 nt, Homo Sapiens
ccccgugguguccccuggcccuccccccaccc

SEQ ID NO: 257734 - RNA, 27 nt, Homo Sapiens
ggaauuuucaccuccagcccccagugu

SEQ ID NO: 257735 - RNA, 32 nt, Homo Sapiens
agagaaagagggaaacaaaagccuguucagca

SEQ ID NO: 257736 - RNA, 32 nt, Homo Sapiens
ggcacgagggaaagggagaaaaagauucuaca

SEQ ID NO: 257737 - RNA, 32 nt, Homo Sapiens
uccccguuuccuggagacccaggguucgcaca

SEQ ID NO: 257738 - RNA, 32 nt, Homo Sapiens
gcagguguuucauugugaacucuagcuuugau

SEQ ID NO: 257739 - RNA, 32 nt, Homo Sapiens
cgccgggcagggcggcgggcgcgcucagucug

SEQ ID NO: 257740 - RNA, 29 nt, Homo Sapiens
caagagucggagaccagccugggcaacac

SEQ ID NO: 257741 - RNA, 32 nt, Homo Sapiens
uuuaguggagacgggguuucuccaugucgguc

SEQ ID NO: 257742 - RNA, 32 nt, Homo Sapiens
uucuaaauauauuauauaauauguuacacucu

SEQ ID NO: 257743 - RNA, 32 nt, Homo Sapiens
ggagacagaaaagaggugcggcaggacucuua

SEQ ID NO: 257744 - RNA, 32 nt, Homo Sapiens
uaaucuaaauguuuguggauuccugugucucc

SEQ ID NO: 257745 - RNA, 32 nt, Homo Sapiens
ccggcugcucagagccgggagauggccacuca

SEQ ID NO: 257746 - RNA, 32 nt, Homo Sapiens
gacuggggccccuggcccggccccacccagcc

SEQ ID NO: 257747 - RNA, 32 nt, Homo Sapiens
aggaagaaagggaaauugcagcuccucagccc

SEQ ID NO: 257748 - RNA, 32 nt, Homo Sapiens
uuaguugauuuucaguacuauuuacauaggaa

SEQ ID NO: 257749 - RNA, 28 nt, Homo Sapiens
cgggcaaggcgggcgccgagguuugcaa

SEQ ID NO: 257750 - RNA, 32 nt, Homo Sapiens
gccaggcuuccucuccugggaagagccugccg

SEQ ID NO: 257751 - RNA, 32 nt, Homo Sapiens
uuuuuccugugcuacauaccaccacagcagcc

SEQ ID NO: 257752 - RNA, 32 nt, Homo Sapiens
cgcgacaguggugggggacgcugcugagugga

SEQ ID NO: 257753 - RNA, 32 nt, Homo Sapiens
acaaacuaccugugcacaccacagcauagaug

SEQ ID NO: 257754 - RNA, 29 nt, Homo Sapiens
aaaagaugaagagaauauuuuccagaaca

SEQ ID NO: 257755 - RNA, 32 nt, Homo Sapiens
aaggagaaggcaccuagacuguacugggaagg

SEQ ID NO: 257756 - RNA, 32 nt, Homo Sapiens
gagucauuuugucauuuagaguauucugauaa

SEQ ID NO: 257757 - RNA, 32 nt, Homo Sapiens
cggcggcggcgggcagcggacgggcggacuga

SEQ ID NO: 257758 - RNA, 32 nt, Homo Sapiens
uuuguauguaacuuacccacauccucuuguau

SEQ ID NO: 257759 - RNA, 28 nt, Homo Sapiens
cgacuguggcggccgcagguugcacgcc

SEQ ID NO: 257760 - RNA, 32 nt, Homo Sapiens
gguggcgcacaagcuuugacagguuggagggu

SEQ ID NO: 257761 - RNA, 32 nt, Homo Sapiens
uagaaggguaaucccggaaaugcuucaucugg

SEQ ID NO: 257762 - RNA, 32 nt, Homo Sapiens
uagcugagagcccgggggccaggccgcggcug

SEQ ID NO: 257763 - RNA, 32 nt, Homo Sapiens
acuggggcauuggaaaagacagagcacgcuuc

SEQ ID NO: 257764 - RNA, 32 nt, Homo Sapiens
uagcucagcauuuaagcaugauuacauauuca

SEQ ID NO: 257765 - RNA, 32 nt, Homo Sapiens
ugggaaaacuaaaaaaguuuucugggacaacg

SEQ ID NO: 257766 - RNA, 32 nt, Homo Sapiens
uggggauuucuguguccugacaccaccucccc

SEQ ID NO: 257767 - RNA, 32 nt, Homo Sapiens
aacugccagacugcgagacaaaguggaccgag

SEQ ID NO: 257768 - RNA, 32 nt, Homo Sapiens
uuuugucuuuugcuguaagcuuugaccuuuug

SEQ ID NO: 257769 - RNA, 32 nt, Homo Sapiens
uaccauucacucagccaggaccagcauuuaau

SEQ ID NO: 257770 - RNA, 32 nt, Homo Sapiens
ggauccgcgcggcacacgugcgacggccguga

SEQ ID NO: 257771 - RNA, 32 nt, Homo Sapiens
cuuuuguacuuaguauauguuuuauauuugga

SEQ ID NO: 257772 - RNA, 32 nt, Homo Sapiens
cuugaggcccuguggcugggucggguggaggc

SEQ ID NO: 257773 - RNA, 32 nt, Homo Sapiens
gcccucuauggcuuuaaggccuugcuuacugc

SEQ ID NO: 257774 - RNA, 32 nt, Homo Sapiens
ugugaaacguguuucaagaccaaaaaacacaa

SEQ ID NO: 257775 - RNA, 32 nt, Homo Sapiens
uugcgaggagacggcgcauguccgccgcgcuu

SEQ ID NO: 257776 - RNA, 32 nt, Homo Sapiens
ggggcggggguggggggugcugcgaggaaugg

SEQ ID NO: 257777 - RNA, 32 nt, Homo Sapiens
uuguuuguuucauaaagcauaucacuuuaaaa

SEQ ID NO: 257778 - RNA, 32 nt, Homo Sapiens
accaggauggcagccaggagcggccggugagc

SEQ ID NO: 257779 - RNA, 32 nt, Homo Sapiens
cagcucacggcggccccggccccggguggcug

SEQ ID NO: 257780 - RNA, 32 nt, Homo Sapiens
cggcggccgugacgaggcgcucccggagcuga

SEQ ID NO: 257781 - RNA, 32 nt, Homo Sapiens
ggaccucugugguuccgcgacagccgcgcccc

SEQ ID NO: 257782 - RNA, 32 nt, Homo Sapiens
uuuggccaaaacagaacaaaugcugaaaagga

SEQ ID NO: 257783 - RNA, 32 nt, Homo Sapiens
accaggaaauuccaauacaucagugcaugugg

SEQ ID NO: 257784 - RNA, 32 nt, Homo Sapiens
acaucccagaauggaggcaggggggugacuca

SEQ ID NO: 257785 - RNA, 32 nt, Homo Sapiens
gccaccuuauuccuccucuccauccagccccu

SEQ ID NO: 257786 - RNA, 32 nt, Homo Sapiens
uugcacacccucagccugagaauguaaaauag

SEQ ID NO: 257787 - RNA, 32 nt, Homo Sapiens
auauauuugugcuuuuuucuuauguaggaaga

SEQ ID NO: 257788 - RNA, 32 nt, Homo Sapiens
gauauacaaaaaucagugguauuuucauacga

SEQ ID NO: 257789 - RNA, 32 nt, Homo Sapiens
ucgacccguacaguugagagccaggggcuggu

SEQ ID NO: 257790 - RNA, 32 nt, Homo Sapiens
aucacucuggccucugccuucaucucaugccg

SEQ ID NO: 257791 - RNA, 32 nt, Homo Sapiens
aaugacucuucccccauacuucacagccaauc

SEQ ID NO: 257792 - RNA, 31 nt, Homo Sapiens
guccuacagcacugccacccuggccauugcu

SEQ ID NO: 257793 - RNA, 32 nt, Homo Sapiens
agcuugcaaugacaauaaagguaaauaaguac

SEQ ID NO: 257794 - RNA, 32 nt, Homo Sapiens
ccaaggaggagcuuagcaagucugcagcccag

SEQ ID NO: 257795 - RNA, 32 nt, Homo Sapiens
agagggcagggccaaccuccucacugugcuuc

SEQ ID NO: 257796 - RNA, 32 nt, Homo Sapiens
uaccagaagcaucuucaguuuucauaugaaaa

SEQ ID NO: 257797 - RNA, 32 nt, Homo Sapiens
aauuaucuuuugcagauaucagcugguuggau

SEQ ID NO: 257798 - RNA, 32 nt, Homo Sapiens
aaaaauuccauaucaaugugccuugcccugga

SEQ ID NO: 257799 - RNA, 32 nt, Homo Sapiens
cagaucuacuugguugucaaguggacaaucaa

SEQ ID NO: 257800 - RNA, 32 nt, Homo Sapiens
guuacucaaauauuuuucacuuaacuuuuuau

SEQ ID NO: 257801 - RNA, 32 nt, Homo Sapiens
gucuuacgaugaucauuuagagguuuauuuug

SEQ ID NO: 257802 - RNA, 32 nt, Homo Sapiens
gcaguguggucucuuacauggccacaaaggga

SEQ ID NO: 257803 - RNA, 32 nt, Homo Sapiens
agaaguugauagccugguuaaaaguuagaucc

SEQ ID NO: 257804 - RNA, 32 nt, Homo Sapiens
uuuuccaggcaccccaccaugggcaaugccuc

SEQ ID NO: 257805 - RNA, 27 nt, Homo Sapiens
guccagugguucuucagcccaugacag

SEQ ID NO: 257806 - RNA, 32 nt, Homo Sapiens
uacggccgucgugccgcucgugucagucaaca

SEQ ID NO: 257807 - RNA, 32 nt, Homo Sapiens
gccuccggcgaugccgccccagccccucugau

SEQ ID NO: 257808 - RNA, 32 nt, Homo Sapiens
aagauauccaacacaacaaaagauugucccuu

SEQ ID NO: 257809 - RNA, 32 nt, Homo Sapiens
auacuaaaaaauaccuaaaaggaagcuuagau

SEQ ID NO: 257810 - RNA, 32 nt, Homo Sapiens
cacguagguuuuuuguuuguuuuguuuuguuc

SEQ ID NO: 257811 - RNA, 32 nt, Homo Sapiens
aaaaugguauucaaauucuggaauggaaaucu

SEQ ID NO: 257812 - RNA, 32 nt, Homo Sapiens
cgcucuaaaacgggaaggcuauuugggacagg

SEQ ID NO: 257813 - RNA, 32 nt, Homo Sapiens
gcgcuggccugcugccccggcggguccgccgg

SEQ ID NO: 257814 - RNA, 32 nt, Homo Sapiens
ucucuaauauaucauuugucuuuuuuccagug

SEQ ID NO: 257815 - RNA, 32 nt, Homo Sapiens
uucauauucuuuauguggaagaauagauuuua

SEQ ID NO: 257816 - RNA, 32 nt, Homo Sapiens
uucuaaauaaacucuuuuuuuuuaaaaaaaaa

SEQ ID NO: 257817 - RNA, 32 nt, Homo Sapiens
cucagagcaccaauaucuccuccaucacuucc

SEQ ID NO: 257818 - RNA, 32 nt, Homo Sapiens
aguugcaaggauuuuuccaugugugguggugu

SEQ ID NO: 257819 - RNA, 32 nt, Homo Sapiens
gucaauuugggaauuauuauuauuaauuuaga

SEQ ID NO: 257820 - RNA, 32 nt, Homo Sapiens
gaugcccuggagcaccguggggugcugcugga

SEQ ID NO: 257821 - RNA, 32 nt, Homo Sapiens
cuggagccauccccguuuccccgccccccaaa

SEQ ID NO: 257822 - RNA, 32 nt, Homo Sapiens
ugccuuccuugaaaauacaauuuaaauuguac

SEQ ID NO: 257823 - RNA, 31 nt, Homo Sapiens
ugucucagccgacagaaccagcaagccagaa

SEQ ID NO: 257824 - RNA, 32 nt, Homo Sapiens
uggguaugcuuaaagauugcaggguagggagg

SEQ ID NO: 257825 - RNA, 32 nt, Homo Sapiens
ugaguauauggacugaaauacuguaccugcua

SEQ ID NO: 257826 - RNA, 32 nt, Homo Sapiens
uccuuccagccuuugcuccccaucccacguuc

SEQ ID NO: 257827 - RNA, 32 nt, Homo Sapiens
ggcugcuccuauguuggaaauuuguucauuaa

SEQ ID NO: 257828 - RNA, 32 nt, Homo Sapiens
caggagacagagaggggcugggggcguggggu

SEQ ID NO: 257829 - RNA, 32 nt, Homo Sapiens
uuuuaaacuuggauuccaacuuccuguugucu

SEQ ID NO: 257830 - RNA, 32 nt, Homo Sapiens
uuuccgaggugccacaaugcaaaugcuuaagg

SEQ ID NO: 257831 - RNA, 32 nt, Homo Sapiens
aaacaagucgauuuguauuaugcuggaauuuu

SEQ ID NO: 257832 - RNA, 32 nt, Homo Sapiens
gccauuugacauuucaaaucagugcucauaua

SEQ ID NO: 257833 - RNA, 32 nt, Homo Sapiens
uggcuucugaccaaaaaccaagcucuacccca

SEQ ID NO: 257834 - RNA, 32 nt, Homo Sapiens
ucugcggcugcgaaucggcuggagcggggccu

SEQ ID NO: 257835 - RNA, 32 nt, Homo Sapiens
cuuggaaucuacugccugcuggccaggcuuua

SEQ ID NO: 257836 - RNA, 32 nt, Homo Sapiens
ugggagcuuuauauauguaaucuugcaggugg

SEQ ID NO: 257837 - RNA, 32 nt, Homo Sapiens
uggcuugauaauaccaaguauuguuguaauuu

SEQ ID NO: 257838 - RNA, 32 nt, Homo Sapiens
ccaaaugaaaauuucaaagucaauaccagcag

SEQ ID NO: 257839 - RNA, 32 nt, Homo Sapiens
uuggagcccuggauucuggugcuauagcuccu

SEQ ID NO: 257840 - RNA, 32 nt, Homo Sapiens
uuuucccuuccuaccccaacccugagccagag

SEQ ID NO: 257841 - RNA, 32 nt, Homo Sapiens
uacuuugguguagaagacgaugauagcagccu

SEQ ID NO: 257842 - RNA, 32 nt, Homo Sapiens
auguugaagauaaaaugaauagugggaaaaca

SEQ ID NO: 257843 - RNA, 32 nt, Homo Sapiens
auuacacacuacugcagauuuuacagguuucu

SEQ ID NO: 257844 - RNA, 32 nt, Homo Sapiens
acccccugccccugccucccccagcccggugc

SEQ ID NO: 257845 - RNA, 32 nt, Homo Sapiens
gcgagcauggcccgcgcggcgccgggcgcuga

SEQ ID NO: 257846 - RNA, 32 nt, Homo Sapiens
uccugggcaggaagcccggcccguggagcagg

SEQ ID NO: 257847 - RNA, 32 nt, Homo Sapiens
ccuccccuagaauggcuuggggcuuagggcug

SEQ ID NO: 257848 - RNA, 32 nt, Homo Sapiens
uacucggauggccucccugccccucugcuggc

SEQ ID NO: 257849 - RNA, 32 nt, Homo Sapiens
uaccuccucccgcgcgcacgcuccgcgccuga

SEQ ID NO: 257850 - RNA, 32 nt, Homo Sapiens
cagcugcagaauguauauaacacaauaaaagc

SEQ ID NO: 257851 - RNA, 32 nt, Homo Sapiens
uuugaggggauccuggauguguguguucuugu

SEQ ID NO: 257852 - RNA, 32 nt, Homo Sapiens
ugagaaugggucuguaauuucucuaagaugaa

SEQ ID NO: 257853 - RNA, 32 nt, Homo Sapiens
aaacugauaaaacaguuuuucgaaacuuacuu

SEQ ID NO: 257854 - RNA, 32 nt, Homo Sapiens
uaaagccuuucuguaucugguugacgugaccc

SEQ ID NO: 257855 - RNA, 32 nt, Homo Sapiens
cgaccucggcccggccucccuucgcucagcuu

SEQ ID NO: 257856 - RNA, 32 nt, Homo Sapiens
uuuaaucccccuccuccccagaaggaaccuca

SEQ ID NO: 257857 - RNA, 32 nt, Homo Sapiens
cuuuuccuucgguuccuucucugcuggcccca

SEQ ID NO: 257858 - RNA, 32 nt, Homo Sapiens
uuaaggugcagggccugggggcaggaggacau

SEQ ID NO: 257859 - RNA, 32 nt, Homo Sapiens
ggucuccaguguuccccccauagagaccagga

SEQ ID NO: 257860 - RNA, 32 nt, Homo Sapiens
ugagggacuggagggaagccgugcuucugagg

SEQ ID NO: 257861 - RNA, 32 nt, Homo Sapiens
ucaguugggaggaagggaaaaaucaaguuuaa

SEQ ID NO: 257862 - RNA, 32 nt, Homo Sapiens
aacagucaugacccugauaguuucccauaaca

SEQ ID NO: 257863 - RNA, 32 nt, Homo Sapiens
gaagugauaaaacaucucucuucuccuuccca

SEQ ID NO: 257864 - RNA, 32 nt, Homo Sapiens
ggccguccugggcagaccugcccgcuacgccu

SEQ ID NO: 257865 - RNA, 32 nt, Homo Sapiens
ggacaguauuacaaguuauacuggcaguuauu

SEQ ID NO: 257866 - RNA, 32 nt, Homo Sapiens
ucuacugccucccagccccacgguuucaggca

SEQ ID NO: 257867 - RNA, 32 nt, Homo Sapiens
acacuggauugugaggcucuuaacuucuuaaa

SEQ ID NO: 257868 - RNA, 32 nt, Homo Sapiens
agaaugugaggaagaaaugggacucuuugguu

SEQ ID NO: 257869 - RNA, 32 nt, Homo Sapiens
cauugcacuccagccugggcaacgagagugaa

SEQ ID NO: 257870 - RNA, 32 nt, Homo Sapiens
ugggagguggagguugcagugagcagagaccg

SEQ ID NO: 257871 - RNA, 32 nt, Homo Sapiens
agcagagcaaaguggggugagggcuucgccgc

SEQ ID NO: 257872 - RNA, 32 nt, Homo Sapiens
auucuagucuugggaagaaaaguuucuacuca

SEQ ID NO: 257873 - RNA, 32 nt, Homo Sapiens
agcggcucgaggugacaagaccccgagugcug

SEQ ID NO: 257874 - RNA, 32 nt, Homo Sapiens
uaccauucacaucauuuuuuauaggguagauc

SEQ ID NO: 257875 - RNA, 32 nt, Homo Sapiens
cugcucuggcucuugaccaccaccacaucagc

SEQ ID NO: 257876 - RNA, 32 nt, Homo Sapiens
uguguguuugucaucauccucaucucaccauu

SEQ ID NO: 257877 - RNA, 32 nt, Homo Sapiens
uuacagaaaaauuuaugugcuuaacaaacuua

SEQ ID NO: 257878 - RNA, 32 nt, Homo Sapiens
ugcgugggacgaagacaucuuugaaggucaug

SEQ ID NO: 257879 - RNA, 32 nt, Homo Sapiens
auuuguccuugacuacuggacauaucacacca

SEQ ID NO: 257880 - RNA, 30 nt, Homo Sapiens
ugcugcuauauagugggggaagcgugcacu

SEQ ID NO: 257881 - RNA, 32 nt, Homo Sapiens
gucagcaaucugugucccaacgccuucuucag

SEQ ID NO: 257882 - RNA, 32 nt, Homo Sapiens
uuagcccaguguuuucuuugaggaccccuuaa

SEQ ID NO: 257883 - RNA, 32 nt, Homo Sapiens
aaaaucucuucucccuucucccuccaucaucg

SEQ ID NO: 257884 - RNA, 32 nt, Homo Sapiens
ggaugggcagugccucucccagugcccagaug

SEQ ID NO: 257885 - RNA, 32 nt, Homo Sapiens
agcugcuugaccuagcucuuugggccucuccu

SEQ ID NO: 257886 - RNA, 32 nt, Homo Sapiens
aguccccugacccagcucuaaaggcacuuagg

SEQ ID NO: 257887 - RNA, 32 nt, Homo Sapiens
cguauauuauacugccucuuagguguacucuu

SEQ ID NO: 257888 - RNA, 32 nt, Homo Sapiens
ugacuuguuuauaaguauuucuuaaagcuagu

SEQ ID NO: 257889 - RNA, 32 nt, Homo Sapiens
ucacagcucccauggaguuagucuggucacca

SEQ ID NO: 257890 - RNA, 32 nt, Homo Sapiens
gaauuuggacauuuuucuguaggcaacagagc

SEQ ID NO: 257891 - RNA, 32 nt, Homo Sapiens
uaagcacggggacagagacguacgugagcaga

SEQ ID NO: 257892 - RNA, 32 nt, Homo Sapiens
gcuacugugugaggcuggccugcgcggcgugg

SEQ ID NO: 257893 - RNA, 32 nt, Homo Sapiens
guuuugaccagacaucuuugaagugcuuuuug

SEQ ID NO: 257894 - RNA, 32 nt, Homo Sapiens
ucaauauguauuacaaauggugaauggauuuc

SEQ ID NO: 257895 - RNA, 32 nt, Homo Sapiens
aaacauuccagaaugaagagagcugucugggg

SEQ ID NO: 257896 - RNA, 32 nt, Homo Sapiens
aacugccuccaggugccuggaacagcccaucg

SEQ ID NO: 257897 - RNA, 32 nt, Homo Sapiens
uauaaauaagucuagcucuauaauccccaagu

SEQ ID NO: 257898 - RNA, 32 nt, Homo Sapiens
ugcugaaggcguacggugcuugccagauuuuc

SEQ ID NO: 257899 - RNA, 32 nt, Homo Sapiens
gcagggcaccucaugugaagagguacaagaag

SEQ ID NO: 257900 - RNA, 32 nt, Homo Sapiens
ucucuacaaaaaguacaaaaauuagccgggca

SEQ ID NO: 257901 - RNA, 32 nt, Homo Sapiens
ggggacacugacauuuaaaguguggacagaag

SEQ ID NO: 257902 - RNA, 32 nt, Homo Sapiens
gcaguuccagaccgcgggcgauggcugccgcu

SEQ ID NO: 257903 - RNA, 32 nt, Homo Sapiens
ccguuuccugggauuggaacuacccuucuugg

SEQ ID NO: 257904 - RNA, 32 nt, Homo Sapiens
acacaauguauuauuaucacugucagaugagc

SEQ ID NO: 257905 - RNA, 32 nt, Homo Sapiens
ccuggccccuggaacuguuaccacugaaagaa

SEQ ID NO: 257906 - RNA, 32 nt, Homo Sapiens
uuuuuuaaugucuuaauauacuugcuuuuguu

SEQ ID NO: 257907 - RNA, 32 nt, Homo Sapiens
uguaaaaugcugucugaacaaagucucccaug

SEQ ID NO: 257908 - RNA, 32 nt, Homo Sapiens
caccaaucuggugaggauaaugguggcuccag

SEQ ID NO: 257909 - RNA, 32 nt, Homo Sapiens
agcuuccuccaggguuccccagccaccuccca

SEQ ID NO: 257910 - RNA, 32 nt, Homo Sapiens
auacaucuucuuccuuuugguuucuugauccu

SEQ ID NO: 257911 - RNA, 32 nt, Homo Sapiens
aucaccgagcugucacaucagcaaauauguag

SEQ ID NO: 257912 - RNA, 32 nt, Homo Sapiens
aacaggaagcaaacaggaagugagcaaggggc

SEQ ID NO: 257913 - RNA, 32 nt, Homo Sapiens
ccuccugcauuugccuggcccugaucucgccu

SEQ ID NO: 257914 - RNA, 32 nt, Homo Sapiens
uuguuaauauuuuaauguacuaauauuucugu

SEQ ID NO: 257915 - RNA, 32 nt, Homo Sapiens
cggggccucacgacagcuuggugcugguaaga

SEQ ID NO: 257916 - RNA, 32 nt, Homo Sapiens
ggauggggggagggaggcaggggcuagaaagu

SEQ ID NO: 257917 - RNA, 32 nt, Homo Sapiens
uaaacagcaagugucaucuacauccuagccuu

SEQ ID NO: 257918 - RNA, 32 nt, Homo Sapiens
uucagaugaaauuguucauucucguaaccucc

SEQ ID NO: 257919 - RNA, 32 nt, Homo Sapiens
guugaagaggaagggcaaaaccacuagaacuc

SEQ ID NO: 257920 - RNA, 31 nt, Homo Sapiens
acagggagggcgggcgcugcaggggccuccc

SEQ ID NO: 257921 - RNA, 32 nt, Homo Sapiens
cuagagggauuaguacaaacuccucuuauaca

SEQ ID NO: 257922 - RNA, 32 nt, Homo Sapiens
cuaaauauauauauuucaacucgaaaaaaaaa

SEQ ID NO: 257923 - RNA, 32 nt, Homo Sapiens
cauauguagcaaccccuccuccccuccugggc

SEQ ID NO: 257924 - RNA, 30 nt, Homo Sapiens
uuaggagcgagcggcggcgguggcggcggu

SEQ ID NO: 257925 - RNA, 32 nt, Homo Sapiens
uuuaagcaauccucccaccucagcccccaggu

SEQ ID NO: 257926 - RNA, 32 nt, Homo Sapiens
uauucuuagccuuuacuaauuucaagcagugu

SEQ ID NO: 257927 - RNA, 32 nt, Homo Sapiens
cccuaugacacagauagcucacaugaauauug

SEQ ID NO: 257928 - RNA, 32 nt, Homo Sapiens
caaacaacaacaaaaacaagaaauguucuguu

SEQ ID NO: 257929 - RNA, 32 nt, Homo Sapiens
gcuggccaacugguggccagugggaggugaug

SEQ ID NO: 257930 - RNA, 32 nt, Homo Sapiens
ggcucaggccccagcacagcccggccucuggc

SEQ ID NO: 257931 - RNA, 32 nt, Homo Sapiens
uaauuuuauagcauuccauuuuccuagugcca

SEQ ID NO: 257932 - RNA, 32 nt, Homo Sapiens
ccgggagccgcaggggggcgccgggugcagag

SEQ ID NO: 257933 - RNA, 32 nt, Homo Sapiens
gagccuaguuuaggaaaaagcugcuuaaaacu

SEQ ID NO: 257934 - RNA, 32 nt, Homo Sapiens
agagcuggggaccagcagucugccuggaggcc

SEQ ID NO: 257935 - RNA, 32 nt, Homo Sapiens
agagauugagguaacuuuuugugucugggucu

SEQ ID NO: 257936 - RNA, 32 nt, Homo Sapiens
aacuacaaccucaugacagaccuugagcagac

SEQ ID NO: 257937 - RNA, 32 nt, Homo Sapiens
aggucuccuaggaaggagagcagagcugugug

SEQ ID NO: 257938 - RNA, 32 nt, Homo Sapiens
cugccgucccacucaggcccguaugagcuucg

SEQ ID NO: 257939 - RNA, 30 nt, Homo Sapiens
gguuuguggggcgugggcagccgugcuggc

SEQ ID NO: 257940 - RNA, 32 nt, Homo Sapiens
uggcggcagacacagcuuguccacagcuuggg

SEQ ID NO: 257941 - RNA, 32 nt, Homo Sapiens
aauuaauaguaaaauaauccaauauagcacuu

SEQ ID NO: 257942 - RNA, 32 nt, Homo Sapiens
augggagcuccuugcagccugagaagccaguc

SEQ ID NO: 257943 - RNA, 32 nt, Homo Sapiens
ccccuggagguacugacuccagcccuuccagc

SEQ ID NO: 257944 - RNA, 32 nt, Homo Sapiens
gagaggaggagaguggcauuaucccuccuagg

SEQ ID NO: 257945 - RNA, 32 nt, Homo Sapiens
auugugguguggggcggguggaggcggcuggc

SEQ ID NO: 257946 - RNA, 32 nt, Homo Sapiens
auauuuuaauaaauaaaacucccaaaugaucu

SEQ ID NO: 257947 - RNA, 32 nt, Homo Sapiens
acgggcggccccagccccucccgcagcccucc

SEQ ID NO: 257948 - RNA, 32 nt, Homo Sapiens
ccauguuucaagaugccugugagcuaggucuu

SEQ ID NO: 257949 - RNA, 31 nt, Homo Sapiens
caaugcacaaagaaaacgcccauguugaaca

SEQ ID NO: 257950 - RNA, 32 nt, Homo Sapiens
acuucucugcccuuaaaguaaauauuagugaa

SEQ ID NO: 257951 - RNA, 32 nt, Homo Sapiens
uucuguauguauauauucacuuucugacauuu

SEQ ID NO: 257952 - RNA, 32 nt, Homo Sapiens
cgggggccuggcccggcccgcacucagacugc

SEQ ID NO: 257953 - RNA, 32 nt, Homo Sapiens
cucucaaauaauccaagacuucucacugggga

SEQ ID NO: 257954 - RNA, 32 nt, Homo Sapiens
auuauuauuauuauuauuuugagacggaguuu

SEQ ID NO: 257955 - RNA, 32 nt, Homo Sapiens
cacugcacuccagccugggugacagaaugagg

SEQ ID NO: 257956 - RNA, 32 nt, Homo Sapiens
agcgggccaugcugcuggcccagccugugccg

SEQ ID NO: 257957 - RNA, 32 nt, Homo Sapiens
aaacauuugggccccugccauccaccaaggga

SEQ ID NO: 257958 - RNA, 32 nt, Homo Sapiens
agagauguauacauuucuuuaaaacuuguugg

SEQ ID NO: 257959 - RNA, 32 nt, Homo Sapiens
cauuucucuuucugccauacuugcuacugcua

SEQ ID NO: 257960 - RNA, 30 nt, Homo Sapiens
uccccaggagguggugucaagagaggccau

SEQ ID NO: 257961 - RNA, 32 nt, Homo Sapiens
accuaccacaaguuuacauguaaccacagaaa

SEQ ID NO: 257962 - RNA, 32 nt, Homo Sapiens
ggauggaggacggacgaagaccacugagcaug

SEQ ID NO: 257963 - RNA, 32 nt, Homo Sapiens
uuucccguaacgcacaggacacgugugcaauu

SEQ ID NO: 257964 - RNA, 32 nt, Homo Sapiens
aagggagaaaaagaaacacaagagacuuaaag

SEQ ID NO: 257965 - RNA, 31 nt, Homo Sapiens
cucugagcgccuggcgcgccccgcgcccucc

SEQ ID NO: 257966 - RNA, 32 nt, Homo Sapiens
ucaugcagcuggacgugucgaggaugcacugu

SEQ ID NO: 257967 - RNA, 32 nt, Homo Sapiens
cuugcuguuguuucuucaguguaaaaugucuu

SEQ ID NO: 257968 - RNA, 32 nt, Homo Sapiens
gcaguggccccggugaccuuggggccuccgac

SEQ ID NO: 257969 - RNA, 32 nt, Homo Sapiens
agcuccgccucccggguucacgccauccuccu

SEQ ID NO: 257970 - RNA, 32 nt, Homo Sapiens
guuucaauuuguaaaaaaugugauaucuauga

SEQ ID NO: 257971 - RNA, 32 nt, Homo Sapiens
ccugcaggcagacgaggccuuugcuuuacagc

SEQ ID NO: 257972 - RNA, 32 nt, Homo Sapiens
ugcuucguaaugaaauaauccaaaaaauagga

SEQ ID NO: 257973 - RNA, 32 nt, Homo Sapiens
aaauuuguucauuucaauauuaacuaaauuuc

SEQ ID NO: 257974 - RNA, 32 nt, Homo Sapiens
auuuuuguacuuuugcagaagaaacuucagca

SEQ ID NO: 257975 - RNA, 32 nt, Homo Sapiens
ggggucauagagguaagcuuuuuuguaaaauc

SEQ ID NO: 257976 - RNA, 32 nt, Homo Sapiens
ugugcccacugccauagucaaccccgugagaa

SEQ ID NO: 257977 - RNA, 32 nt, Homo Sapiens
acccacuaggaacuugaaugugagauucagcu

SEQ ID NO: 257978 - RNA, 32 nt, Homo Sapiens
aaugagguaguuucuccuaggaccccccaaag

SEQ ID NO: 257979 - RNA, 32 nt, Homo Sapiens
ccuuguaagaaaaacacaccacagguuuucau

SEQ ID NO: 257980 - RNA, 32 nt, Homo Sapiens
caggagaaccccggugaguccguccaguugag

SEQ ID NO: 257981 - RNA, 32 nt, Homo Sapiens
uguuuucuuuauauuucuuauagucuuaauuu

SEQ ID NO: 257982 - RNA, 31 nt, Homo Sapiens
cucucagcccugccacugccccggcgugcuc

SEQ ID NO: 257983 - RNA, 32 nt, Homo Sapiens
ugaacucacugcccgcgccucaucucuccuca

SEQ ID NO: 257984 - RNA, 32 nt, Homo Sapiens
accagcggguggccuuaggggcugugaggcag

SEQ ID NO: 257985 - RNA, 32 nt, Homo Sapiens
ggagggugggcacagcugggccugcugugacc

SEQ ID NO: 257986 - RNA, 32 nt, Homo Sapiens
auguguauauauaugcaaauauauguacauau

SEQ ID NO: 257987 - RNA, 30 nt, Homo Sapiens
ggaagauggcggcagccguggugcuggcug

SEQ ID NO: 257988 - RNA, 32 nt, Homo Sapiens
auugcagauaaaaugcaggcagcacaauaugg

SEQ ID NO: 257989 - RNA, 32 nt, Homo Sapiens
ucggugucuuaacagucuccaguguccacgcg

SEQ ID NO: 257990 - RNA, 31 nt, Homo Sapiens
ccucuccucugauggggcuccacucccucac

SEQ ID NO: 257991 - RNA, 32 nt, Homo Sapiens
gucucuuggccaugauguucuugugggcaugu

SEQ ID NO: 257992 - RNA, 32 nt, Homo Sapiens
ugaauacuagaaaagauuuaaaaaauaguaug

SEQ ID NO: 257993 - RNA, 32 nt, Homo Sapiens
cauauuuggggguggggugggguguuacuuug

SEQ ID NO: 257994 - RNA, 32 nt, Homo Sapiens
ugaguuuucagccaguuuguuaaacuuuuaau

SEQ ID NO: 257995 - RNA, 32 nt, Homo Sapiens
ucuauauaucagugucccaguggccucuuaau

SEQ ID NO: 257996 - RNA, 32 nt, Homo Sapiens
auuugccauugguuucugaaaaguauucacau

SEQ ID NO: 257997 - RNA, 32 nt, Homo Sapiens
gccauuucaaccaacucugagcacaaaaugca

SEQ ID NO: 257998 - RNA, 32 nt, Homo Sapiens
uuuagaaucuaaauaaaaucagagguaaugua

SEQ ID NO: 257999 - RNA, 32 nt, Homo Sapiens
agucauugacuuucuuuguuguuacuuucagc

SEQ ID NO: 258000 - RNA, 32 nt, Homo Sapiens
cccaggccugaagugcaguggcaugaucucag

SEQ ID NO: 258001 - RNA, 32 nt, Homo Sapiens
guuguaauucaauuuaaauguguucauguaca

SEQ ID NO: 258002 - RNA, 32 nt, Homo Sapiens
gggacagcaggcggcuccgagaacgggucuga

SEQ ID NO: 258003 - RNA, 32 nt, Homo Sapiens
cuggggagccugccucuguuucccuggagugg

SEQ ID NO: 258004 - RNA, 32 nt, Homo Sapiens
agcugcgggcgcgggccgacccggagccggag

SEQ ID NO: 258005 - RNA, 32 nt, Homo Sapiens
aauucucagaucuuuucuggaacaaggcagaa

SEQ ID NO: 258006 - RNA, 32 nt, Homo Sapiens
aaugaugugggccgcagcccccugcugcccgc

SEQ ID NO: 258007 - RNA, 32 nt, Homo Sapiens
acaaaaaccuccccaaacccuggcccugggag

SEQ ID NO: 258008 - RNA, 32 nt, Homo Sapiens
cugggcccgcaauggcaguccacugccuugcu

SEQ ID NO: 258009 - RNA, 32 nt, Homo Sapiens
cagucaagcuucaucuuuugcaaaacaggaga

SEQ ID NO: 258010 - RNA, 32 nt, Homo Sapiens
cuggauuucaaucccagcagggccucacuagu

SEQ ID NO: 258011 - RNA, 32 nt, Homo Sapiens
aucagacacuugucaagcuagcagaaacucca

SEQ ID NO: 258012 - RNA, 32 nt, Homo Sapiens
ggcaauuuuaagucagcuaaggcaauaaccuu

SEQ ID NO: 258013 - RNA, 32 nt, Homo Sapiens
uccauagccaaggaggugggacucccuggagc

SEQ ID NO: 258014 - RNA, 32 nt, Homo Sapiens
cccuugcuucccucccccagugcguucuguga

SEQ ID NO: 258015 - RNA, 32 nt, Homo Sapiens
guauauauauacccuuuuuuuuuuuuuuuuuu

SEQ ID NO: 258016 - RNA, 32 nt, Homo Sapiens
caguggcuucgcgggcgacgcgucgccauggg

SEQ ID NO: 258017 - RNA, 32 nt, Homo Sapiens
gaaguaugaugagaagacauuuaguguaggca

SEQ ID NO: 258018 - RNA, 32 nt, Homo Sapiens
cuggcauuacaggcgacagccaucgcgccuag

SEQ ID NO: 258019 - RNA, 32 nt, Homo Sapiens
gcuccuugggacccguuccccagccucaggau

SEQ ID NO: 258020 - RNA, 32 nt, Homo Sapiens
uccaggcagacaucauccagguccaucuggaa

SEQ ID NO: 258021 - RNA, 32 nt, Homo Sapiens
cugaauugacuucuauagccaucuuuucccuu

SEQ ID NO: 258022 - RNA, 30 nt, Homo Sapiens
gcugcccuggacugcucacucucuggucuu

SEQ ID NO: 258023 - RNA, 32 nt, Homo Sapiens
gagucucuaugaucuuggcacaaauuguacau

SEQ ID NO: 258024 - RNA, 32 nt, Homo Sapiens
aaaaggacugguacgguagucuguggaaacca

SEQ ID NO: 258025 - RNA, 32 nt, Homo Sapiens
agaagaaaggaagaggaagaggccaagacugu

SEQ ID NO: 258026 - RNA, 32 nt, Homo Sapiens
caaugaaauggaaugaaggcuaauaugcuugc

SEQ ID NO: 258027 - RNA, 32 nt, Homo Sapiens
auaaaaccaaaaugaaacuuugcauauaagcc

SEQ ID NO: 258028 - RNA, 32 nt, Homo Sapiens
uguggccugccccguccacuccugcuugguug

SEQ ID NO: 258029 - RNA, 32 nt, Homo Sapiens
uaaggggugcggcaaugcugcaacugcgggac

SEQ ID NO: 258030 - RNA, 32 nt, Homo Sapiens
auggauauacuucuuucuugcuuuuguugugu

SEQ ID NO: 258031 - RNA, 32 nt, Homo Sapiens
aacucuccuacuccugucccagcccugccucc

SEQ ID NO: 258032 - RNA, 32 nt, Homo Sapiens
guuaaaaagcuaccaucugguguucaguucug

SEQ ID NO: 258033 - RNA, 32 nt, Homo Sapiens
gggcuggcggccggccggcgcccccucauuag

SEQ ID NO: 258034 - RNA, 32 nt, Homo Sapiens
cagggucuacagugacaucacucuguacaaag

SEQ ID NO: 258035 - RNA, 32 nt, Homo Sapiens
accggugacuguuuuucuucauaaaguucugc

SEQ ID NO: 258036 - RNA, 32 nt, Homo Sapiens
agccuccaccauccccgcacaaagcggcucua

SEQ ID NO: 258037 - RNA, 32 nt, Homo Sapiens
cauccucagaucucccauccagggcaaggaca

SEQ ID NO: 258038 - RNA, 32 nt, Homo Sapiens
cccccgucagccccaaccccagcccacacauu

SEQ ID NO: 258039 - RNA, 32 nt, Homo Sapiens
ugcagacaugauuuuuuuuuuacuaacuucau

SEQ ID NO: 258040 - RNA, 32 nt, Homo Sapiens
ugucuggguuccugaggccuggggguggcaga

SEQ ID NO: 258041 - RNA, 32 nt, Homo Sapiens
guaaaaacauauaaaaaguucaagacuuuuuu

SEQ ID NO: 258042 - RNA, 32 nt, Homo Sapiens
caaaauagguaacacaugccugucugucauaa

SEQ ID NO: 258043 - RNA, 32 nt, Homo Sapiens
ucccucaggcuuguguccccacugcugcaucg

SEQ ID NO: 258044 - RNA, 32 nt, Homo Sapiens
ggcuuuucucccaaaaaucggcugaaggcugg

SEQ ID NO: 258045 - RNA, 32 nt, Homo Sapiens
gaaaguggaaaggguggccgagugcccccugc

SEQ ID NO: 258046 - RNA, 32 nt, Homo Sapiens
cugaagggggcugagggguugaugugggguuc

SEQ ID NO: 258047 - RNA, 32 nt, Homo Sapiens
ugccuccggugccgcuggcgaccgcugagccg

SEQ ID NO: 258048 - RNA, 32 nt, Homo Sapiens
cuaggccugcaccucucuggccuccucaagag

SEQ ID NO: 258049 - RNA, 32 nt, Homo Sapiens
ccucccauucccuccuccgccucccccagguc

SEQ ID NO: 258050 - RNA, 32 nt, Homo Sapiens
uuugccuuauuuuacaaauugaggauuaccaa

SEQ ID NO: 258051 - RNA, 32 nt, Homo Sapiens
ccuuguuaagacaaaauuuauuuuccagggau

SEQ ID NO: 258052 - RNA, 32 nt, Homo Sapiens
agagcgucgggcgggaggcggugguccuggga

SEQ ID NO: 258053 - RNA, 32 nt, Homo Sapiens
agccgagaggauguuaugagaaacacagauuu

SEQ ID NO: 258054 - RNA, 32 nt, Homo Sapiens
cgaaagcgcgucugcggccgcaaugucugcug

SEQ ID NO: 258055 - RNA, 32 nt, Homo Sapiens
agccacuggccaggccguuguauccaugucac

SEQ ID NO: 258056 - RNA, 32 nt, Homo Sapiens
ggcagaucugggagacugcugcagugucugcc

SEQ ID NO: 258057 - RNA, 32 nt, Homo Sapiens
uguuucaggcacuaaagcaacaaaacaaccca

SEQ ID NO: 258058 - RNA, 32 nt, Homo Sapiens
gcgcucgcucagcuccucucggcuccuccucc

SEQ ID NO: 258059 - RNA, 32 nt, Homo Sapiens
aagugaaacaauucuuuagauguucagacaga

SEQ ID NO: 258060 - RNA, 32 nt, Homo Sapiens
uaugacuauauuaaauggaaguauuuuuggga

SEQ ID NO: 258061 - RNA, 32 nt, Homo Sapiens
ccccgcugcugcuccgggccaagcuucugguu

SEQ ID NO: 258062 - RNA, 31 nt, Homo Sapiens
ccuguuggagucagcuuucaagauugccugu

SEQ ID NO: 258063 - RNA, 31 nt, Homo Sapiens
gcagcuggcgggcugauucagaaaacaugag

SEQ ID NO: 258064 - RNA, 32 nt, Homo Sapiens
gggcucuggccuugcgucuuccgaccgaauca

SEQ ID NO: 258065 - RNA, 32 nt, Homo Sapiens
ucuguuugugcaaacauaauaccaccauuuaa

SEQ ID NO: 258066 - RNA, 32 nt, Homo Sapiens
uauguguccuuccagacacuuucuacaaauau

SEQ ID NO: 258067 - RNA, 28 nt, Homo Sapiens
acaaugaagaaccaagacaaaaagaacg

SEQ ID NO: 258068 - RNA, 32 nt, Homo Sapiens
aagaagucucuuaaugcuaaugaagaauuuaa

SEQ ID NO: 258069 - RNA, 32 nt, Homo Sapiens
gguuaugaaaacaguacuuggaaaacugaaaa

SEQ ID NO: 258070 - RNA, 32 nt, Homo Sapiens
ucuuggccuuccauccucuccccacggcugau

SEQ ID NO: 258071 - RNA, 32 nt, Homo Sapiens
auuuccccuagcccuguccuuccacuaagcuu

SEQ ID NO: 258072 - RNA, 32 nt, Homo Sapiens
ccuggcuucuuacuuuaauguaauauuuuguu

SEQ ID NO: 258073 - RNA, 30 nt, Homo Sapiens
ccgagggaggcggaucugggucccgggaag

SEQ ID NO: 258074 - RNA, 32 nt, Homo Sapiens
aaaguuuauugaucaaagaaauguuguccugg

SEQ ID NO: 258075 - RNA, 32 nt, Homo Sapiens
guccuccugcuauuccucuccugaagaaccuc

SEQ ID NO: 258076 - RNA, 32 nt, Homo Sapiens
aaccgugaacaaaacuguguuuugaguuuagc

SEQ ID NO: 258077 - RNA, 32 nt, Homo Sapiens
guaaagucauauaaaagguuauaccacuauuu

SEQ ID NO: 258078 - RNA, 32 nt, Homo Sapiens
uuuuauuuacuuuguaagaaacaagcucaagg

SEQ ID NO: 258079 - RNA, 32 nt, Homo Sapiens
uucugagggucucgggauugcagguugaaaaa

SEQ ID NO: 258080 - RNA, 32 nt, Homo Sapiens
ucaaaguguugguaaugccugauucacaacuu

SEQ ID NO: 258081 - RNA, 32 nt, Homo Sapiens
cuagagguaggaagaugauaagaucaguuucu

SEQ ID NO: 258082 - RNA, 32 nt, Homo Sapiens
gcagggccacucggccggcggaggcggcuggu

SEQ ID NO: 258083 - RNA, 32 nt, Homo Sapiens
ugcggauccagcugcaagaccguguaaaugag

SEQ ID NO: 258084 - RNA, 32 nt, Homo Sapiens
gcauggcuauuuuauauuacacuacacacugu

SEQ ID NO: 258085 - RNA, 32 nt, Homo Sapiens
aguuuuuaaaacuacuguugcaaccuuuuaga

SEQ ID NO: 258086 - RNA, 32 nt, Homo Sapiens
uagccaauacuaguuuagguucacauguauua

SEQ ID NO: 258087 - RNA, 32 nt, Homo Sapiens
auauuauaaaaauuacauauauaaaacuaagg

SEQ ID NO: 258088 - RNA, 32 nt, Homo Sapiens
guccuaaccugcccuggccccggagaagcuac

SEQ ID NO: 258089 - RNA, 32 nt, Homo Sapiens
gcaggccucaggugcaugccaugcucagaacc

SEQ ID NO: 258090 - RNA, 32 nt, Homo Sapiens
ucucugugugaaaaguucucggucaugaacac

SEQ ID NO: 258091 - RNA, 32 nt, Homo Sapiens
gguuauguuuaccaacuggggcgggggugggg

SEQ ID NO: 258092 - RNA, 32 nt, Homo Sapiens
cacacgcgcgcaugcaugcacacacacgcacg

SEQ ID NO: 258093 - RNA, 32 nt, Homo Sapiens
aagcuucuggucugagggaggugucuccgagg

SEQ ID NO: 258094 - RNA, 32 nt, Homo Sapiens
aggacauuacaaucuacuaaauaaagaauaac

SEQ ID NO: 258095 - RNA, 32 nt, Homo Sapiens
caaggggccccauugccaaagcaugccugccc

SEQ ID NO: 258096 - RNA, 32 nt, Homo Sapiens
uacaagccccccacccgagaaaucuggggaug

SEQ ID NO: 258097 - RNA, 32 nt, Homo Sapiens
aaagccucugacucaaacuccucccuuuuauc

SEQ ID NO: 258098 - RNA, 32 nt, Homo Sapiens
gguaugucagaggaccgugucucaaagaagug

SEQ ID NO: 258099 - RNA, 32 nt, Homo Sapiens
gacugaaaugaaauauaaauaaaauauuuuca

SEQ ID NO: 258100 - RNA, 32 nt, Homo Sapiens
gaacaauucuauuugcauguuucucuaucuga

SEQ ID NO: 258101 - RNA, 32 nt, Homo Sapiens
caguauccuuugaccaucugcacuuuauuugg

SEQ ID NO: 258102 - RNA, 32 nt, Homo Sapiens
auggggugugugcugcuggggugggugaggac

SEQ ID NO: 258103 - RNA, 32 nt, Homo Sapiens
cauuaaugugaaauaaauugaauuuaauguug

SEQ ID NO: 258104 - RNA, 32 nt, Homo Sapiens
ugcuuggcuauuucugcaucauuucuuaaggc

SEQ ID NO: 258105 - RNA, 32 nt, Homo Sapiens
caccggcccucccgccagcuccucagccugcu

SEQ ID NO: 258106 - RNA, 32 nt, Homo Sapiens
uucaaagguuuuuaugcacuggcuauuugugu

SEQ ID NO: 258107 - RNA, 32 nt, Homo Sapiens
uaugcuugggucuguuuauauguguauauaug

SEQ ID NO: 258108 - RNA, 32 nt, Homo Sapiens
gcagcauccucuccuggaccgccccugcccca

SEQ ID NO: 258109 - RNA, 32 nt, Homo Sapiens
ggggucacaccuguaaucccagcacuuuggga

SEQ ID NO: 258110 - RNA, 32 nt, Homo Sapiens
agcccagcacugccaggaccaaggcugagccc

SEQ ID NO: 258111 - RNA, 32 nt, Homo Sapiens
ucaccuuggacaaagaaguguggauccucaga

SEQ ID NO: 258112 - RNA, 32 nt, Homo Sapiens
agagaaaccacucaaaaacaggaaugguucuu

SEQ ID NO: 258113 - RNA, 32 nt, Homo Sapiens
ccugcuccccugagccagcaggaauggccgca

SEQ ID NO: 258114 - RNA, 32 nt, Homo Sapiens
uugacguuggcuugcuuuggggaugacugucu

SEQ ID NO: 258115 - RNA, 32 nt, Homo Sapiens
ucgccggcccacccucucggguuccggcuucu

SEQ ID NO: 258116 - RNA, 32 nt, Homo Sapiens
gugcgccugcgcugcgcuagggcgcggcgggc

SEQ ID NO: 258117 - RNA, 32 nt, Homo Sapiens
acuugauacuaaauuugggacucuuugcugcg

SEQ ID NO: 258118 - RNA, 32 nt, Homo Sapiens
ugacuccagcaauacagcgaaucagcggcuuu

SEQ ID NO: 258119 - RNA, 32 nt, Homo Sapiens
cucucucugggguugcaaacuggcacugggug

SEQ ID NO: 258120 - RNA, 32 nt, Homo Sapiens
auucuuucgaggauuaaauaucagugcagugc

SEQ ID NO: 258121 - RNA, 32 nt, Homo Sapiens
uaugugugcaaugcgacgagaaugcagaaguc

SEQ ID NO: 258122 - RNA, 32 nt, Homo Sapiens
ccgaucugcccgaaccuucucccggggucagc

SEQ ID NO: 258123 - RNA, 32 nt, Homo Sapiens
uuguaauugaugaaaauaaugaaugaaaauca

SEQ ID NO: 258124 - RNA, 32 nt, Homo Sapiens
cacucuucuggaucccagcaguguccagaaga

SEQ ID NO: 258125 - RNA, 32 nt, Homo Sapiens
aaaugcuggugaaaugcuguugguaaagcaca

SEQ ID NO: 258126 - RNA, 32 nt, Homo Sapiens
gaguccccagcccuccucccuucugggcccga

SEQ ID NO: 258127 - RNA, 32 nt, Homo Sapiens
uccaggauucuuccucaccuggggcuacuucu

SEQ ID NO: 258128 - RNA, 32 nt, Homo Sapiens
gauaauguucuccacugacacaaaagaagaaa

SEQ ID NO: 258129 - RNA, 32 nt, Homo Sapiens
cauuuucccucaucacuguuauuauuuggacu

SEQ ID NO: 258130 - RNA, 32 nt, Homo Sapiens
cugaggagggcuuuccccgccagagugagguu

SEQ ID NO: 258131 - RNA, 32 nt, Homo Sapiens
augcuccguuugcuaggcacuaagaugcgugc

SEQ ID NO: 258132 - RNA, 32 nt, Homo Sapiens
cagaaaaauuuaugugcuuaacaaacuuagaa

SEQ ID NO: 258133 - RNA, 32 nt, Homo Sapiens
aaugaauagaucuggucucugcucccgagacc

SEQ ID NO: 258134 - RNA, 32 nt, Homo Sapiens
ccugggcuugagcugcagaaugacuccaccuu

SEQ ID NO: 258135 - RNA, 32 nt, Homo Sapiens
cccgagccgcccgggcccccagcccguagcug

SEQ ID NO: 258136 - RNA, 32 nt, Homo Sapiens
uuuauaucuaauuugaguuccuuuaaagaucu

SEQ ID NO: 258137 - RNA, 32 nt, Homo Sapiens
agauucuccccucccuggaaccagggauguga

SEQ ID NO: 258138 - RNA, 32 nt, Homo Sapiens
cuggaagcagugccucuuggugcaacaagaaa

SEQ ID NO: 258139 - RNA, 32 nt, Homo Sapiens
gcauccccauccccauccccaucccuaaccac

SEQ ID NO: 258140 - RNA, 32 nt, Homo Sapiens
gaaauugggguucaggcccacccagggggccg

SEQ ID NO: 258141 - RNA, 32 nt, Homo Sapiens
aucugucuuuggagaauguuuucaaaucuauu

SEQ ID NO: 258142 - RNA, 32 nt, Homo Sapiens
uacccaggcagacagaauucuguagcccugcc

SEQ ID NO: 258143 - RNA, 32 nt, Homo Sapiens
aggaggguaaaguuuuaagagaguucaaaagu

SEQ ID NO: 258144 - RNA, 32 nt, Homo Sapiens
ucaccuuagagcauuagagccucuauaggugc

SEQ ID NO: 258145 - RNA, 32 nt, Homo Sapiens
cgggacuuuccacauuuuagucuacauucuaa

SEQ ID NO: 258146 - RNA, 32 nt, Homo Sapiens
auauucacaugauuuuaagaaaacuguaaaag

SEQ ID NO: 258147 - RNA, 30 nt, Homo Sapiens
aggaggagagguggcaggaggagaagaaga

SEQ ID NO: 258148 - RNA, 32 nt, Homo Sapiens
ucccacugugcagcucaaaugugguguucacu

SEQ ID NO: 258149 - RNA, 32 nt, Homo Sapiens
uaaucucaagguuauuauucugacaccagcuu

SEQ ID NO: 258150 - RNA, 32 nt, Homo Sapiens
uguccgggaaugaggcagcuggcuugcuccua

SEQ ID NO: 258151 - RNA, 32 nt, Homo Sapiens
agguuacuaauagcaguaggauagaauuuuau

SEQ ID NO: 258152 - RNA, 32 nt, Homo Sapiens
gggaggcagaaagggaaaguauuagcaugagc

SEQ ID NO: 258153 - RNA, 32 nt, Homo Sapiens
auuuucaucguguuuuaccauguuagcgaggc

SEQ ID NO: 258154 - RNA, 32 nt, Homo Sapiens
acucauaaacacacucucuuuaagacucuucu

SEQ ID NO: 258155 - RNA, 32 nt, Homo Sapiens
cucagucccugacuaacagccucagcacaucc

SEQ ID NO: 258156 - RNA, 32 nt, Homo Sapiens
ggcuuugcuuauuaauaaaauaaaugaaguau

SEQ ID NO: 258157 - RNA, 32 nt, Homo Sapiens
caacuggggcgcgccggcgcggugccagcgcc

SEQ ID NO: 258158 - RNA, 32 nt, Homo Sapiens
ucacaccaacgcguagucgaacugcccgcgcu

SEQ ID NO: 258159 - RNA, 32 nt, Homo Sapiens
agcucccagcccuuccccccagcccucaggga

SEQ ID NO: 258160 - RNA, 32 nt, Homo Sapiens
ugaacuguugcaacaaaucagaaauccacaua

SEQ ID NO: 258161 - RNA, 32 nt, Homo Sapiens
accucccgagucugcgggcagcugcuguccca

SEQ ID NO: 258162 - RNA, 32 nt, Homo Sapiens
agcauggggcaucugcggaagaacuggguugu

SEQ ID NO: 258163 - RNA, 32 nt, Homo Sapiens
cucccuccgcggcucauggcgacgacucucgg

SEQ ID NO: 258164 - RNA, 32 nt, Homo Sapiens
cacuaccaaccuugccucccccuccucucaaa

SEQ ID NO: 258165 - RNA, 32 nt, Homo Sapiens
aaccguuagcagcuggcucuguuuccaagccu

SEQ ID NO: 258166 - RNA, 32 nt, Homo Sapiens
ggcaagggaaaggaugggguuugaaccccuuu

SEQ ID NO: 258167 - RNA, 32 nt, Homo Sapiens
acuugcuuguauuguaaauguggauuuuguag

SEQ ID NO: 258168 - RNA, 32 nt, Homo Sapiens
cuguuggcugguuuuuuguucuguuuuguuuu

SEQ ID NO: 258169 - RNA, 32 nt, Homo Sapiens
aggcugaucucguaucucaggaaccucaggcc

SEQ ID NO: 258170 - RNA, 32 nt, Homo Sapiens
ggcucgaugccucauggaucuuucuccccaag

SEQ ID NO: 258171 - RNA, 32 nt, Homo Sapiens
uuucaaaugaauaguuugcuuguuaccaugga

SEQ ID NO: 258172 - RNA, 31 nt, Homo Sapiens
uaugcagaggugcagaaccagggacuccugg

SEQ ID NO: 258173 - RNA, 32 nt, Homo Sapiens
agcuguuguaaguuuucaucaguagcuuaagu

SEQ ID NO: 258174 - RNA, 32 nt, Homo Sapiens
guugcuucucccucugcuuuuaucuuuuccac

SEQ ID NO: 258175 - RNA, 32 nt, Homo Sapiens
uucuguggcugccggagcugccuccuccuccu

SEQ ID NO: 258176 - RNA, 32 nt, Homo Sapiens
uaguuagaagaugccuacugcuuuuguuguuu

SEQ ID NO: 258177 - RNA, 32 nt, Homo Sapiens
aagcagcccacccagcucccagagaugaggag

SEQ ID NO: 258178 - RNA, 32 nt, Homo Sapiens
auggggcacgagggacaagauaccagacauuu

SEQ ID NO: 258179 - RNA, 32 nt, Homo Sapiens
ucucauuguaaaaauaauuauaugccaaaaau

SEQ ID NO: 258180 - RNA, 32 nt, Homo Sapiens
cuuggccugcccaucucggaucucuccaggag

SEQ ID NO: 258181 - RNA, 32 nt, Homo Sapiens
gaauaagauacuuuuuauuccauccucuaugg

SEQ ID NO: 258182 - RNA, 32 nt, Homo Sapiens
ggacagcacugugccuuggucuccagggaccc

SEQ ID NO: 258183 - RNA, 32 nt, Homo Sapiens
agcacaaaaaauauauuuuaaugaagauuaaa

SEQ ID NO: 258184 - RNA, 32 nt, Homo Sapiens
cuucuugccucccacacuuuucuuugauggga

SEQ ID NO: 258185 - RNA, 32 nt, Homo Sapiens
agugcugagauuacaggugugagccaccaugc

SEQ ID NO: 258186 - RNA, 32 nt, Homo Sapiens
ugcauggaguaccaugggcauuaucccaggcc

SEQ ID NO: 258187 - RNA, 32 nt, Homo Sapiens
aauguuaccugugguuaugaucuuaugcacaa

SEQ ID NO: 258188 - RNA, 32 nt, Homo Sapiens
aaccccugccuauaacagccacuuccuggcgg

SEQ ID NO: 258189 - RNA, 32 nt, Homo Sapiens
caguuguauuuugaaucauccugacgcagaug

SEQ ID NO: 258190 - RNA, 32 nt, Homo Sapiens
ggucgcuucucgcaggcggcgcgcuugcuggg

SEQ ID NO: 258191 - RNA, 32 nt, Homo Sapiens
uggggaaaggacaaaauggagggugacugagg

SEQ ID NO: 258192 - RNA, 32 nt, Homo Sapiens
cacugaauaaacucuagguucccauuucuuuc

SEQ ID NO: 258193 - RNA, 32 nt, Homo Sapiens
guggugguguccucgggcagcacaggcuccug

SEQ ID NO: 258194 - RNA, 32 nt, Homo Sapiens
caaaacaaaaaauuaguagauggauuuaggaa

SEQ ID NO: 258195 - RNA, 32 nt, Homo Sapiens
cgaggggcgggggcaggaggacggcaagaccu

SEQ ID NO: 258196 - RNA, 32 nt, Homo Sapiens
gcagggucugcggaagacagggccccuguguc

SEQ ID NO: 258197 - RNA, 32 nt, Homo Sapiens
gacuuuucacaacuaacagccaacacauugcc

SEQ ID NO: 258198 - RNA, 32 nt, Homo Sapiens
ugcacagcccauucuuuuuaauuuuuacagaa

SEQ ID NO: 258199 - RNA, 32 nt, Homo Sapiens
cuccagaucgagggaucaccacagaggggucc

SEQ ID NO: 258200 - RNA, 32 nt, Homo Sapiens
ggcuggucuugaaccccugaccucaagugauc

SEQ ID NO: 258201 - RNA, 32 nt, Homo Sapiens
acucgcaacuauauuucuguaaacagcugcag

SEQ ID NO: 258202 - RNA, 32 nt, Homo Sapiens
ugucuccucccuccccgccuguaaugaacccu

SEQ ID NO: 258203 - RNA, 28 nt, Homo Sapiens
cacucggggcggcagucggucugucagu

SEQ ID NO: 258204 - RNA, 32 nt, Homo Sapiens
cuguuuuguauauagacauuuucaggcacgug

SEQ ID NO: 258205 - RNA, 32 nt, Homo Sapiens
agucagcgggcucugcgucccgggagcugggg

SEQ ID NO: 258206 - RNA, 32 nt, Homo Sapiens
ugucccaggguggaacuccacaugcuggugca

SEQ ID NO: 258207 - RNA, 32 nt, Homo Sapiens
agaagugauugaauauuguuaauuauaccacc

SEQ ID NO: 258208 - RNA, 32 nt, Homo Sapiens
aagaccugcuuauggaggaaaaagacggccuc

SEQ ID NO: 258209 - RNA, 32 nt, Homo Sapiens
uacaauaagagaugaagaagaugcucuugaug

SEQ ID NO: 258210 - RNA, 32 nt, Homo Sapiens
ccgccuacuccagcccucuugggacacacugu

SEQ ID NO: 258211 - RNA, 32 nt, Homo Sapiens
ccauuauagaaagaauugaaggcugagaaacu

SEQ ID NO: 258212 - RNA, 32 nt, Homo Sapiens
ucuggccagacaccaccuguucucagugccug

SEQ ID NO: 258213 - RNA, 32 nt, Homo Sapiens
gcccuggacuaaauuuccugugccagugacug

SEQ ID NO: 258214 - RNA, 32 nt, Homo Sapiens
gacugaaaugucaaggguuugcaguugucuaa

SEQ ID NO: 258215 - RNA, 32 nt, Homo Sapiens
auucucugccucagccucccaaguaguuggga

SEQ ID NO: 258216 - RNA, 32 nt, Homo Sapiens
augucugcugguauuucuaauuccacagguca

SEQ ID NO: 258217 - RNA, 32 nt, Homo Sapiens
gaaaauagggggucucaggagcuccguuuuag

SEQ ID NO: 258218 - RNA, 32 nt, Homo Sapiens
cuuuuucuuguccaaugggagccggcucccgg

SEQ ID NO: 258219 - RNA, 32 nt, Homo Sapiens
uuuuuguuccucuucugggggaucucagccuc

SEQ ID NO: 258220 - RNA, 32 nt, Homo Sapiens
ucgggguuuuggcggcggcgccggcgggcuag

SEQ ID NO: 258221 - RNA, 32 nt, Homo Sapiens
uauucugacaaugaagaaaugggaguugucag

SEQ ID NO: 258222 - RNA, 32 nt, Homo Sapiens
guucggccgccggcugcccgggucgugcacuu

SEQ ID NO: 258223 - RNA, 32 nt, Homo Sapiens
gggaggugcagguugcagugagccaagauugu

SEQ ID NO: 258224 - RNA, 32 nt, Homo Sapiens
agguuauggcagugacuuucagcugagaccug

SEQ ID NO: 258225 - RNA, 32 nt, Homo Sapiens
auuguuccaagauacuaaguggucuuuucccc

SEQ ID NO: 258226 - RNA, 32 nt, Homo Sapiens
ccccagcccggccagcagucccuucugaggac

SEQ ID NO: 258227 - RNA, 32 nt, Homo Sapiens
gucagaccaaccccgggcccccaucaucacug

SEQ ID NO: 258228 - RNA, 32 nt, Homo Sapiens
uugcguguaccggcugccucuggauagcccug

SEQ ID NO: 258229 - RNA, 32 nt, Homo Sapiens
cgguggcucaugccuguaaucccagcacugug

SEQ ID NO: 258230 - RNA, 32 nt, Homo Sapiens
gccaggcagagggcgcggggcugggcugccgg

SEQ ID NO: 258231 - RNA, 32 nt, Homo Sapiens
uagagaagacuuugaaggaaaagaauguagaa

SEQ ID NO: 258232 - RNA, 32 nt, Homo Sapiens
agggugguuuguguggagcugugcucgucagc

SEQ ID NO: 258233 - RNA, 32 nt, Homo Sapiens
gcccaccgccgggcuucccgcgccggacccag

SEQ ID NO: 258234 - RNA, 32 nt, Homo Sapiens
gcggccgcgcuccggccgcuuugucgaaagcc

SEQ ID NO: 258235 - RNA, 32 nt, Homo Sapiens
ucgggggacggcccgcugcuggccgcucucuu

SEQ ID NO: 258236 - RNA, 32 nt, Homo Sapiens
cuuuggaacugggaaacaggcagagguuggaa

SEQ ID NO: 258237 - RNA, 32 nt, Homo Sapiens
ggcauauuuuuaguuugaauuuccugcgcuua

SEQ ID NO: 258238 - RNA, 32 nt, Homo Sapiens
aggagaaaacaaacacaucaauaucucuucca

SEQ ID NO: 258239 - RNA, 32 nt, Homo Sapiens
aagaaaauuagacuuacugaaauacucauuua

SEQ ID NO: 258240 - RNA, 32 nt, Homo Sapiens
uuccacuugaauauuucuacuguaaaaaaaag

SEQ ID NO: 258241 - RNA, 32 nt, Homo Sapiens
ccucuuguccaauccccgcgccccacacugcc

SEQ ID NO: 258242 - RNA, 32 nt, Homo Sapiens
ggguggggccguuuuagguagagccuuaaaaa

SEQ ID NO: 258243 - RNA, 32 nt, Homo Sapiens
uccccauggccucuuccccaccucugauugcu

SEQ ID NO: 258244 - RNA, 32 nt, Homo Sapiens
ccuaacugauucuucucaguuuucucauuuua

SEQ ID NO: 258245 - RNA, 32 nt, Homo Sapiens
uggaauccaaggagucgguucuguguggggcu

SEQ ID NO: 258246 - RNA, 32 nt, Homo Sapiens
cuccuacccccagaaaaggggugcuggaagga

SEQ ID NO: 258247 - RNA, 32 nt, Homo Sapiens
aacacauaccuuuuaaauccacagcucauuaa

SEQ ID NO: 258248 - RNA, 32 nt, Homo Sapiens
ucacuguccuucugccacggacgcucaagguu

SEQ ID NO: 258249 - RNA, 32 nt, Homo Sapiens
uucagguguccuuugaggauagccagguuuga

SEQ ID NO: 258250 - RNA, 32 nt, Homo Sapiens
gccucagugaaacaggucuuugccauaacuuu

SEQ ID NO: 258251 - RNA, 32 nt, Homo Sapiens
uacuccuuuuuuucuuuuuauuguagugauug

SEQ ID NO: 258252 - RNA, 31 nt, Homo Sapiens
ugaucucucaaugacucugcaauggaagucc

SEQ ID NO: 258253 - RNA, 32 nt, Homo Sapiens
uauuucugacagcuguuuuucuucagaacauc

SEQ ID NO: 258254 - RNA, 32 nt, Homo Sapiens
agugguuauucuuuucuguguuuguuuugcac

SEQ ID NO: 258255 - RNA, 32 nt, Homo Sapiens
auuuaaaaagcauuauuuuuaaauaguaucug

SEQ ID NO: 258256 - RNA, 32 nt, Homo Sapiens
gguggugcacaccaguagucccagcuacucag

SEQ ID NO: 258257 - RNA, 32 nt, Homo Sapiens
aguucccuucucaucaucuucaucucagcuau

SEQ ID NO: 258258 - RNA, 32 nt, Homo Sapiens
gcuagagaaaucagcugcuaugcggguugauu

SEQ ID NO: 258259 - RNA, 32 nt, Homo Sapiens
gucgucccaacccccgccgcccucgucgcgcg

SEQ ID NO: 258260 - RNA, 32 nt, Homo Sapiens
guuugauuucuuaaaguuauuaaacuuguaca

SEQ ID NO: 258261 - RNA, 32 nt, Homo Sapiens
ugccuuggccccagggcgccucucugugccag

SEQ ID NO: 258262 - RNA, 32 nt, Homo Sapiens
ccccaggcccgggucuggggccccaggcuuuc

SEQ ID NO: 258263 - RNA, 32 nt, Homo Sapiens
gcgcgguguagcggcccgcgggcugacuugcu

SEQ ID NO: 258264 - RNA, 32 nt, Homo Sapiens
agacuugcugagucaggcaacuucuucaaccc

SEQ ID NO: 258265 - RNA, 32 nt, Homo Sapiens
cagauccccagcugccucacuucucucuugag

SEQ ID NO: 258266 - RNA, 32 nt, Homo Sapiens
gguucagacagagggagguggacggcagggau

SEQ ID NO: 258267 - RNA, 32 nt, Homo Sapiens
cugcucuacagagcuucagugugagaggaucg

SEQ ID NO: 258268 - RNA, 32 nt, Homo Sapiens
ugaagguuaagcuggcggugcugcuggugacg

SEQ ID NO: 258269 - RNA, 32 nt, Homo Sapiens
accacuuuaggaaguauuaaaaauauuuuuaa

SEQ ID NO: 258270 - RNA, 32 nt, Homo Sapiens
caccagggucauuaagaaggaaggaaugugag

SEQ ID NO: 258271 - RNA, 32 nt, Homo Sapiens
ccacccuggugacaccuugaucuuggacugac

SEQ ID NO: 258272 - RNA, 32 nt, Homo Sapiens
guauuuuuccuuuuguuuucauuugaaguuuu

SEQ ID NO: 258273 - RNA, 32 nt, Homo Sapiens
cccuuugcuucuuccuuugaauucucuaaaau

SEQ ID NO: 258274 - RNA, 32 nt, Homo Sapiens
auuauugggguaauccuaaaauuuauuaggug

SEQ ID NO: 258275 - RNA, 32 nt, Homo Sapiens
ccccgccauggccccccggccccuccugcugc

SEQ ID NO: 258276 - RNA, 32 nt, Homo Sapiens
ggagacucgagcccgguccgcggacccugcgg

SEQ ID NO: 258277 - RNA, 32 nt, Homo Sapiens
ugcauuauaggauguuuagcaacaucccuggc

SEQ ID NO: 258278 - RNA, 32 nt, Homo Sapiens
gaagacggcuggaagguuuuagcauucagaaa

SEQ ID NO: 258279 - RNA, 32 nt, Homo Sapiens
gcaggcacguggauaaaaccuaaaagggaaua

SEQ ID NO: 258280 - RNA, 32 nt, Homo Sapiens
uugccuggcauugguaaugaaagguugguuuu

SEQ ID NO: 258281 - RNA, 32 nt, Homo Sapiens
ucagcaguauuacaccaccucccucaugccuc

SEQ ID NO: 258282 - RNA, 32 nt, Homo Sapiens
aaggcccugcugcuacugcugcuggggguguu

SEQ ID NO: 258283 - RNA, 32 nt, Homo Sapiens
gggaggcugaggcaggcagaucaugaggucaa

SEQ ID NO: 258284 - RNA, 32 nt, Homo Sapiens
ccuccagaucccguccggcagcuuggcgucca

SEQ ID NO: 258285 - RNA, 32 nt, Homo Sapiens
agaugugagccaccacacacaccaucugauua

SEQ ID NO: 258286 - RNA, 32 nt, Homo Sapiens
cuccgcagcucggcucccgcgcgcucagcacc

SEQ ID NO: 258287 - RNA, 32 nt, Homo Sapiens
gauuguauuuauuuuuucagacugguuuucca

SEQ ID NO: 258288 - RNA, 32 nt, Homo Sapiens
ccucaccugccaguuauguggcugccaagccc

SEQ ID NO: 258289 - RNA, 32 nt, Homo Sapiens
cucagagaauggauuuaauguuuggauacagc

SEQ ID NO: 258290 - RNA, 32 nt, Homo Sapiens
ccgcucacuccuuggucgccuugcuugccagc

SEQ ID NO: 258291 - RNA, 32 nt, Homo Sapiens
ccgcccugcacgagcccaggggcugagcguuc

SEQ ID NO: 258292 - RNA, 32 nt, Homo Sapiens
uuggcggacugcgccuggaggcggccggggcc

SEQ ID NO: 258293 - RNA, 32 nt, Homo Sapiens
augcaaguucaaguacauauucuuuuucccgu

SEQ ID NO: 258294 - RNA, 30 nt, Homo Sapiens
cucaacugucaccacugcuaagggacucua

SEQ ID NO: 258295 - RNA, 32 nt, Homo Sapiens
ucugaagccacucccccuggagucucaacuau

SEQ ID NO: 258296 - RNA, 32 nt, Homo Sapiens
ugauauugggaggagggaaaggcccagcugaa

SEQ ID NO: 258297 - RNA, 32 nt, Homo Sapiens
acuaaaaaaaaauuauucauugaugcuauggu

SEQ ID NO: 258298 - RNA, 32 nt, Homo Sapiens
caagagaacgagccagaguucacuccuuccuc

SEQ ID NO: 258299 - RNA, 32 nt, Homo Sapiens
ucccuggucuccugggaaguguggcuucuucu

SEQ ID NO: 258300 - RNA, 32 nt, Homo Sapiens
aguauguccucauagaacuuuuaauacuuaag

SEQ ID NO: 258301 - RNA, 32 nt, Homo Sapiens
uaaaccagagugaucaaguuaaaccauacacu

SEQ ID NO: 258302 - RNA, 32 nt, Homo Sapiens
ugccaaaggcugacccggcccgggcugcguac

SEQ ID NO: 258303 - RNA, 32 nt, Homo Sapiens
gagcaucaaggggacgcugugugugcugcaag

SEQ ID NO: 258304 - RNA, 32 nt, Homo Sapiens
uggccgaggaggaggcggcggcguggagcugc

SEQ ID NO: 258305 - RNA, 32 nt, Homo Sapiens
ucaacuguuccaggaaagaaucucuaagacug

SEQ ID NO: 258306 - RNA, 32 nt, Homo Sapiens
ccgcaaccggggcgaaucauggcggccgccaa

SEQ ID NO: 258307 - RNA, 32 nt, Homo Sapiens
gucgacaugcccauccugacauuguaugcuac

SEQ ID NO: 258308 - RNA, 32 nt, Homo Sapiens
ugggugcccuccccuugguuuucaaguaucuu

SEQ ID NO: 258309 - RNA, 32 nt, Homo Sapiens
acggcauaaaacaccaaggaaauaucaaagaa

SEQ ID NO: 258310 - RNA, 32 nt, Homo Sapiens
uauuuguuauucagaucagaucuggccuauuu

SEQ ID NO: 258311 - RNA, 32 nt, Homo Sapiens
aggagcccauuugguagugaggcagguauggg

SEQ ID NO: 258312 - RNA, 32 nt, Homo Sapiens
gugaguuugucaaaaguaucucauacuuauaa

SEQ ID NO: 258313 - RNA, 32 nt, Homo Sapiens
ggacgugcgucucuccuucucaugccguucug

SEQ ID NO: 258314 - RNA, 32 nt, Homo Sapiens
uggcacagagaaauuauauuccuuacuucaug

SEQ ID NO: 258315 - RNA, 32 nt, Homo Sapiens
cgccugccgcgugcuuuagacgccggcugaca

SEQ ID NO: 258316 - RNA, 32 nt, Homo Sapiens
aaaguacccuguauguuuuucuucuuccacau

SEQ ID NO: 258317 - RNA, 32 nt, Homo Sapiens
uccuacuucucucacacucaccagcuacacgu

SEQ ID NO: 258318 - RNA, 32 nt, Homo Sapiens
ccccuaccuggcaaccgcagugcagcaggcac

SEQ ID NO: 258319 - RNA, 32 nt, Homo Sapiens
augcaggcuuccugggguuauccucucguaca

SEQ ID NO: 258320 - RNA, 32 nt, Homo Sapiens
uauuuaaacuguucuguaaaauaaaaaaaaaa

SEQ ID NO: 258321 - RNA, 32 nt, Homo Sapiens
ggaauugccuguacacagauugaaauagugca

SEQ ID NO: 258322 - RNA, 32 nt, Homo Sapiens
ccggcuuggguccgccccgaagcccagucccu

SEQ ID NO: 258323 - RNA, 32 nt, Homo Sapiens
aacagagugugggggaugggggugggggugcu

SEQ ID NO: 258324 - RNA, 32 nt, Homo Sapiens
cccuguguuauauguguuucacgcacauauuu

SEQ ID NO: 258325 - RNA, 32 nt, Homo Sapiens
gaaaggauuuuuuuuucuuuuucuuuuuagga

SEQ ID NO: 258326 - RNA, 32 nt, Homo Sapiens
ucuguguugucauggugaacuggaguuucucu

SEQ ID NO: 258327 - RNA, 32 nt, Homo Sapiens
uuuuuuacagaaaaugagcaauaaagagauuu

SEQ ID NO: 258328 - RNA, 32 nt, Homo Sapiens
agaaggggccugagauuucugcacuuuaaaca

SEQ ID NO: 258329 - RNA, 32 nt, Homo Sapiens
cucauccacugugcuucuuaauguguaauuaa

SEQ ID NO: 258330 - RNA, 32 nt, Homo Sapiens
aaaacagcucuuucuuccgggaagguuauuag

SEQ ID NO: 258331 - RNA, 32 nt, Homo Sapiens
uuuaaaauuugucuuaaaaauuuauacaccag

SEQ ID NO: 258332 - RNA, 32 nt, Homo Sapiens
aaaucugaauuuugaaaaaccacaaagcuaca

SEQ ID NO: 258333 - RNA, 32 nt, Homo Sapiens
cagcacgagccugugcucgcccugcccaacgc

SEQ ID NO: 258334 - RNA, 32 nt, Homo Sapiens
uaaaaauucccccaagagccgcauaugaaucu

SEQ ID NO: 258335 - RNA, 32 nt, Homo Sapiens
aagaacguccaaugucuuucugacggauacca

SEQ ID NO: 258336 - RNA, 32 nt, Homo Sapiens
cugcucgcgcccccuccucccgcggggggagc

SEQ ID NO: 258337 - RNA, 32 nt, Homo Sapiens
agugauucucccugccuccgccucccaaguag

SEQ ID NO: 258338 - RNA, 32 nt, Homo Sapiens
uuugccacccucagaagcugcugguccugugu

SEQ ID NO: 258339 - RNA, 32 nt, Homo Sapiens
ugcgcugcugccggagcgcucagugccgccgc

SEQ ID NO: 258340 - RNA, 32 nt, Homo Sapiens
ccuuugagacagucccuuugugagauaauuca

SEQ ID NO: 258341 - RNA, 32 nt, Homo Sapiens
cagccuggguggcagagccagacccugacuca

SEQ ID NO: 258342 - RNA, 32 nt, Homo Sapiens
auuuauauaugaugaauucuggauauaugacc

SEQ ID NO: 258343 - RNA, 32 nt, Homo Sapiens
ccugcgccugugcuuuuucucccagcacugcg

SEQ ID NO: 258344 - RNA, 32 nt, Homo Sapiens
ggaagaugucuuauugggaacuacccccauca

SEQ ID NO: 258345 - RNA, 32 nt, Homo Sapiens
uggguugcagguugggugcugcuguugugguc

SEQ ID NO: 258346 - RNA, 32 nt, Homo Sapiens
cagaucuggugccccaucaguccugccgguac

SEQ ID NO: 258347 - RNA, 28 nt, Homo Sapiens
cauucaacaugauugcauuugaagugag

SEQ ID NO: 258348 - RNA, 32 nt, Homo Sapiens
gacacaguuaucaaaaaguauuaucauugcuc

SEQ ID NO: 258349 - RNA, 32 nt, Homo Sapiens
uggugucguucaccgugagagucugcauagaa

SEQ ID NO: 258350 - RNA, 32 nt, Homo Sapiens
gagcaugcuguuugcagcacucuuuauggucu

SEQ ID NO: 258351 - RNA, 32 nt, Homo Sapiens
cgacucugcacccgccucgaccuccccacccg

SEQ ID NO: 258352 - RNA, 32 nt, Homo Sapiens
aucugcgagcgcggcuagcgcagccgcugcca

SEQ ID NO: 258353 - RNA, 32 nt, Homo Sapiens
ccauucauuuuucuaaacaauaaagauagaau

SEQ ID NO: 258354 - RNA, 32 nt, Homo Sapiens
auggccugcagggcugggaggggguacacgcu

SEQ ID NO: 258355 - RNA, 32 nt, Homo Sapiens
uauccccaaccccagacccccaucacuugaug

SEQ ID NO: 258356 - RNA, 32 nt, Homo Sapiens
uccccauucuucucuuccccucucuucccuuu

SEQ ID NO: 258357 - RNA, 32 nt, Homo Sapiens
caaaauaaaaagauuauucagacucugaaaaa

SEQ ID NO: 258358 - RNA, 32 nt, Homo Sapiens
gauaaaucuaauucuuaacucuauuucuccag

SEQ ID NO: 258359 - RNA, 32 nt, Homo Sapiens
agcuaccuaugcacugaacaaacaaaacaauu

SEQ ID NO: 258360 - RNA, 32 nt, Homo Sapiens
ggguaagagacaccaacaccauguucugcacg

SEQ ID NO: 258361 - RNA, 32 nt, Homo Sapiens
gcaaagugaaaugugauuuuaaugauucugag

SEQ ID NO: 258362 - RNA, 32 nt, Homo Sapiens
ugagcugcagccucggccccaggauccugcuc

SEQ ID NO: 258363 - RNA, 32 nt, Homo Sapiens
aacugagguucagggauaaaguaauaaaauug

SEQ ID NO: 258364 - RNA, 32 nt, Homo Sapiens
uugaauuugaguuugaggcuuagaagcuggau

SEQ ID NO: 258365 - RNA, 32 nt, Homo Sapiens
caaacagcaacugacugcaggugcuggcauga

SEQ ID NO: 258366 - RNA, 32 nt, Homo Sapiens
aaagcggauaaaacuuucauuggacuggaaug

SEQ ID NO: 258367 - RNA, 32 nt, Homo Sapiens
cauuaucaccuuuauacaaaauguacauccug

SEQ ID NO: 258368 - RNA, 32 nt, Homo Sapiens
uucaaacugcuaguucccauggaggguaguuc

SEQ ID NO: 258369 - RNA, 32 nt, Homo Sapiens
gaguuuaugcuaaagagguaacuuuuggaaaa

SEQ ID NO: 258370 - RNA, 32 nt, Homo Sapiens
cgagcuguagguuugcagaaaugugugaaacc

SEQ ID NO: 258371 - RNA, 32 nt, Homo Sapiens
agucagaauucagaucuucguguucaucucag

SEQ ID NO: 258372 - RNA, 32 nt, Homo Sapiens
ucaauugaaaugaagguuuuucaucagccuua

SEQ ID NO: 258373 - RNA, 32 nt, Homo Sapiens
cagggaaaaaaauuagaaaagggugaaagauu

SEQ ID NO: 258374 - RNA, 32 nt, Homo Sapiens
ggaggaccuggguuugaguccuggaucacccc

SEQ ID NO: 258375 - RNA, 32 nt, Homo Sapiens
gacucccgcucucccagcuguccuccugucuc

SEQ ID NO: 258376 - RNA, 32 nt, Homo Sapiens
gaaugccggagggcccuuggccugcagaugca

SEQ ID NO: 258377 - RNA, 32 nt, Homo Sapiens
ggcagugaacucagaacgcacugcacaccuaa

SEQ ID NO: 258378 - RNA, 32 nt, Homo Sapiens
ugcaggcgucgggccugggccgucagggcagc

SEQ ID NO: 258379 - RNA, 32 nt, Homo Sapiens
uaaauccacacauucugaguuguuaugcuggg

SEQ ID NO: 258380 - RNA, 32 nt, Homo Sapiens
gugagacugaauggacuugcuggugaaaugaa

SEQ ID NO: 258381 - RNA, 32 nt, Homo Sapiens
uugggaagggaagucgggaucccaggcuagga

SEQ ID NO: 258382 - RNA, 32 nt, Homo Sapiens
aaagaguuaaguuacauauuuauuuucucacu

SEQ ID NO: 258383 - RNA, 30 nt, Homo Sapiens
cguuucauuuuuaagggggaaaagcagcuc

SEQ ID NO: 258384 - RNA, 32 nt, Homo Sapiens
accaacaagcucccaacucccgcguagaguuu

SEQ ID NO: 258385 - RNA, 31 nt, Homo Sapiens
caccccgacaucccugagcaggcaaggagcu

SEQ ID NO: 258386 - RNA, 32 nt, Homo Sapiens
gguugucuugucauucaugugauacuacucau

SEQ ID NO: 258387 - RNA, 32 nt, Homo Sapiens
augacucuccucugagcuguaauaaauaaaau

SEQ ID NO: 258388 - RNA, 32 nt, Homo Sapiens
gcuaaauguagagcaccauuuuucucaaugag

SEQ ID NO: 258389 - RNA, 32 nt, Homo Sapiens
caccuacaagcugcaugcugcauacacaaguc

SEQ ID NO: 258390 - RNA, 32 nt, Homo Sapiens
uugaaaacaaacaaaaaaauugucuuguauuu

SEQ ID NO: 258391 - RNA, 32 nt, Homo Sapiens
cgggugagcgggacuguccgcggcugcugcuc

SEQ ID NO: 258392 - RNA, 32 nt, Homo Sapiens
cccuuccauugccacacccuagauccagccuc

SEQ ID NO: 258393 - RNA, 32 nt, Homo Sapiens
aagagauccaacagaaucacuccugcugaaaa

SEQ ID NO: 258394 - RNA, 32 nt, Homo Sapiens
uuucuaguauuugaacaaagcagaagguuaag

SEQ ID NO: 258395 - RNA, 32 nt, Homo Sapiens
aaacuauugaugaguucuuuauuuucaaauuu

SEQ ID NO: 258396 - RNA, 32 nt, Homo Sapiens
cgccuucuggaagccugcacuccagcuucgag

SEQ ID NO: 258397 - RNA, 32 nt, Homo Sapiens
cugccggaggucggcgcugagcuugcgaucaa

SEQ ID NO: 258398 - RNA, 32 nt, Homo Sapiens
ggggccugcccguccugcagggugcugcucag

SEQ ID NO: 258399 - RNA, 32 nt, Homo Sapiens
uugcagacgggcuucucccacccccucacgca

SEQ ID NO: 258400 - RNA, 32 nt, Homo Sapiens
gccgugagcagcagcuggcccgggcugcccgc

SEQ ID NO: 258401 - RNA, 32 nt, Homo Sapiens
ccacuucagaucugguugacucaucaucaggu

SEQ ID NO: 258402 - RNA, 32 nt, Homo Sapiens
ucacuuucauacauggaugaaacggguuuaac

SEQ ID NO: 258403 - RNA, 32 nt, Homo Sapiens
agccccgcgggcccaggcgcgggcaccuaccc

SEQ ID NO: 258404 - RNA, 32 nt, Homo Sapiens
guuaaacuaccugauuaauuucuuauaaagca

SEQ ID NO: 258405 - RNA, 32 nt, Homo Sapiens
gcuuuuggggcucagaccuccucgcgucucuc

SEQ ID NO: 258406 - RNA, 32 nt, Homo Sapiens
gcacuccaguguucucuuaaugaggcacuuug

SEQ ID NO: 258407 - RNA, 32 nt, Homo Sapiens
ccccuuuuucaauaauagagcaccuagacaga

SEQ ID NO: 258408 - RNA, 32 nt, Homo Sapiens
uaaaugcaguuauaaccuuuuauacagauuua

SEQ ID NO: 258409 - RNA, 32 nt, Homo Sapiens
aacuccggaucuuuuuauuuccuauuuuuggc

SEQ ID NO: 258410 - RNA, 32 nt, Homo Sapiens
aaccuggaacuaaguuauucggcaacgaacug

SEQ ID NO: 258411 - RNA, 32 nt, Homo Sapiens
uuuaggcugcauauggauugccaagucagcau

SEQ ID NO: 258412 - RNA, 32 nt, Homo Sapiens
cugcaagcccugccuuccuuccugggauccug

SEQ ID NO: 258413 - RNA, 32 nt, Homo Sapiens
uguuuggcugcacgcgagcccacucgggacag

SEQ ID NO: 258414 - RNA, 32 nt, Homo Sapiens
caauuuuuuucuucuuuuucuucuuuuucuuu

SEQ ID NO: 258415 - RNA, 32 nt, Homo Sapiens
ccgaggucgugccacugcacuccagccugggc

SEQ ID NO: 258416 - RNA, 32 nt, Homo Sapiens
gaggucaacacagaaaaucaugugcugguugu

SEQ ID NO: 258417 - RNA, 32 nt, Homo Sapiens
aacccagcauuugcauuuuugcacgauaagaa

SEQ ID NO: 258418 - RNA, 32 nt, Homo Sapiens
ggcaggaccugucagcugggaggcccaaggag

SEQ ID NO: 258419 - RNA, 32 nt, Homo Sapiens
uaaccgcugcugucauguuucuuuugcuaaac

SEQ ID NO: 258420 - RNA, 32 nt, Homo Sapiens
gagauucuaugacauauauuauagagagaauu

SEQ ID NO: 258421 - RNA, 32 nt, Homo Sapiens
guaccacuggaggaagaaaugcuaauacaauc

SEQ ID NO: 258422 - RNA, 32 nt, Homo Sapiens
guggccguuuuuccucuuguccaggcucacga

SEQ ID NO: 258423 - RNA, 32 nt, Homo Sapiens
gagaugggaguucaccugagggcaagaaguac

SEQ ID NO: 258424 - RNA, 32 nt, Homo Sapiens
uauguugugugucacagagcuaaaaacucagu

SEQ ID NO: 258425 - RNA, 32 nt, Homo Sapiens
uccaucgccgacggggccauguggaggcggcc

SEQ ID NO: 258426 - RNA, 32 nt, Homo Sapiens
gaaaugaugcuuauuucuuugccauucaaacu

SEQ ID NO: 258427 - RNA, 32 nt, Homo Sapiens
guguggcaguugcuguguaccuugugcuuaca

SEQ ID NO: 258428 - RNA, 32 nt, Homo Sapiens
uugguuuguaauuugggaccugucguggcucc

SEQ ID NO: 258429 - RNA, 32 nt, Homo Sapiens
aauuccaggugucaagaagccuaggaucugug

SEQ ID NO: 258430 - RNA, 32 nt, Homo Sapiens
aaauguauuuuuccuaaauagaaauaaaugau

SEQ ID NO: 258431 - RNA, 32 nt, Homo Sapiens
cagaugcagaacaagucauauuugaagaaugu

SEQ ID NO: 258432 - RNA, 32 nt, Homo Sapiens
acagucccuugccuauguguggcagagugucc

SEQ ID NO: 258433 - RNA, 32 nt, Homo Sapiens
acuuaauaguuuagaagaaaagaugauagcug

SEQ ID NO: 258434 - RNA, 32 nt, Homo Sapiens
aagcugccgucuagugaacagagcagcauugg

SEQ ID NO: 258435 - RNA, 32 nt, Homo Sapiens
uugaugauagcuguuggaguaaaguugcagug

SEQ ID NO: 258436 - RNA, 32 nt, Homo Sapiens
ucaccugccgugccugcccccggauacugcag

SEQ ID NO: 258437 - RNA, 32 nt, Homo Sapiens
caguccaccagccccagggcccuaccuccugg

SEQ ID NO: 258438 - RNA, 32 nt, Homo Sapiens
aaaaaaaucaguuguuuuuuuaaccugaccgu

SEQ ID NO: 258439 - RNA, 32 nt, Homo Sapiens
aggcagguggaucacgaggccaggagaucgag

SEQ ID NO: 258440 - RNA, 32 nt, Homo Sapiens
caggaguccuucggcggcuguugugucgggag

SEQ ID NO: 258441 - RNA, 32 nt, Homo Sapiens
caagcuaaagcauggcggccauccccuccagc

SEQ ID NO: 258442 - RNA, 32 nt, Homo Sapiens
agacagccauguuccuugccugagagucacug

SEQ ID NO: 258443 - RNA, 32 nt, Homo Sapiens
acuggcauuuuuauuuugauaaaauagaccgu

SEQ ID NO: 258444 - RNA, 32 nt, Homo Sapiens
ccuggccaaaaauuuucuaaauuuguauaaua

SEQ ID NO: 258445 - RNA, 32 nt, Homo Sapiens
cccccuuggcaggugugagaucgaggccagua

SEQ ID NO: 258446 - RNA, 32 nt, Homo Sapiens
gugccuggugguccagccugugaugggcaggc

SEQ ID NO: 258447 - RNA, 32 nt, Homo Sapiens
auuauguguauuucucuuucuaguggggcugu

SEQ ID NO: 258448 - RNA, 32 nt, Homo Sapiens
caccccagcugccugcugcuucugacggaucu

SEQ ID NO: 258449 - RNA, 32 nt, Homo Sapiens
ucagugucacauuucauuucauuugaaacuaa

SEQ ID NO: 258450 - RNA, 32 nt, Homo Sapiens
acaaaauauugcauucuuuguuuggauucuga

SEQ ID NO: 258451 - RNA, 32 nt, Homo Sapiens
uuccuccucccuccccaaaccccaaggaacuc

SEQ ID NO: 258452 - RNA, 32 nt, Homo Sapiens
uagcagcacuuuucacagcaucagcagucauc

SEQ ID NO: 258453 - RNA, 32 nt, Homo Sapiens
ugccucacaccuguaaucucagcacuuugggu

SEQ ID NO: 258454 - RNA, 32 nt, Homo Sapiens
ugucucacaccuguaaucccagcacuuugggu

SEQ ID NO: 258455 - RNA, 32 nt, Homo Sapiens
gagcgauucugccggcagcucagcagcauggc

SEQ ID NO: 258456 - RNA, 31 nt, Homo Sapiens
guggaggagauggcggcgacggcccgggaag

SEQ ID NO: 258457 - RNA, 32 nt, Homo Sapiens
cucccaccccuaccuggacgggcccaggcuug

SEQ ID NO: 258458 - RNA, 32 nt, Homo Sapiens
guccccccaagccacggcccgggguucaaggc

SEQ ID NO: 258459 - RNA, 32 nt, Homo Sapiens
cgggugccgggagcuucccuuucucagcgcgg

SEQ ID NO: 258460 - RNA, 32 nt, Homo Sapiens
acagugugaccaaaaacccacuaaggaaaaca

SEQ ID NO: 258461 - RNA, 32 nt, Homo Sapiens
acuucuggcaagauguucugccuuagcacuca

SEQ ID NO: 258462 - RNA, 32 nt, Homo Sapiens
gaagugauagaguaugauuauaauuucuguuu

SEQ ID NO: 258463 - RNA, 32 nt, Homo Sapiens
auuccucauuggcuucaucuucacgcugaacu

SEQ ID NO: 258464 - RNA, 32 nt, Homo Sapiens
augaggcccugugaaugauaauaauaaauugu

SEQ ID NO: 258465 - RNA, 32 nt, Homo Sapiens
agcuggaagauuguacagcauaaagcuaaagu

SEQ ID NO: 258466 - RNA, 32 nt, Homo Sapiens
ccucuccgacccccaggcccaaugucugaccu

SEQ ID NO: 258467 - RNA, 32 nt, Homo Sapiens
uccucugcauuuccagccugaacagauguuga

SEQ ID NO: 258468 - RNA, 32 nt, Homo Sapiens
gccccagcaagugugugcucagagcaucuuug

SEQ ID NO: 258469 - RNA, 32 nt, Homo Sapiens
ucccucauccagcccgucgcagcuuugacauc

SEQ ID NO: 258470 - RNA, 32 nt, Homo Sapiens
agcucucgaauccuaacugcagccaccauuua

SEQ ID NO: 258471 - RNA, 32 nt, Homo Sapiens
gguagcccgagcuccuacucugucuaaagagg

SEQ ID NO: 258472 - RNA, 32 nt, Homo Sapiens
cguccuaagaaccugaucagaaauuuuggaag

SEQ ID NO: 258473 - RNA, 32 nt, Homo Sapiens
cgccggagcucugaucgccgggaacccuugcc

SEQ ID NO: 258474 - RNA, 32 nt, Homo Sapiens
aaccagggauuaggcuguaggggggugagaag

SEQ ID NO: 258475 - RNA, 31 nt, Homo Sapiens
cagcagguacguacccaaccaugggcucgca

SEQ ID NO: 258476 - RNA, 32 nt, Homo Sapiens
ggagagguacagaaagaagagaaaagacugaa

SEQ ID NO: 258477 - RNA, 32 nt, Homo Sapiens
agaaaauaauauaucauguuuacuuuuguucu

SEQ ID NO: 258478 - RNA, 28 nt, Homo Sapiens
ccuaaggaagauuaaaucagaaaauuuu

SEQ ID NO: 258479 - RNA, 32 nt, Homo Sapiens
gccuagcagagccccagucuccagccccuucc

SEQ ID NO: 258480 - RNA, 32 nt, Homo Sapiens
gauuaaagaguaccuuagauccauagaagaug

SEQ ID NO: 258481 - RNA, 32 nt, Homo Sapiens
uaccaaggaauaaguaugaaaacaguucucug

SEQ ID NO: 258482 - RNA, 32 nt, Homo Sapiens
uggaaauauacauuauacuaagucuuauauuu

SEQ ID NO: 258483 - RNA, 32 nt, Homo Sapiens
uuggcugcgccggggguuccucguguagaucc

SEQ ID NO: 258484 - RNA, 32 nt, Homo Sapiens
ucaaguuaaaauguauuguguuguuuguaaag

SEQ ID NO: 258485 - RNA, 32 nt, Homo Sapiens
ugcuauauguacuguauguccuguagcccagu

SEQ ID NO: 258486 - RNA, 32 nt, Homo Sapiens
cacuuugaacaaaggucaguggggauuguuga

SEQ ID NO: 258487 - RNA, 32 nt, Homo Sapiens
acuccgcuuccggugaugcccgggccccagga

SEQ ID NO: 258488 - RNA, 32 nt, Homo Sapiens
aagcgcucuugucaccccugcugcuggagugc

SEQ ID NO: 258489 - RNA, 32 nt, Homo Sapiens
ccgugcacgaccccaaacuucuccgcguuaga

SEQ ID NO: 258490 - RNA, 32 nt, Homo Sapiens
cgccccagcccggcucugcugcagcggcaggg

SEQ ID NO: 258491 - RNA, 32 nt, Homo Sapiens
auguagaaggcacaauaugggcacuuuaaaug

SEQ ID NO: 258492 - RNA, 32 nt, Homo Sapiens
uaucccucuccuccccgcgaaguuucggggcu

SEQ ID NO: 258493 - RNA, 32 nt, Homo Sapiens
gagaccuccaugaggagaguuuucaacguccu

SEQ ID NO: 258494 - RNA, 32 nt, Homo Sapiens
cacacauugaugaaugccgacucuguacuggg

SEQ ID NO: 258495 - RNA, 32 nt, Homo Sapiens
gaaaaagaagggaaccacaguggauaugcuag

SEQ ID NO: 258496 - RNA, 32 nt, Homo Sapiens
gacaaagcagcaucaaauucaaugcaaugucu

SEQ ID NO: 258497 - RNA, 32 nt, Homo Sapiens
auauugacuaaaucaagaucugugauugaaca

SEQ ID NO: 258498 - RNA, 32 nt, Homo Sapiens
cgauuccggccgcguucccccggccccccucc

SEQ ID NO: 258499 - RNA, 32 nt, Homo Sapiens
aggaccucaaaauaagccaugcugcuuugcac

SEQ ID NO: 258500 - RNA, 32 nt, Homo Sapiens
gggcgcgaagccggaggcuccgggacguggau

SEQ ID NO: 258501 - RNA, 32 nt, Homo Sapiens
uuucuucuauccucucccacuccacgucugcu

SEQ ID NO: 258502 - RNA, 32 nt, Homo Sapiens
ugcgcuuuccugcgcgcacugcggagggcgcc

SEQ ID NO: 258503 - RNA, 32 nt, Homo Sapiens
ggaccgaccccauggcugagaauaugacggca

SEQ ID NO: 258504 - RNA, 32 nt, Homo Sapiens
gugguugucaagaaacaaaagaccaaaagagc

SEQ ID NO: 258505 - RNA, 32 nt, Homo Sapiens
gucaccaaaaagacacugcagaaacccugagc

SEQ ID NO: 258506 - RNA, 32 nt, Homo Sapiens
agaauagccugggcaacauagcaagaccccau

SEQ ID NO: 258507 - RNA, 32 nt, Homo Sapiens
cgugugagcgugaggagcugccgccaccgccu

SEQ ID NO: 258508 - RNA, 32 nt, Homo Sapiens
ccuccgggacccuccgcugacuccaccgcgca

SEQ ID NO: 258509 - RNA, 32 nt, Homo Sapiens
gccucagccaaugaccccggcucggcggcgag

SEQ ID NO: 258510 - RNA, 32 nt, Homo Sapiens
aaaaacaagugucaaaguucucuuagauucug

SEQ ID NO: 258511 - RNA, 32 nt, Homo Sapiens
aaucuguacagcucuccguuuaugacaguuua

SEQ ID NO: 258512 - RNA, 32 nt, Homo Sapiens
aacacuuagaaaaucuacaaacauucagaccu

SEQ ID NO: 258513 - RNA, 32 nt, Homo Sapiens
agugccuggcuuugugagacacuguacaagga

SEQ ID NO: 258514 - RNA, 32 nt, Homo Sapiens
ggacgcgggggcgagggugcgcggcgggucug

SEQ ID NO: 258515 - RNA, 32 nt, Homo Sapiens
acgucgggggugcuccuggggcagggacacag

SEQ ID NO: 258516 - RNA, 32 nt, Homo Sapiens
ugugaaauaaaacuggcuuuggcuucuuggaa

SEQ ID NO: 258517 - RNA, 32 nt, Homo Sapiens
aguucauggaagacaucugacuacccugagcc

SEQ ID NO: 258518 - RNA, 32 nt, Homo Sapiens
cuaaaauguauuauugaaacagcauucuggac

SEQ ID NO: 258519 - RNA, 32 nt, Homo Sapiens
auuuaguuuuaaaaucuaaaagucuauaaaga

SEQ ID NO: 258520 - RNA, 32 nt, Homo Sapiens
aaggacucuaaaguguugugacguguucauca

SEQ ID NO: 258521 - RNA, 32 nt, Homo Sapiens
gaggagugaaauaguaaaaugccaaguauugu

SEQ ID NO: 258522 - RNA, 32 nt, Homo Sapiens
cauugcacuccagccugggugauaagagcaag

SEQ ID NO: 258523 - RNA, 32 nt, Homo Sapiens
gagaguggggaaguggagcggcagcucccuug

SEQ ID NO: 258524 - RNA, 32 nt, Homo Sapiens
uuacauuuuuaaaauauuucagcugucauuuu

SEQ ID NO: 258525 - RNA, 32 nt, Homo Sapiens
uugccacaggcagaugaaugucuugaaagcuc

SEQ ID NO: 258526 - RNA, 32 nt, Homo Sapiens
caaugcugaaccucacacuguaggacucacac

SEQ ID NO: 258527 - RNA, 32 nt, Homo Sapiens
agcuuagagugcguggcacgggccccccgccc

SEQ ID NO: 258528 - RNA, 32 nt, Homo Sapiens
gcgcccguuugccugccccucgucggggaucg

SEQ ID NO: 258529 - RNA, 32 nt, Homo Sapiens
gggccauauggaggauuagaugagauaaugga

SEQ ID NO: 258530 - RNA, 32 nt, Homo Sapiens
aauguucucucccagcagcccuggacaguucu

SEQ ID NO: 258531 - RNA, 32 nt, Homo Sapiens
cugugugcccgaggccucacccugcccucgcc

SEQ ID NO: 258532 - RNA, 30 nt, Homo Sapiens
caugguggcaggcgccaguagucccagcua

SEQ ID NO: 258533 - RNA, 32 nt, Homo Sapiens
aagcaagagggaaaaaaaaaccacugcagcuc

SEQ ID NO: 258534 - RNA, 32 nt, Homo Sapiens
aacauagaggcaucaccugacugcacaggcaa

SEQ ID NO: 258535 - RNA, 32 nt, Homo Sapiens
cuuaguggugccuggugcauuccgaggcuaca

SEQ ID NO: 258536 - RNA, 32 nt, Homo Sapiens
ccuuuaagagcggcuggccaggcacggccucc

SEQ ID NO: 258537 - RNA, 32 nt, Homo Sapiens
cuaccuacuagagcagaauggagcuucggucc

SEQ ID NO: 258538 - RNA, 32 nt, Homo Sapiens
cugggggcggagaggcggcggugggcucccug

SEQ ID NO: 258539 - RNA, 32 nt, Homo Sapiens
uuuugaaucucuuucuggcccauccucugcuu

SEQ ID NO: 258540 - RNA, 32 nt, Homo Sapiens
aaaauugucucaaagugauuauauuauauaua

SEQ ID NO: 258541 - RNA, 32 nt, Homo Sapiens
ggauggaaaaauacaauuuauuuugcuuacca

SEQ ID NO: 258542 - RNA, 32 nt, Homo Sapiens
aucauguggugaaggccgccucagggguuguu

SEQ ID NO: 258543 - RNA, 32 nt, Homo Sapiens
aagacccgggcggggcgggcgcuucccggacu

SEQ ID NO: 258544 - RNA, 32 nt, Homo Sapiens
ugucucggcauaccccucuccucuucccaccu

SEQ ID NO: 258545 - RNA, 32 nt, Homo Sapiens
acugcagcucuuuucaguuuuugcuuauacac

SEQ ID NO: 258546 - RNA, 32 nt, Homo Sapiens
ccuuugcgugcaugcauaccucaucagugauu

SEQ ID NO: 258547 - RNA, 32 nt, Homo Sapiens
uuuuuauuuuugcugagacuaaucuuauucau

SEQ ID NO: 258548 - RNA, 32 nt, Homo Sapiens
uuuaaaaaacacacaucuuauggcauucaccu

SEQ ID NO: 258549 - RNA, 32 nt, Homo Sapiens
acagugcacacgcacacacacacacacacaca

SEQ ID NO: 258550 - RNA, 32 nt, Homo Sapiens
ggcuguccucaaugagaguuucaugcagaaug

SEQ ID NO: 258551 - RNA, 32 nt, Homo Sapiens
acucgaggcaggagucggcucuccggagccuc

SEQ ID NO: 258552 - RNA, 32 nt, Homo Sapiens
gccucuuuccagguuccucgccccacagcuuu

SEQ ID NO: 258553 - RNA, 32 nt, Homo Sapiens
ggccaaugggugccgccucuuggccgcggggg

SEQ ID NO: 258554 - RNA, 32 nt, Homo Sapiens
ccggagguuccauggcagccagacagcacagu

SEQ ID NO: 258555 - RNA, 32 nt, Homo Sapiens
cagaugucagauuuuuguuuucuuucuuucag

SEQ ID NO: 258556 - RNA, 32 nt, Homo Sapiens
ucaugcauggccugggugcccugcuggaggug

SEQ ID NO: 258557 - RNA, 32 nt, Homo Sapiens
uuccuuguugcuuuugaaauuuuugcaauuau

SEQ ID NO: 258558 - RNA, 32 nt, Homo Sapiens
uaaacacguuuccuuguuuucuuucucucucu

SEQ ID NO: 258559 - RNA, 32 nt, Homo Sapiens
uuuuccugucuucgccggagggccgggucugg

SEQ ID NO: 258560 - RNA, 32 nt, Homo Sapiens
uggagaaguuggacuagugagguaauggaugu

SEQ ID NO: 258561 - RNA, 32 nt, Homo Sapiens
ggggccggccccagcagccgccagucccaccg

SEQ ID NO: 258562 - RNA, 32 nt, Homo Sapiens
ccgcgccccccgcgcacggacccccauuacac

SEQ ID NO: 258563 - RNA, 32 nt, Homo Sapiens
cuuaccuagagcaaugaucuuuuucacgcauu

SEQ ID NO: 258564 - RNA, 32 nt, Homo Sapiens
acugugacuuuagaugcauuuuucucagugua

SEQ ID NO: 258565 - RNA, 29 nt, Homo Sapiens
uuacccauagugagguaauugagggcuuu

SEQ ID NO: 258566 - RNA, 32 nt, Homo Sapiens
uaaaauaaaaauuuuauucaguuuuguguaaa

SEQ ID NO: 258567 - RNA, 32 nt, Homo Sapiens
cugaucuagaaagccaaguauuugagcaacau

SEQ ID NO: 258568 - RNA, 32 nt, Homo Sapiens
cagccugagaaccucaagcagggagaagagcu

SEQ ID NO: 258569 - RNA, 32 nt, Homo Sapiens
cuggcgccgcuguacauagaaaccguugccac

SEQ ID NO: 258570 - RNA, 32 nt, Homo Sapiens
ucagucgauauuugguggccccaagcgaauga

SEQ ID NO: 258571 - RNA, 32 nt, Homo Sapiens
gcggcgccggcgacguacuguaagacgauauu

SEQ ID NO: 258572 - RNA, 32 nt, Homo Sapiens
agauucuuuuauuccuuuacuuucuuaauaga

SEQ ID NO: 258573 - RNA, 32 nt, Homo Sapiens
ggccgaggauggaugauuguggcagcagaagc

SEQ ID NO: 258574 - RNA, 32 nt, Homo Sapiens
uucugugaccaccacccccuccccucaccgcc

SEQ ID NO: 258575 - RNA, 32 nt, Homo Sapiens
gcugacggcaugaccucuguaagggacuccug

SEQ ID NO: 258576 - RNA, 32 nt, Homo Sapiens
cuaccaaaaaauauaaaaauuagccaaguaug

SEQ ID NO: 258577 - RNA, 32 nt, Homo Sapiens
uuuaacagaaauugcuuuuaaaaaauaucugg

SEQ ID NO: 258578 - RNA, 32 nt, Homo Sapiens
ccauugucaggcagaagcugcccaaagccugg

SEQ ID NO: 258579 - RNA, 32 nt, Homo Sapiens
agugucccugaucuguaaauguguaguggaaa

SEQ ID NO: 258580 - RNA, 32 nt, Homo Sapiens
ccugccgcccugaaggggaggggaggggggag

SEQ ID NO: 258581 - RNA, 32 nt, Homo Sapiens
uuggcagaucucagucuuaaccccgcucagua

SEQ ID NO: 258582 - RNA, 32 nt, Homo Sapiens
aacuacagaacaguuccuuguucuuugcaugu

SEQ ID NO: 258583 - RNA, 32 nt, Homo Sapiens
uucuaacauaaaucauacuggugaaaaauccu

SEQ ID NO: 258584 - RNA, 32 nt, Homo Sapiens
agcagcagccuugacaaacccaggcgcacugu

SEQ ID NO: 258585 - RNA, 32 nt, Homo Sapiens
gugcacauuggggugcuuugggauaaaagauu

SEQ ID NO: 258586 - RNA, 32 nt, Homo Sapiens
cgugcugggccuguacaagggccugggcucgc

SEQ ID NO: 258587 - RNA, 32 nt, Homo Sapiens
gacauugcagugagccgagaucgcagcacugu

SEQ ID NO: 258588 - RNA, 31 nt, Homo Sapiens
agaccaaaagcuaucaccugaggacagaggu

SEQ ID NO: 258589 - RNA, 32 nt, Homo Sapiens
uaucuugguauauuaaaguauuaucuuuuaua

SEQ ID NO: 258590 - RNA, 32 nt, Homo Sapiens
acuccuauuguucugcacuggaugcauucagc

SEQ ID NO: 258591 - RNA, 32 nt, Homo Sapiens
aauauaugcuauauauuaaaaugaugucuuaa

SEQ ID NO: 258592 - RNA, 32 nt, Homo Sapiens
gcgccucugcccggccaccccgucugggaagu

SEQ ID NO: 258593 - RNA, 32 nt, Homo Sapiens
cuuucuuuuuaaaccauaaauuaguuuaaacu

SEQ ID NO: 258594 - RNA, 32 nt, Homo Sapiens
gaauguccucauuugcagagaauguuuuugaa

SEQ ID NO: 258595 - RNA, 32 nt, Homo Sapiens
guccuuauuaaaccaguuucccgaaaaaaaaa

SEQ ID NO: 258596 - RNA, 32 nt, Homo Sapiens
ccucccugcuuugccuggcccguugaaguucc

SEQ ID NO: 258597 - RNA, 32 nt, Homo Sapiens
ucagagcuguuuuuaaugauguuauucuagaa

SEQ ID NO: 258598 - RNA, 32 nt, Homo Sapiens
uuagcugggcgugguggcgugugccuguaguc

SEQ ID NO: 258599 - RNA, 32 nt, Homo Sapiens
acaccagcuccugggaucagacuuucaucuac

SEQ ID NO: 258600 - RNA, 32 nt, Homo Sapiens
uggaggcgugacuuuccccucggguccaggua

SEQ ID NO: 258601 - RNA, 32 nt, Homo Sapiens
ugcucuggugccugagaauggcuggugcccaa

SEQ ID NO: 258602 - RNA, 32 nt, Homo Sapiens
ggcuacugccuugaagaugaccucuagggacc

SEQ ID NO: 258603 - RNA, 32 nt, Homo Sapiens
caagaaccaagaacucuaacugucccaggaau

SEQ ID NO: 258604 - RNA, 32 nt, Homo Sapiens
aaguaacgagcccagcgagguuaugcauaccu

SEQ ID NO: 258605 - RNA, 32 nt, Homo Sapiens
aacuuauuuugagauuugagauuuaaauuuua

SEQ ID NO: 258606 - RNA, 32 nt, Homo Sapiens
aacagaaccagugacuuugcugcuacauauuu

SEQ ID NO: 258607 - RNA, 32 nt, Homo Sapiens
augagccugugugguagcugaugucagaggac

SEQ ID NO: 258608 - RNA, 32 nt, Homo Sapiens
ugacaaccgcccggggcaugggccccccaaca

SEQ ID NO: 258609 - RNA, 32 nt, Homo Sapiens
uguguacccucaagacuaaacacacacuugag

SEQ ID NO: 258610 - RNA, 32 nt, Homo Sapiens
auuaauuuuuauuuauuuuucuugggaauuga

SEQ ID NO: 258611 - RNA, 32 nt, Homo Sapiens
caguucgcacggccacaggggcgcacggcgau

SEQ ID NO: 258612 - RNA, 32 nt, Homo Sapiens
gagguucuacuacucccugccccucgcccugc

SEQ ID NO: 258613 - RNA, 32 nt, Homo Sapiens
aaguccuugcaccauguagaucagcguccccc

SEQ ID NO: 258614 - RNA, 32 nt, Homo Sapiens
aauguuaguaauauauuguuauguuuucuaaa

SEQ ID NO: 258615 - RNA, 32 nt, Homo Sapiens
ccuaauaguuuuucuuuuuauaucugauauuu

SEQ ID NO: 258616 - RNA, 32 nt, Homo Sapiens
acucugcccucugcugcugcccgggguggggu

SEQ ID NO: 258617 - RNA, 32 nt, Homo Sapiens
gaacuggugcauuaaggagcucauggaagaug

SEQ ID NO: 258618 - RNA, 32 nt, Homo Sapiens
uggaaguggcauuggugacauggcagucugug

SEQ ID NO: 258619 - RNA, 32 nt, Homo Sapiens
gcaccgugcugcuuguacagccugcagagccg

SEQ ID NO: 258620 - RNA, 32 nt, Homo Sapiens
aucuucaguccacuuuacaacaaagagcagcu

SEQ ID NO: 258621 - RNA, 32 nt, Homo Sapiens
gaaagagugagaaggguagguguaaggguucc

SEQ ID NO: 258622 - RNA, 32 nt, Homo Sapiens
uucauagagaguguuuuucagauucuucauug

SEQ ID NO: 258623 - RNA, 32 nt, Homo Sapiens
cacaagagcugguuuuaauugggugaauuguu

SEQ ID NO: 258624 - RNA, 32 nt, Homo Sapiens
agucauagcccugagugucuuauuuauugcgg

SEQ ID NO: 258625 - RNA, 28 nt, Homo Sapiens
ccaaagaaagauuugaagaggucaaaga

SEQ ID NO: 258626 - RNA, 32 nt, Homo Sapiens
ucgaauuucuacguggaugugcaugaagcucu

SEQ ID NO: 258627 - RNA, 32 nt, Homo Sapiens
cagggagggagcaaagauggagcggcgggagg

SEQ ID NO: 258628 - RNA, 32 nt, Homo Sapiens
cgugaggaguugguuggagguccccaaggcca

SEQ ID NO: 258629 - RNA, 31 nt, Homo Sapiens
ugucacccacccucaggcuggggccgaggau

SEQ ID NO: 258630 - RNA, 32 nt, Homo Sapiens
cuuggcaguuuaggaagucacuucucccucca

SEQ ID NO: 258631 - RNA, 32 nt, Homo Sapiens
aagacucagugagaaugcauuugaucuugaag

SEQ ID NO: 258632 - RNA, 32 nt, Homo Sapiens
cugaguuugcugaagaaauuguauuucaacca

SEQ ID NO: 258633 - RNA, 32 nt, Homo Sapiens
uagcugggauuacaggcacgcgccaccacucu

SEQ ID NO: 258634 - RNA, 32 nt, Homo Sapiens
gaaauguacacacagauuccugucccuuugcc

SEQ ID NO: 258635 - RNA, 32 nt, Homo Sapiens
cuuaauggacauuuuguugguguuggugcaag

SEQ ID NO: 258636 - RNA, 32 nt, Homo Sapiens
gaaaaugaacaaacugauugauugugcaaacu

SEQ ID NO: 258637 - RNA, 32 nt, Homo Sapiens
uggagcuucucgcugauggggugcgaguauua

SEQ ID NO: 258638 - RNA, 32 nt, Homo Sapiens
uuuaaauaguguucuuuuuuuaaccacucuaa

SEQ ID NO: 258639 - RNA, 32 nt, Homo Sapiens
cauacagcuaugaagcacuuagugaaaagaac

SEQ ID NO: 258640 - RNA, 32 nt, Homo Sapiens
aauccucgaggaacaagguguauuuccgaccu

SEQ ID NO: 258641 - RNA, 32 nt, Homo Sapiens
auucuuagcucuuucauggugggcugucaguu

SEQ ID NO: 258642 - RNA, 32 nt, Homo Sapiens
gcugcagguggcggcgcagucucgguaggcgg

SEQ ID NO: 258643 - RNA, 32 nt, Homo Sapiens
augguggcuucaacuagguaguagcaauaagg

SEQ ID NO: 258644 - RNA, 32 nt, Homo Sapiens
uuucaauccauaaauguggaaaugaacuauga

SEQ ID NO: 258645 - RNA, 32 nt, Homo Sapiens
acugcgcugcaguccaccuggugcuggggcug

SEQ ID NO: 258646 - RNA, 32 nt, Homo Sapiens
uggaaauuauucuguugcuguuugucaagcug

SEQ ID NO: 258647 - RNA, 32 nt, Homo Sapiens
gaucacaggccaguggaaaaagggcaggucag

SEQ ID NO: 258648 - RNA, 32 nt, Homo Sapiens
aaauuaguuuaauuggccuuaaaauuacauua

SEQ ID NO: 258649 - RNA, 32 nt, Homo Sapiens
aguggcaucuucuuugcauccuaaggacgaaa

SEQ ID NO: 258650 - RNA, 32 nt, Homo Sapiens
accugcucccagagaccuuccacacugaaucu

SEQ ID NO: 258651 - RNA, 32 nt, Homo Sapiens
accagcccaucccagaucuuccuuuauuaaaa

SEQ ID NO: 258652 - RNA, 32 nt, Homo Sapiens
uagccgggcgugguggugggcgccuguaaucc

SEQ ID NO: 258653 - RNA, 32 nt, Homo Sapiens
cccagucccaugaucgccccagccugugagcg

SEQ ID NO: 258654 - RNA, 32 nt, Homo Sapiens
ugagggaaauagggaccccccgacuugcccuc

SEQ ID NO: 258655 - RNA, 30 nt, Homo Sapiens
uugugucgccauggcggcggcagcggcgac

SEQ ID NO: 258656 - RNA, 32 nt, Homo Sapiens
aucaaugaauuaacaagcaacacauugucaca

SEQ ID NO: 258657 - RNA, 32 nt, Homo Sapiens
gcaaauccuucgccauuugucuauccuggccc

SEQ ID NO: 258658 - RNA, 32 nt, Homo Sapiens
aguucaaggggaggggacaaagaccccacagc

SEQ ID NO: 258659 - RNA, 32 nt, Homo Sapiens
gcucccucuggcggccgggcuggcaggaccuc

SEQ ID NO: 258660 - RNA, 32 nt, Homo Sapiens
uuuucuuuuuaacuuuaccaaaugaaaugcca

SEQ ID NO: 258661 - RNA, 32 nt, Homo Sapiens
gggggagaaaaccuagcagaccaccaugugcu

SEQ ID NO: 258662 - RNA, 32 nt, Homo Sapiens
cgugaggcgccggagcccggccucgaggugca

SEQ ID NO: 258663 - RNA, 32 nt, Homo Sapiens
guugaaagcucugccagcuacccaggcugaac

SEQ ID NO: 258664 - RNA, 32 nt, Homo Sapiens
ucuaagccuaagcacagcuuguccugggugaa

SEQ ID NO: 258665 - RNA, 32 nt, Homo Sapiens
ucccuuuccagaaguccacucuccugauucac

SEQ ID NO: 258666 - RNA, 32 nt, Homo Sapiens
gaccuggcgugcucagacccaacagcaaagga

SEQ ID NO: 258667 - RNA, 32 nt, Homo Sapiens
uugugccucauaucagguuuugaugaauauau

SEQ ID NO: 258668 - RNA, 32 nt, Homo Sapiens
ugcuaagaagcagucacauaaacagcagcagg

SEQ ID NO: 258669 - RNA, 32 nt, Homo Sapiens
ggaacgagucuggccuggugccggcccagugu

SEQ ID NO: 258670 - RNA, 32 nt, Homo Sapiens
guuaaggaaaacugaggccuaaaugugaccaa

SEQ ID NO: 258671 - RNA, 32 nt, Homo Sapiens
ccuggcugcagccucccggcgccagcgaagac

SEQ ID NO: 258672 - RNA, 32 nt, Homo Sapiens
cccugccguuuaccauuaaccuuuuccacaau

SEQ ID NO: 258673 - RNA, 32 nt, Homo Sapiens
agaguugggguaaugggaacuggccacgugcc

SEQ ID NO: 258674 - RNA, 32 nt, Homo Sapiens
aacgcgccggugcccuugccuucgccgugacc

SEQ ID NO: 258675 - RNA, 32 nt, Homo Sapiens
uuguuacugguuuuauuuucauuuucuucaaa

SEQ ID NO: 258676 - RNA, 32 nt, Homo Sapiens
aggacagccggggcugggugcugcaggggcuu

SEQ ID NO: 258677 - RNA, 32 nt, Homo Sapiens
aagccccaacuuugaguuguccugccuuucug

SEQ ID NO: 258678 - RNA, 32 nt, Homo Sapiens
gucacugacauuuaaugguacuguauauuacu

SEQ ID NO: 258679 - RNA, 32 nt, Homo Sapiens
uacuuuuaugugucaauuauaacucaguaagu

SEQ ID NO: 258680 - RNA, 31 nt, Homo Sapiens
cccgggaauucugugaaccaggcugcugucu

SEQ ID NO: 258681 - RNA, 32 nt, Homo Sapiens
gcuuauguggaaccaccgcguccugccuugga

SEQ ID NO: 258682 - RNA, 32 nt, Homo Sapiens
cacucccauccuuuccucucuccccguucaug

SEQ ID NO: 258683 - RNA, 32 nt, Homo Sapiens
guguuccuagggcuucucuauagugcacauua

SEQ ID NO: 258684 - RNA, 32 nt, Homo Sapiens
uguguuguguuuuguuuuuuaagggagggaau

SEQ ID NO: 258685 - RNA, 32 nt, Homo Sapiens
uggaagaaaaaauaaaccuuaauauugaaacu

SEQ ID NO: 258686 - RNA, 32 nt, Homo Sapiens
gaagaagaggaugggcucguccaugucggcgg

SEQ ID NO: 258687 - RNA, 32 nt, Homo Sapiens
guggccugugguauauggaaaaguagcagggu

SEQ ID NO: 258688 - RNA, 32 nt, Homo Sapiens
uauccauguaaccaaacaccaccuguucccca

SEQ ID NO: 258689 - RNA, 32 nt, Homo Sapiens
uuugacauuuuucugugguugaauagaagaca

SEQ ID NO: 258690 - RNA, 32 nt, Homo Sapiens
aaagcuugaacaccaccguccacagccucagg

SEQ ID NO: 258691 - RNA, 32 nt, Homo Sapiens
gccucgggccgcguccaggguuucggccguaa

SEQ ID NO: 258692 - RNA, 32 nt, Homo Sapiens
ugcugagccccggccgccggcccggcaugggc

SEQ ID NO: 258693 - RNA, 32 nt, Homo Sapiens
uggcuuaaaaguuuuggcgacuuugacuuuua

SEQ ID NO: 258694 - RNA, 32 nt, Homo Sapiens
uggagagaggggcugguggcuggacaggcugc

SEQ ID NO: 258695 - RNA, 31 nt, Homo Sapiens
auuauuuccacauagaauuaguuccugcuua

SEQ ID NO: 258696 - RNA, 32 nt, Homo Sapiens
ggcaaacuacuuuagcugggaaaauucauuuc

SEQ ID NO: 258697 - RNA, 32 nt, Homo Sapiens
cgccugcccccagcccccgcagcccucuggcc

SEQ ID NO: 258698 - RNA, 32 nt, Homo Sapiens
ccccgacuggcaccacugcugccccugccccu

SEQ ID NO: 258699 - RNA, 32 nt, Homo Sapiens
uauuguuaauaaauauucugucauuuguaaag

SEQ ID NO: 258700 - RNA, 32 nt, Homo Sapiens
aacccuucacucaagcagcauuacuguacaug

SEQ ID NO: 258701 - RNA, 32 nt, Homo Sapiens
uuauauaaaagcuagaaauaaugugauuccua

SEQ ID NO: 258702 - RNA, 32 nt, Homo Sapiens
guuugcuuauaaauuuuuuaccacucccacau

SEQ ID NO: 258703 - RNA, 32 nt, Homo Sapiens
accuuauacaucacuuccuguuuuaagcagcu

SEQ ID NO: 258704 - RNA, 32 nt, Homo Sapiens
ucugaccuggcgggcuggucaucacuuacaaa

SEQ ID NO: 258705 - RNA, 32 nt, Homo Sapiens
ggacauguaggucuaguugcauuuucacuggg

SEQ ID NO: 258706 - RNA, 32 nt, Homo Sapiens
auaaaaaauucaaucgggcagcucccuuuucc

SEQ ID NO: 258707 - RNA, 32 nt, Homo Sapiens
aaaaauuuauuuucuuuuuugauaauuuauug

SEQ ID NO: 258708 - RNA, 32 nt, Homo Sapiens
acauucagagacaucaucuacugccugugcgc

SEQ ID NO: 258709 - RNA, 32 nt, Homo Sapiens
agcccagaaagaugagcucauugcuuuaauuu

SEQ ID NO: 258710 - RNA, 32 nt, Homo Sapiens
gcgcacgccccgagguccgagaccgccacgca

SEQ ID NO: 258711 - RNA, 30 nt, Homo Sapiens
cuucgggauuugguuucugagucuguggag

SEQ ID NO: 258712 - RNA, 32 nt, Homo Sapiens
ucaggcucaagcugcuggccggagagcaacga

SEQ ID NO: 258713 - RNA, 32 nt, Homo Sapiens
cguggccggcauuauuuccuaguucuucuugu

SEQ ID NO: 258714 - RNA, 32 nt, Homo Sapiens
uauuguuugacccuuaagcuuuuacaucucuu

SEQ ID NO: 258715 - RNA, 32 nt, Homo Sapiens
ugauggaaaaaguaaaugaacuaguuguccca

SEQ ID NO: 258716 - RNA, 32 nt, Homo Sapiens
aaaacuuuauuuacaaaaaauaaucagaaggc

SEQ ID NO: 258717 - RNA, 32 nt, Homo Sapiens
gggaauagccaggugccagcccugcccagagu

SEQ ID NO: 258718 - RNA, 32 nt, Homo Sapiens
caggaacaaagaaacaggacaggaguuagaug

SEQ ID NO: 258719 - RNA, 32 nt, Homo Sapiens
uuuucaagccucaggaccuaccugaagagaag

SEQ ID NO: 258720 - RNA, 32 nt, Homo Sapiens
uuauuuuauuuuuugagauggaguuucaccuu

SEQ ID NO: 258721 - RNA, 32 nt, Homo Sapiens
ccagcagugggaagggaccgggugggagggag

SEQ ID NO: 258722 - RNA, 32 nt, Homo Sapiens
uucccggccggugucgcuccgcggcgggccau

SEQ ID NO: 258723 - RNA, 32 nt, Homo Sapiens
caaagcccacccagaacagcagggaaauucca

SEQ ID NO: 258724 - RNA, 32 nt, Homo Sapiens
aaagcacagggccagagucucaguugguuucu

SEQ ID NO: 258725 - RNA, 32 nt, Homo Sapiens
ugugugaaaugaauacuuggaauucuaauugu

SEQ ID NO: 258726 - RNA, 32 nt, Homo Sapiens
uuaccuuuggacuuuuuguuaugugagauauu

SEQ ID NO: 258727 - RNA, 32 nt, Homo Sapiens
gggugcucggagcccugcucgggagcuggucc

SEQ ID NO: 258728 - RNA, 32 nt, Homo Sapiens
aaugugggagucugguuugagcaagcgagcug

SEQ ID NO: 258729 - RNA, 32 nt, Homo Sapiens
ccaguuucuucagauguaaacccuguuaacgu

SEQ ID NO: 258730 - RNA, 32 nt, Homo Sapiens
cgucccgcucccuccgcggcucauggcgacga

SEQ ID NO: 258731 - RNA, 32 nt, Homo Sapiens
gggccuaaacugcuuuaccuccccuccuacug

SEQ ID NO: 258732 - RNA, 32 nt, Homo Sapiens
uuaaacuccagaugaacuguagugaccugaug

SEQ ID NO: 258733 - RNA, 32 nt, Homo Sapiens
uguuccaaggauucuacccuagcugaggaaga

SEQ ID NO: 258734 - RNA, 32 nt, Homo Sapiens
gugaggccgaggccgggaggccgugcccggag

SEQ ID NO: 258735 - RNA, 32 nt, Homo Sapiens
gcauuuucuuuuuaguuuuucauuaaaauaua

SEQ ID NO: 258736 - RNA, 28 nt, Homo Sapiens
ugacaguugggugauaugugucaugugg

SEQ ID NO: 258737 - RNA, 32 nt, Homo Sapiens
guacaagaaauauuuauguauuuuuuggaauu

SEQ ID NO: 258738 - RNA, 32 nt, Homo Sapiens
cuaauaccaaaauugagcuuacaauuaggaac

SEQ ID NO: 258739 - RNA, 32 nt, Homo Sapiens
ccccgggcggguggcagguggaggugucaggc

SEQ ID NO: 258740 - RNA, 32 nt, Homo Sapiens
auccaucgcgucugcguuucuguuguccuuuc

SEQ ID NO: 258741 - RNA, 32 nt, Homo Sapiens
cccugcugccagcggccgggacucucagcaca

SEQ ID NO: 258742 - RNA, 32 nt, Homo Sapiens
gcccacucaggaugcaggcucuccccaggggg

SEQ ID NO: 258743 - RNA, 32 nt, Homo Sapiens
uuuauggauaaugugaccgggucuuaugcaaa

SEQ ID NO: 258744 - RNA, 32 nt, Homo Sapiens
gccauauuagcagugaaacauuuuaaacugca

SEQ ID NO: 258745 - RNA, 32 nt, Homo Sapiens
guggcacccagugagagggcucugccgaugga

SEQ ID NO: 258746 - RNA, 32 nt, Homo Sapiens
aacucggguaguccaguggccuagcugguacc

SEQ ID NO: 258747 - RNA, 32 nt, Homo Sapiens
acaagucuucuucugguaagagcaccccaauu

SEQ ID NO: 258748 - RNA, 32 nt, Homo Sapiens
gaguuuuuaaaaaucaaagugauuuugaaaau

SEQ ID NO: 258749 - RNA, 32 nt, Homo Sapiens
uguuaauucuuuuuacaaaacuauuuacugua

SEQ ID NO: 258750 - RNA, 32 nt, Homo Sapiens
gcuauauuguaauucuaaugagaauuauauuu

SEQ ID NO: 258751 - RNA, 32 nt, Homo Sapiens
ggagaggaagcgggaaguuugugggauccccg

SEQ ID NO: 258752 - RNA, 32 nt, Homo Sapiens
cuggacaugcaaauacaucauauuauguuuuc

SEQ ID NO: 258753 - RNA, 32 nt, Homo Sapiens
cuauuuuuaaacauacuagucugcugauagaa

SEQ ID NO: 258754 - RNA, 32 nt, Homo Sapiens
uucucccccuccccuguccccgcuugcucacg

SEQ ID NO: 258755 - RNA, 32 nt, Homo Sapiens
gcucccgucucuucuuuuucugucauuucaug

SEQ ID NO: 258756 - RNA, 32 nt, Homo Sapiens
gcgaggaggggcgggggcaggggcugcagccc

SEQ ID NO: 258757 - RNA, 32 nt, Homo Sapiens
ccuaccagguggaauaaaggacacagauuuga

SEQ ID NO: 258758 - RNA, 32 nt, Homo Sapiens
uuacuuugucagaacaaaauauuuacgcguug

SEQ ID NO: 258759 - RNA, 32 nt, Homo Sapiens
guucacuugcagaaaaggagcgcaaggcagag

SEQ ID NO: 258760 - RNA, 31 nt, Homo Sapiens
aaaaggaaauaaaaaacuguaaagucaaaag

SEQ ID NO: 258761 - RNA, 32 nt, Homo Sapiens
ucuggggcaaugaaacccugaucauguuguug

SEQ ID NO: 258762 - RNA, 32 nt, Homo Sapiens
uguguccuguguacugcagauguguguucucu

SEQ ID NO: 258763 - RNA, 32 nt, Homo Sapiens
aacagauuguagcuuuaaaaaauacacaggua

SEQ ID NO: 258764 - RNA, 32 nt, Homo Sapiens
gugcuuaucuucuaauaagauuuaaaugucac

SEQ ID NO: 258765 - RNA, 30 nt, Homo Sapiens
aagcagggaggugggccuccaaacccaagu

SEQ ID NO: 258766 - RNA, 32 nt, Homo Sapiens
acacuggaauaaugcugagaaauuaagaguuu

SEQ ID NO: 258767 - RNA, 32 nt, Homo Sapiens
ccguagaugaugguuaauaugaaaauggacag

SEQ ID NO: 258768 - RNA, 32 nt, Homo Sapiens
gcuuuccucaguugucaucucuucccagcucu

SEQ ID NO: 258769 - RNA, 32 nt, Homo Sapiens
ggcagcuaaaugauuauucuguguauguuuuu

SEQ ID NO: 258770 - RNA, 32 nt, Homo Sapiens
ucaguuguuaagcuaacacaucuuucuccuca

SEQ ID NO: 258771 - RNA, 32 nt, Homo Sapiens
gaauaaucuaaguuuuaaauauuauuuauccc

SEQ ID NO: 258772 - RNA, 30 nt, Homo Sapiens
cugaugggcggucgcgcgggcacugggucc

SEQ ID NO: 258773 - RNA, 32 nt, Homo Sapiens
aaagagaacugugccaaaaaccucuuuuccac

SEQ ID NO: 258774 - RNA, 32 nt, Homo Sapiens
acagucccaagcccuagcccuaggggguucuc

SEQ ID NO: 258775 - RNA, 32 nt, Homo Sapiens
uuggauuuuuuggaguccgaauauuuccaucu

SEQ ID NO: 258776 - RNA, 32 nt, Homo Sapiens
gccugccccuccccggccuaugugccauccgc

SEQ ID NO: 258777 - RNA, 32 nt, Homo Sapiens
aacuuugugacugguuugucagugucccccau

SEQ ID NO: 258778 - RNA, 32 nt, Homo Sapiens
gagaaggagcgcgcgcugggccugcagcggaa

SEQ ID NO: 258779 - RNA, 32 nt, Homo Sapiens
aggccguuaggaaaagcugauguugugcagug

SEQ ID NO: 258780 - RNA, 29 nt, Homo Sapiens
uucucaccaggauugucuauagaaguuaa

SEQ ID NO: 258781 - RNA, 32 nt, Homo Sapiens
aagcccuuagauuuuggagacaucaggcagau

SEQ ID NO: 258782 - RNA, 32 nt, Homo Sapiens
acaaacaaacuccauggggaugcagucagcaa

SEQ ID NO: 258783 - RNA, 32 nt, Homo Sapiens
agcgaaugggccuguauccucccuggcagaca

SEQ ID NO: 258784 - RNA, 32 nt, Homo Sapiens
cuugauguuuuaucacuucucuaaguaagguu

SEQ ID NO: 258785 - RNA, 32 nt, Homo Sapiens
cccaaaagggaagcagaggagagaaaguccca

SEQ ID NO: 258786 - RNA, 32 nt, Homo Sapiens
gcugauuucuuuuuccucuuccgcuaguugug

SEQ ID NO: 258787 - RNA, 32 nt, Homo Sapiens
aaaacugccugccgcugucugaggaguccacc

SEQ ID NO: 258788 - RNA, 32 nt, Homo Sapiens
ugcccacugcuucaacaggggccagaacaguc

SEQ ID NO: 258789 - RNA, 32 nt, Homo Sapiens
acagcccccugccugauccccugcuggcuggg

SEQ ID NO: 258790 - RNA, 32 nt, Homo Sapiens
ugauaagauguuaucaaugacaauggugcccg

SEQ ID NO: 258791 - RNA, 32 nt, Homo Sapiens
aacccgaagcccuccuucuccuggcagcaggc

SEQ ID NO: 258792 - RNA, 32 nt, Homo Sapiens
aagaaaagaaugccggagggcccuuggccugc

SEQ ID NO: 258793 - RNA, 32 nt, Homo Sapiens
ggucuuucccuuggaaggccaagcuucuuagu

SEQ ID NO: 258794 - RNA, 32 nt, Homo Sapiens
cuccccugaaccugguucugcauuccccacca

SEQ ID NO: 258795 - RNA, 32 nt, Homo Sapiens
guuuuaucuucagaaauucucugugauuaaga

SEQ ID NO: 258796 - RNA, 32 nt, Homo Sapiens
auuaagcuggagaugccuguggaacauuccag

SEQ ID NO: 258797 - RNA, 32 nt, Homo Sapiens
gaaagucgcuacucgagccuugccaacugggg

SEQ ID NO: 258798 - RNA, 32 nt, Homo Sapiens
guuaauuaacugugugcuuccaacagaaaaug

SEQ ID NO: 258799 - RNA, 32 nt, Homo Sapiens
cugucaaugcaaaagaaucagugagguuaaag

SEQ ID NO: 258800 - RNA, 32 nt, Homo Sapiens
ggggcgugcgcggcgauccgcugcuacccgga

SEQ ID NO: 258801 - RNA, 32 nt, Homo Sapiens
gccucaccccggcuccugggccccagcagcau

SEQ ID NO: 258802 - RNA, 32 nt, Homo Sapiens
agagagcuugggagaggacgaggguagucuua

SEQ ID NO: 258803 - RNA, 32 nt, Homo Sapiens
acccauagacuacaacaauuauaggacagcuu

SEQ ID NO: 258804 - RNA, 32 nt, Homo Sapiens
agguuaaaacaaaaacaaaaaaccacaaaaau

SEQ ID NO: 258805 - RNA, 32 nt, Homo Sapiens
uguggaccaaaggagaugguuaaugugaaagc

SEQ ID NO: 258806 - RNA, 32 nt, Homo Sapiens
aaaauaauccacaaagauguuuuuaucucaca

SEQ ID NO: 258807 - RNA, 32 nt, Homo Sapiens
gugcagaggagugagcagcugcaccgcuggga

SEQ ID NO: 258808 - RNA, 32 nt, Homo Sapiens
cuggacaccacuuuuaaaaagcaaucacugug

SEQ ID NO: 258809 - RNA, 32 nt, Homo Sapiens
uacuuccucagaaacgucauugagauuuugau

SEQ ID NO: 258810 - RNA, 32 nt, Homo Sapiens
ucugcccaagcccuuccuccccuccaucaaga

SEQ ID NO: 258811 - RNA, 29 nt, Homo Sapiens
agcucugccuauuuuagaggcaaaguaaa

SEQ ID NO: 258812 - RNA, 32 nt, Homo Sapiens
acauacuguggcggcucccaggcccugcccac

SEQ ID NO: 258813 - RNA, 32 nt, Homo Sapiens
gacaauuuuuuuucuuuuuuuuucuuuuucuu

SEQ ID NO: 258814 - RNA, 32 nt, Homo Sapiens
gugggacccgucguccuccccucguccuucag

SEQ ID NO: 258815 - RNA, 32 nt, Homo Sapiens
gaauuccauaauacauaacauucaauuuuuac

SEQ ID NO: 258816 - RNA, 32 nt, Homo Sapiens
acuucuuagaguuauuccuguuggaccgggcg

SEQ ID NO: 258817 - RNA, 32 nt, Homo Sapiens
aacagacuccacaugggaauuuucaugauauc

SEQ ID NO: 258818 - RNA, 32 nt, Homo Sapiens
uucccauggaaauugaaaagucuauuuaaaua

SEQ ID NO: 258819 - RNA, 32 nt, Homo Sapiens
cucuuucaaaaauaaauguuuaugugagaaaa

SEQ ID NO: 258820 - RNA, 32 nt, Homo Sapiens
aauaaauggcauuauuuuuaaauuggaauaau

SEQ ID NO: 258821 - RNA, 32 nt, Homo Sapiens
acaguaacccaaacagcauggugcugguacaa

SEQ ID NO: 258822 - RNA, 32 nt, Homo Sapiens
gagccucgccggcgcgcaccugcccgcagcgc

SEQ ID NO: 258823 - RNA, 32 nt, Homo Sapiens
uuuuguaaugaaaacaucuaagaucugcugac

SEQ ID NO: 258824 - RNA, 32 nt, Homo Sapiens
uuuagccagaauguuuccuguggaaauaugca

SEQ ID NO: 258825 - RNA, 32 nt, Homo Sapiens
uuugagagcacauuuuguaaaaauauuuaucu

SEQ ID NO: 258826 - RNA, 32 nt, Homo Sapiens
auugagggugggucugccucucccagcccacu

SEQ ID NO: 258827 - RNA, 32 nt, Homo Sapiens
gcuguuguuuuaaaaguuuaauuuaaugaaau

SEQ ID NO: 258828 - RNA, 32 nt, Homo Sapiens
ucacuccacccugagggccccauccucugaac

SEQ ID NO: 258829 - RNA, 32 nt, Homo Sapiens
aggccccuggaacacacucaggcuucccugac

SEQ ID NO: 258830 - RNA, 32 nt, Homo Sapiens
auguuucacccccauauaccaagcugcucugc

SEQ ID NO: 258831 - RNA, 32 nt, Homo Sapiens
cuuguaguuuugagucuuugucucucuggaau

SEQ ID NO: 258832 - RNA, 32 nt, Homo Sapiens
cauuucaagauauguaucuuauauaaaccuca

SEQ ID NO: 258833 - RNA, 32 nt, Homo Sapiens
uuccgauuauuuugauuuuucaguguuaacau

SEQ ID NO: 258834 - RNA, 32 nt, Homo Sapiens
uuuuggaggguggaaguuaggagcagggagag

SEQ ID NO: 258835 - RNA, 32 nt, Homo Sapiens
ggaaguggugggaggcagcuguggugcaggag

SEQ ID NO: 258836 - RNA, 32 nt, Homo Sapiens
caggaagcugggaagggagaugucaggugggg

SEQ ID NO: 258837 - RNA, 32 nt, Homo Sapiens
cagcgcccgcauggagccgccucuggagcuuc

SEQ ID NO: 258838 - RNA, 32 nt, Homo Sapiens
cuuuucacuggaugauguaugagggaauuuua

SEQ ID NO: 258839 - RNA, 32 nt, Homo Sapiens
cuuccagaggccgcuucuccagugacuaaccu

SEQ ID NO: 258840 - RNA, 32 nt, Homo Sapiens
gguggggcugagcugccggggagggguggugg

SEQ ID NO: 258841 - RNA, 32 nt, Homo Sapiens
cagcuaaauggaaaacuguuaagcaaacaucc

SEQ ID NO: 258842 - RNA, 32 nt, Homo Sapiens
acuucgaaaaauacuggguaagcuguaaagaa

SEQ ID NO: 258843 - RNA, 32 nt, Homo Sapiens
acaacauccagaugaaggggugacagcagggc

SEQ ID NO: 258844 - RNA, 32 nt, Homo Sapiens
auagaacaaaaauauuaaaaccaaugagaaua

SEQ ID NO: 258845 - RNA, 32 nt, Homo Sapiens
cuguuauuaauauauaauuaugcaaaugaaug

SEQ ID NO: 258846 - RNA, 32 nt, Homo Sapiens
gcuggacuccgcugccucccccaucuccccgc

SEQ ID NO: 258847 - RNA, 32 nt, Homo Sapiens
acagaacucagcucaaggguucuggggauggg

SEQ ID NO: 258848 - RNA, 32 nt, Homo Sapiens
cccuaccuuggaccaucccgcguagggguggc

SEQ ID NO: 258849 - RNA, 32 nt, Homo Sapiens
gagcagcucaggugcggccccgccccgcccgc

SEQ ID NO: 258850 - RNA, 32 nt, Homo Sapiens
cagcugcaaccucggauaccagcacgggacaa

SEQ ID NO: 258851 - RNA, 32 nt, Homo Sapiens
aaucuaccucauucuuuuuuaucuucugcaua

SEQ ID NO: 258852 - RNA, 32 nt, Homo Sapiens
uuuuuccauuuaucagaaaugauaaaauccag

SEQ ID NO: 258853 - RNA, 32 nt, Homo Sapiens
cugggccucucaguugaacaaagcagcaaaac

SEQ ID NO: 258854 - RNA, 32 nt, Homo Sapiens
aggcgacggagauaagaugcgcgggucguuuu

SEQ ID NO: 258855 - RNA, 32 nt, Homo Sapiens
gauuuaggaaucuauuugaaauauucauuacc

SEQ ID NO: 258856 - RNA, 30 nt, Homo Sapiens
cuuuguggcugugcuguuugugccaauaga

SEQ ID NO: 258857 - RNA, 32 nt, Homo Sapiens
uauuaaauauuuuacuucuuuccauaaagagu

SEQ ID NO: 258858 - RNA, 32 nt, Homo Sapiens
ccuacgugagaagcucggagggggugguuuca

SEQ ID NO: 258859 - RNA, 32 nt, Homo Sapiens
ugaggaaagagcauggagagccagcagcuuca

SEQ ID NO: 258860 - RNA, 32 nt, Homo Sapiens
uggguuucaaagcugccuccaugccgaguguu

SEQ ID NO: 258861 - RNA, 32 nt, Homo Sapiens
uccgucucugcuuuuccacuucuaccugcgug

SEQ ID NO: 258862 - RNA, 32 nt, Homo Sapiens
auuguuccaaaggaucuuauuuugugaacuau

SEQ ID NO: 258863 - RNA, 32 nt, Homo Sapiens
aagagccagcuguggccagagcccuuucacug

SEQ ID NO: 258864 - RNA, 32 nt, Homo Sapiens
uuccauauuauuauaguuaaugucuuaaucca

SEQ ID NO: 258865 - RNA, 32 nt, Homo Sapiens
cagaggccguggaguucaggugugaggggcag

SEQ ID NO: 258866 - RNA, 32 nt, Homo Sapiens
cuaugccaggaagcacaaagacuuuguugaga

SEQ ID NO: 258867 - RNA, 32 nt, Homo Sapiens
cucaaaggugccuggugauaguaggcacucaa

SEQ ID NO: 258868 - RNA, 32 nt, Homo Sapiens
caguuaccaaaauugaacuugucuuucgcuug

SEQ ID NO: 258869 - RNA, 32 nt, Homo Sapiens
ucuguuguuuugcaugaacgugaggagcagca

SEQ ID NO: 258870 - RNA, 32 nt, Homo Sapiens
caagaagcaagagugagaaguggggagaguga

SEQ ID NO: 258871 - RNA, 32 nt, Homo Sapiens
cgcagcaagauggcggacgagaaggacaggga

SEQ ID NO: 258872 - RNA, 29 nt, Homo Sapiens
gucuauauauguauguggggaggacagga

SEQ ID NO: 258873 - RNA, 32 nt, Homo Sapiens
cuacaccagcagagaccucccugcccugcggc

SEQ ID NO: 258874 - RNA, 32 nt, Homo Sapiens
cgggccccgcggcgucaucggcggcgaggagc

SEQ ID NO: 258875 - RNA, 32 nt, Homo Sapiens
ugcugccggagcaaaagcgguagcgggagccc

SEQ ID NO: 258876 - RNA, 32 nt, Homo Sapiens
cgggagacgagcggugucauggccgccgacag

SEQ ID NO: 258877 - RNA, 32 nt, Homo Sapiens
cugagagacccaaggaggaaaaacagacaaaa

SEQ ID NO: 258878 - RNA, 32 nt, Homo Sapiens
caguccccaagccccacugugccuuguugucu

SEQ ID NO: 258879 - RNA, 32 nt, Homo Sapiens
ccccuuugcuugauuuaggagcucucaguugc

SEQ ID NO: 258880 - RNA, 32 nt, Homo Sapiens
uccggaccaagccccuucagcuucucccuccg

SEQ ID NO: 258881 - RNA, 32 nt, Homo Sapiens
cuuaccaaaaaauaaaauuacuuuguaaauag

SEQ ID NO: 258882 - RNA, 32 nt, Homo Sapiens
guguguauauuuucuugaucuauuuuuuaaua

SEQ ID NO: 258883 - RNA, 32 nt, Homo Sapiens
cccucgugccaucccucgaauccaccagcacg

SEQ ID NO: 258884 - RNA, 31 nt, Homo Sapiens
aacugaacaaauuaccuauaauggauuugau

SEQ ID NO: 258885 - RNA, 32 nt, Homo Sapiens
ccacacugggugacaucuaccuagaaaucccu

SEQ ID NO: 258886 - RNA, 32 nt, Homo Sapiens
acgacuuauaucuaugcuagcugauuucaaug

SEQ ID NO: 258887 - RNA, 32 nt, Homo Sapiens
caaugguguacaaugucuuuugcacaaacuuu

SEQ ID NO: 258888 - RNA, 32 nt, Homo Sapiens
gucauauuuaaaauucucuuugaaagaaacag

SEQ ID NO: 258889 - RNA, 32 nt, Homo Sapiens
gucuuauuuauauaaaugucuugguuuuuaca

SEQ ID NO: 258890 - RNA, 32 nt, Homo Sapiens
augcauacaaaggaaaucaugccaugauugaa

SEQ ID NO: 258891 - RNA, 32 nt, Homo Sapiens
gaugugcaugcagggagggaaguugccucuga

SEQ ID NO: 258892 - RNA, 32 nt, Homo Sapiens
gagugccccucgcgucgccccugcuuugaagg

SEQ ID NO: 258893 - RNA, 32 nt, Homo Sapiens
uuauuuaaaaauuugauauuuugcucuucaug

SEQ ID NO: 258894 - RNA, 32 nt, Homo Sapiens
aaaucuagaauuauuucacgcagaauugucac

SEQ ID NO: 258895 - RNA, 32 nt, Homo Sapiens
guacaucagccagggggcagugccaaagacgc

SEQ ID NO: 258896 - RNA, 32 nt, Homo Sapiens
ucccauagguaguuuaacaggcauuaaaauuu

SEQ ID NO: 258897 - RNA, 32 nt, Homo Sapiens
agccugucucugccucccugucuaccggacug

SEQ ID NO: 258898 - RNA, 32 nt, Homo Sapiens
ugccacggccccaccaccuccugcaguaccca

SEQ ID NO: 258899 - RNA, 32 nt, Homo Sapiens
uugacuuuucuuuuugggguuuuaguagugaa

SEQ ID NO: 258900 - RNA, 32 nt, Homo Sapiens
auaacuuaauuuucauuuuccucauucacaaa

SEQ ID NO: 258901 - RNA, 32 nt, Homo Sapiens
aaaccacuggaaacuagaaauuugagcuauug

SEQ ID NO: 258902 - RNA, 32 nt, Homo Sapiens
agguccaggucccagggcuuucccuugcaccu

SEQ ID NO: 258903 - RNA, 32 nt, Homo Sapiens
acgaggcgcuggccgggcuggcugcggccgcc

SEQ ID NO: 258904 - RNA, 32 nt, Homo Sapiens
uaaaaaaaaaagacaucgcuagugagcacgcu

SEQ ID NO: 258905 - RNA, 32 nt, Homo Sapiens
aaacaaccaauauaguguaacaaccauuuacg

SEQ ID NO: 258906 - RNA, 32 nt, Homo Sapiens
agaggaacuuccgcaaacaccugcgcaugguc

SEQ ID NO: 258907 - RNA, 32 nt, Homo Sapiens
ugccgaagaucucagccccgcggccgcgcgcu

SEQ ID NO: 258908 - RNA, 32 nt, Homo Sapiens
accuccgccucccggguucaagagauucuccu

SEQ ID NO: 258909 - RNA, 32 nt, Homo Sapiens
guuuuuucuagccagcuuaggaucucaggauu

SEQ ID NO: 258910 - RNA, 32 nt, Homo Sapiens
gcaaauuccauuuuuucccuugcgcuaaggua

SEQ ID NO: 258911 - RNA, 32 nt, Homo Sapiens
acgccgcgcugaggcccgcgggcccgucaugg

SEQ ID NO: 258912 - RNA, 32 nt, Homo Sapiens
ggagugagagagcaaguccucuguggagaaca

SEQ ID NO: 258913 - RNA, 32 nt, Homo Sapiens
gguuuugguuuggggcacuggaugucgcagcu

SEQ ID NO: 258914 - RNA, 32 nt, Homo Sapiens
uccaaguacccaggggcaucagagcugccugg

SEQ ID NO: 258915 - RNA, 32 nt, Homo Sapiens
gcuugcugucuccuaaggucacccaagcagug

SEQ ID NO: 258916 - RNA, 32 nt, Homo Sapiens
cuccccccaccuuuuuugcugugaaacugaaa

SEQ ID NO: 258917 - RNA, 32 nt, Homo Sapiens
ggcgcagaggggaggccagcccugcccucagg

SEQ ID NO: 258918 - RNA, 32 nt, Homo Sapiens
gugacauuuccuguuacccagcccaaguuuuc

SEQ ID NO: 258919 - RNA, 32 nt, Homo Sapiens
caugauuuuggauucuccaccuccccccaguc

SEQ ID NO: 258920 - RNA, 32 nt, Homo Sapiens
auaagcgggcauugcgugccucgggggaugcc

SEQ ID NO: 258921 - RNA, 32 nt, Homo Sapiens
aguuucagcugcagcuguuucccugaagccag

SEQ ID NO: 258922 - RNA, 32 nt, Homo Sapiens
aagcagcccccuccuccggauggcacaggcuc

SEQ ID NO: 258923 - RNA, 32 nt, Homo Sapiens
aagccaugaaggaaacagaggggccaaagggu

SEQ ID NO: 258924 - RNA, 32 nt, Homo Sapiens
accuuugcagggauucuuguccugcuggccac

SEQ ID NO: 258925 - RNA, 32 nt, Homo Sapiens
gguucucuuuguaucugauauaucuucuggaa

SEQ ID NO: 258926 - RNA, 32 nt, Homo Sapiens
uauugaaauauguuguuucuaaugacauuucu

SEQ ID NO: 258927 - RNA, 32 nt, Homo Sapiens
cagccaaggaccagcaucuguccgcauuucac

SEQ ID NO: 258928 - RNA, 32 nt, Homo Sapiens
accccuucuaaagauaugauuagacuucguua

SEQ ID NO: 258929 - RNA, 32 nt, Homo Sapiens
cccuuacauaaaaugacauauuuguauauaac

SEQ ID NO: 258930 - RNA, 32 nt, Homo Sapiens
ucuggagccagacaaugagauaaggggcuugu

SEQ ID NO: 258931 - RNA, 32 nt, Homo Sapiens
uuugauuuuuugcugcagacucauccuuuuua

SEQ ID NO: 258932 - RNA, 32 nt, Homo Sapiens
guuucuccaauauuaaugauuaauuuuuaaaa

SEQ ID NO: 258933 - RNA, 32 nt, Homo Sapiens
ucaagguucuuucccccucaguuuuguuguug

SEQ ID NO: 258934 - RNA, 32 nt, Homo Sapiens
ccuuuucuuuaucauucauacgacauuucugg

SEQ ID NO: 258935 - RNA, 32 nt, Homo Sapiens
ucugauggaaauguacagcagaaacucuugag

SEQ ID NO: 258936 - RNA, 32 nt, Homo Sapiens
auauccuggugccccccaccccuggaagagcc

SEQ ID NO: 258937 - RNA, 32 nt, Homo Sapiens
aggacaggugugccgccacccaagugccaaga

SEQ ID NO: 258938 - RNA, 32 nt, Homo Sapiens
agucuuuccgucucccuaaaauaaaaaccaga

SEQ ID NO: 258939 - RNA, 32 nt, Homo Sapiens
cuacacacacgcccucacgcccggcgagcccg

SEQ ID NO: 258940 - RNA, 32 nt, Homo Sapiens
ccagacuuccuccuuuccguguuucugaaggg

SEQ ID NO: 258941 - RNA, 32 nt, Homo Sapiens
aguuccauugucagcacagccuaggaggguca

SEQ ID NO: 258942 - RNA, 32 nt, Homo Sapiens
gaccuuagaauguauauagauaugaucaaguc

SEQ ID NO: 258943 - RNA, 32 nt, Homo Sapiens
augugugcgugugcacacacgcaaguaugcac

SEQ ID NO: 258944 - RNA, 32 nt, Homo Sapiens
cuggagaguggaggcaccggccaggcaggggg

SEQ ID NO: 258945 - RNA, 32 nt, Homo Sapiens
gaaccuguagcggacguggaaaaagaacgccc

SEQ ID NO: 258946 - RNA, 32 nt, Homo Sapiens
ggcuggacucgggcuuagggccugcuguggag

SEQ ID NO: 258947 - RNA, 32 nt, Homo Sapiens
auugccuauggaaagauggagaugaaccucua

SEQ ID NO: 258948 - RNA, 32 nt, Homo Sapiens
ucagggugguuuugagagagcaggguaaggaa

SEQ ID NO: 258949 - RNA, 32 nt, Homo Sapiens
aaggaagugaugggaccgcagagaugagaccc

SEQ ID NO: 258950 - RNA, 32 nt, Homo Sapiens
cccuggccaacccccuucuccagccccaucuc

SEQ ID NO: 258951 - RNA, 32 nt, Homo Sapiens
acauccgcuugaaugcuguguacacacucacc

SEQ ID NO: 258952 - RNA, 32 nt, Homo Sapiens
ugagugguuugugauuaaaagggauguucuug

SEQ ID NO: 258953 - RNA, 32 nt, Homo Sapiens
aaaacagacuuaaaaauaaauacuaugugucc

SEQ ID NO: 258954 - RNA, 31 nt, Homo Sapiens
ggaaagaacauaucauacugaacaaauguca

SEQ ID NO: 258955 - RNA, 32 nt, Homo Sapiens
uucuugauuuaaaaacaaaguuuacuaaauuc

SEQ ID NO: 258956 - RNA, 32 nt, Homo Sapiens
aggugaucuauccauccaauggaauauuauuu

SEQ ID NO: 258957 - RNA, 32 nt, Homo Sapiens
agauuguuaaucuuguauaaagcaauucaaua

SEQ ID NO: 258958 - RNA, 32 nt, Homo Sapiens
cugguuuguggucccgcucaucuguacgcagg

SEQ ID NO: 258959 - RNA, 32 nt, Homo Sapiens
ugcuuccccuucucgguccccgagggcccugg

SEQ ID NO: 258960 - RNA, 31 nt, Homo Sapiens
ggcccccaacacaccaccugccuugggaaac

SEQ ID NO: 258961 - RNA, 32 nt, Homo Sapiens
aaaauguccuuaugcuuuuagaguugcaacuu

SEQ ID NO: 258962 - RNA, 32 nt, Homo Sapiens
cagaggagccccgccccuguaagauuuccuuc

SEQ ID NO: 258963 - RNA, 32 nt, Homo Sapiens
ccauugucagccccaggcccagccccaggggu

SEQ ID NO: 258964 - RNA, 32 nt, Homo Sapiens
agggguuuccucuccauccauuuccuugcugg

SEQ ID NO: 258965 - RNA, 32 nt, Homo Sapiens
ggcucccacuccuccuucucuggaacccucuc

SEQ ID NO: 258966 - RNA, 32 nt, Homo Sapiens
gacaccgauuuccucucgccgagcggcggugc

SEQ ID NO: 258967 - RNA, 32 nt, Homo Sapiens
cuaagcugcuggccgaagaugucaccaaggcc

SEQ ID NO: 258968 - RNA, 32 nt, Homo Sapiens
ggcuggcucucguuuuccggauaacgacuaca

SEQ ID NO: 258969 - RNA, 32 nt, Homo Sapiens
gcuggucccuacaggcugaaccacauucuuua

SEQ ID NO: 258970 - RNA, 32 nt, Homo Sapiens
guggggcgcguguggggcgcguguggagcggg

SEQ ID NO: 258971 - RNA, 32 nt, Homo Sapiens
ucauucaguauuacuaauggaauagaaauuca

SEQ ID NO: 258972 - RNA, 32 nt, Homo Sapiens
ccuuggaaaaagcacgggguccugcuccaggg

SEQ ID NO: 258973 - RNA, 32 nt, Homo Sapiens
gucccugcucagccccagcagugcgguggagg

SEQ ID NO: 258974 - RNA, 32 nt, Homo Sapiens
cuuccgacgggagaggguagaccgggggagga

SEQ ID NO: 258975 - RNA, 32 nt, Homo Sapiens
cucacugcuuugcuuucaggugcuuagcugcu

SEQ ID NO: 258976 - RNA, 32 nt, Homo Sapiens
cuccugcaggccagcugcaugcucuccaggag

SEQ ID NO: 258977 - RNA, 32 nt, Homo Sapiens
caagaaacccacccuguccggaggcgggcgug

SEQ ID NO: 258978 - RNA, 32 nt, Homo Sapiens
caacugccaaccccaaagcuuccacccuucuc

SEQ ID NO: 258979 - RNA, 32 nt, Homo Sapiens
acacucggagggauauggggcuggggccaguu

SEQ ID NO: 258980 - RNA, 32 nt, Homo Sapiens
aauuugaaucuguuuucuuaguuucaaaugac

SEQ ID NO: 258981 - RNA, 32 nt, Homo Sapiens
ucuuuuggaacaugcugcacugagagaaacag

SEQ ID NO: 258982 - RNA, 32 nt, Homo Sapiens
ggguggaggagaauauguggguguggacagga

SEQ ID NO: 258983 - RNA, 32 nt, Homo Sapiens
cccggcuccgcgggcaccuugcuugcaugccu

SEQ ID NO: 258984 - RNA, 32 nt, Homo Sapiens
ucuacccgugcaggccccaggagagccgcagg

SEQ ID NO: 258985 - RNA, 32 nt, Homo Sapiens
ucaaaccccgucccccguguguccugcugugu

SEQ ID NO: 258986 - RNA, 32 nt, Homo Sapiens
cauuccuagaagaugauaauugugaaaaccuc

SEQ ID NO: 258987 - RNA, 32 nt, Homo Sapiens
gcccugaccugcccugugacuccgucauacuc

SEQ ID NO: 258988 - RNA, 32 nt, Homo Sapiens
ucgagccugcgguuccagccccgccgcgguuc

SEQ ID NO: 258989 - RNA, 32 nt, Homo Sapiens
aggcacaaagccugcugcagcuggcccugggu

SEQ ID NO: 258990 - RNA, 32 nt, Homo Sapiens
acuucauuguuauucugugacuugcuggaggu

SEQ ID NO: 258991 - RNA, 32 nt, Homo Sapiens
ucuucacuuuauuuuguuguuuuguuuuguuu

SEQ ID NO: 258992 - RNA, 32 nt, Homo Sapiens
gccagucauccccgccgccgcggagccgcugc

SEQ ID NO: 258993 - RNA, 32 nt, Homo Sapiens
ccuagcggucucccggccccugccgcccugcc

SEQ ID NO: 258994 - RNA, 32 nt, Homo Sapiens
cagcaucaaaugccgccucuuccuaauguccu

SEQ ID NO: 258995 - RNA, 32 nt, Homo Sapiens
ccaugaaguauuacuguuaacauauguucgga

SEQ ID NO: 258996 - RNA, 32 nt, Homo Sapiens
cuguguaauuuaauagauuuguugacuagugc

SEQ ID NO: 258997 - RNA, 32 nt, Homo Sapiens
caccugacuaagaaauucugacugcuaguugc

SEQ ID NO: 258998 - RNA, 32 nt, Homo Sapiens
uaaggcuggugggacaguuuuggaccuggaau

SEQ ID NO: 258999 - RNA, 32 nt, Homo Sapiens
uagcuuuucuuacuguuagugaacuuguuuua

SEQ ID NO: 259000 - RNA, 32 nt, Homo Sapiens
gaguagacagaugucagacaaaaaagacgaga

SEQ ID NO: 259001 - RNA, 32 nt, Homo Sapiens
aacgcugugggagagggaagaggaggcugggc

SEQ ID NO: 259002 - RNA, 32 nt, Homo Sapiens
ugcaagcccucccaccucccagggcuccuugc

SEQ ID NO: 259003 - RNA, 32 nt, Homo Sapiens
aguggcuguuuuuaugccccagccccgcaagu

SEQ ID NO: 259004 - RNA, 32 nt, Homo Sapiens
uucuauuuaaaagggaaauauuucuacaugug

SEQ ID NO: 259005 - RNA, 32 nt, Homo Sapiens
gaggggggaagagggagaaggaucauucaaaa

SEQ ID NO: 259006 - RNA, 32 nt, Homo Sapiens
aauaaaacugggcugaauuugcugcugucucc

SEQ ID NO: 259007 - RNA, 32 nt, Homo Sapiens
gcuccauguauauauucuucugauggccagca

SEQ ID NO: 259008 - RNA, 32 nt, Homo Sapiens
ggggcgagaccuacgacgccggcgagcagugg

SEQ ID NO: 259009 - RNA, 32 nt, Homo Sapiens
ggcuuccgcccgggugagcgcggggcugcugg

SEQ ID NO: 259010 - RNA, 32 nt, Homo Sapiens
gcgggucgcggaggaggcagggggaaggugcc

SEQ ID NO: 259011 - RNA, 32 nt, Homo Sapiens
ugcuguggaccucuccuccuucuccuugaccu

SEQ ID NO: 259012 - RNA, 32 nt, Homo Sapiens
cgcuagcugggcuggcauucccucccaaccug

SEQ ID NO: 259013 - RNA, 32 nt, Homo Sapiens
aacuuuugucaaacccaauagguuugggacac

SEQ ID NO: 259014 - RNA, 32 nt, Homo Sapiens
ccugcuuuagagcuaggguggggucuggucac

SEQ ID NO: 259015 - RNA, 32 nt, Homo Sapiens
gcaagggggaggagggaaaucugugcauguua

SEQ ID NO: 259016 - RNA, 32 nt, Homo Sapiens
caggacaaggaccacgggaggcccaggugcgg

SEQ ID NO: 259017 - RNA, 32 nt, Homo Sapiens
cugcauuguacacaggcagcucugcagggaag

SEQ ID NO: 259018 - RNA, 32 nt, Homo Sapiens
ucagccucccgaguagggaggaccacaggugu

SEQ ID NO: 259019 - RNA, 32 nt, Homo Sapiens
acuccugccccgaggguccggacgcgccccag

SEQ ID NO: 259020 - RNA, 32 nt, Homo Sapiens
aguucacuuuauuuaacaauuuucaugucccc

SEQ ID NO: 259021 - RNA, 32 nt, Homo Sapiens
cagauguauuauaguuuuuuuauuugaaacau

SEQ ID NO: 259022 - RNA, 32 nt, Homo Sapiens
guuucuuguguggcauuguugcucuuggguau

SEQ ID NO: 259023 - RNA, 32 nt, Homo Sapiens
aacagauaguaaguaaauuuggugguuuuuuc

SEQ ID NO: 259024 - RNA, 32 nt, Homo Sapiens
guuuucaaugaagaugucacuuugaaaauaau

SEQ ID NO: 259025 - RNA, 32 nt, Homo Sapiens
guuauggagagccaagaucgcaccacugcacc

SEQ ID NO: 259026 - RNA, 32 nt, Homo Sapiens
gcggccccggaccgcaggccggacuacacuuc

SEQ ID NO: 259027 - RNA, 32 nt, Homo Sapiens
acagaaauuccuaaagaagagaaggacccugg

SEQ ID NO: 259028 - RNA, 32 nt, Homo Sapiens
uauaugaugaaauucugaauuaaugaaacugg

SEQ ID NO: 259029 - RNA, 32 nt, Homo Sapiens
ggagaauguacaaagagcacugugagcacuga

SEQ ID NO: 259030 - RNA, 32 nt, Homo Sapiens
cucugcgcccacaaaauacaccgacgaugccc

SEQ ID NO: 259031 - RNA, 32 nt, Homo Sapiens
uguauccugcuuccuucuuuuaaugaucacuu

SEQ ID NO: 259032 - RNA, 32 nt, Homo Sapiens
cuuaaguaaaauugguguuuuuguuauuuuua

SEQ ID NO: 259033 - RNA, 32 nt, Homo Sapiens
ucccuggaagcagacucuucagcaccagucaa

SEQ ID NO: 259034 - RNA, 32 nt, Homo Sapiens
gugaaugagauguuuuaggagcuauaaauaaa

SEQ ID NO: 259035 - RNA, 32 nt, Homo Sapiens
gaccccaggaccaggcuacuucuccccuccuc

SEQ ID NO: 259036 - RNA, 32 nt, Homo Sapiens
guuacuugaaagaauguaguaauuuuaggaag

SEQ ID NO: 259037 - RNA, 32 nt, Homo Sapiens
ucucccagacuuguuuccugugcccaucaucu

SEQ ID NO: 259038 - RNA, 32 nt, Homo Sapiens
aaaagccuaaccccaaggccugaaccuucaau

SEQ ID NO: 259039 - RNA, 32 nt, Homo Sapiens
uuucgccccucgcguccggaguccccguggcc

SEQ ID NO: 259040 - RNA, 29 nt, Homo Sapiens
gcgagaaggcuuugugauuuucuacauga

SEQ ID NO: 259041 - RNA, 32 nt, Homo Sapiens
uugggcgagcgcgagccgcggcugccgggcgc

SEQ ID NO: 259042 - RNA, 32 nt, Homo Sapiens
aaaaauacuggaauuauuaaaacguauaguau

SEQ ID NO: 259043 - RNA, 32 nt, Homo Sapiens
uggugucaaggauuuuacaguugaccuugaag

SEQ ID NO: 259044 - RNA, 32 nt, Homo Sapiens
ggccaugcgggugcucaccacccccaugcaca

SEQ ID NO: 259045 - RNA, 32 nt, Homo Sapiens
gguuuggguucaauuccuucaauuuuuaaaaa

SEQ ID NO: 259046 - RNA, 32 nt, Homo Sapiens
uauuuaacaacaggcucucuggagcgguacua

SEQ ID NO: 259047 - RNA, 32 nt, Homo Sapiens
guggugguggguggcgguggcggggccucacg

SEQ ID NO: 259048 - RNA, 32 nt, Homo Sapiens
ugagaagccaaggacaccgagucagucauggc

SEQ ID NO: 259049 - RNA, 32 nt, Homo Sapiens
gaacugcuuucuuauagcacaaaacuacuuac

SEQ ID NO: 259050 - RNA, 32 nt, Homo Sapiens
ugacagugcucuaguugcuggaucuaauggcc

SEQ ID NO: 259051 - RNA, 32 nt, Homo Sapiens
uuuuguaugccacuguuuuuugaaaugugaaa

SEQ ID NO: 259052 - RNA, 32 nt, Homo Sapiens
agauccagagagguagcaaaaaucacaggggu

SEQ ID NO: 259053 - RNA, 32 nt, Homo Sapiens
caaggaugugaaauaaaacuguaaauuugcau

SEQ ID NO: 259054 - RNA, 32 nt, Homo Sapiens
guucucaucauucugcugaggaacugaaagcg

SEQ ID NO: 259055 - RNA, 32 nt, Homo Sapiens
cagaagaacuguaauauuauuuuaaaaugcga

SEQ ID NO: 259056 - RNA, 32 nt, Homo Sapiens
ccaguccgcccauuucucacccuuugguuaac

SEQ ID NO: 259057 - RNA, 32 nt, Homo Sapiens
cugccccugccagcucuggcacugcccccucc

SEQ ID NO: 259058 - RNA, 32 nt, Homo Sapiens
agggccaggcagggucgcgcgcauggccuggg

SEQ ID NO: 259059 - RNA, 32 nt, Homo Sapiens
ggacgcucgcgggucucggaacgcaucccgcc

SEQ ID NO: 259060 - RNA, 32 nt, Homo Sapiens
ggcuggcauaugcuaauuugggggugguaacc

SEQ ID NO: 259061 - RNA, 32 nt, Homo Sapiens
gcuuuuaacgaaaaucacaacuucaggagaca

SEQ ID NO: 259062 - RNA, 32 nt, Homo Sapiens
uugauuccauucucuccaucccuuccauccca

SEQ ID NO: 259063 - RNA, 32 nt, Homo Sapiens
gaauaggugcaaacaaacaagcuuacuuccau

SEQ ID NO: 259064 - RNA, 32 nt, Homo Sapiens
ggucaugaaaacaguuacuggaauuguugugc

SEQ ID NO: 259065 - RNA, 32 nt, Homo Sapiens
aggccguggguucagguguggcagaagcuugc

SEQ ID NO: 259066 - RNA, 32 nt, Homo Sapiens
gaaaucuggaaacaugauacaaucugcaaaug

SEQ ID NO: 259067 - RNA, 32 nt, Homo Sapiens
agcgguugaaggcgaagcugcagaugccauuc

SEQ ID NO: 259068 - RNA, 32 nt, Homo Sapiens
agcaugcuuucuuuaagacgcaucauaaaugg

SEQ ID NO: 259069 - RNA, 32 nt, Homo Sapiens
gaacuuuugaaaaacuuuuuauacucuaaagu

SEQ ID NO: 259070 - RNA, 32 nt, Homo Sapiens
acuugugcagauaguauuucugauugauguca

SEQ ID NO: 259071 - RNA, 32 nt, Homo Sapiens
uuucgccgucuucuugucuacucuccagaacg

SEQ ID NO: 259072 - RNA, 32 nt, Homo Sapiens
acagccauggccugggggccaagccucacccu

SEQ ID NO: 259073 - RNA, 32 nt, Homo Sapiens
gagcauuuaaggaaacuagacaaguaaaauua

SEQ ID NO: 259074 - RNA, 32 nt, Homo Sapiens
ccucucccaucccccuccucccauccgcuagc

SEQ ID NO: 259075 - RNA, 32 nt, Homo Sapiens
ugauuccaaauauguaugcaccucaaggucau

SEQ ID NO: 259076 - RNA, 32 nt, Homo Sapiens
agauggaaaaacugaggcuuagagauagacaa

SEQ ID NO: 259077 - RNA, 29 nt, Homo Sapiens
gagaccucgggagugaggacgcaggggua

SEQ ID NO: 259078 - RNA, 32 nt, Homo Sapiens
cgacuuuuccuuccuccuuccuccccggauug

SEQ ID NO: 259079 - RNA, 32 nt, Homo Sapiens
cccacccgucccugggcuccaggccgccgccc

SEQ ID NO: 259080 - RNA, 32 nt, Homo Sapiens
ggucgcccugguuccuggcagcuccuggugcc

SEQ ID NO: 259081 - RNA, 32 nt, Homo Sapiens
gaagagugagagaucaaagaaagaauagaacg

SEQ ID NO: 259082 - RNA, 32 nt, Homo Sapiens
accucuuugcuguuuucuuccuccucuauaaa

SEQ ID NO: 259083 - RNA, 32 nt, Homo Sapiens
agcagggcugguuuuccaacccagccucugag

SEQ ID NO: 259084 - RNA, 32 nt, Homo Sapiens
ucuugucaaccuggaucuuacacuucaucuga

SEQ ID NO: 259085 - RNA, 32 nt, Homo Sapiens
aucuuuuuguuuggccaaaauguaauacauuc

SEQ ID NO: 259086 - RNA, 32 nt, Homo Sapiens
ggaaacucaagccccagugcaaacggccuuga

SEQ ID NO: 259087 - RNA, 32 nt, Homo Sapiens
cuggcccuuuaaacgccgcgcgugccucggcg

SEQ ID NO: 259088 - RNA, 32 nt, Homo Sapiens
cauucuugacagagcugaauacagugaucacg

SEQ ID NO: 259089 - RNA, 32 nt, Homo Sapiens
auaaaccuauucacaauuccaaaagggccugg

SEQ ID NO: 259090 - RNA, 32 nt, Homo Sapiens
cccucuccugccacccuuauaccuguucagcc

SEQ ID NO: 259091 - RNA, 32 nt, Homo Sapiens
ugcugugaagaugaaaauaaaaauggagagaa

SEQ ID NO: 259092 - RNA, 32 nt, Homo Sapiens
cggcagcggcgguggcgcuggcugagcagagg

SEQ ID NO: 259093 - RNA, 32 nt, Homo Sapiens
ggaggcagggagccaccuccucagcuucccug

SEQ ID NO: 259094 - RNA, 32 nt, Homo Sapiens
ccugagguguauaaagacauuuagguuaguua

SEQ ID NO: 259095 - RNA, 32 nt, Homo Sapiens
gcaucugccgccgcgccgccgccacccuccca

SEQ ID NO: 259096 - RNA, 32 nt, Homo Sapiens
ugcucuagugucuuauuaguuaaacuuuguaa

SEQ ID NO: 259097 - RNA, 30 nt, Homo Sapiens
aagaaaacugcugcugcaggggguccugaa

SEQ ID NO: 259098 - RNA, 32 nt, Homo Sapiens
aaucacucuucauguguucagaauuacuguuu

SEQ ID NO: 259099 - RNA, 32 nt, Homo Sapiens
aucaaucacagcacuauuuccuauuaagccca

SEQ ID NO: 259100 - RNA, 32 nt, Homo Sapiens
uugggagggacaggggcggggacgaggcucgg

SEQ ID NO: 259101 - RNA, 32 nt, Homo Sapiens
cuguccaugucccacaccacccugacaccuga

SEQ ID NO: 259102 - RNA, 32 nt, Homo Sapiens
caucuggaacauucuccacaagagggaggacu

SEQ ID NO: 259103 - RNA, 32 nt, Homo Sapiens
agucaauccuucacccacgugguuagaggcug

SEQ ID NO: 259104 - RNA, 32 nt, Homo Sapiens
gguugugugcacgcacgcacacacucaugcac

SEQ ID NO: 259105 - RNA, 32 nt, Homo Sapiens
cgggaggagcgggguccgcgcggcggacgagg

SEQ ID NO: 259106 - RNA, 32 nt, Homo Sapiens
cuuuucccucaauccuuuuuuauuuuuaaaaa

SEQ ID NO: 259107 - RNA, 32 nt, Homo Sapiens
gcucaggccaaagaccucccaagcuguaugua

SEQ ID NO: 259108 - RNA, 32 nt, Homo Sapiens
augacugcagauguaaucgagcuuaaagggaa

SEQ ID NO: 259109 - RNA, 32 nt, Homo Sapiens
cugauuuuuuuuucuuuuuuuuuuuuuuuuga

SEQ ID NO: 259110 - RNA, 32 nt, Homo Sapiens
aguaucuuucccuuccuucucuacccucaccu

SEQ ID NO: 259111 - RNA, 32 nt, Homo Sapiens
ccaaagaaaaagaagggaaccacaguggauau

SEQ ID NO: 259112 - RNA, 32 nt, Homo Sapiens
gugauuucaaagcugggcucagcucauguuuc

SEQ ID NO: 259113 - RNA, 32 nt, Homo Sapiens
cccaauguuagaaagaagaaaagggagacgga

SEQ ID NO: 259114 - RNA, 32 nt, Homo Sapiens
acucggcgacccugcccucccgacccucaugu

SEQ ID NO: 259115 - RNA, 32 nt, Homo Sapiens
aaccugaacucagaccacuugcauuagaacca

SEQ ID NO: 259116 - RNA, 32 nt, Homo Sapiens
aauacugaagaaaaaauuggcauugacaucga

SEQ ID NO: 259117 - RNA, 32 nt, Homo Sapiens
ccgccaccgccuccggggucagcccucucucu

SEQ ID NO: 259118 - RNA, 32 nt, Homo Sapiens
uggcuaauuuuuuaaacuuuuuguagagaugg

SEQ ID NO: 259119 - RNA, 32 nt, Homo Sapiens
ggcuggcaagcagucgggacgggagcgcgggc

SEQ ID NO: 259120 - RNA, 32 nt, Homo Sapiens
uuuccugggucacaucucuggaaaauagaugu

SEQ ID NO: 259121 - RNA, 32 nt, Homo Sapiens
uaauucauacaggaacaaaacccuacaauugu

SEQ ID NO: 259122 - RNA, 32 nt, Homo Sapiens
gugugcacccucgugggguuaaggcgagcugu

SEQ ID NO: 259123 - RNA, 29 nt, Homo Sapiens
gaugaaguugacaaucaugauguaaagcc

SEQ ID NO: 259124 - RNA, 32 nt, Homo Sapiens
aggcuuugccccacacaugguccucacucaua

SEQ ID NO: 259125 - RNA, 32 nt, Homo Sapiens
uauaaauuaaaaauccaacaaacaaauguguu

SEQ ID NO: 259126 - RNA, 32 nt, Homo Sapiens
acuauaucaagaaaaugaaaugacacuccaca

SEQ ID NO: 259127 - RNA, 32 nt, Homo Sapiens
cuggcggucaugaaggcugugugcagugcaag

SEQ ID NO: 259128 - RNA, 32 nt, Homo Sapiens
agagucuagcauuguuuuaaaggucugaauag

SEQ ID NO: 259129 - RNA, 32 nt, Homo Sapiens
cugagccgguucgggcucagugcugcgggcgc

SEQ ID NO: 259130 - RNA, 32 nt, Homo Sapiens
cguguguuuugaaaaaggcuuaaugaagagaa

SEQ ID NO: 259131 - RNA, 32 nt, Homo Sapiens
uguggagggcucugccuaugggggguggccug

SEQ ID NO: 259132 - RNA, 32 nt, Homo Sapiens
cuccguuuuugaccaaagacaccugaacauuc

SEQ ID NO: 259133 - RNA, 32 nt, Homo Sapiens
uuuaaaaagguuucuuuuuucauuauucugca

SEQ ID NO: 259134 - RNA, 32 nt, Homo Sapiens
agcaauaucagugauuccauggauuuuguacu

SEQ ID NO: 259135 - RNA, 32 nt, Homo Sapiens
augcgccacuaagggaggagaccacuccucau

SEQ ID NO: 259136 - RNA, 30 nt, Homo Sapiens
cguuggggagguggcucaaauggagccagc

SEQ ID NO: 259137 - RNA, 32 nt, Homo Sapiens
agugcccugagccagggucuccagaaagcccc

SEQ ID NO: 259138 - RNA, 31 nt, Homo Sapiens
accaacacagaggagagaaaacaaaaauagc

SEQ ID NO: 259139 - RNA, 28 nt, Homo Sapiens
guuaaauaaguuagacauuugaaagaaa

SEQ ID NO: 259140 - RNA, 32 nt, Homo Sapiens
ucuggggcuuccgccuccggcgcgcgauuauu

SEQ ID NO: 259141 - RNA, 32 nt, Homo Sapiens
uggugccugucacucagcauucccaugccuga

SEQ ID NO: 259142 - RNA, 32 nt, Homo Sapiens
agugagggccugcagccggccggccagggcag

SEQ ID NO: 259143 - RNA, 32 nt, Homo Sapiens
ccauuugugcacaagaaaauggugaauucagg

SEQ ID NO: 259144 - RNA, 31 nt, Homo Sapiens
cucagaccaaacaugaaggucuguuacuaau

SEQ ID NO: 259145 - RNA, 32 nt, Homo Sapiens
uaugagaagagaaaacaaaauaaaucaacuuu

SEQ ID NO: 259146 - RNA, 32 nt, Homo Sapiens
gcgccugguagugugguguguccacagugaag

SEQ ID NO: 259147 - RNA, 32 nt, Homo Sapiens
gugaaaaugaauggaaguggcuggaugggaca

SEQ ID NO: 259148 - RNA, 32 nt, Homo Sapiens
cccgcccucggcgcccccgccccuccaggaag

SEQ ID NO: 259149 - RNA, 32 nt, Homo Sapiens
aagaaagccguacugucuauguugugauccuu

SEQ ID NO: 259150 - RNA, 32 nt, Homo Sapiens
acccgggcgggggcagggucuggcgggcucuc

SEQ ID NO: 259151 - RNA, 32 nt, Homo Sapiens
agccaugggaccagcuuugaagaugacuugac

SEQ ID NO: 259152 - RNA, 32 nt, Homo Sapiens
accucaaagcugaaguuuuucuuccuauuaua

SEQ ID NO: 259153 - RNA, 32 nt, Homo Sapiens
auggcuauuucugacguauagccaguuuucuu

SEQ ID NO: 259154 - RNA, 32 nt, Homo Sapiens
ucagcagcuccucagagcuguccagcagccac

SEQ ID NO: 259155 - RNA, 32 nt, Homo Sapiens
caaauuuagacucacacauauaaagaaguuua

SEQ ID NO: 259156 - RNA, 32 nt, Homo Sapiens
uaucagagauuuuuauauuuauacaaaagauu

SEQ ID NO: 259157 - RNA, 32 nt, Homo Sapiens
gcuaccucauggugcaauaacacacacacgcu

SEQ ID NO: 259158 - RNA, 32 nt, Homo Sapiens
auguaagagaauccagcagagauggacuggag

SEQ ID NO: 259159 - RNA, 32 nt, Homo Sapiens
cagcaugcuaaugggguacaccauugacuuca

SEQ ID NO: 259160 - RNA, 32 nt, Homo Sapiens
auucagcuuuuguaaauuaucaagcuucaaaa

SEQ ID NO: 259161 - RNA, 32 nt, Homo Sapiens
gcugaucuucccaggacccucaucuccguggc

SEQ ID NO: 259162 - RNA, 32 nt, Homo Sapiens
guaugugcuguaauuuaauuuaggacacauuu

SEQ ID NO: 259163 - RNA, 32 nt, Homo Sapiens
caagugacugaagcagaaagaaaaauuuuuga

SEQ ID NO: 259164 - RNA, 32 nt, Homo Sapiens
ggcaaggcugggccggacucggggcucccgag

SEQ ID NO: 259165 - RNA, 32 nt, Homo Sapiens
aaauguaugcugagguuguuaagauuuacagu

SEQ ID NO: 259166 - RNA, 32 nt, Homo Sapiens
ucuacucccugcaagccucagagcagccaagu

SEQ ID NO: 259167 - RNA, 32 nt, Homo Sapiens
uacaugaggucuuuauuauggcggcaagaugg

SEQ ID NO: 259168 - RNA, 32 nt, Homo Sapiens
ggccugcugccaccccacccucaccaacagau

SEQ ID NO: 259169 - RNA, 32 nt, Homo Sapiens
gccggggcucacgguguuugacccgucggucg

SEQ ID NO: 259170 - RNA, 32 nt, Homo Sapiens
auuuuuuccauuaacaaacaaacaagucagug

SEQ ID NO: 259171 - RNA, 32 nt, Homo Sapiens
guccuauuaauuaauuauuauuucaugucauu

SEQ ID NO: 259172 - RNA, 32 nt, Homo Sapiens
aucaaauaagauacaugauauugaaagaauaa

SEQ ID NO: 259173 - RNA, 32 nt, Homo Sapiens
agacuguacucuuauagccaucugaaauacgu

SEQ ID NO: 259174 - RNA, 32 nt, Homo Sapiens
aaauauuaauauauuucauuacugaaugcuaa

SEQ ID NO: 259175 - RNA, 32 nt, Homo Sapiens
cagaugaucccgguuggaauccaucucuggca

SEQ ID NO: 259176 - RNA, 32 nt, Homo Sapiens
gcguccucuccgggcccagcucuucuuccugg

SEQ ID NO: 259177 - RNA, 32 nt, Homo Sapiens
guuguuaugugguuuucuuuuaaaaagcuccu

SEQ ID NO: 259178 - RNA, 27 nt, Homo Sapiens
acugaagccuucuucugccacuucugc

SEQ ID NO: 259179 - RNA, 32 nt, Homo Sapiens
gaugcccaguuaaguuugaauuucagauagaa

SEQ ID NO: 259180 - RNA, 32 nt, Homo Sapiens
gaaggguauguggcgagacagagcccugcacc

SEQ ID NO: 259181 - RNA, 32 nt, Homo Sapiens
ggggagggcuuucacgcccacccacccccugg

SEQ ID NO: 259182 - RNA, 32 nt, Homo Sapiens
gggccccgcccgcucccaguccccuuccccuu

SEQ ID NO: 259183 - RNA, 32 nt, Homo Sapiens
uccucauaggcucccuggagcucuguccugga

SEQ ID NO: 259184 - RNA, 32 nt, Homo Sapiens
gaaccuguuguuaacuuaauggcugccucccu

SEQ ID NO: 259185 - RNA, 32 nt, Homo Sapiens
acugcccccgguugccugccugggccccaugu

SEQ ID NO: 259186 - RNA, 32 nt, Homo Sapiens
cccgccuggccuggcccuccccaggcggcuca

SEQ ID NO: 259187 - RNA, 32 nt, Homo Sapiens
gugggcgggagccgcgaucugaguagccagcg

SEQ ID NO: 259188 - RNA, 28 nt, Homo Sapiens
aacuuuggccggccgccgggcgacacca

SEQ ID NO: 259189 - RNA, 32 nt, Homo Sapiens
acaagccagcagcagcagaacaguaauuacac

SEQ ID NO: 259190 - RNA, 32 nt, Homo Sapiens
agacggaucggcagggcggggcggaacgguga

SEQ ID NO: 259191 - RNA, 32 nt, Homo Sapiens
ugaauagucuuguucuuuuaguagcaaugaaa

SEQ ID NO: 259192 - RNA, 32 nt, Homo Sapiens
acagcaccuaguauaauggucuacacauaagg

SEQ ID NO: 259193 - RNA, 32 nt, Homo Sapiens
gcaccauuuaauccaacaguuugugaugcucu

SEQ ID NO: 259194 - RNA, 32 nt, Homo Sapiens
ccugaauauuccagguaagaaaauauaaaaug

SEQ ID NO: 259195 - RNA, 32 nt, Homo Sapiens
cuuacugauaaggacgcucgagacuguauuuc

SEQ ID NO: 259196 - RNA, 32 nt, Homo Sapiens
ccuccucacccuaucacccauggaucguaaug

SEQ ID NO: 259197 - RNA, 32 nt, Homo Sapiens
ugcucaccacccaagaaccucaggacagaagc

SEQ ID NO: 259198 - RNA, 32 nt, Homo Sapiens
uucuuuaacaauaaauggaauugguauacuaa

SEQ ID NO: 259199 - RNA, 32 nt, Homo Sapiens
cauggugguuugcugcacccaccaacccauca

SEQ ID NO: 259200 - RNA, 32 nt, Homo Sapiens
uucucucccugcugucagcagugucucuggca

SEQ ID NO: 259201 - RNA, 32 nt, Homo Sapiens
cacccaucugaagugaaaccagcaaccauuua

SEQ ID NO: 259202 - RNA, 32 nt, Homo Sapiens
uuuccgccgugggcugcuggguuccgugaugc

SEQ ID NO: 259203 - RNA, 32 nt, Homo Sapiens
uccccaggaggagacccuccccugccuccgag

SEQ ID NO: 259204 - RNA, 32 nt, Homo Sapiens
ccaugucccuuuguuggauacauauuacagaa

SEQ ID NO: 259205 - RNA, 32 nt, Homo Sapiens
accuguuauaugucauuuuuuauuacucauca

SEQ ID NO: 259206 - RNA, 32 nt, Homo Sapiens
ugaacugaaaauauguauaaaaucuagcaauu

SEQ ID NO: 259207 - RNA, 32 nt, Homo Sapiens
uugguuaaaaaauaaacuaauaaauaagugaa

SEQ ID NO: 259208 - RNA, 32 nt, Homo Sapiens
ugagaggccuggcccgcuaaggugaaaagggg

SEQ ID NO: 259209 - RNA, 32 nt, Homo Sapiens
cacagccggcccagcgggagccaggucagggc

SEQ ID NO: 259210 - RNA, 32 nt, Homo Sapiens
agcauuucccucuuuuucuccucaucggccag

SEQ ID NO: 259211 - RNA, 32 nt, Homo Sapiens
cagcuccaguguuuuuaagagaauguuucuua

SEQ ID NO: 259212 - RNA, 32 nt, Homo Sapiens
ccccgggaagggggugucuguuugccuccaga

SEQ ID NO: 259213 - RNA, 32 nt, Homo Sapiens
acggaggcggugaagugccaucuucggcuagg

SEQ ID NO: 259214 - RNA, 32 nt, Homo Sapiens
ggcgccggccccagcuccucugccgcugccgc

SEQ ID NO: 259215 - RNA, 32 nt, Homo Sapiens
uuuuauguuuuuguauuauuccauaauuagua

SEQ ID NO: 259216 - RNA, 32 nt, Homo Sapiens
agaacaaaaaauaccauggcaaaaccuauaug

SEQ ID NO: 259217 - RNA, 27 nt, Homo Sapiens
ccauucuccugcuucagccucccaagu

SEQ ID NO: 259218 - RNA, 32 nt, Homo Sapiens
ggggguagaacagaaccaaauucacagcuggu

SEQ ID NO: 259219 - RNA, 32 nt, Homo Sapiens
gccuccccguccugcuggcugagggccugggc

SEQ ID NO: 259220 - RNA, 32 nt, Homo Sapiens
uggcucuuuagagauuugaagacagugauccu

SEQ ID NO: 259221 - RNA, 32 nt, Homo Sapiens
ccaaagaacugggaugaaagcagaugugagag

SEQ ID NO: 259222 - RNA, 32 nt, Homo Sapiens
aagugcauagggaauauuuuuacaaaaacgga

SEQ ID NO: 259223 - RNA, 32 nt, Homo Sapiens
cgccuugcggccuggaaccccuggcaauuucc

SEQ ID NO: 259224 - RNA, 32 nt, Homo Sapiens
ggugccauccccacccauagggcuggcucaca

SEQ ID NO: 259225 - RNA, 32 nt, Homo Sapiens
uugcauuccuggccccuaucucuucuuccaug

SEQ ID NO: 259226 - RNA, 32 nt, Homo Sapiens
caggccuggggagggaggggagcccccgacgc

SEQ ID NO: 259227 - RNA, 32 nt, Homo Sapiens
ggagagguuugcuauugagauguaacagugga

SEQ ID NO: 259228 - RNA, 32 nt, Homo Sapiens
cccgaggacaacauggcaagaaggagccuuug

SEQ ID NO: 259229 - RNA, 32 nt, Homo Sapiens
gagucaucccccaaaaagacagagggggagcc

SEQ ID NO: 259230 - RNA, 32 nt, Homo Sapiens
aaauccgcuuaaucucuuccaguguccguguu

SEQ ID NO: 259231 - RNA, 31 nt, Homo Sapiens
ucucuuuagucuugaaggauggauacuggag

SEQ ID NO: 259232 - RNA, 32 nt, Homo Sapiens
gauuuccacuuucaauuuuuaaaauuaauuuu

SEQ ID NO: 259233 - RNA, 32 nt, Homo Sapiens
ggcucacgccuacaaucucagcacguugggag

SEQ ID NO: 259234 - RNA, 32 nt, Homo Sapiens
gguggcacgggagcaggcuaggcggggugcau

SEQ ID NO: 259235 - RNA, 32 nt, Homo Sapiens
gcggcggggcgggaagccauggagccgcgggc

SEQ ID NO: 259236 - RNA, 32 nt, Homo Sapiens
acuuuauccaacauacaaacuuucccaugcag

SEQ ID NO: 259237 - RNA, 32 nt, Homo Sapiens
uucuucaaauuuacaaggguucauuuuggaaa

SEQ ID NO: 259238 - RNA, 32 nt, Homo Sapiens
acuuuagguguuuugacaccaaaagaaaacua

SEQ ID NO: 259239 - RNA, 32 nt, Homo Sapiens
ccuaugucaacaguauaaguuaccauuuacuc

SEQ ID NO: 259240 - RNA, 32 nt, Homo Sapiens
uguguaugaagauguugcacauuaagucucag

SEQ ID NO: 259241 - RNA, 32 nt, Homo Sapiens
gccccgcgcccccggcccgcccgccccggccc

SEQ ID NO: 259242 - RNA, 32 nt, Homo Sapiens
agcgccgggggaggagaaaaccccaagugccu

SEQ ID NO: 259243 - RNA, 32 nt, Homo Sapiens
augugauggagcaaggcaugucugcacagggc

SEQ ID NO: 259244 - RNA, 32 nt, Homo Sapiens
acggugguagcugugcagcugcugcugaucaa

SEQ ID NO: 259245 - RNA, 32 nt, Homo Sapiens
aguuugguguugcucucauucugggugaagau

SEQ ID NO: 259246 - RNA, 32 nt, Homo Sapiens
gcagcgcugccgccgcgcgggggucgaucgca

SEQ ID NO: 259247 - RNA, 32 nt, Homo Sapiens
gguugaguugguuaagcaaagaguuauccugc

SEQ ID NO: 259248 - RNA, 32 nt, Homo Sapiens
gugacagggaugacaggcugcugggguggucc

SEQ ID NO: 259249 - RNA, 29 nt, Homo Sapiens
aaaauuucguguuucuuagugauuuuaaa

SEQ ID NO: 259250 - RNA, 32 nt, Homo Sapiens
uugucaauguacuggcugaggauucuaucuca

SEQ ID NO: 259251 - RNA, 32 nt, Homo Sapiens
cggccucuggucaucccuccccacccucucuc

SEQ ID NO: 259252 - RNA, 32 nt, Homo Sapiens
ucuauuuuuuuuucuuuuuaaacugguucacu

SEQ ID NO: 259253 - RNA, 32 nt, Homo Sapiens
cucccagcugccacgcucuaucauauggagcg

SEQ ID NO: 259254 - RNA, 32 nt, Homo Sapiens
gguugguguggggcugugcugcuggagcacca

SEQ ID NO: 259255 - RNA, 32 nt, Homo Sapiens
cagucuuugcugucacuucuuuuggcuugugc

SEQ ID NO: 259256 - RNA, 32 nt, Homo Sapiens
caguuugaugaaaucuaauuuuuauuuuuuau

SEQ ID NO: 259257 - RNA, 32 nt, Homo Sapiens
uccgcggacacucccacacguguccccgucug

SEQ ID NO: 259258 - RNA, 32 nt, Homo Sapiens
aaauguaauuuauuuuaacauuuuuacaauaa

SEQ ID NO: 259259 - RNA, 32 nt, Homo Sapiens
gugugcaggagccgcagggccgugugggacga

SEQ ID NO: 259260 - RNA, 32 nt, Homo Sapiens
uguuaagaaagaucugauuuuucaaauggcgc

SEQ ID NO: 259261 - RNA, 32 nt, Homo Sapiens
gggggccaagacccuccccuggugggacguug

SEQ ID NO: 259262 - RNA, 32 nt, Homo Sapiens
agaggaggccuuuggguuuuauuggucaaauc

SEQ ID NO: 259263 - RNA, 32 nt, Homo Sapiens
ggauggcagucucaugcagauuuuuuaaaaga

SEQ ID NO: 259264 - RNA, 32 nt, Homo Sapiens
uauaucuguaauuuaaagauuacugcaaauau

SEQ ID NO: 259265 - RNA, 32 nt, Homo Sapiens
ccaccagccuuggaggugaacaagcuaguaac

SEQ ID NO: 259266 - RNA, 32 nt, Homo Sapiens
uuugggugucugcugagcaagcacgugaauga

SEQ ID NO: 259267 - RNA, 32 nt, Homo Sapiens
aucaccaaaaaugucauaacacauaaggccuc

SEQ ID NO: 259268 - RNA, 32 nt, Homo Sapiens
gguuggacccccagccccucuggacgaucacg

SEQ ID NO: 259269 - RNA, 30 nt, Homo Sapiens
gggcagcuggacugcugcuguucaggagcc

SEQ ID NO: 259270 - RNA, 30 nt, Homo Sapiens
ugccaggauaucugcaucaagaguacugua

SEQ ID NO: 259271 - RNA, 32 nt, Homo Sapiens
cucucaggccccagucgccagcucagauuccc

SEQ ID NO: 259272 - RNA, 32 nt, Homo Sapiens
aaaaucuaugucaucauugucaucaucaaaau

SEQ ID NO: 259273 - RNA, 32 nt, Homo Sapiens
uauccucucaacuagauuguaagcacuuggag

SEQ ID NO: 259274 - RNA, 32 nt, Homo Sapiens
cuggcuccucaaugacauaccauuuucaagaa

SEQ ID NO: 259275 - RNA, 32 nt, Homo Sapiens
uuauuuuugucaaaaauaagauguacacuugu

SEQ ID NO: 259276 - RNA, 32 nt, Homo Sapiens
auuauuguuauuaauuuuuuguuuuugagacg

SEQ ID NO: 259277 - RNA, 32 nt, Homo Sapiens
gugccuuucuguuuaccagcuacuucaauccc

SEQ ID NO: 259278 - RNA, 32 nt, Homo Sapiens
cuauguuuggguuuguaaaauaaagugagaua

SEQ ID NO: 259279 - RNA, 32 nt, Homo Sapiens
caauucugacucagccucccaaguagcuggga

SEQ ID NO: 259280 - RNA, 32 nt, Homo Sapiens
aauuaggaauaaaaccauuuucuuauaaaaaa

SEQ ID NO: 259281 - RNA, 32 nt, Homo Sapiens
aaaauuauaacucuucugauucuaauguggaa

SEQ ID NO: 259282 - RNA, 32 nt, Homo Sapiens
caguuuuagaugaguucucuaugugaccaauu

SEQ ID NO: 259283 - RNA, 32 nt, Homo Sapiens
gggaggacaggagaccgcugcugcugcugccg

SEQ ID NO: 259284 - RNA, 32 nt, Homo Sapiens
agcccugugugugucacccauuggugaccugc

SEQ ID NO: 259285 - RNA, 31 nt, Homo Sapiens
agugcugcacuccuccugccccugccacgcc

SEQ ID NO: 259286 - RNA, 32 nt, Homo Sapiens
uggugauguuuuauuuuauuuuauuuuuuuca

SEQ ID NO: 259287 - RNA, 32 nt, Homo Sapiens
cucagagagagaauacaaguuuuguccugucc

SEQ ID NO: 259288 - RNA, 32 nt, Homo Sapiens
gaaaugacauuuuuauacuaaaacaaacacca

SEQ ID NO: 259289 - RNA, 32 nt, Homo Sapiens
cgccuaaaaugaccaaugugugauuucagugg

SEQ ID NO: 259290 - RNA, 32 nt, Homo Sapiens
gcauccucccugucccuccucauuccaccgug

SEQ ID NO: 259291 - RNA, 32 nt, Homo Sapiens
ggcuugcagaguucuucucaccauuuaaacug

SEQ ID NO: 259292 - RNA, 32 nt, Homo Sapiens
ucauggugauuuaaaauagcuaucaagaacaa

SEQ ID NO: 259293 - RNA, 32 nt, Homo Sapiens
guuccuugccccuguccaacccuggacaguug

SEQ ID NO: 259294 - RNA, 32 nt, Homo Sapiens
ugaauaucugcuucaugauaggucuuggaggu

SEQ ID NO: 259295 - RNA, 32 nt, Homo Sapiens
ccaggcugcccccaggguuucugcacuggucc

SEQ ID NO: 259296 - RNA, 32 nt, Homo Sapiens
uuaguuaacaauaaugagccuggagcaguagu

SEQ ID NO: 259297 - RNA, 32 nt, Homo Sapiens
aaucucuacugagacuuccugaguugauuaga

SEQ ID NO: 259298 - RNA, 32 nt, Homo Sapiens
cccucgcagugaguguuacaguucuuaaagau

SEQ ID NO: 259299 - RNA, 32 nt, Homo Sapiens
uacacagauaccaugaugagaguauauuaaag

SEQ ID NO: 259300 - RNA, 32 nt, Homo Sapiens
uguggguggggaaggaaggcguguccaggaga

SEQ ID NO: 259301 - RNA, 32 nt, Homo Sapiens
cgugugaagugagggaaauuguggcuauggag

SEQ ID NO: 259302 - RNA, 31 nt, Homo Sapiens
ugaaauggcaaugaucucuuauugaguuggg

SEQ ID NO: 259303 - RNA, 32 nt, Homo Sapiens
gugauggaaaauuucaugaaccucucauuucu

SEQ ID NO: 259304 - RNA, 32 nt, Homo Sapiens
cuauuuauaauucugcuucugauuugaugggc

SEQ ID NO: 259305 - RNA, 32 nt, Homo Sapiens
gcauguugguuuugucucucuuucuuuucucc

SEQ ID NO: 259306 - RNA, 32 nt, Homo Sapiens
aaguucuagacaaauuuguacauguggcaaug

SEQ ID NO: 259307 - RNA, 32 nt, Homo Sapiens
cccggcugcuaaggcgggccccacgcggcugg

SEQ ID NO: 259308 - RNA, 32 nt, Homo Sapiens
cuucuacauaaucaaguuuuauguuuaaaacc

SEQ ID NO: 259309 - RNA, 32 nt, Homo Sapiens
ucauaaggagucagauuaucuuuaauuuaaaa

SEQ ID NO: 259310 - RNA, 32 nt, Homo Sapiens
ugugucacuagagcaaaauuguagagauaaug

SEQ ID NO: 259311 - RNA, 32 nt, Homo Sapiens
aaaauucagaagauucaagagaaggaaagucg

SEQ ID NO: 259312 - RNA, 31 nt, Homo Sapiens
uggcguggggccagcuccccccgcgcgccca

SEQ ID NO: 259313 - RNA, 32 nt, Homo Sapiens
uuuucuucaugucuucuguucccggcugcgau

SEQ ID NO: 259314 - RNA, 32 nt, Homo Sapiens
ccagcaacucugagauuaaauucaucauugau

SEQ ID NO: 259315 - RNA, 32 nt, Homo Sapiens
aaacauagauagaaugaaccaauaugaacugc

SEQ ID NO: 259316 - RNA, 32 nt, Homo Sapiens
agcagccucugugagcucucuccuuuggaaag

SEQ ID NO: 259317 - RNA, 32 nt, Homo Sapiens
guagcgggauuuccucauuccacggugcacac

SEQ ID NO: 259318 - RNA, 32 nt, Homo Sapiens
cuuuaaaaugcaaaauaaugucuuaagauuca

SEQ ID NO: 259319 - RNA, 32 nt, Homo Sapiens
agaggcgggacuucgcgggcgagacgucaucg

SEQ ID NO: 259320 - RNA, 32 nt, Homo Sapiens
aucugccagaucugugaaugauagagauuaug

SEQ ID NO: 259321 - RNA, 32 nt, Homo Sapiens
ucaccuugcuccgucuaugucuucccagcuca

SEQ ID NO: 259322 - RNA, 32 nt, Homo Sapiens
cgccgccugagaggagagccgggccgccgccg

SEQ ID NO: 259323 - RNA, 32 nt, Homo Sapiens
uguauuuacuuacuaauagaaaauauagguaa

SEQ ID NO: 259324 - RNA, 32 nt, Homo Sapiens
uuaagagauauuaaaugcuuuuauuuucaaua

SEQ ID NO: 259325 - RNA, 32 nt, Homo Sapiens
uguacagauuuacagaggcaucgagacugggc

SEQ ID NO: 259326 - RNA, 32 nt, Homo Sapiens
gaugggaauauuuuguuauacuguguauagug

SEQ ID NO: 259327 - RNA, 32 nt, Homo Sapiens
aacgcagccuuucaaauccaaaacagagagcu

SEQ ID NO: 259328 - RNA, 32 nt, Homo Sapiens
uguaaauaaaauguauuuugaugacagcucag

SEQ ID NO: 259329 - RNA, 32 nt, Homo Sapiens
uguauccagcugcagccgccuccggagcuucg

SEQ ID NO: 259330 - RNA, 32 nt, Homo Sapiens
auauccauuguaaauuugaaacaaagaccgau

SEQ ID NO: 259331 - RNA, 32 nt, Homo Sapiens
ucaaagagaaaguggagaggaccuaacauaug

SEQ ID NO: 259332 - RNA, 32 nt, Homo Sapiens
uggaagagaaaacaugccuuucuuuguugaau

SEQ ID NO: 259333 - RNA, 32 nt, Homo Sapiens
cuggacucucguagaugugcgccgggauuugc

SEQ ID NO: 259334 - RNA, 32 nt, Homo Sapiens
uuucaguuuaagauuaaucuccauuuucuuuc

SEQ ID NO: 259335 - RNA, 32 nt, Homo Sapiens
agaggagggaacgagcgggcgccgggccacuc

SEQ ID NO: 259336 - RNA, 32 nt, Homo Sapiens
cuugauuuuuauuuguuacagguuuccaaugg

SEQ ID NO: 259337 - RNA, 32 nt, Homo Sapiens
gcaguguuagacaagcauguucucucgucuug

SEQ ID NO: 259338 - RNA, 32 nt, Homo Sapiens
auacaaggauguauucuuaaaccgcaugacua

SEQ ID NO: 259339 - RNA, 32 nt, Homo Sapiens
ucgcccagcccagacccucccccaggccuaag

SEQ ID NO: 259340 - RNA, 32 nt, Homo Sapiens
gccaccugacucucaccucugugcccccagcu

SEQ ID NO: 259341 - RNA, 32 nt, Homo Sapiens
gaaauaacuaaauuuucaaaugaguaagcagu

SEQ ID NO: 259342 - RNA, 32 nt, Homo Sapiens
ggugacauuggaugaaguagagcugauuuacu

SEQ ID NO: 259343 - RNA, 32 nt, Homo Sapiens
auuaugaaaaggaaaauuuguccuguauagca

SEQ ID NO: 259344 - RNA, 32 nt, Homo Sapiens
gggaggggagggcacguucuugacacauggga

SEQ ID NO: 259345 - RNA, 32 nt, Homo Sapiens
aggaguugcccgccgcgccgccgccguccgcg

SEQ ID NO: 259346 - RNA, 32 nt, Homo Sapiens
ggagcagcccccggcuaccuccccuggaggca

SEQ ID NO: 259347 - RNA, 32 nt, Homo Sapiens
cucucucagccucuccucugggcucccugguc

SEQ ID NO: 259348 - RNA, 32 nt, Homo Sapiens
auuguacuuauugccacuggccgccacuuuga

SEQ ID NO: 259349 - RNA, 32 nt, Homo Sapiens
uuuuugaaaaaguuucuucaucuuauauugug

SEQ ID NO: 259350 - RNA, 32 nt, Homo Sapiens
caguguuauucuacacuuuuuaaaagaagcgu

SEQ ID NO: 259351 - RNA, 32 nt, Homo Sapiens
cuguguauauauaaaugguuucuacacacgga

SEQ ID NO: 259352 - RNA, 32 nt, Homo Sapiens
agaauuccuugaaauguuucuuucucucaaau

SEQ ID NO: 259353 - RNA, 32 nt, Homo Sapiens
uuggagaacgauuuuuuuuuuaaauaauauau

SEQ ID NO: 259354 - RNA, 32 nt, Homo Sapiens
gacuuugugugaagggaaaugccaaggaugcu

SEQ ID NO: 259355 - RNA, 32 nt, Homo Sapiens
aaacccagaaaagacagaggugauggaauuag

SEQ ID NO: 259356 - RNA, 32 nt, Homo Sapiens
ccuccaugccugacccuccccccaccccccgu

SEQ ID NO: 259357 - RNA, 32 nt, Homo Sapiens
ggacuguguagugaccggcgucccgcugucuc

SEQ ID NO: 259358 - RNA, 32 nt, Homo Sapiens
aaauaguguuuuacguuuuuuauccugcugaa

SEQ ID NO: 259359 - RNA, 32 nt, Homo Sapiens
aauaauguucuuaauguccaaagugcuuuguc

SEQ ID NO: 259360 - RNA, 32 nt, Homo Sapiens
ugucagcccgcagagcccaucuacgcccaaca

SEQ ID NO: 259361 - RNA, 32 nt, Homo Sapiens
ccggaccaacccaugcuuacuccggagccugu

SEQ ID NO: 259362 - RNA, 32 nt, Homo Sapiens
aggcuggagugcagugguaugaucucaccuua

SEQ ID NO: 259363 - RNA, 32 nt, Homo Sapiens
ucugggccacauauugcuaacucuguggcuaa

SEQ ID NO: 259364 - RNA, 32 nt, Homo Sapiens
aggaaaaaguuguuuaaugcucagggcagaaa

SEQ ID NO: 259365 - RNA, 32 nt, Homo Sapiens
uguuuucagaggugauuuuaugacaggaaagu

SEQ ID NO: 259366 - RNA, 32 nt, Homo Sapiens
agugagaccccuccccuuaggccuggggagcc

SEQ ID NO: 259367 - RNA, 32 nt, Homo Sapiens
ccaguuuaauacuguaugucuaguaagauggg

SEQ ID NO: 259368 - RNA, 32 nt, Homo Sapiens
agccgcggggacacccgacgccggggcaggcu

SEQ ID NO: 259369 - RNA, 32 nt, Homo Sapiens
cagugagucaacaugaagccagugcacgccag

SEQ ID NO: 259370 - RNA, 32 nt, Homo Sapiens
auaucuaagguauacaaaucugucuacaugaa

SEQ ID NO: 259371 - RNA, 32 nt, Homo Sapiens
ccgaggucaugccacugcacuccagccuggcc

SEQ ID NO: 259372 - RNA, 32 nt, Homo Sapiens
gacugcuucgaggcugcccuagggagugaggu

SEQ ID NO: 259373 - RNA, 32 nt, Homo Sapiens
uguagagauaaugagguagugauacugucuuc

SEQ ID NO: 259374 - RNA, 32 nt, Homo Sapiens
uauggcuggauuuuggggggcuugcucccaaa

SEQ ID NO: 259375 - RNA, 32 nt, Homo Sapiens
aaacaaauuuauuuuuauguccucuucucccu

SEQ ID NO: 259376 - RNA, 32 nt, Homo Sapiens
uggggcaccaccuccuugaggaccaaggcacu

SEQ ID NO: 259377 - RNA, 32 nt, Homo Sapiens
auuuauuggggauaggagaagaggcauccugc

SEQ ID NO: 259378 - RNA, 32 nt, Homo Sapiens
aaauucuuuuaaaaugcuuuccugauuuaaua

SEQ ID NO: 259379 - RNA, 32 nt, Homo Sapiens
ugccuauaaucuuagcacuuugggaggccaag

SEQ ID NO: 259380 - RNA, 32 nt, Homo Sapiens
ugccuguaaucucagcacuuugggaggcugag

SEQ ID NO: 259381 - RNA, 32 nt, Homo Sapiens
ggccugaagcucccccucccccaccucugcua

SEQ ID NO: 259382 - RNA, 32 nt, Homo Sapiens
accacaacuuucacuauaaugugaaauguaac

SEQ ID NO: 259383 - RNA, 27 nt, Homo Sapiens
uccugguccuucugagggccacugcag

SEQ ID NO: 259384 - RNA, 32 nt, Homo Sapiens
uccccuugaaagaaugucucggucacaucagg

SEQ ID NO: 259385 - RNA, 32 nt, Homo Sapiens
ggauaauauaaaagaguaccugagauguauuu

SEQ ID NO: 259386 - RNA, 32 nt, Homo Sapiens
cagcugcaauugcaccugagggacaggcccua

SEQ ID NO: 259387 - RNA, 32 nt, Homo Sapiens
ggaauguggaagcucaggguuaauguaguggu

SEQ ID NO: 259388 - RNA, 32 nt, Homo Sapiens
cucaccucauuguacuggcccgcaguggcucc

SEQ ID NO: 259389 - RNA, 32 nt, Homo Sapiens
acaaauauuuuugcuucuugucauuugaagga

SEQ ID NO: 259390 - RNA, 32 nt, Homo Sapiens
gggacacugauauuaucaguggcugccuuucu

SEQ ID NO: 259391 - RNA, 29 nt, Homo Sapiens
cuaccacuguaugaguggaaauuaagacu

SEQ ID NO: 259392 - RNA, 32 nt, Homo Sapiens
ccaauaaagcauguaggagauuuuaaccacaa

SEQ ID NO: 259393 - RNA, 27 nt, Homo Sapiens
uaucagaauuaauucuuuuauaugagu

SEQ ID NO: 259394 - RNA, 32 nt, Homo Sapiens
uccuauugucuuguaaaucaaacucuaaguga

SEQ ID NO: 259395 - RNA, 32 nt, Homo Sapiens
gguuaugagagauaagaauaaagaguuaacag

SEQ ID NO: 259396 - RNA, 29 nt, Homo Sapiens
acucaugcacaaaacugccucccaaagac

SEQ ID NO: 259397 - RNA, 32 nt, Homo Sapiens
aauucauuuuugagauaacuguucccaaugca

SEQ ID NO: 259398 - RNA, 32 nt, Homo Sapiens
caucaucagcaacaacaaaaccugauauucca

SEQ ID NO: 259399 - RNA, 32 nt, Homo Sapiens
cucugaagacacagcuuccagcccuggcuuug

SEQ ID NO: 259400 - RNA, 32 nt, Homo Sapiens
uagguuugauaaauuucacaguauagcuuguc

SEQ ID NO: 259401 - RNA, 32 nt, Homo Sapiens
gcuggcgggaacgcgagaagggcaccagcagc

SEQ ID NO: 259402 - RNA, 32 nt, Homo Sapiens
ggcgacuccgcggagcugcacggccauggacg

SEQ ID NO: 259403 - RNA, 31 nt, Homo Sapiens
ggaggcaccuggcugggguccacucugaccc

SEQ ID NO: 259404 - RNA, 32 nt, Homo Sapiens
ucccuggacaccuuggucuggcucuugugcca

SEQ ID NO: 259405 - RNA, 32 nt, Homo Sapiens
accaacugaacaaaaucaugccuuaccuuucu

SEQ ID NO: 259406 - RNA, 32 nt, Homo Sapiens
aaggguuccuuuaggguaucccauuggcagac

SEQ ID NO: 259407 - RNA, 32 nt, Homo Sapiens
caagucuggccccacaccagccccaauccaaa

SEQ ID NO: 259408 - RNA, 32 nt, Homo Sapiens
ggccaggccagaagcugcuguagcuuuaacca

SEQ ID NO: 259409 - RNA, 32 nt, Homo Sapiens
cauugcaggcagcugggcccacuucauaucac

SEQ ID NO: 259410 - RNA, 29 nt, Homo Sapiens
uauaauggaaguuuaucauuuuuugccuc

SEQ ID NO: 259411 - RNA, 32 nt, Homo Sapiens
agucgacuucggggcccagggaccaaccugca

SEQ ID NO: 259412 - RNA, 32 nt, Homo Sapiens
caaagcuugaguuuccuaaauguaagcuuuua

SEQ ID NO: 259413 - RNA, 32 nt, Homo Sapiens
acccugcuacaauuggaagagaaaaggauaug

SEQ ID NO: 259414 - RNA, 32 nt, Homo Sapiens
cgucucugucuccuuccuccccgggaccuccg

SEQ ID NO: 259415 - RNA, 32 nt, Homo Sapiens
uauuucuucaguguuauuguuuucagagccac

SEQ ID NO: 259416 - RNA, 32 nt, Homo Sapiens
ccaggcacagcuuuugccuuuugcagccuguc

SEQ ID NO: 259417 - RNA, 32 nt, Homo Sapiens
cuccauucugccuggcuguccauccucucaac

SEQ ID NO: 259418 - RNA, 32 nt, Homo Sapiens
ugccugcccggggcuuaggaggguggcaccgg

SEQ ID NO: 259419 - RNA, 32 nt, Homo Sapiens
gacuucuuauuuccacacuggauuaugagaua

SEQ ID NO: 259420 - RNA, 32 nt, Homo Sapiens
caugaaugugauuaauaaugcugaaaaaguau

SEQ ID NO: 259421 - RNA, 32 nt, Homo Sapiens
gacuuuacugaauuaguucagaauagucacua

SEQ ID NO: 259422 - RNA, 32 nt, Homo Sapiens
ccacaugcccccacccagcccccucuggaguu

SEQ ID NO: 259423 - RNA, 27 nt, Homo Sapiens
uguuggcauuaauuuggucuagcuaug

SEQ ID NO: 259424 - RNA, 32 nt, Homo Sapiens
cccaugugauugaguucuagccaauggagugu

SEQ ID NO: 259425 - RNA, 32 nt, Homo Sapiens
ccagcaugccuggccugggcgggcuaccucug

SEQ ID NO: 259426 - RNA, 32 nt, Homo Sapiens
cugcuuuguaauuauuuucuuuauuguuggua

SEQ ID NO: 259427 - RNA, 32 nt, Homo Sapiens
auggcccccagccccagccucuggaaaaucag

SEQ ID NO: 259428 - RNA, 32 nt, Homo Sapiens
aggaagccgacccaggccugaggggccaggaa

SEQ ID NO: 259429 - RNA, 32 nt, Homo Sapiens
gugaggcggagcagagguuuaauggaggugug

SEQ ID NO: 259430 - RNA, 32 nt, Homo Sapiens
uugagccugguagggagggcacgacaccgggg

SEQ ID NO: 259431 - RNA, 32 nt, Homo Sapiens
uguccagggcugucuacugcucuucuuuagcc

SEQ ID NO: 259432 - RNA, 32 nt, Homo Sapiens
gggccuaucagugugccccccauccuggccca

SEQ ID NO: 259433 - RNA, 32 nt, Homo Sapiens
cuggccccacccacauccugcugauuggucca

SEQ ID NO: 259434 - RNA, 32 nt, Homo Sapiens
agcuucgccuacuguuugacuacgugcgugca

SEQ ID NO: 259435 - RNA, 32 nt, Homo Sapiens
ccuaaugaugcaucaugccaggaaauucuuuu

SEQ ID NO: 259436 - RNA, 32 nt, Homo Sapiens
uauucccagaaaguuuugaaugcaaaacuugu

SEQ ID NO: 259437 - RNA, 32 nt, Homo Sapiens
acuucuguucuucccucacuccauccccgcua

SEQ ID NO: 259438 - RNA, 27 nt, Homo Sapiens
cagaaugcaauaaaucaaaauaauggc

SEQ ID NO: 259439 - RNA, 32 nt, Homo Sapiens
ccuuggcuuccucuccugagcccagccuuccc

SEQ ID NO: 259440 - RNA, 32 nt, Homo Sapiens
ccuauguuauuuacaggaaaaacguuuuagug

SEQ ID NO: 259441 - RNA, 32 nt, Homo Sapiens
cuucuguucuuuccauuggaucuuugauucug

SEQ ID NO: 259442 - RNA, 32 nt, Homo Sapiens
uauacaaaauuauuugucaauuacaauaaaac

SEQ ID NO: 259443 - RNA, 32 nt, Homo Sapiens
ucuggguuccaagaaggaguuguguuugaggu

SEQ ID NO: 259444 - RNA, 32 nt, Homo Sapiens
gcauuguagagaucugaaauaguuuucuucca

SEQ ID NO: 259445 - RNA, 32 nt, Homo Sapiens
uguggcauccaugcugguuuugucugucuaua

SEQ ID NO: 259446 - RNA, 32 nt, Homo Sapiens
cucaaggaaaauaaaugauguauauuaucgau

SEQ ID NO: 259447 - RNA, 32 nt, Homo Sapiens
cuauuucaacccuggcuucucagcuuuuugcc

SEQ ID NO: 259448 - RNA, 32 nt, Homo Sapiens
uccagggcacggcgugggagggguaucgaaga

SEQ ID NO: 259449 - RNA, 32 nt, Homo Sapiens
aacuguugauuuccucaacauggcucacaaau

SEQ ID NO: 259450 - RNA, 32 nt, Homo Sapiens
ugcagacaagacggaugugaugcugaaaaugu

SEQ ID NO: 259451 - RNA, 32 nt, Homo Sapiens
ucacccacaggcccccaccucgauacucucuu

SEQ ID NO: 259452 - RNA, 32 nt, Homo Sapiens
guuaagaggaagauuuaugagucauggaaccc

SEQ ID NO: 259453 - RNA, 32 nt, Homo Sapiens
cuaggccugugucgcauguccaggcacuggcc

SEQ ID NO: 259454 - RNA, 32 nt, Homo Sapiens
ggguggggcugcucggagcccgggccuggugg

SEQ ID NO: 259455 - RNA, 32 nt, Homo Sapiens
uccuagggcucggacuccccagccuuuccgca

SEQ ID NO: 259456 - RNA, 32 nt, Homo Sapiens
gucagcgcgcacagcccucaugccccagaggg

SEQ ID NO: 259457 - RNA, 32 nt, Homo Sapiens
aacaguacugucuaggcuguugcaauauauuc

SEQ ID NO: 259458 - RNA, 32 nt, Homo Sapiens
ccuuugcccagagcuccaacugcuacaacaga

SEQ ID NO: 259459 - RNA, 32 nt, Homo Sapiens
ccagcgggagucgcggaacagcaggcccgagc

SEQ ID NO: 259460 - RNA, 32 nt, Homo Sapiens
auaaaaaccaaagccaauaaaaaugaugugau

SEQ ID NO: 259461 - RNA, 32 nt, Homo Sapiens
ugacuuccgugcuacaugaugacaaagaauuu

SEQ ID NO: 259462 - RNA, 32 nt, Homo Sapiens
ccccgcccucccucaugcugccacaagcugcu

SEQ ID NO: 259463 - RNA, 32 nt, Homo Sapiens
ccccgcucuggaguacgugucuggcuugggag

SEQ ID NO: 259464 - RNA, 32 nt, Homo Sapiens
ugaugucuuuugcuagaaaagaccaagaaaga

SEQ ID NO: 259465 - RNA, 32 nt, Homo Sapiens
cauuguauccacuuagugaaauccaucggugu

SEQ ID NO: 259466 - RNA, 32 nt, Homo Sapiens
cuagagcaggcuguccucggagggagacauuc

SEQ ID NO: 259467 - RNA, 32 nt, Homo Sapiens
ggcagcagccucagccccagggacugggggcg

SEQ ID NO: 259468 - RNA, 32 nt, Homo Sapiens
aggauucaggguuugcagaaauucucaggacc

SEQ ID NO: 259469 - RNA, 32 nt, Homo Sapiens
aggagagcggcggccuggaugccccagcgccc

SEQ ID NO: 259470 - RNA, 32 nt, Homo Sapiens
gauuaaaaagugagauaaauggucaaugagaa

SEQ ID NO: 259471 - RNA, 32 nt, Homo Sapiens
gccacugcacuccagccugggcgacagcguga

SEQ ID NO: 259472 - RNA, 32 nt, Homo Sapiens
uucuggcacugcuccagaauuccuccuucuug

SEQ ID NO: 259473 - RNA, 32 nt, Homo Sapiens
ggcggagcgggcggcagacccggagcagcaug

SEQ ID NO: 259474 - RNA, 32 nt, Homo Sapiens
accuuggcgggagagugcugcaggugaugcug

SEQ ID NO: 259475 - RNA, 32 nt, Homo Sapiens
uuugaguucuuuggcucuuccuggaaccauaa

SEQ ID NO: 259476 - RNA, 32 nt, Homo Sapiens
aacaucugucugggguuccuuuagucuugaau

SEQ ID NO: 259477 - RNA, 32 nt, Homo Sapiens
acggauuaaaccuuuagguuaccgcugcucua

SEQ ID NO: 259478 - RNA, 32 nt, Homo Sapiens
ggcccucccacuuuccccugccugcuccucca

SEQ ID NO: 259479 - RNA, 32 nt, Homo Sapiens
uguuuuuucguuccccccacccgcccccagca

SEQ ID NO: 259480 - RNA, 32 nt, Homo Sapiens
gggacugcacguagcccggcgcucggcauggc

SEQ ID NO: 259481 - RNA, 32 nt, Homo Sapiens
cauguccggaggcccagcacuccgucugaugg

SEQ ID NO: 259482 - RNA, 30 nt, Homo Sapiens
gccugguggggcguggcucggugagggagg

SEQ ID NO: 259483 - RNA, 32 nt, Homo Sapiens
cagcugggcuccugagucugguggggacuugg

SEQ ID NO: 259484 - RNA, 29 nt, Homo Sapiens
uaagauggcggcggcggcggugguggagu

SEQ ID NO: 259485 - RNA, 32 nt, Homo Sapiens
uuuuguuuuguuuucugacauauucugacaaa

SEQ ID NO: 259486 - RNA, 32 nt, Homo Sapiens
gcugaagcuggcgggggagagcuggggaccca

SEQ ID NO: 259487 - RNA, 32 nt, Homo Sapiens
uccagcccaucccagcucccggcucugguaca

SEQ ID NO: 259488 - RNA, 32 nt, Homo Sapiens
cuggccaaggacaacucuaucuaugucguggc

SEQ ID NO: 259489 - RNA, 32 nt, Homo Sapiens
acaaagccaacacucugugaccaccacacucc

SEQ ID NO: 259490 - RNA, 32 nt, Homo Sapiens
ugauugcuggaacagguggggguuggucauua

SEQ ID NO: 259491 - RNA, 29 nt, Homo Sapiens
guuuuaugaaguuuauuucucaagaaaau

SEQ ID NO: 259492 - RNA, 32 nt, Homo Sapiens
cccacaggcaaaugcauggaggguuguuaaug

SEQ ID NO: 259493 - RNA, 32 nt, Homo Sapiens
cuugagagcuggcuguccuuugaaagaaagaa

SEQ ID NO: 259494 - RNA, 30 nt, Homo Sapiens
caaacaugacugaguucuggcuuauaucug

SEQ ID NO: 259495 - RNA, 32 nt, Homo Sapiens
aguuggugugucucagaaaaucccacugaguu

SEQ ID NO: 259496 - RNA, 32 nt, Homo Sapiens
aaguuauauuuaaugucuuuacuugcauucua

SEQ ID NO: 259497 - RNA, 32 nt, Homo Sapiens
accgagaauuaaaacuucagauuguucaacau

SEQ ID NO: 259498 - RNA, 32 nt, Homo Sapiens
ccaugagccugacacaugaaggucuuggguuc

SEQ ID NO: 259499 - RNA, 30 nt, Homo Sapiens
cagaagggagguggccgggcugagcacggg

SEQ ID NO: 259500 - RNA, 32 nt, Homo Sapiens
cgaguucagggugacacauuuugggacaucug

SEQ ID NO: 259501 - RNA, 32 nt, Homo Sapiens
ucaaucgaucggaaaauucaaauauuuagaaa

SEQ ID NO: 259502 - RNA, 32 nt, Homo Sapiens
guuugguagugccccaccucccgcccucaccu

SEQ ID NO: 259503 - RNA, 32 nt, Homo Sapiens
gguaaucucuuccuagaaacugcaucuaacaa

SEQ ID NO: 259504 - RNA, 32 nt, Homo Sapiens
acucagagauggauuuugacucuggacuagaa

SEQ ID NO: 259505 - RNA, 32 nt, Homo Sapiens
ugaagaccguuccaaccucguuuccauuucuu

SEQ ID NO: 259506 - RNA, 32 nt, Homo Sapiens
cauucagcagaaacgcacuuuggacuuuuugc

SEQ ID NO: 259507 - RNA, 32 nt, Homo Sapiens
cccucgaggacaggccguagcccucauagcca

SEQ ID NO: 259508 - RNA, 32 nt, Homo Sapiens
gaggggcuggggauccccguucugggaauggg

SEQ ID NO: 259509 - RNA, 32 nt, Homo Sapiens
gcaacacccaggcgggcagagaagggcucagg

SEQ ID NO: 259510 - RNA, 32 nt, Homo Sapiens
agauacuaggguccagaggccgacuggagcaa

SEQ ID NO: 259511 - RNA, 32 nt, Homo Sapiens
acagaauaggaaaaagugauuuucaacauaua

SEQ ID NO: 259512 - RNA, 32 nt, Homo Sapiens
gaacagaggaagauaauguagugugaaguccc

SEQ ID NO: 259513 - RNA, 32 nt, Homo Sapiens
gaccaguggcccagcccugggugucccaucac

SEQ ID NO: 259514 - RNA, 32 nt, Homo Sapiens
uguguacauucuucaccuccuggugcccuauc

SEQ ID NO: 259515 - RNA, 32 nt, Homo Sapiens
cguggcugcgggcacacccuggcggggccccu

SEQ ID NO: 259516 - RNA, 32 nt, Homo Sapiens
cgaguuucugacgcgcccgcgucgucccagcu

SEQ ID NO: 259517 - RNA, 32 nt, Homo Sapiens
ucuggaaaucuaaguucauacugguuuaauua

SEQ ID NO: 259518 - RNA, 27 nt, Homo Sapiens
guauggagggagaggcgugugcgggaa

SEQ ID NO: 259519 - RNA, 32 nt, Homo Sapiens
aauacaaaaauuagccagacaugguggcacau

SEQ ID NO: 259520 - RNA, 32 nt, Homo Sapiens
ccgggcccuuucugacgcccagcccccugcac

SEQ ID NO: 259521 - RNA, 32 nt, Homo Sapiens
cuggccuucacuuuucugcguccucuuacucc

SEQ ID NO: 259522 - RNA, 32 nt, Homo Sapiens
ucccagcuccagcccugcaggccgucuuuucc

SEQ ID NO: 259523 - RNA, 32 nt, Homo Sapiens
ggccccucggaaccuccagcuugguccggucu

SEQ ID NO: 259524 - RNA, 32 nt, Homo Sapiens
gcguccaacagauccacuccccacccaacacc

SEQ ID NO: 259525 - RNA, 32 nt, Homo Sapiens
aguaccugacuucucaggacugacaccuacag

SEQ ID NO: 259526 - RNA, 27 nt, Homo Sapiens
uacaauccccaguucagccccccaaac

SEQ ID NO: 259527 - RNA, 32 nt, Homo Sapiens
cuaaugaccucuucuuuuguagauacaucagc

SEQ ID NO: 259528 - RNA, 32 nt, Homo Sapiens
gcaauuuucuucagugguauggcauuuucuca

SEQ ID NO: 259529 - RNA, 32 nt, Homo Sapiens
guguucuccuguuuguggagcuaagguaaaga

SEQ ID NO: 259530 - RNA, 32 nt, Homo Sapiens
gugugaaaacaaucauagauaauauguaaaac

SEQ ID NO: 259531 - RNA, 32 nt, Homo Sapiens
aguuuuucuuccaguguagagcuccuucaagu

SEQ ID NO: 259532 - RNA, 29 nt, Homo Sapiens
uguugagccugugguucuauaaaaccccu

SEQ ID NO: 259533 - RNA, 32 nt, Homo Sapiens
uuggcugagagauggaaggggugggauuugcu

SEQ ID NO: 259534 - RNA, 30 nt, Homo Sapiens
acagaagaugacaucaagauaugcacuugg

SEQ ID NO: 259535 - RNA, 32 nt, Homo Sapiens
agcaacgccgugcagcccuggaggaacggcag

SEQ ID NO: 259536 - RNA, 30 nt, Homo Sapiens
cagcuugggucauucuucaagaguaagaaa

SEQ ID NO: 259537 - RNA, 32 nt, Homo Sapiens
gucucggaccugugcgccccgccccgcgcugg

SEQ ID NO: 259538 - RNA, 32 nt, Homo Sapiens
caaaguucauaauaucaaaauauguguucaaa

SEQ ID NO: 259539 - RNA, 30 nt, Homo Sapiens
cacuccaucugaugugcagaagcugggcug

SEQ ID NO: 259540 - RNA, 32 nt, Homo Sapiens
aaguaaugaauuaauuuuuucuuuaugauuuu

SEQ ID NO: 259541 - RNA, 32 nt, Homo Sapiens
ugcuuccgcagggaacccuggccugcccgcga

SEQ ID NO: 259542 - RNA, 32 nt, Homo Sapiens
cgaaucggggucucguuuuugcuggaagagcc

SEQ ID NO: 259543 - RNA, 32 nt, Homo Sapiens
uucauucugugcuauuuaacugauuaauagug

SEQ ID NO: 259544 - RNA, 32 nt, Homo Sapiens
caggugcccgucuggccgcuggacuguuggcc

SEQ ID NO: 259545 - RNA, 32 nt, Homo Sapiens
gucccaguggagggucaauaaaucacaugaug

SEQ ID NO: 259546 - RNA, 32 nt, Homo Sapiens
guggagaugauuauguuuaacgcauuccuucu

SEQ ID NO: 259547 - RNA, 32 nt, Homo Sapiens
uucuccgagaagccuccgagaagugcuuuaag

SEQ ID NO: 259548 - RNA, 32 nt, Homo Sapiens
acgccccaugcucuucccuccccucgagugug

SEQ ID NO: 259549 - RNA, 32 nt, Homo Sapiens
ggucuuggaggugccuuguggguguggcuuug

SEQ ID NO: 259550 - RNA, 32 nt, Homo Sapiens
gcaucaggaagggacauggaugugcuccugcc

SEQ ID NO: 259551 - RNA, 32 nt, Homo Sapiens
aguuacauucaugaaauugugaugguaacgua

SEQ ID NO: 259552 - RNA, 32 nt, Homo Sapiens
caggccaccacauaccucaaccuggggaacug

SEQ ID NO: 259553 - RNA, 32 nt, Homo Sapiens
cguccccggucgugggggcaccgcccgcaggc

SEQ ID NO: 259554 - RNA, 32 nt, Homo Sapiens
ggcaguaaaacaccccaggcuucucauuaaua

SEQ ID NO: 259555 - RNA, 32 nt, Homo Sapiens
gaaucuuuuuaaaacuauaucaugaugaauug

SEQ ID NO: 259556 - RNA, 32 nt, Homo Sapiens
ugcuggcuuucuaucauuuuuauguuuuaaug

SEQ ID NO: 259557 - RNA, 32 nt, Homo Sapiens
caucauuuucgcuacgaauuuauuuuucaaca

SEQ ID NO: 259558 - RNA, 32 nt, Homo Sapiens
gccugaauacuauggcuaagcaucauaaauaa

SEQ ID NO: 259559 - RNA, 32 nt, Homo Sapiens
acgggccggccgcggccguagccgugugaacg

SEQ ID NO: 259560 - RNA, 32 nt, Homo Sapiens
gcugagcugaggggugccauggagcggcucug

SEQ ID NO: 259561 - RNA, 32 nt, Homo Sapiens
cugucagucucgcugggacagcaagaaacagg

SEQ ID NO: 259562 - RNA, 32 nt, Homo Sapiens
ggcugcugucuccuggcuaauaaucuccagcc

SEQ ID NO: 259563 - RNA, 32 nt, Homo Sapiens
gggaaccccggccacaucuccuccaaacacac

SEQ ID NO: 259564 - RNA, 32 nt, Homo Sapiens
gcauaaggcccauuuuguuguucaggucaaca

SEQ ID NO: 259565 - RNA, 32 nt, Homo Sapiens
guguuuugguaugucauuauuuuauuuaggau

SEQ ID NO: 259566 - RNA, 32 nt, Homo Sapiens
aaucccaccaaaaccaaguuggccacgagagu

SEQ ID NO: 259567 - RNA, 32 nt, Homo Sapiens
aagggaauacaaaauugccaaaaaauagucuc

SEQ ID NO: 259568 - RNA, 32 nt, Homo Sapiens
uacucacgggagaaaaauagacuuuauuuaca

SEQ ID NO: 259569 - RNA, 32 nt, Homo Sapiens
ggcuuuaaaugagaaguaaaauuuucuaaguu

SEQ ID NO: 259570 - RNA, 32 nt, Homo Sapiens
ccacgacacgcuccccugccgccccgccuguu

SEQ ID NO: 259571 - RNA, 32 nt, Homo Sapiens
gacacuggcguucuccucuccccuccuucccc

SEQ ID NO: 259572 - RNA, 32 nt, Homo Sapiens
uaucaaaauauguuuggguuuagauuuuaagu

SEQ ID NO: 259573 - RNA, 31 nt, Homo Sapiens
uuuuuauaaaagaaaaaguauguugugccuu

SEQ ID NO: 259574 - RNA, 32 nt, Homo Sapiens
gagaaugcauaaaaaacacauugccacggaaa

SEQ ID NO: 259575 - RNA, 32 nt, Homo Sapiens
ucugaaugcugcuacuuaauuccuuucucauc

SEQ ID NO: 259576 - RNA, 32 nt, Homo Sapiens
caaacuccagcuuaaagcccuagacagguaaa

SEQ ID NO: 259577 - RNA, 32 nt, Homo Sapiens
cacuggccguuaacucagcacccaggccaagc

SEQ ID NO: 259578 - RNA, 32 nt, Homo Sapiens
caggggugagcaggcaggcuccccucccgagu

SEQ ID NO: 259579 - RNA, 32 nt, Homo Sapiens
cccacucaggggaccccacuccccucacacac

SEQ ID NO: 259580 - RNA, 32 nt, Homo Sapiens
ggcagccccagcgguuaguggaagccccagag

SEQ ID NO: 259581 - RNA, 32 nt, Homo Sapiens
gagacuaggguaaucaucuuuacuucugguuc

SEQ ID NO: 259582 - RNA, 32 nt, Homo Sapiens
aauuuuugcaaccuauucaucugacaaagggc

SEQ ID NO: 259583 - RNA, 32 nt, Homo Sapiens
ugguggcuucguagagugggugcuguucccaa

SEQ ID NO: 259584 - RNA, 32 nt, Homo Sapiens
ggcugcauuuuucuuauugauuuggaauugua

SEQ ID NO: 259585 - RNA, 32 nt, Homo Sapiens
aauauuaaacacaucugcaggacacauuuugc

SEQ ID NO: 259586 - RNA, 32 nt, Homo Sapiens
ugaacugauguuucauuuauauuuucauccaa

SEQ ID NO: 259587 - RNA, 32 nt, Homo Sapiens
ccggggcagcgggagguggcuggacccaucgc

SEQ ID NO: 259588 - RNA, 32 nt, Homo Sapiens
gcaagcaaaaauauuuagauauuuacucaguu

SEQ ID NO: 259589 - RNA, 32 nt, Homo Sapiens
cuugcaacccccucccagcaguggcugggcac

SEQ ID NO: 259590 - RNA, 32 nt, Homo Sapiens
gacgugggagaguggagcacuaccuccucagg

SEQ ID NO: 259591 - RNA, 32 nt, Homo Sapiens
cugggaagcgcgccagcugcgccugcucaacu

SEQ ID NO: 259592 - RNA, 32 nt, Homo Sapiens
gcacugggaaggaaacaaauguguauaaacug

SEQ ID NO: 259593 - RNA, 32 nt, Homo Sapiens
aucgaggcgggcguucacgggcggccaggguu

SEQ ID NO: 259594 - RNA, 32 nt, Homo Sapiens
ugagcugagaaauuauuuaaauagcaucaaaa

SEQ ID NO: 259595 - RNA, 32 nt, Homo Sapiens
gggcccugucgagaagacccgaccgcagaugg

SEQ ID NO: 259596 - RNA, 32 nt, Homo Sapiens
uuucugugaacaggcagccuucuaaaagcccc

SEQ ID NO: 259597 - RNA, 32 nt, Homo Sapiens
ccacucuguggccacuugacuucuugugcaac

SEQ ID NO: 259598 - RNA, 32 nt, Homo Sapiens
agguggagaggagcuuccucccgagcugcccc

SEQ ID NO: 259599 - RNA, 32 nt, Homo Sapiens
agauaucccucaugacaguugcccuuucaaag

SEQ ID NO: 259600 - RNA, 32 nt, Homo Sapiens
ccggaggaugugcagcugcggcggcggcgccg

SEQ ID NO: 259601 - RNA, 32 nt, Homo Sapiens
cuugggagcaguguauguuacuuuacauagca

SEQ ID NO: 259602 - RNA, 32 nt, Homo Sapiens
auggaagcgggugggcggggcugagagagggu

SEQ ID NO: 259603 - RNA, 32 nt, Homo Sapiens
uuuuauacuuuuuugguaaacguacaucacau

SEQ ID NO: 259604 - RNA, 32 nt, Homo Sapiens
caaccugggaaucagagagagaaggagaagga

SEQ ID NO: 259605 - RNA, 32 nt, Homo Sapiens
ugaauauacuaaacaucaaagaaucuauguug

SEQ ID NO: 259606 - RNA, 32 nt, Homo Sapiens
cacugagguggagcuggggcgaggggaggggg

SEQ ID NO: 259607 - RNA, 32 nt, Homo Sapiens
gucucauggugguuuugauuugccuguccuga

SEQ ID NO: 259608 - RNA, 32 nt, Homo Sapiens
cagucaucucaacaauugaagucaggagaagc

SEQ ID NO: 259609 - RNA, 32 nt, Homo Sapiens
aacccaccaauauaaauuuaauuaaagauaua

SEQ ID NO: 259610 - RNA, 32 nt, Homo Sapiens
cugacccucuguuuucaaaucuguaaaauggg

SEQ ID NO: 259611 - RNA, 32 nt, Homo Sapiens
gacaucagcucuucucuucugacugguaacac

SEQ ID NO: 259612 - RNA, 32 nt, Homo Sapiens
caaaacaaacaaaacuagcauuuuaaaacuua

SEQ ID NO: 259613 - RNA, 32 nt, Homo Sapiens
ucguccuucagcgcccuuugcaggagaaggag

SEQ ID NO: 259614 - RNA, 32 nt, Homo Sapiens
ucauaguaucccauuugccuuguaaguuauau

SEQ ID NO: 259615 - RNA, 32 nt, Homo Sapiens
ucaaccuuauugauuauauugagagcgcucuu

SEQ ID NO: 259616 - RNA, 32 nt, Homo Sapiens
gccccgcugcccaccugcccgccugcccaccu

SEQ ID NO: 259617 - RNA, 29 nt, Homo Sapiens
ugggggaugacggcguggacgaggaacag

SEQ ID NO: 259618 - RNA, 32 nt, Homo Sapiens
uuaaaggcucugcugaucgguguugcaguguc

SEQ ID NO: 259619 - RNA, 32 nt, Homo Sapiens
gcacgcugguccugggggcuggagaggaaccg

SEQ ID NO: 259620 - RNA, 32 nt, Homo Sapiens
uggcggcgcggucagggcuggccuuggcuuca

SEQ ID NO: 259621 - RNA, 29 nt, Homo Sapiens
cugcuggugacuuucugcagugaaugcau

SEQ ID NO: 259622 - RNA, 32 nt, Homo Sapiens
gugaggcugcagcagagggucccccaagcuuu

SEQ ID NO: 259623 - RNA, 32 nt, Homo Sapiens
gucuuauuuuucugcauggauuggcauaagac

SEQ ID NO: 259624 - RNA, 32 nt, Homo Sapiens
cugauuucauggagcuuuugaaguuuguuuua

SEQ ID NO: 259625 - RNA, 32 nt, Homo Sapiens
cccagagacaccuuguaaguguccccucuggu

SEQ ID NO: 259626 - RNA, 32 nt, Homo Sapiens
ggucacugccagccugccgggccugccuuccc

SEQ ID NO: 259627 - RNA, 32 nt, Homo Sapiens
gaaagcaaauuggugucuuguuuaaugaucug

SEQ ID NO: 259628 - RNA, 32 nt, Homo Sapiens
acccaguaaugaaauaaaauggccguuuggau

SEQ ID NO: 259629 - RNA, 32 nt, Homo Sapiens
agaagcaaccucaguaauuuagaaaucauuuu

SEQ ID NO: 259630 - RNA, 32 nt, Homo Sapiens
ucauccuggcccgcagagccugccgcgagucc

SEQ ID NO: 259631 - RNA, 30 nt, Homo Sapiens
uuaaagaauauccaguauaauuuuagcuuc

SEQ ID NO: 259632 - RNA, 30 nt, Homo Sapiens
agggugucugucgugccgcaguagagcacu

SEQ ID NO: 259633 - RNA, 32 nt, Homo Sapiens
uaaauaaauaaaauaagaaaaaaguaaaccac

SEQ ID NO: 259634 - RNA, 32 nt, Homo Sapiens
cuuaaggugcuuugggguucucaggccaggau

SEQ ID NO: 259635 - RNA, 32 nt, Homo Sapiens
aacauauuagaaucuuuuuuuaaauuuuucuu

SEQ ID NO: 259636 - RNA, 32 nt, Homo Sapiens
gauauggguaguauuuuuuacauuuuacacac

SEQ ID NO: 259637 - RNA, 32 nt, Homo Sapiens
uaugcaauucucccucccccagcccuucccug

SEQ ID NO: 259638 - RNA, 29 nt, Homo Sapiens
cagccacggggacaggacgggguuggggc

SEQ ID NO: 259639 - RNA, 32 nt, Homo Sapiens
agcaguuuauggggagcacuugaaagagcgug

SEQ ID NO: 259640 - RNA, 32 nt, Homo Sapiens
cuuuuugcuggcauuuaaauagugaaaagagu

SEQ ID NO: 259641 - RNA, 32 nt, Homo Sapiens
gugucuggaguuguuuccuucugguggguuca

SEQ ID NO: 259642 - RNA, 32 nt, Homo Sapiens
guauucuugaagggcuguuuggaccugcauua

SEQ ID NO: 259643 - RNA, 32 nt, Homo Sapiens
ugauuuuguaaauuucaguaauucauuuaaau

SEQ ID NO: 259644 - RNA, 32 nt, Homo Sapiens
caaugaugugugcaaguacgacuucguggagg

SEQ ID NO: 259645 - RNA, 32 nt, Homo Sapiens
auaguugaacucucugucuucauguggaaggu

SEQ ID NO: 259646 - RNA, 32 nt, Homo Sapiens
acaucccuuucuuccccccaccagcuguaaaa

SEQ ID NO: 259647 - RNA, 32 nt, Homo Sapiens
aacugaucacggcuuucacgacaggcuaaggu

SEQ ID NO: 259648 - RNA, 32 nt, Homo Sapiens
uacugaaauggcaacaacaacuccaaauacau

SEQ ID NO: 259649 - RNA, 32 nt, Homo Sapiens
gcugagguuccccaugcgcagcuguccccgau

SEQ ID NO: 259650 - RNA, 32 nt, Homo Sapiens
gaauugagauugaaucaguuccaacugacuug

SEQ ID NO: 259651 - RNA, 32 nt, Homo Sapiens
aaaaagaaggcacacuucuuuuggucugaagg

SEQ ID NO: 259652 - RNA, 32 nt, Homo Sapiens
ggaaugcccgcggcuccagaggaaaaagccca

SEQ ID NO: 259653 - RNA, 32 nt, Homo Sapiens
uuuguaugaugauugugaaccuccugaaugcc

SEQ ID NO: 259654 - RNA, 32 nt, Homo Sapiens
gaggugagauugauagugcaauaaucagugau

SEQ ID NO: 259655 - RNA, 32 nt, Homo Sapiens
augcagagacuauauuuagcauguauagguua

SEQ ID NO: 259656 - RNA, 32 nt, Homo Sapiens
ucuuugugacacgagucaagugucucacaacc

SEQ ID NO: 259657 - RNA, 32 nt, Homo Sapiens
augacucggggguggggaaaggggucggcuga

SEQ ID NO: 259658 - RNA, 32 nt, Homo Sapiens
uuuauucggaaaaugaauaagaugcaguucug

SEQ ID NO: 259659 - RNA, 32 nt, Homo Sapiens
uaaaaugcagcuuuuccgaguuugauguucug

SEQ ID NO: 259660 - RNA, 32 nt, Homo Sapiens
cuacagagggauuuuuaaauuaauugcaaaau

SEQ ID NO: 259661 - RNA, 32 nt, Homo Sapiens
aggagagaugaccccuacccccucauccccca

SEQ ID NO: 259662 - RNA, 32 nt, Homo Sapiens
caaaaagcagcuuuuccacuugauaaaaacaa

SEQ ID NO: 259663 - RNA, 32 nt, Homo Sapiens
aguagagggcagagcucccaccccgccccgcc

SEQ ID NO: 259664 - RNA, 32 nt, Homo Sapiens
ugcagaauauuauuuuuuauuuccuguuagau

SEQ ID NO: 259665 - RNA, 32 nt, Homo Sapiens
uaacggaaggugcgcauccaguccucgcacug

SEQ ID NO: 259666 - RNA, 32 nt, Homo Sapiens
ucgagaccggguggagaaugaggcagaaaaag

SEQ ID NO: 259667 - RNA, 32 nt, Homo Sapiens
aacagaugggauacagaagauaauuggagaaa

SEQ ID NO: 259668 - RNA, 32 nt, Homo Sapiens
caugagcuggacacuagggaaccacaucuucu

SEQ ID NO: 259669 - RNA, 32 nt, Homo Sapiens
uggacuggcgagccuugccgccgcccagcccc

SEQ ID NO: 259670 - RNA, 32 nt, Homo Sapiens
acuugggggacaagugcuaaguauuguggagc

SEQ ID NO: 259671 - RNA, 32 nt, Homo Sapiens
cggauggggcguaggugggcggugcgcccaca

SEQ ID NO: 259672 - RNA, 32 nt, Homo Sapiens
aauuuuaaauaaauuucuuuauugaaaguaug

SEQ ID NO: 259673 - RNA, 32 nt, Homo Sapiens
uuuuugggugagaagaaaaauguagcuaaggu

SEQ ID NO: 259674 - RNA, 32 nt, Homo Sapiens
cugaguccugguuuccuggcagccugcugcgc

SEQ ID NO: 259675 - RNA, 32 nt, Homo Sapiens
ccaucucugaagaucugcucaagacguccagc

SEQ ID NO: 259676 - RNA, 32 nt, Homo Sapiens
uuuauauaaaaaugucugaguaugauuuugug

SEQ ID NO: 259677 - RNA, 32 nt, Homo Sapiens
caguuuuugggguuugaugccauaaugggaau

SEQ ID NO: 259678 - RNA, 32 nt, Homo Sapiens
ggacacagggaggagaacaacacacacugggg

SEQ ID NO: 259679 - RNA, 32 nt, Homo Sapiens
aauagagaaaacacugauugauaauaggcauu

SEQ ID NO: 259680 - RNA, 32 nt, Homo Sapiens
ucagcuguugauaaaggggcaggcuugcguua

SEQ ID NO: 259681 - RNA, 32 nt, Homo Sapiens
aguagcaaaaauaauauggcaaguauuucuug

SEQ ID NO: 259682 - RNA, 32 nt, Homo Sapiens
ggccguuuuguaggcuggggccccgcggggcu

SEQ ID NO: 259683 - RNA, 32 nt, Homo Sapiens
cucggccccucccccaagucucuucugugcaa

SEQ ID NO: 259684 - RNA, 32 nt, Homo Sapiens
uuuggcuccucuguguguguccguaucuuguu

SEQ ID NO: 259685 - RNA, 32 nt, Homo Sapiens
ucuuuaucaaggacguaagcagguuaaaugug

SEQ ID NO: 259686 - RNA, 32 nt, Homo Sapiens
cccggccccgucccgcagcccucacccgcuga

SEQ ID NO: 259687 - RNA, 32 nt, Homo Sapiens
ggcacuucugucaagccucccccgccccaauu

SEQ ID NO: 259688 - RNA, 32 nt, Homo Sapiens
uguaacauuuuucucuuaguuaaaaaugugaa

SEQ ID NO: 259689 - RNA, 32 nt, Homo Sapiens
ccuugccccugcugcugccccgagggcugccc

SEQ ID NO: 259690 - RNA, 32 nt, Homo Sapiens
cgggcugugggcacauggggccccgcagguuc

SEQ ID NO: 259691 - RNA, 32 nt, Homo Sapiens
caguuaaggaacguaaauuuguuauuggcucg

SEQ ID NO: 259692 - RNA, 32 nt, Homo Sapiens
caugaauuagucaucuggauuuuuuauucuuu

SEQ ID NO: 259693 - RNA, 32 nt, Homo Sapiens
accacuauucuauuuugucuccaugauuuugg

SEQ ID NO: 259694 - RNA, 32 nt, Homo Sapiens
ugccaagcaaggaaaacuuauuuuauauuuuc

SEQ ID NO: 259695 - RNA, 32 nt, Homo Sapiens
aguuggaacucuuuccucuccccagccccccu

SEQ ID NO: 259696 - RNA, 32 nt, Homo Sapiens
accguuccgccaugcauaguggacccagcacu

SEQ ID NO: 259697 - RNA, 32 nt, Homo Sapiens
uccugcccuggugaaagugcugauuacuuuac

SEQ ID NO: 259698 - RNA, 32 nt, Homo Sapiens
cucaagucccccaacuucccagcccagugcug

SEQ ID NO: 259699 - RNA, 32 nt, Homo Sapiens
aguugguguucagcuuaguugauucaguaguu

SEQ ID NO: 259700 - RNA, 32 nt, Homo Sapiens
aaaacgcagaggaaaagagccagaagguuucu

SEQ ID NO: 259701 - RNA, 32 nt, Homo Sapiens
ggauuuccggcugcaccaccccggcccgcugc

SEQ ID NO: 259702 - RNA, 32 nt, Homo Sapiens
uuguagcaaauuguuuuaauucuguagcuuug

SEQ ID NO: 259703 - RNA, 32 nt, Homo Sapiens
aguccugcucccucacuccucgccccgccccc

SEQ ID NO: 259704 - RNA, 32 nt, Homo Sapiens
uagguuauugacgagcaguuuucucucagaua

SEQ ID NO: 259705 - RNA, 32 nt, Homo Sapiens
uuaacuauuagguaaacuuaagggggcaguga

SEQ ID NO: 259706 - RNA, 32 nt, Homo Sapiens
guggacgugacugcucuaucccgggcaaaagg

SEQ ID NO: 259707 - RNA, 32 nt, Homo Sapiens
cggcgcggucgcagcccucagcccacuuagga

SEQ ID NO: 259708 - RNA, 32 nt, Homo Sapiens
uuagcauccuguuauaugcauacaguugcugu

SEQ ID NO: 259709 - RNA, 32 nt, Homo Sapiens
ucugcccgccucagccucccaagugcugggau

SEQ ID NO: 259710 - RNA, 32 nt, Homo Sapiens
cuuuggugcuuuuaaccauuccuuccauaaau

SEQ ID NO: 259711 - RNA, 32 nt, Homo Sapiens
uccccuccccagccccgcuccucccucugugg

SEQ ID NO: 259712 - RNA, 32 nt, Homo Sapiens
cuugcuccuccucggcguacgguccuccccug

SEQ ID NO: 259713 - RNA, 32 nt, Homo Sapiens
aggagggcggguggggaccacuccagaauugg

SEQ ID NO: 259714 - RNA, 32 nt, Homo Sapiens
uguuuuucugauuaaaaacaaacaaagcucuu

SEQ ID NO: 259715 - RNA, 32 nt, Homo Sapiens
acauuccggccggcgcucuggcucuguaccug

SEQ ID NO: 259716 - RNA, 32 nt, Homo Sapiens
auuaauugacauuacaguuaaaugagcacuga

SEQ ID NO: 259717 - RNA, 32 nt, Homo Sapiens
cagccuguggagguggauaaaugugggaauau

SEQ ID NO: 259718 - RNA, 32 nt, Homo Sapiens
acugugcgagcacaacacacacaauccuuucu

SEQ ID NO: 259719 - RNA, 32 nt, Homo Sapiens
uguuugauuuuaaacagagaaaaaauaaaagg

SEQ ID NO: 259720 - RNA, 32 nt, Homo Sapiens
ggaagcccucagccucugcccuccccccacac

SEQ ID NO: 259721 - RNA, 32 nt, Homo Sapiens
caccuauaaccccagcacuuugggaggccaag

SEQ ID NO: 259722 - RNA, 32 nt, Homo Sapiens
aucuaugcugaauaaaugccgucagggccagc

SEQ ID NO: 259723 - RNA, 32 nt, Homo Sapiens
gcaaguaauaauacaguuuauaaugaaacuau

SEQ ID NO: 259724 - RNA, 32 nt, Homo Sapiens
cuggcugacaauggaagauccaggugccaauc

SEQ ID NO: 259725 - RNA, 32 nt, Homo Sapiens
cauaccacaugcugccuaugggacuucaguua

SEQ ID NO: 259726 - RNA, 32 nt, Homo Sapiens
cggucugaggccggucagaggccaggauugga

SEQ ID NO: 259727 - RNA, 32 nt, Homo Sapiens
uagagccuguuuuauuuuuucuuaauuuuauu

SEQ ID NO: 259728 - RNA, 30 nt, Homo Sapiens
agggaggguaaaagacugaagauuuguguu

SEQ ID NO: 259729 - RNA, 32 nt, Homo Sapiens
ugaucugugacauauggguuauauuauugugu

SEQ ID NO: 259730 - RNA, 32 nt, Homo Sapiens
aaauuaggagucagcugccagcguuuuugugu

SEQ ID NO: 259731 - RNA, 32 nt, Homo Sapiens
gcugcuuuucuuuucuaaccaagaggcugguu

SEQ ID NO: 259732 - RNA, 32 nt, Homo Sapiens
aaaaaggagaguaacaaauacacaauucacac

SEQ ID NO: 259733 - RNA, 32 nt, Homo Sapiens
aaauagccccuccugggacucccucaaccccc

SEQ ID NO: 259734 - RNA, 32 nt, Homo Sapiens
uuguacuaauuauaaaauuggcacauaauuca

SEQ ID NO: 259735 - RNA, 32 nt, Homo Sapiens
auuucagaacauuuuucaguaccuaguuuuau

SEQ ID NO: 259736 - RNA, 32 nt, Homo Sapiens
cauguuuugugccugcccucccucuuggggag

SEQ ID NO: 259737 - RNA, 32 nt, Homo Sapiens
ucgggccggcgcucccuucucugccagguggc

SEQ ID NO: 259738 - RNA, 31 nt, Homo Sapiens
agauugcaagagguuucuuccccaaaauaua

SEQ ID NO: 259739 - RNA, 32 nt, Homo Sapiens
acagcccggcccggagccccgccuccaccgcc

SEQ ID NO: 259740 - RNA, 32 nt, Homo Sapiens
ccuggugccgugguggcggucacucccucugc

SEQ ID NO: 259741 - RNA, 32 nt, Homo Sapiens
agaaggagaccuuagcuuccccggcuucaagu

SEQ ID NO: 259742 - RNA, 32 nt, Homo Sapiens
ucauguaaggauuuaaacuugcugaauguaaa

SEQ ID NO: 259743 - RNA, 32 nt, Homo Sapiens
agagagggacagcuccggggcccaagcaggua

SEQ ID NO: 259744 - RNA, 32 nt, Homo Sapiens
gcaggaccugcgccaguggccgcugggcacag

SEQ ID NO: 259745 - RNA, 32 nt, Homo Sapiens
ccccagcaccgaggacagugccaggcauggag

SEQ ID NO: 259746 - RNA, 26 nt, Homo Sapiens
caugcgcgcggcucgccgcggucuuc

SEQ ID NO: 259747 - RNA, 32 nt, Homo Sapiens
aggaaucaaaauuaaucagggaucuuuucaca

SEQ ID NO: 259748 - RNA, 32 nt, Homo Sapiens
gcuuuaggacacaaacaaaaacaaagggcaug

SEQ ID NO: 259749 - RNA, 32 nt, Homo Sapiens
uccaucagauuucaaauguuuauacacaaugu

SEQ ID NO: 259750 - RNA, 32 nt, Homo Sapiens
acugccuagcuaaacugccucugaauuucuga

SEQ ID NO: 259751 - RNA, 32 nt, Homo Sapiens
ugauuacugaucauuacuucugcauuuuauuu

SEQ ID NO: 259752 - RNA, 32 nt, Homo Sapiens
gccagucucuuugaacucuggaucuuugcuuu

SEQ ID NO: 259753 - RNA, 32 nt, Homo Sapiens
aggcuuguaaacauauaacauaaaaauggcuu

SEQ ID NO: 259754 - RNA, 32 nt, Homo Sapiens
uguccuccagaccccagaauggucgcaccuga

SEQ ID NO: 259755 - RNA, 32 nt, Homo Sapiens
uccgugugaauucucacauuagacuuuaauuc

SEQ ID NO: 259756 - RNA, 29 nt, Homo Sapiens
cagccugggggacagagcgagacucugcc

SEQ ID NO: 259757 - RNA, 32 nt, Homo Sapiens
gugauacagcaguuuuuuuuuauugucacagg

SEQ ID NO: 259758 - RNA, 32 nt, Homo Sapiens
uucaucagaaguuacacagaccacagugauuu

SEQ ID NO: 259759 - RNA, 32 nt, Homo Sapiens
gaauuguuuuagcugauccaucuuuaacgcag

SEQ ID NO: 259760 - RNA, 32 nt, Homo Sapiens
uaaccuuaaagauguuaauguugauggaaauu

SEQ ID NO: 259761 - RNA, 32 nt, Homo Sapiens
uuuuuuauuucuaaugccuuguccucuuaaaa

SEQ ID NO: 259762 - RNA, 32 nt, Homo Sapiens
cgacucgccgugcgcccggcgcccaccgcagc

SEQ ID NO: 259763 - RNA, 32 nt, Homo Sapiens
uuuggaauccuuuucuucuccuuugguagcag

SEQ ID NO: 259764 - RNA, 32 nt, Homo Sapiens
ggcccuuauccuguuaccucugcaggagugac

SEQ ID NO: 259765 - RNA, 32 nt, Homo Sapiens
ccugaccugugcuguggggcuggcaguacucu

SEQ ID NO: 259766 - RNA, 32 nt, Homo Sapiens
gggcggcacuggccagcgccagcccucgggcc

SEQ ID NO: 259767 - RNA, 32 nt, Homo Sapiens
ccuguccccucuaugaccucgcccuccacaaa

SEQ ID NO: 259768 - RNA, 32 nt, Homo Sapiens
guucuggugagauaugcacucuauuuuguugg

SEQ ID NO: 259769 - RNA, 32 nt, Homo Sapiens
cggcagaggugauuuggguguuuuaaagaaag

SEQ ID NO: 259770 - RNA, 32 nt, Homo Sapiens
cgucgcgugcugagggagacgcaggaggugga

SEQ ID NO: 259771 - RNA, 32 nt, Homo Sapiens
cccgcuuccucuggaucucucuaggagcugac

SEQ ID NO: 259772 - RNA, 32 nt, Homo Sapiens
cacuucauuugauacuguuuuucauguucuug

SEQ ID NO: 259773 - RNA, 32 nt, Homo Sapiens
caaaauguacucacuucaguacuucagcucuu

SEQ ID NO: 259774 - RNA, 32 nt, Homo Sapiens
gagccccuggccccgccgcggcucucacuauc

SEQ ID NO: 259775 - RNA, 32 nt, Homo Sapiens
ucucggcucacugcaacccccaucucccaggu

SEQ ID NO: 259776 - RNA, 32 nt, Homo Sapiens
auuaccugacuucaaauuauacuacagagcug

SEQ ID NO: 259777 - RNA, 32 nt, Homo Sapiens
agcuggucgcgguggcuucugccugugauucc

SEQ ID NO: 259778 - RNA, 32 nt, Homo Sapiens
uuccauagaaggauuaaauucuaagcaccagg

SEQ ID NO: 259779 - RNA, 32 nt, Homo Sapiens
gaggcagugauuccccucccgccccgcacaga

SEQ ID NO: 259780 - RNA, 32 nt, Homo Sapiens
ugcuccccgcaugcaccgcaucgggucucagu

SEQ ID NO: 259781 - RNA, 32 nt, Homo Sapiens
cugcagugaacagcuugaguugucucuuaaga

SEQ ID NO: 259782 - RNA, 32 nt, Homo Sapiens
uguggcgucgacuccgacccaggcagccagca

SEQ ID NO: 259783 - RNA, 32 nt, Homo Sapiens
ugugcgggugugugauuugaacagguuuauaa

SEQ ID NO: 259784 - RNA, 32 nt, Homo Sapiens
uucaucuguguaauuuuuauuaacuuugagau

SEQ ID NO: 259785 - RNA, 32 nt, Homo Sapiens
aagccuaggaggcugggccggagggaggcgga

SEQ ID NO: 259786 - RNA, 32 nt, Homo Sapiens
aaagauuuuuauuacuucuuuuuggagucuuu

SEQ ID NO: 259787 - RNA, 32 nt, Homo Sapiens
gcugagaguuugauuuauaaagaaauuauggu

SEQ ID NO: 259788 - RNA, 32 nt, Homo Sapiens
gcccagcuguauguagaagagccccggacagc

SEQ ID NO: 259789 - RNA, 32 nt, Homo Sapiens
ugcuaagcucucucccuucucuauccuguuuc

SEQ ID NO: 259790 - RNA, 32 nt, Homo Sapiens
aggugccagaccgcggauuuuauuuagcaagc

SEQ ID NO: 259791 - RNA, 32 nt, Homo Sapiens
ucucuuucuucuuuuucuucacuagaggcauc

SEQ ID NO: 259792 - RNA, 32 nt, Homo Sapiens
cuugcgcggugggacagccugggcccucucaa

SEQ ID NO: 259793 - RNA, 32 nt, Homo Sapiens
gggguggcggggggcgggagcuuggauaggau

SEQ ID NO: 259794 - RNA, 30 nt, Homo Sapiens
aauuuggacuuaccuaacaagaguauaaau

SEQ ID NO: 259795 - RNA, 32 nt, Homo Sapiens
uguaauauuuaguucucaaguuugaauuauca

SEQ ID NO: 259796 - RNA, 32 nt, Homo Sapiens
aaagaucaaacacagcauuucauguaaucaga

SEQ ID NO: 259797 - RNA, 32 nt, Homo Sapiens
ccccaccacacaaacacacacacacacacaca

SEQ ID NO: 259798 - RNA, 32 nt, Homo Sapiens
gccuuggaugauuucaucuacucucauguuuu

SEQ ID NO: 259799 - RNA, 32 nt, Homo Sapiens
aaaaacaagagagagaaauucauauuauuauu

SEQ ID NO: 259800 - RNA, 31 nt, Homo Sapiens
cagggcgccgcguuucugccccgccagcgcc

SEQ ID NO: 259801 - RNA, 32 nt, Homo Sapiens
caaaagcaaggugggagucuauuuuuguacau

SEQ ID NO: 259802 - RNA, 32 nt, Homo Sapiens
cagggggccuuugcaggcccagcccaccccgc

SEQ ID NO: 259803 - RNA, 32 nt, Homo Sapiens
cuggggcucgggcuuugggaguuguuucacug

SEQ ID NO: 259804 - RNA, 32 nt, Homo Sapiens
uguugcuucccucccccuauagggcuggaauc

SEQ ID NO: 259805 - RNA, 32 nt, Homo Sapiens
gaaaaguuuuaaauguaguacagguuagaccc

SEQ ID NO: 259806 - RNA, 32 nt, Homo Sapiens
agaguggcucacuggcugggaguccuuaccuc

SEQ ID NO: 259807 - RNA, 32 nt, Homo Sapiens
guuuaaaacaguuuaaugaguaaguuuagaug

SEQ ID NO: 259808 - RNA, 32 nt, Homo Sapiens
ucauguuggagaaaaaccuuaugaugugaugg

SEQ ID NO: 259809 - RNA, 32 nt, Homo Sapiens
aacuaguugucugacagaaauguuaggcuuca

SEQ ID NO: 259810 - RNA, 32 nt, Homo Sapiens
auauguccuaagucagaguagagucaacaaga

SEQ ID NO: 259811 - RNA, 32 nt, Homo Sapiens
ggcacgagggcggaaaagaaagccucagaacg

SEQ ID NO: 259812 - RNA, 32 nt, Homo Sapiens
uaaugagauagcagcuuuuuucugggacccag

SEQ ID NO: 259813 - RNA, 32 nt, Homo Sapiens
ccuggaagggaagugaggaggagggacaagga

SEQ ID NO: 259814 - RNA, 32 nt, Homo Sapiens
cugccacugccaucgccauccaucgcauucca

SEQ ID NO: 259815 - RNA, 32 nt, Homo Sapiens
cugccugcaccaagcuucccuccucuggagaa

SEQ ID NO: 259816 - RNA, 27 nt, Homo Sapiens
acauggcuccgucuccacagcggggcu

SEQ ID NO: 259817 - RNA, 32 nt, Homo Sapiens
cuggcccgggaccugcugcugcuccagccaug

SEQ ID NO: 259818 - RNA, 32 nt, Homo Sapiens
caaaauggcggcggcagcggcggcagcagagu

SEQ ID NO: 259819 - RNA, 32 nt, Homo Sapiens
ugaggcagccuggccuugccuucacagggcuc

SEQ ID NO: 259820 - RNA, 32 nt, Homo Sapiens
ccggauuccagcgauuuuccugccucagccuc

SEQ ID NO: 259821 - RNA, 32 nt, Homo Sapiens
uucacacucagcuacaugugaccuccagcuug

SEQ ID NO: 259822 - RNA, 32 nt, Homo Sapiens
ugguucacaccuguaaucccagcacuuuggga

SEQ ID NO: 259823 - RNA, 32 nt, Homo Sapiens
accagccuggccagcauagugaaacccugucu

SEQ ID NO: 259824 - RNA, 32 nt, Homo Sapiens
uggcucacaccuguaauccuagcacuuuggga

SEQ ID NO: 259825 - RNA, 32 nt, Homo Sapiens
uggcucacaccuguaaucccagcacuucggga

SEQ ID NO: 259826 - RNA, 32 nt, Homo Sapiens
uccccugucuccugggucucuggaggagccca

SEQ ID NO: 259827 - RNA, 32 nt, Homo Sapiens
ggcgcgcaggugccgggacguggaugcccagg

SEQ ID NO: 259828 - RNA, 32 nt, Homo Sapiens
gcaggagagggcccgggcggcgcggacgauga

SEQ ID NO: 259829 - RNA, 31 nt, Homo Sapiens
aaggucaugugagcuuugccaaggcuucucc

SEQ ID NO: 259830 - RNA, 32 nt, Homo Sapiens
cauccuuggaggcgagauggcuccuugcagag

SEQ ID NO: 259831 - RNA, 32 nt, Homo Sapiens
aaggcggugccgagccccugcugcugcaugaa

SEQ ID NO: 259832 - RNA, 32 nt, Homo Sapiens
uggcaggucuaaugggggaggcggcgucccag

SEQ ID NO: 259833 - RNA, 32 nt, Homo Sapiens
uguuuugaucuuuugggaccuacccaaaucca

SEQ ID NO: 259834 - RNA, 32 nt, Homo Sapiens
ugccaccuaaaacauuguuaugcuggaaaugc

SEQ ID NO: 259835 - RNA, 32 nt, Homo Sapiens
gcagcgggcugcugacuuccacagccagccuu

SEQ ID NO: 259836 - RNA, 32 nt, Homo Sapiens
ccagcauccagccagugaguggcacccaaugc

SEQ ID NO: 259837 - RNA, 32 nt, Homo Sapiens
uggagaggcccgcucucacaccgggucgggcc

SEQ ID NO: 259838 - RNA, 32 nt, Homo Sapiens
cuaaugacuccgacuuggcagacgcuaaacuc

SEQ ID NO: 259839 - RNA, 32 nt, Homo Sapiens
aauguaaugaguaaaaugaauuacuguauuuu

SEQ ID NO: 259840 - RNA, 32 nt, Homo Sapiens
ugugcaggcccggcucggcuccugguccccgg

SEQ ID NO: 259841 - RNA, 32 nt, Homo Sapiens
cucaaauaaaagacauuuugauguaaaaaaaa

SEQ ID NO: 259842 - RNA, 32 nt, Homo Sapiens
cccauucagauaaauggcaguacuuuaggaca

SEQ ID NO: 259843 - RNA, 32 nt, Homo Sapiens
cggccagcgcgucgagggaggggccagcgaca

SEQ ID NO: 259844 - RNA, 32 nt, Homo Sapiens
cuccuguagacacccgccgcccucucccggcu

SEQ ID NO: 259845 - RNA, 32 nt, Homo Sapiens
cuguugaaaaggaggaucaggccaaccccaaa

SEQ ID NO: 259846 - RNA, 32 nt, Homo Sapiens
ucccacuaaaaugacucgagaaguguuuagac

SEQ ID NO: 259847 - RNA, 32 nt, Homo Sapiens
aacucaucaaagcugugagccaguuaauagcc

SEQ ID NO: 259848 - RNA, 32 nt, Homo Sapiens
cgggccgugccgccagcguccgucgggagagu

SEQ ID NO: 259849 - RNA, 31 nt, Homo Sapiens
gcccguggugaugccaugccccgccaccacg

SEQ ID NO: 259850 - RNA, 32 nt, Homo Sapiens
ccuacccaccccuucccgcccucccccugcca

SEQ ID NO: 259851 - RNA, 32 nt, Homo Sapiens
auaauagaugcauuuuuccaugcauauuuucu

SEQ ID NO: 259852 - RNA, 32 nt, Homo Sapiens
gggaccugaaccccaaggagcccagagggcac

SEQ ID NO: 259853 - RNA, 32 nt, Homo Sapiens
ggaaggugagcggcugcgggacccagccccuc

SEQ ID NO: 259854 - RNA, 32 nt, Homo Sapiens
ggaccuaauagcauuucuuugugcaguuaggu

SEQ ID NO: 259855 - RNA, 32 nt, Homo Sapiens
aguauuucaaagaagcaauuauguaaaguugu

SEQ ID NO: 259856 - RNA, 32 nt, Homo Sapiens
gcugggcuccacuucauccagaugaaggaaag

SEQ ID NO: 259857 - RNA, 32 nt, Homo Sapiens
ucggaacuuucuucuuuuuuaacuaguggccc

SEQ ID NO: 259858 - RNA, 32 nt, Homo Sapiens
gauugaauauauauguacauauauaugaaaua

SEQ ID NO: 259859 - RNA, 32 nt, Homo Sapiens
caaauucaaauuauuauuuugguccuggucag

SEQ ID NO: 259860 - RNA, 32 nt, Homo Sapiens
ucuggucuauagaguuauggauucacuaacag

SEQ ID NO: 259861 - RNA, 32 nt, Homo Sapiens
gggccaggcugugcccagccagcccugggaga

SEQ ID NO: 259862 - RNA, 32 nt, Homo Sapiens
gaccucagccccagcccgcucccccaccccgc

SEQ ID NO: 259863 - RNA, 29 nt, Homo Sapiens
uggggguggggacagggagccaccggucg

SEQ ID NO: 259864 - RNA, 32 nt, Homo Sapiens
ccgcgagggacgcagggcguugggaacagagg

SEQ ID NO: 259865 - RNA, 32 nt, Homo Sapiens
ccauuuuucucucccacccccaacgccaucuc

SEQ ID NO: 259866 - RNA, 32 nt, Homo Sapiens
aaaucccgaagccccaguaucucaggauauga

SEQ ID NO: 259867 - RNA, 32 nt, Homo Sapiens
ugggacuaaaaccugaugggacaauaacgccu

SEQ ID NO: 259868 - RNA, 32 nt, Homo Sapiens
cugucccccuccccuccccccggcacaccucu

SEQ ID NO: 259869 - RNA, 32 nt, Homo Sapiens
caggucguggguucuccuuugagagugaccac

SEQ ID NO: 259870 - RNA, 32 nt, Homo Sapiens
gucaucgucuucggcuucaacacccgcucggc

SEQ ID NO: 259871 - RNA, 30 nt, Homo Sapiens
aacuuuuggcuuucgggggaaagcucugag

SEQ ID NO: 259872 - RNA, 32 nt, Homo Sapiens
agagucuccagaugggggcaucagggugaggu

SEQ ID NO: 259873 - RNA, 32 nt, Homo Sapiens
auauuccaugcuuguuuucucauucacuggca

SEQ ID NO: 259874 - RNA, 32 nt, Homo Sapiens
uuggagggaagcugcgaggaggcgcaggaagu

SEQ ID NO: 259875 - RNA, 32 nt, Homo Sapiens
aagaugaaaaacaaaagcaagggagaagccag

SEQ ID NO: 259876 - RNA, 32 nt, Homo Sapiens
ucauuugaucaggucugaaaucuuuagcacuu

SEQ ID NO: 259877 - RNA, 32 nt, Homo Sapiens
agcagugcccuggcuguguccuggacgggugg

SEQ ID NO: 259878 - RNA, 32 nt, Homo Sapiens
cauauuuacaaccuagaaguaacuggugauau

SEQ ID NO: 259879 - RNA, 32 nt, Homo Sapiens
aaugcuagaugaugaguuagugggugcagcgc

SEQ ID NO: 259880 - RNA, 32 nt, Homo Sapiens
uguaaugagucuggcaaagccuuaaugagcag

SEQ ID NO: 259881 - RNA, 32 nt, Homo Sapiens
ggagcuugacuucaugccagcuauaaucuccc

SEQ ID NO: 259882 - RNA, 32 nt, Homo Sapiens
gaccucaucauucugggaaaggugguucacga

SEQ ID NO: 259883 - RNA, 29 nt, Homo Sapiens
ugcuugccauaauuugucugagaaggaau

SEQ ID NO: 259884 - RNA, 32 nt, Homo Sapiens
cgggcgugcaggggccccggguucgcagcggc

SEQ ID NO: 259885 - RNA, 32 nt, Homo Sapiens
gcauccugccuugcugcucugucccccacauc

SEQ ID NO: 259886 - RNA, 32 nt, Homo Sapiens
cuauuauuuuauuaaucaaucuguagacaugu

SEQ ID NO: 259887 - RNA, 32 nt, Homo Sapiens
cgggcggcgggugguggcugccaggcggcucg

SEQ ID NO: 259888 - RNA, 32 nt, Homo Sapiens
gaacaaccaaaauaucucucuguagauaccgu

SEQ ID NO: 259889 - RNA, 32 nt, Homo Sapiens
cauuuguaaaauguaagagguauauauaauau

SEQ ID NO: 259890 - RNA, 32 nt, Homo Sapiens
aaagggccaaauagaguuuuuauauuuguuau

SEQ ID NO: 259891 - RNA, 32 nt, Homo Sapiens
agccuagugggccuggccccucccagccccgc

SEQ ID NO: 259892 - RNA, 32 nt, Homo Sapiens
cuugcgcggcggcggcuauggcggcggaggag

SEQ ID NO: 259893 - RNA, 30 nt, Homo Sapiens
cccgagaucagcggcggcggugaccgcgag

SEQ ID NO: 259894 - RNA, 32 nt, Homo Sapiens
ugugcuauauacaaccauuugcauucagaaag

SEQ ID NO: 259895 - RNA, 32 nt, Homo Sapiens
gaaccucggcccgggcgcccucgucggccgcg

SEQ ID NO: 259896 - RNA, 32 nt, Homo Sapiens
accccggcccucaucacccgcuggcacugauc

SEQ ID NO: 259897 - RNA, 32 nt, Homo Sapiens
cauugaagucagaugugguaacuguuaaauug

SEQ ID NO: 259898 - RNA, 32 nt, Homo Sapiens
cgggagccgaggaggacggcgugggcccuguc

SEQ ID NO: 259899 - RNA, 32 nt, Homo Sapiens
caugcccagccugugcgccgggggaccugggg

SEQ ID NO: 259900 - RNA, 32 nt, Homo Sapiens
ggcagccuuuucuccuucauuuuccccacauu

SEQ ID NO: 259901 - RNA, 32 nt, Homo Sapiens
gagaugaaggagaaaaggauggcauugaauua

SEQ ID NO: 259902 - RNA, 32 nt, Homo Sapiens
agggaauggguagcauaaggaaaggaaauggc

SEQ ID NO: 259903 - RNA, 32 nt, Homo Sapiens
aaagugaaagacuugugaagcauaugacauuc

SEQ ID NO: 259904 - RNA, 27 nt, Homo Sapiens
cuuuaguccuucugagcacucucucgg

SEQ ID NO: 259905 - RNA, 32 nt, Homo Sapiens
aaccuagcaacgcagggaccgcggcgguaacu

SEQ ID NO: 259906 - RNA, 32 nt, Homo Sapiens
cugggucugcacccaccccugcccugacuugu

SEQ ID NO: 259907 - RNA, 32 nt, Homo Sapiens
cucuugcuucuuaggcggcccgaggacgccau

SEQ ID NO: 259908 - RNA, 32 nt, Homo Sapiens
auaaaauuucaaaagaaaagguugucuuuuaa

SEQ ID NO: 259909 - RNA, 29 nt, Homo Sapiens
aagacaucauguaugugacuuagauacug

SEQ ID NO: 259910 - RNA, 32 nt, Homo Sapiens
cuauguggguggcaagccacccaggugccgag

SEQ ID NO: 259911 - RNA, 32 nt, Homo Sapiens
ugguguauccucaucccuuccacagugaccuc

SEQ ID NO: 259912 - RNA, 32 nt, Homo Sapiens
acuaugguuauucauccaacccuuggaucucu

SEQ ID NO: 259913 - RNA, 32 nt, Homo Sapiens
aggagaauaugggacuccaugaaccaguguug

SEQ ID NO: 259914 - RNA, 32 nt, Homo Sapiens
aaccccuccccuccccccuguaaacacagugc

SEQ ID NO: 259915 - RNA, 32 nt, Homo Sapiens
cuuuugauucaauuauacugcacauguuuuaa

SEQ ID NO: 259916 - RNA, 32 nt, Homo Sapiens
uccagugcuguuguccuuggccugcagcagga

SEQ ID NO: 259917 - RNA, 32 nt, Homo Sapiens
ggcagccucgucuagcgcgcgccgcgcagacg

SEQ ID NO: 259918 - RNA, 32 nt, Homo Sapiens
ugggcccuaacuggcuggccccucccagcgcu

SEQ ID NO: 259919 - RNA, 32 nt, Homo Sapiens
ggcacgagccagucuccgcgccuccacccagc

SEQ ID NO: 259920 - RNA, 32 nt, Homo Sapiens
cgcugaccagcagcauggaggaccccgccgcg

SEQ ID NO: 259921 - RNA, 32 nt, Homo Sapiens
guuggcgugcuagugggauggcagaugaggaa

SEQ ID NO: 259922 - RNA, 32 nt, Homo Sapiens
uuggggggcugauguccccauacaccuggcuc

SEQ ID NO: 259923 - RNA, 32 nt, Homo Sapiens
uaaaugcucccucuuuugggaggccuuuuucu

SEQ ID NO: 259924 - RNA, 32 nt, Homo Sapiens
ucuguaagucgugacagccuucaucagugcaa

SEQ ID NO: 259925 - RNA, 32 nt, Homo Sapiens
aaaaccagacugccacugccccuacuugggcc

SEQ ID NO: 259926 - RNA, 30 nt, Homo Sapiens
cuuuuuuaucaccacagaguaacgcagacc

SEQ ID NO: 259927 - RNA, 32 nt, Homo Sapiens
gguuuucugugccuuuccauuauuucuucagc

SEQ ID NO: 259928 - RNA, 32 nt, Homo Sapiens
guugagcgggcgcugacggacccggcggcaug

SEQ ID NO: 259929 - RNA, 32 nt, Homo Sapiens
ugcgggccgggcgggagugcggcgagccggcu

SEQ ID NO: 259930 - RNA, 32 nt, Homo Sapiens
gauaggucaggagggacccaggaccugagcuc

SEQ ID NO: 259931 - RNA, 32 nt, Homo Sapiens
cucuuccuucccuguuugucaauguuuuauuc

SEQ ID NO: 259932 - RNA, 32 nt, Homo Sapiens
uaagaauguggggccuuuuuuaugauuuugua

SEQ ID NO: 259933 - RNA, 32 nt, Homo Sapiens
uuggauucauuuccucaaaauguggagagaaa

SEQ ID NO: 259934 - RNA, 32 nt, Homo Sapiens
cgagggcuugggccaggcgcgcgggccguugg

SEQ ID NO: 259935 - RNA, 31 nt, Homo Sapiens
guccugagggcggggccgaacaccuaacucc

SEQ ID NO: 259936 - RNA, 32 nt, Homo Sapiens
ugaccaggaccacccccagggcccgugcugcg

SEQ ID NO: 259937 - RNA, 32 nt, Homo Sapiens
gccucuggcgcgcucugcagcgcggacccgcg

SEQ ID NO: 259938 - RNA, 32 nt, Homo Sapiens
acgcccgcagcccgcggcgccaccagcccagc

SEQ ID NO: 259939 - RNA, 32 nt, Homo Sapiens
acaaacaaacaaaaaaccagaaugcauuguau

SEQ ID NO: 259940 - RNA, 32 nt, Homo Sapiens
gacagagucuuucucugucacccaggcuggag

SEQ ID NO: 259941 - RNA, 32 nt, Homo Sapiens
gaaguaaaauuugagaggaagacaauauuaau

SEQ ID NO: 259942 - RNA, 32 nt, Homo Sapiens
uccaugcuucucuacagguccaaauacugaau

SEQ ID NO: 259943 - RNA, 32 nt, Homo Sapiens
cgaagacaaaagaucugggauacuguucugcu

SEQ ID NO: 259944 - RNA, 32 nt, Homo Sapiens
uucaguuuucuuuacacaaacagguaaucaaa

SEQ ID NO: 259945 - RNA, 32 nt, Homo Sapiens
ucucuggcucugcugcaggucucugcacuccu

SEQ ID NO: 259946 - RNA, 32 nt, Homo Sapiens
agugaacauagcugggggaauuuuaaagguau

SEQ ID NO: 259947 - RNA, 32 nt, Homo Sapiens
cuccugaccccucucucccucauguccuggga

SEQ ID NO: 259948 - RNA, 32 nt, Homo Sapiens
ccauuugggacaugacugaugugcuucagucu

SEQ ID NO: 259949 - RNA, 32 nt, Homo Sapiens
ugucagccuguggaguuguuuccccaagagag

SEQ ID NO: 259950 - RNA, 32 nt, Homo Sapiens
agaaugugaacgcucaccuugcuccgucacgg

SEQ ID NO: 259951 - RNA, 32 nt, Homo Sapiens
auacugcugugcuaccugaugcagugaccgug

SEQ ID NO: 259952 - RNA, 32 nt, Homo Sapiens
guuaaaagguggcuuugaaggaggaagacacc

SEQ ID NO: 259953 - RNA, 32 nt, Homo Sapiens
uacccacuaaggcauaaaguugggaaauacuu

SEQ ID NO: 259954 - RNA, 32 nt, Homo Sapiens
uacaguuuuuaacuuagguuuuaauuuuacaa

SEQ ID NO: 259955 - RNA, 32 nt, Homo Sapiens
cuuccuccuggccccaggaagggcuggcaucg

SEQ ID NO: 259956 - RNA, 32 nt, Homo Sapiens
gagggcuuaggacucuuccucagucuucuucc

SEQ ID NO: 259957 - RNA, 32 nt, Homo Sapiens
ggccucuucugcccagguggguuggaacacgu

SEQ ID NO: 259958 - RNA, 32 nt, Homo Sapiens
cauagcuacuaaaaucagugaccuugaacaua

SEQ ID NO: 259959 - RNA, 32 nt, Homo Sapiens
ccuugcuuuuaggggagggaagcggggaagga

SEQ ID NO: 259960 - RNA, 32 nt, Homo Sapiens
agggcacuaauagggacaaguagcgauguucc

SEQ ID NO: 259961 - RNA, 32 nt, Homo Sapiens
gcugcccccacacaauaaaugguaacauagga

SEQ ID NO: 259962 - RNA, 32 nt, Homo Sapiens
ccucaggaugccagcuggagcuggcacugccc

SEQ ID NO: 259963 - RNA, 32 nt, Homo Sapiens
ccucauccucaauuaccuugucccucauuacu

SEQ ID NO: 259964 - RNA, 32 nt, Homo Sapiens
aaauauuggugggaagacccaccgcugugggg

SEQ ID NO: 259965 - RNA, 31 nt, Homo Sapiens
ucuguccaagccaucagcuccuugggacuga

SEQ ID NO: 259966 - RNA, 32 nt, Homo Sapiens
gaaaggccauguacaagaggaaguacucagcc

SEQ ID NO: 259967 - RNA, 32 nt, Homo Sapiens
gagauugugguuucauucuguauuuuguuuuu

SEQ ID NO: 259968 - RNA, 32 nt, Homo Sapiens
gcgggucgcuggggcccggcgcuaucgcggcc

SEQ ID NO: 259969 - RNA, 32 nt, Homo Sapiens
cacaacaaggggugggggcccgcaggcggggc

SEQ ID NO: 259970 - RNA, 32 nt, Homo Sapiens
cuugccuuugggauugggauccaaggguucuc

SEQ ID NO: 259971 - RNA, 32 nt, Homo Sapiens
ucguggccucccuggggugggugggguucucu

SEQ ID NO: 259972 - RNA, 32 nt, Homo Sapiens
caagcggaucauuugaggucaggaguucgaga

SEQ ID NO: 259973 - RNA, 32 nt, Homo Sapiens
uaguuugucauaauaaaacuuggcagauucua

SEQ ID NO: 259974 - RNA, 32 nt, Homo Sapiens
uaaagaacauucaaauuggaaaggaagaagac

SEQ ID NO: 259975 - RNA, 30 nt, Homo Sapiens
cgagugcgcgcgcacacaccccaguguguc

SEQ ID NO: 259976 - RNA, 32 nt, Homo Sapiens
ucggguggggacgaagaggggccauccucagg

SEQ ID NO: 259977 - RNA, 32 nt, Homo Sapiens
cgcugcaccugccugccgcugcaggaaacauu

SEQ ID NO: 259978 - RNA, 32 nt, Homo Sapiens
caacauuuuucaaaaucaggagauuuucgucc

SEQ ID NO: 259979 - RNA, 32 nt, Homo Sapiens
guaaauaugaaacuuuuuaaaucugauuuucu

SEQ ID NO: 259980 - RNA, 32 nt, Homo Sapiens
gaggagccgcggcucgcggggccggagccagg

SEQ ID NO: 259981 - RNA, 32 nt, Homo Sapiens
auuucuuuaaaauggagggaaaagaccaugau

SEQ ID NO: 259982 - RNA, 32 nt, Homo Sapiens
aaccucccugaacaccuccccaacucugcgcu

SEQ ID NO: 259983 - RNA, 32 nt, Homo Sapiens
gguuacuccccuucccaccccaucccuuaauu

SEQ ID NO: 259984 - RNA, 32 nt, Homo Sapiens
uucccaggaagacauggccucguucuuggugu

SEQ ID NO: 259985 - RNA, 32 nt, Homo Sapiens
ucauagagagaaaaaucuccaaugcuuuugaa

SEQ ID NO: 259986 - RNA, 32 nt, Homo Sapiens
cccugcccugucacucaccucaaaccugccau

SEQ ID NO: 259987 - RNA, 32 nt, Homo Sapiens
augcuaguuauuuuaacacauuguaucauuaa

SEQ ID NO: 259988 - RNA, 32 nt, Homo Sapiens
uugugagccccucucccucuccgcccucgccc

SEQ ID NO: 259989 - RNA, 32 nt, Homo Sapiens
auaaacugugguuaagaagaaaaauuggccgg

SEQ ID NO: 259990 - RNA, 32 nt, Homo Sapiens
cuucuguuuccuagcuuuuucuuucuggaguu

SEQ ID NO: 259991 - RNA, 32 nt, Homo Sapiens
ccagcccuggggacuuauugaaggaccaaaua

SEQ ID NO: 259992 - RNA, 32 nt, Homo Sapiens
caauugggaauggcugggagggggugucccca

SEQ ID NO: 259993 - RNA, 32 nt, Homo Sapiens
aaguuuuaaguaacauuuaaaaauauuaaagc

SEQ ID NO: 259994 - RNA, 32 nt, Homo Sapiens
gggaaauugcugcagucaacaccuggagcccu

SEQ ID NO: 259995 - RNA, 32 nt, Homo Sapiens
agaaacacguacuuaaauuuuuaugcuuauca

SEQ ID NO: 259996 - RNA, 32 nt, Homo Sapiens
ccaauuguuuuuaacugccauguaauauuuua

SEQ ID NO: 259997 - RNA, 32 nt, Homo Sapiens
uccuaaugcucucccucccccagccccccacc

SEQ ID NO: 259998 - RNA, 32 nt, Homo Sapiens
ccccucaccuucuccuucuugauuccaaagcc

SEQ ID NO: 259999 - RNA, 32 nt, Homo Sapiens
uuguaugucauguuagcaaacgcagcuccaac

SEQ ID NO: 260000 - RNA, 32 nt, Homo Sapiens
uuugugcuggaugacaggauucccuggccugg

SEQ ID NO: 260001 - RNA, 32 nt, Homo Sapiens
cucuguuuggaaagaaaaggaaccgcacuggg

SEQ ID NO: 260002 - RNA, 32 nt, Homo Sapiens
ucuuugcccaaguugcucuauggucaagugag

SEQ ID NO: 260003 - RNA, 32 nt, Homo Sapiens
gccucuguggcagcugcgagugugucugauuu

SEQ ID NO: 260004 - RNA, 32 nt, Homo Sapiens
cagccgccccgcugcgcccaccuccccggcug

SEQ ID NO: 260005 - RNA, 32 nt, Homo Sapiens
guuuugaaggauuuuuucuuacauuuaacugc

SEQ ID NO: 260006 - RNA, 32 nt, Homo Sapiens
uaauuuggaggcgagcggggagguggaggaag

SEQ ID NO: 260007 - RNA, 32 nt, Homo Sapiens
gccggggcauguugccggggcccugggcggga

SEQ ID NO: 260008 - RNA, 32 nt, Homo Sapiens
aagacgcccggagcggcugcugcagccaguag

SEQ ID NO: 260009 - RNA, 32 nt, Homo Sapiens
aacacuuuguaaaagccgcggggcccccauac

SEQ ID NO: 260010 - RNA, 32 nt, Homo Sapiens
auccacgacaacaaucaccaucauccagauga

SEQ ID NO: 260011 - RNA, 32 nt, Homo Sapiens
gagacccgcccggcccggcggugcgaugagcu

SEQ ID NO: 260012 - RNA, 32 nt, Homo Sapiens
gaauggguaauucaagaggccuuucuuuuaaa

SEQ ID NO: 260013 - RNA, 32 nt, Homo Sapiens
aaauuuaaaaaagaugagaugaaaauaaaucu

SEQ ID NO: 260014 - RNA, 32 nt, Homo Sapiens
caauuaagaaagauacauaugcacuuuuacug

SEQ ID NO: 260015 - RNA, 32 nt, Homo Sapiens
aguuuuuucuuggcuuuuguaccaaauuuagg

SEQ ID NO: 260016 - RNA, 32 nt, Homo Sapiens
aggccgcgccgacgccugcgcaauguaugcgg

SEQ ID NO: 260017 - RNA, 32 nt, Homo Sapiens
aagaaugcaguauauuuaguuuuccauuugca

SEQ ID NO: 260018 - RNA, 32 nt, Homo Sapiens
gccguggggaggagggcggugggaggggagga

SEQ ID NO: 260019 - RNA, 32 nt, Homo Sapiens
cauugucuaccugugcagauacggcauugaug

SEQ ID NO: 260020 - RNA, 32 nt, Homo Sapiens
acgcagggaaagggugagaccuuucaaagcug

SEQ ID NO: 260021 - RNA, 32 nt, Homo Sapiens
ucagaauaaaagacaugcaaaguaaaaaaaaa

SEQ ID NO: 260022 - RNA, 32 nt, Homo Sapiens
ggagggcaggagagaggaaagaucugaguugg

SEQ ID NO: 260023 - RNA, 32 nt, Homo Sapiens
aaguggcccacugcagcccuggcgagcaggcu

SEQ ID NO: 260024 - RNA, 32 nt, Homo Sapiens
acaaacucauccauuaauguagauaaagcacu

SEQ ID NO: 260025 - RNA, 32 nt, Homo Sapiens
ccauuguauaaaauuaaaacaugaagaauauu

SEQ ID NO: 260026 - RNA, 32 nt, Homo Sapiens
uuauaggcgucugccaccacgcccggcuaauu

SEQ ID NO: 260027 - RNA, 32 nt, Homo Sapiens
aauaaaauuggcaaccagccacuauuuuguug

SEQ ID NO: 260028 - RNA, 32 nt, Homo Sapiens
ucuacccauagagcuucuugagaaaaauuuuc

SEQ ID NO: 260029 - RNA, 32 nt, Homo Sapiens
cccgcccuuucccacacaccggcccggggagg

SEQ ID NO: 260030 - RNA, 32 nt, Homo Sapiens
gcaaaggcugcuucuccuccagugcugaucuu

SEQ ID NO: 260031 - RNA, 32 nt, Homo Sapiens
guaaucuaguucaauucagcaagcauucaugg

SEQ ID NO: 260032 - RNA, 32 nt, Homo Sapiens
agaauauuguaaaacagacaaacaagaaaaca

SEQ ID NO: 260033 - RNA, 32 nt, Homo Sapiens
gagcugauggccccggcccugcucugugcaca

SEQ ID NO: 260034 - RNA, 32 nt, Homo Sapiens
ugcugucccccuccuccgucugggaccgagga

SEQ ID NO: 260035 - RNA, 32 nt, Homo Sapiens
gccuagagaaguuucagggaaggucagaagag

SEQ ID NO: 260036 - RNA, 32 nt, Homo Sapiens
caccucccgggcccgcugcucuccaugcggga

SEQ ID NO: 260037 - RNA, 32 nt, Homo Sapiens
caguguguaaauuuauucaacuaacgauggga

SEQ ID NO: 260038 - RNA, 32 nt, Homo Sapiens
gcaaauaguuuauguuaauugugucaacagau

SEQ ID NO: 260039 - RNA, 32 nt, Homo Sapiens
aauacaauuuaaaagucagaaaucaguuuggc

SEQ ID NO: 260040 - RNA, 28 nt, Homo Sapiens
cuuccaguuacagcggcaggagcgggac

SEQ ID NO: 260041 - RNA, 32 nt, Homo Sapiens
ucccagggaacuaaaacugaauaaugugagga

SEQ ID NO: 260042 - RNA, 32 nt, Homo Sapiens
cgggcuccggcuccccgcgcgcaagauggcug

SEQ ID NO: 260043 - RNA, 32 nt, Homo Sapiens
cagccccccggccaugcugaaggugguggcug

SEQ ID NO: 260044 - RNA, 29 nt, Homo Sapiens
agcacuuugagaggcagaggcaggaggau

SEQ ID NO: 260045 - RNA, 32 nt, Homo Sapiens
cacccggccggcccggccccagccccauggac

SEQ ID NO: 260046 - RNA, 32 nt, Homo Sapiens
aacguauguauuagucugcuggcaggaauguu

SEQ ID NO: 260047 - RNA, 32 nt, Homo Sapiens
aucaguuuuuaaaauauuuagucuaagaugau

SEQ ID NO: 260048 - RNA, 32 nt, Homo Sapiens
gaggggggagggaggagaaggguuacuugcug

SEQ ID NO: 260049 - RNA, 32 nt, Homo Sapiens
cugcugggucugugcgcuggggcgcccgaucc

SEQ ID NO: 260050 - RNA, 32 nt, Homo Sapiens
gugcaaccaaaaugaaaauguuuaaauuaacu

SEQ ID NO: 260051 - RNA, 32 nt, Homo Sapiens
ggagggccgugcuugucucuagacgaggggaa

SEQ ID NO: 260052 - RNA, 32 nt, Homo Sapiens
cagcagugaugaguggggcuagcugaagccca

SEQ ID NO: 260053 - RNA, 32 nt, Homo Sapiens
guaagaaugcaaaagucuagaggggguaacag

SEQ ID NO: 260054 - RNA, 32 nt, Homo Sapiens
gauaauuucagcucuuacaacaagaacagaaa

SEQ ID NO: 260055 - RNA, 32 nt, Homo Sapiens
gauacccacugcccugaccccugggcaggccc

SEQ ID NO: 260056 - RNA, 32 nt, Homo Sapiens
cccagggugcagagaccuccccacccccaguu

SEQ ID NO: 260057 - RNA, 32 nt, Homo Sapiens
augguucauccacaugcguguugugugcucug

SEQ ID NO: 260058 - RNA, 32 nt, Homo Sapiens
agggacuguaauuuaaugaugcguuuucaaga

SEQ ID NO: 260059 - RNA, 32 nt, Homo Sapiens
ugcugguccccucuccuucccuccuuccagcu

SEQ ID NO: 260060 - RNA, 32 nt, Homo Sapiens
cagcccuccccucccuccccuuaugaggucuc

SEQ ID NO: 260061 - RNA, 32 nt, Homo Sapiens
caguagcuaucaaagaggccuggagggccugg

SEQ ID NO: 260062 - RNA, 32 nt, Homo Sapiens
ggagcugcccucgcgacaugggucacccgccg

SEQ ID NO: 260063 - RNA, 32 nt, Homo Sapiens
uagucuccaaauagguaauacuucgcaauuga

SEQ ID NO: 260064 - RNA, 32 nt, Homo Sapiens
ggcucucgggugggagagcgggaccagaucuc

SEQ ID NO: 260065 - RNA, 32 nt, Homo Sapiens
uccgugcucccggcgagcgggcggagagcggg

SEQ ID NO: 260066 - RNA, 32 nt, Homo Sapiens
uccuagccgcgugcccgggccauggugcggcu

SEQ ID NO: 260067 - RNA, 32 nt, Homo Sapiens
cacaccucaggauuccuccuccuugaaucuga

SEQ ID NO: 260068 - RNA, 32 nt, Homo Sapiens
gcaauuuagauuccuuucccuucucuccaguu

SEQ ID NO: 260069 - RNA, 32 nt, Homo Sapiens
uguguacauaucuauauuguauauaugugaug

SEQ ID NO: 260070 - RNA, 32 nt, Homo Sapiens
auuuucagauauuuuccagggugaaaucugua

SEQ ID NO: 260071 - RNA, 32 nt, Homo Sapiens
ccuauucaagacagcagcauuuuuguauugug

SEQ ID NO: 260072 - RNA, 32 nt, Homo Sapiens
cugcggcccagcuaaggggccuggccacuggg

SEQ ID NO: 260073 - RNA, 32 nt, Homo Sapiens
auguauauuaaacuuuuuauaaaaguuaacau

SEQ ID NO: 260074 - RNA, 32 nt, Homo Sapiens
ggcgcgggagacauuguauacacaucaugcua

SEQ ID NO: 260075 - RNA, 32 nt, Homo Sapiens
gaggauggagaaguguaguuaaucacaccucu

SEQ ID NO: 260076 - RNA, 32 nt, Homo Sapiens
cuauuuggaaaacauguuuaaguuuucugugc

SEQ ID NO: 260077 - RNA, 32 nt, Homo Sapiens
cuguuacugaguuagcucuacucuuuuggacc

SEQ ID NO: 260078 - RNA, 32 nt, Homo Sapiens
ugccucuuaauauaaugacacuauuauagacu

SEQ ID NO: 260079 - RNA, 32 nt, Homo Sapiens
acccucggcaguuggcaggcucccucugcagu

SEQ ID NO: 260080 - RNA, 32 nt, Homo Sapiens
gaacucccgagcucaggugaucugcccgccuc

SEQ ID NO: 260081 - RNA, 32 nt, Homo Sapiens
caaacacguggaucaacagaaaaggaaaauuu

SEQ ID NO: 260082 - RNA, 32 nt, Homo Sapiens
cagggcgucgcagcgccgcgugcggcccacuc

SEQ ID NO: 260083 - RNA, 32 nt, Homo Sapiens
agaccagcuggugcccaugcgcugcugguggu

SEQ ID NO: 260084 - RNA, 32 nt, Homo Sapiens
aucauggaucauuguuauuagcuuuguggcuu

SEQ ID NO: 260085 - RNA, 32 nt, Homo Sapiens
acaccacaggccgcaugcucuaaucggucucu

SEQ ID NO: 260086 - RNA, 32 nt, Homo Sapiens
acagucacugucaucaccacccacccugucac

SEQ ID NO: 260087 - RNA, 32 nt, Homo Sapiens
ccauugucccaguaaagaaaaauaacaaaagu

SEQ ID NO: 260088 - RNA, 32 nt, Homo Sapiens
ucuugcugccccaugaguguggcauuacuggu

SEQ ID NO: 260089 - RNA, 32 nt, Homo Sapiens
cccuucuuccuggaggccccagcaggucccug

SEQ ID NO: 260090 - RNA, 32 nt, Homo Sapiens
agauauacuaaaucagagugcuaaguauagaa

SEQ ID NO: 260091 - RNA, 32 nt, Homo Sapiens
ggggcagaaugaaaccugcgggccccuaaccc

SEQ ID NO: 260092 - RNA, 32 nt, Homo Sapiens
aaagaaagauaauucuaaagcuaaccaaagaa

SEQ ID NO: 260093 - RNA, 32 nt, Homo Sapiens
aagguuaacccaggacacuccuggacagugau

SEQ ID NO: 260094 - RNA, 32 nt, Homo Sapiens
gggacagcacauaccacccccacccaaccugu

SEQ ID NO: 260095 - RNA, 32 nt, Homo Sapiens
uagauggugcuagacccuggaccuccugacuc

SEQ ID NO: 260096 - RNA, 32 nt, Homo Sapiens
ugacugaaccaggagaucuggcuggggcuaag

SEQ ID NO: 260097 - RNA, 32 nt, Homo Sapiens
ucaggcagccccagcuucucuucacccaugga

SEQ ID NO: 260098 - RNA, 32 nt, Homo Sapiens
aaaaaagcuauggcacuagaauuuaagaaaug

SEQ ID NO: 260099 - RNA, 32 nt, Homo Sapiens
ucaaucaauuucacauccauuaaacuuacaag

SEQ ID NO: 260100 - RNA, 32 nt, Homo Sapiens
ugacauggaaaccuggugguauggaagcaugu

SEQ ID NO: 260101 - RNA, 32 nt, Homo Sapiens
cugaagauacagcgguauacaaaccuccaugu

SEQ ID NO: 260102 - RNA, 32 nt, Homo Sapiens
caccaggccccauuugacccccggccuuugcc

SEQ ID NO: 260103 - RNA, 32 nt, Homo Sapiens
cucugcagagccccgcgccccccgcgccggga

SEQ ID NO: 260104 - RNA, 32 nt, Homo Sapiens
agucuuuauuuauuuuaacuauuucuucgaac

SEQ ID NO: 260105 - RNA, 32 nt, Homo Sapiens
aggggccggccuagcuuggggcucuggccuug

SEQ ID NO: 260106 - RNA, 32 nt, Homo Sapiens
cagauaggccccaaaccugugauuuuucuugg

SEQ ID NO: 260107 - RNA, 32 nt, Homo Sapiens
ggcugagugggggaggggaagcaagaagggau

SEQ ID NO: 260108 - RNA, 32 nt, Homo Sapiens
gaggcaggccccagcauucauucaaaccuuuu

SEQ ID NO: 260109 - RNA, 32 nt, Homo Sapiens
cggcgccggccgcuaccgcacuucgggcgcuc

SEQ ID NO: 260110 - RNA, 32 nt, Homo Sapiens
caucuggccccuggcccaucucuucugugccu

SEQ ID NO: 260111 - RNA, 32 nt, Homo Sapiens
gucugcugcccaggcuuccccucuauccagcc

SEQ ID NO: 260112 - RNA, 32 nt, Homo Sapiens
agguuuuaaagacgcuagagugccaaagaaga

SEQ ID NO: 260113 - RNA, 32 nt, Homo Sapiens
uaucagcgaaaugguccauguuuuuccaauua

SEQ ID NO: 260114 - RNA, 32 nt, Homo Sapiens
gugguucucccagcugacccugggcauugccu

SEQ ID NO: 260115 - RNA, 32 nt, Homo Sapiens
uaaucauaauuucuucuuacuggccagauacu

SEQ ID NO: 260116 - RNA, 32 nt, Homo Sapiens
ccaagauggccagccugaaacuguuggccagg

SEQ ID NO: 260117 - RNA, 32 nt, Homo Sapiens
uuccagcacccugcaaaaugagacccucgugg

SEQ ID NO: 260118 - RNA, 32 nt, Homo Sapiens
gcaucacccugccggcccggcgcgggucgggg

SEQ ID NO: 260119 - RNA, 32 nt, Homo Sapiens
gagccaugucauccuccuuucauuuuuggaug

SEQ ID NO: 260120 - RNA, 32 nt, Homo Sapiens
caucuguaaaauugagaugaauuuugguguug

SEQ ID NO: 260121 - RNA, 32 nt, Homo Sapiens
guauuuaaagagaauaaacauuuugcacauac

SEQ ID NO: 260122 - RNA, 29 nt, Homo Sapiens
ugauguccugguuucagaugcaucuaaac

SEQ ID NO: 260123 - RNA, 32 nt, Homo Sapiens
uagaaaaacuggguaauuuaagaauuuaauaa

SEQ ID NO: 260124 - RNA, 32 nt, Homo Sapiens
ugucggcgccgcggccgcugcggacggacgcu

SEQ ID NO: 260125 - RNA, 32 nt, Homo Sapiens
acauguguuucauaaccaaagcagccaggaau

SEQ ID NO: 260126 - RNA, 32 nt, Homo Sapiens
accacugcacuccagccugggcgacagugaga

SEQ ID NO: 260127 - RNA, 32 nt, Homo Sapiens
guauuuuucuguauuuguauguuucacuauaa

SEQ ID NO: 260128 - RNA, 32 nt, Homo Sapiens
ggcuauuacaaauaaaccucugaagauuugug

SEQ ID NO: 260129 - RNA, 32 nt, Homo Sapiens
uuucuucagagaagcuggaaaccuagauauuu

SEQ ID NO: 260130 - RNA, 32 nt, Homo Sapiens
cucauucacaugccccagcugugcaccagggc

SEQ ID NO: 260131 - RNA, 32 nt, Homo Sapiens
uggcuuccgcgggccgccgccggcccugaaac

SEQ ID NO: 260132 - RNA, 32 nt, Homo Sapiens
uccuuauucaacaugagaaagcucaugggcaa

SEQ ID NO: 260133 - RNA, 31 nt, Homo Sapiens
auccaauuacaauauauuuugcuuaacauag

SEQ ID NO: 260134 - RNA, 32 nt, Homo Sapiens
ugccccgugguacauucacagcacgggcacag

SEQ ID NO: 260135 - RNA, 32 nt, Homo Sapiens
uucaguucauucauccuucucuccuuuccgcu

SEQ ID NO: 260136 - RNA, 32 nt, Homo Sapiens
caguuucuguuguuugaagcccccaacuucua

SEQ ID NO: 260137 - RNA, 32 nt, Homo Sapiens
cucagcaggacacgugaacacccagacaccca

SEQ ID NO: 260138 - RNA, 32 nt, Homo Sapiens
uccuuggcuugucgucgcaucauuccagucuc

SEQ ID NO: 260139 - RNA, 32 nt, Homo Sapiens
ucuccuuucugggauaaauuucccaggagaag

SEQ ID NO: 260140 - RNA, 30 nt, Homo Sapiens
aaugcuguguguucucaagaagcucccuua

SEQ ID NO: 260141 - RNA, 32 nt, Homo Sapiens
gucaagugaccaaaaaagggggaggcauuuug

SEQ ID NO: 260142 - RNA, 32 nt, Homo Sapiens
uguauguggcuguggcccucccucguggaggu

SEQ ID NO: 260143 - RNA, 32 nt, Homo Sapiens
gauggcuggcuggcccggggcugccccggucu

SEQ ID NO: 260144 - RNA, 32 nt, Homo Sapiens
cgagccaagcggggccgugcgucgccggccuu

SEQ ID NO: 260145 - RNA, 32 nt, Homo Sapiens
guauuuaaauugcuucauagucuaaauuauua

SEQ ID NO: 260146 - RNA, 32 nt, Homo Sapiens
acaaaggcaucagauauucaccaccuucucgg

SEQ ID NO: 260147 - RNA, 32 nt, Homo Sapiens
uccaguucaaggauaaaccaaaacaauauuua

SEQ ID NO: 260148 - RNA, 32 nt, Homo Sapiens
auccauguuuucugcugagaagucaacagcua

SEQ ID NO: 260149 - RNA, 32 nt, Homo Sapiens
aaaaugccugcugcugccaaguuagcuauugg

SEQ ID NO: 260150 - RNA, 32 nt, Homo Sapiens
uucagccagcagcagcagcagcuccagcaaca

SEQ ID NO: 260151 - RNA, 32 nt, Homo Sapiens
uggauuuuuuaugaaauauauuuuacaaagag

SEQ ID NO: 260152 - RNA, 32 nt, Homo Sapiens
cuuucugaaaauuuauauaacuguuguugaua

SEQ ID NO: 260153 - RNA, 32 nt, Homo Sapiens
gccuucccacccagguaaccccguggaacgug

SEQ ID NO: 260154 - RNA, 32 nt, Homo Sapiens
gcgggccggccaugucccacgggaccuacuac

SEQ ID NO: 260155 - RNA, 32 nt, Homo Sapiens
aauagaagggaagugggauccgagccuguaga

SEQ ID NO: 260156 - RNA, 32 nt, Homo Sapiens
caccuccaacuuucccuccaccagugugcuug

SEQ ID NO: 260157 - RNA, 32 nt, Homo Sapiens
gagcguuucuuccaugacacacagcaacaucc

SEQ ID NO: 260158 - RNA, 32 nt, Homo Sapiens
uauaggggaggacaagugacuuguuuaaaguu

SEQ ID NO: 260159 - RNA, 32 nt, Homo Sapiens
caguugggauaggcuuguuuugucuguugaaa

SEQ ID NO: 260160 - RNA, 32 nt, Homo Sapiens
cgagagcucccuccucugcaccaguggcuccc

SEQ ID NO: 260161 - RNA, 32 nt, Homo Sapiens
gagaagagaaaauuaucuuuggauugugcugc

SEQ ID NO: 260162 - RNA, 32 nt, Homo Sapiens
caucuuccagaccccuggcgaccaccgccccu

SEQ ID NO: 260163 - RNA, 32 nt, Homo Sapiens
ucucacccccaccguguauauacaugagcuaa

SEQ ID NO: 260164 - RNA, 32 nt, Homo Sapiens
cauauuaugaauugaguccacaaaggaacaca

SEQ ID NO: 260165 - RNA, 32 nt, Homo Sapiens
gcacacuccagccugacuuuggcacucugcua

SEQ ID NO: 260166 - RNA, 32 nt, Homo Sapiens
cuuucgcugaucugcccggccuggagccuccc

SEQ ID NO: 260167 - RNA, 32 nt, Homo Sapiens
ccaggcugccuugccugccuucagagcucuag

SEQ ID NO: 260168 - RNA, 32 nt, Homo Sapiens
gggguuucgccauauugaucaggcuggucucg

SEQ ID NO: 260169 - RNA, 32 nt, Homo Sapiens
auaaauguauacuacucuuuuucucauaguaa

SEQ ID NO: 260170 - RNA, 32 nt, Homo Sapiens
ugggguggggaagcaauauguauuuuauuguu

SEQ ID NO: 260171 - RNA, 32 nt, Homo Sapiens
uaccugggccaggccaggaaagagacuauuua

SEQ ID NO: 260172 - RNA, 32 nt, Homo Sapiens
ggggguuuagggaaggagcaggcggccaguuu

SEQ ID NO: 260173 - RNA, 32 nt, Homo Sapiens
cuagaggaacgggcgcccggcugggggagccc

SEQ ID NO: 260174 - RNA, 32 nt, Homo Sapiens
cgcucuguagccagggguguacagugccuguc

SEQ ID NO: 260175 - RNA, 32 nt, Homo Sapiens
cugggacgcugcugcuggcgccuggcccucca

SEQ ID NO: 260176 - RNA, 32 nt, Homo Sapiens
augugagccaccgcauccagccccacacccuc

SEQ ID NO: 260177 - RNA, 32 nt, Homo Sapiens
uucgucugugucuuuauauauucaugaaugug

SEQ ID NO: 260178 - RNA, 32 nt, Homo Sapiens
gagcuuaacuguauauagcaaaacagaagagu

SEQ ID NO: 260179 - RNA, 32 nt, Homo Sapiens
uauuuugggccauuuuaaaugugaaauuuugc

SEQ ID NO: 260180 - RNA, 32 nt, Homo Sapiens
ugcuaucccucccccaucccccgaccccacca

SEQ ID NO: 260181 - RNA, 31 nt, Homo Sapiens
cagagucaguauuuuuugccaaauauccaga

SEQ ID NO: 260182 - RNA, 32 nt, Homo Sapiens
uagguuucaaacacuguaauagauauaaagca

SEQ ID NO: 260183 - RNA, 32 nt, Homo Sapiens
aucagauauuuuuucaagaguuagggaaaguu

SEQ ID NO: 260184 - RNA, 32 nt, Homo Sapiens
aguuuggcugcagcugcccgggcggcgucgau

SEQ ID NO: 260185 - RNA, 32 nt, Homo Sapiens
aaauguaaucuuuuuugaaauaaaccuucaua

SEQ ID NO: 260186 - RNA, 27 nt, Homo Sapiens
uggaagaacuaaaagaugaauaaacug

SEQ ID NO: 260187 - RNA, 32 nt, Homo Sapiens
aggucugcaccgcggcggccucggcgccaugg

SEQ ID NO: 260188 - RNA, 32 nt, Homo Sapiens
gaacuuggaggugggcagucagggccuaggau

SEQ ID NO: 260189 - RNA, 32 nt, Homo Sapiens
aucgccucccguggaagcccaggcccgcuucg

SEQ ID NO: 260190 - RNA, 32 nt, Homo Sapiens
caggguucuccucuucucucacaggcggcucg

SEQ ID NO: 260191 - RNA, 32 nt, Homo Sapiens
gccgaggagcagaagaggaagagccgggggcu

SEQ ID NO: 260192 - RNA, 32 nt, Homo Sapiens
augcuuagugauuggugauugaggauaauggu

SEQ ID NO: 260193 - RNA, 32 nt, Homo Sapiens
gcgacgccucuggcagggcccuugcugcagag

SEQ ID NO: 260194 - RNA, 32 nt, Homo Sapiens
uuaagcauuauccugaagacucugccaggaga

SEQ ID NO: 260195 - RNA, 32 nt, Homo Sapiens
gaaguccauuaucccuugauaauuauuucuua

SEQ ID NO: 260196 - RNA, 32 nt, Homo Sapiens
gcgcgggacccagagcuuccccccugucgcua

SEQ ID NO: 260197 - RNA, 32 nt, Homo Sapiens
aaacagaagaagugguauuugcuggcgaguua

SEQ ID NO: 260198 - RNA, 32 nt, Homo Sapiens
cuuucggcucugcgcggcccacugcaauccgu

SEQ ID NO: 260199 - RNA, 32 nt, Homo Sapiens
uuugccuugaacagaccccccgacccuccccc

SEQ ID NO: 260200 - RNA, 32 nt, Homo Sapiens
aaaauaagcaaaggauuucacaguguucuagg

SEQ ID NO: 260201 - RNA, 32 nt, Homo Sapiens
cacagcggggcucagcaguucccacagccucu

SEQ ID NO: 260202 - RNA, 32 nt, Homo Sapiens
ugacuugcccaccugccugggguguggguggg

SEQ ID NO: 260203 - RNA, 32 nt, Homo Sapiens
aaagaaggaagacaaugcuuguaccuaagacu

SEQ ID NO: 260204 - RNA, 32 nt, Homo Sapiens
uucaaccucugccugcaucugccacuuucugc

SEQ ID NO: 260205 - RNA, 32 nt, Homo Sapiens
uugucugucauaauucaugauucggggcuggg

SEQ ID NO: 260206 - RNA, 32 nt, Homo Sapiens
ugaauucccuggauaguccaagcuuuguggau

SEQ ID NO: 260207 - RNA, 32 nt, Homo Sapiens
auagaaccagagacuauggagagacggaggag

SEQ ID NO: 260208 - RNA, 32 nt, Homo Sapiens
gugugcuuugaugaccccgggggugcaggaag

SEQ ID NO: 260209 - RNA, 30 nt, Homo Sapiens
cgcccgccggugccaccgccggccgugcuu

SEQ ID NO: 260210 - RNA, 32 nt, Homo Sapiens
aaaaugaauauguugaucauuagggguguggg

SEQ ID NO: 260211 - RNA, 32 nt, Homo Sapiens
uaucagcauaaaguuccucuuauuuucaguau

SEQ ID NO: 260212 - RNA, 32 nt, Homo Sapiens
uguuucuccuuccccugggggcagccgccgcc

SEQ ID NO: 260213 - RNA, 32 nt, Homo Sapiens
cggaucccggcggcgauccgaccucgcagucu

SEQ ID NO: 260214 - RNA, 32 nt, Homo Sapiens
cgggauggccuguugcuucuggaccagacgcc

SEQ ID NO: 260215 - RNA, 32 nt, Homo Sapiens
cugagggcuucucgucggggucggggcugcag

SEQ ID NO: 260216 - RNA, 32 nt, Homo Sapiens
ccuccuccgugugagccccaccacagcagcag

SEQ ID NO: 260217 - RNA, 32 nt, Homo Sapiens
gagaugccagauuccuuggaaguagagaccgu

SEQ ID NO: 260218 - RNA, 31 nt, Homo Sapiens
uuuuguuaagcaguuuuuaauuuugaugaag

SEQ ID NO: 260219 - RNA, 32 nt, Homo Sapiens
uagauuucaaccagaauaaaaauuguaauaau

SEQ ID NO: 260220 - RNA, 32 nt, Homo Sapiens
uucuuuuccucuuugggaauccaaaugaugau

SEQ ID NO: 260221 - RNA, 32 nt, Homo Sapiens
agaagagcccaacuccuucucauagcugaccc

SEQ ID NO: 260222 - RNA, 32 nt, Homo Sapiens
auggugggacgccuggcacuuaacaaugguag

SEQ ID NO: 260223 - RNA, 32 nt, Homo Sapiens
guguggagugugcugaacacacaccaguuuac

SEQ ID NO: 260224 - RNA, 32 nt, Homo Sapiens
ucagcauguggcucgcguggacagguggacgg

SEQ ID NO: 260225 - RNA, 31 nt, Homo Sapiens
cgguaggcaccucggcgggaaucucccuucc

SEQ ID NO: 260226 - RNA, 32 nt, Homo Sapiens
gaagaagaccaccuugucuaaucaugaaauuu

SEQ ID NO: 260227 - RNA, 30 nt, Homo Sapiens
agagggcgagucggcggcggcgagggcaag

SEQ ID NO: 260228 - RNA, 32 nt, Homo Sapiens
aaaaauggacauuaaaucauggccuugcauua

SEQ ID NO: 260229 - RNA, 32 nt, Homo Sapiens
cagacagccuugcggcggcccgggccuuaaag

SEQ ID NO: 260230 - RNA, 32 nt, Homo Sapiens
ggcgucccuugucuucucuccuccuugggcag

SEQ ID NO: 260231 - RNA, 32 nt, Homo Sapiens
agggacccaggagcugccgccggccucagccc

SEQ ID NO: 260232 - RNA, 32 nt, Homo Sapiens
aggaggcaacccaucuggauguguggaggagg

SEQ ID NO: 260233 - RNA, 32 nt, Homo Sapiens
uuccagcccuuaaagcugcagaaaagguguca

SEQ ID NO: 260234 - RNA, 32 nt, Homo Sapiens
aguccgcgccgccccuccccgcgcucagcugg

SEQ ID NO: 260235 - RNA, 32 nt, Homo Sapiens
caguccagaaaagggaaaaugaugacacagca

SEQ ID NO: 260236 - RNA, 32 nt, Homo Sapiens
cgggccugacgcgggcggguugaacgcgcugg

SEQ ID NO: 260237 - RNA, 32 nt, Homo Sapiens
ugcauugcuccagcaucuuucaucucuucccc

SEQ ID NO: 260238 - RNA, 32 nt, Homo Sapiens
aagccuuuuaauuauggacauucaucagaaag

SEQ ID NO: 260239 - RNA, 32 nt, Homo Sapiens
uugggcccccucccugccccagcuuuccuagg

SEQ ID NO: 260240 - RNA, 32 nt, Homo Sapiens
gcggggccgggucuuuccgcacaggcggaggg

SEQ ID NO: 260241 - RNA, 32 nt, Homo Sapiens
acacaaaauaguuuaaacagcaagcacuuaga

SEQ ID NO: 260242 - RNA, 32 nt, Homo Sapiens
cgcggcuguggcggcgccggcggauccagccu

SEQ ID NO: 260243 - RNA, 32 nt, Homo Sapiens
agagagugggucuccagugagagaaaugccua

SEQ ID NO: 260244 - RNA, 32 nt, Homo Sapiens
ccaggccuggggaccuguuuuuccuguuuccc

SEQ ID NO: 260245 - RNA, 32 nt, Homo Sapiens
ccguccccaagccuccgccccuuagcccccgc

SEQ ID NO: 260246 - RNA, 32 nt, Homo Sapiens
aggcgcagguaacgaagcuagggugcgguugg

SEQ ID NO: 260247 - RNA, 32 nt, Homo Sapiens
uccugacaggugguuacugaaucucucuauga

SEQ ID NO: 260248 - RNA, 32 nt, Homo Sapiens
ugcaauugcucuucuccacgucuuuccugcua

SEQ ID NO: 260249 - RNA, 32 nt, Homo Sapiens
acucgcccauugcuccacggaccucuuuaucc

SEQ ID NO: 260250 - RNA, 32 nt, Homo Sapiens
guacauuuuaaguguucucaccacaaaaaaug

SEQ ID NO: 260251 - RNA, 32 nt, Homo Sapiens
accucugguggagggccauggcguggaccuuc

SEQ ID NO: 260252 - RNA, 32 nt, Homo Sapiens
cuuuuucuucuuccucccccaaaaaccuuuuc

SEQ ID NO: 260253 - RNA, 32 nt, Homo Sapiens
uauuuaacaaaauaaacgacacugccgaaaaa

SEQ ID NO: 260254 - RNA, 32 nt, Homo Sapiens
cugcucuuccgcaucaccccauccaccuuaca

SEQ ID NO: 260255 - RNA, 32 nt, Homo Sapiens
accgcaaauaaugcauuuucugaguuuucuug

SEQ ID NO: 260256 - RNA, 32 nt, Homo Sapiens
guuuugauuuguuuucauuguuuacuuaggag

SEQ ID NO: 260257 - RNA, 32 nt, Homo Sapiens
caaacccaggucuggaacuggcuccuuaccuu

SEQ ID NO: 260258 - RNA, 32 nt, Homo Sapiens
auauauauaaaauuauuauuuuuuugagacgg

SEQ ID NO: 260259 - RNA, 32 nt, Homo Sapiens
auucauuucuucauucauuuguucauucagua

SEQ ID NO: 260260 - RNA, 32 nt, Homo Sapiens
ccaaccugguccgcugccucuucggccaugga

SEQ ID NO: 260261 - RNA, 32 nt, Homo Sapiens
agugaaauguaaagucagggcucuguacaguu

SEQ ID NO: 260262 - RNA, 32 nt, Homo Sapiens
guuuguugcaaacauuguaaaauacagcgaca

SEQ ID NO: 260263 - RNA, 32 nt, Homo Sapiens
uauaauaauauucuuuauuccuggacagcucg

SEQ ID NO: 260264 - RNA, 29 nt, Homo Sapiens
ugugcucggggacccagagaugccugugc

SEQ ID NO: 260265 - RNA, 32 nt, Homo Sapiens
gauguggaaaccgaggcccaggaaguuuguga

SEQ ID NO: 260266 - RNA, 32 nt, Homo Sapiens
gacauuacuuuuuaaagacauuuuacauuauu

SEQ ID NO: 260267 - RNA, 32 nt, Homo Sapiens
cccguuugcacccaacauguuggauaaugccc

SEQ ID NO: 260268 - RNA, 32 nt, Homo Sapiens
cauugugcaauaaaguagaauucuauauugau

SEQ ID NO: 260269 - RNA, 30 nt, Homo Sapiens
ugccggguggguuuugcagaagcucccuua

SEQ ID NO: 260270 - RNA, 31 nt, Homo Sapiens
uuaaugaaauaaaaacauggacugaguguca

SEQ ID NO: 260271 - RNA, 32 nt, Homo Sapiens
cagcagcggcggcggcaguggcggcggcgaag

SEQ ID NO: 260272 - RNA, 32 nt, Homo Sapiens
gaggccagccucagccucuauggcaaggcccu

SEQ ID NO: 260273 - RNA, 32 nt, Homo Sapiens
ugguggcucccuccugcucucuguggugaaag

SEQ ID NO: 260274 - RNA, 32 nt, Homo Sapiens
uggggucaggucuccgccuccucugcuucucc

SEQ ID NO: 260275 - RNA, 32 nt, Homo Sapiens
gagagcagagaaugggggaacuugaggguggg

SEQ ID NO: 260276 - RNA, 32 nt, Homo Sapiens
auaagcuuuccauuuuauucauaaucuaaugu

SEQ ID NO: 260277 - RNA, 32 nt, Homo Sapiens
acaccccguccauugaaaagcccuaugucuuu

SEQ ID NO: 260278 - RNA, 32 nt, Homo Sapiens
cuagggcuuccauagcaaagcaucauagauug

SEQ ID NO: 260279 - RNA, 32 nt, Homo Sapiens
ggugacagagugagacccccacugucccuggu

SEQ ID NO: 260280 - RNA, 32 nt, Homo Sapiens
ucuucuuuucuuguguuccccaggguuuuggg

SEQ ID NO: 260281 - RNA, 32 nt, Homo Sapiens
cuagaugcucuaugugcuuguaaaaagucaau

SEQ ID NO: 260282 - RNA, 32 nt, Homo Sapiens
uucgauggucugaauuuuuauuuccagggaaa

SEQ ID NO: 260283 - RNA, 32 nt, Homo Sapiens
agccaccauggacaucgccauccaccaccccu

SEQ ID NO: 260284 - RNA, 32 nt, Homo Sapiens
guagauagguaaauaccaaguauuuauuacua

SEQ ID NO: 260285 - RNA, 32 nt, Homo Sapiens
aggcaguuuuaacuuucugaagaauaucuguc

SEQ ID NO: 260286 - RNA, 32 nt, Homo Sapiens
cucacgacgcagacauggcagcgcagaaggac

SEQ ID NO: 260287 - RNA, 32 nt, Homo Sapiens
gcuucauuucucauuguggguuuaacuucuaa

SEQ ID NO: 260288 - RNA, 32 nt, Homo Sapiens
auuucauuggaauacauguguacagcaauaag

SEQ ID NO: 260289 - RNA, 32 nt, Homo Sapiens
ucaaagagaaauguuuuguaacucaacuggcc

SEQ ID NO: 260290 - RNA, 30 nt, Homo Sapiens
acaggguuucaccauguuagccaggauggu

SEQ ID NO: 260291 - RNA, 32 nt, Homo Sapiens
cuugcaucgguuucuucagugccuuacaggga

SEQ ID NO: 260292 - RNA, 32 nt, Homo Sapiens
gcucacucucuggucuuaauuuaaaaugaucc

SEQ ID NO: 260293 - RNA, 32 nt, Homo Sapiens
ugaguguuuacuauuuuacaggagucaacaag

SEQ ID NO: 260294 - RNA, 32 nt, Homo Sapiens
agucuccaaaacuccgugaaaccuuauugcug

SEQ ID NO: 260295 - RNA, 32 nt, Homo Sapiens
uggcugcucugcccuccuuccccuccccaacc

SEQ ID NO: 260296 - RNA, 30 nt, Homo Sapiens
guuugcgccugggcugcagaagccagggug

SEQ ID NO: 260297 - RNA, 32 nt, Homo Sapiens
ucaaaucaggaaagauuagaaaaggaacccaa

SEQ ID NO: 260298 - RNA, 32 nt, Homo Sapiens
aaaaaagucaaagaaaauguuuuaauacaugc

SEQ ID NO: 260299 - RNA, 32 nt, Homo Sapiens
uuugcuucaaggaccuuucaucuucaggauuu

SEQ ID NO: 260300 - RNA, 32 nt, Homo Sapiens
cagcgauccgggcuugguuuugugagguuccu

SEQ ID NO: 260301 - RNA, 32 nt, Homo Sapiens
auauguuccagauggcagaugcugucaauaau

SEQ ID NO: 260302 - RNA, 32 nt, Homo Sapiens
gccauuaacauauuuuuguggcugcuuuuucu

SEQ ID NO: 260303 - RNA, 32 nt, Homo Sapiens
ggcucggccgggggcgcguaucaggcagccca

SEQ ID NO: 260304 - RNA, 32 nt, Homo Sapiens
gcggggucuggcccugguggggcuuguggagg

SEQ ID NO: 260305 - RNA, 32 nt, Homo Sapiens
gcgcgaucugccgcggccggcugcugggcaaa

SEQ ID NO: 260306 - RNA, 32 nt, Homo Sapiens
uucuaggaacagagcuggauuccuugugccuc

SEQ ID NO: 260307 - RNA, 32 nt, Homo Sapiens
acccaaaugaauucuaaaccaaucaaaugucu

SEQ ID NO: 260308 - RNA, 32 nt, Homo Sapiens
ccucccaggcagggcucuguguuuugucuguu

SEQ ID NO: 260309 - RNA, 32 nt, Homo Sapiens
cauaaugagagaauaaacuuauuauauuuaaa

SEQ ID NO: 260310 - RNA, 32 nt, Homo Sapiens
ucuugugcaacugcucaggccuugaugucaga

SEQ ID NO: 260311 - RNA, 32 nt, Homo Sapiens
ucuacaaaaaauacaaaaauuagccuggugug

SEQ ID NO: 260312 - RNA, 32 nt, Homo Sapiens
ucuccugggaagacgauaaacagcuagcuaag

SEQ ID NO: 260313 - RNA, 32 nt, Homo Sapiens
guguauggcgucgugaugucaaaccagauugc

SEQ ID NO: 260314 - RNA, 32 nt, Homo Sapiens
cggcggcgacgcugacaccucccaccauggac

SEQ ID NO: 260315 - RNA, 32 nt, Homo Sapiens
acauccagaaaagacauguauagggacagaaa

SEQ ID NO: 260316 - RNA, 32 nt, Homo Sapiens
cugcuucauuuuacuaaccugcauagaucacu

SEQ ID NO: 260317 - RNA, 32 nt, Homo Sapiens
accccauccgcuggcucucaccccucggagac

SEQ ID NO: 260318 - RNA, 32 nt, Homo Sapiens
cauugcacuccagccugggcgacuccaucuca

SEQ ID NO: 260319 - RNA, 32 nt, Homo Sapiens
aaccacgcugggagcuggccugucguacaggc

SEQ ID NO: 260320 - RNA, 32 nt, Homo Sapiens
ucaccugggaagagucugcagagccuuugccc

SEQ ID NO: 260321 - RNA, 32 nt, Homo Sapiens
cuguauugauguagaaaugucuguaaacagag

SEQ ID NO: 260322 - RNA, 32 nt, Homo Sapiens
aggaguggaguaggggggacgcggcggcggcg

SEQ ID NO: 260323 - RNA, 32 nt, Homo Sapiens
ucugacuagcuaaacugccaacuagaagaaug

SEQ ID NO: 260324 - RNA, 32 nt, Homo Sapiens
aucgagaaagugaaacaaaacacuaggaaaug

SEQ ID NO: 260325 - RNA, 32 nt, Homo Sapiens
aaacaaaccaaacucuaaacuuucucagauua

SEQ ID NO: 260326 - RNA, 32 nt, Homo Sapiens
auuguaaaaaaauuauauuuuuucaaaaauau

SEQ ID NO: 260327 - RNA, 32 nt, Homo Sapiens
aaagccacauaaacucaagcaagaaauauguu

SEQ ID NO: 260328 - RNA, 32 nt, Homo Sapiens
ugaaaggguuaaaaugaguaaagcaguugagc

SEQ ID NO: 260329 - RNA, 32 nt, Homo Sapiens
ccuggcuucuucccuuuacccagggcgggcag

SEQ ID NO: 260330 - RNA, 32 nt, Homo Sapiens
auauuuacagaaaaaagugucagugaaaugua

SEQ ID NO: 260331 - RNA, 32 nt, Homo Sapiens
aacauuucagugggaagaaaugcauaaaaugc

SEQ ID NO: 260332 - RNA, 32 nt, Homo Sapiens
caggacaugacaaugacggcuuucuuuucaau

SEQ ID NO: 260333 - RNA, 31 nt, Homo Sapiens
acucugcugccggcuucucggagcggcgcug

SEQ ID NO: 260334 - RNA, 32 nt, Homo Sapiens
uuccuugacacaccuuguagucuaaauguucg

SEQ ID NO: 260335 - RNA, 32 nt, Homo Sapiens
ccgccuugcugaugacauccaccuucuccauc

SEQ ID NO: 260336 - RNA, 32 nt, Homo Sapiens
gugugggggcauuuggggggugaaguggcccc

SEQ ID NO: 260337 - RNA, 32 nt, Homo Sapiens
acaugauuccagugcaguagugccaaaaggcc

SEQ ID NO: 260338 - RNA, 32 nt, Homo Sapiens
caggcuacugucacaucuugaucacagagcag

SEQ ID NO: 260339 - RNA, 32 nt, Homo Sapiens
agacccacagcccugcccuugucucugaggcu

SEQ ID NO: 260340 - RNA, 32 nt, Homo Sapiens
ugggaggggugaguuacacguauuuuauucau

SEQ ID NO: 260341 - RNA, 32 nt, Homo Sapiens
aggagggcacggcgggagggugcuugcagggg

SEQ ID NO: 260342 - RNA, 32 nt, Homo Sapiens
acaagcacaauauaaaaaacaauuagagcagu

SEQ ID NO: 260343 - RNA, 32 nt, Homo Sapiens
ccuuagaaagccuuuuacaaaauuaaaaaaaa

SEQ ID NO: 260344 - RNA, 32 nt, Homo Sapiens
gacgacuucggucugcgccggaagugcaugag

SEQ ID NO: 260345 - RNA, 32 nt, Homo Sapiens
aaaucagaauaaauauguuagaccagaauaaa

SEQ ID NO: 260346 - RNA, 32 nt, Homo Sapiens
cgcggcccacccagaggccgacggcgcuccca

SEQ ID NO: 260347 - RNA, 32 nt, Homo Sapiens
gguuuuuaggcuuccuguuuuaucucgugugu

SEQ ID NO: 260348 - RNA, 32 nt, Homo Sapiens
acuucuggucugauaccuaaggagccugguuc

SEQ ID NO: 260349 - RNA, 32 nt, Homo Sapiens
cggccacugggcuaccucuccuucagucccag

SEQ ID NO: 260350 - RNA, 32 nt, Homo Sapiens
uccucagacuccuggguuuuuguuguugcugu

SEQ ID NO: 260351 - RNA, 32 nt, Homo Sapiens
cauaacucaauuuggaguauuuuuuaaaugcu

SEQ ID NO: 260352 - RNA, 32 nt, Homo Sapiens
aggacucugccagcuuuguuaaacuguccgug

SEQ ID NO: 260353 - RNA, 32 nt, Homo Sapiens
caggcccccacccuccacuccuccccacggua

SEQ ID NO: 260354 - RNA, 32 nt, Homo Sapiens
uccgggacggcgagcggcgggcggcggaggag

SEQ ID NO: 260355 - RNA, 32 nt, Homo Sapiens
uuuuugugcacucugcucuaaaacagauauuc

SEQ ID NO: 260356 - RNA, 32 nt, Homo Sapiens
gucaguggauauauuucuaaugaagugcuaga

SEQ ID NO: 260357 - RNA, 32 nt, Homo Sapiens
ccaaggccaaagccgccuccuuggccuguaga

SEQ ID NO: 260358 - RNA, 32 nt, Homo Sapiens
ugcccugggugcccuccuccagaagcccgaga

SEQ ID NO: 260359 - RNA, 32 nt, Homo Sapiens
agguggcagcagccuuucaccagggcuccauc

SEQ ID NO: 260360 - RNA, 32 nt, Homo Sapiens
aggcaugacauuuuaugauaguaaaucuuauu

SEQ ID NO: 260361 - RNA, 32 nt, Homo Sapiens
agcccagccuggaagcacgggugcgcgacauc

SEQ ID NO: 260362 - RNA, 32 nt, Homo Sapiens
uuuaauuuuuaaacuugguuugaaagaccagc

SEQ ID NO: 260363 - RNA, 32 nt, Homo Sapiens
aauaugcacuagucucuuuuuacaaggcugua

SEQ ID NO: 260364 - RNA, 32 nt, Homo Sapiens
aguucuuucauuuguuuguaauuuuguuuuuc

SEQ ID NO: 260365 - RNA, 32 nt, Homo Sapiens
aguugaggagacuggaggaaaagagagcuggu

SEQ ID NO: 260366 - RNA, 32 nt, Homo Sapiens
auauaaagccccaagugcuuuaccuucuaaaa

SEQ ID NO: 260367 - RNA, 32 nt, Homo Sapiens
uauuuucuuguacauuugugccaugcacuguu

SEQ ID NO: 260368 - RNA, 32 nt, Homo Sapiens
aggcuggccucuaggcuucuccucuguggcuu

SEQ ID NO: 260369 - RNA, 32 nt, Homo Sapiens
aagccagaacuccaccccggcgcccgcgccau

SEQ ID NO: 260370 - RNA, 31 nt, Homo Sapiens
gguucugcaaggucaaggcacuaguaucaga

SEQ ID NO: 260371 - RNA, 30 nt, Homo Sapiens
acaaacuugaaauaaaccaaauuugauguu

SEQ ID NO: 260372 - RNA, 32 nt, Homo Sapiens
uauuuaaacuaagaaaaauguuuagucugaga

SEQ ID NO: 260373 - RNA, 32 nt, Homo Sapiens
ugaauagggaugccucuuuggcgauaauuuga

SEQ ID NO: 260374 - RNA, 32 nt, Homo Sapiens
ucuguggaugacugauguuacuaucuuuauau

SEQ ID NO: 260375 - RNA, 32 nt, Homo Sapiens
cauaggauuuguacucgguaaauguuaguucu

SEQ ID NO: 260376 - RNA, 32 nt, Homo Sapiens
gggggucugugcucugaggagggauggacaua

SEQ ID NO: 260377 - RNA, 32 nt, Homo Sapiens
cuggacaguggaaccucagagaaggcuccucc

SEQ ID NO: 260378 - RNA, 32 nt, Homo Sapiens
cagccccauuuucuuuccuagcuaacuguacc

SEQ ID NO: 260379 - RNA, 32 nt, Homo Sapiens
aacaauuuacuuuauugcucuaaaauagaaaa

SEQ ID NO: 260380 - RNA, 32 nt, Homo Sapiens
agauaaauuuaaaacacagagaugcugcaaau

SEQ ID NO: 260381 - RNA, 32 nt, Homo Sapiens
uaaaacagcagcaguaacaacaacaaaguuua

SEQ ID NO: 260382 - RNA, 32 nt, Homo Sapiens
gcuguugacggcgcugcgauggcugccugcga

SEQ ID NO: 260383 - RNA, 32 nt, Homo Sapiens
guuggaauggauuuuucuuuaacugccguaau

SEQ ID NO: 260384 - RNA, 32 nt, Homo Sapiens
caaaggccgcccugacgugcccggcccugugg

SEQ ID NO: 260385 - RNA, 32 nt, Homo Sapiens
aaucuuugaaaauuauuuuuaagcgaauuggg

SEQ ID NO: 260386 - RNA, 32 nt, Homo Sapiens
ggcuggauaaaacuguuuuuaagucagugauu

SEQ ID NO: 260387 - RNA, 32 nt, Homo Sapiens
aaucaagugggggauuuucaugcugaacccau

SEQ ID NO: 260388 - RNA, 32 nt, Homo Sapiens
gugucuaauagaagcuuaauauguaaacuaga

SEQ ID NO: 260389 - RNA, 32 nt, Homo Sapiens
ggcuauaauccuagaauuauuguccguuccuc

SEQ ID NO: 260390 - RNA, 32 nt, Homo Sapiens
guggggccugcgcgugugaguggccgagaguu

SEQ ID NO: 260391 - RNA, 32 nt, Homo Sapiens
uuuuuaaggggaggagagagcacuuaguuucu

SEQ ID NO: 260392 - RNA, 32 nt, Homo Sapiens
cauuuucagacaacagcagagaagcccaguug

SEQ ID NO: 260393 - RNA, 32 nt, Homo Sapiens
acuucggggcuuugaagagcacagcucaucua

SEQ ID NO: 260394 - RNA, 32 nt, Homo Sapiens
ccugccccgacccuccucuccaccucucgcgu

SEQ ID NO: 260395 - RNA, 32 nt, Homo Sapiens
uauaggcaagauacaauuauaugcguuccucu

SEQ ID NO: 260396 - RNA, 32 nt, Homo Sapiens
uuaucaggaggagaaugcuuuuuuguaaacau

SEQ ID NO: 260397 - RNA, 32 nt, Homo Sapiens
uauuuuuuaaaggaacaaaacgagcaugaauu

SEQ ID NO: 260398 - RNA, 32 nt, Homo Sapiens
ccuaugugcccccaagucaucugagcauuggu

SEQ ID NO: 260399 - RNA, 32 nt, Homo Sapiens
cgccuucccuucccuccgcccaccucccugaa

SEQ ID NO: 260400 - RNA, 32 nt, Homo Sapiens
cccgggcggaggaggaagcuguggcugccggc

SEQ ID NO: 260401 - RNA, 32 nt, Homo Sapiens
uggaugaauacugagugaauaaaggauggaaa

SEQ ID NO: 260402 - RNA, 32 nt, Homo Sapiens
ccaacugcaguuuuagauacguuuugaaaauu

SEQ ID NO: 260403 - RNA, 32 nt, Homo Sapiens
ccagcaucucccacugccuccaaauauuagua

SEQ ID NO: 260404 - RNA, 32 nt, Homo Sapiens
cauuccuuauugcuggccccuuucucaggccg

SEQ ID NO: 260405 - RNA, 32 nt, Homo Sapiens
gaccuaggggagacaccgcgcaucucuuccug

SEQ ID NO: 260406 - RNA, 32 nt, Homo Sapiens
gccaugcccgguggcgcggccugagccccucc

SEQ ID NO: 260407 - RNA, 32 nt, Homo Sapiens
cugcccgccucccacccacugugccuggagcc

SEQ ID NO: 260408 - RNA, 32 nt, Homo Sapiens
gcuaucuuagaugcgaucugacuccuguguga

SEQ ID NO: 260409 - RNA, 32 nt, Homo Sapiens
cugaaagcugcggcgccacuggugccagaguc

SEQ ID NO: 260410 - RNA, 32 nt, Homo Sapiens
ggaccacuggccauuagcucuugcuuuugaug

SEQ ID NO: 260411 - RNA, 32 nt, Homo Sapiens
uuuggaaaauauauuucuuucuuaaaaaaaca

SEQ ID NO: 260412 - RNA, 32 nt, Homo Sapiens
ugaccaagggaagugaccaaggugaagauggc

SEQ ID NO: 260413 - RNA, 32 nt, Homo Sapiens
gguuggaggagacgggggugacugcuaaugcg

SEQ ID NO: 260414 - RNA, 32 nt, Homo Sapiens
aggcacugcuccaggugauagugcgggaacau

SEQ ID NO: 260415 - RNA, 32 nt, Homo Sapiens
gacgugucugcauuuuaaaaaaugucuuuucg

SEQ ID NO: 260416 - RNA, 32 nt, Homo Sapiens
uacuguuauuucucuuuuuugguuaacuuuaa

SEQ ID NO: 260417 - RNA, 32 nt, Homo Sapiens
augcugcccgggagggcuuccuggacacgcug

SEQ ID NO: 260418 - RNA, 32 nt, Homo Sapiens
uuccuccccuucccuuuuuuuguuauuuuuuc

SEQ ID NO: 260419 - RNA, 32 nt, Homo Sapiens
ugcucagagaagcagacaaaacaaagauucaa

SEQ ID NO: 260420 - RNA, 32 nt, Homo Sapiens
uuugcaaacaacauuuaagggaaugugagccc

SEQ ID NO: 260421 - RNA, 32 nt, Homo Sapiens
cucugggaacuggaugaguccuucggcgggac

SEQ ID NO: 260422 - RNA, 32 nt, Homo Sapiens
ccgcaucucaggugaucugcucgccucggccu

SEQ ID NO: 260423 - RNA, 32 nt, Homo Sapiens
gcaugcggccccagucccccaccgccugggcu

SEQ ID NO: 260424 - RNA, 32 nt, Homo Sapiens
ggcucccugcucgcggggcgcccgccacgcuc

SEQ ID NO: 260425 - RNA, 32 nt, Homo Sapiens
ugaguaaaacaaaagcuagucaaauguguuag

SEQ ID NO: 260426 - RNA, 32 nt, Homo Sapiens
cggccggguggcgggggugaguggggccagcg

SEQ ID NO: 260427 - RNA, 32 nt, Homo Sapiens
ucccgccaggcccugccggacccggcgccguc

SEQ ID NO: 260428 - RNA, 32 nt, Homo Sapiens
cugugguccguagacgucggcucccgcccucg

SEQ ID NO: 260429 - RNA, 32 nt, Homo Sapiens
cagauauggcuccuggcugcgucagccucccc

SEQ ID NO: 260430 - RNA, 32 nt, Homo Sapiens
agcccugacaacaugaguggagagugcauuug

SEQ ID NO: 260431 - RNA, 32 nt, Homo Sapiens
ggggccuggcuggccgacguggcguuggcggc

SEQ ID NO: 260432 - RNA, 32 nt, Homo Sapiens
aauguaaugaauuuggaaaauuuagcaagaaa

SEQ ID NO: 260433 - RNA, 32 nt, Homo Sapiens
caagacaccuucccuucuuccucagccagaaa

SEQ ID NO: 260434 - RNA, 32 nt, Homo Sapiens
cccauaacuucauuggcuuggaugccuaagug

SEQ ID NO: 260435 - RNA, 32 nt, Homo Sapiens
uuuucuuaugauguaauuuaugaaaaagaugu

SEQ ID NO: 260436 - RNA, 32 nt, Homo Sapiens
ccccgugugaggaugacaucaccacauuucua

SEQ ID NO: 260437 - RNA, 32 nt, Homo Sapiens
gaaaguauaucauauaugaugauguaacugau

SEQ ID NO: 260438 - RNA, 32 nt, Homo Sapiens
caaaaaucugaauaacagcugcaccguuaaaa

SEQ ID NO: 260439 - RNA, 32 nt, Homo Sapiens
uuagcacucuagcugcccacuccagggcaggg

SEQ ID NO: 260440 - RNA, 32 nt, Homo Sapiens
auagucuugacaaauguauauaaaauucucug

SEQ ID NO: 260441 - RNA, 32 nt, Homo Sapiens
cuucuaguguacccaucauccaaauauuaaac

SEQ ID NO: 260442 - RNA, 32 nt, Homo Sapiens
gcuuucuuucuuuuucuucaaauuuacaaggg

SEQ ID NO: 260443 - RNA, 32 nt, Homo Sapiens
ugcuggaacagguggggguuggucauuaaauu

SEQ ID NO: 260444 - RNA, 32 nt, Homo Sapiens
aaccugcccucauccuggcccgcgacuguaag

SEQ ID NO: 260445 - RNA, 32 nt, Homo Sapiens
uagauaaaacagaccagaggcucuccuuauug

SEQ ID NO: 260446 - RNA, 32 nt, Homo Sapiens
agugggggcugcaaaugcugccacugccucug

SEQ ID NO: 260447 - RNA, 32 nt, Homo Sapiens
uuguacuuuauauaaauugguucuuguucuuc

SEQ ID NO: 260448 - RNA, 32 nt, Homo Sapiens
gccagucaaaacaaaaacuuuacugaaaaugg

SEQ ID NO: 260449 - RNA, 32 nt, Homo Sapiens
auacagguaaggaaacaguuggucaacucuga

SEQ ID NO: 260450 - RNA, 32 nt, Homo Sapiens
gagacagguggauguggaaccacaggcugcuc

SEQ ID NO: 260451 - RNA, 32 nt, Homo Sapiens
gcuggccugagccccaggccuuggccuccugu

SEQ ID NO: 260452 - RNA, 32 nt, Homo Sapiens
accaaaacaagucauugggggugugggaauaa

SEQ ID NO: 260453 - RNA, 32 nt, Homo Sapiens
aaaguaaaacaauucaaauuugauaguauuuu

SEQ ID NO: 260454 - RNA, 32 nt, Homo Sapiens
gccuccgucccgccgcgccacuucgccugccu

SEQ ID NO: 260455 - RNA, 32 nt, Homo Sapiens
acaucuagugauuucccuguauuggguuugaa

SEQ ID NO: 260456 - RNA, 32 nt, Homo Sapiens
cccaagcucccuccucucccucuguagagccu

SEQ ID NO: 260457 - RNA, 32 nt, Homo Sapiens
cagccccucuucccuuccuccauugcacauga

SEQ ID NO: 260458 - RNA, 31 nt, Homo Sapiens
cagguggagccccggcuccugagcaagcaga

SEQ ID NO: 260459 - RNA, 32 nt, Homo Sapiens
cucaaagcaugggauuacuagaaucaaacauu

SEQ ID NO: 260460 - RNA, 32 nt, Homo Sapiens
gguuucaccaugugggccgggcuggucuugaa

SEQ ID NO: 260461 - RNA, 32 nt, Homo Sapiens
gcuguuccuaaacuagcaaauugcucaugcug

SEQ ID NO: 260462 - RNA, 32 nt, Homo Sapiens
ugcucguuuucaggauucuccuccuuuguccu

SEQ ID NO: 260463 - RNA, 32 nt, Homo Sapiens
aaagaaaaucagcuuuucuaagaucaagccag

SEQ ID NO: 260464 - RNA, 32 nt, Homo Sapiens
cuuugagaggcugaggaggguggaucauuuga

SEQ ID NO: 260465 - RNA, 32 nt, Homo Sapiens
gaguguuuugguugaacaacuacuuuaaugca

SEQ ID NO: 260466 - RNA, 32 nt, Homo Sapiens
agcagaaagucaaaaacuaagauacuguagac

SEQ ID NO: 260467 - RNA, 32 nt, Homo Sapiens
cugaguuccagaaaggaagcaguuucuggugc

SEQ ID NO: 260468 - RNA, 32 nt, Homo Sapiens
guuccucauagugccaguguguuuacauuuau

SEQ ID NO: 260469 - RNA, 32 nt, Homo Sapiens
ccgccgugacugguuuucuguccccaagaacg

SEQ ID NO: 260470 - RNA, 32 nt, Homo Sapiens
cuuuggaggguggggcaggaguauaugagcau

SEQ ID NO: 260471 - RNA, 32 nt, Homo Sapiens
gggaaugugucccucccaccaugggccagagc

SEQ ID NO: 260472 - RNA, 32 nt, Homo Sapiens
ccugccagacugcgcgccauggggcaacccgg

SEQ ID NO: 260473 - RNA, 32 nt, Homo Sapiens
uccaguguggaggaggauguggaaugguacca

SEQ ID NO: 260474 - RNA, 32 nt, Homo Sapiens
aacccauucugaguggugucugucugaaagca

SEQ ID NO: 260475 - RNA, 32 nt, Homo Sapiens
gggcaagauggaggugggggcugggggaauau

SEQ ID NO: 260476 - RNA, 32 nt, Homo Sapiens
cccugugaauccucgggcugugacgcccucag

SEQ ID NO: 260477 - RNA, 32 nt, Homo Sapiens
cugagccuuauaccuccaccacagggggugcc

SEQ ID NO: 260478 - RNA, 32 nt, Homo Sapiens
ccagugagacaaaaaagaaaaagcauacacac

SEQ ID NO: 260479 - RNA, 32 nt, Homo Sapiens
agcaaagacuguucuccucccgagggaaccuu

SEQ ID NO: 260480 - RNA, 32 nt, Homo Sapiens
gcugcucagagggaaaugaaaagggagccauu

SEQ ID NO: 260481 - RNA, 32 nt, Homo Sapiens
gaagugcuauaaauguagucuguugcauuuuu

SEQ ID NO: 260482 - RNA, 32 nt, Homo Sapiens
gggggugccccacaaggcccagcccugggcaa

SEQ ID NO: 260483 - RNA, 32 nt, Homo Sapiens
ccuuaccuuauuuugaagaaauccuagacauc

SEQ ID NO: 260484 - RNA, 32 nt, Homo Sapiens
uuuuugagagagaauaaagguuauguuugucu

SEQ ID NO: 260485 - RNA, 32 nt, Homo Sapiens
cucgaugucauuccaaaguuauugccuacuaa

SEQ ID NO: 260486 - RNA, 32 nt, Homo Sapiens
gacccgagccccgcgcccuuuccgggaccccu

SEQ ID NO: 260487 - RNA, 32 nt, Homo Sapiens
gggugcagugacucaugccuacaaucccagca

SEQ ID NO: 260488 - RNA, 32 nt, Homo Sapiens
uauguacauuggucagguauauuaucucaaag

SEQ ID NO: 260489 - RNA, 32 nt, Homo Sapiens
gcguaugaauguaucugagaugcuuuguaagg

SEQ ID NO: 260490 - RNA, 32 nt, Homo Sapiens
cccuggcucccucuccucccugagcaccugcu

SEQ ID NO: 260491 - RNA, 32 nt, Homo Sapiens
aaacaacaaaacaaaaaaaacucugucucagg

SEQ ID NO: 260492 - RNA, 32 nt, Homo Sapiens
uauauauuaccacgacauuuaacaucaauauu

SEQ ID NO: 260493 - RNA, 32 nt, Homo Sapiens
uguugacuuauuucuucagucuaggccuuucu

SEQ ID NO: 260494 - RNA, 32 nt, Homo Sapiens
caaagagucggguuuugggguugaaaguguga

SEQ ID NO: 260495 - RNA, 32 nt, Homo Sapiens
uuuccccugggagaggccaggagggccugauc

SEQ ID NO: 260496 - RNA, 32 nt, Homo Sapiens
auauugacaaauaacacauugucaaccuggau

SEQ ID NO: 260497 - RNA, 32 nt, Homo Sapiens
cugagagaaacgcagguguuccagaggcuucc

SEQ ID NO: 260498 - RNA, 32 nt, Homo Sapiens
agggagcuuugggacagggcuggggcccccau

SEQ ID NO: 260499 - RNA, 29 nt, Homo Sapiens
cugcauguauguaugugugucccgagaag

SEQ ID NO: 260500 - RNA, 32 nt, Homo Sapiens
cuuccuaguacaaaacugccaucgguuguacg

SEQ ID NO: 260501 - RNA, 32 nt, Homo Sapiens
ggggcgugugggugugugaaugugcaaguguc

SEQ ID NO: 260502 - RNA, 32 nt, Homo Sapiens
ugucucuuuccacccuuaucuccacaccugcc

SEQ ID NO: 260503 - RNA, 32 nt, Homo Sapiens
gguugcuucgggcucuuugaucugucaccuau

SEQ ID NO: 260504 - RNA, 32 nt, Homo Sapiens
aacccugaccccagcccacgcucuggugaccu

SEQ ID NO: 260505 - RNA, 32 nt, Homo Sapiens
ucucuuuguuaauguguagaguucuccucucu

SEQ ID NO: 260506 - RNA, 32 nt, Homo Sapiens
cguggagggaguggcucugugcuuucuaccca

SEQ ID NO: 260507 - RNA, 30 nt, Homo Sapiens
cgcgggcgcggcacugcgggucccgauugc

SEQ ID NO: 260508 - RNA, 32 nt, Homo Sapiens
uucagucuacagcaugugcaugguugucagug

SEQ ID NO: 260509 - RNA, 32 nt, Homo Sapiens
agagagaacgaucguuagggcuggggugugug

SEQ ID NO: 260510 - RNA, 32 nt, Homo Sapiens
uuuuuaugcuccuuacuuucucuuuucuaagu

SEQ ID NO: 260511 - RNA, 32 nt, Homo Sapiens
agcuucagagugacugcuccaaugcagcaugu

SEQ ID NO: 260512 - RNA, 30 nt, Homo Sapiens
cccggauggcgagccucgccgcgcucgccc

SEQ ID NO: 260513 - RNA, 32 nt, Homo Sapiens
aggcggguggaucaccugaggucacgaguucg

SEQ ID NO: 260514 - RNA, 32 nt, Homo Sapiens
ccucggcuucgauggucuuguucagagcugca

SEQ ID NO: 260515 - RNA, 32 nt, Homo Sapiens
uuaaagggccgcguugccgcccccucggcccg

SEQ ID NO: 260516 - RNA, 32 nt, Homo Sapiens
aaauuagaggagacuuuuuuuuuucauguuau

SEQ ID NO: 260517 - RNA, 32 nt, Homo Sapiens
aacugauuuuuguaguuuugguauuuaaagca

SEQ ID NO: 260518 - RNA, 32 nt, Homo Sapiens
ugcucugaaugaagucagaacagaaccaaaau

SEQ ID NO: 260519 - RNA, 32 nt, Homo Sapiens
gcugagugguguggaggcagcugcugggcagg

SEQ ID NO: 260520 - RNA, 32 nt, Homo Sapiens
gggcgcuuggaucccggccaucuccgcacccu

SEQ ID NO: 260521 - RNA, 32 nt, Homo Sapiens
uaaguugaaguaaaagcaaguacucuggagca

SEQ ID NO: 260522 - RNA, 32 nt, Homo Sapiens
gggguagcugccaggagcugccuccuagaccc

SEQ ID NO: 260523 - RNA, 32 nt, Homo Sapiens
guucggcuaauuuuuguauuuucaguagagac

SEQ ID NO: 260524 - RNA, 32 nt, Homo Sapiens
uguucuuccuuccuauggaagucggaaacaug

SEQ ID NO: 260525 - RNA, 32 nt, Homo Sapiens
cggagaugaggggaagaugucugugucaagau

SEQ ID NO: 260526 - RNA, 32 nt, Homo Sapiens
aucccugaaagaaauaaaaaccacugugugca

SEQ ID NO: 260527 - RNA, 32 nt, Homo Sapiens
aacuauggcaauuuugcaauauuuucaguagu

SEQ ID NO: 260528 - RNA, 32 nt, Homo Sapiens
ugaaaagaacugaaaacugaugaaacuuuuag

SEQ ID NO: 260529 - RNA, 32 nt, Homo Sapiens
uucugagccagacccucuucagggaagggacc

SEQ ID NO: 260530 - RNA, 32 nt, Homo Sapiens
uguacauuuuuaaaaugugauuuuuguauaua

SEQ ID NO: 260531 - RNA, 32 nt, Homo Sapiens
cccuaugugaggaaacaaaaccccagggaagc

SEQ ID NO: 260532 - RNA, 32 nt, Homo Sapiens
gauggagccccugacauuacucuucuugcauc

SEQ ID NO: 260533 - RNA, 32 nt, Homo Sapiens
uggggacuaaacaaaauucugaggcccccuca

SEQ ID NO: 260534 - RNA, 32 nt, Homo Sapiens
uccgcugcucugcugccugcccgggguaccaa

SEQ ID NO: 260535 - RNA, 32 nt, Homo Sapiens
cgcccucagcugccuccucccgagaccuaaug

SEQ ID NO: 260536 - RNA, 32 nt, Homo Sapiens
gccuggugggggauuggggaucuguguuuagc

SEQ ID NO: 260537 - RNA, 32 nt, Homo Sapiens
auggucccccuggguguucuccaggaccaagu

SEQ ID NO: 260538 - RNA, 32 nt, Homo Sapiens
ucuggugcugaagcagccaagagacccaagac

SEQ ID NO: 260539 - RNA, 32 nt, Homo Sapiens
cgauguguuuacugugugaacucugacaagug

SEQ ID NO: 260540 - RNA, 32 nt, Homo Sapiens
ccacagcacuuuguuauaccucugccacacac

SEQ ID NO: 260541 - RNA, 32 nt, Homo Sapiens
cuggaaaaagcauuggcauuauuuucaauaaa

SEQ ID NO: 260542 - RNA, 32 nt, Homo Sapiens
cgccuguaaucccagcacuuugagaggcugaa

SEQ ID NO: 260543 - RNA, 32 nt, Homo Sapiens
auucuguguggcaccuugauuggaaaauaaua

SEQ ID NO: 260544 - RNA, 32 nt, Homo Sapiens
uuuuguuacuuuugggacauccugucaucuga

SEQ ID NO: 260545 - RNA, 32 nt, Homo Sapiens
cccuucaaaugcagcacugcaccacccugcaa

SEQ ID NO: 260546 - RNA, 32 nt, Homo Sapiens
aaguggcucgcuucuucagugccccgcugcuc

SEQ ID NO: 260547 - RNA, 32 nt, Homo Sapiens
agugccgggagguggggggcggcgcauccgcg

SEQ ID NO: 260548 - RNA, 32 nt, Homo Sapiens
acggcagcagaaaaacgaggaaauuauaugug

SEQ ID NO: 260549 - RNA, 30 nt, Homo Sapiens
cggaggcggcuggugccgccacugccacac

SEQ ID NO: 260550 - RNA, 32 nt, Homo Sapiens
cugcagcccuccagcucuggcccucagcugcu

SEQ ID NO: 260551 - RNA, 32 nt, Homo Sapiens
ggguguuuccuguuggggugugucucaggcag

SEQ ID NO: 260552 - RNA, 32 nt, Homo Sapiens
gaguguuuuauuugauuuuucuuuauuuuaaa

SEQ ID NO: 260553 - RNA, 32 nt, Homo Sapiens
uacuaucuuuugcccagaggcuguuggcucuu

SEQ ID NO: 260554 - RNA, 32 nt, Homo Sapiens
uacugggcccuccuuuguacugcuaguguuac

SEQ ID NO: 260555 - RNA, 32 nt, Homo Sapiens
gaaagcguuucuuuuuauuugcuucuuuuaag

SEQ ID NO: 260556 - RNA, 32 nt, Homo Sapiens
aaccuguucugucccacuggccagccaucuuu

SEQ ID NO: 260557 - RNA, 32 nt, Homo Sapiens
uguucacuuuuuccuuuuugauugaauacaau

SEQ ID NO: 260558 - RNA, 32 nt, Homo Sapiens
aaagcaaucuguaaaaacaucuccaggcuuug

SEQ ID NO: 260559 - RNA, 32 nt, Homo Sapiens
gggauauuccgucuuuaacucucuggcaagaa

SEQ ID NO: 260560 - RNA, 32 nt, Homo Sapiens
aaacuauuguuccuguuucacacagaagaaaa

SEQ ID NO: 260561 - RNA, 32 nt, Homo Sapiens
cagcagauccugaacacuccuugguggggacc

SEQ ID NO: 260562 - RNA, 32 nt, Homo Sapiens
gccuguucgagccauucagguaaauuggucuc

SEQ ID NO: 260563 - RNA, 32 nt, Homo Sapiens
gggcggggcggcggcccauggcgacaccagga

SEQ ID NO: 260564 - RNA, 32 nt, Homo Sapiens
auuuagagguuuaugacugaauucccuuugac

SEQ ID NO: 260565 - RNA, 32 nt, Homo Sapiens
uuguagauauuuaauauuguacaguauagaaa

SEQ ID NO: 260566 - RNA, 32 nt, Homo Sapiens
auucuuugauuuccaguaacuuauuuucgaaa

SEQ ID NO: 260567 - RNA, 32 nt, Homo Sapiens
ggaggaacuuuggcugcgagaauggggggaug

SEQ ID NO: 260568 - RNA, 32 nt, Homo Sapiens
cucauccccuuauccuucucccucgacauuuu

SEQ ID NO: 260569 - RNA, 32 nt, Homo Sapiens
guauuuauguuugcaaauuucauuucccauuc

SEQ ID NO: 260570 - RNA, 32 nt, Homo Sapiens
uuuguuucuggugauguuugccauucaggaau

SEQ ID NO: 260571 - RNA, 32 nt, Homo Sapiens
guguuuuuuauuuacgcgucagggcuuuucuu

SEQ ID NO: 260572 - RNA, 32 nt, Homo Sapiens
agaauuuuucuuuuccauuccaaagguguacu

SEQ ID NO: 260573 - RNA, 32 nt, Homo Sapiens
caguagcagcagcagcagcagcagcagcaacc

SEQ ID NO: 260574 - RNA, 32 nt, Homo Sapiens
cuucagaggguggggggaagauuggggaacgg

SEQ ID NO: 260575 - RNA, 32 nt, Homo Sapiens
ucuugguauggucagaauauaauacuuccaua

SEQ ID NO: 260576 - RNA, 32 nt, Homo Sapiens
cuaaaugacgaguuaauggguguagcacacca

SEQ ID NO: 260577 - RNA, 32 nt, Homo Sapiens
cuuguaauagcucauuauuuugaaagauuuau

SEQ ID NO: 260578 - RNA, 32 nt, Homo Sapiens
agccugccucgggcuccuaaagugcugggauu

SEQ ID NO: 260579 - RNA, 32 nt, Homo Sapiens
agaagacgcccauucggacugcugugccgcgu

SEQ ID NO: 260580 - RNA, 32 nt, Homo Sapiens
uacucaaacacuuuugggccaggauuugaguc

SEQ ID NO: 260581 - RNA, 32 nt, Homo Sapiens
aacagaguggaauucagcacccgccacagcag

SEQ ID NO: 260582 - RNA, 32 nt, Homo Sapiens
aagguacccgaagaagcagaggcugagggcag

SEQ ID NO: 260583 - RNA, 32 nt, Homo Sapiens
ccaccauugcagugaacuuaugacuaccuguc

SEQ ID NO: 260584 - RNA, 32 nt, Homo Sapiens
aagccagagaaccuagaaaacauccaguggau

SEQ ID NO: 260585 - RNA, 32 nt, Homo Sapiens
caaaauacuguuuuucaaauggcugcuuaaaa

SEQ ID NO: 260586 - RNA, 32 nt, Homo Sapiens
ggcugggcuggguggcacaccacccgaggggg

SEQ ID NO: 260587 - RNA, 32 nt, Homo Sapiens
uccugugucaguuuauguuuugguccacuuuu

SEQ ID NO: 260588 - RNA, 32 nt, Homo Sapiens
auacauaaaaauuguuucuauaaauuguagaa

SEQ ID NO: 260589 - RNA, 32 nt, Homo Sapiens
caauggaacuaaugcagauguugcauaauagc

SEQ ID NO: 260590 - RNA, 32 nt, Homo Sapiens
auuuuuagcauacuguuaaauaucacaucaca

SEQ ID NO: 260591 - RNA, 32 nt, Homo Sapiens
uguuuuuguacuuucuuuucaggucauuuaca

SEQ ID NO: 260592 - RNA, 32 nt, Homo Sapiens
caaaaagaugccuuuuaccaugaauucuugag

SEQ ID NO: 260593 - RNA, 32 nt, Homo Sapiens
acagcgggcagucuguccugcuguugguaccu

SEQ ID NO: 260594 - RNA, 32 nt, Homo Sapiens
gacaguucucacccucaaggggcucacaugga

SEQ ID NO: 260595 - RNA, 32 nt, Homo Sapiens
gggcgcucgcccaggacuccccgggccucggg

SEQ ID NO: 260596 - RNA, 32 nt, Homo Sapiens
ucugucgggaggacagugcugaucgugucuca

SEQ ID NO: 260597 - RNA, 32 nt, Homo Sapiens
auugauuucuauuuuuaauuucaguuaguauc

SEQ ID NO: 260598 - RNA, 32 nt, Homo Sapiens
caccacugcacuccagccugggugauggagca

SEQ ID NO: 260599 - RNA, 32 nt, Homo Sapiens
gggggcaggaggagucuggaacacagccuuca

SEQ ID NO: 260600 - RNA, 32 nt, Homo Sapiens
uugccugccugccuguggagacagcccugccu

SEQ ID NO: 260601 - RNA, 32 nt, Homo Sapiens
cuuuucccucucccuuucccuaagaguugucu

SEQ ID NO: 260602 - RNA, 32 nt, Homo Sapiens
aaagugagaaagaucacccaugauucuguuuc

SEQ ID NO: 260603 - RNA, 32 nt, Homo Sapiens
gaugagauuugacaccaauaugggcaaaauua

SEQ ID NO: 260604 - RNA, 32 nt, Homo Sapiens
gaccacugggauggugugugggacaccaagug

SEQ ID NO: 260605 - RNA, 32 nt, Homo Sapiens
aaaauuccuucugcacaugaggccaguauagg

SEQ ID NO: 260606 - RNA, 32 nt, Homo Sapiens
ucgcgcucugcucaguggguaaaauuagaugc

SEQ ID NO: 260607 - RNA, 32 nt, Homo Sapiens
acuccccugaaggaagagccuuccucacccaa

SEQ ID NO: 260608 - RNA, 32 nt, Homo Sapiens
guaaauaugagggaagacacagcaaauggcca

SEQ ID NO: 260609 - RNA, 32 nt, Homo Sapiens
cuucggaggaggcacuccauggagaaagggcu

SEQ ID NO: 260610 - RNA, 31 nt, Homo Sapiens
cgucaagugaucugccugccuuggucuccca

SEQ ID NO: 260611 - RNA, 32 nt, Homo Sapiens
gggcuggugaggggcagagaaccuggcuagag

SEQ ID NO: 260612 - RNA, 32 nt, Homo Sapiens
gugcuugcccacaagcgccccgggccucuaca

SEQ ID NO: 260613 - RNA, 32 nt, Homo Sapiens
ggagccgggucucaggcaccgcugggggcgaa

SEQ ID NO: 260614 - RNA, 32 nt, Homo Sapiens
cuuguucaaagauaagaaaguuacaguuuugg

SEQ ID NO: 260615 - RNA, 32 nt, Homo Sapiens
gggugggggagagaaugacuucugccuucauc

SEQ ID NO: 260616 - RNA, 32 nt, Homo Sapiens
uuuuaaaauuuuucuucagaucccguucaguu

SEQ ID NO: 260617 - RNA, 32 nt, Homo Sapiens
ccgcaaaugcaaacaguuucagaucuaauggu

SEQ ID NO: 260618 - RNA, 32 nt, Homo Sapiens
cucagcgccugccuacugggcagcucaucugu

SEQ ID NO: 260619 - RNA, 32 nt, Homo Sapiens
ccgcaccaugcccgccguggacaagcuccugc

SEQ ID NO: 260620 - RNA, 32 nt, Homo Sapiens
gcguuggagccucugggccggaggaacugggg

SEQ ID NO: 260621 - RNA, 32 nt, Homo Sapiens
ucugcuaagauuuaaguacaauuuaagaauuu

SEQ ID NO: 260622 - RNA, 32 nt, Homo Sapiens
ggacacuugaguuuuuaaaacugugguuaaau

SEQ ID NO: 260623 - RNA, 32 nt, Homo Sapiens
ggaaugcauagaucucuccuucugccauagua

SEQ ID NO: 260624 - RNA, 32 nt, Homo Sapiens
uagcgugucuuacuguauaauggccucuuuug

SEQ ID NO: 260625 - RNA, 32 nt, Homo Sapiens
ccugaguguagcagcacacuuuccauacacca

SEQ ID NO: 260626 - RNA, 32 nt, Homo Sapiens
aaacuuuuguuaaguuuuuucuuguaaauuuu

SEQ ID NO: 260627 - RNA, 32 nt, Homo Sapiens
cuuggguuaaacaagagacagguuuuguagaa

SEQ ID NO: 260628 - RNA, 32 nt, Homo Sapiens
caaauuagguggccuuauaaauauaagcagau

SEQ ID NO: 260629 - RNA, 32 nt, Homo Sapiens
acuguggaauaugugcuggaaaaauugcaaca

SEQ ID NO: 260630 - RNA, 32 nt, Homo Sapiens
uuacuuguaaucaguuccauagcuuuagacgg

SEQ ID NO: 260631 - RNA, 32 nt, Homo Sapiens
gguuaugggugaagaacaacccagggccagcg

SEQ ID NO: 260632 - RNA, 32 nt, Homo Sapiens
gaugucaagagcaucacuguuguuauuuaaaa

SEQ ID NO: 260633 - RNA, 32 nt, Homo Sapiens
cucacuugcugcgagacuucaggccgcuucug

SEQ ID NO: 260634 - RNA, 32 nt, Homo Sapiens
ugcagagaugaccucucgcugccucacaagca

SEQ ID NO: 260635 - RNA, 32 nt, Homo Sapiens
caguggaagagguugcacuucuccgagagagg

SEQ ID NO: 260636 - RNA, 32 nt, Homo Sapiens
uugccaccgcgcgcccggcaucccugcggccg

SEQ ID NO: 260637 - RNA, 29 nt, Homo Sapiens
uaauuaaaacaaacagaacaauuuucccc

SEQ ID NO: 260638 - RNA, 32 nt, Homo Sapiens
cccuugcuggccaccccuggaacaugccuacc

SEQ ID NO: 260639 - RNA, 32 nt, Homo Sapiens
cagcacucagugaguucaucagggccacaccc

SEQ ID NO: 260640 - RNA, 32 nt, Homo Sapiens
cacaucagaauuuuuccagccucauuugucag

SEQ ID NO: 260641 - RNA, 32 nt, Homo Sapiens
guuuaaggaaaugguggcaugaagacccucuc

SEQ ID NO: 260642 - RNA, 32 nt, Homo Sapiens
gaguccagcgacggcucugugacuguuuuccu

SEQ ID NO: 260643 - RNA, 32 nt, Homo Sapiens
ugucacgguggguggcugugucugagcaccuc

SEQ ID NO: 260644 - RNA, 32 nt, Homo Sapiens
agaaucuuccucaagcacuugcuggaaaagau

SEQ ID NO: 260645 - RNA, 32 nt, Homo Sapiens
ucuucccacucuggggguuucuaucacuguga

SEQ ID NO: 260646 - RNA, 32 nt, Homo Sapiens
gucauuuccuuccuuuuaacuucaauguacuc

SEQ ID NO: 260647 - RNA, 32 nt, Homo Sapiens
uuaaaggaaacaaaagugaauaccauauuguu

SEQ ID NO: 260648 - RNA, 32 nt, Homo Sapiens
uccaguacuuuuuaugauuuuuuaaauaaaaa

SEQ ID NO: 260649 - RNA, 32 nt, Homo Sapiens
guuuuugucauucauguacauuuuccuuugga

SEQ ID NO: 260650 - RNA, 32 nt, Homo Sapiens
gggcggggcggggagcggcaggcggccccacc

SEQ ID NO: 260651 - RNA, 32 nt, Homo Sapiens
ugugccugccgccugcccuccacacaucccug

SEQ ID NO: 260652 - RNA, 32 nt, Homo Sapiens
cguuucugaagugcucuuucuuggauuggaca

SEQ ID NO: 260653 - RNA, 32 nt, Homo Sapiens
auguuaaucauucauccauuuauuugauucuc

SEQ ID NO: 260654 - RNA, 32 nt, Homo Sapiens
cauuaaugcucuuuuuuaguauguucuuuaau

SEQ ID NO: 260655 - RNA, 32 nt, Homo Sapiens
acaaggcugcuaaaccaauuaagaaaauaauu

SEQ ID NO: 260656 - RNA, 32 nt, Homo Sapiens
cgaccgggauaagggugugcugcccuucccgg

SEQ ID NO: 260657 - RNA, 32 nt, Homo Sapiens
cuguuguucauaaauuuuuuaaagccuaaaaa

SEQ ID NO: 260658 - RNA, 32 nt, Homo Sapiens
cuaccaggucucuaggggccugagagaggccc

SEQ ID NO: 260659 - RNA, 32 nt, Homo Sapiens
acagcuggguuccaccugaagagccuccgugc

SEQ ID NO: 260660 - RNA, 32 nt, Homo Sapiens
gcgcgcagcgggugcgcagaagacuggaggag

SEQ ID NO: 260661 - RNA, 32 nt, Homo Sapiens
cauccacccucuacuuucugucucucugaucu

SEQ ID NO: 260662 - RNA, 32 nt, Homo Sapiens
agcaaaccauuucucuccgucuguucuguuuu

SEQ ID NO: 260663 - RNA, 32 nt, Homo Sapiens
cacugaauauuuacccacggaccuuucacuga

SEQ ID NO: 260664 - RNA, 32 nt, Homo Sapiens
ucuuaacaaacacaggaggacuuaauggcagc

SEQ ID NO: 260665 - RNA, 32 nt, Homo Sapiens
caugucaucaugcuaucaguuuggcuggguau

SEQ ID NO: 260666 - RNA, 32 nt, Homo Sapiens
gggggaguggugcuggccaaucacaggagaga

SEQ ID NO: 260667 - RNA, 32 nt, Homo Sapiens
gagcuccauaucccagucccagcccuucuuug

SEQ ID NO: 260668 - RNA, 32 nt, Homo Sapiens
ggcggaaagcgagaccccggcgccgagugagg

SEQ ID NO: 260669 - RNA, 32 nt, Homo Sapiens
cugggcagaggggucugcugcagaaacacugu

SEQ ID NO: 260670 - RNA, 32 nt, Homo Sapiens
ucguucguucccucuggccuggcggaacuugc

SEQ ID NO: 260671 - RNA, 32 nt, Homo Sapiens
uucuuuuguuaauguguagaguucuccuuucu

SEQ ID NO: 260672 - RNA, 32 nt, Homo Sapiens
aacaggccccacgcccucuccucccccuccua

SEQ ID NO: 260673 - RNA, 32 nt, Homo Sapiens
accuggaccccggccggcugcgggaaacacuc

SEQ ID NO: 260674 - RNA, 32 nt, Homo Sapiens
gugugcggcugcagugcccaccccuucccugc

SEQ ID NO: 260675 - RNA, 32 nt, Homo Sapiens
ggcuuagaauaaaagauguagcacauuuugcu

SEQ ID NO: 260676 - RNA, 31 nt, Homo Sapiens
uuuucuuugugcucauugaguaguuccagac

SEQ ID NO: 260677 - RNA, 31 nt, Homo Sapiens
aaggccagauaaauggauucgagccacuugu

SEQ ID NO: 260678 - RNA, 32 nt, Homo Sapiens
auaugagcauacgacaugucaaagcucaugug

SEQ ID NO: 260679 - RNA, 31 nt, Homo Sapiens
gcuggagaauaaaaauaauauaucauuugca

SEQ ID NO: 260680 - RNA, 32 nt, Homo Sapiens
ggccacgagcagcagcagcaggaaggcguuga

SEQ ID NO: 260681 - RNA, 32 nt, Homo Sapiens
ggcauucaccugaggauuccuaucuugacuuc

SEQ ID NO: 260682 - RNA, 32 nt, Homo Sapiens
uccgaacaucagaaggagcaaacuccugacac

SEQ ID NO: 260683 - RNA, 32 nt, Homo Sapiens
caugccggucagcagugcugcagacacaggac

SEQ ID NO: 260684 - RNA, 32 nt, Homo Sapiens
gugcuucauggugucuuuauuaggcuuugacu

SEQ ID NO: 260685 - RNA, 32 nt, Homo Sapiens
cugguccuggccaucccacgccgccugcgugu

SEQ ID NO: 260686 - RNA, 32 nt, Homo Sapiens
uguggagaggggccuggugugguggggcccgg

SEQ ID NO: 260687 - RNA, 32 nt, Homo Sapiens
acagugaucugguguggggaggcggccgggcc

SEQ ID NO: 260688 - RNA, 32 nt, Homo Sapiens
uuguagauugauuuuucuuuccugucccccua

SEQ ID NO: 260689 - RNA, 32 nt, Homo Sapiens
ucccccgcaucggagaccacguggugagcgug

SEQ ID NO: 260690 - RNA, 31 nt, Homo Sapiens
cagucccauuccucagcuucuucacaggcac

SEQ ID NO: 260691 - RNA, 32 nt, Homo Sapiens
gucgcugggaugcacggugggcucucgucauc

SEQ ID NO: 260692 - RNA, 32 nt, Homo Sapiens
accauucacagcauucaucaccaacugacaua

SEQ ID NO: 260693 - RNA, 32 nt, Homo Sapiens
auggugaccucgggaauggcaauuuuuugggc

SEQ ID NO: 260694 - RNA, 32 nt, Homo Sapiens
uuaggggaggguuuuucuuuauagcuccuuuu

SEQ ID NO: 260695 - RNA, 32 nt, Homo Sapiens
cucaccacccuucuccccacccgcccccccgc

SEQ ID NO: 260696 - RNA, 32 nt, Homo Sapiens
uaaacccagccuggugggccccggccccugac

SEQ ID NO: 260697 - RNA, 32 nt, Homo Sapiens
gcucugcuggccugagccccaggccuuggccu

SEQ ID NO: 260698 - RNA, 32 nt, Homo Sapiens
cauacaauuagucugaaucuagguuccucuga

SEQ ID NO: 260699 - RNA, 32 nt, Homo Sapiens
auauaagccaagggcacgggguggccgggaac

SEQ ID NO: 260700 - RNA, 32 nt, Homo Sapiens
ccaccagagccagaagcagagguagaaucagg

SEQ ID NO: 260701 - RNA, 32 nt, Homo Sapiens
ugucugcagcugccacuggugcaaggccuuac

SEQ ID NO: 260702 - RNA, 32 nt, Homo Sapiens
cgcaggaacugaacccaaaggaucaccuggua

SEQ ID NO: 260703 - RNA, 32 nt, Homo Sapiens
cucacggcguccccgagcagcgucgcagagcg

SEQ ID NO: 260704 - RNA, 32 nt, Homo Sapiens
aaugaaaugaccaagacuuuaauuauaaaaaa

SEQ ID NO: 260705 - RNA, 32 nt, Homo Sapiens
gucgcugucucuuuucugugauuucuguaaaa

SEQ ID NO: 260706 - RNA, 32 nt, Homo Sapiens
ugagugaccccacucugaguucacuaaguuau

SEQ ID NO: 260707 - RNA, 32 nt, Homo Sapiens
accaugaguugggugcagacaccuagaaggag

SEQ ID NO: 260708 - RNA, 32 nt, Homo Sapiens
ugacacucaccuucugugacuacuucagucac

SEQ ID NO: 260709 - RNA, 32 nt, Homo Sapiens
agacgucuccucaggacccucccaggagagua

SEQ ID NO: 260710 - RNA, 32 nt, Homo Sapiens
guuaaugcaagguuugggguccccuuuaacac

SEQ ID NO: 260711 - RNA, 32 nt, Homo Sapiens
cugcccaaggaccccaggaucaugugcguggc

SEQ ID NO: 260712 - RNA, 32 nt, Homo Sapiens
cuucucuauccuugcucaaaaugugggauaac

SEQ ID NO: 260713 - RNA, 32 nt, Homo Sapiens
gagcaccauaacacugagauaacagcuuaagu

SEQ ID NO: 260714 - RNA, 32 nt, Homo Sapiens
gccgugcaaacgccagcguagggagggaaaac

SEQ ID NO: 260715 - RNA, 32 nt, Homo Sapiens
uuuaugaagcaucuuauucugcgaccgaggcu

SEQ ID NO: 260716 - RNA, 32 nt, Homo Sapiens
ugaccccuccaaggaaagaccaccuucugggg

SEQ ID NO: 260717 - RNA, 32 nt, Homo Sapiens
auuacaacccucagaauaggggacaguggugu

SEQ ID NO: 260718 - RNA, 32 nt, Homo Sapiens
gauaaaauuacauuucagucuuuacuuuuuau

SEQ ID NO: 260719 - RNA, 32 nt, Homo Sapiens
cauuuucaauuuacaauauuuucaacugauag

SEQ ID NO: 260720 - RNA, 32 nt, Homo Sapiens
cguuaugaaacacuucuaaaagaauguaaaag

SEQ ID NO: 260721 - RNA, 32 nt, Homo Sapiens
cugguaaauaaauuauuuuggacaaaaaaaaa

SEQ ID NO: 260722 - RNA, 32 nt, Homo Sapiens
ccuuuccccucuauugcaucccccugcccgac

SEQ ID NO: 260723 - RNA, 32 nt, Homo Sapiens
auuauagaacguuuauaaugguaaauuagauu

SEQ ID NO: 260724 - RNA, 32 nt, Homo Sapiens
aaaauucuaguggacuggcuaguucagaaaau

SEQ ID NO: 260725 - RNA, 32 nt, Homo Sapiens
ccggggccuggcaggcucucgguggguggggu

SEQ ID NO: 260726 - RNA, 32 nt, Homo Sapiens
ucaguggauugaaugucuuuuuauuuuaaauu

SEQ ID NO: 260727 - RNA, 32 nt, Homo Sapiens
ugaggcaaagacuuacgugugauuguuuuccu

SEQ ID NO: 260728 - RNA, 32 nt, Homo Sapiens
aauccaccuuuggaggaaaucaguggggcuca

SEQ ID NO: 260729 - RNA, 32 nt, Homo Sapiens
gccgaucucccgcucccagacugcucucguau

SEQ ID NO: 260730 - RNA, 32 nt, Homo Sapiens
caugcuuaaugauggaaaugaaauguuaaauc

SEQ ID NO: 260731 - RNA, 32 nt, Homo Sapiens
aggaauuauugagaaacuuaugaugguggcau

SEQ ID NO: 260732 - RNA, 32 nt, Homo Sapiens
cagcgaggcuuccgcgcucgcugcuggugagc

SEQ ID NO: 260733 - RNA, 32 nt, Homo Sapiens
auguuggaaaauuacggcaaccuggucuuacu

SEQ ID NO: 260734 - RNA, 32 nt, Homo Sapiens
cugcggcugcucaagacccuggagcuguacuu

SEQ ID NO: 260735 - RNA, 32 nt, Homo Sapiens
uguggacuguaaauguuuuauuuguaagauuc

SEQ ID NO: 260736 - RNA, 32 nt, Homo Sapiens
gacgcugccugugcaggucugcaccggcuccc

SEQ ID NO: 260737 - RNA, 32 nt, Homo Sapiens
cagcucgucuucugcuacaccaucauugagag

SEQ ID NO: 260738 - RNA, 32 nt, Homo Sapiens
cucuagaagaacauucucccuugcuugaugca

SEQ ID NO: 260739 - RNA, 32 nt, Homo Sapiens
uuguuguuuagagucuauuugcacuuuguuaa

SEQ ID NO: 260740 - RNA, 32 nt, Homo Sapiens
gaacauuugaaucuugggaccuuuaaagagcc

SEQ ID NO: 260741 - RNA, 32 nt, Homo Sapiens
ggaucauuacagagacagacucucccgagaca

SEQ ID NO: 260742 - RNA, 32 nt, Homo Sapiens
ggacccaaaaauuugcauuucuaacacauucu

SEQ ID NO: 260743 - RNA, 32 nt, Homo Sapiens
ccccaggucauccuguugaacugagagggaca

SEQ ID NO: 260744 - RNA, 32 nt, Homo Sapiens
cgcccgggccagaguccggccggagcggagcg

SEQ ID NO: 260745 - RNA, 32 nt, Homo Sapiens
uuccaggugcuucuaauggguguugccauagc

SEQ ID NO: 260746 - RNA, 32 nt, Homo Sapiens
guuugcuaacuguggucuuuguggcuacuugu

SEQ ID NO: 260747 - RNA, 32 nt, Homo Sapiens
uaauugaacaaaacgcacaaagcaaugaauau

SEQ ID NO: 260748 - RNA, 32 nt, Homo Sapiens
ggccggcaaccuggccauccccauuccguucu

SEQ ID NO: 260749 - RNA, 32 nt, Homo Sapiens
ugucacuuuauauaaaugucuugauuacagua

SEQ ID NO: 260750 - RNA, 32 nt, Homo Sapiens
uguaauaaugaaauaaacauuaauguuguuug

SEQ ID NO: 260751 - RNA, 32 nt, Homo Sapiens
cccggcugucccccggccccagcgaccaugcc

SEQ ID NO: 260752 - RNA, 32 nt, Homo Sapiens
auuaaaagaacaaaaacuguaaaaaggaagua

SEQ ID NO: 260753 - RNA, 32 nt, Homo Sapiens
cuaauacaggugcacaaugccugcagugucuu

SEQ ID NO: 260754 - RNA, 32 nt, Homo Sapiens
guuuggagauuuuucauacuuuucuuacuaua

SEQ ID NO: 260755 - RNA, 32 nt, Homo Sapiens
uaucgaggacagcagaacaaaggggcacagag

SEQ ID NO: 260756 - RNA, 32 nt, Homo Sapiens
acaaaauggcggcggcagcggugucgcuuugu

SEQ ID NO: 260757 - RNA, 32 nt, Homo Sapiens
augauuaaacauuucuuuuuuuuagccauuau

SEQ ID NO: 260758 - RNA, 32 nt, Homo Sapiens
ucuaccuucccggcuggcccagcccccacacc

SEQ ID NO: 260759 - RNA, 32 nt, Homo Sapiens
agccucgucuucugcaccugucccccacugcc

SEQ ID NO: 260760 - RNA, 32 nt, Homo Sapiens
ugauuuugaaacgaucugcaggucuugccagu

SEQ ID NO: 260761 - RNA, 29 nt, Homo Sapiens
auauauacauguauguguacacauacaua

SEQ ID NO: 260762 - RNA, 32 nt, Homo Sapiens
cuagacuaugaugguuuuuucuucauucuaua

SEQ ID NO: 260763 - RNA, 32 nt, Homo Sapiens
aaguagagggcuuguuaaagcacgggaugcug

SEQ ID NO: 260764 - RNA, 32 nt, Homo Sapiens
gcggccggcgcauggcgugucuggccaaaucu

SEQ ID NO: 260765 - RNA, 32 nt, Homo Sapiens
acaguuaaacacaucuuuaaaagcauagucac

SEQ ID NO: 260766 - RNA, 32 nt, Homo Sapiens
aaccaacugucaacuagaaaauguuuaaauuu

SEQ ID NO: 260767 - RNA, 32 nt, Homo Sapiens
gaggggcagggccagcuuccaucccuucucca

SEQ ID NO: 260768 - RNA, 32 nt, Homo Sapiens
uugaaauuguagugcaaaauggucaguauuau

SEQ ID NO: 260769 - RNA, 32 nt, Homo Sapiens
acggguuuggcgugugggacgcagcugccucu

SEQ ID NO: 260770 - RNA, 32 nt, Homo Sapiens
uagcagcagccuauggcaagagcuuauaaaug

SEQ ID NO: 260771 - RNA, 32 nt, Homo Sapiens
uccucgcggggcguguugcgugcggaggucag

SEQ ID NO: 260772 - RNA, 32 nt, Homo Sapiens
ccgccucugcggcagcgcuagucgccuucucc

SEQ ID NO: 260773 - RNA, 32 nt, Homo Sapiens
cuaaaucuuuuauguauucuaacuuuaaaaga

SEQ ID NO: 260774 - RNA, 32 nt, Homo Sapiens
ccugguaaacacaaguggacacuggugaggga

SEQ ID NO: 260775 - RNA, 32 nt, Homo Sapiens
uagugggaaauuucagauuacuuuuuaaugau

SEQ ID NO: 260776 - RNA, 32 nt, Homo Sapiens
uauggguggagaacccacccccugcccaccac

SEQ ID NO: 260777 - RNA, 32 nt, Homo Sapiens
uaagagugcuauuuccuccucccuuuagaaga

SEQ ID NO: 260778 - RNA, 32 nt, Homo Sapiens
cuccagccggggcgacgagagaugcaucuucg

SEQ ID NO: 260779 - RNA, 32 nt, Homo Sapiens
gcuggaccugguuuuucuggaucauagcuaug

SEQ ID NO: 260780 - RNA, 32 nt, Homo Sapiens
cacgagcucaggccgccgcagccccggcgaac

SEQ ID NO: 260781 - RNA, 32 nt, Homo Sapiens
ccagccugccagccgcgcugcugcugcuccuc

SEQ ID NO: 260782 - RNA, 31 nt, Homo Sapiens
uuauagugaaacauguacuuugagcuuauug

SEQ ID NO: 260783 - RNA, 32 nt, Homo Sapiens
ucucccuuguccaaagucccaggcccagugca

SEQ ID NO: 260784 - RNA, 32 nt, Homo Sapiens
aggagaggccccagcuguccucaucccugccc

SEQ ID NO: 260785 - RNA, 32 nt, Homo Sapiens
ucugaaagggaagucugagcgagucuccuaaa

SEQ ID NO: 260786 - RNA, 32 nt, Homo Sapiens
gaggcuuuucaaucgucucucccuuuggaucu

SEQ ID NO: 260787 - RNA, 32 nt, Homo Sapiens
cagugcgcuccagcugaucucguuccgccggu

SEQ ID NO: 260788 - RNA, 32 nt, Homo Sapiens
acucagcugugacugcuuuccauuaacaguuc

SEQ ID NO: 260789 - RNA, 32 nt, Homo Sapiens
guacucaugaagauggaagucuacauggagaa

SEQ ID NO: 260790 - RNA, 32 nt, Homo Sapiens
aggcugguggccugggugccucugcacacuga

SEQ ID NO: 260791 - RNA, 32 nt, Homo Sapiens
ccuuucugcccuugggcccccggacuuccaca

SEQ ID NO: 260792 - RNA, 32 nt, Homo Sapiens
gaguccccugucaacgacagccauggccgggc

SEQ ID NO: 260793 - RNA, 32 nt, Homo Sapiens
aagcgcaggaggaggcaguguuaggccuuagg

SEQ ID NO: 260794 - RNA, 32 nt, Homo Sapiens
ucaucaucaugaugaugauaauuuauuaacuu

SEQ ID NO: 260795 - RNA, 32 nt, Homo Sapiens
ccgugccgccugaagagcugcagccagaacag

SEQ ID NO: 260796 - RNA, 32 nt, Homo Sapiens
acaccccuucaugcccggcuuuccccauaucc

SEQ ID NO: 260797 - RNA, 32 nt, Homo Sapiens
ugucccaugucccgugucuccucggucgcccc

SEQ ID NO: 260798 - RNA, 32 nt, Homo Sapiens
acgucagcaagguggcucugacccucccaggu

SEQ ID NO: 260799 - RNA, 32 nt, Homo Sapiens
aacuagccgggcaugguggcgcaugccuguaa

SEQ ID NO: 260800 - RNA, 32 nt, Homo Sapiens
uccuccagcccuagacucccaagccccagcag

SEQ ID NO: 260801 - RNA, 32 nt, Homo Sapiens
caacaaaaacaaaaaugugcuguucaaguuuu

SEQ ID NO: 260802 - RNA, 32 nt, Homo Sapiens
uucggguggggaauauaacauaucaaaauaca

SEQ ID NO: 260803 - RNA, 32 nt, Homo Sapiens
acgacccugccagcuuccaagagggcggcuuc

SEQ ID NO: 260804 - RNA, 29 nt, Homo Sapiens
guauaaauuaaauaaacuguuuucaaguc

SEQ ID NO: 260805 - RNA, 32 nt, Homo Sapiens
uguauuacauuuuauuuuuucuuaauccaguu

SEQ ID NO: 260806 - RNA, 32 nt, Homo Sapiens
ccagauggcucuuuuucccaagccgccaucuu

SEQ ID NO: 260807 - RNA, 32 nt, Homo Sapiens
uuuuaugagugaugauacuuuuuccauuacug

SEQ ID NO: 260808 - RNA, 32 nt, Homo Sapiens
uuuaccuauaaaauauuuauuugaaguagagg

SEQ ID NO: 260809 - RNA, 32 nt, Homo Sapiens
ucauuuuugugauguuuugcuacauauaugaa

SEQ ID NO: 260810 - RNA, 32 nt, Homo Sapiens
guaacauagaaaaugaaaaaacaguuaaaaaa

SEQ ID NO: 260811 - RNA, 32 nt, Homo Sapiens
ggcagggcacuugcaguacaugugcuaugugu

SEQ ID NO: 260812 - RNA, 32 nt, Homo Sapiens
ugacuuuugacaaagccaucuguucaucugca

SEQ ID NO: 260813 - RNA, 32 nt, Homo Sapiens
gaccucaguuugggagugcccuugagccccuu

SEQ ID NO: 260814 - RNA, 32 nt, Homo Sapiens
aagguggaaauacugccugaaaagacuccgcc

SEQ ID NO: 260815 - RNA, 32 nt, Homo Sapiens
caccgggaagaacaacucucaucccacaauug

SEQ ID NO: 260816 - RNA, 32 nt, Homo Sapiens
gcaaguuuuauuuaucaaaauguaauggauuu

SEQ ID NO: 260817 - RNA, 32 nt, Homo Sapiens
uuagcacaaaccgacagagaucaucaaacagc

SEQ ID NO: 260818 - RNA, 32 nt, Homo Sapiens
aguggccauaugcugucaggggugcggagugg

SEQ ID NO: 260819 - RNA, 32 nt, Homo Sapiens
ccaccgcagcugccuccucaggauccggucgu

SEQ ID NO: 260820 - RNA, 32 nt, Homo Sapiens
cucaaagggaggaggccagcugguaggcagcc

SEQ ID NO: 260821 - RNA, 32 nt, Homo Sapiens
ucaaaggaauaaaaagcuggccguacaaauua

SEQ ID NO: 260822 - RNA, 32 nt, Homo Sapiens
cguggcagggccaaggcccacccacugccauc

SEQ ID NO: 260823 - RNA, 32 nt, Homo Sapiens
agaacuggagucugacuugguucguuagugga

SEQ ID NO: 260824 - RNA, 32 nt, Homo Sapiens
uuucggaucuucugucccagauccugcucccu

SEQ ID NO: 260825 - RNA, 32 nt, Homo Sapiens
uucguaaugaauuuucuuuacauccuguccac

SEQ ID NO: 260826 - RNA, 32 nt, Homo Sapiens
ucgcgcucuuggcugcucucccggccccaagc

SEQ ID NO: 260827 - RNA, 32 nt, Homo Sapiens
auuucugauuauaaaucauugcuuuuaacugu

SEQ ID NO: 260828 - RNA, 32 nt, Homo Sapiens
uuggcuggggucaggggcuggugccugggagc

SEQ ID NO: 260829 - RNA, 32 nt, Homo Sapiens
agccgcggcgccccgcccuauuuauagcagcg

SEQ ID NO: 260830 - RNA, 32 nt, Homo Sapiens
ugcagccucuguccccuccaccucugaggagc

SEQ ID NO: 260831 - RNA, 32 nt, Homo Sapiens
cgcccccucccucuuucggcugguguagaaua

SEQ ID NO: 260832 - RNA, 32 nt, Homo Sapiens
ggggcagggcagccgucaccccugccucccgc

SEQ ID NO: 260833 - RNA, 32 nt, Homo Sapiens
gggaucacccccuucgugccucauggaauuca

SEQ ID NO: 260834 - RNA, 32 nt, Homo Sapiens
aauauuguacuauuuauggugguggggcuuuc

SEQ ID NO: 260835 - RNA, 32 nt, Homo Sapiens
ucgaaccagauggaugaagaccacuaacggcu

SEQ ID NO: 260836 - RNA, 32 nt, Homo Sapiens
caggaggaggguucggggcgccauggcaccau

SEQ ID NO: 260837 - RNA, 32 nt, Homo Sapiens
aggcagcuugccuuccaccagacgccagccuc

SEQ ID NO: 260838 - RNA, 32 nt, Homo Sapiens
gaccagaggcuuuagauuauuauuuuagaucc

SEQ ID NO: 260839 - RNA, 32 nt, Homo Sapiens
aucaguguucuucaguauguccaauuguuauc

SEQ ID NO: 260840 - RNA, 32 nt, Homo Sapiens
acaaauucuuucacaagguacaaaaucuugca

SEQ ID NO: 260841 - RNA, 32 nt, Homo Sapiens
uacuaaaaaaauuuauuuuacacaugucaagg

SEQ ID NO: 260842 - RNA, 32 nt, Homo Sapiens
cuuauucaucuguuuucuuuuucguuggugua

SEQ ID NO: 260843 - RNA, 32 nt, Homo Sapiens
gcagagggugaucuuugaaaagaggcuggacu

SEQ ID NO: 260844 - RNA, 32 nt, Homo Sapiens
ggacucaggacaggcucugugacuuacaggga

SEQ ID NO: 260845 - RNA, 32 nt, Homo Sapiens
aagagcuguggacacagcacuccaacuuacuc

SEQ ID NO: 260846 - RNA, 32 nt, Homo Sapiens
auuguuugccuugcucuguuuuugcuuuugug

SEQ ID NO: 260847 - RNA, 32 nt, Homo Sapiens
gucuugugcagggugagauguugacuccaagg

SEQ ID NO: 260848 - RNA, 30 nt, Homo Sapiens
aagcugugcuuugugggggaaaauaugcau

SEQ ID NO: 260849 - RNA, 32 nt, Homo Sapiens
aagagcuuggcugcugcguccagggcugcugc

SEQ ID NO: 260850 - RNA, 32 nt, Homo Sapiens
cuugggacuuaccaaaggcacggaccccucca

SEQ ID NO: 260851 - RNA, 32 nt, Homo Sapiens
aagaaaccuuuuuuaaacuauuucuagguuug

SEQ ID NO: 260852 - RNA, 32 nt, Homo Sapiens
auucuuugucagaacaaauauauguaacaggc

SEQ ID NO: 260853 - RNA, 31 nt, Homo Sapiens
ugggggagggcggucuucccacuuccucucc

SEQ ID NO: 260854 - RNA, 32 nt, Homo Sapiens
gguaggaaagagaagauguucuuauucagaua

SEQ ID NO: 260855 - RNA, 32 nt, Homo Sapiens
guuugggcugcuguaacagaaugccacagaug

SEQ ID NO: 260856 - RNA, 32 nt, Homo Sapiens
acaaaaguguaaauacuguuucagaguugaga

SEQ ID NO: 260857 - RNA, 32 nt, Homo Sapiens
uuaacaaauacgaguaacccugucccaaucac

SEQ ID NO: 260858 - RNA, 30 nt, Homo Sapiens
aucccucuggacuggaugguucuucauagg

SEQ ID NO: 260859 - RNA, 32 nt, Homo Sapiens
gcagucgaaccauggugaacuccaccuccgug

SEQ ID NO: 260860 - RNA, 32 nt, Homo Sapiens
cccacugugugcccccuggagcuccuccuaga

SEQ ID NO: 260861 - RNA, 32 nt, Homo Sapiens
agcaaucagugagacuccgugggcguaggacu

SEQ ID NO: 260862 - RNA, 30 nt, Homo Sapiens
auaaacagagagcuugaugcuuucugccuu

SEQ ID NO: 260863 - RNA, 32 nt, Homo Sapiens
uuaggaaccauuuuugcaauuggagauguuug

SEQ ID NO: 260864 - RNA, 32 nt, Homo Sapiens
ccauuuagagauuuuuuguaggaaguuaacaa

SEQ ID NO: 260865 - RNA, 31 nt, Homo Sapiens
aacugcacaaauuguagagcauguguguuug

SEQ ID NO: 260866 - RNA, 32 nt, Homo Sapiens
aguugaugcaguaaguuuuuuggacuaguagu

SEQ ID NO: 260867 - RNA, 32 nt, Homo Sapiens
cacagccuucugcugcagcagaggcucaccca

SEQ ID NO: 260868 - RNA, 32 nt, Homo Sapiens
ugcgcccucccuccccggccagggcgcucggg

SEQ ID NO: 260869 - RNA, 32 nt, Homo Sapiens
gaggccgggccuugcccucccuucugcccagg

SEQ ID NO: 260870 - RNA, 32 nt, Homo Sapiens
gagaaaggaaaauaaauuuaauaaaauuggug

SEQ ID NO: 260871 - RNA, 32 nt, Homo Sapiens
caugccugccagccagccugucccaccacagc

SEQ ID NO: 260872 - RNA, 32 nt, Homo Sapiens
acaccuuuguaucucauuugaugugauaccca

SEQ ID NO: 260873 - RNA, 32 nt, Homo Sapiens
gguuaauuccugacuuaguuuauuuuugcaaa

SEQ ID NO: 260874 - RNA, 32 nt, Homo Sapiens
cacuccuagggcagcccucccagcgccccaug

SEQ ID NO: 260875 - RNA, 32 nt, Homo Sapiens
ccucugcagcgcgcaccccggcggggcuuugg

SEQ ID NO: 260876 - RNA, 32 nt, Homo Sapiens
guaaagccuucagaucugccacucaacuucag

SEQ ID NO: 260877 - RNA, 32 nt, Homo Sapiens
agccaccgcgcccugccccuacugacuuucca

SEQ ID NO: 260878 - RNA, 32 nt, Homo Sapiens
uccaaaccauucccaaaccuuuccccguagua

SEQ ID NO: 260879 - RNA, 32 nt, Homo Sapiens
gccacugcggccuggcugcuggggacgagaga

SEQ ID NO: 260880 - RNA, 32 nt, Homo Sapiens
cccuggcccgucugugcacucuuggcuccugg

SEQ ID NO: 260881 - RNA, 32 nt, Homo Sapiens
agucuggaacucagucccacuucuuggccugg

SEQ ID NO: 260882 - RNA, 32 nt, Homo Sapiens
ugcccuaaauguuugaucucuguuugucauua

SEQ ID NO: 260883 - RNA, 32 nt, Homo Sapiens
cauuugauuauccuacagaaaucuguugucaa

SEQ ID NO: 260884 - RNA, 32 nt, Homo Sapiens
caggagauggugagaugguuaugauaaggcac

SEQ ID NO: 260885 - RNA, 32 nt, Homo Sapiens
ugccgccgcugcucaccccggccguccggccg

SEQ ID NO: 260886 - RNA, 32 nt, Homo Sapiens
aaaauaaaacaucaccuauuuaauguuuuuaa

SEQ ID NO: 260887 - RNA, 32 nt, Homo Sapiens
acaugagucuccucgagaagugaggagaggca

SEQ ID NO: 260888 - RNA, 32 nt, Homo Sapiens
ucugagaaaaagagagacgugcugcuuagaau

SEQ ID NO: 260889 - RNA, 32 nt, Homo Sapiens
cggcggcaaggucggcagcugcgaggccaaga

SEQ ID NO: 260890 - RNA, 32 nt, Homo Sapiens
gcccucccagcccacaccagugcucucggcca

SEQ ID NO: 260891 - RNA, 32 nt, Homo Sapiens
gucauggaggccuggggucucugcgccuggcc

SEQ ID NO: 260892 - RNA, 32 nt, Homo Sapiens
agccgggaguugcggcagcugcaagaggagau

SEQ ID NO: 260893 - RNA, 32 nt, Homo Sapiens
ccacagguccuacaccccuggcacucucuucu

SEQ ID NO: 260894 - RNA, 32 nt, Homo Sapiens
uuauuuauuucuguguuuuaaacauaaauaug

SEQ ID NO: 260895 - RNA, 32 nt, Homo Sapiens
cucccacagacaccgccauccccucggaaucu

SEQ ID NO: 260896 - RNA, 27 nt, Homo Sapiens
gugaucucccacuucagccucccgagu

SEQ ID NO: 260897 - RNA, 32 nt, Homo Sapiens
agcgcuucagggcugggcagguccuggggagg

SEQ ID NO: 260898 - RNA, 32 nt, Homo Sapiens
acggagcagcggguuuuuccaugguuuggacu

SEQ ID NO: 260899 - RNA, 32 nt, Homo Sapiens
aaagauagaguaaaaagaaaacaaaaccaaaa

SEQ ID NO: 260900 - RNA, 32 nt, Homo Sapiens
uaggagggccccaccagucagagcccugaauc

SEQ ID NO: 260901 - RNA, 32 nt, Homo Sapiens
gaaugugagcccaaugcauaaugucuuuaaaa

SEQ ID NO: 260902 - RNA, 32 nt, Homo Sapiens
uauucuaaaaauuguguacaggauauuccuuu

SEQ ID NO: 260903 - RNA, 26 nt, Homo Sapiens
uaugcucucuaaaguucacccuugcu

SEQ ID NO: 260904 - RNA, 32 nt, Homo Sapiens
ucccaggagaagaggcgguggcggcggcggcu

SEQ ID NO: 260905 - RNA, 32 nt, Homo Sapiens
guaauucuuuugcugccugucucuucuccauu

SEQ ID NO: 260906 - RNA, 32 nt, Homo Sapiens
ggccagcaagguggaguggaugccucagaacg

SEQ ID NO: 260907 - RNA, 32 nt, Homo Sapiens
uaaauccaggggaagaugacuaucuugcaugc

SEQ ID NO: 260908 - RNA, 32 nt, Homo Sapiens
cuggcccggccgcggcgcgacgccgaacccgu

SEQ ID NO: 260909 - RNA, 32 nt, Homo Sapiens
auuuucccacuuuaguucuuuagugacucuua

SEQ ID NO: 260910 - RNA, 31 nt, Homo Sapiens
cuuucaacaaauugggcaaugcuugugugau

SEQ ID NO: 260911 - RNA, 32 nt, Homo Sapiens
uagcaagaacuccaaaucauggaagugaaauu

SEQ ID NO: 260912 - RNA, 32 nt, Homo Sapiens
gaaugucugccuauauauucucugcucuuugu

SEQ ID NO: 260913 - RNA, 32 nt, Homo Sapiens
aggaaggaugggugcggguaacuuuuugaccg

SEQ ID NO: 260914 - RNA, 32 nt, Homo Sapiens
agagcccaagucucagagcucuguggaagggg

SEQ ID NO: 260915 - RNA, 30 nt, Homo Sapiens
ccgccauggcggcccgggcggugcuggacg

SEQ ID NO: 260916 - RNA, 32 nt, Homo Sapiens
guccaucugguccugcccgacgccacuuccac

SEQ ID NO: 260917 - RNA, 32 nt, Homo Sapiens
acuuuaaguucugggauacaugugcagaacgu

SEQ ID NO: 260918 - RNA, 32 nt, Homo Sapiens
ugggauggaaagauucugugggaugcaaaaag

SEQ ID NO: 260919 - RNA, 32 nt, Homo Sapiens
gugcccacauggaauguccucccgggcugacc

SEQ ID NO: 260920 - RNA, 32 nt, Homo Sapiens
ucaccuuauaugccugccacagucuugguuca

SEQ ID NO: 260921 - RNA, 32 nt, Homo Sapiens
acugguuauaugccucccuugcagcaagcacu

SEQ ID NO: 260922 - RNA, 32 nt, Homo Sapiens
agauuauuaggccuucagggccagugucucca

SEQ ID NO: 260923 - RNA, 32 nt, Homo Sapiens
gccauugguaaaaagagaaacacaucaggauu

SEQ ID NO: 260924 - RNA, 32 nt, Homo Sapiens
ugcguuggucugcggcguuuccccagcagaca

SEQ ID NO: 260925 - RNA, 32 nt, Homo Sapiens
gggcuugccuccuccugcguccugcuagcuau

SEQ ID NO: 260926 - RNA, 32 nt, Homo Sapiens
aggcggguggaucaccugaggccagguguuug

SEQ ID NO: 260927 - RNA, 32 nt, Homo Sapiens
agccggguuguucccagccugagcaccgggcu

SEQ ID NO: 260928 - RNA, 32 nt, Homo Sapiens
uuccccuccggagcggcuggggcugcggcgcc

SEQ ID NO: 260929 - RNA, 32 nt, Homo Sapiens
ccucucgagacauacaaauccuugcuuuguca

SEQ ID NO: 260930 - RNA, 32 nt, Homo Sapiens
cgccugcaaauauauuguuauuuugguggaga

SEQ ID NO: 260931 - RNA, 32 nt, Homo Sapiens
gccggcggcgucuccucccgggacgcugaggg

SEQ ID NO: 260932 - RNA, 32 nt, Homo Sapiens
gccugcugcuucucuaccuccccuccccaccu

SEQ ID NO: 260933 - RNA, 32 nt, Homo Sapiens
acuguaugugcuguaauuuaauuuaggacaca

SEQ ID NO: 260934 - RNA, 32 nt, Homo Sapiens
uggagauguagcaaaaucaaacuggcuccuua

SEQ ID NO: 260935 - RNA, 32 nt, Homo Sapiens
caggccggcugggcugcagagcgccggcacgg

SEQ ID NO: 260936 - RNA, 32 nt, Homo Sapiens
gcugugguuaagaucucauuuuuauugcuuuu

SEQ ID NO: 260937 - RNA, 32 nt, Homo Sapiens
gguugugguaguccuguuuuccuaauaacuua

SEQ ID NO: 260938 - RNA, 32 nt, Homo Sapiens
uugguauuuaucuauuguaagauaaaaaagcu

SEQ ID NO: 260939 - RNA, 32 nt, Homo Sapiens
gccguugggaagaucaaacaauauuggaugug

SEQ ID NO: 260940 - RNA, 32 nt, Homo Sapiens
cugggacuguacugaggcuugaugggaaguau

SEQ ID NO: 260941 - RNA, 32 nt, Homo Sapiens
gaaaugauaccagcuuuuuuuguaccucuggu

SEQ ID NO: 260942 - RNA, 30 nt, Homo Sapiens
uaaacuuuacacaauaaaauuucauucugg

SEQ ID NO: 260943 - RNA, 32 nt, Homo Sapiens
gcgcacagccccagccacuccuccccacagca

SEQ ID NO: 260944 - RNA, 32 nt, Homo Sapiens
gugccgcagcuguacuccauguggaagcugac

SEQ ID NO: 260945 - RNA, 31 nt, Homo Sapiens
cguggaguggcgguguccaggggcgccccgc

SEQ ID NO: 260946 - RNA, 32 nt, Homo Sapiens
cugacugucccucucagcucugcgccugccag

SEQ ID NO: 260947 - RNA, 32 nt, Homo Sapiens
ugcaaaaugcccucaugcuauuggagauucuc

SEQ ID NO: 260948 - RNA, 32 nt, Homo Sapiens
gugcccagccugcgggccgaccgcgaccaccg

SEQ ID NO: 260949 - RNA, 32 nt, Homo Sapiens
cagccuggguggcagagugagacccagucuca

SEQ ID NO: 260950 - RNA, 32 nt, Homo Sapiens
agcaggucccaggagcuggggguggggccugg

SEQ ID NO: 260951 - RNA, 32 nt, Homo Sapiens
gacuggcaaugagaggcaaaaccuggugcuug

SEQ ID NO: 260952 - RNA, 32 nt, Homo Sapiens
ccacccccauacauuuauuucuguaaauaaug

SEQ ID NO: 260953 - RNA, 32 nt, Homo Sapiens
cuagagaucugguuuugcuauuagacuguagg

SEQ ID NO: 260954 - RNA, 32 nt, Homo Sapiens
uugaaacaaaaaugaguaucuuguagcugggg

SEQ ID NO: 260955 - RNA, 32 nt, Homo Sapiens
caugaggagcagcuuugugcugugggagagac

SEQ ID NO: 260956 - RNA, 32 nt, Homo Sapiens
agaaauugggcccaacaaaacuaauugaauaa

SEQ ID NO: 260957 - RNA, 32 nt, Homo Sapiens
uguuuccuuaaguuccuuuuuaaacuucccau

SEQ ID NO: 260958 - RNA, 32 nt, Homo Sapiens
uacaggcacgugccaccacaccugacuaauuu

SEQ ID NO: 260959 - RNA, 32 nt, Homo Sapiens
ugguugacucuuccucauuaucuuugaugcua

SEQ ID NO: 260960 - RNA, 32 nt, Homo Sapiens
uauugcuguuuuucugguuuaagaguaacagu

SEQ ID NO: 260961 - RNA, 32 nt, Homo Sapiens
uucuugugcaaaauuaaauaaauauuucucuu

SEQ ID NO: 260962 - RNA, 32 nt, Homo Sapiens
ugccccggaugcccaguggccgugccagcccc

SEQ ID NO: 260963 - RNA, 32 nt, Homo Sapiens
uuucaaucuucagauguuucguugaaucuauu

SEQ ID NO: 260964 - RNA, 32 nt, Homo Sapiens
uuuuauggaucuguugggaaccagagagaauc

SEQ ID NO: 260965 - RNA, 29 nt, Homo Sapiens
acaucugugacuugcguugcagaguguac

SEQ ID NO: 260966 - RNA, 30 nt, Homo Sapiens
cggggcgaaugcggcgcggguuccugccuc

SEQ ID NO: 260967 - RNA, 32 nt, Homo Sapiens
agcgaucaccugugccuccccucccccuuugu

SEQ ID NO: 260968 - RNA, 32 nt, Homo Sapiens
ccugggaggaggccccacggccugcugguggg

SEQ ID NO: 260969 - RNA, 32 nt, Homo Sapiens
ccucccuacucccauaccuccuccucuucugg

SEQ ID NO: 260970 - RNA, 32 nt, Homo Sapiens
gacaagcugcaaaucagccaugugcugcgugc

SEQ ID NO: 260971 - RNA, 32 nt, Homo Sapiens
ggagaagaucuaggagcuguccaagugguucc

SEQ ID NO: 260972 - RNA, 32 nt, Homo Sapiens
cagggguuuuagcucuguucucugcucccauc

SEQ ID NO: 260973 - RNA, 32 nt, Homo Sapiens
ucuugcauuucccucaauacaagcugcagccu

SEQ ID NO: 260974 - RNA, 32 nt, Homo Sapiens
uuaucauagaggucuucuuacccaggcacauc

SEQ ID NO: 260975 - RNA, 32 nt, Homo Sapiens
cuucugucaggagagagaugcugaugcuuacu

SEQ ID NO: 260976 - RNA, 32 nt, Homo Sapiens
ucguuuucaacagaauuauaauuaguuccuca

SEQ ID NO: 260977 - RNA, 32 nt, Homo Sapiens
cuuauacaaaaauaaaauaauuuaaaagaaaa

SEQ ID NO: 260978 - RNA, 29 nt, Homo Sapiens
uuuuaaaaauguaugugcuauacccaggu

SEQ ID NO: 260979 - RNA, 31 nt, Homo Sapiens
gagguagcucagagccaaccauccaggaccg

SEQ ID NO: 260980 - RNA, 32 nt, Homo Sapiens
gagaagagggagaggacuggaagggaucacca

SEQ ID NO: 260981 - RNA, 32 nt, Homo Sapiens
auauacuucuaaaagcuccuaacuuauaucca

SEQ ID NO: 260982 - RNA, 32 nt, Homo Sapiens
aguggccccuccccauccccucccucuguucg

SEQ ID NO: 260983 - RNA, 32 nt, Homo Sapiens
gcccguuagcgccaggagcgccaggcagcuga

SEQ ID NO: 260984 - RNA, 32 nt, Homo Sapiens
uaguaucuaacaaaaaguggcauaaaauauua

SEQ ID NO: 260985 - RNA, 32 nt, Homo Sapiens
uuuggcgaggaugggaauauuuucagugaagg

SEQ ID NO: 260986 - RNA, 32 nt, Homo Sapiens
gagcagucccauggugauaaagggcagcccgg

SEQ ID NO: 260987 - RNA, 32 nt, Homo Sapiens
ccuuguacuaguaaguuuuagcacugaauucc

SEQ ID NO: 260988 - RNA, 32 nt, Homo Sapiens
cuaagucaagaggcucaaugggcugcagaaga

SEQ ID NO: 260989 - RNA, 32 nt, Homo Sapiens
ggcuuucccgauuugguugaugagauggaaaa

SEQ ID NO: 260990 - RNA, 32 nt, Homo Sapiens
uuguuuggcguuuguuuuccauuuucauguca

SEQ ID NO: 260991 - RNA, 32 nt, Homo Sapiens
ccuuagaaaaggagaggauggggguagagucu

SEQ ID NO: 260992 - RNA, 32 nt, Homo Sapiens
aaggccggccccaguuucauccuuuuauccug

SEQ ID NO: 260993 - RNA, 32 nt, Homo Sapiens
ugcuccugaggcugcuggcugaggccggagga

SEQ ID NO: 260994 - RNA, 32 nt, Homo Sapiens
uggcccaggacaccggaccagguuuccaaaau

SEQ ID NO: 260995 - RNA, 32 nt, Homo Sapiens
uuccuacacccccgggaccccugcggguggcu

SEQ ID NO: 260996 - RNA, 32 nt, Homo Sapiens
ccucuccuccccagcccuguaggccugagggg

SEQ ID NO: 260997 - RNA, 32 nt, Homo Sapiens
uuccuggucucuggcacaucauaaccaauugg

SEQ ID NO: 260998 - RNA, 32 nt, Homo Sapiens
gggccccgccgcgcgccgcgagcacucaccag

SEQ ID NO: 260999 - RNA, 32 nt, Homo Sapiens
cugcccugugcagcugccuggcaguggcuggg

SEQ ID NO: 261000 - RNA, 32 nt, Homo Sapiens
ugaaagacuuccaaagaauguuagagcacagu

SEQ ID NO: 261001 - RNA, 32 nt, Homo Sapiens
ugucguuugcggucucggcagggcgcccccgu

SEQ ID NO: 261002 - RNA, 32 nt, Homo Sapiens
cucccccugcaggucccccuccccucugggug

SEQ ID NO: 261003 - RNA, 32 nt, Homo Sapiens
cuggcggccguccccgcccacccccggcucag

SEQ ID NO: 261004 - RNA, 32 nt, Homo Sapiens
uuugugaaaaguuaacagcaugcugaauguga

SEQ ID NO: 261005 - RNA, 32 nt, Homo Sapiens
aucucuccugguuuuuuucuuaagccccagaa

SEQ ID NO: 261006 - RNA, 32 nt, Homo Sapiens
ucuauuugcccacccauccauccacccuggca

SEQ ID NO: 261007 - RNA, 32 nt, Homo Sapiens
cuuugcacaggaugcuggccuuugcucuuacu

SEQ ID NO: 261008 - RNA, 32 nt, Homo Sapiens
cuagcucuauacguagugaggacccagauuua

SEQ ID NO: 261009 - RNA, 32 nt, Homo Sapiens
caaaccccacccauaaaucaaugggcccuuua

SEQ ID NO: 261010 - RNA, 32 nt, Homo Sapiens
uccuucuuuaaucuggugucugaggaguuuug

SEQ ID NO: 261011 - RNA, 32 nt, Homo Sapiens
guggaugcuggaccuugcugcugcugcuacug

SEQ ID NO: 261012 - RNA, 32 nt, Homo Sapiens
ucuaucccuucuuccgcccagccccccagccu

SEQ ID NO: 261013 - RNA, 32 nt, Homo Sapiens
gcuguuaccaucucagaggaaguaacugggca

SEQ ID NO: 261014 - RNA, 32 nt, Homo Sapiens
ccgcuagugcugguggccgccgcugcugcccc

SEQ ID NO: 261015 - RNA, 28 nt, Homo Sapiens
gugaagacagguaccaggauggcaggac

SEQ ID NO: 261016 - RNA, 32 nt, Homo Sapiens
aaugaguaaaaugaauuacuguauuuuuccuu

SEQ ID NO: 261017 - RNA, 32 nt, Homo Sapiens
cgcuuagucccacccccagaggaggcggaaga

SEQ ID NO: 261018 - RNA, 32 nt, Homo Sapiens
agagcccgccccacagauguauuuauuguaca

SEQ ID NO: 261019 - RNA, 32 nt, Homo Sapiens
gccccucggucccucacuggcacuucucccuc

SEQ ID NO: 261020 - RNA, 32 nt, Homo Sapiens
guaggcgcgggccauggcgcaguacaagggca

SEQ ID NO: 261021 - RNA, 32 nt, Homo Sapiens
agccccgccgccccgcucccugcuuugcuaca

SEQ ID NO: 261022 - RNA, 32 nt, Homo Sapiens
augaggucaggagaucgagaccauccuggcca

SEQ ID NO: 261023 - RNA, 32 nt, Homo Sapiens
ccucaccccacugccaggccgaggcucagccc

SEQ ID NO: 261024 - RNA, 32 nt, Homo Sapiens
ucaaauaaaaucaugaucuuauuguuaaaauu

SEQ ID NO: 261025 - RNA, 32 nt, Homo Sapiens
ccuaguuccuuccuuugauucuccuuugguag

SEQ ID NO: 261026 - RNA, 32 nt, Homo Sapiens
aaguucucucugugucccccucgcgggccccg

SEQ ID NO: 261027 - RNA, 29 nt, Homo Sapiens
cagcaucggggacacagguggggccacuc

SEQ ID NO: 261028 - RNA, 32 nt, Homo Sapiens
uuuacuuuucugauuauauuaaggggcugcca

SEQ ID NO: 261029 - RNA, 32 nt, Homo Sapiens
aucucagaugggugcugaaauauuuuaauaau

SEQ ID NO: 261030 - RNA, 28 nt, Homo Sapiens
ccuggggggcggcugcugaggaggugca

SEQ ID NO: 261031 - RNA, 32 nt, Homo Sapiens
agcucugccccuuuggggcugcgggugaagcc

SEQ ID NO: 261032 - RNA, 31 nt, Homo Sapiens
cuuugggucuuguucauagugcuguucaggc

SEQ ID NO: 261033 - RNA, 32 nt, Homo Sapiens
cugauaucccacugccccacuccacaaaauag

SEQ ID NO: 261034 - RNA, 32 nt, Homo Sapiens
ggauuauucuaacagaucaccauccaucuuca

SEQ ID NO: 261035 - RNA, 32 nt, Homo Sapiens
aauuuuuccaaggcgagcuagagagaaagaug

SEQ ID NO: 261036 - RNA, 32 nt, Homo Sapiens
cugagaagcaaugucacugccuuccugauccu

SEQ ID NO: 261037 - RNA, 32 nt, Homo Sapiens
agucuuuuggcggcgcccucugcuggccacua

SEQ ID NO: 261038 - RNA, 32 nt, Homo Sapiens
uggagcacaaggcuuugcuaugagcuuccugg

SEQ ID NO: 261039 - RNA, 32 nt, Homo Sapiens
cuuucuauucuccguguuuuuaucacaccugc

SEQ ID NO: 261040 - RNA, 32 nt, Homo Sapiens
ggccgcccuccacauggcgccacggccacuuc

SEQ ID NO: 261041 - RNA, 32 nt, Homo Sapiens
ccccuugucccuuucuuggggauuguggaggc

SEQ ID NO: 261042 - RNA, 32 nt, Homo Sapiens
uggcggaaacaaaugaugaggcugguuagcgg

SEQ ID NO: 261043 - RNA, 32 nt, Homo Sapiens
ugugaccuagucuucaaugucuucugcuugua

SEQ ID NO: 261044 - RNA, 32 nt, Homo Sapiens
uugcucacauuuaggaauaaacuuugaaaaaa

SEQ ID NO: 261045 - RNA, 32 nt, Homo Sapiens
aaaaccagaaaagcaaagaaacuagggaaacu

SEQ ID NO: 261046 - RNA, 32 nt, Homo Sapiens
ccaguccggugccuuccacccugcccuggccu

SEQ ID NO: 261047 - RNA, 32 nt, Homo Sapiens
ucuaacacauuaaaaugucaguuuuucuugcu

SEQ ID NO: 261048 - RNA, 27 nt, Homo Sapiens
ccauggaggaggaggagggggcggugg

SEQ ID NO: 261049 - RNA, 32 nt, Homo Sapiens
caagugucacuauauuugauaauaauuagauc

SEQ ID NO: 261050 - RNA, 32 nt, Homo Sapiens
caagcgucacuacauuugauaauaauuagauc

SEQ ID NO: 261051 - RNA, 32 nt, Homo Sapiens
uaggcucccagggccagaggagccagggacua

SEQ ID NO: 261052 - RNA, 32 nt, Homo Sapiens
acaccucaugcuagccucacgaaacuggaaua

SEQ ID NO: 261053 - RNA, 32 nt, Homo Sapiens
aaccuuagcccgucuuuuuuuuuuuuuuuuuu

SEQ ID NO: 261054 - RNA, 32 nt, Homo Sapiens
ucccccgcccccagccggugcucagguggccc

SEQ ID NO: 261055 - RNA, 32 nt, Homo Sapiens
cagcaacauuuccaucauagaauuucagcguu

SEQ ID NO: 261056 - RNA, 32 nt, Homo Sapiens
caacgaaucuugcagcagcagcagcauaguca

SEQ ID NO: 261057 - RNA, 32 nt, Homo Sapiens
gguacccgaagaagcagaggcugagggcaggc

SEQ ID NO: 261058 - RNA, 32 nt, Homo Sapiens
caaauaccugaaaaaucuuacacuggagagaa

SEQ ID NO: 261059 - RNA, 32 nt, Homo Sapiens
gcacgggcacgcuggaguucauggcuccggag

SEQ ID NO: 261060 - RNA, 32 nt, Homo Sapiens
ggcuguaaaaacaaggcuguggaucauguugu

SEQ ID NO: 261061 - RNA, 32 nt, Homo Sapiens
ccaccccggcccggccuccaggcagaggcgcc

SEQ ID NO: 261062 - RNA, 32 nt, Homo Sapiens
gucaggcucugcgcgccccgcggaggucggcg

SEQ ID NO: 261063 - RNA, 32 nt, Homo Sapiens
cacuccuccgcgggcucugagcagaagggucg

SEQ ID NO: 261064 - RNA, 32 nt, Homo Sapiens
cacggcggggccagcucugcuguccuggcaag

SEQ ID NO: 261065 - RNA, 30 nt, Homo Sapiens
gagcuugcaguaagccgagaucgcgccacu

SEQ ID NO: 261066 - RNA, 32 nt, Homo Sapiens
gucauauuucugagcaaggucuuaccagaaaa

SEQ ID NO: 261067 - RNA, 32 nt, Homo Sapiens
uuccagguucgcgacccccgccgucuucgcgc

SEQ ID NO: 261068 - RNA, 32 nt, Homo Sapiens
ucugagauauuuggggcugaugagaugugaua

SEQ ID NO: 261069 - RNA, 32 nt, Homo Sapiens
aggagccggcccugcuggccacgcaggggcca

SEQ ID NO: 261070 - RNA, 32 nt, Homo Sapiens
accuguuuauaaccaaagaauucaugaaaaag

SEQ ID NO: 261071 - RNA, 32 nt, Homo Sapiens
uauuuacaaaaaugguucauguguauuaccau

SEQ ID NO: 261072 - RNA, 32 nt, Homo Sapiens
gucgggaggcuccguggccguccccggguuga

SEQ ID NO: 261073 - RNA, 32 nt, Homo Sapiens
aggguggcuuuguaaauagcagcaaaucccug

SEQ ID NO: 261074 - RNA, 32 nt, Homo Sapiens
ccccucugcgccccggauugccuggccagcac

SEQ ID NO: 261075 - RNA, 32 nt, Homo Sapiens
ccuuuccucugccuccuccccugccagcccua

SEQ ID NO: 261076 - RNA, 32 nt, Homo Sapiens
agggcagagcaaacagagaacuagggggauaa

SEQ ID NO: 261077 - RNA, 32 nt, Homo Sapiens
acugugugccagcaugugaaagcagccaugau

SEQ ID NO: 261078 - RNA, 32 nt, Homo Sapiens
uucugaaaggauuuaugaauaauuaaauggag

SEQ ID NO: 261079 - RNA, 27 nt, Homo Sapiens
gaccucuccaucuucagcuucuucauc

SEQ ID NO: 261080 - RNA, 32 nt, Homo Sapiens
ccauaaguucccuggcucuaccucuucugcca

SEQ ID NO: 261081 - RNA, 30 nt, Homo Sapiens
uaagaggacaucccugcugggcugcugugc

SEQ ID NO: 261082 - RNA, 32 nt, Homo Sapiens
uccucucccggcuccacccaucacacuacuga

SEQ ID NO: 261083 - RNA, 32 nt, Homo Sapiens
aauuaaaaauauaaaaaguaaaucagacucac

SEQ ID NO: 261084 - RNA, 32 nt, Homo Sapiens
aaauacaguaaaaaugaaacaauguuauuaug

SEQ ID NO: 261085 - RNA, 32 nt, Homo Sapiens
uggaagcccacccaagccggcggggcccuagc

SEQ ID NO: 261086 - RNA, 32 nt, Homo Sapiens
uuguauauuuuauuuaacaauaggcacugggu

SEQ ID NO: 261087 - RNA, 32 nt, Homo Sapiens
ugggagccagcagcccggggcuccacucuggg

SEQ ID NO: 261088 - RNA, 32 nt, Homo Sapiens
uccccaaggcggauggaaggacggaugcuucu

SEQ ID NO: 261089 - RNA, 32 nt, Homo Sapiens
accaaaaucuggcacacacacacacacacaca

SEQ ID NO: 261090 - RNA, 32 nt, Homo Sapiens
uuuuuucaagacagagucuuacucugucgccc

SEQ ID NO: 261091 - RNA, 32 nt, Homo Sapiens
uagguaaaaggaaaccacagguaguuaaugcu

SEQ ID NO: 261092 - RNA, 32 nt, Homo Sapiens
aggucaagugcaucgugcugcaggugcuccgg

SEQ ID NO: 261093 - RNA, 32 nt, Homo Sapiens
ggggugagggucaccuguugucgggaggggag

SEQ ID NO: 261094 - RNA, 32 nt, Homo Sapiens
aauaaaaaucauagggugaaaauuguauuugu

SEQ ID NO: 261095 - RNA, 32 nt, Homo Sapiens
accucauacucuauauaaagucuauguguuag

SEQ ID NO: 261096 - RNA, 32 nt, Homo Sapiens
agcgcacugccccaagcuugccuagguaguau

SEQ ID NO: 261097 - RNA, 32 nt, Homo Sapiens
cagggcauuugcagaagcugggaaggaccaag

SEQ ID NO: 261098 - RNA, 32 nt, Homo Sapiens
cggcggcgugcccuuccuuuccucccucccag

SEQ ID NO: 261099 - RNA, 32 nt, Homo Sapiens
gaauuuguuucaucuauuuuauuuuauugaau

SEQ ID NO: 261100 - RNA, 32 nt, Homo Sapiens
gcuuauaagauuuuuuuuuuuaaugaaaacau

SEQ ID NO: 261101 - RNA, 32 nt, Homo Sapiens
cugccagccagcagcuggcccuccaccaucuu

SEQ ID NO: 261102 - RNA, 32 nt, Homo Sapiens
guguuugugucaacaggacucccacaggaggu

SEQ ID NO: 261103 - RNA, 32 nt, Homo Sapiens
ucuggugccucaguuuccccacaugugcaaug

SEQ ID NO: 261104 - RNA, 32 nt, Homo Sapiens
uuagaagcccuagaaaacaaucuccuggucca

SEQ ID NO: 261105 - RNA, 32 nt, Homo Sapiens
ccacuguugaguuuuccugcuuggaaaaggaa

SEQ ID NO: 261106 - RNA, 32 nt, Homo Sapiens
guuuuagaagcagugauaaugaacacucauaa

SEQ ID NO: 261107 - RNA, 32 nt, Homo Sapiens
aguacugucaggauggggucuuccucauugua

SEQ ID NO: 261108 - RNA, 32 nt, Homo Sapiens
uuaagguggaguacaguaagauguguggguuu

SEQ ID NO: 261109 - RNA, 32 nt, Homo Sapiens
aaaacagcugggugugguggcacaugcccgca

SEQ ID NO: 261110 - RNA, 32 nt, Homo Sapiens
uggcuauauggaacuuaaaauaaauauuguau

SEQ ID NO: 261111 - RNA, 32 nt, Homo Sapiens
ucggaacacccucuccugguggcaggccacuu

SEQ ID NO: 261112 - RNA, 32 nt, Homo Sapiens
uggugccugugucugcagaaaaacaagaccag

SEQ ID NO: 261113 - RNA, 32 nt, Homo Sapiens
cccaaugaugauucuuuuuuacuuugaauguu

SEQ ID NO: 261114 - RNA, 32 nt, Homo Sapiens
caccgucacuggggucacugugcucguguugg

SEQ ID NO: 261115 - RNA, 32 nt, Homo Sapiens
cccgccaccaccugcccucccgcgaccgccuc

SEQ ID NO: 261116 - RNA, 32 nt, Homo Sapiens
ccgcgggcggccgggcccggcauggagaagcg

SEQ ID NO: 261117 - RNA, 32 nt, Homo Sapiens
ugagguuuaggguggggagugccugcugggca

SEQ ID NO: 261118 - RNA, 32 nt, Homo Sapiens
aauaauaaauauauuuucugacaaagacuggc

SEQ ID NO: 261119 - RNA, 32 nt, Homo Sapiens
accuugaaaugaauuuacuguaugaauagaca

SEQ ID NO: 261120 - RNA, 32 nt, Homo Sapiens
uacuauugcauucuuaggcuacugugaggucu

SEQ ID NO: 261121 - RNA, 32 nt, Homo Sapiens
cugagccaacgccucccugugaaacuguugcu

SEQ ID NO: 261122 - RNA, 32 nt, Homo Sapiens
aacagacaucuuauuggauauuacaauugcac

SEQ ID NO: 261123 - RNA, 32 nt, Homo Sapiens
ggagugcugcugcggcgucccgcggccucccc

SEQ ID NO: 261124 - RNA, 32 nt, Homo Sapiens
gacaggaauuaacucuccaaaggucuccccug

SEQ ID NO: 261125 - RNA, 32 nt, Homo Sapiens
ugauuucuccuccuuuggauguauugggcuuc

SEQ ID NO: 261126 - RNA, 32 nt, Homo Sapiens
agccccagcucaccgcgccgcggaccucacac

SEQ ID NO: 261127 - RNA, 32 nt, Homo Sapiens
agaugggguuuugcuagaauguguguauucuu

SEQ ID NO: 261128 - RNA, 32 nt, Homo Sapiens
cucuccucagcuggcaggaaaccuggcagccu

SEQ ID NO: 261129 - RNA, 32 nt, Homo Sapiens
aaaagaagaaaaaaccaagcuuaggguauuuu

SEQ ID NO: 261130 - RNA, 32 nt, Homo Sapiens
uuuugccucccucucuucucuuugccuguaug

SEQ ID NO: 261131 - RNA, 32 nt, Homo Sapiens
cggacgggggacuggaggaggagccagagcuc

SEQ ID NO: 261132 - RNA, 32 nt, Homo Sapiens
cagagcuggacagcgacacgcagggggcucgg

SEQ ID NO: 261133 - RNA, 32 nt, Homo Sapiens
cuugacuuuccuuuuuucagagguguagguuu

SEQ ID NO: 261134 - RNA, 32 nt, Homo Sapiens
aacucaacccuuggggugacuggccaugguga

SEQ ID NO: 261135 - RNA, 32 nt, Homo Sapiens
accucacccgcggccacaauccugagacuuuc

SEQ ID NO: 261136 - RNA, 32 nt, Homo Sapiens
agauuuguacacaacugugaugcuggagaauu

SEQ ID NO: 261137 - RNA, 32 nt, Homo Sapiens
uaaacacaacuuaugaaaucugccuuuaacaa

SEQ ID NO: 261138 - RNA, 32 nt, Homo Sapiens
auaacugcaagucagcuggaagugcugccaag

SEQ ID NO: 261139 - RNA, 32 nt, Homo Sapiens
gcuggccagaccuggaggagagcgggcggucu

SEQ ID NO: 261140 - RNA, 32 nt, Homo Sapiens
uuccugguugcuaccacucaggcugccacuca

SEQ ID NO: 261141 - RNA, 32 nt, Homo Sapiens
aacauccucugagcaccuggccgugggaaugc

SEQ ID NO: 261142 - RNA, 32 nt, Homo Sapiens
augagacaucuucauucaguauuuuucccaau

SEQ ID NO: 261143 - RNA, 32 nt, Homo Sapiens
ggggaagacugagggacauucgaauguucagu

SEQ ID NO: 261144 - RNA, 32 nt, Homo Sapiens
cuaaaggaaaaacaggaauucuggagaccugu

SEQ ID NO: 261145 - RNA, 32 nt, Homo Sapiens
ggcugcucucgaggggggcgcgcccaccgcug

SEQ ID NO: 261146 - RNA, 32 nt, Homo Sapiens
cuuuuaaaaaauauaaaagggacuacuguuca

SEQ ID NO: 261147 - RNA, 32 nt, Homo Sapiens
ugaugaaggcaaaaguuuuuaauaaaaggcau

SEQ ID NO: 261148 - RNA, 32 nt, Homo Sapiens
aauuccaucuucucccauggaaccucaaagag

SEQ ID NO: 261149 - RNA, 32 nt, Homo Sapiens
cugcaaucacuacuccaaacuuuaagaagcuu

SEQ ID NO: 261150 - RNA, 32 nt, Homo Sapiens
accuguggccccagcuucucaguaggcugagg

SEQ ID NO: 261151 - RNA, 31 nt, Homo Sapiens
ggcaaggacggcaccaugccccgcgcgggga

SEQ ID NO: 261152 - RNA, 29 nt, Homo Sapiens
gcugaaugauagagauauuuucuguugug

SEQ ID NO: 261153 - RNA, 32 nt, Homo Sapiens
cagagaaugcaccucuuguuacucccuguuau

SEQ ID NO: 261154 - RNA, 32 nt, Homo Sapiens
ccacaaccgucccacuauuuuacuuuuuaaaa

SEQ ID NO: 261155 - RNA, 32 nt, Homo Sapiens
auauguucuuugcauuuuauuuuugagguuuc

SEQ ID NO: 261156 - RNA, 32 nt, Homo Sapiens
gccagcaccuugaucuuagacucuucacccug

SEQ ID NO: 261157 - RNA, 32 nt, Homo Sapiens
gccagagaugggccaggcagggggagggcaag

SEQ ID NO: 261158 - RNA, 31 nt, Homo Sapiens
ggacccucgcgagacagcagagccuggccug

SEQ ID NO: 261159 - RNA, 32 nt, Homo Sapiens
uuuaaaguuuccuuuacccugcccuuguugaa

SEQ ID NO: 261160 - RNA, 32 nt, Homo Sapiens
uuauguauuucuggugcaguauaauucuucua

SEQ ID NO: 261161 - RNA, 32 nt, Homo Sapiens
agguggcagucccacaccuuguccucccaccu

SEQ ID NO: 261162 - RNA, 32 nt, Homo Sapiens
acucggucugagugugacucuugaauggacgg

SEQ ID NO: 261163 - RNA, 32 nt, Homo Sapiens
gggggaggggagacgaaggagaagcaaacacu

SEQ ID NO: 261164 - RNA, 32 nt, Homo Sapiens
uaaagauucuaaaaugcauguuuuauacuaag

SEQ ID NO: 261165 - RNA, 32 nt, Homo Sapiens
ugauacauuaagauuucuuuuuauaaguauuc

SEQ ID NO: 261166 - RNA, 32 nt, Homo Sapiens
gcggguggggccugggguuccuggacagagga

SEQ ID NO: 261167 - RNA, 32 nt, Homo Sapiens
ugacgcucugcuuuccccugaccuccacugac

SEQ ID NO: 261168 - RNA, 32 nt, Homo Sapiens
ccugugacacuggcuaugugcuccacaguuuc

SEQ ID NO: 261169 - RNA, 32 nt, Homo Sapiens
aagcuauaauuugaauaaucugugugaaaagg

SEQ ID NO: 261170 - RNA, 32 nt, Homo Sapiens
aacauccuuuugguagacagaacagcaugugg

SEQ ID NO: 261171 - RNA, 32 nt, Homo Sapiens
acuccaagugagucuguaauguuugugaagcu

SEQ ID NO: 261172 - RNA, 32 nt, Homo Sapiens
cuuuuuacuguaauguugagacuucauuacuu

SEQ ID NO: 261173 - RNA, 32 nt, Homo Sapiens
aacucuuugacaaauugcacagagcucuuugg

SEQ ID NO: 261174 - RNA, 32 nt, Homo Sapiens
ggcugcgcccccagccccacucuuggcugugc

SEQ ID NO: 261175 - RNA, 32 nt, Homo Sapiens
aacauuuaaaaauuauuaaacauuuaaaaauu

SEQ ID NO: 261176 - RNA, 32 nt, Homo Sapiens
caaagaaaacaaaaaacaaugaaaaccucauu

SEQ ID NO: 261177 - RNA, 32 nt, Homo Sapiens
cagcaggugggcggggugcgguuggcggcggc

SEQ ID NO: 261178 - RNA, 32 nt, Homo Sapiens
agaaguuggggguggggugggugcuggcugca

SEQ ID NO: 261179 - RNA, 32 nt, Homo Sapiens
ggauggagggaagaccugaaagagaggacugg

SEQ ID NO: 261180 - RNA, 32 nt, Homo Sapiens
cuccgcccccgcccccgcccccgccccccgca

SEQ ID NO: 261181 - RNA, 32 nt, Homo Sapiens
auuaucacaacuguuuggugaccuacuucacu

SEQ ID NO: 261182 - RNA, 32 nt, Homo Sapiens
augaaauauucuccagaauguauucauuauca

SEQ ID NO: 261183 - RNA, 32 nt, Homo Sapiens
ccucggccgaaaaacuccaugggggaucaucg

SEQ ID NO: 261184 - RNA, 32 nt, Homo Sapiens
gggucagggggagagguagagaugagacaaga

SEQ ID NO: 261185 - RNA, 32 nt, Homo Sapiens
accucccgcucccuucccccagcccuggagcc

SEQ ID NO: 261186 - RNA, 32 nt, Homo Sapiens
gcugcgggacuccccaggccccggcccaggag

SEQ ID NO: 261187 - RNA, 32 nt, Homo Sapiens
cuuacaguccaaggcauuaaccucaaggcccu

SEQ ID NO: 261188 - RNA, 32 nt, Homo Sapiens
caaggcagacgucguacccagccauguguugg

SEQ ID NO: 261189 - RNA, 32 nt, Homo Sapiens
gaaaugagccaccgugaacagacaucugccau

SEQ ID NO: 261190 - RNA, 32 nt, Homo Sapiens
uggcgccucaaccagcagcuucgaguagagaa

SEQ ID NO: 261191 - RNA, 32 nt, Homo Sapiens
guaggaaaaaaguuuaaacuacauucauguuc

SEQ ID NO: 261192 - RNA, 32 nt, Homo Sapiens
gccgccgccaugucugcgcaucugcaauggau

SEQ ID NO: 261193 - RNA, 32 nt, Homo Sapiens
ccgccgcagacacgggacccgcuucgaggccg

SEQ ID NO: 261194 - RNA, 32 nt, Homo Sapiens
gccaaaacaugaguuucaacuccaccuccagc

SEQ ID NO: 261195 - RNA, 32 nt, Homo Sapiens
ccguggggcaauuuaaccuuuuucaugaaagu

SEQ ID NO: 261196 - RNA, 32 nt, Homo Sapiens
gcagggcucccccuguucccagcccuagcugc

SEQ ID NO: 261197 - RNA, 29 nt, Homo Sapiens
cauucuuuuuaaaaacaccacaaagcaaa

SEQ ID NO: 261198 - RNA, 32 nt, Homo Sapiens
aaugcucacacgccauuaugauccaagcaaaa

SEQ ID NO: 261199 - RNA, 32 nt, Homo Sapiens
ggaaugcugaguuuguuuccuuacuguaggac

SEQ ID NO: 261200 - RNA, 32 nt, Homo Sapiens
uaauuuggagugggagggaggggggugggcga

SEQ ID NO: 261201 - RNA, 32 nt, Homo Sapiens
cccucugcacaccagcagcaggcaugaaccuu

SEQ ID NO: 261202 - RNA, 32 nt, Homo Sapiens
cccacuuuggggagggguuuugucgggggcag

SEQ ID NO: 261203 - RNA, 32 nt, Homo Sapiens
ucuggcucuuugccggccccaagggucguugc

SEQ ID NO: 261204 - RNA, 32 nt, Homo Sapiens
aucugauguucauguucaccuuucucuuaaaa

SEQ ID NO: 261205 - RNA, 32 nt, Homo Sapiens
aguuggcgagaggugucagaacaaagagaaca

SEQ ID NO: 261206 - RNA, 30 nt, Homo Sapiens
aaaguaccacuugucuuuucugugaauuau

SEQ ID NO: 261207 - RNA, 32 nt, Homo Sapiens
augacauuagaauugaauaaaaccuagaaguu

SEQ ID NO: 261208 - RNA, 28 nt, Homo Sapiens
gagggacaaugugaacauuuguauuugg

SEQ ID NO: 261209 - RNA, 32 nt, Homo Sapiens
ucgaggacuuggcucuguugaaucucucaucg

SEQ ID NO: 261210 - RNA, 32 nt, Homo Sapiens
gacuuagccaaggugaugaaccucauugucuu

SEQ ID NO: 261211 - RNA, 32 nt, Homo Sapiens
agccagucagcggagccuccucaccuccguug

SEQ ID NO: 261212 - RNA, 32 nt, Homo Sapiens
ccgcuucgaaagugacuggugccucgccgccu

SEQ ID NO: 261213 - RNA, 32 nt, Homo Sapiens
ucaauaaugaggaaacaggugagcccugaaaa

SEQ ID NO: 261214 - RNA, 32 nt, Homo Sapiens
aacugaacagacggagaagaugugcuagggag

SEQ ID NO: 261215 - RNA, 32 nt, Homo Sapiens
uugcaaugcaaaguaaucuaguaguacuguuu

SEQ ID NO: 261216 - RNA, 32 nt, Homo Sapiens
acucuauuaacuuuuccaaauuuuccuaugcu

SEQ ID NO: 261217 - RNA, 32 nt, Homo Sapiens
cucucuuuuccacacacaacuaucuguuuauu

SEQ ID NO: 261218 - RNA, 32 nt, Homo Sapiens
ucacaugaauaauuuuugucaaauuuuaucau

SEQ ID NO: 261219 - RNA, 32 nt, Homo Sapiens
aucugcuucuaaaauugccccaccugcucuag

SEQ ID NO: 261220 - RNA, 32 nt, Homo Sapiens
aucuuccaaacacagaccuuggugauaaccug

SEQ ID NO: 261221 - RNA, 31 nt, Homo Sapiens
ggaaggacaaauugugcuauguccacacauu

SEQ ID NO: 261222 - RNA, 32 nt, Homo Sapiens
gaggaaaugcaaagugaagaauucuagcauca

SEQ ID NO: 261223 - RNA, 32 nt, Homo Sapiens
guucaggcgccgggacaagcuguuggggugug

SEQ ID NO: 261224 - RNA, 32 nt, Homo Sapiens
gauggcgggagcaaacagcacugguauauucu

SEQ ID NO: 261225 - RNA, 32 nt, Homo Sapiens
acccacauucuguucaggauacuuuuguuuua

SEQ ID NO: 261226 - RNA, 32 nt, Homo Sapiens
caccaaggcucagacacacagauucucagagg

SEQ ID NO: 261227 - RNA, 32 nt, Homo Sapiens
cauugcuuacauugcuguucuauuuguuguaa

SEQ ID NO: 261228 - RNA, 32 nt, Homo Sapiens
agcgcgcgccgcgcagacgcccccggagucgc

SEQ ID NO: 261229 - RNA, 32 nt, Homo Sapiens
augagcuccgcggcccaccugaggcacagggg

SEQ ID NO: 261230 - RNA, 32 nt, Homo Sapiens
ggaaaguucauuuaaagguuggucugaacagu

SEQ ID NO: 261231 - RNA, 32 nt, Homo Sapiens
cugcaugaccaggcugcccccugccccgcaca

SEQ ID NO: 261232 - RNA, 32 nt, Homo Sapiens
ggaugcgccgacgccccgagcgcccggcccuc

SEQ ID NO: 261233 - RNA, 32 nt, Homo Sapiens
ccuagccccggccgcacccccagcccgcgcca

SEQ ID NO: 261234 - RNA, 32 nt, Homo Sapiens
agacccuggugggcguguccucaucagugagg

SEQ ID NO: 261235 - RNA, 32 nt, Homo Sapiens
accaaggcugccacgcucuaagggccacuaga

SEQ ID NO: 261236 - RNA, 30 nt, Homo Sapiens
gaauguacugcauguuaccaucuuacuuga

SEQ ID NO: 261237 - RNA, 32 nt, Homo Sapiens
aacuuuacagcugcuguaaauuuuuuauaaau

SEQ ID NO: 261238 - RNA, 32 nt, Homo Sapiens
ucccgccugguccgcccuucagcagcgacacu

SEQ ID NO: 261239 - RNA, 32 nt, Homo Sapiens
ccuguccccuccccuccccaccccaucuauua

SEQ ID NO: 261240 - RNA, 32 nt, Homo Sapiens
agcugauacagagggaagaggcugggagcaag

SEQ ID NO: 261241 - RNA, 28 nt, Homo Sapiens
gagaucacuggcaacauuauaguagaca

SEQ ID NO: 261242 - RNA, 32 nt, Homo Sapiens
cggcucuuuccaccacacugugguccccuaga

SEQ ID NO: 261243 - RNA, 32 nt, Homo Sapiens
cuuaaagcugucuuucugagaucuaauuccaa

SEQ ID NO: 261244 - RNA, 32 nt, Homo Sapiens
uauuuguacaaauaaaccugaggcaggaaaaa

SEQ ID NO: 261245 - RNA, 32 nt, Homo Sapiens
cucucuagcagccgaaauccaggccgauucgc

SEQ ID NO: 261246 - RNA, 32 nt, Homo Sapiens
aauuagucaggugugguggugcaugccuguaa

SEQ ID NO: 261247 - RNA, 32 nt, Homo Sapiens
gcaccuccagucuucuguguagcggcuuuaac

SEQ ID NO: 261248 - RNA, 32 nt, Homo Sapiens
aucaguuguugcccaagacagaucucacccca

SEQ ID NO: 261249 - RNA, 32 nt, Homo Sapiens
gagcgcuggaguuggugcugggaaacccgggg

SEQ ID NO: 261250 - RNA, 32 nt, Homo Sapiens
gggagaggcagacacggaagaagcgcaucugu

SEQ ID NO: 261251 - RNA, 32 nt, Homo Sapiens
ucuccauguguauauaguauuuccuuguauaa

SEQ ID NO: 261252 - RNA, 32 nt, Homo Sapiens
ggaggugcacgggaggcgucagagcaaaacca

SEQ ID NO: 261253 - RNA, 32 nt, Homo Sapiens
ucaaagaaccaucaagaaauggggaccuggau

SEQ ID NO: 261254 - RNA, 32 nt, Homo Sapiens
gcgcugaggcccacgcgccgccgcuggcccag

SEQ ID NO: 261255 - RNA, 32 nt, Homo Sapiens
uccggaacccaaguuauauguauguauacgug

SEQ ID NO: 261256 - RNA, 29 nt, Homo Sapiens
auuaaugaacuuucuuuuuuguccuugca

SEQ ID NO: 261257 - RNA, 32 nt, Homo Sapiens
cccuugcaucauugugaccuggauagauguga

SEQ ID NO: 261258 - RNA, 32 nt, Homo Sapiens
aucucuaucugcuuauuuugguacugaaagca

SEQ ID NO: 261259 - RNA, 32 nt, Homo Sapiens
gcaguguccguggugugcaguuccucuccaau

SEQ ID NO: 261260 - RNA, 32 nt, Homo Sapiens
ucuaauggucugaaggaagaggcugugagggc

SEQ ID NO: 261261 - RNA, 32 nt, Homo Sapiens
cuggguuucuguaaguuuuuccucauggcuuc

SEQ ID NO: 261262 - RNA, 32 nt, Homo Sapiens
uucccugccgacggggauaccgacuucuggcg

SEQ ID NO: 261263 - RNA, 32 nt, Homo Sapiens
aggcaaugaaagcauuacagcauaaaauggug

SEQ ID NO: 261264 - RNA, 32 nt, Homo Sapiens
accucccacccacagaccuucccuuuagcugu

SEQ ID NO: 261265 - RNA, 32 nt, Homo Sapiens
gggaugguaaccucacugccccgucacucccu

SEQ ID NO: 261266 - RNA, 32 nt, Homo Sapiens
ggcaguuugguucaggacuuagccuuccugac

SEQ ID NO: 261267 - RNA, 32 nt, Homo Sapiens
gggaauuugguuuucucucccuugcuuccuuc

SEQ ID NO: 261268 - RNA, 32 nt, Homo Sapiens
guugcucuugcuuuggucuucuuccaaugaug

SEQ ID NO: 261269 - RNA, 32 nt, Homo Sapiens
ggcauuuuacuuuagauuggaaggcauuaugu

SEQ ID NO: 261270 - RNA, 32 nt, Homo Sapiens
gagaacaaaaggaaaagauuguuaccaccuug

SEQ ID NO: 261271 - RNA, 32 nt, Homo Sapiens
cugggggguuuccugccacaccugccaucugc

SEQ ID NO: 261272 - RNA, 32 nt, Homo Sapiens
cuaccggagcccugaggcgccauccccaugug

SEQ ID NO: 261273 - RNA, 32 nt, Homo Sapiens
gggacugggaggugggggugauagauauauuc

SEQ ID NO: 261274 - RNA, 32 nt, Homo Sapiens
ggggggugcugagggaggggagugagucacag

SEQ ID NO: 261275 - RNA, 32 nt, Homo Sapiens
gugauuaauguuuucuuaagauuuucacauua

SEQ ID NO: 261276 - RNA, 32 nt, Homo Sapiens
aauuuuuauaucuauuuuuauauguaacucuu

SEQ ID NO: 261277 - RNA, 32 nt, Homo Sapiens
ucugagaccaugccucuugaagcuuuuucugc

SEQ ID NO: 261278 - RNA, 32 nt, Homo Sapiens
aucuuggcauugauuguaauucugccuuuuug

SEQ ID NO: 261279 - RNA, 32 nt, Homo Sapiens
gaaugguugggggagagaagggcagcagcuua

SEQ ID NO: 261280 - RNA, 32 nt, Homo Sapiens
uauuuuuauuuuuucaugaaaauuauuggugg

SEQ ID NO: 261281 - RNA, 32 nt, Homo Sapiens
gucucccggguucaagcgaaucuccugccuca

SEQ ID NO: 261282 - RNA, 32 nt, Homo Sapiens
uaaauguugcuguggaaugccaugcuuuagaa

SEQ ID NO: 261283 - RNA, 32 nt, Homo Sapiens
ccuuaaaaagauuguaaauugugcaacaaaga

SEQ ID NO: 261284 - RNA, 32 nt, Homo Sapiens
gaguuucgcucuuguugcccaggcuugagugc

SEQ ID NO: 261285 - RNA, 32 nt, Homo Sapiens
aggagggcgcauggggcgccccggccccuccg

SEQ ID NO: 261286 - RNA, 32 nt, Homo Sapiens
gcacaguuugugaguaaagcugucuggaauua

SEQ ID NO: 261287 - RNA, 32 nt, Homo Sapiens
ggcugcuaccugacccuuggggccugagaagg

SEQ ID NO: 261288 - RNA, 32 nt, Homo Sapiens
gggauucagagauaaagacauaaaacagacac

SEQ ID NO: 261289 - RNA, 32 nt, Homo Sapiens
agcuaucucagccuaaugcucucccauuacaa

SEQ ID NO: 261290 - RNA, 32 nt, Homo Sapiens
uuuaaucauuuucuguuuuuccucuaugugag

SEQ ID NO: 261291 - RNA, 32 nt, Homo Sapiens
gcgcagugagccggggcgggggcggaaucccc

SEQ ID NO: 261292 - RNA, 32 nt, Homo Sapiens
cuacuagaacauauuuugauaaagacaccagu

SEQ ID NO: 261293 - RNA, 32 nt, Homo Sapiens
cgggagucuccauugccgcgaguucuacacca

SEQ ID NO: 261294 - RNA, 32 nt, Homo Sapiens
cacgaggcauggaggcgcugcugcugggcgcg

SEQ ID NO: 261295 - RNA, 32 nt, Homo Sapiens
uccgagagcaagugaagcccugcacaacccca

SEQ ID NO: 261296 - RNA, 32 nt, Homo Sapiens
ggguagggugagaagggcagggguguccugau

SEQ ID NO: 261297 - RNA, 32 nt, Homo Sapiens
aaaauuccccucaguucucaccaagauuaaaa

SEQ ID NO: 261298 - RNA, 32 nt, Homo Sapiens
cacaucucugucaagggucuccaggaugagug

SEQ ID NO: 261299 - RNA, 32 nt, Homo Sapiens
agaugguuauauuacaaucauuuuauauuuuu

SEQ ID NO: 261300 - RNA, 32 nt, Homo Sapiens
ccgcucuacccugaccugggcuugucaucugc

SEQ ID NO: 261301 - RNA, 32 nt, Homo Sapiens
gagcgugcgggcuugcaggaggaggcccagca

SEQ ID NO: 261302 - RNA, 32 nt, Homo Sapiens
ugaccucaucuuaacuaauuauaucaucaaaa

SEQ ID NO: 261303 - RNA, 32 nt, Homo Sapiens
ucuggggaauccaauuauaguugcuuuguauu

SEQ ID NO: 261304 - RNA, 32 nt, Homo Sapiens
cugccuucgcauagcacacugcuugaggcccu

SEQ ID NO: 261305 - RNA, 32 nt, Homo Sapiens
uccuaggcagaaauucauauaaacugugauac

SEQ ID NO: 261306 - RNA, 32 nt, Homo Sapiens
ucccacucugaacaucaccuccuguacuucca

SEQ ID NO: 261307 - RNA, 32 nt, Homo Sapiens
uauauguuuuguaucuucuagcaccaacugcu

SEQ ID NO: 261308 - RNA, 32 nt, Homo Sapiens
gauguguggaccagcucagcuguccccagacc

SEQ ID NO: 261309 - RNA, 32 nt, Homo Sapiens
agcacuguagaacgggcccugcucuugcagag

SEQ ID NO: 261310 - RNA, 28 nt, Homo Sapiens
auuaagagaguugaacauuugaagaaaa

SEQ ID NO: 261311 - RNA, 32 nt, Homo Sapiens
gggagagaaugggagaggagcaccuccacccc

SEQ ID NO: 261312 - RNA, 32 nt, Homo Sapiens
gugacucuggucguccucacugcuacacuccc

SEQ ID NO: 261313 - RNA, 32 nt, Homo Sapiens
ugguacacgaacacacuuuuuacaaaaccaca

SEQ ID NO: 261314 - RNA, 30 nt, Homo Sapiens
cagcccugggcucggcugccggcgccaccg

SEQ ID NO: 261315 - RNA, 32 nt, Homo Sapiens
augacugagacauuaugggccacgcgcugugu

SEQ ID NO: 261316 - RNA, 32 nt, Homo Sapiens
aggcuggccgagaaggaucuggacgaggccua

SEQ ID NO: 261317 - RNA, 31 nt, Homo Sapiens
ccacuggagccccagacgcgggcgccacaug

SEQ ID NO: 261318 - RNA, 32 nt, Homo Sapiens
ucugacugcaauuuuucuucuuuugcaaaugc

SEQ ID NO: 261319 - RNA, 32 nt, Homo Sapiens
aagcccaggaggagugcgggcagggccugacc

SEQ ID NO: 261320 - RNA, 32 nt, Homo Sapiens
aucauaaauguaauuacuauugaaagaccuuu

SEQ ID NO: 261321 - RNA, 32 nt, Homo Sapiens
ucccugccgcagcccccuccccuucugaugcc

SEQ ID NO: 261322 - RNA, 32 nt, Homo Sapiens
gcccucgcucuguugcgcgcgcggugucaccu

SEQ ID NO: 261323 - RNA, 32 nt, Homo Sapiens
ucggcggcccucaggagagaccaggaggacug

SEQ ID NO: 261324 - RNA, 32 nt, Homo Sapiens
caagucuccuguccuccuccuggagcagcaga

SEQ ID NO: 261325 - RNA, 32 nt, Homo Sapiens
caugcuugguuuucuuuuuucuuuugguccag

SEQ ID NO: 261326 - RNA, 27 nt, Homo Sapiens
uucaaggucuccagcagcccccagaag

SEQ ID NO: 261327 - RNA, 32 nt, Homo Sapiens
uugaauaaaagaucaugggcaaugcaugcaca

SEQ ID NO: 261328 - RNA, 32 nt, Homo Sapiens
ccacaccuuauccaguuagacacauacauacc

SEQ ID NO: 261329 - RNA, 31 nt, Homo Sapiens
gucaagggcauaucgagaugaucaggaugcu

SEQ ID NO: 261330 - RNA, 32 nt, Homo Sapiens
uguuaucuccucugggugaccucaaacaucug

SEQ ID NO: 261331 - RNA, 32 nt, Homo Sapiens
cacggguuccauucuuagcucaucucauuuaa

SEQ ID NO: 261332 - RNA, 29 nt, Homo Sapiens
uugaugucauauggaagaguuaaaacagg

SEQ ID NO: 261333 - RNA, 30 nt, Homo Sapiens
ccgacauggugugccuuuuggcaccggcga

SEQ ID NO: 261334 - RNA, 32 nt, Homo Sapiens
auuuugcaauugauuagauauuacagucuacu

SEQ ID NO: 261335 - RNA, 32 nt, Homo Sapiens
uguuucucaaagaagaaagucuacacaagucc

SEQ ID NO: 261336 - RNA, 32 nt, Homo Sapiens
ucuggacagcaaugagugcccgggccacgcgg

SEQ ID NO: 261337 - RNA, 32 nt, Homo Sapiens
ucucaucuuuguucuucuucauauacuauagg

SEQ ID NO: 261338 - RNA, 32 nt, Homo Sapiens
uuuguaacuccucuuuggggucuucuccacca

SEQ ID NO: 261339 - RNA, 32 nt, Homo Sapiens
uacacaguuuaacacagccugauucaagacuc

SEQ ID NO: 261340 - RNA, 32 nt, Homo Sapiens
uuugucuuuaccuccuucuuucuggggaaaac

SEQ ID NO: 261341 - RNA, 32 nt, Homo Sapiens
uaggcaaaugacuucagaggauuuacucuuaa

SEQ ID NO: 261342 - RNA, 32 nt, Homo Sapiens
cguccgcccuccgguaggguucgggccuuccg

SEQ ID NO: 261343 - RNA, 32 nt, Homo Sapiens
acuguguugugauucauaguacauuaaaaaga

SEQ ID NO: 261344 - RNA, 32 nt, Homo Sapiens
uccagccuuucuggagggaugcagagccuuuc

SEQ ID NO: 261345 - RNA, 32 nt, Homo Sapiens
ugacuaucguaaaguuccuuccgggugcagag

SEQ ID NO: 261346 - RNA, 32 nt, Homo Sapiens
ggagccccgugcccgucacgccgccgcagccu

SEQ ID NO: 261347 - RNA, 32 nt, Homo Sapiens
aagaaccugcacugaaugccaccuggaaaaca

SEQ ID NO: 261348 - RNA, 32 nt, Homo Sapiens
uuuauaucaaguuugaauuugggauaauuuuu

SEQ ID NO: 261349 - RNA, 32 nt, Homo Sapiens
augcggacccucacaugggcagaaaaauggug

SEQ ID NO: 261350 - RNA, 32 nt, Homo Sapiens
ugcugugacaaagggaaauugugcuuuuccag

SEQ ID NO: 261351 - RNA, 32 nt, Homo Sapiens
aagaaauugcgauguauauuuucauguaauuu

SEQ ID NO: 261352 - RNA, 32 nt, Homo Sapiens
caguacccgaacucacuucaguaugcuuacug

SEQ ID NO: 261353 - RNA, 32 nt, Homo Sapiens
ugcaguuugacuggcugagggauacagagaug

SEQ ID NO: 261354 - RNA, 32 nt, Homo Sapiens
uuuagaggguccccucggggcccgguggggaa

SEQ ID NO: 261355 - RNA, 32 nt, Homo Sapiens
uuauuaccuucucugaaaagugccaguccaug

SEQ ID NO: 261356 - RNA, 32 nt, Homo Sapiens
uuggaugggggaggcgggcagcuccuagcccc

SEQ ID NO: 261357 - RNA, 27 nt, Homo Sapiens
gcuuuguucuucuucaagucaagauuu

SEQ ID NO: 261358 - RNA, 32 nt, Homo Sapiens
guugcucagggacucaucuuucccuccuuggu

SEQ ID NO: 261359 - RNA, 32 nt, Homo Sapiens
ugguuacuuucccccuuagaguuccagaugua

SEQ ID NO: 261360 - RNA, 30 nt, Homo Sapiens
cauuaaaauaucccaagugccuggcuuuga

SEQ ID NO: 261361 - RNA, 32 nt, Homo Sapiens
uaauaaugggguagcucuguuguuucuccaag

SEQ ID NO: 261362 - RNA, 32 nt, Homo Sapiens
ccgauguggaaguggccagauucuggccgccu

SEQ ID NO: 261363 - RNA, 32 nt, Homo Sapiens
cccagcaccggaggagcagcgagggggcugcg

SEQ ID NO: 261364 - RNA, 32 nt, Homo Sapiens
agauuacgacuccuacgccuucugccccccag

SEQ ID NO: 261365 - RNA, 27 nt, Homo Sapiens
guccaagcugucuucagccuuccccag

SEQ ID NO: 261366 - RNA, 32 nt, Homo Sapiens
ucacuggagugggucuuaauuuuuaaaaagug

SEQ ID NO: 261367 - RNA, 32 nt, Homo Sapiens
ggcccugugaggucagcgucccugggccuccc

SEQ ID NO: 261368 - RNA, 32 nt, Homo Sapiens
caaaauuuguaauuaggcuaauccauuuagug

SEQ ID NO: 261369 - RNA, 32 nt, Homo Sapiens
uacaguucguacauuucuuucaugagaagaac

SEQ ID NO: 261370 - RNA, 32 nt, Homo Sapiens
aaaaaugcuaaugugagaauauaaauuguggg

SEQ ID NO: 261371 - RNA, 32 nt, Homo Sapiens
uuccacgguggccagcccugcugccaucauug

SEQ ID NO: 261372 - RNA, 32 nt, Homo Sapiens
augaggucaggaguucgaggcgagccuggcca

SEQ ID NO: 261373 - RNA, 32 nt, Homo Sapiens
ucccugcuuucccccucuuccuggcucaucca

SEQ ID NO: 261374 - RNA, 32 nt, Homo Sapiens
ucucggaccugggaacccccggaggaaagguc

SEQ ID NO: 261375 - RNA, 32 nt, Homo Sapiens
aaguuuuuggaaagauucuuccagauauuucu

SEQ ID NO: 261376 - RNA, 32 nt, Homo Sapiens
uugugcauauauauaaaguaugucauggcaug

SEQ ID NO: 261377 - RNA, 27 nt, Homo Sapiens
uuguuugccuucuucaggaccugacug

SEQ ID NO: 261378 - RNA, 32 nt, Homo Sapiens
aaguggggaaagggucucuggccuugcaagga

SEQ ID NO: 261379 - RNA, 32 nt, Homo Sapiens
uagauaugcuauaaauuuaagagguugccaug

SEQ ID NO: 261380 - RNA, 32 nt, Homo Sapiens
uuacaggugugagccaccacgcccgguacaua

SEQ ID NO: 261381 - RNA, 32 nt, Homo Sapiens
ucaauucccugccuaugaaguaaguugcguuu

SEQ ID NO: 261382 - RNA, 32 nt, Homo Sapiens
gcuuucucucuugcccuccccaucccaccacc

SEQ ID NO: 261383 - RNA, 32 nt, Homo Sapiens
ugacaaaguuuucaggugcaaaucacaccuug

SEQ ID NO: 261384 - RNA, 32 nt, Homo Sapiens
acugcucuccccacccagaccugccugucucc

SEQ ID NO: 261385 - RNA, 32 nt, Homo Sapiens
uauaggcguaagccaccacaccuggccaaaaa

SEQ ID NO: 261386 - RNA, 32 nt, Homo Sapiens
ugagccaccggcgcgcgcacgcggcggccagc

SEQ ID NO: 261387 - RNA, 32 nt, Homo Sapiens
uucuggcgccgcugcucccggaggagcucccg

SEQ ID NO: 261388 - RNA, 32 nt, Homo Sapiens
ggagcuaccggagcuggcccgcggcggacugc

SEQ ID NO: 261389 - RNA, 32 nt, Homo Sapiens
agaccugaaaaugagccauggcauugggacag

SEQ ID NO: 261390 - RNA, 32 nt, Homo Sapiens
ugaauuuuuccugguuucccacuagggcaugu

SEQ ID NO: 261391 - RNA, 32 nt, Homo Sapiens
gccggcccaugggagccugggguucuguccag

SEQ ID NO: 261392 - RNA, 32 nt, Homo Sapiens
ggauagacugaaucugucauuuuuuagaagau

SEQ ID NO: 261393 - RNA, 32 nt, Homo Sapiens
aggagggaaaugauuuggauggaaguagccaa

SEQ ID NO: 261394 - RNA, 32 nt, Homo Sapiens
aggggaccaaaggcaggccugucgugcugaag

SEQ ID NO: 261395 - RNA, 32 nt, Homo Sapiens
uguggcaacuguaauuaauuuuuguaaagggc

SEQ ID NO: 261396 - RNA, 32 nt, Homo Sapiens
uaucauauauauacauacaugcauacacucuc

SEQ ID NO: 261397 - RNA, 32 nt, Homo Sapiens
agccacgucccucccccugcaggguggugcug

SEQ ID NO: 261398 - RNA, 32 nt, Homo Sapiens
uuaagcagaggaguggcaaggauggcaaucuu

SEQ ID NO: 261399 - RNA, 32 nt, Homo Sapiens
aggaauuagcacaaucucuggcaguuuuauaa

SEQ ID NO: 261400 - RNA, 32 nt, Homo Sapiens
ggcuccucccacccgcgucucccuaucccugg

SEQ ID NO: 261401 - RNA, 32 nt, Homo Sapiens
caguggcacuccugguccugcugucuugguuu

SEQ ID NO: 261402 - RNA, 32 nt, Homo Sapiens
aaucuuuauuaugucuucuccuaagcaguuua

SEQ ID NO: 261403 - RNA, 32 nt, Homo Sapiens
acgcuaacacugucgcaguuugaaaggcuucu

SEQ ID NO: 261404 - RNA, 32 nt, Homo Sapiens
auagccuguacauuuuaaaaauguugucacca

SEQ ID NO: 261405 - RNA, 32 nt, Homo Sapiens
uaaaaugcaugcuguauuuaauuuuccaggaa

SEQ ID NO: 261406 - RNA, 32 nt, Homo Sapiens
ccccccacuuuggugcuaauagcucuccacca

SEQ ID NO: 261407 - RNA, 32 nt, Homo Sapiens
gucaggaaagggggcuuggggcuugccacaug

SEQ ID NO: 261408 - RNA, 32 nt, Homo Sapiens
ucucuucccauaccacccaaaaucauaaugcc

SEQ ID NO: 261409 - RNA, 32 nt, Homo Sapiens
augauuuugcugacuuccacuccaguaaauuu

SEQ ID NO: 261410 - RNA, 32 nt, Homo Sapiens
caaaugggggagaggagggcagugaauaugcu

SEQ ID NO: 261411 - RNA, 32 nt, Homo Sapiens
ccucgccccccgcuucuccgccauggcccugg

SEQ ID NO: 261412 - RNA, 32 nt, Homo Sapiens
cugggcuuuccgaggugcuuucgccgcugucc

SEQ ID NO: 261413 - RNA, 32 nt, Homo Sapiens
ccuggccuggggcagagccuguguguucuuca

SEQ ID NO: 261414 - RNA, 32 nt, Homo Sapiens
uuauuuagcuguaugugaaugaaaauaugcuu

SEQ ID NO: 261415 - RNA, 32 nt, Homo Sapiens
gauuaucuuaguuuuaugauaaaacuagaaga

SEQ ID NO: 261416 - RNA, 32 nt, Homo Sapiens
uggcuguguuagugcuucggaccuccguuaga

SEQ ID NO: 261417 - RNA, 32 nt, Homo Sapiens
uauaauuucagaugaauuguauugaaaaaaug

SEQ ID NO: 261418 - RNA, 27 nt, Homo Sapiens
gcaugacccuccggcggcgcggggaga

SEQ ID NO: 261419 - RNA, 32 nt, Homo Sapiens
uccacccgcgcgcacgcacagcgcccggagcc

SEQ ID NO: 261420 - RNA, 32 nt, Homo Sapiens
ggggaggagcugccuccaucauaaagggaggg

SEQ ID NO: 261421 - RNA, 32 nt, Homo Sapiens
uaaacuggauacuuguucuuuugucagauuug

SEQ ID NO: 261422 - RNA, 32 nt, Homo Sapiens
ugcugcuagaaauuauuaaaguuacacacuag

SEQ ID NO: 261423 - RNA, 32 nt, Homo Sapiens
cgggcagccccucccagccccggugggagucc

SEQ ID NO: 261424 - RNA, 32 nt, Homo Sapiens
acuggcggcagcgcgccgcgggcccgagacuu

SEQ ID NO: 261425 - RNA, 32 nt, Homo Sapiens
uaugaguauaccauguaguuguugagucuuuu

SEQ ID NO: 261426 - RNA, 32 nt, Homo Sapiens
ggaagacuaaaaguagccauuuuuguaaaguu

SEQ ID NO: 261427 - RNA, 32 nt, Homo Sapiens
ggccccaucucccccaacuccacagccccucc

SEQ ID NO: 261428 - RNA, 32 nt, Homo Sapiens
cucaugccaucuuguuauauauuuugcuuacg

SEQ ID NO: 261429 - RNA, 32 nt, Homo Sapiens
ggaccgcgcgccccuuggcggcugagccugug

SEQ ID NO: 261430 - RNA, 32 nt, Homo Sapiens
cccccaagaucccccugaaccugcaccuccau

SEQ ID NO: 261431 - RNA, 32 nt, Homo Sapiens
ccuaggugccugaagcgcugagcaaccugggu

SEQ ID NO: 261432 - RNA, 32 nt, Homo Sapiens
ucuuccauucucagccagaagcauaaacagaa

SEQ ID NO: 261433 - RNA, 32 nt, Homo Sapiens
cuguugaggacacccccaccccaaauuucagu

SEQ ID NO: 261434 - RNA, 32 nt, Homo Sapiens
uugaaugauauauaaauauauuuauagccuga

SEQ ID NO: 261435 - RNA, 32 nt, Homo Sapiens
ugucuuuuucuuuucuuuuuaacuaagaaugg

SEQ ID NO: 261436 - RNA, 32 nt, Homo Sapiens
uggcaaaguugcuuuguuggggugcugauacu

SEQ ID NO: 261437 - RNA, 32 nt, Homo Sapiens
uucuuggguuuuguuuuugucuuguuuuauac

SEQ ID NO: 261438 - RNA, 32 nt, Homo Sapiens
gaggugcaggggcgcgcaggccgccgccgggu

SEQ ID NO: 261439 - RNA, 32 nt, Homo Sapiens
ccguccauccgaaagaggguuggaaaaaaaca

SEQ ID NO: 261440 - RNA, 32 nt, Homo Sapiens
gcugacccagcccugcugcugcuccaugacuu

SEQ ID NO: 261441 - RNA, 32 nt, Homo Sapiens
aaauaucagggcuuaucuccaagcucuccuuu

SEQ ID NO: 261442 - RNA, 32 nt, Homo Sapiens
gucccuugauggucaugccccauuccacagcc

SEQ ID NO: 261443 - RNA, 32 nt, Homo Sapiens
ccaaagucuccauggcacaugacugaagacug

SEQ ID NO: 261444 - RNA, 32 nt, Homo Sapiens
aucccaggccccagcccaggcaggugcugcug

SEQ ID NO: 261445 - RNA, 32 nt, Homo Sapiens
gauuuaauaaacgauuuaaugaaagcuaggua

SEQ ID NO: 261446 - RNA, 32 nt, Homo Sapiens
aaagaggcggcggccccaaucccuguccucuc

SEQ ID NO: 261447 - RNA, 28 nt, Homo Sapiens
aaugcagugaugaacaggaugacaagau

SEQ ID NO: 261448 - RNA, 32 nt, Homo Sapiens
aggcccagccuccugcuucccgagggcaugua

SEQ ID NO: 261449 - RNA, 32 nt, Homo Sapiens
caagauuuuuaaaaauaacuaguguagcuuau

SEQ ID NO: 261450 - RNA, 32 nt, Homo Sapiens
auuguaauuuaaaaugcauugucuauuaauag

SEQ ID NO: 261451 - RNA, 32 nt, Homo Sapiens
cugccacuuaggaaaguaacuuguguugaaau

SEQ ID NO: 261452 - RNA, 32 nt, Homo Sapiens
cugcaaaaucuaaguaucacuuuuauuuuucu

SEQ ID NO: 261453 - RNA, 32 nt, Homo Sapiens
agaaaaccucccacaagucgcgccucaucgag

SEQ ID NO: 261454 - RNA, 32 nt, Homo Sapiens
uaccugcagccgccgcccacggcacggcagcc

SEQ ID NO: 261455 - RNA, 32 nt, Homo Sapiens
caagcuggucugagcagcgcuuccagagccag

SEQ ID NO: 261456 - RNA, 31 nt, Homo Sapiens
uugcaguuauggagaaaguggaaacccagca

SEQ ID NO: 261457 - RNA, 32 nt, Homo Sapiens
cuuucucagauuaaggaugccaaaaaagauau

SEQ ID NO: 261458 - RNA, 32 nt, Homo Sapiens
ccuacagaugaccucugcuacaauaaguacga

SEQ ID NO: 261459 - RNA, 32 nt, Homo Sapiens
cccuguauuuauucuuuuaacaauaacaaaag

SEQ ID NO: 261460 - RNA, 32 nt, Homo Sapiens
cauuauguauauaauuaguuuauauuuacaca

SEQ ID NO: 261461 - RNA, 32 nt, Homo Sapiens
uuugauuaccugauaaugauuauuuaaauauu

SEQ ID NO: 261462 - RNA, 32 nt, Homo Sapiens
gaagacccacccagggagggccaggaccaccu

SEQ ID NO: 261463 - RNA, 32 nt, Homo Sapiens
gggcccugucgcgcucccgccccgguccugca

SEQ ID NO: 261464 - RNA, 32 nt, Homo Sapiens
uugcccuaaguacaacuaggcaagugauugcc

SEQ ID NO: 261465 - RNA, 32 nt, Homo Sapiens
cacccccaggugccggcggcccgggccaagcc

SEQ ID NO: 261466 - RNA, 32 nt, Homo Sapiens
ccucguggccacgaggccacgaacccggccag

SEQ ID NO: 261467 - RNA, 32 nt, Homo Sapiens
ucuacauggggaggagaaacacaggugggagc

SEQ ID NO: 261468 - RNA, 32 nt, Homo Sapiens
acuuccccuguuucuaacacauuucaauaaac

SEQ ID NO: 261469 - RNA, 32 nt, Homo Sapiens
cauacacaaggugaagaccuggccugagaacc

SEQ ID NO: 261470 - RNA, 32 nt, Homo Sapiens
ugacuuccacugucgcgguguaguuguccacc

SEQ ID NO: 261471 - RNA, 32 nt, Homo Sapiens
uuagcugugguugauuccuguguggcaguaaa

SEQ ID NO: 261472 - RNA, 31 nt, Homo Sapiens
caaauuuauugagcuauuagauacgaucuuu

SEQ ID NO: 261473 - RNA, 31 nt, Homo Sapiens
uccuccggggcucagcccugaguuggcauca

SEQ ID NO: 261474 - RNA, 32 nt, Homo Sapiens
aaaggacaaauacauuuccagaucuuuucagu

SEQ ID NO: 261475 - RNA, 32 nt, Homo Sapiens
ggaggcauggucugcccucugcauccucugga

SEQ ID NO: 261476 - RNA, 32 nt, Homo Sapiens
uugcauuguauuuuaauuugugcagaaugaua

SEQ ID NO: 261477 - RNA, 32 nt, Homo Sapiens
cgaugguccccuuugcuugauuuaggagcucu

SEQ ID NO: 261478 - RNA, 32 nt, Homo Sapiens
ccauaucuccuuuaaugacauugauuucuaau

SEQ ID NO: 261479 - RNA, 32 nt, Homo Sapiens
agggucugcuccaagaggcagaggugggcccc

SEQ ID NO: 261480 - RNA, 32 nt, Homo Sapiens
uucuaucaggucccaucaauucuuagaauauc

SEQ ID NO: 261481 - RNA, 32 nt, Homo Sapiens
cuucuuguuuauucucaggaccuuuuuguaac

SEQ ID NO: 261482 - RNA, 32 nt, Homo Sapiens
acaggcgcgggaagcugaucggcaagggcgcc

SEQ ID NO: 261483 - RNA, 32 nt, Homo Sapiens
uguuuuguuggaagacagugcaacgaacugag

SEQ ID NO: 261484 - RNA, 32 nt, Homo Sapiens
uuugagcuaggauaaaaauuggguaaaggaca

SEQ ID NO: 261485 - RNA, 28 nt, Homo Sapiens
auuguguugucuaaggguuugucugagc

SEQ ID NO: 261486 - RNA, 32 nt, Homo Sapiens
ucagcauauauucuagucaugaauuuccuucu

SEQ ID NO: 261487 - RNA, 32 nt, Homo Sapiens
auauuuucauucuccuaucaccugucuugccu

SEQ ID NO: 261488 - RNA, 32 nt, Homo Sapiens
ucuucuccuugaccagcgcuuaucuuucagau

SEQ ID NO: 261489 - RNA, 32 nt, Homo Sapiens
uggcggccacguagcccggcccggauuggacg

SEQ ID NO: 261490 - RNA, 32 nt, Homo Sapiens
aacacuuuuuaaaacaaauguaaagggucugu

SEQ ID NO: 261491 - RNA, 32 nt, Homo Sapiens
cgcuggcacugacuuugccuugaacagacccc

SEQ ID NO: 261492 - RNA, 32 nt, Homo Sapiens
cagcgcgguggcugggucugcacacuggccuc

SEQ ID NO: 261493 - RNA, 32 nt, Homo Sapiens
gugauccgcgccccgcggccuccggaagugcu

SEQ ID NO: 261494 - RNA, 32 nt, Homo Sapiens
gggcugggacagagacuccccaaggaccccau

SEQ ID NO: 261495 - RNA, 32 nt, Homo Sapiens
uguugauauaugugcugaugcugcugggcaac

SEQ ID NO: 261496 - RNA, 32 nt, Homo Sapiens
gguggagacucuuuuuacuaacuugaaugaga

SEQ ID NO: 261497 - RNA, 32 nt, Homo Sapiens
acacaaagaaaugacacauauuugaggugaug

SEQ ID NO: 261498 - RNA, 32 nt, Homo Sapiens
auuuuuacugacaacuaauaaacacuguaugu

SEQ ID NO: 261499 - RNA, 32 nt, Homo Sapiens
auucccaaguuuggaucagggaguuggaaguu

SEQ ID NO: 261500 - RNA, 32 nt, Homo Sapiens
auucacaagggccucuggguguccuggcagag

SEQ ID NO: 261501 - RNA, 32 nt, Homo Sapiens
guuacuagcuguauuuugaauugugagcaaaa

SEQ ID NO: 261502 - RNA, 32 nt, Homo Sapiens
uguauuuguauuuauuucuauuuuuucuaugu

SEQ ID NO: 261503 - RNA, 32 nt, Homo Sapiens
auuccuuacuguaacggaguuuagagccaggg

SEQ ID NO: 261504 - RNA, 32 nt, Homo Sapiens
gcgcgccggcgccgggccauguacucggggaa

SEQ ID NO: 261505 - RNA, 32 nt, Homo Sapiens
uuuucucagaucugguuucuaagaguuuuggg

SEQ ID NO: 261506 - RNA, 32 nt, Homo Sapiens
ucacauucugcaccacccagaagauacuggcu

SEQ ID NO: 261507 - RNA, 32 nt, Homo Sapiens
uugaguuaguuuguuucucaguuucucguaug

SEQ ID NO: 261508 - RNA, 32 nt, Homo Sapiens
uuccuguccuguuucagugcugucccacuccu

SEQ ID NO: 261509 - RNA, 32 nt, Homo Sapiens
agacuaacuuacagaaaaauaauuauaucuga

SEQ ID NO: 261510 - RNA, 32 nt, Homo Sapiens
cuagggucgccgagagcgcccggagggaaccg

SEQ ID NO: 261511 - RNA, 32 nt, Homo Sapiens
uuauuucagaauggaaauauuuuugagaaaag

SEQ ID NO: 261512 - RNA, 32 nt, Homo Sapiens
cagcgucccggcguccucuccgggcccagcuc

SEQ ID NO: 261513 - RNA, 32 nt, Homo Sapiens
ugcccucccacacugcccucccugccccggcc

SEQ ID NO: 261514 - RNA, 32 nt, Homo Sapiens
ccuacacacacacacacacacacacacacaca

SEQ ID NO: 261515 - RNA, 32 nt, Homo Sapiens
guucagcuauguaaguugaacucuguaccacu

SEQ ID NO: 261516 - RNA, 32 nt, Homo Sapiens
gaagcguaugagaguucucauuucugcacauc

SEQ ID NO: 261517 - RNA, 32 nt, Homo Sapiens
uccagguucuucuagaugucugcacaaauggu

SEQ ID NO: 261518 - RNA, 32 nt, Homo Sapiens
uaucccgcuccuugcugagaccaucuccuggg

SEQ ID NO: 261519 - RNA, 32 nt, Homo Sapiens
uacuggcccucccuucucuucucuuugcugcu

SEQ ID NO: 261520 - RNA, 32 nt, Homo Sapiens
acuuuagcaauaauuuuuuuuacaacccucug

SEQ ID NO: 261521 - RNA, 32 nt, Homo Sapiens
ccccgccccucccccuacagauccuccgcgga

SEQ ID NO: 261522 - RNA, 32 nt, Homo Sapiens
uggcuuugccucaggagguuucuggagguuga

SEQ ID NO: 261523 - RNA, 32 nt, Homo Sapiens
uuuguuccaggagagcugagcaagcuggugaa

SEQ ID NO: 261524 - RNA, 32 nt, Homo Sapiens
cauucauuauaaauaaaauuauucugugaucu

SEQ ID NO: 261525 - RNA, 32 nt, Homo Sapiens
uuaauccguuucuggaggaagaguaugacacc

SEQ ID NO: 261526 - RNA, 32 nt, Homo Sapiens
gaccucacucacuuacgguaugucuacugggc

SEQ ID NO: 261527 - RNA, 32 nt, Homo Sapiens
agccgucaguguggcugaauaaaggcucucuu

SEQ ID NO: 261528 - RNA, 32 nt, Homo Sapiens
cgcaccccggcggggcuuuggcugugacgcgg

SEQ ID NO: 261529 - RNA, 32 nt, Homo Sapiens
caguuuuacugauguucugggugggggacaga

SEQ ID NO: 261530 - RNA, 32 nt, Homo Sapiens
gagacaaccacauccuccuccuccuacaccca

SEQ ID NO: 261531 - RNA, 31 nt, Homo Sapiens
cuuuaauaauauuguaacuugcauguaucca

SEQ ID NO: 261532 - RNA, 32 nt, Homo Sapiens
gagucauuuuagugaugagcugccaguccauu

SEQ ID NO: 261533 - RNA, 32 nt, Homo Sapiens
caauguuuuuaaaauaagcuaguuuucugagg

SEQ ID NO: 261534 - RNA, 32 nt, Homo Sapiens
gaggaagggcagaagucccgccgaaggcacuc

SEQ ID NO: 261535 - RNA, 30 nt, Homo Sapiens
uugcugugcugagggagccugagugggaga

SEQ ID NO: 261536 - RNA, 32 nt, Homo Sapiens
agccccugcgccggcugcccguugcuagcuau

SEQ ID NO: 261537 - RNA, 32 nt, Homo Sapiens
cgccuguggucucagcacuuugggaggcugaa

SEQ ID NO: 261538 - RNA, 32 nt, Homo Sapiens
ucaaaauagaaaguugaagauugcugaaaaau

SEQ ID NO: 261539 - RNA, 32 nt, Homo Sapiens
ugcgcuugucuccagcuuccagcccuccuccc

SEQ ID NO: 261540 - RNA, 32 nt, Homo Sapiens
uacagaccaacccagaucaaaauucacccaau

SEQ ID NO: 261541 - RNA, 32 nt, Homo Sapiens
aaauagagggcuucuuuuucucucuuaauguc

SEQ ID NO: 261542 - RNA, 32 nt, Homo Sapiens
aaugggccugaucagcagcugcagcgcucacc

SEQ ID NO: 261543 - RNA, 32 nt, Homo Sapiens
cugcagaacugggauguggagcuggaagugcc

SEQ ID NO: 261544 - RNA, 32 nt, Homo Sapiens
ucuuuuugugcagcugagucauggagcuuuca

SEQ ID NO: 261545 - RNA, 32 nt, Homo Sapiens
uaacaaaaaaacaaacaaaaaaaaucacugaa

SEQ ID NO: 261546 - RNA, 32 nt, Homo Sapiens
cucccuuuuaucauuauucacacuccucugcc

SEQ ID NO: 261547 - RNA, 32 nt, Homo Sapiens
gaagagaaaaggaauauaguccauuuccaaag

SEQ ID NO: 261548 - RNA, 32 nt, Homo Sapiens
agcuuaucuauggaaaaguaaaaauucugugc

SEQ ID NO: 261549 - RNA, 32 nt, Homo Sapiens
ucaauucaaaaauuaauuuuuuaaaacacugc

SEQ ID NO: 261550 - RNA, 32 nt, Homo Sapiens
ccacuucaggguggcguguggcauguaggagu

SEQ ID NO: 261551 - RNA, 32 nt, Homo Sapiens
uggugguuggggguaaggagcggggcacgggg

SEQ ID NO: 261552 - RNA, 32 nt, Homo Sapiens
ccucuugcuagggaacccugccagggugaagg

SEQ ID NO: 261553 - RNA, 32 nt, Homo Sapiens
ggccggcgggcucucuguggcugcggcuggga

SEQ ID NO: 261554 - RNA, 32 nt, Homo Sapiens
augagugccccggccccaggccagcuucacug

SEQ ID NO: 261555 - RNA, 32 nt, Homo Sapiens
gcagcuuggcagagccgaccagcagggccccc

SEQ ID NO: 261556 - RNA, 32 nt, Homo Sapiens
guucagugcgauccugaugguccgggagauga

SEQ ID NO: 261557 - RNA, 32 nt, Homo Sapiens
aauauugcuguaaaaaggagagacaaauuaau

SEQ ID NO: 261558 - RNA, 32 nt, Homo Sapiens
ugagcucauuggcugccuuuguagcauccugu

SEQ ID NO: 261559 - RNA, 32 nt, Homo Sapiens
cagggacaagauacauaugaggacaagguaua

SEQ ID NO: 261560 - RNA, 32 nt, Homo Sapiens
cggagggagcggccggggcgcagacgccugca

SEQ ID NO: 261561 - RNA, 32 nt, Homo Sapiens
gagcggggcccgcuuugggguccaggcagguu

SEQ ID NO: 261562 - RNA, 32 nt, Homo Sapiens
ucggaggagcggcugcugcugcugcugcugcu

SEQ ID NO: 261563 - RNA, 32 nt, Homo Sapiens
guugagcuggacucaagccggaucgccuggag

SEQ ID NO: 261564 - RNA, 32 nt, Homo Sapiens
auuaucugagagggaauaaacaucuuuuccuu

SEQ ID NO: 261565 - RNA, 32 nt, Homo Sapiens
acuugccuuuuuccccaaaaaauaaacucuca

SEQ ID NO: 261566 - RNA, 32 nt, Homo Sapiens
ugcagugaucauuaaucaaaaauauuuggaaa

SEQ ID NO: 261567 - RNA, 32 nt, Homo Sapiens
gcccccaccuaagucacaaaaugagggaagug

SEQ ID NO: 261568 - RNA, 32 nt, Homo Sapiens
cccgaccacggcuuugcgggagcccacuggaa

SEQ ID NO: 261569 - RNA, 32 nt, Homo Sapiens
cuaguuuguaaauaaucauggugcacuugagg

SEQ ID NO: 261570 - RNA, 28 nt, Homo Sapiens
ccccgagcugcugggaggaugaccaugg

SEQ ID NO: 261571 - RNA, 32 nt, Homo Sapiens
guguggccaaaggagauuaacuuuuuaaucag

SEQ ID NO: 261572 - RNA, 32 nt, Homo Sapiens
gagaaaaugauaaguauccauuuagaauguuc

SEQ ID NO: 261573 - RNA, 32 nt, Homo Sapiens
uuguugucguuguuuuaaacuuuagaaucuga

SEQ ID NO: 261574 - RNA, 32 nt, Homo Sapiens
cgcagcccgcucggcccgagggcccgccuaac

SEQ ID NO: 261575 - RNA, 32 nt, Homo Sapiens
acagugauauaaaaaccagcaguuuuuacacu

SEQ ID NO: 261576 - RNA, 32 nt, Homo Sapiens
aaucagcugugggaccuuuuuccuccucugcg

SEQ ID NO: 261577 - RNA, 32 nt, Homo Sapiens
aaggauuugagauguucucaauaaaaagaaaa

SEQ ID NO: 261578 - RNA, 32 nt, Homo Sapiens
auuaaguuuucaaagaacgauuuuuguguuca

SEQ ID NO: 261579 - RNA, 32 nt, Homo Sapiens
augugcugccugggcgcuaucacgugacggcc

SEQ ID NO: 261580 - RNA, 32 nt, Homo Sapiens
aaucaaaucauacaaacuuauaauuaaaucaa

SEQ ID NO: 261581 - RNA, 32 nt, Homo Sapiens
gaaaauacagaaaaguauaagcagaagcauaa

SEQ ID NO: 261582 - RNA, 32 nt, Homo Sapiens
aaugagacaaagugaagaagaaauuauauuca

SEQ ID NO: 261583 - RNA, 32 nt, Homo Sapiens
gggccaggccccagagucccuuaucccuaugc

SEQ ID NO: 261584 - RNA, 32 nt, Homo Sapiens
cccugccugccugcugccccucccagccugcc

SEQ ID NO: 261585 - RNA, 32 nt, Homo Sapiens
aucuuuuguggaagauacuuugaaaucacuuu

SEQ ID NO: 261586 - RNA, 32 nt, Homo Sapiens
uuggccagauuguggggugcagcugggugggg

SEQ ID NO: 261587 - RNA, 32 nt, Homo Sapiens
gaaggguuuccucuccuccaccaugguugaca

SEQ ID NO: 261588 - RNA, 32 nt, Homo Sapiens
uuaauaagugguaucugacacacucuaaaccc

SEQ ID NO: 261589 - RNA, 32 nt, Homo Sapiens
ggcugcucuugaacuccugaccucagguaauc

SEQ ID NO: 261590 - RNA, 32 nt, Homo Sapiens
aguuggccuguggagaugaugugcugguggug

SEQ ID NO: 261591 - RNA, 32 nt, Homo Sapiens
gaauugggagaauggggaaaguuguggggaca

SEQ ID NO: 261592 - RNA, 32 nt, Homo Sapiens
uuaacaauaaucuauuuuaauuauuccucauu

SEQ ID NO: 261593 - RNA, 32 nt, Homo Sapiens
ccacggacccgggugggguggggggugguuuc

SEQ ID NO: 261594 - RNA, 32 nt, Homo Sapiens
cccuccacauaaauuaagaaauucaguauuuc

SEQ ID NO: 261595 - RNA, 32 nt, Homo Sapiens
augccugaaacacuccaaagggggugcugauc

SEQ ID NO: 261596 - RNA, 32 nt, Homo Sapiens
ccauccgguccccugccuggaacuggcuguga

SEQ ID NO: 261597 - RNA, 31 nt, Homo Sapiens
accuugcagcgcauuccaaccaccugggagc

SEQ ID NO: 261598 - RNA, 32 nt, Homo Sapiens
cacuugcaugaaugucgacacuguagccacag

SEQ ID NO: 261599 - RNA, 32 nt, Homo Sapiens
cucuggcauugcuuccucuccuuccuuccugc

SEQ ID NO: 261600 - RNA, 32 nt, Homo Sapiens
guuuaucagaauaucaaggaaaacugugaccc

SEQ ID NO: 261601 - RNA, 32 nt, Homo Sapiens
gguacuguuauuaauguaucagcaacaguuac

SEQ ID NO: 261602 - RNA, 32 nt, Homo Sapiens
uucuuuuccugucccucuuccauccccaagau

SEQ ID NO: 261603 - RNA, 32 nt, Homo Sapiens
ccucucuccuuguucaucucugcaucucuagu

SEQ ID NO: 261604 - RNA, 32 nt, Homo Sapiens
gcucagugaacauccagugcugggugcagcuc

SEQ ID NO: 261605 - RNA, 32 nt, Homo Sapiens
uugaauugacucacaguucagaauggcuuggg

SEQ ID NO: 261606 - RNA, 32 nt, Homo Sapiens
uccacauuuuucccccugcauuauggaaaaug

SEQ ID NO: 261607 - RNA, 32 nt, Homo Sapiens
acgcggcgggucggggccggccucugccuugc

SEQ ID NO: 261608 - RNA, 32 nt, Homo Sapiens
aucaacaccuggcaugggagccaggcuuuggc

SEQ ID NO: 261609 - RNA, 32 nt, Homo Sapiens
gggcauggcccucuccucucaguccuucugca

SEQ ID NO: 261610 - RNA, 32 nt, Homo Sapiens
cgcccggcgaggaggagggagggccgccagug

SEQ ID NO: 261611 - RNA, 32 nt, Homo Sapiens
uuauaaaaggaauguuucugaaugcaagugcc

SEQ ID NO: 261612 - RNA, 28 nt, Homo Sapiens
cgggaguggacgccgccgaggcccggag

SEQ ID NO: 261613 - RNA, 32 nt, Homo Sapiens
cuggagaaauguguguagugcuuuuguuaaag

SEQ ID NO: 261614 - RNA, 32 nt, Homo Sapiens
guggugagggcuuuccugugcauuguaagaug

SEQ ID NO: 261615 - RNA, 32 nt, Homo Sapiens
guggauguacuacuccaccugcccuugggacc

SEQ ID NO: 261616 - RNA, 32 nt, Homo Sapiens
ucuguaggagagagggggaggacccuguucgg

SEQ ID NO: 261617 - RNA, 32 nt, Homo Sapiens
gugggguggccccagggccuggccccacucuc

SEQ ID NO: 261618 - RNA, 32 nt, Homo Sapiens
acaaagagaaaacuguggucucugauuaagac

SEQ ID NO: 261619 - RNA, 32 nt, Homo Sapiens
ccagccaucaccauccuguguacaauggcugu

SEQ ID NO: 261620 - RNA, 32 nt, Homo Sapiens
aaaguuuauaugccuggugcacagugcuuaga

SEQ ID NO: 261621 - RNA, 32 nt, Homo Sapiens
cgacaucuuuggaguguuuuuguuuucucuuc

SEQ ID NO: 261622 - RNA, 32 nt, Homo Sapiens
gccuuccgcgcgcucugcacugccgaagggga

SEQ ID NO: 261623 - RNA, 32 nt, Homo Sapiens
guauuuguauuaauaucagggagaaauguuua

SEQ ID NO: 261624 - RNA, 32 nt, Homo Sapiens
agcccgagcgcccagcgccgcgccgggagagu

SEQ ID NO: 261625 - RNA, 32 nt, Homo Sapiens
cugacugcaaugaccuuucugugcaauaaaag

SEQ ID NO: 261626 - RNA, 32 nt, Homo Sapiens
uugcuuucuccauuuucuuuuauguugucuua

SEQ ID NO: 261627 - RNA, 26 nt, Homo Sapiens
gauggcgucggguggugguggcugua

SEQ ID NO: 261628 - RNA, 32 nt, Homo Sapiens
gaggggaaguagaguuuugauuauuaaacuuu

SEQ ID NO: 261629 - RNA, 32 nt, Homo Sapiens
caugggcccgucugccggcucugccugugcug

SEQ ID NO: 261630 - RNA, 32 nt, Homo Sapiens
ugaccuuuuuauauacauuuuauaucugguau

SEQ ID NO: 261631 - RNA, 32 nt, Homo Sapiens
ccgcccuccgauuuccucuccgcuugcaaccu

SEQ ID NO: 261632 - RNA, 32 nt, Homo Sapiens
aaaugugcuuugaaguuuuuuuaauguugcau

SEQ ID NO: 261633 - RNA, 32 nt, Homo Sapiens
uuugaaucucaauacggcuguuguggagguuu

SEQ ID NO: 261634 - RNA, 32 nt, Homo Sapiens
cucuauuucacagaugaagaaacagagccuca

SEQ ID NO: 261635 - RNA, 32 nt, Homo Sapiens
uuugccgauuccagcccuugguccuuggauag

SEQ ID NO: 261636 - RNA, 32 nt, Homo Sapiens
ccuugguguuuccauauauguuuuacaaucag

SEQ ID NO: 261637 - RNA, 32 nt, Homo Sapiens
agaucagauaaaauuacuuucuauucauuaau

SEQ ID NO: 261638 - RNA, 32 nt, Homo Sapiens
agcagauaaaauggacauauuuauuauagacu

SEQ ID NO: 261639 - RNA, 32 nt, Homo Sapiens
uccccuugcagcgcccgcaggacccccgcaag

SEQ ID NO: 261640 - RNA, 32 nt, Homo Sapiens
agaggacaaggcuggaggcauuugucaucacu

SEQ ID NO: 261641 - RNA, 32 nt, Homo Sapiens
agcaguguuuuaccguccccagccccccuccc

SEQ ID NO: 261642 - RNA, 32 nt, Homo Sapiens
cuccuccagacccacucagaccacgugcacgc

SEQ ID NO: 261643 - RNA, 32 nt, Homo Sapiens
caguuggucucgguugucguuuuuucuugcug

SEQ ID NO: 261644 - RNA, 32 nt, Homo Sapiens
ggugccgcuggcggccguugccaggguagggg

SEQ ID NO: 261645 - RNA, 32 nt, Homo Sapiens
ggcaucugcuuuucucuuuucuuugcuaauaa

SEQ ID NO: 261646 - RNA, 28 nt, Homo Sapiens
gaugguguuacaggaacccacugaaagc

SEQ ID NO: 261647 - RNA, 32 nt, Homo Sapiens
gauguauuuuuucauacuucuggauuauacua

SEQ ID NO: 261648 - RNA, 32 nt, Homo Sapiens
agugcucccugguugugaagugccaggcacua

SEQ ID NO: 261649 - RNA, 32 nt, Homo Sapiens
augccuagcuaauuuuuguauuuuuaguagag

SEQ ID NO: 261650 - RNA, 32 nt, Homo Sapiens
uccaggagcucaggaagaagagaugcacuaua

SEQ ID NO: 261651 - RNA, 32 nt, Homo Sapiens
uuguaaguuuccugaggccuccccagucauac

SEQ ID NO: 261652 - RNA, 32 nt, Homo Sapiens
gugggacaaucuuuaauuuucuaaagauagca

SEQ ID NO: 261653 - RNA, 27 nt, Homo Sapiens
cgaugaguucagaugagaagggcauuu

SEQ ID NO: 261654 - RNA, 32 nt, Homo Sapiens
ugaaucacaacgggccagcucuaguaauacga

SEQ ID NO: 261655 - RNA, 32 nt, Homo Sapiens
aaaaguggaaaacaucuuuguacauuuaaguc

SEQ ID NO: 261656 - RNA, 27 nt, Homo Sapiens
agauggcggagcugcagaugcugcugg

SEQ ID NO: 261657 - RNA, 32 nt, Homo Sapiens
aaucacagagaaacuugguacuuguuuuucuu

SEQ ID NO: 261658 - RNA, 32 nt, Homo Sapiens
uaugucuugguuuucauuugcuuaccaaaaaa

SEQ ID NO: 261659 - RNA, 32 nt, Homo Sapiens
acagugaccccagucccagcuaacucugaccu

SEQ ID NO: 261660 - RNA, 32 nt, Homo Sapiens
ccucgggaagcagucagacugcacucaccuca

SEQ ID NO: 261661 - RNA, 32 nt, Homo Sapiens
cggucggucgcggcgagcagcggagacagcga

SEQ ID NO: 261662 - RNA, 32 nt, Homo Sapiens
gcagaaaaauauauuucauuuucuaggcacaa

SEQ ID NO: 261663 - RNA, 32 nt, Homo Sapiens
gaccaggaacuucuggaucgggcucaccuaca

SEQ ID NO: 261664 - RNA, 32 nt, Homo Sapiens
uugaggucaggaguucaaaaccagccuggcca

SEQ ID NO: 261665 - RNA, 32 nt, Homo Sapiens
ugccuguuacugaguuagcucuacucuuuugg

SEQ ID NO: 261666 - RNA, 32 nt, Homo Sapiens
gugauggacuggaaagaaggugccaaaaguuc

SEQ ID NO: 261667 - RNA, 32 nt, Homo Sapiens
uggcucagaccucggcuagaagccucgguggc

SEQ ID NO: 261668 - RNA, 32 nt, Homo Sapiens
aaucacacaacaaaaaggagaagagauauuuu

SEQ ID NO: 261669 - RNA, 32 nt, Homo Sapiens
ugagcguccccgggcgccuccggagcgccgcg

SEQ ID NO: 261670 - RNA, 32 nt, Homo Sapiens
uggccaucgccucgcacagcgugugccugacc

SEQ ID NO: 261671 - RNA, 32 nt, Homo Sapiens
aaugcagagagguuucuuggggucccagggau

SEQ ID NO: 261672 - RNA, 32 nt, Homo Sapiens
gcuucagccucucccacccagcccugccccuc

SEQ ID NO: 261673 - RNA, 31 nt, Homo Sapiens
uucuacuugguuuuuugaucaguguagcuca

SEQ ID NO: 261674 - RNA, 32 nt, Homo Sapiens
gacugcccugucugcugugcccugaccacagg

SEQ ID NO: 261675 - RNA, 32 nt, Homo Sapiens
cuguacuggcgcgggcugcggaagccugcgug

SEQ ID NO: 261676 - RNA, 32 nt, Homo Sapiens
cuaacaugggaaccaguaaucucaugccagag

SEQ ID NO: 261677 - RNA, 32 nt, Homo Sapiens
aaguucuauuuucucuacuucccaagggggua

SEQ ID NO: 261678 - RNA, 32 nt, Homo Sapiens
ucguuuuacuuuucuuuuuuuuuaacuuuuac

SEQ ID NO: 261679 - RNA, 32 nt, Homo Sapiens
uggaggaugauagggaacauguuggugggggg

SEQ ID NO: 261680 - RNA, 32 nt, Homo Sapiens
cugguuuugaagucgcggccgcuguuccuggg

SEQ ID NO: 261681 - RNA, 32 nt, Homo Sapiens
guuuuaaguauaauacuuaacucucaagcuaa

SEQ ID NO: 261682 - RNA, 32 nt, Homo Sapiens
cguggucccguccacgcccaccucagcuccug

SEQ ID NO: 261683 - RNA, 32 nt, Homo Sapiens
gccgcaugaucuuucuggcuccacucaguguc

SEQ ID NO: 261684 - RNA, 32 nt, Homo Sapiens
cacgggaggcucccuggcaggguguggggcaa

SEQ ID NO: 261685 - RNA, 32 nt, Homo Sapiens
gucuuucuuuuucuuccuuuuuuuaaaaaaau

SEQ ID NO: 261686 - RNA, 32 nt, Homo Sapiens
cacaaucauuggaauuccuuggagccacuggg

SEQ ID NO: 261687 - RNA, 32 nt, Homo Sapiens
gugaccggccggggcugcaggcggcggacggc

SEQ ID NO: 261688 - RNA, 30 nt, Homo Sapiens
gcggguuauggcggcggcggcagugagagc

SEQ ID NO: 261689 - RNA, 32 nt, Homo Sapiens
gucuguuuugucugcuuucuuaauuucuuaua

SEQ ID NO: 261690 - RNA, 32 nt, Homo Sapiens
guucgacacagcacuaugcugccccacugggc

SEQ ID NO: 261691 - RNA, 32 nt, Homo Sapiens
ccugauccaagcugcuugguguccuuguaaga

SEQ ID NO: 261692 - RNA, 32 nt, Homo Sapiens
cuccaacucuguuccuuagacuggcggcuacc

SEQ ID NO: 261693 - RNA, 32 nt, Homo Sapiens
ccugcagacggccacgcgggaggccaucgcgc

SEQ ID NO: 261694 - RNA, 32 nt, Homo Sapiens
cccagaacucagccaguuucuugcuuccgugc

SEQ ID NO: 261695 - RNA, 32 nt, Homo Sapiens
cuucggauaaugaccuccaggaccccacuguu

SEQ ID NO: 261696 - RNA, 32 nt, Homo Sapiens
gugugcuuagaaaauuauggaacuuggccggg

SEQ ID NO: 261697 - RNA, 32 nt, Homo Sapiens
cugggggugggucuuggugaucuuguccuaug

SEQ ID NO: 261698 - RNA, 31 nt, Homo Sapiens
aaaugacaaucuguuuuuaaauuggauucua

SEQ ID NO: 261699 - RNA, 32 nt, Homo Sapiens
uccccugacaccugggcagauggggucuccuu

SEQ ID NO: 261700 - RNA, 32 nt, Homo Sapiens
ggcccaguacacauagagagaggcaggcaggu

SEQ ID NO: 261701 - RNA, 32 nt, Homo Sapiens
auuuauuacaguuuuuaaauuguacaaucucu

SEQ ID NO: 261702 - RNA, 32 nt, Homo Sapiens
cuuugcagccugggaagguggccacguucaca

SEQ ID NO: 261703 - RNA, 32 nt, Homo Sapiens
uugagugguguugcauuccaugugcuugauuu

SEQ ID NO: 261704 - RNA, 32 nt, Homo Sapiens
uuggcucacucgcuuuuuacaaaccacuggau

SEQ ID NO: 261705 - RNA, 32 nt, Homo Sapiens
ccgcugggagucugaggccugagugaguguuu

SEQ ID NO: 261706 - RNA, 32 nt, Homo Sapiens
gaggugcgggcucugucuagcagguggcugca

SEQ ID NO: 261707 - RNA, 32 nt, Homo Sapiens
acagcaaaccaucaaggauugacaguagaguc

SEQ ID NO: 261708 - RNA, 29 nt, Homo Sapiens
uuaaaaaaauaaacauuacauaaaaucuu

SEQ ID NO: 261709 - RNA, 32 nt, Homo Sapiens
caggccaucugcucaacgcucugugguuuguc

SEQ ID NO: 261710 - RNA, 32 nt, Homo Sapiens
cggaggaacaagaucaagaugcgcuguaacug

SEQ ID NO: 261711 - RNA, 32 nt, Homo Sapiens
cuggaagcagucuggucuauagaguuauggau

SEQ ID NO: 261712 - RNA, 32 nt, Homo Sapiens
gcuuggcccccucguccccauccaccugugcc

SEQ ID NO: 261713 - RNA, 32 nt, Homo Sapiens
agcagacccuccccugccggccugcgccagcu

SEQ ID NO: 261714 - RNA, 32 nt, Homo Sapiens
cugaagggacauauguacuacaguccagaaaa

SEQ ID NO: 261715 - RNA, 32 nt, Homo Sapiens
uuuuuaaucccugugcccaauuuuggaguuga

SEQ ID NO: 261716 - RNA, 32 nt, Homo Sapiens
agauauguucacucagauaagacugcccuaaa

SEQ ID NO: 261717 - RNA, 32 nt, Homo Sapiens
cggggcgcggguggauuggggcuggaggugcg

SEQ ID NO: 261718 - RNA, 32 nt, Homo Sapiens
gccuccgcugccgcgacacugcgagggagcag

SEQ ID NO: 261719 - RNA, 30 nt, Homo Sapiens
gaagguuuggggggaggggaaacggguugu

SEQ ID NO: 261720 - RNA, 32 nt, Homo Sapiens
caguucccccgccccaggaaacacugcugacc

SEQ ID NO: 261721 - RNA, 32 nt, Homo Sapiens
caagaaugaaccuggcugugucagucauuuug

SEQ ID NO: 261722 - RNA, 32 nt, Homo Sapiens
cccccaccccccaccccaguugccuugugaag

SEQ ID NO: 261723 - RNA, 32 nt, Homo Sapiens
ugccaccuaccuuguuuucuugccaggguugc

SEQ ID NO: 261724 - RNA, 32 nt, Homo Sapiens
uccgcagcgcccugcgcccacccgccccggac

SEQ ID NO: 261725 - RNA, 32 nt, Homo Sapiens
ggcuggcagaggucgcccuucuccuggaccuc

SEQ ID NO: 261726 - RNA, 32 nt, Homo Sapiens
uguuuuuuguuguuuacuuuugcaucuuuacu

SEQ ID NO: 261727 - RNA, 32 nt, Homo Sapiens
gcccucaaacuuacaagcaccugguaguugac

SEQ ID NO: 261728 - RNA, 32 nt, Homo Sapiens
aagcagaugaccucacaggagugauaagaaac

SEQ ID NO: 261729 - RNA, 32 nt, Homo Sapiens
gugcugacagggccuugauagaauagaguugg

SEQ ID NO: 261730 - RNA, 29 nt, Homo Sapiens
uuggaguaaaguuuuauuugcauuacaaa

SEQ ID NO: 261731 - RNA, 32 nt, Homo Sapiens
aaaaagaucauucgggaaauggcgguggcuca

SEQ ID NO: 261732 - RNA, 32 nt, Homo Sapiens
auaauaagcucuucuuauucauguguaaggga

SEQ ID NO: 261733 - RNA, 32 nt, Homo Sapiens
acaaaccaaaaauuaacccaaacuugcauuau

SEQ ID NO: 261734 - RNA, 32 nt, Homo Sapiens
uugggaccuuggggcacuggacagguugaagc

SEQ ID NO: 261735 - RNA, 32 nt, Homo Sapiens
ucagaaacccauagacugggaauagguuccag

SEQ ID NO: 261736 - RNA, 32 nt, Homo Sapiens
ucuguaccaauauaaauauaguccauauccca

SEQ ID NO: 261737 - RNA, 32 nt, Homo Sapiens
agcacuauuacucuuaucuaagaucgaaauug

SEQ ID NO: 261738 - RNA, 32 nt, Homo Sapiens
cauaugggagaugcuugcccauguguuucauc

SEQ ID NO: 261739 - RNA, 32 nt, Homo Sapiens
gaaaacucuggggucagggagagacccuaccc

SEQ ID NO: 261740 - RNA, 32 nt, Homo Sapiens
aauguuagggaagagaaaggaaaagagcccac

SEQ ID NO: 261741 - RNA, 32 nt, Homo Sapiens
aauuagccgggcgugguggcgggugccuauag

SEQ ID NO: 261742 - RNA, 32 nt, Homo Sapiens
uuaauugggcaucacucaggauguguauaaga

SEQ ID NO: 261743 - RNA, 32 nt, Homo Sapiens
agaccaugguuuugagguuucuuaauaaauuc

SEQ ID NO: 261744 - RNA, 30 nt, Homo Sapiens
ucccaaugcuccccaaacggcggcgagcgc

SEQ ID NO: 261745 - RNA, 32 nt, Homo Sapiens
uuccaugcugugcgcccagggcugggaggaag

SEQ ID NO: 261746 - RNA, 32 nt, Homo Sapiens
guguggaauccagugaggaauuuuauuggugg

SEQ ID NO: 261747 - RNA, 32 nt, Homo Sapiens
guuacaaaauuuaaggguauguuaacuaaagg

SEQ ID NO: 261748 - RNA, 32 nt, Homo Sapiens
caggugugggaagaggcgagagggcuguggag

SEQ ID NO: 261749 - RNA, 32 nt, Homo Sapiens
uugauaggaaaugugaaaauuuuugcuuguga

SEQ ID NO: 261750 - RNA, 32 nt, Homo Sapiens
uuccagcccucccucuaggacccugaccccaa

SEQ ID NO: 261751 - RNA, 32 nt, Homo Sapiens
cacacgcacacacacacacacaaacacacgcg

SEQ ID NO: 261752 - RNA, 32 nt, Homo Sapiens
guccuaacucugcggggcugcagcuuccugca

SEQ ID NO: 261753 - RNA, 32 nt, Homo Sapiens
ggcgccggacgccccucagagacggcgcuggc

SEQ ID NO: 261754 - RNA, 31 nt, Homo Sapiens
cacuacucaaacacucagccugcuuccuuca

SEQ ID NO: 261755 - RNA, 32 nt, Homo Sapiens
ggggcugccggccccucugccucccccgcacc

SEQ ID NO: 261756 - RNA, 32 nt, Homo Sapiens
caaucucgcuucucguguccgccccgcuucuc

SEQ ID NO: 261757 - RNA, 32 nt, Homo Sapiens
gguaggggguaagggugaggccugcugggugg

SEQ ID NO: 261758 - RNA, 29 nt, Homo Sapiens
caggaugccccgcagccccgggacgcgcc

SEQ ID NO: 261759 - RNA, 32 nt, Homo Sapiens
cagcagccuugggauacuaaugaggaugcaac

SEQ ID NO: 261760 - RNA, 31 nt, Homo Sapiens
gugcuccaggacuccuggccccgcgcuccaa

SEQ ID NO: 261761 - RNA, 32 nt, Homo Sapiens
cucugauucagaaacacacuucuaccucuuua

SEQ ID NO: 261762 - RNA, 32 nt, Homo Sapiens
cccugaucccccaccccuugccucuggccacc

SEQ ID NO: 261763 - RNA, 32 nt, Homo Sapiens
uuugauguauaaauuauggaaacagguauucu

SEQ ID NO: 261764 - RNA, 31 nt, Homo Sapiens
cagguagccgccugccugcccugcucugcgg

SEQ ID NO: 261765 - RNA, 32 nt, Homo Sapiens
cuggaaaaaacauuaaacaauaggcaaauaua

SEQ ID NO: 261766 - RNA, 32 nt, Homo Sapiens
ccgcgcgccgagauguugcugcugcugcuacu

SEQ ID NO: 261767 - RNA, 32 nt, Homo Sapiens
ggauugaaaacugcagcagucuggccagcucc

SEQ ID NO: 261768 - RNA, 32 nt, Homo Sapiens
cauuuucuguauuguuaugauuugacuuuuua

SEQ ID NO: 261769 - RNA, 32 nt, Homo Sapiens
ggacgagcuuuucagcagcaugaaggcaacag

SEQ ID NO: 261770 - RNA, 32 nt, Homo Sapiens
uuaagcuucccucuccagccuaggguggggaa

SEQ ID NO: 261771 - RNA, 32 nt, Homo Sapiens
cagcuuggggauccccuugcuuccuggcccag

SEQ ID NO: 261772 - RNA, 32 nt, Homo Sapiens
aaacaguaauuuuucugguuauaacagagaag

SEQ ID NO: 261773 - RNA, 32 nt, Homo Sapiens
caccuuuuguuguuugagcacaagggauucuu

SEQ ID NO: 261774 - RNA, 32 nt, Homo Sapiens
gccgggucaggagagacgcgcccaucuuucgc

SEQ ID NO: 261775 - RNA, 32 nt, Homo Sapiens
guggaaaugcaaauagacauugauuaaucaag

SEQ ID NO: 261776 - RNA, 32 nt, Homo Sapiens
ccccgccccccgccccggcuuaaaucugucuu

SEQ ID NO: 261777 - RNA, 32 nt, Homo Sapiens
agaacuguccuugaggaacuucaucaguaacu

SEQ ID NO: 261778 - RNA, 29 nt, Homo Sapiens
gcucaacuuuuuaaaauccagacccagug

SEQ ID NO: 261779 - RNA, 32 nt, Homo Sapiens
gaccuuacaauauccucaacaagcauuagaac

SEQ ID NO: 261780 - RNA, 32 nt, Homo Sapiens
gggcugcaccccggcggccucggcgccaugga

SEQ ID NO: 261781 - RNA, 32 nt, Homo Sapiens
gacccagccgccgugccgcgggccauggaccu

SEQ ID NO: 261782 - RNA, 32 nt, Homo Sapiens
gacccagcugucagccauuugcccuggugugu

SEQ ID NO: 261783 - RNA, 32 nt, Homo Sapiens
ucccauuagucuccuuuuuuuguuuuguuuug

SEQ ID NO: 261784 - RNA, 32 nt, Homo Sapiens
cugccucugggagcuucccgggaaugacaggg

SEQ ID NO: 261785 - RNA, 32 nt, Homo Sapiens
ucuaugaagaacuacauugauuuguuggcuuu

SEQ ID NO: 261786 - RNA, 32 nt, Homo Sapiens
ggggcagauaacggggcauauuuaagggggca

SEQ ID NO: 261787 - RNA, 32 nt, Homo Sapiens
cugcccugccgaacacuuucccucccaccugc

SEQ ID NO: 261788 - RNA, 32 nt, Homo Sapiens
uaugcuguacauuuaacugaucaaauacauua

SEQ ID NO: 261789 - RNA, 32 nt, Homo Sapiens
cugcggcucccgggugucccaggcccggccgg

SEQ ID NO: 261790 - RNA, 32 nt, Homo Sapiens
acagcugcgaagaaggcagagaaaggaggaua

SEQ ID NO: 261791 - RNA, 32 nt, Homo Sapiens
uacugagaaaucaccugaagacaaaguucaga

SEQ ID NO: 261792 - RNA, 32 nt, Homo Sapiens
aagguuuauaaacuagugcuaacucuugaucc

SEQ ID NO: 261793 - RNA, 32 nt, Homo Sapiens
cucaggcccucccccgggaccggcccgugucc

SEQ ID NO: 261794 - RNA, 32 nt, Homo Sapiens
gugagagcugaaugaaaagggacugaauuuaa

SEQ ID NO: 261795 - RNA, 32 nt, Homo Sapiens
gauagggaauggggaggucagaggacgcaaag

SEQ ID NO: 261796 - RNA, 32 nt, Homo Sapiens
uuuguacuuccaccuccaccacaucugccaga

SEQ ID NO: 261797 - RNA, 32 nt, Homo Sapiens
ucaguuccuggugaggguucucuuccuggcuu

SEQ ID NO: 261798 - RNA, 32 nt, Homo Sapiens
cacauaguauuugcacuuuguacuuuaaaugu

SEQ ID NO: 261799 - RNA, 32 nt, Homo Sapiens
auacaaaauaauaucuauuaaaguugguuuau

SEQ ID NO: 261800 - RNA, 28 nt, Homo Sapiens
gucauggacgccuggguccgcuucagug

SEQ ID NO: 261801 - RNA, 32 nt, Homo Sapiens
ucuugcuccaugaagggugaaucgaaacgcau

SEQ ID NO: 261802 - RNA, 32 nt, Homo Sapiens
ccuuguguuuaacgugauugacucucccuuag

SEQ ID NO: 261803 - RNA, 32 nt, Homo Sapiens
aagggacugagcauugugucaaccuguugcag

SEQ ID NO: 261804 - RNA, 32 nt, Homo Sapiens
cgucaggccaggugaaagggccaggcaguugc

SEQ ID NO: 261805 - RNA, 32 nt, Homo Sapiens
augaacucugcauuuuaaucuguuuaguaguc

SEQ ID NO: 261806 - RNA, 32 nt, Homo Sapiens
cagccauccauagcccugggaauuccaccugc

SEQ ID NO: 261807 - RNA, 32 nt, Homo Sapiens
auguagaaucaucagcuguagcguuaacacua

SEQ ID NO: 261808 - RNA, 32 nt, Homo Sapiens
gauuccaaauuugagccaccaaaauacacugc

SEQ ID NO: 261809 - RNA, 32 nt, Homo Sapiens
ccaucguccucacccggcacccaauuccacca

SEQ ID NO: 261810 - RNA, 32 nt, Homo Sapiens
caaucucuuccaaccuuuaaggugauagauag

SEQ ID NO: 261811 - RNA, 32 nt, Homo Sapiens
uggccuccaagccccagcccuccuuccuaagu

SEQ ID NO: 261812 - RNA, 32 nt, Homo Sapiens
ccucacuguccuguuuucuuaggcacugaggg

SEQ ID NO: 261813 - RNA, 32 nt, Homo Sapiens
uugauaugagaggaauguaucagccaguggcu

SEQ ID NO: 261814 - RNA, 32 nt, Homo Sapiens
agggagacuggccuuggagaugccccacuccc

SEQ ID NO: 261815 - RNA, 32 nt, Homo Sapiens
gacaaaauuauaaaaugaaauguguagguaac

SEQ ID NO: 261816 - RNA, 32 nt, Homo Sapiens
ccagacgggacuugggagcggcugcaggaaac

SEQ ID NO: 261817 - RNA, 32 nt, Homo Sapiens
ggcuugcagcgggacaaacagauggaaagaac

SEQ ID NO: 261818 - RNA, 32 nt, Homo Sapiens
accccuggggaaaggcccgggucuagccgggg

SEQ ID NO: 261819 - RNA, 32 nt, Homo Sapiens
ugcccccuuuuggagagaugagcuguaucacc

SEQ ID NO: 261820 - RNA, 32 nt, Homo Sapiens
cgaugcuguugcuuugcagaucacagugcugg

SEQ ID NO: 261821 - RNA, 32 nt, Homo Sapiens
cuucccagccagcagggaggcuccugggcuaa

SEQ ID NO: 261822 - RNA, 32 nt, Homo Sapiens
cguuugccuuucaauuuuuagagaaaauaaag

SEQ ID NO: 261823 - RNA, 32 nt, Homo Sapiens
acauacaggagagcugcaguugugaaagcacc

SEQ ID NO: 261824 - RNA, 32 nt, Homo Sapiens
agccugcucgggacgucagggcccggggaccc

SEQ ID NO: 261825 - RNA, 32 nt, Homo Sapiens
agcgcuggucgcagcccucagcugcgccgggc

SEQ ID NO: 261826 - RNA, 32 nt, Homo Sapiens
ucagauuuaaggaaaagacuuuuuagccauua

SEQ ID NO: 261827 - RNA, 31 nt, Homo Sapiens
ggaguuuuggggauugaauagauuucaccug

SEQ ID NO: 261828 - RNA, 32 nt, Homo Sapiens
ccaguccaggacaggaaggacugagggucugg

SEQ ID NO: 261829 - RNA, 32 nt, Homo Sapiens
cuguguccuucccagggaaggcacucucuguc

SEQ ID NO: 261830 - RNA, 31 nt, Homo Sapiens
aggacucagcacagccaaccauaaucagcau

SEQ ID NO: 261831 - RNA, 32 nt, Homo Sapiens
uccacgaacagcccccaccugccuucacaggu

SEQ ID NO: 261832 - RNA, 32 nt, Homo Sapiens
gugguaaggggagaggagccggaauggagggc

SEQ ID NO: 261833 - RNA, 32 nt, Homo Sapiens
uaauuuccugucauccuuccaaguuaucaggc

SEQ ID NO: 261834 - RNA, 32 nt, Homo Sapiens
ccuauacagugcccugcccacccuuaucugca

SEQ ID NO: 261835 - RNA, 32 nt, Homo Sapiens
cucuggccugugccgccucagcagcccuggca

SEQ ID NO: 261836 - RNA, 32 nt, Homo Sapiens
aauuuaaaguauugccauuuaaauuacacacu

SEQ ID NO: 261837 - RNA, 32 nt, Homo Sapiens
aaucaacguagagcuuccucugucugauucuc

SEQ ID NO: 261838 - RNA, 32 nt, Homo Sapiens
uucucauuuucauuauuacaaacaaagcuaca

SEQ ID NO: 261839 - RNA, 32 nt, Homo Sapiens
auccacuucucucuccuucucccucugucaac

SEQ ID NO: 261840 - RNA, 32 nt, Homo Sapiens
auagucuuucauuugcuagcugugauccaaau

SEQ ID NO: 261841 - RNA, 32 nt, Homo Sapiens
uuccauuagccauauauagcaaacucacuuug

SEQ ID NO: 261842 - RNA, 32 nt, Homo Sapiens
gccacggggaggccucuugggguguguggggg

SEQ ID NO: 261843 - RNA, 32 nt, Homo Sapiens
cgaggcgggggagcagcgugugagauuccccc

SEQ ID NO: 261844 - RNA, 32 nt, Homo Sapiens
auaauauuaauugcaaugauguuguaauaaaa

SEQ ID NO: 261845 - RNA, 32 nt, Homo Sapiens
guggcgacgacggccgagacguggggauggcg

SEQ ID NO: 261846 - RNA, 32 nt, Homo Sapiens
ucguucucaccaucugcuuccugucacacaag

SEQ ID NO: 261847 - RNA, 32 nt, Homo Sapiens
ugaaaaaguccuccccuauucuaacauaacag

SEQ ID NO: 261848 - RNA, 32 nt, Homo Sapiens
ccuccugccguggcuggggucauggucggcug

SEQ ID NO: 261849 - RNA, 32 nt, Homo Sapiens
agccuguaccucuggauuggcggaaguaaauc

SEQ ID NO: 261850 - RNA, 32 nt, Homo Sapiens
cauaggagggcuuccugcagcugagaucuaug

SEQ ID NO: 261851 - RNA, 32 nt, Homo Sapiens
ggugggucuaacuggcuuuuguggagaaauua

SEQ ID NO: 261852 - RNA, 32 nt, Homo Sapiens
agaauauucaaaaacagcacuuuuccaggaag

SEQ ID NO: 261853 - RNA, 32 nt, Homo Sapiens
cgagugcugggcccgccuccccgcgggacugu

SEQ ID NO: 261854 - RNA, 32 nt, Homo Sapiens
caguaaucaaagauuaaauggaccaugauacu

SEQ ID NO: 261855 - RNA, 32 nt, Homo Sapiens
cucucacacacacacacacacacacacacaua

SEQ ID NO: 261856 - RNA, 32 nt, Homo Sapiens
acuaaggugacuuucugaaacucccuuguguu

SEQ ID NO: 261857 - RNA, 32 nt, Homo Sapiens
guugacaucugugcugaagauacguguggaau

SEQ ID NO: 261858 - RNA, 32 nt, Homo Sapiens
uucaaaagguuuucuuuuucuuuuuuaaacug

SEQ ID NO: 261859 - RNA, 32 nt, Homo Sapiens
acugauaggagaaacuugcuuguggaauguca

SEQ ID NO: 261860 - RNA, 32 nt, Homo Sapiens
agcccacguuaguucuacauuauucuucacuu

SEQ ID NO: 261861 - RNA, 32 nt, Homo Sapiens
uaaauucuguugauuaaagaugagcuuugucu

SEQ ID NO: 261862 - RNA, 32 nt, Homo Sapiens
ugagaccggcgcccacccguccugagcauagc

SEQ ID NO: 261863 - RNA, 32 nt, Homo Sapiens
ugaaagugacuuaucugacacaucucuguagc

SEQ ID NO: 261864 - RNA, 32 nt, Homo Sapiens
uugagguugguggauucacacauggggguccu

SEQ ID NO: 261865 - RNA, 30 nt, Homo Sapiens
gccucugcugaaaggaccuagaagaauccc

SEQ ID NO: 261866 - RNA, 32 nt, Homo Sapiens
ggccacgccgcggaaggcgcgggcugagcaga

SEQ ID NO: 261867 - RNA, 32 nt, Homo Sapiens
gauggacuagccggggccauggccggcgcggc

SEQ ID NO: 261868 - RNA, 32 nt, Homo Sapiens
guucugugguuucauaguuaagcaaaacucua

SEQ ID NO: 261869 - RNA, 32 nt, Homo Sapiens
auggggcggucauaguucacugcagccuugaa

SEQ ID NO: 261870 - RNA, 32 nt, Homo Sapiens
aguggaugaugagaccaauuacaggccgucuc

SEQ ID NO: 261871 - RNA, 32 nt, Homo Sapiens
cagggcagauggaagcgggugggcggggcuga

SEQ ID NO: 261872 - RNA, 32 nt, Homo Sapiens
aacuuucuuauauuguaagcuccuucuauagu

SEQ ID NO: 261873 - RNA, 32 nt, Homo Sapiens
cucagcaacuguuagcugggaagaauguauuc

SEQ ID NO: 261874 - RNA, 31 nt, Homo Sapiens
cauuguuugugcucaauuucagacacucauu

SEQ ID NO: 261875 - RNA, 32 nt, Homo Sapiens
cuuucugcuguuaccgggagcgcgguggccac

SEQ ID NO: 261876 - RNA, 32 nt, Homo Sapiens
ccacacgcccacacagcaccucugccaggccu

SEQ ID NO: 261877 - RNA, 32 nt, Homo Sapiens
ggacugggaagcugcaccuggcucccacuuuc

SEQ ID NO: 261878 - RNA, 32 nt, Homo Sapiens
gucagguucuuugcuguggggcugcuggggau

SEQ ID NO: 261879 - RNA, 32 nt, Homo Sapiens
gaacugaccuaccacaagcauccaccaaagga

SEQ ID NO: 261880 - RNA, 32 nt, Homo Sapiens
gccucagcuuucauacuucagcccuuaaguuc

SEQ ID NO: 261881 - RNA, 32 nt, Homo Sapiens
auugacaccaaaaugaaccuugcuaucaagaa

SEQ ID NO: 261882 - RNA, 32 nt, Homo Sapiens
ccaguggcuuuuucuuuuuuagucaauuuucc

SEQ ID NO: 261883 - RNA, 32 nt, Homo Sapiens
uuacauuagugucaagauaugccauaauacug

SEQ ID NO: 261884 - RNA, 32 nt, Homo Sapiens
cuuugggaggcugaggcggguggaucacaagc

SEQ ID NO: 261885 - RNA, 32 nt, Homo Sapiens
acccaguuuuuaaauuucaaauagcuguccag

SEQ ID NO: 261886 - RNA, 32 nt, Homo Sapiens
ggaagaagccccacguuguccuugaauuccuu

SEQ ID NO: 261887 - RNA, 29 nt, Homo Sapiens
auauucguagugaugaucuguuuucucua

SEQ ID NO: 261888 - RNA, 29 nt, Homo Sapiens
agggacauauguaguggcuauagguuuac

SEQ ID NO: 261889 - RNA, 32 nt, Homo Sapiens
ugccccagggugcauauuucuaugccuuauuu

SEQ ID NO: 261890 - RNA, 28 nt, Homo Sapiens
guuuuggauguuuuuaggaugacauaaa

SEQ ID NO: 261891 - RNA, 32 nt, Homo Sapiens
ucccagagaacaaauuggaguugcaaaacaaa

SEQ ID NO: 261892 - RNA, 32 nt, Homo Sapiens
aaaaucaguaaaauauuuugcuuguaaaaugc

SEQ ID NO: 261893 - RNA, 32 nt, Homo Sapiens
ugucacuuucccucccugccccccgcuucagu

SEQ ID NO: 261894 - RNA, 32 nt, Homo Sapiens
cuaacuguagauauuuaugacucugcgaguua

SEQ ID NO: 261895 - RNA, 32 nt, Homo Sapiens
cugcagccccuggcugcccuggacugugcaga

SEQ ID NO: 261896 - RNA, 32 nt, Homo Sapiens
ucuauuuguugaccaggaccuguggugagaag

SEQ ID NO: 261897 - RNA, 32 nt, Homo Sapiens
caucagcagugaaccacaaacacacacacaaa

SEQ ID NO: 261898 - RNA, 32 nt, Homo Sapiens
aauaugauagcauugggagauauaccuaaugc

SEQ ID NO: 261899 - RNA, 32 nt, Homo Sapiens
uccagcugguauacaggauaaacuacauacac

SEQ ID NO: 261900 - RNA, 32 nt, Homo Sapiens
gauuacaacuccuugccaggaaugggaacaaa

SEQ ID NO: 261901 - RNA, 32 nt, Homo Sapiens
aggaaggcggggggcgcagcaacgcaucgugu

SEQ ID NO: 261902 - RNA, 32 nt, Homo Sapiens
guccagccacugacauaagccccacucgguua

SEQ ID NO: 261903 - RNA, 32 nt, Homo Sapiens
guucaacuaauagagaaccuacauuuugccuu

SEQ ID NO: 261904 - RNA, 32 nt, Homo Sapiens
cugggggagcagauccugagggaaaucauggg

SEQ ID NO: 261905 - RNA, 32 nt, Homo Sapiens
ggagcugcauugugggcggggagugugugggu

SEQ ID NO: 261906 - RNA, 32 nt, Homo Sapiens
agcucucaggugguucuuuucuguuuuucuca

SEQ ID NO: 261907 - RNA, 32 nt, Homo Sapiens
gcggauauccgaaagaauuagagaauaccuag

SEQ ID NO: 261908 - RNA, 32 nt, Homo Sapiens
aacuuuuuuauuuuuguacaguuucuaaguga

SEQ ID NO: 261909 - RNA, 32 nt, Homo Sapiens
acccagaggagcuccuuuccccagcaggccuc

SEQ ID NO: 261910 - RNA, 32 nt, Homo Sapiens
cgccagccuuggacccagcagugggcgcuggu

SEQ ID NO: 261911 - RNA, 32 nt, Homo Sapiens
uuaccacucuggcaggccccagcccugcagca

SEQ ID NO: 261912 - RNA, 32 nt, Homo Sapiens
uaggagagaaaccaccugacuucaggucggga

SEQ ID NO: 261913 - RNA, 32 nt, Homo Sapiens
gguggggaaggauggaaggccuuggauuuaua

SEQ ID NO: 261914 - RNA, 32 nt, Homo Sapiens
guuuguuuuuguuguucccugguagagcucaa

SEQ ID NO: 261915 - RNA, 32 nt, Homo Sapiens
ccggggcuccugggccgcucugccgggcuggg

SEQ ID NO: 261916 - RNA, 32 nt, Homo Sapiens
cagcacacuccaccccacucucagggcuggga

SEQ ID NO: 261917 - RNA, 32 nt, Homo Sapiens
ucugcacaacgggcaaugugcagacgcauuuu

SEQ ID NO: 261918 - RNA, 32 nt, Homo Sapiens
aaucagggcugggccucugugccaggccaucc

SEQ ID NO: 261919 - RNA, 32 nt, Homo Sapiens
uaaccacugccuuccuggaccuuggagccacg

SEQ ID NO: 261920 - RNA, 31 nt, Homo Sapiens
ggggccgggggccccagccagagugaugacc

SEQ ID NO: 261921 - RNA, 32 nt, Homo Sapiens
augcuccacaauuuauauuuagagagagaaca

SEQ ID NO: 261922 - RNA, 32 nt, Homo Sapiens
uccccaucuguuaaaugagagaauagaguaug

SEQ ID NO: 261923 - RNA, 32 nt, Homo Sapiens
auuguuugauaaaaaucucuauaauaaaugca

SEQ ID NO: 261924 - RNA, 32 nt, Homo Sapiens
ggccaagagugggacaggguuuuaaccacaaa

SEQ ID NO: 261925 - RNA, 32 nt, Homo Sapiens
ggacagaagcaucucuacagaugaaaauuaca

SEQ ID NO: 261926 - RNA, 32 nt, Homo Sapiens
agaaaaauuuaguugcuacuguagauuuacau

SEQ ID NO: 261927 - RNA, 32 nt, Homo Sapiens
acuccuauucccauuuuugcuaaacucaauuu

SEQ ID NO: 261928 - RNA, 32 nt, Homo Sapiens
ggaagacacgggugagauaggccacagguguu

SEQ ID NO: 261929 - RNA, 32 nt, Homo Sapiens
gguuuggcgugugggacgcagcugccucugua

SEQ ID NO: 261930 - RNA, 32 nt, Homo Sapiens
ucccaggaauggggugcccgagcccccaggcg

SEQ ID NO: 261931 - RNA, 32 nt, Homo Sapiens
aaaagaaucuugugaugucuacaaggagagaa

SEQ ID NO: 261932 - RNA, 32 nt, Homo Sapiens
ccagccccaacccccggccccgguggccuccc

SEQ ID NO: 261933 - RNA, 32 nt, Homo Sapiens
cggcgccugcgcagccgccauguucgguugcu

SEQ ID NO: 261934 - RNA, 32 nt, Homo Sapiens
cucggccauuuuccaccucgccuucuguggac

SEQ ID NO: 261935 - RNA, 32 nt, Homo Sapiens
uaaggacaccgacaccagucauaguggauuaa

SEQ ID NO: 261936 - RNA, 32 nt, Homo Sapiens
cagccagauuuucaagcuucauucuguuucau

SEQ ID NO: 261937 - RNA, 32 nt, Homo Sapiens
uguguuccugucauagcaaauaugggaccauc

SEQ ID NO: 261938 - RNA, 32 nt, Homo Sapiens
uugcuauggcgacuggggaggggcggugucug

SEQ ID NO: 261939 - RNA, 32 nt, Homo Sapiens
ucuccuagaagguggaggacagacacaggaga

SEQ ID NO: 261940 - RNA, 32 nt, Homo Sapiens
ugcccuucaguugcucaggcuccagcugcccu

SEQ ID NO: 261941 - RNA, 32 nt, Homo Sapiens
cagaguuuaaaauuauaucagauucguuuacu

SEQ ID NO: 261942 - RNA, 32 nt, Homo Sapiens
aaaugaaacaggaaacaagcaaaaccauuuau

SEQ ID NO: 261943 - RNA, 32 nt, Homo Sapiens
cagaauuugacugaauucaggggugagaguuu

SEQ ID NO: 261944 - RNA, 32 nt, Homo Sapiens
guuuugcuaaaauuauuucaaaaucugccuug

SEQ ID NO: 261945 - RNA, 32 nt, Homo Sapiens
aaccacgugacugcagaaacauccuuaucgca

SEQ ID NO: 261946 - RNA, 32 nt, Homo Sapiens
ccccagggccugaggacagguccccaagugga

SEQ ID NO: 261947 - RNA, 25 nt, Homo Sapiens
auggaugugcccggcccggugucuc

SEQ ID NO: 261948 - RNA, 32 nt, Homo Sapiens
gagcguccagcauguuaauuagcguaucauua

SEQ ID NO: 261949 - RNA, 32 nt, Homo Sapiens
auugcuaagugaaguauguccuguuuucugcu

SEQ ID NO: 261950 - RNA, 32 nt, Homo Sapiens
ccaacgacgcgcccgcuggccccugggccggu

SEQ ID NO: 261951 - RNA, 32 nt, Homo Sapiens
agaccucaaccuggcccgcggaccucaggcca

SEQ ID NO: 261952 - RNA, 32 nt, Homo Sapiens
ugugcuggccuggccuugccugcuggcaccau

SEQ ID NO: 261953 - RNA, 32 nt, Homo Sapiens
uuguaugauacugcacagcaucaggcauuuua

SEQ ID NO: 261954 - RNA, 32 nt, Homo Sapiens
uggagugcgagugggaaucagagccuccugaa

SEQ ID NO: 261955 - RNA, 32 nt, Homo Sapiens
aggugggcggggugcgguuggcggcggcggcu

SEQ ID NO: 261956 - RNA, 32 nt, Homo Sapiens
gccccuggguccccggccauccagcggggcug

SEQ ID NO: 261957 - RNA, 32 nt, Homo Sapiens
accccucggcccguguacgcgcucugcaccug

SEQ ID NO: 261958 - RNA, 32 nt, Homo Sapiens
accaacuguuggauucagaaauuuaaacaaaa

SEQ ID NO: 261959 - RNA, 32 nt, Homo Sapiens
auagcugcuuuuuauugacaaacaagaucaua

SEQ ID NO: 261960 - RNA, 32 nt, Homo Sapiens
aaggaaggccagaaccucacccugcccuccuc

SEQ ID NO: 261961 - RNA, 29 nt, Homo Sapiens
augaugaagauauugaugacaucuaauug

SEQ ID NO: 261962 - RNA, 32 nt, Homo Sapiens
ccuggggagggagggagggaugaggcagcguc

SEQ ID NO: 261963 - RNA, 32 nt, Homo Sapiens
aagcagccaagcccagggcuggccugaagccc

SEQ ID NO: 261964 - RNA, 32 nt, Homo Sapiens
aacuuacuauaaagauguuguggguaugcagc

SEQ ID NO: 261965 - RNA, 32 nt, Homo Sapiens
aaaccaugaaguacuuuuuuuauuugcuaaau

SEQ ID NO: 261966 - RNA, 32 nt, Homo Sapiens
uuuaaagacaauuuaagguauuggccauuugg

SEQ ID NO: 261967 - RNA, 32 nt, Homo Sapiens
gaaaguuuuuaaauccucauuuggugcaucug

SEQ ID NO: 261968 - RNA, 32 nt, Homo Sapiens
cgaccagggggcggccgggcuaccguccgcca

SEQ ID NO: 261969 - RNA, 32 nt, Homo Sapiens
cgcggggcccucgcagcuugccugcugcaguc

SEQ ID NO: 261970 - RNA, 32 nt, Homo Sapiens
guaugugugugcgcgcacguguguguaggugg

SEQ ID NO: 261971 - RNA, 32 nt, Homo Sapiens
cccagccuggcaugcauaugcggugguuaagg

SEQ ID NO: 261972 - RNA, 32 nt, Homo Sapiens
uuuuucuucgggaaggcugugcagucugcucu

SEQ ID NO: 261973 - RNA, 32 nt, Homo Sapiens
uguuaagggccgagaccccugcaaaguugagu

SEQ ID NO: 261974 - RNA, 32 nt, Homo Sapiens
cccauucccgcccagacaucucagcccugcuc

SEQ ID NO: 261975 - RNA, 29 nt, Homo Sapiens
agcgggucggagaucgaaggaacgggcca

SEQ ID NO: 261976 - RNA, 32 nt, Homo Sapiens
uaguaaugagugaguucucacucugguuguuu

SEQ ID NO: 261977 - RNA, 32 nt, Homo Sapiens
ucuugugcaaauucuuuuuuuguuguuugucu

SEQ ID NO: 261978 - RNA, 32 nt, Homo Sapiens
ccgagccgccgcugccaucccggagcgagcaa

SEQ ID NO: 261979 - RNA, 32 nt, Homo Sapiens
ugaaaagaaaaauuauaauaaagcccccaaau

SEQ ID NO: 261980 - RNA, 32 nt, Homo Sapiens
gacugucgcuggcgggccccugggcggugacc

SEQ ID NO: 261981 - RNA, 32 nt, Homo Sapiens
aaccccaggccagcugccuuugcucugcugug

SEQ ID NO: 261982 - RNA, 32 nt, Homo Sapiens
aaguucagugcuauaaaacucuguaaaauuuc

SEQ ID NO: 261983 - RNA, 32 nt, Homo Sapiens
uaauaguuugaaaugaugauaauccuaauuau

SEQ ID NO: 261984 - RNA, 32 nt, Homo Sapiens
caacauugugcagcugcugaucgggaacaagu

SEQ ID NO: 261985 - RNA, 32 nt, Homo Sapiens
cggacagggcgcagcaguacuuugagaaaaug

SEQ ID NO: 261986 - RNA, 32 nt, Homo Sapiens
gucaagaacauuguuuuaauggcugccgacaa

SEQ ID NO: 261987 - RNA, 32 nt, Homo Sapiens
agagaggggucuuggcacucucuucuuacuua

SEQ ID NO: 261988 - RNA, 31 nt, Homo Sapiens
accagcaguuccagccaaccaagugauucuu

SEQ ID NO: 261989 - RNA, 32 nt, Homo Sapiens
auucaugcgcugcuuuuucaucaaaaccuacc

SEQ ID NO: 261990 - RNA, 32 nt, Homo Sapiens
aauaaagacaaccugaugaucugauaauuugu

SEQ ID NO: 261991 - RNA, 32 nt, Homo Sapiens
ccugaacaagaggauuuccucacaucauuucc

SEQ ID NO: 261992 - RNA, 32 nt, Homo Sapiens
cuuuuaaaaaauuuauuuuaagguaguacaug

SEQ ID NO: 261993 - RNA, 32 nt, Homo Sapiens
agcaucagcugauguucugccaagucucuggg

SEQ ID NO: 261994 - RNA, 32 nt, Homo Sapiens
ggcgggcggccgggagccauggagcgcggccc

SEQ ID NO: 261995 - RNA, 32 nt, Homo Sapiens
cucaaauaaaaauaaaauaauuuucauucauu

SEQ ID NO: 261996 - RNA, 32 nt, Homo Sapiens
gccccgcuccgcacugcaccccgacccacccc

SEQ ID NO: 261997 - RNA, 32 nt, Homo Sapiens
cgcccgccgcggcucagcgcauucccgcucuc

SEQ ID NO: 261998 - RNA, 32 nt, Homo Sapiens
gcucacggagcugagacauacaguccaguccu

SEQ ID NO: 261999 - RNA, 32 nt, Homo Sapiens
aaacucugaggguggagccaggaagcuguguu

SEQ ID NO: 262000 - RNA, 32 nt, Homo Sapiens
uuugagaggaaugucuuugguuuuaaaugcug

SEQ ID NO: 262001 - RNA, 32 nt, Homo Sapiens
gugaaccuggaaauacaacuuugcuucuuuau

SEQ ID NO: 262002 - RNA, 32 nt, Homo Sapiens
ugucccucucagugccuucucucagcucccag

SEQ ID NO: 262003 - RNA, 32 nt, Homo Sapiens
cuguauuuucguuucuaacucuauuuagggcc

SEQ ID NO: 262004 - RNA, 32 nt, Homo Sapiens
aggcagauguuaccauugucuuuucacuguau

SEQ ID NO: 262005 - RNA, 32 nt, Homo Sapiens
acacuagccuuacagcugggagccuuugccau

SEQ ID NO: 262006 - RNA, 32 nt, Homo Sapiens
auauaagaagcaguugccucaagaaugcagaa

SEQ ID NO: 262007 - RNA, 32 nt, Homo Sapiens
auauaugaagcuccuuuuuuuacuuugcucug

SEQ ID NO: 262008 - RNA, 32 nt, Homo Sapiens
gaaaugaauacuuuaaaaagugauauauguug

SEQ ID NO: 262009 - RNA, 32 nt, Homo Sapiens
gagaaaaucaagcagccgaagaugaacuaaga

SEQ ID NO: 262010 - RNA, 32 nt, Homo Sapiens
uucauugccgugcuuucaugcagaguguuuug

SEQ ID NO: 262011 - RNA, 32 nt, Homo Sapiens
uaugcuaaauuaauuacaauuaugaauggagg

SEQ ID NO: 262012 - RNA, 32 nt, Homo Sapiens
aacuuuaaaaauuuaacaauuaaaacacaauc

SEQ ID NO: 262013 - RNA, 32 nt, Homo Sapiens
uauuauauaauguacaguguuauuuucuguac

SEQ ID NO: 262014 - RNA, 32 nt, Homo Sapiens
gcaccccugcccgcgcgccgggccgccugacu

SEQ ID NO: 262015 - RNA, 32 nt, Homo Sapiens
ucagggcucagguguccugcccagcccaagcc

SEQ ID NO: 262016 - RNA, 32 nt, Homo Sapiens
uugcacuggugccuccccucgaaccgccaagc

SEQ ID NO: 262017 - RNA, 32 nt, Homo Sapiens
cuccucagacccgaccgcaugucugucaugga

SEQ ID NO: 262018 - RNA, 32 nt, Homo Sapiens
aaaauucugugauucagauuugucagggaagc

SEQ ID NO: 262019 - RNA, 32 nt, Homo Sapiens
gugucacugccagcaccaggcacugcuuucac

SEQ ID NO: 262020 - RNA, 32 nt, Homo Sapiens
uugaagucauauuauuuuuuguuuuguuuuuu

SEQ ID NO: 262021 - RNA, 32 nt, Homo Sapiens
aucuggugucugaggaguuuugucugugacuc

SEQ ID NO: 262022 - RNA, 32 nt, Homo Sapiens
ggagaauaaaaauaauugcuuagaugauuacc

SEQ ID NO: 262023 - RNA, 32 nt, Homo Sapiens
gcugcugcacuccaaccugggcgacagagcaa

SEQ ID NO: 262024 - RNA, 32 nt, Homo Sapiens
uucuuuuguaccagguuuuucuuucuuucuuu

SEQ ID NO: 262025 - RNA, 32 nt, Homo Sapiens
caagcaacccacugccuacuaacaucaagagg

SEQ ID NO: 262026 - RNA, 32 nt, Homo Sapiens
auuuuuaaauuaacauuuaacagaaacauuug

SEQ ID NO: 262027 - RNA, 32 nt, Homo Sapiens
accuccccagggagccgagggcgggcguggac

SEQ ID NO: 262028 - RNA, 32 nt, Homo Sapiens
ccuucauugacuggcugcuuguccugcuuccu

SEQ ID NO: 262029 - RNA, 32 nt, Homo Sapiens
gggcgggacuuccaguaggaggcggcaaguuu

SEQ ID NO: 262030 - RNA, 32 nt, Homo Sapiens
cccgaggcgaggcgaggcgcggcgccgcugca

SEQ ID NO: 262031 - RNA, 32 nt, Homo Sapiens
caauauuauuuuuccuuuaacaaaaugaagag

SEQ ID NO: 262032 - RNA, 32 nt, Homo Sapiens
ggcucaaaacuaccuacuucuuucucaggcau

SEQ ID NO: 262033 - RNA, 32 nt, Homo Sapiens
gucaguccugcaugcuggccgaggcccggcca

SEQ ID NO: 262034 - RNA, 32 nt, Homo Sapiens
ucucaucugucauggcggccaagacagacccu

SEQ ID NO: 262035 - RNA, 32 nt, Homo Sapiens
cuuuuguaagagcugggagcaaacacguuuau

SEQ ID NO: 262036 - RNA, 32 nt, Homo Sapiens
cccagccccucccccagagcccaggcucuugc

SEQ ID NO: 262037 - RNA, 32 nt, Homo Sapiens
cgagggcggcggcgauggcggaggcggcgcug

SEQ ID NO: 262038 - RNA, 32 nt, Homo Sapiens
ucuugugacaguuuggguugaauuucuaucgu

SEQ ID NO: 262039 - RNA, 32 nt, Homo Sapiens
agugucacaucucugccuggaacuucuaccag

SEQ ID NO: 262040 - RNA, 32 nt, Homo Sapiens
agggcuuguuuaaaaauaaauuguguuuuggu

SEQ ID NO: 262041 - RNA, 32 nt, Homo Sapiens
ugguucagaacaccaucaaagaugccuucaag

SEQ ID NO: 262042 - RNA, 32 nt, Homo Sapiens
cagagaagaggaaaacucuaccggugcaggag

SEQ ID NO: 262043 - RNA, 32 nt, Homo Sapiens
accuuuuucuaauggcuucucuauaucuuuua

SEQ ID NO: 262044 - RNA, 32 nt, Homo Sapiens
auggaugggaugcacucucagaccaagcagca

SEQ ID NO: 262045 - RNA, 32 nt, Homo Sapiens
aaaaucaacagcaaacaaaaccacacaaacca

SEQ ID NO: 262046 - RNA, 32 nt, Homo Sapiens
augcgggccccggcugugaacccugcaccaag

SEQ ID NO: 262047 - RNA, 32 nt, Homo Sapiens
guggguggagagcgggaaagagagggggcuug

SEQ ID NO: 262048 - RNA, 32 nt, Homo Sapiens
gagagaaugaauuagaggcaugaagaaaguuc

SEQ ID NO: 262049 - RNA, 32 nt, Homo Sapiens
uaggauucuccucuccccauuucagucacagg

SEQ ID NO: 262050 - RNA, 32 nt, Homo Sapiens
cacacuuuagguaccaguaaauccaugcaaug

SEQ ID NO: 262051 - RNA, 32 nt, Homo Sapiens
gagagcggcggcggcggcgcgggucggcagcg

SEQ ID NO: 262052 - RNA, 32 nt, Homo Sapiens
cggcugcaugcacccugcugugacggaggcua

SEQ ID NO: 262053 - RNA, 32 nt, Homo Sapiens
auuacgguuaagguaacgaugccaagucugua

SEQ ID NO: 262054 - RNA, 32 nt, Homo Sapiens
auuauuuaaaacacuccaguuacuuuucccuu

SEQ ID NO: 262055 - RNA, 32 nt, Homo Sapiens
auggcaauaaggcaagaaaaagagauuaaaug

SEQ ID NO: 262056 - RNA, 32 nt, Homo Sapiens
aaaauguuuugcuauuuuuaaucuuaaaagau

SEQ ID NO: 262057 - RNA, 32 nt, Homo Sapiens
ggucacagagggcuccucugccaggcaguggg

SEQ ID NO: 262058 - RNA, 32 nt, Homo Sapiens
agguucugguggugggaagggaggcguuuccu

SEQ ID NO: 262059 - RNA, 32 nt, Homo Sapiens
gucagugccaagaugucgacggcggcgguucc

SEQ ID NO: 262060 - RNA, 32 nt, Homo Sapiens
ugguggccacagcggaggacuggcuguaccgc

SEQ ID NO: 262061 - RNA, 32 nt, Homo Sapiens
ucccccgguguugggcagguucugagcugccc

SEQ ID NO: 262062 - RNA, 32 nt, Homo Sapiens
ccaaaugaaacacuuucaggaccuuccuuccu

SEQ ID NO: 262063 - RNA, 32 nt, Homo Sapiens
gucucuuccuuccaguuuuauuagcuugcucu

SEQ ID NO: 262064 - RNA, 32 nt, Homo Sapiens
ucccuuuuuccuuccgcuccauuuggggcccu

SEQ ID NO: 262065 - RNA, 32 nt, Homo Sapiens
gaacugaaggauuuuauucuauaaagcggccc

SEQ ID NO: 262066 - RNA, 32 nt, Homo Sapiens
ccgaggcagggggugaugugguaccucgaaug

SEQ ID NO: 262067 - RNA, 32 nt, Homo Sapiens
cccgagggccgccuacugccccugccuaugcc

SEQ ID NO: 262068 - RNA, 32 nt, Homo Sapiens
gcgugacugcgcugcgcagggcgcuaggaggc

SEQ ID NO: 262069 - RNA, 32 nt, Homo Sapiens
agguacguccacucggcauggaggagucggcg

SEQ ID NO: 262070 - RNA, 32 nt, Homo Sapiens
accaaccugggcaacauagugagacccccauc

SEQ ID NO: 262071 - RNA, 32 nt, Homo Sapiens
uaugggagacaccacccagagcccugaagcuu

SEQ ID NO: 262072 - RNA, 32 nt, Homo Sapiens
ugcccagccaagggugagcaucucugcugaga

SEQ ID NO: 262073 - RNA, 32 nt, Homo Sapiens
aaacgcaagcugcagcugggccugcaguuccu

SEQ ID NO: 262074 - RNA, 32 nt, Homo Sapiens
gggcggcgcgcucgaucuacgcguccggggcc

SEQ ID NO: 262075 - RNA, 32 nt, Homo Sapiens
uacuacuaaaauuauauaguaacuuuuaacuu

SEQ ID NO: 262076 - RNA, 32 nt, Homo Sapiens
uuauguuuugaaaagaaaauagcuuuuuauac

SEQ ID NO: 262077 - RNA, 32 nt, Homo Sapiens
cauuuuaguuguagaagaaaauuucuuacaaa

SEQ ID NO: 262078 - RNA, 32 nt, Homo Sapiens
ugcacgcguuguuuuucugaacccucacacaa

SEQ ID NO: 262079 - RNA, 32 nt, Homo Sapiens
gugguucccgcaggcuugcgcgcgcacucgcu

SEQ ID NO: 262080 - RNA, 32 nt, Homo Sapiens
ugcgagccgcgggugggccccaggcgcgcaga

SEQ ID NO: 262081 - RNA, 32 nt, Homo Sapiens
uuaauccugaagggcuguuuuaugcggcuucu

SEQ ID NO: 262082 - RNA, 32 nt, Homo Sapiens
cacuggccuggcagucuggcugcugcagaaga

SEQ ID NO: 262083 - RNA, 32 nt, Homo Sapiens
ccugauguuuuaaaugugcuuucuuuuugaaa

SEQ ID NO: 262084 - RNA, 32 nt, Homo Sapiens
acuuuuuagaaaacuaaucuccuuuaucaucc

SEQ ID NO: 262085 - RNA, 30 nt, Homo Sapiens
ccgucaucuaaggcugugggucccguuacg

SEQ ID NO: 262086 - RNA, 32 nt, Homo Sapiens
aacccuccagcccugguccccagccccugcua

SEQ ID NO: 262087 - RNA, 32 nt, Homo Sapiens
gccccggcgccccgccccuccucgggacucga

SEQ ID NO: 262088 - RNA, 32 nt, Homo Sapiens
ucccagggccgggcuggaagggcggcggcggc

SEQ ID NO: 262089 - RNA, 32 nt, Homo Sapiens
uuuuuguuuuuaaauuuacaaaagcuaaaaag

SEQ ID NO: 262090 - RNA, 32 nt, Homo Sapiens
gcgcgcgccuguagcucgcgggccucgcaguu

SEQ ID NO: 262091 - RNA, 32 nt, Homo Sapiens
uuagaaucgcggagugcugugcaucgucauuu

SEQ ID NO: 262092 - RNA, 32 nt, Homo Sapiens
agcggcuccacuacagacccagccccagguuc

SEQ ID NO: 262093 - RNA, 32 nt, Homo Sapiens
gacaaagggaagcgaagccggagcugcgggcg

SEQ ID NO: 262094 - RNA, 32 nt, Homo Sapiens
gacacaugccagggccaugucagacacagauu

SEQ ID NO: 262095 - RNA, 32 nt, Homo Sapiens
ggugcaggcauagcugccugcugcucuggcag

SEQ ID NO: 262096 - RNA, 32 nt, Homo Sapiens
gcugccucccagcagagggccccaggaucucc

SEQ ID NO: 262097 - RNA, 32 nt, Homo Sapiens
ugcagcccuucccagacacagaguucucauuc

SEQ ID NO: 262098 - RNA, 30 nt, Homo Sapiens
guacagcauaaaagaagaauguauauucaa

SEQ ID NO: 262099 - RNA, 32 nt, Homo Sapiens
acucauggcuuugucuucuugagugagguaug

SEQ ID NO: 262100 - RNA, 32 nt, Homo Sapiens
augguuugacaauaaauaauuugagcuguuga

SEQ ID NO: 262101 - RNA, 32 nt, Homo Sapiens
agcuugugggguuuaaauuuaguguacaaaug

SEQ ID NO: 262102 - RNA, 32 nt, Homo Sapiens
cuggacgugcgcgcccaggccagugcugugag

SEQ ID NO: 262103 - RNA, 32 nt, Homo Sapiens
caacugaaacaaaaucuaugaaauaucagauu

SEQ ID NO: 262104 - RNA, 32 nt, Homo Sapiens
aucccaccuccgggcucuggguuccucugccc

SEQ ID NO: 262105 - RNA, 32 nt, Homo Sapiens
ugaauuacugucacucauuucuagguggucuu

SEQ ID NO: 262106 - RNA, 32 nt, Homo Sapiens
auauaacuuaaauaaacauccuuugaagcaaa

SEQ ID NO: 262107 - RNA, 32 nt, Homo Sapiens
acauucucauacauuuaacuuguaaaauagac

SEQ ID NO: 262108 - RNA, 32 nt, Homo Sapiens
uggaggccucucacccgcacagaucuccccug

SEQ ID NO: 262109 - RNA, 32 nt, Homo Sapiens
cgagacgcuccugggcugcgcgcgcuuuuggg

SEQ ID NO: 262110 - RNA, 32 nt, Homo Sapiens
uggauaugucauuucuguaagaguuuuguuaa

SEQ ID NO: 262111 - RNA, 32 nt, Homo Sapiens
cuggggcguccacaacucuaagucacagcccc

SEQ ID NO: 262112 - RNA, 32 nt, Homo Sapiens
caacacaccugaugucacuuugagccauauag

SEQ ID NO: 262113 - RNA, 32 nt, Homo Sapiens
cugccugggucucccgaguggcugggauuaua

SEQ ID NO: 262114 - RNA, 32 nt, Homo Sapiens
uguuagcucccuccauccucugcguaggccca

SEQ ID NO: 262115 - RNA, 32 nt, Homo Sapiens
uauuguauauauauuauaguucucuaauacac

SEQ ID NO: 262116 - RNA, 32 nt, Homo Sapiens
cgcuucccgagcuugggguaggcaauguaggc

SEQ ID NO: 262117 - RNA, 32 nt, Homo Sapiens
acccagaauucaauguuugauauuuuaagaau

SEQ ID NO: 262118 - RNA, 32 nt, Homo Sapiens
aauauaacaaagugagagaaauuuauauuacu

SEQ ID NO: 262119 - RNA, 32 nt, Homo Sapiens
cucccaggagggcuuugugucuggccagcuug

SEQ ID NO: 262120 - RNA, 32 nt, Homo Sapiens
ccagugcagaucuggagaggagcuggcccgga

SEQ ID NO: 262121 - RNA, 32 nt, Homo Sapiens
uuuaguauauuaagacaugcugauggaaacag

SEQ ID NO: 262122 - RNA, 32 nt, Homo Sapiens
uuuggcggaaauuuccccaucauucuaggaug

SEQ ID NO: 262123 - RNA, 32 nt, Homo Sapiens
aagaauuucaugugaauggggccagcaagagc

SEQ ID NO: 262124 - RNA, 32 nt, Homo Sapiens
ugcugagcgagcggagcgcucccgcggcccgg

SEQ ID NO: 262125 - RNA, 32 nt, Homo Sapiens
ggguaauuugguuuuuugguuuuuugggguuu

SEQ ID NO: 262126 - RNA, 32 nt, Homo Sapiens
uacagugucacaggugguggggaccaggggau

SEQ ID NO: 262127 - RNA, 32 nt, Homo Sapiens
gaaagggccaaacagugaguauuuucagcccu

SEQ ID NO: 262128 - RNA, 32 nt, Homo Sapiens
ucuucauuuacuaaaugauuguaaacuugagu

SEQ ID NO: 262129 - RNA, 32 nt, Homo Sapiens
aggcuggggggagaggcuccagacugggucuu

SEQ ID NO: 262130 - RNA, 32 nt, Homo Sapiens
ccagccccccucggcguccucucucgcggccg

SEQ ID NO: 262131 - RNA, 28 nt, Homo Sapiens
gcgggucugcggccgccgagaugggaag

SEQ ID NO: 262132 - RNA, 32 nt, Homo Sapiens
aggaucuugugccuggaaauagccugaggugg

SEQ ID NO: 262133 - RNA, 32 nt, Homo Sapiens
ccuggccuaauuccugaccccuccucaggucc

SEQ ID NO: 262134 - RNA, 32 nt, Homo Sapiens
cccaagcaccagggggaccccugucuuagauu

SEQ ID NO: 262135 - RNA, 32 nt, Homo Sapiens
gaaacauaagagcuuuuucacucuaaaaaucu

SEQ ID NO: 262136 - RNA, 32 nt, Homo Sapiens
cccccacagacccauccggcccgccccccaag

SEQ ID NO: 262137 - RNA, 32 nt, Homo Sapiens
accagccguaacuacagcuuuuauugauuuca

SEQ ID NO: 262138 - RNA, 29 nt, Homo Sapiens
agaggaugaccuuucaguuuaauuucacu

SEQ ID NO: 262139 - RNA, 32 nt, Homo Sapiens
ccuuucucuuucuuuccaacacuugcuacauu

SEQ ID NO: 262140 - RNA, 32 nt, Homo Sapiens
guuugggauuuuuauuuuuuacguguccgaag

SEQ ID NO: 262141 - RNA, 32 nt, Homo Sapiens
aagagagaggggccccggccugcucucccucc

SEQ ID NO: 262142 - RNA, 32 nt, Homo Sapiens
ggcccuggggacuguuggcugcucucccaagu

SEQ ID NO: 262143 - RNA, 32 nt, Homo Sapiens
uacugcacuccagccugggugacaagagugag

SEQ ID NO: 262144 - RNA, 32 nt, Homo Sapiens
cacccagcagugcagcaacuccucaucucucu

SEQ ID NO: 262145 - RNA, 32 nt, Homo Sapiens
aaaagaauuuaggaauacuaaggacaauuauu

SEQ ID NO: 262146 - RNA, 32 nt, Homo Sapiens
caugcuauuuaguuagcaucaguugucaccaa

SEQ ID NO: 262147 - RNA, 32 nt, Homo Sapiens
aaacgcagugggggaggcagggagucuggugc

SEQ ID NO: 262148 - RNA, 32 nt, Homo Sapiens
gaucugaugaauugguuuuugaaucccagaaa

SEQ ID NO: 262149 - RNA, 32 nt, Homo Sapiens
gaagaggucgcggggugagccucuuagcagga

SEQ ID NO: 262150 - RNA, 30 nt, Homo Sapiens
auugcaagacuugccaagaaucuugggauu

SEQ ID NO: 262151 - RNA, 32 nt, Homo Sapiens
uauuguguacaaccuuuaaaacaucaauguuu

SEQ ID NO: 262152 - RNA, 32 nt, Homo Sapiens
uagcacucuguggguacaaagcaccaugugca

SEQ ID NO: 262153 - RNA, 32 nt, Homo Sapiens
uauuagcaaagacaaaaacgcuaacauggaaa

SEQ ID NO: 262154 - RNA, 32 nt, Homo Sapiens
gugacagucacgggaccgcgaccaacucuguc

SEQ ID NO: 262155 - RNA, 32 nt, Homo Sapiens
uuauccauugauuuuuaacaugguucccacca

SEQ ID NO: 262156 - RNA, 32 nt, Homo Sapiens
uguuguacuuuugaauuuucugauugaauuac

SEQ ID NO: 262157 - RNA, 32 nt, Homo Sapiens
aacacagugugaauguuuccccucgugugagc

SEQ ID NO: 262158 - RNA, 32 nt, Homo Sapiens
ccuaaaccgacccacugcagacacaggcucug

SEQ ID NO: 262159 - RNA, 32 nt, Homo Sapiens
ucugccacagaaaaagcaucuuugaagacaaa

SEQ ID NO: 262160 - RNA, 32 nt, Homo Sapiens
acccuuccuaaaacuccucaaguucaucuggc

SEQ ID NO: 262161 - RNA, 32 nt, Homo Sapiens
uggcccuucugaagugccacuccacucuucca

SEQ ID NO: 262162 - RNA, 32 nt, Homo Sapiens
ggcauuccaaccuuauuaauggcugcuagcag

SEQ ID NO: 262163 - RNA, 32 nt, Homo Sapiens
gcagcuacaggagcuggaaaacaaagaucuuu

SEQ ID NO: 262164 - RNA, 32 nt, Homo Sapiens
gcuccgcgccccgaccccgccgccgcgccugc

SEQ ID NO: 262165 - RNA, 32 nt, Homo Sapiens
uaaagaucuuugcaugagguaaaucuacagca

SEQ ID NO: 262166 - RNA, 32 nt, Homo Sapiens
cuuccaggaggaggaccccccuggggagaagg

SEQ ID NO: 262167 - RNA, 32 nt, Homo Sapiens
aagaauacuacuuuuucuuguuggucuagcau

SEQ ID NO: 262168 - RNA, 32 nt, Homo Sapiens
ucccccuuacuacuccccaaccuugacuacca

SEQ ID NO: 262169 - RNA, 32 nt, Homo Sapiens
ucaagauccgagucuacccagcccuuguuaga

SEQ ID NO: 262170 - RNA, 32 nt, Homo Sapiens
gugaaagauugaagagcagguuccugucaaug

SEQ ID NO: 262171 - RNA, 32 nt, Homo Sapiens
cucuucucgucccuccuccccggagccggcac

SEQ ID NO: 262172 - RNA, 32 nt, Homo Sapiens
aaccugaccaaugaaaugugacccguggucaa

SEQ ID NO: 262173 - RNA, 32 nt, Homo Sapiens
caaagaccaaaaugaaaguuuuuuccucccug

SEQ ID NO: 262174 - RNA, 32 nt, Homo Sapiens
uguuuuguauaaaacuauuuuucauuacggag

SEQ ID NO: 262175 - RNA, 32 nt, Homo Sapiens
cauugccugcaccccaccccagccacucaacu

SEQ ID NO: 262176 - RNA, 32 nt, Homo Sapiens
agaagaugucauuguacacuuuauuucccuca

SEQ ID NO: 262177 - RNA, 32 nt, Homo Sapiens
cuuuugccuugaugaacguucuauguauuuca

SEQ ID NO: 262178 - RNA, 32 nt, Homo Sapiens
ucagaagaugacugauuuugaacaguuaaauc

SEQ ID NO: 262179 - RNA, 32 nt, Homo Sapiens
uuaaagaauuugaagucuaaaauauaaaagau

SEQ ID NO: 262180 - RNA, 32 nt, Homo Sapiens
ugcauuuucagcaaauuuuaaaacauuuuuag

SEQ ID NO: 262181 - RNA, 32 nt, Homo Sapiens
aggcggcggcggggcgagcugcagcgccggga

SEQ ID NO: 262182 - RNA, 32 nt, Homo Sapiens
augaaguuacaggcuagcacaauaccuaauuc

SEQ ID NO: 262183 - RNA, 32 nt, Homo Sapiens
uguuaguguuuaacaaacaaccccaaaacuug

SEQ ID NO: 262184 - RNA, 32 nt, Homo Sapiens
cauggcugaaguuggccaccuugcuugaggga

SEQ ID NO: 262185 - RNA, 32 nt, Homo Sapiens
aggaugugaggaacagaagggaagccagcgac

SEQ ID NO: 262186 - RNA, 32 nt, Homo Sapiens
ugucucaaaaauuuaaaaacugguccaggcgc

SEQ ID NO: 262187 - RNA, 30 nt, Homo Sapiens
uccugggcgcccgccgccugcauccugcuc

SEQ ID NO: 262188 - RNA, 32 nt, Homo Sapiens
uuguaugauuaaaaauaaauuucucagaauug

SEQ ID NO: 262189 - RNA, 32 nt, Homo Sapiens
cuuuuacuuaaauuauuuuauguaaaauaggg

SEQ ID NO: 262190 - RNA, 32 nt, Homo Sapiens
gcagaguugagugguugcaacacacacugaau

SEQ ID NO: 262191 - RNA, 32 nt, Homo Sapiens
ugcagagguuccugggggcguggcagggcugu

SEQ ID NO: 262192 - RNA, 32 nt, Homo Sapiens
uagcauucuuucuuguaucuccguugauucca

SEQ ID NO: 262193 - RNA, 32 nt, Homo Sapiens
ugccgucuggcucgcgagcgggacgcugugag

SEQ ID NO: 262194 - RNA, 32 nt, Homo Sapiens
ucagggugcugccugccuccagggaggcgacg

SEQ ID NO: 262195 - RNA, 32 nt, Homo Sapiens
uuauauguucuguauaauguucaguuuguaac

SEQ ID NO: 262196 - RNA, 32 nt, Homo Sapiens
cuugggcaggugguucugucucucugagccuc

SEQ ID NO: 262197 - RNA, 32 nt, Homo Sapiens
aaggucacagaaaucauuagguaaaggaaaac

SEQ ID NO: 262198 - RNA, 32 nt, Homo Sapiens
gaccucugccccagcccucuuucuucagcccu

SEQ ID NO: 262199 - RNA, 32 nt, Homo Sapiens
cuugcccaccugccugcccccgggcagcacgg

SEQ ID NO: 262200 - RNA, 32 nt, Homo Sapiens
uucuuccccuucccuggcccugcagggccuuc

SEQ ID NO: 262201 - RNA, 32 nt, Homo Sapiens
aagauggauguaaugcacuuugggaggccaag

SEQ ID NO: 262202 - RNA, 32 nt, Homo Sapiens
uucguuuuaaguguaauuccauaaugagcaga

SEQ ID NO: 262203 - RNA, 32 nt, Homo Sapiens
aacgugaagaucuagacuggacccugguuuga

SEQ ID NO: 262204 - RNA, 32 nt, Homo Sapiens
ugugcugggagcagcuucggacacauggaaau

SEQ ID NO: 262205 - RNA, 32 nt, Homo Sapiens
gaaaggggggaaaagaguaacuuuacagugga

SEQ ID NO: 262206 - RNA, 32 nt, Homo Sapiens
uuuuuaaauuuccauuugauaauauuucuaca

SEQ ID NO: 262207 - RNA, 32 nt, Homo Sapiens
cagacuuucuucacugucuuucauuuaaaaag

SEQ ID NO: 262208 - RNA, 32 nt, Homo Sapiens
aaacucauuuuuuuuuuuuuuagguggaguuu

SEQ ID NO: 262209 - RNA, 32 nt, Homo Sapiens
gcuccagggaaauuggaauuaauuaagaaauu

SEQ ID NO: 262210 - RNA, 32 nt, Homo Sapiens
acgcggguucccucgagcucgcuccgugggga

SEQ ID NO: 262211 - RNA, 32 nt, Homo Sapiens
uggcggcuggcugcgaccccccgggaaaucag

SEQ ID NO: 262212 - RNA, 32 nt, Homo Sapiens
aguuugguaauauuuuuuuucuuaaguuguac

SEQ ID NO: 262213 - RNA, 32 nt, Homo Sapiens
guaaaauacugaauaaaaaggcaugauuccug

SEQ ID NO: 262214 - RNA, 32 nt, Homo Sapiens
agcagccuucccagccgcuccucguggggggc

SEQ ID NO: 262215 - RNA, 32 nt, Homo Sapiens
uggacgcgcgcaaguucgucugcgaguaccgg

SEQ ID NO: 262216 - RNA, 32 nt, Homo Sapiens
ccccaagacaaaaacuaguucagaauuuaagg

SEQ ID NO: 262217 - RNA, 32 nt, Homo Sapiens
aacacauccuguuuccucucagcccccuccac

SEQ ID NO: 262218 - RNA, 32 nt, Homo Sapiens
uacagcacuuuaaaguuauauacucuauguuu

SEQ ID NO: 262219 - RNA, 32 nt, Homo Sapiens
ugugcauguuaaauuucuuucaaugcuuucaa

SEQ ID NO: 262220 - RNA, 32 nt, Homo Sapiens
agccacaguuucagacaaauguucagugugag

SEQ ID NO: 262221 - RNA, 32 nt, Homo Sapiens
gaauacuacuugccacauccacagcccaugcc

SEQ ID NO: 262222 - RNA, 32 nt, Homo Sapiens
aggaaugaaguacucauacauguuacaacacg

SEQ ID NO: 262223 - RNA, 32 nt, Homo Sapiens
gcaaccuccgccuccaggguucgggcaauucu

SEQ ID NO: 262224 - RNA, 32 nt, Homo Sapiens
uguguuguuguucggcggcggcggcggcggua

SEQ ID NO: 262225 - RNA, 32 nt, Homo Sapiens
auuauggcuacuaccaauggauugauucucuu

SEQ ID NO: 262226 - RNA, 32 nt, Homo Sapiens
cuguauagcaaccuauuuugacugcuucacgg

SEQ ID NO: 262227 - RNA, 32 nt, Homo Sapiens
auguagugaucuuuuuacugugaccacuugua

SEQ ID NO: 262228 - RNA, 32 nt, Homo Sapiens
acaaagaaaaaguuuugaguuuuguauuuucu

SEQ ID NO: 262229 - RNA, 32 nt, Homo Sapiens
cccugugguggggcucccugcacucugguguu

SEQ ID NO: 262230 - RNA, 32 nt, Homo Sapiens
cguugaacuguguuuccuuucccugggcgcag

SEQ ID NO: 262231 - RNA, 32 nt, Homo Sapiens
cugcgcgcaccucggaccuucaccacccgccc

SEQ ID NO: 262232 - RNA, 32 nt, Homo Sapiens
uccaaacucuccagccacucucuucuacgcug

SEQ ID NO: 262233 - RNA, 32 nt, Homo Sapiens
uuaacugaaaagcuuaaaauaaauuuccgaau

SEQ ID NO: 262234 - RNA, 32 nt, Homo Sapiens
uguaauuuaauucaaugcaucauuuuauugua

SEQ ID NO: 262235 - RNA, 32 nt, Homo Sapiens
cucuugcacugguauugaucuugaaccucuau

SEQ ID NO: 262236 - RNA, 32 nt, Homo Sapiens
cacgagagcugauggcacuaacacuggguuuc

SEQ ID NO: 262237 - RNA, 32 nt, Homo Sapiens
cgccuguaaucccagcacuuugggaggccuag

SEQ ID NO: 262238 - RNA, 32 nt, Homo Sapiens
uucuuccugugcugcacagcuuggagaugggc

SEQ ID NO: 262239 - RNA, 32 nt, Homo Sapiens
cccgagaacccgcucugucccgagggcagcua

SEQ ID NO: 262240 - RNA, 32 nt, Homo Sapiens
aucuuaaucuucaaguuaccauauuuuccaaa

SEQ ID NO: 262241 - RNA, 32 nt, Homo Sapiens
cauuuggaaaagacagaaaacuaaaaaggaag

SEQ ID NO: 262242 - RNA, 32 nt, Homo Sapiens
ucuuccgcagacuuggucaucgaccuauuuuu

SEQ ID NO: 262243 - RNA, 32 nt, Homo Sapiens
ggcuggucccuccuccacuccuccccuauaaa

SEQ ID NO: 262244 - RNA, 32 nt, Homo Sapiens
gagauuuaagacaaaggguggcggugguuccu

SEQ ID NO: 262245 - RNA, 32 nt, Homo Sapiens
aucugcaauauuuggaacaccaauggaggucu

SEQ ID NO: 262246 - RNA, 32 nt, Homo Sapiens
cuuuuauacuauuucuuuauggucgauauaca

SEQ ID NO: 262247 - RNA, 32 nt, Homo Sapiens
ccccagaggcggaugggccaggccgcugcaca

SEQ ID NO: 262248 - RNA, 32 nt, Homo Sapiens
cggucuucugucuugugaauuauuuaaaguaa

SEQ ID NO: 262249 - RNA, 30 nt, Homo Sapiens
gaacggcuggacugccugccggcuuaggga

SEQ ID NO: 262250 - RNA, 32 nt, Homo Sapiens
aagaagugcaugucaucccuugauaugucugc

SEQ ID NO: 262251 - RNA, 32 nt, Homo Sapiens
uacucaugucauccucaaugcaucauaaaugc

SEQ ID NO: 262252 - RNA, 32 nt, Homo Sapiens
caauucagugauugauagcaauuuacauuaau

SEQ ID NO: 262253 - RNA, 32 nt, Homo Sapiens
aguuggaaaaaguugccuuaauguuugaaaug

SEQ ID NO: 262254 - RNA, 31 nt, Homo Sapiens
acuugucaggcauggcucagagcuugaagau

SEQ ID NO: 262255 - RNA, 32 nt, Homo Sapiens
caaaauugguuguaaucaaauuuuaaaauaau

SEQ ID NO: 262256 - RNA, 32 nt, Homo Sapiens
ggcggcagcgcgcguggaggcggcacuucgcg

SEQ ID NO: 262257 - RNA, 32 nt, Homo Sapiens
ucccaucucacacaugagcaucaggccaggcc

SEQ ID NO: 262258 - RNA, 32 nt, Homo Sapiens
uuaucaucaauagauggcuauggaucaagcau

SEQ ID NO: 262259 - RNA, 32 nt, Homo Sapiens
cgugggaccugccagugcucuguuucccugcc

SEQ ID NO: 262260 - RNA, 32 nt, Homo Sapiens
aagggguauuuuucgucagccaagauggguuc

SEQ ID NO: 262261 - RNA, 32 nt, Homo Sapiens
ugugaugcgcgcuuuguugaaugugugucucg

SEQ ID NO: 262262 - RNA, 32 nt, Homo Sapiens
uggaaucuguuguuggcuucagagccaguggu

SEQ ID NO: 262263 - RNA, 32 nt, Homo Sapiens
aaggcucuguucuccccuccccguguacauau

SEQ ID NO: 262264 - RNA, 32 nt, Homo Sapiens
uucacugccugccagguuguguugggguggca

SEQ ID NO: 262265 - RNA, 32 nt, Homo Sapiens
agaucacaaucccaccugaggacaggauccgc

SEQ ID NO: 262266 - RNA, 32 nt, Homo Sapiens
guggucagagcgagucucggagaagauguggu

SEQ ID NO: 262267 - RNA, 32 nt, Homo Sapiens
gccccaggcccuguagagagcaggcagccacc

SEQ ID NO: 262268 - RNA, 32 nt, Homo Sapiens
cugaggaggggagaggugggccguaacgggca

SEQ ID NO: 262269 - RNA, 32 nt, Homo Sapiens
cuugccccugcugcugccccgagggcugcccu

SEQ ID NO: 262270 - RNA, 32 nt, Homo Sapiens
agggagaacaaggccuuugcuguuguggauag

SEQ ID NO: 262271 - RNA, 32 nt, Homo Sapiens
ccgucacaccucaggcgugugcggggcgggga

SEQ ID NO: 262272 - RNA, 32 nt, Homo Sapiens
gucuuccuguucugaccccccaucacugcucg

SEQ ID NO: 262273 - RNA, 32 nt, Homo Sapiens
cuuguuugauaaaaaaguaaaccuguuuugca

SEQ ID NO: 262274 - RNA, 32 nt, Homo Sapiens
gacccucgcccggcggcucagaaaggcgggaa

SEQ ID NO: 262275 - RNA, 32 nt, Homo Sapiens
cuuguauuuauuauuuugaagaguguuuuaau

SEQ ID NO: 262276 - RNA, 32 nt, Homo Sapiens
acucaaucuugccugccuucugggagcucuag

SEQ ID NO: 262277 - RNA, 32 nt, Homo Sapiens
ucacugcugcaaauacuguauauucaggacuu

SEQ ID NO: 262278 - RNA, 32 nt, Homo Sapiens
cagccugugagaggcaguuggugcuggcagua

SEQ ID NO: 262279 - RNA, 32 nt, Homo Sapiens
ccccaugaggacccucaggcccggggcgagag

SEQ ID NO: 262280 - RNA, 32 nt, Homo Sapiens
aucagcaaaaugucagaaugggacuuucuagc

SEQ ID NO: 262281 - RNA, 32 nt, Homo Sapiens
cguuguccgugauaaaaguacaagugccccuc

SEQ ID NO: 262282 - RNA, 32 nt, Homo Sapiens
gccugcgguuccuccuggccccaaggcaccgc

SEQ ID NO: 262283 - RNA, 32 nt, Homo Sapiens
uggguuuaugcagaucucuacugccagaacau

SEQ ID NO: 262284 - RNA, 32 nt, Homo Sapiens
auuagagagauuaugcuauauuauggaaaaac

SEQ ID NO: 262285 - RNA, 32 nt, Homo Sapiens
ggccggcccacccagccacccaggguggggaa

SEQ ID NO: 262286 - RNA, 32 nt, Homo Sapiens
ucaucaucugaucucugcuggaucuacagaca

SEQ ID NO: 262287 - RNA, 32 nt, Homo Sapiens
auuccccgggagagaggacgaagcgaggagag

SEQ ID NO: 262288 - RNA, 32 nt, Homo Sapiens
ccaccguacccagccuaucuuuuugauacuuu

SEQ ID NO: 262289 - RNA, 32 nt, Homo Sapiens
agugcaguggggaagagggaaugcuagguuga

SEQ ID NO: 262290 - RNA, 32 nt, Homo Sapiens
aaugaggaaaaaacuuuuaauguucuuuucua

SEQ ID NO: 262291 - RNA, 32 nt, Homo Sapiens
guggccaggggcccccaaacccggggccgcag

SEQ ID NO: 262292 - RNA, 32 nt, Homo Sapiens
cgcucacugcccagccggggccccgggagccu

SEQ ID NO: 262293 - RNA, 32 nt, Homo Sapiens
uaggcagcaguuccuuaguuuacauauguuug

SEQ ID NO: 262294 - RNA, 32 nt, Homo Sapiens
gaugccgcggggugggggcugccuguaaauga

SEQ ID NO: 262295 - RNA, 32 nt, Homo Sapiens
agaagaccaagagcuuuacuaucgaugcuuag

SEQ ID NO: 262296 - RNA, 32 nt, Homo Sapiens
cagggaugguccugccaugaggaggcugcaac

SEQ ID NO: 262297 - RNA, 32 nt, Homo Sapiens
ggaugcacauauacacauuuucaaggacuauu

SEQ ID NO: 262298 - RNA, 32 nt, Homo Sapiens
cuggccucaagagcucccugggcucuccuguu

SEQ ID NO: 262299 - RNA, 32 nt, Homo Sapiens
cgcacccccacuuucgccuccuccagcuccug

SEQ ID NO: 262300 - RNA, 32 nt, Homo Sapiens
cugcuggguggggacagaagcugcaggggaga

SEQ ID NO: 262301 - RNA, 32 nt, Homo Sapiens
uuugaucugaagacuaggggacaauggauauc

SEQ ID NO: 262302 - RNA, 32 nt, Homo Sapiens
gcauuuguuuuguuuucauaauaaaaagcaaa

SEQ ID NO: 262303 - RNA, 32 nt, Homo Sapiens
aaguuuauacugcauuuggggcuguaucuuuu

SEQ ID NO: 262304 - RNA, 32 nt, Homo Sapiens
ccucggcuccagcccccggcgccugccgccuc

SEQ ID NO: 262305 - RNA, 32 nt, Homo Sapiens
guacguuccuuuucuuuuuuggacucugagua

SEQ ID NO: 262306 - RNA, 31 nt, Homo Sapiens
gcggcgaggguagccaugacggccuccgugc

SEQ ID NO: 262307 - RNA, 32 nt, Homo Sapiens
gccccuucucgcgcgcgggcgguuugugugau

SEQ ID NO: 262308 - RNA, 32 nt, Homo Sapiens
ccuuucuucuucgacuggggucgggcaggagu

SEQ ID NO: 262309 - RNA, 32 nt, Homo Sapiens
uugaauucuggugagggacguuguaguuggcg

SEQ ID NO: 262310 - RNA, 32 nt, Homo Sapiens
gagccugacuccucacccacuccaagagacug

SEQ ID NO: 262311 - RNA, 32 nt, Homo Sapiens
caggaaaagcaucccggaggaggaagaagaag

SEQ ID NO: 262312 - RNA, 29 nt, Homo Sapiens
acaugcauauguacuacagagggauuuuu

SEQ ID NO: 262313 - RNA, 32 nt, Homo Sapiens
acugacucaaaucgugagccaauauaaaaugu

SEQ ID NO: 262314 - RNA, 32 nt, Homo Sapiens
gccccuggagggccuggcauguuugcccugcu

SEQ ID NO: 262315 - RNA, 32 nt, Homo Sapiens
agccccuuaggacgcgggucuccuugggcucc

SEQ ID NO: 262316 - RNA, 32 nt, Homo Sapiens
agagacuggcagacugccucagggccuggacu

SEQ ID NO: 262317 - RNA, 31 nt, Homo Sapiens
ggaccuuuguuacucuucugaguuagaaaaa

SEQ ID NO: 262318 - RNA, 32 nt, Homo Sapiens
guuuggaagcucuggaaccaucccggacucgc

SEQ ID NO: 262319 - RNA, 32 nt, Homo Sapiens
uuguuguugcuguugauauuuauuucaugaua

SEQ ID NO: 262320 - RNA, 32 nt, Homo Sapiens
aguguuuuuccauuguauuucauuugcaaaag

SEQ ID NO: 262321 - RNA, 32 nt, Homo Sapiens
aaaguuugcccccaccucacauaggacccgga

SEQ ID NO: 262322 - RNA, 32 nt, Homo Sapiens
ccaaauaagaaaccuaaaauaauugguucuug

SEQ ID NO: 262323 - RNA, 32 nt, Homo Sapiens
gguggaggguagcccuggggccccucgacauc

SEQ ID NO: 262324 - RNA, 32 nt, Homo Sapiens
aauaucagcaaguuucacacugagagagaaau

SEQ ID NO: 262325 - RNA, 32 nt, Homo Sapiens
auuucagcauuaacccaaaaguccacagucca

SEQ ID NO: 262326 - RNA, 31 nt, Homo Sapiens
ucuuguuauugcaucugcugaguuaauaaau

SEQ ID NO: 262327 - RNA, 32 nt, Homo Sapiens
uauauuccaaaauauauauugagauaaaugaa

SEQ ID NO: 262328 - RNA, 32 nt, Homo Sapiens
agccagcgaagagcuuggcugcugcguccagg

SEQ ID NO: 262329 - RNA, 32 nt, Homo Sapiens
uggccuucccagcugacauggaccucagguca

SEQ ID NO: 262330 - RNA, 32 nt, Homo Sapiens
ggaucucccucccgggcccacccagcugccca

SEQ ID NO: 262331 - RNA, 32 nt, Homo Sapiens
cccaggccagcccaccccggcggaccgggccc

SEQ ID NO: 262332 - RNA, 32 nt, Homo Sapiens
cuguugccgugagaccacggacaccaaagagg

SEQ ID NO: 262333 - RNA, 32 nt, Homo Sapiens
acaagacagccuacuucauaaaaaccccacag

SEQ ID NO: 262334 - RNA, 32 nt, Homo Sapiens
gugcccaccuucucucccuccucccgacccgc

SEQ ID NO: 262335 - RNA, 32 nt, Homo Sapiens
ugacucauaaaacugaucugauuccuucagcc

SEQ ID NO: 262336 - RNA, 32 nt, Homo Sapiens
acuugaauauuuaugauucuuaauagauuauu

SEQ ID NO: 262337 - RNA, 32 nt, Homo Sapiens
cuccaccgcggcgagaggcaugggcacguggc

SEQ ID NO: 262338 - RNA, 32 nt, Homo Sapiens
gaugaauuuccacuuccaaagucugucauugg

SEQ ID NO: 262339 - RNA, 32 nt, Homo Sapiens
agugaugagaucuggcucuggccgagggcgag

SEQ ID NO: 262340 - RNA, 32 nt, Homo Sapiens
ccuucuuacugccugccuuccacaaucauggc

SEQ ID NO: 262341 - RNA, 32 nt, Homo Sapiens
gggagaggacggguggauaagaguccaguggg

SEQ ID NO: 262342 - RNA, 32 nt, Homo Sapiens
aaccagacccgcuuggaggccacagccccgac

SEQ ID NO: 262343 - RNA, 32 nt, Homo Sapiens
ucccccgcugggugcccggccuggaacacagg

SEQ ID NO: 262344 - RNA, 32 nt, Homo Sapiens
cggcgccucccgccgcgcccgggauguauucg

SEQ ID NO: 262345 - RNA, 32 nt, Homo Sapiens
gcuuaagaucacaggcuuagugugaggacgag

SEQ ID NO: 262346 - RNA, 32 nt, Homo Sapiens
auaugagguucaggagauagguucaggauaaa

SEQ ID NO: 262347 - RNA, 32 nt, Homo Sapiens
cgccugaaaucucagcacuuugguaggccgaa

SEQ ID NO: 262348 - RNA, 32 nt, Homo Sapiens
gucucaugccagcagcacgucgccauccguca

SEQ ID NO: 262349 - RNA, 32 nt, Homo Sapiens
aagauaagaagugguaccaguucugcaaccag

SEQ ID NO: 262350 - RNA, 32 nt, Homo Sapiens
aacgaggaggucgcugcuaugauccgggcugg

SEQ ID NO: 262351 - RNA, 32 nt, Homo Sapiens
ggagagaggaggggcugcuggacccaaggcuc

SEQ ID NO: 262352 - RNA, 32 nt, Homo Sapiens
aggcuggcagaugcgcguggugcggcugcugc

SEQ ID NO: 262353 - RNA, 32 nt, Homo Sapiens
cucccucccuccccaguguuuuugcaggugag

SEQ ID NO: 262354 - RNA, 32 nt, Homo Sapiens
aagaugcaaggaccaggacucccuccucaccu

SEQ ID NO: 262355 - RNA, 32 nt, Homo Sapiens
acgagcugcccacguccucuccaggaagggac

SEQ ID NO: 262356 - RNA, 32 nt, Homo Sapiens
ggccggcagcccugggguggcggcgggcagag

SEQ ID NO: 262357 - RNA, 32 nt, Homo Sapiens
cucugggcuggcucugcacgggccugccaugc

SEQ ID NO: 262358 - RNA, 32 nt, Homo Sapiens
auuugaggccagggggagagccaggcucuaug

SEQ ID NO: 262359 - RNA, 32 nt, Homo Sapiens
ugcacuagucacuggaggaagagguaggucug

SEQ ID NO: 262360 - RNA, 32 nt, Homo Sapiens
ucccucccugaacuugcaguaaggucagcuuc

SEQ ID NO: 262361 - RNA, 32 nt, Homo Sapiens
gcagguggugagcggcuggggagggccaggac

SEQ ID NO: 262362 - RNA, 32 nt, Homo Sapiens
gggggcuguuccggcagagcccggugaagacc

SEQ ID NO: 262363 - RNA, 32 nt, Homo Sapiens
cacugucuccuggucugugcugcccugcucug

SEQ ID NO: 262364 - RNA, 32 nt, Homo Sapiens
agccagugccuugcucuuggacuucccagccc

SEQ ID NO: 262365 - RNA, 32 nt, Homo Sapiens
aaaaccacagaaaacaagggaagugaagaggu

SEQ ID NO: 262366 - RNA, 32 nt, Homo Sapiens
ugucugcauggcagaagcgucucccuuggcca

SEQ ID NO: 262367 - RNA, 32 nt, Homo Sapiens
uuaucaucuuuuacuucaguauuuccacaaau

SEQ ID NO: 262368 - RNA, 32 nt, Homo Sapiens
gugaauaaaaauugaugagaguguuaaaaaaa

SEQ ID NO: 262369 - RNA, 32 nt, Homo Sapiens
uuugagugcugcuuucuggggucaggucuccg

SEQ ID NO: 262370 - RNA, 32 nt, Homo Sapiens
gaacccucacaucccucuuuccagguccucac

SEQ ID NO: 262371 - RNA, 32 nt, Homo Sapiens
aagaaaucaaggaaaauaacagacuuccacag

SEQ ID NO: 262372 - RNA, 32 nt, Homo Sapiens
ggagggaggggccggguccgcggccggcgaac

SEQ ID NO: 262373 - RNA, 32 nt, Homo Sapiens
cucugccccccgcucuccuugcuugaguggug

SEQ ID NO: 262374 - RNA, 32 nt, Homo Sapiens
guacacucuugcugucugucuuucuugccuuc

SEQ ID NO: 262375 - RNA, 32 nt, Homo Sapiens
aaaccuuuguuugagacucuuauuuaaugggc

SEQ ID NO: 262376 - RNA, 32 nt, Homo Sapiens
gcggccgcucuccccccuccccgacacacacu

SEQ ID NO: 262377 - RNA, 32 nt, Homo Sapiens
auaaggagaaaacauuuaggauuugcagauaa

SEQ ID NO: 262378 - RNA, 32 nt, Homo Sapiens
ccgcugugcucgcgaccccggcuccgggccuc

SEQ ID NO: 262379 - RNA, 32 nt, Homo Sapiens
acaaagaaaugucuauuuuucuuuguucccaa

SEQ ID NO: 262380 - RNA, 32 nt, Homo Sapiens
ccucugccugacggugcccgagccuagcgcgg

SEQ ID NO: 262381 - RNA, 32 nt, Homo Sapiens
ugggcuuuucacuggaggauaaaagccggugc

SEQ ID NO: 262382 - RNA, 32 nt, Homo Sapiens
aauaaucucaauuucggagguuucacaaaaug

SEQ ID NO: 262383 - RNA, 32 nt, Homo Sapiens
ggacaugcgugaaauggguccugcgccguaau

SEQ ID NO: 262384 - RNA, 32 nt, Homo Sapiens
cccugccgcgcgcccucgcgccuguccacauc

SEQ ID NO: 262385 - RNA, 32 nt, Homo Sapiens
uugaaagaaaucagagaugacacauaaaugga

SEQ ID NO: 262386 - RNA, 32 nt, Homo Sapiens
agagggggagaauuguuccuucugcuuuccua

SEQ ID NO: 262387 - RNA, 32 nt, Homo Sapiens
cacccagggacaccccacggcuccucccugcc

SEQ ID NO: 262388 - RNA, 32 nt, Homo Sapiens
gaaguaucugucucauccaaaaagucugagcg

SEQ ID NO: 262389 - RNA, 32 nt, Homo Sapiens
ugaggaggccaaguacaaguugugaaagugag

SEQ ID NO: 262390 - RNA, 32 nt, Homo Sapiens
cugcuuagaaugccuuacuugauaccugguag

SEQ ID NO: 262391 - RNA, 32 nt, Homo Sapiens
aaaccauuuauuccuuuuuucauaagaauaau

SEQ ID NO: 262392 - RNA, 28 nt, Homo Sapiens
gucacauguuuaaaaauguguuuuuuag

SEQ ID NO: 262393 - RNA, 32 nt, Homo Sapiens
uccugugcccucggcccggacuucagacugca

SEQ ID NO: 262394 - RNA, 32 nt, Homo Sapiens
gugaaagagcagguuuucaaugcggaugagac

SEQ ID NO: 262395 - RNA, 32 nt, Homo Sapiens
ggaguagauacuggucugugauugguggaaug

SEQ ID NO: 262396 - RNA, 32 nt, Homo Sapiens
ccaaagcuaaccucagcaugcucaaaaggaag

SEQ ID NO: 262397 - RNA, 32 nt, Homo Sapiens
ugacaucuggacuggauuuaugcuugaugcau

SEQ ID NO: 262398 - RNA, 32 nt, Homo Sapiens
ggaaaauucucuucuucagaauuucugaauag

SEQ ID NO: 262399 - RNA, 32 nt, Homo Sapiens
gggacccccucgcggcuccggguggucuacga

SEQ ID NO: 262400 - RNA, 32 nt, Homo Sapiens
cuucccaucuucugugcuuccagagaacaacu

SEQ ID NO: 262401 - RNA, 32 nt, Homo Sapiens
agggguagcucuugauuuuguuaacauuaaga

SEQ ID NO: 262402 - RNA, 32 nt, Homo Sapiens
cggccacaccgccggacgaugcgcgcccgcgg

SEQ ID NO: 262403 - RNA, 32 nt, Homo Sapiens
gggaccaugcuucauucguggcugugucccca

SEQ ID NO: 262404 - RNA, 32 nt, Homo Sapiens
cuggcugaguggcuuuaucaccaccgagugau

SEQ ID NO: 262405 - RNA, 32 nt, Homo Sapiens
ccuuuuuugucaaccccaucuguagccucuuc

SEQ ID NO: 262406 - RNA, 32 nt, Homo Sapiens
uuuuugagugaauuuuaacugcucugaacuaa

SEQ ID NO: 262407 - RNA, 32 nt, Homo Sapiens
aguuuguguacaaauguaauuauguucauugu

SEQ ID NO: 262408 - RNA, 32 nt, Homo Sapiens
ucagccccacuccuguucugcaacugucccca

SEQ ID NO: 262409 - RNA, 32 nt, Homo Sapiens
gagagggcacagauugcagagguaaugcugug

SEQ ID NO: 262410 - RNA, 32 nt, Homo Sapiens
aguucacccugcagaguauuaagguuucugga

SEQ ID NO: 262411 - RNA, 32 nt, Homo Sapiens
uucucggccgccagcccuccacaccucaucug

SEQ ID NO: 262412 - RNA, 32 nt, Homo Sapiens
ccgcagccacuaccaagggccuugcgacugac

SEQ ID NO: 262413 - RNA, 32 nt, Homo Sapiens
agucccugcccccuccccuucacaccauaacu

SEQ ID NO: 262414 - RNA, 32 nt, Homo Sapiens
cucuccgccccgcuccugcuccuaccugcagc

SEQ ID NO: 262415 - RNA, 32 nt, Homo Sapiens
auuuaucugaagaguuucuccucauugugaau

SEQ ID NO: 262416 - RNA, 32 nt, Homo Sapiens
uguagcauuguccagggccguuguguagauau

SEQ ID NO: 262417 - RNA, 32 nt, Homo Sapiens
aaguguggacuuccagauuuugugcagauuau

SEQ ID NO: 262418 - RNA, 32 nt, Homo Sapiens
ggccccucgccgugcuggcccugaccuggcuc

SEQ ID NO: 262419 - RNA, 32 nt, Homo Sapiens
gagguaaauguuuugucuuuuacuuaagggua

SEQ ID NO: 262420 - RNA, 32 nt, Homo Sapiens
acuaaagaacucuccuauucauggaggcgaac

SEQ ID NO: 262421 - RNA, 32 nt, Homo Sapiens
gccuucuucacuaagacuuuguauucaacuua

SEQ ID NO: 262422 - RNA, 32 nt, Homo Sapiens
caacucgcgagcaaaguuugguggaggcaacg

SEQ ID NO: 262423 - RNA, 32 nt, Homo Sapiens
acugggacuggcucauccaccuaugugcggga

SEQ ID NO: 262424 - RNA, 32 nt, Homo Sapiens
ccccggguucacgagcugcccacguccucucc

SEQ ID NO: 262425 - RNA, 31 nt, Homo Sapiens
gaccccuggugcucucugccccgcugccugg

SEQ ID NO: 262426 - RNA, 28 nt, Homo Sapiens
uaauggcggcggccgccugaggcgggcg

SEQ ID NO: 262427 - RNA, 32 nt, Homo Sapiens
cgagcgcccccucccucccaaucggaggaacc

SEQ ID NO: 262428 - RNA, 32 nt, Homo Sapiens
ugcccaguguuaggaagugcaucaugauccag

SEQ ID NO: 262429 - RNA, 32 nt, Homo Sapiens
ucucaaauagguagaauucauaguucaagacc

SEQ ID NO: 262430 - RNA, 32 nt, Homo Sapiens
cuauuguaaaauuuaaaagaaauauuuauaua

SEQ ID NO: 262431 - RNA, 32 nt, Homo Sapiens
ccaugccucccgcuccacucgcuuuggaaccc

SEQ ID NO: 262432 - RNA, 32 nt, Homo Sapiens
ggcuaaguugucuacagcuaaugauugugucu

SEQ ID NO: 262433 - RNA, 32 nt, Homo Sapiens
uagaugcuugaugaaaucacaaguccuaccac

SEQ ID NO: 262434 - RNA, 32 nt, Homo Sapiens
caccagagugccucugagcagcucacagugug

SEQ ID NO: 262435 - RNA, 32 nt, Homo Sapiens
auuccaaaaugcugcaauguagcugauuuccu

SEQ ID NO: 262436 - RNA, 32 nt, Homo Sapiens
gugggggacagagggaccuuuaaagaaaacaa

SEQ ID NO: 262437 - RNA, 32 nt, Homo Sapiens
uuaagucuauuuccuuuuaaucuaauaagagu

SEQ ID NO: 262438 - RNA, 32 nt, Homo Sapiens
gagacagucucccuaugucacccaggcugugg

SEQ ID NO: 262439 - RNA, 32 nt, Homo Sapiens
guccaaauucuuguuuuaaaucuuacaccuga

SEQ ID NO: 262440 - RNA, 32 nt, Homo Sapiens
aucacugggaaagaacucccccugcaaaccag

SEQ ID NO: 262441 - RNA, 32 nt, Homo Sapiens
auuaaagguguuauucuuucugguugugagau

SEQ ID NO: 262442 - RNA, 32 nt, Homo Sapiens
agccucacuaauggaaaaguaguaugaugaac

SEQ ID NO: 262443 - RNA, 32 nt, Homo Sapiens
acuuauuuuccacaggugguuaccugggaggc

SEQ ID NO: 262444 - RNA, 32 nt, Homo Sapiens
ccccuccaaagccccaccuuuaaguccucucu

SEQ ID NO: 262445 - RNA, 32 nt, Homo Sapiens
gcagcuguuugcugacagaugcuugagauguu

SEQ ID NO: 262446 - RNA, 32 nt, Homo Sapiens
gcaugagcuccgccccugcugcugccuguagc

SEQ ID NO: 262447 - RNA, 29 nt, Homo Sapiens
ucccuuuauaguuucucuauaaaaacugg

SEQ ID NO: 262448 - RNA, 32 nt, Homo Sapiens
uuguauuuacuacuuuucucuuuuucuugugu

SEQ ID NO: 262449 - RNA, 32 nt, Homo Sapiens
agacagaggagaagcuguuugaugcccccuug

SEQ ID NO: 262450 - RNA, 32 nt, Homo Sapiens
uggaaagaacaucaguugcagaugugaccccu

SEQ ID NO: 262451 - RNA, 32 nt, Homo Sapiens
uuuagcugacuuucccagggucguuggcaaau

SEQ ID NO: 262452 - RNA, 32 nt, Homo Sapiens
aaaauuacuaccagagccguuacuacacacaa

SEQ ID NO: 262453 - RNA, 32 nt, Homo Sapiens
gcauaaguaauucaaauacugcuuauaauuuu

SEQ ID NO: 262454 - RNA, 32 nt, Homo Sapiens
ccagaaaaggccaauuuuaacacaugcacuga

SEQ ID NO: 262455 - RNA, 32 nt, Homo Sapiens
aacucuuuucuauuuuguuuuuuaaguaagac

SEQ ID NO: 262456 - RNA, 32 nt, Homo Sapiens
cagggaaugcccuucacucuguaggugcucga

SEQ ID NO: 262457 - RNA, 32 nt, Homo Sapiens
ucugagguuuggagauuaagcggguucugugc

SEQ ID NO: 262458 - RNA, 32 nt, Homo Sapiens
cccucaauuaccuaaucuuaugcuuuaacaca

SEQ ID NO: 262459 - RNA, 32 nt, Homo Sapiens
uccauuucuagcauauggacaccuggccucug

SEQ ID NO: 262460 - RNA, 32 nt, Homo Sapiens
ccaugucuuacauccaggucauacugaugcaa

SEQ ID NO: 262461 - RNA, 32 nt, Homo Sapiens
gagcugggccuggccucccagcccccggaggg

SEQ ID NO: 262462 - RNA, 32 nt, Homo Sapiens
uccugccaccuccugagcugccuucccgccug

SEQ ID NO: 262463 - RNA, 32 nt, Homo Sapiens
acuuuagggaguuuucuggcuaugaagcaccu

SEQ ID NO: 262464 - RNA, 32 nt, Homo Sapiens
acugcccucuuguggugcauugaaagaagaga

SEQ ID NO: 262465 - RNA, 32 nt, Homo Sapiens
cgggacugggcgcugcggccucguccgcgcgc

SEQ ID NO: 262466 - RNA, 32 nt, Homo Sapiens
uuuccuuccuucccucagucucaaagucaccu

SEQ ID NO: 262467 - RNA, 32 nt, Homo Sapiens
ggcacgagggccgccuccccggaccgaggcag

SEQ ID NO: 262468 - RNA, 32 nt, Homo Sapiens
uauuuccacuaaaaauauuguuucugcauuca

SEQ ID NO: 262469 - RNA, 32 nt, Homo Sapiens
gcggccgcgucgaccggcgcggcuggagcgca

SEQ ID NO: 262470 - RNA, 32 nt, Homo Sapiens
guggauacuuuauuuucuuuuauauuucuaua

SEQ ID NO: 262471 - RNA, 32 nt, Homo Sapiens
ggaugcaucauuccuguguguuacaguauuau

SEQ ID NO: 262472 - RNA, 32 nt, Homo Sapiens
cacuuguacauuuuuuaauacucugauucugu

SEQ ID NO: 262473 - RNA, 32 nt, Homo Sapiens
uccugguggagcccgaggauguguacaucguc

SEQ ID NO: 262474 - RNA, 32 nt, Homo Sapiens
ugaaaaucauaucaaaaguauguuguuucagg

SEQ ID NO: 262475 - RNA, 32 nt, Homo Sapiens
cgguugcaaauuguggcaaggcaggugcgagg

SEQ ID NO: 262476 - RNA, 32 nt, Homo Sapiens
aaaucaagaacuaugauauuuuucuguuuaaa

SEQ ID NO: 262477 - RNA, 32 nt, Homo Sapiens
ccccuccugugcccucugcccugguggaagcg

SEQ ID NO: 262478 - RNA, 32 nt, Homo Sapiens
cuguguuggauuggggcccacccugcuccagc

SEQ ID NO: 262479 - RNA, 32 nt, Homo Sapiens
uaaagcugucuccaaggcagugauucuuaccc

SEQ ID NO: 262480 - RNA, 32 nt, Homo Sapiens
gaguccaacgaccuucccaaaaugguucuuag

SEQ ID NO: 262481 - RNA, 32 nt, Homo Sapiens
cgugcguccugucuccuuccaggcugugggcc

SEQ ID NO: 262482 - RNA, 32 nt, Homo Sapiens
uaggggcccaggggcaauuuucccucugaaua

SEQ ID NO: 262483 - RNA, 32 nt, Homo Sapiens
agcagggccucgugccccggcgcuccaggccg

SEQ ID NO: 262484 - RNA, 32 nt, Homo Sapiens
cuucucuguggcugguagacaccaagcugcug

SEQ ID NO: 262485 - RNA, 32 nt, Homo Sapiens
cuuuaguacuaaaauuaaaaguuaccucauuc

SEQ ID NO: 262486 - RNA, 32 nt, Homo Sapiens
uucuuucuugcuuuguuuuuuauuuuuauaua

SEQ ID NO: 262487 - RNA, 32 nt, Homo Sapiens
uugauauuaaaauuauuuucucaguuuaaucc

SEQ ID NO: 262488 - RNA, 32 nt, Homo Sapiens
gccccuugacuccagccucgaccgccagcccc

SEQ ID NO: 262489 - RNA, 32 nt, Homo Sapiens
aaacuucccacuuuauuuuuuauacacauuaa

SEQ ID NO: 262490 - RNA, 32 nt, Homo Sapiens
uccacugaaguaauacuuaacaucucagaaaa

SEQ ID NO: 262491 - RNA, 32 nt, Homo Sapiens
gugaacugggugaccuaggaccucugauauga

SEQ ID NO: 262492 - RNA, 32 nt, Homo Sapiens
ucagcggauacuaguucuuuuaccuucugcuu

SEQ ID NO: 262493 - RNA, 32 nt, Homo Sapiens
cuuagagaagcagucaaacugugaagcacuaa

SEQ ID NO: 262494 - RNA, 32 nt, Homo Sapiens
cccggggcgcguuuaagagcugcgggccgggu

SEQ ID NO: 262495 - RNA, 32 nt, Homo Sapiens
ucacuuucucccuccugccgccgccgccgcgc

SEQ ID NO: 262496 - RNA, 32 nt, Homo Sapiens
cggaccgcgcaccucugagcugccaggguggg

SEQ ID NO: 262497 - RNA, 32 nt, Homo Sapiens
guugugcaguagcugaugugguuuauugccuu

SEQ ID NO: 262498 - RNA, 32 nt, Homo Sapiens
gguuuuuaguugcaguagcuccucaguguuuc

SEQ ID NO: 262499 - RNA, 32 nt, Homo Sapiens
uucagaguguuggaaggcuucggggcugaggu

SEQ ID NO: 262500 - RNA, 32 nt, Homo Sapiens
gccagcgcucucggauccccaggccccuccgu

SEQ ID NO: 262501 - RNA, 32 nt, Homo Sapiens
cuucccacugaaggaaacucuuucucauucgc

SEQ ID NO: 262502 - RNA, 32 nt, Homo Sapiens
ucaggcuguaagucagagcaggcaaugcagaa

SEQ ID NO: 262503 - RNA, 32 nt, Homo Sapiens
gccgacucuucugcaccauggagccagagcca

SEQ ID NO: 262504 - RNA, 32 nt, Homo Sapiens
cauaaugccuuacugugugaaccacaaaccaa

SEQ ID NO: 262505 - RNA, 32 nt, Homo Sapiens
uuuaauuaucccaaauauaucauuuaguugcu

SEQ ID NO: 262506 - RNA, 32 nt, Homo Sapiens
acagccuuacgcgcccgacgcgcgccacccgc

SEQ ID NO: 262507 - RNA, 32 nt, Homo Sapiens
cgccgcugcagcuggggccauuugaggggagc

SEQ ID NO: 262508 - RNA, 32 nt, Homo Sapiens
augagaaaaauauucaaguaacacuuuaaaac

SEQ ID NO: 262509 - RNA, 32 nt, Homo Sapiens
aaaauaacuaguacaaaauaaaacagauguca

SEQ ID NO: 262510 - RNA, 32 nt, Homo Sapiens
ggcagccuccacccuaccgccacagccccuuc

SEQ ID NO: 262511 - RNA, 32 nt, Homo Sapiens
gauccaaguauuuuaucuguguugucucucua

SEQ ID NO: 262512 - RNA, 32 nt, Homo Sapiens
aucaaagaguuaagggcugugcagugauuugu

SEQ ID NO: 262513 - RNA, 32 nt, Homo Sapiens
acuggaagaagcuggaggacagaagcaguacu

SEQ ID NO: 262514 - RNA, 32 nt, Homo Sapiens
uggggugccuccgcgcggucucuggcggaucg

SEQ ID NO: 262515 - RNA, 32 nt, Homo Sapiens
gguuuaggaacaucaauuuguucaaauugacc

SEQ ID NO: 262516 - RNA, 32 nt, Homo Sapiens
cagcagcccgccccggccucucgggagccgug

SEQ ID NO: 262517 - RNA, 32 nt, Homo Sapiens
agaggccugugcugaggccugcgcugacuugu

SEQ ID NO: 262518 - RNA, 32 nt, Homo Sapiens
guuagaggcugcugggauccacuguuuccaca

SEQ ID NO: 262519 - RNA, 32 nt, Homo Sapiens
caggucacuaaaucauuggcguuuauaaagau

SEQ ID NO: 262520 - RNA, 32 nt, Homo Sapiens
agaaccagcuccacccaaaucacucuucgcag

SEQ ID NO: 262521 - RNA, 32 nt, Homo Sapiens
gcaguucuuaauuuccucuccuccuggggaau

SEQ ID NO: 262522 - RNA, 31 nt, Homo Sapiens
cauuuaaaacuagaacagguauauaagcuaa

SEQ ID NO: 262523 - RNA, 32 nt, Homo Sapiens
cgcgacugccgaucgccccggcgcggcaccgc

SEQ ID NO: 262524 - RNA, 32 nt, Homo Sapiens
aucagaaaccuggcuccuggcuccuggcuccc

SEQ ID NO: 262525 - RNA, 32 nt, Homo Sapiens
aggggcugcuggugcuggcgcuggugcuggug

SEQ ID NO: 262526 - RNA, 32 nt, Homo Sapiens
ccaagaagucugggcuggguccaguccccgau

SEQ ID NO: 262527 - RNA, 32 nt, Homo Sapiens
aagcagcugggagcuuggaaaccuggucucuu

SEQ ID NO: 262528 - RNA, 30 nt, Homo Sapiens
uuggagagcagcggcggcggcggcaccccg

SEQ ID NO: 262529 - RNA, 32 nt, Homo Sapiens
uccuuuggacaauugaugauauuuaucauugu

SEQ ID NO: 262530 - RNA, 32 nt, Homo Sapiens
ccucucaaacuccugaccucaaguaauccacc

SEQ ID NO: 262531 - RNA, 32 nt, Homo Sapiens
guucuuaccauguuggccaggcuggucucaaa

SEQ ID NO: 262532 - RNA, 32 nt, Homo Sapiens
cgucguagacaagccagagaacaaaccgguaa

SEQ ID NO: 262533 - RNA, 32 nt, Homo Sapiens
caccccguucagaacuaucuucaguggucuua

SEQ ID NO: 262534 - RNA, 32 nt, Homo Sapiens
uaacaaaaugacugcauucgucucuuuuuuaa

SEQ ID NO: 262535 - RNA, 32 nt, Homo Sapiens
uaaauauguuugucaugagucagggguuugug

SEQ ID NO: 262536 - RNA, 32 nt, Homo Sapiens
uuuguuaaaaauaccuaagagcaauuauagug

SEQ ID NO: 262537 - RNA, 32 nt, Homo Sapiens
ggaaacuuucccugacuucugucucccccuug

SEQ ID NO: 262538 - RNA, 32 nt, Homo Sapiens
gcccuggucccgucugccugcuccucaggacc

SEQ ID NO: 262539 - RNA, 32 nt, Homo Sapiens
ccaccaccaaaaugcagauuuucuugaaaacc

SEQ ID NO: 262540 - RNA, 32 nt, Homo Sapiens
auauuaucaauaauauacuaauacuaauauac

SEQ ID NO: 262541 - RNA, 32 nt, Homo Sapiens
ucacgaaugauauaagccagauauauuucuua

SEQ ID NO: 262542 - RNA, 32 nt, Homo Sapiens
gggggaggcgagaggagccagaagcaaacuuc

SEQ ID NO: 262543 - RNA, 32 nt, Homo Sapiens
acagcaccugaggccccaugcacggggagcca

SEQ ID NO: 262544 - RNA, 32 nt, Homo Sapiens
auccccagagccuggguuuuccagggaaaggc

SEQ ID NO: 262545 - RNA, 32 nt, Homo Sapiens
gacaaccuggacaaguugcaggcgcuggcaaa

SEQ ID NO: 262546 - RNA, 32 nt, Homo Sapiens
cuuuucucuuuuucuuuuuuuuauuuuuguuu

SEQ ID NO: 262547 - RNA, 32 nt, Homo Sapiens
aguccuggcagacaauguggcgggaugacugg

SEQ ID NO: 262548 - RNA, 32 nt, Homo Sapiens
ggggccccccaagaggccccagccugcggccc

SEQ ID NO: 262549 - RNA, 32 nt, Homo Sapiens
gccccucgccccagcgccccaccuucccccac

SEQ ID NO: 262550 - RNA, 31 nt, Homo Sapiens
acuagaauugguuaugguguaacccgaauuc

SEQ ID NO: 262551 - RNA, 32 nt, Homo Sapiens
ugaauuagugagacgacaguucccuuaggcag

SEQ ID NO: 262552 - RNA, 32 nt, Homo Sapiens
cgcuccucggacggcuccggacgcugcugccg

SEQ ID NO: 262553 - RNA, 32 nt, Homo Sapiens
ugcagggaagaggagagcccccugcccugccc

SEQ ID NO: 262554 - RNA, 32 nt, Homo Sapiens
aucaagucuaacaaagaaaaaguuuugaguuu

SEQ ID NO: 262555 - RNA, 32 nt, Homo Sapiens
uuccagaacugcccaccuuccacacugaggua

SEQ ID NO: 262556 - RNA, 31 nt, Homo Sapiens
cuucuagcuggagcacucagagcuucccuga

SEQ ID NO: 262557 - RNA, 32 nt, Homo Sapiens
ugccugugaacauggcggcgcccguugucacg

SEQ ID NO: 262558 - RNA, 32 nt, Homo Sapiens
caaagaggaagcaacugaaacaacaucuggau

SEQ ID NO: 262559 - RNA, 32 nt, Homo Sapiens
aucuagaguguaauuucuuuuauauuagccuu

SEQ ID NO: 262560 - RNA, 32 nt, Homo Sapiens
guccaaacagaaaauaaccggagaagacaagg

SEQ ID NO: 262561 - RNA, 32 nt, Homo Sapiens
uggcacuuugaauaauguaaaccagugaaaag

SEQ ID NO: 262562 - RNA, 32 nt, Homo Sapiens
uacguuuuuuaaaugcuuuagaucugugauuc

SEQ ID NO: 262563 - RNA, 32 nt, Homo Sapiens
agggaggggaagaggagaauacaugcagaguc

SEQ ID NO: 262564 - RNA, 32 nt, Homo Sapiens
ggaugaaaaagacaugauaauauuuuggggau

SEQ ID NO: 262565 - RNA, 32 nt, Homo Sapiens
aaguuucugcauuagucaaaaauauuuaaaag

SEQ ID NO: 262566 - RNA, 32 nt, Homo Sapiens
caccaagaaaucagagaauucuacacuugacu

SEQ ID NO: 262567 - RNA, 32 nt, Homo Sapiens
uugccaaugcuguuuucauucucuaguggcca

SEQ ID NO: 262568 - RNA, 32 nt, Homo Sapiens
gugccgcugccuaugaccgccacuauuaccgc

SEQ ID NO: 262569 - RNA, 32 nt, Homo Sapiens
aaccacugucuccuuucaggagaaugcccagu

SEQ ID NO: 262570 - RNA, 32 nt, Homo Sapiens
uccucgcuccacccacccacgcugcugucacc

SEQ ID NO: 262571 - RNA, 32 nt, Homo Sapiens
gugagacugaaaaagcacuuugaggaaccuua

SEQ ID NO: 262572 - RNA, 32 nt, Homo Sapiens
uccgccgcaccucggaucuaggagcuacucgc

SEQ ID NO: 262573 - RNA, 32 nt, Homo Sapiens
ucuuggucaccaugaccuuuuaucuguguuaa

SEQ ID NO: 262574 - RNA, 32 nt, Homo Sapiens
gcccagccguacauuuacuuuuuaaagcagca

SEQ ID NO: 262575 - RNA, 32 nt, Homo Sapiens
cuuuauugggucugcaccuccauccuugaucu

SEQ ID NO: 262576 - RNA, 32 nt, Homo Sapiens
gugguguuuacaacgucacuaaucauuacaaa

SEQ ID NO: 262577 - RNA, 32 nt, Homo Sapiens
ugagaugaaacacuucaaaacccugguuauag

SEQ ID NO: 262578 - RNA, 32 nt, Homo Sapiens
uccccgcacugacugucgcgccgugcccugcg

SEQ ID NO: 262579 - RNA, 32 nt, Homo Sapiens
gcucgaaaaugauaaaauaaaaauuaugaaaa

SEQ ID NO: 262580 - RNA, 32 nt, Homo Sapiens
cccuccgcgcccccggccguccccccucaucg

SEQ ID NO: 262581 - RNA, 32 nt, Homo Sapiens
ugucgauaaaaugaaacuaguagaaucuuugu

SEQ ID NO: 262582 - RNA, 32 nt, Homo Sapiens
uucacaauggacugggaaaaacaucuuugaaa

SEQ ID NO: 262583 - RNA, 32 nt, Homo Sapiens
ugauggcguauguuuguguauaagguaccuau

SEQ ID NO: 262584 - RNA, 32 nt, Homo Sapiens
uguugcugccagcagggcccuuguuugggauu

SEQ ID NO: 262585 - RNA, 32 nt, Homo Sapiens
ucugauugaacuggaaucacauauuucacaac

SEQ ID NO: 262586 - RNA, 32 nt, Homo Sapiens
cacaugccagggggauaacauucucccucccg

SEQ ID NO: 262587 - RNA, 32 nt, Homo Sapiens
cgccagaaaggagccugagugauucucuuuuc

SEQ ID NO: 262588 - RNA, 32 nt, Homo Sapiens
gguggggaaggaggaggcucccacuggaucca

SEQ ID NO: 262589 - RNA, 32 nt, Homo Sapiens
uuuucucuuuguggggcuuggcguggagcagg

SEQ ID NO: 262590 - RNA, 32 nt, Homo Sapiens
cccaagaaaaagaggaaguacuucugaacuuu

SEQ ID NO: 262591 - RNA, 32 nt, Homo Sapiens
ggcacgaggccggauccaccgugccucugcgg

SEQ ID NO: 262592 - RNA, 32 nt, Homo Sapiens
cucaugcugguuggaaucauggcugcaggcuu

SEQ ID NO: 262593 - RNA, 32 nt, Homo Sapiens
gcagcgcccccuggacgagcgggcccugcaag

SEQ ID NO: 262594 - RNA, 32 nt, Homo Sapiens
uuccuugacuuugagaaauaauuuaagucaaa

SEQ ID NO: 262595 - RNA, 32 nt, Homo Sapiens
gcuugcaccuguuuuuagcuuauuuaaugacg

SEQ ID NO: 262596 - RNA, 32 nt, Homo Sapiens
gguaguggaaaaccagcagccucccgcgacga

SEQ ID NO: 262597 - RNA, 32 nt, Homo Sapiens
uagagucucgcucugucgcccaggguggagug

SEQ ID NO: 262598 - RNA, 32 nt, Homo Sapiens
ccuagucugugccccaagaucacgccucauuu

SEQ ID NO: 262599 - RNA, 32 nt, Homo Sapiens
ccaguaggcaguagucagaacuggaugggcug

SEQ ID NO: 262600 - RNA, 32 nt, Homo Sapiens
cgccgcgccccgccaugccgcucuacuccguu

SEQ ID NO: 262601 - RNA, 32 nt, Homo Sapiens
ggcuugucccuauguaggaugcaccgcaggcc

SEQ ID NO: 262602 - RNA, 32 nt, Homo Sapiens
aauggggcgggugugaggggaacagcucucuu

SEQ ID NO: 262603 - RNA, 32 nt, Homo Sapiens
accucugaaagcacucuagaucuugcagcuga

SEQ ID NO: 262604 - RNA, 32 nt, Homo Sapiens
ucauaauguugguguuuguuucccuccaaugu

SEQ ID NO: 262605 - RNA, 32 nt, Homo Sapiens
uuugguuaugaacuaaggauguaaccaacucc

SEQ ID NO: 262606 - RNA, 32 nt, Homo Sapiens
uuccccccaucccccaccugguuuugacuaau

SEQ ID NO: 262607 - RNA, 32 nt, Homo Sapiens
gagcuguggcacagacccccguccuguccccc

SEQ ID NO: 262608 - RNA, 32 nt, Homo Sapiens
gcgguggggccugguccugcuauaugccggcg

SEQ ID NO: 262609 - RNA, 32 nt, Homo Sapiens
ugaaaagccuauuagauguuuuacaaauuuaa

SEQ ID NO: 262610 - RNA, 32 nt, Homo Sapiens
gccaucaaacuccaagugaugcagggucugau

SEQ ID NO: 262611 - RNA, 32 nt, Homo Sapiens
gaggacaggagaccgcugcugcugcugccgcu

SEQ ID NO: 262612 - RNA, 32 nt, Homo Sapiens
ggaggugcuugaagauuuuccaaacuacuuua

SEQ ID NO: 262613 - RNA, 32 nt, Homo Sapiens
agagcacccacuuuuuuuuuuaaaucacuuuc

SEQ ID NO: 262614 - RNA, 32 nt, Homo Sapiens
gcuugggcuaucuucccugcucugccacgccg

SEQ ID NO: 262615 - RNA, 32 nt, Homo Sapiens
caucuuccugucagcccugguuuccaugguga

SEQ ID NO: 262616 - RNA, 32 nt, Homo Sapiens
caacaagugccagcugaaauuuugguaccagu

SEQ ID NO: 262617 - RNA, 32 nt, Homo Sapiens
uccuucccuacuucuuuuuuugugugucuggu

SEQ ID NO: 262618 - RNA, 32 nt, Homo Sapiens
uuuuaacacguguggugacuggaguagcugca

SEQ ID NO: 262619 - RNA, 32 nt, Homo Sapiens
auugcuguaaagauguaaguuguguauguuug

SEQ ID NO: 262620 - RNA, 32 nt, Homo Sapiens
gcugcugggcuuggcucaggauguguucuggg

SEQ ID NO: 262621 - RNA, 32 nt, Homo Sapiens
gcuuccccauggggcuggccugcggcgccugg

SEQ ID NO: 262622 - RNA, 32 nt, Homo Sapiens
ccaucagagugaacaggcaacccacagaaugg

SEQ ID NO: 262623 - RNA, 32 nt, Homo Sapiens
guugcucacaucuguucuuuuaguguuuugug

SEQ ID NO: 262624 - RNA, 32 nt, Homo Sapiens
ucaucuacuguaaaguguccgucugugucugu

SEQ ID NO: 262625 - RNA, 32 nt, Homo Sapiens
ucucgagucuuaggcugcggaaucuaagacuc

SEQ ID NO: 262626 - RNA, 32 nt, Homo Sapiens
aaauguugggcuaaagccauuaacuuaagaau

SEQ ID NO: 262627 - RNA, 32 nt, Homo Sapiens
cuugcuacauuaguccagcuucuacagguaac

SEQ ID NO: 262628 - RNA, 32 nt, Homo Sapiens
ugucauagaggaaaagcacagauuauaccugg

SEQ ID NO: 262629 - RNA, 32 nt, Homo Sapiens
cugaggcagcuaguagccggagggucaccaug

SEQ ID NO: 262630 - RNA, 32 nt, Homo Sapiens
uggcuuuuaucauuuuaaaugguaggaauuua

SEQ ID NO: 262631 - RNA, 32 nt, Homo Sapiens
uaucguggguugaaacuuguuaaaugagauuu

SEQ ID NO: 262632 - RNA, 32 nt, Homo Sapiens
caguccuuucgauuauccuuuauuuucuuauc

SEQ ID NO: 262633 - RNA, 32 nt, Homo Sapiens
gauuccauaaaauaaacuugagguuaaauaau

SEQ ID NO: 262634 - RNA, 32 nt, Homo Sapiens
augaacauuaaggacuccaugaaccugggcua

SEQ ID NO: 262635 - RNA, 32 nt, Homo Sapiens
cggaccaugugcuauauauaaaucgaauggcu

SEQ ID NO: 262636 - RNA, 32 nt, Homo Sapiens
cuacuggaagcagaaagcagaaauggcuuaac

SEQ ID NO: 262637 - RNA, 32 nt, Homo Sapiens
aaagcaaguuuauguacauauugggcuuucug

SEQ ID NO: 262638 - RNA, 32 nt, Homo Sapiens
agaaacuugucaacucauauccacguuaucua

SEQ ID NO: 262639 - RNA, 32 nt, Homo Sapiens
uugcacaagaugcccaguggcaccauaugguu

SEQ ID NO: 262640 - RNA, 32 nt, Homo Sapiens
cucgcuggggagcccccagggcugcuguggcc

SEQ ID NO: 262641 - RNA, 32 nt, Homo Sapiens
agccgccucacaggucggcggacgggccaggc

SEQ ID NO: 262642 - RNA, 32 nt, Homo Sapiens
gauaacuuucaaucuauauaaaaaucucuguc

SEQ ID NO: 262643 - RNA, 32 nt, Homo Sapiens
gccugagccggggaaccgcagcucccacacca

SEQ ID NO: 262644 - RNA, 32 nt, Homo Sapiens
acacgugagcacgcacacaccaauuccacuug

SEQ ID NO: 262645 - RNA, 31 nt, Homo Sapiens
cgugugcagcgcacagaccugaggccccaga

SEQ ID NO: 262646 - RNA, 32 nt, Homo Sapiens
ugguauucuaaccaaaguugacagacugugcg

SEQ ID NO: 262647 - RNA, 32 nt, Homo Sapiens
aaauaaauuuaaaagaaucuguuuggggagga

SEQ ID NO: 262648 - RNA, 32 nt, Homo Sapiens
aagaagaaaaggaaauucagugugugagucuc

SEQ ID NO: 262649 - RNA, 32 nt, Homo Sapiens
ccggggacccaccgcgcggagccagccuagcu

SEQ ID NO: 262650 - RNA, 32 nt, Homo Sapiens
cuuagcuuccaggucuuaacuucucugacuac

SEQ ID NO: 262651 - RNA, 32 nt, Homo Sapiens
ggguuuaucgacgagaucuggaguaucuauuc

SEQ ID NO: 262652 - RNA, 32 nt, Homo Sapiens
guguguuaagaaaaggugucgaggggagggac

SEQ ID NO: 262653 - RNA, 32 nt, Homo Sapiens
gugugauggcuuggaauuuaauuuauuaaagu

SEQ ID NO: 262654 - RNA, 32 nt, Homo Sapiens
accgacgugucuccuguuuuucuggguggccu

SEQ ID NO: 262655 - RNA, 32 nt, Homo Sapiens
aacuugcugagcauauucuuuugguaucuuga

SEQ ID NO: 262656 - RNA, 32 nt, Homo Sapiens
cagcaucuccuggccuggccugaccgggcuuc

SEQ ID NO: 262657 - RNA, 32 nt, Homo Sapiens
agaaaagcuauuuuaauguuauccauuauaaa

SEQ ID NO: 262658 - RNA, 32 nt, Homo Sapiens
cacagacuuaauauuuuuuucuuagagauggu

SEQ ID NO: 262659 - RNA, 32 nt, Homo Sapiens
guaaugacuuauuguggauaacaaagauaucu

SEQ ID NO: 262660 - RNA, 32 nt, Homo Sapiens
acuuggcauacacccuuuuaauagauggggua

SEQ ID NO: 262661 - RNA, 32 nt, Homo Sapiens
caaugccaucauauacuucacacuggagagaa

SEQ ID NO: 262662 - RNA, 32 nt, Homo Sapiens
uacauuccaaaaacucuaaacuuuuuaaagau

SEQ ID NO: 262663 - RNA, 32 nt, Homo Sapiens
cagcaggaggcucggcggggccggcggggcag

SEQ ID NO: 262664 - RNA, 32 nt, Homo Sapiens
ggcauugcggccuccgcgguggacguguucuu

SEQ ID NO: 262665 - RNA, 32 nt, Homo Sapiens
cugguccacucuggcuaugaccuucaggauca

SEQ ID NO: 262666 - RNA, 32 nt, Homo Sapiens
aaaaugugcgugaggaaggcauuugccucuau

SEQ ID NO: 262667 - RNA, 32 nt, Homo Sapiens
uauauuuaagacaaaauauaaaggcuagaauu

SEQ ID NO: 262668 - RNA, 32 nt, Homo Sapiens
uggguaaacaagucacuggcacaggggaaagc

SEQ ID NO: 262669 - RNA, 32 nt, Homo Sapiens
caauguacuucgcuuaauaguccaaguauauu

SEQ ID NO: 262670 - RNA, 32 nt, Homo Sapiens
cgcucuccugggaccgucugcacuggaaaccc

SEQ ID NO: 262671 - RNA, 32 nt, Homo Sapiens
gugccagccuggcucugccccucccccauggg

SEQ ID NO: 262672 - RNA, 32 nt, Homo Sapiens
ugugugcuugagugugugaacacgugugugug

SEQ ID NO: 262673 - RNA, 32 nt, Homo Sapiens
ggagagaggggaagaaagagaccagugaguca

SEQ ID NO: 262674 - RNA, 32 nt, Homo Sapiens
ucugcgugcaggcgcuccugcugcucuggcuc

SEQ ID NO: 262675 - RNA, 32 nt, Homo Sapiens
cucgauuuuucuuaagccaaaaaugaaugcua

SEQ ID NO: 262676 - RNA, 31 nt, Homo Sapiens
aucaaaauauucagagacucgagcacagcac

SEQ ID NO: 262677 - RNA, 32 nt, Homo Sapiens
cugggcuauccugcccuugggagcacagacag

SEQ ID NO: 262678 - RNA, 32 nt, Homo Sapiens
ugacacuuacauauuucuugccauaacuuuuc

SEQ ID NO: 262679 - RNA, 32 nt, Homo Sapiens
auuuguaagaaggauuuuuaaauuuuuuaugg

SEQ ID NO: 262680 - RNA, 32 nt, Homo Sapiens
ucuauauagcuauauauuuguguuccuucagg

SEQ ID NO: 262681 - RNA, 32 nt, Homo Sapiens
cuggaauuugaacauuuacuguaauuuguaau

SEQ ID NO: 262682 - RNA, 32 nt, Homo Sapiens
caucgcuaaaagauaccauaauuugcugaggc

SEQ ID NO: 262683 - RNA, 32 nt, Homo Sapiens
aagagccucuggcccgggggcugcuggaacau

SEQ ID NO: 262684 - RNA, 32 nt, Homo Sapiens
guccuuguguuuucuuguuuuguuugggaaaa

SEQ ID NO: 262685 - RNA, 32 nt, Homo Sapiens
uccgggaguucagaaccagccuggacaacaua

SEQ ID NO: 262686 - RNA, 32 nt, Homo Sapiens
auuuaggcauuaauauaaaagagguaggaguc

SEQ ID NO: 262687 - RNA, 32 nt, Homo Sapiens
uuuaauucaucaauuacccagucuuagauagu

SEQ ID NO: 262688 - RNA, 32 nt, Homo Sapiens
gaaaugcuguaggaauaaaucugugguaacua

SEQ ID NO: 262689 - RNA, 32 nt, Homo Sapiens
cauuacaaaaauuuagcuacuuucaaaugaga

SEQ ID NO: 262690 - RNA, 32 nt, Homo Sapiens
ucuuucacagauuuguauuaugcugaagaguu

SEQ ID NO: 262691 - RNA, 32 nt, Homo Sapiens
cuaagaugacuauccaaauuaagggaccugag

SEQ ID NO: 262692 - RNA, 32 nt, Homo Sapiens
ucucgaaacaauuuccuuugauuuucagguau

SEQ ID NO: 262693 - RNA, 32 nt, Homo Sapiens
ccugaucccauuuuccucugacguccaccucc

SEQ ID NO: 262694 - RNA, 32 nt, Homo Sapiens
gaaguacuggcucuuuccugcucuggacaaga

SEQ ID NO: 262695 - RNA, 32 nt, Homo Sapiens
aaugccugcccccaggcccagugaggugagau

SEQ ID NO: 262696 - RNA, 32 nt, Homo Sapiens
ggaugaaaaaucaacccccgacauggaaccca

SEQ ID NO: 262697 - RNA, 32 nt, Homo Sapiens
cucuugaacgaugaugauauucagacgaagca

SEQ ID NO: 262698 - RNA, 32 nt, Homo Sapiens
uagauacauuuuaugaauaacuuuuguuauga

SEQ ID NO: 262699 - RNA, 32 nt, Homo Sapiens
uugcaccagauacucaucauauacaaauguuu

SEQ ID NO: 262700 - RNA, 32 nt, Homo Sapiens
ugccuggcucuuucgucacccuuguacaagac

SEQ ID NO: 262701 - RNA, 31 nt, Homo Sapiens
gcuggcagccugccuggcccauagacauccc

SEQ ID NO: 262702 - RNA, 32 nt, Homo Sapiens
uguccugcucugccgcauccagcccuguaccg

SEQ ID NO: 262703 - RNA, 32 nt, Homo Sapiens
caccuccccacuuuuuuccccaagacaagaca

SEQ ID NO: 262704 - RNA, 32 nt, Homo Sapiens
cagaaaaugaucuguuugaugaaagguaacaa

SEQ ID NO: 262705 - RNA, 32 nt, Homo Sapiens
cagccaacccgcagagggaggggaggggcuga

SEQ ID NO: 262706 - RNA, 32 nt, Homo Sapiens
cuuuuuuguuuuauuuuuuggagacagagucu

SEQ ID NO: 262707 - RNA, 32 nt, Homo Sapiens
ggucaacacuuccugcugcauuuccuucccuu

SEQ ID NO: 262708 - RNA, 32 nt, Homo Sapiens
ucagaaaugcccugccuauuaaaugagcuccc

SEQ ID NO: 262709 - RNA, 32 nt, Homo Sapiens
gagaaaucaaggagacagagcugacugcauga

SEQ ID NO: 262710 - RNA, 32 nt, Homo Sapiens
ccuuggggaccucucuggggccccucugguau

SEQ ID NO: 262711 - RNA, 32 nt, Homo Sapiens
gugauccuggcucacugcaaucuccgccuccc

SEQ ID NO: 262712 - RNA, 29 nt, Homo Sapiens
auguauauauguauagugaacauauugcu

SEQ ID NO: 262713 - RNA, 30 nt, Homo Sapiens
cugcugccucggcagcaccuguuggugccg

SEQ ID NO: 262714 - RNA, 32 nt, Homo Sapiens
gaagauuuuuuggaggaaguaacagcuacgau

SEQ ID NO: 262715 - RNA, 32 nt, Homo Sapiens
uugcaggcauaccccacagcuagacugcagga

SEQ ID NO: 262716 - RNA, 32 nt, Homo Sapiens
guccuggaagcaguggccgcggcggcucccuc

SEQ ID NO: 262717 - RNA, 32 nt, Homo Sapiens
gaaugucagggccaggugcagaccuuggggga

SEQ ID NO: 262718 - RNA, 32 nt, Homo Sapiens
ggaaacguuugaugucugugucagcugucuuu

SEQ ID NO: 262719 - RNA, 32 nt, Homo Sapiens
ucaauguguaaauuuuauuuuuguauuaucua

SEQ ID NO: 262720 - RNA, 32 nt, Homo Sapiens
ccuuaguguuuggguauauucauuucaaaggg

SEQ ID NO: 262721 - RNA, 32 nt, Homo Sapiens
gauugcuaucaugugaaguguugcaggugucc

SEQ ID NO: 262722 - RNA, 32 nt, Homo Sapiens
uuauaucgauacaugaauuuaacuuacuuuaa

SEQ ID NO: 262723 - RNA, 32 nt, Homo Sapiens
ugucugucugcucacauaagcauuccguccau

SEQ ID NO: 262724 - RNA, 32 nt, Homo Sapiens
cacaagaaaaacaaaaucagaccaggaucacu

SEQ ID NO: 262725 - RNA, 32 nt, Homo Sapiens
uugcauggccuagagaccgcuccagcuccugg

SEQ ID NO: 262726 - RNA, 32 nt, Homo Sapiens
uguuauucuaagucaguguuuuucaaagcgua

SEQ ID NO: 262727 - RNA, 32 nt, Homo Sapiens
ccucccagagguggcacaauggagcgaucucc

SEQ ID NO: 262728 - RNA, 32 nt, Homo Sapiens
ggaguuccagaccagccugggcagcaucguga

SEQ ID NO: 262729 - RNA, 32 nt, Homo Sapiens
ucucacuuggaaagauauucaggguuguuaaa

SEQ ID NO: 262730 - RNA, 32 nt, Homo Sapiens
aaauacaguugauuagcaacagcggugcugua

SEQ ID NO: 262731 - RNA, 32 nt, Homo Sapiens
ccuggagaauccacauaccuuguguauugaac

SEQ ID NO: 262732 - RNA, 32 nt, Homo Sapiens
caagaagaauaaagaguaacacacaaaauauu

SEQ ID NO: 262733 - RNA, 32 nt, Homo Sapiens
gagccuaagagaacuauggcaacaucagguga

SEQ ID NO: 262734 - RNA, 32 nt, Homo Sapiens
cuccggcccggcggcgauggcgcggagcgugc

SEQ ID NO: 262735 - RNA, 32 nt, Homo Sapiens
caaagagggaaauaucuguucuucuuacugug

SEQ ID NO: 262736 - RNA, 32 nt, Homo Sapiens
uuuguuuuuuaaaugaucagugucuauuugau

SEQ ID NO: 262737 - RNA, 32 nt, Homo Sapiens
acacucugaagcaacaaaguuguguaaaguga

SEQ ID NO: 262738 - RNA, 32 nt, Homo Sapiens
caaauauaauguguaauuuuuaagaccuaaaa

SEQ ID NO: 262739 - RNA, 32 nt, Homo Sapiens
caauuccuuuuggagacaguuguuucaaaugc

SEQ ID NO: 262740 - RNA, 32 nt, Homo Sapiens
aaacacccacuuuuuccagaucuuccucuugc

SEQ ID NO: 262741 - RNA, 28 nt, Homo Sapiens
gagcuguuuacaggacuggggaggcucc

SEQ ID NO: 262742 - RNA, 32 nt, Homo Sapiens
agaagugguggccgcacaugggccgcugugac

SEQ ID NO: 262743 - RNA, 32 nt, Homo Sapiens
uuuaucugcuuugccucuggugguacaagguu

SEQ ID NO: 262744 - RNA, 32 nt, Homo Sapiens
gucacaguuaaaaaccaaccugaacuuugcag

SEQ ID NO: 262745 - RNA, 32 nt, Homo Sapiens
aacacucacucugugucuucaacagcaucuuu

SEQ ID NO: 262746 - RNA, 30 nt, Homo Sapiens
cucccgcuggacugcccaguucaggaugug

SEQ ID NO: 262747 - RNA, 32 nt, Homo Sapiens
uugaauggcccgggcgcgcgcggucguguggg

SEQ ID NO: 262748 - RNA, 32 nt, Homo Sapiens
ccuucugguguuggacaagcuucugagacguc

SEQ ID NO: 262749 - RNA, 32 nt, Homo Sapiens
aacauguuacuaguucauaaccagcuauauga

SEQ ID NO: 262750 - RNA, 32 nt, Homo Sapiens
gucauuucaguaauguguauguuuacaaaaga

SEQ ID NO: 262751 - RNA, 32 nt, Homo Sapiens
guggccugacugcgcggccagacgccagcgcc

SEQ ID NO: 262752 - RNA, 32 nt, Homo Sapiens
gcccuucaccaucaguacaaccccaaguuuca

SEQ ID NO: 262753 - RNA, 32 nt, Homo Sapiens
uugaacagaaaguugggguaucuuguaucccc

SEQ ID NO: 262754 - RNA, 32 nt, Homo Sapiens
ggcacuguuaccaucugcaucuccagaugagc

SEQ ID NO: 262755 - RNA, 32 nt, Homo Sapiens
aggcggcucuggugccccuccucccagcaugc

SEQ ID NO: 262756 - RNA, 32 nt, Homo Sapiens
aaacuucuauagaaaagauaucguguacauag

SEQ ID NO: 262757 - RNA, 32 nt, Homo Sapiens
gggagacgcaggcaauggggccucgcaggcca

SEQ ID NO: 262758 - RNA, 32 nt, Homo Sapiens
cauucccugcuggucaugcagugucuguauau

SEQ ID NO: 262759 - RNA, 31 nt, Homo Sapiens
gcuacuauagcgucuuauguaugguuuaaag

SEQ ID NO: 262760 - RNA, 32 nt, Homo Sapiens
ugccugugaucccagcacuuugggaugcugag

SEQ ID NO: 262761 - RNA, 32 nt, Homo Sapiens
auguggcuaguugccugaccucccucaauggu

SEQ ID NO: 262762 - RNA, 32 nt, Homo Sapiens
ugccuguaaucccagcacuuugggaugcugaa

SEQ ID NO: 262763 - RNA, 32 nt, Homo Sapiens
ggagaugucugcuuuuccaugaaaugaaauag

SEQ ID NO: 262764 - RNA, 32 nt, Homo Sapiens
aagaacauuuccaaaacuaaaauagaaaaugc

SEQ ID NO: 262765 - RNA, 32 nt, Homo Sapiens
ucagccucugccugugcccgccgcccggccgc

SEQ ID NO: 262766 - RNA, 32 nt, Homo Sapiens
augcccgugucugugcgugugcguguguguuu

SEQ ID NO: 262767 - RNA, 32 nt, Homo Sapiens
aacacauccaccaggucuaccuggacaugagc

SEQ ID NO: 262768 - RNA, 32 nt, Homo Sapiens
uggcucuggggaugccagggcaggaggacgag

SEQ ID NO: 262769 - RNA, 32 nt, Homo Sapiens
uucaucuaacugugauuccucuaccagagccu

SEQ ID NO: 262770 - RNA, 32 nt, Homo Sapiens
ggguugcagauacgugacuuggagcacccgug

SEQ ID NO: 262771 - RNA, 32 nt, Homo Sapiens
uaagaaaguauuugauuuuugucucaaugaaa

SEQ ID NO: 262772 - RNA, 32 nt, Homo Sapiens
ggcuuuuuaacccacaaguaaccuuuuuauuu

SEQ ID NO: 262773 - RNA, 32 nt, Homo Sapiens
agucugccugugugucccuuucucccugucuc

SEQ ID NO: 262774 - RNA, 32 nt, Homo Sapiens
acgucgcgggugccggucccggggcccugcug

SEQ ID NO: 262775 - RNA, 32 nt, Homo Sapiens
ccucuaauuuauauugcuuugcacuuugguuu

SEQ ID NO: 262776 - RNA, 32 nt, Homo Sapiens
gugccucguuuuugacuuuguccauuaacauu

SEQ ID NO: 262777 - RNA, 32 nt, Homo Sapiens
auguagauaaacucagaaauuuaauucauguu

SEQ ID NO: 262778 - RNA, 32 nt, Homo Sapiens
gguuaaaauggcaaauuguauguuauaccuau

SEQ ID NO: 262779 - RNA, 32 nt, Homo Sapiens
aauguacccuaaugauuaaaccccgugagaua

SEQ ID NO: 262780 - RNA, 32 nt, Homo Sapiens
ccugaccgcccggccccgcuccgcacugcacc

SEQ ID NO: 262781 - RNA, 32 nt, Homo Sapiens
gcggagaucccggacgaccgucgcggguugau

SEQ ID NO: 262782 - RNA, 32 nt, Homo Sapiens
aguuacagcuccccggcucuucuguguggcag

SEQ ID NO: 262783 - RNA, 32 nt, Homo Sapiens
cuucuguguuugugauauagaacuggaauaag

SEQ ID NO: 262784 - RNA, 32 nt, Homo Sapiens
uguaaaccucuuuugcacuuugaaaaagaauc

SEQ ID NO: 262785 - RNA, 32 nt, Homo Sapiens
cccagaaauggcagucaccuuucccauguguu

SEQ ID NO: 262786 - RNA, 32 nt, Homo Sapiens
agcgggaugugcucucacugcucccaaaaaug

SEQ ID NO: 262787 - RNA, 31 nt, Homo Sapiens
guuuagaaauaaagauggaacauauuuuaua

SEQ ID NO: 262788 - RNA, 32 nt, Homo Sapiens
gaagacagugcagccacccagccuuuaccagc

SEQ ID NO: 262789 - RNA, 32 nt, Homo Sapiens
gguuauggccagcacggcuacaguacagguua

SEQ ID NO: 262790 - RNA, 32 nt, Homo Sapiens
cauuucccugucaugaacaccucgcccagcac

SEQ ID NO: 262791 - RNA, 32 nt, Homo Sapiens
uccugcgaucuuauagauucuaaugagcucuu

SEQ ID NO: 262792 - RNA, 32 nt, Homo Sapiens
gagucaauuaaaccucuuuccuuuaaaaauua

SEQ ID NO: 262793 - RNA, 32 nt, Homo Sapiens
gcagcguccccgcccgccuccucgggagcucu

SEQ ID NO: 262794 - RNA, 32 nt, Homo Sapiens
uuuuugguaagaauuuuaaaucuuuuagcuca

SEQ ID NO: 262795 - RNA, 32 nt, Homo Sapiens
caacagauaaccugaaggaaugcuguuucaug

SEQ ID NO: 262796 - RNA, 32 nt, Homo Sapiens
cugcagccacuacacaggccuggaauucuacc

SEQ ID NO: 262797 - RNA, 30 nt, Homo Sapiens
cagcuaugcugugcugugggaucucuucug

SEQ ID NO: 262798 - RNA, 32 nt, Homo Sapiens
ucuggauucuaaaaauccacaacuagacugga

SEQ ID NO: 262799 - RNA, 32 nt, Homo Sapiens
aaaauacaaaaauuagccaagugaggugguau

SEQ ID NO: 262800 - RNA, 32 nt, Homo Sapiens
acgccucugaccacagccuguggcuccugagg

SEQ ID NO: 262801 - RNA, 32 nt, Homo Sapiens
uacugcuugagcccuggauauuuuagccaaug

SEQ ID NO: 262802 - RNA, 32 nt, Homo Sapiens
cauacauuucucuauuugaauauaucuuaacc

SEQ ID NO: 262803 - RNA, 32 nt, Homo Sapiens
cccagguaauggcaugagauagcugguguuag

SEQ ID NO: 262804 - RNA, 32 nt, Homo Sapiens
caugaaucucagugucccccaggccgcccacg

SEQ ID NO: 262805 - RNA, 32 nt, Homo Sapiens
auuuauuuuuuguuuuuuuuuaaucacaguag

SEQ ID NO: 262806 - RNA, 32 nt, Homo Sapiens
acccuguaauuccagcacuuugggaggguggg

SEQ ID NO: 262807 - RNA, 32 nt, Homo Sapiens
ccuguuguucuucccaucggcgaagauggccc

SEQ ID NO: 262808 - RNA, 32 nt, Homo Sapiens
gagggggcuugcccacccaccccgaccccagc

SEQ ID NO: 262809 - RNA, 32 nt, Homo Sapiens
gaguggggcucagcguggcccauggugccugu

SEQ ID NO: 262810 - RNA, 32 nt, Homo Sapiens
acaccugcgcccuucugcagccgcccgccgca

SEQ ID NO: 262811 - RNA, 32 nt, Homo Sapiens
agaugggauugugacauaucgcuggacccagc

SEQ ID NO: 262812 - RNA, 32 nt, Homo Sapiens
uuuuucuuugacauuuaccaaucaccaagcau

SEQ ID NO: 262813 - RNA, 32 nt, Homo Sapiens
ggcgcccauucgucugucccagagcuuauugg

SEQ ID NO: 262814 - RNA, 32 nt, Homo Sapiens
gggcggccgggcgcaagggugggagggagccg

SEQ ID NO: 262815 - RNA, 32 nt, Homo Sapiens
cuugggcaagaucgccuccuccccuccagccc

SEQ ID NO: 262816 - RNA, 32 nt, Homo Sapiens
ggccgccgcccgggccucgcagggcuaggcga

SEQ ID NO: 262817 - RNA, 32 nt, Homo Sapiens
cucaccacagugaguucucacgagaucugguu

SEQ ID NO: 262818 - RNA, 32 nt, Homo Sapiens
aggaauauaggaaugcuaagauaucauuggua

SEQ ID NO: 262819 - RNA, 32 nt, Homo Sapiens
ccgcagauccuucaaucaggggcugcugcuga

SEQ ID NO: 262820 - RNA, 32 nt, Homo Sapiens
ucucaaccaaaauauuccuguuggaaucauga

SEQ ID NO: 262821 - RNA, 32 nt, Homo Sapiens
agauaucaaaucucagaaagaaugucaaauca

SEQ ID NO: 262822 - RNA, 32 nt, Homo Sapiens
uacccuauuguacaguucuaguaaauagcuau

SEQ ID NO: 262823 - RNA, 32 nt, Homo Sapiens
aacucacagucaacuaguuuauaaguuauauu

SEQ ID NO: 262824 - RNA, 32 nt, Homo Sapiens
accauuccagcauccggcaacaaugcaccagc

SEQ ID NO: 262825 - RNA, 32 nt, Homo Sapiens
aggcuuauucagaacugguguuuuuaaaguuu

SEQ ID NO: 262826 - RNA, 30 nt, Homo Sapiens
ugaggaggagguggccaagaagcggaaaaa

SEQ ID NO: 262827 - RNA, 32 nt, Homo Sapiens
cugucgggaacuuaggagccugcucgccuaca

SEQ ID NO: 262828 - RNA, 32 nt, Homo Sapiens
ccaccgguacuggcucccugcuccaucggcac

SEQ ID NO: 262829 - RNA, 32 nt, Homo Sapiens
auacaucagaucugcaacacagaaaugcucug

SEQ ID NO: 262830 - RNA, 32 nt, Homo Sapiens
auauuucagagguaucucgaaacuacaauaua

SEQ ID NO: 262831 - RNA, 32 nt, Homo Sapiens
acucagcccagcugcuuggccugacccucuca

SEQ ID NO: 262832 - RNA, 32 nt, Homo Sapiens
auugcuuuauccaaauacaugaaucuaaagcu

SEQ ID NO: 262833 - RNA, 32 nt, Homo Sapiens
uaagcaaacaaaugcugauauagucagcaaau

SEQ ID NO: 262834 - RNA, 32 nt, Homo Sapiens
aaauuauacauccagauguaaucccccuaaga

SEQ ID NO: 262835 - RNA, 32 nt, Homo Sapiens
accaccuccgauuccaucaugaugccacguug

SEQ ID NO: 262836 - RNA, 32 nt, Homo Sapiens
caagcuauaauggaugcuuuguuuaaugagcc

SEQ ID NO: 262837 - RNA, 32 nt, Homo Sapiens
uguauuguuuuaaacuuuaagaauuuaucaaa

SEQ ID NO: 262838 - RNA, 32 nt, Homo Sapiens
caucacccuuuuuaacauuguuuacacaucac

SEQ ID NO: 262839 - RNA, 32 nt, Homo Sapiens
gcugaugaagaaaaaauuggaaacgaagagag

SEQ ID NO: 262840 - RNA, 32 nt, Homo Sapiens
ucccaacaucagaaggaacaaacucuggacau

SEQ ID NO: 262841 - RNA, 32 nt, Homo Sapiens
uggcuggagaauuggauagcagaguaauguuu

SEQ ID NO: 262842 - RNA, 32 nt, Homo Sapiens
gggcgccacgggggccauguaagcagcuaucu

SEQ ID NO: 262843 - RNA, 32 nt, Homo Sapiens
ccucggcggcccgggcuccgcucauccugcgg

SEQ ID NO: 262844 - RNA, 32 nt, Homo Sapiens
gggcaugaccaucugcugggaaaaguuccagg

SEQ ID NO: 262845 - RNA, 32 nt, Homo Sapiens
ggaaauuaccuaacaagaagucccaccucacu

SEQ ID NO: 262846 - RNA, 32 nt, Homo Sapiens
ucacacauuuaauuccuauuaaguacagccgc

SEQ ID NO: 262847 - RNA, 32 nt, Homo Sapiens
uccccgcccagcugugauguuucaucugcuuu

SEQ ID NO: 262848 - RNA, 32 nt, Homo Sapiens
uuggguuuuuuuucuuuuuccugcuguauaac

SEQ ID NO: 262849 - RNA, 32 nt, Homo Sapiens
auuguuuuguauauuucugggguuuaaaaugu

SEQ ID NO: 262850 - RNA, 32 nt, Homo Sapiens
aaucauaaaugaaugaucauggcuauguuuua

SEQ ID NO: 262851 - RNA, 32 nt, Homo Sapiens
ggaaccugcggggcagaggcggcggccgcagc

SEQ ID NO: 262852 - RNA, 32 nt, Homo Sapiens
cuccagcaguugccgcgcccagccccgagaga

SEQ ID NO: 262853 - RNA, 32 nt, Homo Sapiens
cgcaggugguggcugugacggggaggaugguc

SEQ ID NO: 262854 - RNA, 32 nt, Homo Sapiens
gucuguagaaaacguuaauuugagcuuuaugg

SEQ ID NO: 262855 - RNA, 32 nt, Homo Sapiens
gccaucuccaaccaugggagugaggcacccgc

SEQ ID NO: 262856 - RNA, 32 nt, Homo Sapiens
cucacggaggaggagcugcugcuggaagguuc

SEQ ID NO: 262857 - RNA, 32 nt, Homo Sapiens
cacuugugaccuuaguacuuggucauccagca

SEQ ID NO: 262858 - RNA, 32 nt, Homo Sapiens
auaguguaauuagaaaaaguacaauauucuaa

SEQ ID NO: 262859 - RNA, 32 nt, Homo Sapiens
ucucuccugggucccaggaucggcccccacca

SEQ ID NO: 262860 - RNA, 32 nt, Homo Sapiens
uucuugcugcugcaauuuuauacaaccauuau

SEQ ID NO: 262861 - RNA, 32 nt, Homo Sapiens
uuuuuugaaacacuucagaacugcugcuauaa

SEQ ID NO: 262862 - RNA, 32 nt, Homo Sapiens
gacaggcacagugcugcugugcucuacaaaug

SEQ ID NO: 262863 - RNA, 32 nt, Homo Sapiens
cgagccgagccgggucgggcccgggccaugcu

SEQ ID NO: 262864 - RNA, 32 nt, Homo Sapiens
cuggacuuuuucugucccacugagacgcagcu

SEQ ID NO: 262865 - RNA, 32 nt, Homo Sapiens
gaaaaaagcccuuccuucuccgacucgguguc

SEQ ID NO: 262866 - RNA, 32 nt, Homo Sapiens
ggaaacaugcuccccaacgugcucuccugugc

SEQ ID NO: 262867 - RNA, 32 nt, Homo Sapiens
ccccagcacugaggagcucgccugcugcccuc

SEQ ID NO: 262868 - RNA, 32 nt, Homo Sapiens
ugcuggacacagagacacccacccagcacacc

SEQ ID NO: 262869 - RNA, 32 nt, Homo Sapiens
ggaugcacuaaucuuggucucuugcauuucag

SEQ ID NO: 262870 - RNA, 32 nt, Homo Sapiens
ucuucccuuuauuggguagaguucuugauggc

SEQ ID NO: 262871 - RNA, 32 nt, Homo Sapiens
cuuugcuucucccagagcugguuugcacagcc

SEQ ID NO: 262872 - RNA, 30 nt, Homo Sapiens
aacguugcuauuuccacccauuuguuuucg

SEQ ID NO: 262873 - RNA, 31 nt, Homo Sapiens
acaaucauaaauucuuccugaguuaggucuc

SEQ ID NO: 262874 - RNA, 32 nt, Homo Sapiens
uaccuucauaugccacuaucucgguaguucaa

SEQ ID NO: 262875 - RNA, 32 nt, Homo Sapiens
auuguccccccuccuccucagcucacccaugg

SEQ ID NO: 262876 - RNA, 32 nt, Homo Sapiens
cgccuguaauccuagcacuuuugggaggcaga

SEQ ID NO: 262877 - RNA, 32 nt, Homo Sapiens
gaagcaguauuuuuauuaacuuuuugagacau

SEQ ID NO: 262878 - RNA, 32 nt, Homo Sapiens
cauaucccaagagcucccaaagccugagacca

SEQ ID NO: 262879 - RNA, 32 nt, Homo Sapiens
cccccggcucuggcagagaaaccuggguuucg

SEQ ID NO: 262880 - RNA, 32 nt, Homo Sapiens
ucacuccccguccugccgcccaggcaggaugu

SEQ ID NO: 262881 - RNA, 32 nt, Homo Sapiens
gguguuaggagcuuguuuugcugaagauuucu

SEQ ID NO: 262882 - RNA, 32 nt, Homo Sapiens
ucugucuugugcuuuuucuuuuagaagcuacu

SEQ ID NO: 262883 - RNA, 32 nt, Homo Sapiens
gcuguguauauauaaaugguuucuacacacgg

SEQ ID NO: 262884 - RNA, 32 nt, Homo Sapiens
aucacccgcccauucuacuacucaaccccucc

SEQ ID NO: 262885 - RNA, 32 nt, Homo Sapiens
aagauggcuggacagugggagagagcacguug

SEQ ID NO: 262886 - RNA, 32 nt, Homo Sapiens
gauaacaaguuacucacuaucacagcgucucc

SEQ ID NO: 262887 - RNA, 32 nt, Homo Sapiens
uacuuuacugauaccuuuaucauuccugagac

SEQ ID NO: 262888 - RNA, 32 nt, Homo Sapiens
uuuaguucugugauuuuacacuuuuuacaugu

SEQ ID NO: 262889 - RNA, 32 nt, Homo Sapiens
gcugucgaagucucugggaucccgcugugggu

SEQ ID NO: 262890 - RNA, 32 nt, Homo Sapiens
ucuccugcguaauuuccacuuucauucaugau

SEQ ID NO: 262891 - RNA, 32 nt, Homo Sapiens
ucccaccccggccccaggcuggaagcccuccc

SEQ ID NO: 262892 - RNA, 30 nt, Homo Sapiens
ggguggggagguggcagcugccugcccugc

SEQ ID NO: 262893 - RNA, 32 nt, Homo Sapiens
agaguaaggcgcccagacaccauguggacaag

SEQ ID NO: 262894 - RNA, 32 nt, Homo Sapiens
gaguuagguggaagaaaaaagggagauuguuc

SEQ ID NO: 262895 - RNA, 32 nt, Homo Sapiens
caucaccucagucuccagagccagccaagaga

SEQ ID NO: 262896 - RNA, 32 nt, Homo Sapiens
uuacucuucggguccacacugcuuuuaugagc

SEQ ID NO: 262897 - RNA, 32 nt, Homo Sapiens
gugcggacgccgucaugcugcagcagcuccug

SEQ ID NO: 262898 - RNA, 32 nt, Homo Sapiens
aaagaucaauacgaauggcaaagcugcugagu

SEQ ID NO: 262899 - RNA, 32 nt, Homo Sapiens
uuuauauuuuccacuuuuuuuuuaccuuauuu

SEQ ID NO: 262900 - RNA, 32 nt, Homo Sapiens
cccuccuggaccucaaagaauucuucagaccu

SEQ ID NO: 262901 - RNA, 32 nt, Homo Sapiens
cggcccugugucuuuucuuaauuugagcgaac

SEQ ID NO: 262902 - RNA, 27 nt, Homo Sapiens
aaauaaagcagcaucugagauuuuaaa

SEQ ID NO: 262903 - RNA, 32 nt, Homo Sapiens
ccucacugggucccagcuccccgcuccuguua

SEQ ID NO: 262904 - RNA, 32 nt, Homo Sapiens
gggcgggguuccccggcuuccaagucgcuguu

SEQ ID NO: 262905 - RNA, 32 nt, Homo Sapiens
aaaacaaaauaaaaacagagcccuagagaaau

SEQ ID NO: 262906 - RNA, 32 nt, Homo Sapiens
agagacggcccuucucucuccucacucacccu

SEQ ID NO: 262907 - RNA, 32 nt, Homo Sapiens
ugggcugcugcccugagugcccgggaaaggcu

SEQ ID NO: 262908 - RNA, 32 nt, Homo Sapiens
auuuuagguccuuaauauucuuucuuuuucuc

SEQ ID NO: 262909 - RNA, 32 nt, Homo Sapiens
gucgcgucaccaugaagcuuccucucgggccg

SEQ ID NO: 262910 - RNA, 29 nt, Homo Sapiens
agugucuaucagaggugaaagcuauauca

SEQ ID NO: 262911 - RNA, 32 nt, Homo Sapiens
uacaccgagggcgagcguggcuggggccggga

SEQ ID NO: 262912 - RNA, 32 nt, Homo Sapiens
ucauccccccaaucuuuguuucuuauauuuug

SEQ ID NO: 262913 - RNA, 32 nt, Homo Sapiens
gagaacacgacuggguggagggggcggagggg

SEQ ID NO: 262914 - RNA, 32 nt, Homo Sapiens
uauuuagaagcaaaacagaagauaaauguugg

SEQ ID NO: 262915 - RNA, 32 nt, Homo Sapiens
guuuacaaauauuuuuaggacucacguuaacu

SEQ ID NO: 262916 - RNA, 32 nt, Homo Sapiens
gaaguaaugguacagacuggcuccagcugcau

SEQ ID NO: 262917 - RNA, 32 nt, Homo Sapiens
acuaaaaauaccaguauguguauuaaguauuu

SEQ ID NO: 262918 - RNA, 32 nt, Homo Sapiens
acucagacggucgccccuccccggauuccccc

SEQ ID NO: 262919 - RNA, 32 nt, Homo Sapiens
gcacauuagaaauuauuagaaacauauuacuu

SEQ ID NO: 262920 - RNA, 32 nt, Homo Sapiens
ugcuacuucugccuagcccuggcggaggugca

SEQ ID NO: 262921 - RNA, 32 nt, Homo Sapiens
gcucugugccugcugucagagcccuggugggg

SEQ ID NO: 262922 - RNA, 32 nt, Homo Sapiens
cccuuacgcccugcguguaccccuccccaguu

SEQ ID NO: 262923 - RNA, 32 nt, Homo Sapiens
gcaccgcccacccacaccccgucugccccuug

SEQ ID NO: 262924 - RNA, 32 nt, Homo Sapiens
guguccaagccccagagucccucuggaccaac

SEQ ID NO: 262925 - RNA, 32 nt, Homo Sapiens
agcccugucagcugcccuccuccaccuaaacc

SEQ ID NO: 262926 - RNA, 32 nt, Homo Sapiens
uggggaggggccauggugccaaugcacuuacu

SEQ ID NO: 262927 - RNA, 32 nt, Homo Sapiens
ggcugggcccgguggcucgugccuguaguccc

SEQ ID NO: 262928 - RNA, 32 nt, Homo Sapiens
agauccacaacgggaaagugacuugugcaggg

SEQ ID NO: 262929 - RNA, 32 nt, Homo Sapiens
aagaucgaucuacauacaauagaugaauaaau

SEQ ID NO: 262930 - RNA, 32 nt, Homo Sapiens
cagacaaccugcugcuggccccugacaaugcc

SEQ ID NO: 262931 - RNA, 32 nt, Homo Sapiens
aaagucccagaagcuuccuggucucaugaacc

SEQ ID NO: 262932 - RNA, 32 nt, Homo Sapiens
gagccccggucccagucccuguagucuccugc

SEQ ID NO: 262933 - RNA, 28 nt, Homo Sapiens
gccaugguggcuaccaagcaggccauga

SEQ ID NO: 262934 - RNA, 32 nt, Homo Sapiens
cugguuccauuuuuccucuguucacaaacuac

SEQ ID NO: 262935 - RNA, 32 nt, Homo Sapiens
uauuaggaggaccagcagcucuuaguccauua

SEQ ID NO: 262936 - RNA, 32 nt, Homo Sapiens
guugaaaugcucaagacuuaauuauuugccuu

SEQ ID NO: 262937 - RNA, 32 nt, Homo Sapiens
aaaaacaaauacugagacaguuacaaaguaaa

SEQ ID NO: 262938 - RNA, 32 nt, Homo Sapiens
cagcccccacccaagauggccuggucuguggg

SEQ ID NO: 262939 - RNA, 32 nt, Homo Sapiens
uauccuuuaaaauuauuuucauugauggaacu

SEQ ID NO: 262940 - RNA, 32 nt, Homo Sapiens
aacccacccagcugggacaccaccagaagguc

SEQ ID NO: 262941 - RNA, 32 nt, Homo Sapiens
aaacugguguugccuauuuggacuagauguag

SEQ ID NO: 262942 - RNA, 29 nt, Homo Sapiens
gugguggcugcacagaggacgccugacug

SEQ ID NO: 262943 - RNA, 32 nt, Homo Sapiens
caguugagcacuuuuccaucagcaacaacagc

SEQ ID NO: 262944 - RNA, 32 nt, Homo Sapiens
ugcacuguggcaaagugaaaugugauuuuaau

SEQ ID NO: 262945 - RNA, 32 nt, Homo Sapiens
uucucagauuguggggcacauuguguagccug

SEQ ID NO: 262946 - RNA, 32 nt, Homo Sapiens
cucaccccgacuuuuccuuccuccuuccuccc

SEQ ID NO: 262947 - RNA, 32 nt, Homo Sapiens
gguggguggagccaggcgccggcgucuuccag

SEQ ID NO: 262948 - RNA, 32 nt, Homo Sapiens
ccuuucugugacucacuucuccaaccuguaaa

SEQ ID NO: 262949 - RNA, 32 nt, Homo Sapiens
gaugaccuauuuugccaauauucaucaacuag

SEQ ID NO: 262950 - RNA, 32 nt, Homo Sapiens
ggguucagggguacauguguagguuuguuuau

SEQ ID NO: 262951 - RNA, 32 nt, Homo Sapiens
uuuuuuuuauauuugcacaggacuauacagca

SEQ ID NO: 262952 - RNA, 32 nt, Homo Sapiens
gaggucgcggugagccgagaucgagccauugc

SEQ ID NO: 262953 - RNA, 32 nt, Homo Sapiens
ugucugccggcucgcgggccaggauccucucg

SEQ ID NO: 262954 - RNA, 32 nt, Homo Sapiens
guucauggcucucggcggccuucccaggcccc

SEQ ID NO: 262955 - RNA, 32 nt, Homo Sapiens
cacgaacaccaagugucugcaaguaaacaccu

SEQ ID NO: 262956 - RNA, 32 nt, Homo Sapiens
agccuccagcagagaccgccuuuacccgcccc

SEQ ID NO: 262957 - RNA, 32 nt, Homo Sapiens
guaaaauaauaacuagaacagaagaaaaggaa

SEQ ID NO: 262958 - RNA, 32 nt, Homo Sapiens
ccgucgugcagucaggugggcggugugucuuu

SEQ ID NO: 262959 - RNA, 32 nt, Homo Sapiens
acccccagccacccucccggaauccgagauag

SEQ ID NO: 262960 - RNA, 32 nt, Homo Sapiens
gggcacaugaaacgaccuggaacuugcuucac

SEQ ID NO: 262961 - RNA, 32 nt, Homo Sapiens
ggauccaaacucgcugagggccaggcaagaaa

SEQ ID NO: 262962 - RNA, 32 nt, Homo Sapiens
guccucccuaguuuccucuccuccagcccaga

SEQ ID NO: 262963 - RNA, 32 nt, Homo Sapiens
gagacugcagugagccgagaucgcaccacugc

SEQ ID NO: 262964 - RNA, 32 nt, Homo Sapiens
ccucagcacccccucccuccccaccuggcccu

SEQ ID NO: 262965 - RNA, 32 nt, Homo Sapiens
acugucccaaaaaacuguagucuacucaagaa

SEQ ID NO: 262966 - RNA, 32 nt, Homo Sapiens
uaagauucuugguauuuggauaucuguuagau

SEQ ID NO: 262967 - RNA, 32 nt, Homo Sapiens
ucagugaaggacuaguaguuccugcuacaacu

SEQ ID NO: 262968 - RNA, 32 nt, Homo Sapiens
guuaaauauuuauguuuagugaaaguguucau

SEQ ID NO: 262969 - RNA, 32 nt, Homo Sapiens
ugacagccgccaacacagagcccuggagaggu

SEQ ID NO: 262970 - RNA, 32 nt, Homo Sapiens
cugcagaugaugugaaguuaucaguuggagga

SEQ ID NO: 262971 - RNA, 32 nt, Homo Sapiens
cuucuuacuaaacaggccugacugcuguagcu

SEQ ID NO: 262972 - RNA, 32 nt, Homo Sapiens
cugggagaacaaagucuugaggcugucugggg

SEQ ID NO: 262973 - RNA, 32 nt, Homo Sapiens
cuguuuuuaaacaucuuagguauaacagcaca

SEQ ID NO: 262974 - RNA, 32 nt, Homo Sapiens
aagugugguguugggcagccccugggcguauc

SEQ ID NO: 262975 - RNA, 32 nt, Homo Sapiens
ugcugcauauuuuuuauuuuguuucucuagug

SEQ ID NO: 262976 - RNA, 32 nt, Homo Sapiens
uccaagcaaaaucauggaauuauugguuauaa

SEQ ID NO: 262977 - RNA, 32 nt, Homo Sapiens
uuucuucccccuccauguagaagagggagaag

SEQ ID NO: 262978 - RNA, 32 nt, Homo Sapiens
auaauugaaucuggagaguccuggggccuugu

SEQ ID NO: 262979 - RNA, 32 nt, Homo Sapiens
uguaccccaucccccauacucaccucuuucca

SEQ ID NO: 262980 - RNA, 32 nt, Homo Sapiens
gccugggcucccagccccucucuccuuuuccu

SEQ ID NO: 262981 - RNA, 32 nt, Homo Sapiens
gcagacgugcuccucagacaucagaacaucac

SEQ ID NO: 262982 - RNA, 32 nt, Homo Sapiens
cuguuucucucgcgccaccacuggccgccggc

SEQ ID NO: 262983 - RNA, 32 nt, Homo Sapiens
uuuaauguuaaaaauuagugaaucuaacaaaa

SEQ ID NO: 262984 - RNA, 32 nt, Homo Sapiens
guacugugugcagcugacccaaggcagccaca

SEQ ID NO: 262985 - RNA, 32 nt, Homo Sapiens
gaauguccuuaacucggcaucuccaggacgag

SEQ ID NO: 262986 - RNA, 32 nt, Homo Sapiens
aaauaugagaauuuauauggaacauaaacccu

SEQ ID NO: 262987 - RNA, 32 nt, Homo Sapiens
cauuuuuaccuuucuucaguggacugaauugu

SEQ ID NO: 262988 - RNA, 32 nt, Homo Sapiens
guaggaaggcuuuauaaaauuagagcucauua

SEQ ID NO: 262989 - RNA, 32 nt, Homo Sapiens
acuuauaguuuauuuuugagaaacaagggcaa

SEQ ID NO: 262990 - RNA, 32 nt, Homo Sapiens
ugccccaccgcccagcuccccccagaggccac

SEQ ID NO: 262991 - RNA, 32 nt, Homo Sapiens
guuggggggucuuggaacagcuucucuaugug

SEQ ID NO: 262992 - RNA, 32 nt, Homo Sapiens
cgggcuccagaaggcggacgccgaccgcaagc

SEQ ID NO: 262993 - RNA, 32 nt, Homo Sapiens
aguuugaucugaucagacgcaaggcuggagca

SEQ ID NO: 262994 - RNA, 32 nt, Homo Sapiens
uaugggcacuguaucuaugaaauaccucauaa

SEQ ID NO: 262995 - RNA, 32 nt, Homo Sapiens
gcugaucauugcuccuucucaccuccugccau

SEQ ID NO: 262996 - RNA, 32 nt, Homo Sapiens
agcuacagcugaaagcacugcauguaaagaga

SEQ ID NO: 262997 - RNA, 32 nt, Homo Sapiens
guguauaugucuuccccaaauucauauguuga

SEQ ID NO: 262998 - RNA, 32 nt, Homo Sapiens
uagagcuugcugggcaggcugcaccucaucug

SEQ ID NO: 262999 - RNA, 32 nt, Homo Sapiens
gguccggcgucccagccgccuaccucgcuggg

SEQ ID NO: 263000 - RNA, 32 nt, Homo Sapiens
aaauaacuguguaacaaaucguauuauaaaua

SEQ ID NO: 263001 - RNA, 32 nt, Homo Sapiens
gcaggcgggaggagggggcgcggcugggcugc

SEQ ID NO: 263002 - RNA, 32 nt, Homo Sapiens
aaauguccguauuuagccaguuccuguuuuuc

SEQ ID NO: 263003 - RNA, 32 nt, Homo Sapiens
auccugaaggcaugguucccagacggggugaa

SEQ ID NO: 263004 - RNA, 32 nt, Homo Sapiens
gcccagucccggccccucucccgccccacacc

SEQ ID NO: 263005 - RNA, 31 nt, Homo Sapiens
aaguuugagccccaggcuuaagccuuuccaa

SEQ ID NO: 263006 - RNA, 32 nt, Homo Sapiens
ggugucuguugccaggcgcgggcccagugggc

SEQ ID NO: 263007 - RNA, 32 nt, Homo Sapiens
cauuccucugcagcacuucacuaccaaaugag

SEQ ID NO: 263008 - RNA, 32 nt, Homo Sapiens
cagacuugguucugaggccuaugaaauguuga

SEQ ID NO: 263009 - RNA, 32 nt, Homo Sapiens
ucuucuacuccacugcugucuaucuugccugc

SEQ ID NO: 263010 - RNA, 31 nt, Homo Sapiens
aaugaacauaauuguaagcuuuuguauaaac

SEQ ID NO: 263011 - RNA, 32 nt, Homo Sapiens
cuggugaagcauggcuucggggugcugccucu

SEQ ID NO: 263012 - RNA, 32 nt, Homo Sapiens
gggaaggccaaggggagucaccuucccuugcc

SEQ ID NO: 263013 - RNA, 32 nt, Homo Sapiens
ggccugggaggcgggggccggcgggagccaag

SEQ ID NO: 263014 - RNA, 32 nt, Homo Sapiens
ggcccgagcgcggcgucggggccagcggagag

SEQ ID NO: 263015 - RNA, 32 nt, Homo Sapiens
gcccaagagucacugugaaggaccccgccgcu

SEQ ID NO: 263016 - RNA, 32 nt, Homo Sapiens
agcagcuagugaugcugaugcugcugguccgg

SEQ ID NO: 263017 - RNA, 32 nt, Homo Sapiens
uuuaaaagauuuuuuuuuuuuauguauuuagu

SEQ ID NO: 263018 - RNA, 32 nt, Homo Sapiens
cagcggugggagcagcagcaaguuugaaaauc

SEQ ID NO: 263019 - RNA, 32 nt, Homo Sapiens
agcggggccaagugagcuuucggggccgcggu

SEQ ID NO: 263020 - RNA, 32 nt, Homo Sapiens
agcuucagcuggccugugaagagagcagagug

SEQ ID NO: 263021 - RNA, 32 nt, Homo Sapiens
cagcuccugcggcuccuccuccuuauucuguc

SEQ ID NO: 263022 - RNA, 32 nt, Homo Sapiens
ggugcuuuuuaaaauauucagacaaauaucua

SEQ ID NO: 263023 - RNA, 32 nt, Homo Sapiens
uuuccaaaaaucauaauuguguaagaaugaac

SEQ ID NO: 263024 - RNA, 32 nt, Homo Sapiens
ugccaucagugcgugaugugguaugacauaca

SEQ ID NO: 263025 - RNA, 32 nt, Homo Sapiens
ccggauccagcgucgcccacgaccgcagcagc

SEQ ID NO: 263026 - RNA, 32 nt, Homo Sapiens
cgcagccauggcggacgguggcggcggcggca

SEQ ID NO: 263027 - RNA, 32 nt, Homo Sapiens
aacugaaacaaguuuuaccaaacaguauuuac

SEQ ID NO: 263028 - RNA, 32 nt, Homo Sapiens
uagguuuguuuggaacagaaaucaaagaccaa

SEQ ID NO: 263029 - RNA, 32 nt, Homo Sapiens
uuauuuugcccggcugagguuguggggggcgc

SEQ ID NO: 263030 - RNA, 32 nt, Homo Sapiens
ugcaggaccccacucugcgggagccccauagc

SEQ ID NO: 263031 - RNA, 32 nt, Homo Sapiens
caacuccagaaagcuaaugucuauuggauuuc

SEQ ID NO: 263032 - RNA, 32 nt, Homo Sapiens
aguaaaauuuaaaaauaaaauguuuuucagga

SEQ ID NO: 263033 - RNA, 32 nt, Homo Sapiens
ccacauacaauuuccaaagagcugggcaauuu

SEQ ID NO: 263034 - RNA, 32 nt, Homo Sapiens
guuuggcagggccaagaguccuaaacguuaga

SEQ ID NO: 263035 - RNA, 32 nt, Homo Sapiens
ugcgugcaggcgcuccugcugcucuggcucuc

SEQ ID NO: 263036 - RNA, 32 nt, Homo Sapiens
cucuccaggcccagcucuuccucccagcaacc

SEQ ID NO: 263037 - RNA, 32 nt, Homo Sapiens
caucacucagccagcuggccugugccgcucug

SEQ ID NO: 263038 - RNA, 32 nt, Homo Sapiens
ugccgcccgggagaggugacccgggcgcccug

SEQ ID NO: 263039 - RNA, 32 nt, Homo Sapiens
ggccugcucaagcuccuccugcuccuugcugu

SEQ ID NO: 263040 - RNA, 29 nt, Homo Sapiens
cuucauggaagccuuucccagcccugguc

SEQ ID NO: 263041 - RNA, 32 nt, Homo Sapiens
agcgggcauuuaggcuuugaugagagggcaca

SEQ ID NO: 263042 - RNA, 32 nt, Homo Sapiens
uaugcugcuuuuccaccagacuugcuccauac

SEQ ID NO: 263043 - RNA, 32 nt, Homo Sapiens
uuaugcuucuaaauacauuaaaacauuucuga

SEQ ID NO: 263044 - RNA, 32 nt, Homo Sapiens
ccacccuuguuccccacccccacccccacucc

SEQ ID NO: 263045 - RNA, 32 nt, Homo Sapiens
cacugcacuccagcccgggugacagagcaaga

SEQ ID NO: 263046 - RNA, 32 nt, Homo Sapiens
uguucugggcuugcaagccccccgcccaauca

SEQ ID NO: 263047 - RNA, 32 nt, Homo Sapiens
ccucgcccgcggcucccagggugaucccgagc

SEQ ID NO: 263048 - RNA, 32 nt, Homo Sapiens
auacuugcuaugauucaauaaacuauaaaauu

SEQ ID NO: 263049 - RNA, 32 nt, Homo Sapiens
cccaggggacgcccaugccaggcccggggacc

SEQ ID NO: 263050 - RNA, 32 nt, Homo Sapiens
ugaaucugcggauuucaugacgucucucugcg

SEQ ID NO: 263051 - RNA, 32 nt, Homo Sapiens
ggcuauuggggagguuggcagaugagugagga

SEQ ID NO: 263052 - RNA, 32 nt, Homo Sapiens
ccuauccccggccccgcccgcggccccaccaa

SEQ ID NO: 263053 - RNA, 32 nt, Homo Sapiens
ccaagaacugcagauagcccaggagcaacagc

SEQ ID NO: 263054 - RNA, 32 nt, Homo Sapiens
auuaagaaaaaauaaaacuaccuacgaaauac

SEQ ID NO: 263055 - RNA, 32 nt, Homo Sapiens
ggaauugcauucaaaccagaacagugccuuag

SEQ ID NO: 263056 - RNA, 32 nt, Homo Sapiens
uguaaauugauucaagugagccaggaaagcag

SEQ ID NO: 263057 - RNA, 32 nt, Homo Sapiens
gcccguccgguggccuggaggccggaggcucu

SEQ ID NO: 263058 - RNA, 32 nt, Homo Sapiens
agauguccaugcugaggccaaaugcuggacag

SEQ ID NO: 263059 - RNA, 32 nt, Homo Sapiens
ccucagauuuugcagcuguaaagcagagguag

SEQ ID NO: 263060 - RNA, 32 nt, Homo Sapiens
ggcaauuuuucaagaagugcccauguugcagg

SEQ ID NO: 263061 - RNA, 32 nt, Homo Sapiens
acggaguccuuuccuuucccgggacgcugggc

SEQ ID NO: 263062 - RNA, 32 nt, Homo Sapiens
uaaugaacugaaaaauguguguuaaaguugcu

SEQ ID NO: 263063 - RNA, 32 nt, Homo Sapiens
cguuaaagcucucucguggugcggcugccgag

SEQ ID NO: 263064 - RNA, 32 nt, Homo Sapiens
uggagaaagcaucccccucggagauauaugga

SEQ ID NO: 263065 - RNA, 32 nt, Homo Sapiens
accaaacuucugauuucuuuugcaacccucug

SEQ ID NO: 263066 - RNA, 32 nt, Homo Sapiens
cgggaccaauacuacugacguccucccugauc

SEQ ID NO: 263067 - RNA, 32 nt, Homo Sapiens
gcacuuauuaugcaccaccucccuucagucac

SEQ ID NO: 263068 - RNA, 32 nt, Homo Sapiens
agaucgacaacaucaaccuguucaaggugcag

SEQ ID NO: 263069 - RNA, 30 nt, Homo Sapiens
cuauuugaagauuaauccuaacucugggac

SEQ ID NO: 263070 - RNA, 31 nt, Homo Sapiens
caagcggugucucuccugccccuuggacacg

SEQ ID NO: 263071 - RNA, 32 nt, Homo Sapiens
ucugcuucugguuuuuaguuugccuuugaauu

SEQ ID NO: 263072 - RNA, 32 nt, Homo Sapiens
agcuacaccuaccggcccugggacgccggagg

SEQ ID NO: 263073 - RNA, 32 nt, Homo Sapiens
auuauaauugugugcucuauucugccuucagg

SEQ ID NO: 263074 - RNA, 32 nt, Homo Sapiens
accuguaaucccaacauuuugggaggccgaga

SEQ ID NO: 263075 - RNA, 32 nt, Homo Sapiens
uaucccaucuguuuaggggauuuuaaaaacuu

SEQ ID NO: 263076 - RNA, 32 nt, Homo Sapiens
ucgggcgcgagggucggcggcgcggacacagc

SEQ ID NO: 263077 - RNA, 32 nt, Homo Sapiens
ccuuugugcugagacugcaagguaaagaaaga

SEQ ID NO: 263078 - RNA, 32 nt, Homo Sapiens
ccucuuccaugggacacccccucucaggggca

SEQ ID NO: 263079 - RNA, 32 nt, Homo Sapiens
gauaguuacccaaaguucagucuagauggcac

SEQ ID NO: 263080 - RNA, 32 nt, Homo Sapiens
uccuccaugcugucccugugggcucacaccgg

SEQ ID NO: 263081 - RNA, 32 nt, Homo Sapiens
uuuuuaaaaaaguauuuacguaaguguuugau

SEQ ID NO: 263082 - RNA, 32 nt, Homo Sapiens
gcuaauuugugauccaacauguacaguaugua

SEQ ID NO: 263083 - RNA, 32 nt, Homo Sapiens
accauccugcucauaacaucuuugaaaagaaa

SEQ ID NO: 263084 - RNA, 32 nt, Homo Sapiens
agagagaaacaaacuuuucaaggcuuauauuc

SEQ ID NO: 263085 - RNA, 32 nt, Homo Sapiens
ggguguccuucugcacccuggggugaggacgg

SEQ ID NO: 263086 - RNA, 32 nt, Homo Sapiens
uaggauuguaggaaaauuaucuaguuaaucau

SEQ ID NO: 263087 - RNA, 32 nt, Homo Sapiens
cccugcccccuugcccuuccagcccuuucagc

SEQ ID NO: 263088 - RNA, 32 nt, Homo Sapiens
ggaguggcaggggagcucugucuguggagggg

SEQ ID NO: 263089 - RNA, 32 nt, Homo Sapiens
cugagaucaucuuccucauuuauuucucugca

SEQ ID NO: 263090 - RNA, 32 nt, Homo Sapiens
gcugcagcaaaggaaguaaaauauggccaucu

SEQ ID NO: 263091 - RNA, 32 nt, Homo Sapiens
agggugaggagcagcugccagccccggcaggc

SEQ ID NO: 263092 - RNA, 32 nt, Homo Sapiens
agaggggccggcgggggcuggggaggggguaa

SEQ ID NO: 263093 - RNA, 32 nt, Homo Sapiens
cuggcgccccccagcccuggcuccccagcugc

SEQ ID NO: 263094 - RNA, 32 nt, Homo Sapiens
caguccucaguucucugccacccauugaccua

SEQ ID NO: 263095 - RNA, 32 nt, Homo Sapiens
gauagagguggauaaaagauccacauaacuua

SEQ ID NO: 263096 - RNA, 32 nt, Homo Sapiens
aguaauuuuuaaauauuuguaauauuguugac

SEQ ID NO: 263097 - RNA, 32 nt, Homo Sapiens
cugugccugacagcugacaguuuuaacugaca

SEQ ID NO: 263098 - RNA, 32 nt, Homo Sapiens
ugaaguauucuuuuugaguuucaguauaucuu

SEQ ID NO: 263099 - RNA, 32 nt, Homo Sapiens
ugguauugauaaaugaauaaauuaguauguuc

SEQ ID NO: 263100 - RNA, 32 nt, Homo Sapiens
cuuauuucauuuuguaaucuuauuuucuuucg

SEQ ID NO: 263101 - RNA, 32 nt, Homo Sapiens
ccgcgugacgcugcugcaccacgugcuggagg

SEQ ID NO: 263102 - RNA, 32 nt, Homo Sapiens
acauuuuuauagaacauuucuaccagggggua

SEQ ID NO: 263103 - RNA, 32 nt, Homo Sapiens
cgcgccugcccccaggaugguccgcgcgaggc

SEQ ID NO: 263104 - RNA, 32 nt, Homo Sapiens
ccacagcugccaugauaaguccuuccaugaag

SEQ ID NO: 263105 - RNA, 32 nt, Homo Sapiens
caccuccguugacaguuguuuuggauagguug

SEQ ID NO: 263106 - RNA, 32 nt, Homo Sapiens
cgauuugaggguggagauauagauaauaauaa

SEQ ID NO: 263107 - RNA, 32 nt, Homo Sapiens
cugguuuguuugcuugcuuguuuacuugcuug

SEQ ID NO: 263108 - RNA, 32 nt, Homo Sapiens
cgccgccaccgccccggcugccaucuccuccu

SEQ ID NO: 263109 - RNA, 32 nt, Homo Sapiens
aggguggagauuugggaccuucauaucagcac

SEQ ID NO: 263110 - RNA, 32 nt, Homo Sapiens
aguuagaaagacucgacgagaacaagcuauca

SEQ ID NO: 263111 - RNA, 32 nt, Homo Sapiens
aaagugggaaagggaagcuuagcccgccgcug

SEQ ID NO: 263112 - RNA, 32 nt, Homo Sapiens
uucuucccugaacuagucauuuauguuccauu

SEQ ID NO: 263113 - RNA, 32 nt, Homo Sapiens
cucauauuaaaauaaacauuuccauaagcacu

SEQ ID NO: 263114 - RNA, 32 nt, Homo Sapiens
agacuuucuaugcccuugguccguauuuuuaa

SEQ ID NO: 263115 - RNA, 32 nt, Homo Sapiens
gagacccggaugcacuggggcuaucuaacagu

SEQ ID NO: 263116 - RNA, 32 nt, Homo Sapiens
cgcgccgaacgaggucccgguguagggccgcg

SEQ ID NO: 263117 - RNA, 32 nt, Homo Sapiens
ugaaagcuccaagucacccuuguuacuggcuc

SEQ ID NO: 263118 - RNA, 32 nt, Homo Sapiens
ucuucuauuuauucuccaaaugucuuccaaag

SEQ ID NO: 263119 - RNA, 32 nt, Homo Sapiens
aaauagaaagaacuacagcaaauuuucuaaag

SEQ ID NO: 263120 - RNA, 32 nt, Homo Sapiens
cggaggcgagcggaggguuucccgcggcggag

SEQ ID NO: 263121 - RNA, 32 nt, Homo Sapiens
augugcaggaggagaccauuuccacggacccu

SEQ ID NO: 263122 - RNA, 32 nt, Homo Sapiens
cgaggcggggccugggcagacugugguccggu

SEQ ID NO: 263123 - RNA, 32 nt, Homo Sapiens
gccguacccgcggcggagcgaggaggcgagaa

SEQ ID NO: 263124 - RNA, 32 nt, Homo Sapiens
aguauauguucccuccaggucagcugccccca

SEQ ID NO: 263125 - RNA, 32 nt, Homo Sapiens
uuuaccagggaagaggagaguacucacuuuac

SEQ ID NO: 263126 - RNA, 32 nt, Homo Sapiens
aaaugaguacuaaaauacagcuuugugccuuu

SEQ ID NO: 263127 - RNA, 32 nt, Homo Sapiens
aaaggggcauugagacuauaaagcaguagaca

SEQ ID NO: 263128 - RNA, 32 nt, Homo Sapiens
acugaccauaucuauuuuauaacucaaaauaa

SEQ ID NO: 263129 - RNA, 32 nt, Homo Sapiens
uaguuuuacuucuuucuuucugauuuggauga

SEQ ID NO: 263130 - RNA, 32 nt, Homo Sapiens
ccuuuucauuuaauggggauuccacuaucuca

SEQ ID NO: 263131 - RNA, 30 nt, Homo Sapiens
aauaauuucugugcuucaaggagcuucaga

SEQ ID NO: 263132 - RNA, 32 nt, Homo Sapiens
cagccuccuccuuuuuuggugguggguuuggg

SEQ ID NO: 263133 - RNA, 29 nt, Homo Sapiens
uguuagaugaagaugcugucuacaaggua

SEQ ID NO: 263134 - RNA, 32 nt, Homo Sapiens
aucggccggcccgguggcuuggcaggcagucu

SEQ ID NO: 263135 - RNA, 32 nt, Homo Sapiens
acuugcucuugccucacucgaccuccaaagug

SEQ ID NO: 263136 - RNA, 32 nt, Homo Sapiens
aacauaagguaaccuacugaauuuuauguccc

SEQ ID NO: 263137 - RNA, 32 nt, Homo Sapiens
uaaaacauuuguuugaacaacaauagauaaau

SEQ ID NO: 263138 - RNA, 32 nt, Homo Sapiens
uccaaggaauggagagugucaggcagguaggu

SEQ ID NO: 263139 - RNA, 32 nt, Homo Sapiens
gaauauuuaaacauugcuuuagauuuuccuaa

SEQ ID NO: 263140 - RNA, 32 nt, Homo Sapiens
aaacaagcacuucuccaguauggugccaggac

SEQ ID NO: 263141 - RNA, 32 nt, Homo Sapiens
ugagccagcgagaccaccagcccgccaggagg

SEQ ID NO: 263142 - RNA, 32 nt, Homo Sapiens
acuaaugauuuauguuugauaaacuuaaguuc

SEQ ID NO: 263143 - RNA, 32 nt, Homo Sapiens
ucuuugagaagaagcuguggggccuaaaggug

SEQ ID NO: 263144 - RNA, 32 nt, Homo Sapiens
agaccaaccugggcaacauagcaagacccugu

SEQ ID NO: 263145 - RNA, 32 nt, Homo Sapiens
ugggcagcgcccuuccucuccacccucccaga

SEQ ID NO: 263146 - RNA, 32 nt, Homo Sapiens
gcucgagucugcgucccggcccucagcacugu

SEQ ID NO: 263147 - RNA, 32 nt, Homo Sapiens
caacuucucuacacagcuuuugcauacuuaca

SEQ ID NO: 263148 - RNA, 32 nt, Homo Sapiens
cgggcccccgccuccuuccccggagccccugg

SEQ ID NO: 263149 - RNA, 32 nt, Homo Sapiens
gccugcucccuuucgucgguggggauggagac

SEQ ID NO: 263150 - RNA, 32 nt, Homo Sapiens
aggucaacacagaaaaucaugugcugguugua

SEQ ID NO: 263151 - RNA, 30 nt, Homo Sapiens
ucaugccucccauggaccuauggagagcaa

SEQ ID NO: 263152 - RNA, 32 nt, Homo Sapiens
ucucccucuucucuccuuugcaaaugggucag

SEQ ID NO: 263153 - RNA, 32 nt, Homo Sapiens
agagaagaggauggauaaggacguuauccaag

SEQ ID NO: 263154 - RNA, 32 nt, Homo Sapiens
gcacgagggucuuuuucuccugccuucuccug

SEQ ID NO: 263155 - RNA, 32 nt, Homo Sapiens
ugagaauauagauagucguacaacaacccagg

SEQ ID NO: 263156 - RNA, 32 nt, Homo Sapiens
aggacgugguggcugaacucuaguggggccga

SEQ ID NO: 263157 - RNA, 32 nt, Homo Sapiens
uguacaccagguuuuuacauucuuauuuugaa

SEQ ID NO: 263158 - RNA, 32 nt, Homo Sapiens
guauauuauuaaaauccuguaaauaucuaugg

SEQ ID NO: 263159 - RNA, 32 nt, Homo Sapiens
guucuccccacaagacaccacaugacaagggg

SEQ ID NO: 263160 - RNA, 32 nt, Homo Sapiens
gugcuuuuaaauacuuuuuagaaaguaaucau

SEQ ID NO: 263161 - RNA, 32 nt, Homo Sapiens
acccaggacuccggaccuggaaagaaucuccu

SEQ ID NO: 263162 - RNA, 32 nt, Homo Sapiens
cccguaguuccuccccgauuucuucuccagcg

SEQ ID NO: 263163 - RNA, 32 nt, Homo Sapiens
uuccugucaaacauuaauccagcaaauauaug

SEQ ID NO: 263164 - RNA, 32 nt, Homo Sapiens
aagauuucaucucccaccccagccucaaguag

SEQ ID NO: 263165 - RNA, 32 nt, Homo Sapiens
cgccaccgcucccggccgccgcgcuccgguac

SEQ ID NO: 263166 - RNA, 32 nt, Homo Sapiens
ggcacagacuagguuuccugugagcuggucgg

SEQ ID NO: 263167 - RNA, 32 nt, Homo Sapiens
gaaggcagccagcagcagcugcacuggaacag

SEQ ID NO: 263168 - RNA, 32 nt, Homo Sapiens
agcacaguauuguagagacaccaauauuagcu

SEQ ID NO: 263169 - RNA, 32 nt, Homo Sapiens
ccguccugcugcuggcaaggaaugggaacagu

SEQ ID NO: 263170 - RNA, 32 nt, Homo Sapiens
caagugcaaccucgcugagggcagacuggggc

SEQ ID NO: 263171 - RNA, 32 nt, Homo Sapiens
cagaaugccgugggcuccagcgaagaaaaggc

SEQ ID NO: 263172 - RNA, 32 nt, Homo Sapiens
ugaacuagaagcuguguuagaacagcauggga

SEQ ID NO: 263173 - RNA, 32 nt, Homo Sapiens
uaacuauuugaaauagaaauaguucuuuaaaa

SEQ ID NO: 263174 - RNA, 32 nt, Homo Sapiens
cauucucggccgggcucuaggcgccauggcuc

SEQ ID NO: 263175 - RNA, 32 nt, Homo Sapiens
uaguucuagugguuuucuuauuuuuagaaagg

SEQ ID NO: 263176 - RNA, 32 nt, Homo Sapiens
uugaggacguaccucauuuccuucuuucuucu

SEQ ID NO: 263177 - RNA, 32 nt, Homo Sapiens
agccugccagagcagagccacccgcuggccgu

SEQ ID NO: 263178 - RNA, 32 nt, Homo Sapiens
uuuguucugcggugcccacaggacuuaccccu

SEQ ID NO: 263179 - RNA, 32 nt, Homo Sapiens
aaucagaggcagagaccuccugaugucuuggu

SEQ ID NO: 263180 - RNA, 32 nt, Homo Sapiens
auuacuaauauuugggaaggcuuuaaagacgc

SEQ ID NO: 263181 - RNA, 32 nt, Homo Sapiens
gauucuauuuccccucuucugcuaauaccucu

SEQ ID NO: 263182 - RNA, 32 nt, Homo Sapiens
cugggcugugccuaggguuuguaacccagggc

SEQ ID NO: 263183 - RNA, 32 nt, Homo Sapiens
gugaccaguuuuggggacccguauguggcaaa

SEQ ID NO: 263184 - RNA, 32 nt, Homo Sapiens
ucugcugggaagggaagggaauggggagaagg

SEQ ID NO: 263185 - RNA, 32 nt, Homo Sapiens
gcugcucccaaagccagagcccaggcugggcg

SEQ ID NO: 263186 - RNA, 32 nt, Homo Sapiens
cugugaggucagucauuuugcaugauguaugu

SEQ ID NO: 263187 - RNA, 32 nt, Homo Sapiens
uccaggcuagcuugcugcaggucuggguaguu

SEQ ID NO: 263188 - RNA, 32 nt, Homo Sapiens
aaaaugguccucccuuucccaugagccacaga

SEQ ID NO: 263189 - RNA, 32 nt, Homo Sapiens
guuaauaaacuuuauucuggcuuagcaaaaaa

SEQ ID NO: 263190 - RNA, 32 nt, Homo Sapiens
guuggggccuccaggauuugccugcagcuuuc

SEQ ID NO: 263191 - RNA, 32 nt, Homo Sapiens
accgaacaaccugcuccucaaugacuacuggg

SEQ ID NO: 263192 - RNA, 32 nt, Homo Sapiens
cccagccuggccccggccuuuauguuuuuugu

SEQ ID NO: 263193 - RNA, 32 nt, Homo Sapiens
ugagauguuccuccuucaaaccuuguuacuau

SEQ ID NO: 263194 - RNA, 32 nt, Homo Sapiens
ggccugugggcugccaggauccccaccucucu

SEQ ID NO: 263195 - RNA, 32 nt, Homo Sapiens
agacauaggagacuagaaaaauaaucaauggc

SEQ ID NO: 263196 - RNA, 32 nt, Homo Sapiens
ccugcuuagaugccuggugacucucaucuugc

SEQ ID NO: 263197 - RNA, 32 nt, Homo Sapiens
caggcaaagcuacagccagaauguccguuuga

SEQ ID NO: 263198 - RNA, 32 nt, Homo Sapiens
guucuguaaaagacauuaaagcaaaaaugcaa

SEQ ID NO: 263199 - RNA, 32 nt, Homo Sapiens
ugcacuguaccucucguaacacagcaauacag

SEQ ID NO: 263200 - RNA, 32 nt, Homo Sapiens
ccaaaggguugcauguaguaagaaauugugau

SEQ ID NO: 263201 - RNA, 32 nt, Homo Sapiens
cauuuccacuaaaaauacaaaaaauuagcugg

SEQ ID NO: 263202 - RNA, 32 nt, Homo Sapiens
aauuagccgggcgugguggcgcacgccuuagu

SEQ ID NO: 263203 - RNA, 32 nt, Homo Sapiens
cagcccacccugcuccuccugcccugucccug

SEQ ID NO: 263204 - RNA, 32 nt, Homo Sapiens
ugauagaggcgggguuucgccauguuacacug

SEQ ID NO: 263205 - RNA, 32 nt, Homo Sapiens
cugacucucagaguuguguaugcugagaaucc

SEQ ID NO: 263206 - RNA, 32 nt, Homo Sapiens
agacauacuggcaaacucacauauugcuggug

SEQ ID NO: 263207 - RNA, 32 nt, Homo Sapiens
ggccgccugccccuccuucuccagccucuucu

SEQ ID NO: 263208 - RNA, 25 nt, Homo Sapiens
aucacaggguuugacuacagaguua

SEQ ID NO: 263209 - RNA, 32 nt, Homo Sapiens
aaacagauuaaagaacuagaaaaaagagacuu

SEQ ID NO: 263210 - RNA, 31 nt, Homo Sapiens
ggcacuggaugcaugaauuccacuccuucca

SEQ ID NO: 263211 - RNA, 32 nt, Homo Sapiens
ggccccgccuucuccgcaucgccccgcgcccc

SEQ ID NO: 263212 - RNA, 32 nt, Homo Sapiens
uugcuccuaagcugaagggaaugcccagcuau

SEQ ID NO: 263213 - RNA, 32 nt, Homo Sapiens
guaaaacugugauaaacuuuauauugaagcug

SEQ ID NO: 263214 - RNA, 32 nt, Homo Sapiens
gugauucugaucccugaucaagcuucagaccu

SEQ ID NO: 263215 - RNA, 32 nt, Homo Sapiens
ugagucaagagaaaaacuggaagaacuuccuc

SEQ ID NO: 263216 - RNA, 32 nt, Homo Sapiens
uccagcucuaggucggcugugcuggagucuag

SEQ ID NO: 263217 - RNA, 32 nt, Homo Sapiens
uugagccucaguuuccucuauucuccaccaga

SEQ ID NO: 263218 - RNA, 32 nt, Homo Sapiens
ccugccaggaggagcaaguccggggccgaagu

SEQ ID NO: 263219 - RNA, 31 nt, Homo Sapiens
uggcgaggguggugcagaggaguccggcugg

SEQ ID NO: 263220 - RNA, 32 nt, Homo Sapiens
gcauugcucccucuuuuauuuaauauuugggu

SEQ ID NO: 263221 - RNA, 32 nt, Homo Sapiens
aacagaaucaagaaacaaauacauuuuaauua

SEQ ID NO: 263222 - RNA, 32 nt, Homo Sapiens
acacagucaugcuuccuggauuuuggagucga

SEQ ID NO: 263223 - RNA, 32 nt, Homo Sapiens
gggggugcaagaggcgaauuggcugcccgggg

SEQ ID NO: 263224 - RNA, 32 nt, Homo Sapiens
cauucuuggagagaggugagcaaccaagggaa

SEQ ID NO: 263225 - RNA, 27 nt, Homo Sapiens
gggggguccuucuccacacccacuuug

SEQ ID NO: 263226 - RNA, 32 nt, Homo Sapiens
augcaguugucaacaaguagaaccucagcuug

SEQ ID NO: 263227 - RNA, 31 nt, Homo Sapiens
caccggcgcccaaguccuccccgcgccgccu

SEQ ID NO: 263228 - RNA, 32 nt, Homo Sapiens
gaaggucugugcucuggagccaggguaaaugg

SEQ ID NO: 263229 - RNA, 32 nt, Homo Sapiens
gugauccccccgccucggccucccaaaguucu

SEQ ID NO: 263230 - RNA, 32 nt, Homo Sapiens
gcacacucugcuccuuacaucuaggcccagcu

SEQ ID NO: 263231 - RNA, 32 nt, Homo Sapiens
agucugcaccucagacuuuaguaggaaacaug

SEQ ID NO: 263232 - RNA, 32 nt, Homo Sapiens
acuggauuacagcauauucucaucucuggccc

SEQ ID NO: 263233 - RNA, 32 nt, Homo Sapiens
caggcugaaagauggcggcggcgucugucucu

SEQ ID NO: 263234 - RNA, 32 nt, Homo Sapiens
aacugggcggccucaggccugugggcuucccg

SEQ ID NO: 263235 - RNA, 32 nt, Homo Sapiens
cuuuuuuggggauagcagcugaagaguggagu

SEQ ID NO: 263236 - RNA, 32 nt, Homo Sapiens
agguaaaacauuuuaaucauuguuaucuuauu

SEQ ID NO: 263237 - RNA, 32 nt, Homo Sapiens
aaggaguacagcaauuguaguaacugacacau

SEQ ID NO: 263238 - RNA, 32 nt, Homo Sapiens
cuuugaauaaaauucuaugaaaaaagacacua

SEQ ID NO: 263239 - RNA, 32 nt, Homo Sapiens
uauaggucugcacuuuaguguuuuuuaauugu

SEQ ID NO: 263240 - RNA, 32 nt, Homo Sapiens
agggggacuuccuggugaugagaggaggugga

SEQ ID NO: 263241 - RNA, 32 nt, Homo Sapiens
gagagaaaacaaaauguuauuuuuauaccaua

SEQ ID NO: 263242 - RNA, 32 nt, Homo Sapiens
cugcccugcucccacagaacacagcaauuccu

SEQ ID NO: 263243 - RNA, 32 nt, Homo Sapiens
auuugcucccucaaagcugaagugaggccggg

SEQ ID NO: 263244 - RNA, 32 nt, Homo Sapiens
ucugggcugcgcagcccccggcgccacggcca

SEQ ID NO: 263245 - RNA, 32 nt, Homo Sapiens
auuggaacaaacuacaagugcaaacaaugugg

SEQ ID NO: 263246 - RNA, 32 nt, Homo Sapiens
acaaagugucggccgcccggcgccggcgcccg

SEQ ID NO: 263247 - RNA, 32 nt, Homo Sapiens
ggaauucuuauguucuuuuuucugaguuuguc

SEQ ID NO: 263248 - RNA, 32 nt, Homo Sapiens
aagaaaggauauaaaaggauguuacaaguuug

SEQ ID NO: 263249 - RNA, 32 nt, Homo Sapiens
cccauuuuuucuuuucaccacccuguugagca

SEQ ID NO: 263250 - RNA, 32 nt, Homo Sapiens
guuugugcaaugacaagcugguguggcugaaa

SEQ ID NO: 263251 - RNA, 32 nt, Homo Sapiens
aguuuuauaaauaacaacuguacuuugauuuu

SEQ ID NO: 263252 - RNA, 32 nt, Homo Sapiens
uacugauuucuaaguccaaaaacuauagagca

SEQ ID NO: 263253 - RNA, 32 nt, Homo Sapiens
aagcauuguaacuuacuaauuagucccuuugc

SEQ ID NO: 263254 - RNA, 32 nt, Homo Sapiens
gcuggucucaaaacuccugaccucaagugauc

SEQ ID NO: 263255 - RNA, 32 nt, Homo Sapiens
gacuagguuuccuuaugcaaguggauaugagc

SEQ ID NO: 263256 - RNA, 32 nt, Homo Sapiens
agggagcccaggugcucggcgucugaacgucu

SEQ ID NO: 263257 - RNA, 32 nt, Homo Sapiens
cugcggcggacgccagcaucuccccgccgggg

SEQ ID NO: 263258 - RNA, 32 nt, Homo Sapiens
cuccuagaguucguggaggcgcagcagagggc

SEQ ID NO: 263259 - RNA, 32 nt, Homo Sapiens
ugguuacuuauuuuuucuuuuuggguucucgg

SEQ ID NO: 263260 - RNA, 32 nt, Homo Sapiens
auauuaaaauuuggugcuuauaagagaaaguu

SEQ ID NO: 263261 - RNA, 32 nt, Homo Sapiens
cucuuggcaaauuuuuaaugcaucugugcuug

SEQ ID NO: 263262 - RNA, 32 nt, Homo Sapiens
auacauauauaaauaaauguauaaauacugcu

SEQ ID NO: 263263 - RNA, 32 nt, Homo Sapiens
uuugcacuaaaauuauaucaaggucucagaug

SEQ ID NO: 263264 - RNA, 32 nt, Homo Sapiens
gucccgggccuggcccaggggccccuuuacau

SEQ ID NO: 263265 - RNA, 32 nt, Homo Sapiens
cugugggaggggcugacagcagcagccggcug

SEQ ID NO: 263266 - RNA, 32 nt, Homo Sapiens
cagcuggguggacuuugggaccugcuuuguga

SEQ ID NO: 263267 - RNA, 32 nt, Homo Sapiens
uggacuggcccgagagggaucccgguucccag

SEQ ID NO: 263268 - RNA, 32 nt, Homo Sapiens
ugcugguuucuucgcgucuucugucaggagag

SEQ ID NO: 263269 - RNA, 32 nt, Homo Sapiens
augaucaggauuaaaucaagauauauaucugg

SEQ ID NO: 263270 - RNA, 32 nt, Homo Sapiens
cgcacacacacgcagacacacacacacacaca

SEQ ID NO: 263271 - RNA, 32 nt, Homo Sapiens
gccaaaaguauuuacaaguauggacucaugag

SEQ ID NO: 263272 - RNA, 32 nt, Homo Sapiens
cauuuaacaucaugaauuuaugcuggauaaaa

SEQ ID NO: 263273 - RNA, 32 nt, Homo Sapiens
uuuacaaaaaauuucuccuuaagaaaacagaa

SEQ ID NO: 263274 - RNA, 32 nt, Homo Sapiens
gaccaaggagagggcugcggaugagccaggga

SEQ ID NO: 263275 - RNA, 32 nt, Homo Sapiens
ggaguucaggacuuaggcggagcugccccacc

SEQ ID NO: 263276 - RNA, 32 nt, Homo Sapiens
uaugagucauagaacacaaaucuauugacgga

SEQ ID NO: 263277 - RNA, 32 nt, Homo Sapiens
cccugagcucuucaggcugcauccucugguga

SEQ ID NO: 263278 - RNA, 32 nt, Homo Sapiens
ccugacuuaauaaaacaaaauucauuuauggu

SEQ ID NO: 263279 - RNA, 29 nt, Homo Sapiens
agguugugaucuuuccuguccugacccuc

SEQ ID NO: 263280 - RNA, 32 nt, Homo Sapiens
ccuggcuagggccaguguuuuuaacccuccuc

SEQ ID NO: 263281 - RNA, 32 nt, Homo Sapiens
acgcaccgcccggacucaccaugcgugaaugc

SEQ ID NO: 263282 - RNA, 32 nt, Homo Sapiens
uucccggagguccuccagauaccgccggagua

SEQ ID NO: 263283 - RNA, 32 nt, Homo Sapiens
gaaggcaggguaacuugcugcaggaaacguuu

SEQ ID NO: 263284 - RNA, 32 nt, Homo Sapiens
acuucgaccucuaaacagauuccuccucuucu

SEQ ID NO: 263285 - RNA, 32 nt, Homo Sapiens
guuuucauugguucauuaauucuauaaggcca

SEQ ID NO: 263286 - RNA, 32 nt, Homo Sapiens
ggccccccuuucuugaccuccuccuccuucaa

SEQ ID NO: 263287 - RNA, 32 nt, Homo Sapiens
ccaauuaaacauuauuugauacauauuuaacu

SEQ ID NO: 263288 - RNA, 32 nt, Homo Sapiens
auauucggagcgagcgcgggacgccgaugagu

SEQ ID NO: 263289 - RNA, 32 nt, Homo Sapiens
augugucugugugcgugcgcaucuguguaugu

SEQ ID NO: 263290 - RNA, 32 nt, Homo Sapiens
gcugacagucacccucccucugcugggaugag

SEQ ID NO: 263291 - RNA, 32 nt, Homo Sapiens
ggcccuucccuggccuguggcccagccuggcu

SEQ ID NO: 263292 - RNA, 32 nt, Homo Sapiens
cuugaucaaugccuccuucucucucuuuagcc

SEQ ID NO: 263293 - RNA, 32 nt, Homo Sapiens
agugcugaacaguggaggaagagggacagaug

SEQ ID NO: 263294 - RNA, 32 nt, Homo Sapiens
aaucauuuccuuucuuuuuuuccccaaaguca

SEQ ID NO: 263295 - RNA, 32 nt, Homo Sapiens
cacuauauguauuuuucuucauauucuauuau

SEQ ID NO: 263296 - RNA, 32 nt, Homo Sapiens
acccggccuccucuccugucuucugcagucuu

SEQ ID NO: 263297 - RNA, 32 nt, Homo Sapiens
uagguaaaaaauaauaaauacugcagcuuuau

SEQ ID NO: 263298 - RNA, 32 nt, Homo Sapiens
cggcgcugcuccuccuuccccagcuccgcgcc

SEQ ID NO: 263299 - RNA, 32 nt, Homo Sapiens
gaacauuuaccgaugcuggacccaccuucccc

SEQ ID NO: 263300 - RNA, 32 nt, Homo Sapiens
guguguauuuuuguacuuugcugaaaguaaug

SEQ ID NO: 263301 - RNA, 32 nt, Homo Sapiens
aagaguuaauaaaugcagcaaacuucacuguu

SEQ ID NO: 263302 - RNA, 32 nt, Homo Sapiens
agcuggaacauaacacaugccuaugauccagc

SEQ ID NO: 263303 - RNA, 32 nt, Homo Sapiens
uuauuguuggcgcuuguugaaaacgagcuuuc

SEQ ID NO: 263304 - RNA, 28 nt, Homo Sapiens
aaaucaguuacaggccagagucuccuug

SEQ ID NO: 263305 - RNA, 32 nt, Homo Sapiens
auucacaugcccucggucacugagucuggagu

SEQ ID NO: 263306 - RNA, 32 nt, Homo Sapiens
aagcauuaguaaaaaucuaacaauaugaaggg

SEQ ID NO: 263307 - RNA, 32 nt, Homo Sapiens
ugcuccuguccucuccuuucaaagacugacuu

SEQ ID NO: 263308 - RNA, 32 nt, Homo Sapiens
uccccucccccuccccaacucagauccggccc

SEQ ID NO: 263309 - RNA, 32 nt, Homo Sapiens
agggauugucuacuccagggauuuucuucaaa

SEQ ID NO: 263310 - RNA, 32 nt, Homo Sapiens
ugaaacuuucugcuuugccuccuuccauggcc

SEQ ID NO: 263311 - RNA, 32 nt, Homo Sapiens
uaaggacaugaguuaaauauauuuauauguac

SEQ ID NO: 263312 - RNA, 32 nt, Homo Sapiens
uuaaaccucagacccauccagucgaugccccg

SEQ ID NO: 263313 - RNA, 32 nt, Homo Sapiens
aguacaagaaaaucuuuuuuaguuauuuguuu

SEQ ID NO: 263314 - RNA, 32 nt, Homo Sapiens
uccaaacauaagucacugaaaaacacuuaaua

SEQ ID NO: 263315 - RNA, 32 nt, Homo Sapiens
uccccaggcaacacugauaguaccaaaagcug

SEQ ID NO: 263316 - RNA, 32 nt, Homo Sapiens
agggagcuggaacccgaggggccggggaagcu

SEQ ID NO: 263317 - RNA, 31 nt, Homo Sapiens
ucugcggcugccagccugccccacuggugug

SEQ ID NO: 263318 - RNA, 32 nt, Homo Sapiens
agucaguucugcaguggacaccagcugggucg

SEQ ID NO: 263319 - RNA, 32 nt, Homo Sapiens
agguuuguaaaaauaugccugcugcuuuuccu

SEQ ID NO: 263320 - RNA, 32 nt, Homo Sapiens
gggcgggcgaggggugcacagcgggaagggga

SEQ ID NO: 263321 - RNA, 32 nt, Homo Sapiens
uuuuacuugaugaaacaaaacuauaccucuga

SEQ ID NO: 263322 - RNA, 32 nt, Homo Sapiens
guagccuuggguaauccacuagggcuuuugug

SEQ ID NO: 263323 - RNA, 32 nt, Homo Sapiens
gugccgcuucgucacgggccugcgcgugcggc

SEQ ID NO: 263324 - RNA, 32 nt, Homo Sapiens
ucauuuuagaaaaauggguuguuugaagauga

SEQ ID NO: 263325 - RNA, 32 nt, Homo Sapiens
uuggcuagacuuuaagagaaaagcauuuucua

SEQ ID NO: 263326 - RNA, 32 nt, Homo Sapiens
cucagcacaacacucccucugggcucucuucc

SEQ ID NO: 263327 - RNA, 32 nt, Homo Sapiens
cuccgggauguggaaucgaaaguucuagaaac

SEQ ID NO: 263328 - RNA, 32 nt, Homo Sapiens
cggagggaggugccggucgggcgcgccccgug

SEQ ID NO: 263329 - RNA, 32 nt, Homo Sapiens
agcauccugauguguccccucuccccacuuca

SEQ ID NO: 263330 - RNA, 32 nt, Homo Sapiens
gugcggccuccagcugagccugucucugaauu

SEQ ID NO: 263331 - RNA, 32 nt, Homo Sapiens
agagugaggugcuaauuuugugugagaugaac

SEQ ID NO: 263332 - RNA, 28 nt, Homo Sapiens
acaaugaacuggaguuuucugugcaugu

SEQ ID NO: 263333 - RNA, 32 nt, Homo Sapiens
uguugaguccucucucccacagaugguucagc

SEQ ID NO: 263334 - RNA, 32 nt, Homo Sapiens
cuaacauuuuaaaaauauaaauacuuuagcaa

SEQ ID NO: 263335 - RNA, 32 nt, Homo Sapiens
ugagaggacagagagagaagggaagcugaugc

SEQ ID NO: 263336 - RNA, 32 nt, Homo Sapiens
auugagggcuccaggccccacccccacgccag

SEQ ID NO: 263337 - RNA, 32 nt, Homo Sapiens
uguuccugagcaugggagggaauagaaguucc

SEQ ID NO: 263338 - RNA, 32 nt, Homo Sapiens
gaugcccacaugccacuggaagggaagugggu

SEQ ID NO: 263339 - RNA, 32 nt, Homo Sapiens
caccuccucuguguccucccaaggcagcauuu

SEQ ID NO: 263340 - RNA, 32 nt, Homo Sapiens
guuguagggcucacuuuuauaauccuaggauu

SEQ ID NO: 263341 - RNA, 32 nt, Homo Sapiens
ucuauaaauagucuccugcaccaccgugacuc

SEQ ID NO: 263342 - RNA, 32 nt, Homo Sapiens
uuuaaagccauggaacaaaaccugauacauca

SEQ ID NO: 263343 - RNA, 32 nt, Homo Sapiens
uggacagaggcggucucugccauggucaccau

SEQ ID NO: 263344 - RNA, 32 nt, Homo Sapiens
ggccggccgggcggggaagacugguguggucu

SEQ ID NO: 263345 - RNA, 32 nt, Homo Sapiens
acaucauuguacaucacugucauuccaaaggu

SEQ ID NO: 263346 - RNA, 32 nt, Homo Sapiens
uuuugccacaguguauucuauauugcaaugau

SEQ ID NO: 263347 - RNA, 32 nt, Homo Sapiens
accgugccuggcccucuccuuauuuaauauau

SEQ ID NO: 263348 - RNA, 32 nt, Homo Sapiens
gacgcaauggacccggcgcuggcagcccagau

SEQ ID NO: 263349 - RNA, 32 nt, Homo Sapiens
gcaguggcauuuggaagguuagguggaugcug

SEQ ID NO: 263350 - RNA, 32 nt, Homo Sapiens
caugcagggaagggucugccccugcccuggca

SEQ ID NO: 263351 - RNA, 32 nt, Homo Sapiens
aucccuacccucaaauucacagugagggugga

SEQ ID NO: 263352 - RNA, 32 nt, Homo Sapiens
uuggaggugcgcggccugucuaccuccgccca

SEQ ID NO: 263353 - RNA, 32 nt, Homo Sapiens
acagugcagaauaaauguaacuuuuuaagccu

SEQ ID NO: 263354 - RNA, 32 nt, Homo Sapiens
auaggugcucaguaaagguugucuugaauuga

SEQ ID NO: 263355 - RNA, 32 nt, Homo Sapiens
cucucccaggccugacucuccucccacuugca

SEQ ID NO: 263356 - RNA, 32 nt, Homo Sapiens
agaguggggcugcuaggcaaguggauuagggg

SEQ ID NO: 263357 - RNA, 32 nt, Homo Sapiens
ggugacggguggcucuguggcugguaggacuc

SEQ ID NO: 263358 - RNA, 32 nt, Homo Sapiens
uugacagacuguagcuucucuugcucucgacc

SEQ ID NO: 263359 - RNA, 32 nt, Homo Sapiens
caggcagggauuuggggugcuggaggcagugg

SEQ ID NO: 263360 - RNA, 32 nt, Homo Sapiens
cccuaaguguggacagaguccugggcaguaag

SEQ ID NO: 263361 - RNA, 32 nt, Homo Sapiens
uccuucuaacgaguuguagaaaucugaguaac

SEQ ID NO: 263362 - RNA, 32 nt, Homo Sapiens
agcccacucacuccccgccgucggugcauggc

SEQ ID NO: 263363 - RNA, 32 nt, Homo Sapiens
cucggaaaacgaaguguuguaagcguugcugc

SEQ ID NO: 263364 - RNA, 32 nt, Homo Sapiens
aucagcugucuccuggauaacauuaaagccau

SEQ ID NO: 263365 - RNA, 32 nt, Homo Sapiens
uaaacauaauuuccuagacugaaaguuuuugg

SEQ ID NO: 263366 - RNA, 32 nt, Homo Sapiens
aaaccuaauauguauauguuugaaauacuuca

SEQ ID NO: 263367 - RNA, 32 nt, Homo Sapiens
ccccggcccucccuggcccggccacuccgaag

SEQ ID NO: 263368 - RNA, 32 nt, Homo Sapiens
gguuuguagcagccgggaugugacccuccagg

SEQ ID NO: 263369 - RNA, 32 nt, Homo Sapiens
gcuuagaaaggaucuuggggcuuguuuucucu

SEQ ID NO: 263370 - RNA, 32 nt, Homo Sapiens
uaccuauuuccauuuucgucugucccaucuau

SEQ ID NO: 263371 - RNA, 32 nt, Homo Sapiens
auacaauacuuguccuuuuuuaucuggcuuau

SEQ ID NO: 263372 - RNA, 32 nt, Homo Sapiens
ucucccagccgcgacuucuccuuuugccuuag

SEQ ID NO: 263373 - RNA, 32 nt, Homo Sapiens
aguuuuccuguaaaaauagcacuauaguauca

SEQ ID NO: 263374 - RNA, 32 nt, Homo Sapiens
auaaagcagcuuugucuuauuccucacaucuc

SEQ ID NO: 263375 - RNA, 32 nt, Homo Sapiens
ugggcgugguggcucucgccuguaaucccagc

SEQ ID NO: 263376 - RNA, 32 nt, Homo Sapiens
auaauauaaggaaaaacuuaugcgguagccug

SEQ ID NO: 263377 - RNA, 32 nt, Homo Sapiens
cgcgcgcgccgggaacgaacucuugcguguga

SEQ ID NO: 263378 - RNA, 32 nt, Homo Sapiens
aagaaaugauucaaauugcugcuuggauuuug

SEQ ID NO: 263379 - RNA, 32 nt, Homo Sapiens
uucagaagcaaccuaguuccuggggcagcugg

SEQ ID NO: 263380 - RNA, 32 nt, Homo Sapiens
cucaaauugucucaaaaggaccaagaggaaaa

SEQ ID NO: 263381 - RNA, 32 nt, Homo Sapiens
gucaacaaagugcuuuuucacugccuaaaauu

SEQ ID NO: 263382 - RNA, 32 nt, Homo Sapiens
caguuugcacaaaagucaguauuuuaucuuaa

SEQ ID NO: 263383 - RNA, 32 nt, Homo Sapiens
aauuagaaaaggaaauagguuuuagguggcau

SEQ ID NO: 263384 - RNA, 32 nt, Homo Sapiens
gaggagccaaccccagccuccugccaggauca

SEQ ID NO: 263385 - RNA, 32 nt, Homo Sapiens
aacaaugggcaagcccuuggucauguugaauu

SEQ ID NO: 263386 - RNA, 32 nt, Homo Sapiens
gcagucagcaucuuaaaguaaauguucaugga

SEQ ID NO: 263387 - RNA, 32 nt, Homo Sapiens
gccuuugcgcagagagcagagaggaugacuug

SEQ ID NO: 263388 - RNA, 32 nt, Homo Sapiens
ggaucuguguuugcagaagaguucuaggucag

SEQ ID NO: 263389 - RNA, 32 nt, Homo Sapiens
cuuuuauuuuuccuuugaaauaaagaagugau

SEQ ID NO: 263390 - RNA, 32 nt, Homo Sapiens
acaauauuuuuccaaauugaaaguaaauauuc

SEQ ID NO: 263391 - RNA, 30 nt, Homo Sapiens
caugagggcaggcgugcagcuggagcccuu

SEQ ID NO: 263392 - RNA, 32 nt, Homo Sapiens
ccucgaacgccuggcuuggggugucauucugc

SEQ ID NO: 263393 - RNA, 32 nt, Homo Sapiens
gcaggcggguugauuaaagaugguguuuucuu

SEQ ID NO: 263394 - RNA, 32 nt, Homo Sapiens
ccgcggcucccucaccugccggcuuguuccuc

SEQ ID NO: 263395 - RNA, 32 nt, Homo Sapiens
uucugaacaacaauuuaguuauguaagaagac

SEQ ID NO: 263396 - RNA, 32 nt, Homo Sapiens
ugcaaggauuuuugacacauuuucucagggaa

SEQ ID NO: 263397 - RNA, 32 nt, Homo Sapiens
acaaauaauuuuuccacagggcaaauuauuua

SEQ ID NO: 263398 - RNA, 32 nt, Homo Sapiens
gccuuguggguuccuguugcugagacuuccug

SEQ ID NO: 263399 - RNA, 32 nt, Homo Sapiens
gcagccugggcuaucucuuuaaaguuaucuug

SEQ ID NO: 263400 - RNA, 32 nt, Homo Sapiens
uugaguuuccuuuaaauacucccuuuuugagu

SEQ ID NO: 263401 - RNA, 32 nt, Homo Sapiens
agaggccagagaggaaguuuguucaccagaga

SEQ ID NO: 263402 - RNA, 32 nt, Homo Sapiens
ccaggcggagggaggaagcgggagcuuuaaag

SEQ ID NO: 263403 - RNA, 32 nt, Homo Sapiens
ggcggcgugcgcgggaccugcgcugacuaggu

SEQ ID NO: 263404 - RNA, 32 nt, Homo Sapiens
ucugagggaaacaaagacaauguggaaagaau

SEQ ID NO: 263405 - RNA, 32 nt, Homo Sapiens
ccaauaccaaaauuagcuaugauauucaggaa

SEQ ID NO: 263406 - RNA, 32 nt, Homo Sapiens
cuaagggccacuagaacacaucuggaaaugca

SEQ ID NO: 263407 - RNA, 32 nt, Homo Sapiens
cuugcauuucuuuuccuaaaucuuauuuaggc

SEQ ID NO: 263408 - RNA, 32 nt, Homo Sapiens
aagaaauauuuucaaauucuuaauccaagaaa

SEQ ID NO: 263409 - RNA, 32 nt, Homo Sapiens
cacggccccggguccaggagaagugcucccug

SEQ ID NO: 263410 - RNA, 32 nt, Homo Sapiens
guuggggggagggagggaaaggauuuuuacau

SEQ ID NO: 263411 - RNA, 32 nt, Homo Sapiens
uccuaaguucccuuccccaaagaccaagaaag

SEQ ID NO: 263412 - RNA, 32 nt, Homo Sapiens
ggccauaagagaaaagaaauuauguuaggaau

SEQ ID NO: 263413 - RNA, 32 nt, Homo Sapiens
cuguuauguacuguacuaauucuuacacugcc

SEQ ID NO: 263414 - RNA, 32 nt, Homo Sapiens
auucugcccccgcccuuccuccccuuauuugu

SEQ ID NO: 263415 - RNA, 32 nt, Homo Sapiens
gcaggccccgucugcugggccugcugcccagu

SEQ ID NO: 263416 - RNA, 31 nt, Homo Sapiens
ccacccgcucccucagcucuuucacagaacc

SEQ ID NO: 263417 - RNA, 32 nt, Homo Sapiens
gcagggugacugaguucccugcccagcuuucg

SEQ ID NO: 263418 - RNA, 32 nt, Homo Sapiens
uccccucccccgcucccauuugugcccauccu

SEQ ID NO: 263419 - RNA, 32 nt, Homo Sapiens
ggccugcguuguuugcagaaaagccguggcua

SEQ ID NO: 263420 - RNA, 32 nt, Homo Sapiens
cguccuggguggcaaauguggccaaccugggg

SEQ ID NO: 263421 - RNA, 32 nt, Homo Sapiens
gccucugucccucucgggccggcucuccaucu

SEQ ID NO: 263422 - RNA, 32 nt, Homo Sapiens
gggcuuauuuggcacacccagccugcugcuuc

SEQ ID NO: 263423 - RNA, 32 nt, Homo Sapiens
cucucugugccuuuuucuuuuacaaacugaag

SEQ ID NO: 263424 - RNA, 32 nt, Homo Sapiens
ucccgcauacccaucuucucgggcuucagccc

SEQ ID NO: 263425 - RNA, 32 nt, Homo Sapiens
aagcaucuguccccuccucccccggccgcucc

SEQ ID NO: 263426 - RNA, 32 nt, Homo Sapiens
uguuguggucaccucuggaaaauacauucugc

SEQ ID NO: 263427 - RNA, 32 nt, Homo Sapiens
caacaaggcuugcugcagauacuacugaccag

SEQ ID NO: 263428 - RNA, 29 nt, Homo Sapiens
ucuguaaguggcuucagaggcagcagccc

SEQ ID NO: 263429 - RNA, 32 nt, Homo Sapiens
uacaaccucuggagcuagaagcuccucaggaa

SEQ ID NO: 263430 - RNA, 30 nt, Homo Sapiens
gcggcgcgcaggcgcccuggggacccggua

SEQ ID NO: 263431 - RNA, 32 nt, Homo Sapiens
auucaccgucgcgccgacucuccggagggaaa

SEQ ID NO: 263432 - RNA, 32 nt, Homo Sapiens
gguccgcucagcccaggcgcccgcccccgccc

SEQ ID NO: 263433 - RNA, 32 nt, Homo Sapiens
gacagccgaggccauggaggugacggcggacc

SEQ ID NO: 263434 - RNA, 32 nt, Homo Sapiens
guggcugagcuaccugcagccauggugguaug

SEQ ID NO: 263435 - RNA, 32 nt, Homo Sapiens
uggagcuauuauggcuggucuuccauuugcuu

SEQ ID NO: 263436 - RNA, 32 nt, Homo Sapiens
cccuggagccccagccccugcguccaucugug

SEQ ID NO: 263437 - RNA, 27 nt, Homo Sapiens
uuuguguucuucuucauauucuaaaac

SEQ ID NO: 263438 - RNA, 30 nt, Homo Sapiens
ugaggucugcuaauauggaauggaacugca

SEQ ID NO: 263439 - RNA, 32 nt, Homo Sapiens
acgaucucggcucacugcaaucuccgccuccc

SEQ ID NO: 263440 - RNA, 30 nt, Homo Sapiens
ggcgcgccgcgugcacagccggcgcucguu

SEQ ID NO: 263441 - RNA, 32 nt, Homo Sapiens
cucccugagucgucgccacaccaggcgacagg

SEQ ID NO: 263442 - RNA, 32 nt, Homo Sapiens
gcuguugugaaguggaauaucaggcucauaug

SEQ ID NO: 263443 - RNA, 32 nt, Homo Sapiens
cggcccgccccgcucuccuagucccuugcaac

SEQ ID NO: 263444 - RNA, 32 nt, Homo Sapiens
aaguagcaaccucagggacugggggcuacagu

SEQ ID NO: 263445 - RNA, 32 nt, Homo Sapiens
caagcccggcccggccaguccccgcaaagugg

SEQ ID NO: 263446 - RNA, 32 nt, Homo Sapiens
cuguacuuggauaggcuggcuaacucguagga

SEQ ID NO: 263447 - RNA, 32 nt, Homo Sapiens
cauuagcaacugagaucaaagcacucuuccac

SEQ ID NO: 263448 - RNA, 32 nt, Homo Sapiens
aaugucaagacauggaggguguuuguaauuuu

SEQ ID NO: 263449 - RNA, 32 nt, Homo Sapiens
uugaauuuucuuuccagccaguuacccuuuca

SEQ ID NO: 263450 - RNA, 32 nt, Homo Sapiens
cuuuuagacauucugcagacaugcagggaagu

SEQ ID NO: 263451 - RNA, 32 nt, Homo Sapiens
uagcucuaaaaauuaucucgaguagcuaaaag

SEQ ID NO: 263452 - RNA, 32 nt, Homo Sapiens
gccaauuacuguggagcagcuuucauuccuac

SEQ ID NO: 263453 - RNA, 32 nt, Homo Sapiens
gggggcggggcuugguggugacugcuggcggg

SEQ ID NO: 263454 - RNA, 32 nt, Homo Sapiens
cagccuguccccagccccucaaucuggugcag

SEQ ID NO: 263455 - RNA, 32 nt, Homo Sapiens
ugaaguacuuugcggugcucuguuauauauug

SEQ ID NO: 263456 - RNA, 32 nt, Homo Sapiens
gucauaaagaaccugcugauaaaacagguugc

SEQ ID NO: 263457 - RNA, 32 nt, Homo Sapiens
uccuuacuccaucuccuccccaaacacgcucc

SEQ ID NO: 263458 - RNA, 32 nt, Homo Sapiens
agacauagauuagaaaacauguuguacaauuu

SEQ ID NO: 263459 - RNA, 28 nt, Homo Sapiens
uucaaauaaaauuuagaauuagcuuguc

SEQ ID NO: 263460 - RNA, 32 nt, Homo Sapiens
aguguugaugaaauaauuuugcauucuguuua

SEQ ID NO: 263461 - RNA, 29 nt, Homo Sapiens
gacagaagaaaaaacuaagguucaagauu

SEQ ID NO: 263462 - RNA, 32 nt, Homo Sapiens
ugcuuucucagccccacccccagguccacagu

SEQ ID NO: 263463 - RNA, 32 nt, Homo Sapiens
aaacugagucugauacguagugaggcagagac

SEQ ID NO: 263464 - RNA, 30 nt, Homo Sapiens
ggcaggguagggagguggauaugcagguug

SEQ ID NO: 263465 - RNA, 32 nt, Homo Sapiens
aagaugucagguacauaacauaaaacagauug

SEQ ID NO: 263466 - RNA, 32 nt, Homo Sapiens
uaggcaaugagacccaguggcuagaaauucac

SEQ ID NO: 263467 - RNA, 32 nt, Homo Sapiens
ggcgacgggcugcggcggagggggagagagag

SEQ ID NO: 263468 - RNA, 32 nt, Homo Sapiens
auuuggugaucuuuuuaaaaaauguauaaauu

SEQ ID NO: 263469 - RNA, 32 nt, Homo Sapiens
cuuuaccaaugcagcauuuauuuuaaaauuaa

SEQ ID NO: 263470 - RNA, 32 nt, Homo Sapiens
ccacgggcggcacggaguuccugagcccuuuc

SEQ ID NO: 263471 - RNA, 32 nt, Homo Sapiens
acauuauagcuuaacuagauuguacgagugcu

SEQ ID NO: 263472 - RNA, 32 nt, Homo Sapiens
aaaacagaacuaugguuauuuaucucagauug

SEQ ID NO: 263473 - RNA, 32 nt, Homo Sapiens
uggacuuagcgcugccgcugggcccgccucug

SEQ ID NO: 263474 - RNA, 32 nt, Homo Sapiens
uucuucaagaaggaaauugauccuagugauuu

SEQ ID NO: 263475 - RNA, 32 nt, Homo Sapiens
aaaucuucucugaccuagaagaauccauccaa

SEQ ID NO: 263476 - RNA, 32 nt, Homo Sapiens
cuaacccgagaugcugcugccggcgcccgcgc

SEQ ID NO: 263477 - RNA, 32 nt, Homo Sapiens
agcucaaccccuguccucucccucuuucccca

SEQ ID NO: 263478 - RNA, 32 nt, Homo Sapiens
acauaaacuugaguuuuguaauuuauacaagg

SEQ ID NO: 263479 - RNA, 32 nt, Homo Sapiens
agugcaguccagagaauugucaguaaguggaa

SEQ ID NO: 263480 - RNA, 32 nt, Homo Sapiens
ugacgggaagauggaagggcaugaugaacucu

SEQ ID NO: 263481 - RNA, 32 nt, Homo Sapiens
cacgggcuuacauccucauuacuauucugccu

SEQ ID NO: 263482 - RNA, 32 nt, Homo Sapiens
gggagguuuuagggcccuccccacccacaccc

SEQ ID NO: 263483 - RNA, 32 nt, Homo Sapiens
cccacccuuucugggccuacagcaccacaggc

SEQ ID NO: 263484 - RNA, 32 nt, Homo Sapiens
acuccaccaaaggagcccagccucucuuuguc

SEQ ID NO: 263485 - RNA, 28 nt, Homo Sapiens
caaccaguguguuucaggaugauacaaa

SEQ ID NO: 263486 - RNA, 31 nt, Homo Sapiens
uggaccuuggagcugaaccagggagcuagca

SEQ ID NO: 263487 - RNA, 32 nt, Homo Sapiens
gacacagacagagucaaugcaguaugacugau

SEQ ID NO: 263488 - RNA, 32 nt, Homo Sapiens
gaacugauucaugcaaacaacaaaaaugaacc

SEQ ID NO: 263489 - RNA, 32 nt, Homo Sapiens
ggcugucucuacauaauacuaacauuucagug

SEQ ID NO: 263490 - RNA, 32 nt, Homo Sapiens
gugagggcgggcccgcggccucccucccgcac

SEQ ID NO: 263491 - RNA, 32 nt, Homo Sapiens
agcugguguuuaucauccaaaugucaaaguug

SEQ ID NO: 263492 - RNA, 32 nt, Homo Sapiens
cugaggcagccacuucggccaggucacacgac

SEQ ID NO: 263493 - RNA, 32 nt, Homo Sapiens
ucuggaaugugcucuucuggaagugagaucug

SEQ ID NO: 263494 - RNA, 32 nt, Homo Sapiens
aauuuaaaaaucagccagguguggugguaugc

SEQ ID NO: 263495 - RNA, 32 nt, Homo Sapiens
gaaccgcugaggcgggcgcgggcccggguggg

SEQ ID NO: 263496 - RNA, 32 nt, Homo Sapiens
gaaauuuuguuaacaaugcaaugccacugagu

SEQ ID NO: 263497 - RNA, 32 nt, Homo Sapiens
uguggaaauggcuggauuccucuguguucuuu

SEQ ID NO: 263498 - RNA, 32 nt, Homo Sapiens
ccuaaagugccucccccuguauucccccuccc

SEQ ID NO: 263499 - RNA, 32 nt, Homo Sapiens
uaaggaauauaagcuuccaucaauagugauuu

SEQ ID NO: 263500 - RNA, 32 nt, Homo Sapiens
acaaaccagucuuuauuuuaaaagaaacuuua

SEQ ID NO: 263501 - RNA, 32 nt, Homo Sapiens
agaaauugcuuaaaauuuuguaauuuguauuu

SEQ ID NO: 263502 - RNA, 32 nt, Homo Sapiens
uaccagaggauccuuuagauuaugucagguuu

SEQ ID NO: 263503 - RNA, 32 nt, Homo Sapiens
ucacuuaauguuuguuaaaugacuuuaucuca

SEQ ID NO: 263504 - RNA, 32 nt, Homo Sapiens
uguuucuccuucauugcagccaucacaaggug

SEQ ID NO: 263505 - RNA, 32 nt, Homo Sapiens
auucagccccuccacaccccuaugucugccuu

SEQ ID NO: 263506 - RNA, 32 nt, Homo Sapiens
uccucgggcccucggcgccacaagcuguccgg

SEQ ID NO: 263507 - RNA, 32 nt, Homo Sapiens
uugcuauuguaacuauuuuuaaguauaaaguu

SEQ ID NO: 263508 - RNA, 32 nt, Homo Sapiens
gccucagaccucugggccugugugagcucucu

SEQ ID NO: 263509 - RNA, 32 nt, Homo Sapiens
uuucuuuuaaaaaugcuuguugugaaagacac

SEQ ID NO: 263510 - RNA, 30 nt, Homo Sapiens
uaggcagagaagcucuuugaaguugucaga

SEQ ID NO: 263511 - RNA, 32 nt, Homo Sapiens
aaauacagaaacauccuuuaguuuacaaaaca

SEQ ID NO: 263512 - RNA, 30 nt, Homo Sapiens
gagaguggcgcgcaguccagcgagggcggg

SEQ ID NO: 263513 - RNA, 32 nt, Homo Sapiens
auucuuugcacuuuuucuuaaucauuuuuuau

SEQ ID NO: 263514 - RNA, 32 nt, Homo Sapiens
gccuucuguauccaccaugguguuuggugagu

SEQ ID NO: 263515 - RNA, 29 nt, Homo Sapiens
gcauuuguggcuuuccugauuucugaguc

SEQ ID NO: 263516 - RNA, 32 nt, Homo Sapiens
aagggcugcaacagacccccucuggaaguuua

SEQ ID NO: 263517 - RNA, 32 nt, Homo Sapiens
cuaggcagucccaauuuuuaaaggcagagaag

SEQ ID NO: 263518 - RNA, 32 nt, Homo Sapiens
accauuacuccuaacccaguuccuccuccugu

SEQ ID NO: 263519 - RNA, 32 nt, Homo Sapiens
aaagaaaucuuccauguuuucucuaaguaaca

SEQ ID NO: 263520 - RNA, 32 nt, Homo Sapiens
caggguccaucuugcccuucccccauccaugg

SEQ ID NO: 263521 - RNA, 32 nt, Homo Sapiens
ggggggcgcuggagagcagcucaaagccgacc

SEQ ID NO: 263522 - RNA, 32 nt, Homo Sapiens
cauuaauaagaaaaugaacuaauuguauagcu

SEQ ID NO: 263523 - RNA, 32 nt, Homo Sapiens
ugacuuucaaggacauuuguuugccauuugcu

SEQ ID NO: 263524 - RNA, 32 nt, Homo Sapiens
aaagccaguuuagaaaguauuaguacgggcau

SEQ ID NO: 263525 - RNA, 32 nt, Homo Sapiens
augauagugucugcuuucugcaugaacggcaa

SEQ ID NO: 263526 - RNA, 32 nt, Homo Sapiens
gagacugcagucaggauaugcauuccaggcuc

SEQ ID NO: 263527 - RNA, 32 nt, Homo Sapiens
cucguaggacgcccgguugcaggccaggaccg

SEQ ID NO: 263528 - RNA, 32 nt, Homo Sapiens
agcccaggcugaccucacaccggagcuuccua

SEQ ID NO: 263529 - RNA, 32 nt, Homo Sapiens
uagagccaggacugaagcuucaagauggcuga

SEQ ID NO: 263530 - RNA, 32 nt, Homo Sapiens
auugcacggaacagauucagaugagcauuuuc

SEQ ID NO: 263531 - RNA, 32 nt, Homo Sapiens
ucuccacugcuacuauccugcaugcaucuccu

SEQ ID NO: 263532 - RNA, 32 nt, Homo Sapiens
uguuuuuacaagauggcaauaaaugcuguggg

SEQ ID NO: 263533 - RNA, 32 nt, Homo Sapiens
ugguuucuuugcuuuauuuuuacagcucugaa

SEQ ID NO: 263534 - RNA, 32 nt, Homo Sapiens
gcaggagaaucaaaccuaagcuuacaaagguu

SEQ ID NO: 263535 - RNA, 32 nt, Homo Sapiens
ucugacuuaccuuguuuaggucauuaggcugc

SEQ ID NO: 263536 - RNA, 32 nt, Homo Sapiens
agcucggcggccugcugguccucugcuugcug

SEQ ID NO: 263537 - RNA, 32 nt, Homo Sapiens
cucucccagggccagacagcccuuccuggcuc

SEQ ID NO: 263538 - RNA, 32 nt, Homo Sapiens
uuccaugcuucucuacagguccaaauacugaa

SEQ ID NO: 263539 - RNA, 32 nt, Homo Sapiens
cauggaccgcggcuuccgccggguagcgcggc

SEQ ID NO: 263540 - RNA, 32 nt, Homo Sapiens
caacagcgguggcagggcaggggguggugggc

SEQ ID NO: 263541 - RNA, 32 nt, Homo Sapiens
gcugcccgccgcggccggggacgcaguccgga

SEQ ID NO: 263542 - RNA, 32 nt, Homo Sapiens
ugccugcugcagcccacugcaucuuuugaaag

SEQ ID NO: 263543 - RNA, 32 nt, Homo Sapiens
ggucauggucugaguggggcuuccugggcagu

SEQ ID NO: 263544 - RNA, 32 nt, Homo Sapiens
uuggggaggaagagugggagggagggcugggg

SEQ ID NO: 263545 - RNA, 32 nt, Homo Sapiens
ugaaaagggcuuuauuuucaaaaauuaacuuc

SEQ ID NO: 263546 - RNA, 32 nt, Homo Sapiens
cccagcccccaccucugccuccaggucucauc

SEQ ID NO: 263547 - RNA, 32 nt, Homo Sapiens
ugccaaguacugcaucuaucagaguacaguca

SEQ ID NO: 263548 - RNA, 32 nt, Homo Sapiens
ccuucgugccaaguuccuaaugagaugaauga

SEQ ID NO: 263549 - RNA, 32 nt, Homo Sapiens
gaauguugaagauuaaaguacauaguuacuaa

SEQ ID NO: 263550 - RNA, 32 nt, Homo Sapiens
guaacggcgggggcgugucggcgggaaggaca

SEQ ID NO: 263551 - RNA, 32 nt, Homo Sapiens
cauagaucuaauuuauacagugagucaagacg

SEQ ID NO: 263552 - RNA, 32 nt, Homo Sapiens
ugagcgaguuaggugaucuugguuucaauuuc

SEQ ID NO: 263553 - RNA, 32 nt, Homo Sapiens
cuguggaggcgagaaggcagugugcauuucag

SEQ ID NO: 263554 - RNA, 32 nt, Homo Sapiens
aauagucagaggaggggcguauggaggucagu

SEQ ID NO: 263555 - RNA, 32 nt, Homo Sapiens
cucacacuucaugagcaggcacugccgucauc

SEQ ID NO: 263556 - RNA, 32 nt, Homo Sapiens
gugaaagcuuuuaauuuuuacauauccaagca

SEQ ID NO: 263557 - RNA, 32 nt, Homo Sapiens
cgggaagccggaccuggagccggagcagccgc

SEQ ID NO: 263558 - RNA, 32 nt, Homo Sapiens
uugauugccuucuauaggugauguggacacug

SEQ ID NO: 263559 - RNA, 32 nt, Homo Sapiens
agcguugaccaccuggaccccugcgccacgug

SEQ ID NO: 263560 - RNA, 32 nt, Homo Sapiens
acaaugggguccuucuguaggcaaagguggaa

SEQ ID NO: 263561 - RNA, 32 nt, Homo Sapiens
ugugugaggggaggacggacagacccagacgc

SEQ ID NO: 263562 - RNA, 32 nt, Homo Sapiens
gugauuuaauuuccucuguauuuguauguuua

SEQ ID NO: 263563 - RNA, 31 nt, Homo Sapiens
caaaucuauugaguccccacaguuugcucaa

SEQ ID NO: 263564 - RNA, 25 nt, Homo Sapiens
auggcggcgcccguugucacggccc

SEQ ID NO: 263565 - RNA, 32 nt, Homo Sapiens
ucgugcagcuggggcguccgcagccgcucguc

SEQ ID NO: 263566 - RNA, 32 nt, Homo Sapiens
caauucccauccccacaccaacacaguucuca

SEQ ID NO: 263567 - RNA, 32 nt, Homo Sapiens
gugggccaaccuugacuaccccggcccagggc

SEQ ID NO: 263568 - RNA, 32 nt, Homo Sapiens
gcaugcaccaaaauguaaucugacaggauuuc

SEQ ID NO: 263569 - RNA, 32 nt, Homo Sapiens
ccccaccugccaaauggggauaaauaaucuua

SEQ ID NO: 263570 - RNA, 32 nt, Homo Sapiens
agcccaagccucaggauggacaagaggaaacc

SEQ ID NO: 263571 - RNA, 32 nt, Homo Sapiens
ggagcaggggugcaggauccuguucugagcug

SEQ ID NO: 263572 - RNA, 32 nt, Homo Sapiens
uauauuugacauucuucacugucuguuguuua

SEQ ID NO: 263573 - RNA, 32 nt, Homo Sapiens
acucuucuauuuuugugagacuugggcuuauc

SEQ ID NO: 263574 - RNA, 32 nt, Homo Sapiens
aaaagugauaaguuuucuuaaaaaucauuaaa

SEQ ID NO: 263575 - RNA, 32 nt, Homo Sapiens
uuccauucucucacuuuuuuuuucuguauccc

SEQ ID NO: 263576 - RNA, 32 nt, Homo Sapiens
aaggagcagcuuuggguuugcagagauuacac

SEQ ID NO: 263577 - RNA, 32 nt, Homo Sapiens
ugcuuaccugugacagcagcucuguccccacc

SEQ ID NO: 263578 - RNA, 32 nt, Homo Sapiens
aucugguugcuaaagaauuauuuaccauuaaa

SEQ ID NO: 263579 - RNA, 32 nt, Homo Sapiens
gaacaccguccucgaucuguacgaaaugugaa

SEQ ID NO: 263580 - RNA, 30 nt, Homo Sapiens
ugcugagaaggaggccacgcagcgaggagg

SEQ ID NO: 263581 - RNA, 32 nt, Homo Sapiens
cgccgcaacgcgccggcccaacugcaggaagg

SEQ ID NO: 263582 - RNA, 28 nt, Homo Sapiens
ugcaguguugcuaccagcaagaaugaag

SEQ ID NO: 263583 - RNA, 32 nt, Homo Sapiens
uacuguuuuuauuuguuuguuuguucaauuuu

SEQ ID NO: 263584 - RNA, 32 nt, Homo Sapiens
uguaagaauauaaguauaaagugcguucauau

SEQ ID NO: 263585 - RNA, 32 nt, Homo Sapiens
accugcugacagagcaugacaaagaugacgcu

SEQ ID NO: 263586 - RNA, 32 nt, Homo Sapiens
gaaguuucaaggauuuggacacucaauuaagg

SEQ ID NO: 263587 - RNA, 32 nt, Homo Sapiens
augugaugaaaguuaggcacaccuuuacugca

SEQ ID NO: 263588 - RNA, 32 nt, Homo Sapiens
aaaguuaacaacaacauagaaaccacacgauu

SEQ ID NO: 263589 - RNA, 32 nt, Homo Sapiens
gcgcccgcgccgggagcagccggaggacucgc

SEQ ID NO: 263590 - RNA, 32 nt, Homo Sapiens
aagacagaggcgggaggauugagugggccagg

SEQ ID NO: 263591 - RNA, 32 nt, Homo Sapiens
uagcuucaaauuauggugacuuuguugccuau

SEQ ID NO: 263592 - RNA, 32 nt, Homo Sapiens
gaagcggaggucggcggggggcugcugggagg

SEQ ID NO: 263593 - RNA, 32 nt, Homo Sapiens
acauggcccucagaguugccccauuggcagcc

SEQ ID NO: 263594 - RNA, 32 nt, Homo Sapiens
guaauuuaauuagauagcaaaaucacugcggu

SEQ ID NO: 263595 - RNA, 32 nt, Homo Sapiens
caaagcauggagaguggcaucuucuuugcauc

SEQ ID NO: 263596 - RNA, 32 nt, Homo Sapiens
aaugcucuggagguggcggggaguuguugauu

SEQ ID NO: 263597 - RNA, 32 nt, Homo Sapiens
augccagggaccaagagggauuaacaagcaga

SEQ ID NO: 263598 - RNA, 32 nt, Homo Sapiens
aagcuuuuuuuuuuuuuuuaaucuuccacuga

SEQ ID NO: 263599 - RNA, 32 nt, Homo Sapiens
gccucugaaguauaucaguuucaucucuuacc

SEQ ID NO: 263600 - RNA, 32 nt, Homo Sapiens
cauacugaugagacaacacacacacacacaaa

SEQ ID NO: 263601 - RNA, 32 nt, Homo Sapiens
ggaggaccucacugaggccgagugggaggacc

SEQ ID NO: 263602 - RNA, 32 nt, Homo Sapiens
uccuugguaugcuaagcgccgguccccugggc

SEQ ID NO: 263603 - RNA, 32 nt, Homo Sapiens
aggagcugugauaaguaaguguuuacauacac

SEQ ID NO: 263604 - RNA, 32 nt, Homo Sapiens
cuggcguucauccacccacuccccucggaccu

SEQ ID NO: 263605 - RNA, 32 nt, Homo Sapiens
ugggaggggcaagaaggaaaagaaacagcagc

SEQ ID NO: 263606 - RNA, 32 nt, Homo Sapiens
acacgcccugccugcccucccugcccagcugu

SEQ ID NO: 263607 - RNA, 32 nt, Homo Sapiens
agcccuuuauuucuuccaaccuugcaaggacc

SEQ ID NO: 263608 - RNA, 32 nt, Homo Sapiens
cugcggcgagucccacccacgaccgcagccca

SEQ ID NO: 263609 - RNA, 32 nt, Homo Sapiens
ggggugcugccugaauccauuaaaaaugggag

SEQ ID NO: 263610 - RNA, 32 nt, Homo Sapiens
aaacuuguacuuuauuuuucugauagaaaugg

SEQ ID NO: 263611 - RNA, 32 nt, Homo Sapiens
uauaauuuuuaaaaggacuauugaugauagaa

SEQ ID NO: 263612 - RNA, 32 nt, Homo Sapiens
cugaugagguggcccaugaggugucagcaaca

SEQ ID NO: 263613 - RNA, 32 nt, Homo Sapiens
gucuccuuuucuucauaacauagauacugacg

SEQ ID NO: 263614 - RNA, 32 nt, Homo Sapiens
aagccuucuucucuggacuccucccucgcccu

SEQ ID NO: 263615 - RNA, 32 nt, Homo Sapiens
cugccuucaaccacagaucaaauacuucaaga

SEQ ID NO: 263616 - RNA, 32 nt, Homo Sapiens
caggccccaccccacaccugcuggaucaaaaa

SEQ ID NO: 263617 - RNA, 32 nt, Homo Sapiens
gguggggaguuggggcacguguguguaagggg

SEQ ID NO: 263618 - RNA, 32 nt, Homo Sapiens
gugcaauugauggggccauugcaggucacccu

SEQ ID NO: 263619 - RNA, 32 nt, Homo Sapiens
gggaugugggcgcuaucuccaacugucuuugc

SEQ ID NO: 263620 - RNA, 32 nt, Homo Sapiens
uggaaaacagagcagugaccacuuccuguaag

SEQ ID NO: 263621 - RNA, 32 nt, Homo Sapiens
ggcuaagaucaaguguagaaauccaugaacac

SEQ ID NO: 263622 - RNA, 32 nt, Homo Sapiens
aaucuuguacugaaaucaacaauuagacuugc

SEQ ID NO: 263623 - RNA, 32 nt, Homo Sapiens
ccaaccccaagccugauccccaccggagaccu

SEQ ID NO: 263624 - RNA, 32 nt, Homo Sapiens
gguucaagcgauccuccugccucagucuccug

SEQ ID NO: 263625 - RNA, 32 nt, Homo Sapiens
cacuuauuaaaggauuaugcugauggaaaugu

SEQ ID NO: 263626 - RNA, 32 nt, Homo Sapiens
auucccgagcagcccugcucuggggugcugag

SEQ ID NO: 263627 - RNA, 32 nt, Homo Sapiens
cagcgcccaccaaccgcuccgccccgggacag

SEQ ID NO: 263628 - RNA, 32 nt, Homo Sapiens
ggccaaggcauuugguuccgcggccgccuucu

SEQ ID NO: 263629 - RNA, 32 nt, Homo Sapiens
ggagcuacccuguguuucugagacccuuugug

SEQ ID NO: 263630 - RNA, 32 nt, Homo Sapiens
caaaaaucauuuucuuuuuuuuuuuuuuuuuc

SEQ ID NO: 263631 - RNA, 32 nt, Homo Sapiens
uuucagguacugaguucuuacuugaguaucau

SEQ ID NO: 263632 - RNA, 32 nt, Homo Sapiens
gccagcugagacuaaagccugaucuucuaguu

SEQ ID NO: 263633 - RNA, 27 nt, Homo Sapiens
gacuuggauuaauucaugguaucuuga

SEQ ID NO: 263634 - RNA, 32 nt, Homo Sapiens
ggcuaaauauauuuauucucauuuguuauucc

SEQ ID NO: 263635 - RNA, 32 nt, Homo Sapiens
uacuauuuaaacaagugauuaaauuuagucug

SEQ ID NO: 263636 - RNA, 32 nt, Homo Sapiens
gaccucaagcagcagagccucccgaucacuua

SEQ ID NO: 263637 - RNA, 32 nt, Homo Sapiens
gaguuucgcucuugucacccaggcaggagugc

SEQ ID NO: 263638 - RNA, 29 nt, Homo Sapiens
uaacacauagugaagaucugugggcuuuu

SEQ ID NO: 263639 - RNA, 32 nt, Homo Sapiens
ucggacugcccccagaaagccuccugcccccu

SEQ ID NO: 263640 - RNA, 32 nt, Homo Sapiens
gagcucuuggacccuccucuucacggacccaa

SEQ ID NO: 263641 - RNA, 32 nt, Homo Sapiens
aagugacggccgccucccggcuaccggggacu

SEQ ID NO: 263642 - RNA, 32 nt, Homo Sapiens
agauuaaccuaaugcagaauugcuagguaaag

SEQ ID NO: 263643 - RNA, 32 nt, Homo Sapiens
aagaaaaugaauuuggcauauagaauuauuac

SEQ ID NO: 263644 - RNA, 32 nt, Homo Sapiens
aaaaucaguuuaaugugggaaguacuuaagug

SEQ ID NO: 263645 - RNA, 32 nt, Homo Sapiens
ggggcgacaucccggcggccgcgcugaggcca

SEQ ID NO: 263646 - RNA, 32 nt, Homo Sapiens
agagaaaguggauuuauugugucauaggaguu

SEQ ID NO: 263647 - RNA, 32 nt, Homo Sapiens
ugcacaauauauuuaucuauaugaggaaccca

SEQ ID NO: 263648 - RNA, 32 nt, Homo Sapiens
ucugccgccaggacugcccccuucccagagcc

SEQ ID NO: 263649 - RNA, 32 nt, Homo Sapiens
ugaaacauuacgucuguagucaucuuauuuga

SEQ ID NO: 263650 - RNA, 30 nt, Homo Sapiens
cggucggcgcccgggcucccuagcccugug

SEQ ID NO: 263651 - RNA, 32 nt, Homo Sapiens
uccugcccauucuccgcguccuuuuaccccau

SEQ ID NO: 263652 - RNA, 32 nt, Homo Sapiens
gcaugugugaaugugagcagcauaguugauau

SEQ ID NO: 263653 - RNA, 32 nt, Homo Sapiens
ccucaguuucuccacaccccacuccucuuucu

SEQ ID NO: 263654 - RNA, 32 nt, Homo Sapiens
gaucacagaaugaaggcggggagcgcggccgg

SEQ ID NO: 263655 - RNA, 32 nt, Homo Sapiens
ggaaagauguuguagaaaugugcauaaauuuc

SEQ ID NO: 263656 - RNA, 32 nt, Homo Sapiens
acccacgugcaaaucucaucacuuccugucug

SEQ ID NO: 263657 - RNA, 32 nt, Homo Sapiens
uggguucguggagaccucgaccacgugaggag

SEQ ID NO: 263658 - RNA, 32 nt, Homo Sapiens
cugccgggcgcuuuucucuccuccaauucaga

SEQ ID NO: 263659 - RNA, 30 nt, Homo Sapiens
auuaacccggcggggcggccggcgcgggac

SEQ ID NO: 263660 - RNA, 32 nt, Homo Sapiens
cgguucuguucuguccucuccaccacccccac

SEQ ID NO: 263661 - RNA, 31 nt, Homo Sapiens
ccgcuggccucucugaccgugaggcuggcuc

SEQ ID NO: 263662 - RNA, 32 nt, Homo Sapiens
uuccugugacauuccgccuuccuuccauguag

SEQ ID NO: 263663 - RNA, 32 nt, Homo Sapiens
aucguguucuguguagaccauugucuuuguug

SEQ ID NO: 263664 - RNA, 32 nt, Homo Sapiens
ggaaaagcccauugcccauccuccucuugcag

SEQ ID NO: 263665 - RNA, 32 nt, Homo Sapiens
aggcaaaagaacuaagacuuuuuucaaacuaa

SEQ ID NO: 263666 - RNA, 32 nt, Homo Sapiens
uuucaacuuaaugucuaauguuuucugacaau

SEQ ID NO: 263667 - RNA, 32 nt, Homo Sapiens
ucccugcccacccaccugaggacaggaaccuc

SEQ ID NO: 263668 - RNA, 32 nt, Homo Sapiens
uagugcaucaguggccugguugccaggggcug

SEQ ID NO: 263669 - RNA, 32 nt, Homo Sapiens
caaauuagggaagaaguagggggaaaagauga

SEQ ID NO: 263670 - RNA, 32 nt, Homo Sapiens
gaauguguuguuugguucuacugcauugugga

SEQ ID NO: 263671 - RNA, 32 nt, Homo Sapiens
caggagaggccuucccggggccccccaucagc

SEQ ID NO: 263672 - RNA, 32 nt, Homo Sapiens
cauuaggagagccugaaaguucagugugacug

SEQ ID NO: 263673 - RNA, 32 nt, Homo Sapiens
gugugcuuucuguguuuuauauuaucuugcaa

SEQ ID NO: 263674 - RNA, 32 nt, Homo Sapiens
uggagcagggucucuccuccccggccccuaug

SEQ ID NO: 263675 - RNA, 32 nt, Homo Sapiens
ugcuuugcuguuagccuguuggaccuucgagc

SEQ ID NO: 263676 - RNA, 32 nt, Homo Sapiens
ucuucaccuccaccaugagccuggacauccag

SEQ ID NO: 263677 - RNA, 32 nt, Homo Sapiens
gcugcccggugagcggcgccgggcuugagguc

SEQ ID NO: 263678 - RNA, 32 nt, Homo Sapiens
aaaaaguccacuuuucuuuuuucuggcgaaac

SEQ ID NO: 263679 - RNA, 32 nt, Homo Sapiens
agccacagggaagcuggucagagccagaccuc

SEQ ID NO: 263680 - RNA, 32 nt, Homo Sapiens
cccuuuucaugcaccuccuccuccugauauuc

SEQ ID NO: 263681 - RNA, 32 nt, Homo Sapiens
uacucugaaaauaaguuauuuagucaaguuau

SEQ ID NO: 263682 - RNA, 32 nt, Homo Sapiens
uacaguacaccuguacaaggucugcucuguuc

SEQ ID NO: 263683 - RNA, 32 nt, Homo Sapiens
uuccuuccuuugauucuccuuugguaggugga

SEQ ID NO: 263684 - RNA, 32 nt, Homo Sapiens
gaauuaaaauuugaucuucaagcuuuaaugau

SEQ ID NO: 263685 - RNA, 32 nt, Homo Sapiens
aaaaagcuaaugacaauuuugagaaaagguuu

SEQ ID NO: 263686 - RNA, 32 nt, Homo Sapiens
acccuggagaucccaaaccuagcccccuagug

SEQ ID NO: 263687 - RNA, 32 nt, Homo Sapiens
aauauugaaauuuucuuucaagcaaaguguaa

SEQ ID NO: 263688 - RNA, 32 nt, Homo Sapiens
agcucaagacgggcgagcugcccgagaucucu

SEQ ID NO: 263689 - RNA, 32 nt, Homo Sapiens
uuuguaaagguuucuguuuaaaauauuuuaaa

SEQ ID NO: 263690 - RNA, 32 nt, Homo Sapiens
aggagcuggaggagggcaggggcugagggagu

SEQ ID NO: 263691 - RNA, 30 nt, Homo Sapiens
auucacugccuugccacuccaucucccucc

SEQ ID NO: 263692 - RNA, 32 nt, Homo Sapiens
cgacgccaggguccuggggcccggggucuccu

SEQ ID NO: 263693 - RNA, 32 nt, Homo Sapiens
ugugggccaguguccuuguacaugcuguagca

SEQ ID NO: 263694 - RNA, 30 nt, Homo Sapiens
acgggguuucaccguguuagccaggaaggu

SEQ ID NO: 263695 - RNA, 32 nt, Homo Sapiens
gccaucccaucccaaccccagcucacuagccu

SEQ ID NO: 263696 - RNA, 32 nt, Homo Sapiens
aacuucuagcuaaaauuguaucauuggcccua

SEQ ID NO: 263697 - RNA, 32 nt, Homo Sapiens
cugagacagcugggaccgcgcgcucggcucua

SEQ ID NO: 263698 - RNA, 32 nt, Homo Sapiens
uggaugcacaacaguaugaauguacuuaaugc

SEQ ID NO: 263699 - RNA, 32 nt, Homo Sapiens
agguuuuucuucacugcuuauuucuaggaaau

SEQ ID NO: 263700 - RNA, 32 nt, Homo Sapiens
cgcagacuggcggagaaggagaggaacgggca

SEQ ID NO: 263701 - RNA, 32 nt, Homo Sapiens
agcacaguguaaaccauucuggaguaacaagc

SEQ ID NO: 263702 - RNA, 32 nt, Homo Sapiens
cucacugggagaagaagaguuccugcgcaugc

SEQ ID NO: 263703 - RNA, 32 nt, Homo Sapiens
ccacaagagccucccuggccccagggccgccu

SEQ ID NO: 263704 - RNA, 32 nt, Homo Sapiens
guccucacugaauguuacugauugcggcugag

SEQ ID NO: 263705 - RNA, 32 nt, Homo Sapiens
ccccccuugggagaggaccccugggaagggug

SEQ ID NO: 263706 - RNA, 32 nt, Homo Sapiens
uuuagguauagcaauuguuuuuagguaaauuu

SEQ ID NO: 263707 - RNA, 31 nt, Homo Sapiens
aguaugcagagccccgcaggacccagcgugg

SEQ ID NO: 263708 - RNA, 32 nt, Homo Sapiens
gcaaaggguuucugaaaaacagcaggauuaag

SEQ ID NO: 263709 - RNA, 32 nt, Homo Sapiens
gggagggcggccgcaggcucuccucucguuag

SEQ ID NO: 263710 - RNA, 32 nt, Homo Sapiens
gagugguggcggggcugcuccuucccaccccu

SEQ ID NO: 263711 - RNA, 32 nt, Homo Sapiens
ccaaguuacauggccacgcagauggggccucu

SEQ ID NO: 263712 - RNA, 32 nt, Homo Sapiens
uacaaugaugaaaaugaaacgaaaaggaaguc

SEQ ID NO: 263713 - RNA, 32 nt, Homo Sapiens
aaggggguggugccugcuggggccuagagggg

SEQ ID NO: 263714 - RNA, 32 nt, Homo Sapiens
ggggcugggcgcugccucucggucgacugcuc

SEQ ID NO: 263715 - RNA, 32 nt, Homo Sapiens
cagguuucuguuggagacccagauugugacaa

SEQ ID NO: 263716 - RNA, 32 nt, Homo Sapiens
uggugccugccaggugauguggggcaaagccc

SEQ ID NO: 263717 - RNA, 32 nt, Homo Sapiens
aguguccuggugaagaccuaguucuugccgga

SEQ ID NO: 263718 - RNA, 32 nt, Homo Sapiens
ucuggucuaccugagaucuauauggagcuuaa

SEQ ID NO: 263719 - RNA, 32 nt, Homo Sapiens
uauauuuauagauuguguucacagcaaucauu

SEQ ID NO: 263720 - RNA, 32 nt, Homo Sapiens
aguccaaggaagcucgaagcagguuuaggacc

SEQ ID NO: 263721 - RNA, 32 nt, Homo Sapiens
ccuacagaauuuuaaaugaaucuuaucaaugu

SEQ ID NO: 263722 - RNA, 32 nt, Homo Sapiens
aauuuugcaguucaaugagaagagggagacaa

SEQ ID NO: 263723 - RNA, 32 nt, Homo Sapiens
caguuacuaacaauagcaugggcuuacagcac

SEQ ID NO: 263724 - RNA, 31 nt, Homo Sapiens
cccgaugcaaggugcccacauguguccaucc

SEQ ID NO: 263725 - RNA, 32 nt, Homo Sapiens
uacacacacacacacacacacacacacaaacc

SEQ ID NO: 263726 - RNA, 32 nt, Homo Sapiens
cucugguacccugguuucagacuucuagccuc

SEQ ID NO: 263727 - RNA, 30 nt, Homo Sapiens
gguggugucugugccugaacccccacgagc

SEQ ID NO: 263728 - RNA, 32 nt, Homo Sapiens
ggacuaugugguugucucuggaccuuaucaag

SEQ ID NO: 263729 - RNA, 32 nt, Homo Sapiens
aauggcucgagcucagaagauaaaagauaagu

SEQ ID NO: 263730 - RNA, 32 nt, Homo Sapiens
uggcaccggguggggugguaugccccaggacc

SEQ ID NO: 263731 - RNA, 32 nt, Homo Sapiens
gggcuuggggauaaaauacacuuuuuaaggac

SEQ ID NO: 263732 - RNA, 32 nt, Homo Sapiens
cuaacaguuggcucuuguagccugcaggcuga

SEQ ID NO: 263733 - RNA, 32 nt, Homo Sapiens
gcagagaagaggguggagccuugccgcccccu

SEQ ID NO: 263734 - RNA, 32 nt, Homo Sapiens
uaauugcuaaaauuauuuaauuaaaaaauugg

SEQ ID NO: 263735 - RNA, 32 nt, Homo Sapiens
uuguauuucuauuuagcaaaaaugagugcucu

SEQ ID NO: 263736 - RNA, 32 nt, Homo Sapiens
uagacaauaagcaacuuagaaaaaauaagauu

SEQ ID NO: 263737 - RNA, 32 nt, Homo Sapiens
uuuucaaaagcggggcuucaucugcaaagggc

SEQ ID NO: 263738 - RNA, 32 nt, Homo Sapiens
uaaaggcagagccagauggagaaggaaaggca

SEQ ID NO: 263739 - RNA, 32 nt, Homo Sapiens
uggguugucuuucuccucuccuacauccauuu

SEQ ID NO: 263740 - RNA, 32 nt, Homo Sapiens
aacugcuguauggaaaaaugacagaaaguaac

SEQ ID NO: 263741 - RNA, 32 nt, Homo Sapiens
accaacgacgauggcgaccugcccuccgaccu

SEQ ID NO: 263742 - RNA, 32 nt, Homo Sapiens
acauccaggaacugaggccugaaccauuuugc

SEQ ID NO: 263743 - RNA, 32 nt, Homo Sapiens
guuucccuaccuguuuccuccucccgguccuu

SEQ ID NO: 263744 - RNA, 32 nt, Homo Sapiens
cccagugcagugccagacugucuccucugcuc

SEQ ID NO: 263745 - RNA, 32 nt, Homo Sapiens
uuacugaccaacugaaguauagacuuacugcu

SEQ ID NO: 263746 - RNA, 32 nt, Homo Sapiens
ugcagaaaauagugagauuaagaucauccuua

SEQ ID NO: 263747 - RNA, 32 nt, Homo Sapiens
uaguuaggcucuucaguguaauaaucauggua

SEQ ID NO: 263748 - RNA, 32 nt, Homo Sapiens
gagcggccaccgaugcugcucucugcggguga

SEQ ID NO: 263749 - RNA, 32 nt, Homo Sapiens
ugacugaaucaucacuagcuauggcauuaaaa

SEQ ID NO: 263750 - RNA, 32 nt, Homo Sapiens
ucuguugugaaauauguuaagccacaggccaa

SEQ ID NO: 263751 - RNA, 32 nt, Homo Sapiens
gaaaaaauuucagaauaauguuauuaaagaaa

SEQ ID NO: 263752 - RNA, 32 nt, Homo Sapiens
ugaguaauuacaugaaguacaaaccucucugc

SEQ ID NO: 263753 - RNA, 32 nt, Homo Sapiens
uaaaauuaaaaacaacguauuccuuuguagug

SEQ ID NO: 263754 - RNA, 32 nt, Homo Sapiens
cggaccaagauguccaaaauuauucuugagca

SEQ ID NO: 263755 - RNA, 32 nt, Homo Sapiens
ugugacuuauuagaaaggaauuuuacaugugg

SEQ ID NO: 263756 - RNA, 32 nt, Homo Sapiens
cauuuugcagacucugaucacagugaaacguu

SEQ ID NO: 263757 - RNA, 32 nt, Homo Sapiens
ggacacuggaugcgcugggagccccggggacc

SEQ ID NO: 263758 - RNA, 32 nt, Homo Sapiens
gccccggaggaugcugcugagccccggcacug

SEQ ID NO: 263759 - RNA, 32 nt, Homo Sapiens
gggccucuacccacaccuggaccuccgugccc

SEQ ID NO: 263760 - RNA, 32 nt, Homo Sapiens
ccccuccccuggaugcccaguaauguaugucu

SEQ ID NO: 263761 - RNA, 32 nt, Homo Sapiens
gcugaguuccuucuuucccuuggacgcccagu

SEQ ID NO: 263762 - RNA, 32 nt, Homo Sapiens
acugccaccuggaggcuugggguguggcaccc

SEQ ID NO: 263763 - RNA, 32 nt, Homo Sapiens
agguagaggaauaaaaugaaauacuaaaucuu

SEQ ID NO: 263764 - RNA, 32 nt, Homo Sapiens
ugucaguuuggcagauuuucccucguuaccuc

SEQ ID NO: 263765 - RNA, 32 nt, Homo Sapiens
auuaauuuaaguauuuaauuuucaucuuccuu

SEQ ID NO: 263766 - RNA, 30 nt, Homo Sapiens
cucuaucacuuugccaccuguuugaugugc

SEQ ID NO: 263767 - RNA, 32 nt, Homo Sapiens
acuguguguagccccaggguuuggccauucag

SEQ ID NO: 263768 - RNA, 32 nt, Homo Sapiens
auguuuuuguuucagaaauauguauugcuuuu

SEQ ID NO: 263769 - RNA, 32 nt, Homo Sapiens
uuugacauugcugggccuuccauccggggugc

SEQ ID NO: 263770 - RNA, 32 nt, Homo Sapiens
ugugaggugggguauaccucugaguaaaaccc

SEQ ID NO: 263771 - RNA, 32 nt, Homo Sapiens
ucauugaagagauaauuuuaauguuuuauugg

SEQ ID NO: 263772 - RNA, 32 nt, Homo Sapiens
uugcaagagguaaagaagaaaacuauauauau

SEQ ID NO: 263773 - RNA, 32 nt, Homo Sapiens
cucuaguucuccaaguccccagcccggccagu

SEQ ID NO: 263774 - RNA, 32 nt, Homo Sapiens
uuuuguuuucccccggcccccuaccucugaag

SEQ ID NO: 263775 - RNA, 32 nt, Homo Sapiens
cacauuuuaaaaauaaaggcauuuuuuaaucu

SEQ ID NO: 263776 - RNA, 32 nt, Homo Sapiens
gguagccccuccccagccuucuuucucuccca

SEQ ID NO: 263777 - RNA, 32 nt, Homo Sapiens
uggcucacaccuguaaucccaacacucuggga

SEQ ID NO: 263778 - RNA, 32 nt, Homo Sapiens
uggcucacaccuguaaucucaacacuuuggga

SEQ ID NO: 263779 - RNA, 32 nt, Homo Sapiens
uugacauugcugugacucauggcuuugucuuc

SEQ ID NO: 263780 - RNA, 32 nt, Homo Sapiens
agcuaugccucccagucugucagaauggccac

SEQ ID NO: 263781 - RNA, 32 nt, Homo Sapiens
gguuauugcaucacacuuuuggaccagcaugc

SEQ ID NO: 263782 - RNA, 32 nt, Homo Sapiens
ucgcuuuuccuccgcaaccaugucugacaaac

SEQ ID NO: 263783 - RNA, 32 nt, Homo Sapiens
ucggagcugugcccggccccgcuucagcaccg

SEQ ID NO: 263784 - RNA, 32 nt, Homo Sapiens
uguggcagccacgauugggguuuggaaaccau

SEQ ID NO: 263785 - RNA, 31 nt, Homo Sapiens
ccucuggggagugagucgacgggcccccgag

SEQ ID NO: 263786 - RNA, 32 nt, Homo Sapiens
acgccucuccuggcaggguagacccaggccuc

SEQ ID NO: 263787 - RNA, 23 nt, Homo Sapiens
ucagaauaaaagacaugcaaagu

SEQ ID NO: 263788 - RNA, 32 nt, Homo Sapiens
ucucccucucugcuccuucucucuuccacagg

SEQ ID NO: 263789 - RNA, 32 nt, Homo Sapiens
aaaaccuggguguguccuuucccagugcuuuu

SEQ ID NO: 263790 - RNA, 30 nt, Homo Sapiens
ucacuucauuccaccuauucucugaaaaua

SEQ ID NO: 263791 - RNA, 32 nt, Homo Sapiens
gagcuggcccgcgccgagagccagcaagaugc

SEQ ID NO: 263792 - RNA, 32 nt, Homo Sapiens
cagaaaucaaagugggaaaagguagccaugac

SEQ ID NO: 263793 - RNA, 32 nt, Homo Sapiens
gaagauacagaaaaagaggauggccagcaacc

SEQ ID NO: 263794 - RNA, 32 nt, Homo Sapiens
uuugcccauaugccgaagagccgagcauugcc

SEQ ID NO: 263795 - RNA, 32 nt, Homo Sapiens
gugaccccugcagauagcaccgguauuugauc

SEQ ID NO: 263796 - RNA, 32 nt, Homo Sapiens
aagcccuuggaacacccuggaugcuguugaag

SEQ ID NO: 263797 - RNA, 32 nt, Homo Sapiens
agcacuggcuggagccgagagcuggcaggacu

SEQ ID NO: 263798 - RNA, 32 nt, Homo Sapiens
aaaugccacaagacauaauuuaaaauaaauaa

SEQ ID NO: 263799 - RNA, 29 nt, Homo Sapiens
acgacaaggagacagaggagcugguagcc

SEQ ID NO: 263800 - RNA, 32 nt, Homo Sapiens
cccagccucuucugcccuuccaugcuggcccc

SEQ ID NO: 263801 - RNA, 32 nt, Homo Sapiens
auuaauaggcauuuggguuguuuccagguuug

SEQ ID NO: 263802 - RNA, 32 nt, Homo Sapiens
aacagcaagggugacuccuggcaggugggggc

SEQ ID NO: 263803 - RNA, 32 nt, Homo Sapiens
ccagcggggaggccaugcugcaaagcugccgu

SEQ ID NO: 263804 - RNA, 32 nt, Homo Sapiens
aaaauucacccaccaugccgcacauuacuggg

SEQ ID NO: 263805 - RNA, 32 nt, Homo Sapiens
uuacuuuuguuaauaagaccuacuucaaaaau

SEQ ID NO: 263806 - RNA, 32 nt, Homo Sapiens
gucgcucacaacauggugaguggcaggucaug

SEQ ID NO: 263807 - RNA, 31 nt, Homo Sapiens
uggcggcgccgcagccauggagggaggcggc

SEQ ID NO: 263808 - RNA, 32 nt, Homo Sapiens
accuucagugacucaccuuuaccucaggaacg

SEQ ID NO: 263809 - RNA, 32 nt, Homo Sapiens
acauuuagucaacaucuagaaagcgcugcgga

SEQ ID NO: 263810 - RNA, 32 nt, Homo Sapiens
uguauuaggacauaaaauagaggcugaccuua

SEQ ID NO: 263811 - RNA, 28 nt, Homo Sapiens
ccugcggggcggcauccgagccccuguu

SEQ ID NO: 263812 - RNA, 32 nt, Homo Sapiens
guuuacuucccacuucccagaaucccuuguau

SEQ ID NO: 263813 - RNA, 32 nt, Homo Sapiens
guccgggugcccgccgccgcgccgcgccccgg

SEQ ID NO: 263814 - RNA, 32 nt, Homo Sapiens
ucucucgcuaucugcggguccuguccuuuucu

SEQ ID NO: 263815 - RNA, 32 nt, Homo Sapiens
gguccaguaaugucuuagauugauaaauuagg

SEQ ID NO: 263816 - RNA, 32 nt, Homo Sapiens
ggugagggguggauggucgugcagucaucacc

SEQ ID NO: 263817 - RNA, 32 nt, Homo Sapiens
ucugcugagagcucugcccuccccucaucacc

SEQ ID NO: 263818 - RNA, 32 nt, Homo Sapiens
caaguguggucaagaauaaucuucuuggcuua

SEQ ID NO: 263819 - RNA, 32 nt, Homo Sapiens
gaauauuguaaauguucaaguauuguuaauga

SEQ ID NO: 263820 - RNA, 32 nt, Homo Sapiens
aaaugaaccguuuugcagcugcgcagucuaaa

SEQ ID NO: 263821 - RNA, 32 nt, Homo Sapiens
aaaguaagggaagcagaaggaaggcuuugaaa

SEQ ID NO: 263822 - RNA, 32 nt, Homo Sapiens
auggcccucacaaaugaaagugcuuugucauu

SEQ ID NO: 263823 - RNA, 32 nt, Homo Sapiens
aaaccucguaacaacuaacaagaccaaagaag

SEQ ID NO: 263824 - RNA, 32 nt, Homo Sapiens
cuuucucagccauggccccccaucccugaccu

SEQ ID NO: 263825 - RNA, 32 nt, Homo Sapiens
ccagacuuggagcaaggcaaccuuggagucag

SEQ ID NO: 263826 - RNA, 32 nt, Homo Sapiens
ggccugcagggcccucccuuuucccauuguuc

SEQ ID NO: 263827 - RNA, 32 nt, Homo Sapiens
gaccagcgcuagccugaggagcucagagccua

SEQ ID NO: 263828 - RNA, 32 nt, Homo Sapiens
gaaacggguaaggggaccauuucugcauugcu

SEQ ID NO: 263829 - RNA, 32 nt, Homo Sapiens
uugugaaccagguuagcaaaugaccuaucaaa

SEQ ID NO: 263830 - RNA, 32 nt, Homo Sapiens
accugcuguaugccgaucaucucagaaagggc

SEQ ID NO: 263831 - RNA, 32 nt, Homo Sapiens
ggaagugccucccacccaugagaugggugucc

SEQ ID NO: 263832 - RNA, 32 nt, Homo Sapiens
uuuugagaguaaccuuaacuaauuaaauggau

SEQ ID NO: 263833 - RNA, 32 nt, Homo Sapiens
uuaucugaaaauauauaauuucuggucaugug

SEQ ID NO: 263834 - RNA, 32 nt, Homo Sapiens
ggaccgcgcgcccgggugccugcuccgcuaag

SEQ ID NO: 263835 - RNA, 29 nt, Homo Sapiens
gaagaugguggccacgaagaccuuugcuc

SEQ ID NO: 263836 - RNA, 32 nt, Homo Sapiens
cuccccgcuccucuccgccgcgcacucucgcg

SEQ ID NO: 263837 - RNA, 32 nt, Homo Sapiens
ccccaggcugccaccccuccccacccguucac

SEQ ID NO: 263838 - RNA, 32 nt, Homo Sapiens
agaugagaccucugacguccaagccuuguucc

SEQ ID NO: 263839 - RNA, 32 nt, Homo Sapiens
uguaugugaauuaaauauaugucaaacuuuuu

SEQ ID NO: 263840 - RNA, 32 nt, Homo Sapiens
acccaugccugccuggccugguagagaagaug

SEQ ID NO: 263841 - RNA, 32 nt, Homo Sapiens
cugauccucagcgccugccaggagccagacuc

SEQ ID NO: 263842 - RNA, 32 nt, Homo Sapiens
gcugguucugcuuuuccagaauccugcccuuu

SEQ ID NO: 263843 - RNA, 32 nt, Homo Sapiens
cgaggacaucucuggagaaucaucuggaaggu

SEQ ID NO: 263844 - RNA, 32 nt, Homo Sapiens
agaagcuccagcugcuuucuccuuauugccgg

SEQ ID NO: 263845 - RNA, 32 nt, Homo Sapiens
aaguuguaaguacaguggcaaaugcuuauuac

SEQ ID NO: 263846 - RNA, 32 nt, Homo Sapiens
aaaguguucaccucaugguuguaucaguuugg

SEQ ID NO: 263847 - RNA, 32 nt, Homo Sapiens
uauauaaacaguauuauauacacaauacuacu

SEQ ID NO: 263848 - RNA, 32 nt, Homo Sapiens
uugcuuacaaauaauauaacuuuucaaccuuc

SEQ ID NO: 263849 - RNA, 32 nt, Homo Sapiens
ccugugagagaagcuuguccaguguccucauu

SEQ ID NO: 263850 - RNA, 32 nt, Homo Sapiens
caucuucagucgucugucccaaguccugcucc

SEQ ID NO: 263851 - RNA, 32 nt, Homo Sapiens
uccaaauauacucuuuugucuuucucuuuauu

SEQ ID NO: 263852 - RNA, 32 nt, Homo Sapiens
cgacgccccucuacccucacucacagcagagg

SEQ ID NO: 263853 - RNA, 32 nt, Homo Sapiens
acacacauuaccacuuuuuuuccuauccuguu

SEQ ID NO: 263854 - RNA, 32 nt, Homo Sapiens
cugugggaccaggcccgggcucuaccagccag

SEQ ID NO: 263855 - RNA, 32 nt, Homo Sapiens
ugcauucucaaucaacauuugcuggccccuac

SEQ ID NO: 263856 - RNA, 32 nt, Homo Sapiens
gcggugggaaaugcuggcgcgcgcggcgcggg

SEQ ID NO: 263857 - RNA, 32 nt, Homo Sapiens
uucccugguuggaaauuuauuucuuauuuccu

SEQ ID NO: 263858 - RNA, 32 nt, Homo Sapiens
auaaaauggauuguauuuuucuauaagaacaa

SEQ ID NO: 263859 - RNA, 32 nt, Homo Sapiens
gcuuugaggguggaaggaugggauggguucca

SEQ ID NO: 263860 - RNA, 32 nt, Homo Sapiens
aaaaaucugcaaaagaucuuuccaaagacaau

SEQ ID NO: 263861 - RNA, 27 nt, Homo Sapiens
uccaccuacuucuucagcugcaccccg

SEQ ID NO: 263862 - RNA, 32 nt, Homo Sapiens
ugucgccugugcgccugcgcgcggcgccgagg

SEQ ID NO: 263863 - RNA, 32 nt, Homo Sapiens
ugaagaacacgaaaggggguggccuugaaggc

SEQ ID NO: 263864 - RNA, 32 nt, Homo Sapiens
aacuugagucugucuggcaguaccucaagauc

SEQ ID NO: 263865 - RNA, 32 nt, Homo Sapiens
ccagugaaacucccacagcaacgcagguagau

SEQ ID NO: 263866 - RNA, 32 nt, Homo Sapiens
ucgccucaccaucuguacaaucuccuguuucu

SEQ ID NO: 263867 - RNA, 32 nt, Homo Sapiens
uauucaaggacguggcuguuguccucaccaag

SEQ ID NO: 263868 - RNA, 32 nt, Homo Sapiens
ugcuuauauguuaaauugaauaaaauauucuu

SEQ ID NO: 263869 - RNA, 32 nt, Homo Sapiens
ugauguuuucuuauucuccuuaaauuaagagu

SEQ ID NO: 263870 - RNA, 32 nt, Homo Sapiens
acugucccgagcugguauaggugagaauggag

SEQ ID NO: 263871 - RNA, 32 nt, Homo Sapiens
gagagcagggaggaagcagagcagugcuuaga

SEQ ID NO: 263872 - RNA, 32 nt, Homo Sapiens
ucuuuaugauuaauuguauaaucuucaggaau

SEQ ID NO: 263873 - RNA, 32 nt, Homo Sapiens
aaggggacacaucauauuucugcauuuuacuu

SEQ ID NO: 263874 - RNA, 32 nt, Homo Sapiens
cagacccacucugcggcccgggccgacccugc

SEQ ID NO: 263875 - RNA, 32 nt, Homo Sapiens
gacucgauuuugcugaacgccugcucauuguc

SEQ ID NO: 263876 - RNA, 32 nt, Homo Sapiens
ccgcaguuuuuggcuacaaacugucacaguau

SEQ ID NO: 263877 - RNA, 32 nt, Homo Sapiens
caugggacuggcuggcccugugucucacgggg

SEQ ID NO: 263878 - RNA, 31 nt, Homo Sapiens
auuaggaagggucagaaccaaacaauaccug

SEQ ID NO: 263879 - RNA, 32 nt, Homo Sapiens
gcgcgcgccgggcaugguccccucuuaaaggc

SEQ ID NO: 263880 - RNA, 32 nt, Homo Sapiens
ucugcaucuguguucgugagagauauuguuuc

SEQ ID NO: 263881 - RNA, 32 nt, Homo Sapiens
guuugcaggcaaaugcuucagcucacaugucc

SEQ ID NO: 263882 - RNA, 32 nt, Homo Sapiens
cggggcggggcagggugccgcaggcugggcuu

SEQ ID NO: 263883 - RNA, 32 nt, Homo Sapiens
cuccacucuauuuuuguguuguuuugcacaga

SEQ ID NO: 263884 - RNA, 32 nt, Homo Sapiens
uggggauccuggcuggcccaccuuccuggcug

SEQ ID NO: 263885 - RNA, 32 nt, Homo Sapiens
aaaugagcuggguuaccuggaaccuaaccuug

SEQ ID NO: 263886 - RNA, 32 nt, Homo Sapiens
agcguccgcucccccgcgccacugcgccgcuc

SEQ ID NO: 263887 - RNA, 32 nt, Homo Sapiens
uugcuuuuuuauuccugaagcuuaccagauau

SEQ ID NO: 263888 - RNA, 32 nt, Homo Sapiens
ugcccacagaucagcucugcucauuccccugu

SEQ ID NO: 263889 - RNA, 32 nt, Homo Sapiens
cggggagcuccaggggacccaggcgccgucgc

SEQ ID NO: 263890 - RNA, 32 nt, Homo Sapiens
gaaagaucaaggaaccaagcgccuccacggga

SEQ ID NO: 263891 - RNA, 32 nt, Homo Sapiens
uuccaggauaacacugauuccugacaacagcg

SEQ ID NO: 263892 - RNA, 32 nt, Homo Sapiens
ugcccugaagaggcaggguacacauggggcug

SEQ ID NO: 263893 - RNA, 29 nt, Homo Sapiens
guguguaaguuucuauauuuuucugaaca

SEQ ID NO: 263894 - RNA, 32 nt, Homo Sapiens
gucagccugugcuaggcauggugucuucacag

SEQ ID NO: 263895 - RNA, 31 nt, Homo Sapiens
gaccgcuguguaggcaccugaguuaacggac

SEQ ID NO: 263896 - RNA, 32 nt, Homo Sapiens
auguggucagcaguccccaccagcuaucagau

SEQ ID NO: 263897 - RNA, 32 nt, Homo Sapiens
uuuauccuuuauauuucauuuguaaacuauau

SEQ ID NO: 263898 - RNA, 32 nt, Homo Sapiens
cacagcugggguggccuggggguggggguggg

SEQ ID NO: 263899 - RNA, 30 nt, Homo Sapiens
gucacuagccuugccacuuuucuauguucc

SEQ ID NO: 263900 - RNA, 32 nt, Homo Sapiens
cgggguccgguguccacgcagagugucagcuu

SEQ ID NO: 263901 - RNA, 29 nt, Homo Sapiens
uuguaauuaguuuuguauuuucuauacug

SEQ ID NO: 263902 - RNA, 32 nt, Homo Sapiens
uucuggaggagaaggugacguggcccagcguc

SEQ ID NO: 263903 - RNA, 32 nt, Homo Sapiens
uauuggacugacuuuucuuaugcugggaugug

SEQ ID NO: 263904 - RNA, 32 nt, Homo Sapiens
uugagaaaaaggaaaggccccuugucacaucc

SEQ ID NO: 263905 - RNA, 32 nt, Homo Sapiens
cauuguguguggaaugucgcagacuccuccac

SEQ ID NO: 263906 - RNA, 32 nt, Homo Sapiens
uggccucgcaggcaucacgcaugcucagaggu

SEQ ID NO: 263907 - RNA, 32 nt, Homo Sapiens
ccuguuccuccggcugccuccauggaggcagu

SEQ ID NO: 263908 - RNA, 32 nt, Homo Sapiens
gacucuagaauguccauauuuauuuuuauguu

SEQ ID NO: 263909 - RNA, 32 nt, Homo Sapiens
cucuuuggacacugaggcccucucugccuuuc

SEQ ID NO: 263910 - RNA, 32 nt, Homo Sapiens
caccccucagucccaccccugucucaaggaga

SEQ ID NO: 263911 - RNA, 32 nt, Homo Sapiens
uugcaguucauuuagaguagagauguaccuca

SEQ ID NO: 263912 - RNA, 32 nt, Homo Sapiens
ggacucuuggacuuauaccauugguuugccag

SEQ ID NO: 263913 - RNA, 32 nt, Homo Sapiens
ugcuggacgugucgcugcugcugcugcugcug

SEQ ID NO: 263914 - RNA, 32 nt, Homo Sapiens
accaccugucccuccgguggcccugggugugc

SEQ ID NO: 263915 - RNA, 32 nt, Homo Sapiens
cugcugguguugcugguggauagaagaggggc

SEQ ID NO: 263916 - RNA, 32 nt, Homo Sapiens
cauagccucuucaggaccaacuggagggagag

SEQ ID NO: 263917 - RNA, 32 nt, Homo Sapiens
uacacagaaauauuuuuguaagguucuggggc

SEQ ID NO: 263918 - RNA, 32 nt, Homo Sapiens
aaaauaagaugugcguauguguguguaugccu

SEQ ID NO: 263919 - RNA, 32 nt, Homo Sapiens
ccugcuacccuuggcccucccugcagccccuu

SEQ ID NO: 263920 - RNA, 32 nt, Homo Sapiens
uaaacuucuguuucuauucacaucuucuccac

SEQ ID NO: 263921 - RNA, 32 nt, Homo Sapiens
uuguguuacuuauggaagauaguuuucuccuu

SEQ ID NO: 263922 - RNA, 32 nt, Homo Sapiens
gggguggggggccuggaaacuucguucuguag

SEQ ID NO: 263923 - RNA, 32 nt, Homo Sapiens
aagauaaugcggguaacagacaauauaauagc

SEQ ID NO: 263924 - RNA, 32 nt, Homo Sapiens
guccuucuggaaccagcugucuguggagagaa

SEQ ID NO: 263925 - RNA, 32 nt, Homo Sapiens
accugauauucuuuuuaauuguuuuaaauuuu

SEQ ID NO: 263926 - RNA, 32 nt, Homo Sapiens
uuguaugcuccuggcagcaggcgugggcuucc

SEQ ID NO: 263927 - RNA, 32 nt, Homo Sapiens
gaggcagcccuccuuuuguguauauagaguga

SEQ ID NO: 263928 - RNA, 32 nt, Homo Sapiens
auuucaaguguacuuuaaaauaaaauacuucu

SEQ ID NO: 263929 - RNA, 32 nt, Homo Sapiens
ucccugggacaaaggugcgucccuucagcucu

SEQ ID NO: 263930 - RNA, 32 nt, Homo Sapiens
uuucacacacuaauuuugaggaccccagguuc

SEQ ID NO: 263931 - RNA, 32 nt, Homo Sapiens
ucacgcuccucccacacccacccuggcuucca

SEQ ID NO: 263932 - RNA, 32 nt, Homo Sapiens
aauucagaaagccucugacuacaggacuaggc

SEQ ID NO: 263933 - RNA, 32 nt, Homo Sapiens
ugacuugcaucgucuaccuaccucugccaucc

SEQ ID NO: 263934 - RNA, 32 nt, Homo Sapiens
uaguugauagaguacuuaaaugcauuacuuua

SEQ ID NO: 263935 - RNA, 32 nt, Homo Sapiens
gauauaugcuguauauuuauuuguuagugcau

SEQ ID NO: 263936 - RNA, 32 nt, Homo Sapiens
uaaagaaaaaucaugacuuguaauuaaaugug

SEQ ID NO: 263937 - RNA, 32 nt, Homo Sapiens
gaccuucggggccguggaccucuaugucucca

SEQ ID NO: 263938 - RNA, 32 nt, Homo Sapiens
cguucucggcgcccagcuuuugagcucgcguc

SEQ ID NO: 263939 - RNA, 32 nt, Homo Sapiens
agcugugugguagugguuuaauuugcagccuu

SEQ ID NO: 263940 - RNA, 32 nt, Homo Sapiens
agccaaaaucacuguuaaaaucuuacuacuuc

SEQ ID NO: 263941 - RNA, 32 nt, Homo Sapiens
aaccaagcaguuccucauucacaucaacagag

SEQ ID NO: 263942 - RNA, 32 nt, Homo Sapiens
aaagagcgcgccccucgcaccgcagccagugc

SEQ ID NO: 263943 - RNA, 32 nt, Homo Sapiens
gcggcccguggcgaggcgagguccggggagcg

SEQ ID NO: 263944 - RNA, 32 nt, Homo Sapiens
ccuuaauugucuaaacagaaaaagcacagcua

SEQ ID NO: 263945 - RNA, 32 nt, Homo Sapiens
gagcagcacggccagcaggugggucuucagcu

SEQ ID NO: 263946 - RNA, 32 nt, Homo Sapiens
gcugcugguguuggaugcgcccuggcgcgcug

SEQ ID NO: 263947 - RNA, 30 nt, Homo Sapiens
ggcaaagagaagcuuccucaggcuagcaaa

SEQ ID NO: 263948 - RNA, 32 nt, Homo Sapiens
aggccacccccaccccagaacagaaccguguc

SEQ ID NO: 263949 - RNA, 31 nt, Homo Sapiens
aucugagugcaagucugaggagucccagggu

SEQ ID NO: 263950 - RNA, 32 nt, Homo Sapiens
auggauauagaauaccagcaucagcaagugua

SEQ ID NO: 263951 - RNA, 32 nt, Homo Sapiens
gucacucuucagggcucugcuccuggcucuau

SEQ ID NO: 263952 - RNA, 32 nt, Homo Sapiens
cuccacuaugcagaugggaacucugagccaca

SEQ ID NO: 263953 - RNA, 32 nt, Homo Sapiens
cggccgggcggggaggcuggcucccccacacc

SEQ ID NO: 263954 - RNA, 32 nt, Homo Sapiens
guuuguuacuuugacuuauaaauacaauuugu

SEQ ID NO: 263955 - RNA, 32 nt, Homo Sapiens
ucagaaagcaaccugacaaugauaauacugua

SEQ ID NO: 263956 - RNA, 32 nt, Homo Sapiens
ugacucuucccaguguccugcaugucugcccc

SEQ ID NO: 263957 - RNA, 32 nt, Homo Sapiens
ggaagacggugauucuugcccuuaauucauaa

SEQ ID NO: 263958 - RNA, 32 nt, Homo Sapiens
ggaggcauugccaaaaaucagccaggugaagu

SEQ ID NO: 263959 - RNA, 32 nt, Homo Sapiens
cccgggccccuacagcgugcacaggugcugga

SEQ ID NO: 263960 - RNA, 32 nt, Homo Sapiens
uguaacauuuaccggcuguguacagcaaacaa

SEQ ID NO: 263961 - RNA, 32 nt, Homo Sapiens
cuucuuuuuuaaauuauaaauggugguuugaa

SEQ ID NO: 263962 - RNA, 32 nt, Homo Sapiens
agucaguauuggcaucauacaaccacuuacug

SEQ ID NO: 263963 - RNA, 32 nt, Homo Sapiens
cugguuuauagcagucuucaaguuuuccaucu

SEQ ID NO: 263964 - RNA, 32 nt, Homo Sapiens
cgagaggcgggaggagcagcggcucaggcgcc

SEQ ID NO: 263965 - RNA, 32 nt, Homo Sapiens
gggggguuauuuauaaacacaaggugguuggu

SEQ ID NO: 263966 - RNA, 32 nt, Homo Sapiens
guccugggugaaaugucugccacaaaagauag

SEQ ID NO: 263967 - RNA, 32 nt, Homo Sapiens
gagagggaggggcuggggggaaggcugcccac

SEQ ID NO: 263968 - RNA, 32 nt, Homo Sapiens
cuuguaucuugaugcuuuauaauccugacucu

SEQ ID NO: 263969 - RNA, 32 nt, Homo Sapiens
cucuucaaggggccugggcugcugcucacggg

SEQ ID NO: 263970 - RNA, 31 nt, Homo Sapiens
ggcccccggcacugcgccccacugccagcug

SEQ ID NO: 263971 - RNA, 32 nt, Homo Sapiens
caauggagaaugucaaggcaaguucuaaauua

SEQ ID NO: 263972 - RNA, 30 nt, Homo Sapiens
cgugugccacuugcccagcuucuugggcac

SEQ ID NO: 263973 - RNA, 29 nt, Homo Sapiens
aaagaugcagaugucagaaaagaaagcau

SEQ ID NO: 263974 - RNA, 32 nt, Homo Sapiens
aguugcugucucccaguggaauguucacugac

SEQ ID NO: 263975 - RNA, 32 nt, Homo Sapiens
auuacucagaaacaugccccucuucccugaau

SEQ ID NO: 263976 - RNA, 32 nt, Homo Sapiens
gacccugccuccuggggggccgccccccaaca

SEQ ID NO: 263977 - RNA, 32 nt, Homo Sapiens
auccuugugguccuggaaaugacuuccagugu

SEQ ID NO: 263978 - RNA, 32 nt, Homo Sapiens
ccuacuaaagcuuuugucuggauaggagcaac

SEQ ID NO: 263979 - RNA, 32 nt, Homo Sapiens
gguccaaagcaucuggaagaggaagaagagag

SEQ ID NO: 263980 - RNA, 32 nt, Homo Sapiens
caaacucaucggaaacaaggcacuguugccua

SEQ ID NO: 263981 - RNA, 32 nt, Homo Sapiens
guggccggggaagagguggaggaggaggggcc

SEQ ID NO: 263982 - RNA, 32 nt, Homo Sapiens
ugaguacuuuugugggagaauuccauaaaguc

SEQ ID NO: 263983 - RNA, 32 nt, Homo Sapiens
agaggccccuaacuccucccaagcuggaucug

SEQ ID NO: 263984 - RNA, 32 nt, Homo Sapiens
gaggcagguggguggagggggaugcugggagu

SEQ ID NO: 263985 - RNA, 32 nt, Homo Sapiens
gugauaccaaaauauuuauuuugagguaaaua

SEQ ID NO: 263986 - RNA, 32 nt, Homo Sapiens
gauugaggguggguggguggacccaggcuccc

SEQ ID NO: 263987 - RNA, 32 nt, Homo Sapiens
ggaaaagccuucuuggaaaaugggacauuagc

SEQ ID NO: 263988 - RNA, 32 nt, Homo Sapiens
aggcaaagguauuauguaaaaauauuuaauaa

SEQ ID NO: 263989 - RNA, 32 nt, Homo Sapiens
ggaucggaaaaagaagcuaaaauacuauagaa

SEQ ID NO: 263990 - RNA, 32 nt, Homo Sapiens
cucucugugcagcugugugaccucagcagauc

SEQ ID NO: 263991 - RNA, 32 nt, Homo Sapiens
agagaagggcuuuuggucuugaaguccaggua

SEQ ID NO: 263992 - RNA, 32 nt, Homo Sapiens
uguuuauacuagguagggucuuucuuauguuu

SEQ ID NO: 263993 - RNA, 32 nt, Homo Sapiens
cggaaggcggcagaggcugggaggcggcagaa

SEQ ID NO: 263994 - RNA, 32 nt, Homo Sapiens
gacauguucuaccugcaaguuuugaagucaac

SEQ ID NO: 263995 - RNA, 32 nt, Homo Sapiens
cggccuucuuugauuuuauauuauuaggagca

SEQ ID NO: 263996 - RNA, 32 nt, Homo Sapiens
uaguacauuuaauuugguacauuuucauaaaa

SEQ ID NO: 263997 - RNA, 32 nt, Homo Sapiens
ucuauggaggggcagggaaaagguggcacuug

SEQ ID NO: 263998 - RNA, 32 nt, Homo Sapiens
gcuagcguuucugaaggguuuucccaauuguu

SEQ ID NO: 263999 - RNA, 30 nt, Homo Sapiens
aggugguaggagcuugaucuuuguuucugc

SEQ ID NO: 264000 - RNA, 32 nt, Homo Sapiens
aggggccggacgcucgggcgccuccccgcucc

SEQ ID NO: 264001 - RNA, 32 nt, Homo Sapiens
cgaaccccuggcggccgcgaccccggcucccg

SEQ ID NO: 264002 - RNA, 32 nt, Homo Sapiens
ggagagcacggucuagugggggugggcaugcu

SEQ ID NO: 264003 - RNA, 32 nt, Homo Sapiens
uaaaaaagauauauuuuugaguuacaaaacaa

SEQ ID NO: 264004 - RNA, 32 nt, Homo Sapiens
cccacccgugugccagcgugacggcucggggu

SEQ ID NO: 264005 - RNA, 32 nt, Homo Sapiens
aagccuucaguuuauacucuuaauuuaauuuu

SEQ ID NO: 264006 - RNA, 32 nt, Homo Sapiens
gcuuuggcugcugcgucauacgccccagagcc

SEQ ID NO: 264007 - RNA, 32 nt, Homo Sapiens
gaugucaaagcaaaacaaaaacaauaaccaug

SEQ ID NO: 264008 - RNA, 32 nt, Homo Sapiens
gauuccacuguggagaaauuggaccauaacuu

SEQ ID NO: 264009 - RNA, 32 nt, Homo Sapiens
caacagccaggagcuuccugucaguaaccaug

SEQ ID NO: 264010 - RNA, 32 nt, Homo Sapiens
gauuugaaucccauccuguuggacucaacacu

SEQ ID NO: 264011 - RNA, 32 nt, Homo Sapiens
cucagguguugcauuuuuuggagcaaaaacua

SEQ ID NO: 264012 - RNA, 32 nt, Homo Sapiens
ugguggugugugccuguauucacagcugcuug

SEQ ID NO: 264013 - RNA, 32 nt, Homo Sapiens
uccacguggcccagcccucauagagaccacgc

SEQ ID NO: 264014 - RNA, 32 nt, Homo Sapiens
ugaguuaggaagucagcagcaggggaggcagc

SEQ ID NO: 264015 - RNA, 32 nt, Homo Sapiens
ggucgccacccgccucacgguggaagaugaug

SEQ ID NO: 264016 - RNA, 32 nt, Homo Sapiens
aucguaaaggaaacagaaagaugaaauaagcc

SEQ ID NO: 264017 - RNA, 32 nt, Homo Sapiens
uugucugggaggcaggaagaccacggcggagg

SEQ ID NO: 264018 - RNA, 32 nt, Homo Sapiens
uucaggacucugcgggaggcuggggccccauc

SEQ ID NO: 264019 - RNA, 32 nt, Homo Sapiens
agggaacggcagggcucuuugcuggagcagag

SEQ ID NO: 264020 - RNA, 32 nt, Homo Sapiens
gaagaacccugcaacauguuagacauuaccgu

SEQ ID NO: 264021 - RNA, 32 nt, Homo Sapiens
cgcgagcacgcgaggcucgggggcggcacggg

SEQ ID NO: 264022 - RNA, 32 nt, Homo Sapiens
uuccuaccuugcgugccuggagucugccccag

SEQ ID NO: 264023 - RNA, 32 nt, Homo Sapiens
uuuuauuccuuccuuucuacccccaaccaguc

SEQ ID NO: 264024 - RNA, 29 nt, Homo Sapiens
uuguuuuaaaguuucugucuguaaagugu

SEQ ID NO: 264025 - RNA, 32 nt, Homo Sapiens
cuugccugccagcagugaugucccacccuguu

SEQ ID NO: 264026 - RNA, 32 nt, Homo Sapiens
agagggcagcugcaaacugaaaaacaauccag

SEQ ID NO: 264027 - RNA, 32 nt, Homo Sapiens
gugaguguuucauggggacagaguuucaguuu

SEQ ID NO: 264028 - RNA, 32 nt, Homo Sapiens
gauguuacuaguaaaaaauguuuauagauaac

SEQ ID NO: 264029 - RNA, 32 nt, Homo Sapiens
ggugggugguggcucuuaaggagguguuccua

SEQ ID NO: 264030 - RNA, 32 nt, Homo Sapiens
aaggcagagccucuucggcagcuucuuaaagc

SEQ ID NO: 264031 - RNA, 32 nt, Homo Sapiens
uauugagcugaauuuucuuuuugaaaugaguu

SEQ ID NO: 264032 - RNA, 32 nt, Homo Sapiens
aacuaaaacaacaaacauccuuaaagagguag

SEQ ID NO: 264033 - RNA, 32 nt, Homo Sapiens
ugguuuugagaccaccugaguuggaaccgaua

SEQ ID NO: 264034 - RNA, 32 nt, Homo Sapiens
cugaucacauucuucaaagacggaguauucuu

SEQ ID NO: 264035 - RNA, 32 nt, Homo Sapiens
agguaugaaacaccaaagagagcgcugaaaau

SEQ ID NO: 264036 - RNA, 32 nt, Homo Sapiens
ggaggagaaggaggucgcgcggccucaucccg

SEQ ID NO: 264037 - RNA, 32 nt, Homo Sapiens
gaggccugugucaugauucugggcauggggcu

SEQ ID NO: 264038 - RNA, 32 nt, Homo Sapiens
uggaagcgcgcccugggcugccgggggcgcgg

SEQ ID NO: 264039 - RNA, 32 nt, Homo Sapiens
accagggacauggcagggcccgagggcgcgau

SEQ ID NO: 264040 - RNA, 32 nt, Homo Sapiens
cucccucucccucucuuguuggggcccaugcc

SEQ ID NO: 264041 - RNA, 32 nt, Homo Sapiens
aagcugugaccugguccugaccaucuggggca

SEQ ID NO: 264042 - RNA, 32 nt, Homo Sapiens
guccgcuggugcccuccguggacaauuguguu

SEQ ID NO: 264043 - RNA, 32 nt, Homo Sapiens
uuagaaaugaaaauaauuacuuugaaacuugg

SEQ ID NO: 264044 - RNA, 32 nt, Homo Sapiens
auaaaauuuaaauauaauauugauagcuguca

SEQ ID NO: 264045 - RNA, 32 nt, Homo Sapiens
cuauugccggcggcuccuguuuuaccgcguca

SEQ ID NO: 264046 - RNA, 32 nt, Homo Sapiens
ucucugacugccuuggaguagguggcauaacc

SEQ ID NO: 264047 - RNA, 32 nt, Homo Sapiens
agguaaaucaguaaucacccauguguaucugc

SEQ ID NO: 264048 - RNA, 32 nt, Homo Sapiens
ggggccuggagcaaacuggggcugcagauuua

SEQ ID NO: 264049 - RNA, 32 nt, Homo Sapiens
ccucuucaguccugcccuccccuccucagucc

SEQ ID NO: 264050 - RNA, 32 nt, Homo Sapiens
gucagagccgaguuaagagauuuucuuuguug

SEQ ID NO: 264051 - RNA, 32 nt, Homo Sapiens
augggcugcagguugcagucagggcuugaagu

SEQ ID NO: 264052 - RNA, 32 nt, Homo Sapiens
ugcagaaaacaucugcagugcagcaaauccau

SEQ ID NO: 264053 - RNA, 30 nt, Homo Sapiens
ugagaccccugauuucccacuccacacccu

SEQ ID NO: 264054 - RNA, 32 nt, Homo Sapiens
aucuuuuuuaucuaauuugucuauguuuucuc

SEQ ID NO: 264055 - RNA, 32 nt, Homo Sapiens
cauuuucagugaagucagacucagaacuaggu

SEQ ID NO: 264056 - RNA, 32 nt, Homo Sapiens
aaguaucugaccaacagggggagccugcaggc

SEQ ID NO: 264057 - RNA, 32 nt, Homo Sapiens
gcgucgacugcccagaguccgcggccggggcg

SEQ ID NO: 264058 - RNA, 32 nt, Homo Sapiens
ggaacccugcugucagcacgcagaguguaaag

SEQ ID NO: 264059 - RNA, 32 nt, Homo Sapiens
ccaagcaagugcuagaauuugcuggacugcag

SEQ ID NO: 264060 - RNA, 32 nt, Homo Sapiens
gaagaaaaacauuuaaugauauacucagauau

SEQ ID NO: 264061 - RNA, 32 nt, Homo Sapiens
ugaaauuucuaaaaaauuucucuucacagcca

SEQ ID NO: 264062 - RNA, 32 nt, Homo Sapiens
cuuagggacuuugaacuuaaauauauccccuu

SEQ ID NO: 264063 - RNA, 32 nt, Homo Sapiens
augccugacuggaagcccgagugggaugcggc

SEQ ID NO: 264064 - RNA, 32 nt, Homo Sapiens
ggccccacucugggaagguggccagaaaccgu

SEQ ID NO: 264065 - RNA, 32 nt, Homo Sapiens
uuggcuuuguuuaucuccaucaucauccaaac

SEQ ID NO: 264066 - RNA, 32 nt, Homo Sapiens
cuggggaacccauugggaaacacaauuguaaa

SEQ ID NO: 264067 - RNA, 29 nt, Homo Sapiens
ugaaucccaaaauaaaucuguagccuuug

SEQ ID NO: 264068 - RNA, 32 nt, Homo Sapiens
uauugauuaaauuauuugauuuauaugaaauc

SEQ ID NO: 264069 - RNA, 32 nt, Homo Sapiens
cagacucgcucgcgcuuucucuuucuccuuuc

SEQ ID NO: 264070 - RNA, 32 nt, Homo Sapiens
gcacggggcagagggacuauguugugagccug

SEQ ID NO: 264071 - RNA, 30 nt, Homo Sapiens
aaugucaguuauucuggggaaacccaacug

SEQ ID NO: 264072 - RNA, 32 nt, Homo Sapiens
cuaaauauucagguuuuaagccugcugcaaac

SEQ ID NO: 264073 - RNA, 32 nt, Homo Sapiens
gcaggcaggcaugugucagagcccuucacaca

SEQ ID NO: 264074 - RNA, 32 nt, Homo Sapiens
ccucccccugcgccccgcacgacugcgggagc

SEQ ID NO: 264075 - RNA, 32 nt, Homo Sapiens
guagggucugaggggcaggggaggcccauauc

SEQ ID NO: 264076 - RNA, 32 nt, Homo Sapiens
cgccgaggaagguccggaggggccuaagugcc

SEQ ID NO: 264077 - RNA, 32 nt, Homo Sapiens
ccuaccuugugcuuagcuuucagauuauggau

SEQ ID NO: 264078 - RNA, 32 nt, Homo Sapiens
cugccuccugggauggagaaauuuaaggcugc

SEQ ID NO: 264079 - RNA, 32 nt, Homo Sapiens
uaagauuaucccauaugcauuucuguagagca

SEQ ID NO: 264080 - RNA, 32 nt, Homo Sapiens
ggcacgagggugacgcgcccuccucgcggugc

SEQ ID NO: 264081 - RNA, 32 nt, Homo Sapiens
cuuuggagggaagaagagagaagacaauguau

SEQ ID NO: 264082 - RNA, 32 nt, Homo Sapiens
cguggacccuguuaaucccaauaaaauucuga

SEQ ID NO: 264083 - RNA, 32 nt, Homo Sapiens
gcccgggccaagggagcuucugucccgaggac

SEQ ID NO: 264084 - RNA, 32 nt, Homo Sapiens
aaaucuuucgagcuguggaaauccaaacaaag

SEQ ID NO: 264085 - RNA, 32 nt, Homo Sapiens
ugccuuuaacuccccccaaaggaccauaccaa

SEQ ID NO: 264086 - RNA, 32 nt, Homo Sapiens
ggugcggggucuggugaugcgagcugcgccuc

SEQ ID NO: 264087 - RNA, 32 nt, Homo Sapiens
ucucccccaucccccacugccacacccucccc

SEQ ID NO: 264088 - RNA, 32 nt, Homo Sapiens
uccggagaggaucuggacuggcugggaguggg

SEQ ID NO: 264089 - RNA, 32 nt, Homo Sapiens
cacagacuuugucuucaagaagcucacagucu

SEQ ID NO: 264090 - RNA, 32 nt, Homo Sapiens
ggagugcgcgcccugcagagccaguggguggg

SEQ ID NO: 264091 - RNA, 32 nt, Homo Sapiens
cgaggcggcugcccuggugggcucuggccaug

SEQ ID NO: 264092 - RNA, 32 nt, Homo Sapiens
aggccgcaccggccaaucuccggcgcccacgu

SEQ ID NO: 264093 - RNA, 32 nt, Homo Sapiens
ggacgcagugaacauauaugcauguacagugu

SEQ ID NO: 264094 - RNA, 32 nt, Homo Sapiens
uuuaaaaauaaauguaaaguugucuuuuaaac

SEQ ID NO: 264095 - RNA, 32 nt, Homo Sapiens
uuuauucauggugcuuugcuuacccacauuau

SEQ ID NO: 264096 - RNA, 32 nt, Homo Sapiens
aagguuuucgagaggagaagugcgccaauguu

SEQ ID NO: 264097 - RNA, 32 nt, Homo Sapiens
uccgagaacuccccgcgccgggcgcccagccu

SEQ ID NO: 264098 - RNA, 32 nt, Homo Sapiens
guagguuuuuauuuucuacaagaauucugguu

SEQ ID NO: 264099 - RNA, 32 nt, Homo Sapiens
ggaaauaacggccuucguggccucgaguuuuu

SEQ ID NO: 264100 - RNA, 32 nt, Homo Sapiens
ggcgagcagcgggaggugcgcgcucugucuag

SEQ ID NO: 264101 - RNA, 32 nt, Homo Sapiens
gcaagcgcccggcagcggcccgcgagguuacu

SEQ ID NO: 264102 - RNA, 32 nt, Homo Sapiens
guaguagaauacugcuaguuucuuaauuuuaa

SEQ ID NO: 264103 - RNA, 32 nt, Homo Sapiens
cagcguccuccuuggcuccccccggaggccau

SEQ ID NO: 264104 - RNA, 32 nt, Homo Sapiens
gaagaaaggcaagggccgugcugcugcugggc

SEQ ID NO: 264105 - RNA, 32 nt, Homo Sapiens
uuucggagccgagggcgccucugcgagagcgc

SEQ ID NO: 264106 - RNA, 32 nt, Homo Sapiens
gcccgcccacccguucgccccucccccugccc

SEQ ID NO: 264107 - RNA, 32 nt, Homo Sapiens
cugagcaccuugagacccccacuccugcccgc

SEQ ID NO: 264108 - RNA, 29 nt, Homo Sapiens
gaaaaugcucucguagguggccaggcagu

SEQ ID NO: 264109 - RNA, 32 nt, Homo Sapiens
acuucauuugaaaagaaaugaguaugcuacua

SEQ ID NO: 264110 - RNA, 32 nt, Homo Sapiens
aaaguuuaagaaaguaaacacuuuuugagcac

SEQ ID NO: 264111 - RNA, 32 nt, Homo Sapiens
gacgucgugaggggcgcgcugugaggcgaguc

SEQ ID NO: 264112 - RNA, 32 nt, Homo Sapiens
gccauuagaaaggaccgugucucuuaagagga

SEQ ID NO: 264113 - RNA, 32 nt, Homo Sapiens
auguuuccagcagaagacaaaaagacaaacau

SEQ ID NO: 264114 - RNA, 32 nt, Homo Sapiens
agucucuguucgcucgcuuaagcuguuuugaa

SEQ ID NO: 264115 - RNA, 32 nt, Homo Sapiens
uuggcccuggggaauugggaggaaccaagccc

SEQ ID NO: 264116 - RNA, 32 nt, Homo Sapiens
ccucauccuccccaggaccccuguccaggaug

SEQ ID NO: 264117 - RNA, 32 nt, Homo Sapiens
ccuuuacugcggggcggccggaggaucgccga

SEQ ID NO: 264118 - RNA, 32 nt, Homo Sapiens
acaaauccacauaaccugaggaccauggaugc

SEQ ID NO: 264119 - RNA, 32 nt, Homo Sapiens
gcagccucuccccagccuccccgugccaaaaa

SEQ ID NO: 264120 - RNA, 32 nt, Homo Sapiens
uucuacuuccagcagaaggggcagcugaccag

SEQ ID NO: 264121 - RNA, 32 nt, Homo Sapiens
gccgcagucucccgaagugcugggauuacuga

SEQ ID NO: 264122 - RNA, 32 nt, Homo Sapiens
caucagucuuccggaaucaagaucaacauauc

SEQ ID NO: 264123 - RNA, 32 nt, Homo Sapiens
aaauuaggaugcuaguugcauucugaauuacu

SEQ ID NO: 264124 - RNA, 32 nt, Homo Sapiens
gaccuuguucuucucaugccggcaucccugcu

SEQ ID NO: 264125 - RNA, 32 nt, Homo Sapiens
cggcccccgcgcaagcgacgccgggaaaugcc

SEQ ID NO: 264126 - RNA, 32 nt, Homo Sapiens
cuucccagcagggccucgcagaugcacaagca

SEQ ID NO: 264127 - RNA, 32 nt, Homo Sapiens
gcgagcuccuaggccucuggcuuccugguaga

SEQ ID NO: 264128 - RNA, 32 nt, Homo Sapiens
uacaaaggaaauuugaauuaccuaguguuugu

SEQ ID NO: 264129 - RNA, 32 nt, Homo Sapiens
ggaguccugguggggacggggagggagucuca

SEQ ID NO: 264130 - RNA, 32 nt, Homo Sapiens
aauaaauaaaaagucucaggugaccaaaggcu

SEQ ID NO: 264131 - RNA, 32 nt, Homo Sapiens
acccauggauuacuuaaaaguguguuguuuug

SEQ ID NO: 264132 - RNA, 32 nt, Homo Sapiens
gaaggacuaugaaaagcuagaauugaguguuu

SEQ ID NO: 264133 - RNA, 32 nt, Homo Sapiens
agagcaaagcugaguucugguccggcuuguag

SEQ ID NO: 264134 - RNA, 32 nt, Homo Sapiens
ugcagauucauuuuucuuucugaugucaaaaa

SEQ ID NO: 264135 - RNA, 32 nt, Homo Sapiens
ccucccugccaaccuucuguccugccaccccc

SEQ ID NO: 264136 - RNA, 32 nt, Homo Sapiens
ccgguccagccacauccagugauucagcaggg

SEQ ID NO: 264137 - RNA, 32 nt, Homo Sapiens
cugccaugcccauuucauggccuugcacacac

SEQ ID NO: 264138 - RNA, 32 nt, Homo Sapiens
ggaaccgaggacuccaggggcuggggacuucg

SEQ ID NO: 264139 - RNA, 32 nt, Homo Sapiens
gaguuguguugguuucuuucugauuccucuac

SEQ ID NO: 264140 - RNA, 32 nt, Homo Sapiens
uccuuucugccagccgauguguccucaucuca

SEQ ID NO: 264141 - RNA, 32 nt, Homo Sapiens
cacuuguauauuuuuuaauacucugauucugu

SEQ ID NO: 264142 - RNA, 32 nt, Homo Sapiens
aucucauaccucuggggacaggaaagguagag

SEQ ID NO: 264143 - RNA, 32 nt, Homo Sapiens
ccaacuuaucccaccuucugccuguuuuguuc

SEQ ID NO: 264144 - RNA, 32 nt, Homo Sapiens
gccagauaaaaugcuggauaucaugcaauaaa

SEQ ID NO: 264145 - RNA, 32 nt, Homo Sapiens
uucaccacauucaaggauccaggaugccaaaa

SEQ ID NO: 264146 - RNA, 32 nt, Homo Sapiens
cuucaaaggauuccucugccugcugugcugcu

SEQ ID NO: 264147 - RNA, 32 nt, Homo Sapiens
gaaucccuuuuucauucauuuccugcagaaua

SEQ ID NO: 264148 - RNA, 32 nt, Homo Sapiens
agcuccugcccacgcuccugacugcugcccug

SEQ ID NO: 264149 - RNA, 32 nt, Homo Sapiens
cacggcccgcaugcauucucaagucuucucug

SEQ ID NO: 264150 - RNA, 32 nt, Homo Sapiens
uagugugaaaacaaucauagauaauauguaaa

SEQ ID NO: 264151 - RNA, 32 nt, Homo Sapiens
cuccuuccagacccgccaccagccguacacca

SEQ ID NO: 264152 - RNA, 32 nt, Homo Sapiens
ggcugccauaacaaaacaccacaggcugggug

SEQ ID NO: 264153 - RNA, 32 nt, Homo Sapiens
cccaaagccagacauguacaagggcuuucugu

SEQ ID NO: 264154 - RNA, 32 nt, Homo Sapiens
ugccagcauccccacacccaccucuccagccc

SEQ ID NO: 264155 - RNA, 32 nt, Homo Sapiens
cgucagggucuccauauguggacgugugcaga

SEQ ID NO: 264156 - RNA, 29 nt, Homo Sapiens
gaagcaacauagugagacgucgucucuac

SEQ ID NO: 264157 - RNA, 32 nt, Homo Sapiens
uugugcuggagcggcgggacucauuccuggga

SEQ ID NO: 264158 - RNA, 32 nt, Homo Sapiens
ugcuguuugcauggcagggcuccagcugccuu

SEQ ID NO: 264159 - RNA, 32 nt, Homo Sapiens
accgcugcucgugccaggacgcgcaguuugca

SEQ ID NO: 264160 - RNA, 32 nt, Homo Sapiens
ugugggucuccauaccauuuuaugauguguau

SEQ ID NO: 264161 - RNA, 32 nt, Homo Sapiens
gaacagggccucaguccuauguagaagcccuc

SEQ ID NO: 264162 - RNA, 32 nt, Homo Sapiens
agaggguccuggggggcggggaggagccaccg

SEQ ID NO: 264163 - RNA, 32 nt, Homo Sapiens
ucuaggccagauguuuacauaauuuuaaccua

SEQ ID NO: 264164 - RNA, 32 nt, Homo Sapiens
uuugccucccccagcccccuccccaucaauaa

SEQ ID NO: 264165 - RNA, 32 nt, Homo Sapiens
ugugacccaaaccagugccgcugcauuaaagg

SEQ ID NO: 264166 - RNA, 30 nt, Homo Sapiens
ugugcaagggcaugagagggucccguggaa

SEQ ID NO: 264167 - RNA, 32 nt, Homo Sapiens
uugagacaaaaauaaauauggccuucuacagu

SEQ ID NO: 264168 - RNA, 32 nt, Homo Sapiens
gaucacugccuuaccccugcugcugcaguggu

SEQ ID NO: 264169 - RNA, 32 nt, Homo Sapiens
agacagccccccuucagcccagcccagccagg

SEQ ID NO: 264170 - RNA, 32 nt, Homo Sapiens
cggagaacccaagaccccggccuggcgugcag

SEQ ID NO: 264171 - RNA, 32 nt, Homo Sapiens
uuagugagcuugaucaagaaugcaaaaucuca

SEQ ID NO: 264172 - RNA, 32 nt, Homo Sapiens
acaguuaguuuaggaaaaguaugcaaacuuua

SEQ ID NO: 264173 - RNA, 32 nt, Homo Sapiens
cagaacaugcuguuuuauugguaaauugaaug

SEQ ID NO: 264174 - RNA, 32 nt, Homo Sapiens
aaagcugcuuuuuugcagaacauuccuugaaa

SEQ ID NO: 264175 - RNA, 32 nt, Homo Sapiens
agaaagagacucucuaaaaauaaaaauguuag

SEQ ID NO: 264176 - RNA, 32 nt, Homo Sapiens
aagguagggugugagcugcugcugaaggcugu

SEQ ID NO: 264177 - RNA, 32 nt, Homo Sapiens
cuggagacagagcuaaggauuccuugaacugc

SEQ ID NO: 264178 - RNA, 32 nt, Homo Sapiens
ggugugccgcugggcuuagccagcggagcggu

SEQ ID NO: 264179 - RNA, 32 nt, Homo Sapiens
ugcuuuagaaaugucaguauuuuuguaauuau

SEQ ID NO: 264180 - RNA, 32 nt, Homo Sapiens
aaugggguguuugaagagaacaucagugacgu

SEQ ID NO: 264181 - RNA, 32 nt, Homo Sapiens
uuuggucacauaucagcucuugaugccuuucu

SEQ ID NO: 264182 - RNA, 32 nt, Homo Sapiens
aaaaacuaacuucuaagaugauuucaucuucu

SEQ ID NO: 264183 - RNA, 32 nt, Homo Sapiens
gagugugaguggcacgcuucccugugaacccg

SEQ ID NO: 264184 - RNA, 32 nt, Homo Sapiens
cagcucucuuucccuucugggugucuuugcug

SEQ ID NO: 264185 - RNA, 32 nt, Homo Sapiens
ucagggagggugggaguugguaaagaguaggg

SEQ ID NO: 264186 - RNA, 32 nt, Homo Sapiens
gcuaacuuuuguggagcccuguucccaaacug

SEQ ID NO: 264187 - RNA, 32 nt, Homo Sapiens
aaugacaaagcuucuccuccaaugacaaucug

SEQ ID NO: 264188 - RNA, 32 nt, Homo Sapiens
gacuauuaucuugacuucugguaauuuauguu

SEQ ID NO: 264189 - RNA, 32 nt, Homo Sapiens
uuuuguaguuguugauacaggaucucacucug

SEQ ID NO: 264190 - RNA, 32 nt, Homo Sapiens
guauaaaucuucugccuuugaucauuucugga

SEQ ID NO: 264191 - RNA, 32 nt, Homo Sapiens
gacuccccucuccgcgcccgggacgccgcccg

SEQ ID NO: 264192 - RNA, 32 nt, Homo Sapiens
uauucuuccagaaugcugaacuccuuguuagc

SEQ ID NO: 264193 - RNA, 32 nt, Homo Sapiens
uuuuaguuaaguaagaagcuauguaaacugac

SEQ ID NO: 264194 - RNA, 32 nt, Homo Sapiens
ccacauguugucuguuuuaacaguggacccau

SEQ ID NO: 264195 - RNA, 32 nt, Homo Sapiens
ugaugcacauucugcugugaggaggcccagaa

SEQ ID NO: 264196 - RNA, 32 nt, Homo Sapiens
aucuaugggagcaucugggaaagcagagcugc

SEQ ID NO: 264197 - RNA, 32 nt, Homo Sapiens
gcugaagaaagaaucagaacuaaccaguaccu

SEQ ID NO: 264198 - RNA, 32 nt, Homo Sapiens
uuuguucuauuaugaagauacugucugggcua

SEQ ID NO: 264199 - RNA, 31 nt, Homo Sapiens
uagcauugaaacacuuucaaacuccugcugg

SEQ ID NO: 264200 - RNA, 32 nt, Homo Sapiens
uggcucacaccuguaucccagcacuuugggag

SEQ ID NO: 264201 - RNA, 32 nt, Homo Sapiens
uguagaaaucagucauguaguuucauaaacuc

SEQ ID NO: 264202 - RNA, 32 nt, Homo Sapiens
gccauacgugcagccagaggcccagcguuauc

SEQ ID NO: 264203 - RNA, 29 nt, Homo Sapiens
auauauaguagucauacuauaaaagcuag

SEQ ID NO: 264204 - RNA, 32 nt, Homo Sapiens
auuugucuauagacacaaguaucaaugucuaa

SEQ ID NO: 264205 - RNA, 32 nt, Homo Sapiens
cugcuggguucagugacuugggugggugggga

SEQ ID NO: 264206 - RNA, 32 nt, Homo Sapiens
gagcaagacuccaucucaaaagaaacaaaaac

SEQ ID NO: 264207 - RNA, 32 nt, Homo Sapiens
cagaagcagaccaggguuggcaaggcuggcac

SEQ ID NO: 264208 - RNA, 32 nt, Homo Sapiens
auggcuuuuuaaaaucauauuuaccugugaau

SEQ ID NO: 264209 - RNA, 32 nt, Homo Sapiens
agucaaaucaguauucuguaauuguuagaauu

SEQ ID NO: 264210 - RNA, 32 nt, Homo Sapiens
aagauguuacaaaauuuacauuuagaaaauau

SEQ ID NO: 264211 - RNA, 32 nt, Homo Sapiens
gacuuaauguaaugcugcguggcauuaagguu

SEQ ID NO: 264212 - RNA, 32 nt, Homo Sapiens
guaccuggaaaacauuuccuucuaagagccau

SEQ ID NO: 264213 - RNA, 32 nt, Homo Sapiens
ggcaaaguuuaaaauuugauuaaacaagagaa

SEQ ID NO: 264214 - RNA, 32 nt, Homo Sapiens
cuagcagaggcaaagauauagagguaagggag

SEQ ID NO: 264215 - RNA, 32 nt, Homo Sapiens
aagaaaauaauaagcccucuauacauaaaugc

SEQ ID NO: 264216 - RNA, 32 nt, Homo Sapiens
uagaggaagauaaggaaaauaaguauuuucca

SEQ ID NO: 264217 - RNA, 32 nt, Homo Sapiens
uuuucagagauaaggaaaaauauuuugcacag

SEQ ID NO: 264218 - RNA, 32 nt, Homo Sapiens
uccaggugcucaccagcuccugugcucucgac

SEQ ID NO: 264219 - RNA, 32 nt, Homo Sapiens
gagccgcgcgucgugcccugcgcugcccagac

SEQ ID NO: 264220 - RNA, 32 nt, Homo Sapiens
ccaacgagaguccaccugaaggagguggccag

SEQ ID NO: 264221 - RNA, 32 nt, Homo Sapiens
uagcccaggaggaaggcagcuggugucucagc

SEQ ID NO: 264222 - RNA, 32 nt, Homo Sapiens
uuuaauagcucuuuaacugcuguccucauuag

SEQ ID NO: 264223 - RNA, 32 nt, Homo Sapiens
augcuaugaugaugaaaagcuggaagauugcu

SEQ ID NO: 264224 - RNA, 32 nt, Homo Sapiens
cuguguccauucucagcaugcugcuaauucaa

SEQ ID NO: 264225 - RNA, 32 nt, Homo Sapiens
caaucagagguccguuguuuccaguggauacg

SEQ ID NO: 264226 - RNA, 32 nt, Homo Sapiens
guaacagaggccggugucaagggagugugaag

SEQ ID NO: 264227 - RNA, 32 nt, Homo Sapiens
caugagccuccgcgccuugccuccucacccac

SEQ ID NO: 264228 - RNA, 32 nt, Homo Sapiens
ccgcggcuaucccgggaguccugcuccgacac

SEQ ID NO: 264229 - RNA, 32 nt, Homo Sapiens
aaccauuagagucaaggccuggauuucaugcc

SEQ ID NO: 264230 - RNA, 32 nt, Homo Sapiens
acccagagcuguauuuggcuagcaaucugccu

SEQ ID NO: 264231 - RNA, 32 nt, Homo Sapiens
gcaaucggacucuuaaacuugcucuccaagga

SEQ ID NO: 264232 - RNA, 32 nt, Homo Sapiens
accaaaggcucuuuuuagaaucaucguuuucc

SEQ ID NO: 264233 - RNA, 32 nt, Homo Sapiens
gccucugccuaggcccugggccccacgaagca

SEQ ID NO: 264234 - RNA, 32 nt, Homo Sapiens
acuccuccccuucguuggcccgccccuuuccu

SEQ ID NO: 264235 - RNA, 32 nt, Homo Sapiens
ucccaguaucuguuccuucucaugccccugca

SEQ ID NO: 264236 - RNA, 32 nt, Homo Sapiens
gcagauucuuauauaccuuuaaucgaaggccu

SEQ ID NO: 264237 - RNA, 32 nt, Homo Sapiens
caucaacguggcaacuaugauguggcauggac

SEQ ID NO: 264238 - RNA, 32 nt, Homo Sapiens
ugcccuacagccaggagcugccgugccugugc

SEQ ID NO: 264239 - RNA, 32 nt, Homo Sapiens
ggccuguaaucccagcacuuuccaaggcaggu

SEQ ID NO: 264240 - RNA, 32 nt, Homo Sapiens
gggcgcccagacggagcggccgugacgcuuuc

SEQ ID NO: 264241 - RNA, 32 nt, Homo Sapiens
gcagggcgggaggggcgcgccauggaggcgcc

SEQ ID NO: 264242 - RNA, 32 nt, Homo Sapiens
aaccauuugugcuugcugcaugagugaauaag

SEQ ID NO: 264243 - RNA, 32 nt, Homo Sapiens
uaaagcucauugugauaacugcacgaugcuga

SEQ ID NO: 264244 - RNA, 32 nt, Homo Sapiens
gauguuucuaguuuuuugcuuuauugccuugc

SEQ ID NO: 264245 - RNA, 32 nt, Homo Sapiens
uccauagucaaauuuguaaaucuuauucuuuu

SEQ ID NO: 264246 - RNA, 32 nt, Homo Sapiens
uugccccucccagaaggcccagccccguccgg

SEQ ID NO: 264247 - RNA, 32 nt, Homo Sapiens
uucugauaagcacuugugcagccccaucagca

SEQ ID NO: 264248 - RNA, 32 nt, Homo Sapiens
cagaugcuaggcgaggcccuccccuucaucca

SEQ ID NO: 264249 - RNA, 32 nt, Homo Sapiens
gguccugaugcuggcaggggggcccccuccuc

SEQ ID NO: 264250 - RNA, 32 nt, Homo Sapiens
ccuccccaccccaaaaagggcaagagcugugg

SEQ ID NO: 264251 - RNA, 32 nt, Homo Sapiens
guauucccaagguuugcugggcucugggaucc

SEQ ID NO: 264252 - RNA, 32 nt, Homo Sapiens
gccguuucuccccagagcugccugcucuguga

SEQ ID NO: 264253 - RNA, 32 nt, Homo Sapiens
cgcuguggccccagccucgccugacagaauga

SEQ ID NO: 264254 - RNA, 32 nt, Homo Sapiens
uaauuuuuuuuuuuuuuuuucuugagauggag

SEQ ID NO: 264255 - RNA, 29 nt, Homo Sapiens
cacacaccuggaauaaaaccacuucuuac

SEQ ID NO: 264256 - RNA, 32 nt, Homo Sapiens
augucaaauggcaaguagcucuuuccugccug

SEQ ID NO: 264257 - RNA, 32 nt, Homo Sapiens
ucaaccggagcccuuacaccagcccuccagca

SEQ ID NO: 264258 - RNA, 32 nt, Homo Sapiens
caccucgccggggcggcugguucucuguuugu

SEQ ID NO: 264259 - RNA, 32 nt, Homo Sapiens
aaagcaugaaauguauauguguaauguuuuau

SEQ ID NO: 264260 - RNA, 32 nt, Homo Sapiens
ggcgccuccgcggagcccccgcgcugccauuc

SEQ ID NO: 264261 - RNA, 32 nt, Homo Sapiens
uuuugcuaggauuuuuucugcuaucagaugug

SEQ ID NO: 264262 - RNA, 32 nt, Homo Sapiens
ccuguuuuccuuuuuucuuuggcauucucugg

SEQ ID NO: 264263 - RNA, 32 nt, Homo Sapiens
aggaggccuuggcgugacuggaggccggacag

SEQ ID NO: 264264 - RNA, 32 nt, Homo Sapiens
uugcagcccguccugcaaccagcccuuuugaa

SEQ ID NO: 264265 - RNA, 32 nt, Homo Sapiens
agugcuccucagcuucuuauccuuccacucuu

SEQ ID NO: 264266 - RNA, 32 nt, Homo Sapiens
auuguuuauuuuuguuccuuugucuucuggcu

SEQ ID NO: 264267 - RNA, 32 nt, Homo Sapiens
uuuucagaaaucaaacugcuuaugaaaaguac

SEQ ID NO: 264268 - RNA, 32 nt, Homo Sapiens
cgcaguuuaaagauuagguuaauauuuaaauu

SEQ ID NO: 264269 - RNA, 32 nt, Homo Sapiens
ggaggagccgagcgggcgcuggcaccgaggcc

SEQ ID NO: 264270 - RNA, 27 nt, Homo Sapiens
cagcggcacuucuucauccccuugccc

SEQ ID NO: 264271 - RNA, 32 nt, Homo Sapiens
ccugcaaccccuugcuggccuggggccugggc

SEQ ID NO: 264272 - RNA, 32 nt, Homo Sapiens
acauuauuuccuguuuuuaacaguucgauugc

SEQ ID NO: 264273 - RNA, 32 nt, Homo Sapiens
acggcgaagggagagggaccuuaggggagcag

SEQ ID NO: 264274 - RNA, 31 nt, Homo Sapiens
gcucggcugccggcugcggucagggccaccg

SEQ ID NO: 264275 - RNA, 32 nt, Homo Sapiens
uaaauauuuacuauguuuuucuauuagcuaaa

SEQ ID NO: 264276 - RNA, 32 nt, Homo Sapiens
acgaaaaagacauuaaauuugcggauggaagg

SEQ ID NO: 264277 - RNA, 32 nt, Homo Sapiens
ugaggaggcccauuuucugccuggcagggggc

SEQ ID NO: 264278 - RNA, 32 nt, Homo Sapiens
aauccucccaccucagcccgaguugcugggau

SEQ ID NO: 264279 - RNA, 32 nt, Homo Sapiens
aaucugauauaaaacuuuuuaaaaaaucagaa

SEQ ID NO: 264280 - RNA, 32 nt, Homo Sapiens
gguugcuaggcuccggccgcgcgccccgcccu

SEQ ID NO: 264281 - RNA, 32 nt, Homo Sapiens
gaaacucgcuagguuaaaucugcaucaaaauc

SEQ ID NO: 264282 - RNA, 32 nt, Homo Sapiens
cagugucacagcguggccuugcuugucugcca

SEQ ID NO: 264283 - RNA, 32 nt, Homo Sapiens
gggcucccaagcaggugcggacggcaccaggc

SEQ ID NO: 264284 - RNA, 32 nt, Homo Sapiens
aucacccucuaguugaaagagcuuacagcucg

SEQ ID NO: 264285 - RNA, 32 nt, Homo Sapiens
ccaguguugcuguugucucaaauugccacagc

SEQ ID NO: 264286 - RNA, 30 nt, Homo Sapiens
aaaccagcagcgacgcggggucccguccgc

SEQ ID NO: 264287 - RNA, 23 nt, Homo Sapiens
gcugcccgcugccuccucccuca

SEQ ID NO: 264288 - RNA, 32 nt, Homo Sapiens
gucccugggcuggcagagaagguuuguguccc

SEQ ID NO: 264289 - RNA, 32 nt, Homo Sapiens
gggaugcgguucggcggaggcggccgccacag

SEQ ID NO: 264290 - RNA, 32 nt, Homo Sapiens
ccagucucaaagcuguggccgccuucagacca

SEQ ID NO: 264291 - RNA, 30 nt, Homo Sapiens
uaacagauauaaaacaaauuuuguaaaguu

SEQ ID NO: 264292 - RNA, 32 nt, Homo Sapiens
uuuuggugucuuucucuuuuagauauuguauc

SEQ ID NO: 264293 - RNA, 32 nt, Homo Sapiens
ccucgccccccgcccggccuccuagccucucc

SEQ ID NO: 264294 - RNA, 32 nt, Homo Sapiens
aggccgcgguguuuggauuugcugggcgugga

SEQ ID NO: 264295 - RNA, 32 nt, Homo Sapiens
accugcaggaggaguucggcuccaccuucccc

SEQ ID NO: 264296 - RNA, 32 nt, Homo Sapiens
gcuaaauuuaucuuuguaaaucuuuuugaguc

SEQ ID NO: 264297 - RNA, 32 nt, Homo Sapiens
cggccgcgguucggacccgccggcgacauggc

SEQ ID NO: 264298 - RNA, 30 nt, Homo Sapiens
gcucaugucuguggcugcagcaauuaaugc

SEQ ID NO: 264299 - RNA, 32 nt, Homo Sapiens
uuuuguggguagaaagcaguguaaccaaugaa

SEQ ID NO: 264300 - RNA, 32 nt, Homo Sapiens
caggucucugucaucaccuuuagguagcucau

SEQ ID NO: 264301 - RNA, 32 nt, Homo Sapiens
aaaaguuacauaacacuaauacuuauaaccua

SEQ ID NO: 264302 - RNA, 32 nt, Homo Sapiens
uaucacuugacagauagaguuaauaaauuacc

SEQ ID NO: 264303 - RNA, 32 nt, Homo Sapiens
ggagcagaggagcucacgccugcgggucggga

SEQ ID NO: 264304 - RNA, 32 nt, Homo Sapiens
auuuaugguguuauuaaaaugcugaccauauu

SEQ ID NO: 264305 - RNA, 32 nt, Homo Sapiens
ugccgcccugugaagagcugccuuccaccaug

SEQ ID NO: 264306 - RNA, 32 nt, Homo Sapiens
uccccaggguaccccugagagcugccccagcc

SEQ ID NO: 264307 - RNA, 32 nt, Homo Sapiens
cggacucagcauaugccgcugguugucgcguu

SEQ ID NO: 264308 - RNA, 32 nt, Homo Sapiens
cuguuuauacugugguauguuuuuguuacagc

SEQ ID NO: 264309 - RNA, 32 nt, Homo Sapiens
acacggacggcacgcugucggugcuggagugg

SEQ ID NO: 264310 - RNA, 32 nt, Homo Sapiens
aauacaggagauguuaagguuuugcugacuuu

SEQ ID NO: 264311 - RNA, 32 nt, Homo Sapiens
cacacccgccccaacgcguucucuggagcuuu

SEQ ID NO: 264312 - RNA, 32 nt, Homo Sapiens
guuucuuaauucuccucuccuuucuuaccuag

SEQ ID NO: 264313 - RNA, 32 nt, Homo Sapiens
ugcugucgaauccuggaguccugcaacauggu

SEQ ID NO: 264314 - RNA, 32 nt, Homo Sapiens
gggcgaucacugaguuuuuccuccauuguugu

SEQ ID NO: 264315 - RNA, 32 nt, Homo Sapiens
aucuccuugggguguugguuugcacuucucuu

SEQ ID NO: 264316 - RNA, 31 nt, Homo Sapiens
uuuuuauuguugcuauuuucaguguauacau

SEQ ID NO: 264317 - RNA, 32 nt, Homo Sapiens
gcuaaaaggggaggacguugaggacgcggcgg

SEQ ID NO: 264318 - RNA, 31 nt, Homo Sapiens
ucccagaugaucuucuuugaugaugagaggc

SEQ ID NO: 264319 - RNA, 32 nt, Homo Sapiens
acagugcccuguggagcaaggcuguguuuccu

SEQ ID NO: 264320 - RNA, 32 nt, Homo Sapiens
aaggcuucaggaaacagaguugugaggagaaa

SEQ ID NO: 264321 - RNA, 32 nt, Homo Sapiens
cucuagcugccgugccagcagucucgucugcu

SEQ ID NO: 264322 - RNA, 32 nt, Homo Sapiens
uuuucaaaaaagucuaaagguguaguuuccac

SEQ ID NO: 264323 - RNA, 32 nt, Homo Sapiens
cuggcgcaacuuuccgcauaagacgguggccg

SEQ ID NO: 264324 - RNA, 30 nt, Homo Sapiens
agcagaggagguggggagcagguggcugga

SEQ ID NO: 264325 - RNA, 32 nt, Homo Sapiens
gcccggaguccucccaccuugacccaagcaug

SEQ ID NO: 264326 - RNA, 32 nt, Homo Sapiens
ugcuccugaccuccgucucuuggaccuaagau

SEQ ID NO: 264327 - RNA, 32 nt, Homo Sapiens
ggguugaaaaggaguagcucagaccuguuuuu

SEQ ID NO: 264328 - RNA, 32 nt, Homo Sapiens
guauaaauauaucaccauuuacaugaggggaa

SEQ ID NO: 264329 - RNA, 32 nt, Homo Sapiens
aacugcuccuuuauuuuuuagagcugcugauu

SEQ ID NO: 264330 - RNA, 31 nt, Homo Sapiens
acacggagggggguuuuuaauuugguuuuua

SEQ ID NO: 264331 - RNA, 31 nt, Homo Sapiens
uuuaauugugauaaauuugugcuguuccagu

SEQ ID NO: 264332 - RNA, 32 nt, Homo Sapiens
ccucaaaaugaaaccuugauauuuucaaagcu

SEQ ID NO: 264333 - RNA, 32 nt, Homo Sapiens
ccaccgcgcgcccuggauccucugccugcccc

SEQ ID NO: 264334 - RNA, 30 nt, Homo Sapiens
aaggcgcuggaggagcaccagcgaaagcag

SEQ ID NO: 264335 - RNA, 32 nt, Homo Sapiens
ucuuaauggauuaaaaucauuaaaguccuuaa

SEQ ID NO: 264336 - RNA, 32 nt, Homo Sapiens
ggaauugcacuguggcagcaucagacguacuc

SEQ ID NO: 264337 - RNA, 32 nt, Homo Sapiens
cuguuguuauuuagaacucaccucucacacuc

SEQ ID NO: 264338 - RNA, 32 nt, Homo Sapiens
agcaaugacaaugaccaaggacugcuacaccu

SEQ ID NO: 264339 - RNA, 32 nt, Homo Sapiens
ggaccgucgcaggaggcguccgcuggauaccu

SEQ ID NO: 264340 - RNA, 32 nt, Homo Sapiens
agaggaagauucaauaauauuaacuagcuuga

SEQ ID NO: 264341 - RNA, 32 nt, Homo Sapiens
caguagugaacuggaugccaugaugcugggug

SEQ ID NO: 264342 - RNA, 32 nt, Homo Sapiens
gaauggguuugagagucguaauuuauauuaaa

SEQ ID NO: 264343 - RNA, 32 nt, Homo Sapiens
cuuuaacuucggggucgucugccagagcaggg

SEQ ID NO: 264344 - RNA, 32 nt, Homo Sapiens
uuguuuguuguggugguugcaacagcagcaac

SEQ ID NO: 264345 - RNA, 31 nt, Homo Sapiens
agacacccacccucacuucucauggccagcc

SEQ ID NO: 264346 - RNA, 32 nt, Homo Sapiens
gucacuguuugguuggugggugauaguggggu

SEQ ID NO: 264347 - RNA, 32 nt, Homo Sapiens
ugcacuuuccgugagcacuuuucgugguacaa

SEQ ID NO: 264348 - RNA, 32 nt, Homo Sapiens
ucugauacccucaaacauggagaacaguaagg

SEQ ID NO: 264349 - RNA, 32 nt, Homo Sapiens
gucguacucugucaccccggcuggagugcagu

SEQ ID NO: 264350 - RNA, 32 nt, Homo Sapiens
gcuaaggcaauaaccuuaugcaugaacauuuc

SEQ ID NO: 264351 - RNA, 32 nt, Homo Sapiens
accacaagggucccccuccccauccuacacag

SEQ ID NO: 264352 - RNA, 32 nt, Homo Sapiens
agaaaauucagcugauuacugaagauguucag

SEQ ID NO: 264353 - RNA, 32 nt, Homo Sapiens
uuuuuggggggagagacacagauuuuuacacu

SEQ ID NO: 264354 - RNA, 32 nt, Homo Sapiens
uauuuguaaaaugacaaucauguguguuaacc

SEQ ID NO: 264355 - RNA, 26 nt, Homo Sapiens
aaugggaggcagccucugcugcugug

SEQ ID NO: 264356 - RNA, 32 nt, Homo Sapiens
agccgggcgggugggaggggccggagcaaaag

SEQ ID NO: 264357 - RNA, 32 nt, Homo Sapiens
ugccacucuccuuuugucaauugggaaaaaau

SEQ ID NO: 264358 - RNA, 32 nt, Homo Sapiens
acuucuuaacaaaaaggaacuuuauaaaaguu

SEQ ID NO: 264359 - RNA, 32 nt, Homo Sapiens
agcuuaaucucucccacucuagguucccacgc

SEQ ID NO: 264360 - RNA, 32 nt, Homo Sapiens
ggaagcaggugugauuacuuuuuugcucguag

SEQ ID NO: 264361 - RNA, 32 nt, Homo Sapiens
ucaucagauaugcuuacuaaaucuucagcaua

SEQ ID NO: 264362 - RNA, 32 nt, Homo Sapiens
ugcaacuggcagcagaguucuaaacaaaaauu

SEQ ID NO: 264363 - RNA, 31 nt, Homo Sapiens
uugcccacagccaccaaaguggguugcagug

SEQ ID NO: 264364 - RNA, 32 nt, Homo Sapiens
gcaaucucgaaaugcuguuuuggaccuccuuc

SEQ ID NO: 264365 - RNA, 32 nt, Homo Sapiens
gcacgaggccguggaggcgccacgucccuugc

SEQ ID NO: 264366 - RNA, 31 nt, Homo Sapiens
uaggccguguucugccugccuccgucucuuu

SEQ ID NO: 264367 - RNA, 32 nt, Homo Sapiens
aaaaguuuacuuucuuuuuuuccaaaauacac

SEQ ID NO: 264368 - RNA, 32 nt, Homo Sapiens
aucaugcaaaaauuaguaauacaaaaaccuau

SEQ ID NO: 264369 - RNA, 32 nt, Homo Sapiens
ccccgccgccccaccggagcgcggaaucuggg

SEQ ID NO: 264370 - RNA, 32 nt, Homo Sapiens
aggccacgcaggacccaacugaaacaaagugu

SEQ ID NO: 264371 - RNA, 32 nt, Homo Sapiens
acaguuauaauuuuggaguuuauuuuucaaau

SEQ ID NO: 264372 - RNA, 32 nt, Homo Sapiens
ucuuuuguguauuuauacuuguauguaugauu

SEQ ID NO: 264373 - RNA, 32 nt, Homo Sapiens
cccggcgccgcggcgaccucggaggaaccggc

SEQ ID NO: 264374 - RNA, 32 nt, Homo Sapiens
cacauuacuguaagcacuaaccauuauaaaaa

SEQ ID NO: 264375 - RNA, 32 nt, Homo Sapiens
uagcccccagucacguuccucacgcucacuug

SEQ ID NO: 264376 - RNA, 32 nt, Homo Sapiens
cacuaaauauccaauauuuaaaggaacacagc

SEQ ID NO: 264377 - RNA, 32 nt, Homo Sapiens
cagcuucaguccccggcccuauggccguucuu

SEQ ID NO: 264378 - RNA, 32 nt, Homo Sapiens
ucggcagagcugccucccgucagggcccacau

SEQ ID NO: 264379 - RNA, 32 nt, Homo Sapiens
gucaguuccacgguuuccugccucccugagac

SEQ ID NO: 264380 - RNA, 32 nt, Homo Sapiens
gccugggagagugacgaggccuaucaguacug

SEQ ID NO: 264381 - RNA, 32 nt, Homo Sapiens
aggaagggaaagggcuuuggggucagguggca

SEQ ID NO: 264382 - RNA, 32 nt, Homo Sapiens
uacuuggccaagagaaugcuuauuuaaguguu

SEQ ID NO: 264383 - RNA, 32 nt, Homo Sapiens
ggggaggaaggggugcaugcaugucccccacc

SEQ ID NO: 264384 - RNA, 32 nt, Homo Sapiens
guugaacccguagcagucuguuuaccuuguaa

SEQ ID NO: 264385 - RNA, 32 nt, Homo Sapiens
cagggauguuuuuauaggagucuaaaggauau

SEQ ID NO: 264386 - RNA, 32 nt, Homo Sapiens
gcaaccugccuggccugggaagccccccgcag

SEQ ID NO: 264387 - RNA, 32 nt, Homo Sapiens
gaaaccucauuucuacuaaaaguacagaaauu

SEQ ID NO: 264388 - RNA, 32 nt, Homo Sapiens
ggcagcggcaggagcgcagagugcuggcccag

SEQ ID NO: 264389 - RNA, 32 nt, Homo Sapiens
ucaguccucgccuggaggagacgcuggacuuc

SEQ ID NO: 264390 - RNA, 32 nt, Homo Sapiens
aggccccugucucugguccccagccucagugc

SEQ ID NO: 264391 - RNA, 32 nt, Homo Sapiens
uaccugucucucucuucucucuaggugucagg

SEQ ID NO: 264392 - RNA, 32 nt, Homo Sapiens
cuuccccacccccauuccuucauucuagagcu

SEQ ID NO: 264393 - RNA, 32 nt, Homo Sapiens
cuagguuuuuaaaauccugucucuuugucuua

SEQ ID NO: 264394 - RNA, 32 nt, Homo Sapiens
ccuaucauagaucucuauguucuugcuuuguc

SEQ ID NO: 264395 - RNA, 32 nt, Homo Sapiens
cagacuaucucuaucaucauugcuuuguggcu

SEQ ID NO: 264396 - RNA, 32 nt, Homo Sapiens
guggaaaacaacagccaaaggcaaguggaaaa

SEQ ID NO: 264397 - RNA, 32 nt, Homo Sapiens
gaccucaugcaauaucacuuugaaaguuauuu

SEQ ID NO: 264398 - RNA, 32 nt, Homo Sapiens
ucguugcccucauugggagagaugcuugcuac

SEQ ID NO: 264399 - RNA, 32 nt, Homo Sapiens
uuaauuucaaagcuuccucuggccagguagac

SEQ ID NO: 264400 - RNA, 32 nt, Homo Sapiens
cacuaucauucccauuuuguuacauuucuguu

SEQ ID NO: 264401 - RNA, 32 nt, Homo Sapiens
caaagugcuuugucauuuagaguccuuuaaca

SEQ ID NO: 264402 - RNA, 32 nt, Homo Sapiens
caauuacacaugccugucagcaaaaacuucgu

SEQ ID NO: 264403 - RNA, 32 nt, Homo Sapiens
acuggaggagcagcuuccuucugggacuggac

SEQ ID NO: 264404 - RNA, 32 nt, Homo Sapiens
gccgggggacgccccccagacucacacggggg

SEQ ID NO: 264405 - RNA, 32 nt, Homo Sapiens
gcaaugauagaaaacuccuuccaauuaaaugg

SEQ ID NO: 264406 - RNA, 32 nt, Homo Sapiens
ggcugggggcaagggauucugcucauguguuu

SEQ ID NO: 264407 - RNA, 32 nt, Homo Sapiens
gagaugggaaagggcuccuucaaguaugccug

SEQ ID NO: 264408 - RNA, 32 nt, Homo Sapiens
cguccccgucuccugccaggcgcggagcccug

SEQ ID NO: 264409 - RNA, 32 nt, Homo Sapiens
ccauguagacgucacgaagagauauagcgaug

SEQ ID NO: 264410 - RNA, 32 nt, Homo Sapiens
uuccugcuggaagcuccuggucugaucugggg

SEQ ID NO: 264411 - RNA, 32 nt, Homo Sapiens
uauaacaaacagaauuggaggcugguuucuua

SEQ ID NO: 264412 - RNA, 32 nt, Homo Sapiens
agugagguaaguccucuuucuaaggaaguuug

SEQ ID NO: 264413 - RNA, 32 nt, Homo Sapiens
gagucccgcagcggccgagcccggggagaagc

SEQ ID NO: 264414 - RNA, 32 nt, Homo Sapiens
ucacccgucuucugcgucgcucacgcugggag

SEQ ID NO: 264415 - RNA, 32 nt, Homo Sapiens
agaugggaaugggaagaagugugacccaugga

SEQ ID NO: 264416 - RNA, 32 nt, Homo Sapiens
cugcugugguggaguagggaauguuaugauuu

SEQ ID NO: 264417 - RNA, 32 nt, Homo Sapiens
cuucucagccccuuuaaaucaccauagggcug

SEQ ID NO: 264418 - RNA, 32 nt, Homo Sapiens
uaaaacuuuuuuucuuuuuuuuuuuggacaga

SEQ ID NO: 264419 - RNA, 32 nt, Homo Sapiens
accaagacuccauacucuggucucucuguuug

SEQ ID NO: 264420 - RNA, 32 nt, Homo Sapiens
gcuuuaaccagacggaggagcagccugacguc

SEQ ID NO: 264421 - RNA, 32 nt, Homo Sapiens
uggagaucaagcuggaacaggaguuccgaucg

SEQ ID NO: 264422 - RNA, 32 nt, Homo Sapiens
gcagagguggggccggcagagaaggggccucc

SEQ ID NO: 264423 - RNA, 32 nt, Homo Sapiens
uucuccgcagaccguuuccuggcgagauccug

SEQ ID NO: 264424 - RNA, 32 nt, Homo Sapiens
ugguucccuccucuccucccacccccacaacc

SEQ ID NO: 264425 - RNA, 32 nt, Homo Sapiens
uaaucauuugguuaagugcuuauuccucuuuu

SEQ ID NO: 264426 - RNA, 32 nt, Homo Sapiens
cuccccgauggggcggcuggccaggcaggggg

SEQ ID NO: 264427 - RNA, 32 nt, Homo Sapiens
cuugcccaggacuuggcauuuccaaaucaaag

SEQ ID NO: 264428 - RNA, 32 nt, Homo Sapiens
ggacaugagccuggacuggccacgcgccgucc

SEQ ID NO: 264429 - RNA, 32 nt, Homo Sapiens
auuucuacauauuucuuccauguaucugagaa

SEQ ID NO: 264430 - RNA, 32 nt, Homo Sapiens
ucgguauucauccaaguuaaauguagaguuuu

SEQ ID NO: 264431 - RNA, 32 nt, Homo Sapiens
guguguuuuuauuuugucaugcucuugaaaau

SEQ ID NO: 264432 - RNA, 32 nt, Homo Sapiens
aaaaaacaaaaaucaccaauauccaagacaug

SEQ ID NO: 264433 - RNA, 32 nt, Homo Sapiens
acauguaauaauauuuuccucaguacaauuuu

SEQ ID NO: 264434 - RNA, 32 nt, Homo Sapiens
uaucuaauccugcuugccugguaaauguucuc

SEQ ID NO: 264435 - RNA, 32 nt, Homo Sapiens
cuggugggaaaguuaaacagggaagucuucag

SEQ ID NO: 264436 - RNA, 32 nt, Homo Sapiens
ccaggcucaggugggcggcggcguggaccggc

SEQ ID NO: 264437 - RNA, 32 nt, Homo Sapiens
acuauguuaagugaaauaagccaggcauggaa

SEQ ID NO: 264438 - RNA, 32 nt, Homo Sapiens
uuuccuuuuccacuucuuucuaacagauuugg

SEQ ID NO: 264439 - RNA, 32 nt, Homo Sapiens
gucuuggccucccagacagucuuuggaccacu

SEQ ID NO: 264440 - RNA, 32 nt, Homo Sapiens
agcgggggcgcaaaaggcaggggucagagggc

SEQ ID NO: 264441 - RNA, 32 nt, Homo Sapiens
cuugauagcuaaugcaccuuuucugugaggag

SEQ ID NO: 264442 - RNA, 32 nt, Homo Sapiens
uuauugaggcuuuaaaacuuauccuccaugaa

SEQ ID NO: 264443 - RNA, 32 nt, Homo Sapiens
ccucaccuucuagguguuuuccuuuuuuguuu

SEQ ID NO: 264444 - RNA, 32 nt, Homo Sapiens
gguggucucuucuuggggcccagugcauggug

SEQ ID NO: 264445 - RNA, 32 nt, Homo Sapiens
uccuuccucccucucucccugauguaggccuu

SEQ ID NO: 264446 - RNA, 32 nt, Homo Sapiens
ugauugauugaaauucauguuuucucaagcuc

SEQ ID NO: 264447 - RNA, 32 nt, Homo Sapiens
cagaugaaucugugacucauguuucccuguuu

SEQ ID NO: 264448 - RNA, 32 nt, Homo Sapiens
aguuccuggguccgccugaagcucuggcugcc

SEQ ID NO: 264449 - RNA, 32 nt, Homo Sapiens
guagaggaauaaugaaaucauugaugcuuuau

SEQ ID NO: 264450 - RNA, 32 nt, Homo Sapiens
cccagcccagacccaacacuaugaccuucuac

SEQ ID NO: 264451 - RNA, 32 nt, Homo Sapiens
caggcccuuucuggccagggaggcauugcugc

SEQ ID NO: 264452 - RNA, 32 nt, Homo Sapiens
gcguggcguggcagauauuucagaaagcuuca

SEQ ID NO: 264453 - RNA, 32 nt, Homo Sapiens
cauacaauaauauuuuucucuuugucuccaac

SEQ ID NO: 264454 - RNA, 32 nt, Homo Sapiens
aaggcucugucgggcaggccgggcuuccggga

SEQ ID NO: 264455 - RNA, 32 nt, Homo Sapiens
gaagagagguuucuuuucuggaccucaguuuc

SEQ ID NO: 264456 - RNA, 32 nt, Homo Sapiens
cccaucccucucuucacccauucauucaugac

SEQ ID NO: 264457 - RNA, 32 nt, Homo Sapiens
agacugaagaaagcaaagcaaaaacuguauag

SEQ ID NO: 264458 - RNA, 32 nt, Homo Sapiens
ggggcugggggaugagagcugcaccgcgcggg

SEQ ID NO: 264459 - RNA, 32 nt, Homo Sapiens
aagaggcuuacauuuuaaauguuauuaaaauu

SEQ ID NO: 264460 - RNA, 32 nt, Homo Sapiens
cuucuucccacuccuccaacccuauggaauga

SEQ ID NO: 264461 - RNA, 32 nt, Homo Sapiens
acaauuguugggauguguaauugucuuauuca

SEQ ID NO: 264462 - RNA, 32 nt, Homo Sapiens
aaauccccucuagucacccauucccacccccc

SEQ ID NO: 264463 - RNA, 32 nt, Homo Sapiens
uuauaacagucuauuucuuuuaaaaacuuuuu

SEQ ID NO: 264464 - RNA, 32 nt, Homo Sapiens
uuucuccaaucucauguccauuuugguguggg

SEQ ID NO: 264465 - RNA, 28 nt, Homo Sapiens
aagugucuuuguaauauguuuuuaguuc

SEQ ID NO: 264466 - RNA, 32 nt, Homo Sapiens
cuggaaccgucgcccuggggccccuccgcccc

SEQ ID NO: 264467 - RNA, 32 nt, Homo Sapiens
uaucccucaccuguagcaugccagucccguuu

SEQ ID NO: 264468 - RNA, 32 nt, Homo Sapiens
cgccugcgcgcggguccggcgccgagguucuu

SEQ ID NO: 264469 - RNA, 32 nt, Homo Sapiens
uuauguuaugaaacagaagaacuuucauccca

SEQ ID NO: 264470 - RNA, 32 nt, Homo Sapiens
ucgcugccgccggucaccgccggccaggcccc

SEQ ID NO: 264471 - RNA, 32 nt, Homo Sapiens
gcugaacuaaaauaaaaaugaaaaggagagau

SEQ ID NO: 264472 - RNA, 32 nt, Homo Sapiens
cauccugacaggaagaaaauagaacagcucau

SEQ ID NO: 264473 - RNA, 32 nt, Homo Sapiens
gcgcugcagcgggcacccucaucaccauaggg

SEQ ID NO: 264474 - RNA, 32 nt, Homo Sapiens
aaggcacacgugccuccagaggacaaucuggg

SEQ ID NO: 264475 - RNA, 32 nt, Homo Sapiens
ucuccaggccccaggccucuuuguggacccau

SEQ ID NO: 264476 - RNA, 32 nt, Homo Sapiens
aagcauaaaucucuucuguaacuuuuauaaac

SEQ ID NO: 264477 - RNA, 32 nt, Homo Sapiens
uccccagccugcacuccugggcgaaggcugac

SEQ ID NO: 264478 - RNA, 32 nt, Homo Sapiens
aagaguaacuuuauuucuuuuuguaaggaauu

SEQ ID NO: 264479 - RNA, 32 nt, Homo Sapiens
acuccgccucguccccggggcucgggcagccg

SEQ ID NO: 264480 - RNA, 32 nt, Homo Sapiens
cuccagccucugcagagacucccuucaccucg

SEQ ID NO: 264481 - RNA, 32 nt, Homo Sapiens
ccccaccuuccauuccucucucuaaccugcuu

SEQ ID NO: 264482 - RNA, 32 nt, Homo Sapiens
uggcaaguucccugaguuuaccucggcggcga

SEQ ID NO: 264483 - RNA, 32 nt, Homo Sapiens
gcaaaaauguuuaaaaugcuuaucucuaagau

SEQ ID NO: 264484 - RNA, 32 nt, Homo Sapiens
agccaccagcuccccucccacaguacccauua

SEQ ID NO: 264485 - RNA, 32 nt, Homo Sapiens
cgggcuccucaaugaacccuaguguuagaggc

SEQ ID NO: 264486 - RNA, 32 nt, Homo Sapiens
ccaugucccagggcuaucaaauaaagaauagu

SEQ ID NO: 264487 - RNA, 32 nt, Homo Sapiens
aagcuucucaugugguacguuuagacagaggc

SEQ ID NO: 264488 - RNA, 32 nt, Homo Sapiens
agccugcaguggacccugcugcugccaagcug

SEQ ID NO: 264489 - RNA, 32 nt, Homo Sapiens
aaaauaaaaucuuuuuauaauauuaucuaugg

SEQ ID NO: 264490 - RNA, 32 nt, Homo Sapiens
uggacaaugaauuugguacagagucacuguaa

SEQ ID NO: 264491 - RNA, 32 nt, Homo Sapiens
ccgccccggcgccccgggacccguuagugccc

SEQ ID NO: 264492 - RNA, 32 nt, Homo Sapiens
augugccaggacauguuucuugaaauauuauu

SEQ ID NO: 264493 - RNA, 32 nt, Homo Sapiens
aaagaggggaaacgaucauccuggacaggaag

SEQ ID NO: 264494 - RNA, 32 nt, Homo Sapiens
uuuccaagauuccacauucauauuacuuacuu

SEQ ID NO: 264495 - RNA, 32 nt, Homo Sapiens
auaaacagaaaagaaagauuuaagaggauuca

SEQ ID NO: 264496 - RNA, 32 nt, Homo Sapiens
caaacuccucaauaaacgcuuucucugguucc

SEQ ID NO: 264497 - RNA, 32 nt, Homo Sapiens
gagccgagcccccgcgcacgcuucagcgcccc

SEQ ID NO: 264498 - RNA, 32 nt, Homo Sapiens
ccuccccgugggugaucacguacugagcgccu

SEQ ID NO: 264499 - RNA, 32 nt, Homo Sapiens
aguuaacuuuuguauuuuuaguagagacggcg

SEQ ID NO: 264500 - RNA, 32 nt, Homo Sapiens
gacauuagcauucuuucuuguaucuccguuga

SEQ ID NO: 264501 - RNA, 32 nt, Homo Sapiens
aagaucguaggguuaaacuuuuuuguguguga

SEQ ID NO: 264502 - RNA, 32 nt, Homo Sapiens
cguguaaucucguuagggcugcggcugccaca

SEQ ID NO: 264503 - RNA, 32 nt, Homo Sapiens
ccacucccagugguuuuccucacucacugcaa

SEQ ID NO: 264504 - RNA, 32 nt, Homo Sapiens
ugcaugcgggguuggcucucucuauuaucagc

SEQ ID NO: 264505 - RNA, 32 nt, Homo Sapiens
gcaaguagaagccuggggggaugcgugugccu

SEQ ID NO: 264506 - RNA, 32 nt, Homo Sapiens
ugccggaggaagaugcuuucuggguggcuggc

SEQ ID NO: 264507 - RNA, 32 nt, Homo Sapiens
aaugccuagagcauguagcaauguucaaggca

SEQ ID NO: 264508 - RNA, 32 nt, Homo Sapiens
uccauccacaguguacuuuaagauugucuuaa

SEQ ID NO: 264509 - RNA, 31 nt, Homo Sapiens
gaguccauuaaaccucuuuccuuuauaaauu

SEQ ID NO: 264510 - RNA, 32 nt, Homo Sapiens
ccuccugcgcgagggagcagguucuccgcauu

SEQ ID NO: 264511 - RNA, 32 nt, Homo Sapiens
aacuucagccugugcugcugggcccgcacccc

SEQ ID NO: 264512 - RNA, 32 nt, Homo Sapiens
cuggggcuggauuccaggauccauucggcaaa

SEQ ID NO: 264513 - RNA, 30 nt, Homo Sapiens
uucuugcccuucugugcccaucuuaagacu

SEQ ID NO: 264514 - RNA, 32 nt, Homo Sapiens
cagcccggacuuugagaaugggcucugguuug

SEQ ID NO: 264515 - RNA, 32 nt, Homo Sapiens
gugaacauauuuccuuuuccaccauaggccuc

SEQ ID NO: 264516 - RNA, 32 nt, Homo Sapiens
ccuccuaaucugggccucuugucauggaugaa

SEQ ID NO: 264517 - RNA, 32 nt, Homo Sapiens
ugcagaugaaaauaaagguguuuuugguuaac

SEQ ID NO: 264518 - RNA, 32 nt, Homo Sapiens
ggagagauaggagucccggcucugcaggugga

SEQ ID NO: 264519 - RNA, 32 nt, Homo Sapiens
ggcccacgcgguccgcggccaagggccaacgg

SEQ ID NO: 264520 - RNA, 32 nt, Homo Sapiens
uugacauaaaaauaacuuuaauguaauuuaug

SEQ ID NO: 264521 - RNA, 32 nt, Homo Sapiens
uauuucccuuuggucuuaagccugauacuuua

SEQ ID NO: 264522 - RNA, 32 nt, Homo Sapiens
gccgaguacuuugaaaaucggaagguuuuaga

SEQ ID NO: 264523 - RNA, 32 nt, Homo Sapiens
cuaaacuacuucauaagaaguagauacucauu

SEQ ID NO: 264524 - RNA, 32 nt, Homo Sapiens
gcagaggaccuggccuggcacuggcuuauuua

SEQ ID NO: 264525 - RNA, 32 nt, Homo Sapiens
acgcugcccgggagggcuuccuggacacgcug

SEQ ID NO: 264526 - RNA, 29 nt, Homo Sapiens
uagagaauauguaugccugcaauauggga

SEQ ID NO: 264527 - RNA, 32 nt, Homo Sapiens
cacgugcccuccccaccucacuagacucuccg

SEQ ID NO: 264528 - RNA, 32 nt, Homo Sapiens
uaaagaaaacaaacaaacaaacaaaaacuguu

SEQ ID NO: 264529 - RNA, 30 nt, Homo Sapiens
ggaggggccgcugccacccaccucccugcc

SEQ ID NO: 264530 - RNA, 30 nt, Homo Sapiens
cauuuauuuuguacugcagaaaaauugcuu

SEQ ID NO: 264531 - RNA, 32 nt, Homo Sapiens
agcugugacucccacugcacuccagcucgggg

SEQ ID NO: 264532 - RNA, 32 nt, Homo Sapiens
uugcccaaggauuaauugaggaaaucagcuaa

SEQ ID NO: 264533 - RNA, 32 nt, Homo Sapiens
gcuuccucuucugauaggcuuauuuccaugaa

SEQ ID NO: 264534 - RNA, 32 nt, Homo Sapiens
ccgaggccucgcgaccgccgagccugcagccu

SEQ ID NO: 264535 - RNA, 32 nt, Homo Sapiens
uuggaaagagcuuuuuccuucucuacaaggag

SEQ ID NO: 264536 - RNA, 32 nt, Homo Sapiens
ugucugugaugauguuuuggcccgagcugcag

SEQ ID NO: 264537 - RNA, 32 nt, Homo Sapiens
gugggcugcacuuuucuacucauuugcacaua

SEQ ID NO: 264538 - RNA, 32 nt, Homo Sapiens
augugcugcccccaugccaccuccaugacucu

SEQ ID NO: 264539 - RNA, 32 nt, Homo Sapiens
ccagacaaggccccgcuuccucacgugacauc

SEQ ID NO: 264540 - RNA, 32 nt, Homo Sapiens
uuucaauuuuuccuuguucuugucaaaggcug

SEQ ID NO: 264541 - RNA, 32 nt, Homo Sapiens
cgguggaacagguggccuggggugcuggaggc

SEQ ID NO: 264542 - RNA, 32 nt, Homo Sapiens
acacucccgaggccgucgcgggccacuggccc

SEQ ID NO: 264543 - RNA, 31 nt, Homo Sapiens
aguaaaugaauaugacauguauaucagaaac

SEQ ID NO: 264544 - RNA, 32 nt, Homo Sapiens
ugccuguagucccagcacuuugggaggccggu

SEQ ID NO: 264545 - RNA, 32 nt, Homo Sapiens
auacagugagugcauauagaaaaaauagaagg

SEQ ID NO: 264546 - RNA, 32 nt, Homo Sapiens
gccuggcuguugcaggagccucggccaugggg

SEQ ID NO: 264547 - RNA, 32 nt, Homo Sapiens
cuuuaauagaaagucaccaucaucuguaguga

SEQ ID NO: 264548 - RNA, 30 nt, Homo Sapiens
cuggcagagaagcugguggauccaauccuu

SEQ ID NO: 264549 - RNA, 32 nt, Homo Sapiens
uacaaagugauggcuuuuuuuuuuaacuuuaa

SEQ ID NO: 264550 - RNA, 32 nt, Homo Sapiens
agcuauuaugaguguaggacacugagccaucc

SEQ ID NO: 264551 - RNA, 32 nt, Homo Sapiens
uauuaccuuucaauuauauuuuucucaguuau

SEQ ID NO: 264552 - RNA, 32 nt, Homo Sapiens
gguggagaauaaaaauaauugcuuagaugauu

SEQ ID NO: 264553 - RNA, 32 nt, Homo Sapiens
ggccucccgggcgcuuggaucccggccaucuc

SEQ ID NO: 264554 - RNA, 32 nt, Homo Sapiens
ugaucauuuggcucuuuuuuuccuuccagaag

SEQ ID NO: 264555 - RNA, 32 nt, Homo Sapiens
aaccugccaaacuuauccuuccuucacagcuu

SEQ ID NO: 264556 - RNA, 32 nt, Homo Sapiens
cacugcaaccuccuccucccggguucaagcga

SEQ ID NO: 264557 - RNA, 32 nt, Homo Sapiens
uccuccacuccagucugcuccgcagaacccca

SEQ ID NO: 264558 - RNA, 32 nt, Homo Sapiens
agggcuuucacgcccacccacccccuggcccu

SEQ ID NO: 264559 - RNA, 32 nt, Homo Sapiens
gggcuccugaaguugcgccgcugccggucggg

SEQ ID NO: 264560 - RNA, 31 nt, Homo Sapiens
ccagcccaagacagccucagagccugggucu

SEQ ID NO: 264561 - RNA, 32 nt, Homo Sapiens
acacgugcaggauugcucaagauggaagggca

SEQ ID NO: 264562 - RNA, 32 nt, Homo Sapiens
gagaucauaaaaaugaaaaauaccaucaagau

SEQ ID NO: 264563 - RNA, 32 nt, Homo Sapiens
aagcgucugccagcgggcacaggggcagccag

SEQ ID NO: 264564 - RNA, 32 nt, Homo Sapiens
uugaacuuuuaaaauacuugauuuaaaaacaa

SEQ ID NO: 264565 - RNA, 32 nt, Homo Sapiens
cagaccagagacgucuucugcagccaccugcu

SEQ ID NO: 264566 - RNA, 32 nt, Homo Sapiens
gguaggcagcuagaggcgcaggagcgaaucca

SEQ ID NO: 264567 - RNA, 32 nt, Homo Sapiens
gccgcuguuccucuccugccuuuagagagccu

SEQ ID NO: 264568 - RNA, 32 nt, Homo Sapiens
gcgcaucagaaucguuuguaaagcuuuuucuu

SEQ ID NO: 264569 - RNA, 32 nt, Homo Sapiens
gccuccagccccaccuuccaaccccucagugc

SEQ ID NO: 264570 - RNA, 32 nt, Homo Sapiens
guagacggcuugggggagucggaggcuccccg

SEQ ID NO: 264571 - RNA, 32 nt, Homo Sapiens
uauggggugcacucuacaguuuuugaaaugcu

SEQ ID NO: 264572 - RNA, 32 nt, Homo Sapiens
caccacuucuauuuauuuaacaucgaggguug

SEQ ID NO: 264573 - RNA, 32 nt, Homo Sapiens
ugcagccaagcuguucccacucuucucucuuc

SEQ ID NO: 264574 - RNA, 32 nt, Homo Sapiens
cucugagggggaggaaauguugcauugcuguu

SEQ ID NO: 264575 - RNA, 32 nt, Homo Sapiens
ccauggcaggacuuagaguugcgaguuaagac

SEQ ID NO: 264576 - RNA, 32 nt, Homo Sapiens
cugcaagaggccaacagauuaagggaugcuca

SEQ ID NO: 264577 - RNA, 32 nt, Homo Sapiens
gcaaaagaacuaagacuuuuuucaaacuaaau

SEQ ID NO: 264578 - RNA, 32 nt, Homo Sapiens
uaagugggcauuuugcaacauggcuucuccuu

SEQ ID NO: 264579 - RNA, 32 nt, Homo Sapiens
aaccuuugcugacaagguuuugucuguuucag

SEQ ID NO: 264580 - RNA, 32 nt, Homo Sapiens
gacaugccaaccuugggcuauuugagcuggag

SEQ ID NO: 264581 - RNA, 32 nt, Homo Sapiens
aaagacagcagugguugaaaagaaugugaaca

SEQ ID NO: 264582 - RNA, 32 nt, Homo Sapiens
agcuaagaauguguggcaccuccaucaguuau

SEQ ID NO: 264583 - RNA, 32 nt, Homo Sapiens
auaaaauuccuaggaugcagugucucauuguc

SEQ ID NO: 264584 - RNA, 32 nt, Homo Sapiens
gaggcggcgagggcgcgggggcucugaggacc

SEQ ID NO: 264585 - RNA, 32 nt, Homo Sapiens
gcaagguaaugucaucaucagauucuccuggg

SEQ ID NO: 264586 - RNA, 32 nt, Homo Sapiens
uuugaauucguguaaauauuuauuuuugugug

SEQ ID NO: 264587 - RNA, 32 nt, Homo Sapiens
caaaaacagaucuauuuaauuugagguugaug

SEQ ID NO: 264588 - RNA, 32 nt, Homo Sapiens
aggaggcgccccgcgaccggcgcgaugagugc

SEQ ID NO: 264589 - RNA, 32 nt, Homo Sapiens
ucuguuccuguccacagcuucccuuuaugcug

SEQ ID NO: 264590 - RNA, 32 nt, Homo Sapiens
ggucaaaaugacugcugaaaauaauuuucaag

SEQ ID NO: 264591 - RNA, 32 nt, Homo Sapiens
guguggggcaggcaggauguggugcaggcagg

SEQ ID NO: 264592 - RNA, 32 nt, Homo Sapiens
agagcaggcaccagcucuuucccucucuacac

SEQ ID NO: 264593 - RNA, 32 nt, Homo Sapiens
cuuccacuuuggguucacuuugaauuuucucc

SEQ ID NO: 264594 - RNA, 32 nt, Homo Sapiens
accucuucaagccccaauuuccucaaccauaa

SEQ ID NO: 264595 - RNA, 32 nt, Homo Sapiens
cccagggucaauccgcugaagaugucuccaca

SEQ ID NO: 264596 - RNA, 32 nt, Homo Sapiens
cauuaaaauaaauggguauuggugguuaaaaa

SEQ ID NO: 264597 - RNA, 32 nt, Homo Sapiens
agucuugcugugaaaugaaagugugggagguu

SEQ ID NO: 264598 - RNA, 32 nt, Homo Sapiens
uccuuaaaacucuggagugagaggaugccaga

SEQ ID NO: 264599 - RNA, 32 nt, Homo Sapiens
uuaaaauaaaauguuguggaaaagguagcauu

SEQ ID NO: 264600 - RNA, 32 nt, Homo Sapiens
ccuccugggcuauuccucuccacccagaaggc

SEQ ID NO: 264601 - RNA, 32 nt, Homo Sapiens
gcucccugcaggcuccuccucuccagagccag

SEQ ID NO: 264602 - RNA, 32 nt, Homo Sapiens
cagcgcccccagcuaccacauggccucgcugu

SEQ ID NO: 264603 - RNA, 32 nt, Homo Sapiens
cuaccucguucuugucuugaugugucaccggg

SEQ ID NO: 264604 - RNA, 30 nt, Homo Sapiens
uagcggggaggugggcggcgagggucccgg

SEQ ID NO: 264605 - RNA, 32 nt, Homo Sapiens
augaaauaaaugaaacagaaaaugauggcaag

SEQ ID NO: 264606 - RNA, 32 nt, Homo Sapiens
cugccgucgccccuagccccagcagcccuggu

SEQ ID NO: 264607 - RNA, 32 nt, Homo Sapiens
ucccgagguccgacagcgcccggcccagaucc

SEQ ID NO: 264608 - RNA, 32 nt, Homo Sapiens
cucaagcaguccucccaccucagccuccuggg

SEQ ID NO: 264609 - RNA, 32 nt, Homo Sapiens
aacuugaaagacuugaaaagaaucuaauaagc

SEQ ID NO: 264610 - RNA, 32 nt, Homo Sapiens
cccaggugacuggcaggagcugcgacugccac

SEQ ID NO: 264611 - RNA, 32 nt, Homo Sapiens
agacuuuuucuuuuguaauaagcauauaauaa

SEQ ID NO: 264612 - RNA, 30 nt, Homo Sapiens
aagucaucccuuacaugccaucuuagacuu

SEQ ID NO: 264613 - RNA, 32 nt, Homo Sapiens
acauggaauuguaugauuuuaucuaaaguaaa

SEQ ID NO: 264614 - RNA, 32 nt, Homo Sapiens
uuaaaauuuuaaaacaaacaaacaaaaaagcc

SEQ ID NO: 264615 - RNA, 32 nt, Homo Sapiens
guaagucuuccccaacaccgaaugggauucca

SEQ ID NO: 264616 - RNA, 32 nt, Homo Sapiens
uguaugauuuccuaauauaaaaacaguaaaag

SEQ ID NO: 264617 - RNA, 32 nt, Homo Sapiens
gcuugauuugaaaacaguguggagaaaaacua

SEQ ID NO: 264618 - RNA, 32 nt, Homo Sapiens
ccugggcaucugugccuucucuauggccuugc

SEQ ID NO: 264619 - RNA, 32 nt, Homo Sapiens
gacauacgaggacccucagaccggaggaacac

SEQ ID NO: 264620 - RNA, 32 nt, Homo Sapiens
cagcuguucuuuguagucccuuuuauuaugca

SEQ ID NO: 264621 - RNA, 32 nt, Homo Sapiens
agaaaaugguggcuaucccuucugcuuagaga

SEQ ID NO: 264622 - RNA, 32 nt, Homo Sapiens
acagggcugccuggccucucccucgugcuccu

SEQ ID NO: 264623 - RNA, 32 nt, Homo Sapiens
acuaguaauaauguaauacuguagaaauauug

SEQ ID NO: 264624 - RNA, 32 nt, Homo Sapiens
augagaugucccuccgcucaaauccuaaagcc

SEQ ID NO: 264625 - RNA, 32 nt, Homo Sapiens
agcccgagggaagauucuggacgagaccgugg

SEQ ID NO: 264626 - RNA, 32 nt, Homo Sapiens
cacugcacuccagccuguugacaaagcaagac

SEQ ID NO: 264627 - RNA, 32 nt, Homo Sapiens
uuaacuaaaaauuacagaaucauuaaaguccu

SEQ ID NO: 264628 - RNA, 32 nt, Homo Sapiens
aguagacaagguggcagucuugucuucagucg

SEQ ID NO: 264629 - RNA, 32 nt, Homo Sapiens
aggcuggggauguccuccgagcagagggugaa

SEQ ID NO: 264630 - RNA, 32 nt, Homo Sapiens
aaccuguuuuaaaauuuuagggaucuuuacuu

SEQ ID NO: 264631 - RNA, 27 nt, Homo Sapiens
uaaucuucccacuucagccucccgagu

SEQ ID NO: 264632 - RNA, 32 nt, Homo Sapiens
cacuccuccccuuuuucaucugcacaaaguug

SEQ ID NO: 264633 - RNA, 32 nt, Homo Sapiens
ggacccugggcagcccugccagcccucccagc

SEQ ID NO: 264634 - RNA, 32 nt, Homo Sapiens
acaacacugcaaacagaagggagaaaguguca

SEQ ID NO: 264635 - RNA, 31 nt, Homo Sapiens
ccauaagauuuucuagagccaaauaauggga

SEQ ID NO: 264636 - RNA, 32 nt, Homo Sapiens
acaagaguguaucaugauggcauuccacgaga

SEQ ID NO: 264637 - RNA, 32 nt, Homo Sapiens
cggaugugaugcugaaaaugugcaucagaugu

SEQ ID NO: 264638 - RNA, 32 nt, Homo Sapiens
uacaguugguggacguuaauuguuugaauuug

SEQ ID NO: 264639 - RNA, 32 nt, Homo Sapiens
gaccuuccuuuaaauuuguuauaacuccagcu

SEQ ID NO: 264640 - RNA, 32 nt, Homo Sapiens
caccaggcucugcagcggcaacccccagcggc

SEQ ID NO: 264641 - RNA, 32 nt, Homo Sapiens
gcauauacccaacaugaaucugcauauuagua

SEQ ID NO: 264642 - RNA, 32 nt, Homo Sapiens
cagcacuuugucaucauucuucauggacuccu

SEQ ID NO: 264643 - RNA, 32 nt, Homo Sapiens
accggaaagugagagaaaucuaugauaagcau

SEQ ID NO: 264644 - RNA, 32 nt, Homo Sapiens
uccaggacacuaaaaugugagaacagcucauu

SEQ ID NO: 264645 - RNA, 32 nt, Homo Sapiens
guucauuugggguuuacaacaacuaggaugug

SEQ ID NO: 264646 - RNA, 32 nt, Homo Sapiens
acaggcccuggugauaaugaggguguccuaaa

SEQ ID NO: 264647 - RNA, 32 nt, Homo Sapiens
ccaaguguucucugcuggcucuuuccugccac

SEQ ID NO: 264648 - RNA, 32 nt, Homo Sapiens
ccccagacgccugauauugaaguaaaaaauuu

SEQ ID NO: 264649 - RNA, 32 nt, Homo Sapiens
gugagagaagcaaaaaaguaaguugcauccug

SEQ ID NO: 264650 - RNA, 32 nt, Homo Sapiens
agucuguaauuuccugacuuuuccuagauguc

SEQ ID NO: 264651 - RNA, 32 nt, Homo Sapiens
cggacgcgugggcccggccaaggcgagugccg

SEQ ID NO: 264652 - RNA, 32 nt, Homo Sapiens
cggcccucggcaagcugcugcagcgcuagacg

SEQ ID NO: 264653 - RNA, 32 nt, Homo Sapiens
gcagacucucucaucuuucucauccuguucuc

SEQ ID NO: 264654 - RNA, 32 nt, Homo Sapiens
aguucugcagaaaaacuguaaagaucccgaga

SEQ ID NO: 264655 - RNA, 31 nt, Homo Sapiens
uuccuucuugguauuaaagagacaaguuuau

SEQ ID NO: 264656 - RNA, 29 nt, Homo Sapiens
ccgaccgccaaggcucggacgaggagagc

SEQ ID NO: 264657 - RNA, 32 nt, Homo Sapiens
ggaauuacaugaacgacagccuucgcaccgac

SEQ ID NO: 264658 - RNA, 32 nt, Homo Sapiens
auuuauuuaaacaauuuuuuccccaaaggcau

SEQ ID NO: 264659 - RNA, 32 nt, Homo Sapiens
guucugaaaaagacuucaagaaacugacuaau

SEQ ID NO: 264660 - RNA, 32 nt, Homo Sapiens
aggcacuggagauaaaacaaacaaagcaaacc

SEQ ID NO: 264661 - RNA, 32 nt, Homo Sapiens
acugcagcaccggauggugcgcugcauucaga

SEQ ID NO: 264662 - RNA, 32 nt, Homo Sapiens
gaaaagaaugucaagcuuguuaaaaugacaug

SEQ ID NO: 264663 - RNA, 32 nt, Homo Sapiens
gaguagaaaaggaagcauguagcauauacuca

SEQ ID NO: 264664 - RNA, 32 nt, Homo Sapiens
ugacuuuccuuaccuccuuguuucucugaucc

SEQ ID NO: 264665 - RNA, 29 nt, Homo Sapiens
uuaguucggaacugcgggacgccgguggg

SEQ ID NO: 264666 - RNA, 32 nt, Homo Sapiens
cgcccgggcccuccccgcacacugaccuauac

SEQ ID NO: 264667 - RNA, 32 nt, Homo Sapiens
cugugccuggcugcuggcauaagugcccacag

SEQ ID NO: 264668 - RNA, 32 nt, Homo Sapiens
uggccuccuggccagcucacacucuuguccug

SEQ ID NO: 264669 - RNA, 32 nt, Homo Sapiens
gaggcacaguuuugcacaguauguugcaugcg

SEQ ID NO: 264670 - RNA, 32 nt, Homo Sapiens
aguuuaagaggagauaccguagucuagauugu

SEQ ID NO: 264671 - RNA, 32 nt, Homo Sapiens
aucagcuacccauuauagcacaaaaucagcca

SEQ ID NO: 264672 - RNA, 32 nt, Homo Sapiens
ccugcccugucgcccgccgccggagcggugac

SEQ ID NO: 264673 - RNA, 32 nt, Homo Sapiens
auguggggaaaacaccuuucccuucuagcuuu

SEQ ID NO: 264674 - RNA, 32 nt, Homo Sapiens
acuuccuuucugcgucaccagugucgucagca

SEQ ID NO: 264675 - RNA, 31 nt, Homo Sapiens
ggugccaagcgcagcuagcucagcaggcggc

SEQ ID NO: 264676 - RNA, 32 nt, Homo Sapiens
cucacucaggcaucuucuuucucuaaauacca

SEQ ID NO: 264677 - RNA, 32 nt, Homo Sapiens
caguuaacauuaacaucuauuauaaaaccaug

SEQ ID NO: 264678 - RNA, 32 nt, Homo Sapiens
cccagaaaaaggaagagguggaaacccagaga

SEQ ID NO: 264679 - RNA, 32 nt, Homo Sapiens
guccgagugagcuaacguggcgguguggcugc

SEQ ID NO: 264680 - RNA, 32 nt, Homo Sapiens
ggccagcccccggccggugcccccaaggagag

SEQ ID NO: 264681 - RNA, 32 nt, Homo Sapiens
gagacacuccaggaagaccugcaggugggagu

SEQ ID NO: 264682 - RNA, 32 nt, Homo Sapiens
caagaccuccaaguacaauauucucaccuucc

SEQ ID NO: 264683 - RNA, 32 nt, Homo Sapiens
auuuaucagauuuccuucuccuauggcccaga

SEQ ID NO: 264684 - RNA, 32 nt, Homo Sapiens
caacugcaguaagggaggggaguuggauauac

SEQ ID NO: 264685 - RNA, 32 nt, Homo Sapiens
ugccucccacccagggcaacacuaggauuggu

SEQ ID NO: 264686 - RNA, 32 nt, Homo Sapiens
aacgaagaauaaagucuguguugcaguccugu

SEQ ID NO: 264687 - RNA, 30 nt, Homo Sapiens
ucggcugcugugucugaugagucuguggcu

SEQ ID NO: 264688 - RNA, 32 nt, Homo Sapiens
uuggugugguggcgcgcgccugugaucucagc

SEQ ID NO: 264689 - RNA, 32 nt, Homo Sapiens
aaacuaggucaaaaacaaaacaaaacagugac

SEQ ID NO: 264690 - RNA, 32 nt, Homo Sapiens
caaccgccgccagcaccauggccagcaccauu

SEQ ID NO: 264691 - RNA, 32 nt, Homo Sapiens
gucuaacaagacaaucgauuuuaaacaggguu

SEQ ID NO: 264692 - RNA, 32 nt, Homo Sapiens
uccaucaaagcacaacucaauugggaguaaau

SEQ ID NO: 264693 - RNA, 32 nt, Homo Sapiens
cacugaaagacguuuggauuauuuucaguuug

SEQ ID NO: 264694 - RNA, 32 nt, Homo Sapiens
guaacugggagagugggcaaguccucagcuga

SEQ ID NO: 264695 - RNA, 32 nt, Homo Sapiens
gaccgcagggcaaguaagcggcugacggcgga

SEQ ID NO: 264696 - RNA, 32 nt, Homo Sapiens
auucgcaccguccaaccugccccgccccuccu

SEQ ID NO: 264697 - RNA, 32 nt, Homo Sapiens
uggaaacauuuuauacuguacaugcuaugcug

SEQ ID NO: 264698 - RNA, 32 nt, Homo Sapiens
ccugggcacuuccccaccccagccaggugucc

SEQ ID NO: 264699 - RNA, 32 nt, Homo Sapiens
gaagugaugaacuguuagguucugaugacuca

SEQ ID NO: 264700 - RNA, 32 nt, Homo Sapiens
auuccgccugugccucagcccgaggguucugc

SEQ ID NO: 264701 - RNA, 32 nt, Homo Sapiens
ggccgggcgugcgggcggggacaugguaaccu

SEQ ID NO: 264702 - RNA, 32 nt, Homo Sapiens
gugagggcgggcccuccgcacccucugcccuc

SEQ ID NO: 264703 - RNA, 32 nt, Homo Sapiens
cuuuuuauaaaaccucuucagggaauauugga

SEQ ID NO: 264704 - RNA, 32 nt, Homo Sapiens
gccagggacagugccaagugaaugggauccuu

SEQ ID NO: 264705 - RNA, 32 nt, Homo Sapiens
ggaguaggacucuggagagcaccguaucacug

SEQ ID NO: 264706 - RNA, 32 nt, Homo Sapiens
uucuguuguuuauaagccacucagucuauggu

SEQ ID NO: 264707 - RNA, 32 nt, Homo Sapiens
ugaccuacccucgccucuuugaugccauccgc

SEQ ID NO: 264708 - RNA, 32 nt, Homo Sapiens
uccccaacucccuguucuggcuccuggguggg

SEQ ID NO: 264709 - RNA, 32 nt, Homo Sapiens
caauuuaauuuagauccucuaaucuuucuaca

SEQ ID NO: 264710 - RNA, 32 nt, Homo Sapiens
aguggggcgggcggcgggagggggguggcagu

SEQ ID NO: 264711 - RNA, 32 nt, Homo Sapiens
gacuguucuucuuguugggggugucugcggaa

SEQ ID NO: 264712 - RNA, 32 nt, Homo Sapiens
aaacuuccuacccacacccucuucccaaggcc

SEQ ID NO: 264713 - RNA, 32 nt, Homo Sapiens
uuuuguuuuuuacuuuucauauuuauauuagc

SEQ ID NO: 264714 - RNA, 32 nt, Homo Sapiens
aaccucccaucccccugccaagauccuugaag

SEQ ID NO: 264715 - RNA, 32 nt, Homo Sapiens
gaguggcuuccaggggccccaggcccugcugg

SEQ ID NO: 264716 - RNA, 32 nt, Homo Sapiens
gacauuagaaucuugauagggauugcacuaaa

SEQ ID NO: 264717 - RNA, 32 nt, Homo Sapiens
aaagcugcagcaugcacagcacaggcaggcac

SEQ ID NO: 264718 - RNA, 32 nt, Homo Sapiens
uuuauuaaaaauucuauugugaucuaaagcag

SEQ ID NO: 264719 - RNA, 32 nt, Homo Sapiens
cuggggccagcaccccagccagccgaacacca

SEQ ID NO: 264720 - RNA, 32 nt, Homo Sapiens
cuggaaccucaucucccugggucggggggugu

SEQ ID NO: 264721 - RNA, 32 nt, Homo Sapiens
cggcggcaaaggggcggagggguucgcugcca

SEQ ID NO: 264722 - RNA, 32 nt, Homo Sapiens
aggcccgccugaagccagcccggcgcccuagc

SEQ ID NO: 264723 - RNA, 32 nt, Homo Sapiens
cgaauggaggucgcugggggcagaggguccga

SEQ ID NO: 264724 - RNA, 31 nt, Homo Sapiens
ccccgucggcacugccggccaguccuugcuc

SEQ ID NO: 264725 - RNA, 32 nt, Homo Sapiens
caugucuuuuaugcuauaaucauuccaaauuu

SEQ ID NO: 264726 - RNA, 32 nt, Homo Sapiens
caaaaaugaaacaaaaaaauucuuucaacagg

SEQ ID NO: 264727 - RNA, 32 nt, Homo Sapiens
uuugcauaccacccucagggcccagagaccca

SEQ ID NO: 264728 - RNA, 32 nt, Homo Sapiens
cauccucauuacugaggcguguccaaugcuuu

SEQ ID NO: 264729 - RNA, 32 nt, Homo Sapiens
guaagaugaccugagucccuuaugauacagcc

SEQ ID NO: 264730 - RNA, 32 nt, Homo Sapiens
cggcccaggcgggcgggauccaggcgggccau

SEQ ID NO: 264731 - RNA, 32 nt, Homo Sapiens
uacaaaaauuuauuuucuuuuuugauaauuua

SEQ ID NO: 264732 - RNA, 32 nt, Homo Sapiens
gggucauuacauacuuuuuuuuuuuucuggaa

SEQ ID NO: 264733 - RNA, 32 nt, Homo Sapiens
ugugaaacuccagcugauguuaccacaguaac

SEQ ID NO: 264734 - RNA, 32 nt, Homo Sapiens
uuugaguuugaaaagaaauuaauuugcagugu

SEQ ID NO: 264735 - RNA, 32 nt, Homo Sapiens
agagugccaagagcuaaaugaguuaccagcua

SEQ ID NO: 264736 - RNA, 32 nt, Homo Sapiens
gcuucauucuaaugcuuauauucaucuuuucc

SEQ ID NO: 264737 - RNA, 32 nt, Homo Sapiens
guuagaucuauuucauguuuuuauuauggaua

SEQ ID NO: 264738 - RNA, 32 nt, Homo Sapiens
acuucugccucccaugcuuacgugauccucuc

SEQ ID NO: 264739 - RNA, 32 nt, Homo Sapiens
ccugagcccucccagugcuugccuucagccac

SEQ ID NO: 264740 - RNA, 32 nt, Homo Sapiens
uccuguguugugugccaagguauaaaguggag

SEQ ID NO: 264741 - RNA, 32 nt, Homo Sapiens
ucuuggaggugcugaggauuaaaugagauaau

SEQ ID NO: 264742 - RNA, 30 nt, Homo Sapiens
cugccgaagcucccugccuuuaauaaacug

SEQ ID NO: 264743 - RNA, 32 nt, Homo Sapiens
acgaggccaugaacgugagcugugcacugcug

SEQ ID NO: 264744 - RNA, 32 nt, Homo Sapiens
gggcacuuagggcaggaugaacgcugcuuucc

SEQ ID NO: 264745 - RNA, 32 nt, Homo Sapiens
caggcuuuuguccuucugcauggcuuacacac

SEQ ID NO: 264746 - RNA, 32 nt, Homo Sapiens
cugaaguguuuccaugacuugcucugcauucu

SEQ ID NO: 264747 - RNA, 32 nt, Homo Sapiens
cuuacccucugcagcccucccugccgccucac

SEQ ID NO: 264748 - RNA, 32 nt, Homo Sapiens
aaagaggugggaaggagguccugggagggaca

SEQ ID NO: 264749 - RNA, 32 nt, Homo Sapiens
uguggcccugugucagcuccgggcuugcacug

SEQ ID NO: 264750 - RNA, 32 nt, Homo Sapiens
ccauugugcggcgcgcgccgggacucugccca

SEQ ID NO: 264751 - RNA, 32 nt, Homo Sapiens
uagcgcaugauuguuuuuauaccaagaacauu

SEQ ID NO: 264752 - RNA, 32 nt, Homo Sapiens
cuguaaucucaacaauuugagaggccaaggug

SEQ ID NO: 264753 - RNA, 32 nt, Homo Sapiens
cgggugcauuguaguuauuauuuuaaaauaga

SEQ ID NO: 264754 - RNA, 29 nt, Homo Sapiens
uggaaugugacuugacuuccggcagcgcg

SEQ ID NO: 264755 - RNA, 32 nt, Homo Sapiens
ccaaaagcaacaugggauacauguacuugcca

SEQ ID NO: 264756 - RNA, 32 nt, Homo Sapiens
acguucuuaaaaaauuuuuugagacagaggcu

SEQ ID NO: 264757 - RNA, 32 nt, Homo Sapiens
cccagugucauuugcuccuccuguuccugugc

SEQ ID NO: 264758 - RNA, 32 nt, Homo Sapiens
ucagcgugaggcugcauagaaguguguacggc

SEQ ID NO: 264759 - RNA, 32 nt, Homo Sapiens
cuccuccggcugccuccccaagguucugggcc

SEQ ID NO: 264760 - RNA, 32 nt, Homo Sapiens
aaccgcauuucucuccuuccugauucugaugu

SEQ ID NO: 264761 - RNA, 32 nt, Homo Sapiens
ggccaccgcgcgccggccgcgcucugcgcaca

SEQ ID NO: 264762 - RNA, 32 nt, Homo Sapiens
uggcgccgcccgagcugcugcugcuggcgcuc

SEQ ID NO: 264763 - RNA, 32 nt, Homo Sapiens
aagugccugccagagcccaagugccaucccac

SEQ ID NO: 264764 - RNA, 29 nt, Homo Sapiens
guuaaugaugguuucagagggaagcccuu

SEQ ID NO: 264765 - RNA, 32 nt, Homo Sapiens
gaagaaacacggaaacaaggaaacuccucucu

SEQ ID NO: 264766 - RNA, 32 nt, Homo Sapiens
auuaguggcccaaaagagagccaggggagccc

SEQ ID NO: 264767 - RNA, 32 nt, Homo Sapiens
gcaaaagcucuuuucuguccugucagucuccu

SEQ ID NO: 264768 - RNA, 32 nt, Homo Sapiens
cugcccgccuccgaggccgccggccgcuucuc

SEQ ID NO: 264769 - RNA, 32 nt, Homo Sapiens
auguuauagcugcauuugucuggccuuuucuu

SEQ ID NO: 264770 - RNA, 32 nt, Homo Sapiens
acacaagugugagcuccuacacgcauacacac

SEQ ID NO: 264771 - RNA, 32 nt, Homo Sapiens
cccaccgcccuucgcugacucccuuuucagac

SEQ ID NO: 264772 - RNA, 32 nt, Homo Sapiens
gugggcgcgcagcgucugcgcgcucugcucca

SEQ ID NO: 264773 - RNA, 32 nt, Homo Sapiens
ccccaaacaaaacagguugagcuuuuuccucc

SEQ ID NO: 264774 - RNA, 32 nt, Homo Sapiens
ugaaggaggcggauacggcuggaccuuacccg

SEQ ID NO: 264775 - RNA, 32 nt, Homo Sapiens
auugaagcuuugugaaaacuacugauguuuuc

SEQ ID NO: 264776 - RNA, 32 nt, Homo Sapiens
acggagcgcgcccggccgagcgggccauggcc

SEQ ID NO: 264777 - RNA, 32 nt, Homo Sapiens
uccagaggcccccgugccuccucguuguuggu

SEQ ID NO: 264778 - RNA, 32 nt, Homo Sapiens
aaauauacaaccucccaagauugaaccaggaa

SEQ ID NO: 264779 - RNA, 32 nt, Homo Sapiens
uauauuucaacacaaguugcuauaagcagucc

SEQ ID NO: 264780 - RNA, 32 nt, Homo Sapiens
cuugcgggcagagagggagagaagggcucccc

SEQ ID NO: 264781 - RNA, 32 nt, Homo Sapiens
aucugagaacagaagcccccuccccuacucag

SEQ ID NO: 264782 - RNA, 32 nt, Homo Sapiens
cgaccagaggacagcucugugcugauccccac

SEQ ID NO: 264783 - RNA, 32 nt, Homo Sapiens
auagucaauaugcuuguauaaaacacuguuca

SEQ ID NO: 264784 - RNA, 32 nt, Homo Sapiens
gccgccgucgggagcagcgcaggccgcgagcc

SEQ ID NO: 264785 - RNA, 32 nt, Homo Sapiens
acgagcuuuccacaacagcuaugugaaacucu

SEQ ID NO: 264786 - RNA, 32 nt, Homo Sapiens
uaaagguacguuuuaauauuuaaguuauucua

SEQ ID NO: 264787 - RNA, 32 nt, Homo Sapiens
auggcaucgaccagccaccuccaccuucuuuc

SEQ ID NO: 264788 - RNA, 32 nt, Homo Sapiens
aacggacuugggagcccuccuuugccugcucc

SEQ ID NO: 264789 - RNA, 32 nt, Homo Sapiens
acgacaacugcgcuuacucaccacaccgaagg

SEQ ID NO: 264790 - RNA, 32 nt, Homo Sapiens
gaccgugugugaaauucucuuuccuguagucc

SEQ ID NO: 264791 - RNA, 32 nt, Homo Sapiens
ucucucagacugccuuccugcuucugggcuaa

SEQ ID NO: 264792 - RNA, 32 nt, Homo Sapiens
uuuuaguuugauucuuuuuuuuucccccaaua

SEQ ID NO: 264793 - RNA, 32 nt, Homo Sapiens
uguggguagagcucagaugaccuagggagaau

SEQ ID NO: 264794 - RNA, 32 nt, Homo Sapiens
cugccucauugccugcccugccagagggaggc

SEQ ID NO: 264795 - RNA, 32 nt, Homo Sapiens
aaacccacccagauccuccccguucugacacc

SEQ ID NO: 264796 - RNA, 32 nt, Homo Sapiens
aacuuuuucuaccuucuacuguuuaaagguuu

SEQ ID NO: 264797 - RNA, 32 nt, Homo Sapiens
aaauuagcugggugcaguggugcaugccugua

SEQ ID NO: 264798 - RNA, 32 nt, Homo Sapiens
cucaauugagaucuuugccuuuuacacacagg

SEQ ID NO: 264799 - RNA, 32 nt, Homo Sapiens
cucacuacucuucggcggccccaaagccucug

SEQ ID NO: 264800 - RNA, 32 nt, Homo Sapiens
uccccacaugugacuacugagggcaguucuga

SEQ ID NO: 264801 - RNA, 32 nt, Homo Sapiens
cacccccgggacguggggucacuuccuucaug

SEQ ID NO: 264802 - RNA, 32 nt, Homo Sapiens
aggcggagacccggaggaccgaagcuuccgga

SEQ ID NO: 264803 - RNA, 32 nt, Homo Sapiens
aauuuacuucauguuggguucuuucugaaaug

SEQ ID NO: 264804 - RNA, 32 nt, Homo Sapiens
ccgcugcccugggacaccuaugagauggcauc

SEQ ID NO: 264805 - RNA, 32 nt, Homo Sapiens
ccuaaugucuugcaaaauccaauagaaguauu

SEQ ID NO: 264806 - RNA, 32 nt, Homo Sapiens
uaaucagucaauuugcagauagcuaaggaaaa

SEQ ID NO: 264807 - RNA, 32 nt, Homo Sapiens
caugcaaagucuuccaggaucuagucccggcc

SEQ ID NO: 264808 - RNA, 32 nt, Homo Sapiens
gggcagggcugcuuuucuuagucugaugccaa

SEQ ID NO: 264809 - RNA, 32 nt, Homo Sapiens
ggggcucucaccagcccuccuuucagccucua

SEQ ID NO: 264810 - RNA, 32 nt, Homo Sapiens
gauuauuuaaaauggaaaugugagaauguggc

SEQ ID NO: 264811 - RNA, 32 nt, Homo Sapiens
agauaccccuagggaagaaagaaggacugggu

SEQ ID NO: 264812 - RNA, 32 nt, Homo Sapiens
ugggaaguccaagaugagggugucaacauuug

SEQ ID NO: 264813 - RNA, 32 nt, Homo Sapiens
ggcaggagguccucagaaggugucaggagguu

SEQ ID NO: 264814 - RNA, 32 nt, Homo Sapiens
gcccagcagcacugccaggccuugaagugcuu

SEQ ID NO: 264815 - RNA, 32 nt, Homo Sapiens
gcagcucugcggcuacacgcggaccucggcug

SEQ ID NO: 264816 - RNA, 32 nt, Homo Sapiens
ugcacugcacuucuucguuuucuucuugcucc

SEQ ID NO: 264817 - RNA, 32 nt, Homo Sapiens
aacuaggagugguggcucgcaccuguaauccc

SEQ ID NO: 264818 - RNA, 32 nt, Homo Sapiens
gaagcuugucauaauuuuuuuaaagcaaauau

SEQ ID NO: 264819 - RNA, 32 nt, Homo Sapiens
aggcgggcggccugagggcgcggagccaugaa

SEQ ID NO: 264820 - RNA, 32 nt, Homo Sapiens
uugugucucacuaauauauaaaguacagguua

SEQ ID NO: 264821 - RNA, 32 nt, Homo Sapiens
uucacuuaaaagacagauuuuggagauuguau

SEQ ID NO: 264822 - RNA, 32 nt, Homo Sapiens
agccugaaccccaacccaacccuaacucuaau

SEQ ID NO: 264823 - RNA, 32 nt, Homo Sapiens
agggucacgcgaacaccgcagaugacagacug

SEQ ID NO: 264824 - RNA, 32 nt, Homo Sapiens
acauuuguucuggccuggcuuggugggacccc

SEQ ID NO: 264825 - RNA, 31 nt, Homo Sapiens
aaugagaaauaaagcuaacugauaucaaaaa

SEQ ID NO: 264826 - RNA, 32 nt, Homo Sapiens
accggaaaauaugcacauuaugcuggagcauu

SEQ ID NO: 264827 - RNA, 32 nt, Homo Sapiens
gcuaaaaacaaaacaaaacaaacaaacaaaca

SEQ ID NO: 264828 - RNA, 32 nt, Homo Sapiens
uggguuuucucauugucuuuuugcaucaguac

SEQ ID NO: 264829 - RNA, 32 nt, Homo Sapiens
cagugaacgucuuggugugugcacacauuugg

SEQ ID NO: 264830 - RNA, 32 nt, Homo Sapiens
ccaaccagggcaggcccggcgucugggcucug

SEQ ID NO: 264831 - RNA, 32 nt, Homo Sapiens
gaugaacuguuaauaucuggugagguugaguu

SEQ ID NO: 264832 - RNA, 32 nt, Homo Sapiens
ugagacuuggguuuucuuaaugccagugugaa

SEQ ID NO: 264833 - RNA, 28 nt, Homo Sapiens
caguaggggcggccgggcagaggcaccc

SEQ ID NO: 264834 - RNA, 32 nt, Homo Sapiens
uggcccuuguaugggagguguuuuuguuuuug

SEQ ID NO: 264835 - RNA, 32 nt, Homo Sapiens
auuauggaaaaaugaauauacacauuauauuu

SEQ ID NO: 264836 - RNA, 32 nt, Homo Sapiens
gauuccauuuucauuucuuuuacuauauauuu

SEQ ID NO: 264837 - RNA, 32 nt, Homo Sapiens
uagaagaaaacaacacgcuuguguucacugug

SEQ ID NO: 264838 - RNA, 32 nt, Homo Sapiens
gcugguggagcaggccuggccuuggagaacga

SEQ ID NO: 264839 - RNA, 32 nt, Homo Sapiens
cauggugugaugcugcauuauauauaaaacug

SEQ ID NO: 264840 - RNA, 32 nt, Homo Sapiens
aaaaaugugguuuguacauaucaaauagauau

SEQ ID NO: 264841 - RNA, 32 nt, Homo Sapiens
cuggauccagccaugccugaggucuaccccug

SEQ ID NO: 264842 - RNA, 32 nt, Homo Sapiens
ugacuagaacaaauaggaauauuuucauggaa

SEQ ID NO: 264843 - RNA, 32 nt, Homo Sapiens
ccgacgcugggccagcacccucuccaccgccg

SEQ ID NO: 264844 - RNA, 32 nt, Homo Sapiens
acacucaggcaaaaauguuggucuuucuuuga

SEQ ID NO: 264845 - RNA, 32 nt, Homo Sapiens
cacgggaggaggaggaauggucuucagcagag

SEQ ID NO: 264846 - RNA, 32 nt, Homo Sapiens
uugacuauaaaggagcuuuuuuauuuugggag

SEQ ID NO: 264847 - RNA, 32 nt, Homo Sapiens
ugauacucagaauauggguugauuugaauauc

SEQ ID NO: 264848 - RNA, 32 nt, Homo Sapiens
cgccacaucccaugagaguagagggcacuggg

SEQ ID NO: 264849 - RNA, 32 nt, Homo Sapiens
aauagcaguguuuaauggaaaauguauuuaug

SEQ ID NO: 264850 - RNA, 32 nt, Homo Sapiens
gucauuuacaagcaagcaggccaggcagcugu

SEQ ID NO: 264851 - RNA, 32 nt, Homo Sapiens
aaauagccagcauguaauacaaguaacuacac

SEQ ID NO: 264852 - RNA, 30 nt, Homo Sapiens
cagggaugccaaaggaaaaauaugauccuc

SEQ ID NO: 264853 - RNA, 32 nt, Homo Sapiens
ggccuccaagggcugcaguucuacgggcuaca

SEQ ID NO: 264854 - RNA, 32 nt, Homo Sapiens
ccugccacucugggcaccggccagcacccucu

SEQ ID NO: 264855 - RNA, 32 nt, Homo Sapiens
cuggcccaccccacccuguucaauuucccuuc

SEQ ID NO: 264856 - RNA, 32 nt, Homo Sapiens
gaggacccugcgaaagcugcgacgacuaucuu

SEQ ID NO: 264857 - RNA, 32 nt, Homo Sapiens
cuacacuggagagaaaaaugugagaguguuua

SEQ ID NO: 264858 - RNA, 32 nt, Homo Sapiens
uccaucccuugccccacccaucccaucuccaa

SEQ ID NO: 264859 - RNA, 32 nt, Homo Sapiens
guaugagguguaacauuuuguaaacugugaau

SEQ ID NO: 264860 - RNA, 32 nt, Homo Sapiens
ggccggugccagcugcccuugcagggugggug

SEQ ID NO: 264861 - RNA, 32 nt, Homo Sapiens
agcccgcgcgacagaaagcugugccgccacca

SEQ ID NO: 264862 - RNA, 32 nt, Homo Sapiens
uguuaguauauucgaauaauauacauaugaga

SEQ ID NO: 264863 - RNA, 32 nt, Homo Sapiens
cugcuguuccuccgcccuuaacucuaucccua

SEQ ID NO: 264864 - RNA, 32 nt, Homo Sapiens
cagcauguuuggcagcagguagccuucagcag

SEQ ID NO: 264865 - RNA, 32 nt, Homo Sapiens
aagagagcgcgcgcuccccacguccugcgcuc

SEQ ID NO: 264866 - RNA, 32 nt, Homo Sapiens
acuaaugcucauccugaucucuaggccuuguu

SEQ ID NO: 264867 - RNA, 32 nt, Homo Sapiens
guauauaagauaaguacggucuucauguuuau

SEQ ID NO: 264868 - RNA, 32 nt, Homo Sapiens
cggugaccuuggccgccucggaugcucugauu

SEQ ID NO: 264869 - RNA, 32 nt, Homo Sapiens
ggggcaaggucagacaggauuugaggccgcca

SEQ ID NO: 264870 - RNA, 32 nt, Homo Sapiens
agacuggguagggaauaugauauuuuagggac

SEQ ID NO: 264871 - RNA, 32 nt, Homo Sapiens
uaguacacugguuuguaaucauuaugucuuca

SEQ ID NO: 264872 - RNA, 32 nt, Homo Sapiens
ucccgccuucggcauugggguccccgcguccc

SEQ ID NO: 264873 - RNA, 32 nt, Homo Sapiens
agccaggccaccuuagaaugggguuuggaagu

SEQ ID NO: 264874 - RNA, 32 nt, Homo Sapiens
cagucaagaacaaaagauuaauugugaauuag

SEQ ID NO: 264875 - RNA, 31 nt, Homo Sapiens
acccaccgccacugccaaccaagacauagcu

SEQ ID NO: 264876 - RNA, 32 nt, Homo Sapiens
uuuauauaaaaugaaguauuuaugaacuguga

SEQ ID NO: 264877 - RNA, 32 nt, Homo Sapiens
guuguuacagcgcgugguuuacuaaugcuaaa

SEQ ID NO: 264878 - RNA, 32 nt, Homo Sapiens
uuuccuuuuuaaagaaggcugcuaauuggauu

SEQ ID NO: 264879 - RNA, 32 nt, Homo Sapiens
ucugggccuuagagcaggccccgaacuguggu

SEQ ID NO: 264880 - RNA, 32 nt, Homo Sapiens
aagaaauguaucauuaaaguaauuacguuaca

SEQ ID NO: 264881 - RNA, 32 nt, Homo Sapiens
ugaaugaagaagguauacuaauaaugcaggcc

SEQ ID NO: 264882 - RNA, 32 nt, Homo Sapiens
auaugacguggccuucguguugucagagagug

SEQ ID NO: 264883 - RNA, 32 nt, Homo Sapiens
aaggagguuaggaggcagcugcagccagcaac

SEQ ID NO: 264884 - RNA, 32 nt, Homo Sapiens
agagauacauuuuuuaugauguucaucacagu

SEQ ID NO: 264885 - RNA, 32 nt, Homo Sapiens
ccacugcacccggcccuugccucauguuugaa

SEQ ID NO: 264886 - RNA, 32 nt, Homo Sapiens
gaccugaaugacuucucagaaccuuuaauaug

SEQ ID NO: 264887 - RNA, 32 nt, Homo Sapiens
aaccaguuugacuuucauaaugucucuguuuu

SEQ ID NO: 264888 - RNA, 32 nt, Homo Sapiens
cuggagccaucccaagcaucagugucucagag

SEQ ID NO: 264889 - RNA, 32 nt, Homo Sapiens
aggccuccaugaugaagacgcgugggcugucg

SEQ ID NO: 264890 - RNA, 32 nt, Homo Sapiens
ggggugguuucccccaguuguucucauaguaa

SEQ ID NO: 264891 - RNA, 32 nt, Homo Sapiens
augcucuucuccuuuuucugucuucccuuagg

SEQ ID NO: 264892 - RNA, 30 nt, Homo Sapiens
acuggcgggcucaggcgcggcaggaggucu

SEQ ID NO: 264893 - RNA, 32 nt, Homo Sapiens
uauauaucucucuauuuuuuuaaucaaacucu

SEQ ID NO: 264894 - RNA, 32 nt, Homo Sapiens
acugccaaucccaacugugccugguaggguuu

SEQ ID NO: 264895 - RNA, 32 nt, Homo Sapiens
ccgauggcagggcgggguagugcggagguggg

SEQ ID NO: 264896 - RNA, 32 nt, Homo Sapiens
aagacuccaucucaaaaacaaacaaacaaaaa

SEQ ID NO: 264897 - RNA, 32 nt, Homo Sapiens
uggcucuaaauaacuaaugacacacauuuaaa

SEQ ID NO: 264898 - RNA, 32 nt, Homo Sapiens
ggaacgcagcgaaggacuauggcaggggagaa

SEQ ID NO: 264899 - RNA, 32 nt, Homo Sapiens
ggcgucuccauggcgaccgcguuggcugggug

SEQ ID NO: 264900 - RNA, 32 nt, Homo Sapiens
acagcccucccgcuccaucgacgagcgccucc

SEQ ID NO: 264901 - RNA, 32 nt, Homo Sapiens
ggcgguggcuccugggaaguugcgcagccgaa

SEQ ID NO: 264902 - RNA, 32 nt, Homo Sapiens
ggaggaggaaaggagcagaaggucuuggugaa

SEQ ID NO: 264903 - RNA, 32 nt, Homo Sapiens
uguugagauaauguuuugguauccuuguccgu

SEQ ID NO: 264904 - RNA, 32 nt, Homo Sapiens
cuugcucugucaccuaggcuagaguggagugg

SEQ ID NO: 264905 - RNA, 32 nt, Homo Sapiens
ggcugagaucaucaaugugacgucuaauguac

SEQ ID NO: 264906 - RNA, 32 nt, Homo Sapiens
gggcagggacgaggccugguguccucgcucca

SEQ ID NO: 264907 - RNA, 32 nt, Homo Sapiens
ggucucuccuuccuccucccuagcucagggau

SEQ ID NO: 264908 - RNA, 32 nt, Homo Sapiens
guuagcugacauucccaggaaauccuacaacu

SEQ ID NO: 264909 - RNA, 32 nt, Homo Sapiens
gugccgggagagcgcgcggugcuggagccgca

SEQ ID NO: 264910 - RNA, 32 nt, Homo Sapiens
uucuuugaacucuuaagguuuuugugagaaaa

SEQ ID NO: 264911 - RNA, 32 nt, Homo Sapiens
cagcccgcgggagaggcccagcgggagucgcg

SEQ ID NO: 264912 - RNA, 32 nt, Homo Sapiens
ucccuggccgcagcagaugcccucccaggagu

SEQ ID NO: 264913 - RNA, 32 nt, Homo Sapiens
gccuugaacucaucauuuuuuauggcugcaua

SEQ ID NO: 264914 - RNA, 32 nt, Homo Sapiens
augaacaggaacaugaaggacaacacaucuca

SEQ ID NO: 264915 - RNA, 32 nt, Homo Sapiens
acacacagccuggccuccccugcggagcugca

SEQ ID NO: 264916 - RNA, 32 nt, Homo Sapiens
uacagccugugcuaauugggagcacuugaaca

SEQ ID NO: 264917 - RNA, 32 nt, Homo Sapiens
acuacagcuccucguccagaccggguucagac

SEQ ID NO: 264918 - RNA, 32 nt, Homo Sapiens
cagagaauauaaauuacuucuugugaagagac

SEQ ID NO: 264919 - RNA, 32 nt, Homo Sapiens
acuguagacgucccagggccugugcugugauc

SEQ ID NO: 264920 - RNA, 32 nt, Homo Sapiens
gcaacaggaggcaacagggaaaaaaucucauc

SEQ ID NO: 264921 - RNA, 32 nt, Homo Sapiens
cugccacuacuauguaccugcagugggguugc

SEQ ID NO: 264922 - RNA, 32 nt, Homo Sapiens
uuaguugaaggacuugggaaauacuaucaaaa

SEQ ID NO: 264923 - RNA, 32 nt, Homo Sapiens
ucuuuuuuguuuguuccuuucaaaauuucaau

SEQ ID NO: 264924 - RNA, 32 nt, Homo Sapiens
gccaggcaggaccagccucuucugggagaccc

SEQ ID NO: 264925 - RNA, 30 nt, Homo Sapiens
ugagagagaggcggcggcggcgggcucccg

SEQ ID NO: 264926 - RNA, 32 nt, Homo Sapiens
ugaaguauaaucuuauuuuaacuuaaaaucuu

SEQ ID NO: 264927 - RNA, 32 nt, Homo Sapiens
cgaucgcccgccgccaugggcuccucgcaaag

SEQ ID NO: 264928 - RNA, 32 nt, Homo Sapiens
ggaccucaauucgcugagcaguugcagggaaa

SEQ ID NO: 264929 - RNA, 32 nt, Homo Sapiens
caccucuccuucccgcuuccccagcugguaga

SEQ ID NO: 264930 - RNA, 32 nt, Homo Sapiens
ggccuuuccuuccugccgcgauucccaacuuu

SEQ ID NO: 264931 - RNA, 32 nt, Homo Sapiens
augcaaacacaugguaaagccuuaagauguuu

SEQ ID NO: 264932 - RNA, 32 nt, Homo Sapiens
ugauucacuccagcccuagccucgcuauccca

SEQ ID NO: 264933 - RNA, 32 nt, Homo Sapiens
ugggaccuggggauggguuucucacaccccau

SEQ ID NO: 264934 - RNA, 32 nt, Homo Sapiens
caggaggcagaggcaggagaccaagauggcag

SEQ ID NO: 264935 - RNA, 32 nt, Homo Sapiens
aucugcuauugugacacaucccauugcuggca

SEQ ID NO: 264936 - RNA, 32 nt, Homo Sapiens
gacuuuuuacauaaacuuuauaaaccuuuuau

SEQ ID NO: 264937 - RNA, 32 nt, Homo Sapiens
cugcccccacugugcccuccccugcccaggag

SEQ ID NO: 264938 - RNA, 32 nt, Homo Sapiens
acuauaggaacaaaacaaaaagaauggaacau

SEQ ID NO: 264939 - RNA, 32 nt, Homo Sapiens
uuuuucauaaauuauuugauuauuuaagacua

SEQ ID NO: 264940 - RNA, 32 nt, Homo Sapiens
uacauuugauucagcuaguauuccaugucaac

SEQ ID NO: 264941 - RNA, 32 nt, Homo Sapiens
accggguggagauaguugaaucaugagggcag

SEQ ID NO: 264942 - RNA, 32 nt, Homo Sapiens
cagcacaaggaccgccgcaucgcugcccggua

SEQ ID NO: 264943 - RNA, 32 nt, Homo Sapiens
uuaugauuacugcucuggagggagugagcagg

SEQ ID NO: 264944 - RNA, 32 nt, Homo Sapiens
cccagucacacucccggcaccccgagcccuuc

SEQ ID NO: 264945 - RNA, 32 nt, Homo Sapiens
aguuuucaagacacacaaaauuuuuaggcaaa

SEQ ID NO: 264946 - RNA, 28 nt, Homo Sapiens
auuggaaaagacagcauuauaaaacaag

SEQ ID NO: 264947 - RNA, 32 nt, Homo Sapiens
uggcucuucauaauucuaagacuaaugcucag

SEQ ID NO: 264948 - RNA, 32 nt, Homo Sapiens
cuuauuggacauaauacauauuuggguuggua

SEQ ID NO: 264949 - RNA, 32 nt, Homo Sapiens
ggagcccgcccgcuccccuccccucccccucc

SEQ ID NO: 264950 - RNA, 32 nt, Homo Sapiens
uggccgccaucaucuccugggaugccagaggg

SEQ ID NO: 264951 - RNA, 32 nt, Homo Sapiens
aaccuuaaaaauuggaacggaaacuaaaacaa

SEQ ID NO: 264952 - RNA, 32 nt, Homo Sapiens
cacacacacacacacacacacacacacaaaac

SEQ ID NO: 264953 - RNA, 32 nt, Homo Sapiens
augauacuaccuacuauaaacaugacaucuac

SEQ ID NO: 264954 - RNA, 32 nt, Homo Sapiens
cuucccuggcucccaacaagcacaguucugau

SEQ ID NO: 264955 - RNA, 32 nt, Homo Sapiens
gaauccaggugccugccuccagucugggaaag

SEQ ID NO: 264956 - RNA, 32 nt, Homo Sapiens
uugucucaaaacaaaacaaagugcuggaauug

SEQ ID NO: 264957 - RNA, 32 nt, Homo Sapiens
ucuccucgggacgauggcgcgcgguggccgcg

SEQ ID NO: 264958 - RNA, 32 nt, Homo Sapiens
uuuccuucuuuuuaauaugucuaucuugagau

SEQ ID NO: 264959 - RNA, 32 nt, Homo Sapiens
ggcgccggggacccgggucgggcugggggcuu

SEQ ID NO: 264960 - RNA, 32 nt, Homo Sapiens
caacucauagcaaagucacuucuguuaauccc

SEQ ID NO: 264961 - RNA, 32 nt, Homo Sapiens
ugccgggaaggggcauuauuugugcacugaga

SEQ ID NO: 264962 - RNA, 32 nt, Homo Sapiens
accauuugucagaaaucagaucagcccucaaa

SEQ ID NO: 264963 - RNA, 32 nt, Homo Sapiens
gugcuaaauauuaacauuuagcauuaacuguc

SEQ ID NO: 264964 - RNA, 32 nt, Homo Sapiens
cggugcccgcuggcccgggguugagacaggcg

SEQ ID NO: 264965 - RNA, 32 nt, Homo Sapiens
acggcagcuggguccagggcuguuugcacaga

SEQ ID NO: 264966 - RNA, 32 nt, Homo Sapiens
cagccuccgaaguagcugggaauuacaggcac

SEQ ID NO: 264967 - RNA, 32 nt, Homo Sapiens
uggugggugguguccugaagcugcuggagccc

SEQ ID NO: 264968 - RNA, 32 nt, Homo Sapiens
acuggccugagggccuggcugcccggggggcg

SEQ ID NO: 264969 - RNA, 32 nt, Homo Sapiens
uuucagcuuugcaccuggaacucuguaguaau

SEQ ID NO: 264970 - RNA, 32 nt, Homo Sapiens
gguggggggcccugcucugugcgguccugagg

SEQ ID NO: 264971 - RNA, 32 nt, Homo Sapiens
ugaauucagauauaacucaagcuuguuagagg

SEQ ID NO: 264972 - RNA, 32 nt, Homo Sapiens
aagugucaguaaggauuuuguuuucuaaaauu

SEQ ID NO: 264973 - RNA, 32 nt, Homo Sapiens
ugcucacagaacccuuuuccugacucucaugg

SEQ ID NO: 264974 - RNA, 32 nt, Homo Sapiens
cgcagcccgcccggcgcccccggugaccguga

SEQ ID NO: 264975 - RNA, 32 nt, Homo Sapiens
ucauuccaucauuauuucuguauucauucucc

SEQ ID NO: 264976 - RNA, 32 nt, Homo Sapiens
uuauaguuggcacuuuacuugguacgaucauc

SEQ ID NO: 264977 - RNA, 32 nt, Homo Sapiens
caccaguacuuuguacuuugagucuuuuuaaa

SEQ ID NO: 264978 - RNA, 32 nt, Homo Sapiens
ugccucccggcggccuucccaggccccgcuuu

SEQ ID NO: 264979 - RNA, 32 nt, Homo Sapiens
aaaagauauauucagaaagacagagugauaaa

SEQ ID NO: 264980 - RNA, 32 nt, Homo Sapiens
uuagauguuucauggagcuuauuuugagaacu

SEQ ID NO: 264981 - RNA, 32 nt, Homo Sapiens
uccaggaauggugcuuuaugugagauacccca

SEQ ID NO: 264982 - RNA, 32 nt, Homo Sapiens
uucgggaggguggggguugggggaagcuugac

SEQ ID NO: 264983 - RNA, 32 nt, Homo Sapiens
ucuguguuuagcuuuuccuaguauugugaggu

SEQ ID NO: 264984 - RNA, 31 nt, Homo Sapiens
gagacgagggcgggcccagguccuugcugcu

SEQ ID NO: 264985 - RNA, 32 nt, Homo Sapiens
ggaggaggaggccccugaaggggugcggcagc

SEQ ID NO: 264986 - RNA, 32 nt, Homo Sapiens
cccaacgccucccggaccggaccgccgagggg

SEQ ID NO: 264987 - RNA, 32 nt, Homo Sapiens
ucauaugccagcugcaaccuccgcuagguacg

SEQ ID NO: 264988 - RNA, 32 nt, Homo Sapiens
gcugcuuucuggcccuggacgacgagacgcuc

SEQ ID NO: 264989 - RNA, 32 nt, Homo Sapiens
gacagcagcuggacugggugggccccacagug

SEQ ID NO: 264990 - RNA, 32 nt, Homo Sapiens
ggaaggcugugugggucuggagcccacguccc

SEQ ID NO: 264991 - RNA, 32 nt, Homo Sapiens
ucuuuucuaaucugagagguuucauguugaag

SEQ ID NO: 264992 - RNA, 32 nt, Homo Sapiens
ggagacguggagaggaggagggacacggcaug

SEQ ID NO: 264993 - RNA, 32 nt, Homo Sapiens
gaugcaugagaggguggcuccugccucuggga

SEQ ID NO: 264994 - RNA, 32 nt, Homo Sapiens
uggacagggggcgugaugcugcuggcacuggu

SEQ ID NO: 264995 - RNA, 32 nt, Homo Sapiens
cucacuccucugggccucuccuccugcuuaaa

SEQ ID NO: 264996 - RNA, 32 nt, Homo Sapiens
aucccuauuugucucuuuuggugucuauuugu

SEQ ID NO: 264997 - RNA, 32 nt, Homo Sapiens
ggcccagcagcccagcagcccacauguguuca

SEQ ID NO: 264998 - RNA, 32 nt, Homo Sapiens
auggugccuguuucucucugugucucaaugcc

SEQ ID NO: 264999 - RNA, 32 nt, Homo Sapiens
uccccaccccuccccucacggcgaagguuucc

SEQ ID NO: 265000 - RNA, 32 nt, Homo Sapiens
cucugcacacaugaucuuccugucccuggagg

SEQ ID NO: 265001 - RNA, 32 nt, Homo Sapiens
cuguucauauccuuugcccuuucgcuucuaug

SEQ ID NO: 265002 - RNA, 32 nt, Homo Sapiens
ccaugaauauauuauguuuauacaaaaucaau

SEQ ID NO: 265003 - RNA, 32 nt, Homo Sapiens
aaaacacuauaaaaauccagugguuguuuaaa

SEQ ID NO: 265004 - RNA, 32 nt, Homo Sapiens
uuugaccccuuuucuuuuuugaaauucccuga

SEQ ID NO: 265005 - RNA, 32 nt, Homo Sapiens
ucauguaaaaacuacacuuaggauaugagaaa

SEQ ID NO: 265006 - RNA, 32 nt, Homo Sapiens
cuggcuguggggcgggcauggggggugaaggg

SEQ ID NO: 265007 - RNA, 32 nt, Homo Sapiens
ugccaaagucagcauuuguccuggguucccuu

SEQ ID NO: 265008 - RNA, 32 nt, Homo Sapiens
ccuuuggcuguuuuggcaaugacucugaauua

SEQ ID NO: 265009 - RNA, 32 nt, Homo Sapiens
agaauaauccaggucaugucuugaauacaucg

SEQ ID NO: 265010 - RNA, 32 nt, Homo Sapiens
gggcuuggauauguggaauagugaacuggggc

SEQ ID NO: 265011 - RNA, 32 nt, Homo Sapiens
uaggggagaugcccggcccugggaugcuguuu

SEQ ID NO: 265012 - RNA, 32 nt, Homo Sapiens
cuguauacagaaauguccucauuuuuaaaaaa

SEQ ID NO: 265013 - RNA, 32 nt, Homo Sapiens
ucucacuuuccacuguaaccuuaagccugcuu

SEQ ID NO: 265014 - RNA, 32 nt, Homo Sapiens
uuuauuguuaaaaguuuauuaugcaacucugg

SEQ ID NO: 265015 - RNA, 32 nt, Homo Sapiens
aaguuuaucagccaaaguauugguuacaguaa

SEQ ID NO: 265016 - RNA, 32 nt, Homo Sapiens
uugagugcagguuacaaccuauauuguuaugc

SEQ ID NO: 265017 - RNA, 32 nt, Homo Sapiens
uuuaaagauggaaucagaaacuacguggugug

SEQ ID NO: 265018 - RNA, 32 nt, Homo Sapiens
guguucuucuuucucuguauuccgauacaaag

SEQ ID NO: 265019 - RNA, 32 nt, Homo Sapiens
ugguuaaguuuucuuguuucugcaucuuuuug

SEQ ID NO: 265020 - RNA, 32 nt, Homo Sapiens
caggccggguggcagccaggaccucucccaug

SEQ ID NO: 265021 - RNA, 32 nt, Homo Sapiens
gccaugcucaaauaagauguagcaaucuaccu

SEQ ID NO: 265022 - RNA, 32 nt, Homo Sapiens
ucacucucacuuucuuaccauucucuugauuu

SEQ ID NO: 265023 - RNA, 32 nt, Homo Sapiens
cgaccucccggccaccccggcccugugccugc

SEQ ID NO: 265024 - RNA, 32 nt, Homo Sapiens
aaggacuuucccuucaccauuuuucuagggua

SEQ ID NO: 265025 - RNA, 32 nt, Homo Sapiens
uuucguuagaaagcggacgcuguucuaaaaaa

SEQ ID NO: 265026 - RNA, 32 nt, Homo Sapiens
cugggcccaagcccacagggacuuuggaggug

SEQ ID NO: 265027 - RNA, 32 nt, Homo Sapiens
ggcccggaagcagaggcugaccaggagcaggg

SEQ ID NO: 265028 - RNA, 32 nt, Homo Sapiens
uacacacgcacacacgcacacacacacacacg

SEQ ID NO: 265029 - RNA, 32 nt, Homo Sapiens
uccguccguccgucggggcgccgcagcucccg

SEQ ID NO: 265030 - RNA, 32 nt, Homo Sapiens
aguggcucgccagcgaagaccccgccugcgcc

SEQ ID NO: 265031 - RNA, 32 nt, Homo Sapiens
caagacgcggcacggcgccuggaccggagggg

SEQ ID NO: 265032 - RNA, 32 nt, Homo Sapiens
uuccuuaccuuucaugggcccagcgaggguag

SEQ ID NO: 265033 - RNA, 32 nt, Homo Sapiens
augcuuauggauuugauaaaucuuauacuuuu

SEQ ID NO: 265034 - RNA, 32 nt, Homo Sapiens
auuuuguucacuguagauuaauuuugccuauu

SEQ ID NO: 265035 - RNA, 32 nt, Homo Sapiens
ccucauuuuggaaacuuuuccuccucuauuaa

SEQ ID NO: 265036 - RNA, 32 nt, Homo Sapiens
cuauuugggcucccaacacuauuucuccaucu

SEQ ID NO: 265037 - RNA, 32 nt, Homo Sapiens
ugauagagggcuuggugccuagcugaguccuc

SEQ ID NO: 265038 - RNA, 32 nt, Homo Sapiens
gagucggccccggcggucgcucccuggaccca

SEQ ID NO: 265039 - RNA, 32 nt, Homo Sapiens
gagacaucuuccgagaaacaggcgauaauuuu

SEQ ID NO: 265040 - RNA, 32 nt, Homo Sapiens
auaggacagauaaguuucaauggaagaagaug

SEQ ID NO: 265041 - RNA, 32 nt, Homo Sapiens
acucuucaucuguagcgugaccucaagguaaa

SEQ ID NO: 265042 - RNA, 32 nt, Homo Sapiens
ugaguuucauucacuucuuuuacuuaauguuu

SEQ ID NO: 265043 - RNA, 32 nt, Homo Sapiens
gcugguucucaguccccgccucgcggggguug

SEQ ID NO: 265044 - RNA, 32 nt, Homo Sapiens
gacaaggcccaucuccuucccuccucaagaag

SEQ ID NO: 265045 - RNA, 32 nt, Homo Sapiens
ucggccgggagcugcucugugcuuuucucucu

SEQ ID NO: 265046 - RNA, 32 nt, Homo Sapiens
caugaaccaucauaccuggccuuuuucuaagg

SEQ ID NO: 265047 - RNA, 32 nt, Homo Sapiens
cggagggcuggcgggggcgcugugguuccaga

SEQ ID NO: 265048 - RNA, 32 nt, Homo Sapiens
augcucucccucucgucuuccauccucauuca

SEQ ID NO: 265049 - RNA, 32 nt, Homo Sapiens
cagccagagcuccgaggcucuccggggcgacg

SEQ ID NO: 265050 - RNA, 32 nt, Homo Sapiens
accuauuuuaguaaauaauguuuuacuggaau

SEQ ID NO: 265051 - RNA, 30 nt, Homo Sapiens
uggacucuggacuguuuccccucucagcau

SEQ ID NO: 265052 - RNA, 32 nt, Homo Sapiens
gaguuaugacuuuggaggaauauuagaaaggc

SEQ ID NO: 265053 - RNA, 30 nt, Homo Sapiens
cuaccagucugugccuuagaggucguuagg

SEQ ID NO: 265054 - RNA, 32 nt, Homo Sapiens
ucuacaaacaacaacaauagcagcagcaaaau

SEQ ID NO: 265055 - RNA, 32 nt, Homo Sapiens
ugauguugauaaaaagaaaguuuauaucuuga

SEQ ID NO: 265056 - RNA, 32 nt, Homo Sapiens
agugacuugcuuucuguaaauuauauggcuua

SEQ ID NO: 265057 - RNA, 32 nt, Homo Sapiens
cucauuuaaaaauuauauugcuaucauucagc

SEQ ID NO: 265058 - RNA, 32 nt, Homo Sapiens
gucucgccgcgcacgccucggcgaccccgcgg

SEQ ID NO: 265059 - RNA, 32 nt, Homo Sapiens
aaaaauuuaagaggaaaauuuucaugucucca

SEQ ID NO: 265060 - RNA, 32 nt, Homo Sapiens
ugaagaaauuuaugaagcagauuuauuuuuga

SEQ ID NO: 265061 - RNA, 32 nt, Homo Sapiens
ugucagccgcuuugguacgcugcaucgggauc

SEQ ID NO: 265062 - RNA, 32 nt, Homo Sapiens
uuagaagauagaugcacuuaugcaguaaauua

SEQ ID NO: 265063 - RNA, 32 nt, Homo Sapiens
uuccuuuucccuucuuuuuuuuuccuuuuugg

SEQ ID NO: 265064 - RNA, 32 nt, Homo Sapiens
augacugaauugcucaucauucugggaguuuc

SEQ ID NO: 265065 - RNA, 32 nt, Homo Sapiens
ugcaggcccucccucuacucuuccuguccuaa

SEQ ID NO: 265066 - RNA, 31 nt, Homo Sapiens
aaaagcuggcacugcauucucucucuguagc

SEQ ID NO: 265067 - RNA, 32 nt, Homo Sapiens
ccaaguagcugagacuacaggcgugcaccacc

SEQ ID NO: 265068 - RNA, 32 nt, Homo Sapiens
gaacaagccuacuucaauaaaugaaggagaau

SEQ ID NO: 265069 - RNA, 32 nt, Homo Sapiens
caaccuggacccagccccacuugcccuuauug

SEQ ID NO: 265070 - RNA, 32 nt, Homo Sapiens
ccucugccuccagcccggcagcucuggggagg

SEQ ID NO: 265071 - RNA, 32 nt, Homo Sapiens
cccagcuccaggugcugcugucugcagcaagg

SEQ ID NO: 265072 - RNA, 32 nt, Homo Sapiens
uaggaaccaaaaugaaaccugcuguauggaaa

SEQ ID NO: 265073 - RNA, 32 nt, Homo Sapiens
cugaaaacacauuuguugauauuugucuuguc

SEQ ID NO: 265074 - RNA, 32 nt, Homo Sapiens
auaaaacgugcagcugcaucuagauugcaguc

SEQ ID NO: 265075 - RNA, 32 nt, Homo Sapiens
ggagcuugcucuucccucccccucaucacagu

SEQ ID NO: 265076 - RNA, 32 nt, Homo Sapiens
uucuuuguuguuuuccucuucuauuaaguuuu

SEQ ID NO: 265077 - RNA, 32 nt, Homo Sapiens
cugaaacaggaggugauuguguucgucagcug

SEQ ID NO: 265078 - RNA, 32 nt, Homo Sapiens
auguaagucaacaacauccugggauugggaca

SEQ ID NO: 265079 - RNA, 32 nt, Homo Sapiens
uaagcaccgcaaugggcagucaauugcagugu

SEQ ID NO: 265080 - RNA, 29 nt, Homo Sapiens
cugaauguagugauguuuacauuguuuac

SEQ ID NO: 265081 - RNA, 32 nt, Homo Sapiens
aagguguccaggcuuuugggggugggccuauc

SEQ ID NO: 265082 - RNA, 32 nt, Homo Sapiens
aaaacaagggaagugaagaggugagucugggu

SEQ ID NO: 265083 - RNA, 32 nt, Homo Sapiens
ugcggacggcccaccaccccagcccgccaacu

SEQ ID NO: 265084 - RNA, 32 nt, Homo Sapiens
agcccccgcucccgaucgugggcugaaccuug

SEQ ID NO: 265085 - RNA, 32 nt, Homo Sapiens
cagugcagcucccagugcugcagugugcgugg

SEQ ID NO: 265086 - RNA, 32 nt, Homo Sapiens
cagcuacucaaaccuugagauuagauuggacg

SEQ ID NO: 265087 - RNA, 32 nt, Homo Sapiens
uuauuacaauuucaaagcuacacuucauuaaa

SEQ ID NO: 265088 - RNA, 29 nt, Homo Sapiens
cuggggggcugggcaaauggcaaacucca

SEQ ID NO: 265089 - RNA, 29 nt, Homo Sapiens
uccuaaaguuugaagagucuaaauacggg

SEQ ID NO: 265090 - RNA, 32 nt, Homo Sapiens
uuaguugaaacacaaauucuggcuugaaaaaa

SEQ ID NO: 265091 - RNA, 32 nt, Homo Sapiens
aaaaaggauuuauuuaucuggauguaccaaug

SEQ ID NO: 265092 - RNA, 32 nt, Homo Sapiens
ucuuuuagggaaggugagagcuuauuuguauc

SEQ ID NO: 265093 - RNA, 32 nt, Homo Sapiens
cucagccagcuugcccacccuccaccuuugcc

SEQ ID NO: 265094 - RNA, 32 nt, Homo Sapiens
auauaaugauguucuuuuuuucuaguuauugu

SEQ ID NO: 265095 - RNA, 32 nt, Homo Sapiens
ggagcaguggugcugucagcgcggccgucgga

SEQ ID NO: 265096 - RNA, 32 nt, Homo Sapiens
cucacggaauauagaagacauggcauuuuacu

SEQ ID NO: 265097 - RNA, 32 nt, Homo Sapiens
auaauaauuguuaaaauucucuacagccuucu

SEQ ID NO: 265098 - RNA, 32 nt, Homo Sapiens
guguauguuuuaaugggagaaucuuaagaauu

SEQ ID NO: 265099 - RNA, 32 nt, Homo Sapiens
aauuauaugggaaccagaauagauaaauuuug

SEQ ID NO: 265100 - RNA, 32 nt, Homo Sapiens
aaaugaauugguucugugacccgggaagcugu

SEQ ID NO: 265101 - RNA, 32 nt, Homo Sapiens
aaaacuguauaaauacaagcugggucagucaa

SEQ ID NO: 265102 - RNA, 32 nt, Homo Sapiens
aucucccuugccuuuauggugaaacaggggag

SEQ ID NO: 265103 - RNA, 32 nt, Homo Sapiens
aacuugaauggcaacuagaggcuuacuuuuug

SEQ ID NO: 265104 - RNA, 32 nt, Homo Sapiens
cgugcgcgccgcgucgccguggagacgagggc

SEQ ID NO: 265105 - RNA, 32 nt, Homo Sapiens
caaaaagaacagaacccucuccagccugcuga

SEQ ID NO: 265106 - RNA, 32 nt, Homo Sapiens
cuccacccaggcgaggcccaccugggcucugu

SEQ ID NO: 265107 - RNA, 32 nt, Homo Sapiens
gcuauuuugaauguuaucauggcuauuacacu

SEQ ID NO: 265108 - RNA, 32 nt, Homo Sapiens
gugaguauuguaaaaauggcuguugugaucac

SEQ ID NO: 265109 - RNA, 32 nt, Homo Sapiens
cacgccgagaagaggagccucgguaguggucg

SEQ ID NO: 265110 - RNA, 28 nt, Homo Sapiens
gacaugaaggcacagacagcacugucuu

SEQ ID NO: 265111 - RNA, 32 nt, Homo Sapiens
ccgcggagaagcugcugccggugucauggcgg

SEQ ID NO: 265112 - RNA, 32 nt, Homo Sapiens
ugaacugugaggguaaaggcuauacuugucuu

SEQ ID NO: 265113 - RNA, 32 nt, Homo Sapiens
uccgagagccucuggcagccgucuaccaagag

SEQ ID NO: 265114 - RNA, 32 nt, Homo Sapiens
gcggaucaugacccgggcggcggccgcgaagg

SEQ ID NO: 265115 - RNA, 32 nt, Homo Sapiens
uugcuuuggaagagauucugcccuguagacac

SEQ ID NO: 265116 - RNA, 32 nt, Homo Sapiens
aaacaucggugaaaagaagagaaaaaaaggaa

SEQ ID NO: 265117 - RNA, 32 nt, Homo Sapiens
ugucuuuacaaccuccccaucaucucuuccca

SEQ ID NO: 265118 - RNA, 32 nt, Homo Sapiens
auaaacuguucccucugggccaaggcggaggg

SEQ ID NO: 265119 - RNA, 32 nt, Homo Sapiens
gcuuguaaauaauucagcagauuuguaauaua

SEQ ID NO: 265120 - RNA, 32 nt, Homo Sapiens
agacagugaucugguguggggaggcggccggg

SEQ ID NO: 265121 - RNA, 32 nt, Homo Sapiens
aggcgcagcccuaccuucuuucuggggaagag

SEQ ID NO: 265122 - RNA, 32 nt, Homo Sapiens
uuuccuaaaaauucccauagaauaaaauucuc

SEQ ID NO: 265123 - RNA, 29 nt, Homo Sapiens
gcugauauguguuucaaaggcuugaaguu

SEQ ID NO: 265124 - RNA, 32 nt, Homo Sapiens
caggcuaaugaaugcagaaagaauaauagaaa

SEQ ID NO: 265125 - RNA, 32 nt, Homo Sapiens
cgcuuaaacuuugaagccauagauaaauuugu

SEQ ID NO: 265126 - RNA, 32 nt, Homo Sapiens
cccucuccgcuccgccggggccaccagcaugu

SEQ ID NO: 265127 - RNA, 32 nt, Homo Sapiens
cuucaaaucucagcaaagcuacaggacuggua

SEQ ID NO: 265128 - RNA, 32 nt, Homo Sapiens
cuguacauauauuauuuugauguauuaagaug

SEQ ID NO: 265129 - RNA, 32 nt, Homo Sapiens
ccugaagcagauaugaauauuagccagauuau

SEQ ID NO: 265130 - RNA, 31 nt, Homo Sapiens
cgcucgccucccucgcuccacgcgcgcccgg

SEQ ID NO: 265131 - RNA, 32 nt, Homo Sapiens
gccccccagccuaggcuuggcuccuuucaccc

SEQ ID NO: 265132 - RNA, 32 nt, Homo Sapiens
gagaaagaaaaauuaugaagguagaacagagu

SEQ ID NO: 265133 - RNA, 32 nt, Homo Sapiens
agucgcuuuucugaauucuccccuccggcagc

SEQ ID NO: 265134 - RNA, 32 nt, Homo Sapiens
cacucacccaagucaaauauguggcacaggca

SEQ ID NO: 265135 - RNA, 32 nt, Homo Sapiens
gauuucuguugucucuggauagacaagaaaca

SEQ ID NO: 265136 - RNA, 32 nt, Homo Sapiens
cugucucuucuccaugagggagaaggaagcag

SEQ ID NO: 265137 - RNA, 32 nt, Homo Sapiens
ggagaugaugugauggaacacacacacacgca

SEQ ID NO: 265138 - RNA, 32 nt, Homo Sapiens
cucaccaauuuaaaugucuuuauauccaugua

SEQ ID NO: 265139 - RNA, 32 nt, Homo Sapiens
auauauuaggaaaauaaaaaauauuuuagagc

SEQ ID NO: 265140 - RNA, 32 nt, Homo Sapiens
cuggauuugucauuuuugauaauuuaaauauu

SEQ ID NO: 265141 - RNA, 32 nt, Homo Sapiens
gggucuuccgccgcccugggcuccuagcgcuc

SEQ ID NO: 265142 - RNA, 32 nt, Homo Sapiens
acacaaaugaauugaggguaggaggagggugc

SEQ ID NO: 265143 - RNA, 32 nt, Homo Sapiens
guugcccagggcucaccucugaugggugggca

SEQ ID NO: 265144 - RNA, 32 nt, Homo Sapiens
auaucaaagucucccccuaauauuuuugguuu

SEQ ID NO: 265145 - RNA, 32 nt, Homo Sapiens
ccauuguuuuaacuugugugaaacaauacaaa

SEQ ID NO: 265146 - RNA, 32 nt, Homo Sapiens
agucucggaaaucuggcugugcagguucaaau

SEQ ID NO: 265147 - RNA, 32 nt, Homo Sapiens
gacuggucaccaucagaggaguuuuuucuaag

SEQ ID NO: 265148 - RNA, 32 nt, Homo Sapiens
cuugaacuaggauuugaggaagucacagggaa

SEQ ID NO: 265149 - RNA, 32 nt, Homo Sapiens
agugcuuuacacauguagcugcuuagucgugg

SEQ ID NO: 265150 - RNA, 32 nt, Homo Sapiens
gcuuauauaguuucaacuuuuaucuucauagu

SEQ ID NO: 265151 - RNA, 32 nt, Homo Sapiens
gcuccugaugggugggggcaggagcuuggaca

SEQ ID NO: 265152 - RNA, 32 nt, Homo Sapiens
ugcaaagcugaaccucuuuagggagcaauaug

SEQ ID NO: 265153 - RNA, 32 nt, Homo Sapiens
uccuggcccuccuggaacccaggcucuaaaca

SEQ ID NO: 265154 - RNA, 32 nt, Homo Sapiens
aggcuccccacuuuugaguccacagugcuugc

SEQ ID NO: 265155 - RNA, 32 nt, Homo Sapiens
uccaucccgggccccagggaugccagcucagg

SEQ ID NO: 265156 - RNA, 32 nt, Homo Sapiens
uaaagcauuaaaauuucuuuuggggagagacu

SEQ ID NO: 265157 - RNA, 32 nt, Homo Sapiens
gaguaagagagggcccuuccccugccaggacc

SEQ ID NO: 265158 - RNA, 32 nt, Homo Sapiens
aauugguuaaugugugagaugugcucagcaca

SEQ ID NO: 265159 - RNA, 32 nt, Homo Sapiens
gauuucagggaagaggugggauuaaaguugaa

SEQ ID NO: 265160 - RNA, 32 nt, Homo Sapiens
guaacugugucugagagcacgugcgucgcggg

SEQ ID NO: 265161 - RNA, 32 nt, Homo Sapiens
aacucacccaugagggaugaaaagcacucuug

SEQ ID NO: 265162 - RNA, 32 nt, Homo Sapiens
cccgucggggagagggcgcgcagccccgaagc

SEQ ID NO: 265163 - RNA, 32 nt, Homo Sapiens
ucgggcgcggccgagcgccgcgcgagcaggag

SEQ ID NO: 265164 - RNA, 32 nt, Homo Sapiens
agaagucuuagcagccagcgggcccuggucag

SEQ ID NO: 265165 - RNA, 32 nt, Homo Sapiens
uccccagagcccagcucuugcucucuugugac

SEQ ID NO: 265166 - RNA, 32 nt, Homo Sapiens
ucugggaaaggggacaagaggcuuuucgugcc

SEQ ID NO: 265167 - RNA, 31 nt, Homo Sapiens
cugcuucaaaggacuuugcccaguggaugcc

SEQ ID NO: 265168 - RNA, 32 nt, Homo Sapiens
gaaguggagcuggggggcguggagagcccggc

SEQ ID NO: 265169 - RNA, 32 nt, Homo Sapiens
auuugcaucucuaccauaaauagaagaccaga

SEQ ID NO: 265170 - RNA, 32 nt, Homo Sapiens
gugggcguggaacacguugaugagggucucca

SEQ ID NO: 265171 - RNA, 32 nt, Homo Sapiens
gaacaugagcaaauagaccuuuccagguugaa

SEQ ID NO: 265172 - RNA, 32 nt, Homo Sapiens
cauccagccaaggaggcgcuggugguggcuuc

SEQ ID NO: 265173 - RNA, 32 nt, Homo Sapiens
cccagcugcugcuucacaccugcaaaggggag

SEQ ID NO: 265174 - RNA, 32 nt, Homo Sapiens
aaccccaggucccgggccgccggcucgccgcg

SEQ ID NO: 265175 - RNA, 32 nt, Homo Sapiens
auaaaccgcaugcuggccuagccuucaaguug

SEQ ID NO: 265176 - RNA, 32 nt, Homo Sapiens
caguagcuaaaauguugagauuagagguacuu

SEQ ID NO: 265177 - RNA, 32 nt, Homo Sapiens
cccuugcagaaucuguagccuucaggauaccc

SEQ ID NO: 265178 - RNA, 32 nt, Homo Sapiens
cucucauaccucugggaaacagaccuuuuucu

SEQ ID NO: 265179 - RNA, 32 nt, Homo Sapiens
aaccuguuuauauaaacuaaguuuuauuacuu

SEQ ID NO: 265180 - RNA, 32 nt, Homo Sapiens
uauuugcaaccuauaucagagaauuacacugu

SEQ ID NO: 265181 - RNA, 32 nt, Homo Sapiens
ugaagccuuguguagcuuucagagcacacgua

SEQ ID NO: 265182 - RNA, 32 nt, Homo Sapiens
agggaauauuggaauauuauuuuugucaggca

SEQ ID NO: 265183 - RNA, 32 nt, Homo Sapiens
gugugugccaaugguggaucuuugcuacugaa

SEQ ID NO: 265184 - RNA, 32 nt, Homo Sapiens
aggugcuugcugucauucccaacucauucuag

SEQ ID NO: 265185 - RNA, 32 nt, Homo Sapiens
gugccucucaagccuugacucccugguauucu

SEQ ID NO: 265186 - RNA, 32 nt, Homo Sapiens
cccucgcagcccggcuccggccgcccgccucu

SEQ ID NO: 265187 - RNA, 32 nt, Homo Sapiens
uaauucaauuuaaauaugugugugucucaucc

SEQ ID NO: 265188 - RNA, 32 nt, Homo Sapiens
ggcagagccagagccucuccgcgcagcccagc

SEQ ID NO: 265189 - RNA, 32 nt, Homo Sapiens
acauugucaacaggaguccaauuaugggcaga

SEQ ID NO: 265190 - RNA, 32 nt, Homo Sapiens
aggaucugggagagggaagggagguguugggc

SEQ ID NO: 265191 - RNA, 32 nt, Homo Sapiens
caacaaacaguggccgaaggcuuguuaugugc

SEQ ID NO: 265192 - RNA, 32 nt, Homo Sapiens
gcuauacuaaaauaaaacuuuauaugcuaauu

SEQ ID NO: 265193 - RNA, 32 nt, Homo Sapiens
gugauaacuaaaugucuauauugucucaagug

SEQ ID NO: 265194 - RNA, 32 nt, Homo Sapiens
ucuugggauccggagaguggccgggccggcag

SEQ ID NO: 265195 - RNA, 32 nt, Homo Sapiens
caauguggacauuuagcaucuccaucuuacaa

SEQ ID NO: 265196 - RNA, 32 nt, Homo Sapiens
aaaacucuaauuguccauucuugcuugacucu

SEQ ID NO: 265197 - RNA, 32 nt, Homo Sapiens
gcccgaccccaccgcccucccgcccccaccug

SEQ ID NO: 265198 - RNA, 32 nt, Homo Sapiens
uccaauuaaguacuaaucagucugcacuuggg

SEQ ID NO: 265199 - RNA, 32 nt, Homo Sapiens
gugccugauuuuuuuuuuuuuaacuuuugcau

SEQ ID NO: 265200 - RNA, 32 nt, Homo Sapiens
agcuguguucagguugaauaucucuaaucuga

SEQ ID NO: 265201 - RNA, 32 nt, Homo Sapiens
aaaauacaaaaauuaacuggaaaaaaaaaaaa

SEQ ID NO: 265202 - RNA, 32 nt, Homo Sapiens
aaaagccacugaugacaagggccccacugugg

SEQ ID NO: 265203 - RNA, 32 nt, Homo Sapiens
uuucacuuaauccuuagaaggcacaaaagccu

SEQ ID NO: 265204 - RNA, 32 nt, Homo Sapiens
ggcugaagggagggaaaggcggcuugggccuc

SEQ ID NO: 265205 - RNA, 32 nt, Homo Sapiens
uaauugagaacguauuuuuuuauuaugcugua

SEQ ID NO: 265206 - RNA, 32 nt, Homo Sapiens
cagaaucucuuuuuaaucuacuccuaaggaug

SEQ ID NO: 265207 - RNA, 32 nt, Homo Sapiens
gcauuuaacccggugaauaaauguagauccug

SEQ ID NO: 265208 - RNA, 32 nt, Homo Sapiens
ugugcugccuccugggcuccagcccuccccug

SEQ ID NO: 265209 - RNA, 32 nt, Homo Sapiens
aguaccaggggaggaguguggaggaagcgggg

SEQ ID NO: 265210 - RNA, 32 nt, Homo Sapiens
cgucccgagagccccagaagucggcggggaag

SEQ ID NO: 265211 - RNA, 27 nt, Homo Sapiens
gaaugagccaggucggggggcggggag

SEQ ID NO: 265212 - RNA, 32 nt, Homo Sapiens
cacgcgggcuccuggggcaccgugugcgacga

SEQ ID NO: 265213 - RNA, 32 nt, Homo Sapiens
uugacuaggcugggagcagagagaagccuggc

SEQ ID NO: 265214 - RNA, 32 nt, Homo Sapiens
gccggagacguggcagccgcccugcccgccag

SEQ ID NO: 265215 - RNA, 32 nt, Homo Sapiens
guuuuacauguggguuucuauaguuuuaauuu

SEQ ID NO: 265216 - RNA, 32 nt, Homo Sapiens
acaaaagucugauuuuuuuuuaucaagaggga

SEQ ID NO: 265217 - RNA, 32 nt, Homo Sapiens
uugugauaauaacuuuuuucaaaccaguuuca

SEQ ID NO: 265218 - RNA, 32 nt, Homo Sapiens
gaccgccaacgcgcccagucuacgcuugcgcg

SEQ ID NO: 265219 - RNA, 32 nt, Homo Sapiens
uauagcagcacauuucauuuauggaaauaugu

SEQ ID NO: 265220 - RNA, 32 nt, Homo Sapiens
aacacccuuucuguacaaggcgauuggaaugg

SEQ ID NO: 265221 - RNA, 32 nt, Homo Sapiens
ccugucggcugggggcggcuggucuccuucca

SEQ ID NO: 265222 - RNA, 30 nt, Homo Sapiens
gcgucauccugugcugcacaggacucuggg

SEQ ID NO: 265223 - RNA, 32 nt, Homo Sapiens
uagaaaaugcaaacaaccaaaaauaaaaaaau

SEQ ID NO: 265224 - RNA, 31 nt, Homo Sapiens
ggauagaaauaaacagccauaugaagagaua

SEQ ID NO: 265225 - RNA, 32 nt, Homo Sapiens
cugcgcccuggccggggcugguuuucuaugaa

SEQ ID NO: 265226 - RNA, 32 nt, Homo Sapiens
ccugguguccccuccgcccuuucuggacaggu

SEQ ID NO: 265227 - RNA, 32 nt, Homo Sapiens
gcgccuccaccccuaccccgcacauccaacug

SEQ ID NO: 265228 - RNA, 32 nt, Homo Sapiens
uccagguucugcagcagcaggcagaugaugca

SEQ ID NO: 265229 - RNA, 32 nt, Homo Sapiens
gcggauuguaagugcugcagcugugcccggcc

SEQ ID NO: 265230 - RNA, 32 nt, Homo Sapiens
cucccacccuccccaaacucaaauugcacccg

SEQ ID NO: 265231 - RNA, 32 nt, Homo Sapiens
aauagggacgagggggcggggcggccacaauu

SEQ ID NO: 265232 - RNA, 32 nt, Homo Sapiens
gaauguuugggcagaagggagaaggaucuaga

SEQ ID NO: 265233 - RNA, 32 nt, Homo Sapiens
uaugacaucccauucuaaacuggaugauagca

SEQ ID NO: 265234 - RNA, 32 nt, Homo Sapiens
agggcaucccaugggggugcugcagccaggag

SEQ ID NO: 265235 - RNA, 32 nt, Homo Sapiens
gcuguguccuucgggggcgugcguguaacugu

SEQ ID NO: 265236 - RNA, 32 nt, Homo Sapiens
ggaguugcccgccuuagcccccgcccccggcc

SEQ ID NO: 265237 - RNA, 32 nt, Homo Sapiens
ggcaugggagccgcgcgcucucucccggcgcc

SEQ ID NO: 265238 - RNA, 32 nt, Homo Sapiens
uuagcauggugaguuguuugggaaaugauuca

SEQ ID NO: 265239 - RNA, 32 nt, Homo Sapiens
gauuuggugucuggugaagacccacuucuggu

SEQ ID NO: 265240 - RNA, 32 nt, Homo Sapiens
ccuggccgcagccuccacccgcgcucgccgcc

SEQ ID NO: 265241 - RNA, 32 nt, Homo Sapiens
ucuugagaaaaggacccugagaaggagguugc

SEQ ID NO: 265242 - RNA, 32 nt, Homo Sapiens
ggcuagauggauaccccaaaagaaaugucuua

SEQ ID NO: 265243 - RNA, 32 nt, Homo Sapiens
cuaacgggauuaggagggcgcgccacccgcuu

SEQ ID NO: 265244 - RNA, 32 nt, Homo Sapiens
aaggaaggaaacaaaagcaauuucaguaucuc

SEQ ID NO: 265245 - RNA, 32 nt, Homo Sapiens
ccgggcaggcugccuccguuagggccgccccu

SEQ ID NO: 265246 - RNA, 32 nt, Homo Sapiens
aauuuuuugagaaacuucugugcugcuuucca

SEQ ID NO: 265247 - RNA, 32 nt, Homo Sapiens
cguauacccacaaaaacaccagcaagcaggag

SEQ ID NO: 265248 - RNA, 32 nt, Homo Sapiens
ggcucagcccucggccaccaugucggcgccgu

SEQ ID NO: 265249 - RNA, 32 nt, Homo Sapiens
cccgccucuuucugcgggcgucuccagcagcc

SEQ ID NO: 265250 - RNA, 32 nt, Homo Sapiens
ggcaggggacaguagucuccccugccagccua

SEQ ID NO: 265251 - RNA, 32 nt, Homo Sapiens
ucccauuuucucagccucuucucugccuccag

SEQ ID NO: 265252 - RNA, 32 nt, Homo Sapiens
aauaaauaaggaagaaagagggagacaguagc

SEQ ID NO: 265253 - RNA, 32 nt, Homo Sapiens
cagcuuugaggacagcagcugcagcauucggc

SEQ ID NO: 265254 - RNA, 32 nt, Homo Sapiens
augccaaugauuaccaaacaacagacaguugc

SEQ ID NO: 265255 - RNA, 32 nt, Homo Sapiens
ugcugcugcugcugccgcugcugcuggguagg

SEQ ID NO: 265256 - RNA, 32 nt, Homo Sapiens
agaggggcaaauaggguaauagaugugaauuc

SEQ ID NO: 265257 - RNA, 32 nt, Homo Sapiens
gcccagcugccuguuuucuuuugcaggggauc

SEQ ID NO: 265258 - RNA, 32 nt, Homo Sapiens
gcuaucggacagagccuggcgagcgcaagcgg

SEQ ID NO: 265259 - RNA, 32 nt, Homo Sapiens
ccacugaccccacccacaagagcauucaggau

SEQ ID NO: 265260 - RNA, 32 nt, Homo Sapiens
cauugagacccuccccaaggggaugggcugcu

SEQ ID NO: 265261 - RNA, 32 nt, Homo Sapiens
cugggacgcuagaagggucauguguuaacuau

SEQ ID NO: 265262 - RNA, 32 nt, Homo Sapiens
auuugucccguaggcccggcccgggccccucu

SEQ ID NO: 265263 - RNA, 32 nt, Homo Sapiens
agaggccgaggugggcagaucgccugagguca

SEQ ID NO: 265264 - RNA, 32 nt, Homo Sapiens
uucuuuuaaaggaugccuuagcuuccucccgc

SEQ ID NO: 265265 - RNA, 32 nt, Homo Sapiens
ugguugaugaucuagcacuuucaccaagaaau

SEQ ID NO: 265266 - RNA, 32 nt, Homo Sapiens
caggcauucagaugugagcucaucaacauuga

SEQ ID NO: 265267 - RNA, 32 nt, Homo Sapiens
augggaacgugauuacuaucccaagaauauaa

SEQ ID NO: 265268 - RNA, 32 nt, Homo Sapiens
uguguuaugauaccaaacaaaauauuuucaua

SEQ ID NO: 265269 - RNA, 32 nt, Homo Sapiens
cuugagaugcuuuggcugauauuuacauguuu

SEQ ID NO: 265270 - RNA, 32 nt, Homo Sapiens
uacaaccagauauaaaacucuuucucgucgcc

SEQ ID NO: 265271 - RNA, 32 nt, Homo Sapiens
uuucuguuucuggguuugggccccacaagcug

SEQ ID NO: 265272 - RNA, 32 nt, Homo Sapiens
acccaccuggacaacauagugaaacccugucu

SEQ ID NO: 265273 - RNA, 30 nt, Homo Sapiens
gggaaaugggagcacaguacuggaaaaugg

SEQ ID NO: 265274 - RNA, 32 nt, Homo Sapiens
cgaucuccccagcagcagcaacagcagcgucc

SEQ ID NO: 265275 - RNA, 32 nt, Homo Sapiens
cacagaugcgcgcgcacacacacacacacaca

SEQ ID NO: 265276 - RNA, 32 nt, Homo Sapiens
cauaucugaccaucuucacucagcgccucuga

SEQ ID NO: 265277 - RNA, 32 nt, Homo Sapiens
cucuuaaacaaggcucacuugugcuacaagac

SEQ ID NO: 265278 - RNA, 32 nt, Homo Sapiens
ugcccuugaagguaucuucuccaggaaauuag

SEQ ID NO: 265279 - RNA, 32 nt, Homo Sapiens
cuaacauguuccuuguuaauucuuguucugua

SEQ ID NO: 265280 - RNA, 32 nt, Homo Sapiens
uaggagaccuaucgucuuggaacuugccauuc

SEQ ID NO: 265281 - RNA, 32 nt, Homo Sapiens
auuccuccaagcccuugcgcucccguuucucu

SEQ ID NO: 265282 - RNA, 32 nt, Homo Sapiens
guuccggcgcauccuccacaccgacaccaucu

SEQ ID NO: 265283 - RNA, 32 nt, Homo Sapiens
ucgggccuucggccugacccagcccccauggc

SEQ ID NO: 265284 - RNA, 32 nt, Homo Sapiens
aauuccugccucgccacuguccugcugcccuc

SEQ ID NO: 265285 - RNA, 32 nt, Homo Sapiens
gggccacucugugcccacgugggaacccacac

SEQ ID NO: 265286 - RNA, 32 nt, Homo Sapiens
ggguguguaguguguacuuccuaauauuggug

SEQ ID NO: 265287 - RNA, 32 nt, Homo Sapiens
auuacccagaacuuuuuuguaaaugcggcagu

SEQ ID NO: 265288 - RNA, 27 nt, Homo Sapiens
gaaauauuaaaguucugguauauuuuu

SEQ ID NO: 265289 - RNA, 32 nt, Homo Sapiens
gcccagggucccugcuugggccccagaaagca

SEQ ID NO: 265290 - RNA, 32 nt, Homo Sapiens
cagucugggcagcagggccagacacugucucu

SEQ ID NO: 265291 - RNA, 32 nt, Homo Sapiens
aaccuugcuuggauuuuuaccugaugaaguuu

SEQ ID NO: 265292 - RNA, 32 nt, Homo Sapiens
guauucagauaaugagaaaaccagagguuccc

SEQ ID NO: 265293 - RNA, 32 nt, Homo Sapiens
gacguccgcucccgaaacgcggcgcggucggg

SEQ ID NO: 265294 - RNA, 32 nt, Homo Sapiens
gaauggugaacaggcuauuuuguacaucaaua

SEQ ID NO: 265295 - RNA, 32 nt, Homo Sapiens
uacaggguuaugauugcacaauaaucauuugc

SEQ ID NO: 265296 - RNA, 32 nt, Homo Sapiens
gagggggaugccuucaugggggugaccccacg

SEQ ID NO: 265297 - RNA, 32 nt, Homo Sapiens
uuuuuugugggaaguaaguaggggaaaagguc

SEQ ID NO: 265298 - RNA, 32 nt, Homo Sapiens
cucccagagaacuacuggauuuccucauaauu

SEQ ID NO: 265299 - RNA, 32 nt, Homo Sapiens
aguccccaguccuccuucucugagcagaccuc

SEQ ID NO: 265300 - RNA, 32 nt, Homo Sapiens
cuuuauuccaucaaguaauuuauuuucaugag

SEQ ID NO: 265301 - RNA, 32 nt, Homo Sapiens
aacuggaaauuaggaacugcuuccucauuuaa

SEQ ID NO: 265302 - RNA, 32 nt, Homo Sapiens
ugcccgcccuccccagguacuggguccaugcc

SEQ ID NO: 265303 - RNA, 32 nt, Homo Sapiens
aggcagaguugucugaauccuuccuggcggcc

SEQ ID NO: 265304 - RNA, 32 nt, Homo Sapiens
gugucaagcaauacuaauuugugucauaaaau

SEQ ID NO: 265305 - RNA, 32 nt, Homo Sapiens
agaaucaaaagaaaacaaaacccauagucaag

SEQ ID NO: 265306 - RNA, 32 nt, Homo Sapiens
agucugccugacgccagcccugccucugggcc

SEQ ID NO: 265307 - RNA, 32 nt, Homo Sapiens
gacguuccucaucacccgccucacagggcccg

SEQ ID NO: 265308 - RNA, 32 nt, Homo Sapiens
uugggcaguggcagcagcaggaggaaguagca

SEQ ID NO: 265309 - RNA, 32 nt, Homo Sapiens
aagcccaaccucaggaagaaggcccuacagau

SEQ ID NO: 265310 - RNA, 32 nt, Homo Sapiens
aagcugagaagcugagagcuggaggacaauau

SEQ ID NO: 265311 - RNA, 32 nt, Homo Sapiens
gcaggggccgcgcuugggcgcuugggagggug

SEQ ID NO: 265312 - RNA, 32 nt, Homo Sapiens
ggcccggcagcggcgagcgggcgcgaugacac

SEQ ID NO: 265313 - RNA, 32 nt, Homo Sapiens
gcaagaaugagaacuuccagagaugaaaacuc

SEQ ID NO: 265314 - RNA, 32 nt, Homo Sapiens
gagcuggugcuguucucagauguuuccuucca

SEQ ID NO: 265315 - RNA, 32 nt, Homo Sapiens
ucucugguccccagccucagugccucuuggcc

SEQ ID NO: 265316 - RNA, 32 nt, Homo Sapiens
acagggauccaagaucuuugcaguucaaucga

SEQ ID NO: 265317 - RNA, 32 nt, Homo Sapiens
auuuaugaacuguggugacuacagguaacuga

SEQ ID NO: 265318 - RNA, 32 nt, Homo Sapiens
cagaggucuuucgucugcacucucagugggaa

SEQ ID NO: 265319 - RNA, 32 nt, Homo Sapiens
cuaacgcucuuccuaguccccgggccaacucg

SEQ ID NO: 265320 - RNA, 32 nt, Homo Sapiens
cugguuucgaguuuuggagauccuuguuuuuu

SEQ ID NO: 265321 - RNA, 32 nt, Homo Sapiens
auuuaaagagguuaauaaaaacaaacuauaaa

SEQ ID NO: 265322 - RNA, 32 nt, Homo Sapiens
gaagugucugcacaucaccgaacgaugagaga

SEQ ID NO: 265323 - RNA, 32 nt, Homo Sapiens
gugccugguggccucacccggaggaaagcacg

SEQ ID NO: 265324 - RNA, 32 nt, Homo Sapiens
ggggcuccaggucauaaggaugagauauauuu

SEQ ID NO: 265325 - RNA, 32 nt, Homo Sapiens
aaaaggaaaaggaaacacuaugaggacccagg

SEQ ID NO: 265326 - RNA, 32 nt, Homo Sapiens
gcccucugcuaagcccgggcacccgcccagcc

SEQ ID NO: 265327 - RNA, 32 nt, Homo Sapiens
ggucaccugcugcccuuugccucccccgacgc

SEQ ID NO: 265328 - RNA, 32 nt, Homo Sapiens
gagcguguuaguguaggcucuccggagaagca

SEQ ID NO: 265329 - RNA, 32 nt, Homo Sapiens
acuacaccaggguccugguccuggacaaagga

SEQ ID NO: 265330 - RNA, 32 nt, Homo Sapiens
auuacaucaucagaucagcaugugcuauacuc

SEQ ID NO: 265331 - RNA, 32 nt, Homo Sapiens
uaagagcagcgggagcggccgugagcccagag

SEQ ID NO: 265332 - RNA, 32 nt, Homo Sapiens
gaggguuaaacuuugaggaauaaugaaaagcu

SEQ ID NO: 265333 - RNA, 32 nt, Homo Sapiens
guaaauuuucuuuuccaagaagcuuuugaaua

SEQ ID NO: 265334 - RNA, 32 nt, Homo Sapiens
acuguggguaccuggugaucagggcaagcugu

SEQ ID NO: 265335 - RNA, 32 nt, Homo Sapiens
acgaguuaauuggugcaacacaacaacauggc

SEQ ID NO: 265336 - RNA, 30 nt, Homo Sapiens
gagcaggcgcccggugccggccacgacgac

SEQ ID NO: 265337 - RNA, 32 nt, Homo Sapiens
uucuacuucuaccugacccccucuccucacug

SEQ ID NO: 265338 - RNA, 32 nt, Homo Sapiens
gcagcccccacuuuccuacaaaauggagggag

SEQ ID NO: 265339 - RNA, 32 nt, Homo Sapiens
gcaggccugucuguggggacaucggugugaag

SEQ ID NO: 265340 - RNA, 32 nt, Homo Sapiens
cacuuaugccacuguggaggagguggaugcag

SEQ ID NO: 265341 - RNA, 32 nt, Homo Sapiens
uuguaguaauaaauauuuuuaacuucauucau

SEQ ID NO: 265342 - RNA, 32 nt, Homo Sapiens
gggugcuuuguucuuccuucugcaccuccuuc

SEQ ID NO: 265343 - RNA, 32 nt, Homo Sapiens
auugagauuuugcugcugugaccccaacccug

SEQ ID NO: 265344 - RNA, 32 nt, Homo Sapiens
aaaugcugcaaagggaagcagauucuguauau

SEQ ID NO: 265345 - RNA, 32 nt, Homo Sapiens
ugcucagcacacccugggccucagccccaccc

SEQ ID NO: 265346 - RNA, 32 nt, Homo Sapiens
ucaacuuauuaaaaauaguuaauuuucauguc

SEQ ID NO: 265347 - RNA, 32 nt, Homo Sapiens
uaacuaauauagagaagugcuuaaaggagcug

SEQ ID NO: 265348 - RNA, 32 nt, Homo Sapiens
auaguuacaaaaugcccuuguuuuuguccuga

SEQ ID NO: 265349 - RNA, 31 nt, Homo Sapiens
uaccaucucuuuguguaauagaucugaauaa

SEQ ID NO: 265350 - RNA, 32 nt, Homo Sapiens
gcccggccacagagccggagcuggaggugcug

SEQ ID NO: 265351 - RNA, 32 nt, Homo Sapiens
aaacuuguauaaaauuaucuuggugagaagac

SEQ ID NO: 265352 - RNA, 32 nt, Homo Sapiens
ucaggagucaacaaagggaggagagaggacuc

SEQ ID NO: 265353 - RNA, 32 nt, Homo Sapiens
augaaaacccucaguuucucacagauuuucac

SEQ ID NO: 265354 - RNA, 32 nt, Homo Sapiens
cgccacuagaaacaggacccuuccucagucau

SEQ ID NO: 265355 - RNA, 32 nt, Homo Sapiens
gcugucccaauccuagcuuuucuauauaccau

SEQ ID NO: 265356 - RNA, 32 nt, Homo Sapiens
uggugcagacuagguguggauuugagcucugu

SEQ ID NO: 265357 - RNA, 32 nt, Homo Sapiens
cgcgggggauggugcgaucccgggcccgaggg

SEQ ID NO: 265358 - RNA, 32 nt, Homo Sapiens
gcuggucuuuaacuccugauggugauccaccc

SEQ ID NO: 265359 - RNA, 32 nt, Homo Sapiens
ccccugggucaccuccucccugcucgcugaca

SEQ ID NO: 265360 - RNA, 32 nt, Homo Sapiens
aucccacugacuguauggcacucuguagucaa

SEQ ID NO: 265361 - RNA, 32 nt, Homo Sapiens
gcccagagaccgagaaaaucucuuaauuucag

SEQ ID NO: 265362 - RNA, 32 nt, Homo Sapiens
aguccuguucuucccccacuaaacugagcugu

SEQ ID NO: 265363 - RNA, 32 nt, Homo Sapiens
gggaagggccuggucagcugcguccggcggag

SEQ ID NO: 265364 - RNA, 32 nt, Homo Sapiens
ugacaaauuggauguagacaacauuacuuaaa

SEQ ID NO: 265365 - RNA, 32 nt, Homo Sapiens
guuuugaacaccuggugauuuaauaaaguggu

SEQ ID NO: 265366 - RNA, 32 nt, Homo Sapiens
gaagaguuuauuauuuuugcuaguuguaaguu

SEQ ID NO: 265367 - RNA, 32 nt, Homo Sapiens
uuguuuccgcggcuccugcggcgguggcagug

SEQ ID NO: 265368 - RNA, 32 nt, Homo Sapiens
gcccaggagcagcuuuuggucuccuugggccc

SEQ ID NO: 265369 - RNA, 32 nt, Homo Sapiens
cucucgcggugucucgucaucuccgggaagac

SEQ ID NO: 265370 - RNA, 32 nt, Homo Sapiens
ccaggaagagccagagcugugcagggaggaag

SEQ ID NO: 265371 - RNA, 32 nt, Homo Sapiens
agauagugucuaggaaaguaauaguauaacua

SEQ ID NO: 265372 - RNA, 32 nt, Homo Sapiens
gugugugcgcuucuccuccccaucccccuucc

SEQ ID NO: 265373 - RNA, 32 nt, Homo Sapiens
ucauguuuuccuuuauaaucauuugaaauuuc

SEQ ID NO: 265374 - RNA, 32 nt, Homo Sapiens
uucucccuccgauguuggacugcccgaugcuc

SEQ ID NO: 265375 - RNA, 32 nt, Homo Sapiens
uuauauuuuuaaaauacuguuuaacauuugug

SEQ ID NO: 265376 - RNA, 32 nt, Homo Sapiens
uuaugcugaugaugguauuuggagaugugaaa

SEQ ID NO: 265377 - RNA, 32 nt, Homo Sapiens
aagaaaaacaaaugguaacuggugcuuaaagc

SEQ ID NO: 265378 - RNA, 32 nt, Homo Sapiens
ccgcagcugcccugggaccccugacauugcag

SEQ ID NO: 265379 - RNA, 32 nt, Homo Sapiens
gaucuucaaaauaaaaagucaucuuaaaaacc

SEQ ID NO: 265380 - RNA, 32 nt, Homo Sapiens
cuucggccccggccggccgggcggggaagacu

SEQ ID NO: 265381 - RNA, 32 nt, Homo Sapiens
cagccucccccgcugccucccuagggcucccc

SEQ ID NO: 265382 - RNA, 32 nt, Homo Sapiens
cacuugccccucacugguguggauggaaaucu

SEQ ID NO: 265383 - RNA, 32 nt, Homo Sapiens
ucuauggcgaggaggaggaggaggagcgcgag

SEQ ID NO: 265384 - RNA, 32 nt, Homo Sapiens
acagaugcaauaaccugcuugacauucuccuc

SEQ ID NO: 265385 - RNA, 32 nt, Homo Sapiens
uaugggagcaagggcugaccugugacuguuuu

SEQ ID NO: 265386 - RNA, 32 nt, Homo Sapiens
aggcaggcagaucaccugaggccaggcugguc

SEQ ID NO: 265387 - RNA, 32 nt, Homo Sapiens
cagacuucaaaauuauuuuauagcccaaauua

SEQ ID NO: 265388 - RNA, 32 nt, Homo Sapiens
aaaccuguaaaaauaugaaagauuuuuauauu

SEQ ID NO: 265389 - RNA, 32 nt, Homo Sapiens
uacauuccgcagaaaacaggcgggaaagcugc

SEQ ID NO: 265390 - RNA, 32 nt, Homo Sapiens
cuuaguuaacuggcaaauagagcuguacucag

SEQ ID NO: 265391 - RNA, 32 nt, Homo Sapiens
cugucugggccugggaggcgagagcagugccc

SEQ ID NO: 265392 - RNA, 32 nt, Homo Sapiens
ggcgggaucgggcacugguuccuccuuguccc

SEQ ID NO: 265393 - RNA, 32 nt, Homo Sapiens
gucuuuuaaguacaugagugcuuagaaaugua

SEQ ID NO: 265394 - RNA, 32 nt, Homo Sapiens
agguagcacagccagcaccuccccugcggauc

SEQ ID NO: 265395 - RNA, 28 nt, Homo Sapiens
gucggggcguccacgccgaggccggcaa

SEQ ID NO: 265396 - RNA, 32 nt, Homo Sapiens
cugaccacuuucagguuuaguuuaccuggcuu

SEQ ID NO: 265397 - RNA, 32 nt, Homo Sapiens
guaagaaauauuucuucaguucauuaccacaa

SEQ ID NO: 265398 - RNA, 32 nt, Homo Sapiens
guggggacuuggaaaaccuuuuugucaacacu

SEQ ID NO: 265399 - RNA, 32 nt, Homo Sapiens
ccuggcuucgggugcaaggcggugcggugugc

SEQ ID NO: 265400 - RNA, 32 nt, Homo Sapiens
ccauccgccccgacuuccagaagggccugaag

SEQ ID NO: 265401 - RNA, 32 nt, Homo Sapiens
ggcccgccuggcgcugcugcugccgggcggag

SEQ ID NO: 265402 - RNA, 32 nt, Homo Sapiens
uuccucuugugaccaccacaugucuagugauu

SEQ ID NO: 265403 - RNA, 32 nt, Homo Sapiens
uauauaagaaaucuggggauaauuaagaauga

SEQ ID NO: 265404 - RNA, 32 nt, Homo Sapiens
guguguaauaaauuauuuuugaauugaacauu

SEQ ID NO: 265405 - RNA, 32 nt, Homo Sapiens
aacagcugccgaccgaacauggcccugggaca

SEQ ID NO: 265406 - RNA, 32 nt, Homo Sapiens
aagucagguuucuaagugagcucccugaggug

SEQ ID NO: 265407 - RNA, 32 nt, Homo Sapiens
uucagcucuuacaggauauaaaacaguccaua

SEQ ID NO: 265408 - RNA, 32 nt, Homo Sapiens
auuguaauuuaugggacugauagagaacuuuu

SEQ ID NO: 265409 - RNA, 32 nt, Homo Sapiens
agcuggcgcggagcuucgcgcugcugcugccc

SEQ ID NO: 265410 - RNA, 30 nt, Homo Sapiens
cucugaccacuugaggccugaucugcccau

SEQ ID NO: 265411 - RNA, 32 nt, Homo Sapiens
auuucuucuucuucuuuuuuaacugaaagcug

SEQ ID NO: 265412 - RNA, 32 nt, Homo Sapiens
ggugacuugcaucuguggccuugaauauuuua

SEQ ID NO: 265413 - RNA, 30 nt, Homo Sapiens
ggcguggcgcccguggcugcccagcaccuu

SEQ ID NO: 265414 - RNA, 30 nt, Homo Sapiens
ggaaagaugcuaaugguugacuuugcauua

SEQ ID NO: 265415 - RNA, 32 nt, Homo Sapiens
aagcagcuuucaucguguuacaucaguggcua

SEQ ID NO: 265416 - RNA, 32 nt, Homo Sapiens
ggguacccgggcuauggcgccggcgcagcgcu

SEQ ID NO: 265417 - RNA, 32 nt, Homo Sapiens
gacccacugcauuuuccaaaguuaagcaaaug

SEQ ID NO: 265418 - RNA, 32 nt, Homo Sapiens
ccccaccagccccuugacgcucuucuuuuguu

SEQ ID NO: 265419 - RNA, 32 nt, Homo Sapiens
ugcuuuggaaaacauauuuucucugugcuagu

SEQ ID NO: 265420 - RNA, 32 nt, Homo Sapiens
aaaagagagacauguagaagaaccucuaacaa

SEQ ID NO: 265421 - RNA, 32 nt, Homo Sapiens
aaagcauucagaagcuaggcuuuaacuuugua

SEQ ID NO: 265422 - RNA, 32 nt, Homo Sapiens
cuaacugguacuccaauucagaaugaucugca

SEQ ID NO: 265423 - RNA, 32 nt, Homo Sapiens
uucuaaaugaacuguggggauccaggauuugu

SEQ ID NO: 265424 - RNA, 32 nt, Homo Sapiens
cuacgcgcgcgggggugcgcgcgggaacgacc

SEQ ID NO: 265425 - RNA, 32 nt, Homo Sapiens
aggaauacuugaugggcagcggugcagacccc

SEQ ID NO: 265426 - RNA, 32 nt, Homo Sapiens
cacccuuagugucaguguggagcuccuucccu

SEQ ID NO: 265427 - RNA, 32 nt, Homo Sapiens
guaaggguaggauaaacuaguuuuuguauaua

SEQ ID NO: 265428 - RNA, 32 nt, Homo Sapiens
gaauuuucuccucuccucucaggucaguccau

SEQ ID NO: 265429 - RNA, 32 nt, Homo Sapiens
agagcaggccccaggggucugugucacauauc

SEQ ID NO: 265430 - RNA, 32 nt, Homo Sapiens
cauauaaauuauuuuucaaacuguauagauuu

SEQ ID NO: 265431 - RNA, 32 nt, Homo Sapiens
caagauggccgcugcacgcagaagggccugga

SEQ ID NO: 265432 - RNA, 32 nt, Homo Sapiens
aaugauguugcuagugcaguguuucacaauuc

SEQ ID NO: 265433 - RNA, 32 nt, Homo Sapiens
ugaaguguauauauauuaccuuagugugcauu

SEQ ID NO: 265434 - RNA, 32 nt, Homo Sapiens
cggaaucccgcacguagagcaaccucgcagca

SEQ ID NO: 265435 - RNA, 32 nt, Homo Sapiens
uccaucuuuuugguguaauuuucauguuuuua

SEQ ID NO: 265436 - RNA, 32 nt, Homo Sapiens
gugguauagucaaucuauuucuuaauaauacu

SEQ ID NO: 265437 - RNA, 32 nt, Homo Sapiens
ccaccccaccccacccuacucuccagacgccc

SEQ ID NO: 265438 - RNA, 32 nt, Homo Sapiens
uucagugacaccugaauuguuuguuguuguuu

SEQ ID NO: 265439 - RNA, 32 nt, Homo Sapiens
cuccuggcugcccuccucccuggcuguguaaa

SEQ ID NO: 265440 - RNA, 32 nt, Homo Sapiens
cccagggccuucuccuucauucucugugaaca

SEQ ID NO: 265441 - RNA, 32 nt, Homo Sapiens
ugagugcccuucucgguugcugccgcugagga

SEQ ID NO: 265442 - RNA, 32 nt, Homo Sapiens
acugaaauuggaagguugucuguaaauaauau

SEQ ID NO: 265443 - RNA, 32 nt, Homo Sapiens
uaucgcggccaccaccuguaggaccuccuccc

SEQ ID NO: 265444 - RNA, 32 nt, Homo Sapiens
ccaauacaaaaauaccuacugcugagagggcu

SEQ ID NO: 265445 - RNA, 32 nt, Homo Sapiens
aaaaaacauaucuauuuggaauaagauacagc

SEQ ID NO: 265446 - RNA, 32 nt, Homo Sapiens
ccagcccagaaaggggcucccacagugcagcg

SEQ ID NO: 265447 - RNA, 32 nt, Homo Sapiens
aggcaggcagaucaccugaggucagagcucga

SEQ ID NO: 265448 - RNA, 32 nt, Homo Sapiens
cuccugugcaaauuauuuauucguuguguaua

SEQ ID NO: 265449 - RNA, 32 nt, Homo Sapiens
gcacggcggggcccgauucgcgcguccggggc

SEQ ID NO: 265450 - RNA, 32 nt, Homo Sapiens
ucagcgugagguacaaaugaugcaaaaugugc

SEQ ID NO: 265451 - RNA, 32 nt, Homo Sapiens
cacugucucccaucacccccagaugggaccau

SEQ ID NO: 265452 - RNA, 32 nt, Homo Sapiens
gcacaacauauuguaauucacacuggagagaa

SEQ ID NO: 265453 - RNA, 32 nt, Homo Sapiens
uugcagagcagcaagaggcucucuccagaaaa

SEQ ID NO: 265454 - RNA, 32 nt, Homo Sapiens
uaaaguuucuaaaauaacauuccucucacuug

SEQ ID NO: 265455 - RNA, 32 nt, Homo Sapiens
uauugguguuuagaauaagucaauguuuuucc

SEQ ID NO: 265456 - RNA, 32 nt, Homo Sapiens
gauugagauagguaugcuguguuguaaauaga

SEQ ID NO: 265457 - RNA, 32 nt, Homo Sapiens
uugaaaaauaaaccucuuugacugcugagcgg

SEQ ID NO: 265458 - RNA, 32 nt, Homo Sapiens
caagccagaaaagcaagccagaaaagcuacaa

SEQ ID NO: 265459 - RNA, 30 nt, Homo Sapiens
cagccucuggacuggaugccuucuguccua

SEQ ID NO: 265460 - RNA, 32 nt, Homo Sapiens
ccuggacguggcggcagagcccaagcacgagc

SEQ ID NO: 265461 - RNA, 32 nt, Homo Sapiens
auagauuugaagaucugauuuauaccauuaua

SEQ ID NO: 265462 - RNA, 32 nt, Homo Sapiens
cuaguuuuaaauuucucuagaacuugcaauag

SEQ ID NO: 265463 - RNA, 32 nt, Homo Sapiens
acauacaucaacaugaaggugugacaucagaa

SEQ ID NO: 265464 - RNA, 32 nt, Homo Sapiens
agcccccucuguucugcugauuguagggaugu

SEQ ID NO: 265465 - RNA, 32 nt, Homo Sapiens
aaaagauggccaugcuggccaaggcugggcuc

SEQ ID NO: 265466 - RNA, 32 nt, Homo Sapiens
uauccagacagagacgccagaccccucaucca

SEQ ID NO: 265467 - RNA, 32 nt, Homo Sapiens
gguguauuucgggucuugcuggggcugagaga

SEQ ID NO: 265468 - RNA, 32 nt, Homo Sapiens
gcgccaccacacuccagccugagcgacagagc

SEQ ID NO: 265469 - RNA, 27 nt, Homo Sapiens
ucuuuguuuuccuucagccuuuauuac

SEQ ID NO: 265470 - RNA, 31 nt, Homo Sapiens
ccuuugaagcgcagcccucuguggcccgcag

SEQ ID NO: 265471 - RNA, 32 nt, Homo Sapiens
acggcgugugcagcugcauguagagcauauuc

SEQ ID NO: 265472 - RNA, 32 nt, Homo Sapiens
ggcgcggggccgagggacucgcagugugugua

SEQ ID NO: 265473 - RNA, 32 nt, Homo Sapiens
auauuaaagauguacuggcauuacuuuuaugg

SEQ ID NO: 265474 - RNA, 32 nt, Homo Sapiens
aucaaaaaugucaaaugcuuugaaaagacgca

SEQ ID NO: 265475 - RNA, 32 nt, Homo Sapiens
cggugagacgaacaaaagggaaaggaaaaaau

SEQ ID NO: 265476 - RNA, 32 nt, Homo Sapiens
augaaacauuuacccacaaaauguaaacccaa

SEQ ID NO: 265477 - RNA, 32 nt, Homo Sapiens
ggcaucagcaucagcccuuccucccagagccc

SEQ ID NO: 265478 - RNA, 32 nt, Homo Sapiens
uucuaaauguuuuuauggcuauuaucuauuuc

SEQ ID NO: 265479 - RNA, 32 nt, Homo Sapiens
agcuuaaaacauguuuugauaaguaauuacac

SEQ ID NO: 265480 - RNA, 32 nt, Homo Sapiens
caccaguuugcaggaagaaaggaagagaaugg

SEQ ID NO: 265481 - RNA, 32 nt, Homo Sapiens
acccauugugauuguggaagauagaauucaau

SEQ ID NO: 265482 - RNA, 32 nt, Homo Sapiens
acuugaggaccacaguuggggguguagggacc

SEQ ID NO: 265483 - RNA, 32 nt, Homo Sapiens
acauuuuaucauguuucuuuugaauauaugaa

SEQ ID NO: 265484 - RNA, 32 nt, Homo Sapiens
gucaguuguacaaagaaaaugcacuuaaaccu

SEQ ID NO: 265485 - RNA, 32 nt, Homo Sapiens
uuuuauuuaaauuuauuuuucuuaauuauuug

SEQ ID NO: 265486 - RNA, 32 nt, Homo Sapiens
ggcucuggaaauggugaggcgaggggcuugag

SEQ ID NO: 265487 - RNA, 32 nt, Homo Sapiens
cagcaacgugcggcgagucauggccgaggccu

SEQ ID NO: 265488 - RNA, 32 nt, Homo Sapiens
caaacuuuguaauucuaauaaugcacucaguu

SEQ ID NO: 265489 - RNA, 32 nt, Homo Sapiens
gaucuggaaggggauaaagggcuguguggcug

SEQ ID NO: 265490 - RNA, 32 nt, Homo Sapiens
cucuggugucaugcucccuccuccucgauaca

SEQ ID NO: 265491 - RNA, 32 nt, Homo Sapiens
gcaacuccuuuccccgcuucagcccucaacug

SEQ ID NO: 265492 - RNA, 32 nt, Homo Sapiens
agcauuugucuccuaagacuuggucacagagg

SEQ ID NO: 265493 - RNA, 29 nt, Homo Sapiens
uuuccaucauguauguaaaauuucauagu

SEQ ID NO: 265494 - RNA, 32 nt, Homo Sapiens
uuagauuccugaagcuucugcacauguaguuc

SEQ ID NO: 265495 - RNA, 32 nt, Homo Sapiens
acauuucugaagaucucaagaucuggacuacu

SEQ ID NO: 265496 - RNA, 32 nt, Homo Sapiens
cuacugugucaugugagcaggcugguaggcag

SEQ ID NO: 265497 - RNA, 32 nt, Homo Sapiens
uuuuguuuuaggauguugugacuuagcaaaaa

SEQ ID NO: 265498 - RNA, 32 nt, Homo Sapiens
gccuagccugcgcagggaaugaacuggagacu

SEQ ID NO: 265499 - RNA, 32 nt, Homo Sapiens
auaaauauuauggacuuuguuaaacuugaaag

SEQ ID NO: 265500 - RNA, 32 nt, Homo Sapiens
cuuucucucccucccccugcaaagaugagaac

SEQ ID NO: 265501 - RNA, 32 nt, Homo Sapiens
guauuaauguuauguuuacuuagguauguauc

SEQ ID NO: 265502 - RNA, 32 nt, Homo Sapiens
cucaguauuaaaccacauuaaucuguauccca

SEQ ID NO: 265503 - RNA, 32 nt, Homo Sapiens
acuuccauaaaacaggauuggugaaucacgga

SEQ ID NO: 265504 - RNA, 32 nt, Homo Sapiens
aauaacuuauuuuaaccucccucuuacaccug

SEQ ID NO: 265505 - RNA, 32 nt, Homo Sapiens
uuccuuucugcuuagagccggagggagggaag

SEQ ID NO: 265506 - RNA, 32 nt, Homo Sapiens
acuaacuucuaaaacuguacuuugauucacau

SEQ ID NO: 265507 - RNA, 28 nt, Homo Sapiens
accauguccguggagcucgaggaggccc

SEQ ID NO: 265508 - RNA, 32 nt, Homo Sapiens
gcccgggaagccggccuuggugcugggacugc

SEQ ID NO: 265509 - RNA, 32 nt, Homo Sapiens
cuccauccaggucaguccugccaggcagguga

SEQ ID NO: 265510 - RNA, 31 nt, Homo Sapiens
ugcccgcacuccugccugcugcccugaccag

SEQ ID NO: 265511 - RNA, 32 nt, Homo Sapiens
aagaacaaaacuccaucucaaaaaauaaaaau

SEQ ID NO: 265512 - RNA, 32 nt, Homo Sapiens
ugggaggaagcagaggcagaugggaaagcaga

SEQ ID NO: 265513 - RNA, 32 nt, Homo Sapiens
gcgagcgcgggcgggcggcagcagcgacguag

SEQ ID NO: 265514 - RNA, 32 nt, Homo Sapiens
cccuccccggcucuccucccagcaucacacca

SEQ ID NO: 265515 - RNA, 32 nt, Homo Sapiens
uucaccauguuggccaggcagaucucaaacuu

SEQ ID NO: 265516 - RNA, 32 nt, Homo Sapiens
aacauaggaucaauauaaaaauuauuaaugag

SEQ ID NO: 265517 - RNA, 32 nt, Homo Sapiens
ucggaccaacggacgcgcugaccgcugccaac

SEQ ID NO: 265518 - RNA, 32 nt, Homo Sapiens
ggcacagcucugcuccuccccugccugccaaa

SEQ ID NO: 265519 - RNA, 32 nt, Homo Sapiens
gaaucagaaaucaaucuuucuacuaauguaaa

SEQ ID NO: 265520 - RNA, 32 nt, Homo Sapiens
uuauaaauggugcugaagcaggacccgaagcc

SEQ ID NO: 265521 - RNA, 32 nt, Homo Sapiens
uccucccuccccgcccucacccgccccacucc

SEQ ID NO: 265522 - RNA, 32 nt, Homo Sapiens
uuucuuuuuaucauuauguuuguccuggcuaa

SEQ ID NO: 265523 - RNA, 32 nt, Homo Sapiens
cacugucuggggaggauuucaaggcugugccc

SEQ ID NO: 265524 - RNA, 32 nt, Homo Sapiens
uuuuccacuccagcugagacugccucacugag

SEQ ID NO: 265525 - RNA, 32 nt, Homo Sapiens
aaggagcuguucuucaagguccccucaacaug

SEQ ID NO: 265526 - RNA, 32 nt, Homo Sapiens
cgggcgugguggcacaugccuguaaucccaac

SEQ ID NO: 265527 - RNA, 32 nt, Homo Sapiens
uuuuacacaaaaccauuuuugaauuaaggcua

SEQ ID NO: 265528 - RNA, 32 nt, Homo Sapiens
guuagccaggauggucucaaucuccugaccuc

SEQ ID NO: 265529 - RNA, 32 nt, Homo Sapiens
aaaguuaauaugguaauuauggucugggguaa

SEQ ID NO: 265530 - RNA, 32 nt, Homo Sapiens
uccugcauuccuggcgcgggacucuagccaga

SEQ ID NO: 265531 - RNA, 32 nt, Homo Sapiens
ucaggaaagauuuuuucuuaauguuucucucg

SEQ ID NO: 265532 - RNA, 32 nt, Homo Sapiens
guauuuaaaaagacaaaguauuuuguccauuu

SEQ ID NO: 265533 - RNA, 32 nt, Homo Sapiens
uggcucucauguacccuugccucccccacccc

SEQ ID NO: 265534 - RNA, 32 nt, Homo Sapiens
ccaaaaaaggggaaggagcggcugcggcgcuc

SEQ ID NO: 265535 - RNA, 32 nt, Homo Sapiens
agaacccagggccagcaguggaagccucaagc

SEQ ID NO: 265536 - RNA, 32 nt, Homo Sapiens
uuuaauacacuuuaauugacuuucucaagcgu

SEQ ID NO: 265537 - RNA, 32 nt, Homo Sapiens
ccacucagaaaaggaggcggcuucgggcuuuc

SEQ ID NO: 265538 - RNA, 32 nt, Homo Sapiens
aacaggcugacacuucggcagggucaccagga

SEQ ID NO: 265539 - RNA, 32 nt, Homo Sapiens
acagcuugauaaaaacuguuuccuuuuaagca

SEQ ID NO: 265540 - RNA, 32 nt, Homo Sapiens
acuuaaaaggauggaagaaaaacuacaugguu

SEQ ID NO: 265541 - RNA, 32 nt, Homo Sapiens
accugaggacaaagcuggcgcucaaggucacc

SEQ ID NO: 265542 - RNA, 32 nt, Homo Sapiens
cuccgaggcugcgucccgggaagcccggcucc

SEQ ID NO: 265543 - RNA, 32 nt, Homo Sapiens
aaaggugugggaaggggaaauggaggaaugcc

SEQ ID NO: 265544 - RNA, 32 nt, Homo Sapiens
caaaacgucuuacugaaccaacaaucaaaaaa

SEQ ID NO: 265545 - RNA, 32 nt, Homo Sapiens
cgccucucuccucuccuccccccaggaggaac

SEQ ID NO: 265546 - RNA, 32 nt, Homo Sapiens
aaggacuucugccagaaaugugcucgugguug

SEQ ID NO: 265547 - RNA, 32 nt, Homo Sapiens
uugcguccggugcggcgaugcugaccccggcg

SEQ ID NO: 265548 - RNA, 32 nt, Homo Sapiens
cauuuucuuuugcacaagggcaugaccuuuuu

SEQ ID NO: 265549 - RNA, 32 nt, Homo Sapiens
agcagaagcaaagagggaagaagacaugaauc

SEQ ID NO: 265550 - RNA, 32 nt, Homo Sapiens
uagugcaagcuauuuguuuguuuucuaauuua

SEQ ID NO: 265551 - RNA, 32 nt, Homo Sapiens
ggaucucacagguagucuccugaguaguugac

SEQ ID NO: 265552 - RNA, 32 nt, Homo Sapiens
acuuguauuuaguucauauuuugucaaaagca

SEQ ID NO: 265553 - RNA, 32 nt, Homo Sapiens
gaagguccaaagaguuucugcaaaguguaugu

SEQ ID NO: 265554 - RNA, 32 nt, Homo Sapiens
cagcacggcguggugugucccuggacacagcu

SEQ ID NO: 265555 - RNA, 32 nt, Homo Sapiens
cucugcuacauucaaccucgugacuucaugau

SEQ ID NO: 265556 - RNA, 32 nt, Homo Sapiens
cuggagucucaacccaucagguucagaccagu

SEQ ID NO: 265557 - RNA, 32 nt, Homo Sapiens
ggaaaaaaacaaaacaaacaaacaaacaaaaa

SEQ ID NO: 265558 - RNA, 32 nt, Homo Sapiens
agagggcucagauggacacagaauucuagcuu

SEQ ID NO: 265559 - RNA, 32 nt, Homo Sapiens
gcccuucugauccacggggcccggcuucccaa

SEQ ID NO: 265560 - RNA, 30 nt, Homo Sapiens
ccgcgauguucccccuucgggcccuguggu

SEQ ID NO: 265561 - RNA, 32 nt, Homo Sapiens
ucaauaccaagccccaggagaugggcacugag

SEQ ID NO: 265562 - RNA, 32 nt, Homo Sapiens
cugcucuguuagacuggugcugaaacaaaagg

SEQ ID NO: 265563 - RNA, 32 nt, Homo Sapiens
uaggauuucaugauuucauuucaacuguuugc

SEQ ID NO: 265564 - RNA, 32 nt, Homo Sapiens
acccaccuguaucucuuguugggagaaaagcu

SEQ ID NO: 265565 - RNA, 32 nt, Homo Sapiens
aucuuguagccaaauuugacaauauaaaguaa

SEQ ID NO: 265566 - RNA, 32 nt, Homo Sapiens
aggauaagucucuggagcagaauuuaucacac

SEQ ID NO: 265567 - RNA, 32 nt, Homo Sapiens
uuauauuugucaauauaauuuuuguauucaca

SEQ ID NO: 265568 - RNA, 32 nt, Homo Sapiens
ccgccgccugcgccgcgagaucagccccggcc

SEQ ID NO: 265569 - RNA, 32 nt, Homo Sapiens
uucaagggaaggggaugaaaaaauggcaugcu

SEQ ID NO: 265570 - RNA, 32 nt, Homo Sapiens
gccaugggaccaguguguagcugcuggacacc

SEQ ID NO: 265571 - RNA, 32 nt, Homo Sapiens
gcuuaugauaaggcccuagagguauggguugc

SEQ ID NO: 265572 - RNA, 32 nt, Homo Sapiens
agucuuuuuuuuuuuucuuaacaaucauacuu

SEQ ID NO: 265573 - RNA, 32 nt, Homo Sapiens
ggacccccugggaucacccagccaucagcccc

SEQ ID NO: 265574 - RNA, 32 nt, Homo Sapiens
ugccuguaacuuaugacucaucuuucagaccu

SEQ ID NO: 265575 - RNA, 32 nt, Homo Sapiens
auaagacaaaaauuuauguuuggagccugugu

SEQ ID NO: 265576 - RNA, 30 nt, Homo Sapiens
gucuggggcaggcgggagugggcccugguu

SEQ ID NO: 265577 - RNA, 32 nt, Homo Sapiens
uuuuauggaaaacacauucaacuaucauuaaa

SEQ ID NO: 265578 - RNA, 32 nt, Homo Sapiens
cggucucggugcuccgaggggcgacgagaagc

SEQ ID NO: 265579 - RNA, 32 nt, Homo Sapiens
guauauacagccugaacucaggaggcagaaau

SEQ ID NO: 265580 - RNA, 32 nt, Homo Sapiens
gagcaacccagcugcggaggcaacggcagugc

SEQ ID NO: 265581 - RNA, 32 nt, Homo Sapiens
cuccugcgugcaccccaaaaaaucacuugcgu

SEQ ID NO: 265582 - RNA, 32 nt, Homo Sapiens
aaccaaggacaauuuuauaacuuuuucguaca

SEQ ID NO: 265583 - RNA, 32 nt, Homo Sapiens
auccuuccauuuggaacagccauuccggcagc

SEQ ID NO: 265584 - RNA, 30 nt, Homo Sapiens
ugauguuguucacauugcaagaguaaaacu

SEQ ID NO: 265585 - RNA, 32 nt, Homo Sapiens
aggccacgccccagccacuuugcucccucuca

SEQ ID NO: 265586 - RNA, 32 nt, Homo Sapiens
aguggcaccgacaggacugugauugugugugg

SEQ ID NO: 265587 - RNA, 32 nt, Homo Sapiens
uuucugagugcaggggggcugcaugcguugcc

SEQ ID NO: 265588 - RNA, 32 nt, Homo Sapiens
gucaggcagggccagcacaggguggcgugggg

SEQ ID NO: 265589 - RNA, 32 nt, Homo Sapiens
uauuuucuuuuggagagauuguauauuuuaaa

SEQ ID NO: 265590 - RNA, 32 nt, Homo Sapiens
cuuuugcuucucgcccaccucuucccgcaccc

SEQ ID NO: 265591 - RNA, 32 nt, Homo Sapiens
gccccguggaugcacaacuuuggcaacaucug

SEQ ID NO: 265592 - RNA, 32 nt, Homo Sapiens
agccguacccgcggccccgggcagggagggag

SEQ ID NO: 265593 - RNA, 32 nt, Homo Sapiens
gcaagcccagacauggccuucugccuggagag

SEQ ID NO: 265594 - RNA, 32 nt, Homo Sapiens
ucagccucaccuuacgaauccaaagaacuggg

SEQ ID NO: 265595 - RNA, 32 nt, Homo Sapiens
aagcugaugugaaaaaccuuucugggaaaaac

SEQ ID NO: 265596 - RNA, 32 nt, Homo Sapiens
aaagaaaaauuuggaggauaaaagaaaggaac

SEQ ID NO: 265597 - RNA, 32 nt, Homo Sapiens
cagggcauuuuucccucuuaccucagauuaag

SEQ ID NO: 265598 - RNA, 32 nt, Homo Sapiens
gcccucuuuccaccgagcuaucccgcgguuuc

SEQ ID NO: 265599 - RNA, 32 nt, Homo Sapiens
uagacuuuuuaaaaugccauauguaauuuuau

SEQ ID NO: 265600 - RNA, 32 nt, Homo Sapiens
uugaaaauacucauuagguaauugucaaagcc

SEQ ID NO: 265601 - RNA, 31 nt, Homo Sapiens
cuugguuugugcuuacauguauggaugugug

SEQ ID NO: 265602 - RNA, 32 nt, Homo Sapiens
ugaacaaacauuuauugaacauccucugagca

SEQ ID NO: 265603 - RNA, 32 nt, Homo Sapiens
uucaguuuuuaaaaaugugauaauaauauuga

SEQ ID NO: 265604 - RNA, 32 nt, Homo Sapiens
ggccccuguauccagauauuggacuuacugcu

SEQ ID NO: 265605 - RNA, 32 nt, Homo Sapiens
ugaauuucuuuuuuuucuuucuuuuuuuuuuu

SEQ ID NO: 265606 - RNA, 32 nt, Homo Sapiens
gggccagagcuacuauagcaaggccaacuuca

SEQ ID NO: 265607 - RNA, 32 nt, Homo Sapiens
uaauaugaaaauauuuaaacagcauuacaaaa

SEQ ID NO: 265608 - RNA, 32 nt, Homo Sapiens
ugaacucuuugccuaugggccugguggucaga

SEQ ID NO: 265609 - RNA, 32 nt, Homo Sapiens
auuuacuuuguagaauaugacuuuagacauau

SEQ ID NO: 265610 - RNA, 32 nt, Homo Sapiens
caaacgaguauauaauuuuuuaucuguacuuu

SEQ ID NO: 265611 - RNA, 32 nt, Homo Sapiens
agugguaccgucugcagagcuugcugcccuug

SEQ ID NO: 265612 - RNA, 32 nt, Homo Sapiens
auuaaccuuuugguuguuugugcaauauuaua

SEQ ID NO: 265613 - RNA, 32 nt, Homo Sapiens
uagaaaugggccguugucuguagcccuggcau

SEQ ID NO: 265614 - RNA, 32 nt, Homo Sapiens
cagccgcgacgcggcccguggccccgaaagca

SEQ ID NO: 265615 - RNA, 32 nt, Homo Sapiens
ucucucuguauaucacuucuuacauauuaaau

SEQ ID NO: 265616 - RNA, 32 nt, Homo Sapiens
cuagcucgagggugugggugucacagggagca

SEQ ID NO: 265617 - RNA, 32 nt, Homo Sapiens
caaguaccgacgucggccggccuuggguuggc

SEQ ID NO: 265618 - RNA, 32 nt, Homo Sapiens
cugaccuacacacacacacacacacacacaca

SEQ ID NO: 265619 - RNA, 32 nt, Homo Sapiens
ggcuggucucgaacuccugaccucaagugacc

SEQ ID NO: 265620 - RNA, 32 nt, Homo Sapiens
ggcuggccucgaacuccugaccucaagugauc

SEQ ID NO: 265621 - RNA, 32 nt, Homo Sapiens
agucccacuugcucccaggcgccgguucugug

SEQ ID NO: 265622 - RNA, 32 nt, Homo Sapiens
ccucgucugccagccggcuuggcuagcgcgcg

SEQ ID NO: 265623 - RNA, 30 nt, Homo Sapiens
cgugggcugggaaugggggagagaagggaa

SEQ ID NO: 265624 - RNA, 32 nt, Homo Sapiens
gagggucuagaggccugaaauccugguuccua

SEQ ID NO: 265625 - RNA, 32 nt, Homo Sapiens
cuguggccaaccccugccccuugccccacaca

SEQ ID NO: 265626 - RNA, 32 nt, Homo Sapiens
auuuccuucucccuuuccccgccagcuucgca

SEQ ID NO: 265627 - RNA, 32 nt, Homo Sapiens
gauuauugcucuucugucuauaaauuuugaau

SEQ ID NO: 265628 - RNA, 32 nt, Homo Sapiens
cucgccggggagagcgggcgggggagcucgcg

SEQ ID NO: 265629 - RNA, 32 nt, Homo Sapiens
gagagacccgaguucccccagcccuucaucac

SEQ ID NO: 265630 - RNA, 32 nt, Homo Sapiens
cccccaggccgcucccggggcucacggaauag

SEQ ID NO: 265631 - RNA, 32 nt, Homo Sapiens
ccacaaacccaccggaaggaagaaacuccaga

SEQ ID NO: 265632 - RNA, 32 nt, Homo Sapiens
uuaugggacaaaggacauuuguuggaggggug

SEQ ID NO: 265633 - RNA, 32 nt, Homo Sapiens
gcucuggcccugcccuguauuccucuuccccu

SEQ ID NO: 265634 - RNA, 32 nt, Homo Sapiens
cuuuuccucucugcaccugcgcucuggugacu

SEQ ID NO: 265635 - RNA, 32 nt, Homo Sapiens
cucccccaacgcccacuggagagaugacacca

SEQ ID NO: 265636 - RNA, 32 nt, Homo Sapiens
uuucccaagugcuuuaccuuaucuguuaaagc

SEQ ID NO: 265637 - RNA, 32 nt, Homo Sapiens
aggcuggauuucacgauuucggccaggcuggu

SEQ ID NO: 265638 - RNA, 32 nt, Homo Sapiens
uagguaagauuuuuaucagcuuucucugucug

SEQ ID NO: 265639 - RNA, 32 nt, Homo Sapiens
gccggacccacccaccgauggauagaccauug

SEQ ID NO: 265640 - RNA, 32 nt, Homo Sapiens
aaauuccauuuuccuuuguuucccaugugcag

SEQ ID NO: 265641 - RNA, 31 nt, Homo Sapiens
ggucugggcgccgcgucgacggcggcuccgc

SEQ ID NO: 265642 - RNA, 32 nt, Homo Sapiens
acuacauccgcaaagacccugucuccaaauaa

SEQ ID NO: 265643 - RNA, 32 nt, Homo Sapiens
cuccauguagaagagggagaaggagaggcucu

SEQ ID NO: 265644 - RNA, 32 nt, Homo Sapiens
gcccugugggcugaggguaaggcuggguaggg

SEQ ID NO: 265645 - RNA, 28 nt, Homo Sapiens
ugugcuuuguuuaaaauguguuugcagg

SEQ ID NO: 265646 - RNA, 32 nt, Homo Sapiens
ccuguguucugacucuucccaguguccugcau

SEQ ID NO: 265647 - RNA, 32 nt, Homo Sapiens
ucucgaaaugcuguuuuggaccuccuucaugg

SEQ ID NO: 265648 - RNA, 32 nt, Homo Sapiens
aggccccucggcugccccuccucccugggccu

SEQ ID NO: 265649 - RNA, 32 nt, Homo Sapiens
gcgcuucgcucccggagccgcggaacucggcg

SEQ ID NO: 265650 - RNA, 32 nt, Homo Sapiens
aauugagaccuguacauaguaaugaaauuaaa

SEQ ID NO: 265651 - RNA, 32 nt, Homo Sapiens
agugguaaugaaauuucggugacuggcccaca

SEQ ID NO: 265652 - RNA, 32 nt, Homo Sapiens
uccaaaucugucauuuaaaguuucuguaauaa

SEQ ID NO: 265653 - RNA, 32 nt, Homo Sapiens
ugauuugaaaaguauuauucucucuucucuuu

SEQ ID NO: 265654 - RNA, 32 nt, Homo Sapiens
ggguguuccuuccuccucaugcuccuggaaua

SEQ ID NO: 265655 - RNA, 32 nt, Homo Sapiens
aagugauuuuuccucuuuuaaaaguaaacaaa

SEQ ID NO: 265656 - RNA, 32 nt, Homo Sapiens
uugaugcaggagagucuggaaaaggaagaaaa

SEQ ID NO: 265657 - RNA, 32 nt, Homo Sapiens
guuuuucuuugguuuuguuuucuucacuaugg

SEQ ID NO: 265658 - RNA, 32 nt, Homo Sapiens
ugaccuuuaacccuuacauuuauaugauucug

SEQ ID NO: 265659 - RNA, 32 nt, Homo Sapiens
caagguuuuuaaguaacauauuucagcauugg

SEQ ID NO: 265660 - RNA, 32 nt, Homo Sapiens
agaaaaaaggaaguggaauggguaacucuucu

SEQ ID NO: 265661 - RNA, 32 nt, Homo Sapiens
cccauuucucaguuuagcauuacauugucuug

SEQ ID NO: 265662 - RNA, 32 nt, Homo Sapiens
cugguaccccugacaaagucaaggcugcugga

SEQ ID NO: 265663 - RNA, 32 nt, Homo Sapiens
cugugccucagcacggccccagaccuugaggc

SEQ ID NO: 265664 - RNA, 32 nt, Homo Sapiens
ggugacuggagcaaagcugcugugagagagug

SEQ ID NO: 265665 - RNA, 32 nt, Homo Sapiens
gaaaccgaaaccgaguccgggcccgucccucc

SEQ ID NO: 265666 - RNA, 32 nt, Homo Sapiens
gucgcuccucgcccgcugcacgacgacgcgac

SEQ ID NO: 265667 - RNA, 32 nt, Homo Sapiens
acccuggcggggguucgcuggcugcggccccg

SEQ ID NO: 265668 - RNA, 32 nt, Homo Sapiens
ucuucaccuggucacggucucaucugacacug

SEQ ID NO: 265669 - RNA, 31 nt, Homo Sapiens
cuguugcugccgggcagugaggcccagccca

SEQ ID NO: 265670 - RNA, 32 nt, Homo Sapiens
cguuggggugguggguggggcugggaagaaac

SEQ ID NO: 265671 - RNA, 32 nt, Homo Sapiens
uucauauuagaccuuuucuaauaaaaauaucu

SEQ ID NO: 265672 - RNA, 32 nt, Homo Sapiens
ucucuuuauuuuucuacuucucaauuugaugg

SEQ ID NO: 265673 - RNA, 31 nt, Homo Sapiens
aaagguucucagguguugccaaauauguccu

SEQ ID NO: 265674 - RNA, 32 nt, Homo Sapiens
caugcacugugaccugcacacccaggugggcu

SEQ ID NO: 265675 - RNA, 32 nt, Homo Sapiens
gaauugugaaacauuggcuguuguguguuggu

SEQ ID NO: 265676 - RNA, 32 nt, Homo Sapiens
auaaauccaagagcuuuccagagacuggcugc

SEQ ID NO: 265677 - RNA, 32 nt, Homo Sapiens
gcagacucucccucaccugccuggccaaauuc

SEQ ID NO: 265678 - RNA, 32 nt, Homo Sapiens
gggauuuuggcaguagcuguaugggagaaaaa

SEQ ID NO: 265679 - RNA, 32 nt, Homo Sapiens
gaaaugcaauguauuucuuuuguaaucagugc

SEQ ID NO: 265680 - RNA, 32 nt, Homo Sapiens
gaccaggugugauccuaggagcgccccuggcc

SEQ ID NO: 265681 - RNA, 32 nt, Homo Sapiens
accgguuaaacccugauugaauguagaaauuu

SEQ ID NO: 265682 - RNA, 32 nt, Homo Sapiens
caagggggcgcgccgccucugccccgcggcga

SEQ ID NO: 265683 - RNA, 32 nt, Homo Sapiens
agaaaaagaccacggagugcugagcuugcugg

SEQ ID NO: 265684 - RNA, 32 nt, Homo Sapiens
gagagggagaugcagcagcugcugagccagcc

SEQ ID NO: 265685 - RNA, 32 nt, Homo Sapiens
ucacguuucccucucccuucuuccccaccaac

SEQ ID NO: 265686 - RNA, 32 nt, Homo Sapiens
gccauccggcuagggagggaaaugaccaccuc

SEQ ID NO: 265687 - RNA, 32 nt, Homo Sapiens
cccauccccaguucgagccgccgcccgaaagg

SEQ ID NO: 265688 - RNA, 32 nt, Homo Sapiens
aagcaucuccagcccuagacuuugacaagaaa

SEQ ID NO: 265689 - RNA, 32 nt, Homo Sapiens
aucuaagcauauaguaaauauuacuaguacuu

SEQ ID NO: 265690 - RNA, 32 nt, Homo Sapiens
ccagggagggugggagccguugccaguccuac

SEQ ID NO: 265691 - RNA, 32 nt, Homo Sapiens
uacucugucccacucuugcucuauucaguuua

SEQ ID NO: 265692 - RNA, 32 nt, Homo Sapiens
caacuuugagauccccaagaccaucuggagga

SEQ ID NO: 265693 - RNA, 32 nt, Homo Sapiens
gguggucacagcauguguccucugacguaugc

SEQ ID NO: 265694 - RNA, 32 nt, Homo Sapiens
cgccuauaaucccagcacuuugggaggcugaa

SEQ ID NO: 265695 - RNA, 32 nt, Homo Sapiens
ucagcucuagggcugccuggagcagagcuccu

SEQ ID NO: 265696 - RNA, 32 nt, Homo Sapiens
cgacugcgcucgccuagguggugggcggggag

SEQ ID NO: 265697 - RNA, 32 nt, Homo Sapiens
ccuuccugcucccagacagucucacaaguaaa

SEQ ID NO: 265698 - RNA, 32 nt, Homo Sapiens
uaacaaccaaaauacugaaucugauguacaua

SEQ ID NO: 265699 - RNA, 32 nt, Homo Sapiens
aggccgggccccagacgucccgcuucgccccg

SEQ ID NO: 265700 - RNA, 32 nt, Homo Sapiens
cagagauaacgaagagaaaacacucggugaca

SEQ ID NO: 265701 - RNA, 32 nt, Homo Sapiens
acgucaggguaaaugagggauucuucaccuuc

SEQ ID NO: 265702 - RNA, 32 nt, Homo Sapiens
auuaaauuacugucagcagcuaaccaauggca

SEQ ID NO: 265703 - RNA, 32 nt, Homo Sapiens
acauuacacacuaauuuagacacauauaguau

SEQ ID NO: 265704 - RNA, 32 nt, Homo Sapiens
uacucaagagaaugguggaagguuaacagcuu

SEQ ID NO: 265705 - RNA, 32 nt, Homo Sapiens
uccaauuguaauuaucuugaauuuuuauacau

SEQ ID NO: 265706 - RNA, 32 nt, Homo Sapiens
ggcugcggagagcagcagcagagcugaguaau

SEQ ID NO: 265707 - RNA, 32 nt, Homo Sapiens
guugaaaaagacaaaaucugaccaucagccag

SEQ ID NO: 265708 - RNA, 32 nt, Homo Sapiens
acaaaacuuuguuuuucucaaucugaauuuau

SEQ ID NO: 265709 - RNA, 32 nt, Homo Sapiens
uuuuuucucaguuuuuucagauauugccauac

SEQ ID NO: 265710 - RNA, 32 nt, Homo Sapiens
ucaauuaaagcaccuuguggaaucuguuuccu

SEQ ID NO: 265711 - RNA, 32 nt, Homo Sapiens
augcgccccuggagaaagugcacgggagggaa

SEQ ID NO: 265712 - RNA, 32 nt, Homo Sapiens
ggugcgcgccgggagccugcagcgggaccagc

SEQ ID NO: 265713 - RNA, 32 nt, Homo Sapiens
uuagaacauguaaaauguuuaauggugaaagu

SEQ ID NO: 265714 - RNA, 32 nt, Homo Sapiens
cuucauuuuuaaaaguuacuagaauuugguau

SEQ ID NO: 265715 - RNA, 32 nt, Homo Sapiens
gguuuuauuuaacguuucgauaccacuagcua

SEQ ID NO: 265716 - RNA, 32 nt, Homo Sapiens
acacaugauaaacacauguccucacugaaugu

SEQ ID NO: 265717 - RNA, 30 nt, Homo Sapiens
cgcuggguacucggcggccaccggggaucg

SEQ ID NO: 265718 - RNA, 32 nt, Homo Sapiens
ggguacugugggcaggggggaugugugugaua

SEQ ID NO: 265719 - RNA, 32 nt, Homo Sapiens
ggacacuuggucuccuucucuuuggucucacu

SEQ ID NO: 265720 - RNA, 31 nt, Homo Sapiens
aagaugaaauaaaaauaauaaucaagggcaa

SEQ ID NO: 265721 - RNA, 32 nt, Homo Sapiens
cugucaaaucuacuccccggaccucaaccaug

SEQ ID NO: 265722 - RNA, 32 nt, Homo Sapiens
auauauucuuuaaaaagcaagcgaauaucuac

SEQ ID NO: 265723 - RNA, 30 nt, Homo Sapiens
acgcugcuggacuguggcgucucuggggca

SEQ ID NO: 265724 - RNA, 32 nt, Homo Sapiens
uaucugauucuaugaggccagcaucauucuaa

SEQ ID NO: 265725 - RNA, 32 nt, Homo Sapiens
ucuaccaaaaauacaaaaauuagcuagacaua

SEQ ID NO: 265726 - RNA, 32 nt, Homo Sapiens
guauaucuagggcgggugggcggguagcagug

SEQ ID NO: 265727 - RNA, 32 nt, Homo Sapiens
ugauggggucuaauucuuauuacuucaacaaa

SEQ ID NO: 265728 - RNA, 32 nt, Homo Sapiens
guuucagaaaauaaaugguuucauuuucucua

SEQ ID NO: 265729 - RNA, 30 nt, Homo Sapiens
ggccaccaugcucuuaucucgcacuuucuu

SEQ ID NO: 265730 - RNA, 32 nt, Homo Sapiens
cagaugccagcccagcuaccacaggggauccc

SEQ ID NO: 265731 - RNA, 32 nt, Homo Sapiens
cuucacuucuauuuugguugaaggcaugaugu

SEQ ID NO: 265732 - RNA, 32 nt, Homo Sapiens
ucgguggcccaggugcugguggagcacaaugu

SEQ ID NO: 265733 - RNA, 32 nt, Homo Sapiens
ugccugagugcaugagauagaauagagaccag

SEQ ID NO: 265734 - RNA, 32 nt, Homo Sapiens
ucauaagugcauauauaguuugaaagagaagg

SEQ ID NO: 265735 - RNA, 32 nt, Homo Sapiens
guuucauuuccacuugugccaucuucuuugcu

SEQ ID NO: 265736 - RNA, 32 nt, Homo Sapiens
ggagccuaagaauccauccccauccaggggca

SEQ ID NO: 265737 - RNA, 32 nt, Homo Sapiens
cucuuuaacaagggcugcaaugcccucauacc

SEQ ID NO: 265738 - RNA, 32 nt, Homo Sapiens
agauaagucaacagaaagugccugcuuuacac

SEQ ID NO: 265739 - RNA, 32 nt, Homo Sapiens
cgaugagcaguaugcauaggauuauuugaauc

SEQ ID NO: 265740 - RNA, 32 nt, Homo Sapiens
acuagggcucggugccagcacuucccggguaa

SEQ ID NO: 265741 - RNA, 32 nt, Homo Sapiens
gccuggaagcugcacauugaccaaaggaggga

SEQ ID NO: 265742 - RNA, 32 nt, Homo Sapiens
aauuugccuuuaaauuuugguuauggguuuca

SEQ ID NO: 265743 - RNA, 32 nt, Homo Sapiens
caggcucugggggagacaggucauuacucugc

SEQ ID NO: 265744 - RNA, 32 nt, Homo Sapiens
ucgucucuuuccggagccccagcgucuccugc

SEQ ID NO: 265745 - RNA, 32 nt, Homo Sapiens
gaacccgggaugcagagcagcuuuugugcacg

SEQ ID NO: 265746 - RNA, 32 nt, Homo Sapiens
acacgacaaccacuuauggcucuuuuucaaaa

SEQ ID NO: 265747 - RNA, 32 nt, Homo Sapiens
cugccccgcgcccccaggagaccuggaccaga

SEQ ID NO: 265748 - RNA, 32 nt, Homo Sapiens
cuucauguucuuccauccauuuaccuaauagu

SEQ ID NO: 265749 - RNA, 32 nt, Homo Sapiens
cacccggcugguuuuuuguguuuuuaguagag

SEQ ID NO: 265750 - RNA, 32 nt, Homo Sapiens
ucuuaauggugauucuucucuguugaacugaa

SEQ ID NO: 265751 - RNA, 32 nt, Homo Sapiens
gccaccuuuucugcaggaaaugugcccagcag

SEQ ID NO: 265752 - RNA, 32 nt, Homo Sapiens
cagaccauucccuggaagaauauguaggacuu

SEQ ID NO: 265753 - RNA, 32 nt, Homo Sapiens
aggcuaauuuuuguauuuuuuguagagauggg

SEQ ID NO: 265754 - RNA, 32 nt, Homo Sapiens
uaauguugaugggugucaaacaucuccuggag

SEQ ID NO: 265755 - RNA, 32 nt, Homo Sapiens
auauaaugagagaguuggaaaaugggauucaa

SEQ ID NO: 265756 - RNA, 32 nt, Homo Sapiens
gagcggcgagggggcgggggaggggcugagcc

SEQ ID NO: 265757 - RNA, 32 nt, Homo Sapiens
uacuuccauuuucaggcucagacuuugaauuu

SEQ ID NO: 265758 - RNA, 32 nt, Homo Sapiens
ccgcauguuucauacuaacucccucugaguuu

SEQ ID NO: 265759 - RNA, 32 nt, Homo Sapiens
cagcugugugaccuugggccuguuacuuuuaa

SEQ ID NO: 265760 - RNA, 29 nt, Homo Sapiens
augaucaucuugaugucuaugauagauaa

SEQ ID NO: 265761 - RNA, 32 nt, Homo Sapiens
uggauacaagauucaagacccuucucuugcuu

SEQ ID NO: 265762 - RNA, 32 nt, Homo Sapiens
gcucugggagacggccaaggccucggccauuc

SEQ ID NO: 265763 - RNA, 32 nt, Homo Sapiens
gacccagacaccuguccccacagucaaagccu

SEQ ID NO: 265764 - RNA, 32 nt, Homo Sapiens
acauacauauaauuuuguuuuccuuuuuaaga

SEQ ID NO: 265765 - RNA, 32 nt, Homo Sapiens
cauugaaaauaguacuuucuucguuucacaaa

SEQ ID NO: 265766 - RNA, 32 nt, Homo Sapiens
ggaggugagcggcgggcggggauggcggagca

SEQ ID NO: 265767 - RNA, 32 nt, Homo Sapiens
uccucaccggugcagaguuggcacauauuaau

SEQ ID NO: 265768 - RNA, 32 nt, Homo Sapiens
uggccgagcggagggcggggccguacugcggg

SEQ ID NO: 265769 - RNA, 32 nt, Homo Sapiens
uuuuguacuguaauuuugaauggaacugaaaa

SEQ ID NO: 265770 - RNA, 32 nt, Homo Sapiens
accuguaccccaauaacuuauguuaaaauaaa

SEQ ID NO: 265771 - RNA, 32 nt, Homo Sapiens
gaggccggguccggcugagcuggagcgagcug

SEQ ID NO: 265772 - RNA, 32 nt, Homo Sapiens
gccgccgccucuuccccugcgccccgcgccca

SEQ ID NO: 265773 - RNA, 32 nt, Homo Sapiens
gauccugcucuggaauaaaugucuuggugguu

SEQ ID NO: 265774 - RNA, 32 nt, Homo Sapiens
ccaagaaugaacugcauuuccuuuaaaaauua

SEQ ID NO: 265775 - RNA, 32 nt, Homo Sapiens
gccuuucgcugcuuguugggguuacaggugaa

SEQ ID NO: 265776 - RNA, 32 nt, Homo Sapiens
cauacuaaaugacaaaaccauaaaaaccuucc

SEQ ID NO: 265777 - RNA, 32 nt, Homo Sapiens
aggccaggagccagcccugcagcccuccccac

SEQ ID NO: 265778 - RNA, 32 nt, Homo Sapiens
uggaccuguaaucaacuuuugauauuucuuaa

SEQ ID NO: 265779 - RNA, 32 nt, Homo Sapiens
uugaauaacgaguaaauaaucuuacuugggua

SEQ ID NO: 265780 - RNA, 32 nt, Homo Sapiens
cugaggucaggaguucgagaccagucugguca

SEQ ID NO: 265781 - RNA, 32 nt, Homo Sapiens
uugaggucaggaguucgagacuagccuggcca

SEQ ID NO: 265782 - RNA, 32 nt, Homo Sapiens
uugaggucaggagcucgagaccagccuggcca

SEQ ID NO: 265783 - RNA, 31 nt, Homo Sapiens
acugcgggagacugccugccuuucaccauuu

SEQ ID NO: 265784 - RNA, 30 nt, Homo Sapiens
ucuaucacaauugccacccaucggguuuug

SEQ ID NO: 265785 - RNA, 32 nt, Homo Sapiens
agggccaaggggcuauuacugcuguugggaaa

SEQ ID NO: 265786 - RNA, 30 nt, Homo Sapiens
caaaccugagcuaggaccuguaauucuaga

SEQ ID NO: 265787 - RNA, 32 nt, Homo Sapiens
aaugaaauuuaaaagcaaauguaaaaguguuc

SEQ ID NO: 265788 - RNA, 28 nt, Homo Sapiens
caaauccuaguagauucugugcaugugg

SEQ ID NO: 265789 - RNA, 32 nt, Homo Sapiens
agcaaaugauauuuauacucagguaaauagac

SEQ ID NO: 265790 - RNA, 32 nt, Homo Sapiens
ggccaggaugcugaaucugcugcugcuggcgc

SEQ ID NO: 265791 - RNA, 32 nt, Homo Sapiens
gggacaagcgguggagaaggguacgccagggu

SEQ ID NO: 265792 - RNA, 32 nt, Homo Sapiens
gccaaauggggauaaauaaucuuaccuaccuc

SEQ ID NO: 265793 - RNA, 32 nt, Homo Sapiens
uugcagcagauaacuuuuuugagucauugacu

SEQ ID NO: 265794 - RNA, 32 nt, Homo Sapiens
aagauuguuugcuguaguguugucuuugauaa

SEQ ID NO: 265795 - RNA, 32 nt, Homo Sapiens
gccagccgagaugggagccuagcuaauaaucc

SEQ ID NO: 265796 - RNA, 32 nt, Homo Sapiens
gugaaaugaucaaauuaggauaguuagcaugc

SEQ ID NO: 265797 - RNA, 32 nt, Homo Sapiens
uacaguuacuaaaaugugcuuacuacaaaaca

SEQ ID NO: 265798 - RNA, 32 nt, Homo Sapiens
uggucgcuggcuccgagaucgcgcggggccgc

SEQ ID NO: 265799 - RNA, 32 nt, Homo Sapiens
uccuuucaucacagggccuuuaacuccuccua

SEQ ID NO: 265800 - RNA, 32 nt, Homo Sapiens
accuggccuucaagcaggcccgggacggcugc

SEQ ID NO: 265801 - RNA, 32 nt, Homo Sapiens
cuuuuuuaaacaaaaagcaaaaaaguaaaaug

SEQ ID NO: 265802 - RNA, 32 nt, Homo Sapiens
uccuugaaucuguugugucuuaauuuuauuug

SEQ ID NO: 265803 - RNA, 32 nt, Homo Sapiens
aaccugcaaccuccugacguggccacugcagu

SEQ ID NO: 265804 - RNA, 32 nt, Homo Sapiens
ucucaccuuuugcagucuccaguguccauuau

SEQ ID NO: 265805 - RNA, 32 nt, Homo Sapiens
aaaaugggcucccaugagacugccuggcucau

SEQ ID NO: 265806 - RNA, 32 nt, Homo Sapiens
cugggacccuccugggcugccaggauuuagca

SEQ ID NO: 265807 - RNA, 32 nt, Homo Sapiens
uuacugguuugugagaaauguucaugcacuuu

SEQ ID NO: 265808 - RNA, 32 nt, Homo Sapiens
agccaaccccccugcagcacaaauaggccccc

SEQ ID NO: 265809 - RNA, 32 nt, Homo Sapiens
accuugaggaugcuugaaggucugcuaggcag

SEQ ID NO: 265810 - RNA, 32 nt, Homo Sapiens
cuaagucuuccaagcaauuaauuuuuuguucg

SEQ ID NO: 265811 - RNA, 32 nt, Homo Sapiens
gggucaccauggcucuggcccgaggcagccgg

SEQ ID NO: 265812 - RNA, 32 nt, Homo Sapiens
auuuugcugcuuuaucaaaaugguuuauuuua

SEQ ID NO: 265813 - RNA, 32 nt, Homo Sapiens
cugcuccccguaucccauggcuccucgccaaa

SEQ ID NO: 265814 - RNA, 32 nt, Homo Sapiens
aauuacaguuuuaugaaagcauauuuuauuua

SEQ ID NO: 265815 - RNA, 32 nt, Homo Sapiens
caaugcguguucugccggauagauacaagggg

SEQ ID NO: 265816 - RNA, 32 nt, Homo Sapiens
ccagcagcugcugucucuccaaugcagcucca

SEQ ID NO: 265817 - RNA, 32 nt, Homo Sapiens
ggugcgugucccgcugcagauccgcuggcuca

SEQ ID NO: 265818 - RNA, 32 nt, Homo Sapiens
ucagcgaacggcggcagcggcggcggcuggaa

SEQ ID NO: 265819 - RNA, 32 nt, Homo Sapiens
uugugucugaugcacagauguggcccuuucaa

SEQ ID NO: 265820 - RNA, 32 nt, Homo Sapiens
cagccuugugccagccagacucguaugaggcu

SEQ ID NO: 265821 - RNA, 32 nt, Homo Sapiens
aauuaagaaagguuuugaauucuuauaacaua

SEQ ID NO: 265822 - RNA, 32 nt, Homo Sapiens
uuuccuguccacuuauacaaacuucuagugag

SEQ ID NO: 265823 - RNA, 32 nt, Homo Sapiens
aaauaucgaaucccucuuucaugagaagucuu

SEQ ID NO: 265824 - RNA, 32 nt, Homo Sapiens
cugaguuuguuuucuaucauaaauacauguuu

SEQ ID NO: 265825 - RNA, 32 nt, Homo Sapiens
ucucuccacuuauucuuuuuuaugauucugca

SEQ ID NO: 265826 - RNA, 32 nt, Homo Sapiens
caagguugaccucagcuucggagccaccucug

SEQ ID NO: 265827 - RNA, 32 nt, Homo Sapiens
ucucucccgguauccgcauuugcuaccagcgg

SEQ ID NO: 265828 - RNA, 32 nt, Homo Sapiens
agagaaggggguggagcaaaagguugggacca

SEQ ID NO: 265829 - RNA, 32 nt, Homo Sapiens
aucaaucuuucugcaauaagaucuaaagccug

SEQ ID NO: 265830 - RNA, 32 nt, Homo Sapiens
uuuuuuauuuuuccguucuaguggucuuucua

SEQ ID NO: 265831 - RNA, 32 nt, Homo Sapiens
ggguaccgucuucucccuauucccucucucuc

SEQ ID NO: 265832 - RNA, 32 nt, Homo Sapiens
gacugccggccgccgggaccgaagcggagguc

SEQ ID NO: 265833 - RNA, 32 nt, Homo Sapiens
gaaguuuccugaggccuccccagccaugugga

SEQ ID NO: 265834 - RNA, 28 nt, Homo Sapiens
uaaugaguuacagaauucacguggaagu

SEQ ID NO: 265835 - RNA, 32 nt, Homo Sapiens
ugacagagggagcugggccuccccucauccuc

SEQ ID NO: 265836 - RNA, 32 nt, Homo Sapiens
cacauauguauguuuuuuuuuacuauuuaaaa

SEQ ID NO: 265837 - RNA, 32 nt, Homo Sapiens
gugaccugccccgcccagcugcaccugccagc

SEQ ID NO: 265838 - RNA, 32 nt, Homo Sapiens
uggugaaaugaaaauggaacauuucaaucaaa

SEQ ID NO: 265839 - RNA, 32 nt, Homo Sapiens
auaccagagauaauggagauauuuugcacuuu

SEQ ID NO: 265840 - RNA, 32 nt, Homo Sapiens
cagguauacuaaauagguagucauuuaggcac

SEQ ID NO: 265841 - RNA, 32 nt, Homo Sapiens
cagcucccgccugccaguggccucuucaggcc

SEQ ID NO: 265842 - RNA, 32 nt, Homo Sapiens
acugcaccuggccagcucuagucuuauuuugc

SEQ ID NO: 265843 - RNA, 32 nt, Homo Sapiens
gagccucuccugaaacaagaggggccggugga

SEQ ID NO: 265844 - RNA, 32 nt, Homo Sapiens
gggcggcagaggagcucuggcccgcagggugu

SEQ ID NO: 265845 - RNA, 32 nt, Homo Sapiens
cucccuguguguugacucaggaccccgccucu

SEQ ID NO: 265846 - RNA, 32 nt, Homo Sapiens
gcugccaaggagauccgugcgcacaaaguggu

SEQ ID NO: 265847 - RNA, 31 nt, Homo Sapiens
cccagcgaggguagaauucagaauagagagu

SEQ ID NO: 265848 - RNA, 32 nt, Homo Sapiens
gacuucacagagcugucagaagacuuaggaag

SEQ ID NO: 265849 - RNA, 32 nt, Homo Sapiens
acaacaucaguuagaguuugagcauuauucag

SEQ ID NO: 265850 - RNA, 32 nt, Homo Sapiens
agugaggagaugcggccaaagauucuuuauau

SEQ ID NO: 265851 - RNA, 32 nt, Homo Sapiens
cagacuaccuuuuuauacuaggucugguuggg

SEQ ID NO: 265852 - RNA, 32 nt, Homo Sapiens
auguauuaacugaaacaaaagacuagagaaag

SEQ ID NO: 265853 - RNA, 32 nt, Homo Sapiens
guuccuuccagccccaggaccgcagcagcagc

SEQ ID NO: 265854 - RNA, 32 nt, Homo Sapiens
agcucugaagagagaaaagcggcgguguccug

SEQ ID NO: 265855 - RNA, 32 nt, Homo Sapiens
agcggagcuugccugccugccuguggagacag

SEQ ID NO: 265856 - RNA, 32 nt, Homo Sapiens
ccacuuccaccaucauggccaagcgcagcccg

SEQ ID NO: 265857 - RNA, 32 nt, Homo Sapiens
auggaucucaaauuuucaucugcacaaugagg

SEQ ID NO: 265858 - RNA, 32 nt, Homo Sapiens
aacagccuggcgggcuacaguuuagcauggcc

SEQ ID NO: 265859 - RNA, 32 nt, Homo Sapiens
uaguaccaaucauuuuaauuauuauucuucau

SEQ ID NO: 265860 - RNA, 32 nt, Homo Sapiens
aaaguguucugugauguaaaauuuaggucaca

SEQ ID NO: 265861 - RNA, 32 nt, Homo Sapiens
ucuagagaacuaaacuggcuuaacgagucaca

SEQ ID NO: 265862 - RNA, 32 nt, Homo Sapiens
gucacggccaccuagugaccgccgaacugccc

SEQ ID NO: 265863 - RNA, 32 nt, Homo Sapiens
aaagguuagcagagcaaagugcggugcuuuag

SEQ ID NO: 265864 - RNA, 32 nt, Homo Sapiens
cuaacaacagagcuuuucugucauccuaaccc

SEQ ID NO: 265865 - RNA, 32 nt, Homo Sapiens
caucauguuuuccaucacuuuaaucaaucauu

SEQ ID NO: 265866 - RNA, 32 nt, Homo Sapiens
uccugccucacaggugaagauuaaagagacaa

SEQ ID NO: 265867 - RNA, 32 nt, Homo Sapiens
ucaacuuggagagaggugacagacggcagauc

SEQ ID NO: 265868 - RNA, 32 nt, Homo Sapiens
gucagaagacgaagagcaaaugcccugacgcc

SEQ ID NO: 265869 - RNA, 27 nt, Homo Sapiens
ugaaauuccuucuucuggcucagaagc

SEQ ID NO: 265870 - RNA, 32 nt, Homo Sapiens
ucucuuuauuaagcuuccuaagaucaaacccu

SEQ ID NO: 265871 - RNA, 32 nt, Homo Sapiens
aaggacuuuucuaucauuuccauuuuauaaau

SEQ ID NO: 265872 - RNA, 32 nt, Homo Sapiens
uauuuucuacugccgccuuuuucaugugcaac

SEQ ID NO: 265873 - RNA, 30 nt, Homo Sapiens
ggggaaggcaggcaugggguguggcccucg

SEQ ID NO: 265874 - RNA, 30 nt, Homo Sapiens
caguggccacucaaggcccaucuuuugccu

SEQ ID NO: 265875 - RNA, 32 nt, Homo Sapiens
aguuuuuauuuuuuauuccuuguaaaaucuuu

SEQ ID NO: 265876 - RNA, 32 nt, Homo Sapiens
ucaggcugucccaagcucccaagagcuuccag

SEQ ID NO: 265877 - RNA, 32 nt, Homo Sapiens
uggcaaguuuaaaagagaaaguggccauuacu

SEQ ID NO: 265878 - RNA, 32 nt, Homo Sapiens
ugcucaaccagacagauagugaaacagcuuuc

SEQ ID NO: 265879 - RNA, 32 nt, Homo Sapiens
caccggcacccggcccagccggggcccggucu

SEQ ID NO: 265880 - RNA, 32 nt, Homo Sapiens
ccuugcuucucaccuggauuccugcuugugca

SEQ ID NO: 265881 - RNA, 32 nt, Homo Sapiens
auacugggggaagaggagccaaugacagggua

SEQ ID NO: 265882 - RNA, 27 nt, Homo Sapiens
cauaucuccugccucagccccccuggc

SEQ ID NO: 265883 - RNA, 32 nt, Homo Sapiens
uuuuuuaguaaacuuuuacugaaguauaccau

SEQ ID NO: 265884 - RNA, 32 nt, Homo Sapiens
uuacaacaauacuaguucuuaacguauguuuu

SEQ ID NO: 265885 - RNA, 32 nt, Homo Sapiens
uuuaggguuugugcucugagauaaacgaaagc

SEQ ID NO: 265886 - RNA, 32 nt, Homo Sapiens
aaauguuuauaugauaaugucuguaaacagca

SEQ ID NO: 265887 - RNA, 32 nt, Homo Sapiens
caaccgaggaggaggggcgggacgccguggag

SEQ ID NO: 265888 - RNA, 32 nt, Homo Sapiens
cgugaaccacuguguccaccccugccucuauu

SEQ ID NO: 265889 - RNA, 32 nt, Homo Sapiens
gaaaucugcauucuauuucucauguauaaaac

SEQ ID NO: 265890 - RNA, 32 nt, Homo Sapiens
guaaguuuggaucaaauuuugcugguucuuug

SEQ ID NO: 265891 - RNA, 32 nt, Homo Sapiens
cugccugccgcagggcaaacuacuucaaacga

SEQ ID NO: 265892 - RNA, 31 nt, Homo Sapiens
cgagggcagcgcagggauccggggaagcugc

SEQ ID NO: 265893 - RNA, 32 nt, Homo Sapiens
aacauguuuucuggugcucaucucacaugcua

SEQ ID NO: 265894 - RNA, 32 nt, Homo Sapiens
gccccucgugucuggcugugcugcuggcugca

SEQ ID NO: 265895 - RNA, 32 nt, Homo Sapiens
cgucuugccucgccucgccuccccucaccuug

SEQ ID NO: 265896 - RNA, 32 nt, Homo Sapiens
auauuagcagggcuucuguuucuaagugacca

SEQ ID NO: 265897 - RNA, 32 nt, Homo Sapiens
uccgccaaccauuuuuucagaagaggucagaa

SEQ ID NO: 265898 - RNA, 32 nt, Homo Sapiens
aguaaggcggcacgggcugggggguggcagag

SEQ ID NO: 265899 - RNA, 32 nt, Homo Sapiens
uuccaaggacccccaaacucugcuccgugcac

SEQ ID NO: 265900 - RNA, 32 nt, Homo Sapiens
auagcagugucuuuucucuggaugccacgagu

SEQ ID NO: 265901 - RNA, 32 nt, Homo Sapiens
ccuuggggcucgcagaguuagagcuuuccagc

SEQ ID NO: 265902 - RNA, 32 nt, Homo Sapiens
cgggagcacuacgcggagcugcacccgugccc

SEQ ID NO: 265903 - RNA, 32 nt, Homo Sapiens
gcaacauuuguauggauuuaagaguauuuuaa

SEQ ID NO: 265904 - RNA, 32 nt, Homo Sapiens
cucccuagggcggggccugugcaugcucuccc

SEQ ID NO: 265905 - RNA, 32 nt, Homo Sapiens
aacucccuccaagucccauguauauagguccu

SEQ ID NO: 265906 - RNA, 32 nt, Homo Sapiens
gaggcgccgggcggaguggcuccgggccgaaa

SEQ ID NO: 265907 - RNA, 32 nt, Homo Sapiens
gcagugacccgggagccaccacagacucuggg

SEQ ID NO: 265908 - RNA, 32 nt, Homo Sapiens
uuuuggugucuggggacaacuauccucccccc

SEQ ID NO: 265909 - RNA, 32 nt, Homo Sapiens
aagaaagcgggaagggucccccacagcaagag

SEQ ID NO: 265910 - RNA, 32 nt, Homo Sapiens
gaggucccucacaggcaggcagcccuccacug

SEQ ID NO: 265911 - RNA, 32 nt, Homo Sapiens
ucagauaugcaaacuuaauggcguuuuguuuu

SEQ ID NO: 265912 - RNA, 32 nt, Homo Sapiens
cugacagacagagaugaaagcauggaaauaaa

SEQ ID NO: 265913 - RNA, 32 nt, Homo Sapiens
uuuauauuuuugcaauaaaguacauuuugacu

SEQ ID NO: 265914 - RNA, 32 nt, Homo Sapiens
agcaucucaagccccaguagcaggagaaagaa

SEQ ID NO: 265915 - RNA, 32 nt, Homo Sapiens
ggaguuuaaaagaucaaguuaggaugcugacu

SEQ ID NO: 265916 - RNA, 32 nt, Homo Sapiens
ugauggguucccucccugaccccgcaccccca

SEQ ID NO: 265917 - RNA, 32 nt, Homo Sapiens
ucaccaaauuccucauuuauacuuggggaaaa

SEQ ID NO: 265918 - RNA, 32 nt, Homo Sapiens
uugaagagucgauuauuuccaguguucuauga

SEQ ID NO: 265919 - RNA, 32 nt, Homo Sapiens
ucucucuuucucucuuuuuuuuuuuuuugcca

SEQ ID NO: 265920 - RNA, 32 nt, Homo Sapiens
guuaggaaaguauuaaguuugugcugaaaauc

SEQ ID NO: 265921 - RNA, 32 nt, Homo Sapiens
aaccugaaggauuuuucuuaggcgagcgccuu

SEQ ID NO: 265922 - RNA, 32 nt, Homo Sapiens
gcauuaggagcuugagcccagacggcccuagc

SEQ ID NO: 265923 - RNA, 32 nt, Homo Sapiens
ucucaauggacuucuuguuuaaugcuggaguu

SEQ ID NO: 265924 - RNA, 32 nt, Homo Sapiens
caagcuccagaggaauaugauauuuuacaggc

SEQ ID NO: 265925 - RNA, 32 nt, Homo Sapiens
uggccucccaguuaugccuccuccucaaguuc

SEQ ID NO: 265926 - RNA, 32 nt, Homo Sapiens
aaucuccaguuauuauacaaaacuacagauac

SEQ ID NO: 265927 - RNA, 32 nt, Homo Sapiens
aggcggagggcggaaggcugcuggggugcgca

SEQ ID NO: 265928 - RNA, 31 nt, Homo Sapiens
cuguaaugaaacaccuucucuggagccaagu

SEQ ID NO: 265929 - RNA, 32 nt, Homo Sapiens
uuuuaaaaacaaaauuugugaaaccuauagac

SEQ ID NO: 265930 - RNA, 32 nt, Homo Sapiens
cgagaggaaguaagaagggucuguucuguggc

SEQ ID NO: 265931 - RNA, 32 nt, Homo Sapiens
augcuccccacagcgucccuggcgcagguggg

SEQ ID NO: 265932 - RNA, 32 nt, Homo Sapiens
cgacacagucagaacuaugaugaccuguggcu

SEQ ID NO: 265933 - RNA, 32 nt, Homo Sapiens
uucuaaacauuucagcuaggaauaccacugau

SEQ ID NO: 265934 - RNA, 32 nt, Homo Sapiens
aaccccuugcuggccuggggccugggccucuc

SEQ ID NO: 265935 - RNA, 32 nt, Homo Sapiens
aaugaggaaggggagaaacuaauguguauuag

SEQ ID NO: 265936 - RNA, 32 nt, Homo Sapiens
aagguguucuccagugccaaguacccugcucc

SEQ ID NO: 265937 - RNA, 32 nt, Homo Sapiens
gagcuaguggggugggcucagcagaagugggu

SEQ ID NO: 265938 - RNA, 32 nt, Homo Sapiens
uacauuaauuuaauguuugcacucugaggugc

SEQ ID NO: 265939 - RNA, 32 nt, Homo Sapiens
gccgacacccucaggacgaguguccggacuug

SEQ ID NO: 265940 - RNA, 32 nt, Homo Sapiens
aaauguuuuaguuuugugcacccauuggcaaa

SEQ ID NO: 265941 - RNA, 32 nt, Homo Sapiens
cguguggggaccccaucugaggucuuggcuga

SEQ ID NO: 265942 - RNA, 32 nt, Homo Sapiens
cuaaaaauauaaauuuuuguuguaagucagga

SEQ ID NO: 265943 - RNA, 32 nt, Homo Sapiens
uuucuaagugaauacaggacacguauuaguug

SEQ ID NO: 265944 - RNA, 32 nt, Homo Sapiens
aacuggccaaaucuuugcauguuuauuuaaca

SEQ ID NO: 265945 - RNA, 32 nt, Homo Sapiens
ccacuggguggggaagcagcucagcccugaug

SEQ ID NO: 265946 - RNA, 32 nt, Homo Sapiens
guauguugcauaauacaguggaucugaauuua

SEQ ID NO: 265947 - RNA, 32 nt, Homo Sapiens
ugcugagagaggaggcccgagaggacacccca

SEQ ID NO: 265948 - RNA, 32 nt, Homo Sapiens
gugccguuauuuaaagaauucucuccauguuu

SEQ ID NO: 265949 - RNA, 32 nt, Homo Sapiens
uagaugaccuuuuuuucuuauaauauuugcaa

SEQ ID NO: 265950 - RNA, 32 nt, Homo Sapiens
ucauuauggaaugugaaauaucaguguugucu

SEQ ID NO: 265951 - RNA, 32 nt, Homo Sapiens
uuuugcaaauuaacaauuuuaucacugauuca

SEQ ID NO: 265952 - RNA, 32 nt, Homo Sapiens
agucaccugguggcuaauuagaccccuccccu

SEQ ID NO: 265953 - RNA, 32 nt, Homo Sapiens
ggaccugccagugcucuguuucccugccagac

SEQ ID NO: 265954 - RNA, 32 nt, Homo Sapiens
aaucacuugucauccaaagaauuauauuaaag

SEQ ID NO: 265955 - RNA, 31 nt, Homo Sapiens
uacaccccacccucagcaucagauauacucu

SEQ ID NO: 265956 - RNA, 32 nt, Homo Sapiens
gugugugcaugugugcgugucuccaugugcgu

SEQ ID NO: 265957 - RNA, 32 nt, Homo Sapiens
cggcgcgaugcggcugggcccgaggaccgcgg

SEQ ID NO: 265958 - RNA, 32 nt, Homo Sapiens
cuucggcgcccccgaugucucuaggcuuccgc

SEQ ID NO: 265959 - RNA, 32 nt, Homo Sapiens
caaauauggaaauuauuuuaagaaacaaugac

SEQ ID NO: 265960 - RNA, 32 nt, Homo Sapiens
uuggaggacuuagaauaagauaggaaaaugug

SEQ ID NO: 265961 - RNA, 32 nt, Homo Sapiens
uucuauguucuuccuaccuguuaaaccucuuc

SEQ ID NO: 265962 - RNA, 32 nt, Homo Sapiens
gagacgggcgcucgcgucucgcaguccucuuc

SEQ ID NO: 265963 - RNA, 32 nt, Homo Sapiens
uuuccacuggccuuacaagaccgugcacugug

SEQ ID NO: 265964 - RNA, 32 nt, Homo Sapiens
cagcuguggccaaaaacaucguguaucaggga

SEQ ID NO: 265965 - RNA, 32 nt, Homo Sapiens
auguguuguuguaaucuccauccaccauagga

SEQ ID NO: 265966 - RNA, 32 nt, Homo Sapiens
auggaaagucugggccagcaucaauaaaauga

SEQ ID NO: 265967 - RNA, 32 nt, Homo Sapiens
aguggggaggagaggagaggggcagcuuccuc

SEQ ID NO: 265968 - RNA, 32 nt, Homo Sapiens
cagucucuuuugcuuaggacauguugccccua

SEQ ID NO: 265969 - RNA, 32 nt, Homo Sapiens
ccuaugggaguagacagcaagcaggugaagcc

SEQ ID NO: 265970 - RNA, 32 nt, Homo Sapiens
auuccggacacuguggagagggaccaguggug

SEQ ID NO: 265971 - RNA, 32 nt, Homo Sapiens
ggucuucugcuccagucaccccggccucuugc

SEQ ID NO: 265972 - RNA, 32 nt, Homo Sapiens
gcagaccugagccccagagcaggccuccuucc

SEQ ID NO: 265973 - RNA, 32 nt, Homo Sapiens
uagauaagaccuuuuacccauuuaauuugucu

SEQ ID NO: 265974 - RNA, 32 nt, Homo Sapiens
caaagauaggagaggcuccaucucuaaugcau

SEQ ID NO: 265975 - RNA, 32 nt, Homo Sapiens
auguaacuuuuguuuuaaccuuugcaccuucu

SEQ ID NO: 265976 - RNA, 32 nt, Homo Sapiens
auuaacuacucauacuuuuucuuuacacuaau

SEQ ID NO: 265977 - RNA, 32 nt, Homo Sapiens
cucccuguuucaguaaaagaugaugaaagcca

SEQ ID NO: 265978 - RNA, 32 nt, Homo Sapiens
uguccuguguccccgcuuccuccagaagccac

SEQ ID NO: 265979 - RNA, 32 nt, Homo Sapiens
gggagaccagcaugcuuagacacuuauugcca

SEQ ID NO: 265980 - RNA, 32 nt, Homo Sapiens
uaaagcugauaugaggaaauaaagagugaacu

SEQ ID NO: 265981 - RNA, 32 nt, Homo Sapiens
ggccggggcgccggcuccaugggcagcggcac

SEQ ID NO: 265982 - RNA, 32 nt, Homo Sapiens
agccgggcaugguggcgggcgccuaaaauccc

SEQ ID NO: 265983 - RNA, 32 nt, Homo Sapiens
cugccggcucugccugugcugcaaguguuggc

SEQ ID NO: 265984 - RNA, 32 nt, Homo Sapiens
auucucgccucgccgcagcccagcccugcgcg

SEQ ID NO: 265985 - RNA, 30 nt, Homo Sapiens
ugaaaaggcaggcaguguggucacagaccg

SEQ ID NO: 265986 - RNA, 32 nt, Homo Sapiens
cgcccgcgcgccccgggagccuacccagcacg

SEQ ID NO: 265987 - RNA, 32 nt, Homo Sapiens
gcucucugggcagcugcuggguucagugacuu

SEQ ID NO: 265988 - RNA, 30 nt, Homo Sapiens
ucuaggcgcgcucguaggccggcgccgcag

SEQ ID NO: 265989 - RNA, 27 nt, Homo Sapiens
uguguuuucuucuucaaucuuuuaaua

SEQ ID NO: 265990 - RNA, 32 nt, Homo Sapiens
auucccuggccaaggagauccaguaccugaaa

SEQ ID NO: 265991 - RNA, 32 nt, Homo Sapiens
aucuggcuggaacgggacagaaaacugauaaa

SEQ ID NO: 265992 - RNA, 32 nt, Homo Sapiens
cgaccuuaaaaauacuaucaaaggagcauggu

SEQ ID NO: 265993 - RNA, 32 nt, Homo Sapiens
uaaggucaugugaacacagcagcaaauaguuu

SEQ ID NO: 265994 - RNA, 32 nt, Homo Sapiens
ucauucugugggucaucuacacguucuuaaaa

SEQ ID NO: 265995 - RNA, 32 nt, Homo Sapiens
cagucuacaucauaauuggcauuucucaagac

SEQ ID NO: 265996 - RNA, 32 nt, Homo Sapiens
ggcaggcagggccggcgcucgugggggucggu

SEQ ID NO: 265997 - RNA, 32 nt, Homo Sapiens
ucauugguucauuaauucuauaaggccauaaa

SEQ ID NO: 265998 - RNA, 32 nt, Homo Sapiens
aacauuaaaaaauuaguuuuuaggcagaccca

SEQ ID NO: 265999 - RNA, 32 nt, Homo Sapiens
guuacuuggccauuucuucccaucuccaaaaa

SEQ ID NO: 266000 - RNA, 32 nt, Homo Sapiens
uagguagaugacugacagaugauagauagaua

SEQ ID NO: 266001 - RNA, 32 nt, Homo Sapiens
aaaaguuuuuauuugcauggcuguauuuacau

SEQ ID NO: 266002 - RNA, 32 nt, Homo Sapiens
ggcuaaugauucgacagaggcuggaggagaua

SEQ ID NO: 266003 - RNA, 32 nt, Homo Sapiens
aguuguuuucccuccugcccaugcucucccag

SEQ ID NO: 266004 - RNA, 32 nt, Homo Sapiens
auuuaaugucucuguaaaggcacuuccaaaca

SEQ ID NO: 266005 - RNA, 32 nt, Homo Sapiens
aguccgcugcucgccggcggccgcccggucau

SEQ ID NO: 266006 - RNA, 32 nt, Homo Sapiens
gcccuagugagggcagaagagaaaccauccuc

SEQ ID NO: 266007 - RNA, 31 nt, Homo Sapiens
auguucuuuccuccaagggcaaauaguaaac

SEQ ID NO: 266008 - RNA, 32 nt, Homo Sapiens
cggcccuuugcgcacgcguggagccuucucag

SEQ ID NO: 266009 - RNA, 32 nt, Homo Sapiens
gaguuccgccccacccucuacagccuuccuca

SEQ ID NO: 266010 - RNA, 32 nt, Homo Sapiens
gauuuugaaugauauuggauaauuauugguaa

SEQ ID NO: 266011 - RNA, 32 nt, Homo Sapiens
uacauaccggggcuccucuccuaacauauaug

SEQ ID NO: 266012 - RNA, 32 nt, Homo Sapiens
ggcggcgacugccugccugccuggguugcgga

SEQ ID NO: 266013 - RNA, 32 nt, Homo Sapiens
gugaauuuguggugggcgggggcuggaggaga

SEQ ID NO: 266014 - RNA, 32 nt, Homo Sapiens
gcuaaucuauaaucuauagaaacuaugcuuau

SEQ ID NO: 266015 - RNA, 32 nt, Homo Sapiens
gagcccagauaugacauugugcaugcaguggg

SEQ ID NO: 266016 - RNA, 30 nt, Homo Sapiens
cagguccaacucuguuauucucgaugccca

SEQ ID NO: 266017 - RNA, 32 nt, Homo Sapiens
cuugggccugccugcccuccccauacccagaa

SEQ ID NO: 266018 - RNA, 32 nt, Homo Sapiens
acacagaaacaaacagaaugagcuaguaagcg

SEQ ID NO: 266019 - RNA, 32 nt, Homo Sapiens
ggggaagucacuucccuucucucagcugaguu

SEQ ID NO: 266020 - RNA, 32 nt, Homo Sapiens
uuccgcgccccucccgccggagaugaggggaa

SEQ ID NO: 266021 - RNA, 32 nt, Homo Sapiens
gugcaguguaaauugugaagcauuauguaaau

SEQ ID NO: 266022 - RNA, 32 nt, Homo Sapiens
uauucuuuuuaaacuucuaggauuuucuucua

SEQ ID NO: 266023 - RNA, 30 nt, Homo Sapiens
aaggguauggcuucugccuaauaaagaaug

SEQ ID NO: 266024 - RNA, 32 nt, Homo Sapiens
gagcaggaugagaauggggcagaggcuagugc

SEQ ID NO: 266025 - RNA, 32 nt, Homo Sapiens
agaaacgcuucuuuuccauccuagugagaagc

SEQ ID NO: 266026 - RNA, 32 nt, Homo Sapiens
auguuuuauuguaucuguuuucuacuuuaugu

SEQ ID NO: 266027 - RNA, 32 nt, Homo Sapiens
uauaaaaguaaggaugggcauuuuggacauug

SEQ ID NO: 266028 - RNA, 32 nt, Homo Sapiens
gaauaaggauguuguuaugaucgccuguggau

SEQ ID NO: 266029 - RNA, 32 nt, Homo Sapiens
guccuaucuaaugcaugagauggcgguaagcc

SEQ ID NO: 266030 - RNA, 32 nt, Homo Sapiens
aagacuucagaauugggaacuaaaccaugaau

SEQ ID NO: 266031 - RNA, 32 nt, Homo Sapiens
uucaugccauucucguccuucagccuccugag

SEQ ID NO: 266032 - RNA, 32 nt, Homo Sapiens
uuggcaguauauuauagugauaauuuuguauu

SEQ ID NO: 266033 - RNA, 32 nt, Homo Sapiens
auuuugguucuuaguucucacuguucccucug

SEQ ID NO: 266034 - RNA, 32 nt, Homo Sapiens
gcccccuggugcggcccgagaccgggcagagu

SEQ ID NO: 266035 - RNA, 32 nt, Homo Sapiens
agcagaccugccggugaauccuucugacucac

SEQ ID NO: 266036 - RNA, 32 nt, Homo Sapiens
ugacuuccgcaucccugacaagaggugacaca

SEQ ID NO: 266037 - RNA, 30 nt, Homo Sapiens
auuucuugcauaauuucuuuucuuucuuuc

SEQ ID NO: 266038 - RNA, 32 nt, Homo Sapiens
gaaacaugaacugccaagagaggaaugggaca

SEQ ID NO: 266039 - RNA, 32 nt, Homo Sapiens
ggggugggaagaacaggaaaagaagcuggaac

SEQ ID NO: 266040 - RNA, 31 nt, Homo Sapiens
auuuaguguaacaugaaugcuugugcuguaa

SEQ ID NO: 266041 - RNA, 32 nt, Homo Sapiens
cuccuggccuccuugaacuccuccugccuugg

SEQ ID NO: 266042 - RNA, 31 nt, Homo Sapiens
ugaaaugugcacuuuauccucauuccauaaa

SEQ ID NO: 266043 - RNA, 32 nt, Homo Sapiens
ggaccccggggggauggcccaggccugcgagg

SEQ ID NO: 266044 - RNA, 32 nt, Homo Sapiens
agaaauaagcaugaaggaauagcugauaaacu

SEQ ID NO: 266045 - RNA, 32 nt, Homo Sapiens
guguaaacacaagccuaggacauggacuaggu

SEQ ID NO: 266046 - RNA, 32 nt, Homo Sapiens
aaaaggagggaagauaaauaugggauaaaauc

SEQ ID NO: 266047 - RNA, 32 nt, Homo Sapiens
aguagaaaaaucagacaaaaguuuuaauuccc

SEQ ID NO: 266048 - RNA, 32 nt, Homo Sapiens
guguugaacugggacacuggggagaaaggggc

SEQ ID NO: 266049 - RNA, 30 nt, Homo Sapiens
aguugaugccuugcagggcauucuucaaaa

SEQ ID NO: 266050 - RNA, 32 nt, Homo Sapiens
aaauuuacuuacauuucuuuaagguauuuuaa

SEQ ID NO: 266051 - RNA, 32 nt, Homo Sapiens
cauggggagcagcuaaacaaugcagauucauc

SEQ ID NO: 266052 - RNA, 32 nt, Homo Sapiens
agacuuuuuguuguuguuguuguuuugagaug

SEQ ID NO: 266053 - RNA, 32 nt, Homo Sapiens
gguuuguguguuacgcacacacacgugcacac

SEQ ID NO: 266054 - RNA, 32 nt, Homo Sapiens
aacauguccauauuugaaggcugccucaggcc

SEQ ID NO: 266055 - RNA, 32 nt, Homo Sapiens
uggcugcugagguuggcggcggugccgcgcgc

SEQ ID NO: 266056 - RNA, 32 nt, Homo Sapiens
cggagccgcugagcgggccgacggccauuuug

SEQ ID NO: 266057 - RNA, 32 nt, Homo Sapiens
gaaaccacccucauaagggcaugagacccagg

SEQ ID NO: 266058 - RNA, 32 nt, Homo Sapiens
auguaugaagggucauaaaauaaucauaaaau

SEQ ID NO: 266059 - RNA, 32 nt, Homo Sapiens
uuaucucugaagaucuaaacuuuugagaaugu

SEQ ID NO: 266060 - RNA, 32 nt, Homo Sapiens
gacgugcagaaucucaguggcaucuggguuca

SEQ ID NO: 266061 - RNA, 32 nt, Homo Sapiens
guucccagcuccacccaacuuucccccuccuc

SEQ ID NO: 266062 - RNA, 32 nt, Homo Sapiens
aaagacuauuaaguuaggaugaacuagauucc

SEQ ID NO: 266063 - RNA, 32 nt, Homo Sapiens
ggggagaaauauaggauagacacuggacaugg

SEQ ID NO: 266064 - RNA, 32 nt, Homo Sapiens
uuguauuuauuuucuauuccauacuucugccc

SEQ ID NO: 266065 - RNA, 32 nt, Homo Sapiens
caggaacgagauggcgguucuccggaggcuga

SEQ ID NO: 266066 - RNA, 32 nt, Homo Sapiens
uagaggacgcucucugcgcgggcccucggagg

SEQ ID NO: 266067 - RNA, 32 nt, Homo Sapiens
cugucucugucuuugcuucucauucucugcag

SEQ ID NO: 266068 - RNA, 32 nt, Homo Sapiens
uggucaacugucagcucucaggguggacggcu

SEQ ID NO: 266069 - RNA, 32 nt, Homo Sapiens
ggaagcugucuccugacaucgccccuccaacg

SEQ ID NO: 266070 - RNA, 32 nt, Homo Sapiens
cuuaugauggauuuuuaacuucccguggaaaa

SEQ ID NO: 266071 - RNA, 32 nt, Homo Sapiens
cauggggagcaacuuuaggggcugggagauag

SEQ ID NO: 266072 - RNA, 32 nt, Homo Sapiens
gccgcgcgaggguggggaccagcugcgcacga

SEQ ID NO: 266073 - RNA, 32 nt, Homo Sapiens
gcugcccgagggccucuuggggcaccuaagac

SEQ ID NO: 266074 - RNA, 32 nt, Homo Sapiens
uugugagcccuccuuucagugaugugauggca

SEQ ID NO: 266075 - RNA, 32 nt, Homo Sapiens
aucaagacauuuauuuucaaagcgagaauucu

SEQ ID NO: 266076 - RNA, 32 nt, Homo Sapiens
cucaaauaacaaguacaaacauugaacaauua

SEQ ID NO: 266077 - RNA, 32 nt, Homo Sapiens
uggacaucuaagacagccgaucaucuuuccuu

SEQ ID NO: 266078 - RNA, 32 nt, Homo Sapiens
gcccagccugcccuuccuuccuccagcuggcu

SEQ ID NO: 266079 - RNA, 32 nt, Homo Sapiens
uuaccgcccaaccuggauccggcgcguguggc

SEQ ID NO: 266080 - RNA, 30 nt, Homo Sapiens
aggauuaagguaacggagauaugcacaaau

SEQ ID NO: 266081 - RNA, 32 nt, Homo Sapiens
uggauggccugccugccuucccuguccguuca

SEQ ID NO: 266082 - RNA, 32 nt, Homo Sapiens
uucagcauucuauuuuuaauaauuuguaugcc

SEQ ID NO: 266083 - RNA, 32 nt, Homo Sapiens
uuaugaaauauuaaacaugaagaaaacuugua

SEQ ID NO: 266084 - RNA, 32 nt, Homo Sapiens
gauuauuacccauaaggcacacucucuaaggc

SEQ ID NO: 266085 - RNA, 32 nt, Homo Sapiens
aauuugcauaaugaauguaaaagggaaauaaa

SEQ ID NO: 266086 - RNA, 32 nt, Homo Sapiens
ucccuguguccuggaggagaaaagcauuagag

SEQ ID NO: 266087 - RNA, 32 nt, Homo Sapiens
aaacacacagaaaauagugacaauuggguuaa

SEQ ID NO: 266088 - RNA, 31 nt, Homo Sapiens
gcgggccggcgcagccauggugaagauuagc

SEQ ID NO: 266089 - RNA, 28 nt, Homo Sapiens
cugugaguggcuaaugagaagagggaca

SEQ ID NO: 266090 - RNA, 25 nt, Homo Sapiens
augcaggggcccugggugcugcugc

SEQ ID NO: 266091 - RNA, 32 nt, Homo Sapiens
ugcaaaaucaaaaucaaugaacgcuugaagga

SEQ ID NO: 266092 - RNA, 32 nt, Homo Sapiens
ccuguugguaaggaggucuuguccucaggggu

SEQ ID NO: 266093 - RNA, 32 nt, Homo Sapiens
acaagaaaauuuaacucuaaaauuuaacuuua

SEQ ID NO: 266094 - RNA, 32 nt, Homo Sapiens
ugguccggucccucugcccccaucccgcaccc

SEQ ID NO: 266095 - RNA, 32 nt, Homo Sapiens
uuggauacuucaagucauucuugcuugcacuu

SEQ ID NO: 266096 - RNA, 32 nt, Homo Sapiens
gagcgagacagucucaaaaacaacaacaacaa

SEQ ID NO: 266097 - RNA, 32 nt, Homo Sapiens
gccuguaaucccaacacuuugggagguggagg

SEQ ID NO: 266098 - RNA, 32 nt, Homo Sapiens
ugaaauucugggauuaaucaccaggugguggu

SEQ ID NO: 266099 - RNA, 32 nt, Homo Sapiens
uuccucuaccagauuguauauuugaagccagu

SEQ ID NO: 266100 - RNA, 32 nt, Homo Sapiens
acguucuaaaauucacuaauaaaauuuucuga

SEQ ID NO: 266101 - RNA, 32 nt, Homo Sapiens
cuucuauauaguuauuuuuuuacguuuuuuuu

SEQ ID NO: 266102 - RNA, 30 nt, Homo Sapiens
cucuuagagaagcuuguuacaaaugcauau

SEQ ID NO: 266103 - RNA, 32 nt, Homo Sapiens
ucugcccuuucccacaccuuuguuccucaaua

SEQ ID NO: 266104 - RNA, 32 nt, Homo Sapiens
uacaggcaugcgccaccaugcccggcuaauuu

SEQ ID NO: 266105 - RNA, 32 nt, Homo Sapiens
uugauuuauuuuuauuuucucuuugugggugu

SEQ ID NO: 266106 - RNA, 32 nt, Homo Sapiens
agaauauuuuugguuuuaaacuuucuuauugc

SEQ ID NO: 266107 - RNA, 32 nt, Homo Sapiens
cggggugcgcgagccgagaggcccuggaagcg

SEQ ID NO: 266108 - RNA, 32 nt, Homo Sapiens
cucaggcccucccaccccuucucuaacacuag

SEQ ID NO: 266109 - RNA, 32 nt, Homo Sapiens
gguuucaaugucucuguaaaugugguagaaau

SEQ ID NO: 266110 - RNA, 32 nt, Homo Sapiens
cuguacagcccgguccucucccacaucuggga

SEQ ID NO: 266111 - RNA, 32 nt, Homo Sapiens
ugcauguggguuccauauaggugcagaaauuu

SEQ ID NO: 266112 - RNA, 32 nt, Homo Sapiens
ggcagcaucguaccugugcaguuccacuaugu

SEQ ID NO: 266113 - RNA, 32 nt, Homo Sapiens
aucuuacuuggggucuuacuuguacccuuaca

SEQ ID NO: 266114 - RNA, 32 nt, Homo Sapiens
gggcgagagggagggacaucgauuaaaccuaa

SEQ ID NO: 266115 - RNA, 32 nt, Homo Sapiens
aucccgucacuaacaauaguacacuuggaugu

SEQ ID NO: 266116 - RNA, 32 nt, Homo Sapiens
agcuugagacacaggagagcccaugguguguu

SEQ ID NO: 266117 - RNA, 32 nt, Homo Sapiens
ccaccgugaacagacaucugccaugcccccag

SEQ ID NO: 266118 - RNA, 32 nt, Homo Sapiens
uucuugaccugccugccugcucuugagaaacc

SEQ ID NO: 266119 - RNA, 32 nt, Homo Sapiens
cucccggagagccgagccgagcgccggcgcac

SEQ ID NO: 266120 - RNA, 32 nt, Homo Sapiens
acauagguacuuaguucucacaccugcacuua

SEQ ID NO: 266121 - RNA, 32 nt, Homo Sapiens
gcccugacgccccacuguccccucacagcccu

SEQ ID NO: 266122 - RNA, 32 nt, Homo Sapiens
cccuuccauaauuccccucauccaccgcccac

SEQ ID NO: 266123 - RNA, 32 nt, Homo Sapiens
aagcgcuccuuucacacacgcgcgcgcucgcu

SEQ ID NO: 266124 - RNA, 32 nt, Homo Sapiens
acaagcuaaaauuagaugaacucaacuuugac

SEQ ID NO: 266125 - RNA, 32 nt, Homo Sapiens
gggggcaaauauguuuucaaaaacuuagugug

SEQ ID NO: 266126 - RNA, 32 nt, Homo Sapiens
uuuucuauuuucccuacgaaaaacagaucuuu

SEQ ID NO: 266127 - RNA, 32 nt, Homo Sapiens
cggucucgccuggagccacuucagggcaccuc

SEQ ID NO: 266128 - RNA, 32 nt, Homo Sapiens
gcuauuacaaauaaaccucugaagauuugugu

SEQ ID NO: 266129 - RNA, 32 nt, Homo Sapiens
cugcccaaaaauauaauauagaacuaauugcu

SEQ ID NO: 266130 - RNA, 32 nt, Homo Sapiens
acagacacuuagaacgguaagaaaccaugagc

SEQ ID NO: 266131 - RNA, 32 nt, Homo Sapiens
agaaucagcuuuuuuuuuuuuaacuauaauau

SEQ ID NO: 266132 - RNA, 32 nt, Homo Sapiens
acaacagaguaaaagagaauacuguaaagaau

SEQ ID NO: 266133 - RNA, 32 nt, Homo Sapiens
ccgagccaccgccgccgcuaccucagcccuuc

SEQ ID NO: 266134 - RNA, 32 nt, Homo Sapiens
gccugggaugguggaguucuuuccaaggauac

SEQ ID NO: 266135 - RNA, 32 nt, Homo Sapiens
aaauugcugaaauguuucuuuaauuuucaaug

SEQ ID NO: 266136 - RNA, 32 nt, Homo Sapiens
gcugcaauuuugggggagccgaggaacugcgg

SEQ ID NO: 266137 - RNA, 32 nt, Homo Sapiens
uauuaacagggaagaagcuuguuauauuccag

SEQ ID NO: 266138 - RNA, 32 nt, Homo Sapiens
cuauggagagcagaaaguugucuggggcugcc

SEQ ID NO: 266139 - RNA, 32 nt, Homo Sapiens
gguggcuacaguguacagucuagacaagacau

SEQ ID NO: 266140 - RNA, 32 nt, Homo Sapiens
uccccugguuaugacagggagcucccaggcca

SEQ ID NO: 266141 - RNA, 32 nt, Homo Sapiens
uucccaguaucaagagcagugcccagcacaca

SEQ ID NO: 266142 - RNA, 32 nt, Homo Sapiens
acuuugucuucgccccagacccuugaggaagg

SEQ ID NO: 266143 - RNA, 32 nt, Homo Sapiens
aacagugccccgagccgcucuccuuggaguag

SEQ ID NO: 266144 - RNA, 32 nt, Homo Sapiens
auccuuggccauucccucuccccucucuaucc

SEQ ID NO: 266145 - RNA, 32 nt, Homo Sapiens
cgcacccgcgcgccggacgccagugaccgcga

SEQ ID NO: 266146 - RNA, 32 nt, Homo Sapiens
accgaguugugcuuggcuugcuugugcagcuc

SEQ ID NO: 266147 - RNA, 32 nt, Homo Sapiens
uucuguaacuuuuauaaaccacagggagguuu

SEQ ID NO: 266148 - RNA, 32 nt, Homo Sapiens
ggagaccaugugcguugugugcaugcgagcgc

SEQ ID NO: 266149 - RNA, 32 nt, Homo Sapiens
aagcacugcaggagcaggcuggcacagagaag

SEQ ID NO: 266150 - RNA, 32 nt, Homo Sapiens
gagagcugcugagggaccuuggagagcucagg

SEQ ID NO: 266151 - RNA, 32 nt, Homo Sapiens
cccuaggcugcgucgggcaugcuuggaagcug

SEQ ID NO: 266152 - RNA, 32 nt, Homo Sapiens
cccagcugggacccggggugucggaguggcaa

SEQ ID NO: 266153 - RNA, 32 nt, Homo Sapiens
gcauccagauauuauuuuguauacaaauauuu

SEQ ID NO: 266154 - RNA, 32 nt, Homo Sapiens
gaggacuccagaagaugagagaaaccucuuua

SEQ ID NO: 266155 - RNA, 32 nt, Homo Sapiens
guucaaaaaaauuuaaauucuugauaaauugc

SEQ ID NO: 266156 - RNA, 32 nt, Homo Sapiens
ggaggcugaggcaggagaagggugggaacccg

SEQ ID NO: 266157 - RNA, 32 nt, Homo Sapiens
aucuucugacuuaaauacaacuuucauggagu

SEQ ID NO: 266158 - RNA, 32 nt, Homo Sapiens
uaccuacagggagagggaugguggggaagggg

SEQ ID NO: 266159 - RNA, 32 nt, Homo Sapiens
aauuccgggcggcggcggccaaacuccgcggc

SEQ ID NO: 266160 - RNA, 32 nt, Homo Sapiens
uucaacauugaagugacuugggaaauaacauu

SEQ ID NO: 266161 - RNA, 28 nt, Homo Sapiens
acaauggcagaaaaaauccuagagaagu

SEQ ID NO: 266162 - RNA, 32 nt, Homo Sapiens
uggcgacugucauguggcuugguuuggucaug

SEQ ID NO: 266163 - RNA, 32 nt, Homo Sapiens
cuuccaauaaacgaucaucuuauuaguuuuca

SEQ ID NO: 266164 - RNA, 32 nt, Homo Sapiens
cuucuucucucuucuucuguuugccuaacucc

SEQ ID NO: 266165 - RNA, 32 nt, Homo Sapiens
cugagggagcggcaccuaggccugaugggcua

SEQ ID NO: 266166 - RNA, 32 nt, Homo Sapiens
ggcccguggcggauuguaagcugcugguuuug

SEQ ID NO: 266167 - RNA, 32 nt, Homo Sapiens
cacggcccuggcggagcgcugagaacgcgggu

SEQ ID NO: 266168 - RNA, 32 nt, Homo Sapiens
aacuccgccgcccgcuccccaggccgcccgcg

SEQ ID NO: 266169 - RNA, 32 nt, Homo Sapiens
ccuccauggccccggagccccauccugggccu

SEQ ID NO: 266170 - RNA, 32 nt, Homo Sapiens
acccagaggcgagggcgcgcauggggagccuc

SEQ ID NO: 266171 - RNA, 30 nt, Homo Sapiens
cauggaaaaaguacugacaaaaauagguuu

SEQ ID NO: 266172 - RNA, 31 nt, Homo Sapiens
gguacaucugugguuuuuaaucugugcuaga

SEQ ID NO: 266173 - RNA, 32 nt, Homo Sapiens
gagccucccaacccgcgccgcgcuggcccucg

SEQ ID NO: 266174 - RNA, 32 nt, Homo Sapiens
cgcccgggacgccaggcaagcagcuuuuacag

SEQ ID NO: 266175 - RNA, 32 nt, Homo Sapiens
ccaccgccuccuccaucucccggagcuggagc

SEQ ID NO: 266176 - RNA, 32 nt, Homo Sapiens
gcucucaaaggacacgaggcccuuggcaggga

SEQ ID NO: 266177 - RNA, 32 nt, Homo Sapiens
gaccaaagccccugcuggcacccuggcccagc

SEQ ID NO: 266178 - RNA, 32 nt, Homo Sapiens
uacaaauuucuuuucuaugaauaauagaggaa

SEQ ID NO: 266179 - RNA, 32 nt, Homo Sapiens
gcagaacuauugucuguaaagcuaggcagaug

SEQ ID NO: 266180 - RNA, 32 nt, Homo Sapiens
ucgcgggcagcauggcggggcugcgggccagg

SEQ ID NO: 266181 - RNA, 32 nt, Homo Sapiens
augcauuuguguaauuuauagaaguaaaaucu

SEQ ID NO: 266182 - RNA, 30 nt, Homo Sapiens
cgucgaggggcccgcgcgggucggcgccau

SEQ ID NO: 266183 - RNA, 32 nt, Homo Sapiens
agccacugccaagcuuccugugcccucacccc

SEQ ID NO: 266184 - RNA, 32 nt, Homo Sapiens
uagauuucuccugaauauguccuccuuuguug

SEQ ID NO: 266185 - RNA, 32 nt, Homo Sapiens
guaaccaaauaccaccuguaccccaauaacuu

SEQ ID NO: 266186 - RNA, 32 nt, Homo Sapiens
aucaucuaguugguuuucauggagcggcccac

SEQ ID NO: 266187 - RNA, 32 nt, Homo Sapiens
ccagcgaggcaaccgccuccgaacgccaggug

SEQ ID NO: 266188 - RNA, 32 nt, Homo Sapiens
uuaaaguuggagcuaccacuuuuagcauagau

SEQ ID NO: 266189 - RNA, 29 nt, Homo Sapiens
uauaccauagugauaaauaugaccaaaag

SEQ ID NO: 266190 - RNA, 32 nt, Homo Sapiens
aggucagcuguggaagacccaggccccuggcu

SEQ ID NO: 266191 - RNA, 32 nt, Homo Sapiens
ucucugugaauugccuguaacacauaguggcu

SEQ ID NO: 266192 - RNA, 32 nt, Homo Sapiens
gcaugugaggucggugcuggaucaccccauca

SEQ ID NO: 266193 - RNA, 32 nt, Homo Sapiens
gcaggcagcucuucuaggccacguccaggucg

SEQ ID NO: 266194 - RNA, 32 nt, Homo Sapiens
gguguguucuaaauaucuguggugguuguuuu

SEQ ID NO: 266195 - RNA, 32 nt, Homo Sapiens
cgguauucuuugcgguauucuuguccccgucc

SEQ ID NO: 266196 - RNA, 32 nt, Homo Sapiens
gggcaaggccccagcaagccucuuggaaaucu

SEQ ID NO: 266197 - RNA, 32 nt, Homo Sapiens
uuuauugucuccaugauuuaucuagcuugcaa

SEQ ID NO: 266198 - RNA, 32 nt, Homo Sapiens
gacuuagcugggugcaguggcucacaccugua

SEQ ID NO: 266199 - RNA, 32 nt, Homo Sapiens
acugaccaguuuaaaaauaugaacuaaaaccu

SEQ ID NO: 266200 - RNA, 30 nt, Homo Sapiens
uagccugcagguaggaccauugcagugaug

SEQ ID NO: 266201 - RNA, 32 nt, Homo Sapiens
aggcggaucauuugaagucaggaguucaagcc

SEQ ID NO: 266202 - RNA, 32 nt, Homo Sapiens
acaccugauaaaauauuuugcgaagagaggug

SEQ ID NO: 266203 - RNA, 32 nt, Homo Sapiens
uuaccauccuccuuccuccccuucccauuagc

SEQ ID NO: 266204 - RNA, 29 nt, Homo Sapiens
uuggauucuaucccagacccagguuuucu

SEQ ID NO: 266205 - RNA, 32 nt, Homo Sapiens
gauucuaaaagcuuuuauugagcauugucaaa

SEQ ID NO: 266206 - RNA, 32 nt, Homo Sapiens
caguggcauagacuccuucacacaucacugug

SEQ ID NO: 266207 - RNA, 32 nt, Homo Sapiens
gggacauuacagaggccuggaacucagcacca

SEQ ID NO: 266208 - RNA, 32 nt, Homo Sapiens
gcagucacauaaacagcagcaggaguaggccu

SEQ ID NO: 266209 - RNA, 32 nt, Homo Sapiens
uagggagaaggaggagaggggaggcuguaccu

SEQ ID NO: 266210 - RNA, 32 nt, Homo Sapiens
aaaauuuaggacagggacaaacacgaggacuu

SEQ ID NO: 266211 - RNA, 32 nt, Homo Sapiens
agcgcggcagccucggacccagcccggagcgc

SEQ ID NO: 266212 - RNA, 32 nt, Homo Sapiens
ccaaugaaccccagccagccuggaccccuaac

SEQ ID NO: 266213 - RNA, 32 nt, Homo Sapiens
uuuuuacuuuuguuggccuuauuuuaugaucc

SEQ ID NO: 266214 - RNA, 32 nt, Homo Sapiens
aguggaguaccuuccuuucucaagucucgaga

SEQ ID NO: 266215 - RNA, 32 nt, Homo Sapiens
auccugaagcagcuguguucugugccuugccc

SEQ ID NO: 266216 - RNA, 32 nt, Homo Sapiens
uguccgaaccugaaauggcagcucuucgagau

SEQ ID NO: 266217 - RNA, 32 nt, Homo Sapiens
uguauuuuuuaaaauugauuuuucucuucauu

SEQ ID NO: 266218 - RNA, 32 nt, Homo Sapiens
aacgggugcugcgcucagcaugaggaggagga

SEQ ID NO: 266219 - RNA, 32 nt, Homo Sapiens
aaaaaagaaauauuuuuaagauguucuuaagc

SEQ ID NO: 266220 - RNA, 32 nt, Homo Sapiens
ucugggucaggauuggaauugggauggaaugg

SEQ ID NO: 266221 - RNA, 32 nt, Homo Sapiens
gcugaccuaauucagaaaagaagugcuacagc

SEQ ID NO: 266222 - RNA, 32 nt, Homo Sapiens
agacaaaagaggaaacaaaagugucucccugu

SEQ ID NO: 266223 - RNA, 32 nt, Homo Sapiens
ugacauuucauggcagucuuguuuauuugauu

SEQ ID NO: 266224 - RNA, 32 nt, Homo Sapiens
uuuagcauauccuaaauaccaggcaaugugcu

SEQ ID NO: 266225 - RNA, 32 nt, Homo Sapiens
guauaaaaacaaaagcaaauuuauauacuaaa

SEQ ID NO: 266226 - RNA, 32 nt, Homo Sapiens
uucucaaagacagaagugauauuuuuaacaaa

SEQ ID NO: 266227 - RNA, 32 nt, Homo Sapiens
ucucucuucucuaugccuaccuccccccauac

SEQ ID NO: 266228 - RNA, 32 nt, Homo Sapiens
uguuucagcauguuggccaggcuggucucgaa

SEQ ID NO: 266229 - RNA, 32 nt, Homo Sapiens
gcuuuucuggcgucggaggcggugagcgagcc

SEQ ID NO: 266230 - RNA, 32 nt, Homo Sapiens
gccaugugagaugauccaagaccaaaacaagg

SEQ ID NO: 266231 - RNA, 32 nt, Homo Sapiens
cuugugacagagcucccggugaacuucuggau

SEQ ID NO: 266232 - RNA, 32 nt, Homo Sapiens
gugcuaaaucucucugccuguuuggacuuugu

SEQ ID NO: 266233 - RNA, 32 nt, Homo Sapiens
aaccucugaaaugugguagaucuuuuuccaaa

SEQ ID NO: 266234 - RNA, 32 nt, Homo Sapiens
uauccucaaauauuuuuguguagaaauuuucg

SEQ ID NO: 266235 - RNA, 31 nt, Homo Sapiens
aguucaagaauuauuuccugaguugaucaaa

SEQ ID NO: 266236 - RNA, 32 nt, Homo Sapiens
ggccgagccgucgccggcgccacgcgaguccc

SEQ ID NO: 266237 - RNA, 32 nt, Homo Sapiens
cucuauuauaucuuguaugguuugcaaaaggg

SEQ ID NO: 266238 - RNA, 32 nt, Homo Sapiens
aaugguuguuuuuaucauaguguacacauuua

SEQ ID NO: 266239 - RNA, 32 nt, Homo Sapiens
gaaaacaaugaaauaaaauuuacagauuuaug

SEQ ID NO: 266240 - RNA, 31 nt, Homo Sapiens
uucaaggcagacuuccugcccccugcacccu

SEQ ID NO: 266241 - RNA, 32 nt, Homo Sapiens
cucccccgacugcuuaccaaauuaaaaugugu

SEQ ID NO: 266242 - RNA, 31 nt, Homo Sapiens
agggaagugucuuaccugagagccuggcugg

SEQ ID NO: 266243 - RNA, 32 nt, Homo Sapiens
aaauuggauagagaagaaaccaauuaaaaaca

SEQ ID NO: 266244 - RNA, 32 nt, Homo Sapiens
uugaagaagauggacauguggugguacgaaaa

SEQ ID NO: 266245 - RNA, 32 nt, Homo Sapiens
cccaagcuuugacauugccaagggcaguuagg

SEQ ID NO: 266246 - RNA, 32 nt, Homo Sapiens
cccugcugccgcugcgcugucccggccgcaag

SEQ ID NO: 266247 - RNA, 32 nt, Homo Sapiens
caacgguucuucucugaacagcaacagagcaa

SEQ ID NO: 266248 - RNA, 32 nt, Homo Sapiens
aaggccaagugcugcaaguggcugggagugac

SEQ ID NO: 266249 - RNA, 32 nt, Homo Sapiens
gcuguuucucccagcaucauaccucaagagga

SEQ ID NO: 266250 - RNA, 32 nt, Homo Sapiens
cacgcccaccgcgcggcuucccccgcuccccg

SEQ ID NO: 266251 - RNA, 32 nt, Homo Sapiens
ucuggccaaacacauucaagcucacauucccu

SEQ ID NO: 266252 - RNA, 32 nt, Homo Sapiens
uaggcauuuuucugucagauuuguaguaauuu

SEQ ID NO: 266253 - RNA, 32 nt, Homo Sapiens
gauguucuucccucccucgccagccaacaaua

SEQ ID NO: 266254 - RNA, 32 nt, Homo Sapiens
uuucccacuggggccaggucucuucuccagcc

SEQ ID NO: 266255 - RNA, 32 nt, Homo Sapiens
ugaaagaaaacaaaacaaaacaaaaaaaaaaa

SEQ ID NO: 266256 - RNA, 32 nt, Homo Sapiens
agggauggauaggaaguagaccucuuuuucuu

SEQ ID NO: 266257 - RNA, 32 nt, Homo Sapiens
guccccaggugauucacaggcacuuuguaguu

SEQ ID NO: 266258 - RNA, 32 nt, Homo Sapiens
ucguuaauuuuccuuugucauuuccuuuguug

SEQ ID NO: 266259 - RNA, 32 nt, Homo Sapiens
cuucaauaauuccauaaacuccagacuucgug

SEQ ID NO: 266260 - RNA, 32 nt, Homo Sapiens
accaggcaaugaagcagaaauagaguaugugu

SEQ ID NO: 266261 - RNA, 32 nt, Homo Sapiens
ugcccucccuuugacuugggguuugcuuuuua

SEQ ID NO: 266262 - RNA, 32 nt, Homo Sapiens
gcaccaaaaacuucauuaaucaccuuaucagg

SEQ ID NO: 266263 - RNA, 32 nt, Homo Sapiens
agagcacacgaggguggggucccuccuuccuc

SEQ ID NO: 266264 - RNA, 32 nt, Homo Sapiens
caccauguuauauuuucuuuuaagacauuaau

SEQ ID NO: 266265 - RNA, 32 nt, Homo Sapiens
ccaggaugccucgcagacgugccuucugccau

SEQ ID NO: 266266 - RNA, 32 nt, Homo Sapiens
augguauuggugagaagccauaaaaauaugaa

SEQ ID NO: 266267 - RNA, 32 nt, Homo Sapiens
gccagucgucuacacacccccuugguacccau

SEQ ID NO: 266268 - RNA, 32 nt, Homo Sapiens
accuugcccuuuacguaucugcucuuaggugc

SEQ ID NO: 266269 - RNA, 32 nt, Homo Sapiens
gacacagcuggguucugaagcuucugaguucu

SEQ ID NO: 266270 - RNA, 32 nt, Homo Sapiens
aggucauggggucagaggucuugggguucauu

SEQ ID NO: 266271 - RNA, 32 nt, Homo Sapiens
gauacaauccgacauauauaaaagaaacagau

SEQ ID NO: 266272 - RNA, 32 nt, Homo Sapiens
gccuggccaggagaggcccauccccagggcag

SEQ ID NO: 266273 - RNA, 32 nt, Homo Sapiens
uuucuccccacuucuucuggcuccucauuuuu

SEQ ID NO: 266274 - RNA, 32 nt, Homo Sapiens
uuuaaaaugcaaauugggaaugaagucaauuu

SEQ ID NO: 266275 - RNA, 32 nt, Homo Sapiens
aaguagcuccagaaugccaaguauucguguaa

SEQ ID NO: 266276 - RNA, 32 nt, Homo Sapiens
uugguuacugugcuuaauuuggaccaaauuuu

SEQ ID NO: 266277 - RNA, 32 nt, Homo Sapiens
cccgccugcgcgucugucucguccgcaucucc

SEQ ID NO: 266278 - RNA, 32 nt, Homo Sapiens
gaaacgacuacagagugaaauguuuuaccaua

SEQ ID NO: 266279 - RNA, 32 nt, Homo Sapiens
cccacccucggucauaucauugagaucaccgu

SEQ ID NO: 266280 - RNA, 32 nt, Homo Sapiens
gugagccgagaucgugcugcugcacuccagcc

SEQ ID NO: 266281 - RNA, 32 nt, Homo Sapiens
gccagggccgggcgcucugugcggacuggggc

SEQ ID NO: 266282 - RNA, 32 nt, Homo Sapiens
aauguauaauauucuuuuuuuuuuuuuuuuug

SEQ ID NO: 266283 - RNA, 32 nt, Homo Sapiens
ugccgagcgcccgcgccgccgcugccucuguc

SEQ ID NO: 266284 - RNA, 31 nt, Homo Sapiens
acagcggcaccgcccacaccccgcgcgcuca

SEQ ID NO: 266285 - RNA, 32 nt, Homo Sapiens
ucccccaucuucucugggucccucuaacaucu

SEQ ID NO: 266286 - RNA, 32 nt, Homo Sapiens
auccggacuggaugugaccuucugccuggaau

SEQ ID NO: 266287 - RNA, 32 nt, Homo Sapiens
gccaccccaucccugcaugccugauccccagu

SEQ ID NO: 266288 - RNA, 32 nt, Homo Sapiens
uaaaacugacuucuagauguagguuucauuau

SEQ ID NO: 266289 - RNA, 32 nt, Homo Sapiens
uuugaggcaauaaguauagacucaaaucuaua

SEQ ID NO: 266290 - RNA, 32 nt, Homo Sapiens
gcggggcgcaaccgcgagaaagaaacgcaggu

SEQ ID NO: 266291 - RNA, 32 nt, Homo Sapiens
ccggacucugggaucggcggcgcuaugaguuc

SEQ ID NO: 266292 - RNA, 32 nt, Homo Sapiens
gcaccccagccccucccaguccccucaacggu

SEQ ID NO: 266293 - RNA, 32 nt, Homo Sapiens
agagcacuaggauugugauacagaauuuguga

SEQ ID NO: 266294 - RNA, 32 nt, Homo Sapiens
aaguaucuugucaagacuguuacuuaagaauc

SEQ ID NO: 266295 - RNA, 32 nt, Homo Sapiens
uuaaaaauauauauuucagauuuucagugcua

SEQ ID NO: 266296 - RNA, 32 nt, Homo Sapiens
uaccauuauaugcaaaaguacuguauauuuuc

SEQ ID NO: 266297 - RNA, 32 nt, Homo Sapiens
ucugccuuuccaggacuagaaccgggaaccug

SEQ ID NO: 266298 - RNA, 32 nt, Homo Sapiens
uuuuauagucucauaguaguaguguugcuuuc

SEQ ID NO: 266299 - RNA, 32 nt, Homo Sapiens
cgccacagcauuccagccugggcgauggagug

SEQ ID NO: 266300 - RNA, 32 nt, Homo Sapiens
aggucggugauguguggagcggaaaagcaggu

SEQ ID NO: 266301 - RNA, 32 nt, Homo Sapiens
uugggcugugcggaucucuggagugagcucug

SEQ ID NO: 266302 - RNA, 32 nt, Homo Sapiens
cauucgagucuccauugcacaauggccagccc

SEQ ID NO: 266303 - RNA, 32 nt, Homo Sapiens
guauauauaucgaaaugucaaauuaauuuuau

SEQ ID NO: 266304 - RNA, 32 nt, Homo Sapiens
uaggaggucuguuagguguacauccugcagcu

SEQ ID NO: 266305 - RNA, 32 nt, Homo Sapiens
cgcggggugcugaaacagcccggggaaguaga

SEQ ID NO: 266306 - RNA, 32 nt, Homo Sapiens
ccuggaugacugaguucuggaauauucuguca

SEQ ID NO: 266307 - RNA, 32 nt, Homo Sapiens
ugaucuuuuuucugucuaguacuuguuuucau

SEQ ID NO: 266308 - RNA, 32 nt, Homo Sapiens
ggccgauuuuuccacaauuuaaaucccaguuc

SEQ ID NO: 266309 - RNA, 32 nt, Homo Sapiens
cacugcgcucgaggccggcaccuaccaugugc

SEQ ID NO: 266310 - RNA, 32 nt, Homo Sapiens
ccuccucuggccccccagguccacguccuuua

SEQ ID NO: 266311 - RNA, 32 nt, Homo Sapiens
ccuuuuuauagcauuaaauucauuuuuuaaaa

SEQ ID NO: 266312 - RNA, 32 nt, Homo Sapiens
uuuuuauaucuguggaguaauagaaagcucca

SEQ ID NO: 266313 - RNA, 30 nt, Homo Sapiens
acugagagaagaaucugcaguuuacugagg

SEQ ID NO: 266314 - RNA, 29 nt, Homo Sapiens
agaguggaauaugaguaagguugcugaau

SEQ ID NO: 266315 - RNA, 32 nt, Homo Sapiens
aaggacaguuugucauuaaggaguacugagac

SEQ ID NO: 266316 - RNA, 32 nt, Homo Sapiens
gguuacaccauguuggccaggcuggucucgaa

SEQ ID NO: 266317 - RNA, 32 nt, Homo Sapiens
ggcuauggguccuggggcgcggcuggcggcgc

SEQ ID NO: 266318 - RNA, 32 nt, Homo Sapiens
uacauagauaucaaaugcuuguccaaaguaau

SEQ ID NO: 266319 - RNA, 32 nt, Homo Sapiens
gagcaguguaaacggccuccuccggcgggaug

SEQ ID NO: 266320 - RNA, 32 nt, Homo Sapiens
ccugggcacguggucagccaaaagcugggggc

SEQ ID NO: 266321 - RNA, 30 nt, Homo Sapiens
gauguguauaaaagacgugaugugcaccac

SEQ ID NO: 266322 - RNA, 32 nt, Homo Sapiens
gcccgaccccgcgccccggcccgaagcucuga

SEQ ID NO: 266323 - RNA, 32 nt, Homo Sapiens
ccuuauaaccucuggagggacaguccagauac

SEQ ID NO: 266324 - RNA, 32 nt, Homo Sapiens
uccaguaccuacuacugguuuuggguugguug

SEQ ID NO: 266325 - RNA, 32 nt, Homo Sapiens
gccacacgggguuugucuguaagcugcagugu

SEQ ID NO: 266326 - RNA, 32 nt, Homo Sapiens
acacuguuuuggaugcauguugaaagacaugc

SEQ ID NO: 266327 - RNA, 30 nt, Homo Sapiens
acacuugucugugcuaugauguaugcagga

SEQ ID NO: 266328 - RNA, 32 nt, Homo Sapiens
ccuugcgucacaccggccccucccucgcugac

SEQ ID NO: 266329 - RNA, 32 nt, Homo Sapiens
gaaacauguacacaacuuguguuuccuuacuu

SEQ ID NO: 266330 - RNA, 32 nt, Homo Sapiens
uaaacguggggauaugucaucugugaaccaug

SEQ ID NO: 266331 - RNA, 32 nt, Homo Sapiens
agaagacuuccuuuccucuccucucgccuccu

SEQ ID NO: 266332 - RNA, 32 nt, Homo Sapiens
ugcacuuugagcccguggggugaggaguuggc

SEQ ID NO: 266333 - RNA, 32 nt, Homo Sapiens
auugucagugaacaguggucacauucaugaug

SEQ ID NO: 266334 - RNA, 32 nt, Homo Sapiens
cagggagacggggcuccuggggugguuaagga

SEQ ID NO: 266335 - RNA, 32 nt, Homo Sapiens
uacccauauauucccauuuagaagaacaugua

SEQ ID NO: 266336 - RNA, 32 nt, Homo Sapiens
ccagccccaucccacuucuguuucaaacuaaa

SEQ ID NO: 266337 - RNA, 32 nt, Homo Sapiens
agaguccacacagugcuguacugcacacacca

SEQ ID NO: 266338 - RNA, 32 nt, Homo Sapiens
ccgccgccgcgcccugcccccggggcagcuuu

SEQ ID NO: 266339 - RNA, 32 nt, Homo Sapiens
uguaccccugggcagugcuaccugggcacaca

SEQ ID NO: 266340 - RNA, 32 nt, Homo Sapiens
gaaacagugaggagcaacgugauucauuuuga

SEQ ID NO: 266341 - RNA, 32 nt, Homo Sapiens
aggcccgccggaggagcgcguccccagccuuc

SEQ ID NO: 266342 - RNA, 32 nt, Homo Sapiens
uuucuuacaucauaucugugcuacccuuucca

SEQ ID NO: 266343 - RNA, 32 nt, Homo Sapiens
guauguggaaggucggaggaguguuacaggag

SEQ ID NO: 266344 - RNA, 32 nt, Homo Sapiens
uuugaucugagacaugcugaugcuucaaggag

SEQ ID NO: 266345 - RNA, 32 nt, Homo Sapiens
ucgugcgcgcagcgcgccccacugcauccucg

SEQ ID NO: 266346 - RNA, 32 nt, Homo Sapiens
gccauuuguaaaaugggaauguuaacgugccu

SEQ ID NO: 266347 - RNA, 32 nt, Homo Sapiens
ccauagagugccaccagucaugccaaagagcu

SEQ ID NO: 266348 - RNA, 32 nt, Homo Sapiens
uugacguaggauguguacauggcucuccaggu

SEQ ID NO: 266349 - RNA, 32 nt, Homo Sapiens
gaaaaaaggucccugcccuucuggagaugaca

SEQ ID NO: 266350 - RNA, 32 nt, Homo Sapiens
ggcggcgcaccucguggcgagaaucgggagaa

SEQ ID NO: 266351 - RNA, 32 nt, Homo Sapiens
aucagggucucgugcccuccccaggcauauua

SEQ ID NO: 266352 - RNA, 32 nt, Homo Sapiens
ucucuggccuccuggggcccauucugcaugcc

SEQ ID NO: 266353 - RNA, 32 nt, Homo Sapiens
ucccuugggggucacacccauccccugguggg

SEQ ID NO: 266354 - RNA, 32 nt, Homo Sapiens
cuucugcuguuuuuuauuuuuaacauguucau

SEQ ID NO: 266355 - RNA, 32 nt, Homo Sapiens
acuaaaaugaagucuguaaauucuguuaauaa

SEQ ID NO: 266356 - RNA, 32 nt, Homo Sapiens
gaaccucaggagaggagggcuccuccuaaagg

SEQ ID NO: 266357 - RNA, 32 nt, Homo Sapiens
cagucugauaauaccaagucugacgcugaggu

SEQ ID NO: 266358 - RNA, 32 nt, Homo Sapiens
cagauggcaggccuugggcuacgucuggcuug

SEQ ID NO: 266359 - RNA, 32 nt, Homo Sapiens
caaggaagcaucugacaaaaccacugcuccug

SEQ ID NO: 266360 - RNA, 29 nt, Homo Sapiens
aauauaauaaaugcauaauguuaagcuuu

SEQ ID NO: 266361 - RNA, 32 nt, Homo Sapiens
ggaaucacagaaauaaacaaguagguuucagu

SEQ ID NO: 266362 - RNA, 32 nt, Homo Sapiens
aggugccucaggaugccagcuggagcuggcac

SEQ ID NO: 266363 - RNA, 32 nt, Homo Sapiens
cugcauugagaacugcauauguuucgcugaua

SEQ ID NO: 266364 - RNA, 32 nt, Homo Sapiens
acggagcugagcggcggggggcagugucgccu

SEQ ID NO: 266365 - RNA, 32 nt, Homo Sapiens
uugaaucaaaaauuuauuuauauuucaagaau

SEQ ID NO: 266366 - RNA, 32 nt, Homo Sapiens
uucuugaauggcaauguuuugcuuuugcucga

SEQ ID NO: 266367 - RNA, 32 nt, Homo Sapiens
aaucuugccuuaaucccucaccagcugaauac

SEQ ID NO: 266368 - RNA, 32 nt, Homo Sapiens
gcaccaguggagaaaauagacaccaugcuggu

SEQ ID NO: 266369 - RNA, 32 nt, Homo Sapiens
gcccuggaggcaacgugcugcaggcgcacucu

SEQ ID NO: 266370 - RNA, 32 nt, Homo Sapiens
cauggggaagcaggucccuacuaucaaccggg

SEQ ID NO: 266371 - RNA, 32 nt, Homo Sapiens
gcggcgacuugggcugggcggucgcccugccc

SEQ ID NO: 266372 - RNA, 32 nt, Homo Sapiens
uuugaagggggcgcccugcuccccucagauca

SEQ ID NO: 266373 - RNA, 32 nt, Homo Sapiens
uuugaggaacaguaaccaggaugugaaugauu

SEQ ID NO: 266374 - RNA, 32 nt, Homo Sapiens
cagucuggccugcgcucccgccgcccuggugc

SEQ ID NO: 266375 - RNA, 32 nt, Homo Sapiens
aguagaagcccauuugaguuuuacauuugauu

SEQ ID NO: 266376 - RNA, 32 nt, Homo Sapiens
cuuugcccuugcuuucugaaaaucagagucac

SEQ ID NO: 266377 - RNA, 32 nt, Homo Sapiens
guccugcgcccggcgcccggggugggcgaccu

SEQ ID NO: 266378 - RNA, 32 nt, Homo Sapiens
cucgcucaauuucucacagggcugcgcagguu

SEQ ID NO: 266379 - RNA, 32 nt, Homo Sapiens
ggagccggucgcgggggcuccgggcuguggga

SEQ ID NO: 266380 - RNA, 32 nt, Homo Sapiens
gcagauccgugugccaguggcuagggggugaa

SEQ ID NO: 266381 - RNA, 32 nt, Homo Sapiens
cgcguggugcaugugcagcaucucgucaugcu

SEQ ID NO: 266382 - RNA, 32 nt, Homo Sapiens
ugcaauggcuggggcuggggcuggggcugggg

SEQ ID NO: 266383 - RNA, 32 nt, Homo Sapiens
agcccucuuucuucagcccucccuuuacuccg

SEQ ID NO: 266384 - RNA, 32 nt, Homo Sapiens
guggccccccugacuucugcccgggguguuga

SEQ ID NO: 266385 - RNA, 32 nt, Homo Sapiens
aacacugaaauugagucugaccucaggagugu

SEQ ID NO: 266386 - RNA, 32 nt, Homo Sapiens
gaaaccucaaggagauucugggcaccggcgcu

SEQ ID NO: 266387 - RNA, 32 nt, Homo Sapiens
gcauccugagaagaaaugauuacuucugaaaa

SEQ ID NO: 266388 - RNA, 32 nt, Homo Sapiens
uaggagugaacaucuuaugaauguaccaaaua

SEQ ID NO: 266389 - RNA, 32 nt, Homo Sapiens
gaucgaaacuggguuauuuaauuggaagaaag

SEQ ID NO: 266390 - RNA, 32 nt, Homo Sapiens
aaccuccaaugcauguacagaaaccugugaua

SEQ ID NO: 266391 - RNA, 32 nt, Homo Sapiens
ucccaaggggagaugggacagugucaucuaaa

SEQ ID NO: 266392 - RNA, 32 nt, Homo Sapiens
ucaaauaaaugauacaucuuggagaagaggga

SEQ ID NO: 266393 - RNA, 32 nt, Homo Sapiens
agguccggugugcacagccggccucccagugu

SEQ ID NO: 266394 - RNA, 32 nt, Homo Sapiens
cagcacugggagaggaggacaucgucaggcug

SEQ ID NO: 266395 - RNA, 32 nt, Homo Sapiens
uccaugcuuuaaaggguuugcaagaaguuagg

SEQ ID NO: 266396 - RNA, 32 nt, Homo Sapiens
gcuuacuuaauuaagcacuuuguaaugacucu

SEQ ID NO: 266397 - RNA, 32 nt, Homo Sapiens
auacagaaacaucagcauuguauacacauauu

SEQ ID NO: 266398 - RNA, 32 nt, Homo Sapiens
guuguuuacagaugaauaguaucacaucauua

SEQ ID NO: 266399 - RNA, 32 nt, Homo Sapiens
ugaugcuuucgauguuguaacaaaauugggau

SEQ ID NO: 266400 - RNA, 32 nt, Homo Sapiens
uacuacacauucagcaaaggaaguggguauaa

SEQ ID NO: 266401 - RNA, 32 nt, Homo Sapiens
cccguggccuaccagcagauucugagccagca

SEQ ID NO: 266402 - RNA, 32 nt, Homo Sapiens
gcaccccucacagacacacggucagcauugcu

SEQ ID NO: 266403 - RNA, 32 nt, Homo Sapiens
ccucucacauccgauuucuccuccugccccag

SEQ ID NO: 266404 - RNA, 32 nt, Homo Sapiens
gggcacaugagcaaacaugauggccccuuuau

SEQ ID NO: 266405 - RNA, 32 nt, Homo Sapiens
cagggccuuucugugguuggaaaucaaaaucc

SEQ ID NO: 266406 - RNA, 32 nt, Homo Sapiens
guaauuuuuuaguuuguguucuuuuaauaaac

SEQ ID NO: 266407 - RNA, 32 nt, Homo Sapiens
uugaauuugugaaaguuuuuggcaaaacuaca

SEQ ID NO: 266408 - RNA, 32 nt, Homo Sapiens
ccaagcagccagcagccuagcagccagucagc

SEQ ID NO: 266409 - RNA, 32 nt, Homo Sapiens
gccagcacauguccgccaaaaccaucaacuua

SEQ ID NO: 266410 - RNA, 32 nt, Homo Sapiens
acugcggugugagcagagcggccacggggccc

SEQ ID NO: 266411 - RNA, 32 nt, Homo Sapiens
uucuauagccuauuuucuuuuauaaauuaaaa

SEQ ID NO: 266412 - RNA, 32 nt, Homo Sapiens
uaaggaaggggaggagugccagcuccauaugc

SEQ ID NO: 266413 - RNA, 31 nt, Homo Sapiens
ucccauucucuuagcccguccacuccccauc

SEQ ID NO: 266414 - RNA, 32 nt, Homo Sapiens
cgcucuguugcgcgcgcggugucaccuugggc

SEQ ID NO: 266415 - RNA, 32 nt, Homo Sapiens
ugauccuaguucaaugcuaggcaaauaauggc

SEQ ID NO: 266416 - RNA, 32 nt, Homo Sapiens
gugacuggcagcagagcaagugcagccagggu

SEQ ID NO: 266417 - RNA, 32 nt, Homo Sapiens
ucuuuaugcugauguugaguuuugggauuguu

SEQ ID NO: 266418 - RNA, 32 nt, Homo Sapiens
gucuccgcuggcagggggaggggagugugagg

SEQ ID NO: 266419 - RNA, 32 nt, Homo Sapiens
uuuugcacauucaacagaauuuauauguugua

SEQ ID NO: 266420 - RNA, 32 nt, Homo Sapiens
agccuugaggacaaggaccggcugggguucug

SEQ ID NO: 266421 - RNA, 32 nt, Homo Sapiens
ggcacgggcaaacacauaggcuugcgucuuaa

SEQ ID NO: 266422 - RNA, 30 nt, Homo Sapiens
gauggacgcugccugccgccggcccugcuc

SEQ ID NO: 266423 - RNA, 32 nt, Homo Sapiens
aggccugcccuucuccacugcccccuccugug

SEQ ID NO: 266424 - RNA, 32 nt, Homo Sapiens
gacauauaauuugugauauuuucuguaugucu

SEQ ID NO: 266425 - RNA, 32 nt, Homo Sapiens
uuuuuggggggagaagcaggggacuccgcagc

SEQ ID NO: 266426 - RNA, 32 nt, Homo Sapiens
agauuaugcuuugaaucagcaaaugagugaug

SEQ ID NO: 266427 - RNA, 32 nt, Homo Sapiens
cuagccaagugaggcgggaggcgacucggacc

SEQ ID NO: 266428 - RNA, 32 nt, Homo Sapiens
aucuaugcugaauaaacaguggaaugugacca

SEQ ID NO: 266429 - RNA, 32 nt, Homo Sapiens
ccuccccgcccgcgcgcaaaacgcacucgccc

SEQ ID NO: 266430 - RNA, 32 nt, Homo Sapiens
acuuuauguaucucauacgcugugauguggau

SEQ ID NO: 266431 - RNA, 32 nt, Homo Sapiens
uuagaaaaccccgcuuucuuucuggggccgug

SEQ ID NO: 266432 - RNA, 32 nt, Homo Sapiens
agacuaauugugaauaaaugauugaaugaaga

SEQ ID NO: 266433 - RNA, 32 nt, Homo Sapiens
gcacacacauaaugucauuucuccagggaaaa

SEQ ID NO: 266434 - RNA, 32 nt, Homo Sapiens
uuauuuuagaauugauauacacggaugacuua

SEQ ID NO: 266435 - RNA, 32 nt, Homo Sapiens
cggguguggugaugcugcuggugcugguggug

SEQ ID NO: 266436 - RNA, 32 nt, Homo Sapiens
cuucauccaucccacccggucgucgccgggga

SEQ ID NO: 266437 - RNA, 32 nt, Homo Sapiens
acuguaaauuugcauaacuggauguacuuaga

SEQ ID NO: 266438 - RNA, 32 nt, Homo Sapiens
cucgucaaggcacaaaaccaguucaugcuuaa

SEQ ID NO: 266439 - RNA, 32 nt, Homo Sapiens
uccggggcugagggaaggaggcggcggccaug

SEQ ID NO: 266440 - RNA, 32 nt, Homo Sapiens
cuacacacaacacugaccccugccagcuccac

SEQ ID NO: 266441 - RNA, 32 nt, Homo Sapiens
augguauucacauguauauacucugaagcaua

SEQ ID NO: 266442 - RNA, 32 nt, Homo Sapiens
cagaguccugguuaauaauguacaaugaccuu

SEQ ID NO: 266443 - RNA, 32 nt, Homo Sapiens
cuguguauuuugcaugacacauuuuaaaaaua

SEQ ID NO: 266444 - RNA, 32 nt, Homo Sapiens
gguauuuuaagugaugucauuugagcaggacu

SEQ ID NO: 266445 - RNA, 32 nt, Homo Sapiens
cagccagucaacaugaaugggacccuagaaac

SEQ ID NO: 266446 - RNA, 32 nt, Homo Sapiens
gccgcggcucucacuaucugucaggggagguu

SEQ ID NO: 266447 - RNA, 32 nt, Homo Sapiens
cgcgccugaggaggaggaggaggcgggggcgg

SEQ ID NO: 266448 - RNA, 32 nt, Homo Sapiens
gcuugagagggaagaagggguguuuagcauuu

SEQ ID NO: 266449 - RNA, 32 nt, Homo Sapiens
gaccuuauuuuugcuaucucuuuguuaggugu

SEQ ID NO: 266450 - RNA, 32 nt, Homo Sapiens
cugcccccgcggcuggagcaucgucugggacu

SEQ ID NO: 266451 - RNA, 32 nt, Homo Sapiens
gaacuugcuacuaccagcaccaugcccuacca

SEQ ID NO: 266452 - RNA, 32 nt, Homo Sapiens
aaguaucuuucagauagcaggcagggaagcaa

SEQ ID NO: 266453 - RNA, 32 nt, Homo Sapiens
cagcuauugguagcuuuuugauuuccccaaac

SEQ ID NO: 266454 - RNA, 32 nt, Homo Sapiens
ucuguucuuuugcagaaaggccuuuuccaccu

SEQ ID NO: 266455 - RNA, 32 nt, Homo Sapiens
ccccuucuauggaaacaacgcugccaaauccu

SEQ ID NO: 266456 - RNA, 32 nt, Homo Sapiens
uccuggaggaccagauugcucugccccaccuu

SEQ ID NO: 266457 - RNA, 32 nt, Homo Sapiens
ucugcucccagcuggagaaaacucugcuuuua

SEQ ID NO: 266458 - RNA, 27 nt, Homo Sapiens
agcagugccuucuucauccuuccuuac

SEQ ID NO: 266459 - RNA, 32 nt, Homo Sapiens
ucauacccaagcagagugccagguuuuacagc

SEQ ID NO: 266460 - RNA, 32 nt, Homo Sapiens
ccuggggaauggggaucaugggugcuggcauu

SEQ ID NO: 266461 - RNA, 32 nt, Homo Sapiens
uugaugaagaucuuaauuuuguuuuugguuua

SEQ ID NO: 266462 - RNA, 32 nt, Homo Sapiens
cuggagucuuuugccaucuggaucuuaguacc

SEQ ID NO: 266463 - RNA, 32 nt, Homo Sapiens
gaguucaacuggauuucuuuugacaauacugu

SEQ ID NO: 266464 - RNA, 32 nt, Homo Sapiens
ccccacgaccccugagcagagccccgaccugu

SEQ ID NO: 266465 - RNA, 32 nt, Homo Sapiens
ccccggagccccagccccaccaugacccucgg

SEQ ID NO: 266466 - RNA, 32 nt, Homo Sapiens
ucuggagcggguggagucagggaagagcugag

SEQ ID NO: 266467 - RNA, 32 nt, Homo Sapiens
ccaugcugccuccuuacauccuuuuuggaaca

SEQ ID NO: 266468 - RNA, 32 nt, Homo Sapiens
gaaugacuaagcuuugcuacuggggcugagga

SEQ ID NO: 266469 - RNA, 32 nt, Homo Sapiens
aucuugucaaggcaucuggagaguccaggaga

SEQ ID NO: 266470 - RNA, 32 nt, Homo Sapiens
aagccaaguccagucacccauucacaagaguc

SEQ ID NO: 266471 - RNA, 32 nt, Homo Sapiens
uggcucaaaaauuuguuuuaggucagagauuu

SEQ ID NO: 266472 - RNA, 32 nt, Homo Sapiens
acccaccugggcaucauuuggugcugauauaa

SEQ ID NO: 266473 - RNA, 32 nt, Homo Sapiens
ggagacguguggagcuguucgaggacucgcgg

SEQ ID NO: 266474 - RNA, 32 nt, Homo Sapiens
ugucuuugcaauauuucuuuucugauuuauuu

SEQ ID NO: 266475 - RNA, 32 nt, Homo Sapiens
gagccagccauguggugagcugggagagggca

SEQ ID NO: 266476 - RNA, 32 nt, Homo Sapiens
ccccuacaaagaugucuaacacuccaaugggg

SEQ ID NO: 266477 - RNA, 32 nt, Homo Sapiens
ccugcgcugccagcuggagccgggcggagcca

SEQ ID NO: 266478 - RNA, 32 nt, Homo Sapiens
caugaagaauacugcaagugaaacugcagaga

SEQ ID NO: 266479 - RNA, 32 nt, Homo Sapiens
acgggaccgagaccccucguagcgcauugcgg

SEQ ID NO: 266480 - RNA, 32 nt, Homo Sapiens
aaaagaaaaaauuuaaaaauaaaauugugcaa

SEQ ID NO: 266481 - RNA, 32 nt, Homo Sapiens
uuguacuucugcuccauagacaucaguauucu

SEQ ID NO: 266482 - RNA, 32 nt, Homo Sapiens
cagguggagcaccauggaaggcgacugucuga

SEQ ID NO: 266483 - RNA, 32 nt, Homo Sapiens
uggaugcuaacuugauacuaaccaucagauug

SEQ ID NO: 266484 - RNA, 32 nt, Homo Sapiens
aauuauguuucugaaugaaucagccaauuaau

SEQ ID NO: 266485 - RNA, 32 nt, Homo Sapiens
ccauuaaauggcauccugauggcuuaauacac

SEQ ID NO: 266486 - RNA, 32 nt, Homo Sapiens
guucuuaguccuguuugucuuaauuuuuauug

SEQ ID NO: 266487 - RNA, 32 nt, Homo Sapiens
uuugauuuuuaaaguaugcuguagcauuucuu

SEQ ID NO: 266488 - RNA, 32 nt, Homo Sapiens
auguagcauucugcuucaauauuaucucucua

SEQ ID NO: 266489 - RNA, 32 nt, Homo Sapiens
cgcgccuccucgcgccugcaccgugguuggaa

SEQ ID NO: 266490 - RNA, 32 nt, Homo Sapiens
cugcgccgcuccgaccccgccgggaugcagag

SEQ ID NO: 266491 - RNA, 32 nt, Homo Sapiens
uaccacgccuugaccuucccaagguuacucag

SEQ ID NO: 266492 - RNA, 32 nt, Homo Sapiens
guaaaaaauaaaugcaggagggcaggaggcau

SEQ ID NO: 266493 - RNA, 32 nt, Homo Sapiens
agauaaaacaauugauguuuuuguguguucaa

SEQ ID NO: 266494 - RNA, 32 nt, Homo Sapiens
ucaguguggaccucaugauuauagaggccaau

SEQ ID NO: 266495 - RNA, 32 nt, Homo Sapiens
cugagguguucaggaggugcugccuggagguc

SEQ ID NO: 266496 - RNA, 32 nt, Homo Sapiens
augaagagcuaaaacuugcugagagcuuacua

SEQ ID NO: 266497 - RNA, 32 nt, Homo Sapiens
gaguggcaggacaggacuuggaccucggaggg

SEQ ID NO: 266498 - RNA, 32 nt, Homo Sapiens
uauccgccugacgcggaagugggcaccguuuu

SEQ ID NO: 266499 - RNA, 32 nt, Homo Sapiens
gcaggggccuccccggcaacagccccaggggc

SEQ ID NO: 266500 - RNA, 32 nt, Homo Sapiens
guuguuucuaugauauaggagcuaggggaagg

SEQ ID NO: 266501 - RNA, 32 nt, Homo Sapiens
aacccaggggcacgcucugggccugggcugag

SEQ ID NO: 266502 - RNA, 32 nt, Homo Sapiens
acuuguacuguaaauaaagaaaucuuaacaau

SEQ ID NO: 266503 - RNA, 32 nt, Homo Sapiens
aucuauagaacaaaauaacaaauaaguauuuu

SEQ ID NO: 266504 - RNA, 32 nt, Homo Sapiens
uaagcaaauauguuauuuaaaauauugauccu

SEQ ID NO: 266505 - RNA, 27 nt, Homo Sapiens
uuuugguccuucuuuccucuuaacgua

SEQ ID NO: 266506 - RNA, 32 nt, Homo Sapiens
gggagcacacgacuuccuuggagccugggccu

SEQ ID NO: 266507 - RNA, 32 nt, Homo Sapiens
gauggagggucucaagcggagugggaggcccc

SEQ ID NO: 266508 - RNA, 30 nt, Homo Sapiens
auuuaauaagguggcaugcagauacauugg

SEQ ID NO: 266509 - RNA, 32 nt, Homo Sapiens
gcuggcuguuuccugcuuugccugcacauugu

SEQ ID NO: 266510 - RNA, 32 nt, Homo Sapiens
ccugaaucuuaccaacaaaacacuccugagga

SEQ ID NO: 266511 - RNA, 32 nt, Homo Sapiens
aucuuagggcuuuguucuucggcuccuaaaau

SEQ ID NO: 266512 - RNA, 32 nt, Homo Sapiens
gccuccaccuccccgguucaagugauucuccu

SEQ ID NO: 266513 - RNA, 32 nt, Homo Sapiens
gaagauguggcaaaguuuggaacuuccuagag

SEQ ID NO: 266514 - RNA, 32 nt, Homo Sapiens
gagagagauuuucaguggcucccuaagaaccc

SEQ ID NO: 266515 - RNA, 30 nt, Homo Sapiens
gggccugugcggcggccgccggagcgcuuu

SEQ ID NO: 266516 - RNA, 32 nt, Homo Sapiens
uuuuugaaaaauuuaacaauccagguucuucu

SEQ ID NO: 266517 - RNA, 32 nt, Homo Sapiens
auguaaaaacaaaacuuucugcuaacaaaaua

SEQ ID NO: 266518 - RNA, 32 nt, Homo Sapiens
gugguucaaagagaagcaggagggcaagggaa

SEQ ID NO: 266519 - RNA, 32 nt, Homo Sapiens
uuuucccaacuggcauauaguagggugcucaa

SEQ ID NO: 266520 - RNA, 32 nt, Homo Sapiens
ugguggcaucauguaacugcuaaccuuacagu

SEQ ID NO: 266521 - RNA, 32 nt, Homo Sapiens
caggcccagaaagcaggaauggcuugcuuaag

SEQ ID NO: 266522 - RNA, 32 nt, Homo Sapiens
ugucccuggugccuggcacagggaacagcaug

SEQ ID NO: 266523 - RNA, 32 nt, Homo Sapiens
uuuugcugccuugcuugaguugcuugugacug

SEQ ID NO: 266524 - RNA, 32 nt, Homo Sapiens
cugacucuccugugcucucucagcgccgagcu

SEQ ID NO: 266525 - RNA, 32 nt, Homo Sapiens
aacauacuuaggauauucugcacauuauggaa

SEQ ID NO: 266526 - RNA, 32 nt, Homo Sapiens
ggcgcccgaccucuccucccccgcgccggcuc

SEQ ID NO: 266527 - RNA, 32 nt, Homo Sapiens
agcgucagguguucagcuccccgggaccacug

SEQ ID NO: 266528 - RNA, 32 nt, Homo Sapiens
aaggggcgucugcggcucuccgccguccccag

SEQ ID NO: 266529 - RNA, 32 nt, Homo Sapiens
cuguacucuuucguuuuagaaucugguaaaug

SEQ ID NO: 266530 - RNA, 32 nt, Homo Sapiens
uccugcggggcuggcuggagcggccgcuccgg

SEQ ID NO: 266531 - RNA, 32 nt, Homo Sapiens
aacagcagaaaaggaaagaaacaaagaacaug

SEQ ID NO: 266532 - RNA, 32 nt, Homo Sapiens
uucccuuccccucccuugguaaaggcacagau

SEQ ID NO: 266533 - RNA, 32 nt, Homo Sapiens
caucagcccucuuuuccggugccggaacuauc

SEQ ID NO: 266534 - RNA, 32 nt, Homo Sapiens
aaagggaaagacuguuuagaaagaaugcauau

SEQ ID NO: 266535 - RNA, 32 nt, Homo Sapiens
ucucucccaaccccggacacccggcuucgacu

SEQ ID NO: 266536 - RNA, 32 nt, Homo Sapiens
gaaacaucugaaugccaagcgaagucugugag

SEQ ID NO: 266537 - RNA, 32 nt, Homo Sapiens
uauguuaguguacuucuugucuauccucaguu

SEQ ID NO: 266538 - RNA, 27 nt, Homo Sapiens
agcaauuaaaaauuauuuuugaacuga

SEQ ID NO: 266539 - RNA, 32 nt, Homo Sapiens
ucacccugaccucuccuuuucacucaggcccu

SEQ ID NO: 266540 - RNA, 32 nt, Homo Sapiens
gcacggucaccaucgccugggccugcccacag

SEQ ID NO: 266541 - RNA, 32 nt, Homo Sapiens
aaaaaaugccuggucagcaauucacugucaug

SEQ ID NO: 266542 - RNA, 32 nt, Homo Sapiens
cuggacugugggaagcugacucugccagggug

SEQ ID NO: 266543 - RNA, 32 nt, Homo Sapiens
agcucagugcaucccaggcagcucuuagugug

SEQ ID NO: 266544 - RNA, 32 nt, Homo Sapiens
ggcgcagugucuuuuuaaccacuuugaagacc

SEQ ID NO: 266545 - RNA, 32 nt, Homo Sapiens
ccuuuauuuccccuuaaaauuaguuuaacauc

SEQ ID NO: 266546 - RNA, 32 nt, Homo Sapiens
uuugcucugcugugcugugggcuggcacucga

SEQ ID NO: 266547 - RNA, 32 nt, Homo Sapiens
agcccaggauugauuucuuuccuaaagucccu

SEQ ID NO: 266548 - RNA, 32 nt, Homo Sapiens
cacacagaagggagaccccgccuagcauagau

SEQ ID NO: 266549 - RNA, 32 nt, Homo Sapiens
uuuaaaucuucagaaugauuuuauugaagagg

SEQ ID NO: 266550 - RNA, 32 nt, Homo Sapiens
ugagaauguauauuucauuuuauuuuugaaaa

SEQ ID NO: 266551 - RNA, 32 nt, Homo Sapiens
accugaaacugccgccacaugcacuccuccac

SEQ ID NO: 266552 - RNA, 32 nt, Homo Sapiens
gccucugccgcgaugauccccccugagcagcc

SEQ ID NO: 266553 - RNA, 32 nt, Homo Sapiens
aguccccacccccacaucuagcucagucucaa

SEQ ID NO: 266554 - RNA, 32 nt, Homo Sapiens
cucccgggacaccagcagauccacacccuggg

SEQ ID NO: 266555 - RNA, 32 nt, Homo Sapiens
ggcgaacgacccgacgcaagauggcgaguaaa

SEQ ID NO: 266556 - RNA, 32 nt, Homo Sapiens
ccgcccgggucgugcccgccguagacggauga

SEQ ID NO: 266557 - RNA, 32 nt, Homo Sapiens
acagggcugggagaagaaauagacuugcaccu

SEQ ID NO: 266558 - RNA, 32 nt, Homo Sapiens
uagaagacuucucauuggggagcaacuuuuuu

SEQ ID NO: 266559 - RNA, 32 nt, Homo Sapiens
acgguguagcagcuggggcauuuguguuacuc

SEQ ID NO: 266560 - RNA, 32 nt, Homo Sapiens
auuuuuaauuuauugucauacauggguuucau

SEQ ID NO: 266561 - RNA, 32 nt, Homo Sapiens
ugcugugucauaccaggccgccccagccucug

SEQ ID NO: 266562 - RNA, 32 nt, Homo Sapiens
ucuuggugucuggccuggucuugcagaaauca

SEQ ID NO: 266563 - RNA, 32 nt, Homo Sapiens
ccaugcgucggucgucgcccccgucguucccu

SEQ ID NO: 266564 - RNA, 32 nt, Homo Sapiens
uacaauagugaaauauuugaguuguucggaac

SEQ ID NO: 266565 - RNA, 32 nt, Homo Sapiens
cuuacccugccuuugcccuuucaggaaggguc

SEQ ID NO: 266566 - RNA, 32 nt, Homo Sapiens
gguuucaccauguuggccaggcuggucucgau

SEQ ID NO: 266567 - RNA, 32 nt, Homo Sapiens
uaaugucauuggaaacaaaagcuugaaagaaa

SEQ ID NO: 266568 - RNA, 32 nt, Homo Sapiens
agcagcgaugcgacccuccgggacggccgggg

SEQ ID NO: 266569 - RNA, 32 nt, Homo Sapiens
uguccuucccacuucagcccuccggagagacu

SEQ ID NO: 266570 - RNA, 32 nt, Homo Sapiens
ccgaggaggucuuugugcccugagcagggacc

SEQ ID NO: 266571 - RNA, 32 nt, Homo Sapiens
agcaacaacaguaacaaucaaacuacugccca

SEQ ID NO: 266572 - RNA, 32 nt, Homo Sapiens
ccaucucaaauguauuugguuauauuauauaa

SEQ ID NO: 266573 - RNA, 32 nt, Homo Sapiens
ucucuguuuacccucccuguccccugagguua

SEQ ID NO: 266574 - RNA, 32 nt, Homo Sapiens
ucguccuccuguccccucuccucccagccacc

SEQ ID NO: 266575 - RNA, 32 nt, Homo Sapiens
acggccagaaccuggggugguggggaggagaa

SEQ ID NO: 266576 - RNA, 32 nt, Homo Sapiens
auuuuagaacaaagcuaacaaauggcuaguuu

SEQ ID NO: 266577 - RNA, 32 nt, Homo Sapiens
uucaggcugaucuggaacucuggcuggauaau

SEQ ID NO: 266578 - RNA, 32 nt, Homo Sapiens
cuuuccuggagcccuccugccuaccccguacc

SEQ ID NO: 266579 - RNA, 32 nt, Homo Sapiens
cuccacucccucccuuucucucuucugcaggc

SEQ ID NO: 266580 - RNA, 32 nt, Homo Sapiens
ccugcuguccuugcggggcacacugauaugac

SEQ ID NO: 266581 - RNA, 32 nt, Homo Sapiens
gccucuuccuucccuucaauaguggguuaaac

SEQ ID NO: 266582 - RNA, 32 nt, Homo Sapiens
agguggagguuacagugagcugagagugcccc

SEQ ID NO: 266583 - RNA, 32 nt, Homo Sapiens
aacaaaauuuaaaacaacaaaaaguuguuugc

SEQ ID NO: 266584 - RNA, 32 nt, Homo Sapiens
cacauuccauuugguagcaauaugcggucuga

SEQ ID NO: 266585 - RNA, 32 nt, Homo Sapiens
augugcaauuuaauauagaaagauuucugccu

SEQ ID NO: 266586 - RNA, 32 nt, Homo Sapiens
uugcuggucuguuugcagaugcauuaucagug

SEQ ID NO: 266587 - RNA, 32 nt, Homo Sapiens
uugacuauguugaaccauuuugcaucccagaa

SEQ ID NO: 266588 - RNA, 32 nt, Homo Sapiens
accauugaaaauaucucugugucuguccacca

SEQ ID NO: 266589 - RNA, 32 nt, Homo Sapiens
gcucuaacuuaaacagaagaacagcuguucac

SEQ ID NO: 266590 - RNA, 32 nt, Homo Sapiens
ucuacuaaaaauacgaaacuuagcugggcgug

SEQ ID NO: 266591 - RNA, 32 nt, Homo Sapiens
auuugggaaaggaaauuuuguaugaccacugu

SEQ ID NO: 266592 - RNA, 32 nt, Homo Sapiens
uugucgugaggagcuccgcgauguccucucaa

SEQ ID NO: 266593 - RNA, 32 nt, Homo Sapiens
gccccgcccgucucugcucugcucagcugcgc

SEQ ID NO: 266594 - RNA, 32 nt, Homo Sapiens
caauccggacucuuccucucacaucaccccca

SEQ ID NO: 266595 - RNA, 32 nt, Homo Sapiens
ggccaccugagaguucucucuccuggcaggag

SEQ ID NO: 266596 - RNA, 32 nt, Homo Sapiens
gcagaaaggacauucccccuccccuccccagg

SEQ ID NO: 266597 - RNA, 32 nt, Homo Sapiens
gggccgcaccggcuuuccugcugcagaucugg

SEQ ID NO: 266598 - RNA, 32 nt, Homo Sapiens
ccugagcgcagcgccuccacccugcccugcug

SEQ ID NO: 266599 - RNA, 32 nt, Homo Sapiens
ggcuggucucaaaccccugaccucaggcaauc

SEQ ID NO: 266600 - RNA, 32 nt, Homo Sapiens
cgggcgugguggcucucgccuguaaucucagc

SEQ ID NO: 266601 - RNA, 32 nt, Homo Sapiens
ucuaauacaagcauauguuagaauuaaaguuc

SEQ ID NO: 266602 - RNA, 32 nt, Homo Sapiens
uguuaguacagaccagaugcuuucuuggcagg

SEQ ID NO: 266603 - RNA, 32 nt, Homo Sapiens
ucucaucacccccacucuacagauggggaaac

SEQ ID NO: 266604 - RNA, 32 nt, Homo Sapiens
augugaagccccagccccacccucugcccuuc

SEQ ID NO: 266605 - RNA, 32 nt, Homo Sapiens
cgcgcgggccgggugcgcgccacgcucuuccu

SEQ ID NO: 266606 - RNA, 32 nt, Homo Sapiens
gaggacaaccucagccagaaauuuagauaggc

SEQ ID NO: 266607 - RNA, 32 nt, Homo Sapiens
aauggaugcaagaguagaagcugauccucgag

SEQ ID NO: 266608 - RNA, 32 nt, Homo Sapiens
cacccugcugcugcuccucccucuucccggag

SEQ ID NO: 266609 - RNA, 32 nt, Homo Sapiens
augaacaauauaaagcacuuaaaggaagagga

SEQ ID NO: 266610 - RNA, 32 nt, Homo Sapiens
accaaacgucccgcgccuuccaggccgcacuc

SEQ ID NO: 266611 - RNA, 32 nt, Homo Sapiens
cugcauugcuggaacugugucaagagagcaga

SEQ ID NO: 266612 - RNA, 32 nt, Homo Sapiens
cuaaaugaaauucuuaaaaucaccgauggaac

SEQ ID NO: 266613 - RNA, 32 nt, Homo Sapiens
uuuucaggguuuuggucugaaaacggaucuua

SEQ ID NO: 266614 - RNA, 32 nt, Homo Sapiens
acagcguggccuuggcagcugccccgaggaag

SEQ ID NO: 266615 - RNA, 32 nt, Homo Sapiens
gaaccggccgagcggcgcgcgcggaggugucc

SEQ ID NO: 266616 - RNA, 32 nt, Homo Sapiens
gcgaaaauguuggaccacuugcuuuaccaguu

SEQ ID NO: 266617 - RNA, 32 nt, Homo Sapiens
agucauauuaaaccuuuggaugggguauguaa

SEQ ID NO: 266618 - RNA, 30 nt, Homo Sapiens
aaccugggagguggagguugcaguaagcca

SEQ ID NO: 266619 - RNA, 32 nt, Homo Sapiens
uacagaaaccuccagcagucuuugaaacaucu

SEQ ID NO: 266620 - RNA, 32 nt, Homo Sapiens
agggcauacugcuguuauugucagugaggggu

SEQ ID NO: 266621 - RNA, 32 nt, Homo Sapiens
uguuaauucuucauucuuguaguauuucauca

SEQ ID NO: 266622 - RNA, 32 nt, Homo Sapiens
aaagaaccaaagguguaauguuuuguugagag

SEQ ID NO: 266623 - RNA, 32 nt, Homo Sapiens
gcuccuaccugggggcagaacuccuaccugaa

SEQ ID NO: 266624 - RNA, 32 nt, Homo Sapiens
uugggaagcuuaccuuuuuuuuuuuuuacuua

SEQ ID NO: 266625 - RNA, 32 nt, Homo Sapiens
caacuugcagcugcccaccucacccucagcuc

SEQ ID NO: 266626 - RNA, 32 nt, Homo Sapiens
cccgcuccuguuguuuuccgccggcaggagua

SEQ ID NO: 266627 - RNA, 32 nt, Homo Sapiens
gaggccuccucccagccaguguccagccuaag

SEQ ID NO: 266628 - RNA, 32 nt, Homo Sapiens
ugcucagaccucuggaccugacaggagacgcc

SEQ ID NO: 266629 - RNA, 32 nt, Homo Sapiens
ucaaaguaaaauugagaaaucuuuaaguuuuu

SEQ ID NO: 266630 - RNA, 32 nt, Homo Sapiens
cacagccaccgccugugccugccccucucugg

SEQ ID NO: 266631 - RNA, 32 nt, Homo Sapiens
ugaaauuucuccacaagaaauacucucagccu

SEQ ID NO: 266632 - RNA, 32 nt, Homo Sapiens
cuccguguuuggucuuuuuuuuccccugugug

SEQ ID NO: 266633 - RNA, 32 nt, Homo Sapiens
ggccaggcauaguggguuaucccuguaauucc

SEQ ID NO: 266634 - RNA, 32 nt, Homo Sapiens
acuccgcaugcgcuccucuccuaagguacaaa

SEQ ID NO: 266635 - RNA, 32 nt, Homo Sapiens
uuaguuuuguuuucuaauuauucaucauuacu

SEQ ID NO: 266636 - RNA, 32 nt, Homo Sapiens
agagcagcgucccagcccuguuuuccaggacu

SEQ ID NO: 266637 - RNA, 32 nt, Homo Sapiens
acaucuuuugcgccacuauuaaggcaccuguc

SEQ ID NO: 266638 - RNA, 32 nt, Homo Sapiens
cauugcucuaaaggacugucugagguaauuca

SEQ ID NO: 266639 - RNA, 32 nt, Homo Sapiens
acuuggacaucugagcugucacugccgaaaac

SEQ ID NO: 266640 - RNA, 32 nt, Homo Sapiens
uagcacugcauaauuaauguguuuuuaauuaa

SEQ ID NO: 266641 - RNA, 32 nt, Homo Sapiens
ggagaagcggcgccuccuccccgccaggaccc

SEQ ID NO: 266642 - RNA, 32 nt, Homo Sapiens
aguuaagauugugccacugcacuccagccugg

SEQ ID NO: 266643 - RNA, 32 nt, Homo Sapiens
agacugaacuguaucugccucuauuuccaaaa

SEQ ID NO: 266644 - RNA, 32 nt, Homo Sapiens
cucaaccauggcaagaaccagagguccaaaga

SEQ ID NO: 266645 - RNA, 32 nt, Homo Sapiens
cucaggccugucagcagcuccuguggacauug

SEQ ID NO: 266646 - RNA, 32 nt, Homo Sapiens
gcugaaaagggagagaccuagaaggggcuugg

SEQ ID NO: 266647 - RNA, 32 nt, Homo Sapiens
uuaagcccgggcggccggcgggaccggcggag

SEQ ID NO: 266648 - RNA, 31 nt, Homo Sapiens
guuuuggagcuagagaggcaggcaagcaguu

SEQ ID NO: 266649 - RNA, 32 nt, Homo Sapiens
gcauggcuguguuucucuucaguguccaaauc

SEQ ID NO: 266650 - RNA, 32 nt, Homo Sapiens
ggccagcacucggggaccucccugccccugcc

SEQ ID NO: 266651 - RNA, 32 nt, Homo Sapiens
aaagcggugcacucgggcuccacgcgcgcccu

SEQ ID NO: 266652 - RNA, 32 nt, Homo Sapiens
gccccugcccaccccacuuccacauggcccuc

SEQ ID NO: 266653 - RNA, 32 nt, Homo Sapiens
uuuucaaauauguucauauauauugacaauau

SEQ ID NO: 266654 - RNA, 32 nt, Homo Sapiens
cguuccugccguaaauacguggcacagcacug

SEQ ID NO: 266655 - RNA, 32 nt, Homo Sapiens
uggaaaggaaaguuaaguagaaacucaugaag

SEQ ID NO: 266656 - RNA, 32 nt, Homo Sapiens
acauucaguggccuugugcaaauacgauaugu

SEQ ID NO: 266657 - RNA, 32 nt, Homo Sapiens
augggauguaaacaauguaaaguaaaacacuc

SEQ ID NO: 266658 - RNA, 32 nt, Homo Sapiens
ggcucugagcccggcgugggcaggcagcggag

SEQ ID NO: 266659 - RNA, 32 nt, Homo Sapiens
gcacuggaugcugcugcugugcucucuguggc

SEQ ID NO: 266660 - RNA, 32 nt, Homo Sapiens
gcccggggcugcgacggcugcagagcgagcug

SEQ ID NO: 266661 - RNA, 32 nt, Homo Sapiens
gaagaaaaacaucaguugaaagauuugccagg

SEQ ID NO: 266662 - RNA, 32 nt, Homo Sapiens
uguuagaaaaauuuuauggacugacauauuug

SEQ ID NO: 266663 - RNA, 32 nt, Homo Sapiens
gauguaugcccaaagcgguagaauuaaagaag

SEQ ID NO: 266664 - RNA, 32 nt, Homo Sapiens
auuggcauuaaauuauuguuuugaucuuaaua

SEQ ID NO: 266665 - RNA, 32 nt, Homo Sapiens
cugccgccggcgauguaacucggggaggcagc

SEQ ID NO: 266666 - RNA, 32 nt, Homo Sapiens
uuugaaucuucagauccaccacaugcugauca

SEQ ID NO: 266667 - RNA, 32 nt, Homo Sapiens
auaauuagcaguuuagaauggaggaagaacaa

SEQ ID NO: 266668 - RNA, 32 nt, Homo Sapiens
cgcagugaacagaggcgggccugccgacugac

SEQ ID NO: 266669 - RNA, 32 nt, Homo Sapiens
cuuaaaggguugugugagaauaaaauacaaug

SEQ ID NO: 266670 - RNA, 32 nt, Homo Sapiens
cggaacgcgaggggcugcugggguguuugucg

SEQ ID NO: 266671 - RNA, 32 nt, Homo Sapiens
agucuugaacuccagccccgcacauccacgcg

SEQ ID NO: 266672 - RNA, 32 nt, Homo Sapiens
aguguguuaacauucagaaaauccaaauauuc

SEQ ID NO: 266673 - RNA, 32 nt, Homo Sapiens
ggccugccuaagcagagccccuuccuguacgc

SEQ ID NO: 266674 - RNA, 32 nt, Homo Sapiens
uucuucaguggucuagagccauaucugaaaua

SEQ ID NO: 266675 - RNA, 31 nt, Homo Sapiens
ggauaauucuauacauaaaaguuccuacuug

SEQ ID NO: 266676 - RNA, 32 nt, Homo Sapiens
cgcgguuuuuauuuugcuuaguuuucuuuuua

SEQ ID NO: 266677 - RNA, 32 nt, Homo Sapiens
uucacguggaccguguuuaauuugguugcugg

SEQ ID NO: 266678 - RNA, 31 nt, Homo Sapiens
uaaucccucaauggcugcuuugaacuuacuc

SEQ ID NO: 266679 - RNA, 32 nt, Homo Sapiens
aaaugaugcacaaaauaaauggcuguugaaau

SEQ ID NO: 266680 - RNA, 32 nt, Homo Sapiens
uacaaaagauuuuuaaaaauuagccagguggu

SEQ ID NO: 266681 - RNA, 32 nt, Homo Sapiens
uuauuacagauuuaugauauuccuuuucuauu

SEQ ID NO: 266682 - RNA, 31 nt, Homo Sapiens
ccacguccugaauguaccguggggcgggggc

SEQ ID NO: 266683 - RNA, 32 nt, Homo Sapiens
caucagaugacgaugccuggaaguagcauaua

SEQ ID NO: 266684 - RNA, 32 nt, Homo Sapiens
uaacuauugggugauccagauuugggcacugu

SEQ ID NO: 266685 - RNA, 32 nt, Homo Sapiens
agguucuaucaugggugacaccaggagagagg

SEQ ID NO: 266686 - RNA, 32 nt, Homo Sapiens
uggagcccgcagaagccguccacagcccugcc

SEQ ID NO: 266687 - RNA, 32 nt, Homo Sapiens
aaacauugucuccauccuccccgucauuagug

SEQ ID NO: 266688 - RNA, 32 nt, Homo Sapiens
gcacauuuugauuuuuuuuuuaaacaaacauu

SEQ ID NO: 266689 - RNA, 32 nt, Homo Sapiens
gcugcccacucuggggacccgcugggggcugg

SEQ ID NO: 266690 - RNA, 32 nt, Homo Sapiens
ucuuugcucugucccuggggucggaucucacc

SEQ ID NO: 266691 - RNA, 32 nt, Homo Sapiens
ugggaaggcacuccucuuggcauuugcuuagu

SEQ ID NO: 266692 - RNA, 32 nt, Homo Sapiens
gcaugcacagcugguccagggcacgguguuuu

SEQ ID NO: 266693 - RNA, 32 nt, Homo Sapiens
ucagucccauucucaucaaugaccucgucucc

SEQ ID NO: 266694 - RNA, 32 nt, Homo Sapiens
acguugccgucgccgccgcccgggacagcccg

SEQ ID NO: 266695 - RNA, 32 nt, Homo Sapiens
auccaugugucugccuccauaugcaucugggc

SEQ ID NO: 266696 - RNA, 32 nt, Homo Sapiens
ggcgacgcugcuguguguggucucagaggcuc

SEQ ID NO: 266697 - RNA, 32 nt, Homo Sapiens
uggucggagggaagagcucgccggggcgccgg

SEQ ID NO: 266698 - RNA, 32 nt, Homo Sapiens
uaaaaaaguauuuacguaaguguuugauucua

SEQ ID NO: 266699 - RNA, 32 nt, Homo Sapiens
cauuaguagugggauuuggcuaugguccagac

SEQ ID NO: 266700 - RNA, 32 nt, Homo Sapiens
ggcacccaucaccacacccagcuaauuuucgu

SEQ ID NO: 266701 - RNA, 32 nt, Homo Sapiens
uguuuauaugaaguucuucccaguuugugaau

SEQ ID NO: 266702 - RNA, 32 nt, Homo Sapiens
agguuguuucaguuguauuggaugcccuaucu

SEQ ID NO: 266703 - RNA, 32 nt, Homo Sapiens
cggguuuucagcgcuccgaaagccggcgcuug

SEQ ID NO: 266704 - RNA, 32 nt, Homo Sapiens
auggguugccgggcgagauguaaccggcugcu

SEQ ID NO: 266705 - RNA, 31 nt, Homo Sapiens
acacgcuuuugugauggagugcuguuuuguu

SEQ ID NO: 266706 - RNA, 32 nt, Homo Sapiens
gugaggugguggccaugacacuggagaccaag

SEQ ID NO: 266707 - RNA, 32 nt, Homo Sapiens
agucaaggagcuggucacaaaggcagaaaugc

SEQ ID NO: 266708 - RNA, 32 nt, Homo Sapiens
gugaggcggugacggcgguucggaagucgucu

SEQ ID NO: 266709 - RNA, 32 nt, Homo Sapiens
uguuguaauuuugucuucgccagauagauuag

SEQ ID NO: 266710 - RNA, 32 nt, Homo Sapiens
auaguaaauccucuccucucccuucuguaggu

SEQ ID NO: 266711 - RNA, 32 nt, Homo Sapiens
gcuggaugggguuuucuguccauccugugcag

SEQ ID NO: 266712 - RNA, 32 nt, Homo Sapiens
gcucugauccucuugacccuucugggaauguu

SEQ ID NO: 266713 - RNA, 32 nt, Homo Sapiens
uuacuuugucggccccauccacagccgcugcg

SEQ ID NO: 266714 - RNA, 32 nt, Homo Sapiens
gccccccaagccagccagacccagacauuaga

SEQ ID NO: 266715 - RNA, 32 nt, Homo Sapiens
uacucucccucauggcgucucccccaccuuuc

SEQ ID NO: 266716 - RNA, 32 nt, Homo Sapiens
cagacauugcuuaaaccuguuccaauuuuaac

SEQ ID NO: 266717 - RNA, 32 nt, Homo Sapiens
ucuggauccagccaugccugaggucuaccccu

SEQ ID NO: 266718 - RNA, 32 nt, Homo Sapiens
cgugcauuuguuacuacugaguuucuuaauau

SEQ ID NO: 266719 - RNA, 32 nt, Homo Sapiens
ugggaugaggaggaauugggggugggggucuu

SEQ ID NO: 266720 - RNA, 32 nt, Homo Sapiens
gccagccugucuguugugcagacgccuccucu

SEQ ID NO: 266721 - RNA, 32 nt, Homo Sapiens
gacggccagcgccagcccuguccccaacaggu

SEQ ID NO: 266722 - RNA, 32 nt, Homo Sapiens
agagaggaggaagagggagucugagcaugagc

SEQ ID NO: 266723 - RNA, 32 nt, Homo Sapiens
gaaagcuugaaaagcagcuuugaaaaacaaag

SEQ ID NO: 266724 - RNA, 32 nt, Homo Sapiens
ugaguaaaguguaagugucaaaacuuuacaau

SEQ ID NO: 266725 - RNA, 32 nt, Homo Sapiens
ggcuggucacguggcuggcccgcggcggugcg

SEQ ID NO: 266726 - RNA, 32 nt, Homo Sapiens
agacaaccacacgcuguuggggagagaaggau

SEQ ID NO: 266727 - RNA, 32 nt, Homo Sapiens
cuguuucugacgcagucugugcucucacaugg

SEQ ID NO: 266728 - RNA, 32 nt, Homo Sapiens
auguauuaaaauuuuuugaugucagccuugca

SEQ ID NO: 266729 - RNA, 32 nt, Homo Sapiens
gcugcuggagccuggugaagugugggugguga

SEQ ID NO: 266730 - RNA, 32 nt, Homo Sapiens
ccauuaaaaaucaacgcuuucucugauucugu

SEQ ID NO: 266731 - RNA, 32 nt, Homo Sapiens
ccagcuugccgagcggccgccgcugccguguc

SEQ ID NO: 266732 - RNA, 32 nt, Homo Sapiens
aacauugaaugcauguuaaauaaaaauggaau

SEQ ID NO: 266733 - RNA, 32 nt, Homo Sapiens
aggggagucugcuugucuuagauguugguggu

SEQ ID NO: 266734 - RNA, 32 nt, Homo Sapiens
cugggccuagcugucccacgggccaccacuac

SEQ ID NO: 266735 - RNA, 32 nt, Homo Sapiens
aaauauuuguacucagcuauguuaacauguac

SEQ ID NO: 266736 - RNA, 32 nt, Homo Sapiens
ggagggagguggccauggagggggcacuggac

SEQ ID NO: 266737 - RNA, 32 nt, Homo Sapiens
aucagcccugucaccaccugguccuucaugaa

SEQ ID NO: 266738 - RNA, 32 nt, Homo Sapiens
aaaguuuacugauacgguuucaguuaacacau

SEQ ID NO: 266739 - RNA, 32 nt, Homo Sapiens
cucaagucauucuccuaccucgggcucccaaa

SEQ ID NO: 266740 - RNA, 32 nt, Homo Sapiens
auguccauaaauguauacaaucugacccuguu

SEQ ID NO: 266741 - RNA, 32 nt, Homo Sapiens
acucgccgccgccgcucucugcgcacucggag

SEQ ID NO: 266742 - RNA, 32 nt, Homo Sapiens
ugcugucucccucucccacccgugucugcugu

SEQ ID NO: 266743 - RNA, 32 nt, Homo Sapiens
ucccaguccuccugggauccugcuggcuuggg

SEQ ID NO: 266744 - RNA, 32 nt, Homo Sapiens
cuaaaguaucacggaagauacuaugguucgug

SEQ ID NO: 266745 - RNA, 32 nt, Homo Sapiens
ggcuuaguaacgccguggacugcagcgacaau

SEQ ID NO: 266746 - RNA, 32 nt, Homo Sapiens
aucaccugaauaucuuaccuccccucaagagu

SEQ ID NO: 266747 - RNA, 32 nt, Homo Sapiens
ugacaacuuagaaaaacacacacaguggggaa

SEQ ID NO: 266748 - RNA, 32 nt, Homo Sapiens
ugcuuggagucucaggccccagcgucuggcac

SEQ ID NO: 266749 - RNA, 32 nt, Homo Sapiens
gacaguugaaccugguggcaguugcagaugag

SEQ ID NO: 266750 - RNA, 32 nt, Homo Sapiens
cugaggccaugcccuccccagggaccgucugc

SEQ ID NO: 266751 - RNA, 32 nt, Homo Sapiens
acuaaguuuauuagauuuacuguaguauaaga

SEQ ID NO: 266752 - RNA, 32 nt, Homo Sapiens
uggagagggccggggucggggagguugggggg

SEQ ID NO: 266753 - RNA, 32 nt, Homo Sapiens
uuuuguguaauguguuaagugcuguucauuua

SEQ ID NO: 266754 - RNA, 32 nt, Homo Sapiens
ugggcugguggugcucgcugcugcugcugaga

SEQ ID NO: 266755 - RNA, 32 nt, Homo Sapiens
cuaaaaaugcaaagagggaaaaauuauuucac

SEQ ID NO: 266756 - RNA, 32 nt, Homo Sapiens
uuuuucaagagugagaauaaaaagggaggaug

SEQ ID NO: 266757 - RNA, 32 nt, Homo Sapiens
ccaacagagucguggugcuggaugcugugucg

SEQ ID NO: 266758 - RNA, 32 nt, Homo Sapiens
cggugccgggccgggagggaagagggaggcug

SEQ ID NO: 266759 - RNA, 32 nt, Homo Sapiens
uucgaacgcagaugggguuuggagcggcucuu

SEQ ID NO: 266760 - RNA, 32 nt, Homo Sapiens
uguugcccaggcuagucuggaacuccugagcu

SEQ ID NO: 266761 - RNA, 32 nt, Homo Sapiens
gguauuuguauauuuguuugcauuccaauuuu

SEQ ID NO: 266762 - RNA, 32 nt, Homo Sapiens
gaaaugggagcacaguauugggaaaugggagc

SEQ ID NO: 266763 - RNA, 32 nt, Homo Sapiens
uugaguaaauuaaaugagcauuaucucuuccc

SEQ ID NO: 266764 - RNA, 32 nt, Homo Sapiens
cugcguccucucggugagcugugcagugccgg

SEQ ID NO: 266765 - RNA, 32 nt, Homo Sapiens
ggcgagugcaugugcuacugcugcuacaggcc

SEQ ID NO: 266766 - RNA, 32 nt, Homo Sapiens
uuguacagaaaagaaauccagagaaucaaaug

SEQ ID NO: 266767 - RNA, 32 nt, Homo Sapiens
uucaccuaucccauuuuagcaucuacuuguuu

SEQ ID NO: 266768 - RNA, 32 nt, Homo Sapiens
cacugcacuccaggccugggugacagugcgag

SEQ ID NO: 266769 - RNA, 32 nt, Homo Sapiens
agcccccacuuuccuacaaaauggagggagcc

SEQ ID NO: 266770 - RNA, 32 nt, Homo Sapiens
gaaagguagaagagaagaaguucccauuuacu

SEQ ID NO: 266771 - RNA, 32 nt, Homo Sapiens
acuagccuggcuaauacagugaaaccccaucu

SEQ ID NO: 266772 - RNA, 32 nt, Homo Sapiens
accucuucauucuccuuuucaguauaaccucc

SEQ ID NO: 266773 - RNA, 32 nt, Homo Sapiens
ccucaaaaaauauuagcuauuaucauuauaaa

SEQ ID NO: 266774 - RNA, 32 nt, Homo Sapiens
ucggaggcauuugugaggaggcgcgaaucaag

SEQ ID NO: 266775 - RNA, 32 nt, Homo Sapiens
ugcuccuucggggugcggugugcggagaaggc

SEQ ID NO: 266776 - RNA, 32 nt, Homo Sapiens
uuuucuucagcgcccaggaugcagccggcuaa

SEQ ID NO: 266777 - RNA, 32 nt, Homo Sapiens
ggauucugcauuaguggggcugagagaugugg

SEQ ID NO: 266778 - RNA, 32 nt, Homo Sapiens
cuggcuagggcguuugaccgccggcggugaag

SEQ ID NO: 266779 - RNA, 32 nt, Homo Sapiens
cggaggccgcggugugcggggcgacggcgagg

SEQ ID NO: 266780 - RNA, 32 nt, Homo Sapiens
auuuauagaaauagaaaaguuguaacuuuaaa

SEQ ID NO: 266781 - RNA, 32 nt, Homo Sapiens
aauucuuguaauauguugauucaguguuuugu

SEQ ID NO: 266782 - RNA, 32 nt, Homo Sapiens
acaaaacgaaacaaaauccuucauauacaaaa

SEQ ID NO: 266783 - RNA, 32 nt, Homo Sapiens
aguuguucuguugacuuuugcaugugaaguaa

SEQ ID NO: 266784 - RNA, 32 nt, Homo Sapiens
uuauuacuuuuguuuuuaauuuuaaccauagu

SEQ ID NO: 266785 - RNA, 32 nt, Homo Sapiens
cuaucaguuuauauuucucuaugauuugaguu

SEQ ID NO: 266786 - RNA, 32 nt, Homo Sapiens
uccgugcuacaucuucacaguuccucugaaua

SEQ ID NO: 266787 - RNA, 32 nt, Homo Sapiens
ugagugacggugacuguggccuugaagccugg

SEQ ID NO: 266788 - RNA, 32 nt, Homo Sapiens
uauggguuagaaaucauugaaauggauugguc

SEQ ID NO: 266789 - RNA, 32 nt, Homo Sapiens
auuuuaaaggcuuauuguuguauuuuguagca

SEQ ID NO: 266790 - RNA, 32 nt, Homo Sapiens
caauauacuguacauuugauaauaaaauauau

SEQ ID NO: 266791 - RNA, 32 nt, Homo Sapiens
guaauccuagcacuuugagaccacuaaggcgg

SEQ ID NO: 266792 - RNA, 32 nt, Homo Sapiens
uggcagcaacaauaaauagacacgcacggcag

SEQ ID NO: 266793 - RNA, 32 nt, Homo Sapiens
ccugcuccugacagccagcagcuguguauuug

SEQ ID NO: 266794 - RNA, 32 nt, Homo Sapiens
auaacccauuaugcuacuuuuacacgcaugug

SEQ ID NO: 266795 - RNA, 32 nt, Homo Sapiens
cuauauucacccaaauaaucaagggugaaggu

SEQ ID NO: 266796 - RNA, 32 nt, Homo Sapiens
acacugaccgacccuccuggggucugucagga

SEQ ID NO: 266797 - RNA, 32 nt, Homo Sapiens
aaccuaaaacaaaaaacaugaguugugugcca

SEQ ID NO: 266798 - RNA, 32 nt, Homo Sapiens
agccguggcagcagcccucauccccauggcgg

SEQ ID NO: 266799 - RNA, 32 nt, Homo Sapiens
uugaucuuaaaagcuuugugauugcaaaggug

SEQ ID NO: 266800 - RNA, 29 nt, Homo Sapiens
aaaccuuggggacaggugggcgugguacu

SEQ ID NO: 266801 - RNA, 32 nt, Homo Sapiens
ccacaccaacacaguucucaagucaccaaugg

SEQ ID NO: 266802 - RNA, 32 nt, Homo Sapiens
cugggccccgucccugugaccgggccaggcuc

SEQ ID NO: 266803 - RNA, 32 nt, Homo Sapiens
ccacugcugcugcugcugcugcugccgcugcu

SEQ ID NO: 266804 - RNA, 32 nt, Homo Sapiens
uuauccacuggguaacaguguuuacccaugaa

SEQ ID NO: 266805 - RNA, 32 nt, Homo Sapiens
gugauaggaugagacuccaucucaggggaaaa

SEQ ID NO: 266806 - RNA, 32 nt, Homo Sapiens
auacaaauauauuguuaaucucuguuauguac

SEQ ID NO: 266807 - RNA, 32 nt, Homo Sapiens
uaauugaggguggggggaggagggagugcguc

SEQ ID NO: 266808 - RNA, 32 nt, Homo Sapiens
uuaaggaguuagugaggccugggugugaccua

SEQ ID NO: 266809 - RNA, 32 nt, Homo Sapiens
aggcuguggcaugauggccggaggcaagaagc

SEQ ID NO: 266810 - RNA, 32 nt, Homo Sapiens
gaggucgcugaggguuuggggaggcuuuucug

SEQ ID NO: 266811 - RNA, 32 nt, Homo Sapiens
agaaucaucauuguugcuuuaucacuucuaag

SEQ ID NO: 266812 - RNA, 32 nt, Homo Sapiens
uacagacacuauucaacuuuggcaucuugcca

SEQ ID NO: 266813 - RNA, 32 nt, Homo Sapiens
caaguagcuggguuuauaggugcccgccacca

SEQ ID NO: 266814 - RNA, 32 nt, Homo Sapiens
ucccaacuuuuguaaaguuguguauguuuuug

SEQ ID NO: 266815 - RNA, 32 nt, Homo Sapiens
ugugaauagucugugugcacaaugggcaauuc

SEQ ID NO: 266816 - RNA, 32 nt, Homo Sapiens
cugggugccucucuccuuccucaggguacugc

SEQ ID NO: 266817 - RNA, 32 nt, Homo Sapiens
gugccagaggcagcaaagcagcccuuauaggg

SEQ ID NO: 266818 - RNA, 32 nt, Homo Sapiens
gaggauaugggucaguuacagcagcccucacc

SEQ ID NO: 266819 - RNA, 32 nt, Homo Sapiens
agaugagcugaauuuugguaaauuauuuuagg

SEQ ID NO: 266820 - RNA, 32 nt, Homo Sapiens
uaaauauauauucugguuauaguucuaauaug

SEQ ID NO: 266821 - RNA, 32 nt, Homo Sapiens
gaccagaaguaauuauacuaaaguaucaagaa

SEQ ID NO: 266822 - RNA, 29 nt, Homo Sapiens
guuugucuguguuucauacaagguucuug

SEQ ID NO: 266823 - RNA, 32 nt, Homo Sapiens
agcccuacgagugcuccgcgugcgccaaggcc

SEQ ID NO: 266824 - RNA, 32 nt, Homo Sapiens
uaccugaauggagaaacguagucuuaccucgu

SEQ ID NO: 266825 - RNA, 32 nt, Homo Sapiens
uugauuugauaaauagauguguugaauuacua

SEQ ID NO: 266826 - RNA, 32 nt, Homo Sapiens
cuugagacucguugagaucuuuguugagaacc

SEQ ID NO: 266827 - RNA, 32 nt, Homo Sapiens
ccuccucuuccuuccuccuccagccgccgccg

SEQ ID NO: 266828 - RNA, 32 nt, Homo Sapiens
aaaaugaucauuacagauguuuagugacaaag

SEQ ID NO: 266829 - RNA, 32 nt, Homo Sapiens
acaccccgccccacuaugggccuaccauuaau

SEQ ID NO: 266830 - RNA, 32 nt, Homo Sapiens
cuggcugacuuuucaagggggaccacccuacc

SEQ ID NO: 266831 - RNA, 32 nt, Homo Sapiens
gugucuuacugauguuuucaugaucaacuugu

SEQ ID NO: 266832 - RNA, 32 nt, Homo Sapiens
gcccagggcgcggaaggccaugcugcccgccu

SEQ ID NO: 266833 - RNA, 32 nt, Homo Sapiens
cuuuugccuagguuggaguacagcggugaaau

SEQ ID NO: 266834 - RNA, 32 nt, Homo Sapiens
aaauuaaaaacaaaacaaaacaaaaaaaaaaa

SEQ ID NO: 266835 - RNA, 32 nt, Homo Sapiens
agggguggugccuacuuccacuguaagaaaga

SEQ ID NO: 266836 - RNA, 32 nt, Homo Sapiens
cugccucuauagauacacuucuuaacaaguaa

SEQ ID NO: 266837 - RNA, 32 nt, Homo Sapiens
gaagagguaggaccagugcuuuuuuguuucuu

SEQ ID NO: 266838 - RNA, 32 nt, Homo Sapiens
gaugcuguccgcgcugcccgcguacggccgcg

SEQ ID NO: 266839 - RNA, 32 nt, Homo Sapiens
caagugacuuucuccuucuacucccaauuccc

SEQ ID NO: 266840 - RNA, 32 nt, Homo Sapiens
ccgggcccuccauggcccgggccgcugcccuc

SEQ ID NO: 266841 - RNA, 32 nt, Homo Sapiens
cucaccgcaaccuccgccucccagguucaagc

SEQ ID NO: 266842 - RNA, 32 nt, Homo Sapiens
cgugcggggggcccuagucaugccucugcgca

SEQ ID NO: 266843 - RNA, 32 nt, Homo Sapiens
uagcaacuaugaagagaaaagcuacuaauaaa

SEQ ID NO: 266844 - RNA, 32 nt, Homo Sapiens
aguccgccucacuggaggaagagaaagacgug

SEQ ID NO: 266845 - RNA, 32 nt, Homo Sapiens
uucuauaauggcaucuuacauggcauuaaaau

SEQ ID NO: 266846 - RNA, 30 nt, Homo Sapiens
agucuuuggcggcgggccgggccgaacguc

SEQ ID NO: 266847 - RNA, 32 nt, Homo Sapiens
ucuucugcgucacgaacagccaguccauugaa

SEQ ID NO: 266848 - RNA, 32 nt, Homo Sapiens
acuguuuuuaucucauuuauuaagucucagaa

SEQ ID NO: 266849 - RNA, 32 nt, Homo Sapiens
ggcggccgaccccggucugugccgcccccugg

SEQ ID NO: 266850 - RNA, 32 nt, Homo Sapiens
agagcugcugaacucccaggcauuccaggaac

SEQ ID NO: 266851 - RNA, 32 nt, Homo Sapiens
gcucuaaaaucuuauauuaauuuuauuaagca

SEQ ID NO: 266852 - RNA, 32 nt, Homo Sapiens
gucugcuaggagagggcgggcagcgccgcggc

SEQ ID NO: 266853 - RNA, 32 nt, Homo Sapiens
cauccaauaaaguaugcauauuugagcuguag

SEQ ID NO: 266854 - RNA, 32 nt, Homo Sapiens
cucagggucggcuugugaaaagcuguuaaaca

SEQ ID NO: 266855 - RNA, 32 nt, Homo Sapiens
gcaugaggccccagggcaccguucuagaacaa

SEQ ID NO: 266856 - RNA, 32 nt, Homo Sapiens
acgaugccggcccggcagcuucggcaacgcca

SEQ ID NO: 266857 - RNA, 32 nt, Homo Sapiens
gcuggcccugugccacccuuccccucacaugu

SEQ ID NO: 266858 - RNA, 32 nt, Homo Sapiens
aguuuguuuuuagacguccuuuguccaauaug

SEQ ID NO: 266859 - RNA, 32 nt, Homo Sapiens
uguguuuugcucccgucuccgacgagagaggc

SEQ ID NO: 266860 - RNA, 32 nt, Homo Sapiens
caugccuuuccagugcugcucccuuuaucaug

SEQ ID NO: 266861 - RNA, 32 nt, Homo Sapiens
ggccccucgucuccccgcacccggagccaccc

SEQ ID NO: 266862 - RNA, 32 nt, Homo Sapiens
ugcugugagccuggggacgacauggcaggcug

SEQ ID NO: 266863 - RNA, 32 nt, Homo Sapiens
cacuuccggaccccucgaccgcccggcaccag

SEQ ID NO: 266864 - RNA, 32 nt, Homo Sapiens
acugguguuucuuuuuauaaccccuugaaaca

SEQ ID NO: 266865 - RNA, 32 nt, Homo Sapiens
ccugaggaccacucugcccucccgcggcccgg

SEQ ID NO: 266866 - RNA, 32 nt, Homo Sapiens
uguauugcaauaaaggaauaccugaggcuggg

SEQ ID NO: 266867 - RNA, 32 nt, Homo Sapiens
cugggcauccccagcccccuggccccucccac

SEQ ID NO: 266868 - RNA, 32 nt, Homo Sapiens
ucuuuuccaaaauaaauuuguuaaugauacau

SEQ ID NO: 266869 - RNA, 32 nt, Homo Sapiens
ccuccauuugggccgauggccucuuggaggcu

SEQ ID NO: 266870 - RNA, 32 nt, Homo Sapiens
uguuguugaccuccugauggcuugucauccug

SEQ ID NO: 266871 - RNA, 32 nt, Homo Sapiens
ccugaccucucuucuuuggagaggaggaugga

SEQ ID NO: 266872 - RNA, 31 nt, Homo Sapiens
gggucugcaaggucuuugguucagcuaagcu

SEQ ID NO: 266873 - RNA, 32 nt, Homo Sapiens
ugaggggaaggcugcugcacaauggcaguuuu

SEQ ID NO: 266874 - RNA, 32 nt, Homo Sapiens
accugcacucuacccacccccaucaccuacuc

SEQ ID NO: 266875 - RNA, 32 nt, Homo Sapiens
ugcaucaugggucuugcuugccugcugcccug

SEQ ID NO: 266876 - RNA, 32 nt, Homo Sapiens
guauuuauuuauaaguuuuugccauuauaauu

SEQ ID NO: 266877 - RNA, 32 nt, Homo Sapiens
cuaauuuagauguaagaaugugaagguuuuua

SEQ ID NO: 266878 - RNA, 29 nt, Homo Sapiens
cagcaugaccgagcgccgcguccccuucu

SEQ ID NO: 266879 - RNA, 32 nt, Homo Sapiens
acuuuaguccucuccuucccccuaaaagcgaa

SEQ ID NO: 266880 - RNA, 32 nt, Homo Sapiens
acaccaugggccacgcccauguuuuccaggcc

SEQ ID NO: 266881 - RNA, 32 nt, Homo Sapiens
ggagccacagaagauagacagauggaaggugg

SEQ ID NO: 266882 - RNA, 32 nt, Homo Sapiens
aaguuuaaaaauuuguguuggacuucaugcgg

SEQ ID NO: 266883 - RNA, 32 nt, Homo Sapiens
cuccuuugccagcaccgagcucuuccacuucc

SEQ ID NO: 266884 - RNA, 32 nt, Homo Sapiens
gucucaagaaacaaagaucucgcuggugcgua

SEQ ID NO: 266885 - RNA, 32 nt, Homo Sapiens
ccagaaguagccagaggccaguuugaacauca

SEQ ID NO: 266886 - RNA, 32 nt, Homo Sapiens
guuugggucuuagguggcuuugggucauuacg

SEQ ID NO: 266887 - RNA, 32 nt, Homo Sapiens
uauaaucgagggccaggagggcccggguugcu

SEQ ID NO: 266888 - RNA, 32 nt, Homo Sapiens
guuugcuuucuuuucacuuucgaauaaagagu

SEQ ID NO: 266889 - RNA, 32 nt, Homo Sapiens
gcgcguauggccucgggcccucguuccccaag

SEQ ID NO: 266890 - RNA, 32 nt, Homo Sapiens
caagcuaaguuguuuaucucggcugcggcggg

SEQ ID NO: 266891 - RNA, 32 nt, Homo Sapiens
ugucccugcccagaggccccagcugccccuuc

SEQ ID NO: 266892 - RNA, 32 nt, Homo Sapiens
gacucugaggcggccagaggccuaggaauguc

SEQ ID NO: 266893 - RNA, 32 nt, Homo Sapiens
gaggauagaauccuuuggaaucuuauggcaac

SEQ ID NO: 266894 - RNA, 32 nt, Homo Sapiens
aagucuguaggaagcaaaucuauacuuuuuua

SEQ ID NO: 266895 - RNA, 32 nt, Homo Sapiens
gucucuucucccugcaucacuguucauucaca

SEQ ID NO: 266896 - RNA, 32 nt, Homo Sapiens
ggaucuuucucgcacaggcuuggagugcagug

SEQ ID NO: 266897 - RNA, 32 nt, Homo Sapiens
ggccuguggagccccagcucugggucccuagc

SEQ ID NO: 266898 - RNA, 32 nt, Homo Sapiens
uagguaaaacaaaacaaaaacgacaguaauac

SEQ ID NO: 266899 - RNA, 32 nt, Homo Sapiens
uuuucuuuucuuuuuugaaaaguccaagaaug

SEQ ID NO: 266900 - RNA, 32 nt, Homo Sapiens
agcuuuaagacauuuaacauuguuauaaauga

SEQ ID NO: 266901 - RNA, 32 nt, Homo Sapiens
gggacgccauguccauggaggaccccuucuuu

SEQ ID NO: 266902 - RNA, 32 nt, Homo Sapiens
accucucuggaaaugcuucucaacuuugauga

SEQ ID NO: 266903 - RNA, 30 nt, Homo Sapiens
ucuguguaucaccccacacagagaguuaaa

SEQ ID NO: 266904 - RNA, 32 nt, Homo Sapiens
gcagguucaauuuuauuuacaacugauuccug

SEQ ID NO: 266905 - RNA, 32 nt, Homo Sapiens
aucugccucaauuauuucugcugguuauaaug

SEQ ID NO: 266906 - RNA, 29 nt, Homo Sapiens
guuuuucuauaugaguggagaagacagcu

SEQ ID NO: 266907 - RNA, 32 nt, Homo Sapiens
agcuuccugcagcaucgucuggucggugaaag

SEQ ID NO: 266908 - RNA, 32 nt, Homo Sapiens
cgcucucugcccgcgccgccgccgccucagcc

SEQ ID NO: 266909 - RNA, 32 nt, Homo Sapiens
gaacuguguuggauuuaagauaccuuuucacu

SEQ ID NO: 266910 - RNA, 32 nt, Homo Sapiens
uguggauuccaagaacaaaaccaauuguccaa

SEQ ID NO: 266911 - RNA, 32 nt, Homo Sapiens
uggaagggaucugcagauuccaaacuggaaua

SEQ ID NO: 266912 - RNA, 32 nt, Homo Sapiens
acucacucuggccacuccuccucugguggcau

SEQ ID NO: 266913 - RNA, 32 nt, Homo Sapiens
uuuucuguggccaauguguguuuucucuggga

SEQ ID NO: 266914 - RNA, 32 nt, Homo Sapiens
ucguggucuacuccgucauuggguuccgcgcc

SEQ ID NO: 266915 - RNA, 32 nt, Homo Sapiens
agcaacuaaaagaaagaggaaagcuugauuag

SEQ ID NO: 266916 - RNA, 32 nt, Homo Sapiens
acccuagcuggaaagcgccggaggcggaggaa

SEQ ID NO: 266917 - RNA, 31 nt, Homo Sapiens
agacaagaguugaguaccguggauguuccua

SEQ ID NO: 266918 - RNA, 32 nt, Homo Sapiens
ccacauucaaggaagaaccuucugucccagcu

SEQ ID NO: 266919 - RNA, 32 nt, Homo Sapiens
augacaaugaauuuggcuacagcaacagggug

SEQ ID NO: 266920 - RNA, 32 nt, Homo Sapiens
caugucuguccccaagccagacuugcgguugg

SEQ ID NO: 266921 - RNA, 32 nt, Homo Sapiens
guacauuccuugauuuccaggauaguuuuuca

SEQ ID NO: 266922 - RNA, 32 nt, Homo Sapiens
gcaaauguuuucacaaaagugaaucuuuguga

SEQ ID NO: 266923 - RNA, 32 nt, Homo Sapiens
ggagagagcuguucuuuuucuaaugacuacac

SEQ ID NO: 266924 - RNA, 32 nt, Homo Sapiens
ccaggcuaccgaggagggcgccaggcccccag

SEQ ID NO: 266925 - RNA, 32 nt, Homo Sapiens
uauuuaaaaaaauaaagauauguuuuuaauga

SEQ ID NO: 266926 - RNA, 32 nt, Homo Sapiens
aggcaggcggaucaccugaggucuggaguuug

SEQ ID NO: 266927 - RNA, 32 nt, Homo Sapiens
ccaggccccagagagccugugcaugagcaugu

SEQ ID NO: 266928 - RNA, 32 nt, Homo Sapiens
aagucccagccccucucagaggaggcgugcgg

SEQ ID NO: 266929 - RNA, 32 nt, Homo Sapiens
gcuugcuucuuuuuguuuugccugccacuagu

SEQ ID NO: 266930 - RNA, 32 nt, Homo Sapiens
guaggcacuuugugccagcagcaugagcucau

SEQ ID NO: 266931 - RNA, 32 nt, Homo Sapiens
aauuagccgggcguaguggcgcgcgccuauaa

SEQ ID NO: 266932 - RNA, 32 nt, Homo Sapiens
gccggcccccgagaccccggcccccaccccac

SEQ ID NO: 266933 - RNA, 32 nt, Homo Sapiens
aucccgcuagaauccguccagucucugcucgc

SEQ ID NO: 266934 - RNA, 32 nt, Homo Sapiens
auucacagaguuguucaucuaucacuacuaaa

SEQ ID NO: 266935 - RNA, 32 nt, Homo Sapiens
ggacaaagacccccagcauguguguacccugg

SEQ ID NO: 266936 - RNA, 32 nt, Homo Sapiens
aauaaauacucgucugucaaugaaaaaaaaaa

SEQ ID NO: 266937 - RNA, 32 nt, Homo Sapiens
cuauuuuaaauauuuaucagucuaaacuugug

SEQ ID NO: 266938 - RNA, 32 nt, Homo Sapiens
cagcuccccggggccgccgcaacgaaggugga

SEQ ID NO: 266939 - RNA, 32 nt, Homo Sapiens
cagucagguugaagaccuaaccagggccagaa

SEQ ID NO: 266940 - RNA, 32 nt, Homo Sapiens
ugcuuuuguucagaagaaagugcugaacaucg

SEQ ID NO: 266941 - RNA, 29 nt, Homo Sapiens
uaauaugaaaauaucuauuaaaggacauc

SEQ ID NO: 266942 - RNA, 32 nt, Homo Sapiens
uauuuuugcuauaaguucuauaaggugcauaa

SEQ ID NO: 266943 - RNA, 32 nt, Homo Sapiens
ucaccaguucccuuggcguccugucccucagu

SEQ ID NO: 266944 - RNA, 32 nt, Homo Sapiens
acaggagccauucugguuucuggccaaacaca

SEQ ID NO: 266945 - RNA, 32 nt, Homo Sapiens
uacugcugaagcaaaugugaaugccaaagacu

SEQ ID NO: 266946 - RNA, 32 nt, Homo Sapiens
guccuggagagggucccgggccccacccuccc

SEQ ID NO: 266947 - RNA, 28 nt, Homo Sapiens
uuuaucagaaaagaacauuugauaccau

SEQ ID NO: 266948 - RNA, 32 nt, Homo Sapiens
cucuuuuccagaauaagaguacugacuaagcu

SEQ ID NO: 266949 - RNA, 32 nt, Homo Sapiens
agcuuuaagaaacucaaaaacuggugcuggaa

SEQ ID NO: 266950 - RNA, 32 nt, Homo Sapiens
agggccagaaauguggagacaugguuuuuguu

SEQ ID NO: 266951 - RNA, 32 nt, Homo Sapiens
aaccagaaagagaguccagaaguauucagaug

SEQ ID NO: 266952 - RNA, 32 nt, Homo Sapiens
ucuugcucuccucuccuccaauagcuuacuuc

SEQ ID NO: 266953 - RNA, 32 nt, Homo Sapiens
cgcacuccuagagaaagguacacaguuguccg

SEQ ID NO: 266954 - RNA, 32 nt, Homo Sapiens
cacacaggaaucaaacuuugguaaaucauuuc

SEQ ID NO: 266955 - RNA, 32 nt, Homo Sapiens
uggagggcucuguggacaaccuggacagccug

SEQ ID NO: 266956 - RNA, 32 nt, Homo Sapiens
ucucugccccaaacucuuccccgggaaggggg

SEQ ID NO: 266957 - RNA, 32 nt, Homo Sapiens
cucggcccuggcccggagggccccauggccgc

SEQ ID NO: 266958 - RNA, 32 nt, Homo Sapiens
auuuuagaacucucauacaauccuggaacaca

SEQ ID NO: 266959 - RNA, 32 nt, Homo Sapiens
ugauuuuugcuccucaggcccaauauucucag

SEQ ID NO: 266960 - RNA, 32 nt, Homo Sapiens
aggcgcuagguagagcgccgggaccugugaca

SEQ ID NO: 266961 - RNA, 32 nt, Homo Sapiens
gccagccccgcccacaccugaagcccacagcg

SEQ ID NO: 266962 - RNA, 32 nt, Homo Sapiens
cgcugccccucgcggucccagagcucggaguc

SEQ ID NO: 266963 - RNA, 32 nt, Homo Sapiens
gaggagaaaaagacauagucuaauuugaugcc

SEQ ID NO: 266964 - RNA, 32 nt, Homo Sapiens
uggcacucugucugcugguggcccucucggcu

SEQ ID NO: 266965 - RNA, 31 nt, Homo Sapiens
agccuauagugagccaugauugugccaccgc

SEQ ID NO: 266966 - RNA, 32 nt, Homo Sapiens
ccggugaggccagcgcguccucgcagccauga

SEQ ID NO: 266967 - RNA, 32 nt, Homo Sapiens
uacuuagugaauauccuuuaagagcugggauu

SEQ ID NO: 266968 - RNA, 32 nt, Homo Sapiens
ugacucuagaggaugaauuagcaagaggguau

SEQ ID NO: 266969 - RNA, 32 nt, Homo Sapiens
ggcagaugucuacuuguucaguuuuucaaauc

SEQ ID NO: 266970 - RNA, 32 nt, Homo Sapiens
cucacuggcgcaggcccggcccgcagcccgag

SEQ ID NO: 266971 - RNA, 30 nt, Homo Sapiens
cguuuagggcgaagacggaguuguaaacuu

SEQ ID NO: 266972 - RNA, 28 nt, Homo Sapiens
uuugcccuguguuauauguguuucacgc

SEQ ID NO: 266973 - RNA, 32 nt, Homo Sapiens
gccccccgccgggacgugggcgucgucaggaa

SEQ ID NO: 266974 - RNA, 32 nt, Homo Sapiens
acaagaaacgagccugaaaaucagguccagcc

SEQ ID NO: 266975 - RNA, 32 nt, Homo Sapiens
cccagcuaaguuuccccucaauaaaaagcccg

SEQ ID NO: 266976 - RNA, 32 nt, Homo Sapiens
agacaagucaccccaaaaccgcugugcagcuu

SEQ ID NO: 266977 - RNA, 32 nt, Homo Sapiens
uucccccuuacacuccucuccuucgacugcuc

SEQ ID NO: 266978 - RNA, 32 nt, Homo Sapiens
ucucuugcacaccagcucgucacugccugccc

SEQ ID NO: 266979 - RNA, 32 nt, Homo Sapiens
cccugucuccuccaugagccguccagggccug

SEQ ID NO: 266980 - RNA, 31 nt, Homo Sapiens
ggagcgagggcggggcgccgcgcucuauaau

SEQ ID NO: 266981 - RNA, 32 nt, Homo Sapiens
gaggcccgcggggaugggaggggaggagggug

SEQ ID NO: 266982 - RNA, 32 nt, Homo Sapiens
caagguggagcugugaugucacaauuuggcaa

SEQ ID NO: 266983 - RNA, 32 nt, Homo Sapiens
cugccucccuauuugccaggcuuucauuucug

SEQ ID NO: 266984 - RNA, 32 nt, Homo Sapiens
aacuuugaagucugauuuuccuggacaguuuu

SEQ ID NO: 266985 - RNA, 32 nt, Homo Sapiens
cuugggcauucgcucgcagaacgcaaggacau

SEQ ID NO: 266986 - RNA, 32 nt, Homo Sapiens
cugcccuacccaggcuuucucucccacuuccc

SEQ ID NO: 266987 - RNA, 32 nt, Homo Sapiens
aauuaaauauaaauuacuuuugugggggaaug

SEQ ID NO: 266988 - RNA, 32 nt, Homo Sapiens
acuuguuguuuuacuaaagaaagauuacuuag

SEQ ID NO: 266989 - RNA, 32 nt, Homo Sapiens
aggaucuguggcuugucucuguccugagggug

SEQ ID NO: 266990 - RNA, 32 nt, Homo Sapiens
gauccuccaaccucggccuccugguacauauu

SEQ ID NO: 266991 - RNA, 32 nt, Homo Sapiens
gagguauauagagguauuuauuuacaaauaaa

SEQ ID NO: 266992 - RNA, 31 nt, Homo Sapiens
ccuuugugucacauucucagagaguuggagg

SEQ ID NO: 266993 - RNA, 32 nt, Homo Sapiens
cugcaauuuuuuccucuugauaaucaaggaau

SEQ ID NO: 266994 - RNA, 32 nt, Homo Sapiens
ccauuauucagaucuacacaaacaaggcuucc

SEQ ID NO: 266995 - RNA, 32 nt, Homo Sapiens
uuauuuguuuuugucuauguaaucaaauaaaa

SEQ ID NO: 266996 - RNA, 32 nt, Homo Sapiens
aaauuuaacaaaccugcacaugugcucuugaa

SEQ ID NO: 266997 - RNA, 32 nt, Homo Sapiens
aguucauguacaaggccccucugcaacuggag

SEQ ID NO: 266998 - RNA, 32 nt, Homo Sapiens
cccuugccccgcgccagcuucugcgcccgcag

SEQ ID NO: 266999 - RNA, 32 nt, Homo Sapiens
ucacaaaagcaguuauuuuaaaaucugauccc

SEQ ID NO: 267000 - RNA, 29 nt, Homo Sapiens
gagaaugggggucuguggguaccuguucc

SEQ ID NO: 267001 - RNA, 32 nt, Homo Sapiens
aaggaagauaggaaacaaaaaauagaaggugc

SEQ ID NO: 267002 - RNA, 32 nt, Homo Sapiens
aaaauugcaugaagcagaggcuaagaugguuu

SEQ ID NO: 267003 - RNA, 32 nt, Homo Sapiens
cuuaguuaugagugaagccucuguucacuuau

SEQ ID NO: 267004 - RNA, 32 nt, Homo Sapiens
aaaaugaaauuccuuucagucuagaguguuuc

SEQ ID NO: 267005 - RNA, 32 nt, Homo Sapiens
gugaccuuggagguggaggagaaugaugggcg

SEQ ID NO: 267006 - RNA, 32 nt, Homo Sapiens
guccucuugggguuuuguaccaucugaugcug

SEQ ID NO: 267007 - RNA, 32 nt, Homo Sapiens
gcggccagcgccugaggcgccccgccccgccc

SEQ ID NO: 267008 - RNA, 32 nt, Homo Sapiens
ugaagcgauccucccaccccagccuccggggu

SEQ ID NO: 267009 - RNA, 32 nt, Homo Sapiens
ucggcucagcagccuccaacuucucccgaauc

SEQ ID NO: 267010 - RNA, 32 nt, Homo Sapiens
cgcguccccacuccgcgccgccgcgccucugc

SEQ ID NO: 267011 - RNA, 32 nt, Homo Sapiens
aggccagcaggugggguaucaucugcucggug

SEQ ID NO: 267012 - RNA, 32 nt, Homo Sapiens
aaaagcaaaaauugucaguguuuggaugaaaa

SEQ ID NO: 267013 - RNA, 32 nt, Homo Sapiens
caauuucucaugucucuccugagauguuuuau

SEQ ID NO: 267014 - RNA, 32 nt, Homo Sapiens
accgcccacccccacacccuccauaccguuuu

SEQ ID NO: 267015 - RNA, 32 nt, Homo Sapiens
acaguagccauucaaaauaaaauacauggaug

SEQ ID NO: 267016 - RNA, 32 nt, Homo Sapiens
agggccggggagagggugcgggugcaggcggg

SEQ ID NO: 267017 - RNA, 32 nt, Homo Sapiens
ccugcaggcugcacccaccuccuccccuuccu

SEQ ID NO: 267018 - RNA, 32 nt, Homo Sapiens
gccauccacccgcgcgcacgcacagcgcccgg

SEQ ID NO: 267019 - RNA, 32 nt, Homo Sapiens
agccuuaaacacaugccucacaaacaucuacu

SEQ ID NO: 267020 - RNA, 32 nt, Homo Sapiens
cauuuuuccuuccgugccucugcuuaccccag

SEQ ID NO: 267021 - RNA, 32 nt, Homo Sapiens
ugacauuugucaaccguuauaguauuauacag

SEQ ID NO: 267022 - RNA, 32 nt, Homo Sapiens
agagcuuuucuggcuucaguaccaaugaucac

SEQ ID NO: 267023 - RNA, 32 nt, Homo Sapiens
cugggacccagcugcaaaggcuguaggagugg

SEQ ID NO: 267024 - RNA, 32 nt, Homo Sapiens
uauagagauaguaauuaggcaauauaauucga

SEQ ID NO: 267025 - RNA, 32 nt, Homo Sapiens
gagcuuggaaaacuggaguuucuuuuccuccg

SEQ ID NO: 267026 - RNA, 30 nt, Homo Sapiens
gggccucugcuaauuuagagagaccuaucc

SEQ ID NO: 267027 - RNA, 32 nt, Homo Sapiens
cgcagaagaacugaagacuguugugugcuccc

SEQ ID NO: 267028 - RNA, 32 nt, Homo Sapiens
uggaguccccuuuacuggacccuaacaugucu

SEQ ID NO: 267029 - RNA, 32 nt, Homo Sapiens
ggagaacucagauaaaaauauuuucauacguu

SEQ ID NO: 267030 - RNA, 32 nt, Homo Sapiens
ugacauuugcucugaucccuggaauagguguu

SEQ ID NO: 267031 - RNA, 32 nt, Homo Sapiens
uugaugagugauugccuguccauacacucucu

SEQ ID NO: 267032 - RNA, 32 nt, Homo Sapiens
cagauaugggacugauucuguggcuuaccuug

SEQ ID NO: 267033 - RNA, 32 nt, Homo Sapiens
cuucuuagugaaauggguacuacauuuguuac

SEQ ID NO: 267034 - RNA, 32 nt, Homo Sapiens
cuuagagcugggugugaugggcaccgaggcca

SEQ ID NO: 267035 - RNA, 32 nt, Homo Sapiens
uuuauuugcaacuuauacuagcacagaaagaa

SEQ ID NO: 267036 - RNA, 32 nt, Homo Sapiens
auagaaagauucagauauaucaacacuuggaa

SEQ ID NO: 267037 - RNA, 32 nt, Homo Sapiens
uccacgcuggcuccgugcgccauggucaccca

SEQ ID NO: 267038 - RNA, 32 nt, Homo Sapiens
acugccuaacuguguacaguguuaccaguguc

SEQ ID NO: 267039 - RNA, 32 nt, Homo Sapiens
aagcaguggcccuggguuggggaaauauagaa

SEQ ID NO: 267040 - RNA, 32 nt, Homo Sapiens
gcaacacuuuaacgucuuacauuuucucugau

SEQ ID NO: 267041 - RNA, 32 nt, Homo Sapiens
gcucugucgcccaagcugaagugcaguggugc

SEQ ID NO: 267042 - RNA, 32 nt, Homo Sapiens
cagagccuggggagguggagcccucuugccug

SEQ ID NO: 267043 - RNA, 32 nt, Homo Sapiens
cuuuguccagugcagugcccucuucccuuccu

SEQ ID NO: 267044 - RNA, 32 nt, Homo Sapiens
uuuucagaagguggcaugguccucaagugagu

SEQ ID NO: 267045 - RNA, 32 nt, Homo Sapiens
ggaaccaucauucugcguggaaaaaccuacag

SEQ ID NO: 267046 - RNA, 32 nt, Homo Sapiens
cacuucaccccucgugucucucuuuguugcua

SEQ ID NO: 267047 - RNA, 32 nt, Homo Sapiens
guuuauuguguuaucagagugcauuagaaaga

SEQ ID NO: 267048 - RNA, 32 nt, Homo Sapiens
caacccccaucccccaccgggccuuugucccu

SEQ ID NO: 267049 - RNA, 32 nt, Homo Sapiens
aggggagguucagaagacagaguuuuagaagc

SEQ ID NO: 267050 - RNA, 32 nt, Homo Sapiens
guuuugcuccagccacuuuucuuguacaacca

SEQ ID NO: 267051 - RNA, 32 nt, Homo Sapiens
aaauggauaaaauacugauacauguaacauug

SEQ ID NO: 267052 - RNA, 32 nt, Homo Sapiens
ggucggcgucuucggggcuguccaucaggauc

SEQ ID NO: 267053 - RNA, 32 nt, Homo Sapiens
cguggggagucuuuuuaacuguuucuaccuca

SEQ ID NO: 267054 - RNA, 32 nt, Homo Sapiens
acagacccaggguggggugggguccaggucgg

SEQ ID NO: 267055 - RNA, 32 nt, Homo Sapiens
ucaagcucaaaauuuauguugugaugaugaau

SEQ ID NO: 267056 - RNA, 32 nt, Homo Sapiens
aggaaaauggugcugucuccacagacaaaggc

SEQ ID NO: 267057 - RNA, 32 nt, Homo Sapiens
agcaccaugcggccgcccugcgcacggagccc

SEQ ID NO: 267058 - RNA, 32 nt, Homo Sapiens
aaaacaaaacaaaaacgacaguaauaccaagg

SEQ ID NO: 267059 - RNA, 32 nt, Homo Sapiens
aacuagcagacacuucuccuaauccuccucaa

SEQ ID NO: 267060 - RNA, 32 nt, Homo Sapiens
uuucugcguuaagggagaaggaaugaccaauu

SEQ ID NO: 267061 - RNA, 32 nt, Homo Sapiens
uuccgcccgccuuucugagggcgcagguucga

SEQ ID NO: 267062 - RNA, 32 nt, Homo Sapiens
ucuuucuuucuuuuuuuuuuuuuuggacugag

SEQ ID NO: 267063 - RNA, 32 nt, Homo Sapiens
aggaucaccucuuccuggaagccuuccucuuu

SEQ ID NO: 267064 - RNA, 32 nt, Homo Sapiens
uugagcugcauaaucuaaacaugucaaacguu

SEQ ID NO: 267065 - RNA, 32 nt, Homo Sapiens
gcugccucacuccccacccccacuugccaggu

SEQ ID NO: 267066 - RNA, 32 nt, Homo Sapiens
uuucuggugauaaacuugauggucauuguuau

SEQ ID NO: 267067 - RNA, 32 nt, Homo Sapiens
uagcaguugggugugcuauaugcaaaaguaaa

SEQ ID NO: 267068 - RNA, 32 nt, Homo Sapiens
uaccuuagaagaagaaagaaagagggaaagag

SEQ ID NO: 267069 - RNA, 32 nt, Homo Sapiens
cacuuucacauggaauuucccaguuaugaaau

SEQ ID NO: 267070 - RNA, 32 nt, Homo Sapiens
caaaauauauauaacauacuacuuggaggcuu

SEQ ID NO: 267071 - RNA, 32 nt, Homo Sapiens
uugauuuguauauaguugcugccauaaauaca

SEQ ID NO: 267072 - RNA, 32 nt, Homo Sapiens
cuuuuaacuucacacagcacaaaagagaaaug

SEQ ID NO: 267073 - RNA, 32 nt, Homo Sapiens
cuaauaagauuuauuaucaaauuaaaguuuca

SEQ ID NO: 267074 - RNA, 32 nt, Homo Sapiens
ggcuagucaagccccuauccaggcccgaaucc

SEQ ID NO: 267075 - RNA, 32 nt, Homo Sapiens
gcuuacugaaucguacaaaacccugaacgcag

SEQ ID NO: 267076 - RNA, 32 nt, Homo Sapiens
aguuguuaauaaauguauaaaacuguucuuga

SEQ ID NO: 267077 - RNA, 32 nt, Homo Sapiens
uuccacccgaacuuaacauagccuuuuuauac

SEQ ID NO: 267078 - RNA, 32 nt, Homo Sapiens
ugcuugacagacucaagagaaacuacccaggu

SEQ ID NO: 267079 - RNA, 32 nt, Homo Sapiens
ucuuccgcgggcuagcgggcggugggggcgcc

SEQ ID NO: 267080 - RNA, 32 nt, Homo Sapiens
cccggccccuccccgcucccuuccacucugca

SEQ ID NO: 267081 - RNA, 32 nt, Homo Sapiens
acauuuuacugaaauguugcuccaucauauca

SEQ ID NO: 267082 - RNA, 32 nt, Homo Sapiens
uccgugggagccagcgagccucucucccugau

SEQ ID NO: 267083 - RNA, 32 nt, Homo Sapiens
agauuuaggagcagaaaugcaaggggcugcau

SEQ ID NO: 267084 - RNA, 32 nt, Homo Sapiens
uguagauaaugugcaagauaaaaacuauuuuc

SEQ ID NO: 267085 - RNA, 32 nt, Homo Sapiens
aacccugcagcgggaaaggcugacugggaaau

SEQ ID NO: 267086 - RNA, 32 nt, Homo Sapiens
ucccgggagagcgcagggaggggcgugggugc

SEQ ID NO: 267087 - RNA, 32 nt, Homo Sapiens
auugguuguuugucuuuuuuuguugaguugua

SEQ ID NO: 267088 - RNA, 32 nt, Homo Sapiens
agaauugacaacauaaacuacuuuugcuuuga

SEQ ID NO: 267089 - RNA, 32 nt, Homo Sapiens
cagagccuucaucgucuggcuggccaacgggg

SEQ ID NO: 267090 - RNA, 32 nt, Homo Sapiens
uacaguuucuuacuguuuuguaucaaaaucac

SEQ ID NO: 267091 - RNA, 32 nt, Homo Sapiens
cuccugucaccaugauucuguccagccagcag

SEQ ID NO: 267092 - RNA, 32 nt, Homo Sapiens
guuugagucuuaguuuugugaaagugguuuau

SEQ ID NO: 267093 - RNA, 32 nt, Homo Sapiens
ucgccuagguggugggcggggagggaaggaag

SEQ ID NO: 267094 - RNA, 32 nt, Homo Sapiens
cgccggcggaccgcgggcgagugcagccggug

SEQ ID NO: 267095 - RNA, 32 nt, Homo Sapiens
uaugucacgugcaggaacagugaggcagggac

SEQ ID NO: 267096 - RNA, 32 nt, Homo Sapiens
acugguuaaacauauuuuauucaccauuaagu

SEQ ID NO: 267097 - RNA, 32 nt, Homo Sapiens
ucuaaaauugcuauccugauaauuuuguugac

SEQ ID NO: 267098 - RNA, 32 nt, Homo Sapiens
cgcccauggcaagcgcggccugcccgggcccu

SEQ ID NO: 267099 - RNA, 32 nt, Homo Sapiens
gagcagcgcuggccgcgugccgccuccggagc

SEQ ID NO: 267100 - RNA, 32 nt, Homo Sapiens
cugugugguaaugagagauccaaacaccaagc

SEQ ID NO: 267101 - RNA, 32 nt, Homo Sapiens
caguucguuuuugcucaggcccgggggaguua

SEQ ID NO: 267102 - RNA, 32 nt, Homo Sapiens
guucuggaggccuuuaccaggacagagcuaga

SEQ ID NO: 267103 - RNA, 32 nt, Homo Sapiens
uaaauguuuaaauauaaauguuugucuggauu

SEQ ID NO: 267104 - RNA, 32 nt, Homo Sapiens
gcucccagugcagcugccaccccagcccaaau

SEQ ID NO: 267105 - RNA, 32 nt, Homo Sapiens
ucuacuauauacuaggcccugaagauagagcg

SEQ ID NO: 267106 - RNA, 32 nt, Homo Sapiens
gaacacaaaugugaaaucaugggcugacugag

SEQ ID NO: 267107 - RNA, 32 nt, Homo Sapiens
ggucuaaguauuuuaaaugugccuauuucaca

SEQ ID NO: 267108 - RNA, 32 nt, Homo Sapiens
ccacagacucgcgcuggagccgagacccgcuc

SEQ ID NO: 267109 - RNA, 32 nt, Homo Sapiens
cuacuuugcuccuggggugaaguccuauccag

SEQ ID NO: 267110 - RNA, 32 nt, Homo Sapiens
ggaggagagaccuguagaaguuuaaagauagu

SEQ ID NO: 267111 - RNA, 32 nt, Homo Sapiens
cacaggugaaaguuuuucugaaguguugggau

SEQ ID NO: 267112 - RNA, 32 nt, Homo Sapiens
ggugcaguggcggcuccgcggcgcacgcacgc

SEQ ID NO: 267113 - RNA, 32 nt, Homo Sapiens
agaggccgggcugcugcagaaccccgccgugu

SEQ ID NO: 267114 - RNA, 32 nt, Homo Sapiens
uuguuguaaucguccauuaauucauaaguuuu

SEQ ID NO: 267115 - RNA, 32 nt, Homo Sapiens
cacuuaggugaguucugccuccugcuagcuuc

SEQ ID NO: 267116 - RNA, 32 nt, Homo Sapiens
uguaaggaagcaggaaaaauuaacuacuuuca

SEQ ID NO: 267117 - RNA, 32 nt, Homo Sapiens
gccacagguguuuccugaaacugucuccuccu

SEQ ID NO: 267118 - RNA, 32 nt, Homo Sapiens
uugcccccauccccacccgccccucucccggc

SEQ ID NO: 267119 - RNA, 32 nt, Homo Sapiens
uuggaaggaaucagcuauguucugccuuuugc

SEQ ID NO: 267120 - RNA, 32 nt, Homo Sapiens
acucuaaguggaaaucaggauuguuaugaaga

SEQ ID NO: 267121 - RNA, 32 nt, Homo Sapiens
ggauccuugggaacgagagaaaaaagaaaccc

SEQ ID NO: 267122 - RNA, 32 nt, Homo Sapiens
auuuuacuaaacaaaauacuuccuauuugagc

SEQ ID NO: 267123 - RNA, 32 nt, Homo Sapiens
aucaucaguucagcuuuuuuuuuugguuguug

SEQ ID NO: 267124 - RNA, 32 nt, Homo Sapiens
cuugacugcccccuguugucccacacgugggg

SEQ ID NO: 267125 - RNA, 32 nt, Homo Sapiens
acugaggaccagcuccucaugcuugaggcugu

SEQ ID NO: 267126 - RNA, 32 nt, Homo Sapiens
uagaccagcuucccuucccuucuggggcugcc

SEQ ID NO: 267127 - RNA, 32 nt, Homo Sapiens
gcccccauagauauggcaaugguagucagcac

SEQ ID NO: 267128 - RNA, 32 nt, Homo Sapiens
gaggcucaggcauggcgggcugcaggucccga

SEQ ID NO: 267129 - RNA, 32 nt, Homo Sapiens
uucuuuuauuucuuuuucucuuugauugaaag

SEQ ID NO: 267130 - RNA, 27 nt, Homo Sapiens
aacauggcccaugucagcccccugcgc

SEQ ID NO: 267131 - RNA, 32 nt, Homo Sapiens
cccaagagugaggaagauuugcuggcccuggc

SEQ ID NO: 267132 - RNA, 32 nt, Homo Sapiens
uaaacugcuagcaggagcuguacaaugagaaa

SEQ ID NO: 267133 - RNA, 32 nt, Homo Sapiens
gcccucugucccugucccacccugucccugac

SEQ ID NO: 267134 - RNA, 32 nt, Homo Sapiens
cacuagaaauaauuauuauacuuauaaccauu

SEQ ID NO: 267135 - RNA, 32 nt, Homo Sapiens
auuucacagagguuuaaauacuguggagugac

SEQ ID NO: 267136 - RNA, 32 nt, Homo Sapiens
aaacaagggagaagagugucagaaucagaauc

SEQ ID NO: 267137 - RNA, 32 nt, Homo Sapiens
agcccgcccuccccuuuggccuucccagaauc

SEQ ID NO: 267138 - RNA, 32 nt, Homo Sapiens
cacuuucauggagacugcaauacguugcuaug

SEQ ID NO: 267139 - RNA, 32 nt, Homo Sapiens
ggaccccuguggcuaccaaaauccaugcuucu

SEQ ID NO: 267140 - RNA, 32 nt, Homo Sapiens
cugcuccaagccugcaggaccgagggccacag

SEQ ID NO: 267141 - RNA, 32 nt, Homo Sapiens
cugcuucgacgugugugucauggcuuaaaaau

SEQ ID NO: 267142 - RNA, 32 nt, Homo Sapiens
accgagaugggguggggacgcuucaaggccug

SEQ ID NO: 267143 - RNA, 32 nt, Homo Sapiens
cgggaaaucaggugcaagcauguguguucccg

SEQ ID NO: 267144 - RNA, 32 nt, Homo Sapiens
cucccgcagauccgaacggccugggcgggguc

SEQ ID NO: 267145 - RNA, 32 nt, Homo Sapiens
aaaaguuaccagaauuuauaauuuauaguaau

SEQ ID NO: 267146 - RNA, 32 nt, Homo Sapiens
gagaaacauucaacucugugagaugaaugcac

SEQ ID NO: 267147 - RNA, 32 nt, Homo Sapiens
acuuguugcagcaguuugaauuucccagauau

SEQ ID NO: 267148 - RNA, 32 nt, Homo Sapiens
aucccauguuccccccaguucuucccauccug

SEQ ID NO: 267149 - RNA, 32 nt, Homo Sapiens
auguacagagcuuaaauguaauuuauauguuu

SEQ ID NO: 267150 - RNA, 32 nt, Homo Sapiens
augagauccauaguuuuacagcauaugaagag

SEQ ID NO: 267151 - RNA, 32 nt, Homo Sapiens
uuuuaacucuacuguagaugcauguccaugca

SEQ ID NO: 267152 - RNA, 32 nt, Homo Sapiens
uuuuccugcuccaugcagacuguuagcuuuua

SEQ ID NO: 267153 - RNA, 32 nt, Homo Sapiens
gcuggggucucaggccggggccgcgggcgucc

SEQ ID NO: 267154 - RNA, 32 nt, Homo Sapiens
aaagaaugcuagguaaucuucguagaaaacua

SEQ ID NO: 267155 - RNA, 32 nt, Homo Sapiens
cagugcauuucaaauauauuugccauacccaa

SEQ ID NO: 267156 - RNA, 30 nt, Homo Sapiens
uuuaaagagaagcagacugacuuuggaaag

SEQ ID NO: 267157 - RNA, 32 nt, Homo Sapiens
ggaggacacaucuggaggaaauggccuucuuu

SEQ ID NO: 267158 - RNA, 32 nt, Homo Sapiens
gagacaaugucacacuucaaggaggcagcucu

SEQ ID NO: 267159 - RNA, 32 nt, Homo Sapiens
aaaguccuuaaauggacacaauagacauuauc

SEQ ID NO: 267160 - RNA, 30 nt, Homo Sapiens
uucucgcccugcucaggggaggguggugcu

SEQ ID NO: 267161 - RNA, 32 nt, Homo Sapiens
ccgcggcuggcacugcugcugcuucugcuccu

SEQ ID NO: 267162 - RNA, 32 nt, Homo Sapiens
ucaucaggugcuucuuuuuaaaacuagaacuu

SEQ ID NO: 267163 - RNA, 32 nt, Homo Sapiens
uccggggccuccugggacccuggcccucgccg

SEQ ID NO: 267164 - RNA, 32 nt, Homo Sapiens
aggaacacgguggagaggaaagagacaugccu

SEQ ID NO: 267165 - RNA, 30 nt, Homo Sapiens
cacgagggcggcggcggcgguagaggcggc

SEQ ID NO: 267166 - RNA, 32 nt, Homo Sapiens
aagauagagaauacaagaaaaguuuuugggau

SEQ ID NO: 267167 - RNA, 32 nt, Homo Sapiens
uuucacuccagccuggccccagucccagcccc

SEQ ID NO: 267168 - RNA, 32 nt, Homo Sapiens
uugagcugagaaugggagacagcggggcgggg

SEQ ID NO: 267169 - RNA, 32 nt, Homo Sapiens
ucccagauggaaagaccugagugccucucgcc

SEQ ID NO: 267170 - RNA, 32 nt, Homo Sapiens
gagccgcccucccuaucuugcugcuccucuug

SEQ ID NO: 267171 - RNA, 32 nt, Homo Sapiens
acuguacuaaucccuuuccccagauuguauca

SEQ ID NO: 267172 - RNA, 32 nt, Homo Sapiens
cccgagagucagaaccugggggagagggaugg

SEQ ID NO: 267173 - RNA, 32 nt, Homo Sapiens
gaggcagcgaccgcggucggugggcuccggcg

SEQ ID NO: 267174 - RNA, 32 nt, Homo Sapiens
uuuuaggcuaggaauguaauguugacauaaau

SEQ ID NO: 267175 - RNA, 32 nt, Homo Sapiens
acccaaauuaguuuccacaacgcaacuguguu

SEQ ID NO: 267176 - RNA, 32 nt, Homo Sapiens
ccagcagauuuuuucuuccaaaggaacaucag

SEQ ID NO: 267177 - RNA, 25 nt, Homo Sapiens
augucuggagccccugauguccugc

SEQ ID NO: 267178 - RNA, 32 nt, Homo Sapiens
caaaaugcugcuuuccucugugucucacagcu

SEQ ID NO: 267179 - RNA, 32 nt, Homo Sapiens
ucccugcucagcugcuggcccgggcgaccugg

SEQ ID NO: 267180 - RNA, 32 nt, Homo Sapiens
ugcggggcuccgagacagagccaggcgccccc

SEQ ID NO: 267181 - RNA, 32 nt, Homo Sapiens
gcuuugcgggcaauagaucagaggauauugcc

SEQ ID NO: 267182 - RNA, 32 nt, Homo Sapiens
accuguguccucgccgcaccacugccgcacac

SEQ ID NO: 267183 - RNA, 32 nt, Homo Sapiens
agacauuaaucugggcacuuugauuacaggca

SEQ ID NO: 267184 - RNA, 32 nt, Homo Sapiens
guggccguggacgggggcguggucgcggccgg

SEQ ID NO: 267185 - RNA, 30 nt, Homo Sapiens
ggagcgaggggcagggaugagucugucccu

SEQ ID NO: 267186 - RNA, 32 nt, Homo Sapiens
ugggcugugggaggcagcugugccguuuucug

SEQ ID NO: 267187 - RNA, 32 nt, Homo Sapiens
cgcccuccgagcucgccccgguggguguggcc

SEQ ID NO: 267188 - RNA, 32 nt, Homo Sapiens
cgagaaugcuaacagcacaggauacaguacuu

SEQ ID NO: 267189 - RNA, 32 nt, Homo Sapiens
ugucuggagcaauggaagaaccacuggaauaa

SEQ ID NO: 267190 - RNA, 32 nt, Homo Sapiens
cuggauugugaggcccgggaucugggcuccgc

SEQ ID NO: 267191 - RNA, 32 nt, Homo Sapiens
ugaggauaaugggaagagguuugguuuccugu

SEQ ID NO: 267192 - RNA, 32 nt, Homo Sapiens
uggcugagacugccuuacuggcagccaggugc

SEQ ID NO: 267193 - RNA, 32 nt, Homo Sapiens
cugaacgcccaccuuaauuuucauauaacugu

SEQ ID NO: 267194 - RNA, 32 nt, Homo Sapiens
uggaaauggaaagccagugaaggcugcuuugg

SEQ ID NO: 267195 - RNA, 32 nt, Homo Sapiens
auuacucaagauuauaaaucuguuuuuaaaau

SEQ ID NO: 267196 - RNA, 32 nt, Homo Sapiens
uaaaaucaucuuucuuuuuuguuuguuccuuu

SEQ ID NO: 267197 - RNA, 32 nt, Homo Sapiens
caucccuacccccuccuccccccguccaccca

SEQ ID NO: 267198 - RNA, 32 nt, Homo Sapiens
uacugcuuuaacagaagcugggagguuuacag

SEQ ID NO: 267199 - RNA, 32 nt, Homo Sapiens
gagaccguucccuccgccuucuuccucagagg

SEQ ID NO: 267200 - RNA, 32 nt, Homo Sapiens
ggagguuuguuguuuugccuguuaguuuugag

SEQ ID NO: 267201 - RNA, 32 nt, Homo Sapiens
ugaguuauuuuugaaugucauguuuaugucau

SEQ ID NO: 267202 - RNA, 32 nt, Homo Sapiens
gcugaagauuucaaacaaaagaaacugaugca

SEQ ID NO: 267203 - RNA, 32 nt, Homo Sapiens
aacaauuagggugacaugugugcacugaguaa

SEQ ID NO: 267204 - RNA, 32 nt, Homo Sapiens
acuguacuuuuguuuaaauuuaaugaaacaaa

SEQ ID NO: 267205 - RNA, 32 nt, Homo Sapiens
cucccuggccccagcgcggcuccacccugggc

SEQ ID NO: 267206 - RNA, 30 nt, Homo Sapiens
gaaccagggcugaugggggaccuccaccag

SEQ ID NO: 267207 - RNA, 32 nt, Homo Sapiens
uggugguggcugaugcuuguauucccagcauu

SEQ ID NO: 267208 - RNA, 32 nt, Homo Sapiens
caggacggcuccugggcagcugggcccuccug

SEQ ID NO: 267209 - RNA, 32 nt, Homo Sapiens
uggagugcaggggacaaggcucugaacauagc

SEQ ID NO: 267210 - RNA, 32 nt, Homo Sapiens
aaggggaaaauauuuuacgaagcucuguguuc

SEQ ID NO: 267211 - RNA, 32 nt, Homo Sapiens
cugugucuccacguguggaucagcagcaccuc

SEQ ID NO: 267212 - RNA, 31 nt, Homo Sapiens
ucuuuauugagcauuuuggagacugguuuuu

SEQ ID NO: 267213 - RNA, 32 nt, Homo Sapiens
ggcgaucaaaagggcagacaugcugaaguaug

SEQ ID NO: 267214 - RNA, 32 nt, Homo Sapiens
ucgggucugaccaggagauggaggaugugucc

SEQ ID NO: 267215 - RNA, 32 nt, Homo Sapiens
cugcgcuucucgcacucugaacugcuuacuau

SEQ ID NO: 267216 - RNA, 32 nt, Homo Sapiens
cuacauaaacaguuuuguacaaugaaaauuac

SEQ ID NO: 267217 - RNA, 32 nt, Homo Sapiens
cuaggaacuuuauguauacuggauuuggguug

SEQ ID NO: 267218 - RNA, 32 nt, Homo Sapiens
ucgucuaucccauggagucacuaggaucuaag

SEQ ID NO: 267219 - RNA, 32 nt, Homo Sapiens
ggcaauaauuuucuaagacccgugugaaugug

SEQ ID NO: 267220 - RNA, 32 nt, Homo Sapiens
cuuguauaaaaugacuggauguguauaaagga

SEQ ID NO: 267221 - RNA, 32 nt, Homo Sapiens
cagugaggagagagccugggggucggcugggg

SEQ ID NO: 267222 - RNA, 32 nt, Homo Sapiens
aguggcagcuucaagagcaacuucuccacaug

SEQ ID NO: 267223 - RNA, 32 nt, Homo Sapiens
gacagggaggguguuuuggguggcauagaggu

SEQ ID NO: 267224 - RNA, 32 nt, Homo Sapiens
aauauuaaucuguguccccaccuagugagcug

SEQ ID NO: 267225 - RNA, 32 nt, Homo Sapiens
ccaagccccccgccccgcccccaucaccccgu

SEQ ID NO: 267226 - RNA, 32 nt, Homo Sapiens
caucuggaccugguuuaggggguuagaugcuu

SEQ ID NO: 267227 - RNA, 32 nt, Homo Sapiens
ggauggugcgaucccgggcccgagggcaucag

SEQ ID NO: 267228 - RNA, 32 nt, Homo Sapiens
uggcuacucugugccagagccuggggcucuaa

SEQ ID NO: 267229 - RNA, 32 nt, Homo Sapiens
acucccaaaugacuccuccccuucguuggccc

SEQ ID NO: 267230 - RNA, 32 nt, Homo Sapiens
uauucuugagccauagcuauggcauauucuuc

SEQ ID NO: 267231 - RNA, 32 nt, Homo Sapiens
uuuguguagagguagugaugaggaggccugcu

SEQ ID NO: 267232 - RNA, 32 nt, Homo Sapiens
uugauggggugcuguguaaaucuuguauuuau

SEQ ID NO: 267233 - RNA, 32 nt, Homo Sapiens
ggucccagugauuauacguuauugguugcugu

SEQ ID NO: 267234 - RNA, 32 nt, Homo Sapiens
ggagaaucgcuugaaccccggagguagagguu

SEQ ID NO: 267235 - RNA, 32 nt, Homo Sapiens
cgaauuaccacaucgcucccagauggguguac

SEQ ID NO: 267236 - RNA, 32 nt, Homo Sapiens
aauuuugaaaaauuuaaacauaaaaaauaaaa

SEQ ID NO: 267237 - RNA, 32 nt, Homo Sapiens
cuuccauauaaaaugguauuugaaagugagag

SEQ ID NO: 267238 - RNA, 32 nt, Homo Sapiens
uuaagaggaaauggacuggcauuuauggugaa

SEQ ID NO: 267239 - RNA, 32 nt, Homo Sapiens
uuuuguuccuuccugcugggcugccucgugca

SEQ ID NO: 267240 - RNA, 32 nt, Homo Sapiens
ucuggcgugaggggucagagggcgcgccgacg

SEQ ID NO: 267241 - RNA, 32 nt, Homo Sapiens
ugauggccucauccagggccacguucuccugg

SEQ ID NO: 267242 - RNA, 32 nt, Homo Sapiens
uacaggcgcccaccaccacaccuggcuaauuu

SEQ ID NO: 267243 - RNA, 32 nt, Homo Sapiens
aguacaggguccccggccucuccuuuaagauu

SEQ ID NO: 267244 - RNA, 32 nt, Homo Sapiens
acauggcagcuacugcaucuucaugugucaca

SEQ ID NO: 267245 - RNA, 32 nt, Homo Sapiens
guucuguucagugugcucuuuggacuacauua

SEQ ID NO: 267246 - RNA, 32 nt, Homo Sapiens
gaaaggcccucccucacccugcuccccaccca

SEQ ID NO: 267247 - RNA, 30 nt, Homo Sapiens
acccugcccucugccacccaggcugcgucc

SEQ ID NO: 267248 - RNA, 32 nt, Homo Sapiens
uaaaggcaacccugagggacuuggcaguagaa

SEQ ID NO: 267249 - RNA, 32 nt, Homo Sapiens
ggggaucuugguacagacgagcaagcgguccc

SEQ ID NO: 267250 - RNA, 32 nt, Homo Sapiens
guaagauaaaccuggaggagaagcacaguugu

SEQ ID NO: 267251 - RNA, 32 nt, Homo Sapiens
uaugaugaucagaugcugaauuuugugaaaug

SEQ ID NO: 267252 - RNA, 32 nt, Homo Sapiens
cgugggccuaggugguccucagcccucaugac

SEQ ID NO: 267253 - RNA, 32 nt, Homo Sapiens
ugugcccguccucggugcagagugacgagagc

SEQ ID NO: 267254 - RNA, 32 nt, Homo Sapiens
cucugcugcccagagccccaggaggcaaaucu

SEQ ID NO: 267255 - RNA, 32 nt, Homo Sapiens
gcauaugaucaaaauacccacuacuugauagc

SEQ ID NO: 267256 - RNA, 32 nt, Homo Sapiens
cuuacauaugcaaugaaugugguaaaggcuuc

SEQ ID NO: 267257 - RNA, 31 nt, Homo Sapiens
ccagaguaagggaaagcaggaguccaaaucu

SEQ ID NO: 267258 - RNA, 32 nt, Homo Sapiens
aaaguuuuagggauuaauuaagcagagagcca

SEQ ID NO: 267259 - RNA, 32 nt, Homo Sapiens
aucaaauugacaaaauuacugaagauaggcca

SEQ ID NO: 267260 - RNA, 32 nt, Homo Sapiens
aggcaagaauacuugggagcggaaaaaaggug

SEQ ID NO: 267261 - RNA, 32 nt, Homo Sapiens
cgcgcucagagcccggccgggccucggcgugg

SEQ ID NO: 267262 - RNA, 32 nt, Homo Sapiens
ugugauaaccaccauggauacauuuugguggc

SEQ ID NO: 267263 - RNA, 32 nt, Homo Sapiens
acuuaauucuuuugccuauuuaaaaaacuggg

SEQ ID NO: 267264 - RNA, 32 nt, Homo Sapiens
auuugagagauuugcauaaaucaauaaaacaa

SEQ ID NO: 267265 - RNA, 32 nt, Homo Sapiens
gaaucacuuaggauggagacugggaccugcau

SEQ ID NO: 267266 - RNA, 32 nt, Homo Sapiens
aggccaagugaagcgguccggcuggggucggc

SEQ ID NO: 267267 - RNA, 32 nt, Homo Sapiens
cagagcccgcuggcagagccgcggguugacga

SEQ ID NO: 267268 - RNA, 32 nt, Homo Sapiens
agacggggcggccguggcuccgagggcgggag

SEQ ID NO: 267269 - RNA, 32 nt, Homo Sapiens
cgggagagagacggagucccgcucugucacgc

SEQ ID NO: 267270 - RNA, 32 nt, Homo Sapiens
acacgccgcgcugaggcccgcgggcccgucau

SEQ ID NO: 267271 - RNA, 32 nt, Homo Sapiens
aggauggcagcgggaccggcggcucuaagguu

SEQ ID NO: 267272 - RNA, 32 nt, Homo Sapiens
ccuaaaauaugauucuauuuauuuugagucac

SEQ ID NO: 267273 - RNA, 32 nt, Homo Sapiens
uggugcccggaauggucuccucuucuucuuuc

SEQ ID NO: 267274 - RNA, 32 nt, Homo Sapiens
uuaauuuuuuaaaggacacugcuaaugauuga

SEQ ID NO: 267275 - RNA, 32 nt, Homo Sapiens
agucccuagaaacuggucuuuguuuuguuuuu

SEQ ID NO: 267276 - RNA, 28 nt, Homo Sapiens
accacguacaacaugaaauuuugaaaca

SEQ ID NO: 267277 - RNA, 32 nt, Homo Sapiens
uacgggcgucgcccgagacaggacggagucaa

SEQ ID NO: 267278 - RNA, 32 nt, Homo Sapiens
uggaugcgugcccgcuggaccucugccccugc

SEQ ID NO: 267279 - RNA, 32 nt, Homo Sapiens
aaacuuauaaaccacgagaaauauauaggcuu

SEQ ID NO: 267280 - RNA, 32 nt, Homo Sapiens
augggagaugcaucugugcagaaaugcgggug

SEQ ID NO: 267281 - RNA, 32 nt, Homo Sapiens
ggcccgagcuguggccggcguggaugaggggc

SEQ ID NO: 267282 - RNA, 32 nt, Homo Sapiens
aauaugacaaugaaaucuguguguaucagauu

SEQ ID NO: 267283 - RNA, 32 nt, Homo Sapiens
aagguaguaaaagggaacauuacuucugcuuu

SEQ ID NO: 267284 - RNA, 32 nt, Homo Sapiens
caacuuccaagcuuucuguuugcucccugugu

SEQ ID NO: 267285 - RNA, 32 nt, Homo Sapiens
uugcacuagcuguuuccucugccuaaacaucc

SEQ ID NO: 267286 - RNA, 32 nt, Homo Sapiens
gaugagggaaaaugucccacugcacugcgaau

SEQ ID NO: 267287 - RNA, 32 nt, Homo Sapiens
gccuccccucgcucgcucuccucuuccucuag

SEQ ID NO: 267288 - RNA, 32 nt, Homo Sapiens
acuccaagaagcugcgggaaggacagcagggg

SEQ ID NO: 267289 - RNA, 32 nt, Homo Sapiens
uuauuuucaaugaaacaaagaaagagauguua

SEQ ID NO: 267290 - RNA, 32 nt, Homo Sapiens
acucccuuggaagggagggaaccacccgugag

SEQ ID NO: 267291 - RNA, 32 nt, Homo Sapiens
agcaagcaaguuggcaugcaugagauauagaa

SEQ ID NO: 267292 - RNA, 32 nt, Homo Sapiens
cacaaaugucccagcccucccuggucaccgcc

SEQ ID NO: 267293 - RNA, 32 nt, Homo Sapiens
caccuguacuauauuucuauuagacuaaaguu

SEQ ID NO: 267294 - RNA, 32 nt, Homo Sapiens
caagagaauaagcagugcuuugaaaggaucca

SEQ ID NO: 267295 - RNA, 32 nt, Homo Sapiens
gaaucuucaaaauaaccacagucugaucuuac

SEQ ID NO: 267296 - RNA, 32 nt, Homo Sapiens
ccagaggccccaggcucugugcugaugaacag

SEQ ID NO: 267297 - RNA, 32 nt, Homo Sapiens
aacagccaggcccccaggaggacagccaugga

SEQ ID NO: 267298 - RNA, 32 nt, Homo Sapiens
uuuuacaauuuaauaaugugauauuuccuaug

SEQ ID NO: 267299 - RNA, 32 nt, Homo Sapiens
ggugucaggcugucacuguucacacaaauuuu

SEQ ID NO: 267300 - RNA, 32 nt, Homo Sapiens
acuuucuccucuccccucucccaagcacaucu

SEQ ID NO: 267301 - RNA, 32 nt, Homo Sapiens
ggugaaguuuguauguuuaccuaauauuaccu

SEQ ID NO: 267302 - RNA, 32 nt, Homo Sapiens
cagcuuaaaaauuuugauuguuaaugcccuau

SEQ ID NO: 267303 - RNA, 32 nt, Homo Sapiens
ugaaaggcugaguggggcgcgcgaagggcggc

SEQ ID NO: 267304 - RNA, 32 nt, Homo Sapiens
auugagucaacuucagaaaaccauccaacagc

SEQ ID NO: 267305 - RNA, 32 nt, Homo Sapiens
uccuugcacuuggccaugauaaggagaugcuu

SEQ ID NO: 267306 - RNA, 32 nt, Homo Sapiens
acgagaucugaugagugaugcuauggaggaga

SEQ ID NO: 267307 - RNA, 32 nt, Homo Sapiens
aauaauuguucucaaguuauugcaauaaaugu

SEQ ID NO: 267308 - RNA, 32 nt, Homo Sapiens
uccuuccccuccccaaccccaggcccaccaug

SEQ ID NO: 267309 - RNA, 32 nt, Homo Sapiens
cugggagcauccccuuagcagcagccucugau

SEQ ID NO: 267310 - RNA, 32 nt, Homo Sapiens
acugggaaugacuucagguuauuuucacugca

SEQ ID NO: 267311 - RNA, 32 nt, Homo Sapiens
cugcuuuccucuuuucgaugugcguuuucgga

SEQ ID NO: 267312 - RNA, 32 nt, Homo Sapiens
ggccgcgcucccgcugcuccugccgggugaug

SEQ ID NO: 267313 - RNA, 32 nt, Homo Sapiens
uggauuuccuccccgcaucucagcucuccguc

SEQ ID NO: 267314 - RNA, 32 nt, Homo Sapiens
acuuaucauaauguucaauuugauacaguaga

SEQ ID NO: 267315 - RNA, 32 nt, Homo Sapiens
ucucuggccccggcacaugucaccccugcacu

SEQ ID NO: 267316 - RNA, 31 nt, Homo Sapiens
acacccauguggcaaacacgggccgugaggc

SEQ ID NO: 267317 - RNA, 32 nt, Homo Sapiens
agaaacagaugaauucaauguggccuuuugac

SEQ ID NO: 267318 - RNA, 32 nt, Homo Sapiens
uggcgagaggaagagggacuagguccaaacgc

SEQ ID NO: 267319 - RNA, 32 nt, Homo Sapiens
uagguaaacgggcccucuccaacacucccgcu

SEQ ID NO: 267320 - RNA, 32 nt, Homo Sapiens
caucuucaaugugccauagaccuucccacaaa

SEQ ID NO: 267321 - RNA, 32 nt, Homo Sapiens
cuggaagugccucccacccaugagaugggugu

SEQ ID NO: 267322 - RNA, 32 nt, Homo Sapiens
agagacauaaaaugggagaagaaguuauacca

SEQ ID NO: 267323 - RNA, 32 nt, Homo Sapiens
aaaaugugauuuuuuuuuuuuaaccaguauug

SEQ ID NO: 267324 - RNA, 32 nt, Homo Sapiens
gccacgagcccgccgccucuucgccgcccgcc

SEQ ID NO: 267325 - RNA, 32 nt, Homo Sapiens
ucucuguauguccuagaauaagaagcaaugau

SEQ ID NO: 267326 - RNA, 32 nt, Homo Sapiens
gauuggcaggcgacuccccgccccugccccgc

SEQ ID NO: 267327 - RNA, 32 nt, Homo Sapiens
acccuccagguggugccgggcuggggcugggg

SEQ ID NO: 267328 - RNA, 32 nt, Homo Sapiens
ugguggagguggagaugggcaccugcagcuuu

SEQ ID NO: 267329 - RNA, 32 nt, Homo Sapiens
uccguugagggcugcagucagaggcccuggac

SEQ ID NO: 267330 - RNA, 32 nt, Homo Sapiens
accaagcagaaucucucaaccugaucuuagua

SEQ ID NO: 267331 - RNA, 32 nt, Homo Sapiens
gcagccagucagcuugccgccggcggccaagc

SEQ ID NO: 267332 - RNA, 32 nt, Homo Sapiens
ugguucguguguguuaccauuauucuuuuguc

SEQ ID NO: 267333 - RNA, 32 nt, Homo Sapiens
ggcggaguucaucgcugagagcccccgccucc

SEQ ID NO: 267334 - RNA, 32 nt, Homo Sapiens
ggcuuuucuuugcaugaugcugaagccagaag

SEQ ID NO: 267335 - RNA, 32 nt, Homo Sapiens
cugagcgcauacguaguugguucuuaccccca

SEQ ID NO: 267336 - RNA, 32 nt, Homo Sapiens
cggcagccggucuggacgcgcggccggggcug

SEQ ID NO: 267337 - RNA, 32 nt, Homo Sapiens
auggcagcuccucugcagcuuccuccucagcc

SEQ ID NO: 267338 - RNA, 32 nt, Homo Sapiens
aguuuuauuuuuggccuucuaagaaagugucu

SEQ ID NO: 267339 - RNA, 32 nt, Homo Sapiens
caagggcagcuacuucggcuacgccguggacu

SEQ ID NO: 267340 - RNA, 32 nt, Homo Sapiens
aaauuagcugggugugguagugcgugccugug

SEQ ID NO: 267341 - RNA, 32 nt, Homo Sapiens
ccccagcccccugacaccccagcccccgccag

SEQ ID NO: 267342 - RNA, 32 nt, Homo Sapiens
uauuucaggggguggggaggggcaugugcagg

SEQ ID NO: 267343 - RNA, 32 nt, Homo Sapiens
uaaaaaucaccauagaguuuauagggaaaccg

SEQ ID NO: 267344 - RNA, 32 nt, Homo Sapiens
ucugaucugaagauuuugggcguucaaggcau

SEQ ID NO: 267345 - RNA, 32 nt, Homo Sapiens
cuauagacucaaagcugaauugagaucagggu

SEQ ID NO: 267346 - RNA, 32 nt, Homo Sapiens
cacacuccccacgcgccgccucccggaagccc

SEQ ID NO: 267347 - RNA, 32 nt, Homo Sapiens
gacaaacugacagggacugcuuugaaagacag

SEQ ID NO: 267348 - RNA, 32 nt, Homo Sapiens
cacaaaggcuccugggacucugggcagaguca

SEQ ID NO: 267349 - RNA, 32 nt, Homo Sapiens
aaggaaaccaucgccaucaucaucaccaccau

SEQ ID NO: 267350 - RNA, 32 nt, Homo Sapiens
uaaggggaaugcuuuauuauggcugcuguugu

SEQ ID NO: 267351 - RNA, 32 nt, Homo Sapiens
gagaugcgccgcggcugcacacggucgcccgc

SEQ ID NO: 267352 - RNA, 32 nt, Homo Sapiens
cuucccuggccggcugccauggccaggagcua

SEQ ID NO: 267353 - RNA, 32 nt, Homo Sapiens
cagacuagcaauuugggggcuuacucaugcua

SEQ ID NO: 267354 - RNA, 32 nt, Homo Sapiens
aaaaagaagcuacuuccuauauuacaguauga

SEQ ID NO: 267355 - RNA, 32 nt, Homo Sapiens
cccauuuucuuuuuuucuuuuacuuuucuuuu

SEQ ID NO: 267356 - RNA, 31 nt, Homo Sapiens
uacuagaacauauuuugauaaagacaccagu

SEQ ID NO: 267357 - RNA, 32 nt, Homo Sapiens
gaaagucugucucuuccauuucugggagcugg

SEQ ID NO: 267358 - RNA, 32 nt, Homo Sapiens
cacaguaguuguaggauugcuuuucuguauca

SEQ ID NO: 267359 - RNA, 32 nt, Homo Sapiens
uagagggagaaugggaaccacccccucagucc

SEQ ID NO: 267360 - RNA, 32 nt, Homo Sapiens
gagccugggaugaccuggcccaguugcccuuc

SEQ ID NO: 267361 - RNA, 32 nt, Homo Sapiens
ugugaagucucaauaauugauaccaaaauguu

SEQ ID NO: 267362 - RNA, 32 nt, Homo Sapiens
uaacaccuuuugcugcucacugagaacccagc

SEQ ID NO: 267363 - RNA, 32 nt, Homo Sapiens
aaaagauauugagguuucugcuaugccgucuu

SEQ ID NO: 267364 - RNA, 32 nt, Homo Sapiens
aagcaaucacugugcuagaaaaguauauuggc

SEQ ID NO: 267365 - RNA, 32 nt, Homo Sapiens
auauucguagugaugaucuguuuucucuaaaa

SEQ ID NO: 267366 - RNA, 32 nt, Homo Sapiens
cgggcgcccccucacccgcugcaggccccacc

SEQ ID NO: 267367 - RNA, 32 nt, Homo Sapiens
cccccacggaugggugcccacccccaccaguc

SEQ ID NO: 267368 - RNA, 32 nt, Homo Sapiens
gaagcggaggcgagaccgcgcucaacacuggg

SEQ ID NO: 267369 - RNA, 32 nt, Homo Sapiens
uuggagcccgcgcgcgcauggaggcguugccg

SEQ ID NO: 267370 - RNA, 32 nt, Homo Sapiens
gccagcaaaagaccuggcagguccugaaucaa

SEQ ID NO: 267371 - RNA, 32 nt, Homo Sapiens
uaggaaacagaaaagagaagaaagaagcacuc

SEQ ID NO: 267372 - RNA, 32 nt, Homo Sapiens
agggcauuuauaguccaguggugagugaggga

SEQ ID NO: 267373 - RNA, 32 nt, Homo Sapiens
ccugucaucagauuuaauuaaaauuauacuua

SEQ ID NO: 267374 - RNA, 32 nt, Homo Sapiens
gccgcgucuuggagcccuuccaggcggguccc

SEQ ID NO: 267375 - RNA, 32 nt, Homo Sapiens
uaugacuucuaaaaagugaaucuaucagcauu

SEQ ID NO: 267376 - RNA, 32 nt, Homo Sapiens
cauggaauuggaaccauaggucuuaguaaaca

SEQ ID NO: 267377 - RNA, 32 nt, Homo Sapiens
aacggaggcgucugcguuaggccugaccagug

SEQ ID NO: 267378 - RNA, 32 nt, Homo Sapiens
ugccccuucaccuuuaccccgcccgcaccccu

SEQ ID NO: 267379 - RNA, 32 nt, Homo Sapiens
gacuuaccaugggaugggguccagucccauga

SEQ ID NO: 267380 - RNA, 32 nt, Homo Sapiens
cccauauuccuccacagaucucucuuccuuga

SEQ ID NO: 267381 - RNA, 32 nt, Homo Sapiens
uccccauagggcuuccuccccugcuggguuug

SEQ ID NO: 267382 - RNA, 32 nt, Homo Sapiens
gcuggcgauccggagggccgcugagcucccca

SEQ ID NO: 267383 - RNA, 32 nt, Homo Sapiens
ccccgacucuccccaggcccccggugggcaug

SEQ ID NO: 267384 - RNA, 32 nt, Homo Sapiens
gccacugcacuacagcccgggcgacagaguga

SEQ ID NO: 267385 - RNA, 32 nt, Homo Sapiens
caccccucacuccccagggagcuccggggaca

SEQ ID NO: 267386 - RNA, 32 nt, Homo Sapiens
uuauugcaaggcaaaugggaacuaacacaucu

SEQ ID NO: 267387 - RNA, 32 nt, Homo Sapiens
ucccagacuuucucaagcuccuccucacugcc

SEQ ID NO: 267388 - RNA, 32 nt, Homo Sapiens
ccccgucucuacccccuaaaaauagaaagauu

SEQ ID NO: 267389 - RNA, 30 nt, Homo Sapiens
cugggcugcgggcccacgggucccggggau

SEQ ID NO: 267390 - RNA, 32 nt, Homo Sapiens
aguucauguccaaagcacuuuaggaggcugca

SEQ ID NO: 267391 - RNA, 30 nt, Homo Sapiens
ugguguaacagaauauugauaugcagcuug

SEQ ID NO: 267392 - RNA, 32 nt, Homo Sapiens
gcuguggggaagggcugaugcagguguggagu

SEQ ID NO: 267393 - RNA, 32 nt, Homo Sapiens
accgugccgccuucuuguggcugcugacuggg

SEQ ID NO: 267394 - RNA, 32 nt, Homo Sapiens
cccccaauuccagagagaaacacaucacuaga

SEQ ID NO: 267395 - RNA, 32 nt, Homo Sapiens
ggacgucaugcccgaggcuugcgugcaguuuc

SEQ ID NO: 267396 - RNA, 32 nt, Homo Sapiens
agagaccaggacucaguuccccugcccuaguc

SEQ ID NO: 267397 - RNA, 32 nt, Homo Sapiens
accucgcgcacgcccuggcccgcucccugccc

SEQ ID NO: 267398 - RNA, 32 nt, Homo Sapiens
ggggcuuucaaccaggcucacccaggcugggg

SEQ ID NO: 267399 - RNA, 32 nt, Homo Sapiens
aguugauccuaauuagcaaggauaacaaggua

SEQ ID NO: 267400 - RNA, 32 nt, Homo Sapiens
agacauuaauaaaaaucugaaagggccgggcg

SEQ ID NO: 267401 - RNA, 32 nt, Homo Sapiens
ucuuucuuuuuuuuuuuuuuuaauuucaagag

SEQ ID NO: 267402 - RNA, 32 nt, Homo Sapiens
agcaggcagugacccccagugcccuaguuuga

SEQ ID NO: 267403 - RNA, 32 nt, Homo Sapiens
auuuuagaccaguaaacuuaucuuuggugaga

SEQ ID NO: 267404 - RNA, 32 nt, Homo Sapiens
uugcacccgcauggcuccaccaaggccacaca

SEQ ID NO: 267405 - RNA, 32 nt, Homo Sapiens
cagugcuccaaggcagggacuggagaagccaa

SEQ ID NO: 267406 - RNA, 32 nt, Homo Sapiens
gccgacuacaaucccgagcccugccagccggg

SEQ ID NO: 267407 - RNA, 32 nt, Homo Sapiens
agagcuucuuuuucuuuuuugugguuuaguua

SEQ ID NO: 267408 - RNA, 32 nt, Homo Sapiens
ugcaccaacuaccuuuucagauuuccgguaau

SEQ ID NO: 267409 - RNA, 32 nt, Homo Sapiens
auuguuuguaccauuccaguccuuuucaaauc

SEQ ID NO: 267410 - RNA, 32 nt, Homo Sapiens
caacuugcugaaauacaccauuauuauuuguu

SEQ ID NO: 267411 - RNA, 32 nt, Homo Sapiens
auauaaaaaaagacaucgcuagugagcacgcu

SEQ ID NO: 267412 - RNA, 32 nt, Homo Sapiens
gcgaacaggaggagaaggaggucgcgcggccu

SEQ ID NO: 267413 - RNA, 32 nt, Homo Sapiens
guuuugugaaucugugcugauguaaugugcac

SEQ ID NO: 267414 - RNA, 32 nt, Homo Sapiens
aaagacaaccuugaucuuuaauaaaaaagaag

SEQ ID NO: 267415 - RNA, 32 nt, Homo Sapiens
auuaaggcagaguuuuacuguaauauuugcaa

SEQ ID NO: 267416 - RNA, 32 nt, Homo Sapiens
cagagagacaccuggucagccagcguugcaaa

SEQ ID NO: 267417 - RNA, 32 nt, Homo Sapiens
gagccuauauagccuuccugugagagaggauu

SEQ ID NO: 267418 - RNA, 32 nt, Homo Sapiens
uuaaauuagcuauuuuaaccauuucuagucuc

SEQ ID NO: 267419 - RNA, 32 nt, Homo Sapiens
caccaggggaggugggguuuggugagagacgc

SEQ ID NO: 267420 - RNA, 32 nt, Homo Sapiens
uggaaagcgucuugcuugcccagcgcgcgcua

SEQ ID NO: 267421 - RNA, 32 nt, Homo Sapiens
acugcauuccuaccuagcuuugaaauaaauua

SEQ ID NO: 267422 - RNA, 29 nt, Homo Sapiens
gcgggcggacgacagaggaugccgaacca

SEQ ID NO: 267423 - RNA, 32 nt, Homo Sapiens
ugugauaggaagucccuguuguucuccguacu

SEQ ID NO: 267424 - RNA, 32 nt, Homo Sapiens
gcagcccggggagaggugggcugggcugcagg

SEQ ID NO: 267425 - RNA, 32 nt, Homo Sapiens
guucacaacccccacccucccccgcccccgcc

SEQ ID NO: 267426 - RNA, 32 nt, Homo Sapiens
cuuuacccugccugggucuccucccucacucu

SEQ ID NO: 267427 - RNA, 32 nt, Homo Sapiens
ccgucggacagagggcccagccgugauccagc

SEQ ID NO: 267428 - RNA, 32 nt, Homo Sapiens
uccucuaaguccccggcacacucgcugauugg

SEQ ID NO: 267429 - RNA, 32 nt, Homo Sapiens
gaaucggcggcacgcgccgcaggaggcuggga

SEQ ID NO: 267430 - RNA, 32 nt, Homo Sapiens
ucgccgcgcgccccuggcuucgacccggacgg

SEQ ID NO: 267431 - RNA, 32 nt, Homo Sapiens
uauuugugagacuguaaguuacaugaaggcag

SEQ ID NO: 267432 - RNA, 32 nt, Homo Sapiens
ccuggacaguggcagaaccuuuccaguguucu

SEQ ID NO: 267433 - RNA, 32 nt, Homo Sapiens
accuguucguauuccuucuccccagccggcau

SEQ ID NO: 267434 - RNA, 32 nt, Homo Sapiens
ccugcccaacuuuauccagagcgugcugucgu

SEQ ID NO: 267435 - RNA, 32 nt, Homo Sapiens
aggggcaaaaacccuccccaggaaggaggagg

SEQ ID NO: 267436 - RNA, 32 nt, Homo Sapiens
guucucuggagccccaggacccaggccgcuug

SEQ ID NO: 267437 - RNA, 32 nt, Homo Sapiens
uggucaaaauuaacauuaaaaacauuuuagac

SEQ ID NO: 267438 - RNA, 30 nt, Homo Sapiens
uaaaacuguauugauaccaagaguauguuu

SEQ ID NO: 267439 - RNA, 32 nt, Homo Sapiens
gucaauaagcagccacuguuuccaccucccca

SEQ ID NO: 267440 - RNA, 32 nt, Homo Sapiens
uuggauggagcacuuaaacuuucagcuaagga

SEQ ID NO: 267441 - RNA, 29 nt, Homo Sapiens
uaauaugaauggaguuaauaguucuaaug

SEQ ID NO: 267442 - RNA, 32 nt, Homo Sapiens
uaaaagccuucugagagggcugugcuggggug

SEQ ID NO: 267443 - RNA, 27 nt, Homo Sapiens
guuugccauuaauuucugagugggaca

SEQ ID NO: 267444 - RNA, 32 nt, Homo Sapiens
ccuuuaaguccucucuucucuauuccugaccc

SEQ ID NO: 267445 - RNA, 32 nt, Homo Sapiens
gaaaaccuggaaagaauuucuggacuuuagcc

SEQ ID NO: 267446 - RNA, 32 nt, Homo Sapiens
uuccauuugacaaaaauaauacaauuccacag

SEQ ID NO: 267447 - RNA, 32 nt, Homo Sapiens
ucacugccaauauacaagcaguauaucagauu

SEQ ID NO: 267448 - RNA, 32 nt, Homo Sapiens
cuugucaaggccaguucugcagugacaggccc

SEQ ID NO: 267449 - RNA, 32 nt, Homo Sapiens
aacacagaugacuaauuuuagaccuauuuuac

SEQ ID NO: 267450 - RNA, 32 nt, Homo Sapiens
agccugcguuguuugucuucaucuaauccagc

SEQ ID NO: 267451 - RNA, 32 nt, Homo Sapiens
ccugccccaccaagcccugucugaaguggagc

SEQ ID NO: 267452 - RNA, 32 nt, Homo Sapiens
ccuguuucuccacuuccuucucuauugguugg

SEQ ID NO: 267453 - RNA, 32 nt, Homo Sapiens
cccacugucucucaccucccccaccccccacu

SEQ ID NO: 267454 - RNA, 32 nt, Homo Sapiens
gauacagaaauacagcaagccuuaauauaaag

SEQ ID NO: 267455 - RNA, 32 nt, Homo Sapiens
uauggguccagcugcguuuccaucacucgcua

SEQ ID NO: 267456 - RNA, 32 nt, Homo Sapiens
uuagaacuuaggaagugccaguggguugguga

SEQ ID NO: 267457 - RNA, 32 nt, Homo Sapiens
uaccguggcgggggcgggcagggguucccauu

SEQ ID NO: 267458 - RNA, 32 nt, Homo Sapiens
ucuaagugggaccaaagaaaaaauagcgaacu

SEQ ID NO: 267459 - RNA, 32 nt, Homo Sapiens
gggagggggaucacgcagagggacaggugcag

SEQ ID NO: 267460 - RNA, 32 nt, Homo Sapiens
gguuaaaucaucuuuacaaaaugugugcuuua

SEQ ID NO: 267461 - RNA, 32 nt, Homo Sapiens
ucucccugccccagcucugcugcccgcccuuc

SEQ ID NO: 267462 - RNA, 32 nt, Homo Sapiens
uuaaaaaaaaaaguuacagaaauacuauaaca

SEQ ID NO: 267463 - RNA, 32 nt, Homo Sapiens
uuauuuucuuuuucuuuuuuaaauucuuagug

SEQ ID NO: 267464 - RNA, 32 nt, Homo Sapiens
cuuuacaccaccuucucaacacugcugaaaag

SEQ ID NO: 267465 - RNA, 31 nt, Homo Sapiens
ccucaggugaucugccugccuuggccuccca

SEQ ID NO: 267466 - RNA, 32 nt, Homo Sapiens
gguaaggaauaaaaaauguacagaugacucag

SEQ ID NO: 267467 - RNA, 32 nt, Homo Sapiens
gagauagagagcugcuuuuaugcugagauccu

SEQ ID NO: 267468 - RNA, 32 nt, Homo Sapiens
cuuucugucugccuauuuuuacuuuguguuug

SEQ ID NO: 267469 - RNA, 32 nt, Homo Sapiens
cugaugcguggcggcccccacccggccucggc

SEQ ID NO: 267470 - RNA, 32 nt, Homo Sapiens
cacuggagauguuuaaaguuggccucuauccu

SEQ ID NO: 267471 - RNA, 32 nt, Homo Sapiens
gaagaggaaggggagagucggcggucggagcg

SEQ ID NO: 267472 - RNA, 32 nt, Homo Sapiens
cagcacauuguuagacccaucuuaauuaagcc

SEQ ID NO: 267473 - RNA, 32 nt, Homo Sapiens
aaauaguuaacacuaagacagguccagucuuu

SEQ ID NO: 267474 - RNA, 30 nt, Homo Sapiens
augggguuucacuguguuagccaggauggu

SEQ ID NO: 267475 - RNA, 32 nt, Homo Sapiens
uggguuccacagggucugagcuccucagaggu

SEQ ID NO: 267476 - RNA, 32 nt, Homo Sapiens
acucaaagaaaagaggcagccggcugugcgug

SEQ ID NO: 267477 - RNA, 32 nt, Homo Sapiens
agccacaaguucucaauucuuaagagacaugg

SEQ ID NO: 267478 - RNA, 32 nt, Homo Sapiens
ugugagcccgcggcgugaggcgugggaggaag

SEQ ID NO: 267479 - RNA, 32 nt, Homo Sapiens
aaauagauuggaaaugauuguugcaucucacu

SEQ ID NO: 267480 - RNA, 32 nt, Homo Sapiens
ucuguuaucuucugugaaaucauccuacaagc

SEQ ID NO: 267481 - RNA, 32 nt, Homo Sapiens
ccagccuggcuccaucagccuccagcuuccuu

SEQ ID NO: 267482 - RNA, 32 nt, Homo Sapiens
cagcugcgaggugaugggggcuggggccccag

SEQ ID NO: 267483 - RNA, 32 nt, Homo Sapiens
ucauuaugaacaaagaagucucccagguguga

SEQ ID NO: 267484 - RNA, 32 nt, Homo Sapiens
uucaggauuaggaauuuggguuugucauagau

SEQ ID NO: 267485 - RNA, 32 nt, Homo Sapiens
aaggaucccuggauguuccaaccccauaaauc

SEQ ID NO: 267486 - RNA, 32 nt, Homo Sapiens
cuacugaucaauccccuccccggcugauuugc

SEQ ID NO: 267487 - RNA, 32 nt, Homo Sapiens
gcuucuucauuuccaacauggaagaaacuuac

SEQ ID NO: 267488 - RNA, 30 nt, Homo Sapiens
gaacuggcgcccgcucggagcggcgccgcg

SEQ ID NO: 267489 - RNA, 32 nt, Homo Sapiens
uacaguuuucuauucagauauguuuauuuuaa

SEQ ID NO: 267490 - RNA, 32 nt, Homo Sapiens
cuggcuguccuggagcugcugcuggagccugc

SEQ ID NO: 267491 - RNA, 32 nt, Homo Sapiens
agcaaacuccagcagaccugcagccgaggggc

SEQ ID NO: 267492 - RNA, 32 nt, Homo Sapiens
cauuuauuugaaauuugacucaugaacuauuu

SEQ ID NO: 267493 - RNA, 32 nt, Homo Sapiens
ugagcauucugaacuuuuuuaugauuuagauc

SEQ ID NO: 267494 - RNA, 30 nt, Homo Sapiens
uacagugucugugccauggauuucguuuuu

SEQ ID NO: 267495 - RNA, 32 nt, Homo Sapiens
uuagauacauagccgacuguauacagagguuc

SEQ ID NO: 267496 - RNA, 32 nt, Homo Sapiens
aggaaggcaaucugggaauggguuggaugggg

SEQ ID NO: 267497 - RNA, 32 nt, Homo Sapiens
gcucuggccugcugguucccacuccauacuuu

SEQ ID NO: 267498 - RNA, 32 nt, Homo Sapiens
cuagugaccagauauauagaaggacugcagcc

SEQ ID NO: 267499 - RNA, 32 nt, Homo Sapiens
gugaucuugccuuugcuccaucugcaagacca

SEQ ID NO: 267500 - RNA, 32 nt, Homo Sapiens
ggcacuucuuucgugguaguucuuuuauuuuu

SEQ ID NO: 267501 - RNA, 32 nt, Homo Sapiens
ccguggacaccggucccccagcccccaccguc

SEQ ID NO: 267502 - RNA, 32 nt, Homo Sapiens
uccaggucaggaggggagggugcugggccuga

SEQ ID NO: 267503 - RNA, 32 nt, Homo Sapiens
uuuucauuucgguggcaacaaucuucauugua

SEQ ID NO: 267504 - RNA, 32 nt, Homo Sapiens
ugguuggagcuuuuggggggaauuaugaagaa

SEQ ID NO: 267505 - RNA, 32 nt, Homo Sapiens
ggacagcccuccccucaccacucccuaccuug

SEQ ID NO: 267506 - RNA, 32 nt, Homo Sapiens
gaguucguguccuaauggucucuaauucacau

SEQ ID NO: 267507 - RNA, 32 nt, Homo Sapiens
ccugcaagcgggagagagcggcgaggcggcgg

SEQ ID NO: 267508 - RNA, 32 nt, Homo Sapiens
ugacuauaugagaauggaaacuucuaaggaag

SEQ ID NO: 267509 - RNA, 32 nt, Homo Sapiens
accaacagagcuggagcccucuguggagggag

SEQ ID NO: 267510 - RNA, 32 nt, Homo Sapiens
cauucuggaucuaaaccgccacaggggccuga

SEQ ID NO: 267511 - RNA, 32 nt, Homo Sapiens
cagcagccccuccuuguuaccguguuccggag

SEQ ID NO: 267512 - RNA, 32 nt, Homo Sapiens
uauuuuuuaaaugggagcaacauaucagucgu

SEQ ID NO: 267513 - RNA, 31 nt, Homo Sapiens
uguccccaagccagacuugcgguuggagucu

SEQ ID NO: 267514 - RNA, 32 nt, Homo Sapiens
acccaccauaggaaacaagacaacauucaauu

SEQ ID NO: 267515 - RNA, 32 nt, Homo Sapiens
cgcugcugggccccaucuccacaggagagacu

SEQ ID NO: 267516 - RNA, 32 nt, Homo Sapiens
ggcagcuugagccugucacguggucaaggccc

SEQ ID NO: 267517 - RNA, 32 nt, Homo Sapiens
gggagaagaacagaccgauuugaaagauucaa

SEQ ID NO: 267518 - RNA, 32 nt, Homo Sapiens
acauagugccagcagcagugccacgcaguucc

SEQ ID NO: 267519 - RNA, 31 nt, Homo Sapiens
uccccaggcugggagugggugagacgagacu

SEQ ID NO: 267520 - RNA, 32 nt, Homo Sapiens
ucacacuaaaauuuaauuggauauugaugaaa

SEQ ID NO: 267521 - RNA, 32 nt, Homo Sapiens
cagggacuuaaucaacgcaagcuuaugacccg

SEQ ID NO: 267522 - RNA, 32 nt, Homo Sapiens
ccugcucugaaucgaaguccuaguuccuuccu

SEQ ID NO: 267523 - RNA, 32 nt, Homo Sapiens
aaagcaccaagagguuuucagauggaagugag

SEQ ID NO: 267524 - RNA, 32 nt, Homo Sapiens
auuagaagaaaauggaugacaaagaaauugag

SEQ ID NO: 267525 - RNA, 32 nt, Homo Sapiens
cugugauguucccaccugcuucuguagaaaug

SEQ ID NO: 267526 - RNA, 32 nt, Homo Sapiens
aggucucuggucuucccaggcagaggacccug

SEQ ID NO: 267527 - RNA, 32 nt, Homo Sapiens
uguuguguuuucaugucuuuuuucagcccucu

SEQ ID NO: 267528 - RNA, 32 nt, Homo Sapiens
aaccaucguuaauacugaagugagcuauagca

SEQ ID NO: 267529 - RNA, 32 nt, Homo Sapiens
gggccagggagcgggcugggggugggaaggag

SEQ ID NO: 267530 - RNA, 32 nt, Homo Sapiens
ucccuauuuugacaccaaauuaugguguagac

SEQ ID NO: 267531 - RNA, 32 nt, Homo Sapiens
ggcgagcgcggguggggcgggguuaggcggcg

SEQ ID NO: 267532 - RNA, 32 nt, Homo Sapiens
caaagcagcugagaccccagcgaggggcggag

SEQ ID NO: 267533 - RNA, 32 nt, Homo Sapiens
ggcugcaaucaaagcauucgccaggcagaggu

SEQ ID NO: 267534 - RNA, 32 nt, Homo Sapiens
uggguagggauuggaaguacuuggcagggcag

SEQ ID NO: 267535 - RNA, 32 nt, Homo Sapiens
gucauucucagucuccucggagggagucugaa

SEQ ID NO: 267536 - RNA, 32 nt, Homo Sapiens
gcacgauggcugaagucuguaauccuagcacu

SEQ ID NO: 267537 - RNA, 32 nt, Homo Sapiens
gggccacgcgccguuugccgggacugagccgc

SEQ ID NO: 267538 - RNA, 32 nt, Homo Sapiens
uuccuuagucuagcauauccacaguguauaca

SEQ ID NO: 267539 - RNA, 32 nt, Homo Sapiens
ccuaguagcuggcgcccauccuagugggcacu

SEQ ID NO: 267540 - RNA, 32 nt, Homo Sapiens
auucuacagaagccccaguccauggucaccug

SEQ ID NO: 267541 - RNA, 32 nt, Homo Sapiens
aaaaggguggacucaccgcuguuguuuuaugg

SEQ ID NO: 267542 - RNA, 32 nt, Homo Sapiens
ucucuuucccccuuuuaauuugugaugucacu

SEQ ID NO: 267543 - RNA, 32 nt, Homo Sapiens
gacagagucucacuuugucacccaggcuggag

SEQ ID NO: 267544 - RNA, 32 nt, Homo Sapiens
ggcucuuucucuaugaaacugacuccaagggu

SEQ ID NO: 267545 - RNA, 32 nt, Homo Sapiens
acccaguuauuuaacaaauaaauaccucauug

SEQ ID NO: 267546 - RNA, 32 nt, Homo Sapiens
cacacucgagagccagauauuuuuguaguuuu

SEQ ID NO: 267547 - RNA, 32 nt, Homo Sapiens
uguucuguagcagccaccccccugcccccacu

SEQ ID NO: 267548 - RNA, 32 nt, Homo Sapiens
uccuucuguauauaccauggucuuacuuucca

SEQ ID NO: 267549 - RNA, 31 nt, Homo Sapiens
gccgucauggcgucgcccuucagcggggcgc

SEQ ID NO: 267550 - RNA, 32 nt, Homo Sapiens
cuccucaccucgcgcgcggcugacgcaggcag

SEQ ID NO: 267551 - RNA, 32 nt, Homo Sapiens
ccugccccaggcgugcagagccaggguccugg

SEQ ID NO: 267552 - RNA, 32 nt, Homo Sapiens
uucucaucucuuauguucugaagaauccagua

SEQ ID NO: 267553 - RNA, 32 nt, Homo Sapiens
aagggacggaacaggucacacccagagcggca

SEQ ID NO: 267554 - RNA, 32 nt, Homo Sapiens
ccgcgggaggaggaggagccggagccucugcc

SEQ ID NO: 267555 - RNA, 32 nt, Homo Sapiens
aaguguguucaaauuuggacuggccauuuccu

SEQ ID NO: 267556 - RNA, 32 nt, Homo Sapiens
uuuuacacuauuacuacauuaugggaagauuc

SEQ ID NO: 267557 - RNA, 32 nt, Homo Sapiens
aaaccacgucugugggaccccagggaccggcc

SEQ ID NO: 267558 - RNA, 32 nt, Homo Sapiens
gcaguggccccggcugucugcacauuuuuugu

SEQ ID NO: 267559 - RNA, 32 nt, Homo Sapiens
guguguagaaguggaaauacguaugccuccuu

SEQ ID NO: 267560 - RNA, 32 nt, Homo Sapiens
ggaauuagaaaagauuuggguguugauuuuuc

SEQ ID NO: 267561 - RNA, 32 nt, Homo Sapiens
cgaggcuccccagcgucccccggaggagcggu

SEQ ID NO: 267562 - RNA, 32 nt, Homo Sapiens
cuccuuuuuuauuuuauguccucuauaugcca

SEQ ID NO: 267563 - RNA, 32 nt, Homo Sapiens
aaaauguguauauagagauaguauagacuccu

SEQ ID NO: 267564 - RNA, 32 nt, Homo Sapiens
auaaguacugaaucaguauuuauuaaguaaau

SEQ ID NO: 267565 - RNA, 32 nt, Homo Sapiens
gauuauuucagaguccacuguugugggcugac

SEQ ID NO: 267566 - RNA, 32 nt, Homo Sapiens
gacauucugggaacugaucagucuuccagcuu

SEQ ID NO: 267567 - RNA, 32 nt, Homo Sapiens
cuuugaaaauaaaacuaaaauaaaugucuaua

SEQ ID NO: 267568 - RNA, 32 nt, Homo Sapiens
ccagugucugaacucccugucccugucaaaua

SEQ ID NO: 267569 - RNA, 32 nt, Homo Sapiens
uucuuauuuguauaaugacacaaagcauuggg

SEQ ID NO: 267570 - RNA, 32 nt, Homo Sapiens
cugcuucuuggggcuccagcaccacccuucug

SEQ ID NO: 267571 - RNA, 32 nt, Homo Sapiens
acucaggugcauuuuuccaaucacaauauucu

SEQ ID NO: 267572 - RNA, 32 nt, Homo Sapiens
ccucccgaaggauggggaacccugcccucucu

SEQ ID NO: 267573 - RNA, 32 nt, Homo Sapiens
aguaucaaaauauauacacccccaacacugga

SEQ ID NO: 267574 - RNA, 32 nt, Homo Sapiens
uuuugccgaaacaauaaauugccuuuagcagc

SEQ ID NO: 267575 - RNA, 32 nt, Homo Sapiens
uuaaguucuuugauuuguaccauuccuucaaa

SEQ ID NO: 267576 - RNA, 32 nt, Homo Sapiens
aauuucauuauauguuaagaaaauaaaggaaa

SEQ ID NO: 267577 - RNA, 32 nt, Homo Sapiens
uucccaagccccaagacccgccucagaacuaa

SEQ ID NO: 267578 - RNA, 32 nt, Homo Sapiens
ugcagagcgaagccaccaagacuuuaugcgga

SEQ ID NO: 267579 - RNA, 32 nt, Homo Sapiens
ccaguaaguggaguuuuggacaugcugcugcu

SEQ ID NO: 267580 - RNA, 32 nt, Homo Sapiens
gcaugugugacugucucggaugaagugacuga

SEQ ID NO: 267581 - RNA, 32 nt, Homo Sapiens
ggccaggcggaagacccuggcuccgucauggc

SEQ ID NO: 267582 - RNA, 32 nt, Homo Sapiens
cagccuuccuucccugacccugagacucaccc

SEQ ID NO: 267583 - RNA, 32 nt, Homo Sapiens
gauaaauucuaccuuucugaugaacaugggaa

SEQ ID NO: 267584 - RNA, 32 nt, Homo Sapiens
uuuuaauuaauagaaagauuuuaauauccaag

SEQ ID NO: 267585 - RNA, 32 nt, Homo Sapiens
ggcuggucucaaacuccugaccucaggcgauc

SEQ ID NO: 267586 - RNA, 32 nt, Homo Sapiens
ggccggucucaaacuccugaccucaggugauc

SEQ ID NO: 267587 - RNA, 32 nt, Homo Sapiens
gucagcgucucgagaggccccuggacaauuga

SEQ ID NO: 267588 - RNA, 32 nt, Homo Sapiens
ugugccuuuuuauucaucuacuuuauuuugau

SEQ ID NO: 267589 - RNA, 32 nt, Homo Sapiens
uuuguguucaaucugcuucucuauaaaauccc

SEQ ID NO: 267590 - RNA, 32 nt, Homo Sapiens
gcaaauaagaccucuugauauuuucaaggacu

SEQ ID NO: 267591 - RNA, 32 nt, Homo Sapiens
ugaagcgcagcccucuguggcccgcagccccc

SEQ ID NO: 267592 - RNA, 32 nt, Homo Sapiens
ggaauucagauggucauguguauguguagagc

SEQ ID NO: 267593 - RNA, 32 nt, Homo Sapiens
ucuaucugacaguuuuucccccagggaagugc

SEQ ID NO: 267594 - RNA, 32 nt, Homo Sapiens
agaccucgcugggaccccggggccaccgggag

SEQ ID NO: 267595 - RNA, 32 nt, Homo Sapiens
uguagcaaagacuuaaauuuuguagauacaau

SEQ ID NO: 267596 - RNA, 32 nt, Homo Sapiens
aauuuacuuugagacacuuaugcucaaguugg

SEQ ID NO: 267597 - RNA, 32 nt, Homo Sapiens
caccuacuccuuucaugguuauaacacauugg

SEQ ID NO: 267598 - RNA, 32 nt, Homo Sapiens
ucucugcagccaacugagacuaucuugcugug

SEQ ID NO: 267599 - RNA, 32 nt, Homo Sapiens
ugaguaaaggagaaaugaaaaaauauuaaauc

SEQ ID NO: 267600 - RNA, 32 nt, Homo Sapiens
ugcagacuaacuccucuuuucaucucuuaccc

SEQ ID NO: 267601 - RNA, 32 nt, Homo Sapiens
ugccuuuuuuaaagcuauguuauuuauauguu

SEQ ID NO: 267602 - RNA, 32 nt, Homo Sapiens
aaauuagcugggugugguggcacgugccugua

SEQ ID NO: 267603 - RNA, 32 nt, Homo Sapiens
uugauuagggaagagggauguggucucugauc

SEQ ID NO: 267604 - RNA, 32 nt, Homo Sapiens
caauucaguauuuuuaaguacaccugucagcu

SEQ ID NO: 267605 - RNA, 32 nt, Homo Sapiens
uggaguaaaugcaauacuguguuguaauaucc

SEQ ID NO: 267606 - RNA, 32 nt, Homo Sapiens
ggacacgcugcccuucugccccugccugggaa

SEQ ID NO: 267607 - RNA, 32 nt, Homo Sapiens
aguacccccacgcuggccccagccucagaccc

SEQ ID NO: 267608 - RNA, 32 nt, Homo Sapiens
ggacuaaggcaccggaggauccccgcccugcc

SEQ ID NO: 267609 - RNA, 27 nt, Homo Sapiens
guguuccagccauucugguauuccuuu

SEQ ID NO: 267610 - RNA, 32 nt, Homo Sapiens
aaauuuaaaaacaggcaaaacuauggugaaaa

SEQ ID NO: 267611 - RNA, 32 nt, Homo Sapiens
ggaaggcaggagccuuccuuucuccugcccca

SEQ ID NO: 267612 - RNA, 32 nt, Homo Sapiens
aaggggcugggaggcaaacaagagggaacugu

SEQ ID NO: 267613 - RNA, 32 nt, Homo Sapiens
aacuagaaaacuaauuuuaaauauuguuaguu

SEQ ID NO: 267614 - RNA, 32 nt, Homo Sapiens
acggaccgcgcgcccgggugccugcuccgcua

SEQ ID NO: 267615 - RNA, 32 nt, Homo Sapiens
ggaagcgcacaguaaaagaauuccuuagcaug

SEQ ID NO: 267616 - RNA, 32 nt, Homo Sapiens
ggcccagaauguccaggucuccagggucccac

SEQ ID NO: 267617 - RNA, 32 nt, Homo Sapiens
uuucgucuucagccgccacgucaagaagcacc

SEQ ID NO: 267618 - RNA, 29 nt, Homo Sapiens
aaauugcaaagucagaauuuucuaaauga

SEQ ID NO: 267619 - RNA, 32 nt, Homo Sapiens
agugaggaaaucaaagugcuauuacgaaguuc

SEQ ID NO: 267620 - RNA, 32 nt, Homo Sapiens
ucacuggacucgccucucuccucuccuccccc

SEQ ID NO: 267621 - RNA, 32 nt, Homo Sapiens
auucuauacucuuuuugaaacuuuucuauaau

SEQ ID NO: 267622 - RNA, 32 nt, Homo Sapiens
ccauucauccucaaaaaagauaggaggcagug

SEQ ID NO: 267623 - RNA, 32 nt, Homo Sapiens
ugcccgcccucccagcucggucagcccggcca

SEQ ID NO: 267624 - RNA, 32 nt, Homo Sapiens
uagauccuggccuggggccuucggaacaugaa

SEQ ID NO: 267625 - RNA, 32 nt, Homo Sapiens
cugauuauaguucugaggcccuagcuacucac

SEQ ID NO: 267626 - RNA, 32 nt, Homo Sapiens
gcucuccaugugagacaaccacuccugcccug

SEQ ID NO: 267627 - RNA, 31 nt, Homo Sapiens
uuuaaguuucuugguugcccaagggcagagc

SEQ ID NO: 267628 - RNA, 32 nt, Homo Sapiens
uuaccccaagacagacacaaagggcagaaggu

SEQ ID NO: 267629 - RNA, 32 nt, Homo Sapiens
aggggauauuuuucaaccucuugcuuuauacu

SEQ ID NO: 267630 - RNA, 32 nt, Homo Sapiens
ucuccucuuucugccacuugugcgcugcuucc

SEQ ID NO: 267631 - RNA, 32 nt, Homo Sapiens
ccggcacgguuuccuggggacccaggcuugca

SEQ ID NO: 267632 - RNA, 32 nt, Homo Sapiens
ugggccggcuccccggccccuggcuugggcga

SEQ ID NO: 267633 - RNA, 32 nt, Homo Sapiens
cauaauuuuuccauuuguucugcauuuugauu

SEQ ID NO: 267634 - RNA, 31 nt, Homo Sapiens
gaggagaggcacugccggagcccuugccaga

SEQ ID NO: 267635 - RNA, 32 nt, Homo Sapiens
gugccaaauaauugaucagaugcugaauugag

SEQ ID NO: 267636 - RNA, 32 nt, Homo Sapiens
guuaauguuuugccuuguuuucuuuucuuccu

SEQ ID NO: 267637 - RNA, 32 nt, Homo Sapiens
gcaccagcacugccucccccagggauccucuc

SEQ ID NO: 267638 - RNA, 32 nt, Homo Sapiens
auauaaccuauauuucaagagagagaagauaa

SEQ ID NO: 267639 - RNA, 32 nt, Homo Sapiens
gauugcauauccuugaucagcccuuuuuccca

SEQ ID NO: 267640 - RNA, 32 nt, Homo Sapiens
guggagacagugccgucuggcaggugaaauac

SEQ ID NO: 267641 - RNA, 32 nt, Homo Sapiens
gggugcugaagaggcgcguggagacgaggcag

SEQ ID NO: 267642 - RNA, 32 nt, Homo Sapiens
ccaucugcaggagggcccggggcccccugccc

SEQ ID NO: 267643 - RNA, 32 nt, Homo Sapiens
cuccaggcccagcucuuccucccagcaaccuc

SEQ ID NO: 267644 - RNA, 32 nt, Homo Sapiens
auguuugcuuuaaaaauauauauguacaacau

SEQ ID NO: 267645 - RNA, 32 nt, Homo Sapiens
aucuuguuuuaaaaauacauauuucuaccucu

SEQ ID NO: 267646 - RNA, 28 nt, Homo Sapiens
cuucuguugacaaaggaaacacauacuc

SEQ ID NO: 267647 - RNA, 32 nt, Homo Sapiens
gcacugauauaaaagaaauauauuuguguuuu

SEQ ID NO: 267648 - RNA, 32 nt, Homo Sapiens
cuucggcagggcuggagcggcugcugguuggu

SEQ ID NO: 267649 - RNA, 32 nt, Homo Sapiens
cagccaaucuggagcuucauguuuccuucuaa

SEQ ID NO: 267650 - RNA, 32 nt, Homo Sapiens
aggagcagggacccgacuugcagacgcauugc

SEQ ID NO: 267651 - RNA, 32 nt, Homo Sapiens
cggcgguggcggccauggcggcagauggagag

SEQ ID NO: 267652 - RNA, 28 nt, Homo Sapiens
ggucagugaguuaccaggaauguuuaaa

SEQ ID NO: 267653 - RNA, 32 nt, Homo Sapiens
uaucuuauagacuugucuuguucagauucugu

SEQ ID NO: 267654 - RNA, 32 nt, Homo Sapiens
caucgccgccgggggagggagcgagggggccg

SEQ ID NO: 267655 - RNA, 32 nt, Homo Sapiens
aagacuuuucuuuuccuuccggaacauguucu

SEQ ID NO: 267656 - RNA, 32 nt, Homo Sapiens
gugagcgcucagcccggcaccuguuccuccag

SEQ ID NO: 267657 - RNA, 32 nt, Homo Sapiens
uuaugaaguggacacaaaguuacuuucuuuga

SEQ ID NO: 267658 - RNA, 32 nt, Homo Sapiens
cacuccuuaacuccuuaguauuucauagaaaa

SEQ ID NO: 267659 - RNA, 32 nt, Homo Sapiens
gagauccacugggauugucugagggaauucuu

SEQ ID NO: 267660 - RNA, 32 nt, Homo Sapiens
cccagccauucagagguuuccaaacuaagcca

SEQ ID NO: 267661 - RNA, 32 nt, Homo Sapiens
gacagaggggcagaugccauggagggcugagg

SEQ ID NO: 267662 - RNA, 32 nt, Homo Sapiens
aggucuucugccuuuccuuuccccgugagugu

SEQ ID NO: 267663 - RNA, 32 nt, Homo Sapiens
agggcacccuccccaccuagcccuccaaccaa

SEQ ID NO: 267664 - RNA, 32 nt, Homo Sapiens
guggcuccggggccugaguaggcgcugccgcu

SEQ ID NO: 267665 - RNA, 32 nt, Homo Sapiens
cagcgccccguccuuccgcagcccaaccgccu

SEQ ID NO: 267666 - RNA, 32 nt, Homo Sapiens
ccaaagagaaggcuaaugaggaugcugugcca

SEQ ID NO: 267667 - RNA, 32 nt, Homo Sapiens
ccgccaugauucugaggccucccuagccaugg

SEQ ID NO: 267668 - RNA, 32 nt, Homo Sapiens
aaguuauucuucauguagucugcugaucucag

SEQ ID NO: 267669 - RNA, 32 nt, Homo Sapiens
gcguccgacucgccgcgccgaacgaggucccg

SEQ ID NO: 267670 - RNA, 32 nt, Homo Sapiens
gcugcggagcgcggcgggcggccccuuggagc

SEQ ID NO: 267671 - RNA, 32 nt, Homo Sapiens
ugucauuuuugugccaaaugaagaguaggacu

SEQ ID NO: 267672 - RNA, 32 nt, Homo Sapiens
uucuugggaugaugauaauaaacauuuauuga

SEQ ID NO: 267673 - RNA, 32 nt, Homo Sapiens
uauagguuaaaauaaacuaugcuguuuuauuu

SEQ ID NO: 267674 - RNA, 29 nt, Homo Sapiens
agcugugugacuuuaucguuggagaguau

SEQ ID NO: 267675 - RNA, 32 nt, Homo Sapiens
uaacagacugucuacuuagauuguucuaggga

SEQ ID NO: 267676 - RNA, 32 nt, Homo Sapiens
uuuucccugcaggaauacaucgucagugccag

SEQ ID NO: 267677 - RNA, 30 nt, Homo Sapiens
gucuucuguuuccugggggaaaggggcauu

SEQ ID NO: 267678 - RNA, 32 nt, Homo Sapiens
gcaauacuuaggaggcuuacuucuuuggauua

SEQ ID NO: 267679 - RNA, 32 nt, Homo Sapiens
agaaggaaaaagacaaaaaggaagucuggauu

SEQ ID NO: 267680 - RNA, 32 nt, Homo Sapiens
uuugucacucuaagagcauccaagcccuggcc

SEQ ID NO: 267681 - RNA, 32 nt, Homo Sapiens
cucauguuucucuguuucucuuuuccacaauu

SEQ ID NO: 267682 - RNA, 32 nt, Homo Sapiens
gcuuaguaggagggucuggcccggggcgggga

SEQ ID NO: 267683 - RNA, 32 nt, Homo Sapiens
cuggcacucccagcccggggccugcugccucc

SEQ ID NO: 267684 - RNA, 32 nt, Homo Sapiens
caaauggugcccaaagaucugcuuucugaagg

SEQ ID NO: 267685 - RNA, 32 nt, Homo Sapiens
aaaggcagccuccuuaaauguuuucugaagag

SEQ ID NO: 267686 - RNA, 32 nt, Homo Sapiens
guugcucaucucuaaauugcuauacugucucc

SEQ ID NO: 267687 - RNA, 32 nt, Homo Sapiens
gcugucgggcuucggcggcuuuucucuuuagc

SEQ ID NO: 267688 - RNA, 32 nt, Homo Sapiens
uuuuaaaaaauauuuuuaucguugaaaccuug

SEQ ID NO: 267689 - RNA, 32 nt, Homo Sapiens
uaauucaccaaaaaguucauauaauuuaaaga

SEQ ID NO: 267690 - RNA, 32 nt, Homo Sapiens
augcuugguugaauaauauauuugcaaagaug

SEQ ID NO: 267691 - RNA, 32 nt, Homo Sapiens
uuuugguuugguuuuucuggggacugauaagu

SEQ ID NO: 267692 - RNA, 32 nt, Homo Sapiens
cucaagacauauauuuuugagaaauuaucauu

SEQ ID NO: 267693 - RNA, 32 nt, Homo Sapiens
gaagcuacagcuuugauuagacgagaggcuau

SEQ ID NO: 267694 - RNA, 32 nt, Homo Sapiens
gaguugugcagguaagugcacuuuuagguaau

SEQ ID NO: 267695 - RNA, 32 nt, Homo Sapiens
ucgaggccccccaccccugauuuucggcaccc

SEQ ID NO: 267696 - RNA, 32 nt, Homo Sapiens
uacaacuggcucuuccuccccucacuaagaag

SEQ ID NO: 267697 - RNA, 32 nt, Homo Sapiens
cauguugugggaaagacccugugggagauauu

SEQ ID NO: 267698 - RNA, 32 nt, Homo Sapiens
cuuugcggcugucgucaagcgcggcguugggc

SEQ ID NO: 267699 - RNA, 32 nt, Homo Sapiens
accucgcccgucucccgccccuccaagccaca

SEQ ID NO: 267700 - RNA, 32 nt, Homo Sapiens
gccagggucagugcgcgcugcccgucgcgcug

SEQ ID NO: 267701 - RNA, 32 nt, Homo Sapiens
ccugaaacacuaaagagaaaugucuuuugugc

SEQ ID NO: 267702 - RNA, 32 nt, Homo Sapiens
ccgcgguccccggccuucccacggacgccugg

SEQ ID NO: 267703 - RNA, 32 nt, Homo Sapiens
ggaggccaaggcggguggaucgcgagaucagg

SEQ ID NO: 267704 - RNA, 32 nt, Homo Sapiens
agcuaccuagcaugcauuuuacacacauugga

SEQ ID NO: 267705 - RNA, 32 nt, Homo Sapiens
cagugccuccccucugcccagccccuguggcc

SEQ ID NO: 267706 - RNA, 32 nt, Homo Sapiens
ccuguacgcccauuguaucuuggaaguaacua

SEQ ID NO: 267707 - RNA, 32 nt, Homo Sapiens
auuuuauaugaacaguguuaauuuagaugcac

SEQ ID NO: 267708 - RNA, 32 nt, Homo Sapiens
uuccuugaagguagcuguaucuuauuuucuuu

SEQ ID NO: 267709 - RNA, 32 nt, Homo Sapiens
uacuucuugacgcaucuguuuauuuaaaccaa

SEQ ID NO: 267710 - RNA, 32 nt, Homo Sapiens
aagcuauacacagcucuguuuugucaaugacc

SEQ ID NO: 267711 - RNA, 32 nt, Homo Sapiens
uucucccgggaccgcccggccggagcugcggg

SEQ ID NO: 267712 - RNA, 32 nt, Homo Sapiens
aggcacccauucuucuugcuauccuccauccc

SEQ ID NO: 267713 - RNA, 32 nt, Homo Sapiens
uguucagcagagaaacccauguccucucucca

SEQ ID NO: 267714 - RNA, 32 nt, Homo Sapiens
gcuaauucuggcuccacuggcuuugccacuug

SEQ ID NO: 267715 - RNA, 32 nt, Homo Sapiens
cauacccgugugcgccagcaggaccacagcug

SEQ ID NO: 267716 - RNA, 32 nt, Homo Sapiens
ugaguuuuuuauuuuuaaguguuuguuuuuca

SEQ ID NO: 267717 - RNA, 32 nt, Homo Sapiens
gaaagaaaauagucuuccuucuuucuugggca

SEQ ID NO: 267718 - RNA, 32 nt, Homo Sapiens
gacuugcugaguuuggcauagauagugcacuc

SEQ ID NO: 267719 - RNA, 32 nt, Homo Sapiens
ccagggaaauggauauauauuuuuggacuggu

SEQ ID NO: 267720 - RNA, 32 nt, Homo Sapiens
augguaaaagucaaacaguauaaaaggguaua

SEQ ID NO: 267721 - RNA, 32 nt, Homo Sapiens
gcguccucuaugcccagaagugccagggaucg

SEQ ID NO: 267722 - RNA, 32 nt, Homo Sapiens
agagaacgcccucaucucuccucaccccugcc

SEQ ID NO: 267723 - RNA, 30 nt, Homo Sapiens
aaacaauguacaaaagggaagugcuggacc

SEQ ID NO: 267724 - RNA, 32 nt, Homo Sapiens
gccccacccccuccgcugauugccagaugggg

SEQ ID NO: 267725 - RNA, 32 nt, Homo Sapiens
ugacauuuagaagagaugcuggugauagucau

SEQ ID NO: 267726 - RNA, 32 nt, Homo Sapiens
aaauggagagaaaaaagaagagagccuaacug

SEQ ID NO: 267727 - RNA, 32 nt, Homo Sapiens
acaucgucaccaugggcaaguccauuggcaac

SEQ ID NO: 267728 - RNA, 32 nt, Homo Sapiens
cuauguccauucucauucguggcauguuuuga

SEQ ID NO: 267729 - RNA, 32 nt, Homo Sapiens
uaguuugugggccuuacaaaucaggccacugg

SEQ ID NO: 267730 - RNA, 32 nt, Homo Sapiens
uucuauguuuugugaaggccugaaacaggcaa

SEQ ID NO: 267731 - RNA, 32 nt, Homo Sapiens
aauugaacuuccaggaaagugugaagacccaa

SEQ ID NO: 267732 - RNA, 32 nt, Homo Sapiens
cauugcacuccagccuggcgacagagugagac

SEQ ID NO: 267733 - RNA, 32 nt, Homo Sapiens
agaucgcaacauugcacuccaggcugggcagc

SEQ ID NO: 267734 - RNA, 32 nt, Homo Sapiens
gaggauccagggaugaggauagaguggccuga

SEQ ID NO: 267735 - RNA, 32 nt, Homo Sapiens
guggaaaagaaaguacagaacaaacccugugu

SEQ ID NO: 267736 - RNA, 32 nt, Homo Sapiens
ggcuuugagcccuaucuuccacuacaaaugac

SEQ ID NO: 267737 - RNA, 32 nt, Homo Sapiens
cgaagcccugaacuugagacaccaaguuuguc

SEQ ID NO: 267738 - RNA, 32 nt, Homo Sapiens
gugcauagacauuucaaggauuuuuauugcuc

SEQ ID NO: 267739 - RNA, 32 nt, Homo Sapiens
cccuuuuggaauacauguguuauuguugcauu

SEQ ID NO: 267740 - RNA, 32 nt, Homo Sapiens
gccggucgcaauggaagaagagaucgccgcgc

SEQ ID NO: 267741 - RNA, 28 nt, Homo Sapiens
uuuggaagguuuuaacauugaaagugag

SEQ ID NO: 267742 - RNA, 32 nt, Homo Sapiens
uuaggucaaggugguugauaguuuguucaaau

SEQ ID NO: 267743 - RNA, 32 nt, Homo Sapiens
cuuaauaaauugagcagcauucauuaagugca

SEQ ID NO: 267744 - RNA, 32 nt, Homo Sapiens
agaaagagccgccgggcgcugccucgccagac

SEQ ID NO: 267745 - RNA, 32 nt, Homo Sapiens
aauggcuguaaauuauuguaaauauuaaagga

SEQ ID NO: 267746 - RNA, 32 nt, Homo Sapiens
aauauaaaggugauuguaugcauaaaacaggu

SEQ ID NO: 267747 - RNA, 32 nt, Homo Sapiens
uguauguagugcuacaauuagagaaacagaag

SEQ ID NO: 267748 - RNA, 32 nt, Homo Sapiens
cacuaccgcuggccggcgcccgggugggccug

SEQ ID NO: 267749 - RNA, 32 nt, Homo Sapiens
cgccgggagaccccggccguccuuuauccggu

SEQ ID NO: 267750 - RNA, 32 nt, Homo Sapiens
gugaaauggaaauacuguuuuuccuugugaau

SEQ ID NO: 267751 - RNA, 32 nt, Homo Sapiens
ggcuuaguuguguucauguuuugucuacagua

SEQ ID NO: 267752 - RNA, 32 nt, Homo Sapiens
gccaggggaaguggcccaugccugcuguccug

SEQ ID NO: 267753 - RNA, 32 nt, Homo Sapiens
acugugaacuauuuugaagaaaacacaacauu

SEQ ID NO: 267754 - RNA, 32 nt, Homo Sapiens
ccccaccaccgccagcuuccccugccuccuac

SEQ ID NO: 267755 - RNA, 27 nt, Homo Sapiens
cugcuuuacuucuucaacccaaccucc

SEQ ID NO: 267756 - RNA, 32 nt, Homo Sapiens
uggcugcagugcuggcucucaggguggucgcg

SEQ ID NO: 267757 - RNA, 32 nt, Homo Sapiens
agaauucuauagugucccacucuaucuguaaa

SEQ ID NO: 267758 - RNA, 32 nt, Homo Sapiens
uguaauucaauccuugguuguuauggcaaaca

SEQ ID NO: 267759 - RNA, 32 nt, Homo Sapiens
auaccaagugguuuccaaauggucaacuuacu

SEQ ID NO: 267760 - RNA, 32 nt, Homo Sapiens
agguagcacccugcucugucacuuccugcuca

SEQ ID NO: 267761 - RNA, 32 nt, Homo Sapiens
ggaugaugaugaugaggagauaggagguccaa

SEQ ID NO: 267762 - RNA, 32 nt, Homo Sapiens
gaaaaacacacacaguggggaauugauauucu

SEQ ID NO: 267763 - RNA, 32 nt, Homo Sapiens
gaccgcggggcgcuaacccuggagagcccagg

SEQ ID NO: 267764 - RNA, 32 nt, Homo Sapiens
guuauuugauaaauacugccaaauuguuuuuc

SEQ ID NO: 267765 - RNA, 32 nt, Homo Sapiens
cgggaguugaagagggcugcaaggugggaagu

SEQ ID NO: 267766 - RNA, 32 nt, Homo Sapiens
uaaugcgaaauuggauucugagcauuuguagc

SEQ ID NO: 267767 - RNA, 32 nt, Homo Sapiens
ccagaaccaaaauaagacuuaaacuguacagg

SEQ ID NO: 267768 - RNA, 32 nt, Homo Sapiens
agacaagcuuggucauaauagauccaguguuu

SEQ ID NO: 267769 - RNA, 30 nt, Homo Sapiens
caucccagggcucugauuagccaggccugg

SEQ ID NO: 267770 - RNA, 32 nt, Homo Sapiens
gggagcuaugaucuugccauugcacuccagcu

SEQ ID NO: 267771 - RNA, 32 nt, Homo Sapiens
ucaucuucuuuuccaguagaaaauaguuugug

SEQ ID NO: 267772 - RNA, 32 nt, Homo Sapiens
uuuuaguauccacaggauauuaaacguguaaa

SEQ ID NO: 267773 - RNA, 28 nt, Homo Sapiens
acaguggagugggccaggauggcucgcu

SEQ ID NO: 267774 - RNA, 32 nt, Homo Sapiens
uuuuuucuuuugauuuccucaggaccuuagag

SEQ ID NO: 267775 - RNA, 32 nt, Homo Sapiens
ccuuuuugcaguauauuucugaaaugacagaa

SEQ ID NO: 267776 - RNA, 32 nt, Homo Sapiens
gccccccugccagcuauugacacagcugcgaa

SEQ ID NO: 267777 - RNA, 32 nt, Homo Sapiens
ucuggugcuauuuuuauuuaagucuuuguuuc

SEQ ID NO: 267778 - RNA, 32 nt, Homo Sapiens
cggggagagcugccuccacggccgggcaccca

SEQ ID NO: 267779 - RNA, 32 nt, Homo Sapiens
auugccuuucuuauuugagauuuuacagcuau

SEQ ID NO: 267780 - RNA, 32 nt, Homo Sapiens
ccaggaagaugcuacgucaugccaaguguuuu

SEQ ID NO: 267781 - RNA, 32 nt, Homo Sapiens
acauuuauuuuugacugggcagauaggggauu

SEQ ID NO: 267782 - RNA, 32 nt, Homo Sapiens
cacccugggcgacagagugagacucggucuca

SEQ ID NO: 267783 - RNA, 32 nt, Homo Sapiens
gcuggccucucaucccccuucuucccacaacc

SEQ ID NO: 267784 - RNA, 32 nt, Homo Sapiens
gagguacagcuggcagagggaaaggcacuggg

SEQ ID NO: 267785 - RNA, 32 nt, Homo Sapiens
ggcacggcgagggggagcaggcuuggcucggg

SEQ ID NO: 267786 - RNA, 32 nt, Homo Sapiens
cugcccacaauauguacucauccaccaucaau

SEQ ID NO: 267787 - RNA, 32 nt, Homo Sapiens
uuccagauuaguguuauuuuuacuucaaacua

SEQ ID NO: 267788 - RNA, 32 nt, Homo Sapiens
gcgugguggcagccagcucucuggccaccaug

SEQ ID NO: 267789 - RNA, 32 nt, Homo Sapiens
guaggccacauaauuguaguauuuucaauaaa

SEQ ID NO: 267790 - RNA, 32 nt, Homo Sapiens
uaucaacuccccuccaaacaaacaauuaaaaa

SEQ ID NO: 267791 - RNA, 32 nt, Homo Sapiens
uaccuguugcuuaauuacaauauuucugauaa

SEQ ID NO: 267792 - RNA, 32 nt, Homo Sapiens
acuaugacaguguguauuaauaaaauauuugc

SEQ ID NO: 267793 - RNA, 32 nt, Homo Sapiens
ucggggaugugagcugagcugcacccagacaa

SEQ ID NO: 267794 - RNA, 32 nt, Homo Sapiens
agcagccggggucggagcggcuccucaagagu

SEQ ID NO: 267795 - RNA, 32 nt, Homo Sapiens
uccccuacaccugaaguuacacugccagcagu

SEQ ID NO: 267796 - RNA, 32 nt, Homo Sapiens
auuuguaacauagaaacgcuuccacuaaagga

SEQ ID NO: 267797 - RNA, 32 nt, Homo Sapiens
cuuggccgaagccgcgcgaaccucagggcaag

SEQ ID NO: 267798 - RNA, 32 nt, Homo Sapiens
aaaaaugcugucaaauccuuaauagcuacagg

SEQ ID NO: 267799 - RNA, 32 nt, Homo Sapiens
cgacuugaauguuuauacuuuuauucuauaau

SEQ ID NO: 267800 - RNA, 32 nt, Homo Sapiens
uuuauagcaagucuugaaaaucuuauggcauu

SEQ ID NO: 267801 - RNA, 32 nt, Homo Sapiens
agaauugguuauuugggggcuuuuuuacuuac

SEQ ID NO: 267802 - RNA, 32 nt, Homo Sapiens
aauauuuuuugaacaauagguacaauagaagg

SEQ ID NO: 267803 - RNA, 32 nt, Homo Sapiens
cuaagaagcugauuuugcuaaacuccuguucc

SEQ ID NO: 267804 - RNA, 32 nt, Homo Sapiens
ggggcugucgccuggcgccgcgcauggcccac

SEQ ID NO: 267805 - RNA, 32 nt, Homo Sapiens
ggguccacuucuuaaccuuccuuuuaacucug

SEQ ID NO: 267806 - RNA, 32 nt, Homo Sapiens
uuuccacacugucagagcuguuggccucgccu

SEQ ID NO: 267807 - RNA, 32 nt, Homo Sapiens
uacggcggcucugaagcagagcccugggacgg

SEQ ID NO: 267808 - RNA, 32 nt, Homo Sapiens
guauguauauauuaucaguacuggccuucucu

SEQ ID NO: 267809 - RNA, 32 nt, Homo Sapiens
uaccggaagagccugauguggggcaggguggg

SEQ ID NO: 267810 - RNA, 32 nt, Homo Sapiens
gaagcaucauccacgaaccagaaaauuggccc

SEQ ID NO: 267811 - RNA, 32 nt, Homo Sapiens
uauuuauauuuuuuaaaauggaaaagaucacu

SEQ ID NO: 267812 - RNA, 32 nt, Homo Sapiens
uccggacccuuucuucccauccuuugcuccua

SEQ ID NO: 267813 - RNA, 32 nt, Homo Sapiens
agcagcgccgccugcgggcauaccgucccccu

SEQ ID NO: 267814 - RNA, 32 nt, Homo Sapiens
cuaauuguauuuuuaauuuuuucuuuucuccc

SEQ ID NO: 267815 - RNA, 32 nt, Homo Sapiens
ggaaacucagaauauaagcauauaagaaaaau

SEQ ID NO: 267816 - RNA, 32 nt, Homo Sapiens
ggcagaguuggaagcagccaaaucacaguggg

SEQ ID NO: 267817 - RNA, 32 nt, Homo Sapiens
auguggauauuugguagcaaugacugaugugg

SEQ ID NO: 267818 - RNA, 32 nt, Homo Sapiens
augcagacauggugaauuuaauucaaggagga

SEQ ID NO: 267819 - RNA, 32 nt, Homo Sapiens
ugacuuauuuuuguuaguuuuugagggcagaa

SEQ ID NO: 267820 - RNA, 32 nt, Homo Sapiens
ggcaaggccuggcaaccuacagcccuccgacc

SEQ ID NO: 267821 - RNA, 32 nt, Homo Sapiens
uuuauuuuuuauuuuuccguucuaguggucuu

SEQ ID NO: 267822 - RNA, 32 nt, Homo Sapiens
caaagucuaaaaugguggggcaguagggaccu

SEQ ID NO: 267823 - RNA, 32 nt, Homo Sapiens
ccucugcccuuaacuggcuggaacugguucau

SEQ ID NO: 267824 - RNA, 32 nt, Homo Sapiens
agugcacggccuggagauagagggcagggacu

SEQ ID NO: 267825 - RNA, 32 nt, Homo Sapiens
uuuucucacaacacugaauuugguagcuuuuc

SEQ ID NO: 267826 - RNA, 32 nt, Homo Sapiens
cacaggucaggaguuugagaacagcuggccaa

SEQ ID NO: 267827 - RNA, 32 nt, Homo Sapiens
aaugguggucugaacaaggcaccuguaaauaa

SEQ ID NO: 267828 - RNA, 32 nt, Homo Sapiens
auuccuuuauaaauaacaucacaaaugagaac

SEQ ID NO: 267829 - RNA, 32 nt, Homo Sapiens
ccugaagguccgggauuggccggagcgcccgc

SEQ ID NO: 267830 - RNA, 32 nt, Homo Sapiens
ugggauguauucuucugcugcugcuuauuaaa

SEQ ID NO: 267831 - RNA, 32 nt, Homo Sapiens
auuuacauucagaguacacuuuucuuuggaaa

SEQ ID NO: 267832 - RNA, 29 nt, Homo Sapiens
cccaaauaaaguuuacuuguuuuacauuc

SEQ ID NO: 267833 - RNA, 32 nt, Homo Sapiens
uuccagaggagcuuuugggcucaucacuggcc

SEQ ID NO: 267834 - RNA, 32 nt, Homo Sapiens
aaugcugauuuaacauuuaaguaucacagcau

SEQ ID NO: 267835 - RNA, 32 nt, Homo Sapiens
accauuucagcuuuugcuauguaggcagaauu

SEQ ID NO: 267836 - RNA, 32 nt, Homo Sapiens
cccugagaaagauaugaggguuuaaaacgggu

SEQ ID NO: 267837 - RNA, 30 nt, Homo Sapiens
guauguggaggcggcggcgggagugcgggc

SEQ ID NO: 267838 - RNA, 32 nt, Homo Sapiens
ccaaaaggcagacauugcagugagccaagauc

SEQ ID NO: 267839 - RNA, 31 nt, Homo Sapiens
gggcgggcgggcccgccucaguguugcuucu

SEQ ID NO: 267840 - RNA, 32 nt, Homo Sapiens
aaugauacugucauccucuugggguuuaucag

SEQ ID NO: 267841 - RNA, 32 nt, Homo Sapiens
cccgauggaagguuuucaggcuccucacaaag

SEQ ID NO: 267842 - RNA, 32 nt, Homo Sapiens
accugagugacagccuggcccgcggccgccua

SEQ ID NO: 267843 - RNA, 31 nt, Homo Sapiens
gucaagaaccacagcacuugaguuaaaauac

SEQ ID NO: 267844 - RNA, 32 nt, Homo Sapiens
gggaugcuguacuuuuugaauuguugcagugu

SEQ ID NO: 267845 - RNA, 32 nt, Homo Sapiens
uucacacgcgccugugugcgguuccgggcauc

SEQ ID NO: 267846 - RNA, 32 nt, Homo Sapiens
ucuccagagucuuaugcagugccugggacaca

SEQ ID NO: 267847 - RNA, 32 nt, Homo Sapiens
uuagguuccgccugugguugcacauuugguuc

SEQ ID NO: 267848 - RNA, 32 nt, Homo Sapiens
augcacaccucugaagaccccugcaugaaaau

SEQ ID NO: 267849 - RNA, 32 nt, Homo Sapiens
cugggaggggagagccuggccagggcuggugu

SEQ ID NO: 267850 - RNA, 32 nt, Homo Sapiens
augcauuuccuauuuuuugucuacuuuugggu

SEQ ID NO: 267851 - RNA, 32 nt, Homo Sapiens
cgaugccgacaagaaaacuuuuaugagagaga

SEQ ID NO: 267852 - RNA, 32 nt, Homo Sapiens
cuauuaucucuuaaauuuuugccaguguguga

SEQ ID NO: 267853 - RNA, 32 nt, Homo Sapiens
ugcucugcccucagaccuggccaggugaugcu

SEQ ID NO: 267854 - RNA, 32 nt, Homo Sapiens
uugcguaacugagacuccuugauaugcuucag

SEQ ID NO: 267855 - RNA, 32 nt, Homo Sapiens
uuucugucaccuucuagccgcccgccacccca

SEQ ID NO: 267856 - RNA, 31 nt, Homo Sapiens
ucccccgcggugcaguugccccgcgggcgcc

SEQ ID NO: 267857 - RNA, 32 nt, Homo Sapiens
aaaggccucugaggaggaaagccuccuaauug

SEQ ID NO: 267858 - RNA, 29 nt, Homo Sapiens
ucgacucggacacagaggacagcggcagc

SEQ ID NO: 267859 - RNA, 32 nt, Homo Sapiens
cgaggacgacacugaggccucccgugccgccg

SEQ ID NO: 267860 - RNA, 32 nt, Homo Sapiens
caaauucaaggcuacgauauuuucuuauugca

SEQ ID NO: 267861 - RNA, 32 nt, Homo Sapiens
ucugaaugcauuauauuuuccaaaguauaccc

SEQ ID NO: 267862 - RNA, 32 nt, Homo Sapiens
gccucucccacuuuccucuuccccaaaguauc

SEQ ID NO: 267863 - RNA, 32 nt, Homo Sapiens
auuuucaguagcugaagaaaauauggcacugu

SEQ ID NO: 267864 - RNA, 32 nt, Homo Sapiens
gcacuauuuuaaaauuuuuuaauuuuucccau

SEQ ID NO: 267865 - RNA, 32 nt, Homo Sapiens
aaacaaggaaauguaccucuuucuucagaauu

SEQ ID NO: 267866 - RNA, 32 nt, Homo Sapiens
guucuuuuguuuucuuuuuuguaccaaaguca

SEQ ID NO: 267867 - RNA, 32 nt, Homo Sapiens
uaagaauauaaaauaauauaacaagugcagcu

SEQ ID NO: 267868 - RNA, 32 nt, Homo Sapiens
gacuguggcucgagcuggcccgcagacacgug

SEQ ID NO: 267869 - RNA, 32 nt, Homo Sapiens
ggccgccgagacccucaggggcugcggcccug

SEQ ID NO: 267870 - RNA, 32 nt, Homo Sapiens
agguaggggaaaaaaaucauuggcuaaguuaa

SEQ ID NO: 267871 - RNA, 32 nt, Homo Sapiens
ucuggcaucugcuguuccaccuccccccuccc

SEQ ID NO: 267872 - RNA, 32 nt, Homo Sapiens
uggcuggcgggccagcguggugcuccucagga

SEQ ID NO: 267873 - RNA, 32 nt, Homo Sapiens
guguuuaucacguucagagaaacucaagcuau

SEQ ID NO: 267874 - RNA, 32 nt, Homo Sapiens
ggacagcccuccccgcccuucguucugaguaa

SEQ ID NO: 267875 - RNA, 32 nt, Homo Sapiens
acacgcuaacuccgaagccuccccuuacgccc

SEQ ID NO: 267876 - RNA, 32 nt, Homo Sapiens
ucccggcugaggcgcagcggcgagaggucgcg

SEQ ID NO: 267877 - RNA, 31 nt, Homo Sapiens
cugacacaagccaccgccccugagugcucau

SEQ ID NO: 267878 - RNA, 32 nt, Homo Sapiens
uugcugaggcucugacccagugagauuacaga

SEQ ID NO: 267879 - RNA, 32 nt, Homo Sapiens
ccuaucguugguuugucuagaacacucagcug

SEQ ID NO: 267880 - RNA, 32 nt, Homo Sapiens
gaugguauaacucucagucagaggccaaugga

SEQ ID NO: 267881 - RNA, 32 nt, Homo Sapiens
ugaacaucaagccuguuaauucuucaaagaau

SEQ ID NO: 267882 - RNA, 32 nt, Homo Sapiens
ggcugaauuuucugcccugagaucugggcaua

SEQ ID NO: 267883 - RNA, 32 nt, Homo Sapiens
uuaguuuccuuccuuccccucugaccccuaag

SEQ ID NO: 267884 - RNA, 32 nt, Homo Sapiens
uugcuccgccucugcuggcacauuuccccaga

SEQ ID NO: 267885 - RNA, 32 nt, Homo Sapiens
acuucauuaaaauuaucuacaauuuccuaaua

SEQ ID NO: 267886 - RNA, 32 nt, Homo Sapiens
ucccggcgucgcuucggagcgcggcggcagcu

SEQ ID NO: 267887 - RNA, 32 nt, Homo Sapiens
ggaggaaaaugaaaaugcuucuagaaugagug

SEQ ID NO: 267888 - RNA, 32 nt, Homo Sapiens
gagcuucccuccccacccccauauguaucagu

SEQ ID NO: 267889 - RNA, 32 nt, Homo Sapiens
ccagcccgcgcgcgugagcagcuagccgacca

SEQ ID NO: 267890 - RNA, 32 nt, Homo Sapiens
aagaagccaggcccggcccuggccuuugagga

SEQ ID NO: 267891 - RNA, 27 nt, Homo Sapiens
ggagguuuuccucucagccccacccug

SEQ ID NO: 267892 - RNA, 32 nt, Homo Sapiens
caucacucugcuagguugggggcccccgaccc

SEQ ID NO: 267893 - RNA, 32 nt, Homo Sapiens
uuauuuuuucuuuucagccagagauuuuaaua

SEQ ID NO: 267894 - RNA, 32 nt, Homo Sapiens
gccugcccacuggucagccuucagggacccug

SEQ ID NO: 267895 - RNA, 30 nt, Homo Sapiens
gguugucaauauggcaugcagaauuauccc

SEQ ID NO: 267896 - RNA, 32 nt, Homo Sapiens
caguaaacgaucacugaagauuccuuggcuuu

SEQ ID NO: 267897 - RNA, 32 nt, Homo Sapiens
cauaacugccagcugcucuccccgagugcuca

SEQ ID NO: 267898 - RNA, 32 nt, Homo Sapiens
ugauugaguauuuuaaaauacuacuaaaguca

SEQ ID NO: 267899 - RNA, 32 nt, Homo Sapiens
ugugccaaacuuacugauauccucaucuguaa

SEQ ID NO: 267900 - RNA, 32 nt, Homo Sapiens
cuauggauguuuuuauuuuauauuuucuuuau

SEQ ID NO: 267901 - RNA, 32 nt, Homo Sapiens
uuaucacauuuuacgaagcaauuuuaaucuua

SEQ ID NO: 267902 - RNA, 32 nt, Homo Sapiens
ggucuggaggcacaaugcggggcugcagagga

SEQ ID NO: 267903 - RNA, 32 nt, Homo Sapiens
ccuucagccuggggcucuggcaucugagcccg

SEQ ID NO: 267904 - RNA, 32 nt, Homo Sapiens
aaccgagugaagaggauugaagaugaacccac

SEQ ID NO: 267905 - RNA, 32 nt, Homo Sapiens
aaaaauuuguguugugauacaaauuaaguuug

SEQ ID NO: 267906 - RNA, 32 nt, Homo Sapiens
ucacccccaaccccagaccccccuuggucaca

SEQ ID NO: 267907 - RNA, 32 nt, Homo Sapiens
ucgcgccucccgucccgucgccgcccuaggcc

SEQ ID NO: 267908 - RNA, 32 nt, Homo Sapiens
ggcacgagggcggggaggcggcggcuccaggg

SEQ ID NO: 267909 - RNA, 32 nt, Homo Sapiens
aaaguuguuggacuuuuaaauacauuuuuuca

SEQ ID NO: 267910 - RNA, 32 nt, Homo Sapiens
gagaguuaggugaugagucaccaccucaagag

SEQ ID NO: 267911 - RNA, 32 nt, Homo Sapiens
aauguguguggguugauugugaguaguuuucu

SEQ ID NO: 267912 - RNA, 32 nt, Homo Sapiens
acaaguccugggcaguucugguaaacggucca

SEQ ID NO: 267913 - RNA, 31 nt, Homo Sapiens
gggaaaaauuguaaggcaggaguuuggcaag

SEQ ID NO: 267914 - RNA, 32 nt, Homo Sapiens
augaguuuuuuccuuuguuuucuuuugcuggg

SEQ ID NO: 267915 - RNA, 32 nt, Homo Sapiens
ugaggcuuggacgcugugguccuccugguccg

SEQ ID NO: 267916 - RNA, 32 nt, Homo Sapiens
ucucucuccuucccugguccucaguuucccca

SEQ ID NO: 267917 - RNA, 32 nt, Homo Sapiens
augaaaagcauggaauauuauauuuuauuguu

SEQ ID NO: 267918 - RNA, 32 nt, Homo Sapiens
uuuauuugccuggggugcaacuucugcuucau

SEQ ID NO: 267919 - RNA, 32 nt, Homo Sapiens
agucaacaacacucgguccccuugaagaggca

SEQ ID NO: 267920 - RNA, 32 nt, Homo Sapiens
caugagguccaguguugucaccaucuauuagg

SEQ ID NO: 267921 - RNA, 31 nt, Homo Sapiens
caucugugaacuuaacacagagccuuauuua

SEQ ID NO: 267922 - RNA, 32 nt, Homo Sapiens
aaagaauuugaaagaggcuuagcgugaagggg

SEQ ID NO: 267923 - RNA, 32 nt, Homo Sapiens
gguccucuccuugccuuggccccagccucugc

SEQ ID NO: 267924 - RNA, 32 nt, Homo Sapiens
ggucuggaagcaugggggagggggagagaggu

SEQ ID NO: 267925 - RNA, 32 nt, Homo Sapiens
cuccagacccucgggaucuccguuuacaguuc

SEQ ID NO: 267926 - RNA, 32 nt, Homo Sapiens
cccaugccaaccccuccuggagccagccgaau

SEQ ID NO: 267927 - RNA, 32 nt, Homo Sapiens
gacggcaggaagcucugcccagaguggccuca

SEQ ID NO: 267928 - RNA, 32 nt, Homo Sapiens
auuuuuacuagauuuugcacuaacucauauua

SEQ ID NO: 267929 - RNA, 32 nt, Homo Sapiens
uugccuuucugcagguguuuccacgagccuau

SEQ ID NO: 267930 - RNA, 32 nt, Homo Sapiens
acucggcccccaaaaacugauaaaagaauaaa

SEQ ID NO: 267931 - RNA, 32 nt, Homo Sapiens
uuuuacaguaacuuauuuuaugaucgggugau

SEQ ID NO: 267932 - RNA, 32 nt, Homo Sapiens
ccagcccuggucaguuuugauucuuaacccca

SEQ ID NO: 267933 - RNA, 32 nt, Homo Sapiens
gggaggcugacgugggcagaucaugaggucag

SEQ ID NO: 267934 - RNA, 32 nt, Homo Sapiens
uauaucaggaccauguucucuguaggccacuu

SEQ ID NO: 267935 - RNA, 32 nt, Homo Sapiens
augguucugaccagucaggcaggcugggacug

SEQ ID NO: 267936 - RNA, 32 nt, Homo Sapiens
cacagcauggacaaaggcucacaggggugggg

SEQ ID NO: 267937 - RNA, 32 nt, Homo Sapiens
uugagaagaucuggggaagagaaggcggccac

SEQ ID NO: 267938 - RNA, 32 nt, Homo Sapiens
uuaaucagaagccugguugaagaggaaagacu

SEQ ID NO: 267939 - RNA, 32 nt, Homo Sapiens
cuccagccuuugcucccuccccgcugcccuuu

SEQ ID NO: 267940 - RNA, 30 nt, Homo Sapiens
ugccugcccgcgcagcagacccggggcggc

SEQ ID NO: 267941 - RNA, 32 nt, Homo Sapiens
auuucgcacuuucuccucugcugcucuccaga

SEQ ID NO: 267942 - RNA, 32 nt, Homo Sapiens
ucuggaacacgcugcggggcucccgggccuga

SEQ ID NO: 267943 - RNA, 32 nt, Homo Sapiens
gcgcggaggaggagguucccggaagccacgcg

SEQ ID NO: 267944 - RNA, 32 nt, Homo Sapiens
gucauuuuccuucccuucuccaucucucuggc

SEQ ID NO: 267945 - RNA, 32 nt, Homo Sapiens
auuauuuggaagcucggaagugaaauucuauu

SEQ ID NO: 267946 - RNA, 32 nt, Homo Sapiens
ucaguggggcagagacccguggauugcugugc

SEQ ID NO: 267947 - RNA, 32 nt, Homo Sapiens
aguuuggagaaugacuccaaagguuugagcuu

SEQ ID NO: 267948 - RNA, 32 nt, Homo Sapiens
agagaaauggaaagugaaagugagauucucug

SEQ ID NO: 267949 - RNA, 32 nt, Homo Sapiens
uauaaaauaaaauaaaccaagcacaaguacga

SEQ ID NO: 267950 - RNA, 32 nt, Homo Sapiens
aauuccggccagcagcuuccuccuucagccac

SEQ ID NO: 267951 - RNA, 32 nt, Homo Sapiens
gcuuagcugguggccagccugacuggcuuccu

SEQ ID NO: 267952 - RNA, 32 nt, Homo Sapiens
uuaguguugucugaaaugcaagagggaaggug

SEQ ID NO: 267953 - RNA, 32 nt, Homo Sapiens
cggccugguuccagcccugcuuuagcgugggu

SEQ ID NO: 267954 - RNA, 32 nt, Homo Sapiens
uauuucuuucuuaguuguuggcacucuuaggu

SEQ ID NO: 267955 - RNA, 32 nt, Homo Sapiens
ugugaacccacuuuugaccgucacacacauuu

SEQ ID NO: 267956 - RNA, 32 nt, Homo Sapiens
uggagguucuggggcgcagaaccgcuacugcu

SEQ ID NO: 267957 - RNA, 32 nt, Homo Sapiens
augaagucucccucuuguuacccaggcuggag

SEQ ID NO: 267958 - RNA, 32 nt, Homo Sapiens
uauacuguauaacccuacaaaauacauagaag

SEQ ID NO: 267959 - RNA, 32 nt, Homo Sapiens
ucgccuccuuucuccuuccuuccaaaauaaca

SEQ ID NO: 267960 - RNA, 32 nt, Homo Sapiens
ugcucuuguucuaaucucuaauagguuaacgu

SEQ ID NO: 267961 - RNA, 32 nt, Homo Sapiens
accucccaagacugccaagggcccuaccaugg

SEQ ID NO: 267962 - RNA, 32 nt, Homo Sapiens
gguaagaucuuagguuccaagauuuuacuuca

SEQ ID NO: 267963 - RNA, 32 nt, Homo Sapiens
caggggcucuuacuguguuuucuguaacaaca

SEQ ID NO: 267964 - RNA, 32 nt, Homo Sapiens
accugcaggaccuccuccugcuggccaccacc

SEQ ID NO: 267965 - RNA, 32 nt, Homo Sapiens
guccugucaccugccgcccagccccucuccug

SEQ ID NO: 267966 - RNA, 32 nt, Homo Sapiens
cuuccuagcagcuccuccuccucccucccaag

SEQ ID NO: 267967 - RNA, 32 nt, Homo Sapiens
gaccuaaggacacguggaagucaguuuaauug

SEQ ID NO: 267968 - RNA, 32 nt, Homo Sapiens
uaaguaaauccaguuuccaagaaccuaaacug

SEQ ID NO: 267969 - RNA, 32 nt, Homo Sapiens
ggaggcuguucauaaauuguaaauauauauuu

SEQ ID NO: 267970 - RNA, 32 nt, Homo Sapiens
guccguccggugcagcagcccggcgcauuccc

SEQ ID NO: 267971 - RNA, 32 nt, Homo Sapiens
accgugccaaccccacccagcuccaggcccac

SEQ ID NO: 267972 - RNA, 32 nt, Homo Sapiens
cuauauauuaaguggaaguggacuaucauaaa

SEQ ID NO: 267973 - RNA, 32 nt, Homo Sapiens
agagcguuucuaauaaaguuugucauucaguc

SEQ ID NO: 267974 - RNA, 32 nt, Homo Sapiens
ccaggacuaacuucuucagugcuuagagugug

SEQ ID NO: 267975 - RNA, 32 nt, Homo Sapiens
ugcuuuaaauuaaaauuuuaugacaguaucga

SEQ ID NO: 267976 - RNA, 32 nt, Homo Sapiens
uagaaacaaaaaugcaauuuuaaaaccuuaaa

SEQ ID NO: 267977 - RNA, 32 nt, Homo Sapiens
cacuguccgcgguggacucucauguggccaag

SEQ ID NO: 267978 - RNA, 32 nt, Homo Sapiens
gaaaaggaaauucaccgaucuguccgugaggc

SEQ ID NO: 267979 - RNA, 32 nt, Homo Sapiens
accccugggagaaucugaaucuucuuggagga

SEQ ID NO: 267980 - RNA, 32 nt, Homo Sapiens
cgggcuucuccaugacagcugcggcccgggcu

SEQ ID NO: 267981 - RNA, 32 nt, Homo Sapiens
cugagggauguuuuccccccuugcuugugccu

SEQ ID NO: 267982 - RNA, 32 nt, Homo Sapiens
ggccucggggaauggaagcggagaacgcgggc

SEQ ID NO: 267983 - RNA, 32 nt, Homo Sapiens
cgcaaaacauugucccuaacuccaccgccuau

SEQ ID NO: 267984 - RNA, 32 nt, Homo Sapiens
ggaaccuuuuggagagaacccccggcaggacc

SEQ ID NO: 267985 - RNA, 32 nt, Homo Sapiens
accccuuccuuccccaguggaagcauuuucaa

SEQ ID NO: 267986 - RNA, 32 nt, Homo Sapiens
ggcccucaugucaccauggucuucccggaugc

SEQ ID NO: 267987 - RNA, 32 nt, Homo Sapiens
cuauuucauauucuacagaaguaaaucagguu

SEQ ID NO: 267988 - RNA, 32 nt, Homo Sapiens
cucucucccaaguuuccuaucucgucaagauc

SEQ ID NO: 267989 - RNA, 32 nt, Homo Sapiens
aggagcagcggcggcuugaggacccggggaga

SEQ ID NO: 267990 - RNA, 32 nt, Homo Sapiens
ggaaucgcgggaagcuggcccaggucaggucc

SEQ ID NO: 267991 - RNA, 32 nt, Homo Sapiens
cggaucacaaggaaaacaaacucaggaagaaa

SEQ ID NO: 267992 - RNA, 32 nt, Homo Sapiens
gugaggggcacccagccccagccccaggggcg

SEQ ID NO: 267993 - RNA, 32 nt, Homo Sapiens
ugcgcgggcugcgccgagcgcugggcaggagg

SEQ ID NO: 267994 - RNA, 32 nt, Homo Sapiens
aaccccaucucuacuaaaaauaugaaaaucag

SEQ ID NO: 267995 - RNA, 32 nt, Homo Sapiens
ugauucuacccagccuauucucuuccccauuu

SEQ ID NO: 267996 - RNA, 32 nt, Homo Sapiens
gucccucccccucccgacaccauguccugccg

SEQ ID NO: 267997 - RNA, 32 nt, Homo Sapiens
aguuugauccugaguaugcuugguguuugccu

SEQ ID NO: 267998 - RNA, 31 nt, Homo Sapiens
ccaacuucggagccugcuagagccugcagaa

SEQ ID NO: 267999 - RNA, 32 nt, Homo Sapiens
ggcccagaacuggcagagagaagguugccaug

SEQ ID NO: 268000 - RNA, 32 nt, Homo Sapiens
ugucuguggguaugaagugguugggagaaucc

SEQ ID NO: 268001 - RNA, 32 nt, Homo Sapiens
uccuuacgcucgcggugaagucaagccucgga

SEQ ID NO: 268002 - RNA, 32 nt, Homo Sapiens
aucccuuuuaugaagggaucccauugaaugca

SEQ ID NO: 268003 - RNA, 32 nt, Homo Sapiens
cagcgcaggaggaccggcugccgccgccgccg

SEQ ID NO: 268004 - RNA, 32 nt, Homo Sapiens
ggagggcagggcuggggaccgaaggggacaag

SEQ ID NO: 268005 - RNA, 32 nt, Homo Sapiens
auucaucucuacaggcucaaaacuccucuuug

SEQ ID NO: 268006 - RNA, 32 nt, Homo Sapiens
aaacaguaggacauccuggguggguggagcug

SEQ ID NO: 268007 - RNA, 32 nt, Homo Sapiens
aauuuuauuuauuacuuuuuuauauacagaau

SEQ ID NO: 268008 - RNA, 32 nt, Homo Sapiens
ucacuuuaacaauaagggaacaaaauuuagua

SEQ ID NO: 268009 - RNA, 32 nt, Homo Sapiens
aucuaacaaaaaguggcauaaaauauuacaaa

SEQ ID NO: 268010 - RNA, 32 nt, Homo Sapiens
acucagugucugagagguuuugucugcggcuc

SEQ ID NO: 268011 - RNA, 31 nt, Homo Sapiens
gauuuguugaaagacauucaagauuacgaag

SEQ ID NO: 268012 - RNA, 32 nt, Homo Sapiens
aagguucaguaagacaaagugauuuaucaucu

SEQ ID NO: 268013 - RNA, 32 nt, Homo Sapiens
gaaugugcuugggucccacgugacugaucuga

SEQ ID NO: 268014 - RNA, 32 nt, Homo Sapiens
ugucuuugguagugcuucugcugcugccacca

SEQ ID NO: 268015 - RNA, 32 nt, Homo Sapiens
cuucgucuccucccccucccccgucugacgcu

SEQ ID NO: 268016 - RNA, 32 nt, Homo Sapiens
gcagggugcgagcaggggcuucgggccacgcu

SEQ ID NO: 268017 - RNA, 32 nt, Homo Sapiens
uacagagaccucuggugccugaccgcaguuca

SEQ ID NO: 268018 - RNA, 32 nt, Homo Sapiens
ggucugaggggcagcucuggccagugcucacc

SEQ ID NO: 268019 - RNA, 32 nt, Homo Sapiens
aauagauuccccauugccuccuccuucccaaa

SEQ ID NO: 268020 - RNA, 32 nt, Homo Sapiens
cgcgaggcucugcgucucugcgucccucgucg

SEQ ID NO: 268021 - RNA, 32 nt, Homo Sapiens
aacgcacugacauuuuuuuuuauuuaauauag

SEQ ID NO: 268022 - RNA, 32 nt, Homo Sapiens
ccccugccggugccgguacccuccaugcccug

SEQ ID NO: 268023 - RNA, 32 nt, Homo Sapiens
uacagauggcugccugcugcucggcuuugcuu

SEQ ID NO: 268024 - RNA, 32 nt, Homo Sapiens
uggggguggggaggagggggaugcgguagggg

SEQ ID NO: 268025 - RNA, 32 nt, Homo Sapiens
uucaucuguuaguggauacuugggcuacuucc

SEQ ID NO: 268026 - RNA, 32 nt, Homo Sapiens
aagaaagugucuauauuggaacuagggucauu

SEQ ID NO: 268027 - RNA, 32 nt, Homo Sapiens
gauaacugccaugcacuguacugcacacgucc

SEQ ID NO: 268028 - RNA, 31 nt, Homo Sapiens
gcccauauucauucuuugccaugaaaugaau

SEQ ID NO: 268029 - RNA, 32 nt, Homo Sapiens
guacugggaaagggauuuucagcccucagaau

SEQ ID NO: 268030 - RNA, 32 nt, Homo Sapiens
uauacuuuuguaaacaaaaauugaaacauuuc

SEQ ID NO: 268031 - RNA, 32 nt, Homo Sapiens
gggcucugcuaagggacgcgccucgccguggg

SEQ ID NO: 268032 - RNA, 32 nt, Homo Sapiens
cuucccugccugagacacgaauggaagccagg

SEQ ID NO: 268033 - RNA, 32 nt, Homo Sapiens
aggacguguguauacacacacacacacacaca

SEQ ID NO: 268034 - RNA, 32 nt, Homo Sapiens
cuaauuuuuuaaaaauauuuuuaguagagaca

SEQ ID NO: 268035 - RNA, 32 nt, Homo Sapiens
caggauuauuauuuuaaagauuagauuuaguc

SEQ ID NO: 268036 - RNA, 31 nt, Homo Sapiens
agaggacaagagguuuaugauagagggcauu

SEQ ID NO: 268037 - RNA, 32 nt, Homo Sapiens
agccugugcagccuccugggaauccagucuac

SEQ ID NO: 268038 - RNA, 32 nt, Homo Sapiens
uuugaaacagaaaaauauguaccaagaaucuu

SEQ ID NO: 268039 - RNA, 32 nt, Homo Sapiens
uccccaucgacgggaaggcuuggacuccaaga

SEQ ID NO: 268040 - RNA, 32 nt, Homo Sapiens
aguaaaggccaucaaacuacgcgauagucucu

SEQ ID NO: 268041 - RNA, 32 nt, Homo Sapiens
cuuuauuuaauggccaaaugguuuuugcaaga

SEQ ID NO: 268042 - RNA, 32 nt, Homo Sapiens
ggcggcuccucuaucaggaagauugugcaugc

SEQ ID NO: 268043 - RNA, 32 nt, Homo Sapiens
aaccugcggggccgcacggccguggucacggg

SEQ ID NO: 268044 - RNA, 32 nt, Homo Sapiens
ucauccucuucugcacccugcugugccucguu

SEQ ID NO: 268045 - RNA, 32 nt, Homo Sapiens
uuaguaaaaugaaaucaaaguauugaucaggg

SEQ ID NO: 268046 - RNA, 32 nt, Homo Sapiens
ugcaggcagacacauccucccaccagggcggc

SEQ ID NO: 268047 - RNA, 32 nt, Homo Sapiens
ucccacaacaaauuaaugauauuuuuguguca

SEQ ID NO: 268048 - RNA, 32 nt, Homo Sapiens
ugaaauaugaaaugccugugaacucuuaaagc

SEQ ID NO: 268049 - RNA, 32 nt, Homo Sapiens
auuuaauaaaauuuagucugaagugaaaaaaa

SEQ ID NO: 268050 - RNA, 32 nt, Homo Sapiens
agccucugugucuguagcccaggccucuaccc

SEQ ID NO: 268051 - RNA, 32 nt, Homo Sapiens
gacccggcuucgagccucuccucuccgucucc

SEQ ID NO: 268052 - RNA, 32 nt, Homo Sapiens
ccuuauaaacuugucaggauguguguugcguu

SEQ ID NO: 268053 - RNA, 32 nt, Homo Sapiens
uccaggggcgccccgccccugcggccccacca

SEQ ID NO: 268054 - RNA, 32 nt, Homo Sapiens
ugaaaauaucgcaagucaaaaauacacguucg

SEQ ID NO: 268055 - RNA, 32 nt, Homo Sapiens
caagcucgcccuuagcagagcagagcugagag

SEQ ID NO: 268056 - RNA, 32 nt, Homo Sapiens
caccuguaauccuagcacuuugggaggucaag

SEQ ID NO: 268057 - RNA, 32 nt, Homo Sapiens
caccuauaaucccagcacuuugggagguugag

SEQ ID NO: 268058 - RNA, 32 nt, Homo Sapiens
caccuauaaucucagcacuuugggaggcugag

SEQ ID NO: 268059 - RNA, 32 nt, Homo Sapiens
cagggcacaaaacagcuucugcuagcaaacgu

SEQ ID NO: 268060 - RNA, 32 nt, Homo Sapiens
aauuucaucuuaaagcacuuucauuuuauacc

SEQ ID NO: 268061 - RNA, 32 nt, Homo Sapiens
gagucccuucccuccccaggccucgcuucccc

SEQ ID NO: 268062 - RNA, 32 nt, Homo Sapiens
gugaaagugcccaucaggucuuucuggguuuu

SEQ ID NO: 268063 - RNA, 32 nt, Homo Sapiens
guggaagcugugagcgcccccaucccggaggu

SEQ ID NO: 268064 - RNA, 32 nt, Homo Sapiens
ccagaucggaagagccgaguccgggcagaggg

SEQ ID NO: 268065 - RNA, 32 nt, Homo Sapiens
agccugagugcagcugccaacucccgccgagu

SEQ ID NO: 268066 - RNA, 32 nt, Homo Sapiens
auuuuauuugcuuuaaauuugcuggcuacccu

SEQ ID NO: 268067 - RNA, 32 nt, Homo Sapiens
gggcguucgcacccugagagagggggucaaag

SEQ ID NO: 268068 - RNA, 32 nt, Homo Sapiens
aagcaccgccccagcucugacaaaaccccgcc

SEQ ID NO: 268069 - RNA, 32 nt, Homo Sapiens
agcucacgaaccccaaaccuggcaagucaccu

SEQ ID NO: 268070 - RNA, 32 nt, Homo Sapiens
gaaaaguguacuuuaucauuuuaacaaagcag

SEQ ID NO: 268071 - RNA, 32 nt, Homo Sapiens
aguauuacaucaucuuauuuugguuuuauacc

SEQ ID NO: 268072 - RNA, 32 nt, Homo Sapiens
ggacuauuauacaaagaugucuguaaaaagua

SEQ ID NO: 268073 - RNA, 32 nt, Homo Sapiens
aggauauaaugagaaguuggcagucugcaacc

SEQ ID NO: 268074 - RNA, 32 nt, Homo Sapiens
cuauuccuggaaaaauacauuguggcuuagca

SEQ ID NO: 268075 - RNA, 32 nt, Homo Sapiens
aauuguuaguuucugaguuuuaccaaauaaag

SEQ ID NO: 268076 - RNA, 32 nt, Homo Sapiens
gucagggacacucagaagacucugagaggugg

SEQ ID NO: 268077 - RNA, 32 nt, Homo Sapiens
aaggggaaaaagaauauguaaaaccaccacag

SEQ ID NO: 268078 - RNA, 32 nt, Homo Sapiens
uagauacagggaccaaugcaauagcauuuuac

SEQ ID NO: 268079 - RNA, 32 nt, Homo Sapiens
gacuggggcggcggugcuggagguugcggcgg

SEQ ID NO: 268080 - RNA, 32 nt, Homo Sapiens
cucuccgcugucuggagggaaggggauuugga

SEQ ID NO: 268081 - RNA, 32 nt, Homo Sapiens
ggagcgggccgaaagcggcuugggcucgacgg

SEQ ID NO: 268082 - RNA, 32 nt, Homo Sapiens
ugggcucuuagcuccuucuucucuacucacuu

SEQ ID NO: 268083 - RNA, 32 nt, Homo Sapiens
ugcagauguggggagccuggaaacacccggcc

SEQ ID NO: 268084 - RNA, 32 nt, Homo Sapiens
gcugagccauggaaggaggugugugcauggau

SEQ ID NO: 268085 - RNA, 32 nt, Homo Sapiens
agucaacagaaauaaagaaaaaucauacuuug

SEQ ID NO: 268086 - RNA, 32 nt, Homo Sapiens
cugaccaaauuuacuuucuuaagggaaaaaaa

SEQ ID NO: 268087 - RNA, 32 nt, Homo Sapiens
uaccuuaaauucaaaucuacaguuuuacaaaa

SEQ ID NO: 268088 - RNA, 32 nt, Homo Sapiens
ccggccgguagucccuggcgcugcugacccag

SEQ ID NO: 268089 - RNA, 32 nt, Homo Sapiens
cccccgcaccaaccacccauauucaggagaag

SEQ ID NO: 268090 - RNA, 32 nt, Homo Sapiens
aacuuaacuguauauaagcaaaacagaagagu

SEQ ID NO: 268091 - RNA, 32 nt, Homo Sapiens
cccccucgcuucccgcgcucuccagcggggcc

SEQ ID NO: 268092 - RNA, 32 nt, Homo Sapiens
ccgcgccgagggucuggcgggccgcagaggga

SEQ ID NO: 268093 - RNA, 32 nt, Homo Sapiens
gcgccguccucgccgccccauggagucccagu

SEQ ID NO: 268094 - RNA, 32 nt, Homo Sapiens
aauuguuauugagaauaaaauuuuuacaauca

SEQ ID NO: 268095 - RNA, 32 nt, Homo Sapiens
ugaauucucuacauguuuaaaaucuuggaaau

SEQ ID NO: 268096 - RNA, 32 nt, Homo Sapiens
cuccagccgccgcgcucccagccccggcagcc

SEQ ID NO: 268097 - RNA, 32 nt, Homo Sapiens
gcaauucugggccucuccaggccuguccugcc

SEQ ID NO: 268098 - RNA, 32 nt, Homo Sapiens
ucuguugccaugccccuuuguaaaauugaguu

SEQ ID NO: 268099 - RNA, 32 nt, Homo Sapiens
auguacacaccacguucacacacacacagagg

SEQ ID NO: 268100 - RNA, 32 nt, Homo Sapiens
cggauuauuucuucuguaaauauuucagaaug

SEQ ID NO: 268101 - RNA, 32 nt, Homo Sapiens
guauguauaguuuuuaccacaguggauguaua

SEQ ID NO: 268102 - RNA, 32 nt, Homo Sapiens
ucagaugcuuuggucagcaccugcuuucucag

SEQ ID NO: 268103 - RNA, 32 nt, Homo Sapiens
uauucucagacaccuuuaauaucuuuauggaa

SEQ ID NO: 268104 - RNA, 32 nt, Homo Sapiens
gugugcaugagcaugccagcacaugaugcaug

SEQ ID NO: 268105 - RNA, 32 nt, Homo Sapiens
cccauuuucucugccuuccuuaucucacugaa

SEQ ID NO: 268106 - RNA, 32 nt, Homo Sapiens
aagccuuuacccaaaaaucaaaccuuauugua

SEQ ID NO: 268107 - RNA, 32 nt, Homo Sapiens
cuucccacucccuccuuggccuggcaguggug

SEQ ID NO: 268108 - RNA, 32 nt, Homo Sapiens
uccagaaaaauuuccaucugagauucuaguac

SEQ ID NO: 268109 - RNA, 32 nt, Homo Sapiens
cagauccccacuuuuccccuccagugccuccc

SEQ ID NO: 268110 - RNA, 32 nt, Homo Sapiens
ugguaaagauaacccauuuaugcuggagguug

SEQ ID NO: 268111 - RNA, 32 nt, Homo Sapiens
ggcgucacguggcagcguggggcccgccuccu

SEQ ID NO: 268112 - RNA, 32 nt, Homo Sapiens
acuugacucacauuuacccagccccuccugcg

SEQ ID NO: 268113 - RNA, 32 nt, Homo Sapiens
ugaugccagaccauuuggagaaguaucagagg

SEQ ID NO: 268114 - RNA, 32 nt, Homo Sapiens
ggagaauuuuaaaauguuaaacuguaauuugu

SEQ ID NO: 268115 - RNA, 32 nt, Homo Sapiens
caagagacaggccccagggcuucuggcuagaa

SEQ ID NO: 268116 - RNA, 32 nt, Homo Sapiens
aaagaugaaagaaaaaaugaaaacuuuauaca

SEQ ID NO: 268117 - RNA, 32 nt, Homo Sapiens
aagcuauccauuuuauacaaucacugauacag

SEQ ID NO: 268118 - RNA, 32 nt, Homo Sapiens
agaacgugcagggccugccuagcuugcgugcu

SEQ ID NO: 268119 - RNA, 32 nt, Homo Sapiens
cgaggcgagcgcgggagccugggcggcgagcc

SEQ ID NO: 268120 - RNA, 32 nt, Homo Sapiens
agucugggaaagggguuccugggccacuccag

SEQ ID NO: 268121 - RNA, 32 nt, Homo Sapiens
guuuacagcgucucugcccccuagcguguuuu

SEQ ID NO: 268122 - RNA, 32 nt, Homo Sapiens
cuguaugcgggugacgucugcugcugcugacu

SEQ ID NO: 268123 - RNA, 32 nt, Homo Sapiens
aacuggauuaauauaccaaugauccuuucaaa

SEQ ID NO: 268124 - RNA, 32 nt, Homo Sapiens
ugccuuuuugccucuggugggcaugaagacug

SEQ ID NO: 268125 - RNA, 32 nt, Homo Sapiens
ggagcugcuaagcccagggaaugcacacacgu

SEQ ID NO: 268126 - RNA, 32 nt, Homo Sapiens
accugagagaucuggcagguuggauauauuua

SEQ ID NO: 268127 - RNA, 32 nt, Homo Sapiens
ccugggcaacauagggagauccugucucuacu

SEQ ID NO: 268128 - RNA, 32 nt, Homo Sapiens
gacaaaaaaaauuuuacuacuuuugagauugc

SEQ ID NO: 268129 - RNA, 32 nt, Homo Sapiens
aacauugauuuuuuauuuucuuuccugaaaua

SEQ ID NO: 268130 - RNA, 32 nt, Homo Sapiens
guuucugcuauaacuggugaaccauccugucc

SEQ ID NO: 268131 - RNA, 32 nt, Homo Sapiens
gcccuacucuuucuccucccuuuggugaccuc

SEQ ID NO: 268132 - RNA, 32 nt, Homo Sapiens
aaccucugccauguguuuuuuauuuuguuuuu

SEQ ID NO: 268133 - RNA, 32 nt, Homo Sapiens
uaauuugcuuugcauguaacuuacaauaaaau

SEQ ID NO: 268134 - RNA, 32 nt, Homo Sapiens
gucgguggccuccgcuccugcucgcagccccu

SEQ ID NO: 268135 - RNA, 32 nt, Homo Sapiens
uuuuaaacgaagucagugauauuuagucaccu

SEQ ID NO: 268136 - RNA, 32 nt, Homo Sapiens
ccucuugcccuggccuagcugcaggcccccgg

SEQ ID NO: 268137 - RNA, 31 nt, Homo Sapiens
gugauugguaacugccuggccuggcaccguu

SEQ ID NO: 268138 - RNA, 32 nt, Homo Sapiens
aguuuuuucuuuuucuuaauggaagaagauau

SEQ ID NO: 268139 - RNA, 32 nt, Homo Sapiens
uggaggggccagcaggcugccgucccaccaca

SEQ ID NO: 268140 - RNA, 32 nt, Homo Sapiens
acaagaacagucacccccaacaacaagcccug

SEQ ID NO: 268141 - RNA, 32 nt, Homo Sapiens
cccuguguguggggugcaguuuuuaaaaauca

SEQ ID NO: 268142 - RNA, 32 nt, Homo Sapiens
acucagcguuugcgggaaaauaaaccacuggu

SEQ ID NO: 268143 - RNA, 32 nt, Homo Sapiens
uacuacagaaguaauuacuuugaaagaaaagu

SEQ ID NO: 268144 - RNA, 32 nt, Homo Sapiens
aggagcaccuggaagcugccagccagcagaac

SEQ ID NO: 268145 - RNA, 32 nt, Homo Sapiens
ucugguuguauuucuauauuuauuuucaguau

SEQ ID NO: 268146 - RNA, 32 nt, Homo Sapiens
gguguguagugguggcucuauguaguucuaau

SEQ ID NO: 268147 - RNA, 32 nt, Homo Sapiens
auuuaaaccugccauuaaaaauccccauguuu

SEQ ID NO: 268148 - RNA, 32 nt, Homo Sapiens
uaguccauaguuucuuuuuucccuuuuaacaa

SEQ ID NO: 268149 - RNA, 32 nt, Homo Sapiens
aaggacuucugaaacgcuguuuucauacucga

SEQ ID NO: 268150 - RNA, 32 nt, Homo Sapiens
uccuggcccuggccuuucacuccaguucuggg

SEQ ID NO: 268151 - RNA, 32 nt, Homo Sapiens
aggaacgcagcuggaagaaaagaugauauaac

SEQ ID NO: 268152 - RNA, 32 nt, Homo Sapiens
ugaaccaugcauaugauggacacacaauggau

SEQ ID NO: 268153 - RNA, 32 nt, Homo Sapiens
caacuacaggaaauggcuuugggaguuccaau

SEQ ID NO: 268154 - RNA, 32 nt, Homo Sapiens
gcgcacggguggcacccgccggacccccagcg

SEQ ID NO: 268155 - RNA, 32 nt, Homo Sapiens
cagccagcggggcgugaugcagugugcacagc

SEQ ID NO: 268156 - RNA, 32 nt, Homo Sapiens
ccagcgcgucccccgacucgccgcccggagac

SEQ ID NO: 268157 - RNA, 32 nt, Homo Sapiens
gccucaguggagaugcuugguguggggaucug

SEQ ID NO: 268158 - RNA, 32 nt, Homo Sapiens
guaaagaaaauggcaaaauaaauaucuuucca

SEQ ID NO: 268159 - RNA, 32 nt, Homo Sapiens
acguggagaaaguagaugucuuauccuggguc

SEQ ID NO: 268160 - RNA, 32 nt, Homo Sapiens
aaaauguuuacucuccuucugucaacccucac

SEQ ID NO: 268161 - RNA, 32 nt, Homo Sapiens
uaccaggcacugugucucauguugauuauagg

SEQ ID NO: 268162 - RNA, 32 nt, Homo Sapiens
aaagugauagaguguuuugcugauagugcugu

SEQ ID NO: 268163 - RNA, 32 nt, Homo Sapiens
uggggaucugguaaauuucaguuucuugauac

SEQ ID NO: 268164 - RNA, 32 nt, Homo Sapiens
acucucucacccaccagcuccacacauuccag

SEQ ID NO: 268165 - RNA, 32 nt, Homo Sapiens
acuauuuacccauauauggcaauucaucugga

SEQ ID NO: 268166 - RNA, 32 nt, Homo Sapiens
ggagcuacucgcccggcccugggcggugggag

SEQ ID NO: 268167 - RNA, 32 nt, Homo Sapiens
acggguccauucuuccuggugauggcagaggg

SEQ ID NO: 268168 - RNA, 32 nt, Homo Sapiens
ucuuaaugcaauccauuuucugauggauuguu

SEQ ID NO: 268169 - RNA, 32 nt, Homo Sapiens
uuucuaagaacuaauauaauugcuaccuuaaa

SEQ ID NO: 268170 - RNA, 32 nt, Homo Sapiens
uacugcucccccagccucuccccugccccuca

SEQ ID NO: 268171 - RNA, 32 nt, Homo Sapiens
acacguauauauauuucaagaugaaacuaaag

SEQ ID NO: 268172 - RNA, 32 nt, Homo Sapiens
ugcuucuggucggcugugaugugcuccagcuu

SEQ ID NO: 268173 - RNA, 32 nt, Homo Sapiens
cucccuagcuuucaguuuucucuucugugaaa

SEQ ID NO: 268174 - RNA, 32 nt, Homo Sapiens
gcuuuucucuacuuccaaaucacaauuucuua

SEQ ID NO: 268175 - RNA, 32 nt, Homo Sapiens
aacaauuugaaugcugaauuuacuacaaaggc

SEQ ID NO: 268176 - RNA, 32 nt, Homo Sapiens
agggcagcgggcccgacccgcacggcuuuccu

SEQ ID NO: 268177 - RNA, 32 nt, Homo Sapiens
uuuucuaagaaacauuuauauugauaagaucu

SEQ ID NO: 268178 - RNA, 32 nt, Homo Sapiens
gugacgaaggcacgauuccuguaaauguguaa

SEQ ID NO: 268179 - RNA, 32 nt, Homo Sapiens
auuaacauucuauuagauaaacugagaauuua

SEQ ID NO: 268180 - RNA, 32 nt, Homo Sapiens
acgaggucaggagaucgagaccauccuggcua

SEQ ID NO: 268181 - RNA, 32 nt, Homo Sapiens
acaaggucaggagaucgaaaccauccuggcua

SEQ ID NO: 268182 - RNA, 32 nt, Homo Sapiens
uggcccgcggcggcgaggagcagagggagcgg

SEQ ID NO: 268183 - RNA, 32 nt, Homo Sapiens
aaacaggauaaacuuuugacuccccuuuuguu

SEQ ID NO: 268184 - RNA, 30 nt, Homo Sapiens
gcaauauguauuacccaccgggaaacagug

SEQ ID NO: 268185 - RNA, 29 nt, Homo Sapiens
acauaaggugcuuuauauuuuauuuuggu

SEQ ID NO: 268186 - RNA, 32 nt, Homo Sapiens
uucugaaaaaauauugaaaguuucuaugguga

SEQ ID NO: 268187 - RNA, 32 nt, Homo Sapiens
agaugcaucuccugggguguguccucgucugu

SEQ ID NO: 268188 - RNA, 32 nt, Homo Sapiens
cccgggccuccuccccgagggccuugggcguc

SEQ ID NO: 268189 - RNA, 32 nt, Homo Sapiens
acuucccuuuugggguugcugcgaagauaauu

SEQ ID NO: 268190 - RNA, 32 nt, Homo Sapiens
agaguagaaggaugguuacuaguggcugggaa

SEQ ID NO: 268191 - RNA, 32 nt, Homo Sapiens
aggcgcgcgcgucgcugcugcugcugcggggc

SEQ ID NO: 268192 - RNA, 32 nt, Homo Sapiens
guuccgcgcgccccguucagccaugucguccg

SEQ ID NO: 268193 - RNA, 32 nt, Homo Sapiens
gccauacugagccugagguauuucauaucucc

SEQ ID NO: 268194 - RNA, 32 nt, Homo Sapiens
guuguguauguucugaaucacauggaaauaaa

SEQ ID NO: 268195 - RNA, 28 nt, Homo Sapiens
uuaccaaaagauuagccaugaaaugguu

SEQ ID NO: 268196 - RNA, 32 nt, Homo Sapiens
gaugggguggugaugaggugccaggcacuagg

SEQ ID NO: 268197 - RNA, 32 nt, Homo Sapiens
gagaagcagggaccauugucuuccucaggagc

SEQ ID NO: 268198 - RNA, 32 nt, Homo Sapiens
aguccgagcgcgucaccuccucacgcugcggc

SEQ ID NO: 268199 - RNA, 32 nt, Homo Sapiens
ucgcucccuacucuccuccccuuauucccgag

SEQ ID NO: 268200 - RNA, 32 nt, Homo Sapiens
gaccaccccacuugcugccagccugucaguga

SEQ ID NO: 268201 - RNA, 32 nt, Homo Sapiens
gggcugcugguugggagggaaagcauccccgu

SEQ ID NO: 268202 - RNA, 32 nt, Homo Sapiens
ggguacugccgacggcacuuugcacucugaug

SEQ ID NO: 268203 - RNA, 32 nt, Homo Sapiens
gaagcccuaaggaaggcugggcccguacgucc

SEQ ID NO: 268204 - RNA, 32 nt, Homo Sapiens
ugacuccgcaaggcuuccagaagaugcucgaa

SEQ ID NO: 268205 - RNA, 32 nt, Homo Sapiens
ucccuucucgcugcggccgcccaggugcccgc

SEQ ID NO: 268206 - RNA, 32 nt, Homo Sapiens
agugcaggccuggccuguguccccgugcccag

SEQ ID NO: 268207 - RNA, 32 nt, Homo Sapiens
cagaaggaagacagaaagauagaaauugauua

SEQ ID NO: 268208 - RNA, 32 nt, Homo Sapiens
acugugccuuagaaucgccccuggacagaguu

SEQ ID NO: 268209 - RNA, 32 nt, Homo Sapiens
ggcucacugcaucuccggcuccuggacucaag

SEQ ID NO: 268210 - RNA, 32 nt, Homo Sapiens
ucuccccugugcucaugcuggaagcacagcgu

SEQ ID NO: 268211 - RNA, 32 nt, Homo Sapiens
acucauuuugauuguuauaacaucucagcacc

SEQ ID NO: 268212 - RNA, 31 nt, Homo Sapiens
aucucaaacugagccauucacaggacuugac

SEQ ID NO: 268213 - RNA, 32 nt, Homo Sapiens
ugagaucaucuuccucauuuauuucucugcau

SEQ ID NO: 268214 - RNA, 32 nt, Homo Sapiens
aaugcauacgauuuuuacacugaucuuagauu

SEQ ID NO: 268215 - RNA, 32 nt, Homo Sapiens
ggccacacgaggcuguggagcggcgugacuca

SEQ ID NO: 268216 - RNA, 32 nt, Homo Sapiens
uuggaugugaaaggaaaucacugguuaaagcu

SEQ ID NO: 268217 - RNA, 32 nt, Homo Sapiens
ggugacagggagcuaggcagccgugcucccuc

SEQ ID NO: 268218 - RNA, 32 nt, Homo Sapiens
uagaaggcaaauccaucaaaaguuacuucugg

SEQ ID NO: 268219 - RNA, 32 nt, Homo Sapiens
gcugccaggccaaggcagucacaggggcccug

SEQ ID NO: 268220 - RNA, 32 nt, Homo Sapiens
gaaggaccgagaggcgggaggagcagcggcuc

SEQ ID NO: 268221 - RNA, 32 nt, Homo Sapiens
gccaggccagcagcucgggggccacaaggaga

SEQ ID NO: 268222 - RNA, 32 nt, Homo Sapiens
acugccuggaaacgggcugggccugccucgga

SEQ ID NO: 268223 - RNA, 32 nt, Homo Sapiens
cguccagccucgggguguagguuucugaggug

SEQ ID NO: 268224 - RNA, 31 nt, Homo Sapiens
ucgugagcaaagaaagaaaucauguuacuuc

SEQ ID NO: 268225 - RNA, 32 nt, Homo Sapiens
uugguuucuuugacugauuuuuggaugauaua

SEQ ID NO: 268226 - RNA, 32 nt, Homo Sapiens
uauucuaaaaguuugaauuugcugggguguuu

SEQ ID NO: 268227 - RNA, 32 nt, Homo Sapiens
uaacaucauuuuguuuuccaccaggcagggag

SEQ ID NO: 268228 - RNA, 32 nt, Homo Sapiens
gguuuugcuguaaaugguuuugaugggcgaaa

SEQ ID NO: 268229 - RNA, 30 nt, Homo Sapiens
gauccuuccugcucaagguaugugugccca

SEQ ID NO: 268230 - RNA, 32 nt, Homo Sapiens
ccacaccccgcgcgcucagagcccggccgggc

SEQ ID NO: 268231 - RNA, 32 nt, Homo Sapiens
uugguagaaaaauuauuuguuuauaacuuuaa

SEQ ID NO: 268232 - RNA, 32 nt, Homo Sapiens
aggccccuuuggagggagaaucaauaaauaac

SEQ ID NO: 268233 - RNA, 32 nt, Homo Sapiens
acuuugauaugcuguuaucaccacccccugcc

SEQ ID NO: 268234 - RNA, 32 nt, Homo Sapiens
gaaguagaugacuucaauuaaacaaauuuaug

SEQ ID NO: 268235 - RNA, 32 nt, Homo Sapiens
aaucuuauguguuuucuuuuuaauuuuuugau

SEQ ID NO: 268236 - RNA, 32 nt, Homo Sapiens
uaaaggcuuuuuaauagcagacuuccaaaaga

SEQ ID NO: 268237 - RNA, 32 nt, Homo Sapiens
cucugggacagcgguggcgucucugugcccgu

SEQ ID NO: 268238 - RNA, 32 nt, Homo Sapiens
gugucgggccugggccggggccgcccuggcaa

SEQ ID NO: 268239 - RNA, 32 nt, Homo Sapiens
ggaaaacucuuugccuucuccuuaccacuguc

SEQ ID NO: 268240 - RNA, 32 nt, Homo Sapiens
gggcuccagcaggaguggaggcuggucugggc

SEQ ID NO: 268241 - RNA, 32 nt, Homo Sapiens
auuauggcauuuuggaauuuguaaucucauga

SEQ ID NO: 268242 - RNA, 32 nt, Homo Sapiens
ccacuuuauaauguguaaaauaacauaaaaau

SEQ ID NO: 268243 - RNA, 32 nt, Homo Sapiens
ccucuggugucugccaucccccucccucccug

SEQ ID NO: 268244 - RNA, 32 nt, Homo Sapiens
ugagacuccuccaguggaccagcccucucggu

SEQ ID NO: 268245 - RNA, 32 nt, Homo Sapiens
ggggugcuugcgccacccacgucccaggggag

SEQ ID NO: 268246 - RNA, 32 nt, Homo Sapiens
gugcuucccugccuggcccuggagggagcugg

SEQ ID NO: 268247 - RNA, 32 nt, Homo Sapiens
cggccagaacagacagccugggcccugccgca

SEQ ID NO: 268248 - RNA, 32 nt, Homo Sapiens
augcaggcuggguaugguggcucaugccugua

SEQ ID NO: 268249 - RNA, 32 nt, Homo Sapiens
agugcuaacugacugccucuccagguucggag

SEQ ID NO: 268250 - RNA, 32 nt, Homo Sapiens
gugaugauggcuuuuccuggagggaaaggaua

SEQ ID NO: 268251 - RNA, 32 nt, Homo Sapiens
gggauauaggagaggaaaaguaaggugcaguu

SEQ ID NO: 268252 - RNA, 32 nt, Homo Sapiens
ggcccuccacaggcuuccagacuugaaggaaa

SEQ ID NO: 268253 - RNA, 32 nt, Homo Sapiens
aguuccauucuucuuccuuucauuaucaaguc

SEQ ID NO: 268254 - RNA, 32 nt, Homo Sapiens
ccacgccugcgcgccagggauccgggauaaga

SEQ ID NO: 268255 - RNA, 32 nt, Homo Sapiens
cuauccucacugcuugaauuugguguugcaug

SEQ ID NO: 268256 - RNA, 32 nt, Homo Sapiens
uuuuuauuuguuuuuauuagcguagaguagga

SEQ ID NO: 268257 - RNA, 32 nt, Homo Sapiens
cauucaaaugaggaugaugagucacuguaaua

SEQ ID NO: 268258 - RNA, 32 nt, Homo Sapiens
agaaagagaggguggaggggcuguaaaucuug

SEQ ID NO: 268259 - RNA, 32 nt, Homo Sapiens
uuuuggagagacuguagcucagggcgugcaau

SEQ ID NO: 268260 - RNA, 32 nt, Homo Sapiens
ucaguggccauacccuucaucauccucauuca

SEQ ID NO: 268261 - RNA, 32 nt, Homo Sapiens
aguuuguggaaauggaauaaaaacaaggaugu

SEQ ID NO: 268262 - RNA, 32 nt, Homo Sapiens
ucugaacaucagaaggaacaaacucuggacac

SEQ ID NO: 268263 - RNA, 32 nt, Homo Sapiens
ccgcccgguguugcgcuccuucccagaauccg

SEQ ID NO: 268264 - RNA, 32 nt, Homo Sapiens
ugaccaaaagacaguacaaaaaacacuggcac

SEQ ID NO: 268265 - RNA, 32 nt, Homo Sapiens
gccgacccugcugcgagcccagccccgcccug

SEQ ID NO: 268266 - RNA, 32 nt, Homo Sapiens
uaugcccggcgccgggcaccaacuccauguuu

SEQ ID NO: 268267 - RNA, 32 nt, Homo Sapiens
ucccagcucugcaggcccccaaggcucucugg

SEQ ID NO: 268268 - RNA, 32 nt, Homo Sapiens
gagacccggugcucugggagccaggcccugag

SEQ ID NO: 268269 - RNA, 32 nt, Homo Sapiens
cccaauggugcagcugcagcagucaccacuag

SEQ ID NO: 268270 - RNA, 31 nt, Homo Sapiens
cgcugcugcugcggcgcuccaaguucaucuc

SEQ ID NO: 268271 - RNA, 32 nt, Homo Sapiens
ccuccuugcuguucuucaguauggcaagcaac

SEQ ID NO: 268272 - RNA, 32 nt, Homo Sapiens
ggccgggggcgguggcucaugccuguaguccc

SEQ ID NO: 268273 - RNA, 32 nt, Homo Sapiens
gguuuucuuuugcuugaguggacaguagcacc

SEQ ID NO: 268274 - RNA, 32 nt, Homo Sapiens
aagugucuguuuauauuuuuggaauauuugua

SEQ ID NO: 268275 - RNA, 32 nt, Homo Sapiens
auguaaauguccaaaauguugaucuuccacug

SEQ ID NO: 268276 - RNA, 32 nt, Homo Sapiens
cauaggaagaaaccaguauauugaucuuauga

SEQ ID NO: 268277 - RNA, 32 nt, Homo Sapiens
acuuccggaagcggcggcgcucgggaggaagu

SEQ ID NO: 268278 - RNA, 32 nt, Homo Sapiens
gcagagcucccucugguucuagggucccucac

SEQ ID NO: 268279 - RNA, 32 nt, Homo Sapiens
ugccaccacacacacacacacacacacacaca

SEQ ID NO: 268280 - RNA, 32 nt, Homo Sapiens
aaggaaauggcuuuuauaaacaucuuuuacuu

SEQ ID NO: 268281 - RNA, 32 nt, Homo Sapiens
gacuacuuguguuuucugaagaagggucuuca

SEQ ID NO: 268282 - RNA, 32 nt, Homo Sapiens
ccacagacaauacguuugauaauaguuuuuuc

SEQ ID NO: 268283 - RNA, 31 nt, Homo Sapiens
ggcggucacggcggccugcccagggcgcagc

SEQ ID NO: 268284 - RNA, 32 nt, Homo Sapiens
gugauauauuuacaaguaaucuguaagauaua

SEQ ID NO: 268285 - RNA, 32 nt, Homo Sapiens
agggaaaguuuuuaaugacuauacaggccagu

SEQ ID NO: 268286 - RNA, 32 nt, Homo Sapiens
caguuaaaggaacacccacaugcagagaugag

SEQ ID NO: 268287 - RNA, 32 nt, Homo Sapiens
auagguugguggccucugaugaagguauucca

SEQ ID NO: 268288 - RNA, 32 nt, Homo Sapiens
auucucauuuuuccuaucuguaaauggaaggg

SEQ ID NO: 268289 - RNA, 32 nt, Homo Sapiens
cacugcacuccagcccaggugacagagugaga

SEQ ID NO: 268290 - RNA, 32 nt, Homo Sapiens
ccuagggacauaugacuucaaauaucacauug

SEQ ID NO: 268291 - RNA, 32 nt, Homo Sapiens
caggccuuugcuagugcagaaugccacaucug

SEQ ID NO: 268292 - RNA, 32 nt, Homo Sapiens
cuugggaggcuaagguaggagaauuagccugg

SEQ ID NO: 268293 - RNA, 32 nt, Homo Sapiens
agcuacugacuuguuaucaucuccauuugauc

SEQ ID NO: 268294 - RNA, 32 nt, Homo Sapiens
ugcagagccaggguccugggguuuugugcugg

SEQ ID NO: 268295 - RNA, 32 nt, Homo Sapiens
uccgagggcugggcuacuggggugucugucag

SEQ ID NO: 268296 - RNA, 32 nt, Homo Sapiens
gcugcccauuuucucuggguacugcuggccag

SEQ ID NO: 268297 - RNA, 32 nt, Homo Sapiens
cuguacacucacccauaacaaacaauuacacc

SEQ ID NO: 268298 - RNA, 32 nt, Homo Sapiens
acuguaauauauuauuauuugauuguauaugu

SEQ ID NO: 268299 - RNA, 32 nt, Homo Sapiens
aaggaaaccuucccuuuguccaugguccugcu

SEQ ID NO: 268300 - RNA, 32 nt, Homo Sapiens
uaauucucagguaugaggcuuuagucacuucu

SEQ ID NO: 268301 - RNA, 32 nt, Homo Sapiens
auguuuagcuuuguaugaacugagugugccag

SEQ ID NO: 268302 - RNA, 31 nt, Homo Sapiens
ccugcgagcauaucgacaacucucgggccag

SEQ ID NO: 268303 - RNA, 29 nt, Homo Sapiens
cuuaucuucauaugaagaaagcuaugaga

SEQ ID NO: 268304 - RNA, 32 nt, Homo Sapiens
auucugcuuuaaagcucauguuuuauucaaag

SEQ ID NO: 268305 - RNA, 32 nt, Homo Sapiens
gggugucuauaauuaagcaagccuaagcuggg

SEQ ID NO: 268306 - RNA, 32 nt, Homo Sapiens
cucuccugcccauuuuccuguucuucuguccu

SEQ ID NO: 268307 - RNA, 29 nt, Homo Sapiens
uguuggggacgucgaugguuugggcugga

SEQ ID NO: 268308 - RNA, 32 nt, Homo Sapiens
uacuuuguuauuguaccuaaguaaauuuucuu

SEQ ID NO: 268309 - RNA, 32 nt, Homo Sapiens
gcugugcucaggugaagcccacccgugucugg

SEQ ID NO: 268310 - RNA, 32 nt, Homo Sapiens
ucauguauucaucuauuuuaaauugccggcga

SEQ ID NO: 268311 - RNA, 32 nt, Homo Sapiens
cccuuugaccucagggccaugaagcugcccag

SEQ ID NO: 268312 - RNA, 32 nt, Homo Sapiens
guuggcauggaggcugcgacugaugaaggcau

SEQ ID NO: 268313 - RNA, 32 nt, Homo Sapiens
gaauucugauugauuugauugggaugaaugcc

SEQ ID NO: 268314 - RNA, 32 nt, Homo Sapiens
aagacgagggucacgcacgcguuacaaccccg

SEQ ID NO: 268315 - RNA, 32 nt, Homo Sapiens
aaaaguauuuaguuaucuuuucaaaguaaaau

SEQ ID NO: 268316 - RNA, 30 nt, Homo Sapiens
agcuggggagguggauuuagcagaaggcaa

SEQ ID NO: 268317 - RNA, 32 nt, Homo Sapiens
uagccgaugccggcgccgccgccgccggggau

SEQ ID NO: 268318 - RNA, 32 nt, Homo Sapiens
agcggaugaacagcagguucuccuaggcuuug

SEQ ID NO: 268319 - RNA, 32 nt, Homo Sapiens
aaggucuucuaaaaguguuccaauuuaucuca

SEQ ID NO: 268320 - RNA, 32 nt, Homo Sapiens
ggucaugaagccgcgcagcagccauggcuuuu

SEQ ID NO: 268321 - RNA, 32 nt, Homo Sapiens
gagcacuaguggacaaagccagcaaaugcggc

SEQ ID NO: 268322 - RNA, 32 nt, Homo Sapiens
gccaaggcggguggaucacuugaggccaggag

SEQ ID NO: 268323 - RNA, 30 nt, Homo Sapiens
aaugauuuucuaaugggaacagucacuuca

SEQ ID NO: 268324 - RNA, 30 nt, Homo Sapiens
aacccagagcagcuugaugaguuuuuguuu

SEQ ID NO: 268325 - RNA, 32 nt, Homo Sapiens
cugauuggguaucuuggugcugccuguauugg

SEQ ID NO: 268326 - RNA, 32 nt, Homo Sapiens
uacugaggguggcagugagcuggcacuuuggu

SEQ ID NO: 268327 - RNA, 32 nt, Homo Sapiens
ugguauuuugggcuccucuacugcacaagggc

SEQ ID NO: 268328 - RNA, 32 nt, Homo Sapiens
ucuguccccaaguuggacauucacaaaggccg

SEQ ID NO: 268329 - RNA, 32 nt, Homo Sapiens
cuaaccaauauuuucuaacuuccauuugcuac

SEQ ID NO: 268330 - RNA, 32 nt, Homo Sapiens
uugaagagguaucucuccaagcaagaaugacu

SEQ ID NO: 268331 - RNA, 32 nt, Homo Sapiens
ggaaauaguccauuuuaauggcaauuucauaa

SEQ ID NO: 268332 - RNA, 31 nt, Homo Sapiens
cucccaugugcucgguguucagugguguaua

SEQ ID NO: 268333 - RNA, 32 nt, Homo Sapiens
ucaccuucauauauuuguaugauccuaaugaa

SEQ ID NO: 268334 - RNA, 32 nt, Homo Sapiens
uuuugugagacuuauucacuaucaggaguaca

SEQ ID NO: 268335 - RNA, 32 nt, Homo Sapiens
gucucugcugucuccccuccccaccccauccu

SEQ ID NO: 268336 - RNA, 32 nt, Homo Sapiens
guauuuaaaaauuaaugccuaaugaccuggug

SEQ ID NO: 268337 - RNA, 29 nt, Homo Sapiens
ggugauggcggcggcaggagcaggaccug

SEQ ID NO: 268338 - RNA, 32 nt, Homo Sapiens
ucauggcuuaauagugcauuuauuuuuagcac

SEQ ID NO: 268339 - RNA, 32 nt, Homo Sapiens
cauuccuggcauaaaaagucuuuaucaaaaaa

SEQ ID NO: 268340 - RNA, 29 nt, Homo Sapiens
augcuucagaggauucggacgcagggucc

SEQ ID NO: 268341 - RNA, 32 nt, Homo Sapiens
cucauuuguuucccuuuuugacuguauggggg

SEQ ID NO: 268342 - RNA, 28 nt, Homo Sapiens
caaagacauucaacagagugaggcaggu

SEQ ID NO: 268343 - RNA, 32 nt, Homo Sapiens
acagagaaggucuccucugugcuccauccaca

SEQ ID NO: 268344 - RNA, 32 nt, Homo Sapiens
cuccgcauugcccccacccccauuuuccaggg

SEQ ID NO: 268345 - RNA, 32 nt, Homo Sapiens
caacucaaaggcacaggagauuucuaaacauu

SEQ ID NO: 268346 - RNA, 32 nt, Homo Sapiens
gagaggggaaaggggucuggcccaucgagggg

SEQ ID NO: 268347 - RNA, 32 nt, Homo Sapiens
aagugacagcuagggguugagaggggccagaa

SEQ ID NO: 268348 - RNA, 32 nt, Homo Sapiens
uuaggccucuggccuccacccucccccaacag

SEQ ID NO: 268349 - RNA, 31 nt, Homo Sapiens
uugcaauaaagagcacaacauaaaaaaaaaa

SEQ ID NO: 268350 - RNA, 32 nt, Homo Sapiens
ugcaugaaauuugauguguaaaauaauaaaag

SEQ ID NO: 268351 - RNA, 32 nt, Homo Sapiens
ggcaaugcugugagagccauuggaagacuguc

SEQ ID NO: 268352 - RNA, 32 nt, Homo Sapiens
ccuaguuccuuccuggccccucucucacuggc

SEQ ID NO: 268353 - RNA, 32 nt, Homo Sapiens
uuaaauguuuuauuaaggcauguaauaaacua

SEQ ID NO: 268354 - RNA, 32 nt, Homo Sapiens
cccuacaaccccagccuccugagggcuccaug

SEQ ID NO: 268355 - RNA, 32 nt, Homo Sapiens
ccaguuuguaaguuucugucagcaggagaguu

SEQ ID NO: 268356 - RNA, 32 nt, Homo Sapiens
ccacccagggaagcagggcugcugcugcacac

SEQ ID NO: 268357 - RNA, 32 nt, Homo Sapiens
uguauuuuauaaguaucuucauguaucccugu

SEQ ID NO: 268358 - RNA, 32 nt, Homo Sapiens
agcacuucucacaugagaaauuaggggcgggu

SEQ ID NO: 268359 - RNA, 28 nt, Homo Sapiens
acauagcaauaaaaaccugucauuuucc

SEQ ID NO: 268360 - RNA, 32 nt, Homo Sapiens
cugaaccacaagcagcuucgcguuaacuggag

SEQ ID NO: 268361 - RNA, 32 nt, Homo Sapiens
ggcaggcacacacaguggcauaaauucuauug

SEQ ID NO: 268362 - RNA, 32 nt, Homo Sapiens
ccucgacggcccggccccggcuccgcaggacg

SEQ ID NO: 268363 - RNA, 32 nt, Homo Sapiens
gacgucacccuaguccugucccggggagccug

SEQ ID NO: 268364 - RNA, 32 nt, Homo Sapiens
ugaugugaaacacuuugccuccuguguacugu

SEQ ID NO: 268365 - RNA, 30 nt, Homo Sapiens
aguccccuggggaugggggaccacuguugg

SEQ ID NO: 268366 - RNA, 32 nt, Homo Sapiens
aaguuauucaagugaaagaaagagaagggaau

SEQ ID NO: 268367 - RNA, 31 nt, Homo Sapiens
gccaccgugcccucagccgagaugcggguuc

SEQ ID NO: 268368 - RNA, 32 nt, Homo Sapiens
auccucguuugaaagauaauuaagaucccccg

SEQ ID NO: 268369 - RNA, 32 nt, Homo Sapiens
aggaggccugcaccccaguauaagggccuccc

SEQ ID NO: 268370 - RNA, 32 nt, Homo Sapiens
agaaaauaaaauauuucuuaauuguaaucaua

SEQ ID NO: 268371 - RNA, 32 nt, Homo Sapiens
guccugcgcccagguccuccccugccccccag

SEQ ID NO: 268372 - RNA, 32 nt, Homo Sapiens
ggcaaccucccauuuuagauguuuaaaggacc

SEQ ID NO: 268373 - RNA, 32 nt, Homo Sapiens
gaggccggagagcuggagccgggacuuggagg

SEQ ID NO: 268374 - RNA, 32 nt, Homo Sapiens
aaagggcuucuuccucaggccagcucuucuga

SEQ ID NO: 268375 - RNA, 32 nt, Homo Sapiens
ucaggaaguauuuuggggagaagaucggccug

SEQ ID NO: 268376 - RNA, 32 nt, Homo Sapiens
gagagcccagugccggccaaccgcgcgagcgc

SEQ ID NO: 268377 - RNA, 32 nt, Homo Sapiens
gaugcagaacuuucuuuuuuuuuuuuuuuuuu

SEQ ID NO: 268378 - RNA, 31 nt, Homo Sapiens
agagguauaaagaaaaacuagauguaauaaa

SEQ ID NO: 268379 - RNA, 32 nt, Homo Sapiens
cuguucugaguaucgugaagaaaucuugaguc

SEQ ID NO: 268380 - RNA, 32 nt, Homo Sapiens
cgguauuugccccaagcuaagcuuuccccacu

SEQ ID NO: 268381 - RNA, 32 nt, Homo Sapiens
auuucugguuuaggaagagaugugguucaggu

SEQ ID NO: 268382 - RNA, 30 nt, Homo Sapiens
cuucuuuuggacugcgaccuccuucccucc

SEQ ID NO: 268383 - RNA, 29 nt, Homo Sapiens
ggaacucaguguuucagugaugaaagccu

SEQ ID NO: 268384 - RNA, 32 nt, Homo Sapiens
caucucgaugcagcgcauacaggccaauucca

SEQ ID NO: 268385 - RNA, 32 nt, Homo Sapiens
gccuuugaguaugcagauuccugguaucacuu

SEQ ID NO: 268386 - RNA, 32 nt, Homo Sapiens
gaaaggcuggcuacagcaaacaucauucaaga

SEQ ID NO: 268387 - RNA, 32 nt, Homo Sapiens
cagaagaaacucaucucauccaaauacacgcu

SEQ ID NO: 268388 - RNA, 32 nt, Homo Sapiens
acugauguuauuacaaagaaaauacaugccca

SEQ ID NO: 268389 - RNA, 32 nt, Homo Sapiens
ccaauuuauguuuuuucuuuguuuauauuuug

SEQ ID NO: 268390 - RNA, 32 nt, Homo Sapiens
gggagagaccucuagauggugcaggugaguuu

SEQ ID NO: 268391 - RNA, 32 nt, Homo Sapiens
cuguaucuaucuagugccuguuugugcguuuu

SEQ ID NO: 268392 - RNA, 32 nt, Homo Sapiens
uucuuucuuuauuuauuuuacauggaaauaau

SEQ ID NO: 268393 - RNA, 32 nt, Homo Sapiens
augauaaaaaaguguccuauaauucuauugaa

SEQ ID NO: 268394 - RNA, 32 nt, Homo Sapiens
acgaacugcccacguccucuccaggaagggac

SEQ ID NO: 268395 - RNA, 32 nt, Homo Sapiens
acaugcuuagacagagaagagauuaacuucag

SEQ ID NO: 268396 - RNA, 32 nt, Homo Sapiens
guauaugucuaaaaauuacuuuacacaugugc

SEQ ID NO: 268397 - RNA, 32 nt, Homo Sapiens
cagaucccggacccaaaccauguucccuguga

SEQ ID NO: 268398 - RNA, 32 nt, Homo Sapiens
caccgcggcgaaugcagaugacugcaccggcc

SEQ ID NO: 268399 - RNA, 32 nt, Homo Sapiens
ggggaggaaaggaaagguauuuuguuucuuug

SEQ ID NO: 268400 - RNA, 32 nt, Homo Sapiens
ugagucagugauugaagccaauauucugauuc

SEQ ID NO: 268401 - RNA, 32 nt, Homo Sapiens
aaugcccugugauuuuuaugauacuucuucaa

SEQ ID NO: 268402 - RNA, 32 nt, Homo Sapiens
cgccugacaguuaaagcagaggacuacacuug

SEQ ID NO: 268403 - RNA, 32 nt, Homo Sapiens
aguagagaagggccauccagccgugccccagc

SEQ ID NO: 268404 - RNA, 32 nt, Homo Sapiens
uuuuguacuucauuuguuuuuauccauucuga

SEQ ID NO: 268405 - RNA, 32 nt, Homo Sapiens
caugcaauaaaaaggccaaacuuuuuauucca

SEQ ID NO: 268406 - RNA, 32 nt, Homo Sapiens
cucccuuugcuucaaauggcgucuaccccgua

SEQ ID NO: 268407 - RNA, 30 nt, Homo Sapiens
gaguaggaaaauaaaauauaugcaaaucaa

SEQ ID NO: 268408 - RNA, 32 nt, Homo Sapiens
ucagaguuccugccuccagcugccagggggga

SEQ ID NO: 268409 - RNA, 32 nt, Homo Sapiens
guggauuauagcaccuccucuccagccucagg

SEQ ID NO: 268410 - RNA, 32 nt, Homo Sapiens
uacgacgaggauguugucugcgacgugugucg

SEQ ID NO: 268411 - RNA, 32 nt, Homo Sapiens
ugaaacuuugccuuaagaaggugcuggauucc

SEQ ID NO: 268412 - RNA, 32 nt, Homo Sapiens
gacaucaccaaaaccuuaggacagaugcauga

SEQ ID NO: 268413 - RNA, 32 nt, Homo Sapiens
cacugagccagacggucgguuggaacaugaga

SEQ ID NO: 268414 - RNA, 32 nt, Homo Sapiens
cuuucagggaauguuuuguuuauuuguuuuua

SEQ ID NO: 268415 - RNA, 32 nt, Homo Sapiens
ugacucaaucuugccugccuucugggagcucu

SEQ ID NO: 268416 - RNA, 32 nt, Homo Sapiens
ccccaguaccucccuccccuccccuccagcau

SEQ ID NO: 268417 - RNA, 32 nt, Homo Sapiens
uuuuacuggaggagcuugugugcggagcuccu

SEQ ID NO: 268418 - RNA, 32 nt, Homo Sapiens
ccggggccgggguuugaagaugcugaacgucc

SEQ ID NO: 268419 - RNA, 32 nt, Homo Sapiens
gggcuggggugugaaaaagaagauuguaugaa

SEQ ID NO: 268420 - RNA, 32 nt, Homo Sapiens
agccuucaggcgacguacuguaagacgauauu

SEQ ID NO: 268421 - RNA, 32 nt, Homo Sapiens
aaaugaggguuguguuaccuagcuggcugggu

SEQ ID NO: 268422 - RNA, 32 nt, Homo Sapiens
uggaaauaccaacacauuuaugcugaagguuu

SEQ ID NO: 268423 - RNA, 32 nt, Homo Sapiens
cugcgcguggccaggaugcccgggcuggagcg

SEQ ID NO: 268424 - RNA, 32 nt, Homo Sapiens
aggcaaacacuggccauggccgugggaguacu

SEQ ID NO: 268425 - RNA, 31 nt, Homo Sapiens
uccacaggaaagaaaaaucuuagugaucccu

SEQ ID NO: 268426 - RNA, 32 nt, Homo Sapiens
uggcuucaccuucuccuucucucuucguugcu

SEQ ID NO: 268427 - RNA, 31 nt, Homo Sapiens
gcggagcgcugcagccaagccgauagcacga

SEQ ID NO: 268428 - RNA, 32 nt, Homo Sapiens
cgaggccccgcggcgccuccuucugcggacuc

SEQ ID NO: 268429 - RNA, 32 nt, Homo Sapiens
auggagaaauuguuaagaaaauuacagcauac

SEQ ID NO: 268430 - RNA, 32 nt, Homo Sapiens
ggucagagauucuugugucgugucugggugag

SEQ ID NO: 268431 - RNA, 31 nt, Homo Sapiens
auucuggaauaaaaagguauuugcugauaaa

SEQ ID NO: 268432 - RNA, 32 nt, Homo Sapiens
agccagucagcuugccgccggcggccaagcag

SEQ ID NO: 268433 - RNA, 32 nt, Homo Sapiens
aguguguauccaauguuuuagagcagugauug

SEQ ID NO: 268434 - RNA, 32 nt, Homo Sapiens
agaaauccaaaauaaaguaaaugcuuguuuca

SEQ ID NO: 268435 - RNA, 32 nt, Homo Sapiens
cugaauaacaaggcaacuuuuguuuaccauuc

SEQ ID NO: 268436 - RNA, 32 nt, Homo Sapiens
guacaggaggguggcgaggccccucccucacu

SEQ ID NO: 268437 - RNA, 32 nt, Homo Sapiens
uguguuuuuucucgcugggcagcuugaggggc

SEQ ID NO: 268438 - RNA, 32 nt, Homo Sapiens
gcucgggagagccucggggccggagucgcgug

SEQ ID NO: 268439 - RNA, 32 nt, Homo Sapiens
gggccauggacccaacugggccccagaagagc

SEQ ID NO: 268440 - RNA, 32 nt, Homo Sapiens
gcugucaguguguauugguuucaccaauaacc

SEQ ID NO: 268441 - RNA, 32 nt, Homo Sapiens
gguuuugcugcuacacuaagaauugugauuug

SEQ ID NO: 268442 - RNA, 32 nt, Homo Sapiens
cuuggcguucaggaaacacagauucuuugucc

SEQ ID NO: 268443 - RNA, 31 nt, Homo Sapiens
cauuuuccaaaaauaaaauuugauuucaaua

SEQ ID NO: 268444 - RNA, 32 nt, Homo Sapiens
aaaacaaacaaauagauaaauuagauuuauuc

SEQ ID NO: 268445 - RNA, 32 nt, Homo Sapiens
uucuuugauaaggaaauggcacaaacauaaag

SEQ ID NO: 268446 - RNA, 32 nt, Homo Sapiens
uauauguagacuuugucuuaugugucaaaagu

SEQ ID NO: 268447 - RNA, 32 nt, Homo Sapiens
ggccgggcgcgguggcucacgccuguuauccc

SEQ ID NO: 268448 - RNA, 32 nt, Homo Sapiens
agcuccgggacuucucccgcagcacccagcuc

SEQ ID NO: 268449 - RNA, 29 nt, Homo Sapiens
uaccauucguguuuuagaaagguauguga

SEQ ID NO: 268450 - RNA, 32 nt, Homo Sapiens
ucugccucaguguaucacuggagucacaggac

SEQ ID NO: 268451 - RNA, 32 nt, Homo Sapiens
gacacagccaaggcccuggggcaugcccaggc

SEQ ID NO: 268452 - RNA, 32 nt, Homo Sapiens
gcuuccaacuaugaagggauugagacuaaaac

SEQ ID NO: 268453 - RNA, 31 nt, Homo Sapiens
auaaagcaagagguugcuuuucugugaacga

SEQ ID NO: 268454 - RNA, 32 nt, Homo Sapiens
uggaaagaggggcuccccgaccugcccauccc

SEQ ID NO: 268455 - RNA, 31 nt, Homo Sapiens
gggggucauguggucgcuccucgaggguuuc

SEQ ID NO: 268456 - RNA, 32 nt, Homo Sapiens
ucuugggaggcuuucaauuguauuuuauauga

SEQ ID NO: 268457 - RNA, 32 nt, Homo Sapiens
ucaacccugccaggagcugagggcaccaccca

SEQ ID NO: 268458 - RNA, 32 nt, Homo Sapiens
ugcugcuaaaaaucaacuuaugccauuuuaaa

SEQ ID NO: 268459 - RNA, 28 nt, Homo Sapiens
accauggcguccccggcgcuggcggcgg

SEQ ID NO: 268460 - RNA, 32 nt, Homo Sapiens
caguggccgagccugcugcugcuccugcuguu

SEQ ID NO: 268461 - RNA, 32 nt, Homo Sapiens
uucuuccgccccggugggagccggcgcugcgc

SEQ ID NO: 268462 - RNA, 32 nt, Homo Sapiens
gaagaaaagggagaggugagcuaacauuugcu

SEQ ID NO: 268463 - RNA, 32 nt, Homo Sapiens
guuccagccccagacgcccaccugugccucag

SEQ ID NO: 268464 - RNA, 32 nt, Homo Sapiens
gaauaugaagugcagauuguaacauggagcua

SEQ ID NO: 268465 - RNA, 28 nt, Homo Sapiens
agagccaagaagggacauuugaguugug

SEQ ID NO: 268466 - RNA, 32 nt, Homo Sapiens
uguacauacuauccuguuuccuccucaauaga

SEQ ID NO: 268467 - RNA, 32 nt, Homo Sapiens
cuuccagggccgcuccuccaccacccuccccc

SEQ ID NO: 268468 - RNA, 32 nt, Homo Sapiens
agaccuaaacugugucacagacuucugaaugu

SEQ ID NO: 268469 - RNA, 32 nt, Homo Sapiens
cagccgguccgggaacccugagugagaaugag

SEQ ID NO: 268470 - RNA, 32 nt, Homo Sapiens
ccauggcggccccucagccugccugaagagag

SEQ ID NO: 268471 - RNA, 32 nt, Homo Sapiens
gagcagucaccaucugaucuucaucaaaggaa

SEQ ID NO: 268472 - RNA, 31 nt, Homo Sapiens
ggggccugccgcugccugcccaaccccugca

SEQ ID NO: 268473 - RNA, 32 nt, Homo Sapiens
cuagaugccccgcucuucuccccugcucaugg

SEQ ID NO: 268474 - RNA, 32 nt, Homo Sapiens
ucccauucuuggcccaggauuauugucaaaga

SEQ ID NO: 268475 - RNA, 32 nt, Homo Sapiens
gugacugagucaacaacauacugccacuauga

SEQ ID NO: 268476 - RNA, 32 nt, Homo Sapiens
ccgcccauauccccggcugcgcuaguccuggc

SEQ ID NO: 268477 - RNA, 32 nt, Homo Sapiens
aaauuucccagcuauagaaaucucucuauuuu

SEQ ID NO: 268478 - RNA, 32 nt, Homo Sapiens
acaggaccauguuuuuaaccuaccaucaagag

SEQ ID NO: 268479 - RNA, 32 nt, Homo Sapiens
guacguacuaccuaaaaggaugucuaaauguu

SEQ ID NO: 268480 - RNA, 32 nt, Homo Sapiens
ucugcugccacccagagcugggccagggagga

SEQ ID NO: 268481 - RNA, 32 nt, Homo Sapiens
ucgccgucaccagcuuccugugccugcgcuuc

SEQ ID NO: 268482 - RNA, 29 nt, Homo Sapiens
ugucugccuuguuucagagugaguuuucu

SEQ ID NO: 268483 - RNA, 32 nt, Homo Sapiens
uccggacccucgccgcgcccaggcaggcgcgc

SEQ ID NO: 268484 - RNA, 32 nt, Homo Sapiens
gcucuacauccaccagaugaucagcgucagga

SEQ ID NO: 268485 - RNA, 32 nt, Homo Sapiens
cauucucguccucaugguggacaagaaacugg

SEQ ID NO: 268486 - RNA, 32 nt, Homo Sapiens
ugugucagauauauauacuaacacgucuaaua

SEQ ID NO: 268487 - RNA, 32 nt, Homo Sapiens
uuuugcuuucuuuuccuuauaauaaaugaccc

SEQ ID NO: 268488 - RNA, 32 nt, Homo Sapiens
gacuuucgaggugaagcuuucaggucccuucu

SEQ ID NO: 268489 - RNA, 32 nt, Homo Sapiens
caguucccaggcugggucugccgcugggcccu

SEQ ID NO: 268490 - RNA, 32 nt, Homo Sapiens
guuguugaagcaaaugaauuauuuuuaaaugu

SEQ ID NO: 268491 - RNA, 32 nt, Homo Sapiens
ccacccugucucuggaggaaccacgagcgagg

SEQ ID NO: 268492 - RNA, 32 nt, Homo Sapiens
guaccagugcuuucuuuuuuguuguuuuuuga

SEQ ID NO: 268493 - RNA, 32 nt, Homo Sapiens
cagcgccuuccacuccaucauuucauuucaca

SEQ ID NO: 268494 - RNA, 32 nt, Homo Sapiens
uagagugaauacuaccccuuucuuauaauugc

SEQ ID NO: 268495 - RNA, 32 nt, Homo Sapiens
caaagaugaaagggaaaggggguguggccagg

SEQ ID NO: 268496 - RNA, 32 nt, Homo Sapiens
cuuuccuuauguaucaucuaauacaaugaugg

SEQ ID NO: 268497 - RNA, 32 nt, Homo Sapiens
uucuguggggugcacagccucccucccuccag

SEQ ID NO: 268498 - RNA, 32 nt, Homo Sapiens
gcucagccucaaucaagaaguuccccaucuuu

SEQ ID NO: 268499 - RNA, 32 nt, Homo Sapiens
gaggagcccucccgcucagccucagaagcaga

SEQ ID NO: 268500 - RNA, 32 nt, Homo Sapiens
ggggccugugccggagaacgcacauguugacu

SEQ ID NO: 268501 - RNA, 32 nt, Homo Sapiens
uguauaacaauugauguuuguuuucuguuuga

SEQ ID NO: 268502 - RNA, 32 nt, Homo Sapiens
accaacaagggaggaagucagaggggcugguc

SEQ ID NO: 268503 - RNA, 32 nt, Homo Sapiens
cugagguucugcugcagccugacuucaaugcu

SEQ ID NO: 268504 - RNA, 32 nt, Homo Sapiens
cgcaugccacuacacccagguaauuuuuaaaa

SEQ ID NO: 268505 - RNA, 30 nt, Homo Sapiens
augcgccuggagcgcgcgggucccagcgcc

SEQ ID NO: 268506 - RNA, 29 nt, Homo Sapiens
gggaguuggggacaguguguauucuuccu

SEQ ID NO: 268507 - RNA, 32 nt, Homo Sapiens
uccaaggaaaggaaauguuaugagcaagagug

SEQ ID NO: 268508 - RNA, 32 nt, Homo Sapiens
gacuguggaguucuuuuaauucuuaugaaaga

SEQ ID NO: 268509 - RNA, 32 nt, Homo Sapiens
gaguggaagugggaaacuccuucugacccugg

SEQ ID NO: 268510 - RNA, 32 nt, Homo Sapiens
ccuggcaggugccccaggaugccacgccugga

SEQ ID NO: 268511 - RNA, 32 nt, Homo Sapiens
gggaccaaaagggccucaggcucaaggggugg

SEQ ID NO: 268512 - RNA, 32 nt, Homo Sapiens
uuugagugaaugauuauauuuuuaaaaaguua

SEQ ID NO: 268513 - RNA, 32 nt, Homo Sapiens
guuaaacauuggcuccuguguuugcaccaaaa

SEQ ID NO: 268514 - RNA, 32 nt, Homo Sapiens
uuuuuccacuggauuaauuuucaccggaacaa

SEQ ID NO: 268515 - RNA, 32 nt, Homo Sapiens
gcugagauccugagucauguguuccaguggcu

SEQ ID NO: 268516 - RNA, 32 nt, Homo Sapiens
caugugccuugguuccucuucucuaaaauggc

SEQ ID NO: 268517 - RNA, 32 nt, Homo Sapiens
uauuucccuuucuuauacacaccugaauaaaa

SEQ ID NO: 268518 - RNA, 32 nt, Homo Sapiens
aucugagguaucaaacacacacaggauaccag

SEQ ID NO: 268519 - RNA, 31 nt, Homo Sapiens
acugugaaaauaaauuuguuuuuuacgccac

SEQ ID NO: 268520 - RNA, 32 nt, Homo Sapiens
aauuucugguuggauuuggugcccugaacuuu

SEQ ID NO: 268521 - RNA, 32 nt, Homo Sapiens
ccugccgccugccugccugccacugaggguuc

SEQ ID NO: 268522 - RNA, 32 nt, Homo Sapiens
gccuuucgcucccggacccggcagcccgagca

SEQ ID NO: 268523 - RNA, 32 nt, Homo Sapiens
ccuaaaguuucuucuacuuuggcacauucccc

SEQ ID NO: 268524 - RNA, 32 nt, Homo Sapiens
gccuucuuugaagcugcugaucucuuguagca

SEQ ID NO: 268525 - RNA, 32 nt, Homo Sapiens
aaaaggaggcaggagcaguucucaacacacca

SEQ ID NO: 268526 - RNA, 32 nt, Homo Sapiens
aagggagguucaguaguggggaauucugugac

SEQ ID NO: 268527 - RNA, 32 nt, Homo Sapiens
aaacaaaaucuagggcuguauuuuauauauau

SEQ ID NO: 268528 - RNA, 32 nt, Homo Sapiens
ugugaccucgggaugcugcagcggcgcaaugc

SEQ ID NO: 268529 - RNA, 32 nt, Homo Sapiens
ugugagugagacugagggaucguagauuuuua

SEQ ID NO: 268530 - RNA, 32 nt, Homo Sapiens
cucaucaaugaaauccagugaaacagcaccau

SEQ ID NO: 268531 - RNA, 27 nt, Homo Sapiens
auuauuauauuuuucagcccuucaucc

SEQ ID NO: 268532 - RNA, 32 nt, Homo Sapiens
agacccccaagccccacugaggccccuacuga

SEQ ID NO: 268533 - RNA, 32 nt, Homo Sapiens
aaacauuuuuccaggaagguggaaaaggaagu

SEQ ID NO: 268534 - RNA, 32 nt, Homo Sapiens
uucucccagggucagagguggaguuagaaagg

SEQ ID NO: 268535 - RNA, 32 nt, Homo Sapiens
ggcuuuuaagcaugauucacaccuggcaaaac

SEQ ID NO: 268536 - RNA, 32 nt, Homo Sapiens
caaggaccgucggugggcgauggcugcaacgg

SEQ ID NO: 268537 - RNA, 32 nt, Homo Sapiens
gcuugcaagggagaggacagauaaagauacgu

SEQ ID NO: 268538 - RNA, 32 nt, Homo Sapiens
gagggaaaggccacugcaccagcccucagcuc

SEQ ID NO: 268539 - RNA, 32 nt, Homo Sapiens
acccacaccagcugucccacucaccauggaga

SEQ ID NO: 268540 - RNA, 32 nt, Homo Sapiens
ugauucauguuauauuuaaugcauuaaaccug

SEQ ID NO: 268541 - RNA, 32 nt, Homo Sapiens
acacuaaaaaauuuggcuuaaaccaguguuca

SEQ ID NO: 268542 - RNA, 32 nt, Homo Sapiens
acaucaaucacucaauuuccuguccuuuuaaa

SEQ ID NO: 268543 - RNA, 32 nt, Homo Sapiens
cacccugcuucucaugggcuggcugccaugug

SEQ ID NO: 268544 - RNA, 32 nt, Homo Sapiens
gggggcaguggcugaugcugcagaacugccac

SEQ ID NO: 268545 - RNA, 32 nt, Homo Sapiens
ucuccuuccgccggggccgccgggccucaugg

SEQ ID NO: 268546 - RNA, 32 nt, Homo Sapiens
cugacaaagagcuaaagaagcuacguaauaaa

SEQ ID NO: 268547 - RNA, 32 nt, Homo Sapiens
uucaagaccaaccuggugaaaccccgucucua

SEQ ID NO: 268548 - RNA, 32 nt, Homo Sapiens
acuuuguaaaauguguacauaggacuuggaga

SEQ ID NO: 268549 - RNA, 31 nt, Homo Sapiens
ugaccucgugucugccugccuuggccuccca

SEQ ID NO: 268550 - RNA, 32 nt, Homo Sapiens
acaaaaugagagacaaaaaugaaggaaucaaa

SEQ ID NO: 268551 - RNA, 32 nt, Homo Sapiens
ccuauauauuggguuggcgccggcgccagcug

SEQ ID NO: 268552 - RNA, 32 nt, Homo Sapiens
gccccucugaggagacacgaaggugguucccc

SEQ ID NO: 268553 - RNA, 32 nt, Homo Sapiens
auauuauuuaacagcaaaggcaucauaggggu

SEQ ID NO: 268554 - RNA, 32 nt, Homo Sapiens
ccagcuaauguuuguauuuuuuguagagaugg

SEQ ID NO: 268555 - RNA, 32 nt, Homo Sapiens
agcaaggcacaaaagcccugcuugcuuuugca

SEQ ID NO: 268556 - RNA, 32 nt, Homo Sapiens
ggcagagcugggucaugcagcaccccauccuu

SEQ ID NO: 268557 - RNA, 32 nt, Homo Sapiens
ugacuuuugcuuaauccaauauuuugccuuuu

SEQ ID NO: 268558 - RNA, 32 nt, Homo Sapiens
ucgagcgccccggcgggagguuuuucuauaug

SEQ ID NO: 268559 - RNA, 32 nt, Homo Sapiens
guaaaagcucaaaaauugugauuccuugaacg

SEQ ID NO: 268560 - RNA, 31 nt, Homo Sapiens
uagacgcacccggccugaccccgcgccacca

SEQ ID NO: 268561 - RNA, 32 nt, Homo Sapiens
uagguaacuuccacagaaaacacaaacaugua

SEQ ID NO: 268562 - RNA, 32 nt, Homo Sapiens
ccggggcucaucugccgccgccgccgcgcuga

SEQ ID NO: 268563 - RNA, 32 nt, Homo Sapiens
uucuucucucccuuuuuccccuuccaggaaga

SEQ ID NO: 268564 - RNA, 32 nt, Homo Sapiens
aauuagccgggcgggguggcgcgcaccuguaa

SEQ ID NO: 268565 - RNA, 32 nt, Homo Sapiens
cggucgccuggucccggcaccagcgccgccca

SEQ ID NO: 268566 - RNA, 32 nt, Homo Sapiens
guuucuguauucuccuauuucuuuucaaaaac

SEQ ID NO: 268567 - RNA, 32 nt, Homo Sapiens
agagagcugaggggcgggggcgcugcggcaca

SEQ ID NO: 268568 - RNA, 32 nt, Homo Sapiens
uuacugucaacagagauauuuuaaaagagaga

SEQ ID NO: 268569 - RNA, 32 nt, Homo Sapiens
ggguccggacgcgccccagcucgcgccccuuc

SEQ ID NO: 268570 - RNA, 28 nt, Homo Sapiens
aaaaugaagacuuuuaccuggacccuag

SEQ ID NO: 268571 - RNA, 32 nt, Homo Sapiens
ggccguggagcuggccucggccucggcaucgg

SEQ ID NO: 268572 - RNA, 32 nt, Homo Sapiens
auuuuauuguaauauuuuuauuuuacaacgug

SEQ ID NO: 268573 - RNA, 32 nt, Homo Sapiens
cagcuguuccauggcagagccuugacuggaug

SEQ ID NO: 268574 - RNA, 32 nt, Homo Sapiens
augauguuguucuaaagaugucuuaacauuua

SEQ ID NO: 268575 - RNA, 32 nt, Homo Sapiens
ggggcgcccuccggagaugcugccguggaaga

SEQ ID NO: 268576 - RNA, 32 nt, Homo Sapiens
agugcucugaagaugugucacauuauauuaua

SEQ ID NO: 268577 - RNA, 32 nt, Homo Sapiens
uagagagacuccaucucaaaaaaaaaaaaaaa

SEQ ID NO: 268578 - RNA, 32 nt, Homo Sapiens
cggccuucaccgccgcgcgcucugacgccggc

SEQ ID NO: 268579 - RNA, 32 nt, Homo Sapiens
cuagcucacaugccuccccuagcaguuaaugc

SEQ ID NO: 268580 - RNA, 32 nt, Homo Sapiens
ggguuuggagggcacacgaugugugcucccca

SEQ ID NO: 268581 - RNA, 32 nt, Homo Sapiens
ugauacacagaaaaggcugggaaacgggagca

SEQ ID NO: 268582 - RNA, 32 nt, Homo Sapiens
aucgaggcggaugcggcccggaccccguggau

SEQ ID NO: 268583 - RNA, 32 nt, Homo Sapiens
ccgggaugcgcgcgcgagcccucgccuccacu

SEQ ID NO: 268584 - RNA, 32 nt, Homo Sapiens
gcuggaccaacccaggaccagggcgccugggc

SEQ ID NO: 268585 - RNA, 32 nt, Homo Sapiens
ucuaauaaaacuuauuuauaaaaacaagggga

SEQ ID NO: 268586 - RNA, 27 nt, Homo Sapiens
cauccuccuccccucagcccccagccu

SEQ ID NO: 268587 - RNA, 32 nt, Homo Sapiens
ucccagcgccgggaagcccgucuuggguccuc

SEQ ID NO: 268588 - RNA, 32 nt, Homo Sapiens
cgucucugcagcugccuaccccugccccaugu

SEQ ID NO: 268589 - RNA, 32 nt, Homo Sapiens
cguagguacuuugaacccaaguaaacaaaagg

SEQ ID NO: 268590 - RNA, 32 nt, Homo Sapiens
cuguuugcauuacucugcaguuuccauuugca

SEQ ID NO: 268591 - RNA, 32 nt, Homo Sapiens
cuauguaacaggguaaacaguguuauguagaa

SEQ ID NO: 268592 - RNA, 32 nt, Homo Sapiens
augguuucuuccaaccaccaccaccugacaac

SEQ ID NO: 268593 - RNA, 32 nt, Homo Sapiens
agccagcagaacucuuaaagccaguuguagua

SEQ ID NO: 268594 - RNA, 32 nt, Homo Sapiens
aacacuccgcuccauggucuccagucaucaga

SEQ ID NO: 268595 - RNA, 32 nt, Homo Sapiens
guacggcaugcgccgguuggcgugauggagcg

SEQ ID NO: 268596 - RNA, 32 nt, Homo Sapiens
auguacuguauauaucauuuuagacacaucaa

SEQ ID NO: 268597 - RNA, 32 nt, Homo Sapiens
agaugaguuuuauuuaacccuauauaugguga

SEQ ID NO: 268598 - RNA, 32 nt, Homo Sapiens
ugucuguggccacauccuucucuuccauuaga

SEQ ID NO: 268599 - RNA, 32 nt, Homo Sapiens
ccacacuugccccgcccucccacaccugcuug

SEQ ID NO: 268600 - RNA, 32 nt, Homo Sapiens
acucuuacaaccuccaucaugggaagucaagu

SEQ ID NO: 268601 - RNA, 32 nt, Homo Sapiens
cccagcccucugcaccccccagcccggccauc

SEQ ID NO: 268602 - RNA, 32 nt, Homo Sapiens
gagcccgcgcucucggaggcugucuucugucg

SEQ ID NO: 268603 - RNA, 28 nt, Homo Sapiens
aauaaggggcggccaugccgguguggua

SEQ ID NO: 268604 - RNA, 32 nt, Homo Sapiens
auccuccauagucuggaacagccagcugaaaa

SEQ ID NO: 268605 - RNA, 32 nt, Homo Sapiens
auugaggugucugaugagaaugugcuuuggug

SEQ ID NO: 268606 - RNA, 32 nt, Homo Sapiens
accccuuucuccccuuuggaccaucugccauc

SEQ ID NO: 268607 - RNA, 32 nt, Homo Sapiens
cagaggcccuggcacccagcgccccgccgccc

SEQ ID NO: 268608 - RNA, 32 nt, Homo Sapiens
uuacuuagugaacauuacauuuucagaauaga

SEQ ID NO: 268609 - RNA, 32 nt, Homo Sapiens
gagggaagauaaauccuuucugauuaaagaaa

SEQ ID NO: 268610 - RNA, 32 nt, Homo Sapiens
cgcugggugauacagauucugauaaaaacaua

SEQ ID NO: 268611 - RNA, 32 nt, Homo Sapiens
ccaaauuccugccugauucuggguccguccug

SEQ ID NO: 268612 - RNA, 32 nt, Homo Sapiens
cacccagccuuccccuucuccgacugcagggu

SEQ ID NO: 268613 - RNA, 32 nt, Homo Sapiens
acuacauugcauaaguuuuguuauguuguauu

SEQ ID NO: 268614 - RNA, 32 nt, Homo Sapiens
aaagcugcccccacccccaccccugcccccgu

SEQ ID NO: 268615 - RNA, 32 nt, Homo Sapiens
uggagacuuaggccuuccuacuucugggccuc

SEQ ID NO: 268616 - RNA, 32 nt, Homo Sapiens
cuggauggucccugucuauaaccuugggcuag

SEQ ID NO: 268617 - RNA, 32 nt, Homo Sapiens
ucugguuucuaaaaacccuacuucaguaaagg

SEQ ID NO: 268618 - RNA, 32 nt, Homo Sapiens
ggaaaccaauuaagauuaauacaggauaaagg

SEQ ID NO: 268619 - RNA, 32 nt, Homo Sapiens
ugccuuaaaaauuaacaaggucauucagaagu

SEQ ID NO: 268620 - RNA, 32 nt, Homo Sapiens
gggugaggggaucagucugguggaaaggacag

SEQ ID NO: 268621 - RNA, 32 nt, Homo Sapiens
uagauguagaaaaagcauuugauaaaauucaa

SEQ ID NO: 268622 - RNA, 32 nt, Homo Sapiens
cccgaggacuuaccauccacaaugcaccacgg

SEQ ID NO: 268623 - RNA, 32 nt, Homo Sapiens
acuaaugcauauuauuugauugacaauaaaau

SEQ ID NO: 268624 - RNA, 32 nt, Homo Sapiens
uguaaaaauggcaagccacaugcuuuucucac

SEQ ID NO: 268625 - RNA, 32 nt, Homo Sapiens
agccccgcgugucaccgccgcggucgucgggg

SEQ ID NO: 268626 - RNA, 32 nt, Homo Sapiens
cgcgaucucugccugcuuacucgggaaauuug

SEQ ID NO: 268627 - RNA, 32 nt, Homo Sapiens
ggcgggcggacggggaccccuggggcucuccc

SEQ ID NO: 268628 - RNA, 31 nt, Homo Sapiens
guucagaaauaaagacucuauuucagcaaaa

SEQ ID NO: 268629 - RNA, 32 nt, Homo Sapiens
ugaaugaacaaaugaaggaaugacuaaggaug

SEQ ID NO: 268630 - RNA, 32 nt, Homo Sapiens
ggccaguuuuaaccagcaugaugaaguguccu

SEQ ID NO: 268631 - RNA, 32 nt, Homo Sapiens
ccugaagaacagagagcacgguguccagagcu

SEQ ID NO: 268632 - RNA, 32 nt, Homo Sapiens
uggcccgugauaugcuaaucagcccugccucu

SEQ ID NO: 268633 - RNA, 32 nt, Homo Sapiens
ggccggcccuguaaucgacugaccucaacagg

SEQ ID NO: 268634 - RNA, 32 nt, Homo Sapiens
ccccugcgaccgcccugccccccgucaccgaa

SEQ ID NO: 268635 - RNA, 32 nt, Homo Sapiens
uagagugacugaugaagugcaccuuucaaaaa

SEQ ID NO: 268636 - RNA, 32 nt, Homo Sapiens
gagacuuaaacuacaacaaacaauaugcuuaa

SEQ ID NO: 268637 - RNA, 32 nt, Homo Sapiens
cuacucagaaauuuuuauuuuucuaagguucu

SEQ ID NO: 268638 - RNA, 32 nt, Homo Sapiens
ucagucagucuccucccugucuccacucuuuc

SEQ ID NO: 268639 - RNA, 32 nt, Homo Sapiens
gagaauauucagaacauucucauucuaaaggg

SEQ ID NO: 268640 - RNA, 32 nt, Homo Sapiens
agucauaucaccucuguuuccuccccaacaaa

SEQ ID NO: 268641 - RNA, 32 nt, Homo Sapiens
uuuuauaagugucaagauaauggcacauugac

SEQ ID NO: 268642 - RNA, 32 nt, Homo Sapiens
cugaccuguccccuggcccagcccuuaggccc

SEQ ID NO: 268643 - RNA, 32 nt, Homo Sapiens
gcugcgcgggagaggccagcagagggcgccag

SEQ ID NO: 268644 - RNA, 32 nt, Homo Sapiens
accgcgccccccgcgcacggacccccauuaca

SEQ ID NO: 268645 - RNA, 32 nt, Homo Sapiens
auuuugccuuuaaauuuuugugaaccaauuuu

SEQ ID NO: 268646 - RNA, 32 nt, Homo Sapiens
agcucacccagccccagcuccaggacugagag

SEQ ID NO: 268647 - RNA, 32 nt, Homo Sapiens
uuaugaggauuaguagaagagaguggguccag

SEQ ID NO: 268648 - RNA, 32 nt, Homo Sapiens
uuuuguggacauuuggcaggaguuuugacugg

SEQ ID NO: 268649 - RNA, 32 nt, Homo Sapiens
uacguugcuuguauauuuaaaguuggaguucg

SEQ ID NO: 268650 - RNA, 32 nt, Homo Sapiens
uguucuaguuuacgugcccaccagcaguaaaa

SEQ ID NO: 268651 - RNA, 32 nt, Homo Sapiens
acugaacaguucugucccacucccagacgggg

SEQ ID NO: 268652 - RNA, 31 nt, Homo Sapiens
gggcgucuugguaguuucuggugggauucag

SEQ ID NO: 268653 - RNA, 28 nt, Homo Sapiens
caaagugaugagaacauuacuaaaaucc

SEQ ID NO: 268654 - RNA, 32 nt, Homo Sapiens
cguaagaaaaauuuuaaauaaacaucuuuaaa

SEQ ID NO: 268655 - RNA, 32 nt, Homo Sapiens
aaugaggagaauaaaauguuugcugaaacuug

SEQ ID NO: 268656 - RNA, 32 nt, Homo Sapiens
acauuuuugcuaucuuuuuuuauuauucugau

SEQ ID NO: 268657 - RNA, 32 nt, Homo Sapiens
uugcacauggggccaaaaccaguaaacagcca

SEQ ID NO: 268658 - RNA, 32 nt, Homo Sapiens
auguucuagcuuuuccaaauuuuguaauugag

SEQ ID NO: 268659 - RNA, 32 nt, Homo Sapiens
aagccagccaggugcaguggcucacaccugua

SEQ ID NO: 268660 - RNA, 32 nt, Homo Sapiens
auuuuggugccuacauauuuuaucuucugauc

SEQ ID NO: 268661 - RNA, 32 nt, Homo Sapiens
agaugggcugucaacagccuguuuucauaaac

SEQ ID NO: 268662 - RNA, 32 nt, Homo Sapiens
ugucccugaaaccauggcagcuccaucuguca

SEQ ID NO: 268663 - RNA, 32 nt, Homo Sapiens
ggcacagccccggcuccggcuccugcggcagc

SEQ ID NO: 268664 - RNA, 32 nt, Homo Sapiens
uuccuguccgcccuucuccucugccauccaga

SEQ ID NO: 268665 - RNA, 32 nt, Homo Sapiens
caguccagccccagcucccuugugccuuccgu

SEQ ID NO: 268666 - RNA, 32 nt, Homo Sapiens
cagccugagugagagaggaggaccccgucuca

SEQ ID NO: 268667 - RNA, 32 nt, Homo Sapiens
cugcgcccaagccaagguccggcgcccacgga

SEQ ID NO: 268668 - RNA, 32 nt, Homo Sapiens
agaauacaauucaguuuuaguuucaaaauguu

SEQ ID NO: 268669 - RNA, 32 nt, Homo Sapiens
cucagggucccuucugccaucuaggccuuagg

SEQ ID NO: 268670 - RNA, 32 nt, Homo Sapiens
acacuauagaaagaagcagcucaaagcaauug

SEQ ID NO: 268671 - RNA, 32 nt, Homo Sapiens
uaaggacagauucggacuuuucguuuccuaug

SEQ ID NO: 268672 - RNA, 30 nt, Homo Sapiens
uagcgaccacuuguuuuucuuuuugucaua

SEQ ID NO: 268673 - RNA, 32 nt, Homo Sapiens
gagcucccugaaccauuguucagaggaccaau

SEQ ID NO: 268674 - RNA, 32 nt, Homo Sapiens
ugcucagucaauaguggcucucauuagccagg

SEQ ID NO: 268675 - RNA, 32 nt, Homo Sapiens
uguacuuuagacauacgcuugucuccugaaug

SEQ ID NO: 268676 - RNA, 32 nt, Homo Sapiens
uuguugacugaauaaaugaaugcacaaccaaa

SEQ ID NO: 268677 - RNA, 32 nt, Homo Sapiens
ggcgcguggaggggcgcggagggcgaaaugag

SEQ ID NO: 268678 - RNA, 32 nt, Homo Sapiens
gaucaucugaaucuuaaucauguccaacugcc

SEQ ID NO: 268679 - RNA, 32 nt, Homo Sapiens
cugccucagccuucggaguggcugggauuaca

SEQ ID NO: 268680 - RNA, 32 nt, Homo Sapiens
cggccgcggggagacaggggcuggggcuggac

SEQ ID NO: 268681 - RNA, 32 nt, Homo Sapiens
gcgaagcagugucaacagucccugguaaacac

SEQ ID NO: 268682 - RNA, 32 nt, Homo Sapiens
agagcucacuucccuuuccugccacggagucu

SEQ ID NO: 268683 - RNA, 32 nt, Homo Sapiens
caggugcucaggugaaguccugugugugggcu

SEQ ID NO: 268684 - RNA, 32 nt, Homo Sapiens
uacccuuuuuuucuauuuuuuaugcuaaaaaa

SEQ ID NO: 268685 - RNA, 32 nt, Homo Sapiens
ugccugcagacacgcccgcauuucuccagggc

SEQ ID NO: 268686 - RNA, 32 nt, Homo Sapiens
gggcagggcuggaagccuuacguaugaagcau

SEQ ID NO: 268687 - RNA, 32 nt, Homo Sapiens
agcucugauuguacaagaauuaccugugcuag

SEQ ID NO: 268688 - RNA, 32 nt, Homo Sapiens
accucuccgugaaaguuuuuccuauccauucc

SEQ ID NO: 268689 - RNA, 32 nt, Homo Sapiens
ugaauaccccaaugguuucuccaauuaugccc

SEQ ID NO: 268690 - RNA, 32 nt, Homo Sapiens
caugaaaauuagugaaaucagaaugaacguuu

SEQ ID NO: 268691 - RNA, 32 nt, Homo Sapiens
gauagaaacaaauauugugugcucuuaacgau

SEQ ID NO: 268692 - RNA, 32 nt, Homo Sapiens
caugcagcuucccagccccuccccuccccuac

SEQ ID NO: 268693 - RNA, 32 nt, Homo Sapiens
uggaagaccagacacacaaguaccucgggaca

SEQ ID NO: 268694 - RNA, 32 nt, Homo Sapiens
acuauguagaaaguguagacuaauguauaauc

SEQ ID NO: 268695 - RNA, 32 nt, Homo Sapiens
uuaaggaaaaauuugggguggugauaauaugg

SEQ ID NO: 268696 - RNA, 32 nt, Homo Sapiens
ucugaugugauugagaaagaaaagcacaaaua

SEQ ID NO: 268697 - RNA, 32 nt, Homo Sapiens
cguuaauguuuuuuuucuuuaccuucagcacc

SEQ ID NO: 268698 - RNA, 32 nt, Homo Sapiens
acugcgcccgucuuaggccugggugucugacc

SEQ ID NO: 268699 - RNA, 32 nt, Homo Sapiens
ucccugcuggggauacuggucagagcauaaag

SEQ ID NO: 268700 - RNA, 32 nt, Homo Sapiens
ggccgcgcagcgcaacgcacuggugccagacu

SEQ ID NO: 268701 - RNA, 32 nt, Homo Sapiens
gauuauaucauuucuuuuucaauuauacuauu

SEQ ID NO: 268702 - RNA, 32 nt, Homo Sapiens
cugaggcgucugggucucuccucucccuugca

SEQ ID NO: 268703 - RNA, 32 nt, Homo Sapiens
gacguugaaacgcagcauuuuugaaaagggag

SEQ ID NO: 268704 - RNA, 28 nt, Homo Sapiens
gggagaauggcgaauggcgugaacccgg

SEQ ID NO: 268705 - RNA, 32 nt, Homo Sapiens
gaucaagacaccuuuuguccagacagcucccu

SEQ ID NO: 268706 - RNA, 32 nt, Homo Sapiens
gggaaaaggggaggggaagagacuggaauauu

SEQ ID NO: 268707 - RNA, 32 nt, Homo Sapiens
auggcaaaaauuaggaagcauaaaaaauaugc

SEQ ID NO: 268708 - RNA, 32 nt, Homo Sapiens
ggauaguauagaaugaagggggaaauaacaca

SEQ ID NO: 268709 - RNA, 32 nt, Homo Sapiens
acuuuuuuuuuauuuuuuucugauaaaauaca

SEQ ID NO: 268710 - RNA, 32 nt, Homo Sapiens
guuacugcaauaagcaucaaauuagcagcgca

SEQ ID NO: 268711 - RNA, 32 nt, Homo Sapiens
agucugagugucccgcggugcccgccaacccg

SEQ ID NO: 268712 - RNA, 32 nt, Homo Sapiens
uuggcauaauacauuuuaaaucaaaccuguuc

SEQ ID NO: 268713 - RNA, 32 nt, Homo Sapiens
cgcggaagcgggucccgcaggucgccacgguu

SEQ ID NO: 268714 - RNA, 32 nt, Homo Sapiens
agugcgcgggagcggaggagccggcacccgcc

SEQ ID NO: 268715 - RNA, 32 nt, Homo Sapiens
cggggcuccgcggaaaaccgaaccggcccacg

SEQ ID NO: 268716 - RNA, 32 nt, Homo Sapiens
uugcccaccucuucugcgugccccucuucugu

SEQ ID NO: 268717 - RNA, 32 nt, Homo Sapiens
ccccuuaucuaucuccuucucggcuccccagc

SEQ ID NO: 268718 - RNA, 32 nt, Homo Sapiens
cagugugcccagaguaaccacuuuuuuccuuu

SEQ ID NO: 268719 - RNA, 32 nt, Homo Sapiens
caacuggccuucugcccugcagccuccguccu

SEQ ID NO: 268720 - RNA, 30 nt, Homo Sapiens
ggcuuccggagcuuuggcggcagcuagggg

SEQ ID NO: 268721 - RNA, 32 nt, Homo Sapiens
uggagguguuuguugaacauaucugcagagcc

SEQ ID NO: 268722 - RNA, 32 nt, Homo Sapiens
acaguccacuuaaaaaaugaugaugaugauaa

SEQ ID NO: 268723 - RNA, 32 nt, Homo Sapiens
agggaagauaucucaugacaaaaggaagaaau

SEQ ID NO: 268724 - RNA, 32 nt, Homo Sapiens
agcugaugucauuuuaguucuaaaucaccugg

SEQ ID NO: 268725 - RNA, 29 nt, Homo Sapiens
ucaauuuagaugaaguauuuucuuuuuag

SEQ ID NO: 268726 - RNA, 32 nt, Homo Sapiens
guggcccccagcugugguggacacagcugugc

SEQ ID NO: 268727 - RNA, 32 nt, Homo Sapiens
uuuguaaaugucaaggacauuuggauuuacuu

SEQ ID NO: 268728 - RNA, 31 nt, Homo Sapiens
ugccggaaauaaagcuacaucuauccaaaaa

SEQ ID NO: 268729 - RNA, 32 nt, Homo Sapiens
aauuuauugugcauauucuuucguuuugguuu

SEQ ID NO: 268730 - RNA, 32 nt, Homo Sapiens
ugguggcccgcaccuguggucccagcuacccg

SEQ ID NO: 268731 - RNA, 32 nt, Homo Sapiens
gguuccccuucucccuucuuggcacuuuccuu

SEQ ID NO: 268732 - RNA, 31 nt, Homo Sapiens
gccugccugacccaccucagagccugcuuug

SEQ ID NO: 268733 - RNA, 32 nt, Homo Sapiens
gugaagaagauaaugaauuuuuuaaagggaac

SEQ ID NO: 268734 - RNA, 32 nt, Homo Sapiens
uaauucaguuauuugcacaaguucagugagaa

SEQ ID NO: 268735 - RNA, 32 nt, Homo Sapiens
cagguuggccuccuggucaaccccaccuguga

SEQ ID NO: 268736 - RNA, 29 nt, Homo Sapiens
agggagaaauacaugguuuuuguggaaau

SEQ ID NO: 268737 - RNA, 32 nt, Homo Sapiens
guuuuuguuuaguuacuguucauuuuacuuua

SEQ ID NO: 268738 - RNA, 32 nt, Homo Sapiens
ggaagaggccgcguggggcgaaggcggcgcuu

SEQ ID NO: 268739 - RNA, 32 nt, Homo Sapiens
aauaagaaucaucagagagcuguauccauguc

SEQ ID NO: 268740 - RNA, 32 nt, Homo Sapiens
cauuuauauggaaauggaaauaaacauauauu

SEQ ID NO: 268741 - RNA, 32 nt, Homo Sapiens
uaaaagucaguagaaucuucuaccucauaacu

SEQ ID NO: 268742 - RNA, 32 nt, Homo Sapiens
agcaugcacaggaugguaaauuggauuggugg

SEQ ID NO: 268743 - RNA, 32 nt, Homo Sapiens
ugcccgcggcuguggcggcgccggcggaucca

SEQ ID NO: 268744 - RNA, 32 nt, Homo Sapiens
gugaaauaaauauguagauagucacauauaca

SEQ ID NO: 268745 - RNA, 32 nt, Homo Sapiens
cuagaaucaccugccaccuggagccucaguaa

SEQ ID NO: 268746 - RNA, 32 nt, Homo Sapiens
aucccaagaggccccugaagccccaagagcuc

SEQ ID NO: 268747 - RNA, 32 nt, Homo Sapiens
gaauucugcuaagagcauuagugaugcaacau

SEQ ID NO: 268748 - RNA, 32 nt, Homo Sapiens
gcucucgcucccacugagccaagcccccuaac

SEQ ID NO: 268749 - RNA, 32 nt, Homo Sapiens
caagugauccuccugcuuggaccucccaaagc

SEQ ID NO: 268750 - RNA, 32 nt, Homo Sapiens
acguggagaucuuuguagguuuagacauggcu

SEQ ID NO: 268751 - RNA, 32 nt, Homo Sapiens
ggacaugcuaguaacuuggagaggagaauaaa

SEQ ID NO: 268752 - RNA, 31 nt, Homo Sapiens
auucuacugcacugccuggcucagcugcacg

SEQ ID NO: 268753 - RNA, 32 nt, Homo Sapiens
augccgcggagcacagagugauuuggaacucc

SEQ ID NO: 268754 - RNA, 32 nt, Homo Sapiens
cgcaugcgcaaggcccuggcgcaugcuccagu

SEQ ID NO: 268755 - RNA, 32 nt, Homo Sapiens
gaaggcccuggucacugcccccggcccaccug

SEQ ID NO: 268756 - RNA, 32 nt, Homo Sapiens
uuugaugaauuaugauacaaucuacauaauaa

SEQ ID NO: 268757 - RNA, 32 nt, Homo Sapiens
cccaccaggagcucagcucuguggaguuuucc

SEQ ID NO: 268758 - RNA, 32 nt, Homo Sapiens
cuguuagacauuagcauuuucguugaugagca

SEQ ID NO: 268759 - RNA, 32 nt, Homo Sapiens
ccugccuuuuuagucccgguggagcggacuua

SEQ ID NO: 268760 - RNA, 32 nt, Homo Sapiens
acuccggguucuccuccagagcgcuaguccca

SEQ ID NO: 268761 - RNA, 32 nt, Homo Sapiens
gaacuguguuuccauccuuugcauuucucugc

SEQ ID NO: 268762 - RNA, 32 nt, Homo Sapiens
uuuggguacugauuauauccacauggaaguag

SEQ ID NO: 268763 - RNA, 32 nt, Homo Sapiens
gugggcuaauuugucucucauuuuggguccuu

SEQ ID NO: 268764 - RNA, 32 nt, Homo Sapiens
ggagcucccucuaucuucucugcugucacacu

SEQ ID NO: 268765 - RNA, 32 nt, Homo Sapiens
uucacacaacuguggauaaauuuuggaagaau

SEQ ID NO: 268766 - RNA, 32 nt, Homo Sapiens
cuuuacccaagguuaugcuaugaccuuuccgc

SEQ ID NO: 268767 - RNA, 32 nt, Homo Sapiens
gaaacgauggcuaauagguaaauauuucuuuc

SEQ ID NO: 268768 - RNA, 32 nt, Homo Sapiens
agcucaaggaagcucagggaaaauggacguau

SEQ ID NO: 268769 - RNA, 32 nt, Homo Sapiens
guuuaauucuguagguaaccauuugagcugca

SEQ ID NO: 268770 - RNA, 32 nt, Homo Sapiens
auauuggcagauguaugaaaagaagugugagu

SEQ ID NO: 268771 - RNA, 32 nt, Homo Sapiens
guauauugguaguugucaauauagcagugcua

SEQ ID NO: 268772 - RNA, 32 nt, Homo Sapiens
auuguagccccacuauucuccucuuuaucaca

SEQ ID NO: 268773 - RNA, 32 nt, Homo Sapiens
ggaccccgcugucacccgcuuuccgggcaccc

SEQ ID NO: 268774 - RNA, 32 nt, Homo Sapiens
cagccucugcuguacacagaaacuacaggcuc

SEQ ID NO: 268775 - RNA, 32 nt, Homo Sapiens
caaagacaagguggcuguggccgauguccacc

SEQ ID NO: 268776 - RNA, 32 nt, Homo Sapiens
ggccugacuaggaaaaguugggaguuaaggag

SEQ ID NO: 268777 - RNA, 32 nt, Homo Sapiens
ggaugaaugccuuuuaaaacuccagcuuuucc

SEQ ID NO: 268778 - RNA, 32 nt, Homo Sapiens
augucaagcaaggaaugcuaggcgggggaggg

SEQ ID NO: 268779 - RNA, 32 nt, Homo Sapiens
cgggaguggaaaccaggcauagccauucugcu

SEQ ID NO: 268780 - RNA, 32 nt, Homo Sapiens
gucggaguggccauggugcugcugcugcuggu

SEQ ID NO: 268781 - RNA, 32 nt, Homo Sapiens
aauuugaaaagacaaacuauggcugcuucuuc

SEQ ID NO: 268782 - RNA, 32 nt, Homo Sapiens
gugaaaauccugaaaucaaggaucuuuggaac

SEQ ID NO: 268783 - RNA, 32 nt, Homo Sapiens
aggaggugggggcaugggaaaccuuuucaucu

SEQ ID NO: 268784 - RNA, 32 nt, Homo Sapiens
caaugcugaauuaggcaaaaccaauauuuagu

SEQ ID NO: 268785 - RNA, 32 nt, Homo Sapiens
cuaaaaaguaguguuauggcugauuuccgaga

SEQ ID NO: 268786 - RNA, 32 nt, Homo Sapiens
aucagugaauauaaauguacuacauuugcaug

SEQ ID NO: 268787 - RNA, 32 nt, Homo Sapiens
aggagaccggaguggacgggcuggggaaggca

SEQ ID NO: 268788 - RNA, 32 nt, Homo Sapiens
gaacuugacaguuaggacuuaguucuccuuga

SEQ ID NO: 268789 - RNA, 32 nt, Homo Sapiens
ccgaccccggccgccgcgggaccccgaugagc

SEQ ID NO: 268790 - RNA, 32 nt, Homo Sapiens
uuucucuagucuuuuuuggacagccucaguaa

SEQ ID NO: 268791 - RNA, 32 nt, Homo Sapiens
gaggagcagcgggacgaggaagggcagacugg

SEQ ID NO: 268792 - RNA, 32 nt, Homo Sapiens
ucagcaagaggggcaaggucagacaggauuug

SEQ ID NO: 268793 - RNA, 32 nt, Homo Sapiens
cagcuuugcaagaugaaaagcuuucccacuug

SEQ ID NO: 268794 - RNA, 32 nt, Homo Sapiens
auucaucucaaauuauuuugaauucuucccaa

SEQ ID NO: 268795 - RNA, 32 nt, Homo Sapiens
gcguuugcaccucgcugcuccagccucugggg

SEQ ID NO: 268796 - RNA, 32 nt, Homo Sapiens
aagccuuaagauguuucuuuugaauaugguua

SEQ ID NO: 268797 - RNA, 32 nt, Homo Sapiens
gcgucccucccucucucuccagccguuuuggg

SEQ ID NO: 268798 - RNA, 32 nt, Homo Sapiens
agacauuuucuuuaugguuccaagugcaaaac

SEQ ID NO: 268799 - RNA, 32 nt, Homo Sapiens
acuuaaaugacuucauugggaauauugagcag

SEQ ID NO: 268800 - RNA, 29 nt, Homo Sapiens
cuggauauguguauguaaauuagaaaaua

SEQ ID NO: 268801 - RNA, 32 nt, Homo Sapiens
cuaguacuacaauaauggauauuuuuauuucu

SEQ ID NO: 268802 - RNA, 32 nt, Homo Sapiens
gccuguuguuuucgcugugacuugggucucag

SEQ ID NO: 268803 - RNA, 32 nt, Homo Sapiens
guggcugggugaccacagcagcugcaugcaga

SEQ ID NO: 268804 - RNA, 32 nt, Homo Sapiens
aauguuuguucauuguuuuucuccauucuucc

SEQ ID NO: 268805 - RNA, 32 nt, Homo Sapiens
uuuuaaagguaacaguaauuuucaacacauuu

SEQ ID NO: 268806 - RNA, 32 nt, Homo Sapiens
agcccgcauucagacaccgcggaccggcuccg

SEQ ID NO: 268807 - RNA, 32 nt, Homo Sapiens
ggugccgcccacggcuuuggcccuggggucug

SEQ ID NO: 268808 - RNA, 32 nt, Homo Sapiens
agggugcugugaccgaugagaccucagcucag

SEQ ID NO: 268809 - RNA, 32 nt, Homo Sapiens
aguaaaagaaacaaagaauuaucuuugugauc

SEQ ID NO: 268810 - RNA, 32 nt, Homo Sapiens
agauuauucaguacucuugagagugucacaac

SEQ ID NO: 268811 - RNA, 31 nt, Homo Sapiens
agaugccuugguaaaauaggcauuggggcuc

SEQ ID NO: 268812 - RNA, 32 nt, Homo Sapiens
aaacugaggcaugggccauuuauuuuccucgg

SEQ ID NO: 268813 - RNA, 32 nt, Homo Sapiens
ggggcccagcgaaucacgcagagaaaucuuac

SEQ ID NO: 268814 - RNA, 32 nt, Homo Sapiens
aacaguggcuacaacuaacaaauggccacaaa

SEQ ID NO: 268815 - RNA, 32 nt, Homo Sapiens
cggcggcggcggcggcagcgcugccuucacuc

SEQ ID NO: 268816 - RNA, 32 nt, Homo Sapiens
aguccugaauucaaauccuuguuuuugcacuu

SEQ ID NO: 268817 - RNA, 32 nt, Homo Sapiens
agaacaugaugauuggagaugcaugaaacgug

SEQ ID NO: 268818 - RNA, 32 nt, Homo Sapiens
ccagaaagacauuucaagauagaugcuucagg

SEQ ID NO: 268819 - RNA, 32 nt, Homo Sapiens
augucaguguguauuauucaccucuuuugcua

SEQ ID NO: 268820 - RNA, 32 nt, Homo Sapiens
acuucccuauuucgcuuucuccucggcucacu

SEQ ID NO: 268821 - RNA, 32 nt, Homo Sapiens
gucggugaccuggccugugaggagcagugagg

SEQ ID NO: 268822 - RNA, 32 nt, Homo Sapiens
uacagaauaagaaaacaaaaaacaagacuacu

SEQ ID NO: 268823 - RNA, 32 nt, Homo Sapiens
agaaaagaugaccccagcuccugacacacaga

SEQ ID NO: 268824 - RNA, 32 nt, Homo Sapiens
cagacauggaggaagcgcaggccggcaugggg

SEQ ID NO: 268825 - RNA, 32 nt, Homo Sapiens
ugaagaacuacgucuuuuuuuuuuuuguuauc

SEQ ID NO: 268826 - RNA, 32 nt, Homo Sapiens
cucccaccccgggaacccggaaguggaggagg

SEQ ID NO: 268827 - RNA, 32 nt, Homo Sapiens
ucccaauguggccuauggagagacaggccuuu

SEQ ID NO: 268828 - RNA, 32 nt, Homo Sapiens
ucuccugagugccaacuguccaggccauuuga

SEQ ID NO: 268829 - RNA, 32 nt, Homo Sapiens
auggguucugcagguaacucauccucuagucc

SEQ ID NO: 268830 - RNA, 32 nt, Homo Sapiens
ggagggccaggaggaggaagagucugcagcau

SEQ ID NO: 268831 - RNA, 32 nt, Homo Sapiens
acccccagaaaugugaaaggagguuucuuacu

SEQ ID NO: 268832 - RNA, 32 nt, Homo Sapiens
acugaaugaugaauuaauauauuuauauauug

SEQ ID NO: 268833 - RNA, 32 nt, Homo Sapiens
cccuguuuugcccuuccaccuucugccaugug

SEQ ID NO: 268834 - RNA, 32 nt, Homo Sapiens
cagaaauagcuaaaugugacucaggaaguauc

SEQ ID NO: 268835 - RNA, 32 nt, Homo Sapiens
uaucaguaccagugaaugggugacauaucaug

SEQ ID NO: 268836 - RNA, 32 nt, Homo Sapiens
gcacggaggcggaggccgagggggcugugcac

SEQ ID NO: 268837 - RNA, 32 nt, Homo Sapiens
gcugcuccaacucuggcagacacgccaagcuu

SEQ ID NO: 268838 - RNA, 27 nt, Homo Sapiens
cuaagguccuucuuagcacucuucagc

SEQ ID NO: 268839 - RNA, 32 nt, Homo Sapiens
guucuauucuagucuuuuuuuauugaguccuc

SEQ ID NO: 268840 - RNA, 32 nt, Homo Sapiens
ggccagugaugauguuuugauauuuauuuccu

SEQ ID NO: 268841 - RNA, 32 nt, Homo Sapiens
uccacugcucuagaaucuaaccagaaauagaa

SEQ ID NO: 268842 - RNA, 32 nt, Homo Sapiens
gggcuggggagugucauggggguggggacagg

SEQ ID NO: 268843 - RNA, 32 nt, Homo Sapiens
acugaauccaaauauccuagcuggcucuuacu

SEQ ID NO: 268844 - RNA, 32 nt, Homo Sapiens
ccuaguaaccguccggccgcggcgcuggcuua

SEQ ID NO: 268845 - RNA, 32 nt, Homo Sapiens
cugggcuuccccucggccuccaggugaggcug

SEQ ID NO: 268846 - RNA, 32 nt, Homo Sapiens
gcagcuugcguugacagccugggggcagcaag

SEQ ID NO: 268847 - RNA, 32 nt, Homo Sapiens
caaucgauucugaacucugagguccaaguucu

SEQ ID NO: 268848 - RNA, 32 nt, Homo Sapiens
uuuuuacugaaauuaacugaaaaaauaugaaa

SEQ ID NO: 268849 - RNA, 32 nt, Homo Sapiens
uuuaauaacaucuauuauuucuaguaaauucu

SEQ ID NO: 268850 - RNA, 32 nt, Homo Sapiens
aacaugauugaaaauacacuguuuuagucucu

SEQ ID NO: 268851 - RNA, 32 nt, Homo Sapiens
guuaacagugugcucauagaaacugcuuugac

SEQ ID NO: 268852 - RNA, 32 nt, Homo Sapiens
aagauccgcaauguggagcagcagccacugca

SEQ ID NO: 268853 - RNA, 32 nt, Homo Sapiens
aguccagauuuucccaccugaccucccugccu

SEQ ID NO: 268854 - RNA, 32 nt, Homo Sapiens
cagugggccuaccccacaccugggcucuccac

SEQ ID NO: 268855 - RNA, 32 nt, Homo Sapiens
cuccuggcacgcugggcccuccgggaggagag

SEQ ID NO: 268856 - RNA, 32 nt, Homo Sapiens
ccaccacugggcugcucuccaaccgagugcuc

SEQ ID NO: 268857 - RNA, 32 nt, Homo Sapiens
uccagccuaagcaacauagugaaaccccaucu

SEQ ID NO: 268858 - RNA, 32 nt, Homo Sapiens
ugaagaaguacaauuuguuauaguauaguauc

SEQ ID NO: 268859 - RNA, 32 nt, Homo Sapiens
uugaggccagggguuugagaccagccuggcca

SEQ ID NO: 268860 - RNA, 32 nt, Homo Sapiens
gaggcacagcacccucaaggcuugaggaggag

SEQ ID NO: 268861 - RNA, 32 nt, Homo Sapiens
ugugcuggccgcgcucgccggacgaagaagag

SEQ ID NO: 268862 - RNA, 32 nt, Homo Sapiens
uagacauccggaugauggauagaugaggagac

SEQ ID NO: 268863 - RNA, 32 nt, Homo Sapiens
cgcuccccgcgccccuucccacuucccgcggg

SEQ ID NO: 268864 - RNA, 32 nt, Homo Sapiens
cggguucugggguguagacgcugcuggccagc

SEQ ID NO: 268865 - RNA, 29 nt, Homo Sapiens
ucuuuuuuaaaauaaauuuuauuuuauau

SEQ ID NO: 268866 - RNA, 32 nt, Homo Sapiens
caggcagcgcgagggaggagcugcgccgccgg

SEQ ID NO: 268867 - RNA, 32 nt, Homo Sapiens
gccacuaaaaagcauccugcugcugcagugca

SEQ ID NO: 268868 - RNA, 32 nt, Homo Sapiens
cuaggaucaggucauacuccacagccugccug

SEQ ID NO: 268869 - RNA, 32 nt, Homo Sapiens
ccuggacccuuccacagccuggcugcuaggcc

SEQ ID NO: 268870 - RNA, 32 nt, Homo Sapiens
gaaagggggugggacagggacucggggcuggg

SEQ ID NO: 268871 - RNA, 30 nt, Homo Sapiens
uggcuagucugugccucagugagaucaguc

SEQ ID NO: 268872 - RNA, 32 nt, Homo Sapiens
ccugagcccucccggccaggcuucgugcuggg

SEQ ID NO: 268873 - RNA, 32 nt, Homo Sapiens
gcggccucugcgccucgggcgggcgggagaga

SEQ ID NO: 268874 - RNA, 32 nt, Homo Sapiens
cgucucccagcaugcucuagagaggcggcucu

SEQ ID NO: 268875 - RNA, 32 nt, Homo Sapiens
ugcagccacuccugggggcuguggggaagaca

SEQ ID NO: 268876 - RNA, 32 nt, Homo Sapiens
uucugcuuggcuuuccggcuuaauuuuccucg

SEQ ID NO: 268877 - RNA, 31 nt, Homo Sapiens
ugcugucuugguagcuuggacuuagugggag

SEQ ID NO: 268878 - RNA, 32 nt, Homo Sapiens
cugugccucacagaugccccgagaagagauga

SEQ ID NO: 268879 - RNA, 32 nt, Homo Sapiens
gggcaggccuccuggguugcagggacuugaga

SEQ ID NO: 268880 - RNA, 32 nt, Homo Sapiens
ugcuggcucauguugguagaaacuggcaccca

SEQ ID NO: 268881 - RNA, 32 nt, Homo Sapiens
cuugacuugcuccauccucuuaaacuuuuugu

SEQ ID NO: 268882 - RNA, 32 nt, Homo Sapiens
agcaucugcuccagauggaaaauggguaagga

SEQ ID NO: 268883 - RNA, 32 nt, Homo Sapiens
guucuuacgugauuuuaaccauucaacaugcu

SEQ ID NO: 268884 - RNA, 32 nt, Homo Sapiens
cacugaggccccagguguccucccucccccac

SEQ ID NO: 268885 - RNA, 32 nt, Homo Sapiens
aucaaacaaaaauuucuugaguucuuauggcu

SEQ ID NO: 268886 - RNA, 32 nt, Homo Sapiens
aagaaccuucucuccuuccucuuccucaugaa

SEQ ID NO: 268887 - RNA, 32 nt, Homo Sapiens
uguuuuggauugcaugagacucguucaggaga

SEQ ID NO: 268888 - RNA, 32 nt, Homo Sapiens
cggagugaauggcggcggcggcugggaugcug

SEQ ID NO: 268889 - RNA, 32 nt, Homo Sapiens
gaggaagaggauguuacuagagucagaugauu

SEQ ID NO: 268890 - RNA, 32 nt, Homo Sapiens
cuucuuccgguccacacccuauacucaugaca

SEQ ID NO: 268891 - RNA, 32 nt, Homo Sapiens
gguugggaaggagauagcugcaaccaaaaaag

SEQ ID NO: 268892 - RNA, 32 nt, Homo Sapiens
gucguuuuucuuuuuuaaacaaaacaugacaa

SEQ ID NO: 268893 - RNA, 32 nt, Homo Sapiens
ggcgcucaccuccgccaccuccucaggguucu

SEQ ID NO: 268894 - RNA, 32 nt, Homo Sapiens
aguuuugucacuuuucuagccaaaggaagacc

SEQ ID NO: 268895 - RNA, 32 nt, Homo Sapiens
ucuugcucugcacuguaugugugagcuauaug

SEQ ID NO: 268896 - RNA, 32 nt, Homo Sapiens
gugcacagcaaccaagcaugaggacugaguua

SEQ ID NO: 268897 - RNA, 32 nt, Homo Sapiens
caccaacaagagcuacgucuaagguuguggca

SEQ ID NO: 268898 - RNA, 32 nt, Homo Sapiens
ccaugcagcucuuaccugucagugucucauug

SEQ ID NO: 268899 - RNA, 32 nt, Homo Sapiens
ucugcagagguaauaggcaggggacugaauga

SEQ ID NO: 268900 - RNA, 32 nt, Homo Sapiens
guguuugccugccugcaggaggugcuggagag

SEQ ID NO: 268901 - RNA, 32 nt, Homo Sapiens
uaccucagaaugccgggucuaaguuguagauu

SEQ ID NO: 268902 - RNA, 32 nt, Homo Sapiens
agccaaaagaucaaagaagggauacuuucaga

SEQ ID NO: 268903 - RNA, 32 nt, Homo Sapiens
guccuggcucugacaagcccuccagcuucacg

SEQ ID NO: 268904 - RNA, 32 nt, Homo Sapiens
uauaaauauuccaugaacaauuggagaaaaua

SEQ ID NO: 268905 - RNA, 32 nt, Homo Sapiens
uuggugguugccagguacuggaggaagagaga

SEQ ID NO: 268906 - RNA, 32 nt, Homo Sapiens
ccuggggaacuugaacggcagcuuuugcaagc

SEQ ID NO: 268907 - RNA, 32 nt, Homo Sapiens
acuguauuccuacaauguacacuuggauauuu

SEQ ID NO: 268908 - RNA, 32 nt, Homo Sapiens
uuugcuuuuuguuuuucuuucuucuucuuaca

SEQ ID NO: 268909 - RNA, 32 nt, Homo Sapiens
cgcgcucucuuccucccucagacaacucgccc

SEQ ID NO: 268910 - RNA, 32 nt, Homo Sapiens
cucaucccuacccuggggcaccucugacccug

SEQ ID NO: 268911 - RNA, 32 nt, Homo Sapiens
ggcagggcgggcgggcgcucuaaggguucugc

SEQ ID NO: 268912 - RNA, 32 nt, Homo Sapiens
cugcaucgggacuuuuuaauucuucagacaca

SEQ ID NO: 268913 - RNA, 32 nt, Homo Sapiens
ucauuucccuggaugguuucuugccugcacug

SEQ ID NO: 268914 - RNA, 32 nt, Homo Sapiens
aucuccggguccucggucccgccucagcagcc

SEQ ID NO: 268915 - RNA, 32 nt, Homo Sapiens
gauccugccaacuuucuggggcuucuggauga

SEQ ID NO: 268916 - RNA, 32 nt, Homo Sapiens
agcuuagaaaaaacagccugcaggauuggcuu

SEQ ID NO: 268917 - RNA, 32 nt, Homo Sapiens
acuucccccauggagauuccuguccuagucua

SEQ ID NO: 268918 - RNA, 32 nt, Homo Sapiens
ugcugucuaauagaacuuucugugacgaugga

SEQ ID NO: 268919 - RNA, 32 nt, Homo Sapiens
cuccacaguccuccagcuucggauccacagac

SEQ ID NO: 268920 - RNA, 32 nt, Homo Sapiens
aagacaaaaacgcaggucuaucaagagcuacu

SEQ ID NO: 268921 - RNA, 32 nt, Homo Sapiens
ucuuuguuaugaacauuaugaaaaccaccuuc

SEQ ID NO: 268922 - RNA, 32 nt, Homo Sapiens
cuuacacauacaccagcaacaguauaaaugua

SEQ ID NO: 268923 - RNA, 32 nt, Homo Sapiens
ugccauucucugcacaugggcagccagccuga

SEQ ID NO: 268924 - RNA, 32 nt, Homo Sapiens
gacucgcagggccugcucuucuuccggcagga

SEQ ID NO: 268925 - RNA, 32 nt, Homo Sapiens
gcuccgaggagcuggccugauguccucggguc

SEQ ID NO: 268926 - RNA, 32 nt, Homo Sapiens
cgcuucccggcggcucugcugguugggggagg

SEQ ID NO: 268927 - RNA, 32 nt, Homo Sapiens
cagaauccacugggcucucuuggccauccgcu

SEQ ID NO: 268928 - RNA, 32 nt, Homo Sapiens
ggaaugacuguguuuacccagugccuauaccc

SEQ ID NO: 268929 - RNA, 32 nt, Homo Sapiens
agaguagcuuugcaacuggcuuuggggacuuc

SEQ ID NO: 268930 - RNA, 32 nt, Homo Sapiens
guugcuuuuuaauggcggcagcggcugcuggg

SEQ ID NO: 268931 - RNA, 32 nt, Homo Sapiens
caucuguuuauuucuauaccuuucaauacaug

SEQ ID NO: 268932 - RNA, 32 nt, Homo Sapiens
aaauggaauuggcagcacuggauuguauauua

SEQ ID NO: 268933 - RNA, 32 nt, Homo Sapiens
cccccugcuguggaaccuaagaaaccagggaa

SEQ ID NO: 268934 - RNA, 32 nt, Homo Sapiens
cugcugguccuggagagcugcccccagaagaa

SEQ ID NO: 268935 - RNA, 32 nt, Homo Sapiens
guagggaggucuugaagccaaugagggauuua

SEQ ID NO: 268936 - RNA, 32 nt, Homo Sapiens
gaguggcggacucuucugaagcagccagaacu

SEQ ID NO: 268937 - RNA, 32 nt, Homo Sapiens
cuucuguguuuuuccuuuuuaugugagugugu

SEQ ID NO: 268938 - RNA, 32 nt, Homo Sapiens
gcacugugucuugccuuucagaucuuaacaga

SEQ ID NO: 268939 - RNA, 32 nt, Homo Sapiens
uguguaaauaucuuuucauauuuuuuccuacg

SEQ ID NO: 268940 - RNA, 32 nt, Homo Sapiens
auauguugccagcauugugcucagccgaagag

SEQ ID NO: 268941 - RNA, 32 nt, Homo Sapiens
gcaaaacuuuuguauuuuuguaaaaaaucuca

SEQ ID NO: 268942 - RNA, 32 nt, Homo Sapiens
ugaugcucggcugauuuuuguuuacuuuuuag

SEQ ID NO: 268943 - RNA, 32 nt, Homo Sapiens
ggggaaaaacugaacauucaggugauauuuua

SEQ ID NO: 268944 - RNA, 28 nt, Homo Sapiens
cggauggaggacucggacucggcggcaa

SEQ ID NO: 268945 - RNA, 30 nt, Homo Sapiens
cacaaauggucaggcggcggcggcggagaa

SEQ ID NO: 268946 - RNA, 32 nt, Homo Sapiens
aucaacaauuuaauguauuaguccaaauuauu

SEQ ID NO: 268947 - RNA, 32 nt, Homo Sapiens
ccgggaugguggggggucuuggagccaagcuc

SEQ ID NO: 268948 - RNA, 32 nt, Homo Sapiens
aacuggccucuacuaucuuuaacucaugcaug

SEQ ID NO: 268949 - RNA, 32 nt, Homo Sapiens
ugacagauccuggucuucuuucuggguuauug

SEQ ID NO: 268950 - RNA, 31 nt, Homo Sapiens
ccugugaaauaaaacucaguauuuuaauaaa

SEQ ID NO: 268951 - RNA, 32 nt, Homo Sapiens
gauaggauggucagaaaggaccucuuuguaga

SEQ ID NO: 268952 - RNA, 30 nt, Homo Sapiens
uaguaucugcuaauguaagggacaucugua

SEQ ID NO: 268953 - RNA, 32 nt, Homo Sapiens
ucucucuuucuuucuuuuuuucuuucuggaac

SEQ ID NO: 268954 - RNA, 32 nt, Homo Sapiens
agcccccacccccaagcuuggugcugagcccu

SEQ ID NO: 268955 - RNA, 32 nt, Homo Sapiens
ugggagggggagguuucuuccucccccguccc

SEQ ID NO: 268956 - RNA, 32 nt, Homo Sapiens
uuuuuuguuucaucugcauuuggucuucucug

SEQ ID NO: 268957 - RNA, 32 nt, Homo Sapiens
uacauguauuaagauggucauauuauucuucu

SEQ ID NO: 268958 - RNA, 32 nt, Homo Sapiens
agcagcaggcaucaccccccaguggacucggg

SEQ ID NO: 268959 - RNA, 32 nt, Homo Sapiens
ccgcugcguucugggagcuccucccccuucug

SEQ ID NO: 268960 - RNA, 32 nt, Homo Sapiens
ccauggcaaagagggauuaagguggcaggugg

SEQ ID NO: 268961 - RNA, 30 nt, Homo Sapiens
acaggguuucaccguguuagccaggaugga

SEQ ID NO: 268962 - RNA, 32 nt, Homo Sapiens
ggcuagggaggcuuuuaccacgugccugagag

SEQ ID NO: 268963 - RNA, 32 nt, Homo Sapiens
aguuugccaaaauauuuuguuguaaaauuuuu

SEQ ID NO: 268964 - RNA, 32 nt, Homo Sapiens
cucaggugucuccuugcugucaucccacauag

SEQ ID NO: 268965 - RNA, 32 nt, Homo Sapiens
ugaauccaaggccaaugcugccugcucuguuu

SEQ ID NO: 268966 - RNA, 32 nt, Homo Sapiens
uagaagaacuucaucuuaauuuaugucacaaa

SEQ ID NO: 268967 - RNA, 32 nt, Homo Sapiens
uccuaaucauaaaaauagccccagaaagagcc

SEQ ID NO: 268968 - RNA, 32 nt, Homo Sapiens
acuggucccucggagaucugcuggggcuaugg

SEQ ID NO: 268969 - RNA, 29 nt, Homo Sapiens
uguaaagaugaggguuauuuucugaaaug

SEQ ID NO: 268970 - RNA, 32 nt, Homo Sapiens
auuucuccgugugggggcuacaugcgacccuc

SEQ ID NO: 268971 - RNA, 32 nt, Homo Sapiens
ugguuuuacacccacccccugggcagggaguu

SEQ ID NO: 268972 - RNA, 32 nt, Homo Sapiens
ccaaggagcagggggcaggagauggaaaauug

SEQ ID NO: 268973 - RNA, 32 nt, Homo Sapiens
cccuuuggaucuuucuuccucuccagcccaca

SEQ ID NO: 268974 - RNA, 32 nt, Homo Sapiens
cccugcgcucccgacacccccgcccgccuccc

SEQ ID NO: 268975 - RNA, 32 nt, Homo Sapiens
ugaguuacuaaaauaucauggauuuuguuuau

SEQ ID NO: 268976 - RNA, 32 nt, Homo Sapiens
aucguggggccuuuccuucucggcugguucuc

SEQ ID NO: 268977 - RNA, 32 nt, Homo Sapiens
gccaaaagggccuuuggauccuggacaaagcu

SEQ ID NO: 268978 - RNA, 32 nt, Homo Sapiens
augccaagauucuuaaauuugccagcguuaaa

SEQ ID NO: 268979 - RNA, 32 nt, Homo Sapiens
gauuugagauacaacuuuuuguguggguugaa

SEQ ID NO: 268980 - RNA, 32 nt, Homo Sapiens
uguccacagucacugagccagacggucgguug

SEQ ID NO: 268981 - RNA, 32 nt, Homo Sapiens
uugugcccaucaaaagcccccauccuacccag

SEQ ID NO: 268982 - RNA, 32 nt, Homo Sapiens
cucacugcagccuccgccucccagguucaagc

SEQ ID NO: 268983 - RNA, 32 nt, Homo Sapiens
aaucucaagugcuuagaacaguucuuacauau

SEQ ID NO: 268984 - RNA, 32 nt, Homo Sapiens
cucagguauucaguaauacaaugaaaagcaaa

SEQ ID NO: 268985 - RNA, 32 nt, Homo Sapiens
aaggaaaaaugaacacagggaagugacuuugc

SEQ ID NO: 268986 - RNA, 32 nt, Homo Sapiens
guagccuugcuuucugagcaccaucuaaagaa

SEQ ID NO: 268987 - RNA, 32 nt, Homo Sapiens
uguguauuccugugguuuuucuaauagaaacu

SEQ ID NO: 268988 - RNA, 32 nt, Homo Sapiens
aaaauucugugccuuuucuauuaucaccaaac

SEQ ID NO: 268989 - RNA, 32 nt, Homo Sapiens
aauggguaacuaaaauggacuuccauaguauu

SEQ ID NO: 268990 - RNA, 32 nt, Homo Sapiens
uuuagaacauguagcaucaucuuagaggucua

SEQ ID NO: 268991 - RNA, 32 nt, Homo Sapiens
acauuuaaacaauguucuaagguacauauacu

SEQ ID NO: 268992 - RNA, 32 nt, Homo Sapiens
ccucucuaacuggccuggcucuggaagggcug

SEQ ID NO: 268993 - RNA, 32 nt, Homo Sapiens
gaguucucuucugcagaaaccaauggugaggc

SEQ ID NO: 268994 - RNA, 32 nt, Homo Sapiens
guaggacagcagacccuggggguuggcucuga

SEQ ID NO: 268995 - RNA, 32 nt, Homo Sapiens
aagugcaugcgugcuggaacgucaaacaucac

SEQ ID NO: 268996 - RNA, 32 nt, Homo Sapiens
ugucccucagcugccaccaugagcgaccaaga

SEQ ID NO: 268997 - RNA, 32 nt, Homo Sapiens
gggugcggggagaggggagggauagcauuagg

SEQ ID NO: 268998 - RNA, 32 nt, Homo Sapiens
aacgugaacauaugugcugccugcccuccauu

SEQ ID NO: 268999 - RNA, 32 nt, Homo Sapiens
uaaauuaaggucuuuuauaaauuuaguaaauc

SEQ ID NO: 269000 - RNA, 32 nt, Homo Sapiens
gacuccauuuagccuuuuaagccgagguuccu

SEQ ID NO: 269001 - RNA, 32 nt, Homo Sapiens
guagugggggccgguguggggcagaguccuga

SEQ ID NO: 269002 - RNA, 32 nt, Homo Sapiens
cucccagguucaaguaauucugccucagccuc

SEQ ID NO: 269003 - RNA, 32 nt, Homo Sapiens
ggacaaggacuccgagaagaccaagagguggu

SEQ ID NO: 269004 - RNA, 30 nt, Homo Sapiens
cuggguggcuguggcggcggcagggggaug

SEQ ID NO: 269005 - RNA, 30 nt, Homo Sapiens
uuaaggcauaaaagaagaauucugcauaga

SEQ ID NO: 269006 - RNA, 32 nt, Homo Sapiens
ugacauaacucauacaucggcacugaauuaaa

SEQ ID NO: 269007 - RNA, 32 nt, Homo Sapiens
caggaggcggagaggcaggcggagcucagaug

SEQ ID NO: 269008 - RNA, 32 nt, Homo Sapiens
uaguuaggccugugucaacaguuuggauuuuu

SEQ ID NO: 269009 - RNA, 32 nt, Homo Sapiens
ugccugagggcuuauuuuggcugcugguaacu

SEQ ID NO: 269010 - RNA, 32 nt, Homo Sapiens
ugcuaagauaaaaaccaaaacaauaucagaau

SEQ ID NO: 269011 - RNA, 31 nt, Homo Sapiens
ggagcugggaccugccugccccugucuuuuc

SEQ ID NO: 269012 - RNA, 32 nt, Homo Sapiens
uuacuuuacuucgugccaaaucaaaugaaaca

SEQ ID NO: 269013 - RNA, 32 nt, Homo Sapiens
auuguauuaugcugcucacugauccuucugca

SEQ ID NO: 269014 - RNA, 32 nt, Homo Sapiens
gaaagacuuuuuuuuuuuuuuaacuuagucaa

SEQ ID NO: 269015 - RNA, 31 nt, Homo Sapiens
cccuggcugccggucccauccuuggagggac

SEQ ID NO: 269016 - RNA, 32 nt, Homo Sapiens
aggccgaggguccccgggcacccaggucgguc

SEQ ID NO: 269017 - RNA, 32 nt, Homo Sapiens
uagcagagguugcagugagcugagagugugcc

SEQ ID NO: 269018 - RNA, 32 nt, Homo Sapiens
cccggcaggggcggggugcgaguggguggugg

SEQ ID NO: 269019 - RNA, 32 nt, Homo Sapiens
ucuuccgugggacuguccccaaggcugaggcu

SEQ ID NO: 269020 - RNA, 32 nt, Homo Sapiens
uugucuuagauauacaaauacauagugagaaa

SEQ ID NO: 269021 - RNA, 32 nt, Homo Sapiens
gcuugucccucacggucaccguuacauuuucu

SEQ ID NO: 269022 - RNA, 32 nt, Homo Sapiens
aucuuugauuuuucauucaaguaaauauagcc

SEQ ID NO: 269023 - RNA, 32 nt, Homo Sapiens
gauggagaaagaugaucauauuuacagacacu

SEQ ID NO: 269024 - RNA, 32 nt, Homo Sapiens
cacccuaaccccgacuccccagcccugggacu

SEQ ID NO: 269025 - RNA, 32 nt, Homo Sapiens
guuuaaccuugaugaauuguauaaagagagaa

SEQ ID NO: 269026 - RNA, 32 nt, Homo Sapiens
aguuauaugaauauguccuagcacuaagggaa

SEQ ID NO: 269027 - RNA, 32 nt, Homo Sapiens
cggggcggcuggccgggcagggggcugacacc

SEQ ID NO: 269028 - RNA, 32 nt, Homo Sapiens
uuauugaucaauuaauaaaacuguaguuguaa

SEQ ID NO: 269029 - RNA, 32 nt, Homo Sapiens
gagggguacgcuuccucgagacuuggggcucu

SEQ ID NO: 269030 - RNA, 32 nt, Homo Sapiens
gcagacccauggcuggcgcagcugccuguugc

SEQ ID NO: 269031 - RNA, 32 nt, Homo Sapiens
auagcuguauaaaauguauaugauugucuuga

SEQ ID NO: 269032 - RNA, 32 nt, Homo Sapiens
ucauuuaaaaagcucacugcugaugguagaaa

SEQ ID NO: 269033 - RNA, 32 nt, Homo Sapiens
uuuacugucuggggaccccccuugcccaugcu

SEQ ID NO: 269034 - RNA, 32 nt, Homo Sapiens
auuuauucuucuagcaauuaauugccuacauu

SEQ ID NO: 269035 - RNA, 32 nt, Homo Sapiens
gaaaggguuugugauacagcggucacuauuuu

SEQ ID NO: 269036 - RNA, 32 nt, Homo Sapiens
uccaggccgagccccgagcgccugcaggaaca

SEQ ID NO: 269037 - RNA, 30 nt, Homo Sapiens
gagcgcaugugugugcaccagugcacaagu

SEQ ID NO: 269038 - RNA, 32 nt, Homo Sapiens
ggaugaagguugcugggauuaaggggauuaga

SEQ ID NO: 269039 - RNA, 32 nt, Homo Sapiens
gucugggggaaugcggagaaaagggaggcuug

SEQ ID NO: 269040 - RNA, 32 nt, Homo Sapiens
caaaaggggccuggccagucagacagcccuuu

SEQ ID NO: 269041 - RNA, 32 nt, Homo Sapiens
uuaucaaaagugauugugaaaacagugucuua

SEQ ID NO: 269042 - RNA, 27 nt, Homo Sapiens
gcccuguucuucuucaugcuguugcug

SEQ ID NO: 269043 - RNA, 32 nt, Homo Sapiens
ccaguguggacuugggauuugcugugcucagc

SEQ ID NO: 269044 - RNA, 32 nt, Homo Sapiens
cggacuccuggucuggcccaauaaagacuguu

SEQ ID NO: 269045 - RNA, 32 nt, Homo Sapiens
uguuuuuuuuuuucuuuuuugucccccccauc

SEQ ID NO: 269046 - RNA, 32 nt, Homo Sapiens
aaacaaaggauuugaaaacaccaagaguacag

SEQ ID NO: 269047 - RNA, 32 nt, Homo Sapiens
cuucuauuugugugaauauauucaaauaugua

SEQ ID NO: 269048 - RNA, 32 nt, Homo Sapiens
aggcuuccuggagcugucggcggccgcgcugc

SEQ ID NO: 269049 - RNA, 32 nt, Homo Sapiens
guaagaugcaggagaaguugggcaaaagcccu

SEQ ID NO: 269050 - RNA, 32 nt, Homo Sapiens
ggcagacccacccguccacacccucugaguca

SEQ ID NO: 269051 - RNA, 32 nt, Homo Sapiens
uuuagcaaggauaaaaucauugccuuguguua

SEQ ID NO: 269052 - RNA, 32 nt, Homo Sapiens
cccccaggcagccccugaagcugccggguucu

SEQ ID NO: 269053 - RNA, 32 nt, Homo Sapiens
gccggcgcgcgacgcgggagggcgccgauagg

SEQ ID NO: 269054 - RNA, 32 nt, Homo Sapiens
ucgggguaauagggcugcugcucggccggccg

SEQ ID NO: 269055 - RNA, 32 nt, Homo Sapiens
ucugcacugcaaccuccaccaggaccaggauc

SEQ ID NO: 269056 - RNA, 32 nt, Homo Sapiens
auaugcugacaauaaauuguauggagaauggu

SEQ ID NO: 269057 - RNA, 32 nt, Homo Sapiens
ggaaaaacaaaugcaauauacaugaacuuuuu

SEQ ID NO: 269058 - RNA, 32 nt, Homo Sapiens
uaaccagaugacugaggaauguugaagauugc

SEQ ID NO: 269059 - RNA, 30 nt, Homo Sapiens
auuuuggccaggcgcgguggcucaggccug

SEQ ID NO: 269060 - RNA, 32 nt, Homo Sapiens
auguaugcagauuuauggauauuaucaaugag

SEQ ID NO: 269061 - RNA, 32 nt, Homo Sapiens
aggucuucuaccugugaugcuucuucaaggcu

SEQ ID NO: 269062 - RNA, 32 nt, Homo Sapiens
aggccgccgcgcgcacacaccgggcccggcuc

SEQ ID NO: 269063 - RNA, 32 nt, Homo Sapiens
ccagaacaagaagaagcauaaacugacuucug

SEQ ID NO: 269064 - RNA, 32 nt, Homo Sapiens
auugccccgcggcacgcugccccugcacgcgc

SEQ ID NO: 269065 - RNA, 32 nt, Homo Sapiens
agaccauuccuccuguaugucuuuacaagcaa

SEQ ID NO: 269066 - RNA, 32 nt, Homo Sapiens
uggucggucgccccgcugcugccuggcagcgc

SEQ ID NO: 269067 - RNA, 32 nt, Homo Sapiens
aguaugcagcaugagaauuugcuagaucguuu

SEQ ID NO: 269068 - RNA, 32 nt, Homo Sapiens
agggagcagugacugaauaaacacgagcugug

SEQ ID NO: 269069 - RNA, 32 nt, Homo Sapiens
cgccgcggcagagggacaucacguacggcagc

SEQ ID NO: 269070 - RNA, 32 nt, Homo Sapiens
ugaacauacuuaggauauucugcacauuaugg

SEQ ID NO: 269071 - RNA, 31 nt, Homo Sapiens
aagaacauggaggcagauauaaucacaaauc

SEQ ID NO: 269072 - RNA, 32 nt, Homo Sapiens
cgccaccacgcccaggcggugucccugaagua

SEQ ID NO: 269073 - RNA, 32 nt, Homo Sapiens
ccuuccaggcagagccgagaguucgccccaac

SEQ ID NO: 269074 - RNA, 32 nt, Homo Sapiens
ggaaauguggagaacauucaaucuugccguca

SEQ ID NO: 269075 - RNA, 32 nt, Homo Sapiens
auaaaauuucacaggcuucaaauucucaugcu

SEQ ID NO: 269076 - RNA, 32 nt, Homo Sapiens
ugggacgcccagauccugcuggaguggcagcu

SEQ ID NO: 269077 - RNA, 32 nt, Homo Sapiens
uauaaugugggaaauggcuuggggaggauggc

SEQ ID NO: 269078 - RNA, 32 nt, Homo Sapiens
guacuucuacgacuuuggagccacugaugggu

SEQ ID NO: 269079 - RNA, 32 nt, Homo Sapiens
aaaaaugggagacgggggagggggcuggcagc

SEQ ID NO: 269080 - RNA, 32 nt, Homo Sapiens
gguuucuucuguuuuccaacuaaauauuuuuu

SEQ ID NO: 269081 - RNA, 32 nt, Homo Sapiens
auagcucuauagaugcugaaaagguauuucgu

SEQ ID NO: 269082 - RNA, 32 nt, Homo Sapiens
gguuuucgaagcucagcccaccccccucauuu

SEQ ID NO: 269083 - RNA, 32 nt, Homo Sapiens
cauccuggagggcuuucuggguguguccaggg

SEQ ID NO: 269084 - RNA, 32 nt, Homo Sapiens
cggcuuuuucuuuagaugucucaaugccuucu

SEQ ID NO: 269085 - RNA, 32 nt, Homo Sapiens
ccccgccucccuccccaccccacaauggcaga

SEQ ID NO: 269086 - RNA, 32 nt, Homo Sapiens
uuaaccccuuuuucuuuuugcuuucauuuuua

SEQ ID NO: 269087 - RNA, 32 nt, Homo Sapiens
ugaguuaaacauagggucacagcuugggccaa

SEQ ID NO: 269088 - RNA, 32 nt, Homo Sapiens
uggcuggaucccgccugaaacggaccugcaga

SEQ ID NO: 269089 - RNA, 32 nt, Homo Sapiens
agugaauucagauauaacucaagcuuguuaga

SEQ ID NO: 269090 - RNA, 30 nt, Homo Sapiens
acucugggaggugggcacacaggggcaccg

SEQ ID NO: 269091 - RNA, 32 nt, Homo Sapiens
gcuuuugaguaccaccuguuaaugagcuuucc

SEQ ID NO: 269092 - RNA, 32 nt, Homo Sapiens
guccugaaagagaauuuuuaaauuauuuaaua

SEQ ID NO: 269093 - RNA, 32 nt, Homo Sapiens
cccucugaccgcggccgagauggcccccuaca

SEQ ID NO: 269094 - RNA, 32 nt, Homo Sapiens
acuacuguucuucuacacauuacuguaagcac

SEQ ID NO: 269095 - RNA, 32 nt, Homo Sapiens
ucaugcuaaaagauggacucuccaggcacagc

SEQ ID NO: 269096 - RNA, 32 nt, Homo Sapiens
gauucauuugaaggccugcuaucccuccagua

SEQ ID NO: 269097 - RNA, 32 nt, Homo Sapiens
ggguaaacaaacuaccagcuacaggauaggga

SEQ ID NO: 269098 - RNA, 32 nt, Homo Sapiens
aguggggaagagggacggauauuuuuaauuga

SEQ ID NO: 269099 - RNA, 32 nt, Homo Sapiens
gaauaugagaauauacguauaugauguauuuu

SEQ ID NO: 269100 - RNA, 32 nt, Homo Sapiens
gggcauaugccugugaaccagaugguggcacc

SEQ ID NO: 269101 - RNA, 32 nt, Homo Sapiens
uaccuucaaccuggcccaguccccugcgucau

SEQ ID NO: 269102 - RNA, 32 nt, Homo Sapiens
acugcccugaaauaaaccuggagugagcugcc

SEQ ID NO: 269103 - RNA, 32 nt, Homo Sapiens
accuggagcgcgcgcccgugcugggcggcagc

SEQ ID NO: 269104 - RNA, 32 nt, Homo Sapiens
uuuuaaauaaucgaauacuauuuuauauaugg

SEQ ID NO: 269105 - RNA, 32 nt, Homo Sapiens
gaugaauaaaaacagcaaaaccaaauaaagug

SEQ ID NO: 269106 - RNA, 32 nt, Homo Sapiens
aaucauuugauuuaaacaaugccaagucacuc

SEQ ID NO: 269107 - RNA, 32 nt, Homo Sapiens
ugcacugguaccccgggcgccacguucucagu

SEQ ID NO: 269108 - RNA, 32 nt, Homo Sapiens
acccacccaccgucucccacuccaaguucauc

SEQ ID NO: 269109 - RNA, 32 nt, Homo Sapiens
ccucgcugagcggcugcccgaggaggagcucu

SEQ ID NO: 269110 - RNA, 32 nt, Homo Sapiens
auaucagggaauuuauauugaaaaaaacugcg

SEQ ID NO: 269111 - RNA, 32 nt, Homo Sapiens
ccucuggucagcugguccaggcugguccccgc

SEQ ID NO: 269112 - RNA, 32 nt, Homo Sapiens
cauccggaaaggaaagggcagucagacagcag

SEQ ID NO: 269113 - RNA, 31 nt, Homo Sapiens
cccucgcgucugugccugccucaacgcgggu

SEQ ID NO: 269114 - RNA, 32 nt, Homo Sapiens
guacgcacugaauagugaaaauaauuagacau

SEQ ID NO: 269115 - RNA, 32 nt, Homo Sapiens
ccaggaugccuguguccaccucccuccaccag

SEQ ID NO: 269116 - RNA, 30 nt, Homo Sapiens
ccuggcugagguggcagcagggggcgggac

SEQ ID NO: 269117 - RNA, 30 nt, Homo Sapiens
gagagagggaucuuagaugagucuuacccu

SEQ ID NO: 269118 - RNA, 32 nt, Homo Sapiens
uccaagcacuguauaaugacuguucagugaau

SEQ ID NO: 269119 - RNA, 32 nt, Homo Sapiens
gucagaaggggggcgucagagaagcugccccu

SEQ ID NO: 269120 - RNA, 32 nt, Homo Sapiens
ggaggugaggggcuuccuuucugcagcugaga

SEQ ID NO: 269121 - RNA, 31 nt, Homo Sapiens
aaucuggguaacaugaaagugaugcugguug

SEQ ID NO: 269122 - RNA, 32 nt, Homo Sapiens
aagaauccguguccucccuggaccucagaaug

SEQ ID NO: 269123 - RNA, 32 nt, Homo Sapiens
acagaaauuuaguuaacaucuuacaacugaac

SEQ ID NO: 269124 - RNA, 32 nt, Homo Sapiens
gugggcccaagcaaggggccuaugagggccuc

SEQ ID NO: 269125 - RNA, 32 nt, Homo Sapiens
gggcucaucccgggccccagagauaaucccag

SEQ ID NO: 269126 - RNA, 32 nt, Homo Sapiens
uaugggccuaugauuuaaauucuuacacugac

SEQ ID NO: 269127 - RNA, 32 nt, Homo Sapiens
augucuuuuccaagucuggagagcagcgaugc

SEQ ID NO: 269128 - RNA, 32 nt, Homo Sapiens
uuuguuuacccauaaaaguauuagaggcagcg

SEQ ID NO: 269129 - RNA, 32 nt, Homo Sapiens
cccccgcgucaacugcaaggggcccgcccaua

SEQ ID NO: 269130 - RNA, 32 nt, Homo Sapiens
cgcaggccagccccggccccuagcccucaggc

SEQ ID NO: 269131 - RNA, 32 nt, Homo Sapiens
cucuucgugauugggggcgccaggcagggcgg

SEQ ID NO: 269132 - RNA, 32 nt, Homo Sapiens
cggaucagccuugugggauggcagaugaucag

SEQ ID NO: 269133 - RNA, 32 nt, Homo Sapiens
gggugggaagaccccugaugcagccuguccuc

SEQ ID NO: 269134 - RNA, 32 nt, Homo Sapiens
gugagaguguggguuuuaaauucgaagcucag

SEQ ID NO: 269135 - RNA, 27 nt, Homo Sapiens
ucacuucaguaauucugguagcagccg

SEQ ID NO: 269136 - RNA, 32 nt, Homo Sapiens
ucucuggagccccaggacccaggccgcuugua

SEQ ID NO: 269137 - RNA, 32 nt, Homo Sapiens
ucugcucaauccccucuccccauccccagggc

SEQ ID NO: 269138 - RNA, 32 nt, Homo Sapiens
ccuggugagagcuccuuuacagggacuuuaug

SEQ ID NO: 269139 - RNA, 32 nt, Homo Sapiens
ugcgggugacugucgcccagaccaggugccau

SEQ ID NO: 269140 - RNA, 32 nt, Homo Sapiens
uuuccugguagccuccuuuccuccccuucugc

SEQ ID NO: 269141 - RNA, 32 nt, Homo Sapiens
agggacagacugcuuccgggucgaagggcuug

SEQ ID NO: 269142 - RNA, 32 nt, Homo Sapiens
gaggggcagucccccaccuugucacccucagg

SEQ ID NO: 269143 - RNA, 32 nt, Homo Sapiens
ugaggguccugcugcuggccccaccaaauacu

SEQ ID NO: 269144 - RNA, 32 nt, Homo Sapiens
cugggccucgguggccggggccgcgagcugug

SEQ ID NO: 269145 - RNA, 32 nt, Homo Sapiens
cagggaagggaagggggaccugggucucaaug

SEQ ID NO: 269146 - RNA, 30 nt, Homo Sapiens
gcguuuuccugugcugccaagcucagaagc

SEQ ID NO: 269147 - RNA, 32 nt, Homo Sapiens
aaauacagcugaaccccgcgggccccuagcac

SEQ ID NO: 269148 - RNA, 32 nt, Homo Sapiens
cagaccaagaaguuuaacaugugcaucaggug

SEQ ID NO: 269149 - RNA, 32 nt, Homo Sapiens
agucccuggggcauucauuugcuggccuccau

SEQ ID NO: 269150 - RNA, 32 nt, Homo Sapiens
gugugucuuuaacuugcgucccauucucaggg

SEQ ID NO: 269151 - RNA, 32 nt, Homo Sapiens
ccucuuggaguauuuuuggcuuuauauaaaac

SEQ ID NO: 269152 - RNA, 32 nt, Homo Sapiens
aaagugcagcauggaggaaaaucugaacucua

SEQ ID NO: 269153 - RNA, 32 nt, Homo Sapiens
ccccucuuugcaggcuuuuccuccucucuaga

SEQ ID NO: 269154 - RNA, 32 nt, Homo Sapiens
cuguguaaauguuugauuucucauuugcugcc

SEQ ID NO: 269155 - RNA, 32 nt, Homo Sapiens
uaaaauaggacgcugggagcaguugcaggcca

SEQ ID NO: 269156 - RNA, 32 nt, Homo Sapiens
uugcacuugugcuugcugugugguauauaaac

SEQ ID NO: 269157 - RNA, 32 nt, Homo Sapiens
cuuguuuuauguauuuucucuuucuuuccugu

SEQ ID NO: 269158 - RNA, 32 nt, Homo Sapiens
ccugccgcaccaagcuggcccuccuuccuccc

SEQ ID NO: 269159 - RNA, 32 nt, Homo Sapiens
aguuugagaaauaaaagcaggggggugggggc

SEQ ID NO: 269160 - RNA, 32 nt, Homo Sapiens
cacgaggcaccucgcucgcagccuccccagcg

SEQ ID NO: 269161 - RNA, 32 nt, Homo Sapiens
uucagagcugccaucaggucagaccuuugccu

SEQ ID NO: 269162 - RNA, 31 nt, Homo Sapiens
cugugcacaugggagugcuccacucccuagc

SEQ ID NO: 269163 - RNA, 32 nt, Homo Sapiens
cuugaacgaugaugauauucagacgaagcauu

SEQ ID NO: 269164 - RNA, 32 nt, Homo Sapiens
gauucaacaaccccuguggcuaacccucugcu

SEQ ID NO: 269165 - RNA, 32 nt, Homo Sapiens
aggguggcccgggcccuuuccucggucauugu

SEQ ID NO: 269166 - RNA, 32 nt, Homo Sapiens
uacuauguuguccaggcuaagaggugggauuu

SEQ ID NO: 269167 - RNA, 32 nt, Homo Sapiens
caccaccugccagcuggcaccugugaaggagg

SEQ ID NO: 269168 - RNA, 32 nt, Homo Sapiens
ggaucucgcugggcuggguccuggauuccagg

SEQ ID NO: 269169 - RNA, 32 nt, Homo Sapiens
uguuaagugauaauauuauauaaaaacaugau

SEQ ID NO: 269170 - RNA, 32 nt, Homo Sapiens
gacaaagacauucgaagacugcgggacuuuca

SEQ ID NO: 269171 - RNA, 32 nt, Homo Sapiens
cagccgcggcgaguccuuugcacauguuggca

SEQ ID NO: 269172 - RNA, 32 nt, Homo Sapiens
cccggaggugagaacaggaagccauucaccuc

SEQ ID NO: 269173 - RNA, 32 nt, Homo Sapiens
caagcucucuucugccuucucaccuugggcaa

SEQ ID NO: 269174 - RNA, 32 nt, Homo Sapiens
gaggaguccuccccggccggugcuccagggcu

SEQ ID NO: 269175 - RNA, 32 nt, Homo Sapiens
augauguuuuaaauauuuuaagaugaauuaug

SEQ ID NO: 269176 - RNA, 32 nt, Homo Sapiens
ccuccagcacucaaagauuaaccuuagcuccu

SEQ ID NO: 269177 - RNA, 32 nt, Homo Sapiens
uuccaggcaagagcuuccuucuuuugucucac

SEQ ID NO: 269178 - RNA, 32 nt, Homo Sapiens
cuaauguagaaugucauuguuuuuaaaacugu

SEQ ID NO: 269179 - RNA, 32 nt, Homo Sapiens
ucucuuccauucuuugccaucguggugugugc

SEQ ID NO: 269180 - RNA, 32 nt, Homo Sapiens
cuuccugccucccacacucccaaauccaugcc

SEQ ID NO: 269181 - RNA, 32 nt, Homo Sapiens
guguccuucuaaaauacagcacaagcuacagc

SEQ ID NO: 269182 - RNA, 32 nt, Homo Sapiens
uauuuauuuuuccuuucaguucuauuaguuuu

SEQ ID NO: 269183 - RNA, 32 nt, Homo Sapiens
aauuagccgggcgugguggcgcgcucguguag

SEQ ID NO: 269184 - RNA, 32 nt, Homo Sapiens
gggggcugacacccccaccucccucccggaug

SEQ ID NO: 269185 - RNA, 32 nt, Homo Sapiens
uguccuuguaagucaguugacuugccgcacau

SEQ ID NO: 269186 - RNA, 32 nt, Homo Sapiens
agacauuacuuggauuuugucaauuguuuuac

SEQ ID NO: 269187 - RNA, 32 nt, Homo Sapiens
guuacccaugagccaguacuuauuauccaccg

SEQ ID NO: 269188 - RNA, 29 nt, Homo Sapiens
uuggauaaagaacuauauuuuucucaaaa

SEQ ID NO: 269189 - RNA, 32 nt, Homo Sapiens
auuuauuuccaaagcugucucaucuccuuugu

SEQ ID NO: 269190 - RNA, 32 nt, Homo Sapiens
uacugaguuuaaaauuuauuaauuuguaccuu

SEQ ID NO: 269191 - RNA, 32 nt, Homo Sapiens
cgccgcccgcucagaaagcgcgggaaaggcac

SEQ ID NO: 269192 - RNA, 32 nt, Homo Sapiens
agccgccagagccgcgggccgcgcgggugucg

SEQ ID NO: 269193 - RNA, 32 nt, Homo Sapiens
ggcugagugaaauggacgucaccagaacuuuc

SEQ ID NO: 269194 - RNA, 32 nt, Homo Sapiens
guccuuguugagcuccuccgagcguuccauca

SEQ ID NO: 269195 - RNA, 32 nt, Homo Sapiens
uagcauuuuuaccugcagaaaaacuuuguaug

SEQ ID NO: 269196 - RNA, 32 nt, Homo Sapiens
uuauuuuaaaacagaagaauugugaaaguuua

SEQ ID NO: 269197 - RNA, 32 nt, Homo Sapiens
ggccagcugaguucuguuguuguuuucaugcc

SEQ ID NO: 269198 - RNA, 32 nt, Homo Sapiens
ugggaucuuucugcccagaaaggggaaaguug

SEQ ID NO: 269199 - RNA, 32 nt, Homo Sapiens
cagagcucagagccacccacagccgcagccau

SEQ ID NO: 269200 - RNA, 32 nt, Homo Sapiens
ugcacuccagccugggcgacugagcgagacuc

SEQ ID NO: 269201 - RNA, 32 nt, Homo Sapiens
ugucauaucuguucuuguuuucuuuuguuuuu

SEQ ID NO: 269202 - RNA, 32 nt, Homo Sapiens
cuagcauuuuaaaacuuaguuguaaucuuucu

SEQ ID NO: 269203 - RNA, 32 nt, Homo Sapiens
uguauuuucuuuauuucacauuuuauuuggag

SEQ ID NO: 269204 - RNA, 32 nt, Homo Sapiens
cugggcuguucccucuccugcccggacugugg

SEQ ID NO: 269205 - RNA, 32 nt, Homo Sapiens
ggauucuuuuccugcccucucuucccagcuuc

SEQ ID NO: 269206 - RNA, 32 nt, Homo Sapiens
ucauauuuuguuuguuaucaccagagaugccu

SEQ ID NO: 269207 - RNA, 32 nt, Homo Sapiens
ggccucacgcacccgcggcgcaggagcuucag

SEQ ID NO: 269208 - RNA, 32 nt, Homo Sapiens
cuauuagagauuaugacauaguaauauuaaaa

SEQ ID NO: 269209 - RNA, 32 nt, Homo Sapiens
gagcacuccgcggucccuccgugacgccccuc

SEQ ID NO: 269210 - RNA, 32 nt, Homo Sapiens
aauggcuccaccccucccccagcccugcuucu

SEQ ID NO: 269211 - RNA, 30 nt, Homo Sapiens
agcggaguuaaaaauaaaaauguuaaacgc

SEQ ID NO: 269212 - RNA, 32 nt, Homo Sapiens
auagauggaggaggugugggcugacuaccucc

SEQ ID NO: 269213 - RNA, 32 nt, Homo Sapiens
gcaccgcgcugcgccgugcccgugaguccggc

SEQ ID NO: 269214 - RNA, 32 nt, Homo Sapiens
uauaauuucguacagcaacuugcggagagauu

SEQ ID NO: 269215 - RNA, 32 nt, Homo Sapiens
gaugccaggacacccccucccacacucaggac

SEQ ID NO: 269216 - RNA, 32 nt, Homo Sapiens
ucaaauuaaguacuaaggcacaaagacauguc

SEQ ID NO: 269217 - RNA, 32 nt, Homo Sapiens
uaucaaucaauauauguuaagacauauaucag

SEQ ID NO: 269218 - RNA, 32 nt, Homo Sapiens
caccuuguaacgucagauacaaaugucucuau

SEQ ID NO: 269219 - RNA, 32 nt, Homo Sapiens
caguggcggcuguccccuccccagcccagccg

SEQ ID NO: 269220 - RNA, 32 nt, Homo Sapiens
guauugaugaggaaacugaaguuuggagcgau

SEQ ID NO: 269221 - RNA, 32 nt, Homo Sapiens
agucuaacuuccgcgcaucuacgagggccggg

SEQ ID NO: 269222 - RNA, 32 nt, Homo Sapiens
gacaucacuuggauuucuuaaucuuaaaugcu

SEQ ID NO: 269223 - RNA, 32 nt, Homo Sapiens
caggacuaacuguguuuggguuggguguagua

SEQ ID NO: 269224 - RNA, 32 nt, Homo Sapiens
ugacaaauaagggcuugcccugucccauaugg

SEQ ID NO: 269225 - RNA, 32 nt, Homo Sapiens
auugaugaaaauaguuauuuuauucuuuacau

SEQ ID NO: 269226 - RNA, 32 nt, Homo Sapiens
gcagccuccgcggggaaccaggcgggagggac

SEQ ID NO: 269227 - RNA, 32 nt, Homo Sapiens
gucuaucaaaacuauuugauccaagugaaaaa

SEQ ID NO: 269228 - RNA, 32 nt, Homo Sapiens
uuauggaaaauauuuuaaacucuagaagcuuc

SEQ ID NO: 269229 - RNA, 32 nt, Homo Sapiens
ggcuccccaagcccccuuugccggguuggagc

SEQ ID NO: 269230 - RNA, 32 nt, Homo Sapiens
gcuagacaccaaugacgagagugauguuauca

SEQ ID NO: 269231 - RNA, 32 nt, Homo Sapiens
aggucaaaaaauacugucauacucuaagcuuc

SEQ ID NO: 269232 - RNA, 32 nt, Homo Sapiens
uauuggcauagucuauggagaagugcagaaac

SEQ ID NO: 269233 - RNA, 27 nt, Homo Sapiens
cagcacuccucucccagccccccugcc

SEQ ID NO: 269234 - RNA, 32 nt, Homo Sapiens
agaaaagauacaucuuugauaaugucgccaaa

SEQ ID NO: 269235 - RNA, 32 nt, Homo Sapiens
agaaagugauuuucuuuuuuuaaaucauaggu

SEQ ID NO: 269236 - RNA, 32 nt, Homo Sapiens
uucaauguagauauuucuuaaguugaaauagc

SEQ ID NO: 269237 - RNA, 32 nt, Homo Sapiens
cguccuaccuggcaugcugcagcccucugccg

SEQ ID NO: 269238 - RNA, 32 nt, Homo Sapiens
cgagcgucugaagacguccucccgagggcaga

SEQ ID NO: 269239 - RNA, 32 nt, Homo Sapiens
aacaguuaagugaaacaaacaaacaaucacac

SEQ ID NO: 269240 - RNA, 32 nt, Homo Sapiens
acagaguguaggcaagagaaagaauauguuau

SEQ ID NO: 269241 - RNA, 32 nt, Homo Sapiens
aauauuauaaguagauaacauguauuaguauu

SEQ ID NO: 269242 - RNA, 32 nt, Homo Sapiens
gaaagagacgcaaacacaaaaguggaaaacag

SEQ ID NO: 269243 - RNA, 32 nt, Homo Sapiens
uuucuuaggggaaggagaaguaagaggcuacc

SEQ ID NO: 269244 - RNA, 32 nt, Homo Sapiens
ccucgggcagccagcucucucuugcuucgcgu

SEQ ID NO: 269245 - RNA, 32 nt, Homo Sapiens
cagcuggcagugccgcccaccacgugcacugu

SEQ ID NO: 269246 - RNA, 30 nt, Homo Sapiens
ggggucagcaggcgcugcgggcgcagcucc

SEQ ID NO: 269247 - RNA, 32 nt, Homo Sapiens
accccagggagaggaggcgccgaguucugaug

SEQ ID NO: 269248 - RNA, 30 nt, Homo Sapiens
ggugaauaauucuuucccuaacucuggucc

SEQ ID NO: 269249 - RNA, 32 nt, Homo Sapiens
uugugguuugguuuuuuuuguuuuuuguuuug

SEQ ID NO: 269250 - RNA, 32 nt, Homo Sapiens
aagucccagcccaguccccgcgcgcgucccuc

SEQ ID NO: 269251 - RNA, 32 nt, Homo Sapiens
agucaaaagcaucuaugugucguaaagcauuc

SEQ ID NO: 269252 - RNA, 32 nt, Homo Sapiens
uggacgccgccucggcguccccgcgucugccu

SEQ ID NO: 269253 - RNA, 32 nt, Homo Sapiens
uauguagagggagagaucgaagacugagugac

SEQ ID NO: 269254 - RNA, 32 nt, Homo Sapiens
guccuuccaacuuagugcaucccuuuagaaag

SEQ ID NO: 269255 - RNA, 32 nt, Homo Sapiens
uagaaaaauaaucaauggccuccugaaaaaau

SEQ ID NO: 269256 - RNA, 32 nt, Homo Sapiens
accaaagcccgcgcgccgcugcaucccgcguc

SEQ ID NO: 269257 - RNA, 32 nt, Homo Sapiens
uacaugcccugccugucuuagaggaacgcugu

SEQ ID NO: 269258 - RNA, 32 nt, Homo Sapiens
cgggcccuugaccagcgcggcccgcaggucuu

SEQ ID NO: 269259 - RNA, 32 nt, Homo Sapiens
acaacuuggucuuuguuaggcuugucaaauug

SEQ ID NO: 269260 - RNA, 32 nt, Homo Sapiens
cauuuuuguaggaugccugacgagguguagcc

SEQ ID NO: 269261 - RNA, 32 nt, Homo Sapiens
uuagccccaagccuggguguccucugaggcca

SEQ ID NO: 269262 - RNA, 32 nt, Homo Sapiens
aacucuuuggagaugagcuagauggagagucc

SEQ ID NO: 269263 - RNA, 32 nt, Homo Sapiens
acuauuuuaaucuugguuuuauugcuuaaaau

SEQ ID NO: 269264 - RNA, 32 nt, Homo Sapiens
acuuuugacugagggcagcuuugcaaaaugag

SEQ ID NO: 269265 - RNA, 32 nt, Homo Sapiens
ugggaguuguuauaaacacaccccaaggaagc

SEQ ID NO: 269266 - RNA, 32 nt, Homo Sapiens
gcgugggguagucccugggcucaguccuagcu

SEQ ID NO: 269267 - RNA, 32 nt, Homo Sapiens
aggggcaggagugcuuccugguguguguauua

SEQ ID NO: 269268 - RNA, 32 nt, Homo Sapiens
cggcuccgaaucugccccagcggccgcugcga

SEQ ID NO: 269269 - RNA, 32 nt, Homo Sapiens
gccuuuuuuuuuuuuuaaccuuuucguuuaac

SEQ ID NO: 269270 - RNA, 32 nt, Homo Sapiens
cugcccaggggagggaguguggacaguaucug

SEQ ID NO: 269271 - RNA, 32 nt, Homo Sapiens
auauguauugcccaaggaaaaauacaggaugu

SEQ ID NO: 269272 - RNA, 32 nt, Homo Sapiens
gagauaagaccacuuuuuuaucugagcuucug

SEQ ID NO: 269273 - RNA, 32 nt, Homo Sapiens
uaauccugcuuugucauucacaucucacaaaa

SEQ ID NO: 269274 - RNA, 32 nt, Homo Sapiens
aguccaguagaagaagcaagaacuagcugcag

SEQ ID NO: 269275 - RNA, 32 nt, Homo Sapiens
gucuuuccagcaugcccuggggugcagugguc

SEQ ID NO: 269276 - RNA, 32 nt, Homo Sapiens
cgggcaugggccuucccggcccggagcuggga

SEQ ID NO: 269277 - RNA, 32 nt, Homo Sapiens
ggccguggccagagucuggcggcggccuggcg

SEQ ID NO: 269278 - RNA, 32 nt, Homo Sapiens
uuucucuuaaacaauuuuuaaaauucagaaug

SEQ ID NO: 269279 - RNA, 32 nt, Homo Sapiens
uuauuuuguuuaauaaagaacauucucaaaac

SEQ ID NO: 269280 - RNA, 32 nt, Homo Sapiens
uuuauuuuuucagacauacuguaauuuaaaaa

SEQ ID NO: 269281 - RNA, 32 nt, Homo Sapiens
uccagcccaccucgccaaccacucuuguuggu

SEQ ID NO: 269282 - RNA, 32 nt, Homo Sapiens
ggccuggccucgccugccuuucugccuuuuaa

SEQ ID NO: 269283 - RNA, 32 nt, Homo Sapiens
cugucucuggaaagcaucccuugccgcugcca

SEQ ID NO: 269284 - RNA, 32 nt, Homo Sapiens
uguugcacuccaggcaccuggccaagagaaua

SEQ ID NO: 269285 - RNA, 32 nt, Homo Sapiens
aagcacgucuaaccacuccucccgccugaugg

SEQ ID NO: 269286 - RNA, 32 nt, Homo Sapiens
aauuaccuggggauguuguuccaaauccagac

SEQ ID NO: 269287 - RNA, 32 nt, Homo Sapiens
gcauguaagaggaaauugcaaauaucagaucc

SEQ ID NO: 269288 - RNA, 32 nt, Homo Sapiens
ccuauaagaauauuuuggcuuuguaaucuaua

SEQ ID NO: 269289 - RNA, 32 nt, Homo Sapiens
cgucagagggugggaucuggcagcucggggaa

SEQ ID NO: 269290 - RNA, 32 nt, Homo Sapiens
uagcauggaaaacguuugcuguuuuucccuuu

SEQ ID NO: 269291 - RNA, 32 nt, Homo Sapiens
cccagccuugaacuucacuccucccucagugg

SEQ ID NO: 269292 - RNA, 32 nt, Homo Sapiens
uggggcaggguggggucuggaacuugucgggu

SEQ ID NO: 269293 - RNA, 32 nt, Homo Sapiens
agaaaccuuacaaguguacugaguguggcaaa

SEQ ID NO: 269294 - RNA, 32 nt, Homo Sapiens
ugcugaaacacaacagaagaaaaauggagugc

SEQ ID NO: 269295 - RNA, 32 nt, Homo Sapiens
guguccucucugugucccugcugcugccaggg

SEQ ID NO: 269296 - RNA, 30 nt, Homo Sapiens
ugcagggaggggugccaugagucuugcuuu

SEQ ID NO: 269297 - RNA, 32 nt, Homo Sapiens
gcacuugaaaaugaaaugacugucuaagagau

SEQ ID NO: 269298 - RNA, 32 nt, Homo Sapiens
uuccacaaacaaagugaacugggggaugggau

SEQ ID NO: 269299 - RNA, 32 nt, Homo Sapiens
cuaaugcugcccucacugccucuuugcaguag

SEQ ID NO: 269300 - RNA, 32 nt, Homo Sapiens
uaguugaacaggggcuaggagcuccccacucc

SEQ ID NO: 269301 - RNA, 32 nt, Homo Sapiens
ugaguagugcuguucauauuacuuuaguucua

SEQ ID NO: 269302 - RNA, 32 nt, Homo Sapiens
uaugguuugucaagaucauucauuaaauguaa

SEQ ID NO: 269303 - RNA, 32 nt, Homo Sapiens
uguacauuuuggauuucuuuauauaaggucau

SEQ ID NO: 269304 - RNA, 32 nt, Homo Sapiens
accgccgcggucgucggggagccccggggcuc

SEQ ID NO: 269305 - RNA, 32 nt, Homo Sapiens
cgggcaggcggcugaggccuguccccucaguu

SEQ ID NO: 269306 - RNA, 30 nt, Homo Sapiens
gacucuggcuugcagcaccauucggaguaa

SEQ ID NO: 269307 - RNA, 31 nt, Homo Sapiens
gugggcagucacugccuguuccccacugccu

SEQ ID NO: 269308 - RNA, 32 nt, Homo Sapiens
aaagacaguccuggugaaugggcuucaagugg

SEQ ID NO: 269309 - RNA, 32 nt, Homo Sapiens
aggcagccccacucccagcaagcagaagugau

SEQ ID NO: 269310 - RNA, 32 nt, Homo Sapiens
ucuaggaucuuugucuucuggcuggaggugcu

SEQ ID NO: 269311 - RNA, 32 nt, Homo Sapiens
cgcgugguguugggcggggcugucguguccua

SEQ ID NO: 269312 - RNA, 32 nt, Homo Sapiens
ggcgacagucagagccggggugccagcgggac

SEQ ID NO: 269313 - RNA, 32 nt, Homo Sapiens
auggaacaccagacucugggggugcugguaca

SEQ ID NO: 269314 - RNA, 32 nt, Homo Sapiens
acaggacaaggugucaggugacuccuucccag

SEQ ID NO: 269315 - RNA, 32 nt, Homo Sapiens
caggcucaggacccggaguucucggaccucaa

SEQ ID NO: 269316 - RNA, 32 nt, Homo Sapiens
uuccgggacagcuggggacagguaucuuuugu

SEQ ID NO: 269317 - RNA, 32 nt, Homo Sapiens
ugacucuucuaaaaguucaucuacaaauuuuc

SEQ ID NO: 269318 - RNA, 32 nt, Homo Sapiens
aaggcuacgcguggccgccgggaccugccuca

SEQ ID NO: 269319 - RNA, 32 nt, Homo Sapiens
aacgugcucucgaugcugauuuguggugugcu

SEQ ID NO: 269320 - RNA, 32 nt, Homo Sapiens
ccuaccugcccgcuccacaaccucaguucuuc

SEQ ID NO: 269321 - RNA, 32 nt, Homo Sapiens
gcagcugccgucucugcccccuggccucccca

SEQ ID NO: 269322 - RNA, 30 nt, Homo Sapiens
ggugcggguuucggcggcggcugaggaaga

SEQ ID NO: 269323 - RNA, 32 nt, Homo Sapiens
gucucaccaaccccagcccaucaucuguugga

SEQ ID NO: 269324 - RNA, 32 nt, Homo Sapiens
ggccacggggaggccucuuggggggugugggg

SEQ ID NO: 269325 - RNA, 32 nt, Homo Sapiens
uguguucacagugugaggggcuguuuuauguc

SEQ ID NO: 269326 - RNA, 32 nt, Homo Sapiens
cugucagcacuccaggaugcgugucuguucgu

SEQ ID NO: 269327 - RNA, 32 nt, Homo Sapiens
agcuguaugcuuacccaaaaaagggaacacug

SEQ ID NO: 269328 - RNA, 32 nt, Homo Sapiens
agggccgcccgccacaccccgcgcucaacugc

SEQ ID NO: 269329 - RNA, 32 nt, Homo Sapiens
agaaagggaaaguuaaggaugcuggagcagaa

SEQ ID NO: 269330 - RNA, 32 nt, Homo Sapiens
cagcauuuauagaacaugcugccccacauaca

SEQ ID NO: 269331 - RNA, 32 nt, Homo Sapiens
agguuuuucccagaccuucuccugucccgcgu

SEQ ID NO: 269332 - RNA, 32 nt, Homo Sapiens
guauuuugcauaucuuuuuuucauuuucguaa

SEQ ID NO: 269333 - RNA, 32 nt, Homo Sapiens
uucagaaauuuggcagguccuuugcuucuaau

SEQ ID NO: 269334 - RNA, 32 nt, Homo Sapiens
gcuccucuucccaagcucccaggugacgcuga

SEQ ID NO: 269335 - RNA, 32 nt, Homo Sapiens
ggaagggagagcaggggagagaaggccucauc

SEQ ID NO: 269336 - RNA, 32 nt, Homo Sapiens
gucaguuuuuaaaauuguuuuuguuguugucu

SEQ ID NO: 269337 - RNA, 32 nt, Homo Sapiens
aggcgaccgcggaggguggcgaggggcggcca

SEQ ID NO: 269338 - RNA, 32 nt, Homo Sapiens
gcacuccaaccugggcaacauggcaagacccu

SEQ ID NO: 269339 - RNA, 32 nt, Homo Sapiens
uuuuucugucuccugccuuuuccagaagucug

SEQ ID NO: 269340 - RNA, 32 nt, Homo Sapiens
uugcagccugcaccaccacaccuggcuaaauu

SEQ ID NO: 269341 - RNA, 31 nt, Homo Sapiens
aauuggagggcggauuacgggggcccacguc

SEQ ID NO: 269342 - RNA, 32 nt, Homo Sapiens
agucacugaaaggaaaucauggauuuauuaau

SEQ ID NO: 269343 - RNA, 32 nt, Homo Sapiens
caugcagucauagccaucaucucaaucagccc

SEQ ID NO: 269344 - RNA, 32 nt, Homo Sapiens
gccuaaaugugaccaaaccaacauuguaaucc

SEQ ID NO: 269345 - RNA, 30 nt, Homo Sapiens
ggcccugcguagcagcaccagccggcccca

SEQ ID NO: 269346 - RNA, 32 nt, Homo Sapiens
guuuuaucuucugcucuuucuucuuccacaca

SEQ ID NO: 269347 - RNA, 32 nt, Homo Sapiens
caaauaagaugguguguauguaagaaauuugu

SEQ ID NO: 269348 - RNA, 30 nt, Homo Sapiens
gaaagaugggaccucccggcccagcacugc

SEQ ID NO: 269349 - RNA, 32 nt, Homo Sapiens
accugagcgccuucggcggcgcggcgcggcuc

SEQ ID NO: 269350 - RNA, 32 nt, Homo Sapiens
gucccugccuuaggccuaccugauggaaguaa

SEQ ID NO: 269351 - RNA, 32 nt, Homo Sapiens
cgauuacaauaaauguuuuucuaaaaaaaaaa

SEQ ID NO: 269352 - RNA, 32 nt, Homo Sapiens
gcauacaucguucuuuguuguaauuaaauaaa

SEQ ID NO: 269353 - RNA, 32 nt, Homo Sapiens
gauuuauuuuuccauuuacaacaaacaccugu

SEQ ID NO: 269354 - RNA, 32 nt, Homo Sapiens
cugucagauaaaacuuuauuuuacuaaugagc

SEQ ID NO: 269355 - RNA, 32 nt, Homo Sapiens
auuugaggcuuguggaggaaaggaaccaagug

SEQ ID NO: 269356 - RNA, 32 nt, Homo Sapiens
aguguggaaauacgaccugaccccugcaaucc

SEQ ID NO: 269357 - RNA, 32 nt, Homo Sapiens
cacugcugucauuugggggguggaaugaacag

SEQ ID NO: 269358 - RNA, 32 nt, Homo Sapiens
guagucagcuauugcauagagaguggugucua

SEQ ID NO: 269359 - RNA, 32 nt, Homo Sapiens
agccgggagaucugggcuggagcuaggggguc

SEQ ID NO: 269360 - RNA, 32 nt, Homo Sapiens
gucccuugggcuagauuuucucuucugguuuu

SEQ ID NO: 269361 - RNA, 32 nt, Homo Sapiens
caucuucggcccggguccccgccgccaccccu

SEQ ID NO: 269362 - RNA, 32 nt, Homo Sapiens
acccaaggugcugagagaucuccagcugcaca

SEQ ID NO: 269363 - RNA, 32 nt, Homo Sapiens
aagagauugcuaauaaaaucaaauaaaucaaa

SEQ ID NO: 269364 - RNA, 32 nt, Homo Sapiens
agauaucauugcaucacauuuauuuaucuuuc

SEQ ID NO: 269365 - RNA, 32 nt, Homo Sapiens
ucucaugucccaguucacagccaggcaucagc

SEQ ID NO: 269366 - RNA, 32 nt, Homo Sapiens
guaauauuuuauauguuauaccaugucauaua

SEQ ID NO: 269367 - RNA, 32 nt, Homo Sapiens
cuaguuuuuguuccaaaaauucaaguuuaugg

SEQ ID NO: 269368 - RNA, 32 nt, Homo Sapiens
ugugagaaaugcacuuuucagcuccuguuuca

SEQ ID NO: 269369 - RNA, 32 nt, Homo Sapiens
aucuagcucuuacuuuugaaaauucugaggca

SEQ ID NO: 269370 - RNA, 32 nt, Homo Sapiens
gcaaucccugucaccaucucaucaccaggagu

SEQ ID NO: 269371 - RNA, 32 nt, Homo Sapiens
gaucccauccccucccgcacagcccugggccc

SEQ ID NO: 269372 - RNA, 32 nt, Homo Sapiens
ugagucuuagaccuaucgaaaagcauacuaac

SEQ ID NO: 269373 - RNA, 32 nt, Homo Sapiens
guguucccuaguguuucuuaauuucuuuuuag

SEQ ID NO: 269374 - RNA, 32 nt, Homo Sapiens
cuggggggaggauccugaaacaugcgggaaaa

SEQ ID NO: 269375 - RNA, 31 nt, Homo Sapiens
agcccagccuggcgccugcccugcccccguc

SEQ ID NO: 269376 - RNA, 32 nt, Homo Sapiens
gccacaagcugcaugcacaaagaccuuaggca

SEQ ID NO: 269377 - RNA, 32 nt, Homo Sapiens
aaacauuuaaaauaaauaguuuuuaauuguag

SEQ ID NO: 269378 - RNA, 32 nt, Homo Sapiens
ucccuagcuggaugcagcuucuccaugggcua

SEQ ID NO: 269379 - RNA, 32 nt, Homo Sapiens
cugcuggcccugggggcacucugugagugggg

SEQ ID NO: 269380 - RNA, 32 nt, Homo Sapiens
uguggggagggguagagagaauaaucauuagg

SEQ ID NO: 269381 - RNA, 32 nt, Homo Sapiens
ccuacauuugcccgcccuuccagcccuucccc

SEQ ID NO: 269382 - RNA, 32 nt, Homo Sapiens
cccacgccagccccaaacuaagauaucccuca

SEQ ID NO: 269383 - RNA, 29 nt, Homo Sapiens
ccuuggggacaggggcccagggcuaacga

SEQ ID NO: 269384 - RNA, 32 nt, Homo Sapiens
augaguuuaugauguuacaaguccauuuuggg

SEQ ID NO: 269385 - RNA, 32 nt, Homo Sapiens
gcaccgcggacgagcaggcccaggcauccagu

SEQ ID NO: 269386 - RNA, 32 nt, Homo Sapiens
agucuugaaaauaacagagccuucauuucaaa

SEQ ID NO: 269387 - RNA, 32 nt, Homo Sapiens
aguaauugcaggaagauugaagaaaaauccuc

SEQ ID NO: 269388 - RNA, 32 nt, Homo Sapiens
uuuauguauucaucagacacauaccgaacacc

SEQ ID NO: 269389 - RNA, 32 nt, Homo Sapiens
cggaagcuggucagcagcuguugggaugugua

SEQ ID NO: 269390 - RNA, 32 nt, Homo Sapiens
ugcguguguaccuacccacaccuagggggaug

SEQ ID NO: 269391 - RNA, 32 nt, Homo Sapiens
ggaagcccucuucuucaucagacgccauggcu

SEQ ID NO: 269392 - RNA, 32 nt, Homo Sapiens
cuugccucuccaugugaucugugacguugcca

SEQ ID NO: 269393 - RNA, 32 nt, Homo Sapiens
aguauaagaugugccauuuuguccucuguaug

SEQ ID NO: 269394 - RNA, 32 nt, Homo Sapiens
cuugacccagcuuccuucucuccuuuuaccug

SEQ ID NO: 269395 - RNA, 32 nt, Homo Sapiens
caaaagaaagaggagaagaauauuuugugugu

SEQ ID NO: 269396 - RNA, 32 nt, Homo Sapiens
uuagguuuguuugaauaagagaucugaccuga

SEQ ID NO: 269397 - RNA, 32 nt, Homo Sapiens
uccauuugauaauuuuaacaaacaauguaagu

SEQ ID NO: 269398 - RNA, 32 nt, Homo Sapiens
acacaggacagggguuccuucugggcauuaca

SEQ ID NO: 269399 - RNA, 32 nt, Homo Sapiens
augcucugcugucuccuggugaucauuuccug

SEQ ID NO: 269400 - RNA, 32 nt, Homo Sapiens
ugagguaauaauagaguuaacauguuagagua

SEQ ID NO: 269401 - RNA, 32 nt, Homo Sapiens
gguggggagcgguggcacucgugggagggaga

SEQ ID NO: 269402 - RNA, 32 nt, Homo Sapiens
gcggucccugcugacccuguggcaccgcugcc

SEQ ID NO: 269403 - RNA, 32 nt, Homo Sapiens
ucauuuuaaaaguagugugucaauugccuggu

SEQ ID NO: 269404 - RNA, 32 nt, Homo Sapiens
ccaggacgagcccugcgccuucuuuuucgaua

SEQ ID NO: 269405 - RNA, 32 nt, Homo Sapiens
uucuccaaccgcugcgccccagcagcgucccc

SEQ ID NO: 269406 - RNA, 32 nt, Homo Sapiens
uggcguauuuccuaguggggauggcaguguuu

SEQ ID NO: 269407 - RNA, 32 nt, Homo Sapiens
cggaccgggcccagcccugggcucuuacuguc

SEQ ID NO: 269408 - RNA, 32 nt, Homo Sapiens
acacaggacucucauuacuuuuuuauggaauc

SEQ ID NO: 269409 - RNA, 32 nt, Homo Sapiens
cucagcuggcagaacaccuuuccuuucucacc

SEQ ID NO: 269410 - RNA, 32 nt, Homo Sapiens
aggcuccagccagcuguccuggguuuccguuu

SEQ ID NO: 269411 - RNA, 32 nt, Homo Sapiens
ggguuucauuuguuaaauucauuggauuuuaa

SEQ ID NO: 269412 - RNA, 32 nt, Homo Sapiens
gcagaaauagaccaugugaaaacuccaugcuu

SEQ ID NO: 269413 - RNA, 32 nt, Homo Sapiens
cgcgcucugcccagcccagccuacagugcgga

SEQ ID NO: 269414 - RNA, 32 nt, Homo Sapiens
ccaaugccaaacuuuuugaagucuaauuuuug

SEQ ID NO: 269415 - RNA, 32 nt, Homo Sapiens
cagauccgcucccagacggccuuggacugcuu

SEQ ID NO: 269416 - RNA, 32 nt, Homo Sapiens
uauuacauuuuucauuuaccacaagauauuuu

SEQ ID NO: 269417 - RNA, 31 nt, Homo Sapiens
aaugagacaaagaaaaauauaguuaacacaa

SEQ ID NO: 269418 - RNA, 32 nt, Homo Sapiens
acuuuuucucuuaagagcggucagagaaaucc

SEQ ID NO: 269419 - RNA, 32 nt, Homo Sapiens
uuguauacaucaucucauuuaaucuucacaac

SEQ ID NO: 269420 - RNA, 32 nt, Homo Sapiens
ccuaaccuguccagccagagcaugcgucucag

SEQ ID NO: 269421 - RNA, 32 nt, Homo Sapiens
uuagugggugcagcgcaccagcauggcacaug

SEQ ID NO: 269422 - RNA, 32 nt, Homo Sapiens
cauccguaccccaaaccucaacaucaaacagu

SEQ ID NO: 269423 - RNA, 32 nt, Homo Sapiens
gaggcuuaauaaacuuuagucuguuauuuugu

SEQ ID NO: 269424 - RNA, 32 nt, Homo Sapiens
aaacgccgccgggcgcuucuagucggacaaaa

SEQ ID NO: 269425 - RNA, 32 nt, Homo Sapiens
gacuggagugcaguggugugaucauaacucag

SEQ ID NO: 269426 - RNA, 32 nt, Homo Sapiens
aauguuuuuguagcuaaauuguaauugaaacu

SEQ ID NO: 269427 - RNA, 32 nt, Homo Sapiens
ugcgaggcccggggcguuccccugccucucgu

SEQ ID NO: 269428 - RNA, 32 nt, Homo Sapiens
agaggaggccugagaagaagguccugggaaug

SEQ ID NO: 269429 - RNA, 32 nt, Homo Sapiens
cugcgccucccgcuccaccucgcuucuucucu

SEQ ID NO: 269430 - RNA, 32 nt, Homo Sapiens
ugcagacgcagugcugagcacacagcuaccgg

SEQ ID NO: 269431 - RNA, 32 nt, Homo Sapiens
uugggaaacggcagauguagauaauucagcau

SEQ ID NO: 269432 - RNA, 32 nt, Homo Sapiens
uaaauccucacguuaacguacacacacaaaca

SEQ ID NO: 269433 - RNA, 32 nt, Homo Sapiens
gcaggcacaaaucuugggucuuggggacuaac

SEQ ID NO: 269434 - RNA, 32 nt, Homo Sapiens
caagacccagcuugggggaaaagccaccccug

SEQ ID NO: 269435 - RNA, 32 nt, Homo Sapiens
cacacagcacagagacccugggcccagcccac

SEQ ID NO: 269436 - RNA, 32 nt, Homo Sapiens
auaugugcuucauaaaauaacaucucauguuu

SEQ ID NO: 269437 - RNA, 32 nt, Homo Sapiens
uuguggagugcgucuguaaagugcuuguuuua

SEQ ID NO: 269438 - RNA, 32 nt, Homo Sapiens
acuguauuaacguucagcuuacuaaacugacu

SEQ ID NO: 269439 - RNA, 32 nt, Homo Sapiens
uauauauauauaucuuuuuuuuuuuuuaaaca

SEQ ID NO: 269440 - RNA, 32 nt, Homo Sapiens
ugcuauuuacacaugaaaaaacugaaauuaga

SEQ ID NO: 269441 - RNA, 32 nt, Homo Sapiens
guauucuccuauauauucuucuaaucaaaaaa

SEQ ID NO: 269442 - RNA, 32 nt, Homo Sapiens
uagcccaguucgguggcggcccggggcggauu

SEQ ID NO: 269443 - RNA, 32 nt, Homo Sapiens
accuguuagacaaugguugcucuugggcucuu

SEQ ID NO: 269444 - RNA, 28 nt, Homo Sapiens
ugcugggggcggcgaccaccgugagcgu

SEQ ID NO: 269445 - RNA, 32 nt, Homo Sapiens
cucacaguuucacuaacauuugauuuuguuag

SEQ ID NO: 269446 - RNA, 32 nt, Homo Sapiens
uccgucacaccaagcccuuaucuggggcgcgu

SEQ ID NO: 269447 - RNA, 32 nt, Homo Sapiens
cauugcggccccaacccaugccugcuuuggaa

SEQ ID NO: 269448 - RNA, 32 nt, Homo Sapiens
cucaagccuucacagugagcugauggucucua

SEQ ID NO: 269449 - RNA, 32 nt, Homo Sapiens
uuucaaccuuaaucuuggaucccuuuaccuca

SEQ ID NO: 269450 - RNA, 32 nt, Homo Sapiens
uguuagauuuucugccagaggggugggucaga

SEQ ID NO: 269451 - RNA, 32 nt, Homo Sapiens
cuccuucuccggccagacccagccccgcgaag

SEQ ID NO: 269452 - RNA, 32 nt, Homo Sapiens
ucuuaaaacgaaagauaauguuaagaaaaauu

SEQ ID NO: 269453 - RNA, 32 nt, Homo Sapiens
ugcagaccggcuuuugagagcuggacaggugg

SEQ ID NO: 269454 - RNA, 32 nt, Homo Sapiens
aaguucugcuaagggacagacugccuccucaa

SEQ ID NO: 269455 - RNA, 32 nt, Homo Sapiens
cggcuaauuuuuuguauuuuuuguagagacgg

SEQ ID NO: 269456 - RNA, 32 nt, Homo Sapiens
gaggacacaaggaaagaguguauugauaagaa

SEQ ID NO: 269457 - RNA, 32 nt, Homo Sapiens
cucuucuguuccuugaacuauaucccuccacu

SEQ ID NO: 269458 - RNA, 32 nt, Homo Sapiens
gggaaguccauauuugucugcuuuucuugcag

SEQ ID NO: 269459 - RNA, 32 nt, Homo Sapiens
uaauaaggaaagauuuugagauggguggcaua

SEQ ID NO: 269460 - RNA, 32 nt, Homo Sapiens
auugcuaaaguuguguauauguguguguauau

SEQ ID NO: 269461 - RNA, 32 nt, Homo Sapiens
caaaucuuucccuuauuucaaggcuuaguuca

SEQ ID NO: 269462 - RNA, 32 nt, Homo Sapiens
ucguugcguugagaggcgcccgcgggguagug

SEQ ID NO: 269463 - RNA, 32 nt, Homo Sapiens
uuucaacaaggugcugagcagugucaauccag

SEQ ID NO: 269464 - RNA, 32 nt, Homo Sapiens
uuucggaugaugccaauuucuuuuucugguuu

SEQ ID NO: 269465 - RNA, 32 nt, Homo Sapiens
acaucuucaaagcagcgacugggaagaaaaau

SEQ ID NO: 269466 - RNA, 32 nt, Homo Sapiens
ccaggggcgggggguggggcagcuguggggag

SEQ ID NO: 269467 - RNA, 32 nt, Homo Sapiens
uccuuaaggaggccugcagagaaaggggcuuu

SEQ ID NO: 269468 - RNA, 32 nt, Homo Sapiens
uuaaguuuauuuucuuuuuucguuuuauaaau

SEQ ID NO: 269469 - RNA, 32 nt, Homo Sapiens
aaccauugucauaagaauguuuaugaauaguu

SEQ ID NO: 269470 - RNA, 32 nt, Homo Sapiens
cgccgccgagggucaggagcccgggagcgcga

SEQ ID NO: 269471 - RNA, 32 nt, Homo Sapiens
acuguuuagggcccugauuugcugggcaguuu

SEQ ID NO: 269472 - RNA, 32 nt, Homo Sapiens
cauuuugauaaggaaaggauaugcucagacuc

SEQ ID NO: 269473 - RNA, 32 nt, Homo Sapiens
ccuccuccccgcggcccgcccgggccaugcuc

SEQ ID NO: 269474 - RNA, 31 nt, Homo Sapiens
ggggaccgggcggugcggcuguuucacaaca

SEQ ID NO: 269475 - RNA, 32 nt, Homo Sapiens
uguuacaauccuaggggacuccugucaccugu

SEQ ID NO: 269476 - RNA, 32 nt, Homo Sapiens
augauuucuauuuauuaugauauccuauuuau

SEQ ID NO: 269477 - RNA, 32 nt, Homo Sapiens
agacccgugcgcggccuacacgcuugggggac

SEQ ID NO: 269478 - RNA, 32 nt, Homo Sapiens
uaccuuaaaaaguaauuguagauggaaaucag

SEQ ID NO: 269479 - RNA, 32 nt, Homo Sapiens
auuguuaagacaaaaaguggccaggcacagug

SEQ ID NO: 269480 - RNA, 32 nt, Homo Sapiens
guuuagguaucuucauacuguauuuuguauca

SEQ ID NO: 269481 - RNA, 32 nt, Homo Sapiens
aagugugaguugaguucucauuuagguuugua

SEQ ID NO: 269482 - RNA, 32 nt, Homo Sapiens
caagcuggaggcggcagaggacugggccaagc

SEQ ID NO: 269483 - RNA, 28 nt, Homo Sapiens
gccaugccugcgcucuggcugggcugcu

SEQ ID NO: 269484 - RNA, 32 nt, Homo Sapiens
gaauuaaguauuuauuaauguucaagaaacua

SEQ ID NO: 269485 - RNA, 32 nt, Homo Sapiens
cagggugggauggcagacauggcaggugccgg

SEQ ID NO: 269486 - RNA, 32 nt, Homo Sapiens
cuugacaucccauguuugccuggauaaaguuc

SEQ ID NO: 269487 - RNA, 32 nt, Homo Sapiens
guggcggggggccuguggcagaggccuuguga

SEQ ID NO: 269488 - RNA, 32 nt, Homo Sapiens
cccgcuggacuauacuggauaugugggcacag

SEQ ID NO: 269489 - RNA, 32 nt, Homo Sapiens
ccugguggggcucugcaggcucccucgggagu

SEQ ID NO: 269490 - RNA, 32 nt, Homo Sapiens
aucuacuaugaacuugcugcugugauagaaaa

SEQ ID NO: 269491 - RNA, 32 nt, Homo Sapiens
cuggaagaaaucaagcauuuuaccccagaaua

SEQ ID NO: 269492 - RNA, 32 nt, Homo Sapiens
acaggcugcguuucuccuuucuguccgugggc

SEQ ID NO: 269493 - RNA, 32 nt, Homo Sapiens
aaaauauuuaaaacguuuuaccuaggcuuuaa

SEQ ID NO: 269494 - RNA, 32 nt, Homo Sapiens
gacagaagagguaagggaggcuaaguggguaa

SEQ ID NO: 269495 - RNA, 32 nt, Homo Sapiens
gacugcauccgccgcggcgucuccauggcacg

SEQ ID NO: 269496 - RNA, 32 nt, Homo Sapiens
gcucauggagagagggcgcagagcaaaccaug

SEQ ID NO: 269497 - RNA, 32 nt, Homo Sapiens
gccagaaguccucuaagucuugccaguacaag

SEQ ID NO: 269498 - RNA, 32 nt, Homo Sapiens
aggguuaggagguccuuaggccucugagaagc

SEQ ID NO: 269499 - RNA, 32 nt, Homo Sapiens
gcucauggcucucggcggccuucccaggcccc

SEQ ID NO: 269500 - RNA, 32 nt, Homo Sapiens
cuaguauuauuucaucuuuuauacagguuauu

SEQ ID NO: 269501 - RNA, 32 nt, Homo Sapiens
ugucaugggcauuuuuaguagcauagacccuu

SEQ ID NO: 269502 - RNA, 32 nt, Homo Sapiens
accuauccaugugagccuuguuugccucagcu

SEQ ID NO: 269503 - RNA, 32 nt, Homo Sapiens
guacauacuguaacauacagaguauagugaag

SEQ ID NO: 269504 - RNA, 32 nt, Homo Sapiens
auguuaaaaaagucuucaggauaauauaaaau

SEQ ID NO: 269505 - RNA, 32 nt, Homo Sapiens
guggggaaggagguuuucucccugcccgggaa

SEQ ID NO: 269506 - RNA, 32 nt, Homo Sapiens
uaugggaaaaugcauucugagauggaaaucac

SEQ ID NO: 269507 - RNA, 32 nt, Homo Sapiens
agacacacuacacacacacacacacacacaca

SEQ ID NO: 269508 - RNA, 32 nt, Homo Sapiens
cuagucggacaaagcccucgcgucggacccuu

SEQ ID NO: 269509 - RNA, 32 nt, Homo Sapiens
ugaaaauggagccagagagccuggacaucagg

SEQ ID NO: 269510 - RNA, 32 nt, Homo Sapiens
gaauggggcagaaauuccguggaggcagauag

SEQ ID NO: 269511 - RNA, 32 nt, Homo Sapiens
aguuuacuuuuguauuugaauuuugauuuucu

SEQ ID NO: 269512 - RNA, 32 nt, Homo Sapiens
aaacuuuggaaauguuaauguucagacugaaa

SEQ ID NO: 269513 - RNA, 32 nt, Homo Sapiens
caaguagaagagaauuuguuuaauagauuuua

SEQ ID NO: 269514 - RNA, 32 nt, Homo Sapiens
gaaggaggcagacugauggcgauucccucuca

SEQ ID NO: 269515 - RNA, 32 nt, Homo Sapiens
ugccuguaaucccagcacuuuggaaggccgag

SEQ ID NO: 269516 - RNA, 32 nt, Homo Sapiens
ucccuagaggccgguuccuggucugugcugcu

SEQ ID NO: 269517 - RNA, 32 nt, Homo Sapiens
cgugugggggacacgcagaugagugaauugga

SEQ ID NO: 269518 - RNA, 32 nt, Homo Sapiens
ucaacaaaaggggccugaaaacaucauuugca

SEQ ID NO: 269519 - RNA, 32 nt, Homo Sapiens
uuuucuuuggcuuuuucuuucuuucuucaccc

SEQ ID NO: 269520 - RNA, 32 nt, Homo Sapiens
aaacaggaaagggugaaggaaauccuugucua

SEQ ID NO: 269521 - RNA, 32 nt, Homo Sapiens
uuucauaucuccugcuguuccaucccagcuug

SEQ ID NO: 269522 - RNA, 32 nt, Homo Sapiens
auacggccuccuccccgccgacugggcaaagg

SEQ ID NO: 269523 - RNA, 32 nt, Homo Sapiens
ggugggaagggagaagcagacauagucauuua

SEQ ID NO: 269524 - RNA, 32 nt, Homo Sapiens
agauaagugauccuagauaaaauauuuuagau

SEQ ID NO: 269525 - RNA, 32 nt, Homo Sapiens
acucccagcccuccccuccccacaacaugaac

SEQ ID NO: 269526 - RNA, 32 nt, Homo Sapiens
cuauaagggaucuauuuaagaaguggucaggu

SEQ ID NO: 269527 - RNA, 32 nt, Homo Sapiens
uuacccagcccgcuccagcagugcgggagauu

SEQ ID NO: 269528 - RNA, 29 nt, Homo Sapiens
uauuauuaaauaucaggaaagcuaacauu

SEQ ID NO: 269529 - RNA, 32 nt, Homo Sapiens
uuuccuaaaaauuuaagugcccccaucaucgu

SEQ ID NO: 269530 - RNA, 32 nt, Homo Sapiens
gcggaccggccgccauguccacguucaggcag

SEQ ID NO: 269531 - RNA, 32 nt, Homo Sapiens
cauccuaaugaaaauuucacugacagggccga

SEQ ID NO: 269532 - RNA, 28 nt, Homo Sapiens
ccacugauaagguaacauuugagcaagu

SEQ ID NO: 269533 - RNA, 32 nt, Homo Sapiens
aacacaaaacuuauuuaaagaugcuuuauaug

SEQ ID NO: 269534 - RNA, 32 nt, Homo Sapiens
aaauuuuaaguaccuaggggagaaagagccau

SEQ ID NO: 269535 - RNA, 32 nt, Homo Sapiens
uacugaaagggagggguggagauggguguggc

SEQ ID NO: 269536 - RNA, 32 nt, Homo Sapiens
ucaagaugucuaggcccggcugggcguggugg

SEQ ID NO: 269537 - RNA, 32 nt, Homo Sapiens
uuaaaugccaggccuggcaagugggugaaaga

SEQ ID NO: 269538 - RNA, 32 nt, Homo Sapiens
aauguaaaugaaaucacauuuaaaauaaacug

SEQ ID NO: 269539 - RNA, 32 nt, Homo Sapiens
gccaguuccagcucuggugggugcugguccac

SEQ ID NO: 269540 - RNA, 32 nt, Homo Sapiens
aaugguuucgugggcuggccccagggcccccc

SEQ ID NO: 269541 - RNA, 32 nt, Homo Sapiens
gugcugcagggccagccccacuccugacaccu

SEQ ID NO: 269542 - RNA, 32 nt, Homo Sapiens
auuagcugggcacgguggugcgugccuguagu

SEQ ID NO: 269543 - RNA, 32 nt, Homo Sapiens
accacaucucccucaugcaccgcccgcacguc

SEQ ID NO: 269544 - RNA, 32 nt, Homo Sapiens
acauguuccugggguuggucaccauuaucucc

SEQ ID NO: 269545 - RNA, 32 nt, Homo Sapiens
ccucugcccugcgcuccuucuccccgcugcaa

SEQ ID NO: 269546 - RNA, 32 nt, Homo Sapiens
ugccuuccugggggauacuccuccccacccua

SEQ ID NO: 269547 - RNA, 32 nt, Homo Sapiens
cccuguguagcugaauucccaagcccugcauu

SEQ ID NO: 269548 - RNA, 32 nt, Homo Sapiens
cccacaccgccagcugcucggcgcccgggucc

SEQ ID NO: 269549 - RNA, 32 nt, Homo Sapiens
ucaacauuaaauaguuuuaucuuguuguugcc

SEQ ID NO: 269550 - RNA, 32 nt, Homo Sapiens
ugggcgccuguagucccaacuacucaggaggc

SEQ ID NO: 269551 - RNA, 32 nt, Homo Sapiens
uccgggccggcggguggccgcucaccaugccc

SEQ ID NO: 269552 - RNA, 32 nt, Homo Sapiens
gacacucauugccuauggaaagauggagauga

SEQ ID NO: 269553 - RNA, 32 nt, Homo Sapiens
ucuggugccacaacagaagcagauuggguucc

SEQ ID NO: 269554 - RNA, 32 nt, Homo Sapiens
cauguaacuucugagccucagcuccucaucca

SEQ ID NO: 269555 - RNA, 31 nt, Homo Sapiens
cuccaacauuugacugucaccugagucuaac

SEQ ID NO: 269556 - RNA, 31 nt, Homo Sapiens
uuccggcugccgguugacaugaagaagcagc

SEQ ID NO: 269557 - RNA, 32 nt, Homo Sapiens
cggaggggguggcagugagcggcggcagaggc

SEQ ID NO: 269558 - RNA, 32 nt, Homo Sapiens
cugugaaccauguggaugaaaaacagacaacu

SEQ ID NO: 269559 - RNA, 32 nt, Homo Sapiens
gcgauaaagggagccgagccggacgugagggg

SEQ ID NO: 269560 - RNA, 32 nt, Homo Sapiens
gcaggggcuccuuggccuccaguucccgugac

SEQ ID NO: 269561 - RNA, 32 nt, Homo Sapiens
uacaauuuuuaaaauaguuuaugucaucucuu

SEQ ID NO: 269562 - RNA, 32 nt, Homo Sapiens
ggggacauaauggccuccuuguucacuuuuua

SEQ ID NO: 269563 - RNA, 32 nt, Homo Sapiens
agggaaaggggagaagaaagaaaaacacauuu

SEQ ID NO: 269564 - RNA, 32 nt, Homo Sapiens
cgcuacugcgcaaagaugguggaggaggagaa

SEQ ID NO: 269565 - RNA, 32 nt, Homo Sapiens
ccacggcaguugcaagguaaccaguguggauc

SEQ ID NO: 269566 - RNA, 32 nt, Homo Sapiens
uccucgucccgcagccucuucucggccucccg

SEQ ID NO: 269567 - RNA, 32 nt, Homo Sapiens
gccgccggcuucgcccucgccauggcgcccug

SEQ ID NO: 269568 - RNA, 32 nt, Homo Sapiens
auuguugaauacugccugcaaguugcuuauug

SEQ ID NO: 269569 - RNA, 32 nt, Homo Sapiens
agaucugaaggguaauaaaauguacuggauuu

SEQ ID NO: 269570 - RNA, 32 nt, Homo Sapiens
aauuaggaaaucaacgucuuuggucaggaacu

SEQ ID NO: 269571 - RNA, 32 nt, Homo Sapiens
aggggaccuuugagcugagccuuacaggacag

SEQ ID NO: 269572 - RNA, 32 nt, Homo Sapiens
ggccagugugcggcccgggggcucccugugcc

SEQ ID NO: 269573 - RNA, 32 nt, Homo Sapiens
ucuacuaaaaauacaaaacaauuagccgggcg

SEQ ID NO: 269574 - RNA, 32 nt, Homo Sapiens
cacgggcgcgcccggcuccgcccgcaagugcg

SEQ ID NO: 269575 - RNA, 32 nt, Homo Sapiens
cuacgugugugauuuuccuguuuuauauugaa

SEQ ID NO: 269576 - RNA, 32 nt, Homo Sapiens
ggugucugagggcuuccacgugggccucacau

SEQ ID NO: 269577 - RNA, 32 nt, Homo Sapiens
aggcagcuguccuggagacaagagcuggagac

SEQ ID NO: 269578 - RNA, 32 nt, Homo Sapiens
ucacagcuuucacauagcacagauaacucgcc

SEQ ID NO: 269579 - RNA, 32 nt, Homo Sapiens
ugcaagcccagcuggccacguagguuuuaaag

SEQ ID NO: 269580 - RNA, 32 nt, Homo Sapiens
uucagcacccccacccaccuccacccagcccc

SEQ ID NO: 269581 - RNA, 32 nt, Homo Sapiens
agcaucugcccccuuccgggcaucagugacag

SEQ ID NO: 269582 - RNA, 28 nt, Homo Sapiens
acuuuuugugugauuauuauaaacuuug

SEQ ID NO: 269583 - RNA, 32 nt, Homo Sapiens
acuuuagauaaaaaugcaaaagggcagucauc

SEQ ID NO: 269584 - RNA, 32 nt, Homo Sapiens
uuuguggcaacgcagcccuguucuguuuuugc

SEQ ID NO: 269585 - RNA, 32 nt, Homo Sapiens
gggacagaugguuuuucuuuauuguaaaauug

SEQ ID NO: 269586 - RNA, 32 nt, Homo Sapiens
auaaaugugaaguuauaaaauaaauauaugcu

SEQ ID NO: 269587 - RNA, 32 nt, Homo Sapiens
aguguugguuaccauggugaagcuggcagcca

SEQ ID NO: 269588 - RNA, 32 nt, Homo Sapiens
acuccucccaaccgcccuggugcaaaguccca

SEQ ID NO: 269589 - RNA, 32 nt, Homo Sapiens
aaacaauuuuugguaaaaugugaugaagaugg

SEQ ID NO: 269590 - RNA, 32 nt, Homo Sapiens
gacuuaaggaagagacccugugagucugacaa

SEQ ID NO: 269591 - RNA, 32 nt, Homo Sapiens
gaaaauugaugggauuuggucaacacuaacau

SEQ ID NO: 269592 - RNA, 32 nt, Homo Sapiens
gcuuggaguugucugucacgcacauguguccu

SEQ ID NO: 269593 - RNA, 32 nt, Homo Sapiens
gcugggugcucugcugcuggacuuuuguggcu

SEQ ID NO: 269594 - RNA, 32 nt, Homo Sapiens
ccacgcguccgcccacgcguccgcccacgcgu

SEQ ID NO: 269595 - RNA, 32 nt, Homo Sapiens
gggaaagcugugcauuaaauagacauuuaaca

SEQ ID NO: 269596 - RNA, 32 nt, Homo Sapiens
uuuggaccgaaugaaugguaacuuuuuaaugu

SEQ ID NO: 269597 - RNA, 31 nt, Homo Sapiens
uggauugcaagguguuuagcagcaucugucu

SEQ ID NO: 269598 - RNA, 32 nt, Homo Sapiens
cccggugccuggcgcgugguagcaggcgcccg

SEQ ID NO: 269599 - RNA, 32 nt, Homo Sapiens
uaaacggcuuccuggggcggaacuguuucgcu

SEQ ID NO: 269600 - RNA, 32 nt, Homo Sapiens
uuuucuguuaaaauugucaaauauauuuuaug

SEQ ID NO: 269601 - RNA, 30 nt, Homo Sapiens
ugggaugcgcccgugucacgcgccucuggg

SEQ ID NO: 269602 - RNA, 32 nt, Homo Sapiens
cccugcacuccagcucgccccuuucccgcgcg

SEQ ID NO: 269603 - RNA, 32 nt, Homo Sapiens
ugcguuuucuccaugauaacauagacaaacag

SEQ ID NO: 269604 - RNA, 32 nt, Homo Sapiens
ucccuguguuugucucuaguguccuccuaaac

SEQ ID NO: 269605 - RNA, 29 nt, Homo Sapiens
uuuguuguuucugaauuucccccgaauuc

SEQ ID NO: 269606 - RNA, 32 nt, Homo Sapiens
ccguggcaggugguuggaaaagaaauggcuuc

SEQ ID NO: 269607 - RNA, 32 nt, Homo Sapiens
aaacagcaaugcugauaaauguucaaggaauu

SEQ ID NO: 269608 - RNA, 32 nt, Homo Sapiens
ucaaaagaaauuucuguaaaugguaugucucc

SEQ ID NO: 269609 - RNA, 32 nt, Homo Sapiens
cagacuuuaucccuccuucuuacucugggcca

SEQ ID NO: 269610 - RNA, 32 nt, Homo Sapiens
cuccucuuuuucugagaaacauggagcagcgc

SEQ ID NO: 269611 - RNA, 32 nt, Homo Sapiens
ggaggcgugcuuccuccacccgccggcuagca

SEQ ID NO: 269612 - RNA, 32 nt, Homo Sapiens
cccugcacgccuagcguugucccgcggccagg

SEQ ID NO: 269613 - RNA, 32 nt, Homo Sapiens
gaugcaaucauugggaaauuuucaugcacgcu

SEQ ID NO: 269614 - RNA, 32 nt, Homo Sapiens
uuguguaugauaugauaaauguuuagcaguag

SEQ ID NO: 269615 - RNA, 31 nt, Homo Sapiens
agcugugggccccagaaagccagccugccuu

SEQ ID NO: 269616 - RNA, 32 nt, Homo Sapiens
aaggaaaaaguacaguauucuuuuaauaaacu

SEQ ID NO: 269617 - RNA, 32 nt, Homo Sapiens
ccuccugagcgcggcagagggugagccucaca

SEQ ID NO: 269618 - RNA, 32 nt, Homo Sapiens
gugcggccgggcggggaggcuggcucccccac

SEQ ID NO: 269619 - RNA, 30 nt, Homo Sapiens
caucccgcggugcagccgccggcccgguag

SEQ ID NO: 269620 - RNA, 32 nt, Homo Sapiens
cagggagggagcaagcggggcugggagggcug

SEQ ID NO: 269621 - RNA, 32 nt, Homo Sapiens
aagcuggaauaguuugucuuuacaauggguuu

SEQ ID NO: 269622 - RNA, 32 nt, Homo Sapiens
acgcaagccuuaaaauuuuucuuaagacagag

SEQ ID NO: 269623 - RNA, 32 nt, Homo Sapiens
ucuuuuauuucuaucaaguauuuuacauauga

SEQ ID NO: 269624 - RNA, 28 nt, Homo Sapiens
gcgcgauggacagccccgaggugaccuu

SEQ ID NO: 269625 - RNA, 32 nt, Homo Sapiens
gggccccuggaucuccucccuuacccuccucu

SEQ ID NO: 269626 - RNA, 32 nt, Homo Sapiens
aucucaacauuuaucuuaauucugauccaagu

SEQ ID NO: 269627 - RNA, 32 nt, Homo Sapiens
aaccuagaaucgucuagaaaacuagaaccuac

SEQ ID NO: 269628 - RNA, 32 nt, Homo Sapiens
ugccccugccagcaggugccagggcuggugag

SEQ ID NO: 269629 - RNA, 32 nt, Homo Sapiens
cagcuccccucagaccuccucaucucaugagc

SEQ ID NO: 269630 - RNA, 32 nt, Homo Sapiens
cggagcuacuugaaacuucugcucuugcuagg

SEQ ID NO: 269631 - RNA, 32 nt, Homo Sapiens
ugugggaaaauauuugcugagauuuuguauag

SEQ ID NO: 269632 - RNA, 32 nt, Homo Sapiens
caagucccuugugaccacucagugucccgucc

SEQ ID NO: 269633 - RNA, 32 nt, Homo Sapiens
ccuacauucuaccaagcugcucuuuuaaaagu

SEQ ID NO: 269634 - RNA, 32 nt, Homo Sapiens
uuuugacaguaaacuucugccuauggcuuaca

SEQ ID NO: 269635 - RNA, 32 nt, Homo Sapiens
cauuugcagaaaccauuaagcaguuacauauu

SEQ ID NO: 269636 - RNA, 32 nt, Homo Sapiens
ugaggaggggguuccucccgcugggguucaua

SEQ ID NO: 269637 - RNA, 32 nt, Homo Sapiens
ucaaaugaaaauaaucaaagguaaucuugagg

SEQ ID NO: 269638 - RNA, 32 nt, Homo Sapiens
auuccagaaucuugacuuucugauuggugauu

SEQ ID NO: 269639 - RNA, 32 nt, Homo Sapiens
agugugugcagguucaacuaagaucucauaaa

SEQ ID NO: 269640 - RNA, 32 nt, Homo Sapiens
ugguugcucugaagugggcugcggccuguuca

SEQ ID NO: 269641 - RNA, 32 nt, Homo Sapiens
uugucuguuuguuuucucauuaauuuuggucu

SEQ ID NO: 269642 - RNA, 32 nt, Homo Sapiens
aaguacaucucuacuaaaaauacgaaaaaauu

SEQ ID NO: 269643 - RNA, 32 nt, Homo Sapiens
ccguuucagcagggacaggggcugacaggccc

SEQ ID NO: 269644 - RNA, 32 nt, Homo Sapiens
cuugccagcuggaagcucuuucuccaaugagc

SEQ ID NO: 269645 - RNA, 32 nt, Homo Sapiens
ggaguucugaggaggguuugauaaguugaaua

SEQ ID NO: 269646 - RNA, 32 nt, Homo Sapiens
gacccaagcaaagacacacaucaucaacuucc

SEQ ID NO: 269647 - RNA, 32 nt, Homo Sapiens
uaaaaugugcuaacaauguuuuguuucuauca

SEQ ID NO: 269648 - RNA, 32 nt, Homo Sapiens
auguuuacuuuugguaacucucuuccuucuuu

SEQ ID NO: 269649 - RNA, 32 nt, Homo Sapiens
cagccgugaagagcuucuucauuacgacuuua

SEQ ID NO: 269650 - RNA, 32 nt, Homo Sapiens
aaccacuggccaagggucacccagcaaguuuu

SEQ ID NO: 269651 - RNA, 32 nt, Homo Sapiens
gaaaaauuugaaaauaucaucacugagcuaag

SEQ ID NO: 269652 - RNA, 32 nt, Homo Sapiens
cgauuagagaagacauaacauucauuaagaau

SEQ ID NO: 269653 - RNA, 32 nt, Homo Sapiens
gucuugagcuggaagcguagggcugagcugug

SEQ ID NO: 269654 - RNA, 32 nt, Homo Sapiens
cagacccuaucagaauaaucccagcccaucau

SEQ ID NO: 269655 - RNA, 23 nt, Homo Sapiens
aagguguugcuguugaagccacc

SEQ ID NO: 269656 - RNA, 32 nt, Homo Sapiens
cucuguuuucccucacucgccagccccgcacc

SEQ ID NO: 269657 - RNA, 32 nt, Homo Sapiens
uuugcaauauauuguguauuggucugauauuu

SEQ ID NO: 269658 - RNA, 32 nt, Homo Sapiens
ugacagauacucaauagaaaacaccugcagac

SEQ ID NO: 269659 - RNA, 32 nt, Homo Sapiens
uggccugcucuuccucacggccggggcugcac

SEQ ID NO: 269660 - RNA, 32 nt, Homo Sapiens
aaauaaguuuuacauuuuuggcacauaacaac

SEQ ID NO: 269661 - RNA, 32 nt, Homo Sapiens
uaacgaauaagugauuucacuacaaagcagug

SEQ ID NO: 269662 - RNA, 32 nt, Homo Sapiens
uggagauucugggcgaggcuagugacugggua

SEQ ID NO: 269663 - RNA, 32 nt, Homo Sapiens
aacaagagaucauaauaaaaaccuaaaagaac

SEQ ID NO: 269664 - RNA, 32 nt, Homo Sapiens
cuuaaagggccccacaccacagacccagacac

SEQ ID NO: 269665 - RNA, 32 nt, Homo Sapiens
gcagaagguggcccuaugcacccagguagccc

SEQ ID NO: 269666 - RNA, 32 nt, Homo Sapiens
ccugcgucgaggaggggccuuugucccggaaa

SEQ ID NO: 269667 - RNA, 32 nt, Homo Sapiens
ucagucucauuucauuuaaagaagaaucacuc

SEQ ID NO: 269668 - RNA, 32 nt, Homo Sapiens
ugcucuuggggguggggagcauggugggaaug

SEQ ID NO: 269669 - RNA, 32 nt, Homo Sapiens
aguggcuguauuacagaacaggaacuccaagc

SEQ ID NO: 269670 - RNA, 32 nt, Homo Sapiens
ugcuguuuuuuagccuaggaguuagaaauccu

SEQ ID NO: 269671 - RNA, 32 nt, Homo Sapiens
caagguccuuugcauggcagucuuauccccaa

SEQ ID NO: 269672 - RNA, 32 nt, Homo Sapiens
auacuuauuaaacacuuguuauaugccagaau

SEQ ID NO: 269673 - RNA, 32 nt, Homo Sapiens
agugaaaagagguuugauugcauauuaaauug

SEQ ID NO: 269674 - RNA, 31 nt, Homo Sapiens
cccuaggaaucaagaagacgcacagacugaa

SEQ ID NO: 269675 - RNA, 32 nt, Homo Sapiens
gguucuggagagagggugggucccgggccagg

SEQ ID NO: 269676 - RNA, 32 nt, Homo Sapiens
cugccagaaggucuggggcgccaagguguguc

SEQ ID NO: 269677 - RNA, 32 nt, Homo Sapiens
gcaugaccuggugccuggcccagcggcaauaa

SEQ ID NO: 269678 - RNA, 31 nt, Homo Sapiens
agaugcucacggagaugcuggacacauaaag

SEQ ID NO: 269679 - RNA, 32 nt, Homo Sapiens
ugaugccuccccacccucacccuaugaugaca

SEQ ID NO: 269680 - RNA, 32 nt, Homo Sapiens
ugugagcaggugggucaaaugccauugccucc

SEQ ID NO: 269681 - RNA, 32 nt, Homo Sapiens
ugacuggaggccgggcaggaagcaagucauca

SEQ ID NO: 269682 - RNA, 32 nt, Homo Sapiens
ucucagcagaaucgucauguuuuucugaugca

SEQ ID NO: 269683 - RNA, 32 nt, Homo Sapiens
cgagugagugagcggcgggcgggcgcgagugu

SEQ ID NO: 269684 - RNA, 32 nt, Homo Sapiens
cuaucuaagaagcucaugguauacaaggguca

SEQ ID NO: 269685 - RNA, 32 nt, Homo Sapiens
acuucuaguugacuuuuuuuuaaauauacauu

SEQ ID NO: 269686 - RNA, 32 nt, Homo Sapiens
ugguuuguuuuaauuuuuugaacuuuggguac

SEQ ID NO: 269687 - RNA, 32 nt, Homo Sapiens
ggcccacgugagcgccgagggccgccgcaagc

SEQ ID NO: 269688 - RNA, 32 nt, Homo Sapiens
aagguauugguagguuacucaauuucaaaagg

SEQ ID NO: 269689 - RNA, 32 nt, Homo Sapiens
guguuaguguggcagguaugacaacucaucca

SEQ ID NO: 269690 - RNA, 32 nt, Homo Sapiens
gcuggagacagagaucaaacacucaagguucc

SEQ ID NO: 269691 - RNA, 32 nt, Homo Sapiens
aggacuggcacuuuuucuuuuuucucagcaaa

SEQ ID NO: 269692 - RNA, 32 nt, Homo Sapiens
cagugagcugugaucacuccagugcacucgag

SEQ ID NO: 269693 - RNA, 32 nt, Homo Sapiens
cggggcuccaggggcgggagcgacgccgcaga

SEQ ID NO: 269694 - RNA, 32 nt, Homo Sapiens
uuucuuuuucuuuuucuuuuuaaaugagaagg

SEQ ID NO: 269695 - RNA, 32 nt, Homo Sapiens
aaaggagggcugugaggagauaccucauuaaa

SEQ ID NO: 269696 - RNA, 32 nt, Homo Sapiens
gcggaagggaguggagauggggcugguugcug

SEQ ID NO: 269697 - RNA, 32 nt, Homo Sapiens
ugccaccauuccauccugugccccgcccccgc

SEQ ID NO: 269698 - RNA, 32 nt, Homo Sapiens
agcccugcacuccagcagcaucuuccagccuu

SEQ ID NO: 269699 - RNA, 32 nt, Homo Sapiens
cucggcauuuccccaacuccuucuccaccccc

SEQ ID NO: 269700 - RNA, 32 nt, Homo Sapiens
guuuguaggaaucauugaaauuuuauacaagc

SEQ ID NO: 269701 - RNA, 32 nt, Homo Sapiens
uaagagugcccgugucgguucuuccuggaagu

SEQ ID NO: 269702 - RNA, 32 nt, Homo Sapiens
gaauauacugacggcauaaaagggcagaacca

SEQ ID NO: 269703 - RNA, 32 nt, Homo Sapiens
caguccccuguugcgccgcgcccccguccguc

SEQ ID NO: 269704 - RNA, 32 nt, Homo Sapiens
cauuuccaaaguaugaaaggucuuucaggcuu

SEQ ID NO: 269705 - RNA, 32 nt, Homo Sapiens
aaaguggcauuauuuuauuuuacaaggugccc

SEQ ID NO: 269706 - RNA, 32 nt, Homo Sapiens
cucaucgagaucuggcagcccuggcaccgggu

SEQ ID NO: 269707 - RNA, 32 nt, Homo Sapiens
auuacuggugccucuucagcugucaguccauc

SEQ ID NO: 269708 - RNA, 32 nt, Homo Sapiens
gggaggucagugcuucgugccucgauugaagg

SEQ ID NO: 269709 - RNA, 32 nt, Homo Sapiens
gggccauuucccuuucgcaguucuuucaauag

SEQ ID NO: 269710 - RNA, 32 nt, Homo Sapiens
ugcugacuuaaguuucccuuucuugguuuaug

SEQ ID NO: 269711 - RNA, 32 nt, Homo Sapiens
uggcagugguggaaccucugcgucucccuggc

SEQ ID NO: 269712 - RNA, 32 nt, Homo Sapiens
ggcggggcuggccccacccccaugaccacugc

SEQ ID NO: 269713 - RNA, 32 nt, Homo Sapiens
cugaaauaaccugguaaacaacacccuccucc

SEQ ID NO: 269714 - RNA, 32 nt, Homo Sapiens
caauuacuuaggauguuugugaucugccgacc

SEQ ID NO: 269715 - RNA, 32 nt, Homo Sapiens
auuaggaggcgaggagagaggagggcgcagcu

SEQ ID NO: 269716 - RNA, 32 nt, Homo Sapiens
uuuuuuuuaaacaaaaucguucuuguuggauu

SEQ ID NO: 269717 - RNA, 32 nt, Homo Sapiens
cccagccccagcucccuguccuccccaacacc

SEQ ID NO: 269718 - RNA, 32 nt, Homo Sapiens
auaacuuauguggcuuuuaacuuauugcuucc

SEQ ID NO: 269719 - RNA, 32 nt, Homo Sapiens
ugaagaaaugacugaauaugagcugcucaucc

SEQ ID NO: 269720 - RNA, 32 nt, Homo Sapiens
cacccuccuucugcacauggggacugggcuug

SEQ ID NO: 269721 - RNA, 32 nt, Homo Sapiens
ucaagauuuuuaguuuggcccaaguguggccc

SEQ ID NO: 269722 - RNA, 29 nt, Homo Sapiens
guagccuggauauuauucuuguaguuuac

SEQ ID NO: 269723 - RNA, 32 nt, Homo Sapiens
uagcauuaacucaaacgauaaugaucauaguc

SEQ ID NO: 269724 - RNA, 32 nt, Homo Sapiens
cucagggucagcuguacacuuuauugaccagu

SEQ ID NO: 269725 - RNA, 32 nt, Homo Sapiens
ggauccaucuguguuucccuggaaugggacag

SEQ ID NO: 269726 - RNA, 32 nt, Homo Sapiens
ggccugugggccgcauacggcccaggauggcu

SEQ ID NO: 269727 - RNA, 32 nt, Homo Sapiens
gaagggggaacggaugaaugugagauacagca

SEQ ID NO: 269728 - RNA, 32 nt, Homo Sapiens
gccgcccccgcggaacggccugcugcagcccc

SEQ ID NO: 269729 - RNA, 32 nt, Homo Sapiens
auucugagaaacaaaaacacacacgcagaauu

SEQ ID NO: 269730 - RNA, 32 nt, Homo Sapiens
acccccggccccacuccgcccgcgaccccugc

SEQ ID NO: 269731 - RNA, 32 nt, Homo Sapiens
gaaugauaauuucucauucaggugugaaaacu

SEQ ID NO: 269732 - RNA, 32 nt, Homo Sapiens
ggcgggugguggcggcgguggcagcgggggcu

SEQ ID NO: 269733 - RNA, 32 nt, Homo Sapiens
cuggaccucagaggugacacccauugggcccu

SEQ ID NO: 269734 - RNA, 32 nt, Homo Sapiens
auguuucugagaccucuuucuacuuuacuguc

SEQ ID NO: 269735 - RNA, 30 nt, Homo Sapiens
uucuuacgugguggcaucaagagcaaaaug

SEQ ID NO: 269736 - RNA, 31 nt, Homo Sapiens
uugcauuuuaguaccuaaccauaggcugaga

SEQ ID NO: 269737 - RNA, 32 nt, Homo Sapiens
cucucucacgaagcacacggaccuccagaguc

SEQ ID NO: 269738 - RNA, 32 nt, Homo Sapiens
acaggagacccacagaauaaauauguaagguu

SEQ ID NO: 269739 - RNA, 32 nt, Homo Sapiens
uucccgaugccgccgcccggcugcugaucgcc

SEQ ID NO: 269740 - RNA, 32 nt, Homo Sapiens
ggagccgcagccucugguggaguucggucggg

SEQ ID NO: 269741 - RNA, 32 nt, Homo Sapiens
auaaaaucaaacaaaacuaaguugugaaggaa

SEQ ID NO: 269742 - RNA, 32 nt, Homo Sapiens
gacagcuguggcggccgccguuucccgguccc

SEQ ID NO: 269743 - RNA, 32 nt, Homo Sapiens
cauaguucagaaaaaugugcaaaggaaacuau

SEQ ID NO: 269744 - RNA, 32 nt, Homo Sapiens
cuggcccaggggucucuuccccugcccccuca

SEQ ID NO: 269745 - RNA, 32 nt, Homo Sapiens
caccccaguuuaggagauuaucaagcugguug

SEQ ID NO: 269746 - RNA, 32 nt, Homo Sapiens
ggcacagcuggcuggcggcugcccuguccgca

SEQ ID NO: 269747 - RNA, 32 nt, Homo Sapiens
gagcucaggaggaggaccccaggggagaggag

SEQ ID NO: 269748 - RNA, 32 nt, Homo Sapiens
uagucaaaacaauguuuucauaauuuucuauu

SEQ ID NO: 269749 - RNA, 32 nt, Homo Sapiens
cgcaggcccuccauuuugggucgggggaggcc

SEQ ID NO: 269750 - RNA, 32 nt, Homo Sapiens
uucaauauccuguucauacuaguuagagcugg

SEQ ID NO: 269751 - RNA, 32 nt, Homo Sapiens
auuauguucuuugcauuauauugagcaagcag

SEQ ID NO: 269752 - RNA, 32 nt, Homo Sapiens
gaaucucauuuucuucuuucuuccauucccuu

SEQ ID NO: 269753 - RNA, 32 nt, Homo Sapiens
auuuauaucgcuauauaaaaguguuuuauaaa

SEQ ID NO: 269754 - RNA, 32 nt, Homo Sapiens
cggggaccgagacggacgguagccgugccaga

SEQ ID NO: 269755 - RNA, 32 nt, Homo Sapiens
uagugggugugguggcucacaccugcaauccc

SEQ ID NO: 269756 - RNA, 32 nt, Homo Sapiens
aagccuuuugaggagaaaggcuuuuaugcauc

SEQ ID NO: 269757 - RNA, 32 nt, Homo Sapiens
cccgguccggacuccuccuccuccucuucucg

SEQ ID NO: 269758 - RNA, 32 nt, Homo Sapiens
gggaggagcuggggugagccgcggcggccguc

SEQ ID NO: 269759 - RNA, 25 nt, Homo Sapiens
augaggaggccccuaagcaagugcg

SEQ ID NO: 269760 - RNA, 32 nt, Homo Sapiens
cuuucuguguguauuggucagaauagaaucca

SEQ ID NO: 269761 - RNA, 32 nt, Homo Sapiens
cuccuggcagaguucaguggcuucagucuguc

SEQ ID NO: 269762 - RNA, 32 nt, Homo Sapiens
cuagugggcauugcggccuccgcgguggacgu

SEQ ID NO: 269763 - RNA, 32 nt, Homo Sapiens
cacccagcggaugccuauucccgccccccacc

SEQ ID NO: 269764 - RNA, 32 nt, Homo Sapiens
uuugccugcccucuaggguuauacacuuuuua

SEQ ID NO: 269765 - RNA, 32 nt, Homo Sapiens
uauuaacaagaaucugugaaaaccacauuuua

SEQ ID NO: 269766 - RNA, 32 nt, Homo Sapiens
cugcccgccucggccucccaaagugcugagau

SEQ ID NO: 269767 - RNA, 32 nt, Homo Sapiens
acggagguuaggaugcuacuugcugcaaacaa

SEQ ID NO: 269768 - RNA, 29 nt, Homo Sapiens
ggcucugucauuuucagaggcaaagaagu

SEQ ID NO: 269769 - RNA, 32 nt, Homo Sapiens
acaguuucaugguuuuuaauucuuucaaagca

SEQ ID NO: 269770 - RNA, 32 nt, Homo Sapiens
gacugaugcucuucuuuuuucucuuucugucc

SEQ ID NO: 269771 - RNA, 32 nt, Homo Sapiens
augagaaacacuuuuagaauggauuuauuuuu

SEQ ID NO: 269772 - RNA, 32 nt, Homo Sapiens
uuaaaauuauaagcauaggauuuuauauuuug

SEQ ID NO: 269773 - RNA, 32 nt, Homo Sapiens
uuuagcugaaaccagcagaauugaaaacucug

SEQ ID NO: 269774 - RNA, 32 nt, Homo Sapiens
gcaacaggaaaagaacugagggacgugcagau

SEQ ID NO: 269775 - RNA, 32 nt, Homo Sapiens
guacagugacggggaacucaccaccuuuugaa

SEQ ID NO: 269776 - RNA, 32 nt, Homo Sapiens
guauuuacaaaacagugacauuugauucaauu

SEQ ID NO: 269777 - RNA, 32 nt, Homo Sapiens
cuauuuuugguucuagaugcuuugccucuaga

SEQ ID NO: 269778 - RNA, 32 nt, Homo Sapiens
cgucgccccgccgcgccgcgcuccaaccgccu

SEQ ID NO: 269779 - RNA, 32 nt, Homo Sapiens
agcauuggauauaaauaugguguccugcuuuu

SEQ ID NO: 269780 - RNA, 32 nt, Homo Sapiens
ccacgucggcuggcaugagccggcgccccugc

SEQ ID NO: 269781 - RNA, 32 nt, Homo Sapiens
accuuuuaguguccagggcucaggagccaugu

SEQ ID NO: 269782 - RNA, 32 nt, Homo Sapiens
acuugaacuagauugcaugcuuccuccuuugc

SEQ ID NO: 269783 - RNA, 29 nt, Homo Sapiens
cgggcugucucuuuccuguggaaauagaa

SEQ ID NO: 269784 - RNA, 32 nt, Homo Sapiens
aauacggagaauaagaaucuuagagguuguuc

SEQ ID NO: 269785 - RNA, 32 nt, Homo Sapiens
cgucgccgcucccgaagcuuuuccagaugucc

SEQ ID NO: 269786 - RNA, 32 nt, Homo Sapiens
ucuuccugcgggcgaggcgcgcggucugguac

SEQ ID NO: 269787 - RNA, 32 nt, Homo Sapiens
acaacccccacccccaggacugcugcuggagc

SEQ ID NO: 269788 - RNA, 32 nt, Homo Sapiens
uucucucugaugcuccagcauuggggcagggg

SEQ ID NO: 269789 - RNA, 32 nt, Homo Sapiens
auaacagcagcuuuuuaaacugcagaacuuuu

SEQ ID NO: 269790 - RNA, 32 nt, Homo Sapiens
uaaaguguguggaauaauauuuauuucagcau

SEQ ID NO: 269791 - RNA, 32 nt, Homo Sapiens
uucucaauaaacgugagauccuguugagcauc

SEQ ID NO: 269792 - RNA, 32 nt, Homo Sapiens
gcuggggguugccauggauggggacccaaaga

SEQ ID NO: 269793 - RNA, 32 nt, Homo Sapiens
guugcccaccccgccugccccuggacaugaag

SEQ ID NO: 269794 - RNA, 32 nt, Homo Sapiens
ucaggaccgucccacaccuuuuacuugcucag

SEQ ID NO: 269795 - RNA, 32 nt, Homo Sapiens
acgcauuugcuugccacauuaagggaaaaugg

SEQ ID NO: 269796 - RNA, 32 nt, Homo Sapiens
agaaacaauauuuacauagccucaaaguauac

SEQ ID NO: 269797 - RNA, 32 nt, Homo Sapiens
gugggggauauguuuuaagacccccaguuaau

SEQ ID NO: 269798 - RNA, 32 nt, Homo Sapiens
agauaugaguaacaaagaaaagaaauuaguag

SEQ ID NO: 269799 - RNA, 32 nt, Homo Sapiens
auaagauauauaugugcucuuaauuuuaagug

SEQ ID NO: 269800 - RNA, 32 nt, Homo Sapiens
ugacaccaucucucccagcagucuuggggucu

SEQ ID NO: 269801 - RNA, 32 nt, Homo Sapiens
uaucaugaguuaguguuucuuccccaaacuga

SEQ ID NO: 269802 - RNA, 32 nt, Homo Sapiens
gggcccccacuuucuucccaaacucauccuaa

SEQ ID NO: 269803 - RNA, 32 nt, Homo Sapiens
gaggggcagggccgcguucguccgggacccgc

SEQ ID NO: 269804 - RNA, 32 nt, Homo Sapiens
gcgagaucccuccaaaaucaaguggggcgaug

SEQ ID NO: 269805 - RNA, 31 nt, Homo Sapiens
accgcgcugccggccgcagagccgggccaga

SEQ ID NO: 269806 - RNA, 32 nt, Homo Sapiens
gaaagagcacgcccggccccgcccugugcuca

SEQ ID NO: 269807 - RNA, 32 nt, Homo Sapiens
uuuuaggcugggcgcaguggcucacaccugua

SEQ ID NO: 269808 - RNA, 32 nt, Homo Sapiens
gugcagcccugggcaccgccccugcccugccc

SEQ ID NO: 269809 - RNA, 32 nt, Homo Sapiens
agcccugaggcuccgccccagcccucagcccc

SEQ ID NO: 269810 - RNA, 32 nt, Homo Sapiens
cugcucagcccccagagcugucugcagauaug

SEQ ID NO: 269811 - RNA, 32 nt, Homo Sapiens
agggauccaugaugaaugugucauuaguuggc

SEQ ID NO: 269812 - RNA, 32 nt, Homo Sapiens
ggaaccuucagaugauuggacaguggacaguc

SEQ ID NO: 269813 - RNA, 32 nt, Homo Sapiens
ggagcaagcuuaugcgggaaagagggaggggg

SEQ ID NO: 269814 - RNA, 32 nt, Homo Sapiens
cauaggcgaugaaguggagaugucagaacagc

SEQ ID NO: 269815 - RNA, 32 nt, Homo Sapiens
cagagucagauugaaaaguaaaucacaacaua

SEQ ID NO: 269816 - RNA, 32 nt, Homo Sapiens
aguacuuuguauuuaauauauaauauugcaua

SEQ ID NO: 269817 - RNA, 32 nt, Homo Sapiens
gcaggaaguuuggggagagcucggcgauuagc

SEQ ID NO: 269818 - RNA, 32 nt, Homo Sapiens
gcugguggaggaagaagauguucgucagccaa

SEQ ID NO: 269819 - RNA, 32 nt, Homo Sapiens
uacaggcaugcgccaccacgcccagcugauuu

SEQ ID NO: 269820 - RNA, 30 nt, Homo Sapiens
ugaggauggaaggcuuugggggugucggag

SEQ ID NO: 269821 - RNA, 29 nt, Homo Sapiens
aaauaguaaaguuucaaaauauucucuca

SEQ ID NO: 269822 - RNA, 32 nt, Homo Sapiens
caucccaggaccagguuccccuccgugcucuu

SEQ ID NO: 269823 - RNA, 32 nt, Homo Sapiens
cagaaucauaaacgucucuauaguugacaauu

SEQ ID NO: 269824 - RNA, 32 nt, Homo Sapiens
uucugcaucuucuggaucaauucacggaacag

SEQ ID NO: 269825 - RNA, 32 nt, Homo Sapiens
cuuuuuucccuucuucaggucaggggaaaggg

SEQ ID NO: 269826 - RNA, 30 nt, Homo Sapiens
cugaccucaugauccgcccaucuuggccuc

SEQ ID NO: 269827 - RNA, 32 nt, Homo Sapiens
aauuguauuugcaauaaacaacaucaaauuuu

SEQ ID NO: 269828 - RNA, 32 nt, Homo Sapiens
uagaggaaaaggaagaugacgaggccauuggg

SEQ ID NO: 269829 - RNA, 32 nt, Homo Sapiens
gcgccaugggccgccugcacugcacugaggac

SEQ ID NO: 269830 - RNA, 32 nt, Homo Sapiens
uaguggcaugcgccuguauacccagcuacucg

SEQ ID NO: 269831 - RNA, 32 nt, Homo Sapiens
ggccuccgaagccaugcggaacugugagucag

SEQ ID NO: 269832 - RNA, 32 nt, Homo Sapiens
uaguaaaugcaaacaugccaaguauuuuauaa

SEQ ID NO: 269833 - RNA, 32 nt, Homo Sapiens
uccccgcccuccaggcuucucguuccuggaua

SEQ ID NO: 269834 - RNA, 32 nt, Homo Sapiens
gaaacacugcagaagcuaagacauagaauucu

SEQ ID NO: 269835 - RNA, 32 nt, Homo Sapiens
aauuuauuuuugcauggcacuugcaucuguga

SEQ ID NO: 269836 - RNA, 32 nt, Homo Sapiens
cuccuguaaucccagcacuuugggaggccaag

SEQ ID NO: 269837 - RNA, 32 nt, Homo Sapiens
gcaguuuuaagucuuauuuuuacuguuuauau

SEQ ID NO: 269838 - RNA, 32 nt, Homo Sapiens
ugacucuugcaggagccuguccccucaucaca

SEQ ID NO: 269839 - RNA, 32 nt, Homo Sapiens
uguccuuuagggcucuuggagcagccagacca

SEQ ID NO: 269840 - RNA, 32 nt, Homo Sapiens
ucaguucugugagcaaaaccaaggcuggguuu

SEQ ID NO: 269841 - RNA, 32 nt, Homo Sapiens
gcuggguggguaugggggagggggagacucug

SEQ ID NO: 269842 - RNA, 32 nt, Homo Sapiens
cuuuuuaaaaauuuuuugagauacggucuggc

SEQ ID NO: 269843 - RNA, 32 nt, Homo Sapiens
cccccugcacgcugagcuacguccuggcguuu

SEQ ID NO: 269844 - RNA, 32 nt, Homo Sapiens
gucccagcccacuacuggcccuuuccaagaag

SEQ ID NO: 269845 - RNA, 32 nt, Homo Sapiens
aaauccuuuuaaacacagaaauccugaguucu

SEQ ID NO: 269846 - RNA, 32 nt, Homo Sapiens
gacuccgacccggcgcaacauggccgcagccu

SEQ ID NO: 269847 - RNA, 32 nt, Homo Sapiens
gucuucacauucauauuccagauuuauauuuu

SEQ ID NO: 269848 - RNA, 32 nt, Homo Sapiens
ccaacucgguucucauggaggaguggguggag

SEQ ID NO: 269849 - RNA, 32 nt, Homo Sapiens
cgccagcccagcggcccgggcucuggggaaac

SEQ ID NO: 269850 - RNA, 32 nt, Homo Sapiens
cuucaggaaaauaaauaucacaguauuaucug

SEQ ID NO: 269851 - RNA, 29 nt, Homo Sapiens
uugaugucauaugaauccacgcuaugcuu

SEQ ID NO: 269852 - RNA, 32 nt, Homo Sapiens
gauauuuauuuuuauuuuuuuauuaugcacau

SEQ ID NO: 269853 - RNA, 32 nt, Homo Sapiens
aggaccccauucugccuccuucuggggaaaua

SEQ ID NO: 269854 - RNA, 31 nt, Homo Sapiens
ugauagaaauaaacagguuguuggggguaga

SEQ ID NO: 269855 - RNA, 32 nt, Homo Sapiens
guaccuggggaggagugagaaaaggagagcag

SEQ ID NO: 269856 - RNA, 32 nt, Homo Sapiens
uuaaaaacauggguugucacuuaaguuuggag

SEQ ID NO: 269857 - RNA, 32 nt, Homo Sapiens
uaauucuuaauuuuuuuuuuuacucuuuacaa

SEQ ID NO: 269858 - RNA, 32 nt, Homo Sapiens
ggggagggcuugguggggagggggacuuacaa

SEQ ID NO: 269859 - RNA, 32 nt, Homo Sapiens
ucuuuauggcuucggcggcuggcuuaccucua

SEQ ID NO: 269860 - RNA, 32 nt, Homo Sapiens
auaaccagugucaccuacaacauggaauggag

SEQ ID NO: 269861 - RNA, 32 nt, Homo Sapiens
uguagguauaauguauauucccagagaauugu

SEQ ID NO: 269862 - RNA, 32 nt, Homo Sapiens
ccccggcgccgcccauauccccggcugcgcua

SEQ ID NO: 269863 - RNA, 32 nt, Homo Sapiens
acugucccaggucccaggucccggcccggagc

SEQ ID NO: 269864 - RNA, 32 nt, Homo Sapiens
uuucugcauguuugucugugugucugcguugu

SEQ ID NO: 269865 - RNA, 32 nt, Homo Sapiens
acgcagccagcuuuucugggaccuccccucuc

SEQ ID NO: 269866 - RNA, 32 nt, Homo Sapiens
uucaucauuugaaucaauauagauaaauuuag

SEQ ID NO: 269867 - RNA, 32 nt, Homo Sapiens
ugaaagcuucauguauuuuaauuuagauucug

SEQ ID NO: 269868 - RNA, 32 nt, Homo Sapiens
ucugucucuggcugagguuuugucuauuuuac

SEQ ID NO: 269869 - RNA, 32 nt, Homo Sapiens
gcaacuucuguauuaugcacgugaagccuucc

SEQ ID NO: 269870 - RNA, 32 nt, Homo Sapiens
auaacuaaacaaaauacaaaaaucaauauacg

SEQ ID NO: 269871 - RNA, 32 nt, Homo Sapiens
ggagcccugggaggcucuggagcccacuguac

SEQ ID NO: 269872 - RNA, 32 nt, Homo Sapiens
caucugcagaaagccagcuggcaugucaacca

SEQ ID NO: 269873 - RNA, 32 nt, Homo Sapiens
uuuuccaguccucaugcaggguaucagcauug

SEQ ID NO: 269874 - RNA, 32 nt, Homo Sapiens
cugguguuaugaagaacguaaaugcacuguuu

SEQ ID NO: 269875 - RNA, 32 nt, Homo Sapiens
cggggaguccuggugagaccccggugagaugg

SEQ ID NO: 269876 - RNA, 32 nt, Homo Sapiens
uuucuggugucuauaggaaugcaugagagacc

SEQ ID NO: 269877 - RNA, 32 nt, Homo Sapiens
gcuugacugcaguacugcauucacucaacgaa

SEQ ID NO: 269878 - RNA, 32 nt, Homo Sapiens
ucagcagaaaccgaaagagaaagaacggaaac

SEQ ID NO: 269879 - RNA, 32 nt, Homo Sapiens
gcgcgcugguagucgccgguguggcugcaccu

SEQ ID NO: 269880 - RNA, 32 nt, Homo Sapiens
acccgcggcggcgcugacuuccgcgagucgga

SEQ ID NO: 269881 - RNA, 32 nt, Homo Sapiens
cauuucauuaagaucucuaaucuguuuugagu

SEQ ID NO: 269882 - RNA, 32 nt, Homo Sapiens
auuagcaaguuuuuaagaaguauuuaaaaauc

SEQ ID NO: 269883 - RNA, 32 nt, Homo Sapiens
uaauuugugaaugcauauguaugugugguuac

SEQ ID NO: 269884 - RNA, 32 nt, Homo Sapiens
uuugugaacaaaugagacaaggcugcaaauuc

SEQ ID NO: 269885 - RNA, 32 nt, Homo Sapiens
aaacaagccaucuauuuuaaagcuauccaggg

SEQ ID NO: 269886 - RNA, 32 nt, Homo Sapiens
agggauugcccaccccugggcaucaugugugu

SEQ ID NO: 269887 - RNA, 32 nt, Homo Sapiens
gaaacacuaggauucaggaagguaggcaggac

SEQ ID NO: 269888 - RNA, 31 nt, Homo Sapiens
auauauuugugcuuuuuucuuauguaggaag

SEQ ID NO: 269889 - RNA, 32 nt, Homo Sapiens
aagucucuucccuuuccaagccgcuuccgaag

SEQ ID NO: 269890 - RNA, 32 nt, Homo Sapiens
auuguaaaauauauuuuuacuuuuuagucuuc

SEQ ID NO: 269891 - RNA, 31 nt, Homo Sapiens
agcaauaaaaagacaugaagcauugacacau

SEQ ID NO: 269892 - RNA, 32 nt, Homo Sapiens
agcgauggacaaaggcaggcugcccggcuggc

SEQ ID NO: 269893 - RNA, 32 nt, Homo Sapiens
uugggcgcgggaagaaaaggagaggaggaagc

SEQ ID NO: 269894 - RNA, 32 nt, Homo Sapiens
uccagagccaucucugagacuccguacuacug

SEQ ID NO: 269895 - RNA, 32 nt, Homo Sapiens
uaaauacauggccccugaaaucuugaugagaa

SEQ ID NO: 269896 - RNA, 32 nt, Homo Sapiens
ugaaaauauaugacuuugaauaaaauaaagcu

SEQ ID NO: 269897 - RNA, 32 nt, Homo Sapiens
ggugaaaguggaagagcuagaugagaaguggg

SEQ ID NO: 269898 - RNA, 32 nt, Homo Sapiens
aacuaggggguuggagggggcugguggagauu

SEQ ID NO: 269899 - RNA, 32 nt, Homo Sapiens
cauagucauaagcaaugauacaugaaaccaau

SEQ ID NO: 269900 - RNA, 32 nt, Homo Sapiens
gcagccgcucagcaccggggccuuccccgcag

SEQ ID NO: 269901 - RNA, 32 nt, Homo Sapiens
uuugguuaguuuagaagaaaagaaagcucuau

SEQ ID NO: 269902 - RNA, 32 nt, Homo Sapiens
aacauuugcuuuauuuuuauucacagagaaag

SEQ ID NO: 269903 - RNA, 32 nt, Homo Sapiens
ccccuucugaugcauggaggauggugugagcu

SEQ ID NO: 269904 - RNA, 32 nt, Homo Sapiens
ucucuuuuugugugucuacugugauuuaagua

SEQ ID NO: 269905 - RNA, 32 nt, Homo Sapiens
ggccaccuguccaccgugugggccgugcugug

SEQ ID NO: 269906 - RNA, 32 nt, Homo Sapiens
cacugccaacugggauuggguucgaacagcuu

SEQ ID NO: 269907 - RNA, 32 nt, Homo Sapiens
auuuggguucccucugggcccgggccaccggg

SEQ ID NO: 269908 - RNA, 32 nt, Homo Sapiens
ggaaagggaaauguagauacuuuauuaauuca

SEQ ID NO: 269909 - RNA, 32 nt, Homo Sapiens
ccugcaggcuggccauggcgcuucacguuccc

SEQ ID NO: 269910 - RNA, 32 nt, Homo Sapiens
uuuguacccauuguagggaaggggacacugag

SEQ ID NO: 269911 - RNA, 32 nt, Homo Sapiens
guuauuguaaaaugauuauuugccaugucaug

SEQ ID NO: 269912 - RNA, 32 nt, Homo Sapiens
auugauccuccuccucagcuccuugcagaugu

SEQ ID NO: 269913 - RNA, 32 nt, Homo Sapiens
uagcauggaaucccucugaggaccuggauacu

SEQ ID NO: 269914 - RNA, 32 nt, Homo Sapiens
agcacuagugaaaauuuuuuuaauuuaguaca

SEQ ID NO: 269915 - RNA, 27 nt, Homo Sapiens
gaccuguccuucugugccucacaguaa

SEQ ID NO: 269916 - RNA, 32 nt, Homo Sapiens
cuucacuggcccaucccuccccucuagugcug

SEQ ID NO: 269917 - RNA, 32 nt, Homo Sapiens
ggaaucauuguccagagcugcuuccccgucac

SEQ ID NO: 269918 - RNA, 32 nt, Homo Sapiens
aagagagaaaggaaacacacucuuucauugcu

SEQ ID NO: 269919 - RNA, 32 nt, Homo Sapiens
cuguaggauuuaauauuuuuuaucuuuacagg

SEQ ID NO: 269920 - RNA, 32 nt, Homo Sapiens
ucccccaggucucagcccccaaggcugccccc

SEQ ID NO: 269921 - RNA, 32 nt, Homo Sapiens
ggaaauggaaaagcaggcacauuaucauucuc

SEQ ID NO: 269922 - RNA, 32 nt, Homo Sapiens
ucuuuugaacaaacagacaaauuagcuaguag

SEQ ID NO: 269923 - RNA, 32 nt, Homo Sapiens
uauugcauucuauuuuauuuuauagauacuaa

SEQ ID NO: 269924 - RNA, 32 nt, Homo Sapiens
aagcauggaagcuagugauucugaaugauaua

SEQ ID NO: 269925 - RNA, 32 nt, Homo Sapiens
aguaaaaaagagaauuguagauaauacugucu

SEQ ID NO: 269926 - RNA, 32 nt, Homo Sapiens
gucccccuuucuggccccuuggagcccacaca

SEQ ID NO: 269927 - RNA, 32 nt, Homo Sapiens
ggacggcgucgggaaccauaccauggcccgga

SEQ ID NO: 269928 - RNA, 32 nt, Homo Sapiens
ugucagcaucaagccccacaguucuuaauaca

SEQ ID NO: 269929 - RNA, 32 nt, Homo Sapiens
ggcuaaugucauucuuccaguagaaucaagca

SEQ ID NO: 269930 - RNA, 32 nt, Homo Sapiens
auauauauauauauuuuuuuuuuuuuuuuuac

SEQ ID NO: 269931 - RNA, 32 nt, Homo Sapiens
ugcuccuccuuccaccucuccgauuccaccuc

SEQ ID NO: 269932 - RNA, 32 nt, Homo Sapiens
gagugcccugcgccuggcaugugagacagugc

SEQ ID NO: 269933 - RNA, 32 nt, Homo Sapiens
gccaguugaccaaucauagaaaguauuacuuu

SEQ ID NO: 269934 - RNA, 32 nt, Homo Sapiens
auucuggauacuuaucaugacuucaagcaucc

SEQ ID NO: 269935 - RNA, 32 nt, Homo Sapiens
ggagaggaagcagugcauggccagcacugcuc

SEQ ID NO: 269936 - RNA, 32 nt, Homo Sapiens
auacaucugccgaguucucugaucagugacau

SEQ ID NO: 269937 - RNA, 32 nt, Homo Sapiens
guaccuuuuugucaggacaauuaggauuguaa

SEQ ID NO: 269938 - RNA, 32 nt, Homo Sapiens
ccaaugggcuggggggccccccugagcgccug

SEQ ID NO: 269939 - RNA, 32 nt, Homo Sapiens
ccagaauuucuuucuuuuuuuuguuuuuguuu

SEQ ID NO: 269940 - RNA, 32 nt, Homo Sapiens
cuuauaaacaacacggcuguauuguuaaucgg

SEQ ID NO: 269941 - RNA, 32 nt, Homo Sapiens
auggaaaauauuuagucugcacuuguauaaau

SEQ ID NO: 269942 - RNA, 32 nt, Homo Sapiens
ugcaucccaucccaaagacaguccacagcagg

SEQ ID NO: 269943 - RNA, 32 nt, Homo Sapiens
agagaugagguuucgccauguuuuccaggcug

SEQ ID NO: 269944 - RNA, 32 nt, Homo Sapiens
caggaauugcccucaagaacucugcuucuugc

SEQ ID NO: 269945 - RNA, 32 nt, Homo Sapiens
uugugaaucuguagauuuuauuuuuucagucu

SEQ ID NO: 269946 - RNA, 32 nt, Homo Sapiens
ggggagguggguccaagucuccccucaggaag

SEQ ID NO: 269947 - RNA, 32 nt, Homo Sapiens
uaacagugauaauuuuaacuuuuaagugcuau

SEQ ID NO: 269948 - RNA, 32 nt, Homo Sapiens
cagugcagaugaccuggcauguggaguuacag

SEQ ID NO: 269949 - RNA, 32 nt, Homo Sapiens
gacuuaggucuccuccucccgaacucuaaacc

SEQ ID NO: 269950 - RNA, 32 nt, Homo Sapiens
uccagaaggggagcuuuuucagaaacagggca

SEQ ID NO: 269951 - RNA, 32 nt, Homo Sapiens
gguggaagacagcaauggagaccuguccucau

SEQ ID NO: 269952 - RNA, 32 nt, Homo Sapiens
aacaacaacagaaagcuguguuugucuuuuuu

SEQ ID NO: 269953 - RNA, 32 nt, Homo Sapiens
ggucuuuuuuuuguuucuuucuuaaagccacu

SEQ ID NO: 269954 - RNA, 32 nt, Homo Sapiens
aagcaacucuucugccucagcaucccaaguag

SEQ ID NO: 269955 - RNA, 32 nt, Homo Sapiens
acgcgggccggggccaggggucucugacgggg

SEQ ID NO: 269956 - RNA, 32 nt, Homo Sapiens
aaggcucgcccucggcgcucugucugccucug

SEQ ID NO: 269957 - RNA, 32 nt, Homo Sapiens
uucugggcggggggugagugggggaagaccca

SEQ ID NO: 269958 - RNA, 32 nt, Homo Sapiens
uagacaauuuuuuuuucuuguucacaaaaaaa

SEQ ID NO: 269959 - RNA, 32 nt, Homo Sapiens
agaguggggugcagaggacgacccugcaaagg

SEQ ID NO: 269960 - RNA, 32 nt, Homo Sapiens
uguauaguucccucccacacugaauaggguug

SEQ ID NO: 269961 - RNA, 32 nt, Homo Sapiens
accuugacguugcagugcaguuucacagaucg

SEQ ID NO: 269962 - RNA, 32 nt, Homo Sapiens
cgucuggacuuccaccuccagugccagaaacu

SEQ ID NO: 269963 - RNA, 32 nt, Homo Sapiens
cgccuauuaucuuagcacuuugggaggcugag

SEQ ID NO: 269964 - RNA, 32 nt, Homo Sapiens
uggagagcccugggaccgcuacaccacucugg

SEQ ID NO: 269965 - RNA, 32 nt, Homo Sapiens
guaccuggaaaauaaaccucuugagaaaaaga

SEQ ID NO: 269966 - RNA, 32 nt, Homo Sapiens
ccgcccuuuccacggugacgccgucugcacua

SEQ ID NO: 269967 - RNA, 32 nt, Homo Sapiens
accggaaggcagagcagcgucugccugacggg

SEQ ID NO: 269968 - RNA, 32 nt, Homo Sapiens
cucacugugaccuccgccucucggguucaagu

SEQ ID NO: 269969 - RNA, 32 nt, Homo Sapiens
ccacugagcauuucuuuuuuuuuuuucuugag

SEQ ID NO: 269970 - RNA, 32 nt, Homo Sapiens
gaguggcuagagaggucggagguaaguggcua

SEQ ID NO: 269971 - RNA, 32 nt, Homo Sapiens
gugaagaaggugacugucuuagcuuuacugua

SEQ ID NO: 269972 - RNA, 32 nt, Homo Sapiens
uagaccacccugccccaccugccccuuccccc

SEQ ID NO: 269973 - RNA, 32 nt, Homo Sapiens
cgccuccgccggcuaccauguccgcccaggcg

SEQ ID NO: 269974 - RNA, 32 nt, Homo Sapiens
aauaggaaccucugaugucauucuucaacguu

SEQ ID NO: 269975 - RNA, 32 nt, Homo Sapiens
guauuuuuaggucuuuaauacaguguuucuac

SEQ ID NO: 269976 - RNA, 32 nt, Homo Sapiens
ggagguucaacaugaaaaugauuugaggccca

SEQ ID NO: 269977 - RNA, 32 nt, Homo Sapiens
guucaaagaugaaagcaccauguaucaggauu

SEQ ID NO: 269978 - RNA, 32 nt, Homo Sapiens
uuagaaagggaagauguuaagauauguggccu

SEQ ID NO: 269979 - RNA, 32 nt, Homo Sapiens
cuuacaaaugucaugacuguggcaaggucuuc

SEQ ID NO: 269980 - RNA, 32 nt, Homo Sapiens
cugugccuguugggcuguccacagcuacucaa

SEQ ID NO: 269981 - RNA, 32 nt, Homo Sapiens
ggcuggucucgaacuccugaccucaagugauc

SEQ ID NO: 269982 - RNA, 32 nt, Homo Sapiens
acucuaaaauguuuagaacccuguuaucugag

SEQ ID NO: 269983 - RNA, 32 nt, Homo Sapiens
gggcaguccccauugguggaccaggugcucug

SEQ ID NO: 269984 - RNA, 32 nt, Homo Sapiens
uggcguuggcggcgcugcgcgcgggagggcag

SEQ ID NO: 269985 - RNA, 32 nt, Homo Sapiens
aagugaagaguuucagagcaucagauugagug

SEQ ID NO: 269986 - RNA, 32 nt, Homo Sapiens
uuuuuagaaaagacacaacuuuaauuccuguc

SEQ ID NO: 269987 - RNA, 32 nt, Homo Sapiens
ucguuuuauuuuuuccuaccaaaguguugccu

SEQ ID NO: 269988 - RNA, 32 nt, Homo Sapiens
agagaaacagagcaccaaguccccugcucugu

SEQ ID NO: 269989 - RNA, 32 nt, Homo Sapiens
uggguguccacccacaccuuguguuccucaug

SEQ ID NO: 269990 - RNA, 32 nt, Homo Sapiens
aagccaagauucaauggaauuuuaguagggca

SEQ ID NO: 269991 - RNA, 32 nt, Homo Sapiens
ggaugagugucuuuuuguagguuauugacacu

SEQ ID NO: 269992 - RNA, 32 nt, Homo Sapiens
ugugccacuuugcaucccacgccggaggaggc

SEQ ID NO: 269993 - RNA, 32 nt, Homo Sapiens
gaagagacagagaucagagggagacacagaaa

SEQ ID NO: 269994 - RNA, 31 nt, Homo Sapiens
ccccucgccucugccaggccccgcgccccua

SEQ ID NO: 269995 - RNA, 32 nt, Homo Sapiens
cacagaggucccuucugccaccuaccaugcac

SEQ ID NO: 269996 - RNA, 32 nt, Homo Sapiens
ucucuccacagugugagugcacgugugaagcc

SEQ ID NO: 269997 - RNA, 32 nt, Homo Sapiens
caauauuaauaaauguaugccaaacaacaaua

SEQ ID NO: 269998 - RNA, 32 nt, Homo Sapiens
ugacagcccuccccuacaauccuugggcagag

SEQ ID NO: 269999 - RNA, 32 nt, Homo Sapiens
gugcugcacucacuucugcccccuggggaguu

SEQ ID NO: 270000 - RNA, 32 nt, Homo Sapiens
gugucgcccugagcggagcgccgcccgcggga

SEQ ID NO: 270001 - RNA, 32 nt, Homo Sapiens
uaaguuggcuccugggcuaggugaugaagaua

SEQ ID NO: 270002 - RNA, 32 nt, Homo Sapiens
ucaacuuccugauuucacaaugaugguaggga

SEQ ID NO: 270003 - RNA, 32 nt, Homo Sapiens
auuaugauaaacucagaaaauaaacacagaga

SEQ ID NO: 270004 - RNA, 32 nt, Homo Sapiens
uugauauauucucauuaaaucuguaaaucacc

SEQ ID NO: 270005 - RNA, 32 nt, Homo Sapiens
guccauuguucauuuuaauucacauuucuuau

SEQ ID NO: 270006 - RNA, 32 nt, Homo Sapiens
acaugaaaacuacuuugaaauuccuugauuug

SEQ ID NO: 270007 - RNA, 32 nt, Homo Sapiens
gacuaagaugaccccauaggagaauaagaccu

SEQ ID NO: 270008 - RNA, 32 nt, Homo Sapiens
gugacgcgggccccgcgccccgcgcccaccau

SEQ ID NO: 270009 - RNA, 32 nt, Homo Sapiens
cacuccgcggcccgccaggacccggccccggu

SEQ ID NO: 270010 - RNA, 32 nt, Homo Sapiens
ucauuuugcccauuucuaucagugaaaugauu

SEQ ID NO: 270011 - RNA, 32 nt, Homo Sapiens
ucauagaagauauuuuuguacaaauuuuacau

SEQ ID NO: 270012 - RNA, 32 nt, Homo Sapiens
caggggaauuuaaugaggcgacaugcuagaau

SEQ ID NO: 270013 - RNA, 31 nt, Homo Sapiens
gaaagccucaaugaaauggagcuggcucacu

SEQ ID NO: 270014 - RNA, 32 nt, Homo Sapiens
cuuggagcucaccuuggaacacugccgucgcu

SEQ ID NO: 270015 - RNA, 32 nt, Homo Sapiens
uuaaagccgagcucaguuaccauagggacagg

SEQ ID NO: 270016 - RNA, 32 nt, Homo Sapiens
ugauagcaacuuucccaggggcaugauguggc

SEQ ID NO: 270017 - RNA, 32 nt, Homo Sapiens
cauggacacgcucucggcccaggccgcgaaac

SEQ ID NO: 270018 - RNA, 32 nt, Homo Sapiens
auacagugccuugcucggggcccaccaccccc

SEQ ID NO: 270019 - RNA, 32 nt, Homo Sapiens
agucaccccacuuuaacuuucuaccaggaccc

SEQ ID NO: 270020 - RNA, 32 nt, Homo Sapiens
auauaccuucaagcaacccuuuggauuaugcc

SEQ ID NO: 270021 - RNA, 32 nt, Homo Sapiens
cggggcggcuccgacgcggguccaagggcagc

SEQ ID NO: 270022 - RNA, 32 nt, Homo Sapiens
acaucacugcacugcugacgccgcccuuguga

SEQ ID NO: 270023 - RNA, 32 nt, Homo Sapiens
cccugguggagguggacgacaugaugaucaug

SEQ ID NO: 270024 - RNA, 32 nt, Homo Sapiens
ggaaugugaggaagaaagaaaggcagggcauu

SEQ ID NO: 270025 - RNA, 32 nt, Homo Sapiens
gcggcgaacaggaggagaaggaggucgcgcgg

SEQ ID NO: 270026 - RNA, 32 nt, Homo Sapiens
cgaagcacaagagcuugaugugugucgcagug

SEQ ID NO: 270027 - RNA, 32 nt, Homo Sapiens
aacauuaaaaugaaagaugcaugaugaaaauc

SEQ ID NO: 270028 - RNA, 32 nt, Homo Sapiens
ccgggcgagcaggccgcgucgcgcucaccaug

SEQ ID NO: 270029 - RNA, 32 nt, Homo Sapiens
gucaaaugucauuguguaugcaugcuuuauaa

SEQ ID NO: 270030 - RNA, 32 nt, Homo Sapiens
aggaaaagaaugccucagccagaugggaauac

SEQ ID NO: 270031 - RNA, 32 nt, Homo Sapiens
aggggcagggcgcugaccugcugcugagcugg

SEQ ID NO: 270032 - RNA, 32 nt, Homo Sapiens
ccgcuggcgagggacaggcugggccuggcaga

SEQ ID NO: 270033 - RNA, 32 nt, Homo Sapiens
guugggguuggagcagcggcgagggggccccu

SEQ ID NO: 270034 - RNA, 32 nt, Homo Sapiens
aggaggaggaggaggacaugggguuugauuuu

SEQ ID NO: 270035 - RNA, 32 nt, Homo Sapiens
agaacccuuuaccuguauuccuggacaaggcc

SEQ ID NO: 270036 - RNA, 32 nt, Homo Sapiens
cucgcugugcccucggagccugccugaaucuc

SEQ ID NO: 270037 - RNA, 32 nt, Homo Sapiens
guauuuugugggacaaagaaaaaaggacucca

SEQ ID NO: 270038 - RNA, 32 nt, Homo Sapiens
gcccccgagaucuggagcccagggacuuucuu

SEQ ID NO: 270039 - RNA, 32 nt, Homo Sapiens
acaauuuuauggauugguuuuaauuuuuauga

SEQ ID NO: 270040 - RNA, 32 nt, Homo Sapiens
gaccuuuucuuuucuuuuuuccuucuuuuuuu

SEQ ID NO: 270041 - RNA, 32 nt, Homo Sapiens
agaggauuguuucuaauaacaacaucaauauu

SEQ ID NO: 270042 - RNA, 32 nt, Homo Sapiens
gucauuaaugguauuucuuuuuuacacucuac

SEQ ID NO: 270043 - RNA, 32 nt, Homo Sapiens
uuauaaagaaaagaggcuuaauugacucacag

SEQ ID NO: 270044 - RNA, 32 nt, Homo Sapiens
gaaggaggaaaagaagcaguuccugauguuac

SEQ ID NO: 270045 - RNA, 32 nt, Homo Sapiens
uccucugcccaaacaaggaccaaaaaagacaa

SEQ ID NO: 270046 - RNA, 32 nt, Homo Sapiens
gcggauaaaaauuggacucgaauaaaacccuu

SEQ ID NO: 270047 - RNA, 28 nt, Homo Sapiens
aaaugccaucaauaaaaaauuaugacau

SEQ ID NO: 270048 - RNA, 29 nt, Homo Sapiens
acauguauacguauguacgugucuguagg

SEQ ID NO: 270049 - RNA, 32 nt, Homo Sapiens
gcucuuuuguugcauuuuauuguuuuuccuac

SEQ ID NO: 270050 - RNA, 32 nt, Homo Sapiens
uuucauucaaccaaguaaacugguagagucau

SEQ ID NO: 270051 - RNA, 32 nt, Homo Sapiens
caggacaaggaccuuggagucacagagguucu

SEQ ID NO: 270052 - RNA, 32 nt, Homo Sapiens
uguuugugacaaaaguuuuuaauaauaguuuu

SEQ ID NO: 270053 - RNA, 32 nt, Homo Sapiens
ggacgagugcagcuuccacaucuucuaccagc

SEQ ID NO: 270054 - RNA, 32 nt, Homo Sapiens
ccaaugugcucagaagaaugggcuuacauuuc

SEQ ID NO: 270055 - RNA, 30 nt, Homo Sapiens
uagcuaugacggcgcgcgggacuccgagcc

SEQ ID NO: 270056 - RNA, 32 nt, Homo Sapiens
ggggccgcuccaucgcgccuuccuccugcgcc

SEQ ID NO: 270057 - RNA, 32 nt, Homo Sapiens
agcauuuugcaaacaaaaaaaaaaaaaaaaaa

SEQ ID NO: 270058 - RNA, 32 nt, Homo Sapiens
cccggcucgaccauccgccugccgcccggacg

SEQ ID NO: 270059 - RNA, 30 nt, Homo Sapiens
ccuggugucauugcugcagccuccagugcc

SEQ ID NO: 270060 - RNA, 32 nt, Homo Sapiens
uguucgggcucuugccguccccgcacccgcac

SEQ ID NO: 270061 - RNA, 32 nt, Homo Sapiens
uugccauccgcccucacccccagcacacgcgc

SEQ ID NO: 270062 - RNA, 32 nt, Homo Sapiens
cugcagccuugacuauuaaaucucaaagggaa

SEQ ID NO: 270063 - RNA, 32 nt, Homo Sapiens
uuuccccuuuuugcaaaaaaccacuggccaaa

SEQ ID NO: 270064 - RNA, 32 nt, Homo Sapiens
uaccgcaagaacgccacgcgggacgccacggc

SEQ ID NO: 270065 - RNA, 32 nt, Homo Sapiens
uagaaaagaagauggcccagguccugcacgug

SEQ ID NO: 270066 - RNA, 32 nt, Homo Sapiens
cccagagccugagccacugcgccccgccagac

SEQ ID NO: 270067 - RNA, 32 nt, Homo Sapiens
agcccuguucuuccucucccacugaauucuaa

SEQ ID NO: 270068 - RNA, 32 nt, Homo Sapiens
uggugucauuuagaagacaaaacaugagauug

SEQ ID NO: 270069 - RNA, 29 nt, Homo Sapiens
gcauauauauguauauuuaccaagauuuu

SEQ ID NO: 270070 - RNA, 32 nt, Homo Sapiens
uugugauuugcaaguauuuucuuccaguccuu

SEQ ID NO: 270071 - RNA, 32 nt, Homo Sapiens
guugggagaggcugucuugggggcuagcuggu

SEQ ID NO: 270072 - RNA, 32 nt, Homo Sapiens
ucuaugcuaggaagcugagauauuuugguauu

SEQ ID NO: 270073 - RNA, 32 nt, Homo Sapiens
ugcuauuuauuacuaauauuauugaaugccuu

SEQ ID NO: 270074 - RNA, 32 nt, Homo Sapiens
uuauuaauuuuuuuuuuuuuuaaguagagaug

SEQ ID NO: 270075 - RNA, 32 nt, Homo Sapiens
uucuauaguuuaaagcagcuugugaaauuaaa

SEQ ID NO: 270076 - RNA, 32 nt, Homo Sapiens
cagcgggggaggaagagaagggagguagcugg

SEQ ID NO: 270077 - RNA, 32 nt, Homo Sapiens
uuaaaucaaaaauuggauaauuuguaauauuu

SEQ ID NO: 270078 - RNA, 32 nt, Homo Sapiens
agauauugagaaaaaauuugaaauuuuuacua

SEQ ID NO: 270079 - RNA, 32 nt, Homo Sapiens
guguaaaggcugucuuuuuuuuuuuuuuuaaa

SEQ ID NO: 270080 - RNA, 32 nt, Homo Sapiens
gaaauggaauuggcaaugugggaaauaagaaa

SEQ ID NO: 270081 - RNA, 28 nt, Homo Sapiens
uguauauuaaagagacauuugaacccua

SEQ ID NO: 270082 - RNA, 32 nt, Homo Sapiens
ggccccauauuugccccuccccaucacagucc

SEQ ID NO: 270083 - RNA, 31 nt, Homo Sapiens
cucccuuugugcuugggauuacaguugugag

SEQ ID NO: 270084 - RNA, 32 nt, Homo Sapiens
aagugcagugguacaaucuuggcucacugcaa

SEQ ID NO: 270085 - RNA, 32 nt, Homo Sapiens
gucuucguggccauccugcagaugagcaccgu

SEQ ID NO: 270086 - RNA, 32 nt, Homo Sapiens
agacccgccccgacggacggugcaggcgaaga

SEQ ID NO: 270087 - RNA, 32 nt, Homo Sapiens
gugaggcccuggggaggcagggguuggugccc

SEQ ID NO: 270088 - RNA, 32 nt, Homo Sapiens
acucuagugaagugguuugagcacuaaccuug

SEQ ID NO: 270089 - RNA, 32 nt, Homo Sapiens
ccuucugcacugacuuccagaucaugguucuc

SEQ ID NO: 270090 - RNA, 32 nt, Homo Sapiens
cgacacagcccgcgcguccccgcggccggugg

SEQ ID NO: 270091 - RNA, 32 nt, Homo Sapiens
auacuuuuuuaaaaggcagagcauucuuuuuu

SEQ ID NO: 270092 - RNA, 32 nt, Homo Sapiens
gugaaagcccguaucugucuccaggugaaugu

SEQ ID NO: 270093 - RNA, 32 nt, Homo Sapiens
ucauaugagguccuaaugaaguacuacaguuu

SEQ ID NO: 270094 - RNA, 32 nt, Homo Sapiens
caguacuccccuccccccaguuguucuuuauu

SEQ ID NO: 270095 - RNA, 32 nt, Homo Sapiens
cauuauugaucacaguaugaaguaaaacuauu

SEQ ID NO: 270096 - RNA, 32 nt, Homo Sapiens
uaucugagcuucaagggagacaucucagggca

SEQ ID NO: 270097 - RNA, 32 nt, Homo Sapiens
ggcucagugguuugguguucccucgucugcac

SEQ ID NO: 270098 - RNA, 32 nt, Homo Sapiens
ugcaaccuuguacuuuacaaucaugccuacau

SEQ ID NO: 270099 - RNA, 32 nt, Homo Sapiens
cgccgcugcuggcgccgcaggcuggcccccaa

SEQ ID NO: 270100 - RNA, 32 nt, Homo Sapiens
gauucagagggguauacaguguugucagcaga

SEQ ID NO: 270101 - RNA, 32 nt, Homo Sapiens
gcucucuuuuuaacuuucucugugauaaggaa

SEQ ID NO: 270102 - RNA, 32 nt, Homo Sapiens
uuuuuuauugcuaugaacuuuagcucaacugu

SEQ ID NO: 270103 - RNA, 32 nt, Homo Sapiens
gacgcucugugccuucggaggucuuucugccu

SEQ ID NO: 270104 - RNA, 28 nt, Homo Sapiens
gcugcgcggcggccgugauggcugguga

SEQ ID NO: 270105 - RNA, 32 nt, Homo Sapiens
cccaagugccucccucccuccuccucuuuacu

SEQ ID NO: 270106 - RNA, 32 nt, Homo Sapiens
aauaaauauaucuauauagaauagacauaucc

SEQ ID NO: 270107 - RNA, 32 nt, Homo Sapiens
uguaaauagaucauggaaauaaaauuacuuau

SEQ ID NO: 270108 - RNA, 32 nt, Homo Sapiens
aggugacccagcucugugucauuuggagccca

SEQ ID NO: 270109 - RNA, 32 nt, Homo Sapiens
aucauauucuaaaaguaauaaauuccaauaca

SEQ ID NO: 270110 - RNA, 32 nt, Homo Sapiens
augaagguaaaagcucuuucuugaauaauguu

SEQ ID NO: 270111 - RNA, 32 nt, Homo Sapiens
cauggaagucaguguuugugggaaagccagga

SEQ ID NO: 270112 - RNA, 32 nt, Homo Sapiens
guacuggaugcaaagcuagaaaauauugcaau

SEQ ID NO: 270113 - RNA, 32 nt, Homo Sapiens
ugguuaauugaaauagucaauuuuaaaguuuc

SEQ ID NO: 270114 - RNA, 27 nt, Homo Sapiens
aagcccucacuuuucagccccgaggau

SEQ ID NO: 270115 - RNA, 32 nt, Homo Sapiens
gaauucagaaaagagccgguggaaaacaugga

SEQ ID NO: 270116 - RNA, 32 nt, Homo Sapiens
aagcucugcccuuguuauccugccacccgcag

SEQ ID NO: 270117 - RNA, 32 nt, Homo Sapiens
agcugcggagcaugucgaccccggcccggagg

SEQ ID NO: 270118 - RNA, 32 nt, Homo Sapiens
cuucagcagcugagaaaugaacacgaauccau

SEQ ID NO: 270119 - RNA, 32 nt, Homo Sapiens
ccaggugauaccuccgccggugacccaggggc

SEQ ID NO: 270120 - RNA, 32 nt, Homo Sapiens
augucgcuguugaucugacagccacaucuaac

SEQ ID NO: 270121 - RNA, 32 nt, Homo Sapiens
aggaugccugugauugguugguccuccaugau

SEQ ID NO: 270122 - RNA, 32 nt, Homo Sapiens
gacccuagcuggaaagcgccggaggcggagga

SEQ ID NO: 270123 - RNA, 29 nt, Homo Sapiens
ggacauggaguaugaaagacguggugguc

SEQ ID NO: 270124 - RNA, 32 nt, Homo Sapiens
uacauuggauggccuuauuaccucucaaucau

SEQ ID NO: 270125 - RNA, 32 nt, Homo Sapiens
caucgauugggguuguuuugaacuaauggguc

SEQ ID NO: 270126 - RNA, 32 nt, Homo Sapiens
acuaccaacuguaaauugagauuuaauuccca

SEQ ID NO: 270127 - RNA, 32 nt, Homo Sapiens
augauucucuuccagcgcugcuccucaagggu

SEQ ID NO: 270128 - RNA, 32 nt, Homo Sapiens
ucuuuggggauaggaagagaaacauaacuacu

SEQ ID NO: 270129 - RNA, 32 nt, Homo Sapiens
augggaugaagaugaugauauuaaauccagag

SEQ ID NO: 270130 - RNA, 32 nt, Homo Sapiens
gggaaacuagucuuccuacacugaaacacaga

SEQ ID NO: 270131 - RNA, 32 nt, Homo Sapiens
ugguucacagaaaacagcaaauauccccagcc

SEQ ID NO: 270132 - RNA, 32 nt, Homo Sapiens
aaaauguaaaggggguggggucaggcucagug

SEQ ID NO: 270133 - RNA, 32 nt, Homo Sapiens
caguuagcuucaaacaaaaacgaaaguuagac

SEQ ID NO: 270134 - RNA, 30 nt, Homo Sapiens
auacaagucugaguggcagaagcuucaagu

SEQ ID NO: 270135 - RNA, 32 nt, Homo Sapiens
guuucuuugcaccucuuuucaaguccuuacau

SEQ ID NO: 270136 - RNA, 32 nt, Homo Sapiens
guuugccguuaguuccccuccccuccccuccc

SEQ ID NO: 270137 - RNA, 32 nt, Homo Sapiens
cauguggguggucacgggagggugugagucag

SEQ ID NO: 270138 - RNA, 32 nt, Homo Sapiens
gaacaugaacugaguucuucaacuacagguug

SEQ ID NO: 270139 - RNA, 32 nt, Homo Sapiens
aaguuuggaauucauggguucugcggcacaag

SEQ ID NO: 270140 - RNA, 32 nt, Homo Sapiens
aagcauuugacaaagacuugcuugucuugggc

SEQ ID NO: 270141 - RNA, 32 nt, Homo Sapiens
cuugccugcacccaccaugaggcauggagcag

SEQ ID NO: 270142 - RNA, 32 nt, Homo Sapiens
gaccaaauauuucaaaugagcuuauaggcagc

SEQ ID NO: 270143 - RNA, 32 nt, Homo Sapiens
cgcugauaaugggaugaggagauacagacccu

SEQ ID NO: 270144 - RNA, 32 nt, Homo Sapiens
cauccuccgagaagauacaaucucaagggugg

SEQ ID NO: 270145 - RNA, 32 nt, Homo Sapiens
gaccuguaggucaggaccaucagagaggcaag

SEQ ID NO: 270146 - RNA, 32 nt, Homo Sapiens
ugcccaucaguuuccuugggugacuacagcgu

SEQ ID NO: 270147 - RNA, 32 nt, Homo Sapiens
cuggcauagcagccgccuccggcgcgggccga

SEQ ID NO: 270148 - RNA, 28 nt, Homo Sapiens
aaagcagcauauuaaaugacuccaccug

SEQ ID NO: 270149 - RNA, 32 nt, Homo Sapiens
ucucuuugacauuuguacugaagugauuugau

SEQ ID NO: 270150 - RNA, 32 nt, Homo Sapiens
uucugcuacuaaaauguucucauccuuucucc

SEQ ID NO: 270151 - RNA, 31 nt, Homo Sapiens
ugucugauggccgcuuucucggucggcaccg

SEQ ID NO: 270152 - RNA, 32 nt, Homo Sapiens
auugggacaaagacauaaauauuagaauggag

SEQ ID NO: 270153 - RNA, 32 nt, Homo Sapiens
aguuaugacuauuguggccucuguggagauga

SEQ ID NO: 270154 - RNA, 32 nt, Homo Sapiens
auccgccggccgcggaccggggcugccucgga

SEQ ID NO: 270155 - RNA, 30 nt, Homo Sapiens
acuccugcccacuugggggaaaccuuauac

SEQ ID NO: 270156 - RNA, 32 nt, Homo Sapiens
ccagagccuugccccccucccccagcccccac

SEQ ID NO: 270157 - RNA, 32 nt, Homo Sapiens
ucugaagcuuacaauugaccuauacauugcau

SEQ ID NO: 270158 - RNA, 32 nt, Homo Sapiens
cugaaggugaccaagcuuccaaagcucguccc

SEQ ID NO: 270159 - RNA, 32 nt, Homo Sapiens
gcccagccacgggcucucagggugcuggggca

SEQ ID NO: 270160 - RNA, 32 nt, Homo Sapiens
agaagguagcagacagacagacggaucuaacc

SEQ ID NO: 270161 - RNA, 32 nt, Homo Sapiens
accacugcccguacccuuacccgccccgccac

SEQ ID NO: 270162 - RNA, 32 nt, Homo Sapiens
uuucaccccagccuguaguccuccucacuuca

SEQ ID NO: 270163 - RNA, 32 nt, Homo Sapiens
auagaaauguaacuuuuguaagacaaagguuu

SEQ ID NO: 270164 - RNA, 32 nt, Homo Sapiens
ggccaagagggagaaggggccucccccaacac

SEQ ID NO: 270165 - RNA, 32 nt, Homo Sapiens
ugcgucuccagccccgcagcccggcccgggcg

SEQ ID NO: 270166 - RNA, 32 nt, Homo Sapiens
ggcggugaccgggaagcccgcguuaaaggggc

SEQ ID NO: 270167 - RNA, 32 nt, Homo Sapiens
accguagaacagagcucuuuuguuugcuuaug

SEQ ID NO: 270168 - RNA, 32 nt, Homo Sapiens
uuugccauuauuucuucaguuuucuuuucuug

SEQ ID NO: 270169 - RNA, 32 nt, Homo Sapiens
aagagaugauaccccaccgcccccucuugguc

SEQ ID NO: 270170 - RNA, 32 nt, Homo Sapiens
ucuuuccaggauuuuuaguaauaaucaaugga

SEQ ID NO: 270171 - RNA, 32 nt, Homo Sapiens
cucugccuggcaggcgcacgcgcccagcaccc

SEQ ID NO: 270172 - RNA, 32 nt, Homo Sapiens
uccggaccggcgcgccagggcuguccgucgcg

SEQ ID NO: 270173 - RNA, 32 nt, Homo Sapiens
acucuugauauuaaauuaaaugugccuugaaa

SEQ ID NO: 270174 - RNA, 32 nt, Homo Sapiens
auguggaauuguaaguucaauaaaccucuuug

SEQ ID NO: 270175 - RNA, 32 nt, Homo Sapiens
acaaggucaggaguucgagaccagccugacca

SEQ ID NO: 270176 - RNA, 32 nt, Homo Sapiens
gagcuguggguggaaaggaagugaugucagug

SEQ ID NO: 270177 - RNA, 32 nt, Homo Sapiens
acaaagucaggaguucgagaccagccuggcca

SEQ ID NO: 270178 - RNA, 32 nt, Homo Sapiens
gcuuucuuuccuggccacacugcuacaaucca

SEQ ID NO: 270179 - RNA, 32 nt, Homo Sapiens
gcaggaaaacacuacuuccaaaacacugaauu

SEQ ID NO: 270180 - RNA, 32 nt, Homo Sapiens
aacacccgcuccgucccuccccacccaggguc

SEQ ID NO: 270181 - RNA, 32 nt, Homo Sapiens
aaucagacuaucugucugugugucaccucucc

SEQ ID NO: 270182 - RNA, 32 nt, Homo Sapiens
ccuggacccugagguugucuccagaaacgguc

SEQ ID NO: 270183 - RNA, 32 nt, Homo Sapiens
agaacagcaagccuauccauaccaccauccua

SEQ ID NO: 270184 - RNA, 32 nt, Homo Sapiens
cuccccuugccccacacccuuuacuccccagc

SEQ ID NO: 270185 - RNA, 32 nt, Homo Sapiens
cacaaguguccuguguuuuguaaagaugaggg

SEQ ID NO: 270186 - RNA, 32 nt, Homo Sapiens
cuucccgccgccccgcccccagccccacacaa

SEQ ID NO: 270187 - RNA, 32 nt, Homo Sapiens
uuccagcuuugauccuuuguaagauuuuguga

SEQ ID NO: 270188 - RNA, 32 nt, Homo Sapiens
gugcucuaaaaauuaaauauuuugacuuuaag

SEQ ID NO: 270189 - RNA, 32 nt, Homo Sapiens
cacuucgauuaaaaauagcaauuugaccaagu

SEQ ID NO: 270190 - RNA, 32 nt, Homo Sapiens
accaaugccguggcaacagcucuacaguuacu

SEQ ID NO: 270191 - RNA, 32 nt, Homo Sapiens
cacccccugugcuuucugaaaauagacuugcu

SEQ ID NO: 270192 - RNA, 32 nt, Homo Sapiens
uguuuaaaacaauguuuguuagcauucuguga

SEQ ID NO: 270193 - RNA, 32 nt, Homo Sapiens
aggcuacgggccacgcgccgccgccgcugccg

SEQ ID NO: 270194 - RNA, 31 nt, Homo Sapiens
ggccaacuaggcagccaaccuaagcaagauc

SEQ ID NO: 270195 - RNA, 32 nt, Homo Sapiens
cuuugaaaacuacuucuauuaaguuauugaug

SEQ ID NO: 270196 - RNA, 32 nt, Homo Sapiens
augauguuuagauguucauacuugacucacau

SEQ ID NO: 270197 - RNA, 32 nt, Homo Sapiens
agaagaaggggagaggagguugugugggacaa

SEQ ID NO: 270198 - RNA, 32 nt, Homo Sapiens
acacccauuuuuccuuuugccgaccccaagag

SEQ ID NO: 270199 - RNA, 32 nt, Homo Sapiens
gugaacaguggaauauaaagcauaaaaggcag

SEQ ID NO: 270200 - RNA, 32 nt, Homo Sapiens
caggaauucaggugcugcugaagcugcaucaa

SEQ ID NO: 270201 - RNA, 32 nt, Homo Sapiens
ccaggagaagcaccucccucccggccccucug

SEQ ID NO: 270202 - RNA, 32 nt, Homo Sapiens
agccauuuuuauuauaaaacuuucucaauaaa

SEQ ID NO: 270203 - RNA, 32 nt, Homo Sapiens
uggugggaaggggauugggguggggcaggcug

SEQ ID NO: 270204 - RNA, 32 nt, Homo Sapiens
agcuucaucccaucuuagauucuacaugauua

SEQ ID NO: 270205 - RNA, 32 nt, Homo Sapiens
cugaggccagcagccgccgucaauguucacag

SEQ ID NO: 270206 - RNA, 32 nt, Homo Sapiens
ggcugggugcgguggcucaugccuguaauccc

SEQ ID NO: 270207 - RNA, 32 nt, Homo Sapiens
ccccuuuccacuacggguggguucccaaggac

SEQ ID NO: 270208 - RNA, 32 nt, Homo Sapiens
ggccgggugcgguggcucacgccuguaauccc

SEQ ID NO: 270209 - RNA, 32 nt, Homo Sapiens
ggccaggcgcgguggcucacacccguaauccc

SEQ ID NO: 270210 - RNA, 32 nt, Homo Sapiens
ggccgggcgcgguggcucacgccuguaauccu

SEQ ID NO: 270211 - RNA, 32 nt, Homo Sapiens
aaucuucacaguguuuuaaagaacauguuaaa

SEQ ID NO: 270212 - RNA, 32 nt, Homo Sapiens
ugaucucugugagcccaucauuacuguucauu

SEQ ID NO: 270213 - RNA, 32 nt, Homo Sapiens
guuuucaccauguuggcgaggcugguauccaa

SEQ ID NO: 270214 - RNA, 31 nt, Homo Sapiens
uaucaacaaaaggcccuuuuuagggccccca

SEQ ID NO: 270215 - RNA, 32 nt, Homo Sapiens
cuuggguccagacugcgccacagccucucggg

SEQ ID NO: 270216 - RNA, 31 nt, Homo Sapiens
aucugagcaaagguuuuuaguaauugaauuu

SEQ ID NO: 270217 - RNA, 32 nt, Homo Sapiens
uagcacuucaacauagcucuuaacaacuucca

SEQ ID NO: 270218 - RNA, 32 nt, Homo Sapiens
cccugcuugaguuuugcacuuggaagaacccu

SEQ ID NO: 270219 - RNA, 32 nt, Homo Sapiens
uuucuggccugagacuugcagggaggcaagaa

SEQ ID NO: 270220 - RNA, 32 nt, Homo Sapiens
auauuguuagguagaggcuggcacuuuauuag

SEQ ID NO: 270221 - RNA, 32 nt, Homo Sapiens
aauugcuguaaauuuuaauaugucuuaguauc

SEQ ID NO: 270222 - RNA, 32 nt, Homo Sapiens
aacauuccauucucuuuguaugucacuuggau

SEQ ID NO: 270223 - RNA, 32 nt, Homo Sapiens
caucuguaaaagacugaggugggggugggagg

SEQ ID NO: 270224 - RNA, 32 nt, Homo Sapiens
auuaccuccaugaucaauaaccaagaggcugc

SEQ ID NO: 270225 - RNA, 32 nt, Homo Sapiens
cgcccagcucacgccgcgcccgcgcucccagg

SEQ ID NO: 270226 - RNA, 32 nt, Homo Sapiens
ucacuuuugucaauugcuaauacccaguuacu

SEQ ID NO: 270227 - RNA, 32 nt, Homo Sapiens
gucuuaucauccacuuauuccaaggcuaagaa

SEQ ID NO: 270228 - RNA, 32 nt, Homo Sapiens
uuuugacaacgaucauuaaaucuuauguuguu

SEQ ID NO: 270229 - RNA, 32 nt, Homo Sapiens
ggcauugugggggugacgguggccacugugag

SEQ ID NO: 270230 - RNA, 32 nt, Homo Sapiens
aguacuguggaguuuuaacauuuuguccucuu

SEQ ID NO: 270231 - RNA, 32 nt, Homo Sapiens
agguauguuugcucugccccagccccacacuu

SEQ ID NO: 270232 - RNA, 32 nt, Homo Sapiens
ggcgcuggcugcacucaagacccucgagauua

SEQ ID NO: 270233 - RNA, 32 nt, Homo Sapiens
uacugugugaacauagccaaaaguaugugccg

SEQ ID NO: 270234 - RNA, 30 nt, Homo Sapiens
guggacuuacuugccaccagcuugugcauu

SEQ ID NO: 270235 - RNA, 32 nt, Homo Sapiens
guggggguagggcaaggagguaccucacaggu

SEQ ID NO: 270236 - RNA, 32 nt, Homo Sapiens
caccgguacugaccagcucccguugggccagg

SEQ ID NO: 270237 - RNA, 32 nt, Homo Sapiens
cuugguauaaaccagguaauuuggaagugaau

SEQ ID NO: 270238 - RNA, 32 nt, Homo Sapiens
cugcgggcgggcggugcgauguccggagagga

SEQ ID NO: 270239 - RNA, 32 nt, Homo Sapiens
uauaguuuucaauuuguguuauuuucauuucu

SEQ ID NO: 270240 - RNA, 32 nt, Homo Sapiens
guugcuuggaauguggaucugguagugagcca

SEQ ID NO: 270241 - RNA, 32 nt, Homo Sapiens
uugucacugcuuucuucuuuuccuacuuuuca

SEQ ID NO: 270242 - RNA, 32 nt, Homo Sapiens
gacucaacaaaguaaauaaaaguauauuuuau

SEQ ID NO: 270243 - RNA, 32 nt, Homo Sapiens
gggcugaggacgagacccccauccagccucca

SEQ ID NO: 270244 - RNA, 32 nt, Homo Sapiens
ggcucgcaggggugcuggcacuguggguccug

SEQ ID NO: 270245 - RNA, 32 nt, Homo Sapiens
gggaaaggcaauauuuaugaagggcagaagag

SEQ ID NO: 270246 - RNA, 32 nt, Homo Sapiens
cuuguccagaaagauggguuugugaauacggg

SEQ ID NO: 270247 - RNA, 32 nt, Homo Sapiens
uagccgggaaugcugcugcugcugcugcugcu

SEQ ID NO: 270248 - RNA, 32 nt, Homo Sapiens
ugggaauguaaauuaguauagccacuauggag

SEQ ID NO: 270249 - RNA, 32 nt, Homo Sapiens
ggggagagcuggaaggggcuagaaagcucccg

SEQ ID NO: 270250 - RNA, 32 nt, Homo Sapiens
ggagaucuuuuggcuuuucuauguugucgaau

SEQ ID NO: 270251 - RNA, 32 nt, Homo Sapiens
ccucagccccaaagagcagagagaggggacgu

SEQ ID NO: 270252 - RNA, 32 nt, Homo Sapiens
uuggggaaucuauacauuauaagggacuuaac

SEQ ID NO: 270253 - RNA, 32 nt, Homo Sapiens
ccacuguggccuuucuuagcauuuuuaccugc

SEQ ID NO: 270254 - RNA, 32 nt, Homo Sapiens
aaaagccagcuguccuuggagcagagaucaca

SEQ ID NO: 270255 - RNA, 32 nt, Homo Sapiens
ucuaucaccauuacuuuuuuuuaagucacaau

SEQ ID NO: 270256 - RNA, 32 nt, Homo Sapiens
ccagccacagcuggaagcccaggccugcagcu

SEQ ID NO: 270257 - RNA, 32 nt, Homo Sapiens
ggaugcugcuugccgcgcccgcguccucaccg

SEQ ID NO: 270258 - RNA, 32 nt, Homo Sapiens
gaguguccucucaucaucuaggaugugagugg

SEQ ID NO: 270259 - RNA, 32 nt, Homo Sapiens
uucuugucuucagaugguuugcuauuuuucuc

SEQ ID NO: 270260 - RNA, 32 nt, Homo Sapiens
cauaaauuagaaaaaauaagugauucaaaaug

SEQ ID NO: 270261 - RNA, 32 nt, Homo Sapiens
uagaaggggaugagucagauuuuuacagagga

SEQ ID NO: 270262 - RNA, 32 nt, Homo Sapiens
acaucuucuaguuggacaauauuggagaagac

SEQ ID NO: 270263 - RNA, 32 nt, Homo Sapiens
gggcugcugugcgggcggggguggccuggagc

SEQ ID NO: 270264 - RNA, 32 nt, Homo Sapiens
uuucaugauaaaaugagagcucugcagagaau

SEQ ID NO: 270265 - RNA, 32 nt, Homo Sapiens
cuuagggagcagccugaagccuuugcugucaa

SEQ ID NO: 270266 - RNA, 30 nt, Homo Sapiens
ggaagauggcggcggcgcaggaggcggacg

SEQ ID NO: 270267 - RNA, 32 nt, Homo Sapiens
aagagaaucugugcuaugcaauguuucauuaa

SEQ ID NO: 270268 - RNA, 32 nt, Homo Sapiens
gaguugggccgcgggcgggguuggagccuacu

SEQ ID NO: 270269 - RNA, 32 nt, Homo Sapiens
ucccauggcccccacacccccuccucaucacc

SEQ ID NO: 270270 - RNA, 32 nt, Homo Sapiens
cucgcgggcgaccgcggggcuugcugggaaga

SEQ ID NO: 270271 - RNA, 32 nt, Homo Sapiens
guaugugacaacauuuuuguacauuauguuau

SEQ ID NO: 270272 - RNA, 30 nt, Homo Sapiens
cuucuauaucaccagaaagagucgcgcagu

SEQ ID NO: 270273 - RNA, 32 nt, Homo Sapiens
ugcuggcguccucuccuccaugcugcugcccc

SEQ ID NO: 270274 - RNA, 32 nt, Homo Sapiens
ugaaucuaggauucuauucuaguuuggggggu

SEQ ID NO: 270275 - RNA, 32 nt, Homo Sapiens
gacagauaaaaugaagugggaagaauaugaag

SEQ ID NO: 270276 - RNA, 32 nt, Homo Sapiens
uuccuuagacauuuaaauuucaaggcagguac

SEQ ID NO: 270277 - RNA, 32 nt, Homo Sapiens
ggcuggucuggaacuccugaccucaagugauc

SEQ ID NO: 270278 - RNA, 32 nt, Homo Sapiens
accccaccaccacccgcaacacugccgcuguc

SEQ ID NO: 270279 - RNA, 32 nt, Homo Sapiens
cauauguacuuugaauuugagaagugggugau

SEQ ID NO: 270280 - RNA, 32 nt, Homo Sapiens
cuuccuucccuggcaugacuccaugauuuguc

SEQ ID NO: 270281 - RNA, 32 nt, Homo Sapiens
uucuucaauuuuguaaacuuccuggaaagcug

SEQ ID NO: 270282 - RNA, 32 nt, Homo Sapiens
uuuccucaucuuccucuugcugcugccaugua

SEQ ID NO: 270283 - RNA, 32 nt, Homo Sapiens
gauugaagaugaugagaaauuuuucaccacug

SEQ ID NO: 270284 - RNA, 32 nt, Homo Sapiens
gccggccgccccacccuccuugcauaaaagcc

SEQ ID NO: 270285 - RNA, 32 nt, Homo Sapiens
auaaauugauaaaaauagcuguguacuacuaa

SEQ ID NO: 270286 - RNA, 32 nt, Homo Sapiens
aguuggccaaaaaacuuggauauuuaaaaaga

SEQ ID NO: 270287 - RNA, 32 nt, Homo Sapiens
aucaggccuuuuggacuucauucauaauuuug

SEQ ID NO: 270288 - RNA, 32 nt, Homo Sapiens
aaacaaacaaaaauugcucaaaaaagaggaga

SEQ ID NO: 270289 - RNA, 32 nt, Homo Sapiens
gaaaaagacauucaggacugcugguuuguagu

SEQ ID NO: 270290 - RNA, 32 nt, Homo Sapiens
auaauuacauuuuauguauugaggaugccaag

SEQ ID NO: 270291 - RNA, 32 nt, Homo Sapiens
cagaguugccagcaggcgagugcuugggcaga

SEQ ID NO: 270292 - RNA, 28 nt, Homo Sapiens
agaugagacugccauccaccggcagaag

SEQ ID NO: 270293 - RNA, 32 nt, Homo Sapiens
ucgcugugugacucagggcaagugugcgcacc

SEQ ID NO: 270294 - RNA, 32 nt, Homo Sapiens
cauccccccacccaggaccuagugcaugccag

SEQ ID NO: 270295 - RNA, 32 nt, Homo Sapiens
guucuaauauuuugcuccuuuuuaaauuuugu

SEQ ID NO: 270296 - RNA, 32 nt, Homo Sapiens
ucuaagagauaaauugauauaucauucagugu

SEQ ID NO: 270297 - RNA, 32 nt, Homo Sapiens
cuuuugcuauaauuuuuaaccaaaaaauagca

SEQ ID NO: 270298 - RNA, 32 nt, Homo Sapiens
uuacccugaggccuccacgggacuucauuuaa

SEQ ID NO: 270299 - RNA, 32 nt, Homo Sapiens
gcaguggcgcggucucggcucacugcaagcuc

SEQ ID NO: 270300 - RNA, 32 nt, Homo Sapiens
uguauuuuuaauuuuuuuuuuaauucauaaaa

SEQ ID NO: 270301 - RNA, 32 nt, Homo Sapiens
ucuauugugguucucauguuucugccucccua

SEQ ID NO: 270302 - RNA, 32 nt, Homo Sapiens
uaaaugguucacgguccacuggccgccuugug

SEQ ID NO: 270303 - RNA, 32 nt, Homo Sapiens
gucuugaggaaaaauuucuuaaagcaaaagaa

SEQ ID NO: 270304 - RNA, 32 nt, Homo Sapiens
acggguuuaguucugucuuuuuucuccuuuuu

SEQ ID NO: 270305 - RNA, 32 nt, Homo Sapiens
ccagaguggccucagcugcacgacuccagagg

SEQ ID NO: 270306 - RNA, 32 nt, Homo Sapiens
gugcaacuggcaguccaggagcucuggguuuc

SEQ ID NO: 270307 - RNA, 32 nt, Homo Sapiens
gauugcuucuaacauaaaucugcauaaaaauu

SEQ ID NO: 270308 - RNA, 32 nt, Homo Sapiens
cccccugaggguuugcucuccucucaagguuu

SEQ ID NO: 270309 - RNA, 32 nt, Homo Sapiens
gcugcuacugucaguuauuuugcucccaaccc

SEQ ID NO: 270310 - RNA, 32 nt, Homo Sapiens
gauucuuucccaauucacaucuaaccucaucu

SEQ ID NO: 270311 - RNA, 32 nt, Homo Sapiens
cuacgccugugcugcugucaugaguggcgagc

SEQ ID NO: 270312 - RNA, 32 nt, Homo Sapiens
uaaaaucaaaaauguauguuaagagaauuuuu

SEQ ID NO: 270313 - RNA, 32 nt, Homo Sapiens
uacaggcgccugccaccaugcccgccuaauuu

SEQ ID NO: 270314 - RNA, 30 nt, Homo Sapiens
aggcagauggacugcuugaguccaggaauu

SEQ ID NO: 270315 - RNA, 32 nt, Homo Sapiens
gggacaagguugugccggcagcucugggggaa

SEQ ID NO: 270316 - RNA, 32 nt, Homo Sapiens
guggcaguuggguaccugcucacgcacggugu

SEQ ID NO: 270317 - RNA, 32 nt, Homo Sapiens
ugcugucaccuggaaaacacguggcaugauca

SEQ ID NO: 270318 - RNA, 32 nt, Homo Sapiens
aaaauauguaaauuacacuauacaaccauaug

SEQ ID NO: 270319 - RNA, 32 nt, Homo Sapiens
cuggccauaaacaaaaucucugcagcacuaua

SEQ ID NO: 270320 - RNA, 32 nt, Homo Sapiens
gcagauggagguuacauacugucaugagugug

SEQ ID NO: 270321 - RNA, 32 nt, Homo Sapiens
augagcucgcuaaccuacgaucuggugauaau

SEQ ID NO: 270322 - RNA, 32 nt, Homo Sapiens
ccccaggcuucggcccggccgccgccgcacau

SEQ ID NO: 270323 - RNA, 32 nt, Homo Sapiens
aaugaauuuaucuaaucuaucaccuuuguauu

SEQ ID NO: 270324 - RNA, 32 nt, Homo Sapiens
ucccccaacccacgcuccaacacacacacaca

SEQ ID NO: 270325 - RNA, 32 nt, Homo Sapiens
agcaggacagagcugcaagugccuggcagaau

SEQ ID NO: 270326 - RNA, 32 nt, Homo Sapiens
gggagaaaaugguggcuaucccuucugcuuag

SEQ ID NO: 270327 - RNA, 32 nt, Homo Sapiens
uuuuuuuuuuuuuuuuuuuuuaaagaaaaaag

SEQ ID NO: 270328 - RNA, 32 nt, Homo Sapiens
aggacccgaggcaggcucugggcccgccgggu

SEQ ID NO: 270329 - RNA, 32 nt, Homo Sapiens
ccugccugcaucucccaccuccuccccagcgc

SEQ ID NO: 270330 - RNA, 32 nt, Homo Sapiens
acacgccccccucuccuccuuuguuccggggg

SEQ ID NO: 270331 - RNA, 32 nt, Homo Sapiens
ugccuaaccuacugccuaagucauuagggcug

SEQ ID NO: 270332 - RNA, 32 nt, Homo Sapiens
uccccuuccccgcucagcacccuguuaggauc

SEQ ID NO: 270333 - RNA, 32 nt, Homo Sapiens
uccuuuugccccagcccucucagacccgcccc

SEQ ID NO: 270334 - RNA, 32 nt, Homo Sapiens
gcacaaggcuaaagguuacagcugagaucuuu

SEQ ID NO: 270335 - RNA, 32 nt, Homo Sapiens
ucccuuucaaagcugugugaccggcugggcau

SEQ ID NO: 270336 - RNA, 32 nt, Homo Sapiens
uccauccuucauggagaccccuggugcugggu

SEQ ID NO: 270337 - RNA, 32 nt, Homo Sapiens
cucugcugccagcaggggagaggggccaucug

SEQ ID NO: 270338 - RNA, 32 nt, Homo Sapiens
aguagcagcccugugugaucgugcgucugagu

SEQ ID NO: 270339 - RNA, 32 nt, Homo Sapiens
ggacgcuuucccuacaggcgaccacugcucug

SEQ ID NO: 270340 - RNA, 29 nt, Homo Sapiens
uagccucuguguuucauuaggcauucauc

SEQ ID NO: 270341 - RNA, 32 nt, Homo Sapiens
ccacauagcacaugcacgucugucccagacuu

SEQ ID NO: 270342 - RNA, 32 nt, Homo Sapiens
gccgcacgcccggcagccuccggagacgcgcg

SEQ ID NO: 270343 - RNA, 32 nt, Homo Sapiens
aaaagauaaaaagucagaaaucugaaaagugg

SEQ ID NO: 270344 - RNA, 32 nt, Homo Sapiens
aagugucaaaaauaguaucugaagauacugaa

SEQ ID NO: 270345 - RNA, 32 nt, Homo Sapiens
uccgccuucccgcugcgguagcgccgccgggg

SEQ ID NO: 270346 - RNA, 32 nt, Homo Sapiens
agggcaggcagcugcgcgcggcuggagucaug

SEQ ID NO: 270347 - RNA, 32 nt, Homo Sapiens
guguggagcguggagcgccgggacugugcacg

SEQ ID NO: 270348 - RNA, 32 nt, Homo Sapiens
uucaaagaauugguaauugaccggaggaaggc

SEQ ID NO: 270349 - RNA, 29 nt, Homo Sapiens
gcggggugaggacagagaggagucgaggg

SEQ ID NO: 270350 - RNA, 32 nt, Homo Sapiens
agugucuguuuucucuggucaacggugaugac

SEQ ID NO: 270351 - RNA, 32 nt, Homo Sapiens
cugaggucaggaguuugagaccacccugacca

SEQ ID NO: 270352 - RNA, 32 nt, Homo Sapiens
agcgagcgcgcccgccugguucugcgaaaagg

SEQ ID NO: 270353 - RNA, 32 nt, Homo Sapiens
augcaaucaaaggagacaugucuccugggaag

SEQ ID NO: 270354 - RNA, 32 nt, Homo Sapiens
gggagcgaggccagcggucaugugcccgugcc

SEQ ID NO: 270355 - RNA, 32 nt, Homo Sapiens
ggcaucuagcuggagcgacagagagcacgaug

SEQ ID NO: 270356 - RNA, 32 nt, Homo Sapiens
aguaucaguuuacaauaauguucuuaaaacag

SEQ ID NO: 270357 - RNA, 32 nt, Homo Sapiens
uuaagaaaacuguacuaaaucugaaucauguu

SEQ ID NO: 270358 - RNA, 32 nt, Homo Sapiens
uaugcaucagaaaaaugaaaaaacagaggaaa

SEQ ID NO: 270359 - RNA, 30 nt, Homo Sapiens
cuuugggaccccgugccuccugccaacauc

SEQ ID NO: 270360 - RNA, 32 nt, Homo Sapiens
agcagugagcauuguucauaugagaauggcgg

SEQ ID NO: 270361 - RNA, 32 nt, Homo Sapiens
gggcuggccucugacccacaagagggcagauu

SEQ ID NO: 270362 - RNA, 32 nt, Homo Sapiens
ccugcagcccucgcccggcgcuccaguagcag

SEQ ID NO: 270363 - RNA, 32 nt, Homo Sapiens
ucugagggaaagggcccuccuuccuaaauuuu

SEQ ID NO: 270364 - RNA, 27 nt, Homo Sapiens
acaggguccuucugugacaccugcugc

SEQ ID NO: 270365 - RNA, 32 nt, Homo Sapiens
ucccucccucagcccccucccccaucucaguc

SEQ ID NO: 270366 - RNA, 32 nt, Homo Sapiens
uuuguaaaaugaugucaugaaauggugggucc

SEQ ID NO: 270367 - RNA, 32 nt, Homo Sapiens
caaaaauugguuuuaaaguugacuccacuucc

SEQ ID NO: 270368 - RNA, 32 nt, Homo Sapiens
accuggagaaaacagugccuuuccuugcccug

SEQ ID NO: 270369 - RNA, 29 nt, Homo Sapiens
ggacuagaaagauuauauuuccucuagag

SEQ ID NO: 270370 - RNA, 32 nt, Homo Sapiens
ucgucggggcccggccaggcaccuuggccgcc

SEQ ID NO: 270371 - RNA, 31 nt, Homo Sapiens
gugugaagugagcgccucagagccucucagg

SEQ ID NO: 270372 - RNA, 32 nt, Homo Sapiens
ggcucgggggcgcccccugagcagaaaacagg

SEQ ID NO: 270373 - RNA, 32 nt, Homo Sapiens
guauaauggggauauaugaaaggcaccagucc

SEQ ID NO: 270374 - RNA, 32 nt, Homo Sapiens
cuuuucuuucauuagcuaggaucuacuagaug

SEQ ID NO: 270375 - RNA, 32 nt, Homo Sapiens
agcucagcucggcucccgcccgcgguccgcag

SEQ ID NO: 270376 - RNA, 32 nt, Homo Sapiens
ugcccggagcagccuguuccugcacuccaccc

SEQ ID NO: 270377 - RNA, 32 nt, Homo Sapiens
gaaucucgucauaagugaucucaggcucucac

SEQ ID NO: 270378 - RNA, 32 nt, Homo Sapiens
cgauggguucugcagcccagggcccccgaugc

SEQ ID NO: 270379 - RNA, 32 nt, Homo Sapiens
cagaauuuaaacaucuuucuaggucugcgcgg

SEQ ID NO: 270380 - RNA, 32 nt, Homo Sapiens
gaggugggguuuauugggaugcuggagaagag

SEQ ID NO: 270381 - RNA, 32 nt, Homo Sapiens
uuuauuuacugaugcuuuauguuaccaaaaca

SEQ ID NO: 270382 - RNA, 32 nt, Homo Sapiens
ccaagacuguucuugugcaacucucagaauac

SEQ ID NO: 270383 - RNA, 32 nt, Homo Sapiens
cgcuguccccgcaggcagccggccugccgcca

SEQ ID NO: 270384 - RNA, 32 nt, Homo Sapiens
gcgggccauggcggauguccccggggcacagc

SEQ ID NO: 270385 - RNA, 32 nt, Homo Sapiens
ggcugugauaaggaauauuaaaaauuguguuu

SEQ ID NO: 270386 - RNA, 32 nt, Homo Sapiens
uuuuauuucaagguauaguugccaaguaaagu

SEQ ID NO: 270387 - RNA, 32 nt, Homo Sapiens
aaaggaaguaaaaccagauguuuuccaccaaa

SEQ ID NO: 270388 - RNA, 32 nt, Homo Sapiens
aaauaaagaauuauuuguuuuguuuucaauga

SEQ ID NO: 270389 - RNA, 32 nt, Homo Sapiens
cagcccagugugguggguggacccucaggucu

SEQ ID NO: 270390 - RNA, 28 nt, Homo Sapiens
guaugagauguaacuauuauaaacuguu

SEQ ID NO: 270391 - RNA, 30 nt, Homo Sapiens
uugacaacaccaugacguuaugcugacaug

SEQ ID NO: 270392 - RNA, 32 nt, Homo Sapiens
gcaccgacacgcugcuguggggucccggugag

SEQ ID NO: 270393 - RNA, 32 nt, Homo Sapiens
auucaguauguggcugugggacagagguugga

SEQ ID NO: 270394 - RNA, 32 nt, Homo Sapiens
ggcuucuuaaaacaacccggcuuccucacccu

SEQ ID NO: 270395 - RNA, 32 nt, Homo Sapiens
ugguggacaacuccugauggccucgagccuga

SEQ ID NO: 270396 - RNA, 32 nt, Homo Sapiens
aaacuauguacaaaaggauugcuuguaaauau

SEQ ID NO: 270397 - RNA, 32 nt, Homo Sapiens
ccauuuaaaaauucaucuuuguauucccuuaa

SEQ ID NO: 270398 - RNA, 32 nt, Homo Sapiens
guuagagaggggcccuugcuucccuguuccag

SEQ ID NO: 270399 - RNA, 32 nt, Homo Sapiens
cagauggggagggacagggucggccuguaccc

SEQ ID NO: 270400 - RNA, 32 nt, Homo Sapiens
aauuuucagggugcacuucuuucaucaaaaug

SEQ ID NO: 270401 - RNA, 32 nt, Homo Sapiens
uguacagaaaaguuuuccuguaauaauuuugc

SEQ ID NO: 270402 - RNA, 32 nt, Homo Sapiens
cugccuguggugugcccggcucugccacuccc

SEQ ID NO: 270403 - RNA, 32 nt, Homo Sapiens
aagcauuaugugaauucaccagcaagauguac

SEQ ID NO: 270404 - RNA, 32 nt, Homo Sapiens
gcaacagccgcagcgccgcggucucugcgacu

SEQ ID NO: 270405 - RNA, 32 nt, Homo Sapiens
gagcuuuggaaaaauaaagauuugucagcccu

SEQ ID NO: 270406 - RNA, 32 nt, Homo Sapiens
ccccacccccacuuacuauaguucugugaucc

SEQ ID NO: 270407 - RNA, 32 nt, Homo Sapiens
gaauugccauggguguuuuucuucugugguga

SEQ ID NO: 270408 - RNA, 32 nt, Homo Sapiens
agauuacgaaguuuagaugaccaaaauggaua

SEQ ID NO: 270409 - RNA, 32 nt, Homo Sapiens
uaaugcuagguuuuauuuucuaguauuuuauu

SEQ ID NO: 270410 - RNA, 32 nt, Homo Sapiens
cuccugcagggcccacggcuccugagcaacag

SEQ ID NO: 270411 - RNA, 32 nt, Homo Sapiens
uuagaaaaaauauuucaguuggaaggcuguag

SEQ ID NO: 270412 - RNA, 32 nt, Homo Sapiens
ggcagcucagaugguguaaauuuuaaaauuuu

SEQ ID NO: 270413 - RNA, 32 nt, Homo Sapiens
uugugugcacgcacgcacacacucaugcacac

SEQ ID NO: 270414 - RNA, 32 nt, Homo Sapiens
cagagauuaaacuuauaccaucgauuagaaug

SEQ ID NO: 270415 - RNA, 32 nt, Homo Sapiens
aggucacagaaacaaaacccacaggggcugag

SEQ ID NO: 270416 - RNA, 32 nt, Homo Sapiens
ggcgcuccaaguucaucuccgccccggggcuc

SEQ ID NO: 270417 - RNA, 32 nt, Homo Sapiens
acugugauuugaucaaauuccaaauuaugaca

SEQ ID NO: 270418 - RNA, 32 nt, Homo Sapiens
uguugagaacuguguccugcauccuggcgcag

SEQ ID NO: 270419 - RNA, 32 nt, Homo Sapiens
gauugacuuccacucccacuccuucacuaaaa

SEQ ID NO: 270420 - RNA, 32 nt, Homo Sapiens
ccaaccucagguauuucuuuauaucaguguga

SEQ ID NO: 270421 - RNA, 32 nt, Homo Sapiens
gcaagacagagccugauguggcacggaguggg

SEQ ID NO: 270422 - RNA, 32 nt, Homo Sapiens
uuucauugaggcacuuuuuuuauuguuugaau

SEQ ID NO: 270423 - RNA, 32 nt, Homo Sapiens
gaucucuguaucauguuuuucuuuuuaaauca

SEQ ID NO: 270424 - RNA, 32 nt, Homo Sapiens
acguguucccucucuuuuuuuuccuuuuugug

SEQ ID NO: 270425 - RNA, 32 nt, Homo Sapiens
uuccucuccgcgguggagcaaacuguggacuu

SEQ ID NO: 270426 - RNA, 32 nt, Homo Sapiens
gcucgccgccgcggagcgcguagccggagcgc

SEQ ID NO: 270427 - RNA, 32 nt, Homo Sapiens
augugagugguaaguauaucucaguuuaaaug

SEQ ID NO: 270428 - RNA, 32 nt, Homo Sapiens
gaaucuaaaaggaaaccguuuauuguuugaug

SEQ ID NO: 270429 - RNA, 32 nt, Homo Sapiens
gagguugaguaagcugagaacacgccauugca

SEQ ID NO: 270430 - RNA, 32 nt, Homo Sapiens
uggcgagaagaccccugacuaccacauccuug

SEQ ID NO: 270431 - RNA, 32 nt, Homo Sapiens
gacugucuuugaacuuaagacuguagcgucga

SEQ ID NO: 270432 - RNA, 32 nt, Homo Sapiens
uaaaaagcugaauagcauguuaguuacuuggu

SEQ ID NO: 270433 - RNA, 32 nt, Homo Sapiens
ggugugggggucccggggcuccaagccaccag

SEQ ID NO: 270434 - RNA, 32 nt, Homo Sapiens
cuguggauccugaaagguguucuguuggcacc

SEQ ID NO: 270435 - RNA, 32 nt, Homo Sapiens
cagccuccugaguagcugggaauacagcaugc

SEQ ID NO: 270436 - RNA, 32 nt, Homo Sapiens
uagcuacaugguuauuuugucuccauugcuuu

SEQ ID NO: 270437 - RNA, 29 nt, Homo Sapiens
ucagaccggggacagcaggagguugggcc

SEQ ID NO: 270438 - RNA, 32 nt, Homo Sapiens
gucuaacucugcauagacagggucuagauuuu

SEQ ID NO: 270439 - RNA, 32 nt, Homo Sapiens
auucacagaggcaaggcagagaacaagaccug

SEQ ID NO: 270440 - RNA, 32 nt, Homo Sapiens
aaaacgucaaauuggaccaauugucuugguuu

SEQ ID NO: 270441 - RNA, 32 nt, Homo Sapiens
guuuuccauguaugcauagguucuaacagcag

SEQ ID NO: 270442 - RNA, 32 nt, Homo Sapiens
agaagaugaugaugaugaauaguuggcucuag

SEQ ID NO: 270443 - RNA, 31 nt, Homo Sapiens
gaagucacuggccagaaccaggccaaggugg

SEQ ID NO: 270444 - RNA, 32 nt, Homo Sapiens
gccggcuccgcgggaacucucucccucagaca

SEQ ID NO: 270445 - RNA, 32 nt, Homo Sapiens
ucccguggccccagccuggcccagcucccccg

SEQ ID NO: 270446 - RNA, 32 nt, Homo Sapiens
ggucagcucaccugcuuggggagguaaauaua

SEQ ID NO: 270447 - RNA, 32 nt, Homo Sapiens
ugcaaaaugaauugucacaucacacccaacgu

SEQ ID NO: 270448 - RNA, 28 nt, Homo Sapiens
aaugacuuuagugacauuauaaaacuga

SEQ ID NO: 270449 - RNA, 32 nt, Homo Sapiens
aaaaagaggagcuuuuuaguuuuucagcuuaa

SEQ ID NO: 270450 - RNA, 32 nt, Homo Sapiens
uuggugaaagcaugaauaaaaauacaucuacu

SEQ ID NO: 270451 - RNA, 32 nt, Homo Sapiens
aaauuagcuggguguauggcgcccaccuguaa

SEQ ID NO: 270452 - RNA, 32 nt, Homo Sapiens
aaaauguucguauguguguugcacuaauucua

SEQ ID NO: 270453 - RNA, 32 nt, Homo Sapiens
cucaggaggaggagaacccaagaaacugugga

SEQ ID NO: 270454 - RNA, 32 nt, Homo Sapiens
guucacugccagcucugaugcuguccacugug

SEQ ID NO: 270455 - RNA, 32 nt, Homo Sapiens
cacugguaaccauucuucuacucuguaugccc

SEQ ID NO: 270456 - RNA, 32 nt, Homo Sapiens
augcuuccuguacagccuguggaacugugacu

SEQ ID NO: 270457 - RNA, 32 nt, Homo Sapiens
ggcuccauaaaccauggcauguuggguuugca

SEQ ID NO: 270458 - RNA, 32 nt, Homo Sapiens
uuuacaggugugaaagucacagcuuguaaaua

SEQ ID NO: 270459 - RNA, 32 nt, Homo Sapiens
acuacaugacauucugucuauucaaucaccug

SEQ ID NO: 270460 - RNA, 32 nt, Homo Sapiens
cuuuugaacaauuuuaauuuuuugccucauaa

SEQ ID NO: 270461 - RNA, 32 nt, Homo Sapiens
ugagaguucccccuguccccuccaccuucccu

SEQ ID NO: 270462 - RNA, 32 nt, Homo Sapiens
uacuugcccucccuugcucccccucccuggca

SEQ ID NO: 270463 - RNA, 32 nt, Homo Sapiens
ccugagaguccuccugcccuucaguugcucag

SEQ ID NO: 270464 - RNA, 32 nt, Homo Sapiens
aaauuaugaagauguuagacuucuuuugauau

SEQ ID NO: 270465 - RNA, 32 nt, Homo Sapiens
ggguuuuuuuuuuuuucuuuugauuuccucag

SEQ ID NO: 270466 - RNA, 32 nt, Homo Sapiens
acagagcguggcccgcgguguacaauacccau

SEQ ID NO: 270467 - RNA, 32 nt, Homo Sapiens
acacuucgcucuugaggagcucaacggucugg

SEQ ID NO: 270468 - RNA, 32 nt, Homo Sapiens
aaauaauguuuccauucugaacauguuuuguc

SEQ ID NO: 270469 - RNA, 32 nt, Homo Sapiens
cggggcucgccagcaccagcccuggaacccca

SEQ ID NO: 270470 - RNA, 32 nt, Homo Sapiens
aaaacaaacaaaaaacaaaacccuggaguguu

SEQ ID NO: 270471 - RNA, 32 nt, Homo Sapiens
gcuccagugcaguucaaggcuuucagacaagc

SEQ ID NO: 270472 - RNA, 32 nt, Homo Sapiens
gggccugaggauugaggccuagagagaggcag

SEQ ID NO: 270473 - RNA, 32 nt, Homo Sapiens
ugccgccgccgccgccgcgaccgcgagggaca

SEQ ID NO: 270474 - RNA, 32 nt, Homo Sapiens
ugaagcugugucugcggggaggcagcggaagg

SEQ ID NO: 270475 - RNA, 32 nt, Homo Sapiens
ggcacagcuagagggagggagguggccaugga

SEQ ID NO: 270476 - RNA, 32 nt, Homo Sapiens
gugauccgccuggcuuggccucccaaagcgcu

SEQ ID NO: 270477 - RNA, 30 nt, Homo Sapiens
uagugguacgguaggagcuuugcaggaagu

SEQ ID NO: 270478 - RNA, 32 nt, Homo Sapiens
cgggcuaagcgcccggccccggggccgcggau

SEQ ID NO: 270479 - RNA, 32 nt, Homo Sapiens
ugugaucgaugauguaaauugcuucauagaau

SEQ ID NO: 270480 - RNA, 32 nt, Homo Sapiens
aaguuagaaaacaguagguccugagaaccaua

SEQ ID NO: 270481 - RNA, 32 nt, Homo Sapiens
gggcgcugggagcgcauugcgagggggcugga

SEQ ID NO: 270482 - RNA, 32 nt, Homo Sapiens
ugacagccgccuuuggcagcgagcgcucgggg

SEQ ID NO: 270483 - RNA, 32 nt, Homo Sapiens
ugugucuguugugccuugcccggcgccucacg

SEQ ID NO: 270484 - RNA, 32 nt, Homo Sapiens
ucacauaucaccguggugauggcgucacgugg

SEQ ID NO: 270485 - RNA, 32 nt, Homo Sapiens
ggaugugccugcucaggaaaccucuuugcucc

SEQ ID NO: 270486 - RNA, 32 nt, Homo Sapiens
ccugaugcugcuaaaguaaagccuuaagugug

SEQ ID NO: 270487 - RNA, 32 nt, Homo Sapiens
gaguccucggugucgguggccggcagucaucu

SEQ ID NO: 270488 - RNA, 27 nt, Homo Sapiens
ucucuggcuuucuucagccaugacuca

SEQ ID NO: 270489 - RNA, 32 nt, Homo Sapiens
aaguucuaaaauuccaagaaugugcuuuuaga

SEQ ID NO: 270490 - RNA, 32 nt, Homo Sapiens
gguaauucuuaaacuuuuuagaggguggcagg

SEQ ID NO: 270491 - RNA, 32 nt, Homo Sapiens
agggucacuuuaauaaaaauuguuaugaacua

SEQ ID NO: 270492 - RNA, 32 nt, Homo Sapiens
gcacccaucccggcugcuuuugcugcgcccuc

SEQ ID NO: 270493 - RNA, 32 nt, Homo Sapiens
ggggaggugcacauaggugaaugugugggugu

SEQ ID NO: 270494 - RNA, 32 nt, Homo Sapiens
uuugauuaucaccauggaauaaauuugggcac

SEQ ID NO: 270495 - RNA, 32 nt, Homo Sapiens
caggcagugcguuucucaggacuuuauagcuu

SEQ ID NO: 270496 - RNA, 32 nt, Homo Sapiens
aucaacauagccaaagaaaaacaaucaagaca

SEQ ID NO: 270497 - RNA, 32 nt, Homo Sapiens
aacuguuucccuaggagagcacuuggagaugg

SEQ ID NO: 270498 - RNA, 32 nt, Homo Sapiens
cuugcacaauaucauuaccaucacuuuuucau

SEQ ID NO: 270499 - RNA, 32 nt, Homo Sapiens
aagaacagaagcaaagaguggugguguggaac

SEQ ID NO: 270500 - RNA, 32 nt, Homo Sapiens
acuaaggagccaugagccaccuggacauucac

SEQ ID NO: 270501 - RNA, 32 nt, Homo Sapiens
agugugcaaagaccaguccucaguaucugcac

SEQ ID NO: 270502 - RNA, 32 nt, Homo Sapiens
gcggcgacagcuccagcuccggcuccggcucc

SEQ ID NO: 270503 - RNA, 32 nt, Homo Sapiens
gucccaagugcauuagaggaacuguaaaaauc

SEQ ID NO: 270504 - RNA, 32 nt, Homo Sapiens
cugauugguggucgaagcaccaucuucacaga

SEQ ID NO: 270505 - RNA, 30 nt, Homo Sapiens
gauaccucuaaauugggggaacuccuucau

SEQ ID NO: 270506 - RNA, 32 nt, Homo Sapiens
gcacagcccacuuuuaaauucuguuauccuug

SEQ ID NO: 270507 - RNA, 32 nt, Homo Sapiens
uuguauacuagauuucauuguugucucucaug

SEQ ID NO: 270508 - RNA, 32 nt, Homo Sapiens
caggagagcugaugguggaguucuagucugaa

SEQ ID NO: 270509 - RNA, 32 nt, Homo Sapiens
aaccacuaauccacguuauaugucuagauuug

SEQ ID NO: 270510 - RNA, 32 nt, Homo Sapiens
ggagggcaagagaauaucaaacaaagauuucu

SEQ ID NO: 270511 - RNA, 32 nt, Homo Sapiens
aaaaacagauaaaacauggacaauggcagagg

SEQ ID NO: 270512 - RNA, 32 nt, Homo Sapiens
cuguggcucgggugcuggcaggugcuggcggg

SEQ ID NO: 270513 - RNA, 32 nt, Homo Sapiens
gcacuggcccgccccagcucucagaggccggc

SEQ ID NO: 270514 - RNA, 32 nt, Homo Sapiens
auuagauguuuccauaucauuaaaaccaagga

SEQ ID NO: 270515 - RNA, 32 nt, Homo Sapiens
cguccccuucccuccgcccugcccuaagccac

SEQ ID NO: 270516 - RNA, 32 nt, Homo Sapiens
uuugauuccugccuuuccccagccucagcccu

SEQ ID NO: 270517 - RNA, 32 nt, Homo Sapiens
cuauuaaauuuuauaguuaucuuaauauuaug

SEQ ID NO: 270518 - RNA, 32 nt, Homo Sapiens
uugucuugcagggagaaguuaucccuauuccu

SEQ ID NO: 270519 - RNA, 32 nt, Homo Sapiens
cucucucgcggcagaggacgcggaucaggccu

SEQ ID NO: 270520 - RNA, 32 nt, Homo Sapiens
caaacuugggcucgcgcuucccggcccggcgc

SEQ ID NO: 270521 - RNA, 32 nt, Homo Sapiens
gcagaaucucgggagagaagggcaccgcgaac

SEQ ID NO: 270522 - RNA, 32 nt, Homo Sapiens
auuauuugauaaagaguagcaugaaucuugug

SEQ ID NO: 270523 - RNA, 32 nt, Homo Sapiens
cuguuccggugccuuuccuauccaggcaccac

SEQ ID NO: 270524 - RNA, 32 nt, Homo Sapiens
acuacacugaugggagcagcuuaaugaaagau

SEQ ID NO: 270525 - RNA, 32 nt, Homo Sapiens
guaagaaagagggucuuaauuacugagcacuu

SEQ ID NO: 270526 - RNA, 32 nt, Homo Sapiens
gccucagucuccuuccccuccccucgccuguc

SEQ ID NO: 270527 - RNA, 32 nt, Homo Sapiens
gccacgugggcucauauggggcugggaguagu

SEQ ID NO: 270528 - RNA, 32 nt, Homo Sapiens
gaagcccuuucuggagaagcaaggcuguccuc

SEQ ID NO: 270529 - RNA, 32 nt, Homo Sapiens
uccugcuggacacagagacacccacccagcac

SEQ ID NO: 270530 - RNA, 32 nt, Homo Sapiens
aaaaaagaguguaaaaagucaaacagugucag

SEQ ID NO: 270531 - RNA, 32 nt, Homo Sapiens
gggcucuuuuucuguagccaggucuucccaag

SEQ ID NO: 270532 - RNA, 32 nt, Homo Sapiens
gccguauaccaaguaugcuuagauaaauaagc

SEQ ID NO: 270533 - RNA, 32 nt, Homo Sapiens
cuguuguuuuuagauauaguccacugcauucu

SEQ ID NO: 270534 - RNA, 32 nt, Homo Sapiens
gggaccacuccagaagaaacccauucgugauu

SEQ ID NO: 270535 - RNA, 32 nt, Homo Sapiens
guggaagacagagauggcagagccauccaccc

SEQ ID NO: 270536 - RNA, 32 nt, Homo Sapiens
cuggcaaggaccagcgcuccaugauccuucgg

SEQ ID NO: 270537 - RNA, 32 nt, Homo Sapiens
uccagagaacaguagucuuguuagaacuggaa

SEQ ID NO: 270538 - RNA, 32 nt, Homo Sapiens
cuccuggcaacaucaggccaacguccacccca

SEQ ID NO: 270539 - RNA, 32 nt, Homo Sapiens
aaauucccaucccauaaugcaugaccuuccua

SEQ ID NO: 270540 - RNA, 32 nt, Homo Sapiens
acgcccaccucucuccuggagcgcugggccuu

SEQ ID NO: 270541 - RNA, 32 nt, Homo Sapiens
agguuuuugagucaugaugcaagaaucuggga

SEQ ID NO: 270542 - RNA, 32 nt, Homo Sapiens
cauccuugaauucuagcucccauuccaaacug

SEQ ID NO: 270543 - RNA, 32 nt, Homo Sapiens
caucccguguucuccuuuuccucucucccgga

SEQ ID NO: 270544 - RNA, 32 nt, Homo Sapiens
cacuguguuggugggaacucuggcuacacuga

SEQ ID NO: 270545 - RNA, 32 nt, Homo Sapiens
cugucggaacagugacugcugaccugccaaga

SEQ ID NO: 270546 - RNA, 32 nt, Homo Sapiens
cugaggugagaggaucgcuugagcucaggagu

SEQ ID NO: 270547 - RNA, 32 nt, Homo Sapiens
uuuuucuaugcauguagauguauuaaauaugu

SEQ ID NO: 270548 - RNA, 31 nt, Homo Sapiens
cgucgcugauggagaaagggcucccgcagaa

SEQ ID NO: 270549 - RNA, 32 nt, Homo Sapiens
aaguggugguuuuauuuuuuuaguuuuuaugu

SEQ ID NO: 270550 - RNA, 32 nt, Homo Sapiens
cggcggggagacgccggcugccagcaugucgc

SEQ ID NO: 270551 - RNA, 32 nt, Homo Sapiens
accagccuggccaacauagugaaaccccgugu

SEQ ID NO: 270552 - RNA, 32 nt, Homo Sapiens
ccccagguagagugggggcagggggcagggaa

SEQ ID NO: 270553 - RNA, 32 nt, Homo Sapiens
cuaaucaaucccagcauuguuuccaaugagca

SEQ ID NO: 270554 - RNA, 32 nt, Homo Sapiens
ccagacgcggaacuugccggccuugaagcugc

SEQ ID NO: 270555 - RNA, 32 nt, Homo Sapiens
aaagacaaacuccugcggugcaagaguccugg

SEQ ID NO: 270556 - RNA, 32 nt, Homo Sapiens
uaguccacaaaacauguuuucuggugcucauc

SEQ ID NO: 270557 - RNA, 32 nt, Homo Sapiens
gcuuccaauuuaacacaccuagaggcugggca

SEQ ID NO: 270558 - RNA, 30 nt, Homo Sapiens
ggagccggagguggaggguggggucuggca

SEQ ID NO: 270559 - RNA, 32 nt, Homo Sapiens
cuguggcagcgggcuuauccuucucuguugcc

SEQ ID NO: 270560 - RNA, 32 nt, Homo Sapiens
guggucccagccuacaccggguuccggggacc

SEQ ID NO: 270561 - RNA, 32 nt, Homo Sapiens
uugggcugaugcaaaaauaucuauguggaaga

SEQ ID NO: 270562 - RNA, 32 nt, Homo Sapiens
cagauggccugccuuuggcugagagggcuacc

SEQ ID NO: 270563 - RNA, 32 nt, Homo Sapiens
cuucaccuggcuacagaagaggacucaggacg

SEQ ID NO: 270564 - RNA, 32 nt, Homo Sapiens
ucccuaagccggcaaugaccgccugcgcccgc

SEQ ID NO: 270565 - RNA, 32 nt, Homo Sapiens
cuguuuaguuuuacuaaaaucuguaaauacug

SEQ ID NO: 270566 - RNA, 32 nt, Homo Sapiens
gaaaguggucugaggugguagcaagauuccac

SEQ ID NO: 270567 - RNA, 32 nt, Homo Sapiens
aacuugaauugucacauacauuuuacaguuug

SEQ ID NO: 270568 - RNA, 32 nt, Homo Sapiens
uuuacggagccccggaugguugccaggcacag

SEQ ID NO: 270569 - RNA, 32 nt, Homo Sapiens
ugcaaaaagggagaaacaaaacagaugagaca

SEQ ID NO: 270570 - RNA, 32 nt, Homo Sapiens
cagaaacccucugcuacccagcuuuugacuua

SEQ ID NO: 270571 - RNA, 32 nt, Homo Sapiens
ugagcaccgugucaagcugcucugagccacag

SEQ ID NO: 270572 - RNA, 32 nt, Homo Sapiens
auguuaccugaacauguggugaggucagccgu

SEQ ID NO: 270573 - RNA, 32 nt, Homo Sapiens
cuaccccuuucucugcagauagauagacacug

SEQ ID NO: 270574 - RNA, 32 nt, Homo Sapiens
aaaaagacauauaaagauugcauauuuuauua

SEQ ID NO: 270575 - RNA, 32 nt, Homo Sapiens
agacuguacucuucuagccaucugaaauacgu

SEQ ID NO: 270576 - RNA, 32 nt, Homo Sapiens
uuguccccgcugcuguugcugcugacuccaag

SEQ ID NO: 270577 - RNA, 32 nt, Homo Sapiens
cuuauucaucugagccgucuccacagucccaa

SEQ ID NO: 270578 - RNA, 32 nt, Homo Sapiens
gcccaaaaaaagacaaaaauaaaaauuccuuu

SEQ ID NO: 270579 - RNA, 32 nt, Homo Sapiens
cgcaguucaaccaguguuuacaauggaauuuc

SEQ ID NO: 270580 - RNA, 32 nt, Homo Sapiens
ucauuccccgucugcggugcggugcgugccug

SEQ ID NO: 270581 - RNA, 32 nt, Homo Sapiens
ccucaguuaacuuuaacaacaagcauucugau

SEQ ID NO: 270582 - RNA, 32 nt, Homo Sapiens
ggaauguaaccuguuuauuguauuuuaaagug

SEQ ID NO: 270583 - RNA, 32 nt, Homo Sapiens
ccuacuuuuugauuuuaacaaaugcaaauuua

SEQ ID NO: 270584 - RNA, 32 nt, Homo Sapiens
ggugcuggggcccuuccaucccuuguccccuu

SEQ ID NO: 270585 - RNA, 32 nt, Homo Sapiens
gcaucuuuuuuuucuuuuuuuaacaaaugaug

SEQ ID NO: 270586 - RNA, 30 nt, Homo Sapiens
gguaaggagaagcuggauuaucuccuguug

SEQ ID NO: 270587 - RNA, 32 nt, Homo Sapiens
auccucccccagguugagacgucugcagagug

SEQ ID NO: 270588 - RNA, 32 nt, Homo Sapiens
uaaaauaaaaauuacuuggaacauuuaucauu

SEQ ID NO: 270589 - RNA, 32 nt, Homo Sapiens
caucuuguguuaccuuugcagccaagaaucag

SEQ ID NO: 270590 - RNA, 32 nt, Homo Sapiens
cccaccgccugccccauccccauccccaacaa

SEQ ID NO: 270591 - RNA, 32 nt, Homo Sapiens
gcucccaugccagcuuccccugcacccacagg

SEQ ID NO: 270592 - RNA, 32 nt, Homo Sapiens
ucacaccuguaaucccaauacuuuggguggcu

SEQ ID NO: 270593 - RNA, 32 nt, Homo Sapiens
ugugggaggguggacaggcaaugguucagugg

SEQ ID NO: 270594 - RNA, 32 nt, Homo Sapiens
aggguuucuaggauuuaugaccuuaugaccag

SEQ ID NO: 270595 - RNA, 32 nt, Homo Sapiens
gggcacagguguuuuucuuuuugcaguuuuac

SEQ ID NO: 270596 - RNA, 32 nt, Homo Sapiens
gauuuacucaauaucugaaucaccuugauuca

SEQ ID NO: 270597 - RNA, 32 nt, Homo Sapiens
uguaguggaugccagucuuguugcugugacaa

SEQ ID NO: 270598 - RNA, 32 nt, Homo Sapiens
cccaauugcaagcccucggcucagcugcuucu

SEQ ID NO: 270599 - RNA, 32 nt, Homo Sapiens
uuuuuguaucuauguuuaugagugagauuuag

SEQ ID NO: 270600 - RNA, 32 nt, Homo Sapiens
uggaugcugaugcagaggagggugggggagcu

SEQ ID NO: 270601 - RNA, 32 nt, Homo Sapiens
gcaggaugcuauuugcauguguccccagguga

SEQ ID NO: 270602 - RNA, 32 nt, Homo Sapiens
ggcuggcauccauggccacgcugcuggccugg

SEQ ID NO: 270603 - RNA, 32 nt, Homo Sapiens
gguuauuugucuuuuuauuauugaguuguaag

SEQ ID NO: 270604 - RNA, 32 nt, Homo Sapiens
gcucagaaucugccaggcucaagcauucauug

SEQ ID NO: 270605 - RNA, 32 nt, Homo Sapiens
uuuauuaaacuugcugugaaaacacuuugauu

SEQ ID NO: 270606 - RNA, 32 nt, Homo Sapiens
gaguggaauuugcauuauaaacuuuuuccauu

SEQ ID NO: 270607 - RNA, 32 nt, Homo Sapiens
uggaguuugucaguuuuuuucuuaaaagucca

SEQ ID NO: 270608 - RNA, 32 nt, Homo Sapiens
aaggucggggagcggcuguuuagggugcauca

SEQ ID NO: 270609 - RNA, 32 nt, Homo Sapiens
ggaaucauggagguugcaaccacaaaauucag

SEQ ID NO: 270610 - RNA, 32 nt, Homo Sapiens
uuguuccuugcuucuuuuguuaaaacucauuc

SEQ ID NO: 270611 - RNA, 32 nt, Homo Sapiens
uggucuugccgucagcacaucccgcugcagag

SEQ ID NO: 270612 - RNA, 32 nt, Homo Sapiens
cagagcuggccuggaguccgcggcuggccgcg

SEQ ID NO: 270613 - RNA, 30 nt, Homo Sapiens
uccggcccgcugcugccgccgcgcuucuac

SEQ ID NO: 270614 - RNA, 32 nt, Homo Sapiens
aucuauugcaucuauuuuaugguaauaaaagg

SEQ ID NO: 270615 - RNA, 32 nt, Homo Sapiens
uaccauuuuaucacuguucaaagcacugucaa

SEQ ID NO: 270616 - RNA, 32 nt, Homo Sapiens
uuacuugagggaggggggaggggggagggaua

SEQ ID NO: 270617 - RNA, 32 nt, Homo Sapiens
cugguauuuuuuggagcuuccauccugguucu

SEQ ID NO: 270618 - RNA, 32 nt, Homo Sapiens
uuuaugauguguaugggacauacguuguucuc

SEQ ID NO: 270619 - RNA, 32 nt, Homo Sapiens
ugcagaggccccagggccugucuggacuuuuc

SEQ ID NO: 270620 - RNA, 32 nt, Homo Sapiens
ccggcccccuccccggaaccggcggucgagcu

SEQ ID NO: 270621 - RNA, 32 nt, Homo Sapiens
ccugcucccgcggcgaagggggagggagaggc

SEQ ID NO: 270622 - RNA, 32 nt, Homo Sapiens
aaaaagaaaaaaugacaccaucuuuuauucuu

SEQ ID NO: 270623 - RNA, 32 nt, Homo Sapiens
caccucuauaaaauguguacugggaauaagcu

SEQ ID NO: 270624 - RNA, 32 nt, Homo Sapiens
ggccucaggaggagguggaacugauguagggg

SEQ ID NO: 270625 - RNA, 32 nt, Homo Sapiens
caagacaaaaggcauuccucccugcccaaucc

SEQ ID NO: 270626 - RNA, 28 nt, Homo Sapiens
uuucugcagcaggcgcaaccucuccuag

SEQ ID NO: 270627 - RNA, 32 nt, Homo Sapiens
ggggggagggagcuauuagagaaggaugaggc

SEQ ID NO: 270628 - RNA, 32 nt, Homo Sapiens
gcuuugggaguagaugauuucuucuuauuuug

SEQ ID NO: 270629 - RNA, 32 nt, Homo Sapiens
ggccgggugcgguggcucaugccugaaauucu

SEQ ID NO: 270630 - RNA, 32 nt, Homo Sapiens
ucuuugggcagacgugcagagaagaacauaag

SEQ ID NO: 270631 - RNA, 32 nt, Homo Sapiens
ucaaaggaggggcucagcucccugugcauucu

SEQ ID NO: 270632 - RNA, 32 nt, Homo Sapiens
cgugaacucuguaauucuauguguuacuagca

SEQ ID NO: 270633 - RNA, 32 nt, Homo Sapiens
gaagggccauccaacuacggaccugcccaugg

SEQ ID NO: 270634 - RNA, 32 nt, Homo Sapiens
auugaugcccagggccugugcggccgcccugg

SEQ ID NO: 270635 - RNA, 32 nt, Homo Sapiens
cgggagaugcugucgggccgcggcggcgcuug

SEQ ID NO: 270636 - RNA, 32 nt, Homo Sapiens
aguaaugagagaagaaaaaguaguuugaagcu

SEQ ID NO: 270637 - RNA, 32 nt, Homo Sapiens
agccaaaggucuucuuuuuucaauuccuaaug

SEQ ID NO: 270638 - RNA, 32 nt, Homo Sapiens
ucugagccugcgcugcauaggacugagcagac

SEQ ID NO: 270639 - RNA, 32 nt, Homo Sapiens
uacauccucacuuuuauuauaaauggguguuu

SEQ ID NO: 270640 - RNA, 32 nt, Homo Sapiens
caaggguacguauauugugaaguaaagccuca

SEQ ID NO: 270641 - RNA, 32 nt, Homo Sapiens
cauuuguaaaaccaccagcaucaggaguaagg

SEQ ID NO: 270642 - RNA, 32 nt, Homo Sapiens
cauguucugugccugcucagcagagccucguu

SEQ ID NO: 270643 - RNA, 32 nt, Homo Sapiens
aaguuuuacugaucaguugcugguugguuggu

SEQ ID NO: 270644 - RNA, 32 nt, Homo Sapiens
agacaaaaacaauaaaacauuuaauauucauu

SEQ ID NO: 270645 - RNA, 32 nt, Homo Sapiens
agcagaucgggagacaggauguugacauauag

SEQ ID NO: 270646 - RNA, 32 nt, Homo Sapiens
uaaaacuuauauauuuuuuaaaauaacuucaa

SEQ ID NO: 270647 - RNA, 32 nt, Homo Sapiens
gagccccuggggaucaaguagacaaagggugg

SEQ ID NO: 270648 - RNA, 32 nt, Homo Sapiens
gacgucagaacacguggauaacgugauaacuu

SEQ ID NO: 270649 - RNA, 32 nt, Homo Sapiens
agccuggagugggcgguacgcagacgcgcgcg

SEQ ID NO: 270650 - RNA, 32 nt, Homo Sapiens
ugacagccacacgcgacccucggugcagagug

SEQ ID NO: 270651 - RNA, 32 nt, Homo Sapiens
gucuggaggagcaauuuuacugcgacauuuua

SEQ ID NO: 270652 - RNA, 32 nt, Homo Sapiens
ucuaccaaacauuuccagaaacguauuuauag

SEQ ID NO: 270653 - RNA, 32 nt, Homo Sapiens
gccuauggaugaggaggacgcggcggccccgg

SEQ ID NO: 270654 - RNA, 32 nt, Homo Sapiens
uuuaagggguuuuuguugugacugcugccuug

SEQ ID NO: 270655 - RNA, 32 nt, Homo Sapiens
auaaaguauacuguagcaaugcauuggcacac

SEQ ID NO: 270656 - RNA, 31 nt, Homo Sapiens
uaugaccauuugacuguucaaugauuauuug

SEQ ID NO: 270657 - RNA, 32 nt, Homo Sapiens
cugagagugaaaauaaaagguacauuuuauaa

SEQ ID NO: 270658 - RNA, 32 nt, Homo Sapiens
uuuuaggcacuuucuucauuuuuuugguuauu

SEQ ID NO: 270659 - RNA, 27 nt, Homo Sapiens
ccugccacuacauucugguuuacauua

SEQ ID NO: 270660 - RNA, 32 nt, Homo Sapiens
ggccagcccuccccagccgagguucucggcac

SEQ ID NO: 270661 - RNA, 32 nt, Homo Sapiens
uauuuauguacaaaaacucauacaauuauugg

SEQ ID NO: 270662 - RNA, 32 nt, Homo Sapiens
uauuaaaugcccuggguucuuuagucuuccaa

SEQ ID NO: 270663 - RNA, 32 nt, Homo Sapiens
uagauacucaucaggaccucacaggagcugag

SEQ ID NO: 270664 - RNA, 32 nt, Homo Sapiens
aaccaaauuccugaauuauuuauaauuguguc

SEQ ID NO: 270665 - RNA, 32 nt, Homo Sapiens
uucauauaagcucggugacauuugagccacag

SEQ ID NO: 270666 - RNA, 32 nt, Homo Sapiens
cuguuuuggauggucauguuuuuucuccuccg

SEQ ID NO: 270667 - RNA, 32 nt, Homo Sapiens
augaccucggagccuuguguccccuggagaaa

SEQ ID NO: 270668 - RNA, 32 nt, Homo Sapiens
uaugccguaggauguuuagcaacaucccuggu

SEQ ID NO: 270669 - RNA, 32 nt, Homo Sapiens
cggggacgaaacaauaaagaccggaagcugag

SEQ ID NO: 270670 - RNA, 32 nt, Homo Sapiens
cuacauuuucuuuuucuucuuuugagauggag

SEQ ID NO: 270671 - RNA, 32 nt, Homo Sapiens
gccccaccccucgggccuuugggcuggaccag

SEQ ID NO: 270672 - RNA, 32 nt, Homo Sapiens
auggaggaauucuacaucugaugcccucugcu

SEQ ID NO: 270673 - RNA, 32 nt, Homo Sapiens
cuguugaaguugcaguggcuuguucacaccug

SEQ ID NO: 270674 - RNA, 32 nt, Homo Sapiens
cagcacgcaccucuggugauccgaggccacac

SEQ ID NO: 270675 - RNA, 32 nt, Homo Sapiens
ugaauggcaggagaggggcauuuggaggcucc

SEQ ID NO: 270676 - RNA, 32 nt, Homo Sapiens
gacucauuuuucuguguagagacucgguggcc

SEQ ID NO: 270677 - RNA, 32 nt, Homo Sapiens
cgacaucuucgccgucccggcgccccggugcc

SEQ ID NO: 270678 - RNA, 32 nt, Homo Sapiens
ccacccgcccuucguccccuccgccucuuugu

SEQ ID NO: 270679 - RNA, 32 nt, Homo Sapiens
cagggucuggagaccguggcccgggaaguggc

SEQ ID NO: 270680 - RNA, 32 nt, Homo Sapiens
ucugggauucagaauacaguguucucaaguga

SEQ ID NO: 270681 - RNA, 32 nt, Homo Sapiens
cuaugcugacauaacagaaaauguagaugaga

SEQ ID NO: 270682 - RNA, 32 nt, Homo Sapiens
gaggggcccgucuuggcauggcgcgagucuag

SEQ ID NO: 270683 - RNA, 32 nt, Homo Sapiens
cggcugcggucaccccacgccuccgcggcuca

SEQ ID NO: 270684 - RNA, 32 nt, Homo Sapiens
gacgggguuuguacgccgcgggcacccgucgc

SEQ ID NO: 270685 - RNA, 32 nt, Homo Sapiens
cugcaggagcagcugucccggcugagacaaca

SEQ ID NO: 270686 - RNA, 32 nt, Homo Sapiens
ccugauuuuuaaagaggugcauguaauuuuga

SEQ ID NO: 270687 - RNA, 32 nt, Homo Sapiens
uguaauuuuuaaaacuuaguguuuugucugau

SEQ ID NO: 270688 - RNA, 32 nt, Homo Sapiens
uaucugugucauuggucaaaguuuuguuuuuc

SEQ ID NO: 270689 - RNA, 32 nt, Homo Sapiens
cccccagaacagaggcugaaacccggcgcauc

SEQ ID NO: 270690 - RNA, 32 nt, Homo Sapiens
cuggauccuucccagaagaaucucuacagaga

SEQ ID NO: 270691 - RNA, 32 nt, Homo Sapiens
auugcuuguuguugcgcuucggaggcggcgau

SEQ ID NO: 270692 - RNA, 32 nt, Homo Sapiens
accgaugcuccagccaaccccuguggagcccg

SEQ ID NO: 270693 - RNA, 32 nt, Homo Sapiens
cacuuucucccuugcccaauccugcuucuuuc

SEQ ID NO: 270694 - RNA, 32 nt, Homo Sapiens
uuccuuaucauuuggaucuacauguugaauaa

SEQ ID NO: 270695 - RNA, 32 nt, Homo Sapiens
auaaaacugaaauaaaccugcacugaaaccug

SEQ ID NO: 270696 - RNA, 32 nt, Homo Sapiens
gcaggauuucacaaaacaaauuccucacaaau

SEQ ID NO: 270697 - RNA, 32 nt, Homo Sapiens
caaugcugccuucucccuguccuccuccugga

SEQ ID NO: 270698 - RNA, 32 nt, Homo Sapiens
ugcuguugaugaugugaauuuuggaaauauuc

SEQ ID NO: 270699 - RNA, 32 nt, Homo Sapiens
cuuucucacuuacuccucucccauucagcaau

SEQ ID NO: 270700 - RNA, 32 nt, Homo Sapiens
aguuagaagucuacuuugaaccagaggauuac

SEQ ID NO: 270701 - RNA, 32 nt, Homo Sapiens
guuacucuguuccuucacuccacacagcucag

SEQ ID NO: 270702 - RNA, 32 nt, Homo Sapiens
cagaagcaggaaaaccaauuauaaguucaagu

SEQ ID NO: 270703 - RNA, 32 nt, Homo Sapiens
uuaaguucaugacaauggaugacacaaguuug

SEQ ID NO: 270704 - RNA, 32 nt, Homo Sapiens
cugggagaugucggcggcguguugggaggaac

SEQ ID NO: 270705 - RNA, 31 nt, Homo Sapiens
caccucgcucauuuuggucuaacuggauuua

SEQ ID NO: 270706 - RNA, 32 nt, Homo Sapiens
uuggaauuuuuacuuuuguuggccuuauuuua

SEQ ID NO: 270707 - RNA, 32 nt, Homo Sapiens
uagcugggauuacaggcaugcgccaccaggcc

SEQ ID NO: 270708 - RNA, 32 nt, Homo Sapiens
cagacauuacacaaaaucagagugcugaguac

SEQ ID NO: 270709 - RNA, 32 nt, Homo Sapiens
gugggggcggggaggagaggcggcggcggcag

SEQ ID NO: 270710 - RNA, 32 nt, Homo Sapiens
ggggcagccacuccagccccagcccagccugg

SEQ ID NO: 270711 - RNA, 32 nt, Homo Sapiens
gaaaggccagcacuucauggacccuggggagg

SEQ ID NO: 270712 - RNA, 30 nt, Homo Sapiens
aggugggagggucaugacgcagcgaguuuc

SEQ ID NO: 270713 - RNA, 32 nt, Homo Sapiens
cuuggggcaccucagcucuggaugcuaccccu

SEQ ID NO: 270714 - RNA, 32 nt, Homo Sapiens
uaacuuggugccuaccugaaaaauguauugug

SEQ ID NO: 270715 - RNA, 30 nt, Homo Sapiens
gggagauggcgcagcccauccugggccaug

SEQ ID NO: 270716 - RNA, 32 nt, Homo Sapiens
ugagagacuuauuuauaauauauccuuacucu

SEQ ID NO: 270717 - RNA, 32 nt, Homo Sapiens
guggaaguuagguacaaugcagcacugagaua

SEQ ID NO: 270718 - RNA, 32 nt, Homo Sapiens
ugcuugcgcguguccgcgccccggggcggaga

SEQ ID NO: 270719 - RNA, 32 nt, Homo Sapiens
uuaucagaauacuaguuuuaaaagcugaaugu

SEQ ID NO: 270720 - RNA, 32 nt, Homo Sapiens
gcccgucuguuccuucuggggugugcgagcgg

SEQ ID NO: 270721 - RNA, 32 nt, Homo Sapiens
gcaagccuggguguuccuuccuccucaugcuc

SEQ ID NO: 270722 - RNA, 32 nt, Homo Sapiens
ugguuuuaaaauugugugcguguaucuguucu

SEQ ID NO: 270723 - RNA, 31 nt, Homo Sapiens
gaaggcaauuuauuugaaccaaauaaaagau

SEQ ID NO: 270724 - RNA, 32 nt, Homo Sapiens
uuuuuggucucaguaacagggaaguaaguaac

SEQ ID NO: 270725 - RNA, 32 nt, Homo Sapiens
uuuauauaaaguaguuuuugcauuuguuuauu

SEQ ID NO: 270726 - RNA, 31 nt, Homo Sapiens
gugcugcugccgggccaggaagggugggugg

SEQ ID NO: 270727 - RNA, 32 nt, Homo Sapiens
ucaccccacacucagcagcaccaauggugaag

SEQ ID NO: 270728 - RNA, 32 nt, Homo Sapiens
gguuccagaauuuggagucuccaguucucacg

SEQ ID NO: 270729 - RNA, 32 nt, Homo Sapiens
ucccagcagccacaagcuugcccgcccuggcu

SEQ ID NO: 270730 - RNA, 32 nt, Homo Sapiens
gggagggaugagaacagaagcaggaccaggau

SEQ ID NO: 270731 - RNA, 32 nt, Homo Sapiens
ucucaaauuggaaagaaagauuccuugagacg

SEQ ID NO: 270732 - RNA, 32 nt, Homo Sapiens
gacuucucaguaggaaggggugaggcagcugu

SEQ ID NO: 270733 - RNA, 32 nt, Homo Sapiens
ccgccugagagccccaggagacaucggcuaga

SEQ ID NO: 270734 - RNA, 32 nt, Homo Sapiens
ugcuaauuaacugaaacaugcuuaccagauuc

SEQ ID NO: 270735 - RNA, 32 nt, Homo Sapiens
gaaguuaacaaauuauuuuaaagaaguaguua

SEQ ID NO: 270736 - RNA, 32 nt, Homo Sapiens
agggcccgagcgcgugccuuccccgugcggcc

SEQ ID NO: 270737 - RNA, 32 nt, Homo Sapiens
ggaacugcagcagccaccccccggggccaucg

SEQ ID NO: 270738 - RNA, 32 nt, Homo Sapiens
auaaucaggaauauuucuauaguaaauggagu

SEQ ID NO: 270739 - RNA, 32 nt, Homo Sapiens
aagagacccgcggagggaggcggaggcuguga

SEQ ID NO: 270740 - RNA, 32 nt, Homo Sapiens
cucuucguauaaauaauguggaucuuacaugu

SEQ ID NO: 270741 - RNA, 32 nt, Homo Sapiens
ggcugucuuaccaugagaaguugguaaguugg

SEQ ID NO: 270742 - RNA, 32 nt, Homo Sapiens
uccugauccgcacugcccuuuuugcaccccag

SEQ ID NO: 270743 - RNA, 32 nt, Homo Sapiens
ucuguggcaggccuggucaggcucuccaggug

SEQ ID NO: 270744 - RNA, 31 nt, Homo Sapiens
guucuagugauaguucucagaggaucugaug

SEQ ID NO: 270745 - RNA, 32 nt, Homo Sapiens
acuuuaauucuuaaauuuaugguuggaaaugc

SEQ ID NO: 270746 - RNA, 32 nt, Homo Sapiens
uggacuuggccaugucuacaucauaccugugg

SEQ ID NO: 270747 - RNA, 32 nt, Homo Sapiens
cuccauauacagucacauccugagcuacuagg

SEQ ID NO: 270748 - RNA, 32 nt, Homo Sapiens
augacuaaaggagggcugaacucuguauuagu

SEQ ID NO: 270749 - RNA, 29 nt, Homo Sapiens
ucauguuaaaguuuuggcuuuuaucuuau

SEQ ID NO: 270750 - RNA, 32 nt, Homo Sapiens
ggauugugaugguucguucuguuuacaucagu

SEQ ID NO: 270751 - RNA, 32 nt, Homo Sapiens
ugccucaggaugaaacaaaccuuugagucuca

SEQ ID NO: 270752 - RNA, 32 nt, Homo Sapiens
gauaagggaaaacauuauuccacuuacuguuu

SEQ ID NO: 270753 - RNA, 32 nt, Homo Sapiens
accuccgccucccagguucaauugauucuccu

SEQ ID NO: 270754 - RNA, 32 nt, Homo Sapiens
gacgcuccagaauggagguccugagggagaag

SEQ ID NO: 270755 - RNA, 32 nt, Homo Sapiens
uaauauauaaaccauguaugugguuaggaaua

SEQ ID NO: 270756 - RNA, 32 nt, Homo Sapiens
aaagcaagcuuaauguaguuaaggaucuucau

SEQ ID NO: 270757 - RNA, 32 nt, Homo Sapiens
aauucguacuuauuuauggacaaaauucagug

SEQ ID NO: 270758 - RNA, 32 nt, Homo Sapiens
ugucuuauauauauuucuuuguuaucaaacuu

SEQ ID NO: 270759 - RNA, 32 nt, Homo Sapiens
agagaagaaugaauucuaaagauguuccccau

SEQ ID NO: 270760 - RNA, 32 nt, Homo Sapiens
uuccaucguuugcgacauuguagcuauacuaa

SEQ ID NO: 270761 - RNA, 32 nt, Homo Sapiens
guguccugcucacauugucuccagggccucgg

SEQ ID NO: 270762 - RNA, 32 nt, Homo Sapiens
gacgucagagcauauuggagguugccugugug

SEQ ID NO: 270763 - RNA, 32 nt, Homo Sapiens
uguauaucucaacagaauuaaaaugucuagcu

SEQ ID NO: 270764 - RNA, 32 nt, Homo Sapiens
agaaagauuuauauuucucugaguauguaucc

SEQ ID NO: 270765 - RNA, 32 nt, Homo Sapiens
caaggaacaaaguggguuguggaccuugaucg

SEQ ID NO: 270766 - RNA, 32 nt, Homo Sapiens
gcgguggaggugcggcagcugcugcucaggug

SEQ ID NO: 270767 - RNA, 32 nt, Homo Sapiens
acauuguugcuguuucugcauuuaaacauaau

SEQ ID NO: 270768 - RNA, 32 nt, Homo Sapiens
cugggucugugcugcuggccgacaugucaggg

SEQ ID NO: 270769 - RNA, 32 nt, Homo Sapiens
aaugaagacugccugccccagccccucccgcc

SEQ ID NO: 270770 - RNA, 32 nt, Homo Sapiens
cucuccaucuuuauccaaaaauguaaacuucc

SEQ ID NO: 270771 - RNA, 32 nt, Homo Sapiens
ggguuuguuuguggaggcgcugucugucccuc

SEQ ID NO: 270772 - RNA, 32 nt, Homo Sapiens
ccuagcuggugccuguccucucuugagccuuu

SEQ ID NO: 270773 - RNA, 32 nt, Homo Sapiens
aagagcggggacgggaugaggcggcgguugau

SEQ ID NO: 270774 - RNA, 32 nt, Homo Sapiens
uucagcugcugacaauccuauuuagcauaugc

SEQ ID NO: 270775 - RNA, 32 nt, Homo Sapiens
uggugacuuucugcagugaaugcaucacccuu

SEQ ID NO: 270776 - RNA, 32 nt, Homo Sapiens
accucguuccccagcccucaccccucaccccu

SEQ ID NO: 270777 - RNA, 32 nt, Homo Sapiens
uauagaguuaaaccuuuuaacuuccauggccc

SEQ ID NO: 270778 - RNA, 32 nt, Homo Sapiens
ggagagaugagaaaaaagaaaacuacuacaaa

SEQ ID NO: 270779 - RNA, 31 nt, Homo Sapiens
ccaaccaugggaggccgcgucuuucucgcau

SEQ ID NO: 270780 - RNA, 32 nt, Homo Sapiens
ccuuauauaaagggcuguuugugcaugagcuc

SEQ ID NO: 270781 - RNA, 32 nt, Homo Sapiens
acagccccuccauggcccccgagauggaccag

SEQ ID NO: 270782 - RNA, 32 nt, Homo Sapiens
accuggacuccgccucguccccggggcucggg

SEQ ID NO: 270783 - RNA, 32 nt, Homo Sapiens
gggugcuacaguaaaagaaaacaaaaguccag

SEQ ID NO: 270784 - RNA, 32 nt, Homo Sapiens
aacuugcacagcucagcaccaggaggaugagc

SEQ ID NO: 270785 - RNA, 32 nt, Homo Sapiens
uagagcagauaauauauagaguuccauacacc

SEQ ID NO: 270786 - RNA, 32 nt, Homo Sapiens
ggaagaagauggcggaaggcggagcggcggau

SEQ ID NO: 270787 - RNA, 32 nt, Homo Sapiens
aaagcaugauuuugauugcuuaccuacauacg

SEQ ID NO: 270788 - RNA, 32 nt, Homo Sapiens
ccuuggcuaucaggagaauccuggacacugua

SEQ ID NO: 270789 - RNA, 32 nt, Homo Sapiens
acacguaaauguuguuuaauucuguagguaac

SEQ ID NO: 270790 - RNA, 32 nt, Homo Sapiens
cauuguuuuuaaaacuguuuuauaucuuaaga

SEQ ID NO: 270791 - RNA, 32 nt, Homo Sapiens
gauccuucugcuucggccuccugaguagcuaa

SEQ ID NO: 270792 - RNA, 32 nt, Homo Sapiens
gcgcgggcgggaagauggcggcuggguucaaa

SEQ ID NO: 270793 - RNA, 32 nt, Homo Sapiens
guagccugacuucugccggagcucccagucca

SEQ ID NO: 270794 - RNA, 32 nt, Homo Sapiens
guggugauggaccuccccgcucccucaagcuc

SEQ ID NO: 270795 - RNA, 32 nt, Homo Sapiens
acuacaaugaauucguuugacucaaagauuaa

SEQ ID NO: 270796 - RNA, 32 nt, Homo Sapiens
uauaacuguuuuuauguuccacugaaucccug

SEQ ID NO: 270797 - RNA, 32 nt, Homo Sapiens
aaucuuucuggaugauucuguguuaucaagga

SEQ ID NO: 270798 - RNA, 32 nt, Homo Sapiens
aaucuucuuuucuucuuagaaauccuagaaaa

SEQ ID NO: 270799 - RNA, 32 nt, Homo Sapiens
cugcucuauucuguaccaaguacuggagaaaa

SEQ ID NO: 270800 - RNA, 32 nt, Homo Sapiens
ugcucugcugaauaauuucauuaccucugcac

SEQ ID NO: 270801 - RNA, 31 nt, Homo Sapiens
ugguggugaaacaccguagggcaugugguuc

SEQ ID NO: 270802 - RNA, 32 nt, Homo Sapiens
ucauuuaauuuucauuuacugauuggaauacu

SEQ ID NO: 270803 - RNA, 32 nt, Homo Sapiens
gccaccacccucagccacaauuuggcagaagg

SEQ ID NO: 270804 - RNA, 32 nt, Homo Sapiens
uuaucugaauggauauuuguuucuauauccug

SEQ ID NO: 270805 - RNA, 32 nt, Homo Sapiens
agauuuuuauauuuauacaaaagauuacuaaa

SEQ ID NO: 270806 - RNA, 32 nt, Homo Sapiens
gaggcagcacagugcagacagaccuaauggcu

SEQ ID NO: 270807 - RNA, 32 nt, Homo Sapiens
ccacagaccuucccuuuagcuguugacacaac

SEQ ID NO: 270808 - RNA, 32 nt, Homo Sapiens
aauauuuccaacaguucuauguuuccuacaag

SEQ ID NO: 270809 - RNA, 32 nt, Homo Sapiens
gaccgcgggcugggugcuggcggccgcgcugc

SEQ ID NO: 270810 - RNA, 32 nt, Homo Sapiens
ucacaacuagaugagcucucccuuauauguug

SEQ ID NO: 270811 - RNA, 32 nt, Homo Sapiens
guggggcacugggaaacccugcccaugucccu

SEQ ID NO: 270812 - RNA, 32 nt, Homo Sapiens
gaggaggucuuccagcagcagcaggucuggag

SEQ ID NO: 270813 - RNA, 32 nt, Homo Sapiens
cagcgaggccccagguacuuacuacaccauuc

SEQ ID NO: 270814 - RNA, 32 nt, Homo Sapiens
caccucuacugucuccucccugggcuaagcag

SEQ ID NO: 270815 - RNA, 32 nt, Homo Sapiens
acgagcuggaggaggagaaggaaggcccggcg

SEQ ID NO: 270816 - RNA, 32 nt, Homo Sapiens
uccauacguaucucagacagggaagcuagcuu

SEQ ID NO: 270817 - RNA, 32 nt, Homo Sapiens
guggccuucagcggccuggugggccuggagcc

SEQ ID NO: 270818 - RNA, 32 nt, Homo Sapiens
uggccaucucuaggggagucaggccgcugggg

SEQ ID NO: 270819 - RNA, 32 nt, Homo Sapiens
aaaugaccagaugguaaauauuuucaugucac

SEQ ID NO: 270820 - RNA, 32 nt, Homo Sapiens
ucagcucucuggaccugggagcuccaagauag

SEQ ID NO: 270821 - RNA, 32 nt, Homo Sapiens
caugcugcaccaggagcagagcccugcacccu

SEQ ID NO: 270822 - RNA, 32 nt, Homo Sapiens
ccuucauuuuuggaaggacuguggaugauuau

SEQ ID NO: 270823 - RNA, 32 nt, Homo Sapiens
gcaucauuccuuggggcaaaauguggacaagg

SEQ ID NO: 270824 - RNA, 32 nt, Homo Sapiens
gacuuggaaggggccuggucugucaacuaguc

SEQ ID NO: 270825 - RNA, 32 nt, Homo Sapiens
gauccauggaaagcuuccugggaaacguaugc

SEQ ID NO: 270826 - RNA, 32 nt, Homo Sapiens
gguuucacuauguuggccaggcuggucuccaa

SEQ ID NO: 270827 - RNA, 32 nt, Homo Sapiens
uucucggcccacgcgguccgcggccaagggcc

SEQ ID NO: 270828 - RNA, 32 nt, Homo Sapiens
uucucucauaagaccauauucccuuuaaaaga

SEQ ID NO: 270829 - RNA, 32 nt, Homo Sapiens
uagggccacagugccguaucugcugcagacau

SEQ ID NO: 270830 - RNA, 32 nt, Homo Sapiens
aaccccacucccucaagaagggccagggccag

SEQ ID NO: 270831 - RNA, 32 nt, Homo Sapiens
cuguuuuuuaguagaacugaauguucaagcau

SEQ ID NO: 270832 - RNA, 32 nt, Homo Sapiens
aucacuucucccugggcucccaggcccuccug

SEQ ID NO: 270833 - RNA, 32 nt, Homo Sapiens
gucacagcagacuuccugaaaagcagacacug

SEQ ID NO: 270834 - RNA, 32 nt, Homo Sapiens
aaguuaguuggaaaagcuccugaaauguauga

SEQ ID NO: 270835 - RNA, 32 nt, Homo Sapiens
ccuuggaucagggccccuccccggccucaguu

SEQ ID NO: 270836 - RNA, 32 nt, Homo Sapiens
acuuaaccuucuccaacauacauccugcauua

SEQ ID NO: 270837 - RNA, 32 nt, Homo Sapiens
ggcuggaguuuacagagacacugcacagcuua

SEQ ID NO: 270838 - RNA, 32 nt, Homo Sapiens
aaaaaguuuaaaaaugcauaaaaaauaggauu

SEQ ID NO: 270839 - RNA, 32 nt, Homo Sapiens
caaaggaacgacccuccucauuugggccuuuu

SEQ ID NO: 270840 - RNA, 29 nt, Homo Sapiens
guggcuguuugaccagaccacaaaguuca

SEQ ID NO: 270841 - RNA, 32 nt, Homo Sapiens
acagacuggcaggcgggcgggcggccgcagcc

SEQ ID NO: 270842 - RNA, 32 nt, Homo Sapiens
cgccggccacacggagcggcgcccgggagcua

SEQ ID NO: 270843 - RNA, 32 nt, Homo Sapiens
cuaaagcaauccucccaccucugccucccgag

SEQ ID NO: 270844 - RNA, 32 nt, Homo Sapiens
uccauucucuccaucccuuccaucccaggcaa

SEQ ID NO: 270845 - RNA, 32 nt, Homo Sapiens
auguugcaagucuguuucaucuaguaaacuga

SEQ ID NO: 270846 - RNA, 32 nt, Homo Sapiens
cgccgccgccgccuccuccccccggaucgggu

SEQ ID NO: 270847 - RNA, 32 nt, Homo Sapiens
agacugaaucaucaaaguaaagucucucugag

SEQ ID NO: 270848 - RNA, 32 nt, Homo Sapiens
uucuuguccuugugcucugugaaacauugaac

SEQ ID NO: 270849 - RNA, 32 nt, Homo Sapiens
uggcuuuguauugaucucuccagucauuuuug

SEQ ID NO: 270850 - RNA, 32 nt, Homo Sapiens
ucucaccugagccccaggugaaggggcccggg

SEQ ID NO: 270851 - RNA, 32 nt, Homo Sapiens
cagaaacuucggggucuacaaacgcaggcggg

SEQ ID NO: 270852 - RNA, 32 nt, Homo Sapiens
gcccggucuucgccggccccggccccuggcga

SEQ ID NO: 270853 - RNA, 32 nt, Homo Sapiens
cagcaucaccagcucccucaccaccaaugcga

SEQ ID NO: 270854 - RNA, 32 nt, Homo Sapiens
uauuuguacuuugacaaacugaauuuaaauaa

SEQ ID NO: 270855 - RNA, 32 nt, Homo Sapiens
cucacuugcacccuccgucucucggguucaag

SEQ ID NO: 270856 - RNA, 32 nt, Homo Sapiens
cgcccuggcccgcucccugcccgcggauaccu

SEQ ID NO: 270857 - RNA, 32 nt, Homo Sapiens
caauaagugaauggaagcaguggugguagcua

SEQ ID NO: 270858 - RNA, 32 nt, Homo Sapiens
cucccacggguucuucugggccccacagucug

SEQ ID NO: 270859 - RNA, 32 nt, Homo Sapiens
uguuagaaaagucaagcagagauaugccagau

SEQ ID NO: 270860 - RNA, 32 nt, Homo Sapiens
uaacaacuaugauuaacuuguuuacuuuuucu

SEQ ID NO: 270861 - RNA, 32 nt, Homo Sapiens
agaauuuacagaaaaauagagaaaauaaacac

SEQ ID NO: 270862 - RNA, 32 nt, Homo Sapiens
uugaucaccugccuguccagcucuggugggcc

SEQ ID NO: 270863 - RNA, 32 nt, Homo Sapiens
cuuaaccaggacuccaauugcaacugcuguuc

SEQ ID NO: 270864 - RNA, 32 nt, Homo Sapiens
cuggaguggaucuauuuacauagucauuuagg

SEQ ID NO: 270865 - RNA, 32 nt, Homo Sapiens
ggagcgcgacggcggcggccagaugccccgug

SEQ ID NO: 270866 - RNA, 32 nt, Homo Sapiens
cagcuauggguuucuucuuaaucauuuuuguu

SEQ ID NO: 270867 - RNA, 32 nt, Homo Sapiens
uuuacuaagaccauuucuuuuagaaaacuuug

SEQ ID NO: 270868 - RNA, 32 nt, Homo Sapiens
cuauuuuccucuuuucuuaaacacgaagguua

SEQ ID NO: 270869 - RNA, 32 nt, Homo Sapiens
ggccaaggagccagagcguggaggcggacugu

SEQ ID NO: 270870 - RNA, 32 nt, Homo Sapiens
ccuugucauauaccaucaauaaaguacccugu

SEQ ID NO: 270871 - RNA, 32 nt, Homo Sapiens
ucggccccugucugcugcucgcgccuggagau

SEQ ID NO: 270872 - RNA, 32 nt, Homo Sapiens
aggacagcaccucgaacuacaggcccuaaaga

SEQ ID NO: 270873 - RNA, 32 nt, Homo Sapiens
uuaaaaauauaaauuuuugccacuguuuugug

SEQ ID NO: 270874 - RNA, 32 nt, Homo Sapiens
acauacagcuucacaaaauauuucauuauaag

SEQ ID NO: 270875 - RNA, 32 nt, Homo Sapiens
gcacacccaccggcccggccugccacccgggg

SEQ ID NO: 270876 - RNA, 32 nt, Homo Sapiens
cagcucaaacgggagccaaaacucgaagcuug

SEQ ID NO: 270877 - RNA, 32 nt, Homo Sapiens
aguauucuaauguuucaaguugagaucaugcu

SEQ ID NO: 270878 - RNA, 32 nt, Homo Sapiens
gaggccgccuccccgccagcccugggguccac

SEQ ID NO: 270879 - RNA, 32 nt, Homo Sapiens
acuuuuauaugaugcauuuauucuaaugugau

SEQ ID NO: 270880 - RNA, 32 nt, Homo Sapiens
aagucccgcgucgccgcccuggcggggacggu

SEQ ID NO: 270881 - RNA, 32 nt, Homo Sapiens
cauccccuucccccggccccucucaauaaacg

SEQ ID NO: 270882 - RNA, 32 nt, Homo Sapiens
gcugcaaggaagaaauuaaugauccuaaggaa

SEQ ID NO: 270883 - RNA, 32 nt, Homo Sapiens
aggaggagggacugagcggcggcggcccccgc

SEQ ID NO: 270884 - RNA, 32 nt, Homo Sapiens
agcucacugcugcugccucugaaacagaaagu

SEQ ID NO: 270885 - RNA, 32 nt, Homo Sapiens
gaauguuagaaacuacaaaaccacuaccuugu

SEQ ID NO: 270886 - RNA, 31 nt, Homo Sapiens
gccugggacccugcuccgccccgcgcucccc

SEQ ID NO: 270887 - RNA, 32 nt, Homo Sapiens
ucucaggaauaaaacugcuuuaacggagauga

SEQ ID NO: 270888 - RNA, 32 nt, Homo Sapiens
uuagcaccuuggcaguccuuguccuccuggac

SEQ ID NO: 270889 - RNA, 32 nt, Homo Sapiens
gguuguguuaaugacugaauguugacaauaaa

SEQ ID NO: 270890 - RNA, 32 nt, Homo Sapiens
ucugggcagucccuccucuccccaguguccac

SEQ ID NO: 270891 - RNA, 32 nt, Homo Sapiens
ccuuaagugauacuuuuuuagaaguacauuau

SEQ ID NO: 270892 - RNA, 32 nt, Homo Sapiens
aaaggaaaauacugaguuuagcagaaaacgau

SEQ ID NO: 270893 - RNA, 32 nt, Homo Sapiens
ggccuuucccuuuuccauucagauaaucaaga

SEQ ID NO: 270894 - RNA, 32 nt, Homo Sapiens
gaggcgcccgggacagucauggagcgccgccu

SEQ ID NO: 270895 - RNA, 31 nt, Homo Sapiens
uagcugagaaauuguaggcauguuugauaca

SEQ ID NO: 270896 - RNA, 32 nt, Homo Sapiens
uaugcaggccccaaguuauuuuuuagcaaucu

SEQ ID NO: 270897 - RNA, 32 nt, Homo Sapiens
cuccaacagcuucugccucccuccucaucacu

SEQ ID NO: 270898 - RNA, 32 nt, Homo Sapiens
cauaauuuaaaauaaauaaacuuugggaaaag

SEQ ID NO: 270899 - RNA, 32 nt, Homo Sapiens
accccggcggccucggcgccauggaguccugg

SEQ ID NO: 270900 - RNA, 32 nt, Homo Sapiens
aagucaauaaaaugauagcuuuccuguuugag

SEQ ID NO: 270901 - RNA, 32 nt, Homo Sapiens
caacucaaucccagguuuucucuucuucccuu

SEQ ID NO: 270902 - RNA, 32 nt, Homo Sapiens
uacaugccaugccuaugggccagaguugucuu

SEQ ID NO: 270903 - RNA, 32 nt, Homo Sapiens
uuaaggauagcauuccaaauagacuuugaaua

SEQ ID NO: 270904 - RNA, 28 nt, Homo Sapiens
gccacaguuacagcucaagugcuuacac

SEQ ID NO: 270905 - RNA, 32 nt, Homo Sapiens
gagcccagaacaugcauauaaagcaaacauau

SEQ ID NO: 270906 - RNA, 32 nt, Homo Sapiens
ugagggcgggcgccagcgaacucggagagggg

SEQ ID NO: 270907 - RNA, 32 nt, Homo Sapiens
aguccugcaucuuuucuucugcuuucuucccu

SEQ ID NO: 270908 - RNA, 32 nt, Homo Sapiens
auuuauacaaauaauuuauuuccacuagggaa

SEQ ID NO: 270909 - RNA, 32 nt, Homo Sapiens
cguaaagauucauuuuucaaggagaagagccu

SEQ ID NO: 270910 - RNA, 32 nt, Homo Sapiens
agugucauuccuuuaaggaauuccuuggcaau

SEQ ID NO: 270911 - RNA, 32 nt, Homo Sapiens
uugaguguggguucuccaagcugcuggcacag

SEQ ID NO: 270912 - RNA, 32 nt, Homo Sapiens
uaaugaauuuucauggaugcugauuaaaagac

SEQ ID NO: 270913 - RNA, 32 nt, Homo Sapiens
cgugagccgggaagagggagacgggcagggcg

SEQ ID NO: 270914 - RNA, 32 nt, Homo Sapiens
agaacgagaaaguuaaaaacaagcccacccag

SEQ ID NO: 270915 - RNA, 32 nt, Homo Sapiens
guguggagugggaaggucuugauuugguugac

SEQ ID NO: 270916 - RNA, 32 nt, Homo Sapiens
cggcacuggagugggccgggcaggcucugccu

SEQ ID NO: 270917 - RNA, 32 nt, Homo Sapiens
gacuccaccugccuccuccccaaucccacacu

SEQ ID NO: 270918 - RNA, 32 nt, Homo Sapiens
gcaaggagagcuggaguuggcuccauaacaaa

SEQ ID NO: 270919 - RNA, 32 nt, Homo Sapiens
cacauaagggaagagaggaggauguggcuuuc

SEQ ID NO: 270920 - RNA, 32 nt, Homo Sapiens
gccccggagccgccggccgcuagcgucagcgc

SEQ ID NO: 270921 - RNA, 32 nt, Homo Sapiens
uucgugugcaaggggccggggaggugggcgug

SEQ ID NO: 270922 - RNA, 32 nt, Homo Sapiens
ggaaggguccugaaacacauggccugauuguu

SEQ ID NO: 270923 - RNA, 32 nt, Homo Sapiens
uugcguggccgcugaguugccggcgccggcug

SEQ ID NO: 270924 - RNA, 32 nt, Homo Sapiens
caggcggggucucacuauauuguccaggcuag

SEQ ID NO: 270925 - RNA, 32 nt, Homo Sapiens
cuggaggcggguggcccagaaagccaucuaca

SEQ ID NO: 270926 - RNA, 32 nt, Homo Sapiens
ggcuucagcucuuucccagguguugacuccag

SEQ ID NO: 270927 - RNA, 32 nt, Homo Sapiens
gacuguguccucggugcagaaacuaccagauu

SEQ ID NO: 270928 - RNA, 32 nt, Homo Sapiens
gggcauuuaggccaugcugugcucuacuucau

SEQ ID NO: 270929 - RNA, 32 nt, Homo Sapiens
cccagaugacuccucacccauccaccaccugc

SEQ ID NO: 270930 - RNA, 32 nt, Homo Sapiens
aaaacguuuuaccuaggcuuuaacucaaaaac

SEQ ID NO: 270931 - RNA, 32 nt, Homo Sapiens
ucaagcaauccuuccaccuugcccucccaaag

SEQ ID NO: 270932 - RNA, 32 nt, Homo Sapiens
uuuccccacgcugaccucccccauagacuccg

SEQ ID NO: 270933 - RNA, 32 nt, Homo Sapiens
cugguguaauguaugauauuaacaucugcacc

SEQ ID NO: 270934 - RNA, 32 nt, Homo Sapiens
cuucguucaagaugaauucuguucacagugga

SEQ ID NO: 270935 - RNA, 32 nt, Homo Sapiens
ggcucaucacuggccuggggagggcuugacac

SEQ ID NO: 270936 - RNA, 32 nt, Homo Sapiens
guuuuaaucacaugacuaccugucccaguaca

SEQ ID NO: 270937 - RNA, 32 nt, Homo Sapiens
uguuucccaggcagcucuguggccauggauau

SEQ ID NO: 270938 - RNA, 32 nt, Homo Sapiens
gcccagguggcacacgcccagcugcgucgcag

SEQ ID NO: 270939 - RNA, 32 nt, Homo Sapiens
uuggagugaaacaaauaaauagcauuguauuc

SEQ ID NO: 270940 - RNA, 32 nt, Homo Sapiens
gagccaccgugcccggcccaggacuuuuaaaa

SEQ ID NO: 270941 - RNA, 29 nt, Homo Sapiens
acagguugaucuuuauauuuuacugguug

SEQ ID NO: 270942 - RNA, 32 nt, Homo Sapiens
aagugugagaaccuguucuggauuuguuugaa

SEQ ID NO: 270943 - RNA, 32 nt, Homo Sapiens
cgggaguccuuccuguaccgcucagacagcga

SEQ ID NO: 270944 - RNA, 32 nt, Homo Sapiens
uaacucuucuauuuuauuggggucugaaguua

SEQ ID NO: 270945 - RNA, 32 nt, Homo Sapiens
gggcagggccggggcgugggccggcaggaaga

SEQ ID NO: 270946 - RNA, 32 nt, Homo Sapiens
aagcccagacacuaugguuaucaucaaaacag

SEQ ID NO: 270947 - RNA, 32 nt, Homo Sapiens
aauacagaugacccagaccugacauuaaaucc

SEQ ID NO: 270948 - RNA, 32 nt, Homo Sapiens
accagcucagaugguugaucuuaccauacccu

SEQ ID NO: 270949 - RNA, 32 nt, Homo Sapiens
auaacucaaaaauuaguugaaaaauaauuacu

SEQ ID NO: 270950 - RNA, 32 nt, Homo Sapiens
ccggaggaaaaauacauuugucugggcgaacu

SEQ ID NO: 270951 - RNA, 32 nt, Homo Sapiens
aucuucccaauaacccagagguacaucaagua

SEQ ID NO: 270952 - RNA, 32 nt, Homo Sapiens
uagugcuuuaaacgugaugcauguuuuaaugg

SEQ ID NO: 270953 - RNA, 32 nt, Homo Sapiens
cgcgcuccggagugugccgccggauccucgcu

SEQ ID NO: 270954 - RNA, 32 nt, Homo Sapiens
acucuuuuccuguccugcauuaauuuuccaaa

SEQ ID NO: 270955 - RNA, 30 nt, Homo Sapiens
uccauccaaaucccugccuuccucucugaa

SEQ ID NO: 270956 - RNA, 32 nt, Homo Sapiens
guuagaaaauuccagaguucauauuaaaauau

SEQ ID NO: 270957 - RNA, 29 nt, Homo Sapiens
acagcugcauaugaguaaaguuaccccaa

SEQ ID NO: 270958 - RNA, 32 nt, Homo Sapiens
uucggaagacgccggguccggcugggacugcc

SEQ ID NO: 270959 - RNA, 32 nt, Homo Sapiens
gaggaguggaguuucuuaggcugcuuccucug

SEQ ID NO: 270960 - RNA, 32 nt, Homo Sapiens
caugccuggcccagccccaccucagucuccag

SEQ ID NO: 270961 - RNA, 32 nt, Homo Sapiens
gcuguccaugggugggggcuguguguuagccu

SEQ ID NO: 270962 - RNA, 32 nt, Homo Sapiens
aguuuguuuccugucugauagcaccacacgca

SEQ ID NO: 270963 - RNA, 32 nt, Homo Sapiens
ccuugcauagagugaaauauuuguaaaacucc

SEQ ID NO: 270964 - RNA, 32 nt, Homo Sapiens
uucugguccgcaugcuccugcuccugacucac

SEQ ID NO: 270965 - RNA, 32 nt, Homo Sapiens
cuacacucuugaaagcacuuaaaagugcaagc

SEQ ID NO: 270966 - RNA, 32 nt, Homo Sapiens
gcaugaagcaaagcuauuuuauggaaauaugc

SEQ ID NO: 270967 - RNA, 32 nt, Homo Sapiens
ccccacugcccccaccccacaacaggccccgg

SEQ ID NO: 270968 - RNA, 32 nt, Homo Sapiens
cuccuccucguucuccucccaucagcaagaag

SEQ ID NO: 270969 - RNA, 32 nt, Homo Sapiens
cuguccgucgaggcauaucuucaccaacguua

SEQ ID NO: 270970 - RNA, 32 nt, Homo Sapiens
uccgaagagauuuuuagugcugagugauuuuc

SEQ ID NO: 270971 - RNA, 32 nt, Homo Sapiens
uuagguauuuucccuuuuaaugugguuuugaa

SEQ ID NO: 270972 - RNA, 32 nt, Homo Sapiens
ccucugcccucccuucuugugcccuuaaaacc

SEQ ID NO: 270973 - RNA, 32 nt, Homo Sapiens
agaacagcaccaagccauucaugggggaaucu

SEQ ID NO: 270974 - RNA, 28 nt, Homo Sapiens
ucgagaguuccuaccagguggccaaggc

SEQ ID NO: 270975 - RNA, 32 nt, Homo Sapiens
cguggguuuugugaaagagagcuagcuggcgg

SEQ ID NO: 270976 - RNA, 32 nt, Homo Sapiens
aaauacagugugucuucuuuuauucacaaaau

SEQ ID NO: 270977 - RNA, 32 nt, Homo Sapiens
cucucucugcccaugagcugccacacagcacc

SEQ ID NO: 270978 - RNA, 32 nt, Homo Sapiens
ccucgcccgccuuugaaguuugcugugccgac

SEQ ID NO: 270979 - RNA, 32 nt, Homo Sapiens
gauguacacacacagauggcagacgucucccc

SEQ ID NO: 270980 - RNA, 32 nt, Homo Sapiens
gcaagugagagccggacgggcacugggcgacu

SEQ ID NO: 270981 - RNA, 32 nt, Homo Sapiens
gaaugauauggacuuagugaauucuaaggaac

SEQ ID NO: 270982 - RNA, 32 nt, Homo Sapiens
uuaaugguauuucuuuuuuacacucuacaagu

SEQ ID NO: 270983 - RNA, 29 nt, Homo Sapiens
accuugaugaagaccuggacuauugaaug

SEQ ID NO: 270984 - RNA, 32 nt, Homo Sapiens
acagcgccggucguguuuacggcggcgcccgc

SEQ ID NO: 270985 - RNA, 32 nt, Homo Sapiens
uuggcaucaaggaacaccagcuacaaaccaag

SEQ ID NO: 270986 - RNA, 32 nt, Homo Sapiens
cccuacucgggcauagagcugguacacuagca

SEQ ID NO: 270987 - RNA, 32 nt, Homo Sapiens
uuguucauuccucccgguggguucguggucug

SEQ ID NO: 270988 - RNA, 32 nt, Homo Sapiens
uuacuucuuuguuuuucuuaaugauggcaauu

SEQ ID NO: 270989 - RNA, 32 nt, Homo Sapiens
ucuguucuguuguuuacugucuccuuuguggg

SEQ ID NO: 270990 - RNA, 30 nt, Homo Sapiens
gucacugucugugucacugcaguggugcgg

SEQ ID NO: 270991 - RNA, 32 nt, Homo Sapiens
cuuaauuucuaaaacuuuuaauuuuucugcuu

SEQ ID NO: 270992 - RNA, 32 nt, Homo Sapiens
aauaaccggcccggcccccguccgcgcgcguc

SEQ ID NO: 270993 - RNA, 32 nt, Homo Sapiens
gaggacccuaauuauugcuuucaacggacaaa

SEQ ID NO: 270994 - RNA, 32 nt, Homo Sapiens
gagggucuggggggaaggggcuggggaguggg

SEQ ID NO: 270995 - RNA, 32 nt, Homo Sapiens
augauguaugcaaaaauacugaagcuaggaaa

SEQ ID NO: 270996 - RNA, 32 nt, Homo Sapiens
ggccuccucucccugcuggcagaugggaacag

SEQ ID NO: 270997 - RNA, 32 nt, Homo Sapiens
agggcuugcaucacgucacuccagugguuccc

SEQ ID NO: 270998 - RNA, 32 nt, Homo Sapiens
gacacccccggagguuccagaucguggacauc

SEQ ID NO: 270999 - RNA, 32 nt, Homo Sapiens
uugcuguauggaaaaauaaagugaaauugccc

SEQ ID NO: 271000 - RNA, 32 nt, Homo Sapiens
ucagcucuuguacagacaugugcucuggggaa

SEQ ID NO: 271001 - RNA, 32 nt, Homo Sapiens
gagaacacacaggcagcagagaccauggggcc

SEQ ID NO: 271002 - RNA, 32 nt, Homo Sapiens
cauaguaauaauaugucauuguacauguugaa

SEQ ID NO: 271003 - RNA, 32 nt, Homo Sapiens
uccccaucucggccggcccggagcucgcccac

SEQ ID NO: 271004 - RNA, 32 nt, Homo Sapiens
cuggcccgggacgcgcccggagcccagggaag

SEQ ID NO: 271005 - RNA, 32 nt, Homo Sapiens
acauuuugagaaccauacugcuauagaucaau

SEQ ID NO: 271006 - RNA, 32 nt, Homo Sapiens
uguagcagugugccuccauggccuagggcggu

SEQ ID NO: 271007 - RNA, 32 nt, Homo Sapiens
aagagcccgcaugcccuagacucacuccagag

SEQ ID NO: 271008 - RNA, 32 nt, Homo Sapiens
aucucccgagcgacccccggcgcccgcccgcc

SEQ ID NO: 271009 - RNA, 32 nt, Homo Sapiens
cugcuaauacacagcccuccccaaggcccgug

SEQ ID NO: 271010 - RNA, 32 nt, Homo Sapiens
cgggcguuaccaucguccgugcgcaccgcccg

SEQ ID NO: 271011 - RNA, 32 nt, Homo Sapiens
uagccuaccagccugcccucuucuggucugug

SEQ ID NO: 271012 - RNA, 30 nt, Homo Sapiens
acugugacuuugucugcagaagagcuggaa

SEQ ID NO: 271013 - RNA, 32 nt, Homo Sapiens
cugggagccacgugcuggccauguggccaggg

SEQ ID NO: 271014 - RNA, 32 nt, Homo Sapiens
gcguguccucuguguccagcagccgccugcag

SEQ ID NO: 271015 - RNA, 32 nt, Homo Sapiens
cuguguccacaccugaauaucaucucaaauug

SEQ ID NO: 271016 - RNA, 32 nt, Homo Sapiens
uggccuuugcaaccagccagcauuccaauuua

SEQ ID NO: 271017 - RNA, 32 nt, Homo Sapiens
aaugagcucuuccaauccaaaaauguuaaaau

SEQ ID NO: 271018 - RNA, 32 nt, Homo Sapiens
uuggauguaaauauucaguuuauauaauuaua

SEQ ID NO: 271019 - RNA, 32 nt, Homo Sapiens
ccagguacuggaaaaucugaggcuacuagaga

SEQ ID NO: 271020 - RNA, 32 nt, Homo Sapiens
uuuuggugugccuaucucugauggaugauuga

SEQ ID NO: 271021 - RNA, 32 nt, Homo Sapiens
ccuauaaacuggggcagaggaaaagaaugaug

SEQ ID NO: 271022 - RNA, 32 nt, Homo Sapiens
uauauaaaacaauuugggggccaggcacgaug

SEQ ID NO: 271023 - RNA, 32 nt, Homo Sapiens
cucuuggagaacugaggcugaggguagaggga

SEQ ID NO: 271024 - RNA, 31 nt, Homo Sapiens
cuuccgcggcacugacucugcgccgugucac

SEQ ID NO: 271025 - RNA, 32 nt, Homo Sapiens
cccccaccccgauuccucuccccagaagcggu

SEQ ID NO: 271026 - RNA, 32 nt, Homo Sapiens
auugguggacagccuucuucucuuaaucacaa

SEQ ID NO: 271027 - RNA, 32 nt, Homo Sapiens
accaaagagcugccucuugguggcaguauucc

SEQ ID NO: 271028 - RNA, 32 nt, Homo Sapiens
uuggaggcgguagcuuuuucggcgucgagacu

SEQ ID NO: 271029 - RNA, 32 nt, Homo Sapiens
cggugccaggaugcaccggggguguggaugac

SEQ ID NO: 271030 - RNA, 32 nt, Homo Sapiens
ccauugacacuauaaagcaaguaaacaaugaa

SEQ ID NO: 271031 - RNA, 32 nt, Homo Sapiens
aggauaaauggcauuguccaucucuuuaauga

SEQ ID NO: 271032 - RNA, 32 nt, Homo Sapiens
uucccuuuauugucuauaaaucuuccaccaug

SEQ ID NO: 271033 - RNA, 32 nt, Homo Sapiens
uaagauuuaaccaacaucaacaaaauaaaaac

SEQ ID NO: 271034 - RNA, 32 nt, Homo Sapiens
guuuggaaaaauuugucacauggucagugaug

SEQ ID NO: 271035 - RNA, 32 nt, Homo Sapiens
uugaagagacagcagcccauccccucagccca

SEQ ID NO: 271036 - RNA, 32 nt, Homo Sapiens
gcuuggcuguuuagugguuuggagcauaguga

SEQ ID NO: 271037 - RNA, 32 nt, Homo Sapiens
agcucucacucugugccaaacacaugcuugaa

SEQ ID NO: 271038 - RNA, 32 nt, Homo Sapiens
uaacuaggaaguggcagaacugauucuccagc

SEQ ID NO: 271039 - RNA, 32 nt, Homo Sapiens
guuccaaaugucaaaauuugugauuuuuuaga

SEQ ID NO: 271040 - RNA, 32 nt, Homo Sapiens
gacccagacaguguuuuccucccgggggccgu

SEQ ID NO: 271041 - RNA, 32 nt, Homo Sapiens
aaaaacagccuccgcaccauuccucccagggu

SEQ ID NO: 271042 - RNA, 32 nt, Homo Sapiens
gagcugucacugccgaaaacaggccgcaagag

SEQ ID NO: 271043 - RNA, 32 nt, Homo Sapiens
uuacauugauaaaauaguaagucaauccagga

SEQ ID NO: 271044 - RNA, 32 nt, Homo Sapiens
aguuguccggggcggggguggggggugcugcg

SEQ ID NO: 271045 - RNA, 32 nt, Homo Sapiens
gagugagaggcacaugaagagaaguauucaag

SEQ ID NO: 271046 - RNA, 32 nt, Homo Sapiens
uaguauaucuuacuuuuuggaaauguuuuaug

SEQ ID NO: 271047 - RNA, 32 nt, Homo Sapiens
acaugugaggcucuccccuccuccccuccccc

SEQ ID NO: 271048 - RNA, 32 nt, Homo Sapiens
gcgccacagagaagacccccgggaguucggcg

SEQ ID NO: 271049 - RNA, 32 nt, Homo Sapiens
gcugggaaaaggaaagcaaugccucugucuug

SEQ ID NO: 271050 - RNA, 32 nt, Homo Sapiens
agccucgaaauuccuguaaauuguuuacuuua

SEQ ID NO: 271051 - RNA, 32 nt, Homo Sapiens
cggcaauguugguggcucuugcauuccucugg

SEQ ID NO: 271052 - RNA, 32 nt, Homo Sapiens
aggaggggccggccagcucugcuugcacaggg

SEQ ID NO: 271053 - RNA, 32 nt, Homo Sapiens
uuugggaccaaagggauuguugacguuuuccc

SEQ ID NO: 271054 - RNA, 32 nt, Homo Sapiens
aacuaaaguauucuucguuucuuuagucaaau

SEQ ID NO: 271055 - RNA, 32 nt, Homo Sapiens
ggacccaccagcucucuccccaucccgcuucu

SEQ ID NO: 271056 - RNA, 31 nt, Homo Sapiens
gaaaugauauaaaaacuauagucauaagaag

SEQ ID NO: 271057 - RNA, 32 nt, Homo Sapiens
cuuucugagaucaucuuccucauuuauuucuc

SEQ ID NO: 271058 - RNA, 32 nt, Homo Sapiens
augcuuauauugcaucccugaucaccgugugc

SEQ ID NO: 271059 - RNA, 32 nt, Homo Sapiens
uuuuuaaguuccuuccaaauauguuaguaccu

SEQ ID NO: 271060 - RNA, 32 nt, Homo Sapiens
ccuucccuaccuugagugagcuuccucugcau

SEQ ID NO: 271061 - RNA, 32 nt, Homo Sapiens
ccgcagcgcaaucccggcgcucgcccaaggac

SEQ ID NO: 271062 - RNA, 32 nt, Homo Sapiens
cuccuuuaagauacaggaagcuuggaagcgga

SEQ ID NO: 271063 - RNA, 32 nt, Homo Sapiens
cugucaucaguggugugauuuuaccagaugcu

SEQ ID NO: 271064 - RNA, 32 nt, Homo Sapiens
ccuucaccguggcuaccauugucacucguagg

SEQ ID NO: 271065 - RNA, 32 nt, Homo Sapiens
gccaaacaccaacuucuguuuccauuccagcu

SEQ ID NO: 271066 - RNA, 32 nt, Homo Sapiens
cggagucucccucuucugcuuuucccagcagg

SEQ ID NO: 271067 - RNA, 32 nt, Homo Sapiens
ggagaagcugucucaaagacuugagccccaag

SEQ ID NO: 271068 - RNA, 32 nt, Homo Sapiens
caugaggaaggaaaguugaugaacuaguacgg

SEQ ID NO: 271069 - RNA, 32 nt, Homo Sapiens
gagggaucaguucuuaacuuuucagggucuac

SEQ ID NO: 271070 - RNA, 32 nt, Homo Sapiens
caguauuggagguggagccuagugggagguga

SEQ ID NO: 271071 - RNA, 32 nt, Homo Sapiens
ucuggccuuucugggucgacacgcacguagac

SEQ ID NO: 271072 - RNA, 32 nt, Homo Sapiens
ggccgcacucucugggggcgagggccagguca

SEQ ID NO: 271073 - RNA, 32 nt, Homo Sapiens
guucuuugaaagauaaaauuaaauacaugagu

SEQ ID NO: 271074 - RNA, 32 nt, Homo Sapiens
ccugggggagggguuuggggcugguuugacuu

SEQ ID NO: 271075 - RNA, 26 nt, Homo Sapiens
aauaacuaaaaauaaacuuagaaaau

SEQ ID NO: 271076 - RNA, 31 nt, Homo Sapiens
ugccuccauggugaucgucuucuacugcaac

SEQ ID NO: 271077 - RNA, 32 nt, Homo Sapiens
uggccgcugccgcuccucgauccccacggcuu

SEQ ID NO: 271078 - RNA, 32 nt, Homo Sapiens
agaagcuguccguggcggcugguguuggcugg

SEQ ID NO: 271079 - RNA, 31 nt, Homo Sapiens
uacaggguuucacccuguuagccaggauggu

SEQ ID NO: 271080 - RNA, 32 nt, Homo Sapiens
aguuaagagcugucacaagcacaaaucuuucc

SEQ ID NO: 271081 - RNA, 32 nt, Homo Sapiens
uguucaagauaaaacuguuuuaagauauacgu

SEQ ID NO: 271082 - RNA, 32 nt, Homo Sapiens
auccuggcccucccccaaccacguuuuucuuu

SEQ ID NO: 271083 - RNA, 32 nt, Homo Sapiens
auccuguguuugcuccuccccucauacaagag

SEQ ID NO: 271084 - RNA, 32 nt, Homo Sapiens
gaggcaggagagaggaggaggagugcggcgcg

SEQ ID NO: 271085 - RNA, 32 nt, Homo Sapiens
ggcugagacgagccagcuuagacuaauuggua

SEQ ID NO: 271086 - RNA, 32 nt, Homo Sapiens
guccccagaaaaggcccagcaguccaggaggu

SEQ ID NO: 271087 - RNA, 32 nt, Homo Sapiens
ggaucagugcuaaaggaagaggcagccgggug

SEQ ID NO: 271088 - RNA, 32 nt, Homo Sapiens
acccgcccaucccaggacuccagaugccagga

SEQ ID NO: 271089 - RNA, 32 nt, Homo Sapiens
agaaacaacugggaauccugaaagagaagcag

SEQ ID NO: 271090 - RNA, 32 nt, Homo Sapiens
cacuguauguuuacuucucaccauuugaguug

SEQ ID NO: 271091 - RNA, 32 nt, Homo Sapiens
gggaggaggcggagagcaauguguuacagaug

SEQ ID NO: 271092 - RNA, 27 nt, Homo Sapiens
cuggucucuucccacagcccccagcag

SEQ ID NO: 271093 - RNA, 32 nt, Homo Sapiens
agauuccugauccacaccccaacccaacaacc

SEQ ID NO: 271094 - RNA, 32 nt, Homo Sapiens
aacucacuucccuccuccacuacuccaggugu

SEQ ID NO: 271095 - RNA, 32 nt, Homo Sapiens
auucgguaagucugaucaaaucaauaaagcaa

SEQ ID NO: 271096 - RNA, 32 nt, Homo Sapiens
aguccucccucccccuucuccuucacccccaa

SEQ ID NO: 271097 - RNA, 32 nt, Homo Sapiens
uugucauccaagguagcugugcacuugccuug

SEQ ID NO: 271098 - RNA, 32 nt, Homo Sapiens
ugagucagcaaacuccgcggcccgcaagcccg

SEQ ID NO: 271099 - RNA, 32 nt, Homo Sapiens
ccaaauuaaaagaccuaaaccuuaccaaauug

SEQ ID NO: 271100 - RNA, 32 nt, Homo Sapiens
agccuuuucacacagcacuccccucagacacc

SEQ ID NO: 271101 - RNA, 32 nt, Homo Sapiens
agcgcggccccggcucucgcugcagcgccgcc

SEQ ID NO: 271102 - RNA, 32 nt, Homo Sapiens
cggguggggcgccugggugguccccaaggucg

SEQ ID NO: 271103 - RNA, 32 nt, Homo Sapiens
accccacuucuuuuagcaaggucugaaaguuu

SEQ ID NO: 271104 - RNA, 32 nt, Homo Sapiens
uauucaaaaauuuuauacuuuaaguucuuacc

SEQ ID NO: 271105 - RNA, 32 nt, Homo Sapiens
ggagcagcccccggccccggcgcgccgccgac

SEQ ID NO: 271106 - RNA, 32 nt, Homo Sapiens
gugcgagggggccagcgacgccggccaccaac

SEQ ID NO: 271107 - RNA, 32 nt, Homo Sapiens
cgggcacacacaggaccgugccucacagggcc

SEQ ID NO: 271108 - RNA, 32 nt, Homo Sapiens
uuaugcagcauuaaccuuuuucuccagaucau

SEQ ID NO: 271109 - RNA, 32 nt, Homo Sapiens
aauugucauuuucuaaaguccuuuugcuaaaa

SEQ ID NO: 271110 - RNA, 32 nt, Homo Sapiens
augcaaucugccucccuuuuuguuuucccaaa

SEQ ID NO: 271111 - RNA, 32 nt, Homo Sapiens
gcauuaauguugauauuuuuuaaauauugugu

SEQ ID NO: 271112 - RNA, 32 nt, Homo Sapiens
guagugccuggccccagccccaggcagccaca

SEQ ID NO: 271113 - RNA, 32 nt, Homo Sapiens
gagcgggcgggccagcgccgcggaguuucggg

SEQ ID NO: 271114 - RNA, 32 nt, Homo Sapiens
cuguacccaggaauggagccugcacggugaau

SEQ ID NO: 271115 - RNA, 32 nt, Homo Sapiens
guuguuaggagaaugaaugaggugauauccac

SEQ ID NO: 271116 - RNA, 32 nt, Homo Sapiens
aggcucgggcugcggggcgcggggacuccggg

SEQ ID NO: 271117 - RNA, 32 nt, Homo Sapiens
ccaagccccccgcccucccgccgcggucccag

SEQ ID NO: 271118 - RNA, 32 nt, Homo Sapiens
ccagcgugaacagagccaugccccacccuccc

SEQ ID NO: 271119 - RNA, 32 nt, Homo Sapiens
uuuuuguauaguaaagugauaauuucuggaau

SEQ ID NO: 271120 - RNA, 32 nt, Homo Sapiens
aagauuauagagcauaauaauuuuguaaaugg

SEQ ID NO: 271121 - RNA, 32 nt, Homo Sapiens
cagauuuugcuuuuuauuuauuuauaauguaa

SEQ ID NO: 271122 - RNA, 32 nt, Homo Sapiens
uucugcuagcuauauauuuaggaaauucaaag

SEQ ID NO: 271123 - RNA, 32 nt, Homo Sapiens
auugcuccuaggauagguuuggaccagucuga

SEQ ID NO: 271124 - RNA, 32 nt, Homo Sapiens
gagggaauuaggaugguggaauauugguguua

SEQ ID NO: 271125 - RNA, 32 nt, Homo Sapiens
cgccugugcccaucugcugaccccgcucugaa

SEQ ID NO: 271126 - RNA, 32 nt, Homo Sapiens
aaugagcuagugguguuuguccugcuccgucc

SEQ ID NO: 271127 - RNA, 32 nt, Homo Sapiens
gucuucagaaaagugauguggacauaggaggc

SEQ ID NO: 271128 - RNA, 32 nt, Homo Sapiens
uugucauuguuauauaaucauuauuacuuuug

SEQ ID NO: 271129 - RNA, 30 nt, Homo Sapiens
aaauuauuuguguugggggaaauguugugg

SEQ ID NO: 271130 - RNA, 32 nt, Homo Sapiens
cgcugugcgggcccuacgccgagagcuucggc

SEQ ID NO: 271131 - RNA, 32 nt, Homo Sapiens
gcccacaaggaccagggguccccugagucauc

SEQ ID NO: 271132 - RNA, 32 nt, Homo Sapiens
auaaguauuugauggcacaaauccauggcugg

SEQ ID NO: 271133 - RNA, 32 nt, Homo Sapiens
acaaugaauugagaccuggaggucuuggguug

SEQ ID NO: 271134 - RNA, 32 nt, Homo Sapiens
uuucaucauugcuucuagaagucugcaauucu

SEQ ID NO: 271135 - RNA, 32 nt, Homo Sapiens
acuauuuuguaucuacagucggauaauggauu

SEQ ID NO: 271136 - RNA, 32 nt, Homo Sapiens
aauacucugauuaucacccauguacagagaca

SEQ ID NO: 271137 - RNA, 32 nt, Homo Sapiens
auauucuuagaauugagauugcuacacggagc

SEQ ID NO: 271138 - RNA, 32 nt, Homo Sapiens
gggcgggggucgugugcuuggaggaagccgcg

SEQ ID NO: 271139 - RNA, 32 nt, Homo Sapiens
uacuuucaaauuauuaccaugaguauaauuuu

SEQ ID NO: 271140 - RNA, 32 nt, Homo Sapiens
aagcggguggaucacccgaggucaggaguuga

SEQ ID NO: 271141 - RNA, 32 nt, Homo Sapiens
ucccaggaagcaggcucacaagagccagacag

SEQ ID NO: 271142 - RNA, 32 nt, Homo Sapiens
guagaguucagaaugacuguuuucucaugugc

SEQ ID NO: 271143 - RNA, 32 nt, Homo Sapiens
acccuccccccgccagcuccauccccagcuuu

SEQ ID NO: 271144 - RNA, 32 nt, Homo Sapiens
ccugcucccaagcagacaccacgugcuccucc

SEQ ID NO: 271145 - RNA, 30 nt, Homo Sapiens
aguauuaaaaauuuuucauuuacaugcuga

SEQ ID NO: 271146 - RNA, 32 nt, Homo Sapiens
cgguaccgcuccccagcucacugcgccccuuu

SEQ ID NO: 271147 - RNA, 32 nt, Homo Sapiens
aaucuccagagauaagaccacuuuuuuaucug

SEQ ID NO: 271148 - RNA, 32 nt, Homo Sapiens
gucugccacgugcggcagcccggagcccagga

SEQ ID NO: 271149 - RNA, 32 nt, Homo Sapiens
auucuguagcaaauaaauccuuugaaagagcu

SEQ ID NO: 271150 - RNA, 32 nt, Homo Sapiens
guuuucucauuucuuaaaccagaaguuuauga

SEQ ID NO: 271151 - RNA, 32 nt, Homo Sapiens
acauaggggucuaagugaccaauggauuguuc

SEQ ID NO: 271152 - RNA, 32 nt, Homo Sapiens
ccgggccuuucucguucacaccggugguaucu

SEQ ID NO: 271153 - RNA, 32 nt, Homo Sapiens
ggggugaggaggaggcaucuaccccuggccuu

SEQ ID NO: 271154 - RNA, 32 nt, Homo Sapiens
caccuggugcugagcuggggccccgccuccuu

SEQ ID NO: 271155 - RNA, 32 nt, Homo Sapiens
acgcggaggcugggccauuaugagcucugcau

SEQ ID NO: 271156 - RNA, 32 nt, Homo Sapiens
ccgugucccucaugggugagcccuccagcugu

SEQ ID NO: 271157 - RNA, 32 nt, Homo Sapiens
ucaaaauauaauuauuugauuaagagaagucu

SEQ ID NO: 271158 - RNA, 32 nt, Homo Sapiens
ggaaagcccugcccuggcaugggaggggcuac

SEQ ID NO: 271159 - RNA, 32 nt, Homo Sapiens
cugcuaugcgcggcagcccgcgccggggccgg

SEQ ID NO: 271160 - RNA, 32 nt, Homo Sapiens
gugacuaaaggaaaaaacuuugacuuugccca

SEQ ID NO: 271161 - RNA, 32 nt, Homo Sapiens
cgcggucgcccagcacgccgggacgcgcgugg

SEQ ID NO: 271162 - RNA, 32 nt, Homo Sapiens
uauaucugaaauuuguaauaaaaucaacuuca

SEQ ID NO: 271163 - RNA, 32 nt, Homo Sapiens
cauauccucuacgguuauuuccugcuuucuaa

SEQ ID NO: 271164 - RNA, 29 nt, Homo Sapiens
ucccucauauguaggugcugggaaaaggg

SEQ ID NO: 271165 - RNA, 32 nt, Homo Sapiens
ccuccuggcuccugggcugggacaagugagga

SEQ ID NO: 271166 - RNA, 32 nt, Homo Sapiens
agaguuucucacugccuaauaggcuaaugugc

SEQ ID NO: 271167 - RNA, 32 nt, Homo Sapiens
ucauuuuccucauuuccaacauuguuuuaaaa

SEQ ID NO: 271168 - RNA, 32 nt, Homo Sapiens
ggguggagagggccacacccaccugggccccu

SEQ ID NO: 271169 - RNA, 32 nt, Homo Sapiens
uucaccauugagaccgugaagauacuuuguau

SEQ ID NO: 271170 - RNA, 32 nt, Homo Sapiens
uuaucauguacaagagugagauuaucauguac

SEQ ID NO: 271171 - RNA, 32 nt, Homo Sapiens
cggagaggcuccugggaaacucccacggccca

SEQ ID NO: 271172 - RNA, 32 nt, Homo Sapiens
uaaacauagaaaggguacaguaaaaauauggu

SEQ ID NO: 271173 - RNA, 32 nt, Homo Sapiens
auagcuugagccugugagaucgagauuacagu

SEQ ID NO: 271174 - RNA, 32 nt, Homo Sapiens
aacauccacagugucugcuggucguggucaga

SEQ ID NO: 271175 - RNA, 32 nt, Homo Sapiens
ccagaaugccaccaucccaccucugagacucc

SEQ ID NO: 271176 - RNA, 32 nt, Homo Sapiens
cccucccugccagcugcccccaccgccuuccc

SEQ ID NO: 271177 - RNA, 32 nt, Homo Sapiens
uucuuugucagauaaugcuuuuuuauguguuu

SEQ ID NO: 271178 - RNA, 28 nt, Homo Sapiens
ggugagggggccugggucuacacacgug

SEQ ID NO: 271179 - RNA, 32 nt, Homo Sapiens
ccauuauguuguaagaaauuauagauguuuug

SEQ ID NO: 271180 - RNA, 32 nt, Homo Sapiens
acuuuugaaauauuuggaucuaguuucuaagu

SEQ ID NO: 271181 - RNA, 32 nt, Homo Sapiens
cuuuucuccaugaacccaggucguccagcagg

SEQ ID NO: 271182 - RNA, 32 nt, Homo Sapiens
uauuaguuuuaaaauauuuguaucucauuugu

SEQ ID NO: 271183 - RNA, 32 nt, Homo Sapiens
ucccaggagcucuggagguacaggauuuccac

SEQ ID NO: 271184 - RNA, 32 nt, Homo Sapiens
ucuauggagcccauguaauaauuguuuuuuca

SEQ ID NO: 271185 - RNA, 32 nt, Homo Sapiens
aagccgguucccugcaccgagccccgggugcg

SEQ ID NO: 271186 - RNA, 32 nt, Homo Sapiens
cauaguuuuaucaguguauuuagacacuaucu

SEQ ID NO: 271187 - RNA, 32 nt, Homo Sapiens
auauaaauauaaauaugaaaucauaucgagug

SEQ ID NO: 271188 - RNA, 29 nt, Homo Sapiens
cccauuaagaagguuggcuuggccaggca

SEQ ID NO: 271189 - RNA, 32 nt, Homo Sapiens
uuaguaaaacaaaauaacuaaagaaaugugag

SEQ ID NO: 271190 - RNA, 32 nt, Homo Sapiens
cuguagagcguagaguggcagcucuccaagaa

SEQ ID NO: 271191 - RNA, 32 nt, Homo Sapiens
uuaaaaaaggauucauaacguggugauugugu

SEQ ID NO: 271192 - RNA, 32 nt, Homo Sapiens
gagcuguccaggugcugccuggugauccgcac

SEQ ID NO: 271193 - RNA, 32 nt, Homo Sapiens
uucaucauauaucaucaucauuauuauggugg

SEQ ID NO: 271194 - RNA, 32 nt, Homo Sapiens
gccauguggcuuugggccuagagcuuguugau

SEQ ID NO: 271195 - RNA, 32 nt, Homo Sapiens
cccaguggaacacuuagugacuaucacagccg

SEQ ID NO: 271196 - RNA, 32 nt, Homo Sapiens
uagaaaccaagagcugucgugaaagcccugaa

SEQ ID NO: 271197 - RNA, 32 nt, Homo Sapiens
ccacccuacagccccagguccuggcccagucc

SEQ ID NO: 271198 - RNA, 32 nt, Homo Sapiens
ggggagaagauauuuaauugaaacccgcacgc

SEQ ID NO: 271199 - RNA, 32 nt, Homo Sapiens
cgucucaaaacaaacaaacaaacaaacaaaca

SEQ ID NO: 271200 - RNA, 32 nt, Homo Sapiens
ccugggcucccucuugauuaguaggugacauu

SEQ ID NO: 271201 - RNA, 32 nt, Homo Sapiens
uuccaggagcaccaccugagugaggugcagaa

SEQ ID NO: 271202 - RNA, 32 nt, Homo Sapiens
aucuuuauauaguuuuguaaaaauauugcuua

SEQ ID NO: 271203 - RNA, 32 nt, Homo Sapiens
cuuugauaaggaaauggcacaaacauaaaggg

SEQ ID NO: 271204 - RNA, 32 nt, Homo Sapiens
cugccucuaccuugcugugccucucuggcuuu

SEQ ID NO: 271205 - RNA, 32 nt, Homo Sapiens
cagggaggagagcggcuguggagaaacuuccu

SEQ ID NO: 271206 - RNA, 32 nt, Homo Sapiens
ggcuuuugcuuuggauuuuuuaugaaauauau

SEQ ID NO: 271207 - RNA, 32 nt, Homo Sapiens
gcacuuggagggcccaggugucucuccaccag

SEQ ID NO: 271208 - RNA, 28 nt, Homo Sapiens
ccgaugauggcggacggcgccgcagcug

SEQ ID NO: 271209 - RNA, 32 nt, Homo Sapiens
ugucugugcacaccucacggcaagggccagcc

SEQ ID NO: 271210 - RNA, 32 nt, Homo Sapiens
uaaccaaugcauuuagauuuuucauuucggug

SEQ ID NO: 271211 - RNA, 32 nt, Homo Sapiens
aaugggagagcuauaaaaggcagagcuaugug

SEQ ID NO: 271212 - RNA, 32 nt, Homo Sapiens
uaguauuuaaaauaaauucuuaaucagaggag

SEQ ID NO: 271213 - RNA, 32 nt, Homo Sapiens
uguggccucccaccccaccccacccuucacac

SEQ ID NO: 271214 - RNA, 32 nt, Homo Sapiens
agagaacugcugcgcgggaggccauggccggc

SEQ ID NO: 271215 - RNA, 32 nt, Homo Sapiens
uaugugcagguccuuacacacuuuucucuaaa

SEQ ID NO: 271216 - RNA, 32 nt, Homo Sapiens
acugggcuggugccuccuccgcuucaggguau

SEQ ID NO: 271217 - RNA, 32 nt, Homo Sapiens
ggauaauuuaaagaugucuucugaagauguaa

SEQ ID NO: 271218 - RNA, 32 nt, Homo Sapiens
aucgcccagagaagcaccagcccugggcagga

SEQ ID NO: 271219 - RNA, 32 nt, Homo Sapiens
ggggaagcucauuugaggaguggugguaaaau

SEQ ID NO: 271220 - RNA, 32 nt, Homo Sapiens
gcggccggguggccgugugcccugggugcagc

SEQ ID NO: 271221 - RNA, 32 nt, Homo Sapiens
uacuguauaacaaauuugaauuuagaaauaau

SEQ ID NO: 271222 - RNA, 32 nt, Homo Sapiens
cagugaaguauuugaagccaucaacaucacaa

SEQ ID NO: 271223 - RNA, 32 nt, Homo Sapiens
gcgccccagcagcguccccggucgccaguggg

SEQ ID NO: 271224 - RNA, 32 nt, Homo Sapiens
ucaaauuuucuuuguuuccauuccaaaaucaa

SEQ ID NO: 271225 - RNA, 29 nt, Homo Sapiens
ucuacagcauaugagaaaagcuaccuuuc

SEQ ID NO: 271226 - RNA, 32 nt, Homo Sapiens
uuuaacuguauccaauguguggauguuuuaag

SEQ ID NO: 271227 - RNA, 32 nt, Homo Sapiens
gggggcuguggacccccggccccugggacuca

SEQ ID NO: 271228 - RNA, 30 nt, Homo Sapiens
gaacgaugacagaaaaggaggugcuggagu

SEQ ID NO: 271229 - RNA, 32 nt, Homo Sapiens
ccuuugugacucaagguugaauuaaaaugccu

SEQ ID NO: 271230 - RNA, 32 nt, Homo Sapiens
aacauugauugaaauagucauauuuuacuuag

SEQ ID NO: 271231 - RNA, 32 nt, Homo Sapiens
acagauugugaugggaaaauguuuucuguagg

SEQ ID NO: 271232 - RNA, 32 nt, Homo Sapiens
gaauagguagugacuuuuuucuuuuucguggg

SEQ ID NO: 271233 - RNA, 32 nt, Homo Sapiens
guauugaaguucaaauccagauaguauuacau

SEQ ID NO: 271234 - RNA, 32 nt, Homo Sapiens
uaaauguuuggguuucugaauuuaaacagauc

SEQ ID NO: 271235 - RNA, 32 nt, Homo Sapiens
uuugccccuaaaaugucuuuaauacacauuac

SEQ ID NO: 271236 - RNA, 32 nt, Homo Sapiens
uccuauaaauguuuuguuccaaauguuuuuau

SEQ ID NO: 271237 - RNA, 32 nt, Homo Sapiens
acgcccagccaugaagauuaaauuuuuaaaaa

SEQ ID NO: 271238 - RNA, 32 nt, Homo Sapiens
aaagaguguaagauggucaauauuugguuucc

SEQ ID NO: 271239 - RNA, 32 nt, Homo Sapiens
ggaccaggacuucagggccacaggugcugcca

SEQ ID NO: 271240 - RNA, 32 nt, Homo Sapiens
uuggcaaacaauuaaugcuuaauauuuuggau

SEQ ID NO: 271241 - RNA, 32 nt, Homo Sapiens
agauucuuccugaaagucauauggguagaggg

SEQ ID NO: 271242 - RNA, 32 nt, Homo Sapiens
caaacaugaaaagauagcugcaugcaaugggc

SEQ ID NO: 271243 - RNA, 32 nt, Homo Sapiens
aggcuguugggucucaggacuccaggaccuac

SEQ ID NO: 271244 - RNA, 32 nt, Homo Sapiens
aucugugcugaguuuuucaaaggucagagcag

SEQ ID NO: 271245 - RNA, 32 nt, Homo Sapiens
aaagcuuugacuguucgacgugccugcucagc

SEQ ID NO: 271246 - RNA, 29 nt, Homo Sapiens
cuaaaucuauaugaguaccauauuuuuau

SEQ ID NO: 271247 - RNA, 30 nt, Homo Sapiens
cugaagaagaagcuugaugcuuggcuguca

SEQ ID NO: 271248 - RNA, 32 nt, Homo Sapiens
cguugcgggcgggagcggcugcaacgccggug

SEQ ID NO: 271249 - RNA, 32 nt, Homo Sapiens
uaggggcuguugcauuuuuuuauuaguagaaa

SEQ ID NO: 271250 - RNA, 32 nt, Homo Sapiens
ccagggcgugggcaggugguguccuguggcac

SEQ ID NO: 271251 - RNA, 32 nt, Homo Sapiens
auugugacaauuuuugcaacuuacagggaaua

SEQ ID NO: 271252 - RNA, 32 nt, Homo Sapiens
uucccugcgcccccuuccucuccggaagcccc

SEQ ID NO: 271253 - RNA, 32 nt, Homo Sapiens
cacaaucucggcccgcugcagccucugccucu

SEQ ID NO: 271254 - RNA, 32 nt, Homo Sapiens
aucuaauuugucuauguuuucucuguuuucuu

SEQ ID NO: 271255 - RNA, 32 nt, Homo Sapiens
cugaccccgguggcggccccagcaccucagcc

SEQ ID NO: 271256 - RNA, 32 nt, Homo Sapiens
ugcauuuuaggcacuuuugauaugugaaaaua

SEQ ID NO: 271257 - RNA, 32 nt, Homo Sapiens
ccagagcacggcagugggcaagcagucguccc

SEQ ID NO: 271258 - RNA, 32 nt, Homo Sapiens
aggcuggccccacucuuguagcauggacacug

SEQ ID NO: 271259 - RNA, 32 nt, Homo Sapiens
gcccacggcggcggcccggccagagacucggc

SEQ ID NO: 271260 - RNA, 32 nt, Homo Sapiens
aggcggcgaggagccgacggcuccaccugaug

SEQ ID NO: 271261 - RNA, 30 nt, Homo Sapiens
acaacauggagacccucugugcaccccagg

SEQ ID NO: 271262 - RNA, 32 nt, Homo Sapiens
agaugcuucacuuuccuucucuguaaccagac

SEQ ID NO: 271263 - RNA, 32 nt, Homo Sapiens
uaugaugacaauguuuagacuggcugaucugu

SEQ ID NO: 271264 - RNA, 32 nt, Homo Sapiens
guuuugccuucuuuuauuugggaguuuauuuu

SEQ ID NO: 271265 - RNA, 32 nt, Homo Sapiens
guucccucaacacaauugcuaaugcagaauag

SEQ ID NO: 271266 - RNA, 31 nt, Homo Sapiens
ggggucucacggaggggucucgcacugaggc

SEQ ID NO: 271267 - RNA, 32 nt, Homo Sapiens
agaguauaaaaugugaauguuuuuguagcuaa

SEQ ID NO: 271268 - RNA, 32 nt, Homo Sapiens
acauugcgguauccaugauuuggccuugugga

SEQ ID NO: 271269 - RNA, 32 nt, Homo Sapiens
gaagcaguuaagcccccuccucaccccuuccu

SEQ ID NO: 271270 - RNA, 32 nt, Homo Sapiens
aucccagggccucucucuagcugggugagagg

SEQ ID NO: 271271 - RNA, 32 nt, Homo Sapiens
gaacaucuugaacagcucuggugacuaucaua

SEQ ID NO: 271272 - RNA, 32 nt, Homo Sapiens
cugagagcaaaguuaacaaaucucaccccuuc

SEQ ID NO: 271273 - RNA, 32 nt, Homo Sapiens
uugcacgcuggggaucccggaccucgauucug

SEQ ID NO: 271274 - RNA, 32 nt, Homo Sapiens
cagauuuggaagaugacugcugauuccagugc

SEQ ID NO: 271275 - RNA, 32 nt, Homo Sapiens
uacucgggagacugaggcagagaacugcuuga

SEQ ID NO: 271276 - RNA, 32 nt, Homo Sapiens
accugcugagaagcgucgucggaggcugcagg

SEQ ID NO: 271277 - RNA, 32 nt, Homo Sapiens
ugguauaacaauacuagacuauagacaaguaa

SEQ ID NO: 271278 - RNA, 32 nt, Homo Sapiens
gaugaagggggagagggcgcccgggcccccca

SEQ ID NO: 271279 - RNA, 32 nt, Homo Sapiens
acacggaauguuuuugucauguacaaagagaa

SEQ ID NO: 271280 - RNA, 32 nt, Homo Sapiens
uccuaaauaucccaauaaaggaauguagaaca

SEQ ID NO: 271281 - RNA, 32 nt, Homo Sapiens
ccugacuucucgccucggugggcugggucggc

SEQ ID NO: 271282 - RNA, 32 nt, Homo Sapiens
aacaacacacugggguggcggcggcagcgagg

SEQ ID NO: 271283 - RNA, 32 nt, Homo Sapiens
auguuaauggacgucuggccgaaacuauuaua

SEQ ID NO: 271284 - RNA, 32 nt, Homo Sapiens
ggaggacgcuggccagcgugcagggggcggag

SEQ ID NO: 271285 - RNA, 29 nt, Homo Sapiens
aaacuuugaacacaauuuuaguacacugc

SEQ ID NO: 271286 - RNA, 32 nt, Homo Sapiens
ggagcgguggcggcuguggggaggcugggcgc

SEQ ID NO: 271287 - RNA, 32 nt, Homo Sapiens
aauccggguucaucccacaccagccgccucca

SEQ ID NO: 271288 - RNA, 32 nt, Homo Sapiens
cugcagugucaaccaccccaucuuccaugagg

SEQ ID NO: 271289 - RNA, 32 nt, Homo Sapiens
caaagcaagcguaagauugaggcaugaaguuc

SEQ ID NO: 271290 - RNA, 32 nt, Homo Sapiens
cuaaguagcugagaccacagggacacaccauu

SEQ ID NO: 271291 - RNA, 32 nt, Homo Sapiens
cuaauaauucuuaagcaaauguguguaaugcc

SEQ ID NO: 271292 - RNA, 32 nt, Homo Sapiens
augugggcugaaaucaucaucuuuccauaaug

SEQ ID NO: 271293 - RNA, 32 nt, Homo Sapiens
ggcugaggcggaggagccgccgcuucugaccu

SEQ ID NO: 271294 - RNA, 32 nt, Homo Sapiens
ccugauugcugauaguguuuuaugcagacucu

SEQ ID NO: 271295 - RNA, 32 nt, Homo Sapiens
gcuccgaccacucauucagugugugaccucag

SEQ ID NO: 271296 - RNA, 32 nt, Homo Sapiens
gcgcuugggcgacugcgccccagacuucuguc

SEQ ID NO: 271297 - RNA, 32 nt, Homo Sapiens
gccugguguguaauaaagcacucaauaaaugu

SEQ ID NO: 271298 - RNA, 32 nt, Homo Sapiens
uacauuuacaguauuaaauuuacaaugaacau

SEQ ID NO: 271299 - RNA, 32 nt, Homo Sapiens
accuaguuuauuauuugguuauugauaaagca

SEQ ID NO: 271300 - RNA, 32 nt, Homo Sapiens
ugcaggaucuaaugacuguacauauuauuguu

SEQ ID NO: 271301 - RNA, 32 nt, Homo Sapiens
cucccucugaccaagggagacgggcucaguca

SEQ ID NO: 271302 - RNA, 32 nt, Homo Sapiens
agcugugguggcggccgaggcagccacugugg

SEQ ID NO: 271303 - RNA, 32 nt, Homo Sapiens
agaaaagccucccuaaagauggaccaagaaag

SEQ ID NO: 271304 - RNA, 32 nt, Homo Sapiens
gagaggggcgcgcagcagcagcuccucaacgc

SEQ ID NO: 271305 - RNA, 32 nt, Homo Sapiens
uggccucuuggagaggcgagccagggggcucc

SEQ ID NO: 271306 - RNA, 32 nt, Homo Sapiens
guggcucugggguucuuaauucauuccuaacu

SEQ ID NO: 271307 - RNA, 32 nt, Homo Sapiens
gcagggauuugugacacugcauugcugggcug

SEQ ID NO: 271308 - RNA, 32 nt, Homo Sapiens
gagcuggcaaccugcuugaaugagauggggag

SEQ ID NO: 271309 - RNA, 32 nt, Homo Sapiens
cugugagcccgcggcgugaggcgugggaggaa

SEQ ID NO: 271310 - RNA, 32 nt, Homo Sapiens
aggcggccguggcggcgguggcggcgguuggg

SEQ ID NO: 271311 - RNA, 32 nt, Homo Sapiens
guaaguaugugcuuuucugugggggugggauu

SEQ ID NO: 271312 - RNA, 32 nt, Homo Sapiens
gagauaaugcgugcagugcucuuaucaccauc

SEQ ID NO: 271313 - RNA, 32 nt, Homo Sapiens
augauuuuucacaacuaacuuguaaauauauu

SEQ ID NO: 271314 - RNA, 32 nt, Homo Sapiens
gaguggggcagagggacagggcagccagacca

SEQ ID NO: 271315 - RNA, 32 nt, Homo Sapiens
agggucuguagguugcacacuuugguaccaga

SEQ ID NO: 271316 - RNA, 32 nt, Homo Sapiens
ccaugacacaaguuuaccuauguaacaaaccu

SEQ ID NO: 271317 - RNA, 32 nt, Homo Sapiens
gaaugcauauccuauuuccaggcaggcucucu

SEQ ID NO: 271318 - RNA, 32 nt, Homo Sapiens
aucauccugucuugcuaacaguucuuggaguc

SEQ ID NO: 271319 - RNA, 32 nt, Homo Sapiens
auauauuccaggacaagguuaacuaguggaca

SEQ ID NO: 271320 - RNA, 32 nt, Homo Sapiens
ccuccucucccggcggccgccgcugcccgcga

SEQ ID NO: 271321 - RNA, 32 nt, Homo Sapiens
aaaucaaugguggggaacuauaaagaaguaac

SEQ ID NO: 271322 - RNA, 32 nt, Homo Sapiens
cacuugaggccgggaguucgggaccagccuag

SEQ ID NO: 271323 - RNA, 32 nt, Homo Sapiens
uugugccgcagccugacccagcccgagaugga

SEQ ID NO: 271324 - RNA, 32 nt, Homo Sapiens
ggcuuucugggccuagcggaucuuugacgccc

SEQ ID NO: 271325 - RNA, 31 nt, Homo Sapiens
ucgugcuuugugaucuguucagugucacucu

SEQ ID NO: 271326 - RNA, 32 nt, Homo Sapiens
cucaaaaaaugguaacuaauguuauaauuagg

SEQ ID NO: 271327 - RNA, 32 nt, Homo Sapiens
cugcaaagccccaggccaagggcaacuucugg

SEQ ID NO: 271328 - RNA, 32 nt, Homo Sapiens
auagcuaaaauacauagcauugaagacuaauu

SEQ ID NO: 271329 - RNA, 32 nt, Homo Sapiens
ugagcccaggacaacuaacuaucgaguuuuca

SEQ ID NO: 271330 - RNA, 32 nt, Homo Sapiens
ccgcaggagggcggucuuccccggcucgccaa

SEQ ID NO: 271331 - RNA, 32 nt, Homo Sapiens
uacagaaaucacaugaaaaauaaagguuccau

SEQ ID NO: 271332 - RNA, 32 nt, Homo Sapiens
ggacagauauucuucccaccuuuggaggcccc

SEQ ID NO: 271333 - RNA, 32 nt, Homo Sapiens
cuuucgcacgcgaagcaaccgcuagagcagga

SEQ ID NO: 271334 - RNA, 32 nt, Homo Sapiens
gcaggagagaggaggaggagugcggcgcggcg

SEQ ID NO: 271335 - RNA, 32 nt, Homo Sapiens
aauuauaauuuucaguuucuccccaugaagcg

SEQ ID NO: 271336 - RNA, 32 nt, Homo Sapiens
ggacugcgcuggaggguccggcguggaaggca

SEQ ID NO: 271337 - RNA, 32 nt, Homo Sapiens
aaugcuuuuuacuaggaaauuuuaauacugaa

SEQ ID NO: 271338 - RNA, 32 nt, Homo Sapiens
aguaagucaauagccauagaaaccuacugaca

SEQ ID NO: 271339 - RNA, 32 nt, Homo Sapiens
uucagcuuccuucuccucaucccuccccaaaa

SEQ ID NO: 271340 - RNA, 32 nt, Homo Sapiens
ugggagaccggacgcgcgcggccuccgccgcu

SEQ ID NO: 271341 - RNA, 32 nt, Homo Sapiens
aaaggacuugccuugucucagaugagacauua

SEQ ID NO: 271342 - RNA, 32 nt, Homo Sapiens
ccauauugaaaacaaauaucuuuuucaacguu

SEQ ID NO: 271343 - RNA, 32 nt, Homo Sapiens
gggguagacaugcuugggauagauaagccugu

SEQ ID NO: 271344 - RNA, 32 nt, Homo Sapiens
gguucagugugugucccucagaucauaccauu

SEQ ID NO: 271345 - RNA, 32 nt, Homo Sapiens
ugaaugacugugguuggaaacacacacacaca

SEQ ID NO: 271346 - RNA, 32 nt, Homo Sapiens
uucaacugaagccccagccugcucuacccaga

SEQ ID NO: 271347 - RNA, 32 nt, Homo Sapiens
uacacagacccugcccaccccaucccuggcug

SEQ ID NO: 271348 - RNA, 32 nt, Homo Sapiens
gccaugccuggccauaaucuacauuuucuuac

SEQ ID NO: 271349 - RNA, 32 nt, Homo Sapiens
ugaacauuuagaguauuucaaaacuuuugaag

SEQ ID NO: 271350 - RNA, 32 nt, Homo Sapiens
gagggaggcugcgggggcgggcgggcguaugu

SEQ ID NO: 271351 - RNA, 32 nt, Homo Sapiens
gacauggaccagcaucuggucuuguuuccagg

SEQ ID NO: 271352 - RNA, 29 nt, Homo Sapiens
ucagcauaaaguuccucuuauuuucagua

SEQ ID NO: 271353 - RNA, 32 nt, Homo Sapiens
gucccguuuccucccaauauuccuucucaaac

SEQ ID NO: 271354 - RNA, 28 nt, Homo Sapiens
aaaaaauugacagguauuauaaauugug

SEQ ID NO: 271355 - RNA, 32 nt, Homo Sapiens
ccccacaggcugaagacagucaccuuacccaa

SEQ ID NO: 271356 - RNA, 32 nt, Homo Sapiens
guuuaaacauaaauuuagcgaauaugguagaa

SEQ ID NO: 271357 - RNA, 32 nt, Homo Sapiens
guauuucuuuggagaaaggucuauccaggucc

SEQ ID NO: 271358 - RNA, 32 nt, Homo Sapiens
ucggcucuacaggacgcgcucaucucaaaccc

SEQ ID NO: 271359 - RNA, 32 nt, Homo Sapiens
gccccuuucuccccaugccccauccagcacuu

SEQ ID NO: 271360 - RNA, 32 nt, Homo Sapiens
aggucauugaucaguuuggagaguagggccac

SEQ ID NO: 271361 - RNA, 32 nt, Homo Sapiens
uggaguuucuuaucuuuuuugguuuauucuca

SEQ ID NO: 271362 - RNA, 32 nt, Homo Sapiens
gaacuagaacaucagcaggcccuagaagccuc

SEQ ID NO: 271363 - RNA, 32 nt, Homo Sapiens
uuuuaauaaaauugacaacauuuuauuaccac

SEQ ID NO: 271364 - RNA, 32 nt, Homo Sapiens
ugagauacaaccucaacagguggaagaagauc

SEQ ID NO: 271365 - RNA, 32 nt, Homo Sapiens
uaggugucauguucuuuuuucugucuugucuu

SEQ ID NO: 271366 - RNA, 32 nt, Homo Sapiens
agguaaaauggcauuagauggcucuauauuuu

SEQ ID NO: 271367 - RNA, 32 nt, Homo Sapiens
cugcgccuuucgugguacacuccaccggaucu

SEQ ID NO: 271368 - RNA, 32 nt, Homo Sapiens
ugggagggcgguggaggcucuguacccuggcc

SEQ ID NO: 271369 - RNA, 32 nt, Homo Sapiens
auuuaaagggaagaaccacaaaggcuugcaaa

SEQ ID NO: 271370 - RNA, 32 nt, Homo Sapiens
ggggucgggcccagcccuuccaccccauuggc

SEQ ID NO: 271371 - RNA, 32 nt, Homo Sapiens
guuaauauuacuguagcacuuacuagcauuuc

SEQ ID NO: 271372 - RNA, 32 nt, Homo Sapiens
uccucgcucagcggcccggcaggccgcacaac

SEQ ID NO: 271373 - RNA, 32 nt, Homo Sapiens
agcuuuggagaauggauuuggagugucuuggg

SEQ ID NO: 271374 - RNA, 32 nt, Homo Sapiens
aaaaaaugucuauuuuuuuuuauuaaaauauu

SEQ ID NO: 271375 - RNA, 28 nt, Homo Sapiens
ugguuuguauuaaaaugugucaauugcu

SEQ ID NO: 271376 - RNA, 32 nt, Homo Sapiens
uuucuacugucaaauauguaccuuuucuucau

SEQ ID NO: 271377 - RNA, 32 nt, Homo Sapiens
cacuuuuuaucaggaaugaaauuaaaauuuuu

SEQ ID NO: 271378 - RNA, 32 nt, Homo Sapiens
uuuauauccaaauauaccuauuucaaagugua

SEQ ID NO: 271379 - RNA, 32 nt, Homo Sapiens
cagcucacugcaacuucugccuccugguauca

SEQ ID NO: 271380 - RNA, 32 nt, Homo Sapiens
aguguggcgcgggcccggggccacgcagcgga

SEQ ID NO: 271381 - RNA, 32 nt, Homo Sapiens
auugaaaacacuuaguaugcaguugauaagag

SEQ ID NO: 271382 - RNA, 32 nt, Homo Sapiens
ucuuucuguaauuuuucucaccacccugaccu

SEQ ID NO: 271383 - RNA, 32 nt, Homo Sapiens
gggcaacggaggggaaauaaaagggaacggcu

SEQ ID NO: 271384 - RNA, 32 nt, Homo Sapiens
gugagagucagguggcagcuguaucguuucga

SEQ ID NO: 271385 - RNA, 32 nt, Homo Sapiens
cguguccaugcuggcuucucgcaguggcccuu

SEQ ID NO: 271386 - RNA, 32 nt, Homo Sapiens
ccgguucccuccccagcuccucgucuuugaac

SEQ ID NO: 271387 - RNA, 32 nt, Homo Sapiens
cucuugacagaugucugggaaagcagaguggu

SEQ ID NO: 271388 - RNA, 32 nt, Homo Sapiens
uugcccgacagaccauggcucccuuuggaaga

SEQ ID NO: 271389 - RNA, 31 nt, Homo Sapiens
uguuuuggugguaccaccugguugaauuucu

SEQ ID NO: 271390 - RNA, 32 nt, Homo Sapiens
uuuaaaaaacaaaagacuuuguacgauauugu

SEQ ID NO: 271391 - RNA, 32 nt, Homo Sapiens
aucuugaaugguuuucuggagagacagcauug

SEQ ID NO: 271392 - RNA, 32 nt, Homo Sapiens
gggaaauuacacugcggucaagggcagagccu

SEQ ID NO: 271393 - RNA, 32 nt, Homo Sapiens
auggaagaauguuccauccauaaacagauuaa

SEQ ID NO: 271394 - RNA, 32 nt, Homo Sapiens
cugggauccgggaguccaucccggcccagcac

SEQ ID NO: 271395 - RNA, 32 nt, Homo Sapiens
cgucgagaauuccuggaagggcccugauauga

SEQ ID NO: 271396 - RNA, 32 nt, Homo Sapiens
ggcggcgccgagcacagucaccccgcuggcgg

SEQ ID NO: 271397 - RNA, 32 nt, Homo Sapiens
aacacacauggaugcacacacacacacgccaa

SEQ ID NO: 271398 - RNA, 31 nt, Homo Sapiens
aagcacugcccagaccaaccauggguucaaa

SEQ ID NO: 271399 - RNA, 32 nt, Homo Sapiens
uuuaaggaaaaauaaauauuuugcggcauuaa

SEQ ID NO: 271400 - RNA, 32 nt, Homo Sapiens
ggagggaggaagaguuugggggcuguggaggg

SEQ ID NO: 271401 - RNA, 32 nt, Homo Sapiens
ugcuuaccaucccccacccccaaccaaguucu

SEQ ID NO: 271402 - RNA, 32 nt, Homo Sapiens
ccucacccagcucugucaccuccugacugaac

SEQ ID NO: 271403 - RNA, 32 nt, Homo Sapiens
ucuguuuggccauuacuacacuuuuuacuuua

SEQ ID NO: 271404 - RNA, 32 nt, Homo Sapiens
caacaaagaaacaaagauguuaugguguuuag

SEQ ID NO: 271405 - RNA, 32 nt, Homo Sapiens
uaguuuaauuacugccacaucuccaugcauca

SEQ ID NO: 271406 - RNA, 32 nt, Homo Sapiens
ccggcccccaguucuuuuuuuuuuuuugagac

SEQ ID NO: 271407 - RNA, 32 nt, Homo Sapiens
gugcugggggagaggaagccuggccuugaggg

SEQ ID NO: 271408 - RNA, 32 nt, Homo Sapiens
ugauucagguauauuucuucauagcuaaccag

SEQ ID NO: 271409 - RNA, 32 nt, Homo Sapiens
uggagggagcuuccuuccuuccuuccuggaca

SEQ ID NO: 271410 - RNA, 32 nt, Homo Sapiens
guugggcugcggcggcggcggcuggggaagcc

SEQ ID NO: 271411 - RNA, 32 nt, Homo Sapiens
uucuauaaaaauuagacuacuaguagugaaaa

SEQ ID NO: 271412 - RNA, 32 nt, Homo Sapiens
guuaacugagcuuuuucuuaauuucauuccuu

SEQ ID NO: 271413 - RNA, 32 nt, Homo Sapiens
uacaccagcaaccugggaagacgagacgcugc

SEQ ID NO: 271414 - RNA, 32 nt, Homo Sapiens
ugcugcauuugaaguuuaguaacugguuauua

SEQ ID NO: 271415 - RNA, 32 nt, Homo Sapiens
gguggggacggguguuccuucugggugggggc

SEQ ID NO: 271416 - RNA, 32 nt, Homo Sapiens
uuggaaucugaauaaaccaauuacaaaauaaa

SEQ ID NO: 271417 - RNA, 32 nt, Homo Sapiens
uuugcuuucuaccugacccuagucagagauuu

SEQ ID NO: 271418 - RNA, 32 nt, Homo Sapiens
ucugugcuuucuaaauuuacugauggacguga

SEQ ID NO: 271419 - RNA, 32 nt, Homo Sapiens
cggcgccguguuccagcuccgcguuguuccgc

SEQ ID NO: 271420 - RNA, 32 nt, Homo Sapiens
uacugaagauaaaauuacaggauaucacauug

SEQ ID NO: 271421 - RNA, 32 nt, Homo Sapiens
ccccuuuguagaccagggcuccccuccucuug

SEQ ID NO: 271422 - RNA, 32 nt, Homo Sapiens
auggaaugugucucuauauuauacagguaccu

SEQ ID NO: 271423 - RNA, 32 nt, Homo Sapiens
acgcagaaggcacaucccuuuggaauggaagc

SEQ ID NO: 271424 - RNA, 32 nt, Homo Sapiens
cauucaaaaaauaucuuaaagacugaagaaac

SEQ ID NO: 271425 - RNA, 32 nt, Homo Sapiens
cugguaacccugcggcaguggaggagcugccc

SEQ ID NO: 271426 - RNA, 32 nt, Homo Sapiens
uucagauguauauuuuaacuuugauucucagg

SEQ ID NO: 271427 - RNA, 32 nt, Homo Sapiens
cauccuccaacuccuaccuccuccucuugcuu

SEQ ID NO: 271428 - RNA, 32 nt, Homo Sapiens
cugugaaauucccagucauuuauuuucacuuu

SEQ ID NO: 271429 - RNA, 32 nt, Homo Sapiens
agcugguucagguggcagccacagcagccuca

SEQ ID NO: 271430 - RNA, 32 nt, Homo Sapiens
ugaaagugaugaagaagaguggcugggaguca

SEQ ID NO: 271431 - RNA, 32 nt, Homo Sapiens
uguauuuaauuguuugaaauaaaagugauccc

SEQ ID NO: 271432 - RNA, 32 nt, Homo Sapiens
aaugaaaucucuucuuuccugucuugguccug

SEQ ID NO: 271433 - RNA, 32 nt, Homo Sapiens
gacuuccuucccucacuauauaucuuuaugca

SEQ ID NO: 271434 - RNA, 32 nt, Homo Sapiens
gcuccucgucaugggacugguaccucagaucu

SEQ ID NO: 271435 - RNA, 32 nt, Homo Sapiens
acccgggaagcagagguugcagugacagagau

SEQ ID NO: 271436 - RNA, 32 nt, Homo Sapiens
gagucucgcucuuccuccaaggcuggagugca

SEQ ID NO: 271437 - RNA, 32 nt, Homo Sapiens
cccagguuuucuaaagauacaaacccaugggc

SEQ ID NO: 271438 - RNA, 32 nt, Homo Sapiens
guagacgcggugggggcgggguggggggucug

SEQ ID NO: 271439 - RNA, 32 nt, Homo Sapiens
uguuuucauuuucuauuuuucuuuaaaugcag

SEQ ID NO: 271440 - RNA, 32 nt, Homo Sapiens
agguggaggugauuagggggaggaugcuaagu

SEQ ID NO: 271441 - RNA, 32 nt, Homo Sapiens
gcggacaccagccugcguccccggcgcggcgg

SEQ ID NO: 271442 - RNA, 32 nt, Homo Sapiens
gaggaacccggacuuuaacauguaauuuggga

SEQ ID NO: 271443 - RNA, 32 nt, Homo Sapiens
uugauuuuuauuucuuuuucuuuuguuuucug

SEQ ID NO: 271444 - RNA, 32 nt, Homo Sapiens
auguaugucaucuauuuuuucuucaauaaaga

SEQ ID NO: 271445 - RNA, 32 nt, Homo Sapiens
caucuaguguggaaacaagcuuucucaccagg

SEQ ID NO: 271446 - RNA, 30 nt, Homo Sapiens
cagggaggagguggcaagccacaccccacg

SEQ ID NO: 271447 - RNA, 32 nt, Homo Sapiens
uuucugcuuccacuauagaauauauacauaaa

SEQ ID NO: 271448 - RNA, 32 nt, Homo Sapiens
cucuuuggcugacugcaguguccuagacacuu

SEQ ID NO: 271449 - RNA, 32 nt, Homo Sapiens
auccgcagcaggggccagacccugcccacaag

SEQ ID NO: 271450 - RNA, 32 nt, Homo Sapiens
uuaaaaaauaccauugaaaucagcaugacaaa

SEQ ID NO: 271451 - RNA, 32 nt, Homo Sapiens
aguuuggaagcagucuauuccaucaacuagcc

SEQ ID NO: 271452 - RNA, 32 nt, Homo Sapiens
cccgguauguuuuuuuuuuuuaacuugaacau

SEQ ID NO: 271453 - RNA, 32 nt, Homo Sapiens
uccuccucccgcgcgcuccgcggcugcaccgg

SEQ ID NO: 271454 - RNA, 32 nt, Homo Sapiens
ggcagggggaggagggccgaccccugcaagac

SEQ ID NO: 271455 - RNA, 32 nt, Homo Sapiens
ggcgugcggaacgccgcggugucucggcgccu

SEQ ID NO: 271456 - RNA, 32 nt, Homo Sapiens
cagcuaagugcucccccuagcucccaucucag

SEQ ID NO: 271457 - RNA, 32 nt, Homo Sapiens
caaccagaugacccauuuuacccuauucacug

SEQ ID NO: 271458 - RNA, 32 nt, Homo Sapiens
cacgccaaacuuucccuauggcuucggugacc

SEQ ID NO: 271459 - RNA, 32 nt, Homo Sapiens
gucaugacaauuuuuguauuuauauuugaaau

SEQ ID NO: 271460 - RNA, 32 nt, Homo Sapiens
cucucucuccaaguuuaucucauccuuuauuu

SEQ ID NO: 271461 - RNA, 32 nt, Homo Sapiens
gggcgucucggagcuggauccccgucagcuca

SEQ ID NO: 271462 - RNA, 32 nt, Homo Sapiens
ggcugcauuaucuacagcauuguacaauaaca

SEQ ID NO: 271463 - RNA, 32 nt, Homo Sapiens
uuucuuaaaaauuauucugaauuaaauguaua

SEQ ID NO: 271464 - RNA, 32 nt, Homo Sapiens
accauggagcucagagcgcagccccggcgccg

SEQ ID NO: 271465 - RNA, 32 nt, Homo Sapiens
auagugagggaagacacgcggaaacaggcuug

SEQ ID NO: 271466 - RNA, 32 nt, Homo Sapiens
caccuugucauucuggguuuccuucugcuuca

SEQ ID NO: 271467 - RNA, 32 nt, Homo Sapiens
cucaaaugugcuuugucucucugugcugaggc

SEQ ID NO: 271468 - RNA, 32 nt, Homo Sapiens
accccagacucagaagcagcgagaaggccagg

SEQ ID NO: 271469 - RNA, 27 nt, Homo Sapiens
aaagacaauuaauuccuggucuaguuu

SEQ ID NO: 271470 - RNA, 32 nt, Homo Sapiens
acagagccccccacccccucgccccugaucua

SEQ ID NO: 271471 - RNA, 32 nt, Homo Sapiens
uauguugaagcuggaggagauuuugaacugug

SEQ ID NO: 271472 - RNA, 32 nt, Homo Sapiens
ucccuguagucuccugcggccgcggccucuca

SEQ ID NO: 271473 - RNA, 32 nt, Homo Sapiens
ugaugaugggucuggugacuauuauugcggac

SEQ ID NO: 271474 - RNA, 32 nt, Homo Sapiens
aaaugaaagagcuucuuacccagugcuguugc

SEQ ID NO: 271475 - RNA, 32 nt, Homo Sapiens
uaaaaaggcagaccaggauguaauguuuuuaa

SEQ ID NO: 271476 - RNA, 32 nt, Homo Sapiens
aguuaccaaacacagugagccgggacucuaaa

SEQ ID NO: 271477 - RNA, 32 nt, Homo Sapiens
agauccugaacaugugcugauuuuuauugugc

SEQ ID NO: 271478 - RNA, 32 nt, Homo Sapiens
gauaugaggguggcaugcagcugagggcaggg

SEQ ID NO: 271479 - RNA, 32 nt, Homo Sapiens
aaagcugugcugccugcccucuaguaaguacu

SEQ ID NO: 271480 - RNA, 32 nt, Homo Sapiens
uaggauaugagaaaauuuuaaauuauaugcau

SEQ ID NO: 271481 - RNA, 32 nt, Homo Sapiens
ugaaauaaaaauacaauaaacuuacuauaaag

SEQ ID NO: 271482 - RNA, 32 nt, Homo Sapiens
uguagcaucccaugacagcuuuauagauauau

SEQ ID NO: 271483 - RNA, 32 nt, Homo Sapiens
ucuauuuucaaaaaauacaaaaauuagccggg

SEQ ID NO: 271484 - RNA, 31 nt, Homo Sapiens
agccuuggccccugccugcgucugugcucaa

SEQ ID NO: 271485 - RNA, 32 nt, Homo Sapiens
ggcagcaaggccagugcugugccaagcccggu

SEQ ID NO: 271486 - RNA, 32 nt, Homo Sapiens
ccuggcccaucccugcaccuccggggugucuc

SEQ ID NO: 271487 - RNA, 32 nt, Homo Sapiens
ggucucuccgcggacgagacagcggggaucau

SEQ ID NO: 271488 - RNA, 32 nt, Homo Sapiens
uugagaauuaaggaacauucuuugaaaugccu

SEQ ID NO: 271489 - RNA, 32 nt, Homo Sapiens
cccguaccccagaaagcagaggaggcguguaa

SEQ ID NO: 271490 - RNA, 32 nt, Homo Sapiens
gacaguggggacccaggcuucuccucagagcc

SEQ ID NO: 271491 - RNA, 32 nt, Homo Sapiens
auuucugucucuucuuuuucccccaaccuccc

SEQ ID NO: 271492 - RNA, 32 nt, Homo Sapiens
uuccuagcacuucaccaccuccuucaucuucu

SEQ ID NO: 271493 - RNA, 32 nt, Homo Sapiens
uagcugucugaccucuacggaccucacaucca

SEQ ID NO: 271494 - RNA, 32 nt, Homo Sapiens
ggguagaccccuucuacccagcuagaccugau

SEQ ID NO: 271495 - RNA, 32 nt, Homo Sapiens
uguuugucuggagauggccaguucuuucuacc

SEQ ID NO: 271496 - RNA, 32 nt, Homo Sapiens
ggcugaagaaaagaagacaacaugggaaagga

SEQ ID NO: 271497 - RNA, 32 nt, Homo Sapiens
agccaaugcugauucugggaaccaauggcccu

SEQ ID NO: 271498 - RNA, 32 nt, Homo Sapiens
acuaagauaagagacuaaaauaaaaugcuaaa

SEQ ID NO: 271499 - RNA, 32 nt, Homo Sapiens
agcagcgaggagagcccuaagaaggacacaga

SEQ ID NO: 271500 - RNA, 32 nt, Homo Sapiens
cucccugccccaccccagcuccugcccuggaa

SEQ ID NO: 271501 - RNA, 32 nt, Homo Sapiens
cuugaaagcuccaugauaagcacagagauggg

SEQ ID NO: 271502 - RNA, 32 nt, Homo Sapiens
gaagcaggcccaguggauaccuuuagacacau

SEQ ID NO: 271503 - RNA, 32 nt, Homo Sapiens
acuuugugaugaugaguaauugucagacgugg

SEQ ID NO: 271504 - RNA, 32 nt, Homo Sapiens
ucagccccgcggcccuccauggcgcuggugcg

SEQ ID NO: 271505 - RNA, 32 nt, Homo Sapiens
gccucucccagggcccaguccucccccgagag

SEQ ID NO: 271506 - RNA, 32 nt, Homo Sapiens
cuuccuugcccgccucuccccccgccgcccca

SEQ ID NO: 271507 - RNA, 29 nt, Homo Sapiens
ggcucucugggacagaguggagcgccugu

SEQ ID NO: 271508 - RNA, 32 nt, Homo Sapiens
cgguggaaagucaucaggcagacgccaaggca

SEQ ID NO: 271509 - RNA, 32 nt, Homo Sapiens
aggcucccugaacuuuuuuccuugucccaucc

SEQ ID NO: 271510 - RNA, 32 nt, Homo Sapiens
aucucugcacaaaagagcaagcucuuaaguuc

SEQ ID NO: 271511 - RNA, 30 nt, Homo Sapiens
uuuuuauugcuaauggugaagaggcuguua

SEQ ID NO: 271512 - RNA, 32 nt, Homo Sapiens
acuugcugaagaaugauucaggguaaaucaca

SEQ ID NO: 271513 - RNA, 32 nt, Homo Sapiens
aaguggauuucauucauuucugauuguccagu

SEQ ID NO: 271514 - RNA, 32 nt, Homo Sapiens
caugacuugcagggccguugcccccagacuuc

SEQ ID NO: 271515 - RNA, 32 nt, Homo Sapiens
uacaacaaucccagcaucugauugagucagug

SEQ ID NO: 271516 - RNA, 32 nt, Homo Sapiens
ucccuagauagcuauuaagauacuuagauuag

SEQ ID NO: 271517 - RNA, 30 nt, Homo Sapiens
gucccaggguaaacagcgggucccgccacu

SEQ ID NO: 271518 - RNA, 32 nt, Homo Sapiens
acucaguuauuuuuaaugcuuaauacauacau

SEQ ID NO: 271519 - RNA, 32 nt, Homo Sapiens
cuuuccuuucccuuuccucugccaguacaacu

SEQ ID NO: 271520 - RNA, 32 nt, Homo Sapiens
agccgagguucagugguggcagcaggaaggac

SEQ ID NO: 271521 - RNA, 32 nt, Homo Sapiens
caauacugggcaauucagagcaugguuagaag

SEQ ID NO: 271522 - RNA, 32 nt, Homo Sapiens
uauugagcgguuugcagccugaugcucagccc

SEQ ID NO: 271523 - RNA, 32 nt, Homo Sapiens
aaacccuucuguacucguugguaaauaucuac

SEQ ID NO: 271524 - RNA, 32 nt, Homo Sapiens
aaggcaggucccugcucacugugcuagcuuuc

SEQ ID NO: 271525 - RNA, 32 nt, Homo Sapiens
auacacgcacacaaaaucucagcuguugaaga

SEQ ID NO: 271526 - RNA, 32 nt, Homo Sapiens
uaacagagcguggaaggggggcauucucuguc

SEQ ID NO: 271527 - RNA, 32 nt, Homo Sapiens
cagucacugugcuaauggugaccgggaaggga

SEQ ID NO: 271528 - RNA, 32 nt, Homo Sapiens
gaccacaucauucucucugagcagaggagcag

SEQ ID NO: 271529 - RNA, 32 nt, Homo Sapiens
agccuuaugaucccaauuuuuaugaugaaacc

SEQ ID NO: 271530 - RNA, 32 nt, Homo Sapiens
guaaacuuccaagucauucucaccuaaacccu

SEQ ID NO: 271531 - RNA, 32 nt, Homo Sapiens
cuguaacucccuaaugauuguuuucuaagcau

SEQ ID NO: 271532 - RNA, 32 nt, Homo Sapiens
aaacaaaaugaaacaaaacaaacaaacaagca

SEQ ID NO: 271533 - RNA, 32 nt, Homo Sapiens
cgcacuugcccucugccacaccugucggugga

SEQ ID NO: 271534 - RNA, 32 nt, Homo Sapiens
ugaaagcaacgcgccuauucacauggagaauc

SEQ ID NO: 271535 - RNA, 32 nt, Homo Sapiens
uuauuacuucccuuucccugcucugacuuuua

SEQ ID NO: 271536 - RNA, 32 nt, Homo Sapiens
cuugguuuuguugauuuuuucuuaaauaaaag

SEQ ID NO: 271537 - RNA, 32 nt, Homo Sapiens
cauggccccucucugggcccagcccauuuauc

SEQ ID NO: 271538 - RNA, 32 nt, Homo Sapiens
aauaugaugguagcuggcaggggaaguguggu

SEQ ID NO: 271539 - RNA, 32 nt, Homo Sapiens
auacacauagccaugcagcaaacuacaguuuu

SEQ ID NO: 271540 - RNA, 32 nt, Homo Sapiens
cagaccucgacccggaacguggcugcccacug

SEQ ID NO: 271541 - RNA, 32 nt, Homo Sapiens
uugagauauaaagacccugaaaaagcccauuu

SEQ ID NO: 271542 - RNA, 32 nt, Homo Sapiens
cuuuucuuuacuacuucaugcucuugacuagc

SEQ ID NO: 271543 - RNA, 28 nt, Homo Sapiens
cuguuuagcauggagaugacucucagaa

SEQ ID NO: 271544 - RNA, 32 nt, Homo Sapiens
agcccuccgcccagaaacccagcccuguccgg

SEQ ID NO: 271545 - RNA, 32 nt, Homo Sapiens
uggagggggagcugugagggcugggcgccccu

SEQ ID NO: 271546 - RNA, 32 nt, Homo Sapiens
uucagaaguucccucucugacccaggcugagu

SEQ ID NO: 271547 - RNA, 32 nt, Homo Sapiens
gacuaggauaacauuuucacuacuugugugac

SEQ ID NO: 271548 - RNA, 31 nt, Homo Sapiens
ugugccauggggcugcccacucuggaguuca

SEQ ID NO: 271549 - RNA, 32 nt, Homo Sapiens
gcuucaggaccuggcgccccccugcuccccug

SEQ ID NO: 271550 - RNA, 32 nt, Homo Sapiens
auaauguuccuacaauaguuguauguaucuaa

SEQ ID NO: 271551 - RNA, 32 nt, Homo Sapiens
gagcagaugaacugcaaggaguaucaggagga

SEQ ID NO: 271552 - RNA, 32 nt, Homo Sapiens
uuaggugcuaacggccaugagcuccgacucuc

SEQ ID NO: 271553 - RNA, 32 nt, Homo Sapiens
ggagcaggacgcccggccgggcagcaugaguc

SEQ ID NO: 271554 - RNA, 32 nt, Homo Sapiens
uggggagcccaggccuggccucggggcagggc

SEQ ID NO: 271555 - RNA, 30 nt, Homo Sapiens
gacgcggugcugcugccgccgcuucggguu

SEQ ID NO: 271556 - RNA, 32 nt, Homo Sapiens
gcuuguguaaaaacagcuccuauuuuauuaaa

SEQ ID NO: 271557 - RNA, 32 nt, Homo Sapiens
augauucaauuugcauuuucugauccuguagu

SEQ ID NO: 271558 - RNA, 32 nt, Homo Sapiens
ccguggccaagagcaucuucuggguggaugga

SEQ ID NO: 271559 - RNA, 32 nt, Homo Sapiens
cucaguucauaaaguuuuuuacaauucaaaaa

SEQ ID NO: 271560 - RNA, 32 nt, Homo Sapiens
aaguagcccagcaaaugaugaggcuugaaccu

SEQ ID NO: 271561 - RNA, 32 nt, Homo Sapiens
gugcaaaaugauacagccacuuugaaacacca

SEQ ID NO: 271562 - RNA, 32 nt, Homo Sapiens
ggggggaggaggaggagggacugagcggcggc

SEQ ID NO: 271563 - RNA, 32 nt, Homo Sapiens
uaauucaaaauaauauggacauuaucauguuc

SEQ ID NO: 271564 - RNA, 32 nt, Homo Sapiens
ugauaaaauuaacacaaaaucagucaagaagg

SEQ ID NO: 271565 - RNA, 32 nt, Homo Sapiens
cgcagggccaguugcaggccgcugauugccau

SEQ ID NO: 271566 - RNA, 32 nt, Homo Sapiens
cugugcaugcaaacaagagggcaugggagcac

SEQ ID NO: 271567 - RNA, 32 nt, Homo Sapiens
ucuuucccguccaucacccauccuaagcacuu

SEQ ID NO: 271568 - RNA, 32 nt, Homo Sapiens
gaagaaucuauuuccacauuuuuuccaguuuc

SEQ ID NO: 271569 - RNA, 32 nt, Homo Sapiens
auuuaugaagcaagaauagguacagucauuuu

SEQ ID NO: 271570 - RNA, 32 nt, Homo Sapiens
acucggggggccucagcccuugggaggggaca

SEQ ID NO: 271571 - RNA, 32 nt, Homo Sapiens
ggacgucuuggggaccaagcuuccucaacuga

SEQ ID NO: 271572 - RNA, 32 nt, Homo Sapiens
cgggggaggggagguucguuccgcggagcgca

SEQ ID NO: 271573 - RNA, 32 nt, Homo Sapiens
ggaguagaggaagaggaaggacuaacgcagag

SEQ ID NO: 271574 - RNA, 32 nt, Homo Sapiens
aauacaucaaggaguuaugcugacauaauucu

SEQ ID NO: 271575 - RNA, 32 nt, Homo Sapiens
uuuuuaggccuggccgccauggcgucuccuuc

SEQ ID NO: 271576 - RNA, 32 nt, Homo Sapiens
uacucaccaaaauauaguuaauuguggcuuua

SEQ ID NO: 271577 - RNA, 32 nt, Homo Sapiens
aagccccugaagcucaccaggaggaagaagca

SEQ ID NO: 271578 - RNA, 32 nt, Homo Sapiens
gacccgggccgccagcauccgccccgccaucc

SEQ ID NO: 271579 - RNA, 32 nt, Homo Sapiens
aucauaaaacaucuauuacauaaaauaaaggu

SEQ ID NO: 271580 - RNA, 32 nt, Homo Sapiens
ccaguaaaccaucggaucaauuggaaagaagg

SEQ ID NO: 271581 - RNA, 31 nt, Homo Sapiens
aaccagcggcacuucuucauccccuugccca

SEQ ID NO: 271582 - RNA, 32 nt, Homo Sapiens
uagaguuuugguaaguuuucuuuuugcuuguu

SEQ ID NO: 271583 - RNA, 32 nt, Homo Sapiens
acacccagcuccgacgcagcuccucugcgccc

SEQ ID NO: 271584 - RNA, 32 nt, Homo Sapiens
gacuucuggcuggccagaggcugcgguccguc

SEQ ID NO: 271585 - RNA, 32 nt, Homo Sapiens
auuucaagauaaagaacaaauguuuccuugaa

SEQ ID NO: 271586 - RNA, 32 nt, Homo Sapiens
uguauuugauaaaacacauaauuuugagaaaa

SEQ ID NO: 271587 - RNA, 32 nt, Homo Sapiens
aguccaggcugucccugaaacugagucugugg

SEQ ID NO: 271588 - RNA, 32 nt, Homo Sapiens
aaaauguugguacuagccauuaacuuaaaggu

SEQ ID NO: 271589 - RNA, 32 nt, Homo Sapiens
acuuuuaugucuagccagaggauuguauaugc

SEQ ID NO: 271590 - RNA, 32 nt, Homo Sapiens
agccagugccccugccagcugcacgggcagcu

SEQ ID NO: 271591 - RNA, 32 nt, Homo Sapiens
auguaugcugguuccaacuguuuaaucccuuc

SEQ ID NO: 271592 - RNA, 32 nt, Homo Sapiens
uguaucagccuuccucauuaucagaaauuaaa

SEQ ID NO: 271593 - RNA, 32 nt, Homo Sapiens
ggauuguagggaggggugcacaguguucccuc

SEQ ID NO: 271594 - RNA, 32 nt, Homo Sapiens
caauguuccauucuucgacauccgucauugcu

SEQ ID NO: 271595 - RNA, 32 nt, Homo Sapiens
auuagaacugguuccccucaccacccaaccua

SEQ ID NO: 271596 - RNA, 32 nt, Homo Sapiens
aagugaggacacauuuucagcaccucaccuuc

SEQ ID NO: 271597 - RNA, 32 nt, Homo Sapiens
aaccccuccuuccccagacccagagguccagg

SEQ ID NO: 271598 - RNA, 32 nt, Homo Sapiens
ugagcccucaggugagagccgagcgcacccuu

SEQ ID NO: 271599 - RNA, 32 nt, Homo Sapiens
cuccuggugggugccauguuucuccugcccgc

SEQ ID NO: 271600 - RNA, 31 nt, Homo Sapiens
aaugugaauuugacugaugaaugaagagcgu

SEQ ID NO: 271601 - RNA, 32 nt, Homo Sapiens
uuggcucccuggauuaucaagcaguuuguagu

SEQ ID NO: 271602 - RNA, 32 nt, Homo Sapiens
agaccacucccacccagagacuuguguggccu

SEQ ID NO: 271603 - RNA, 32 nt, Homo Sapiens
cuugaggguuccaggagggcauggagcagaca

SEQ ID NO: 271604 - RNA, 32 nt, Homo Sapiens
gaaccgcgauggagccggggcccagcacagcg

SEQ ID NO: 271605 - RNA, 32 nt, Homo Sapiens
guguggaccgucugcugggacuccggcccugc

SEQ ID NO: 271606 - RNA, 32 nt, Homo Sapiens
gcagcccagggccacaagcucccuugaucuuu

SEQ ID NO: 271607 - RNA, 32 nt, Homo Sapiens
acguccgccucccagguucaagcgauucucau

SEQ ID NO: 271608 - RNA, 32 nt, Homo Sapiens
ucaauuucugguuuugguauauauccauucca

SEQ ID NO: 271609 - RNA, 32 nt, Homo Sapiens
ggaagguugguaguaaaugcuguuagugugac

SEQ ID NO: 271610 - RNA, 32 nt, Homo Sapiens
aaagagaauuguggcagauguugugugugaac

SEQ ID NO: 271611 - RNA, 32 nt, Homo Sapiens
ggcagcuaggcagggagggggcugggaaagaa

SEQ ID NO: 271612 - RNA, 32 nt, Homo Sapiens
cccagauucccuaguuacuaucucuaagcacu

SEQ ID NO: 271613 - RNA, 32 nt, Homo Sapiens
ccuugcgucacuuccgcccacggggcggucuc

SEQ ID NO: 271614 - RNA, 32 nt, Homo Sapiens
cuuugagaggccgaggugggcagaucgccuga

SEQ ID NO: 271615 - RNA, 32 nt, Homo Sapiens
ccaucuuguugcucucuccugaauuuuuuaug

SEQ ID NO: 271616 - RNA, 32 nt, Homo Sapiens
acuccaccaccgacucagcccucugcagcuac

SEQ ID NO: 271617 - RNA, 32 nt, Homo Sapiens
ggcgcuccgggcggcgacggcggcucucguag

SEQ ID NO: 271618 - RNA, 32 nt, Homo Sapiens
gggcccgguguugccagauccuuugucauaag

SEQ ID NO: 271619 - RNA, 32 nt, Homo Sapiens
aaagccuccgugcugcuggaucuuugggggga

SEQ ID NO: 271620 - RNA, 32 nt, Homo Sapiens
gcaaggcgccgcggcucagcgcgcaccggcgg

SEQ ID NO: 271621 - RNA, 32 nt, Homo Sapiens
ucaugucaaaaauguuauucagcuggggaaau

SEQ ID NO: 271622 - RNA, 32 nt, Homo Sapiens
ggugcaaucugugcucuccagcugggaaccag

SEQ ID NO: 271623 - RNA, 32 nt, Homo Sapiens
guggccccuccaggcucuuuggcagccucuuc

SEQ ID NO: 271624 - RNA, 32 nt, Homo Sapiens
aaccaguaaacacucuguaguaaccauuacag

SEQ ID NO: 271625 - RNA, 32 nt, Homo Sapiens
ggcauggagcgcgggguggcagagccucugga

SEQ ID NO: 271626 - RNA, 32 nt, Homo Sapiens
aacucccugugcugcuuguagacaguucccau

SEQ ID NO: 271627 - RNA, 32 nt, Homo Sapiens
uuuuuucugggguucugaaaaggucagauccu

SEQ ID NO: 271628 - RNA, 32 nt, Homo Sapiens
uccgaccgccgcgccccaggaaucagugacau

SEQ ID NO: 271629 - RNA, 32 nt, Homo Sapiens
augggccaauauuagcucuuauggaaacugau

SEQ ID NO: 271630 - RNA, 32 nt, Homo Sapiens
ucgguagcugagaacuuauuaagggauuuagg

SEQ ID NO: 271631 - RNA, 32 nt, Homo Sapiens
caaauauuccauuugcagacagaccgucauau

SEQ ID NO: 271632 - RNA, 32 nt, Homo Sapiens
ccagacccguccuaaacacuuccuacucccgg

SEQ ID NO: 271633 - RNA, 32 nt, Homo Sapiens
uaaagguaauauuuuuaauaugauacauuaca

SEQ ID NO: 271634 - RNA, 30 nt, Homo Sapiens
cccggagcuguucggccgccggcugcccgg

SEQ ID NO: 271635 - RNA, 32 nt, Homo Sapiens
gcugccggcagcccgaucccgcgcucugcaaa

SEQ ID NO: 271636 - RNA, 32 nt, Homo Sapiens
cuuucuguguagaacaaggucucugacaguau

SEQ ID NO: 271637 - RNA, 32 nt, Homo Sapiens
aaagagaagucaagcagacucccuuuaaccug

SEQ ID NO: 271638 - RNA, 32 nt, Homo Sapiens
aucaguauuuuuccuuuugcacgcauuaugaa

SEQ ID NO: 271639 - RNA, 32 nt, Homo Sapiens
ugcccugaagucaguucucacaguauagaaga

SEQ ID NO: 271640 - RNA, 32 nt, Homo Sapiens
aggcuggagcaucuuggcaggaugaaacacga

SEQ ID NO: 271641 - RNA, 31 nt, Homo Sapiens
ucuucacuagagguuuugcugucugauuaac

SEQ ID NO: 271642 - RNA, 32 nt, Homo Sapiens
uccacaucccugauuccuguuguuauggaaac

SEQ ID NO: 271643 - RNA, 32 nt, Homo Sapiens
ucuucuggcaggcaggugccacugucagcuuu

SEQ ID NO: 271644 - RNA, 32 nt, Homo Sapiens
auugaggaagacggcaccgaaagcgaaggaag

SEQ ID NO: 271645 - RNA, 30 nt, Homo Sapiens
guugcugugucaaccuacaagauagugauu

SEQ ID NO: 271646 - RNA, 32 nt, Homo Sapiens
uaaugaaaugagauauaucuuuucauaaccag

SEQ ID NO: 271647 - RNA, 32 nt, Homo Sapiens
ucugaaugaccacaggcgauugguuuuagugg

SEQ ID NO: 271648 - RNA, 32 nt, Homo Sapiens
ugugccuacaggacuucucuuuagucagggca

SEQ ID NO: 271649 - RNA, 32 nt, Homo Sapiens
uuggagcacccccacccuccccccaccgugcc

SEQ ID NO: 271650 - RNA, 32 nt, Homo Sapiens
ggccgagaggaugcuguugagcacauugcagc

SEQ ID NO: 271651 - RNA, 32 nt, Homo Sapiens
gucuugggguaucuggccuccuguauuucuaa

SEQ ID NO: 271652 - RNA, 32 nt, Homo Sapiens
uaauauagguaaauacccuccacucaaggagg

SEQ ID NO: 271653 - RNA, 32 nt, Homo Sapiens
uuaaauauaaauucaagcauuugugauacaug

SEQ ID NO: 271654 - RNA, 32 nt, Homo Sapiens
agucugaacgaaugccacgugcccucacccag

SEQ ID NO: 271655 - RNA, 32 nt, Homo Sapiens
acccaugcugcuuuucugaguguugauggggg

SEQ ID NO: 271656 - RNA, 29 nt, Homo Sapiens
cuggccaggaagauucugggaggcaaugg

SEQ ID NO: 271657 - RNA, 32 nt, Homo Sapiens
uggagcugagcucuuggugacuggucacugca

SEQ ID NO: 271658 - RNA, 32 nt, Homo Sapiens
ugguaaggggagaggagccggaauggagggca

SEQ ID NO: 271659 - RNA, 32 nt, Homo Sapiens
uuggagaaaacaaggaaggcggaagaauggag

SEQ ID NO: 271660 - RNA, 32 nt, Homo Sapiens
gugugccccagcugcaucagccagcuucuagg

SEQ ID NO: 271661 - RNA, 32 nt, Homo Sapiens
agccccgcgggucgcccucccgugccucgccc

SEQ ID NO: 271662 - RNA, 32 nt, Homo Sapiens
acacacgaggccagcucccuugcguguccagc

SEQ ID NO: 271663 - RNA, 32 nt, Homo Sapiens
gccagaguugcaaagaucuuuuccagaguaug

SEQ ID NO: 271664 - RNA, 32 nt, Homo Sapiens
aacaggaauauuaagauaaaugugaaucugca

SEQ ID NO: 271665 - RNA, 32 nt, Homo Sapiens
uacuugagaaaguuguugugguguuguaugcc

SEQ ID NO: 271666 - RNA, 32 nt, Homo Sapiens
aauugacucauaaaaauaaaguuaguggacuu

SEQ ID NO: 271667 - RNA, 32 nt, Homo Sapiens
gggucauggaagcucccuggaggagguguauc

SEQ ID NO: 271668 - RNA, 32 nt, Homo Sapiens
ccauccaucauccauccguccauccuccaucc

SEQ ID NO: 271669 - RNA, 32 nt, Homo Sapiens
gguuccuuucaaaaacaauaaaacaaaacaau

SEQ ID NO: 271670 - RNA, 32 nt, Homo Sapiens
uuguucuacuuuguauuuacuacugugugaau

SEQ ID NO: 271671 - RNA, 32 nt, Homo Sapiens
cccgggaggaagcuccuucagacaaggugagc

SEQ ID NO: 271672 - RNA, 32 nt, Homo Sapiens
uuuuuacauuuuauuuuguuuuauuuugguag

SEQ ID NO: 271673 - RNA, 32 nt, Homo Sapiens
ugcugucucugcaagauuggggugcuccgggu

SEQ ID NO: 271674 - RNA, 32 nt, Homo Sapiens
aggaagagcaggcugcgccucacccuccagug

SEQ ID NO: 271675 - RNA, 32 nt, Homo Sapiens
ggucccugcugagugcgcugcccgggccguga

SEQ ID NO: 271676 - RNA, 32 nt, Homo Sapiens
auuccuggauuaaagaauaugcacuuuuuaaa

SEQ ID NO: 271677 - RNA, 32 nt, Homo Sapiens
guuccccugcacauacucucuugcuugcugcc

SEQ ID NO: 271678 - RNA, 32 nt, Homo Sapiens
uagagcugcauaaugucccucucuuggcuauu

SEQ ID NO: 271679 - RNA, 32 nt, Homo Sapiens
ccuaccuauacauacgugcacacacacauaca

SEQ ID NO: 271680 - RNA, 32 nt, Homo Sapiens
acagccuggagagggcacaccacccaaccagc

SEQ ID NO: 271681 - RNA, 32 nt, Homo Sapiens
auaguauaauaacuaagaacauguagcuuaag

SEQ ID NO: 271682 - RNA, 32 nt, Homo Sapiens
uuaaauucuuugauuuguaccauuccuucaaa

SEQ ID NO: 271683 - RNA, 32 nt, Homo Sapiens
ggaaggguuugugagcuagaauaagaggugca

SEQ ID NO: 271684 - RNA, 32 nt, Homo Sapiens
uugcaugugaaauucacuuuugaaagaacaug

SEQ ID NO: 271685 - RNA, 32 nt, Homo Sapiens
gagcuaugccuguugaggcaucuggagacuga

SEQ ID NO: 271686 - RNA, 32 nt, Homo Sapiens
aaauuaugugauguaauuuaucuuccuuagga

SEQ ID NO: 271687 - RNA, 32 nt, Homo Sapiens
aagucauuuauguuauuuaaaugauguacugu

SEQ ID NO: 271688 - RNA, 32 nt, Homo Sapiens
cuuuaaaugucuuuuuauuauguauuuaaaag

SEQ ID NO: 271689 - RNA, 32 nt, Homo Sapiens
gcgcccguagccagcgcccccguaaagaaaua

SEQ ID NO: 271690 - RNA, 32 nt, Homo Sapiens
ccuugacuuuaugggauaaacaucuuucagac

SEQ ID NO: 271691 - RNA, 32 nt, Homo Sapiens
aaaccugagcauuugcaggcaucugguuaaag

SEQ ID NO: 271692 - RNA, 32 nt, Homo Sapiens
caacgggauugugaggaucaagucacucucau

SEQ ID NO: 271693 - RNA, 32 nt, Homo Sapiens
cauuccacugugacucugcaaauaaugcccug

SEQ ID NO: 271694 - RNA, 32 nt, Homo Sapiens
ccacgggcugcucggcgccgccgccgccucgu

SEQ ID NO: 271695 - RNA, 32 nt, Homo Sapiens
ucgcaguguuugugucccuggguacuuaaggu

SEQ ID NO: 271696 - RNA, 32 nt, Homo Sapiens
agcuucccuuucuggccgccagauggguggag

SEQ ID NO: 271697 - RNA, 32 nt, Homo Sapiens
aucauaguucucuugaaaagcagacuuucagu

SEQ ID NO: 271698 - RNA, 32 nt, Homo Sapiens
aaauucagaacagccugccuguucccccgcac

SEQ ID NO: 271699 - RNA, 32 nt, Homo Sapiens
acacucaaaaauuggcaaaugucaucaguguu

SEQ ID NO: 271700 - RNA, 32 nt, Homo Sapiens
agaaaaggcaucauuguccgcuccauuaagaa

SEQ ID NO: 271701 - RNA, 32 nt, Homo Sapiens
uguauauauauucacauucuuaaaauaaucuu

SEQ ID NO: 271702 - RNA, 32 nt, Homo Sapiens
aaaucuuauuuuuauaugugucuuuggcuuuu

SEQ ID NO: 271703 - RNA, 32 nt, Homo Sapiens
cagcaauuaugaaaauaaucucugauucccug

SEQ ID NO: 271704 - RNA, 32 nt, Homo Sapiens
gguauuguuaauaaauauucugucauuuguaa

SEQ ID NO: 271705 - RNA, 32 nt, Homo Sapiens
uguuauauuauuaauuaaaaguuacagcuguc

SEQ ID NO: 271706 - RNA, 30 nt, Homo Sapiens
aacauguggggcgugggcaggcagugagaa

SEQ ID NO: 271707 - RNA, 32 nt, Homo Sapiens
ggcagagggcagcuacugcagguuuccgagca

SEQ ID NO: 271708 - RNA, 32 nt, Homo Sapiens
gagggucuuauaggcaucauucaccagggucg

SEQ ID NO: 271709 - RNA, 32 nt, Homo Sapiens
ucaccugcagcugcgccuccuugcaccugcgc

SEQ ID NO: 271710 - RNA, 32 nt, Homo Sapiens
cuucaggugauccgcgggaggggccuccacgc

SEQ ID NO: 271711 - RNA, 32 nt, Homo Sapiens
gaucaggccuucuuugguucuugggugguuuu

SEQ ID NO: 271712 - RNA, 32 nt, Homo Sapiens
ggcggugaccccagccucgcccgacagagccc

SEQ ID NO: 271713 - RNA, 32 nt, Homo Sapiens
auuuagggauugauugucugcugggguggguu

SEQ ID NO: 271714 - RNA, 32 nt, Homo Sapiens
uugguaccaccuguaguuugcuguugcauguu

SEQ ID NO: 271715 - RNA, 32 nt, Homo Sapiens
acuguauagaacuuauuuguaaauagcacaua

SEQ ID NO: 271716 - RNA, 32 nt, Homo Sapiens
auugcccagaaaguaccugagcuaucagugau

SEQ ID NO: 271717 - RNA, 32 nt, Homo Sapiens
uuaagauguuuccauucuccugugaauuuuaa

SEQ ID NO: 271718 - RNA, 32 nt, Homo Sapiens
gcccccuuuucuacaaucaaauccauucauua

SEQ ID NO: 271719 - RNA, 30 nt, Homo Sapiens
caauaacgcgcgcacagcacacaggggugc

SEQ ID NO: 271720 - RNA, 32 nt, Homo Sapiens
aucaagaguauuuucauuuuucaauccauaaa

SEQ ID NO: 271721 - RNA, 32 nt, Homo Sapiens
gacucuaauauuuguguaaaucugcugaagaa

SEQ ID NO: 271722 - RNA, 32 nt, Homo Sapiens
cuacaagucgcacgcgcggaaguaaacaccuc

SEQ ID NO: 271723 - RNA, 30 nt, Homo Sapiens
acccgaggagguggcagugcaagacacugc

SEQ ID NO: 271724 - RNA, 32 nt, Homo Sapiens
ccucaaacaggucgcuucucgggaguucuugg

SEQ ID NO: 271725 - RNA, 32 nt, Homo Sapiens
ugcagacugccuuguacucccuggacacccuc

SEQ ID NO: 271726 - RNA, 32 nt, Homo Sapiens
caaaauugcuaaauguuauaauuuagaguuga

SEQ ID NO: 271727 - RNA, 32 nt, Homo Sapiens
ggguuccaggggaagucccacccccugaaucu

SEQ ID NO: 271728 - RNA, 32 nt, Homo Sapiens
gauggcgagcuuuggguccgcacacucuggaa

SEQ ID NO: 271729 - RNA, 32 nt, Homo Sapiens
acuuuagaccaagacaaacuacacaggguauu

SEQ ID NO: 271730 - RNA, 32 nt, Homo Sapiens
gggaauuucuaaaaacagauaauuuguacguu

SEQ ID NO: 271731 - RNA, 32 nt, Homo Sapiens
gugcacuuuccacucuaccaggaagcccuaug

SEQ ID NO: 271732 - RNA, 32 nt, Homo Sapiens
ccaucagcuccuccccuuucaccaccagcucc

SEQ ID NO: 271733 - RNA, 32 nt, Homo Sapiens
agaggccucaacccagugggccccacuccaga

SEQ ID NO: 271734 - RNA, 32 nt, Homo Sapiens
gcaggacggggcgcugcuggugcggcugcugc

SEQ ID NO: 271735 - RNA, 32 nt, Homo Sapiens
agaaggcauccagcaagaacugcacaagaaac

SEQ ID NO: 271736 - RNA, 32 nt, Homo Sapiens
gugagucauggcaaccauaauuccucuuuccc

SEQ ID NO: 271737 - RNA, 32 nt, Homo Sapiens
auugggcuggcuguccgcugcugacuggaugg

SEQ ID NO: 271738 - RNA, 31 nt, Homo Sapiens
aagcccugcugauccucuccaaggagcugga

SEQ ID NO: 271739 - RNA, 30 nt, Homo Sapiens
aacagugccuguuugggggaaaacaggaaa

SEQ ID NO: 271740 - RNA, 32 nt, Homo Sapiens
gcgcuggacgacggagagcggcgggcccgcag

SEQ ID NO: 271741 - RNA, 32 nt, Homo Sapiens
ggagagccguccucggccgaggaggcugggaa

SEQ ID NO: 271742 - RNA, 32 nt, Homo Sapiens
ggcgcgaggcagccaggagggcccgugcggcg

SEQ ID NO: 271743 - RNA, 32 nt, Homo Sapiens
agaaaagcugcuucuccccccaucccgggucc

SEQ ID NO: 271744 - RNA, 32 nt, Homo Sapiens
gccuaaaaauauugcagugacuuuuuaggcag

SEQ ID NO: 271745 - RNA, 28 nt, Homo Sapiens
gaccggaaagauuugcauuuuauuaugu

SEQ ID NO: 271746 - RNA, 32 nt, Homo Sapiens
ggacaagaacuaacuaccacuaucauagggcu

SEQ ID NO: 271747 - RNA, 32 nt, Homo Sapiens
acggccccaagcccagggcuggaggcaggucc

SEQ ID NO: 271748 - RNA, 30 nt, Homo Sapiens
auuucagagguuaugggggaaagugggguu

SEQ ID NO: 271749 - RNA, 32 nt, Homo Sapiens
acuggagaugcaucgggaaagaagaaacuccg

SEQ ID NO: 271750 - RNA, 32 nt, Homo Sapiens
gcauaugucucugcuaagcaccauaguuguca

SEQ ID NO: 271751 - RNA, 32 nt, Homo Sapiens
cuaccuuagagaaagccagugauucaauauca

SEQ ID NO: 271752 - RNA, 32 nt, Homo Sapiens
uccaggcccaaccccauuccaccagcaccccg

SEQ ID NO: 271753 - RNA, 32 nt, Homo Sapiens
auacagcccuguacaucuaguuuucuugguuc

SEQ ID NO: 271754 - RNA, 32 nt, Homo Sapiens
gaacacuagcuaacaccuuccucuaucucuaa

SEQ ID NO: 271755 - RNA, 32 nt, Homo Sapiens
uaaagaugcuacuucccacuguaugggggaga

SEQ ID NO: 271756 - RNA, 32 nt, Homo Sapiens
gccaaucccagccccagacuccaaagcauccc

SEQ ID NO: 271757 - RNA, 32 nt, Homo Sapiens
ccugugcccccuccucccugccgcagugcccc

SEQ ID NO: 271758 - RNA, 32 nt, Homo Sapiens
cugugaaacuguauauuuuguaaauaaauaua

SEQ ID NO: 271759 - RNA, 32 nt, Homo Sapiens
ggcuccugacaaccuccuccccucggcggacg

SEQ ID NO: 271760 - RNA, 32 nt, Homo Sapiens
cuagucgcccuccgcuggccccgccuucgucc

SEQ ID NO: 271761 - RNA, 32 nt, Homo Sapiens
uugaguuuaggucucccccacccauauuuaau

SEQ ID NO: 271762 - RNA, 32 nt, Homo Sapiens
ggcaucuauguuauaaauuuagaugcaaaaga

SEQ ID NO: 271763 - RNA, 32 nt, Homo Sapiens
gggcgucccccucccccauggagagagccaga

SEQ ID NO: 271764 - RNA, 32 nt, Homo Sapiens
ccaugagggcuuuggaucagauuccucuucuc

SEQ ID NO: 271765 - RNA, 32 nt, Homo Sapiens
aaggucauugccuuugacacugucccauagcu

SEQ ID NO: 271766 - RNA, 32 nt, Homo Sapiens
cuuaaaaaucacacuguaaauaugaaucugcu

SEQ ID NO: 271767 - RNA, 32 nt, Homo Sapiens
ugcugacccugccccggguccgagggugucaa

SEQ ID NO: 271768 - RNA, 32 nt, Homo Sapiens
cucgcuugccgggccuggcccuccugggaagg

SEQ ID NO: 271769 - RNA, 32 nt, Homo Sapiens
gccaugcagaacaauacugaaaacauaaucuu

SEQ ID NO: 271770 - RNA, 32 nt, Homo Sapiens
cggccaggggacgagcgccuuccuugcccacc

SEQ ID NO: 271771 - RNA, 32 nt, Homo Sapiens
gaagaaccaagcauggugaaagacagguauuu

SEQ ID NO: 271772 - RNA, 32 nt, Homo Sapiens
ggcguucuccgcgcgcaaaucccggcgacgcg

SEQ ID NO: 271773 - RNA, 32 nt, Homo Sapiens
agcucaaaguaaacguguauuuuuuaguaaca

SEQ ID NO: 271774 - RNA, 32 nt, Homo Sapiens
cggucccguuggucaccuccguccggaacacc

SEQ ID NO: 271775 - RNA, 32 nt, Homo Sapiens
cgaaggcccuucccugcucccgcggcgaaggg

SEQ ID NO: 271776 - RNA, 32 nt, Homo Sapiens
gggaagagcgcagagggcuggcugggaggaac

SEQ ID NO: 271777 - RNA, 32 nt, Homo Sapiens
gggguacagguugggugggcccucccugaggg

SEQ ID NO: 271778 - RNA, 32 nt, Homo Sapiens
cuggagagcuggggcguccacaacucuaaguc

SEQ ID NO: 271779 - RNA, 32 nt, Homo Sapiens
gauaucaagaggcugcgccuguacugccugga

SEQ ID NO: 271780 - RNA, 32 nt, Homo Sapiens
guacgugccccucuccugucuggaggcgggug

SEQ ID NO: 271781 - RNA, 32 nt, Homo Sapiens
guguuguggcccuggggcccagccccaaacug

SEQ ID NO: 271782 - RNA, 32 nt, Homo Sapiens
guuguuggccccaggagcaucccucggggccg

SEQ ID NO: 271783 - RNA, 32 nt, Homo Sapiens
gugccuucugcucucuggaaccagaggacuag

SEQ ID NO: 271784 - RNA, 32 nt, Homo Sapiens
cuuggcugugugucugcggaucuguaguggcg

SEQ ID NO: 271785 - RNA, 32 nt, Homo Sapiens
ucugggcgcgcgcgacgucaguuugaguucug

SEQ ID NO: 271786 - RNA, 32 nt, Homo Sapiens
cacagcgggauggcaucuccgacacucccgug

SEQ ID NO: 271787 - RNA, 32 nt, Homo Sapiens
gucacagauuggaauuacauaugacaaaguau

SEQ ID NO: 271788 - RNA, 31 nt, Homo Sapiens
caauucaaauaaaaauaaagucagcuuuguu

SEQ ID NO: 271789 - RNA, 32 nt, Homo Sapiens
cucagggguguguggaaggcagugggggaguu

SEQ ID NO: 271790 - RNA, 30 nt, Homo Sapiens
uuugcugcagaguugagggaaacccccagc

SEQ ID NO: 271791 - RNA, 32 nt, Homo Sapiens
cugaggucaggaguucgagaccagccuggcua

SEQ ID NO: 271792 - RNA, 32 nt, Homo Sapiens
gacaaauucuguagaguagacacagugaguau

SEQ ID NO: 271793 - RNA, 32 nt, Homo Sapiens
caaauuuuugcugcuuaggucaucucaaggcu

SEQ ID NO: 271794 - RNA, 32 nt, Homo Sapiens
uggcggagcaacaaacccggcgcggacccuag

SEQ ID NO: 271795 - RNA, 32 nt, Homo Sapiens
ggguaguaauuggcccacucucuucuuacugg

SEQ ID NO: 271796 - RNA, 32 nt, Homo Sapiens
cgcuggcauuucugccgggacggccgggugcu

SEQ ID NO: 271797 - RNA, 32 nt, Homo Sapiens
guggcuccccuccuuccacgccugaauuuggc

SEQ ID NO: 271798 - RNA, 32 nt, Homo Sapiens
cauucaacaagucucuaggaaguuccaaacuu

SEQ ID NO: 271799 - RNA, 32 nt, Homo Sapiens
ugucugccugcgccaccuccgugcuugcuuaa

SEQ ID NO: 271800 - RNA, 32 nt, Homo Sapiens
uaagaaauauuuuugugcuuucuggccuucuu

SEQ ID NO: 271801 - RNA, 32 nt, Homo Sapiens
cuccugccuggugcucggcagaccccacugug

SEQ ID NO: 271802 - RNA, 32 nt, Homo Sapiens
ccaggagaggggccaagagcgcggcugacccu

SEQ ID NO: 271803 - RNA, 32 nt, Homo Sapiens
cucuccccacuacuucaggauuggaacacagg

SEQ ID NO: 271804 - RNA, 32 nt, Homo Sapiens
agaaguuggagguggagcugugacuggcugag

SEQ ID NO: 271805 - RNA, 32 nt, Homo Sapiens
ccugcugacaaugcuccuagcuggauuuugua

SEQ ID NO: 271806 - RNA, 32 nt, Homo Sapiens
cgccccugcccggccccgccccccaacguguc

SEQ ID NO: 271807 - RNA, 32 nt, Homo Sapiens
cccgcggagugaccccaccuucucaugggggg

SEQ ID NO: 271808 - RNA, 32 nt, Homo Sapiens
cucguuugggcucaaggcaccgcagccuguca

SEQ ID NO: 271809 - RNA, 32 nt, Homo Sapiens
cuacauugaaaauaaaccggugacuguuuuuc

SEQ ID NO: 271810 - RNA, 32 nt, Homo Sapiens
auacucggaccccugggaccagcccuucagcc

SEQ ID NO: 271811 - RNA, 32 nt, Homo Sapiens
uggacucugcuguggggaagggcugaugcagg

SEQ ID NO: 271812 - RNA, 32 nt, Homo Sapiens
cuauucuguaaaauuuaaaaaauauauaugca

SEQ ID NO: 271813 - RNA, 32 nt, Homo Sapiens
aggacaucuguucuuugguguaaucucucaug

SEQ ID NO: 271814 - RNA, 32 nt, Homo Sapiens
cugccccaucuggccggcccagcccaguccag

SEQ ID NO: 271815 - RNA, 32 nt, Homo Sapiens
cucuacuuuuucuggaugauuuccagccauca

SEQ ID NO: 271816 - RNA, 32 nt, Homo Sapiens
ccuuuaauggggaugcaaauaaaguuuguggg

SEQ ID NO: 271817 - RNA, 32 nt, Homo Sapiens
aaaauugcaauaacccaugcacugagacuuag

SEQ ID NO: 271818 - RNA, 32 nt, Homo Sapiens
gcgcgcgcgggcgggcggacagaucggagccg

SEQ ID NO: 271819 - RNA, 32 nt, Homo Sapiens
uuuaaugaggauauuauaucaggugccaggaa

SEQ ID NO: 271820 - RNA, 32 nt, Homo Sapiens
gaccacgggaggagguguaggagagaagcgcc

SEQ ID NO: 271821 - RNA, 32 nt, Homo Sapiens
gaaacucuauuauggaacccaauggacauaug

SEQ ID NO: 271822 - RNA, 32 nt, Homo Sapiens
cggggacccggcugcgguggcugcgggacuga

SEQ ID NO: 271823 - RNA, 32 nt, Homo Sapiens
auaggagcugaauaaaaugaggcugagaccua

SEQ ID NO: 271824 - RNA, 32 nt, Homo Sapiens
gggggaccgagacuguaccuuccagccuucag

SEQ ID NO: 271825 - RNA, 32 nt, Homo Sapiens
cgcccgccaugccguccgcgggccccgccuga

SEQ ID NO: 271826 - RNA, 32 nt, Homo Sapiens
gacggcgggaucucuuucgccauggcugccgg

SEQ ID NO: 271827 - RNA, 32 nt, Homo Sapiens
ugagauugcagauguuaccaucggcuggaauu

SEQ ID NO: 271828 - RNA, 32 nt, Homo Sapiens
auuucaccaacccagaaccuccuugaucauca

SEQ ID NO: 271829 - RNA, 32 nt, Homo Sapiens
cagagggcgcgcugcguccgccgcccggagga

SEQ ID NO: 271830 - RNA, 32 nt, Homo Sapiens
caccccaaagaagaugcugcugcacucagaag

SEQ ID NO: 271831 - RNA, 32 nt, Homo Sapiens
cccagccccacccaagaggagggcagcgugug

SEQ ID NO: 271832 - RNA, 32 nt, Homo Sapiens
uuucuaaggaaguggaaagaauuaaacuagaa

SEQ ID NO: 271833 - RNA, 32 nt, Homo Sapiens
uggcugguguacuugggaauguacuaucagga

SEQ ID NO: 271834 - RNA, 32 nt, Homo Sapiens
auagccauugcuuuugagaaucagauagugug

SEQ ID NO: 271835 - RNA, 32 nt, Homo Sapiens
cacgggcccaaccgggccaugucgggggagcc

SEQ ID NO: 271836 - RNA, 32 nt, Homo Sapiens
aggaggugggcucgcugauaggcaugacuuuc

SEQ ID NO: 271837 - RNA, 32 nt, Homo Sapiens
ccggacccgcagccccgaugcugcugacgcug

SEQ ID NO: 271838 - RNA, 32 nt, Homo Sapiens
ugaccaagucugccaaccaauggccagcuaug

SEQ ID NO: 271839 - RNA, 32 nt, Homo Sapiens
cucgaagaccugaacuaagugcuuaauucaag

SEQ ID NO: 271840 - RNA, 32 nt, Homo Sapiens
gaccugggggagacacggaggacccccuggcu

SEQ ID NO: 271841 - RNA, 32 nt, Homo Sapiens
acaaaguguaaugaaaugacaagcugguugaa

SEQ ID NO: 271842 - RNA, 32 nt, Homo Sapiens
ggacacggaucuuccauucucuacauccaccg

SEQ ID NO: 271843 - RNA, 32 nt, Homo Sapiens
cauucaguuccuccccuuuccuuucuaacuug

SEQ ID NO: 271844 - RNA, 32 nt, Homo Sapiens
acucuguguagcccgagcccagcccuuccugg

SEQ ID NO: 271845 - RNA, 32 nt, Homo Sapiens
acuccauagucuuuuccugugguguuaggucu

SEQ ID NO: 271846 - RNA, 32 nt, Homo Sapiens
gauggaaguggaagauucagaguucauuucua

SEQ ID NO: 271847 - RNA, 32 nt, Homo Sapiens
caauaaaugucacuucccaugccguuauuuua

SEQ ID NO: 271848 - RNA, 32 nt, Homo Sapiens
gauguuuccucuugccuucucuggugccucca

SEQ ID NO: 271849 - RNA, 32 nt, Homo Sapiens
uaauugcccuuaauauuuugacauauagggau

SEQ ID NO: 271850 - RNA, 32 nt, Homo Sapiens
gugucagaacugaguucuugcugagguuugca

SEQ ID NO: 271851 - RNA, 32 nt, Homo Sapiens
ggcgcauaaggcggggccggcgcgggccuuuc

SEQ ID NO: 271852 - RNA, 32 nt, Homo Sapiens
agggcaggggagaggugggguggcagacacgc

SEQ ID NO: 271853 - RNA, 32 nt, Homo Sapiens
ccuguaaugugguaaggaaaucuuauuugugg

SEQ ID NO: 271854 - RNA, 32 nt, Homo Sapiens
gccuuagaaaaccacaauguuuacagcccugu

SEQ ID NO: 271855 - RNA, 32 nt, Homo Sapiens
uccuuuaaaucugugucucuguguguauaaca

SEQ ID NO: 271856 - RNA, 32 nt, Homo Sapiens
cauuuccauuuuuucuuucuguaugguugugg

SEQ ID NO: 271857 - RNA, 32 nt, Homo Sapiens
ccuuucagcugcgccggccgcgaggccacgga

SEQ ID NO: 271858 - RNA, 32 nt, Homo Sapiens
gagugcccacuaugugccaagcacugugcuca

SEQ ID NO: 271859 - RNA, 32 nt, Homo Sapiens
guaccaguauguggucugaggaccccgaccgg

SEQ ID NO: 271860 - RNA, 32 nt, Homo Sapiens
uccgcgcgcuggagaagcuggagguggaccgg

SEQ ID NO: 271861 - RNA, 32 nt, Homo Sapiens
cuaucagcaaauuauuugauagauuguucuua

SEQ ID NO: 271862 - RNA, 32 nt, Homo Sapiens
ccgccggaaaaauuacuuuaaaaaucgccaaa

SEQ ID NO: 271863 - RNA, 32 nt, Homo Sapiens
cguacagggugggguccccaccccuagccccu

SEQ ID NO: 271864 - RNA, 32 nt, Homo Sapiens
cuuguuuuuaaauugcagaaauggaugucuuc

SEQ ID NO: 271865 - RNA, 32 nt, Homo Sapiens
gugccauuauauuugcauuauguauuuauaau

SEQ ID NO: 271866 - RNA, 32 nt, Homo Sapiens
caaauuuuucuuuuuuaaggaacuacuccaaa

SEQ ID NO: 271867 - RNA, 32 nt, Homo Sapiens
auuagucuuuagccauaaccacuacacuuuua

SEQ ID NO: 271868 - RNA, 32 nt, Homo Sapiens
ugcccauguucccaaacaggacguacacccga

SEQ ID NO: 271869 - RNA, 32 nt, Homo Sapiens
cacggccuggcaugcagcuuguccuugcuccu

SEQ ID NO: 271870 - RNA, 32 nt, Homo Sapiens
cccagccagaaagugguucucaugaugcuucu

SEQ ID NO: 271871 - RNA, 32 nt, Homo Sapiens
aggcuguacggcuacagccugggcaacaucuc

SEQ ID NO: 271872 - RNA, 32 nt, Homo Sapiens
gaaggucaaauuuuaauuguaucaaugggcaa

SEQ ID NO: 271873 - RNA, 32 nt, Homo Sapiens
gacaggagaccgcugcugcugcugccgcuacu

SEQ ID NO: 271874 - RNA, 32 nt, Homo Sapiens
cuuuaacacgcgaggcuuucaggcgugcagaa

SEQ ID NO: 271875 - RNA, 29 nt, Homo Sapiens
uauguaaugcuuauauaccauagaguuuu

SEQ ID NO: 271876 - RNA, 32 nt, Homo Sapiens
guaggaguuugaagcuuucuuaacucagaaag

SEQ ID NO: 271877 - RNA, 32 nt, Homo Sapiens
guagccagacugccucucuagauuccuccucu

SEQ ID NO: 271878 - RNA, 32 nt, Homo Sapiens
guggccucaucccacugugcugugcucacaac

SEQ ID NO: 271879 - RNA, 32 nt, Homo Sapiens
cagcauguucuuccugcugccucgagguuaug

SEQ ID NO: 271880 - RNA, 32 nt, Homo Sapiens
uuuuaauauauuuuaauauauuacaugugcag

SEQ ID NO: 271881 - RNA, 32 nt, Homo Sapiens
aaaugaaauauuaaccuaaggucaagcuggga

SEQ ID NO: 271882 - RNA, 32 nt, Homo Sapiens
cuaauggaaagguaacuggcaaugcacuugau

SEQ ID NO: 271883 - RNA, 32 nt, Homo Sapiens
aaaccaguuauguuucggaaagagggaaaaga

SEQ ID NO: 271884 - RNA, 32 nt, Homo Sapiens
caugacacagcacaacucuacagacagugaug

SEQ ID NO: 271885 - RNA, 32 nt, Homo Sapiens
ggagggcaucucgccaguggugcgaggcaggg

SEQ ID NO: 271886 - RNA, 32 nt, Homo Sapiens
ccccgagcccccuccccuccccuccagggugc

SEQ ID NO: 271887 - RNA, 32 nt, Homo Sapiens
uuaguauaugaauaucuuucugaauuuuugua

SEQ ID NO: 271888 - RNA, 32 nt, Homo Sapiens
agcccggcaagcugcgagcgcgccaaagaccc

SEQ ID NO: 271889 - RNA, 32 nt, Homo Sapiens
gccuuccgcguucucucgcccucgggcccacc

SEQ ID NO: 271890 - RNA, 32 nt, Homo Sapiens
agguggccagggcuccacgggggccuaguggc

SEQ ID NO: 271891 - RNA, 32 nt, Homo Sapiens
uggcagccgggcgggugggaggggccggagca

SEQ ID NO: 271892 - RNA, 32 nt, Homo Sapiens
auaaaugucaugaaacaaaaacacugauuuua

SEQ ID NO: 271893 - RNA, 32 nt, Homo Sapiens
cugauaucuauuacguaucucauacauauuuc

SEQ ID NO: 271894 - RNA, 32 nt, Homo Sapiens
gggcaaccugucgagcugggaggacuugcugc

SEQ ID NO: 271895 - RNA, 32 nt, Homo Sapiens
auuuugauaauggcuuccagacucuuugcguu

SEQ ID NO: 271896 - RNA, 32 nt, Homo Sapiens
gagaccuguauauuacuuuuauuuuuaggacc

SEQ ID NO: 271897 - RNA, 32 nt, Homo Sapiens
cuuuucauuaaccauggccugauauuaguucu

SEQ ID NO: 271898 - RNA, 32 nt, Homo Sapiens
uauguaagugauguuauuagcaucgagauucc

SEQ ID NO: 271899 - RNA, 32 nt, Homo Sapiens
aaccauuguggaagucagugugguguuccuca

SEQ ID NO: 271900 - RNA, 32 nt, Homo Sapiens
aaacccaguuuaucuuauacaaaugagccucu

SEQ ID NO: 271901 - RNA, 32 nt, Homo Sapiens
uucuaccguaauugcuuugugccuuugggcag

SEQ ID NO: 271902 - RNA, 32 nt, Homo Sapiens
aauaaagcagcuuugucuuauuccucacaucu

SEQ ID NO: 271903 - RNA, 32 nt, Homo Sapiens
cccagcacagagccaccggaacaucaagaucc

SEQ ID NO: 271904 - RNA, 32 nt, Homo Sapiens
cccaagaaaaagaggaaguaacuucugaacuu

SEQ ID NO: 271905 - RNA, 32 nt, Homo Sapiens
uaaauggcauuuaaaaauuugcugaaugcuug

SEQ ID NO: 271906 - RNA, 32 nt, Homo Sapiens
cuuaaguucgggaaacaaaguucggggaaaau

SEQ ID NO: 271907 - RNA, 32 nt, Homo Sapiens
accauccuggcuaacacagugaaaccccgucu

SEQ ID NO: 271908 - RNA, 32 nt, Homo Sapiens
cauuuuguccucuuuucagugaaacagaguaa

SEQ ID NO: 271909 - RNA, 32 nt, Homo Sapiens
aacucugggaagccaaugggggugggggugga

SEQ ID NO: 271910 - RNA, 32 nt, Homo Sapiens
acuugcuuucuaccagcuaagaaccaugcugc

SEQ ID NO: 271911 - RNA, 32 nt, Homo Sapiens
uaugguaucauguaucucucuguggugguuca

SEQ ID NO: 271912 - RNA, 32 nt, Homo Sapiens
guccugcgagcgccagcggccgggacgaggcg

SEQ ID NO: 271913 - RNA, 32 nt, Homo Sapiens
gguuuucugaagauccaguuggacaauuuuca

SEQ ID NO: 271914 - RNA, 32 nt, Homo Sapiens
cuucugccaagagcccugagccacucacagca

SEQ ID NO: 271915 - RNA, 32 nt, Homo Sapiens
cugccagccagugggaaggcaggccgcgcgcg

SEQ ID NO: 271916 - RNA, 32 nt, Homo Sapiens
ugggccccagcccacaccuucaccagggccca

SEQ ID NO: 271917 - RNA, 32 nt, Homo Sapiens
uucucucgguugguugccagggcuugcagauc

SEQ ID NO: 271918 - RNA, 32 nt, Homo Sapiens
cuuggaagagcugggcuuuguuuucugucucc

SEQ ID NO: 271919 - RNA, 32 nt, Homo Sapiens
aaucaggggucagcaaacuuuuucuguaaagg

SEQ ID NO: 271920 - RNA, 32 nt, Homo Sapiens
gcgcugccgcggcagcggcgggccccucauuu

SEQ ID NO: 271921 - RNA, 32 nt, Homo Sapiens
aauuagggccgucagaaucggugcuggaagac

SEQ ID NO: 271922 - RNA, 32 nt, Homo Sapiens
acccuagauaaaacguuucaauggcuucccau

SEQ ID NO: 271923 - RNA, 32 nt, Homo Sapiens
gaaugauaaaagacucaagcacuaaaaauaua

SEQ ID NO: 271924 - RNA, 32 nt, Homo Sapiens
uugcuccaaaguccaacagacacacacugagc

SEQ ID NO: 271925 - RNA, 32 nt, Homo Sapiens
ugggggcacaggaaacaaagcuagagguggcu

SEQ ID NO: 271926 - RNA, 32 nt, Homo Sapiens
gcuacauuucuugguucccuggccaggaagca

SEQ ID NO: 271927 - RNA, 32 nt, Homo Sapiens
cuucuucauuggcuuucugaaauguccugagu

SEQ ID NO: 271928 - RNA, 32 nt, Homo Sapiens
uuccuggcugggugaccucaaccuaucacccu

SEQ ID NO: 271929 - RNA, 32 nt, Homo Sapiens
cggccgcacggcaagcguggaccgcggggggc

SEQ ID NO: 271930 - RNA, 32 nt, Homo Sapiens
auucuuucuccuuuccuucuccaaaggcuugg

SEQ ID NO: 271931 - RNA, 32 nt, Homo Sapiens
gugcugagaagcugggccagagaccccgcggg

SEQ ID NO: 271932 - RNA, 32 nt, Homo Sapiens
agcagcgccagcggucguccuccagcucccgc

SEQ ID NO: 271933 - RNA, 32 nt, Homo Sapiens
ucuguccugugcuacccacagugcagauugca

SEQ ID NO: 271934 - RNA, 32 nt, Homo Sapiens
gacggcacccaucaucgagcugcacaaccaga

SEQ ID NO: 271935 - RNA, 32 nt, Homo Sapiens
uauccacaaaguagaugaccaaugcacgcucc

SEQ ID NO: 271936 - RNA, 32 nt, Homo Sapiens
cuuuacaaaauauuuccucaguacuuugcaga

SEQ ID NO: 271937 - RNA, 32 nt, Homo Sapiens
ugcucggcgaccgcgggcuuggccagcggcgc

SEQ ID NO: 271938 - RNA, 32 nt, Homo Sapiens
uccacccucaggccuuauaauacauaaaauaa

SEQ ID NO: 271939 - RNA, 32 nt, Homo Sapiens
gcugccuugggucuuugguuugcugagggcug

SEQ ID NO: 271940 - RNA, 32 nt, Homo Sapiens
gaaggcgcgggcugagcagagccgggcguugg

SEQ ID NO: 271941 - RNA, 32 nt, Homo Sapiens
cuugagagaacaguguugcugcuggcagagau

SEQ ID NO: 271942 - RNA, 32 nt, Homo Sapiens
aaccccucccagcagaugccuucccagacuac

SEQ ID NO: 271943 - RNA, 32 nt, Homo Sapiens
uagccuggcccuccccuccuuggcauucaugg

SEQ ID NO: 271944 - RNA, 32 nt, Homo Sapiens
gaggacuuuucucggguaucuugaggguuugu

SEQ ID NO: 271945 - RNA, 31 nt, Homo Sapiens
gagaauggugcuagaaguucaggugagaaca

SEQ ID NO: 271946 - RNA, 32 nt, Homo Sapiens
ucuggauuccaaggugggauggugaucccuuu

SEQ ID NO: 271947 - RNA, 32 nt, Homo Sapiens
ggcuucaccuauauuucuguuaauaaucacau

SEQ ID NO: 271948 - RNA, 32 nt, Homo Sapiens
ccuccaaugauaaagaaaaugguaaauuuucu

SEQ ID NO: 271949 - RNA, 32 nt, Homo Sapiens
ccccaagaccagaugucgcgcggccggacaca

SEQ ID NO: 271950 - RNA, 32 nt, Homo Sapiens
uccuaccuccgucuucgccaaggccccgcccg

SEQ ID NO: 271951 - RNA, 32 nt, Homo Sapiens
ugccgccaccaugcugcccccugggacugcga

SEQ ID NO: 271952 - RNA, 32 nt, Homo Sapiens
uucuguuuauuggguuuugauuugauuuuuug

SEQ ID NO: 271953 - RNA, 32 nt, Homo Sapiens
gauuggagaagcuggagagaaagcagaagagg

SEQ ID NO: 271954 - RNA, 31 nt, Homo Sapiens
uauuugauacugucucucagaguuugcaaac

SEQ ID NO: 271955 - RNA, 32 nt, Homo Sapiens
agacauuucuaaaacauaugugcuucauuaug

SEQ ID NO: 271956 - RNA, 32 nt, Homo Sapiens
aacugggaacagaguccuugucacuccagggg

SEQ ID NO: 271957 - RNA, 32 nt, Homo Sapiens
auucgaaaauuugauaguaucaaaauuaguau

SEQ ID NO: 271958 - RNA, 32 nt, Homo Sapiens
aacuuguggugggacagauuccacggaaggau

SEQ ID NO: 271959 - RNA, 32 nt, Homo Sapiens
cccagugaacaugaaauuguacauuguguaua

SEQ ID NO: 271960 - RNA, 32 nt, Homo Sapiens
aggcugcaaccugguaugaaaucaccaucaga

SEQ ID NO: 271961 - RNA, 32 nt, Homo Sapiens
gauggaugcaugaauaaagaugauguguguac

SEQ ID NO: 271962 - RNA, 32 nt, Homo Sapiens
uugcaccaguuucuuugcuauauccugccuug

SEQ ID NO: 271963 - RNA, 25 nt, Homo Sapiens
auggccggccccagccucgcuugcu

SEQ ID NO: 271964 - RNA, 32 nt, Homo Sapiens
aaagguccauuaugcuucuccucucugagaau

SEQ ID NO: 271965 - RNA, 28 nt, Homo Sapiens
gacugaguggcuaacgggaagccucccu

SEQ ID NO: 271966 - RNA, 32 nt, Homo Sapiens
ucacaguuugguucuuuuguuuuguuuuuuaa

SEQ ID NO: 271967 - RNA, 32 nt, Homo Sapiens
acugagguucuugggauacagaucucagggcu

SEQ ID NO: 271968 - RNA, 32 nt, Homo Sapiens
acacagcacugacuuacaguagaucagaacuc

SEQ ID NO: 271969 - RNA, 32 nt, Homo Sapiens
acagaagaaaagacaagaagcagcugccaaga

SEQ ID NO: 271970 - RNA, 32 nt, Homo Sapiens
ggccccgggcguaucgcucuccaggccgcccu

SEQ ID NO: 271971 - RNA, 32 nt, Homo Sapiens
aaggauacaucauauacugacaaacucaaugu

SEQ ID NO: 271972 - RNA, 32 nt, Homo Sapiens
ugggcucagccgggagaccccuggagaggcgg

SEQ ID NO: 271973 - RNA, 32 nt, Homo Sapiens
acugcauacagaucucuuuauuucuauuauga

SEQ ID NO: 271974 - RNA, 32 nt, Homo Sapiens
ugccagccccugcuccuccucccagggagcca

SEQ ID NO: 271975 - RNA, 32 nt, Homo Sapiens
acaggggcaaggaaaugcaaucuuccacaacc

SEQ ID NO: 271976 - RNA, 32 nt, Homo Sapiens
acaaccuuauguauguucugaaugugggaaag

SEQ ID NO: 271977 - RNA, 32 nt, Homo Sapiens
agccuuacagcuuuucucagaagguaacuugu

SEQ ID NO: 271978 - RNA, 32 nt, Homo Sapiens
auaauagaacuguagaauaaaaagaauuuuuu

SEQ ID NO: 271979 - RNA, 32 nt, Homo Sapiens
gguuuccuucggauuuuccucccuuuguucgg

SEQ ID NO: 271980 - RNA, 32 nt, Homo Sapiens
aguaggcuggugaggaaguccaggcuccaggg

SEQ ID NO: 271981 - RNA, 32 nt, Homo Sapiens
gcgcccaccccauggcgacggacgcggcgcua

SEQ ID NO: 271982 - RNA, 32 nt, Homo Sapiens
uggggacggcccggugccuggcugcaaggccg

SEQ ID NO: 271983 - RNA, 32 nt, Homo Sapiens
gggcugggcugagaggggagggggcggcggcg

SEQ ID NO: 271984 - RNA, 32 nt, Homo Sapiens
ggccaccggagcggcccggcgacgaucgcuga

SEQ ID NO: 271985 - RNA, 32 nt, Homo Sapiens
uuagcauugauauaguugucuuucuuggacug

SEQ ID NO: 271986 - RNA, 32 nt, Homo Sapiens
gaccuuguccccagccccaccuggcccuuucu

SEQ ID NO: 271987 - RNA, 32 nt, Homo Sapiens
cauuuuauauuuccaauuguuaaagaaaaaua

SEQ ID NO: 271988 - RNA, 32 nt, Homo Sapiens
ggcuuccaggaccuuucucuuccuccuccucc

SEQ ID NO: 271989 - RNA, 32 nt, Homo Sapiens
acuggaagcaggagacagaacagugucugucc

SEQ ID NO: 271990 - RNA, 32 nt, Homo Sapiens
ggcuuauuucagaacaacuuccacuuacuuuc

SEQ ID NO: 271991 - RNA, 32 nt, Homo Sapiens
auaccaaccugggcaauauagcaagaucccau

SEQ ID NO: 271992 - RNA, 32 nt, Homo Sapiens
cagcuccgcaggcagguguggaugcugcaauu

SEQ ID NO: 271993 - RNA, 32 nt, Homo Sapiens
acagcuuugaagcagcagcaggagccugcggg

SEQ ID NO: 271994 - RNA, 32 nt, Homo Sapiens
ugcucacucauuuuagcuauguagaaggugga

SEQ ID NO: 271995 - RNA, 32 nt, Homo Sapiens
uuguauaaacucaaaacaaacaaaagaaccaa

SEQ ID NO: 271996 - RNA, 32 nt, Homo Sapiens
caaggcgggucaccgccuccuggcccgcggag

SEQ ID NO: 271997 - RNA, 30 nt, Homo Sapiens
aggaauguauccccugccuauuuuccuugu

SEQ ID NO: 271998 - RNA, 32 nt, Homo Sapiens
ggcaccuggugccugcccccugccgggcagcu

SEQ ID NO: 271999 - RNA, 32 nt, Homo Sapiens
uuguaaguuacuuuuucuuuaugacuucugug

SEQ ID NO: 272000 - RNA, 32 nt, Homo Sapiens
aaaaauaaaagcuguuuucaccaccucccucc

SEQ ID NO: 272001 - RNA, 32 nt, Homo Sapiens
augaguugauguaacccaucuacauuuugugg

SEQ ID NO: 272002 - RNA, 32 nt, Homo Sapiens
caguuggacguggccuggggccccugcucacu

SEQ ID NO: 272003 - RNA, 32 nt, Homo Sapiens
agggagggguccggcaugcugcuggcauuuug

SEQ ID NO: 272004 - RNA, 32 nt, Homo Sapiens
gguacuggacgccgcgcacgcacucgucugcc

SEQ ID NO: 272005 - RNA, 32 nt, Homo Sapiens
cugcugggcaacuggaggacugcagggggcgc

SEQ ID NO: 272006 - RNA, 32 nt, Homo Sapiens
acuucuugaagaaguauaauuguaaauaagcc

SEQ ID NO: 272007 - RNA, 32 nt, Homo Sapiens
gggcaucgcucuuccucacaccacgaaucuga

SEQ ID NO: 272008 - RNA, 32 nt, Homo Sapiens
ggagacagcucggccaggccugcccggagggu

SEQ ID NO: 272009 - RNA, 32 nt, Homo Sapiens
ccacacaugcuuauaacaggcacuagaauaaa

SEQ ID NO: 272010 - RNA, 32 nt, Homo Sapiens
uuguuugugcuuaauguaaagccgcuuuauaa

SEQ ID NO: 272011 - RNA, 32 nt, Homo Sapiens
ggaaaccuugcggagugcuaggcggaagcugc

SEQ ID NO: 272012 - RNA, 32 nt, Homo Sapiens
uacccucuggagggguguggcuccuucccauc

SEQ ID NO: 272013 - RNA, 32 nt, Homo Sapiens
cucuguuuucuuuuuaauauacauuuaaaaua

SEQ ID NO: 272014 - RNA, 32 nt, Homo Sapiens
gcgcagaacccaccccaccccccagugcagac

SEQ ID NO: 272015 - RNA, 32 nt, Homo Sapiens
guauuugagaauauccugguaacuggugguuu

SEQ ID NO: 272016 - RNA, 32 nt, Homo Sapiens
cccugcauuugaagagcagguuuucauuuaua

SEQ ID NO: 272017 - RNA, 32 nt, Homo Sapiens
uaaagaggugcauguaauuuugaaauagcaca

SEQ ID NO: 272018 - RNA, 32 nt, Homo Sapiens
cuguugcuaagccccagcaagcaauccuaggu

SEQ ID NO: 272019 - RNA, 32 nt, Homo Sapiens
agaaggcaaagacuuauucauuuucaaaaggu

SEQ ID NO: 272020 - RNA, 32 nt, Homo Sapiens
aguaagcuuggaaaaauaauuuaagaauacaa

SEQ ID NO: 272021 - RNA, 32 nt, Homo Sapiens
gcuugacauucgccagcgcagggccccacaag

SEQ ID NO: 272022 - RNA, 32 nt, Homo Sapiens
cacaagugcagcguucaucucaucucaacaag

SEQ ID NO: 272023 - RNA, 32 nt, Homo Sapiens
agcccacacugcggagccaggcggcagcaugg

SEQ ID NO: 272024 - RNA, 32 nt, Homo Sapiens
ggaagcgggggugcagcgcggcagaaugaggg

SEQ ID NO: 272025 - RNA, 32 nt, Homo Sapiens
ccugcaccgacuaggcugaggugcugguacuu

SEQ ID NO: 272026 - RNA, 32 nt, Homo Sapiens
aggcgggcaaggacagcuccgcgagcccccua

SEQ ID NO: 272027 - RNA, 32 nt, Homo Sapiens
acaugugugcuaagaguaaugaucaaaucagg

SEQ ID NO: 272028 - RNA, 32 nt, Homo Sapiens
aacauaaaugucaguuucuucagauuugugau

SEQ ID NO: 272029 - RNA, 32 nt, Homo Sapiens
ucuugaugaucaaggagugaaguaauugacag

SEQ ID NO: 272030 - RNA, 32 nt, Homo Sapiens
gacccagccuggcuaagggaaccauuucacug

SEQ ID NO: 272031 - RNA, 32 nt, Homo Sapiens
gacuacugguuuuagagcaguuccucugccuc

SEQ ID NO: 272032 - RNA, 32 nt, Homo Sapiens
ggaauauaucucuauuugagaauagacccuua

SEQ ID NO: 272033 - RNA, 31 nt, Homo Sapiens
ccuuccuucaggaagauguccacucaugccc

SEQ ID NO: 272034 - RNA, 32 nt, Homo Sapiens
ccuuccuccucgggcagugcguucuggggcug

SEQ ID NO: 272035 - RNA, 32 nt, Homo Sapiens
gaggcgugaaacucaccucaggaaauguaucu

SEQ ID NO: 272036 - RNA, 32 nt, Homo Sapiens
aaagaaaaaauaauuuauuuuacaaaugagau

SEQ ID NO: 272037 - RNA, 32 nt, Homo Sapiens
ucugucuagcuagacauagaaacaauauggaa

SEQ ID NO: 272038 - RNA, 32 nt, Homo Sapiens
gagggucggcgucuggggucagggcgcgcaca

SEQ ID NO: 272039 - RNA, 31 nt, Homo Sapiens
cagcgggacacuagccugcccccucuguuug

SEQ ID NO: 272040 - RNA, 32 nt, Homo Sapiens
gccagcggggcccgguuccaauaaagagacuu

SEQ ID NO: 272041 - RNA, 32 nt, Homo Sapiens
ucuccuucaaggaaccacacauuuuuaguaga

SEQ ID NO: 272042 - RNA, 32 nt, Homo Sapiens
gugcacaucgccaucgccacacgccaacuccg

SEQ ID NO: 272043 - RNA, 32 nt, Homo Sapiens
gacuaagaaucccuaagccuagcugggaaggu

SEQ ID NO: 272044 - RNA, 32 nt, Homo Sapiens
uggaggcggaggcaacggcggcuggagcugcc

SEQ ID NO: 272045 - RNA, 32 nt, Homo Sapiens
uuuuuaaagagauggcaucuugcuaugucguc

SEQ ID NO: 272046 - RNA, 32 nt, Homo Sapiens
gguuuaauucuauauccucuugcuuguuacag

SEQ ID NO: 272047 - RNA, 32 nt, Homo Sapiens
agucccgaaauuuggaucuucuuucuuuuuga

SEQ ID NO: 272048 - RNA, 32 nt, Homo Sapiens
ccugccugucuccuaggccacuaaaccacagc

SEQ ID NO: 272049 - RNA, 32 nt, Homo Sapiens
ccucucgacccuguccuccccccgccacugga

SEQ ID NO: 272050 - RNA, 31 nt, Homo Sapiens
ucuaugaggucagcaaggauaugaugagauu

SEQ ID NO: 272051 - RNA, 32 nt, Homo Sapiens
uggcauauacuuauuucuugagagaagauuuu

SEQ ID NO: 272052 - RNA, 32 nt, Homo Sapiens
cacaggugcucuaaccauguuuauugaacaaa

SEQ ID NO: 272053 - RNA, 32 nt, Homo Sapiens
auauauuuaggaucuuggauauguuuaauaua

SEQ ID NO: 272054 - RNA, 32 nt, Homo Sapiens
gugauugccugccuuagaacuauguagaggag

SEQ ID NO: 272055 - RNA, 32 nt, Homo Sapiens
cacaccucagggcagcgagaguggaccuggug

SEQ ID NO: 272056 - RNA, 32 nt, Homo Sapiens
ugucaaaauggcaauugugaacugcuugaaca

SEQ ID NO: 272057 - RNA, 32 nt, Homo Sapiens
aauuagccgggcgugguggugcgcacuuaugg

SEQ ID NO: 272058 - RNA, 32 nt, Homo Sapiens
gcggccgccccaagccggagccccgcagcgcu

SEQ ID NO: 272059 - RNA, 32 nt, Homo Sapiens
aagaugacacccaaauuaucaagagggaugag

SEQ ID NO: 272060 - RNA, 32 nt, Homo Sapiens
cugcugcauccaccacccuucuuacagaucag

SEQ ID NO: 272061 - RNA, 32 nt, Homo Sapiens
guaaagcacuauugucuugggguugagcccua

SEQ ID NO: 272062 - RNA, 32 nt, Homo Sapiens
ccuucccgcugccauuucuacucgucaggaac

SEQ ID NO: 272063 - RNA, 32 nt, Homo Sapiens
aggcccagccuuuuugaccugcuugagaggga

SEQ ID NO: 272064 - RNA, 32 nt, Homo Sapiens
ugaaauuuuuaaaucauuucauguuagucuua

SEQ ID NO: 272065 - RNA, 32 nt, Homo Sapiens
uguauugguggaagaauucuagugguucccua

SEQ ID NO: 272066 - RNA, 32 nt, Homo Sapiens
gcuggccagcagccugcuccgcgcggauccgg

SEQ ID NO: 272067 - RNA, 32 nt, Homo Sapiens
uauuuucauuggucuacugaaaacgaacaaua

SEQ ID NO: 272068 - RNA, 32 nt, Homo Sapiens
cagaagagugucaaguuggacucuuugaacuc

SEQ ID NO: 272069 - RNA, 32 nt, Homo Sapiens
gcugggggcuugucgcccuuucaggcuccacc

SEQ ID NO: 272070 - RNA, 32 nt, Homo Sapiens
uaauagcuauacaugaauuacauuguggaugu

SEQ ID NO: 272071 - RNA, 32 nt, Homo Sapiens
agaagucuuaauugcccucuccugcuucaguc

SEQ ID NO: 272072 - RNA, 32 nt, Homo Sapiens
gauugaguuacaauuauacuuuucuuaccuaa

SEQ ID NO: 272073 - RNA, 32 nt, Homo Sapiens
uacauaagaaauuauuaaaaacaaggggggug

SEQ ID NO: 272074 - RNA, 32 nt, Homo Sapiens
uuuuuucuuuuuucuuuuuuuuugcaauaaag

SEQ ID NO: 272075 - RNA, 32 nt, Homo Sapiens
cuagaagacauggaagcauaugcugaggaccu

SEQ ID NO: 272076 - RNA, 32 nt, Homo Sapiens
uugccccggcucugcuggccaagucguggguc

SEQ ID NO: 272077 - RNA, 32 nt, Homo Sapiens
ccggggcacgggggcagccugcucuccuccug

SEQ ID NO: 272078 - RNA, 32 nt, Homo Sapiens
ucaguuucuagccccagguuccugguuguguc

SEQ ID NO: 272079 - RNA, 32 nt, Homo Sapiens
ggagcccuggcuaaggccgccggcccugcucc

SEQ ID NO: 272080 - RNA, 32 nt, Homo Sapiens
guacauucuuccagauggaaucaauaacuuuu

SEQ ID NO: 272081 - RNA, 32 nt, Homo Sapiens
augcuagaauccccccuagacggaggaaaacc

SEQ ID NO: 272082 - RNA, 32 nt, Homo Sapiens
gauuggauucagaaaaauuaacuuucugaauu

SEQ ID NO: 272083 - RNA, 32 nt, Homo Sapiens
augauuaacaauuuguaaguuuucaagaucgg

SEQ ID NO: 272084 - RNA, 32 nt, Homo Sapiens
uaucuaauuuaaaagguaugcuaaccacugug

SEQ ID NO: 272085 - RNA, 32 nt, Homo Sapiens
gagcacggcccaacccuggaggaggccccugc

SEQ ID NO: 272086 - RNA, 32 nt, Homo Sapiens
agugauuugucaaaacgaauuaccucuuuugg

SEQ ID NO: 272087 - RNA, 32 nt, Homo Sapiens
cugcccuucucacucagcauuauggauccaag

SEQ ID NO: 272088 - RNA, 32 nt, Homo Sapiens
acuucuugcagggccgggcgcccggcagcuac

SEQ ID NO: 272089 - RNA, 32 nt, Homo Sapiens
aaaccaagccccaugagcagcaguggaagacc

SEQ ID NO: 272090 - RNA, 32 nt, Homo Sapiens
ggagaggcagcugcggggggagccggcggccg

SEQ ID NO: 272091 - RNA, 32 nt, Homo Sapiens
ggugcagugucugaggugggaguucaaugggg

SEQ ID NO: 272092 - RNA, 31 nt, Homo Sapiens
gaugggguauucuugaaccaggucaugcucc

SEQ ID NO: 272093 - RNA, 32 nt, Homo Sapiens
gaccccacuccagagggagccuggcagucaga

SEQ ID NO: 272094 - RNA, 32 nt, Homo Sapiens
aucuuuggagaauggacagugaugggcucaau

SEQ ID NO: 272095 - RNA, 32 nt, Homo Sapiens
cauggcagccccagccaugggcgcccgggcuc

SEQ ID NO: 272096 - RNA, 32 nt, Homo Sapiens
caugcaaaggcacgugguuuccuuuucuccuc

SEQ ID NO: 272097 - RNA, 32 nt, Homo Sapiens
gggagggcgggugggcagcuggggacaagcag

SEQ ID NO: 272098 - RNA, 30 nt, Homo Sapiens
ggggagaacuucccugccuccuccagucuc

SEQ ID NO: 272099 - RNA, 32 nt, Homo Sapiens
ugcaucccaucccuaacccuugccugaccaug

SEQ ID NO: 272100 - RNA, 32 nt, Homo Sapiens
accauggagcagccugcaugugaggaauggaa

SEQ ID NO: 272101 - RNA, 32 nt, Homo Sapiens
agauuuagaccaugguaauaguaguucuuauu

SEQ ID NO: 272102 - RNA, 32 nt, Homo Sapiens
uccacacugaggaggaucauggccugcuacgg

SEQ ID NO: 272103 - RNA, 32 nt, Homo Sapiens
guggcugugugacuuugaacacguuucugccc

SEQ ID NO: 272104 - RNA, 32 nt, Homo Sapiens
aaguguuuauaggaauccaacaaauacugcuc

SEQ ID NO: 272105 - RNA, 32 nt, Homo Sapiens
cgcccuuccagcccuuccccagccccuccucu

SEQ ID NO: 272106 - RNA, 32 nt, Homo Sapiens
gcaucugaacuugaauucugugcagcugauug

SEQ ID NO: 272107 - RNA, 32 nt, Homo Sapiens
acauuucugaccauuuccagaaagcugcaaag

SEQ ID NO: 272108 - RNA, 32 nt, Homo Sapiens
gcauuuuaaacacuuugaguuccgcucagaag

SEQ ID NO: 272109 - RNA, 32 nt, Homo Sapiens
ugccgaagcugagacugacuacugugcauuag

SEQ ID NO: 272110 - RNA, 32 nt, Homo Sapiens
augccaauccaagcuuccaucaccuugcuccu

SEQ ID NO: 272111 - RNA, 32 nt, Homo Sapiens
aaaauuuaaagucaucauaauuuguugccaua

SEQ ID NO: 272112 - RNA, 32 nt, Homo Sapiens
gacuggggcccucuccuuucuauguccucaau

SEQ ID NO: 272113 - RNA, 32 nt, Homo Sapiens
ccaggaagaaggcggcggcggaggcggccugg

SEQ ID NO: 272114 - RNA, 32 nt, Homo Sapiens
uaguguaaccuuuuucuucucauuuuuucuuc

SEQ ID NO: 272115 - RNA, 30 nt, Homo Sapiens
cuccuugucugugcucugauaugcuccuug

SEQ ID NO: 272116 - RNA, 32 nt, Homo Sapiens
ggacgugauaggagcaaagucucuccauucuc

SEQ ID NO: 272117 - RNA, 32 nt, Homo Sapiens
ucacccggguggcgcuggaaguuaucaguggc

SEQ ID NO: 272118 - RNA, 32 nt, Homo Sapiens
gucagagugcuuauauauagcuuuauuuuggu

SEQ ID NO: 272119 - RNA, 32 nt, Homo Sapiens
uuaagaugguguuuuuguucuacauauuuuuc

SEQ ID NO: 272120 - RNA, 32 nt, Homo Sapiens
caauuggaguaagaaaagaugaacuaguucau

SEQ ID NO: 272121 - RNA, 32 nt, Homo Sapiens
cucuuuaaagacccuguuuccaaauaugguua

SEQ ID NO: 272122 - RNA, 32 nt, Homo Sapiens
acauggcccuuccuuucagcagugggaugugg

SEQ ID NO: 272123 - RNA, 32 nt, Homo Sapiens
cacccgccuuggccuccugggugcugggauua

SEQ ID NO: 272124 - RNA, 32 nt, Homo Sapiens
cucuacagagaugugaugugggaaaccuucag

SEQ ID NO: 272125 - RNA, 32 nt, Homo Sapiens
uaagcauuuuucugcccaauuaccugugagaa

SEQ ID NO: 272126 - RNA, 32 nt, Homo Sapiens
uguugggaugggcuaaaacagagccuucaaaa

SEQ ID NO: 272127 - RNA, 32 nt, Homo Sapiens
gccuuugggauuucugggcccuugcuuagcuu

SEQ ID NO: 272128 - RNA, 32 nt, Homo Sapiens
ccguaggcaucucgcuggggcugcugaagcgg

SEQ ID NO: 272129 - RNA, 32 nt, Homo Sapiens
ucagggcagggugaccuacuccccauuguucu

SEQ ID NO: 272130 - RNA, 32 nt, Homo Sapiens
uuccugugacuggagaggcaucaggagagguc

SEQ ID NO: 272131 - RNA, 32 nt, Homo Sapiens
gcuuagggcagugccggguacacaguaaauua

SEQ ID NO: 272132 - RNA, 32 nt, Homo Sapiens
ccccucccuugccugccacuuuggggacuuga

SEQ ID NO: 272133 - RNA, 32 nt, Homo Sapiens
gacaggggaaagggcucucuuacaccgcacuc

SEQ ID NO: 272134 - RNA, 32 nt, Homo Sapiens
ugagaguuuacaucagaaagaaaacagcaaau

SEQ ID NO: 272135 - RNA, 32 nt, Homo Sapiens
ggugaccuugcaacuucaugucaacuuucugg

SEQ ID NO: 272136 - RNA, 32 nt, Homo Sapiens
cagugcggcagagccucgugcaagcaggagag

SEQ ID NO: 272137 - RNA, 32 nt, Homo Sapiens
auguucccacccaaaucucaacuugaauugua

SEQ ID NO: 272138 - RNA, 32 nt, Homo Sapiens
uuccuccccaacccccccccccgccccuuuuu

SEQ ID NO: 272139 - RNA, 32 nt, Homo Sapiens
cuuucaaaauuuccucuccaucugcuggcacc

SEQ ID NO: 272140 - RNA, 32 nt, Homo Sapiens
uuucccaagaaaugugcagucuguaaacacuu

SEQ ID NO: 272141 - RNA, 32 nt, Homo Sapiens
uuguuuauacuucauugcuccuucaggacaug

SEQ ID NO: 272142 - RNA, 32 nt, Homo Sapiens
ugugucaaccucaauccuaaacaagcagcaag

SEQ ID NO: 272143 - RNA, 32 nt, Homo Sapiens
gaggcgggcgcugccggccgggacucgggcag

SEQ ID NO: 272144 - RNA, 32 nt, Homo Sapiens
uuugccgguccggcugcccggugcgccagauc

SEQ ID NO: 272145 - RNA, 32 nt, Homo Sapiens
agccucugccccagcccacuggcaugccaccc

SEQ ID NO: 272146 - RNA, 32 nt, Homo Sapiens
cuaccuuuugucacgguugcuauggaaaagau

SEQ ID NO: 272147 - RNA, 32 nt, Homo Sapiens
uuguuaugaggaauuauacauguaucacauuc

SEQ ID NO: 272148 - RNA, 32 nt, Homo Sapiens
cauuuucaguuuguuggacauuuuacagcuuc

SEQ ID NO: 272149 - RNA, 32 nt, Homo Sapiens
auguccagaaaagaaggacauuuagaaugaua

SEQ ID NO: 272150 - RNA, 32 nt, Homo Sapiens
ccgcggaaaaggagggggagcggcuggucagc

SEQ ID NO: 272151 - RNA, 32 nt, Homo Sapiens
ugccuggauucccagcacuuugggagaccaag

SEQ ID NO: 272152 - RNA, 32 nt, Homo Sapiens
uguguucugaauucuauucaguuuguuuaaua

SEQ ID NO: 272153 - RNA, 32 nt, Homo Sapiens
uagauugccucucuagacaacuaccccuuagu

SEQ ID NO: 272154 - RNA, 32 nt, Homo Sapiens
auggaagaucauauauuaauguaaucaggugg

SEQ ID NO: 272155 - RNA, 32 nt, Homo Sapiens
aauagagcacuuuuagagguuuucauaaauga

SEQ ID NO: 272156 - RNA, 32 nt, Homo Sapiens
caguuucugggacaccuugggguguggccuug

SEQ ID NO: 272157 - RNA, 32 nt, Homo Sapiens
agguuuucuguuucuuuuuugccuacucccaa

SEQ ID NO: 272158 - RNA, 32 nt, Homo Sapiens
uggagcagcuggaaguauggaugcuucuaccc

SEQ ID NO: 272159 - RNA, 32 nt, Homo Sapiens
gcgaggaucuugccaucucuuuuacagguugg

SEQ ID NO: 272160 - RNA, 32 nt, Homo Sapiens
acugagacccacuuacaguggggucugggaac

SEQ ID NO: 272161 - RNA, 32 nt, Homo Sapiens
ggcggaggaggguggcaccaugggcccgggcg

SEQ ID NO: 272162 - RNA, 32 nt, Homo Sapiens
aagggccacugugugucuuccuccccggcggg

SEQ ID NO: 272163 - RNA, 32 nt, Homo Sapiens
aagcccuguaagacauacaauaauuuauacug

SEQ ID NO: 272164 - RNA, 32 nt, Homo Sapiens
augcccccauccccacccccuauuuccaccau

SEQ ID NO: 272165 - RNA, 32 nt, Homo Sapiens
auuuaacuccgucuuuggccugacaacagucu

SEQ ID NO: 272166 - RNA, 32 nt, Homo Sapiens
ugaguuguauaaaaguuguacugcaucuuagu

SEQ ID NO: 272167 - RNA, 32 nt, Homo Sapiens
gagucaaaauuugaagaggaaaggaugguggc

SEQ ID NO: 272168 - RNA, 32 nt, Homo Sapiens
ucgugcuguuaagagauuuguuuauguuuaua

SEQ ID NO: 272169 - RNA, 32 nt, Homo Sapiens
cccucuuucuuucccuucacaccaccccagcc

SEQ ID NO: 272170 - RNA, 32 nt, Homo Sapiens
cuugacucgcuguuccuagacaucaguguuug

SEQ ID NO: 272171 - RNA, 32 nt, Homo Sapiens
uaauucuccagaaguuaacaucuaauaucuag

SEQ ID NO: 272172 - RNA, 32 nt, Homo Sapiens
cuauuuagaggaaguuaaaacaacaacaaaaa

SEQ ID NO: 272173 - RNA, 32 nt, Homo Sapiens
ggugaauggaagacacuuaccuaacaaguacu

SEQ ID NO: 272174 - RNA, 32 nt, Homo Sapiens
ucucaccgcccgguacgugcucgcgcgaaggc

SEQ ID NO: 272175 - RNA, 32 nt, Homo Sapiens
ucacuuccuaauuauuuugcuacauuucacua

SEQ ID NO: 272176 - RNA, 31 nt, Homo Sapiens
gggcuuucaggaaggaaguccacuucuucug

SEQ ID NO: 272177 - RNA, 32 nt, Homo Sapiens
cugacugcaggugcuggcaugauggagguggu

SEQ ID NO: 272178 - RNA, 32 nt, Homo Sapiens
gucacccuaacagaccuucaagaagcagaaag

SEQ ID NO: 272179 - RNA, 32 nt, Homo Sapiens
accaaguaacaagugggaaaacuuuagagggu

SEQ ID NO: 272180 - RNA, 32 nt, Homo Sapiens
cugacccucagcagccucuccuggccuuggca

SEQ ID NO: 272181 - RNA, 32 nt, Homo Sapiens
guucucauaaguucuagaacugguagcucggu

SEQ ID NO: 272182 - RNA, 32 nt, Homo Sapiens
ggcugacgggucgcugacgggcggcggucugg

SEQ ID NO: 272183 - RNA, 32 nt, Homo Sapiens
ccgcccuccgcgccccccgacggccgcgguca

SEQ ID NO: 272184 - RNA, 32 nt, Homo Sapiens
gucaggcagcccaagaggaucuucuuuggucc

SEQ ID NO: 272185 - RNA, 32 nt, Homo Sapiens
ccuaaaugaugcccggccagcaggaccuggcc

SEQ ID NO: 272186 - RNA, 32 nt, Homo Sapiens
cuguauuugaauuuuuuauagauguauauaca

SEQ ID NO: 272187 - RNA, 32 nt, Homo Sapiens
cagcucuuucucucaccccaccagcuacagca

SEQ ID NO: 272188 - RNA, 32 nt, Homo Sapiens
uucucccuggaaugcaugauggcauuauucug

SEQ ID NO: 272189 - RNA, 32 nt, Homo Sapiens
cgcccacccacccaggcuggagccauggauaa

SEQ ID NO: 272190 - RNA, 32 nt, Homo Sapiens
guguguuuacuuuuaugauaacgucacaucac

SEQ ID NO: 272191 - RNA, 32 nt, Homo Sapiens
aauuguuuacuuuggaauauaggaaaacaguu

SEQ ID NO: 272192 - RNA, 32 nt, Homo Sapiens
gcgcccggccaauuuuuuuuuauguuuuguag

SEQ ID NO: 272193 - RNA, 32 nt, Homo Sapiens
ggagucuccgcgggcggccagggcgcgcgugc

SEQ ID NO: 272194 - RNA, 32 nt, Homo Sapiens
gugucuauucuggguuagagaagugcuuacua

SEQ ID NO: 272195 - RNA, 32 nt, Homo Sapiens
ccauggcucccucuacccugccuugaggccug

SEQ ID NO: 272196 - RNA, 32 nt, Homo Sapiens
cuggcagcgacagcugcagacgggcugaacca

SEQ ID NO: 272197 - RNA, 32 nt, Homo Sapiens
ggaugcuauauagccuuuuuuauauugccuau

SEQ ID NO: 272198 - RNA, 32 nt, Homo Sapiens
ccugagccugccuuugagcccccgucacguug

SEQ ID NO: 272199 - RNA, 32 nt, Homo Sapiens
cuggggcucccucaucuuccuagccccagagc

SEQ ID NO: 272200 - RNA, 32 nt, Homo Sapiens
ggacaggcggcuggaggaggcgggcgucuaaa

SEQ ID NO: 272201 - RNA, 32 nt, Homo Sapiens
augaggacaagagggacaagguaugggguggg

SEQ ID NO: 272202 - RNA, 32 nt, Homo Sapiens
ccagguucuguuuauggccacauuuaauaucu

SEQ ID NO: 272203 - RNA, 32 nt, Homo Sapiens
cuggggaggggaggugugaagccagaggcagc

SEQ ID NO: 272204 - RNA, 32 nt, Homo Sapiens
gaguccagggaagagaaagugauuucuagaaa

SEQ ID NO: 272205 - RNA, 32 nt, Homo Sapiens
agcaagacagagaaggucucucuucccaucau

SEQ ID NO: 272206 - RNA, 32 nt, Homo Sapiens
agaguccaaacacaaucaacagauaccagcga

SEQ ID NO: 272207 - RNA, 32 nt, Homo Sapiens
uacccagcagugcuccuaugugaccugguaga

SEQ ID NO: 272208 - RNA, 32 nt, Homo Sapiens
aaaauugaaaauaaacuugugcuuauauuuug

SEQ ID NO: 272209 - RNA, 28 nt, Homo Sapiens
cuucugcagacaccuagcugcccucaga

SEQ ID NO: 272210 - RNA, 32 nt, Homo Sapiens
ccucugggacagagaccugucuccacgccucc

SEQ ID NO: 272211 - RNA, 32 nt, Homo Sapiens
ccauggagauccaggcgugggcccgugucugu

SEQ ID NO: 272212 - RNA, 29 nt, Homo Sapiens
uuucaauaaaguuuguacacuuucaaaaa

SEQ ID NO: 272213 - RNA, 32 nt, Homo Sapiens
cucuugacuacauggaccuugguuucaaagug

SEQ ID NO: 272214 - RNA, 32 nt, Homo Sapiens
gacauaggauguuuccaagaggaggcaauaaa

SEQ ID NO: 272215 - RNA, 32 nt, Homo Sapiens
aagccugcaaaaacccaaagaguucguggcgc

SEQ ID NO: 272216 - RNA, 32 nt, Homo Sapiens
cucuuuucagaggggaaaaaggagcagcucuu

SEQ ID NO: 272217 - RNA, 32 nt, Homo Sapiens
uauguaaccugcacguucugcacauguauccc

SEQ ID NO: 272218 - RNA, 32 nt, Homo Sapiens
gucauuggaaacaaaagcuugaaagaaacaca

SEQ ID NO: 272219 - RNA, 32 nt, Homo Sapiens
agaguuuuauuacuaagaaaauaaauguuacu

SEQ ID NO: 272220 - RNA, 32 nt, Homo Sapiens
gaguaugaaaaagguuuuaaucaguguucaac

SEQ ID NO: 272221 - RNA, 32 nt, Homo Sapiens
aaaaacaguuuaggaagcauaauuacgaacau

SEQ ID NO: 272222 - RNA, 29 nt, Homo Sapiens
gcuggauaaugguucagaggcacaagcug

SEQ ID NO: 272223 - RNA, 32 nt, Homo Sapiens
uuuuguuucuuacccuuaaauagucuugugaa

SEQ ID NO: 272224 - RNA, 32 nt, Homo Sapiens
uucuaaaauggcagcuucaguucuagagaaga

SEQ ID NO: 272225 - RNA, 32 nt, Homo Sapiens
aucuuugggaggaaaaaacuggaccucucuuc

SEQ ID NO: 272226 - RNA, 32 nt, Homo Sapiens
cgggcccaucugugucccaugucccagcaccc

SEQ ID NO: 272227 - RNA, 32 nt, Homo Sapiens
ugcgcuggccccaccugccuugugcccuggag

SEQ ID NO: 272228 - RNA, 32 nt, Homo Sapiens
cccucugcggaacgccgagagccccgggagag

SEQ ID NO: 272229 - RNA, 32 nt, Homo Sapiens
aguaacacucugggagggcucaggccacauca

SEQ ID NO: 272230 - RNA, 32 nt, Homo Sapiens
gcggggggaguggggaggaggggggucggccg

SEQ ID NO: 272231 - RNA, 32 nt, Homo Sapiens
cuugacguacauuuuuagugacauuuuaaaag

SEQ ID NO: 272232 - RNA, 32 nt, Homo Sapiens
ucuggcacuuggagacuauaugggagcaacuu

SEQ ID NO: 272233 - RNA, 32 nt, Homo Sapiens
ugacuuggauuugcuguauccuuuaaaauagu

SEQ ID NO: 272234 - RNA, 32 nt, Homo Sapiens
caaucaagggaagaaggaggaaugcuggacug

SEQ ID NO: 272235 - RNA, 32 nt, Homo Sapiens
uguuggagcggcgggaggcggcagcagcgucg

SEQ ID NO: 272236 - RNA, 30 nt, Homo Sapiens
guggacucccuugccacucacauuggcauu

SEQ ID NO: 272237 - RNA, 32 nt, Homo Sapiens
ucccccucccauuacuaagcuccuucugcucc

SEQ ID NO: 272238 - RNA, 32 nt, Homo Sapiens
ggacagcagggcccccagucgcacgucugcuu

SEQ ID NO: 272239 - RNA, 32 nt, Homo Sapiens
aacauuaaacacagugggaauaucacuuuuga

SEQ ID NO: 272240 - RNA, 32 nt, Homo Sapiens
agacaaauuucauacaugaacaauauaaauug

SEQ ID NO: 272241 - RNA, 32 nt, Homo Sapiens
cucuacuaaaacuacaaaaauuaacugggugu

SEQ ID NO: 272242 - RNA, 32 nt, Homo Sapiens
ggccccuuccuggaggccccaguacuuucuga

SEQ ID NO: 272243 - RNA, 32 nt, Homo Sapiens
cgaaaacaaccacagccgucacaugguccucc

SEQ ID NO: 272244 - RNA, 32 nt, Homo Sapiens
cuagagcauugcugcccuggggccugauguuc

SEQ ID NO: 272245 - RNA, 32 nt, Homo Sapiens
gucugcauacucgcugcccgccggcucccucc

SEQ ID NO: 272246 - RNA, 32 nt, Homo Sapiens
cgcccgcuccagcuccuccgccgacgugaaga

SEQ ID NO: 272247 - RNA, 32 nt, Homo Sapiens
gaacuagaaaaaagagacuuaagaucauuuuu

SEQ ID NO: 272248 - RNA, 32 nt, Homo Sapiens
uuccuaaaaguacagugcacauauacaaauug

SEQ ID NO: 272249 - RNA, 32 nt, Homo Sapiens
ccaacuacugucaucgugagguuuucaucggc

SEQ ID NO: 272250 - RNA, 32 nt, Homo Sapiens
ggcugggaagccggugauagugaagauccccu

SEQ ID NO: 272251 - RNA, 32 nt, Homo Sapiens
aggcagccagcgcccccuccccaguccccaga

SEQ ID NO: 272252 - RNA, 32 nt, Homo Sapiens
cccaggaucuucuggaggaagguggccaugga

SEQ ID NO: 272253 - RNA, 32 nt, Homo Sapiens
uccccuccacccucacuccauccaccucggag

SEQ ID NO: 272254 - RNA, 32 nt, Homo Sapiens
augacagcccuaacaagaacuguuuuugaauc

SEQ ID NO: 272255 - RNA, 27 nt, Homo Sapiens
agacccucccgccucagccccccaaga

SEQ ID NO: 272256 - RNA, 32 nt, Homo Sapiens
guuggaacugcugacuuuccuaaccaaaacaa

SEQ ID NO: 272257 - RNA, 32 nt, Homo Sapiens
agucuuuugaauauagguuuccaauuaaguac

SEQ ID NO: 272258 - RNA, 32 nt, Homo Sapiens
aauuaaugcuugaugauaaaagaaucaaacuu

SEQ ID NO: 272259 - RNA, 32 nt, Homo Sapiens
gagcgccuucucucuccagccaucaccgcugu

SEQ ID NO: 272260 - RNA, 32 nt, Homo Sapiens
uuucccuuaggacucugcacuuuauagaaugu

SEQ ID NO: 272261 - RNA, 32 nt, Homo Sapiens
gcacugcggggaucuugcccgguguccugguc

SEQ ID NO: 272262 - RNA, 31 nt, Homo Sapiens
cauaccucccuuauuccucuaacugggaccc

SEQ ID NO: 272263 - RNA, 29 nt, Homo Sapiens
cuggguuuuguugcauaccacagauuguc

SEQ ID NO: 272264 - RNA, 32 nt, Homo Sapiens
agaaaguuucugccuggcccugcaucugguuc

SEQ ID NO: 272265 - RNA, 32 nt, Homo Sapiens
agugcccacuggugcuggcguccucaaagugc

SEQ ID NO: 272266 - RNA, 32 nt, Homo Sapiens
ugcuaggggacgaugauguggcagauggcucg

SEQ ID NO: 272267 - RNA, 32 nt, Homo Sapiens
agcauaggauuguaugugggagguggauaggu

SEQ ID NO: 272268 - RNA, 32 nt, Homo Sapiens
ccucggaagccguuugcugcugcagaguugca

SEQ ID NO: 272269 - RNA, 32 nt, Homo Sapiens
guaaccauauaaauauaacuggaauauucuua

SEQ ID NO: 272270 - RNA, 32 nt, Homo Sapiens
cgcauuuacaauccuuuagcuagacagaaaag

SEQ ID NO: 272271 - RNA, 32 nt, Homo Sapiens
uaacccgaccgccgcuggucuucgcuggacac

SEQ ID NO: 272272 - RNA, 32 nt, Homo Sapiens
guugggcuauagggaggcuccaguuugggaaa

SEQ ID NO: 272273 - RNA, 32 nt, Homo Sapiens
uggcccggacauggcgacucccggcccuguga

SEQ ID NO: 272274 - RNA, 32 nt, Homo Sapiens
accgagcacuuggacucgaacucugugccggg

SEQ ID NO: 272275 - RNA, 32 nt, Homo Sapiens
gguuucgcccguucccgccgccggcggaagcc

SEQ ID NO: 272276 - RNA, 32 nt, Homo Sapiens
auuacugcauuaccaagaaacaguagccaaag

SEQ ID NO: 272277 - RNA, 32 nt, Homo Sapiens
gcagucgugucugaccuacauugggcuuuucu

SEQ ID NO: 272278 - RNA, 32 nt, Homo Sapiens
augcugcuuuuggaagcuacaguagcaauuuu

SEQ ID NO: 272279 - RNA, 32 nt, Homo Sapiens
uugauaucggcaauguaaaaauccccaaacau

SEQ ID NO: 272280 - RNA, 30 nt, Homo Sapiens
agguuugguaacugcauccggccucucagg

SEQ ID NO: 272281 - RNA, 32 nt, Homo Sapiens
gucccauugcuguucagccuuuguuuuuacgu

SEQ ID NO: 272282 - RNA, 32 nt, Homo Sapiens
cgcuucggggcaacugugagugcgcguguggg

SEQ ID NO: 272283 - RNA, 32 nt, Homo Sapiens
ggcccagacacccaccugacuuaguggcuccu

SEQ ID NO: 272284 - RNA, 32 nt, Homo Sapiens
gauaugugccaauauugauauucucuuauacc

SEQ ID NO: 272285 - RNA, 32 nt, Homo Sapiens
uauguaacuuuuaucacaaaucaaauagugac

SEQ ID NO: 272286 - RNA, 32 nt, Homo Sapiens
agcugcacggcuccuggccccggagcaugcgc

SEQ ID NO: 272287 - RNA, 32 nt, Homo Sapiens
ucacuugaggccaggagcuggugugcagccug

SEQ ID NO: 272288 - RNA, 32 nt, Homo Sapiens
ggaaucuucaguacugaacaaaacagaacccu

SEQ ID NO: 272289 - RNA, 32 nt, Homo Sapiens
cuucucacucuuuggguccacacugcuuuuac

SEQ ID NO: 272290 - RNA, 31 nt, Homo Sapiens
aucugcucaucugauauucaaacacacagua

SEQ ID NO: 272291 - RNA, 32 nt, Homo Sapiens
ggcgacaguggcggcggcgccauggcagggcu

SEQ ID NO: 272292 - RNA, 32 nt, Homo Sapiens
uucaugccgggcgcaguggcucacgccuguaa

SEQ ID NO: 272293 - RNA, 28 nt, Homo Sapiens
caguaggggcggcugggcagaggggccc

SEQ ID NO: 272294 - RNA, 32 nt, Homo Sapiens
uuuagauaaaggaaacauauaacuauugaguu

SEQ ID NO: 272295 - RNA, 32 nt, Homo Sapiens
auaucauaaacacaaauagauauaugcagaau

SEQ ID NO: 272296 - RNA, 32 nt, Homo Sapiens
caccagcccccuccucccuuuucaucuaagau

SEQ ID NO: 272297 - RNA, 32 nt, Homo Sapiens
ucaaaauuugaaaugucaaguauuagaaauga

SEQ ID NO: 272298 - RNA, 32 nt, Homo Sapiens
ccaguuaaacaugagaaaagugaggcucagaa

SEQ ID NO: 272299 - RNA, 32 nt, Homo Sapiens
agucuaccaaaauaaacuaagacuuucuaugu

SEQ ID NO: 272300 - RNA, 32 nt, Homo Sapiens
auaggcccaggcucuccuuucgcuuggcgugg

SEQ ID NO: 272301 - RNA, 32 nt, Homo Sapiens
gauugaaggggagaacgucuccagacagaauu

SEQ ID NO: 272302 - RNA, 32 nt, Homo Sapiens
agagcacagcugcagaucccaggccucuggcg

SEQ ID NO: 272303 - RNA, 32 nt, Homo Sapiens
gacuacaguuugucaucaaggucuagccuucc

SEQ ID NO: 272304 - RNA, 32 nt, Homo Sapiens
agcgggagggugggcgggguggugcgagccaa

SEQ ID NO: 272305 - RNA, 32 nt, Homo Sapiens
aggucucuaggcugaggcggcggccgcuccuc

SEQ ID NO: 272306 - RNA, 32 nt, Homo Sapiens
cucauugaagaaauauuuacaauauaaaacau

SEQ ID NO: 272307 - RNA, 28 nt, Homo Sapiens
ggucgcauguggcccaggauggcuuuaa

SEQ ID NO: 272308 - RNA, 32 nt, Homo Sapiens
uguuuuuaauuguugccguauucaucuauaua

SEQ ID NO: 272309 - RNA, 32 nt, Homo Sapiens
uguggcuggaagauccugcggguggggcuugg

SEQ ID NO: 272310 - RNA, 32 nt, Homo Sapiens
ucuuuuuucuuuucuuuuuuuuuuuuucgaga

SEQ ID NO: 272311 - RNA, 32 nt, Homo Sapiens
accacagcacgcggccuccugauccggaagca

SEQ ID NO: 272312 - RNA, 32 nt, Homo Sapiens
uauugguccucgcccccaugccccacagugag

SEQ ID NO: 272313 - RNA, 32 nt, Homo Sapiens
uacuacagaaaauaaaacugcgcuacuaaaaa

SEQ ID NO: 272314 - RNA, 32 nt, Homo Sapiens
agcggcagagggcguuggggcuggccggggca

SEQ ID NO: 272315 - RNA, 32 nt, Homo Sapiens
gggugccccccucugcagacagccaguccagg

SEQ ID NO: 272316 - RNA, 32 nt, Homo Sapiens
ggcuggcggggccgugggagggggguuguggg

SEQ ID NO: 272317 - RNA, 32 nt, Homo Sapiens
aggcagguauaacgguaccggcggcggcagcg

SEQ ID NO: 272318 - RNA, 32 nt, Homo Sapiens
ccuguguucugggaauaacauaaagagagcaa

SEQ ID NO: 272319 - RNA, 32 nt, Homo Sapiens
cugagccagcccgugcgcugacagcgguaugg

SEQ ID NO: 272320 - RNA, 32 nt, Homo Sapiens
uucugguguggccuuguagcuagugccugggc

SEQ ID NO: 272321 - RNA, 32 nt, Homo Sapiens
agaccgcccucccugugaccuggggcccaccc

SEQ ID NO: 272322 - RNA, 32 nt, Homo Sapiens
acuuggcugucauucggcuggccugcgcagag

SEQ ID NO: 272323 - RNA, 32 nt, Homo Sapiens
gcaagaggggggccagugucaggacggcugug

SEQ ID NO: 272324 - RNA, 32 nt, Homo Sapiens
uugggacaagauaacauagcagaggaauuaau

SEQ ID NO: 272325 - RNA, 32 nt, Homo Sapiens
uaugaaacagagcuguuaauaaugguuaugug

SEQ ID NO: 272326 - RNA, 32 nt, Homo Sapiens
uguuuuaaguuccaaugaguauuacuaguuac

SEQ ID NO: 272327 - RNA, 32 nt, Homo Sapiens
auucuaauauauuauuguguaccuauuguaaa

SEQ ID NO: 272328 - RNA, 32 nt, Homo Sapiens
auuugccgaggcuccucggccaggccccgucc

SEQ ID NO: 272329 - RNA, 32 nt, Homo Sapiens
gcaugaucugagcagcagcauccaggcugacc

SEQ ID NO: 272330 - RNA, 32 nt, Homo Sapiens
gccuuuuaaaauuuauuugagaccucuugaug

SEQ ID NO: 272331 - RNA, 32 nt, Homo Sapiens
caagaauuuuuuuuuucuugguguauguaagc

SEQ ID NO: 272332 - RNA, 32 nt, Homo Sapiens
aggcaagcaggaacccagucuagauagaaugc

SEQ ID NO: 272333 - RNA, 32 nt, Homo Sapiens
uuguggugcagggaaccuggccugagaacugc

SEQ ID NO: 272334 - RNA, 32 nt, Homo Sapiens
gaaguuguucaagaaaaauuugaaaguagcaa

SEQ ID NO: 272335 - RNA, 32 nt, Homo Sapiens
cccagaucgcgguauauagagauaugcauuuu

SEQ ID NO: 272336 - RNA, 32 nt, Homo Sapiens
uuaguuuucuuuuuuuuuugagaugaguuuca

SEQ ID NO: 272337 - RNA, 32 nt, Homo Sapiens
cucgcuuuuauuuuaauauugaugucaguauu

SEQ ID NO: 272338 - RNA, 32 nt, Homo Sapiens
gagaaguggggaccccaccccucaucaggagu

SEQ ID NO: 272339 - RNA, 32 nt, Homo Sapiens
aagaaacuagauucccaccucauaucauucac

SEQ ID NO: 272340 - RNA, 32 nt, Homo Sapiens
cuucugccgcauccccgccgccgcggcgccuu

SEQ ID NO: 272341 - RNA, 32 nt, Homo Sapiens
uugggaagagggagugggaggggucugucucc

SEQ ID NO: 272342 - RNA, 32 nt, Homo Sapiens
gaucaccggacuuaacaggggcagggcaggac

SEQ ID NO: 272343 - RNA, 32 nt, Homo Sapiens
uucuuaagcagaggaguggcaaggauggcaau

SEQ ID NO: 272344 - RNA, 31 nt, Homo Sapiens
uucugggccaggcuguaucagaauugucguc

SEQ ID NO: 272345 - RNA, 32 nt, Homo Sapiens
cgucugcucucagccuccuccuccugcaggau

SEQ ID NO: 272346 - RNA, 32 nt, Homo Sapiens
aaacuccugugaaagaaagacuuuuuauugug

SEQ ID NO: 272347 - RNA, 32 nt, Homo Sapiens
cccaaacuccuccaugcaaguucugcuuccuc

SEQ ID NO: 272348 - RNA, 32 nt, Homo Sapiens
guuaggguauuuuuaagguuuuuucuagauag

SEQ ID NO: 272349 - RNA, 32 nt, Homo Sapiens
ggaagacuagauuucagccagcccuugcgccc

SEQ ID NO: 272350 - RNA, 32 nt, Homo Sapiens
uucuuuguuucauaauuggauucaucaauccc

SEQ ID NO: 272351 - RNA, 32 nt, Homo Sapiens
gggcggggaggagaggcggcggcggcaguguc

SEQ ID NO: 272352 - RNA, 32 nt, Homo Sapiens
ggagggaggaacaauuuuuaaauauaaaacau

SEQ ID NO: 272353 - RNA, 32 nt, Homo Sapiens
cguccuuaucccauuuauuaauuucucugaca

SEQ ID NO: 272354 - RNA, 32 nt, Homo Sapiens
acagggugcuucuuagauucuauugguccuuc

SEQ ID NO: 272355 - RNA, 32 nt, Homo Sapiens
accagccuggccaacauagugaaaccccuucu

SEQ ID NO: 272356 - RNA, 32 nt, Homo Sapiens
accauccuggcuaacauagugaaacccugucu

SEQ ID NO: 272357 - RNA, 32 nt, Homo Sapiens
ucgaacacaccaagccgcuaaugagauagcag

SEQ ID NO: 272358 - RNA, 32 nt, Homo Sapiens
accauccuggccaacauagugaaaccccgucu

SEQ ID NO: 272359 - RNA, 32 nt, Homo Sapiens
gccuaggaccucaggcggggaggaggagcugc

SEQ ID NO: 272360 - RNA, 32 nt, Homo Sapiens
cuuuucuuuucuuuuuuuuuuauuuuuaagau

SEQ ID NO: 272361 - RNA, 31 nt, Homo Sapiens
ucacaauucuguagguuaggaguccagguua

SEQ ID NO: 272362 - RNA, 32 nt, Homo Sapiens
uuagccuguguugauaucuccuccuuccuggu

SEQ ID NO: 272363 - RNA, 32 nt, Homo Sapiens
agguugaauauguuuucauauguuuacugaau

SEQ ID NO: 272364 - RNA, 32 nt, Homo Sapiens
uuggagauaucaaguccccagcccagggccag

SEQ ID NO: 272365 - RNA, 32 nt, Homo Sapiens
gagagagaauaaagguuauguuugucuuaccu

SEQ ID NO: 272366 - RNA, 32 nt, Homo Sapiens
ccuaccauguggaacugugaguccaauuaaac

SEQ ID NO: 272367 - RNA, 32 nt, Homo Sapiens
uccacuccucucugguaccccauccccgcauc

SEQ ID NO: 272368 - RNA, 32 nt, Homo Sapiens
gagaggcuggaacaguugagggagcgcugaca

SEQ ID NO: 272369 - RNA, 31 nt, Homo Sapiens
uggcugcugccggggagccccaagccuuggc

SEQ ID NO: 272370 - RNA, 32 nt, Homo Sapiens
ccuuaggaaaagauccaggugcuugugaaaag

SEQ ID NO: 272371 - RNA, 32 nt, Homo Sapiens
cauccuggaagacgccggugccgacguccuga

SEQ ID NO: 272372 - RNA, 32 nt, Homo Sapiens
guaauuucuaguugguuuuggaaugcuugaua

SEQ ID NO: 272373 - RNA, 32 nt, Homo Sapiens
accugcaggaccuccuccugcugagcagcccg

SEQ ID NO: 272374 - RNA, 32 nt, Homo Sapiens
cggacaggcggcuggaggaggcgggcgucuaa

SEQ ID NO: 272375 - RNA, 32 nt, Homo Sapiens
agcagcuggcccggcugggcccggggcgcgca

SEQ ID NO: 272376 - RNA, 32 nt, Homo Sapiens
uccaaacccacccaccaaggacucugaaccug

SEQ ID NO: 272377 - RNA, 32 nt, Homo Sapiens
cugcaaaaaguacauagugaauuuuaaaaugu

SEQ ID NO: 272378 - RNA, 30 nt, Homo Sapiens
cccggaugggcaucguggagccggguugcg

SEQ ID NO: 272379 - RNA, 32 nt, Homo Sapiens
ugugagugguaaguauaucucaguuuaaaugg

SEQ ID NO: 272380 - RNA, 32 nt, Homo Sapiens
cacaagucaucaugauuuuuuauuuuaaaaua

SEQ ID NO: 272381 - RNA, 28 nt, Homo Sapiens
uuauaagagggcuacaggaugagaaaau

SEQ ID NO: 272382 - RNA, 32 nt, Homo Sapiens
aggucccccugugccagauccuccccuaugcu

SEQ ID NO: 272383 - RNA, 32 nt, Homo Sapiens
uuuuuucuuaucaaguaagaaaacuguaauuu

SEQ ID NO: 272384 - RNA, 32 nt, Homo Sapiens
acuacagugacgagagugacucggccaucguc

SEQ ID NO: 272385 - RNA, 32 nt, Homo Sapiens
gccaguugauggggaagaaaggaagucggagg

SEQ ID NO: 272386 - RNA, 32 nt, Homo Sapiens
aaauuuuuaaucuugcaguaauauuaaacagg

SEQ ID NO: 272387 - RNA, 32 nt, Homo Sapiens
gggcgggcacuuugcacuggaacuuacaacac

SEQ ID NO: 272388 - RNA, 32 nt, Homo Sapiens
acaacugggagaaaugucuauuuagguguuua

SEQ ID NO: 272389 - RNA, 32 nt, Homo Sapiens
aagguagaugaccugugauuagacugggcggc

SEQ ID NO: 272390 - RNA, 32 nt, Homo Sapiens
uuauccuggguuggccacuggaugcguucaca

SEQ ID NO: 272391 - RNA, 32 nt, Homo Sapiens
aaagaauauauucuucuuuguaguccuucuuc

SEQ ID NO: 272392 - RNA, 27 nt, Homo Sapiens
ccauggaaaaagugcuagguugugaac

SEQ ID NO: 272393 - RNA, 32 nt, Homo Sapiens
agccuuccaagcccaucccgacucccggggcc

SEQ ID NO: 272394 - RNA, 32 nt, Homo Sapiens
gcccaacgcgcuuccuuuggcuccuccugaac

SEQ ID NO: 272395 - RNA, 32 nt, Homo Sapiens
auggaagauaauucauuauaccuaguauaagc

SEQ ID NO: 272396 - RNA, 32 nt, Homo Sapiens
auaaaaacacuggacacaaggcuugggugaac

SEQ ID NO: 272397 - RNA, 32 nt, Homo Sapiens
auacccagaaaagaaacggcuaagcucuggca

SEQ ID NO: 272398 - RNA, 32 nt, Homo Sapiens
acuuucauuacaaucaaauuauagaaauuacu

SEQ ID NO: 272399 - RNA, 32 nt, Homo Sapiens
ccuguaacagagcuacaacuaggaaaauuaga

SEQ ID NO: 272400 - RNA, 32 nt, Homo Sapiens
aagagauaggcaccuacuuuucccuccacccu

SEQ ID NO: 272401 - RNA, 32 nt, Homo Sapiens
ggugagccuuggagacaugugggaaacaccug

SEQ ID NO: 272402 - RNA, 32 nt, Homo Sapiens
cccauagaauaaaauuuaaaaacaaguaaaaa

SEQ ID NO: 272403 - RNA, 32 nt, Homo Sapiens
uuauuagauuuggggaggaaaacagugaaauu

SEQ ID NO: 272404 - RNA, 32 nt, Homo Sapiens
gcuccucccgcucgacccccacuuccuuucuu

SEQ ID NO: 272405 - RNA, 32 nt, Homo Sapiens
ucaagagaauuuccuggcuguugugaaagaau

SEQ ID NO: 272406 - RNA, 32 nt, Homo Sapiens
ucagucauuauacauugcuuugguccaaucag

SEQ ID NO: 272407 - RNA, 32 nt, Homo Sapiens
gcugauguauucgaagauguguugacagucgu

SEQ ID NO: 272408 - RNA, 32 nt, Homo Sapiens
accccugcuugccucgccccagcagcuccggu

SEQ ID NO: 272409 - RNA, 32 nt, Homo Sapiens
uccgggcgcgcccagcaguagcaccgcccgcg

SEQ ID NO: 272410 - RNA, 32 nt, Homo Sapiens
ucaaggaaucuuuaagcagagaagggcauaaa

SEQ ID NO: 272411 - RNA, 32 nt, Homo Sapiens
gccggaccagcuggugcugcgcggcgcagaua

SEQ ID NO: 272412 - RNA, 32 nt, Homo Sapiens
cggugguagcagcugguaccucccgccgccuc

SEQ ID NO: 272413 - RNA, 32 nt, Homo Sapiens
gcccauuuggcucauuccccaagccccuaauu

SEQ ID NO: 272414 - RNA, 32 nt, Homo Sapiens
uuacuuguaugaaauuauaccuuugaauuuua

SEQ ID NO: 272415 - RNA, 32 nt, Homo Sapiens
cauuuucccucaugucguugguauucugaggg

SEQ ID NO: 272416 - RNA, 32 nt, Homo Sapiens
aaugccuuuguacagcucauacuuuccugcug

SEQ ID NO: 272417 - RNA, 32 nt, Homo Sapiens
cuccuauggaauguaaagugcaaucauuucuu

SEQ ID NO: 272418 - RNA, 32 nt, Homo Sapiens
cuggauucacugacaagaagaguuugaauuag

SEQ ID NO: 272419 - RNA, 32 nt, Homo Sapiens
augucaucaggugaugacuggaugagcugcug

SEQ ID NO: 272420 - RNA, 32 nt, Homo Sapiens
gccccaugagucuccuuccguccucagcgggc

SEQ ID NO: 272421 - RNA, 32 nt, Homo Sapiens
gcugcacuacaugcaggaaucuccagggacca

SEQ ID NO: 272422 - RNA, 32 nt, Homo Sapiens
gcugguaauaauauauuugauuuaaaugcugu

SEQ ID NO: 272423 - RNA, 32 nt, Homo Sapiens
uagggaguaauuggacuguggguguggaucuc

SEQ ID NO: 272424 - RNA, 32 nt, Homo Sapiens
uuaagguccaacaaccuaaucuacauauuugu

SEQ ID NO: 272425 - RNA, 32 nt, Homo Sapiens
gcggggagggcuugucugcguauuuggagcug

SEQ ID NO: 272426 - RNA, 32 nt, Homo Sapiens
auaaggccuacuuuaagagauaccaagugaaa

SEQ ID NO: 272427 - RNA, 32 nt, Homo Sapiens
uguggggagcagcuuucaacaccuucauuuuc

SEQ ID NO: 272428 - RNA, 32 nt, Homo Sapiens
aggggaccgugugggggaggggaccagugacc

SEQ ID NO: 272429 - RNA, 32 nt, Homo Sapiens
uuaaagaaguggcugucguggcaagguagacc

SEQ ID NO: 272430 - RNA, 31 nt, Homo Sapiens
caguggugcagguccgcaccaggagccugcu

SEQ ID NO: 272431 - RNA, 32 nt, Homo Sapiens
uauacugcagcaugcuauaugaggcuccuccc

SEQ ID NO: 272432 - RNA, 32 nt, Homo Sapiens
aaauaaaauacucauuuuugcauaaaaagguu

SEQ ID NO: 272433 - RNA, 32 nt, Homo Sapiens
agacaaggccccagcccuccucugggagccuc

SEQ ID NO: 272434 - RNA, 32 nt, Homo Sapiens
uuauuaaacuacaggcuguagauuucuuaguu

SEQ ID NO: 272435 - RNA, 32 nt, Homo Sapiens
ugcccuucccggcaccucccccgccccugccc

SEQ ID NO: 272436 - RNA, 32 nt, Homo Sapiens
acagacauugaaaucugauuuauauuguauaa

SEQ ID NO: 272437 - RNA, 32 nt, Homo Sapiens
ucggagcuuauauacugugacuucugaagacu

SEQ ID NO: 272438 - RNA, 32 nt, Homo Sapiens
ccggaggcgaacaggaggcauuccgcgagccg

SEQ ID NO: 272439 - RNA, 32 nt, Homo Sapiens
uccuaaauuuaaaagauuuguuggaaaaaauu

SEQ ID NO: 272440 - RNA, 32 nt, Homo Sapiens
agcgagcgaggcuggcauggggugcugaagug

SEQ ID NO: 272441 - RNA, 32 nt, Homo Sapiens
uuuaucuccagauggaaugggguccuagcaac

SEQ ID NO: 272442 - RNA, 32 nt, Homo Sapiens
guuccuagcaagaucaacgcagaagggaagcu

SEQ ID NO: 272443 - RNA, 32 nt, Homo Sapiens
uuaccaaagggaggggggcggcuuuugugaau

SEQ ID NO: 272444 - RNA, 32 nt, Homo Sapiens
auuuuauaauuucccuuguugaauauauucau

SEQ ID NO: 272445 - RNA, 32 nt, Homo Sapiens
ugggaguucuauuuaggaagaugcagccucug

SEQ ID NO: 272446 - RNA, 32 nt, Homo Sapiens
agacccucugugugggcugggcuggucagaau

SEQ ID NO: 272447 - RNA, 32 nt, Homo Sapiens
aagcauugcuguuaugucuguuuaagaaaagu

SEQ ID NO: 272448 - RNA, 32 nt, Homo Sapiens
ggugcagcacaccagcauggcacauguauaca

SEQ ID NO: 272449 - RNA, 32 nt, Homo Sapiens
cgccaugacaucuucacuuugcagcuugugcu

SEQ ID NO: 272450 - RNA, 32 nt, Homo Sapiens
gcugagcccucccccaacccacgcuccaacac

SEQ ID NO: 272451 - RNA, 32 nt, Homo Sapiens
aaucaaugagagaucugugaagagagagggcu

SEQ ID NO: 272452 - RNA, 32 nt, Homo Sapiens
uuggggcccagcugcagccugcugccugcccu

SEQ ID NO: 272453 - RNA, 32 nt, Homo Sapiens
cccugcccugagaucuguggaacuuugaacgu

SEQ ID NO: 272454 - RNA, 32 nt, Homo Sapiens
uuuuugagacucaaccacuuugaaagcauuug

SEQ ID NO: 272455 - RNA, 32 nt, Homo Sapiens
aggaggcgggccaggaggagggggccuggcgg

SEQ ID NO: 272456 - RNA, 32 nt, Homo Sapiens
gccuucccugucaccggcuccucuguccugcc

SEQ ID NO: 272457 - RNA, 32 nt, Homo Sapiens
ucucaguuuuuugucauguaagauacuaaccu

SEQ ID NO: 272458 - RNA, 32 nt, Homo Sapiens
aagagaugcucuuuuccaagcuauaauggaug

SEQ ID NO: 272459 - RNA, 32 nt, Homo Sapiens
cugugggugcacagaagucaaaaauugagguu

SEQ ID NO: 272460 - RNA, 32 nt, Homo Sapiens
uuggugaucagcuacuaguucuuccagcccuc

SEQ ID NO: 272461 - RNA, 32 nt, Homo Sapiens
gcagcagaagaauuauggcagcucuucacgga

SEQ ID NO: 272462 - RNA, 32 nt, Homo Sapiens
gccgccugggacuuaaccugcucaggcgggcc

SEQ ID NO: 272463 - RNA, 32 nt, Homo Sapiens
ggggagggaggaccaagaaucuugaaacguaa

SEQ ID NO: 272464 - RNA, 32 nt, Homo Sapiens
ucuuggugguggcuuugguaaaacgacugcag

SEQ ID NO: 272465 - RNA, 32 nt, Homo Sapiens
uuuguaguggcaaauauuccucuaguucuaua

SEQ ID NO: 272466 - RNA, 32 nt, Homo Sapiens
gguuucaccauauugcccaggcuggucucgag

SEQ ID NO: 272467 - RNA, 29 nt, Homo Sapiens
ggacauggguguggaagaaucucuguggu

SEQ ID NO: 272468 - RNA, 32 nt, Homo Sapiens
accucguacuaaaaccuuugcuuugacacagu

SEQ ID NO: 272469 - RNA, 32 nt, Homo Sapiens
uagaacgccacccagccgcccggagcagggac

SEQ ID NO: 272470 - RNA, 32 nt, Homo Sapiens
guuuaauaccuuauuugaauaauuaccugaag

SEQ ID NO: 272471 - RNA, 30 nt, Homo Sapiens
caaugucugugugugggaggugcugaccuu

SEQ ID NO: 272472 - RNA, 32 nt, Homo Sapiens
ccaaacacuaagggagagcucccuuuggaugu

SEQ ID NO: 272473 - RNA, 32 nt, Homo Sapiens
aggaggacagcagacuuuaggaccccacagca

SEQ ID NO: 272474 - RNA, 32 nt, Homo Sapiens
ccccuuuuucacuuuaaaacaaaccucaagaa

SEQ ID NO: 272475 - RNA, 32 nt, Homo Sapiens
agggauuggaauguggaggaauucuagaaggg

SEQ ID NO: 272476 - RNA, 32 nt, Homo Sapiens
cuuaugugacccacuugaauggcugaucuaau

SEQ ID NO: 272477 - RNA, 32 nt, Homo Sapiens
aaaaggaaaaggagauuuuggaguccagagag

SEQ ID NO: 272478 - RNA, 32 nt, Homo Sapiens
cuuauauguuucuguacuuuuaauuuuauaca

SEQ ID NO: 272479 - RNA, 32 nt, Homo Sapiens
uuguaagaaaaauuaaaauugguuguuauugc

SEQ ID NO: 272480 - RNA, 32 nt, Homo Sapiens
uaccugaccugccaaucauuagggagaggcaa

SEQ ID NO: 272481 - RNA, 32 nt, Homo Sapiens
caguguugugcagucgcaguggcggcagcagc

SEQ ID NO: 272482 - RNA, 32 nt, Homo Sapiens
uccggccccgacgcgccgcccaacgggccuug

SEQ ID NO: 272483 - RNA, 32 nt, Homo Sapiens
ggggagggcagagggaaggcgauacauccuuc

SEQ ID NO: 272484 - RNA, 32 nt, Homo Sapiens
guggcaccuccgagcaaggcgggccgugugua

SEQ ID NO: 272485 - RNA, 32 nt, Homo Sapiens
cuuaaagagaauuuuuuuuuuaaucuuuagcu

SEQ ID NO: 272486 - RNA, 32 nt, Homo Sapiens
guauauuuuuguguccaguuauauuauuuaaa

SEQ ID NO: 272487 - RNA, 32 nt, Homo Sapiens
aagaaucagguguuaauauaauacuaaggaua

SEQ ID NO: 272488 - RNA, 32 nt, Homo Sapiens
aaggugcaccggguacuucuugagcauuggga

SEQ ID NO: 272489 - RNA, 32 nt, Homo Sapiens
ccucugccuccacuuccugcuuuagccccuuc

SEQ ID NO: 272490 - RNA, 32 nt, Homo Sapiens
cuccaccacccucccccagguugaggcacuau

SEQ ID NO: 272491 - RNA, 32 nt, Homo Sapiens
gaggggggcugucggcugcugcuucugggcca

SEQ ID NO: 272492 - RNA, 31 nt, Homo Sapiens
gugagccagccccagggccagaggaguuggg

SEQ ID NO: 272493 - RNA, 32 nt, Homo Sapiens
gggggcuccauuaguucugcugccgagacuaa

SEQ ID NO: 272494 - RNA, 32 nt, Homo Sapiens
auucaugguguaagaacaguuuugcaguauaa

SEQ ID NO: 272495 - RNA, 32 nt, Homo Sapiens
ugcauuuuuuauucuuuuauaugacuuuuaag

SEQ ID NO: 272496 - RNA, 32 nt, Homo Sapiens
augguucaaguauuaagcaguucauucuacca

SEQ ID NO: 272497 - RNA, 32 nt, Homo Sapiens
uguaugcaacaaguagaauggggccuuguugu

SEQ ID NO: 272498 - RNA, 28 nt, Homo Sapiens
cuuucuaaagauuaauuucuugggagca

SEQ ID NO: 272499 - RNA, 32 nt, Homo Sapiens
cacccccgccuccaaugauaggcaucccaccu

SEQ ID NO: 272500 - RNA, 32 nt, Homo Sapiens
ggaggcccaucccccaccugccagcgguuucc

SEQ ID NO: 272501 - RNA, 32 nt, Homo Sapiens
aauuagccgggcgugguggcaggcgccuguaa

SEQ ID NO: 272502 - RNA, 32 nt, Homo Sapiens
caagagaaagacugaaggggaugcuaaaggag

SEQ ID NO: 272503 - RNA, 32 nt, Homo Sapiens
gucaucuguccuguuuguuagggguauuuuuu

SEQ ID NO: 272504 - RNA, 32 nt, Homo Sapiens
ccacauacaccugagccacuguggugggucac

SEQ ID NO: 272505 - RNA, 32 nt, Homo Sapiens
uugggauucuaccuguuccuaauuuggugugg

SEQ ID NO: 272506 - RNA, 32 nt, Homo Sapiens
agugcagcugagagcaaggagaauuauugucg

SEQ ID NO: 272507 - RNA, 32 nt, Homo Sapiens
aaucaauguauuaauaucuccauagcugggaa

SEQ ID NO: 272508 - RNA, 29 nt, Homo Sapiens
augacuucguguuuaauuggggagcuugu

SEQ ID NO: 272509 - RNA, 32 nt, Homo Sapiens
cauaaggaacaaaagcaacagauucuccagcu

SEQ ID NO: 272510 - RNA, 32 nt, Homo Sapiens
guggcggcgggaccauggaggcggcggucgcu

SEQ ID NO: 272511 - RNA, 32 nt, Homo Sapiens
uaaagcuguuuuugacacagcacauguguguu

SEQ ID NO: 272512 - RNA, 31 nt, Homo Sapiens
aguauuuuuguugaaaauguauaucagcauc

SEQ ID NO: 272513 - RNA, 32 nt, Homo Sapiens
uguauuauuuaguagagacaggguuucaccac

SEQ ID NO: 272514 - RNA, 32 nt, Homo Sapiens
gacggguccaguccagcccugcucucccuggu

SEQ ID NO: 272515 - RNA, 32 nt, Homo Sapiens
acugggccugugugccacguggcagcugcugc

SEQ ID NO: 272516 - RNA, 32 nt, Homo Sapiens
guucagaaggguucuugggccuuuuguucaau

SEQ ID NO: 272517 - RNA, 32 nt, Homo Sapiens
aacauggcaaaaccuugucuccacuaaaaaua

SEQ ID NO: 272518 - RNA, 32 nt, Homo Sapiens
augggcuuuguaaaccacuugacuuugcuaau

SEQ ID NO: 272519 - RNA, 32 nt, Homo Sapiens
ccccucugccuggcugcccagucuggaaagug

SEQ ID NO: 272520 - RNA, 32 nt, Homo Sapiens
uauguauuuggacuguaacaaacaaaacagaa

SEQ ID NO: 272521 - RNA, 32 nt, Homo Sapiens
gacaugucugucccaccuguaccugacacaga

SEQ ID NO: 272522 - RNA, 32 nt, Homo Sapiens
guaaacaucuccgaaugucacuccauggauuc

SEQ ID NO: 272523 - RNA, 32 nt, Homo Sapiens
aaccccagcaauuuauacaacgcugucauauu

SEQ ID NO: 272524 - RNA, 32 nt, Homo Sapiens
uaagagcauuugucaagcaccuuguauguguc

SEQ ID NO: 272525 - RNA, 32 nt, Homo Sapiens
gagcuggaccggacgacugugcucucuuagcu

SEQ ID NO: 272526 - RNA, 32 nt, Homo Sapiens
gcugaauaaagaccaaugaagagguuugagua

SEQ ID NO: 272527 - RNA, 32 nt, Homo Sapiens
ucuugggaacuacuccaccucacuguacagua

SEQ ID NO: 272528 - RNA, 32 nt, Homo Sapiens
uucauggccugcugaaauaugugugugaagaa

SEQ ID NO: 272529 - RNA, 32 nt, Homo Sapiens
ucaaggggaauuucagcuccguuugcgucagc

SEQ ID NO: 272530 - RNA, 32 nt, Homo Sapiens
agcacccauaccauuuauaacuucugaauuua

SEQ ID NO: 272531 - RNA, 32 nt, Homo Sapiens
auuuuuauuucuaaccacaauuuuacagaacu

SEQ ID NO: 272532 - RNA, 32 nt, Homo Sapiens
aggguuuaauucuguaaaaacaaaauuucuca

SEQ ID NO: 272533 - RNA, 32 nt, Homo Sapiens
uuacuuuuuauuucuuuuucuuguuuaacugc

SEQ ID NO: 272534 - RNA, 32 nt, Homo Sapiens
uaaauagaaaagacauugaaucaccaaggccu

SEQ ID NO: 272535 - RNA, 32 nt, Homo Sapiens
aaugcucaauacuuaccuaaucaaauggcauc

SEQ ID NO: 272536 - RNA, 32 nt, Homo Sapiens
cagccuucccccacccaugcccuuuccuuuaa

SEQ ID NO: 272537 - RNA, 32 nt, Homo Sapiens
uucucccagggcagaggggcgagggagaggcu

SEQ ID NO: 272538 - RNA, 32 nt, Homo Sapiens
uuuuauauuuaguucagaccuagagccaguag

SEQ ID NO: 272539 - RNA, 32 nt, Homo Sapiens
cacagccuagauuuuccaaucuugccaaucca

SEQ ID NO: 272540 - RNA, 32 nt, Homo Sapiens
gaaccgagcgggcggcgggcgcgcgcaccaug

SEQ ID NO: 272541 - RNA, 32 nt, Homo Sapiens
aaacaucaugauggcucuaauucauaaauaca

SEQ ID NO: 272542 - RNA, 32 nt, Homo Sapiens
agaagaaaacaucuacgaaagguaaaaagaga

SEQ ID NO: 272543 - RNA, 32 nt, Homo Sapiens
ccgcccuccagcugcccucccuggcaccccug

SEQ ID NO: 272544 - RNA, 32 nt, Homo Sapiens
cccugccccguccugagugccccuuccugucc

SEQ ID NO: 272545 - RNA, 32 nt, Homo Sapiens
guggggcucgggggcgcguccacguggccaga

SEQ ID NO: 272546 - RNA, 32 nt, Homo Sapiens
uuuauuguugaaucauuuugugaauguccccc

SEQ ID NO: 272547 - RNA, 32 nt, Homo Sapiens
gaaggucuccaagugucaacucccagugaaag

SEQ ID NO: 272548 - RNA, 32 nt, Homo Sapiens
uuaggaacucaagcuucuaaaacuauccaugu

SEQ ID NO: 272549 - RNA, 32 nt, Homo Sapiens
gggcauuuaacacccaccuggacuucagcaga

SEQ ID NO: 272550 - RNA, 32 nt, Homo Sapiens
ucacccccuccuccucagcccucccccaccca

SEQ ID NO: 272551 - RNA, 32 nt, Homo Sapiens
gauuacuuuuucuuuauguguuugacgggaaa

SEQ ID NO: 272552 - RNA, 32 nt, Homo Sapiens
uaagucguuagccuccucccuccgcuuucagc

SEQ ID NO: 272553 - RNA, 32 nt, Homo Sapiens
uuugaggccuuacagcucuucacaguacaagg

SEQ ID NO: 272554 - RNA, 32 nt, Homo Sapiens
uucagagacugucccugaaaccuaguacugcc

SEQ ID NO: 272555 - RNA, 32 nt, Homo Sapiens
agguugauuuucaugauucaugagcuggguac

SEQ ID NO: 272556 - RNA, 32 nt, Homo Sapiens
aagcauaaacucccauaaacccagcaccuaga

SEQ ID NO: 272557 - RNA, 32 nt, Homo Sapiens
acaugguaaaauguguuuuaauaacccccaga

SEQ ID NO: 272558 - RNA, 32 nt, Homo Sapiens
gcggugccgggcagcacugccggcgcuucgcc

SEQ ID NO: 272559 - RNA, 32 nt, Homo Sapiens
gagcaauuccaaggcaaguggguaugggaaua

SEQ ID NO: 272560 - RNA, 32 nt, Homo Sapiens
acgugcuguagaaagcacuugaaaaugcguuu

SEQ ID NO: 272561 - RNA, 28 nt, Homo Sapiens
aaauauuuaaagaaaacuuaugcugacc

SEQ ID NO: 272562 - RNA, 32 nt, Homo Sapiens
aaaaacaagcacacuucucaccccuauggagc

SEQ ID NO: 272563 - RNA, 32 nt, Homo Sapiens
auggcccuugguggaugugcccgggguccuga

SEQ ID NO: 272564 - RNA, 30 nt, Homo Sapiens
guaccuauccuugccacccauacaggaaau

SEQ ID NO: 272565 - RNA, 32 nt, Homo Sapiens
cccaggaaagaaugcuucugcugcuucaaaca

SEQ ID NO: 272566 - RNA, 32 nt, Homo Sapiens
agguggggcucgaggaacguaguguucuuugc

SEQ ID NO: 272567 - RNA, 32 nt, Homo Sapiens
uuuagccuuggcccuuuuuggccagggaaaua

SEQ ID NO: 272568 - RNA, 32 nt, Homo Sapiens
gcuuucauuaccaaauaauguaaaaccucaaa

SEQ ID NO: 272569 - RNA, 32 nt, Homo Sapiens
gucucaaauugcaugaauuuuuucuggcuguu

SEQ ID NO: 272570 - RNA, 32 nt, Homo Sapiens
cuuauguacuuugaauauucgaguauaaaguc

SEQ ID NO: 272571 - RNA, 32 nt, Homo Sapiens
gucuuucuuuugcuagaaagcucacaacuuua

SEQ ID NO: 272572 - RNA, 32 nt, Homo Sapiens
augccucccugaaauggucuccaggucccccc

SEQ ID NO: 272573 - RNA, 32 nt, Homo Sapiens
cuggguuagguggucuaggauaccaacucccc

SEQ ID NO: 272574 - RNA, 32 nt, Homo Sapiens
uacuuaauuuguaaggaaauuguuucauagau

SEQ ID NO: 272575 - RNA, 32 nt, Homo Sapiens
aauucacugaauauuucuucugagagcauggu

SEQ ID NO: 272576 - RNA, 32 nt, Homo Sapiens
aucugugggggcuuccucuccuuccacccucu

SEQ ID NO: 272577 - RNA, 32 nt, Homo Sapiens
accuaccucgagcaucucaaucuccaagaaua

SEQ ID NO: 272578 - RNA, 32 nt, Homo Sapiens
ucuguauuuuaaaaauacauuuguaccuuaua

SEQ ID NO: 272579 - RNA, 32 nt, Homo Sapiens
ggguugaguggaagaugucuuaguaguauugc

SEQ ID NO: 272580 - RNA, 32 nt, Homo Sapiens
cugacggccugccuaagaaauacuggcuuccu

SEQ ID NO: 272581 - RNA, 32 nt, Homo Sapiens
cagcccucaugcuugcugugcacuaugacuca

SEQ ID NO: 272582 - RNA, 30 nt, Homo Sapiens
cugcugggcaggcgggcaggcaggccuggg

SEQ ID NO: 272583 - RNA, 32 nt, Homo Sapiens
uagagguggaggcggagccggaugucagaggu

SEQ ID NO: 272584 - RNA, 32 nt, Homo Sapiens
cauaaaaaaucagccugucugcucuccccaca

SEQ ID NO: 272585 - RNA, 32 nt, Homo Sapiens
aacucacgcugcuccagccugaggcuuccaga

SEQ ID NO: 272586 - RNA, 32 nt, Homo Sapiens
gcuggcugucacuguaaagcugucccacagcg

SEQ ID NO: 272587 - RNA, 32 nt, Homo Sapiens
ccugccgucggggcgcggcugcucacccgccc

SEQ ID NO: 272588 - RNA, 32 nt, Homo Sapiens
uggacacgcacacacacacacacacacacaca

SEQ ID NO: 272589 - RNA, 32 nt, Homo Sapiens
uaucugggcacgguggugggcgccuguaauuc

SEQ ID NO: 272590 - RNA, 32 nt, Homo Sapiens
aaaauaucgaaauaaacuuuugcagcuuucuc

SEQ ID NO: 272591 - RNA, 32 nt, Homo Sapiens
agagcucaagagccuuccuacucuuuggaacu

SEQ ID NO: 272592 - RNA, 32 nt, Homo Sapiens
uggccagagggagagaggacucuggaccuagg

SEQ ID NO: 272593 - RNA, 32 nt, Homo Sapiens
aguucugauaaaccucuuaguaugcucagccu

SEQ ID NO: 272594 - RNA, 32 nt, Homo Sapiens
agaccauccaacaugacuaauccuguggcaaa

SEQ ID NO: 272595 - RNA, 32 nt, Homo Sapiens
cucagucuuuucugccucaacuucuuccagac

SEQ ID NO: 272596 - RNA, 32 nt, Homo Sapiens
agcccgcgccucuccucugcgccccgccucuc

SEQ ID NO: 272597 - RNA, 32 nt, Homo Sapiens
cguguugcagucaauguauuaagcaaagcaaa

SEQ ID NO: 272598 - RNA, 32 nt, Homo Sapiens
gacuuccuguuuuuaaaacgggggucuggucu

SEQ ID NO: 272599 - RNA, 32 nt, Homo Sapiens
uugcugucuuuagaaugguuugugaaaauaug

SEQ ID NO: 272600 - RNA, 32 nt, Homo Sapiens
gaggaaaugcuguuacuuggaauuaauuuucc

SEQ ID NO: 272601 - RNA, 32 nt, Homo Sapiens
gcucgcgggcauggacagcgcggccgccgccu

SEQ ID NO: 272602 - RNA, 32 nt, Homo Sapiens
gaggcucagagucugcagcagcagccagacca

SEQ ID NO: 272603 - RNA, 32 nt, Homo Sapiens
aaaagugcgcaaaacacauccuuauuguuccu

SEQ ID NO: 272604 - RNA, 32 nt, Homo Sapiens
aaacaccauguggagacucacacugugacccu

SEQ ID NO: 272605 - RNA, 32 nt, Homo Sapiens
ccagacaaccucagggaggaguguccuggcgu

SEQ ID NO: 272606 - RNA, 32 nt, Homo Sapiens
uuggggauggacggcuucggccaagcguuuua

SEQ ID NO: 272607 - RNA, 32 nt, Homo Sapiens
acaaggugaucaagugaaggaaaaaccugagc

SEQ ID NO: 272608 - RNA, 32 nt, Homo Sapiens
aggagauaggaagccagacuccacugcuuacg

SEQ ID NO: 272609 - RNA, 32 nt, Homo Sapiens
auccuagcuucucucuccuuccccucaagacc

SEQ ID NO: 272610 - RNA, 32 nt, Homo Sapiens
aagcggggugacucauuucccuuguccagggc

SEQ ID NO: 272611 - RNA, 32 nt, Homo Sapiens
uugaggcucuuaaauuguccuaucccaguggu

SEQ ID NO: 272612 - RNA, 32 nt, Homo Sapiens
caguaguccccucuccuagccacucuagcccc

SEQ ID NO: 272613 - RNA, 29 nt, Homo Sapiens
agaggucugaagauuggaaggggcccuac

SEQ ID NO: 272614 - RNA, 32 nt, Homo Sapiens
gguuuggauuuggggguucuuugguuuuaauu

SEQ ID NO: 272615 - RNA, 32 nt, Homo Sapiens
gggcuuuccccucuccuuccuuuacguauacu

SEQ ID NO: 272616 - RNA, 32 nt, Homo Sapiens
cggggcagagucagcucugugcugagccuccu

SEQ ID NO: 272617 - RNA, 32 nt, Homo Sapiens
uagagucccuugguacaagcuccucucccccc

SEQ ID NO: 272618 - RNA, 32 nt, Homo Sapiens
aaccuucucuggcagagugacuuuacaacuua

SEQ ID NO: 272619 - RNA, 32 nt, Homo Sapiens
cacacaucccagcgccggcucccggccaugga

SEQ ID NO: 272620 - RNA, 32 nt, Homo Sapiens
ccggcguugcuguagcgcgucugggaauuaca

SEQ ID NO: 272621 - RNA, 32 nt, Homo Sapiens
uggcaucaccggugcacagcugguguccuagc

SEQ ID NO: 272622 - RNA, 32 nt, Homo Sapiens
uuucaauguaaauuauaacaccaucauuugag

SEQ ID NO: 272623 - RNA, 32 nt, Homo Sapiens
caaauacaaauauacuuuuuuauauuucacaa

SEQ ID NO: 272624 - RNA, 32 nt, Homo Sapiens
cugcagaaaagucacagcuccaaauacguuga

SEQ ID NO: 272625 - RNA, 32 nt, Homo Sapiens
auuggcugugaugcucaaauccauugcauccu

SEQ ID NO: 272626 - RNA, 29 nt, Homo Sapiens
ucuagcauagugauauugauuuguaauuu

SEQ ID NO: 272627 - RNA, 32 nt, Homo Sapiens
cuuuagcgcccaguuggguggaugccuggugg

SEQ ID NO: 272628 - RNA, 32 nt, Homo Sapiens
augaugauuggaaaaaccugugaaguuguuaa

SEQ ID NO: 272629 - RNA, 32 nt, Homo Sapiens
uuauuuccaaauacuugagaaauuaccuuuug

SEQ ID NO: 272630 - RNA, 32 nt, Homo Sapiens
ugacgggaaaggagccgaggcagggcgacauu

SEQ ID NO: 272631 - RNA, 32 nt, Homo Sapiens
cuggagucuggaguguggagccccacagucuu

SEQ ID NO: 272632 - RNA, 32 nt, Homo Sapiens
ugucaauaaaaauaaaucuaaaucaaaaaaaa

SEQ ID NO: 272633 - RNA, 32 nt, Homo Sapiens
agcaugguuccuggcaaacagcaggcacucaa

SEQ ID NO: 272634 - RNA, 32 nt, Homo Sapiens
cuuagacucccacagaggggacugucuguauc

SEQ ID NO: 272635 - RNA, 32 nt, Homo Sapiens
gcaggacuggaucccaccccccugcagguccu

SEQ ID NO: 272636 - RNA, 32 nt, Homo Sapiens
guuuaaguacaggaucaagccuugcuugagau

SEQ ID NO: 272637 - RNA, 32 nt, Homo Sapiens
uucucauuuuuuucuucagugcacaacauaag

SEQ ID NO: 272638 - RNA, 32 nt, Homo Sapiens
gcccaccgcgcgcucgcuugaccgcggcgccc

SEQ ID NO: 272639 - RNA, 32 nt, Homo Sapiens
cgguguccacacucccauauuuaacgcaaccc

SEQ ID NO: 272640 - RNA, 32 nt, Homo Sapiens
ccuaguuuaccucgcguguguuuaccuauaug

SEQ ID NO: 272641 - RNA, 32 nt, Homo Sapiens
aguaaugcaaaaauaaaacgguagaauaugaa

SEQ ID NO: 272642 - RNA, 32 nt, Homo Sapiens
ucagagcuacauaguggaauguuuauggaaua

SEQ ID NO: 272643 - RNA, 32 nt, Homo Sapiens
acuacugcaauaaccuucaaaguagccucuga

SEQ ID NO: 272644 - RNA, 32 nt, Homo Sapiens
gggagagagaggaggacaggcugcgaccccgg

SEQ ID NO: 272645 - RNA, 32 nt, Homo Sapiens
aaaaagaacauuuuuccagugugguuuuuaac

SEQ ID NO: 272646 - RNA, 32 nt, Homo Sapiens
gauuuuacagaaaaggaaaugacacuugagau

SEQ ID NO: 272647 - RNA, 32 nt, Homo Sapiens
aacgggcagcagagggcgcggggcggcuccga

SEQ ID NO: 272648 - RNA, 30 nt, Homo Sapiens
aucuuggauaaaaagccuacaugaugcaaa

SEQ ID NO: 272649 - RNA, 32 nt, Homo Sapiens
gagaagcccuccccacccaggacugagaggcu

SEQ ID NO: 272650 - RNA, 32 nt, Homo Sapiens
uagcuuuccugcuauuuaucaaggcuggccug

SEQ ID NO: 272651 - RNA, 32 nt, Homo Sapiens
agcggggcgccaaggggcgcgccaggagcugc

SEQ ID NO: 272652 - RNA, 32 nt, Homo Sapiens
cggaggccugcgcgcuggguugcuccuucuuc

SEQ ID NO: 272653 - RNA, 32 nt, Homo Sapiens
gauggcccaggccauucaugagggauccaccu

SEQ ID NO: 272654 - RNA, 32 nt, Homo Sapiens
gcaguuucuccucuccugggcaccuguaacau

SEQ ID NO: 272655 - RNA, 32 nt, Homo Sapiens
ccccaaaaauacauccuagccuuaauguuuau

SEQ ID NO: 272656 - RNA, 32 nt, Homo Sapiens
agcugggcgggcccaccgcuccagcggcugcu

SEQ ID NO: 272657 - RNA, 32 nt, Homo Sapiens
gcauuuucaagcauauacccaggaguccagca

SEQ ID NO: 272658 - RNA, 32 nt, Homo Sapiens
aacuccugcuaaggguggccaugagacucagc

SEQ ID NO: 272659 - RNA, 32 nt, Homo Sapiens
cccuccgcaugcugcagaguaucuaugccccu

SEQ ID NO: 272660 - RNA, 32 nt, Homo Sapiens
uguaauuuucuguacucaccauuugaaguuag

SEQ ID NO: 272661 - RNA, 31 nt, Homo Sapiens
uuauagaaauaaauaauauguauggagucau

SEQ ID NO: 272662 - RNA, 32 nt, Homo Sapiens
gcuuucuccaggaaacaaggacagcugcacgg

SEQ ID NO: 272663 - RNA, 32 nt, Homo Sapiens
ggagcgagcggcugcugucaggcugucugaaa

SEQ ID NO: 272664 - RNA, 32 nt, Homo Sapiens
gcccugggacucuggaggggccaggguaccau

SEQ ID NO: 272665 - RNA, 32 nt, Homo Sapiens
cgcuggcgccagcacugggaggaggcggugcg

SEQ ID NO: 272666 - RNA, 32 nt, Homo Sapiens
uauaauuaaggguggcagggacuggagucagu

SEQ ID NO: 272667 - RNA, 32 nt, Homo Sapiens
caaguagugaaguggaaauccauguguaaggc

SEQ ID NO: 272668 - RNA, 32 nt, Homo Sapiens
gugugagugagagagcgagugagugagugagu

SEQ ID NO: 272669 - RNA, 32 nt, Homo Sapiens
uugccgcuagccgccugggaauuuaagggacc

SEQ ID NO: 272670 - RNA, 32 nt, Homo Sapiens
guaaagccaaaauaaaaggauuguuggcagac

SEQ ID NO: 272671 - RNA, 32 nt, Homo Sapiens
aucauucuuuaaaagaauaguuuaauacuuuu

SEQ ID NO: 272672 - RNA, 32 nt, Homo Sapiens
cuguuguaacaaaaaagcagucagacaauaug

SEQ ID NO: 272673 - RNA, 32 nt, Homo Sapiens
uuguaggagcaaacaaggcuucauauucuuuu

SEQ ID NO: 272674 - RNA, 32 nt, Homo Sapiens
uuguuuuuaagugguuuuggguucaaagccaa

SEQ ID NO: 272675 - RNA, 32 nt, Homo Sapiens
ugugaggaaggggcucaggggucugggccccu

SEQ ID NO: 272676 - RNA, 32 nt, Homo Sapiens
gugagauuugagcuauuacuaaaggcuuugcc

SEQ ID NO: 272677 - RNA, 32 nt, Homo Sapiens
uacaccucaauccuccauuugcuguacucuuu

SEQ ID NO: 272678 - RNA, 31 nt, Homo Sapiens
aguauuuugugcuuugucuguguuacaaugc

SEQ ID NO: 272679 - RNA, 32 nt, Homo Sapiens
uuguuuauuguuaaaguauggaaauucaacua

SEQ ID NO: 272680 - RNA, 32 nt, Homo Sapiens
uuuacaagcaauggcuuuuguggccaucauuu

SEQ ID NO: 272681 - RNA, 32 nt, Homo Sapiens
caggaagaaaaaagaaaagaauuacagaaugg

SEQ ID NO: 272682 - RNA, 32 nt, Homo Sapiens
uuguguuuucuauguaaaugauuuugucagcu

SEQ ID NO: 272683 - RNA, 32 nt, Homo Sapiens
ucagagggaaccgggcggagcggccaacaugg

SEQ ID NO: 272684 - RNA, 32 nt, Homo Sapiens
aguccacagaggcugcugcccggagcugagcu

SEQ ID NO: 272685 - RNA, 32 nt, Homo Sapiens
aacagagcagaggaccagcagaugaauggaca

SEQ ID NO: 272686 - RNA, 32 nt, Homo Sapiens
aguuaaccgguuuucuagccucauggaauacu

SEQ ID NO: 272687 - RNA, 32 nt, Homo Sapiens
aauuuacaaaauuuauucucagguaaucauuu

SEQ ID NO: 272688 - RNA, 32 nt, Homo Sapiens
gccuggccucccagcccugcccggcugcucug

SEQ ID NO: 272689 - RNA, 32 nt, Homo Sapiens
cggggcggccccagccaggcccccuucgaacc

SEQ ID NO: 272690 - RNA, 32 nt, Homo Sapiens
uggaacgguggaugucugcacugugcaucagc

SEQ ID NO: 272691 - RNA, 32 nt, Homo Sapiens
uaacuaugauacccucaauaaaacagggauug

SEQ ID NO: 272692 - RNA, 32 nt, Homo Sapiens
gguuauuuugauauaugauaauaauuaucuuu

SEQ ID NO: 272693 - RNA, 32 nt, Homo Sapiens
cagcgucgggccuggcccgagcugucucugug

SEQ ID NO: 272694 - RNA, 32 nt, Homo Sapiens
uauaggugugcgccaccacaccuggccaugug

SEQ ID NO: 272695 - RNA, 32 nt, Homo Sapiens
gggucuaugucauugguuucugaugcuuguac

SEQ ID NO: 272696 - RNA, 32 nt, Homo Sapiens
gagccggugaccaagcucggggccgagcggga

SEQ ID NO: 272697 - RNA, 32 nt, Homo Sapiens
gugcuggaaaauaaaguguacaucuugaaaau

SEQ ID NO: 272698 - RNA, 32 nt, Homo Sapiens
auaucauuuuuuaaauucuugaugccuauuug

SEQ ID NO: 272699 - RNA, 32 nt, Homo Sapiens
ugcagacccagcugccuuagacagauucccug

SEQ ID NO: 272700 - RNA, 32 nt, Homo Sapiens
aaggaagcagaagaccugggcuuuugucgaag

SEQ ID NO: 272701 - RNA, 32 nt, Homo Sapiens
ugcucuggcaucuggaggaacagaaaacuaag

SEQ ID NO: 272702 - RNA, 32 nt, Homo Sapiens
uuaauagauaaaaaucccagacuacuucagcc

SEQ ID NO: 272703 - RNA, 32 nt, Homo Sapiens
cuggagcggcgguuuagagagccgagccugau

SEQ ID NO: 272704 - RNA, 32 nt, Homo Sapiens
cuaaggagcgggcccacucuggacccaccugg

SEQ ID NO: 272705 - RNA, 32 nt, Homo Sapiens
guugaagauugugcucauuauguuuguggagu

SEQ ID NO: 272706 - RNA, 32 nt, Homo Sapiens
gcugggggagcuccgcgccgccggacgcccgu

SEQ ID NO: 272707 - RNA, 32 nt, Homo Sapiens
gggggcaggggugcgccuccucugcccugccc

SEQ ID NO: 272708 - RNA, 32 nt, Homo Sapiens
uaguaaguuucuguguaacccaucucaauuau

SEQ ID NO: 272709 - RNA, 30 nt, Homo Sapiens
gucuaauugaugcugggggaaaagaaagaa

SEQ ID NO: 272710 - RNA, 32 nt, Homo Sapiens
uugcuguuuuuagaauuaucccuuugucugug

SEQ ID NO: 272711 - RNA, 32 nt, Homo Sapiens
uaugccuuuugcuagccugcugugaugccugg

SEQ ID NO: 272712 - RNA, 32 nt, Homo Sapiens
uguaaguuuacuauauguaaagcuaagaugug

SEQ ID NO: 272713 - RNA, 32 nt, Homo Sapiens
ggcagggcugcauugggagcauccagaacugc

SEQ ID NO: 272714 - RNA, 32 nt, Homo Sapiens
uugaaaggaauucuccucaaaggucggauauu

SEQ ID NO: 272715 - RNA, 32 nt, Homo Sapiens
cagagcuuaaagacaaggucuucgaauuaacc

SEQ ID NO: 272716 - RNA, 32 nt, Homo Sapiens
ucaccaaguggcaggccaccucugggcaggac

SEQ ID NO: 272717 - RNA, 32 nt, Homo Sapiens
cacucauccuuguuuuuggagagauaauuauu

SEQ ID NO: 272718 - RNA, 32 nt, Homo Sapiens
ggucauggccccagcggccccggcacauggag

SEQ ID NO: 272719 - RNA, 32 nt, Homo Sapiens
gaaaaauauuccaagacuaaguugagaaaaga

SEQ ID NO: 272720 - RNA, 32 nt, Homo Sapiens
caucaaagccucccccucccccaccccuuugc

SEQ ID NO: 272721 - RNA, 32 nt, Homo Sapiens
uccuuccacccucuuugguuuuguaaaggugg

SEQ ID NO: 272722 - RNA, 32 nt, Homo Sapiens
uuugggcgccgaccagacgcggcauuuucgga

SEQ ID NO: 272723 - RNA, 32 nt, Homo Sapiens
cagccacacuguacaagcuuggcuucuucaaa

SEQ ID NO: 272724 - RNA, 32 nt, Homo Sapiens
cugaucaugcugucacaaacuuaagaggaaau

SEQ ID NO: 272725 - RNA, 32 nt, Homo Sapiens
ccauuacgcuaguuaucaugcauguuaugcuu

SEQ ID NO: 272726 - RNA, 32 nt, Homo Sapiens
agcgaguguuuguaaccauguaguuuuggaac

SEQ ID NO: 272727 - RNA, 32 nt, Homo Sapiens
aacauucuauugcuaaagaaauccuaaccuac

SEQ ID NO: 272728 - RNA, 32 nt, Homo Sapiens
augaggacaguucugacagaaauguaccucuu

SEQ ID NO: 272729 - RNA, 32 nt, Homo Sapiens
uccuccuauccaccugcauccacacauggccu

SEQ ID NO: 272730 - RNA, 32 nt, Homo Sapiens
ucauuuaaaaauuuuaacuucuauaugggacc

SEQ ID NO: 272731 - RNA, 32 nt, Homo Sapiens
caagccauuucccccuuuuguuucuaaaauua

SEQ ID NO: 272732 - RNA, 32 nt, Homo Sapiens
aacuucuucugucguggggaagagggaugaaa

SEQ ID NO: 272733 - RNA, 32 nt, Homo Sapiens
caucauuguaauuauuacugguauuuacaauu

SEQ ID NO: 272734 - RNA, 32 nt, Homo Sapiens
gaaacucacucuggccacuccuccucuggugg

SEQ ID NO: 272735 - RNA, 32 nt, Homo Sapiens
ugguuggcucugccuuugcugucuuuaccuga

SEQ ID NO: 272736 - RNA, 32 nt, Homo Sapiens
gcugccucggggugggguccgggaggagcgcg

SEQ ID NO: 272737 - RNA, 32 nt, Homo Sapiens
aucuucccugucaugacuuuaaguucuacuuu

SEQ ID NO: 272738 - RNA, 32 nt, Homo Sapiens
cuugcuggccccagcccugcuggggauccccg

SEQ ID NO: 272739 - RNA, 32 nt, Homo Sapiens
cccccauggccuaaucaccuuuccaaggcccc

SEQ ID NO: 272740 - RNA, 32 nt, Homo Sapiens
cagccgcgcuucccgggucccgcggcucccgc

SEQ ID NO: 272741 - RNA, 32 nt, Homo Sapiens
agcaguucuuaguagaggcauuucuacacuga

SEQ ID NO: 272742 - RNA, 32 nt, Homo Sapiens
acacgguucugaucuuuuuuuaaaaaaacguu

SEQ ID NO: 272743 - RNA, 32 nt, Homo Sapiens
gggaaguuaccugguagaucaagcauuacaca

SEQ ID NO: 272744 - RNA, 32 nt, Homo Sapiens
cugcuacuauguccucagguuaauuuuugucu

SEQ ID NO: 272745 - RNA, 32 nt, Homo Sapiens
cuucuaauagagcuguuuggauaauaugaaac

SEQ ID NO: 272746 - RNA, 32 nt, Homo Sapiens
caggccugguccaggaggagcuguggacacag

SEQ ID NO: 272747 - RNA, 32 nt, Homo Sapiens
uccccuuauguggcgggggacauacagugguc

SEQ ID NO: 272748 - RNA, 32 nt, Homo Sapiens
uagauauguacagcacuagaagcugaguagac

SEQ ID NO: 272749 - RNA, 32 nt, Homo Sapiens
ggcggcggggcgagcugcagcgccgggacagg

SEQ ID NO: 272750 - RNA, 32 nt, Homo Sapiens
uauaucaaguuccauuuguugaauuggguucc

SEQ ID NO: 272751 - RNA, 32 nt, Homo Sapiens
ucaucaggcuugucagcuggcccgccacgucc

SEQ ID NO: 272752 - RNA, 32 nt, Homo Sapiens
uuagcucuuauccuauuauacuguaauauuuc

SEQ ID NO: 272753 - RNA, 31 nt, Homo Sapiens
ugaaucuuuaaauaucgucuaauuuucauaa

SEQ ID NO: 272754 - RNA, 32 nt, Homo Sapiens
aaagcaaaaguacauugguaauuugggcacau

SEQ ID NO: 272755 - RNA, 32 nt, Homo Sapiens
ugaggaccaaagguuagagcccucuuucuccc

SEQ ID NO: 272756 - RNA, 32 nt, Homo Sapiens
cuauaauguacaaauugcuauaugugaauuaa

SEQ ID NO: 272757 - RNA, 32 nt, Homo Sapiens
ggccuguugcuucuggaccagacgccugcaca

SEQ ID NO: 272758 - RNA, 32 nt, Homo Sapiens
gaauuuucuuucccuuuuauucuacccccacu

SEQ ID NO: 272759 - RNA, 32 nt, Homo Sapiens
ggacgcuuacacaaaucaacaagcaaaaaaca

SEQ ID NO: 272760 - RNA, 32 nt, Homo Sapiens
caagauauguaucuuucuuuuguuacacauga

SEQ ID NO: 272761 - RNA, 32 nt, Homo Sapiens
gggcaagggguaggggauggggugcuguguag

SEQ ID NO: 272762 - RNA, 32 nt, Homo Sapiens
uauggagcaggcccgugagcuugugacugagu

SEQ ID NO: 272763 - RNA, 32 nt, Homo Sapiens
ugaccugaacugugucucuucuuaguucaucu

SEQ ID NO: 272764 - RNA, 32 nt, Homo Sapiens
auguuaagggguuguuguguaguugcauugga

SEQ ID NO: 272765 - RNA, 32 nt, Homo Sapiens
uccugcuuccagcugcugcagcgcgccuucgc

SEQ ID NO: 272766 - RNA, 32 nt, Homo Sapiens
ggaaaacaaccugucauuauguaucaagaacc

SEQ ID NO: 272767 - RNA, 32 nt, Homo Sapiens
aaaagccggcgcgcccgcggcccgcgcgauuu

SEQ ID NO: 272768 - RNA, 32 nt, Homo Sapiens
ggcuaccgcucccggcuuggcgucccgcgcgc

SEQ ID NO: 272769 - RNA, 32 nt, Homo Sapiens
acguguguggcaugguuuggccuggggaucuu

SEQ ID NO: 272770 - RNA, 32 nt, Homo Sapiens
ugcugugacugaggaguggaugaugcucgugu

SEQ ID NO: 272771 - RNA, 32 nt, Homo Sapiens
guuuugacaaaauaaauuuacuaaacuuggcc

SEQ ID NO: 272772 - RNA, 32 nt, Homo Sapiens
gcggauuucucccugcuucucuucugucaccc

SEQ ID NO: 272773 - RNA, 32 nt, Homo Sapiens
gagaccagccuggccaauaaggugaaacccug

SEQ ID NO: 272774 - RNA, 32 nt, Homo Sapiens
aguuucuugagcaucaagaugcugugaaaaaa

SEQ ID NO: 272775 - RNA, 32 nt, Homo Sapiens
gacucaguucccuucugaacacucgggggaca

SEQ ID NO: 272776 - RNA, 32 nt, Homo Sapiens
aguccccuggggaugggggaccacuguugggg

SEQ ID NO: 272777 - RNA, 32 nt, Homo Sapiens
uuuauuuauuuacguuugauaaaacuuacugg

SEQ ID NO: 272778 - RNA, 32 nt, Homo Sapiens
aagaggcuccacgccuggaucccuugccccca

SEQ ID NO: 272779 - RNA, 32 nt, Homo Sapiens
agaagaacagaaguuuaaguuauuguuuaaug

SEQ ID NO: 272780 - RNA, 32 nt, Homo Sapiens
acucauuauuguuguauuuccaaaaaaguaau

SEQ ID NO: 272781 - RNA, 32 nt, Homo Sapiens
cuccccauuucccacacccuugugcccugugu

SEQ ID NO: 272782 - RNA, 32 nt, Homo Sapiens
aacuauggaaaacauagacauuaugcuuuuau

SEQ ID NO: 272783 - RNA, 32 nt, Homo Sapiens
ccuggccucucugcaccagggugacaaggggu

SEQ ID NO: 272784 - RNA, 32 nt, Homo Sapiens
uuuuauuuuauagucucaaaucaaauacauac

SEQ ID NO: 272785 - RNA, 32 nt, Homo Sapiens
uucaggaaguggguauuaauucucacuguaua

SEQ ID NO: 272786 - RNA, 32 nt, Homo Sapiens
cgcucuucccugccuaucuccuccgcccgccu

SEQ ID NO: 272787 - RNA, 32 nt, Homo Sapiens
ccggggggcgcagcuagagagccccggagccg

SEQ ID NO: 272788 - RNA, 32 nt, Homo Sapiens
aacagguucuuugucuuaucuggggaaggaaa

SEQ ID NO: 272789 - RNA, 32 nt, Homo Sapiens
ucaaggacaagaaaugguagcaaccaaaaggu

SEQ ID NO: 272790 - RNA, 32 nt, Homo Sapiens
gagaugcugcgcaugcaccacgugcugaagga

SEQ ID NO: 272791 - RNA, 32 nt, Homo Sapiens
cuuuuucauuuugugaaaaacuccauguuagu

SEQ ID NO: 272792 - RNA, 32 nt, Homo Sapiens
cuucaggcagcugaggguccugggggagcuga

SEQ ID NO: 272793 - RNA, 32 nt, Homo Sapiens
gcgcccgcugcgcgcgcauguuuccucuuuuc

SEQ ID NO: 272794 - RNA, 32 nt, Homo Sapiens
ucuggaccgcgugcuggaggggcgggcgcagc

SEQ ID NO: 272795 - RNA, 32 nt, Homo Sapiens
uuaaauggaaggccacagaaaaggggaaaaga

SEQ ID NO: 272796 - RNA, 32 nt, Homo Sapiens
ggccggcgggggcuggggaggggguaaguuua

SEQ ID NO: 272797 - RNA, 32 nt, Homo Sapiens
aaaucugauaagacugaagagauagcagaaga

SEQ ID NO: 272798 - RNA, 32 nt, Homo Sapiens
aggaaacaaaaauacuuauauauacacagaac

SEQ ID NO: 272799 - RNA, 30 nt, Homo Sapiens
guuuugcuaucucucugagaagcucaucug

SEQ ID NO: 272800 - RNA, 32 nt, Homo Sapiens
uguuucaucuucuuucuuuuccuaaagaauca

SEQ ID NO: 272801 - RNA, 32 nt, Homo Sapiens
uaaggacguccgcguguuuucucuuucaguua

SEQ ID NO: 272802 - RNA, 32 nt, Homo Sapiens
ucaugagcaggcacugccgucaucucauuuua

SEQ ID NO: 272803 - RNA, 32 nt, Homo Sapiens
caggcagggcgucuauguuucuuuccuucugu

SEQ ID NO: 272804 - RNA, 32 nt, Homo Sapiens
gaggaagacccugcccucuccucacuccucug

SEQ ID NO: 272805 - RNA, 32 nt, Homo Sapiens
aacugaaaacaguucauguguggggggcaagu

SEQ ID NO: 272806 - RNA, 32 nt, Homo Sapiens
accuccaccuucuuucaguguuuaccgaagcc

SEQ ID NO: 272807 - RNA, 32 nt, Homo Sapiens
gcaaccuuuggaugcacuuuauauuauuuuga

SEQ ID NO: 272808 - RNA, 32 nt, Homo Sapiens
ucccugcccaaauuuuaacuuucauccaaaau

SEQ ID NO: 272809 - RNA, 32 nt, Homo Sapiens
ugagcgcugccgccccggggcccccagccaug

SEQ ID NO: 272810 - RNA, 32 nt, Homo Sapiens
ucagcauauuccagugauaacuuuaaaaauua

SEQ ID NO: 272811 - RNA, 32 nt, Homo Sapiens
ggaaaaugacaaaguauucucggcugcaaaaa

SEQ ID NO: 272812 - RNA, 32 nt, Homo Sapiens
guuggggcuggucccagccugaggcuccagcu

SEQ ID NO: 272813 - RNA, 32 nt, Homo Sapiens
auggaauuugggcaccuguuucccccaccuac

SEQ ID NO: 272814 - RNA, 32 nt, Homo Sapiens
gugagggaaugggagcagcugugggcgccuca

SEQ ID NO: 272815 - RNA, 32 nt, Homo Sapiens
gggcccugggccugggucugcgggagccccau

SEQ ID NO: 272816 - RNA, 32 nt, Homo Sapiens
ccaggcaaaaggaagauugucuuuggcuauag

SEQ ID NO: 272817 - RNA, 32 nt, Homo Sapiens
aaauaguucugaacauuuuucuauucauucau

SEQ ID NO: 272818 - RNA, 32 nt, Homo Sapiens
gcagagcucccauugcagcuacauacuugaga

SEQ ID NO: 272819 - RNA, 32 nt, Homo Sapiens
ugcaccuuaaaccauggauauuuuuuccucag

SEQ ID NO: 272820 - RNA, 32 nt, Homo Sapiens
cuaaacccaccuuguucaguguccucugagga

SEQ ID NO: 272821 - RNA, 32 nt, Homo Sapiens
uuucccuggcuggucucggacuccugggcuca

SEQ ID NO: 272822 - RNA, 32 nt, Homo Sapiens
uggaugggcgccaugugccuucugcacgccuc

SEQ ID NO: 272823 - RNA, 32 nt, Homo Sapiens
cuuucaaauggcacagucccucuucaagaugu

SEQ ID NO: 272824 - RNA, 32 nt, Homo Sapiens
ucaacacccuccccacccagucuccccgcccc

SEQ ID NO: 272825 - RNA, 32 nt, Homo Sapiens
augccacucaguccggccgcgaacagugcucc

SEQ ID NO: 272826 - RNA, 32 nt, Homo Sapiens
acuucuggugguuuuuuuuucucacgcugaug

SEQ ID NO: 272827 - RNA, 32 nt, Homo Sapiens
cuaauaagaaugccuuuuuauaaagccugugc

SEQ ID NO: 272828 - RNA, 32 nt, Homo Sapiens
cuugucggacgcccagccgggaugaggccagg

SEQ ID NO: 272829 - RNA, 32 nt, Homo Sapiens
gaacgcggcugcaggguccggucuucgguuug

SEQ ID NO: 272830 - RNA, 32 nt, Homo Sapiens
acucccgcgcgcgauccuucgaccacacgcgc

SEQ ID NO: 272831 - RNA, 32 nt, Homo Sapiens
guuauuuggccaucuccugguuauauacaaau

SEQ ID NO: 272832 - RNA, 32 nt, Homo Sapiens
uguucggccuccugccuaucagugaggcaucu

SEQ ID NO: 272833 - RNA, 32 nt, Homo Sapiens
gagccgaacaugaguuuuuagacuguaucuug

SEQ ID NO: 272834 - RNA, 32 nt, Homo Sapiens
auuuugggggagagagcagggaguggcucagg

SEQ ID NO: 272835 - RNA, 32 nt, Homo Sapiens
uggcgggcggggagcucuccuccggagaaaaa

SEQ ID NO: 272836 - RNA, 32 nt, Homo Sapiens
ggauagugcuuuugugaaauuuuucaaauuug

SEQ ID NO: 272837 - RNA, 32 nt, Homo Sapiens
uacuaccagagaguucugcugcuguuguuuuu

SEQ ID NO: 272838 - RNA, 32 nt, Homo Sapiens
ccuggggccgucugcccguggaccuggcugag

SEQ ID NO: 272839 - RNA, 32 nt, Homo Sapiens
cauuuauggccucaagauacuauacauuuaaa

SEQ ID NO: 272840 - RNA, 32 nt, Homo Sapiens
gauugugucuaucauguauauuuuaaauuucu

SEQ ID NO: 272841 - RNA, 32 nt, Homo Sapiens
acaugccugccagcguugugucaugccugucc

SEQ ID NO: 272842 - RNA, 32 nt, Homo Sapiens
cauuuuccucggugggggcuuagcgcacugga

SEQ ID NO: 272843 - RNA, 32 nt, Homo Sapiens
agugucaucauuucuucauucugcauauucuu

SEQ ID NO: 272844 - RNA, 32 nt, Homo Sapiens
ucggaauuuuuccugaacaaauaacagaaagg

SEQ ID NO: 272845 - RNA, 32 nt, Homo Sapiens
cccuuuaaaaugaaaugucaacuuuaagguau

SEQ ID NO: 272846 - RNA, 32 nt, Homo Sapiens
ugauggccacgugugccuuggccacgggaggc

SEQ ID NO: 272847 - RNA, 32 nt, Homo Sapiens
agcccaagggcuuauucaucaccauggguaaa

SEQ ID NO: 272848 - RNA, 30 nt, Homo Sapiens
aguagucagggaaugggggagguggggagu

SEQ ID NO: 272849 - RNA, 32 nt, Homo Sapiens
cucugccuagaaugcucuuuccucaaauuuuc

SEQ ID NO: 272850 - RNA, 32 nt, Homo Sapiens
aguaaugcuauauauuucugagcauuguuuuu

SEQ ID NO: 272851 - RNA, 32 nt, Homo Sapiens
aaccuagccuugccuuccaagcaagaaaggaa

SEQ ID NO: 272852 - RNA, 32 nt, Homo Sapiens
uuccccauaaauuuauugccugagaacuuagu

SEQ ID NO: 272853 - RNA, 30 nt, Homo Sapiens
gaaggccuguuguggagggaaaccacccau

SEQ ID NO: 272854 - RNA, 32 nt, Homo Sapiens
gcuaaggcagcaaagauggaggaagagucaga

SEQ ID NO: 272855 - RNA, 32 nt, Homo Sapiens
cuugcgugcagggaugcuugcugauggaugaa

SEQ ID NO: 272856 - RNA, 32 nt, Homo Sapiens
auuacucacuugcugcgagacuucaggccgcu

SEQ ID NO: 272857 - RNA, 32 nt, Homo Sapiens
ccaagccccuccccagcccccucucccggaca

SEQ ID NO: 272858 - RNA, 32 nt, Homo Sapiens
acgagugacagcggccgccgcgcucgguccag

SEQ ID NO: 272859 - RNA, 32 nt, Homo Sapiens
cauuggggugggccuuguuucugaggaaauaa

SEQ ID NO: 272860 - RNA, 32 nt, Homo Sapiens
gggcagggcuggcgcugcggcgggagaugcug

SEQ ID NO: 272861 - RNA, 32 nt, Homo Sapiens
ugcgugaggguggugggccugcggggacauuc

SEQ ID NO: 272862 - RNA, 32 nt, Homo Sapiens
aaaaagaaauugacucaguacuauuucuuuuc

SEQ ID NO: 272863 - RNA, 32 nt, Homo Sapiens
augcuuugccagcaguacgugguagccacaau

SEQ ID NO: 272864 - RNA, 32 nt, Homo Sapiens
gugcaggcggaggacuucggcgcggcuccucc

SEQ ID NO: 272865 - RNA, 32 nt, Homo Sapiens
gugaagcuggcuuuugagucggacgguaucau

SEQ ID NO: 272866 - RNA, 32 nt, Homo Sapiens
caccugagacuuguuuauaaaaaacaaaacaa

SEQ ID NO: 272867 - RNA, 32 nt, Homo Sapiens
ccuucugccaccugguggccggcggcaggaac

SEQ ID NO: 272868 - RNA, 32 nt, Homo Sapiens
cagagaacauguguagaagggauuguaaccca

SEQ ID NO: 272869 - RNA, 32 nt, Homo Sapiens
ccagucauuauguuuuuauagaauaauuaaac

SEQ ID NO: 272870 - RNA, 32 nt, Homo Sapiens
ccuggagaaugggaguguuaagacuuuugacu

SEQ ID NO: 272871 - RNA, 32 nt, Homo Sapiens
cacauaaaaaagaagcacuuugauugaaguau

SEQ ID NO: 272872 - RNA, 32 nt, Homo Sapiens
cuguugccauuccaucucuguguuaacacuuc

SEQ ID NO: 272873 - RNA, 32 nt, Homo Sapiens
auucagcaagcugcuucuccaaucaaagcugc

SEQ ID NO: 272874 - RNA, 32 nt, Homo Sapiens
ccagaagcugaauuagauagacuuuccaccga

SEQ ID NO: 272875 - RNA, 32 nt, Homo Sapiens
auugaacuaguuuguucuuaaucucaaaaauu

SEQ ID NO: 272876 - RNA, 32 nt, Homo Sapiens
uuuaccagaugaugggggaggggggaaggagu

SEQ ID NO: 272877 - RNA, 32 nt, Homo Sapiens
acaccuagauagacauaaaaugauaauuaaaa

SEQ ID NO: 272878 - RNA, 32 nt, Homo Sapiens
ucaguuuaauuguaacaauauauuuaauucaa

SEQ ID NO: 272879 - RNA, 32 nt, Homo Sapiens
uucuuuauuuuuucuuuuuuacuguauaaugu

SEQ ID NO: 272880 - RNA, 32 nt, Homo Sapiens
gagggcagcagagcgugcugcacugcucaggg

SEQ ID NO: 272881 - RNA, 32 nt, Homo Sapiens
ggaggaaggcgcccggcugcgucugcagaggc

SEQ ID NO: 272882 - RNA, 32 nt, Homo Sapiens
ugucuaccaugauuauuuuucuaagcugguug

SEQ ID NO: 272883 - RNA, 32 nt, Homo Sapiens
aauguguuguuaccaaaaagacugaaaagccc

SEQ ID NO: 272884 - RNA, 32 nt, Homo Sapiens
cuuccuguguggaaucuuccccacuccauccc

SEQ ID NO: 272885 - RNA, 32 nt, Homo Sapiens
uuacuuagaaaugauaacuaagaucacaauga

SEQ ID NO: 272886 - RNA, 32 nt, Homo Sapiens
cugugccaugaccagcaguguugguggccacc

SEQ ID NO: 272887 - RNA, 32 nt, Homo Sapiens
uagcucagaaaagccggcaggccagaaggacc

SEQ ID NO: 272888 - RNA, 32 nt, Homo Sapiens
cuguauuguaaauuuuagacuauuucauauac

SEQ ID NO: 272889 - RNA, 32 nt, Homo Sapiens
auuuaccugcaugucugagaugccauuuauug

SEQ ID NO: 272890 - RNA, 32 nt, Homo Sapiens
gacuuaaaaucauacaucuuggagaaccuuuc

SEQ ID NO: 272891 - RNA, 32 nt, Homo Sapiens
uuuaaguguucccucuuuggggcaaauucuua

SEQ ID NO: 272892 - RNA, 32 nt, Homo Sapiens
aauguuguuaucauaucaugcuucaacuauua

SEQ ID NO: 272893 - RNA, 32 nt, Homo Sapiens
agggcuggggcaccugccccccugcuccccac

SEQ ID NO: 272894 - RNA, 32 nt, Homo Sapiens
ugguauggggaugauccaggauuauguuguga

SEQ ID NO: 272895 - RNA, 32 nt, Homo Sapiens
ucccucuccagccacugcgacccggcgaagag

SEQ ID NO: 272896 - RNA, 32 nt, Homo Sapiens
cucugcccgcggcuguggcggcgccggcggau

SEQ ID NO: 272897 - RNA, 32 nt, Homo Sapiens
ccccgaugugauuuuucuccccggggauucga

SEQ ID NO: 272898 - RNA, 32 nt, Homo Sapiens
ugugaggccagcaaauauuuucuuaaauucau

SEQ ID NO: 272899 - RNA, 32 nt, Homo Sapiens
gaggagccgcggggcguccgggucugagccgc

SEQ ID NO: 272900 - RNA, 32 nt, Homo Sapiens
gggagccguccucagcagcgucaacaugucaa

SEQ ID NO: 272901 - RNA, 32 nt, Homo Sapiens
aaguucugucguucuuuccccaauccccagga

SEQ ID NO: 272902 - RNA, 31 nt, Homo Sapiens
ccugggcugccccagaacacaguccauuacg

SEQ ID NO: 272903 - RNA, 32 nt, Homo Sapiens
agugaauuuuugguagaaaugcuauguccuug

SEQ ID NO: 272904 - RNA, 32 nt, Homo Sapiens
acagggcaggagaggaaguuguagcgccuagc

SEQ ID NO: 272905 - RNA, 30 nt, Homo Sapiens
ggaagauggccggcccguggaccuucaccc

SEQ ID NO: 272906 - RNA, 32 nt, Homo Sapiens
uccacuccugcagcuggggggcuucucggugg

SEQ ID NO: 272907 - RNA, 32 nt, Homo Sapiens
gccuagggcagacaauaguauagaagucugga

SEQ ID NO: 272908 - RNA, 31 nt, Homo Sapiens
uaugaguuacugugggguccaagggcacucg

SEQ ID NO: 272909 - RNA, 32 nt, Homo Sapiens
cugcaggaagggaggguggcgagggggaagcg

SEQ ID NO: 272910 - RNA, 32 nt, Homo Sapiens
cucuccugagcuauccucagccaggcaugcac

SEQ ID NO: 272911 - RNA, 32 nt, Homo Sapiens
augaggcccuccccauggcuuuagagacgauc

SEQ ID NO: 272912 - RNA, 32 nt, Homo Sapiens
gaacacugguuuaggagccauuggccugcccu

SEQ ID NO: 272913 - RNA, 32 nt, Homo Sapiens
aucgaauuuccuuugaucucucuucugaauug

SEQ ID NO: 272914 - RNA, 32 nt, Homo Sapiens
gcuucagacccccacacccucuccugcugcug

SEQ ID NO: 272915 - RNA, 32 nt, Homo Sapiens
cccuacccgcggcccacgcggagccaggaggc

SEQ ID NO: 272916 - RNA, 32 nt, Homo Sapiens
uaaugcaguuuguucaggaaaucagcacaaag

SEQ ID NO: 272917 - RNA, 32 nt, Homo Sapiens
gacugacaggcugacauagaaaauaaacuuug

SEQ ID NO: 272918 - RNA, 32 nt, Homo Sapiens
auuuacagccauuguuacaaguuuauaaugua

SEQ ID NO: 272919 - RNA, 32 nt, Homo Sapiens
ccuggccucucuggacaggagcucccagccca

SEQ ID NO: 272920 - RNA, 32 nt, Homo Sapiens
cagucuccugcagguuucugugccccuguggu

SEQ ID NO: 272921 - RNA, 32 nt, Homo Sapiens
auaugccugggagcagauuugcuggaucauau

SEQ ID NO: 272922 - RNA, 32 nt, Homo Sapiens
ugacagcugcaugccuggaccaccccagcccu

SEQ ID NO: 272923 - RNA, 32 nt, Homo Sapiens
ucgcggccagcuuucucguguggcggcgcuuc

SEQ ID NO: 272924 - RNA, 32 nt, Homo Sapiens
gauucuuggggaucaguuaacagcagcugacc

SEQ ID NO: 272925 - RNA, 32 nt, Homo Sapiens
aaauaacagguucuguugcugcugagcuuucg

SEQ ID NO: 272926 - RNA, 32 nt, Homo Sapiens
gugccugagugaugauacaaucgcuguuuagu

SEQ ID NO: 272927 - RNA, 32 nt, Homo Sapiens
ugccccacucccagcccuccucagccccagcc

SEQ ID NO: 272928 - RNA, 32 nt, Homo Sapiens
gccauggcuucgagacaccugaggagaccugg

SEQ ID NO: 272929 - RNA, 32 nt, Homo Sapiens
gccagcagcuccgagaagaugaacuccuuggu

SEQ ID NO: 272930 - RNA, 32 nt, Homo Sapiens
ccagggcggcgcacgcgcaagaggcgcgcuuc

SEQ ID NO: 272931 - RNA, 32 nt, Homo Sapiens
cuaaauuccaaagaauccaacgcagcacuagc

SEQ ID NO: 272932 - RNA, 32 nt, Homo Sapiens
aaaucugggcuugucuuccuaaugcuaccuuu

SEQ ID NO: 272933 - RNA, 32 nt, Homo Sapiens
agguuaaacacuuuaagaugagaaaaauugau

SEQ ID NO: 272934 - RNA, 32 nt, Homo Sapiens
gccagaugccgccugcccugugaggacggcug

SEQ ID NO: 272935 - RNA, 32 nt, Homo Sapiens
acuuucuuaauuucuauuuaugaugaaguaua

SEQ ID NO: 272936 - RNA, 32 nt, Homo Sapiens
gacuucagcggacauggcucccagcgugccag

SEQ ID NO: 272937 - RNA, 32 nt, Homo Sapiens
uggaaacagguggucuucuaugcugcagagaa

SEQ ID NO: 272938 - RNA, 32 nt, Homo Sapiens
uagaaagcauccuuggucaucauugucuccuu

SEQ ID NO: 272939 - RNA, 32 nt, Homo Sapiens
caccuguaaucccagcacuuugggagggcagg

SEQ ID NO: 272940 - RNA, 32 nt, Homo Sapiens
acaggaggcugccagcagcauuuuccccaagg

SEQ ID NO: 272941 - RNA, 32 nt, Homo Sapiens
gaacacuacaguguucugcauugcaccaugac

SEQ ID NO: 272942 - RNA, 32 nt, Homo Sapiens
agucggaggcggagagccuggacgcccagagg

SEQ ID NO: 272943 - RNA, 29 nt, Homo Sapiens
uuccguggaggacagaggggcgcggaggg

SEQ ID NO: 272944 - RNA, 32 nt, Homo Sapiens
uccccaauuauuuugcagaauugcacuuaaua

SEQ ID NO: 272945 - RNA, 30 nt, Homo Sapiens
auguggucaccugugggggaaacucuucag

SEQ ID NO: 272946 - RNA, 32 nt, Homo Sapiens
aaguuauacuggcaguuauugaagauacuuaa

SEQ ID NO: 272947 - RNA, 32 nt, Homo Sapiens
uuuuucuauaagaacaaaauauuaauuaaggu

SEQ ID NO: 272948 - RNA, 32 nt, Homo Sapiens
agaauacuuaaaaugccugggauaguucuugg

SEQ ID NO: 272949 - RNA, 32 nt, Homo Sapiens
auuccgugccucaauuuccccaucuguaaacu

SEQ ID NO: 272950 - RNA, 32 nt, Homo Sapiens
aaccucaaaaaacuagucauucggaauucuga

SEQ ID NO: 272951 - RNA, 32 nt, Homo Sapiens
ucucaaaaaacaaacaaacaaacaaacaaaaa

SEQ ID NO: 272952 - RNA, 32 nt, Homo Sapiens
accucgcgcgccgccgcugccacgcgcccccc

SEQ ID NO: 272953 - RNA, 32 nt, Homo Sapiens
agugccaauuuaagguauauuguguuccaugg

SEQ ID NO: 272954 - RNA, 32 nt, Homo Sapiens
acaguucuggaacauucaggagcugauaugug

SEQ ID NO: 272955 - RNA, 32 nt, Homo Sapiens
caaagaugagucgggcggagggggcggcccca

SEQ ID NO: 272956 - RNA, 28 nt, Homo Sapiens
ggcuuccggcaccggccgaggugcgggu

SEQ ID NO: 272957 - RNA, 32 nt, Homo Sapiens
ucaguacuuaggaagaccacagcuagauggac

SEQ ID NO: 272958 - RNA, 32 nt, Homo Sapiens
cagaaggcacuaacucucuggugauugggugg

SEQ ID NO: 272959 - RNA, 32 nt, Homo Sapiens
auccgagguuuugaacgcgauuuuuuccgaca

SEQ ID NO: 272960 - RNA, 32 nt, Homo Sapiens
auuucaugauggagugaugcccugcccugcuu

SEQ ID NO: 272961 - RNA, 32 nt, Homo Sapiens
guuggcuugugcuacucuggaaucauuuuacu

SEQ ID NO: 272962 - RNA, 32 nt, Homo Sapiens
aacaaggaaagcacccugguccucccuggcuc

SEQ ID NO: 272963 - RNA, 32 nt, Homo Sapiens
uucuacauucucaucuacucauugucucagug

SEQ ID NO: 272964 - RNA, 28 nt, Homo Sapiens
agagaauguucaggaccaagcaguuacc

SEQ ID NO: 272965 - RNA, 32 nt, Homo Sapiens
uuuuuuuuccccucacuagcaccuggaaugau

SEQ ID NO: 272966 - RNA, 32 nt, Homo Sapiens
uacucgauuuaaaacguguugucagaccuugu

SEQ ID NO: 272967 - RNA, 32 nt, Homo Sapiens
gaggacccacugggcagcuccuggacagccuc

SEQ ID NO: 272968 - RNA, 32 nt, Homo Sapiens
uaugguugacuccggauggacaaaagaaaaaa

SEQ ID NO: 272969 - RNA, 32 nt, Homo Sapiens
ccucgugaaacacagcugggcaaguauuaaug

SEQ ID NO: 272970 - RNA, 32 nt, Homo Sapiens
cccucgggcuggaagcgugcgggcucgggugg

SEQ ID NO: 272971 - RNA, 32 nt, Homo Sapiens
aaagaacuagcagaaagucaaaaacuaagaua

SEQ ID NO: 272972 - RNA, 31 nt, Homo Sapiens
aaaacaaaauaaaaaggugugcaauugacaa

SEQ ID NO: 272973 - RNA, 32 nt, Homo Sapiens
caggcugucccccgcccugcccggcccgagcc

SEQ ID NO: 272974 - RNA, 32 nt, Homo Sapiens
augcagcucuuaccugucagugucucauugag

SEQ ID NO: 272975 - RNA, 32 nt, Homo Sapiens
aaaucaagaacacauucagagaaaugcaaaau

SEQ ID NO: 272976 - RNA, 32 nt, Homo Sapiens
uuuggggcuuaucucugauacaugcuggagcc

SEQ ID NO: 272977 - RNA, 32 nt, Homo Sapiens
aacuguaaugcaggauuggaccaugaaugaua

SEQ ID NO: 272978 - RNA, 32 nt, Homo Sapiens
uccguguaucuaauaaagucugacccaaaaaa

SEQ ID NO: 272979 - RNA, 32 nt, Homo Sapiens
uucccucucuucuggcuucucauuccugaaau

SEQ ID NO: 272980 - RNA, 32 nt, Homo Sapiens
cgggagucgggcccgaccugagccacgcgggc

SEQ ID NO: 272981 - RNA, 32 nt, Homo Sapiens
agaugaacacugguuugauccgggacaaccug

SEQ ID NO: 272982 - RNA, 32 nt, Homo Sapiens
ucucccuccgagucacucugcagcuuggcccg

SEQ ID NO: 272983 - RNA, 32 nt, Homo Sapiens
guguggcaacuuuuccucucgcuucuccuccg

SEQ ID NO: 272984 - RNA, 32 nt, Homo Sapiens
uccuauccuaaauucuaacuuggcccauuccc

SEQ ID NO: 272985 - RNA, 32 nt, Homo Sapiens
cccuggcccuccccagcccggccccuuagccu

SEQ ID NO: 272986 - RNA, 32 nt, Homo Sapiens
agaaagaucuguuuccucuccucgggccuccu

SEQ ID NO: 272987 - RNA, 32 nt, Homo Sapiens
uucuggucauuuccaacuuauagaggaaggga

SEQ ID NO: 272988 - RNA, 32 nt, Homo Sapiens
cucugggcgucccaugaucccuucugugucug

SEQ ID NO: 272989 - RNA, 32 nt, Homo Sapiens
uguaaauaaaaauaaaguuacuuacaaaaaaa

SEQ ID NO: 272990 - RNA, 32 nt, Homo Sapiens
aauguucugauggaugccagugccaaauuuaa

SEQ ID NO: 272991 - RNA, 32 nt, Homo Sapiens
ggccagaugggagggagcuggugggauagugg

SEQ ID NO: 272992 - RNA, 32 nt, Homo Sapiens
aagucucaguauugaggccucuccaguucuca

SEQ ID NO: 272993 - RNA, 32 nt, Homo Sapiens
uugcaaccaaaauggggacuuccuggguaggg

SEQ ID NO: 272994 - RNA, 32 nt, Homo Sapiens
uagaagcgccccagcccggcaagcuggcucac

SEQ ID NO: 272995 - RNA, 32 nt, Homo Sapiens
cgccuggcucucucgccgcggagccgccaaga

SEQ ID NO: 272996 - RNA, 32 nt, Homo Sapiens
uggggcuugccacauggaugguugccacucuc

SEQ ID NO: 272997 - RNA, 32 nt, Homo Sapiens
uucccaucuuaaauuucuaaaaacaguuaaga

SEQ ID NO: 272998 - RNA, 32 nt, Homo Sapiens
uccucuagcaggucagcgacugagaggggccu

SEQ ID NO: 272999 - RNA, 32 nt, Homo Sapiens
cguagccuugaggccuggcacgguggcucaug

SEQ ID NO: 273000 - RNA, 32 nt, Homo Sapiens
agccaacaggaguuccgggaaccauccaucug

SEQ ID NO: 273001 - RNA, 32 nt, Homo Sapiens
auugguuucuuuuuccaacuuaauagguuuau

SEQ ID NO: 273002 - RNA, 32 nt, Homo Sapiens
cuuuugucuuucaaauuaaaauuaaaaacuaa

SEQ ID NO: 273003 - RNA, 32 nt, Homo Sapiens
accagggccuccaggcagggcugggguuggcc

SEQ ID NO: 273004 - RNA, 32 nt, Homo Sapiens
acagacaucacaccccaagccucagaggauug

SEQ ID NO: 273005 - RNA, 32 nt, Homo Sapiens
ccgaucuucucgcaaaaggcgagugugugggg

SEQ ID NO: 273006 - RNA, 32 nt, Homo Sapiens
uccaaccaggacuucuuagagucuaaugaugu

SEQ ID NO: 273007 - RNA, 32 nt, Homo Sapiens
ccaguucaaugaugaguuuucuuaacagaauu

SEQ ID NO: 273008 - RNA, 32 nt, Homo Sapiens
ggcuacugccagcagcgaaggcgccucccgcg

SEQ ID NO: 273009 - RNA, 32 nt, Homo Sapiens
ggcccgggcagcgggggcggcgaggaggccau

SEQ ID NO: 273010 - RNA, 32 nt, Homo Sapiens
cuuccaguugcuuuuucuuuuuucuuuuuuuu

SEQ ID NO: 273011 - RNA, 32 nt, Homo Sapiens
cgguagcccugaggcucuggcgccuucaagug

SEQ ID NO: 273012 - RNA, 32 nt, Homo Sapiens
gccccaccaucauccccuucucauuuuauaaa

SEQ ID NO: 273013 - RNA, 32 nt, Homo Sapiens
ugagaccagcggggagcucaccgacgggcacc

SEQ ID NO: 273014 - RNA, 32 nt, Homo Sapiens
acacuuaauauuugggccugaagcauuaaacu

SEQ ID NO: 273015 - RNA, 32 nt, Homo Sapiens
cugccuccuccacucagcauuccauggaccaa

SEQ ID NO: 273016 - RNA, 32 nt, Homo Sapiens
ucccugggggccgggaggaucccgcccugugg

SEQ ID NO: 273017 - RNA, 32 nt, Homo Sapiens
uaaugagaugcuucagcucacaguuugaagug

SEQ ID NO: 273018 - RNA, 32 nt, Homo Sapiens
guugguaaaaacagagauugaaauuacuguuu

SEQ ID NO: 273019 - RNA, 32 nt, Homo Sapiens
ugacucuguuuaauaaagucaguuuaauuuua

SEQ ID NO: 273020 - RNA, 32 nt, Homo Sapiens
aacuaucggcuuucuuacugguaaaauuauau

SEQ ID NO: 273021 - RNA, 32 nt, Homo Sapiens
uguguuugaaagauacucuauuaaagaagacu

SEQ ID NO: 273022 - RNA, 32 nt, Homo Sapiens
gcucagggucugugaggaggcaagguucgcag

SEQ ID NO: 273023 - RNA, 32 nt, Homo Sapiens
acaaucucaaaauaagcuuacguagacaaaua

SEQ ID NO: 273024 - RNA, 32 nt, Homo Sapiens
uggaaucuggagacgccagcccugcccaauca

SEQ ID NO: 273025 - RNA, 32 nt, Homo Sapiens
ggggaccucugggagcucucugcagugcuccc

SEQ ID NO: 273026 - RNA, 32 nt, Homo Sapiens
uaccccgugcgcgcuucgacguugcugcuguu

SEQ ID NO: 273027 - RNA, 32 nt, Homo Sapiens
uuaugaauugauuugggcaaucaaaugaauuu

SEQ ID NO: 273028 - RNA, 32 nt, Homo Sapiens
acaguucuggaaagaacacaucacuugugcuu

SEQ ID NO: 273029 - RNA, 32 nt, Homo Sapiens
aagaaaaggcaaauucaccagagccuuugaau

SEQ ID NO: 273030 - RNA, 32 nt, Homo Sapiens
aauuucuaauuauuauuuuuaguaugauauuu

SEQ ID NO: 273031 - RNA, 32 nt, Homo Sapiens
cuuccggacuggccgcaccccggaggagccac

SEQ ID NO: 273032 - RNA, 32 nt, Homo Sapiens
accaagaggauauauauggguauauaagaggg

SEQ ID NO: 273033 - RNA, 32 nt, Homo Sapiens
gaaaauucauacuggagagaaacuacaaaugu

SEQ ID NO: 273034 - RNA, 32 nt, Homo Sapiens
cccuucugccugcccagcugccccggggccac

SEQ ID NO: 273035 - RNA, 32 nt, Homo Sapiens
gagauugcagccugcugccuccccuccaucag

SEQ ID NO: 273036 - RNA, 32 nt, Homo Sapiens
uguauuguuucauugguuucugauaagucugu

SEQ ID NO: 273037 - RNA, 32 nt, Homo Sapiens
ucauuacuaaagcuauacuaacagcagucacc

SEQ ID NO: 273038 - RNA, 32 nt, Homo Sapiens
gucucccuuguacauucuuuauucaugauauu

SEQ ID NO: 273039 - RNA, 32 nt, Homo Sapiens
agaggcgccccucccucccggacugggcggcu

SEQ ID NO: 273040 - RNA, 32 nt, Homo Sapiens
uuccuccgcgcacccccacgggccgcuggcaa

SEQ ID NO: 273041 - RNA, 32 nt, Homo Sapiens
ccaccuacugaaucaugagcggaggaagucgu

SEQ ID NO: 273042 - RNA, 32 nt, Homo Sapiens
cuuugaagucauaccaaugaaaaaauguauau

SEQ ID NO: 273043 - RNA, 32 nt, Homo Sapiens
cagaugcaggugccggcugcugcagugcagua

SEQ ID NO: 273044 - RNA, 32 nt, Homo Sapiens
gugaggcguugaccacgcccauaugaauugga

SEQ ID NO: 273045 - RNA, 32 nt, Homo Sapiens
cucaguggcgccaccugcuggugcuaauaggg

SEQ ID NO: 273046 - RNA, 32 nt, Homo Sapiens
auaauguuuccauaauuuuguaaaacuaaaga

SEQ ID NO: 273047 - RNA, 32 nt, Homo Sapiens
uucugggaagggguugcccggcugugcugcca

SEQ ID NO: 273048 - RNA, 32 nt, Homo Sapiens
aagccugggggcugggggcgggugggccgagc

SEQ ID NO: 273049 - RNA, 32 nt, Homo Sapiens
ugccugguucccuccccaaggccacagggagc

SEQ ID NO: 273050 - RNA, 32 nt, Homo Sapiens
uagaacuaugagcccgaggccuuccccucucc

SEQ ID NO: 273051 - RNA, 32 nt, Homo Sapiens
uguugcuucuauuauugugcacaaccauugag

SEQ ID NO: 273052 - RNA, 32 nt, Homo Sapiens
cacaauaaaaauuuuuucucuuuaaaaaaaaa

SEQ ID NO: 273053 - RNA, 32 nt, Homo Sapiens
gggguucucaguuuccucccccagacagcccu

SEQ ID NO: 273054 - RNA, 32 nt, Homo Sapiens
gcccugccaccucuccucauggggccaggaag

SEQ ID NO: 273055 - RNA, 32 nt, Homo Sapiens
agucgccgucuucgagucccaccuguccgaag

SEQ ID NO: 273056 - RNA, 32 nt, Homo Sapiens
agcugcugcagcgcuagacgccgccccgccgc

SEQ ID NO: 273057 - RNA, 32 nt, Homo Sapiens
agcuugguucugcccagcacucgugcuuguuc

SEQ ID NO: 273058 - RNA, 32 nt, Homo Sapiens
augccucauuuuagcaaacuagguuucuuugu

SEQ ID NO: 273059 - RNA, 31 nt, Homo Sapiens
uuaacuacaaagaagaggauuuuaagaggag

SEQ ID NO: 273060 - RNA, 32 nt, Homo Sapiens
uagagaggugcuauucaagugauucugaaggc

SEQ ID NO: 273061 - RNA, 32 nt, Homo Sapiens
cagucuucuccauggugcugaagaugccagug

SEQ ID NO: 273062 - RNA, 32 nt, Homo Sapiens
gggcccggcugacugcgccucugcuuucuuuc

SEQ ID NO: 273063 - RNA, 32 nt, Homo Sapiens
uucuuuuuucuuuccuggaauggagugggcag

SEQ ID NO: 273064 - RNA, 32 nt, Homo Sapiens
cuggcucccuccuggggcgcggccggguggcc

SEQ ID NO: 273065 - RNA, 32 nt, Homo Sapiens
gugcaaaauggcauaccugucuuucucccaga

SEQ ID NO: 273066 - RNA, 32 nt, Homo Sapiens
aggucucgauuuccaaagguaaagauggaagg

SEQ ID NO: 273067 - RNA, 31 nt, Homo Sapiens
ggggugggggcggugccauuggucuggugca

SEQ ID NO: 273068 - RNA, 32 nt, Homo Sapiens
cgcugccaccccacccagcgcugccagggagc

SEQ ID NO: 273069 - RNA, 32 nt, Homo Sapiens
aaauccuucccguucuucuggauggcauccua

SEQ ID NO: 273070 - RNA, 32 nt, Homo Sapiens
acaguuggaagcacagggguaacugguaccug

SEQ ID NO: 273071 - RNA, 32 nt, Homo Sapiens
aggcucacaccuguaaucucagcauuuuggga

SEQ ID NO: 273072 - RNA, 32 nt, Homo Sapiens
cugccagcaacagcuuccuucuuugagcuuag

SEQ ID NO: 273073 - RNA, 32 nt, Homo Sapiens
ugguggcugucggggggcgcgcggggaagcag

SEQ ID NO: 273074 - RNA, 32 nt, Homo Sapiens
gcaguggggaaaccgaggcagcuccugcuccc

SEQ ID NO: 273075 - RNA, 29 nt, Homo Sapiens
uguuugaaguuuguauauuuuccguacug

SEQ ID NO: 273076 - RNA, 30 nt, Homo Sapiens
cacccaaauaucccuuuacgauucucaggg

SEQ ID NO: 273077 - RNA, 32 nt, Homo Sapiens
gggcucacccucggggcucccuucuucucuac

SEQ ID NO: 273078 - RNA, 32 nt, Homo Sapiens
auagaaguguuucauccuuucaaaaccauuuc

SEQ ID NO: 273079 - RNA, 32 nt, Homo Sapiens
agaaguaauuuucucaugaugaaauaaaguuc

SEQ ID NO: 273080 - RNA, 32 nt, Homo Sapiens
ggaguggacaagccucuugguuaaggcuccuc

SEQ ID NO: 273081 - RNA, 32 nt, Homo Sapiens
auguuccccaggcacucugugcucgccuucac

SEQ ID NO: 273082 - RNA, 32 nt, Homo Sapiens
ugguggacaccuguagucccagcugcuuggga

SEQ ID NO: 273083 - RNA, 32 nt, Homo Sapiens
aagaagaauggaauuauuaauuuuauuugacu

SEQ ID NO: 273084 - RNA, 32 nt, Homo Sapiens
auggagaauuuuuucuucugagcauuuuaaua

SEQ ID NO: 273085 - RNA, 32 nt, Homo Sapiens
ucaguugauagucuggaaugcauguuauauau

SEQ ID NO: 273086 - RNA, 30 nt, Homo Sapiens
gcaauaggcaggcaccaccguccccagagc

SEQ ID NO: 273087 - RNA, 32 nt, Homo Sapiens
uuaggcuggguccacgcuucccuggugccagc

SEQ ID NO: 273088 - RNA, 32 nt, Homo Sapiens
cuuccccuggggaugaggguuggguguccaug

SEQ ID NO: 273089 - RNA, 32 nt, Homo Sapiens
guccgggcgggggagcccgcguuguggcagug

SEQ ID NO: 273090 - RNA, 32 nt, Homo Sapiens
caggcuuuucuuuuccaaccuuuauacguugc

SEQ ID NO: 273091 - RNA, 32 nt, Homo Sapiens
ggacgugauaugccuguaucuguuuuuaauuu

SEQ ID NO: 273092 - RNA, 29 nt, Homo Sapiens
gaaugccauauaaauggaauuauauagaa

SEQ ID NO: 273093 - RNA, 32 nt, Homo Sapiens
aagucaaucaaucccaacuccuguaauccaug

SEQ ID NO: 273094 - RNA, 32 nt, Homo Sapiens
gcgcgccccucgcaccgcagccagugccgacc

SEQ ID NO: 273095 - RNA, 32 nt, Homo Sapiens
guuugucaagcaacuaucgacuugaucaguuc

SEQ ID NO: 273096 - RNA, 32 nt, Homo Sapiens
auagacauaaccucaaaguacuucacuuauuc

SEQ ID NO: 273097 - RNA, 32 nt, Homo Sapiens
cuccagccuggcaucuggccgcggcggucucc

SEQ ID NO: 273098 - RNA, 32 nt, Homo Sapiens
ugaucuguucuaucagccugcccgcugcuaga

SEQ ID NO: 273099 - RNA, 32 nt, Homo Sapiens
aucucagcuguugaagagugggcuuggaauca

SEQ ID NO: 273100 - RNA, 32 nt, Homo Sapiens
gauucugcgaaauagacggaccucuccacccc

SEQ ID NO: 273101 - RNA, 32 nt, Homo Sapiens
ggggcgcaacguucgauuucuaccucagcagc

SEQ ID NO: 273102 - RNA, 32 nt, Homo Sapiens
gggcgcgcucagccucgcucuccccgggacuc

SEQ ID NO: 273103 - RNA, 32 nt, Homo Sapiens
ucacaaguaaaaauggcuuuuuauuuagauuc

SEQ ID NO: 273104 - RNA, 32 nt, Homo Sapiens
uuaugguggugaugaaggccuggaggagcagg

SEQ ID NO: 273105 - RNA, 32 nt, Homo Sapiens
cuccauuuuuaaauuuuuguuguuuucuagcc

SEQ ID NO: 273106 - RNA, 32 nt, Homo Sapiens
aaacauuuaugaacuaaggagguacuuaagug

SEQ ID NO: 273107 - RNA, 32 nt, Homo Sapiens
cugcgcgcgggaagauggcggaacaggcuacc

SEQ ID NO: 273108 - RNA, 32 nt, Homo Sapiens
cacccuguuccucucccauguggucccaucau

SEQ ID NO: 273109 - RNA, 32 nt, Homo Sapiens
caucgaagggaaggguggggggcagcugcggu

SEQ ID NO: 273110 - RNA, 32 nt, Homo Sapiens
aagagaggagaauaugggacuccaugaaccag

SEQ ID NO: 273111 - RNA, 32 nt, Homo Sapiens
uggggaaccccugacccucccccagggccuug

SEQ ID NO: 273112 - RNA, 32 nt, Homo Sapiens
ccgguugccacucuccuccccucccucagaga

SEQ ID NO: 273113 - RNA, 32 nt, Homo Sapiens
ccaccucuaaauucuguaaaauuauagacuug

SEQ ID NO: 273114 - RNA, 32 nt, Homo Sapiens
ccuauaggugguucaacguggaggaagguugg

SEQ ID NO: 273115 - RNA, 32 nt, Homo Sapiens
aaaaaucagaauaagaaguaccugacauacuu

SEQ ID NO: 273116 - RNA, 32 nt, Homo Sapiens
uggcacgauauuaauauuuuggaaguaaucau

SEQ ID NO: 273117 - RNA, 32 nt, Homo Sapiens
uuuucaucugcacugccaugucugagugguug

SEQ ID NO: 273118 - RNA, 32 nt, Homo Sapiens
cauuugggccugccuggcaugacuguuuccag

SEQ ID NO: 273119 - RNA, 32 nt, Homo Sapiens
cuucuguggcaccagauuccacccugggaacu

SEQ ID NO: 273120 - RNA, 32 nt, Homo Sapiens
uuguauauauugcagauuugccuuuuuaaaaa

SEQ ID NO: 273121 - RNA, 32 nt, Homo Sapiens
aggaggaaaaggaaagcguuuuuguagcccac

SEQ ID NO: 273122 - RNA, 32 nt, Homo Sapiens
cagucuggaaagugaugucagaauagcuucca

SEQ ID NO: 273123 - RNA, 30 nt, Homo Sapiens
gagcucgcggcgcagcagcggagcgagcgc

SEQ ID NO: 273124 - RNA, 32 nt, Homo Sapiens
gguugugaauagcuuagguuugguaaacuuag

SEQ ID NO: 273125 - RNA, 32 nt, Homo Sapiens
ggcugugccugccugugcccagcaaccugugc

SEQ ID NO: 273126 - RNA, 32 nt, Homo Sapiens
cucugaugaaaaauugcugacuguagcuuugg

SEQ ID NO: 273127 - RNA, 32 nt, Homo Sapiens
augcuguacaucuauuuuggauuguauauugu

SEQ ID NO: 273128 - RNA, 32 nt, Homo Sapiens
cggucucaacuuuuaaacuugguuuaagcauu

SEQ ID NO: 273129 - RNA, 32 nt, Homo Sapiens
ugaccgaggggguggggacugagccgcccgcc

SEQ ID NO: 273130 - RNA, 32 nt, Homo Sapiens
ugccugauggaagugacucaacaaagagccaa

SEQ ID NO: 273131 - RNA, 32 nt, Homo Sapiens
ccaggggagauuccagccagacacccgccccc

SEQ ID NO: 273132 - RNA, 32 nt, Homo Sapiens
uuucauggagaggucugcauuuagacggaaac

SEQ ID NO: 273133 - RNA, 31 nt, Homo Sapiens
gugccuuucaucagaaagucaaucuucaguu

SEQ ID NO: 273134 - RNA, 32 nt, Homo Sapiens
uuucugaaaaaaucauacaacuuugugcuucu

SEQ ID NO: 273135 - RNA, 32 nt, Homo Sapiens
ccgccgccgcggggcgggcgcgaugccacgau

SEQ ID NO: 273136 - RNA, 32 nt, Homo Sapiens
aaaaugggacuguggaaauaaaguauaugugu

SEQ ID NO: 273137 - RNA, 32 nt, Homo Sapiens
gaccuauccagucuucaaggugcuccagaaag

SEQ ID NO: 273138 - RNA, 32 nt, Homo Sapiens
acccggagcgggaagauggcggcggcgcagga

SEQ ID NO: 273139 - RNA, 32 nt, Homo Sapiens
gcaaaaugauacagccacuuugaaacaccauu

SEQ ID NO: 273140 - RNA, 32 nt, Homo Sapiens
cucuccuccucgcgccccaccucccccgagag

SEQ ID NO: 273141 - RNA, 32 nt, Homo Sapiens
uuugagggaacagggucgacccugcccccuug

SEQ ID NO: 273142 - RNA, 32 nt, Homo Sapiens
cuccauucaaggacuacugucuuacuucauua

SEQ ID NO: 273143 - RNA, 32 nt, Homo Sapiens
auuuggaggaagagucugagcaggguuggaaa

SEQ ID NO: 273144 - RNA, 32 nt, Homo Sapiens
cccccugauccucccuggggaccccuguggcc

SEQ ID NO: 273145 - RNA, 32 nt, Homo Sapiens
ugcucaugcuucaggaccuuguuugucgaaga

SEQ ID NO: 273146 - RNA, 32 nt, Homo Sapiens
aaguaggcaaaugugaaaauaguuucaauaua

SEQ ID NO: 273147 - RNA, 32 nt, Homo Sapiens
gcaccuaggagcgcagcggagccccgacaccg

SEQ ID NO: 273148 - RNA, 32 nt, Homo Sapiens
cagguuguugguguggagcaaagggaaagcag

SEQ ID NO: 273149 - RNA, 32 nt, Homo Sapiens
gacuuccugugggacaagcgcacgggccucgc

SEQ ID NO: 273150 - RNA, 32 nt, Homo Sapiens
cccacauccuccauccugacugcagcaugggg

SEQ ID NO: 273151 - RNA, 32 nt, Homo Sapiens
caaggcucccagcagagcuccacagccuagag

SEQ ID NO: 273152 - RNA, 32 nt, Homo Sapiens
cuaggacaccgacaccagucauaguggauuaa

SEQ ID NO: 273153 - RNA, 32 nt, Homo Sapiens
acauuggcgaucaaccugaccggagcccgcca

SEQ ID NO: 273154 - RNA, 32 nt, Homo Sapiens
cacagguuuggcuuccggucagugucccgaca

SEQ ID NO: 273155 - RNA, 32 nt, Homo Sapiens
uaaugaggugacugaguggaagcugagguuag

SEQ ID NO: 273156 - RNA, 32 nt, Homo Sapiens
ugcuuccaccacauuguccugauccuuugcuc

SEQ ID NO: 273157 - RNA, 32 nt, Homo Sapiens
uaagaggccauagcaccgaaaagcagcguggg

SEQ ID NO: 273158 - RNA, 32 nt, Homo Sapiens
gaaggcgggcugagcccggcgccgggaggagu

SEQ ID NO: 273159 - RNA, 32 nt, Homo Sapiens
gccucugccaccagcccugcuggccccugguu

SEQ ID NO: 273160 - RNA, 32 nt, Homo Sapiens
ugugcgggaaucagcucugcagcuguguccag

SEQ ID NO: 273161 - RNA, 32 nt, Homo Sapiens
ccccuccccggcagcaggccggggcggagcag

SEQ ID NO: 273162 - RNA, 32 nt, Homo Sapiens
ucagugaugugaagaaagaggaggaggagcgc

SEQ ID NO: 273163 - RNA, 32 nt, Homo Sapiens
ccucccugccccacccaucccugcaaagccau

SEQ ID NO: 273164 - RNA, 30 nt, Homo Sapiens
ggggaggggaagcuugagcugcugcuguca

SEQ ID NO: 273165 - RNA, 28 nt, Homo Sapiens
uugacaacagaauaacauuuggaaauug

SEQ ID NO: 273166 - RNA, 32 nt, Homo Sapiens
auggggugcugggucagcaugccaaacccaag

SEQ ID NO: 273167 - RNA, 32 nt, Homo Sapiens
aggcuggguguccuagagaaccccaagaugaa

SEQ ID NO: 273168 - RNA, 32 nt, Homo Sapiens
ggucugauagugggcaagguguguagccucuu

SEQ ID NO: 273169 - RNA, 32 nt, Homo Sapiens
guugccaccccaacccaauaaaacugauguua

SEQ ID NO: 273170 - RNA, 32 nt, Homo Sapiens
ccccuacuacuaucucccacucuagauaaagc

SEQ ID NO: 273171 - RNA, 32 nt, Homo Sapiens
ucuugguacuguuuccuccucuguucccaaau

SEQ ID NO: 273172 - RNA, 32 nt, Homo Sapiens
uuacauuuuuaaagguacacugguauuuauau

SEQ ID NO: 273173 - RNA, 32 nt, Homo Sapiens
cuccagcucugccccaggcuccuccuagacuc

SEQ ID NO: 273174 - RNA, 32 nt, Homo Sapiens
aguaaggaaucuuucauaaacacaccucaguu

SEQ ID NO: 273175 - RNA, 32 nt, Homo Sapiens
uugccuuuauguuuuguuuucuuuuuuacagg

SEQ ID NO: 273176 - RNA, 32 nt, Homo Sapiens
ccuguuggugaccccuguauucacaccugaac

SEQ ID NO: 273177 - RNA, 32 nt, Homo Sapiens
uaaaggugguuuuuuuuuuuuaaauuuugcuu

SEQ ID NO: 273178 - RNA, 32 nt, Homo Sapiens
auugggugggauuuuuucccuuuuuauguggg

SEQ ID NO: 273179 - RNA, 32 nt, Homo Sapiens
gaagaagccagagguagcggccccagccccag

SEQ ID NO: 273180 - RNA, 32 nt, Homo Sapiens
aacaaaaaccaagcaaacuucuacacagcuaa

SEQ ID NO: 273181 - RNA, 29 nt, Homo Sapiens
uaugaagaauaaaaauauauacacaguua

SEQ ID NO: 273182 - RNA, 30 nt, Homo Sapiens
uccccaugacaccaccugaacgucucuucc

SEQ ID NO: 273183 - RNA, 32 nt, Homo Sapiens
agucacagggucgaauacuacugcacagcaac

SEQ ID NO: 273184 - RNA, 32 nt, Homo Sapiens
accgccugcccccagcucaucccagagcgucc

SEQ ID NO: 273185 - RNA, 32 nt, Homo Sapiens
gaaaaaugaagaugaaagacagaugaagaugu

SEQ ID NO: 273186 - RNA, 32 nt, Homo Sapiens
caaggcgccgggccccggggccaugcucuuau

SEQ ID NO: 273187 - RNA, 32 nt, Homo Sapiens
uuuuaaagucagacgcagcaaaaacuguuuca

SEQ ID NO: 273188 - RNA, 32 nt, Homo Sapiens
augaggggccuggccuggcagcccccgggcug

SEQ ID NO: 273189 - RNA, 32 nt, Homo Sapiens
acauugugguauaauauugcaagauguuacca

SEQ ID NO: 273190 - RNA, 27 nt, Homo Sapiens
ccgcugccguucuucagccggcccugg

SEQ ID NO: 273191 - RNA, 32 nt, Homo Sapiens
acgggagccacuuuucccagccuguguuuuca

SEQ ID NO: 273192 - RNA, 32 nt, Homo Sapiens
agccuccgucuuuguaucccagccccuagccc

SEQ ID NO: 273193 - RNA, 32 nt, Homo Sapiens
uucucgcaccagaauuauccacagcaacugcu

SEQ ID NO: 273194 - RNA, 32 nt, Homo Sapiens
aagaaauguaauuauaaaucuacaucaaacag

SEQ ID NO: 273195 - RNA, 32 nt, Homo Sapiens
ggcugggcgugguggcucacgcuuguaauccc

SEQ ID NO: 273196 - RNA, 32 nt, Homo Sapiens
ggccgggcgugguggcucaugccuguaaucuc

SEQ ID NO: 273197 - RNA, 31 nt, Homo Sapiens
uuauuaagggacucugcaggaguuuaaaaug

SEQ ID NO: 273198 - RNA, 32 nt, Homo Sapiens
uuaucaggguugcuccgaguguguguuccagg

SEQ ID NO: 273199 - RNA, 32 nt, Homo Sapiens
aggccuaguugaaguuuaaaccccagcaaaac

SEQ ID NO: 273200 - RNA, 31 nt, Homo Sapiens
cugccgcggcgcagccaggccggcgaccacc

SEQ ID NO: 273201 - RNA, 32 nt, Homo Sapiens
agacuuucaggauuaagcgauuccuggccaag

SEQ ID NO: 273202 - RNA, 32 nt, Homo Sapiens
cgugcccccagcguggggcuaacgggcgccuu

SEQ ID NO: 273203 - RNA, 32 nt, Homo Sapiens
agucagacugaaauauaaaaaaggugguggug

SEQ ID NO: 273204 - RNA, 32 nt, Homo Sapiens
uauugauauuacuaugugaugaacugaguaug

SEQ ID NO: 273205 - RNA, 32 nt, Homo Sapiens
ggccucgcugggucucggggaagcagaggacu

SEQ ID NO: 273206 - RNA, 32 nt, Homo Sapiens
aagaugaauacaaacaaaauuuuuguauaaac

SEQ ID NO: 273207 - RNA, 32 nt, Homo Sapiens
ccauucaaggacuacugucuuacuucauuaaa

SEQ ID NO: 273208 - RNA, 32 nt, Homo Sapiens
gcccuguguucgcuguggacgcuguagaggca

SEQ ID NO: 273209 - RNA, 32 nt, Homo Sapiens
ccagguguggaggacuuggucugugaccaccu

SEQ ID NO: 273210 - RNA, 32 nt, Homo Sapiens
uuuuaauguuaaaauauugauuucuacguuau

SEQ ID NO: 273211 - RNA, 32 nt, Homo Sapiens
ccgagcaccucauuugucccaacagcauuacu

SEQ ID NO: 273212 - RNA, 32 nt, Homo Sapiens
gaccucuggccagcuggcuuccgcccuuggug

SEQ ID NO: 273213 - RNA, 32 nt, Homo Sapiens
caguugccagcaguguccccccugccuugggc

SEQ ID NO: 273214 - RNA, 32 nt, Homo Sapiens
ccaggagguccaggccgcaaugagauguguuu

SEQ ID NO: 273215 - RNA, 32 nt, Homo Sapiens
ccgguguggcugcucgguggccccacacccac

SEQ ID NO: 273216 - RNA, 32 nt, Homo Sapiens
auggcaagggcagugcguggaaaggccgggga

SEQ ID NO: 273217 - RNA, 32 nt, Homo Sapiens
gcuccgcccucccugcuccccauaacagaccc

SEQ ID NO: 273218 - RNA, 32 nt, Homo Sapiens
agcauuuuaagugcagccaugaaauaaguuag

SEQ ID NO: 273219 - RNA, 32 nt, Homo Sapiens
uauucugauggcaaaacaaguggaagaaaaga

SEQ ID NO: 273220 - RNA, 32 nt, Homo Sapiens
uccccaccgagacgcgccggcggaccgcgggc

SEQ ID NO: 273221 - RNA, 27 nt, Homo Sapiens
gcccaguccuucuccugcccgagagau

SEQ ID NO: 273222 - RNA, 32 nt, Homo Sapiens
cuucuucuuuugccaauuccacuauuguuugg

SEQ ID NO: 273223 - RNA, 32 nt, Homo Sapiens
ggguugaagauaaguaagggagcaaugucuau

SEQ ID NO: 273224 - RNA, 32 nt, Homo Sapiens
ugcauaccaaccccuccuuuacccacguuggg

SEQ ID NO: 273225 - RNA, 32 nt, Homo Sapiens
uagacaaaauuaacaaaaucagacauguuauu

SEQ ID NO: 273226 - RNA, 32 nt, Homo Sapiens
aagcuguucugaauuuauccacaguaauauag

SEQ ID NO: 273227 - RNA, 32 nt, Homo Sapiens
ccuggggcccuccacgcuggccgggcugugua

SEQ ID NO: 273228 - RNA, 32 nt, Homo Sapiens
uucucaggcugauguugagugucuguagcuuu

SEQ ID NO: 273229 - RNA, 32 nt, Homo Sapiens
aucuugucugucuccacucucauuccaggcaa

SEQ ID NO: 273230 - RNA, 32 nt, Homo Sapiens
gcuggcuccuccgcgcgucgccggcgcuccac

SEQ ID NO: 273231 - RNA, 32 nt, Homo Sapiens
aaaaaucuauauucuuuuuuuuuuugacacag

SEQ ID NO: 273232 - RNA, 32 nt, Homo Sapiens
acauucuuagaagaguuucaaaaguuuuaugu

SEQ ID NO: 273233 - RNA, 32 nt, Homo Sapiens
uugcaauagucuuuuugaguaaagucucucuu

SEQ ID NO: 273234 - RNA, 32 nt, Homo Sapiens
uccaucagguaguugugagugcacugaauuuu

SEQ ID NO: 273235 - RNA, 32 nt, Homo Sapiens
cugauaagcacuuuuuaaauggcucuaagaau

SEQ ID NO: 273236 - RNA, 32 nt, Homo Sapiens
agccgggugcgguggcgggcaccuguaguccc

SEQ ID NO: 273237 - RNA, 32 nt, Homo Sapiens
ccaaaaaauuaaaacgaaaauaaaguagcugc

SEQ ID NO: 273238 - RNA, 32 nt, Homo Sapiens
agccgggcgcgguggugggcaccuguaguccc

SEQ ID NO: 273239 - RNA, 32 nt, Homo Sapiens
cccaggcccuucucagccccccggccgcggcc

SEQ ID NO: 273240 - RNA, 31 nt, Homo Sapiens
guaguuaaggggcaaaaguccauucucauuu

SEQ ID NO: 273241 - RNA, 32 nt, Homo Sapiens
uucgauuuuuaaaaauacuuuuccauguuuuc

SEQ ID NO: 273242 - RNA, 32 nt, Homo Sapiens
caauuccaauccuuuuucuguaccucacgcgc

SEQ ID NO: 273243 - RNA, 32 nt, Homo Sapiens
caaugagauauacuaaacaaugagauucuaua

SEQ ID NO: 273244 - RNA, 32 nt, Homo Sapiens
cuuuucguaguuuuugucaugucugucaacuu

SEQ ID NO: 273245 - RNA, 32 nt, Homo Sapiens
cccccacccaggacggcugugaugagguggcc

SEQ ID NO: 273246 - RNA, 32 nt, Homo Sapiens
uccaagaugaagauguggucccugcccuugag

SEQ ID NO: 273247 - RNA, 32 nt, Homo Sapiens
cugaccaaccuuucccagggcggcaccgauca

SEQ ID NO: 273248 - RNA, 32 nt, Homo Sapiens
aagugacucugauacauaagcaucauaggaaa

SEQ ID NO: 273249 - RNA, 32 nt, Homo Sapiens
uaccagaauggaaacauacagcuccuuaaugu

SEQ ID NO: 273250 - RNA, 32 nt, Homo Sapiens
uguaaaggccaaucaaugcacugucuguccuc

SEQ ID NO: 273251 - RNA, 32 nt, Homo Sapiens
gcacaccugaaucagcuggacauacugcugga

SEQ ID NO: 273252 - RNA, 32 nt, Homo Sapiens
ccuuucagcaucuuucuuuggaggaagauugg

SEQ ID NO: 273253 - RNA, 30 nt, Homo Sapiens
aauucugucugugguacgugguuccuuccu

SEQ ID NO: 273254 - RNA, 32 nt, Homo Sapiens
gaaaauacugaacauagcuguauagguuugug

SEQ ID NO: 273255 - RNA, 32 nt, Homo Sapiens
uagaauuaagauaacuaugauuuuauagcuuu

SEQ ID NO: 273256 - RNA, 32 nt, Homo Sapiens
cuucuccgcccauucugacccagggccuagga

SEQ ID NO: 273257 - RNA, 32 nt, Homo Sapiens
caugcccccacuuccccacaggugaaaguuuu

SEQ ID NO: 273258 - RNA, 32 nt, Homo Sapiens
ugucccuuguauaccacugugcuugcacuaca

SEQ ID NO: 273259 - RNA, 32 nt, Homo Sapiens
uugugugcuguaaaggauuuuaggaggaauuu

SEQ ID NO: 273260 - RNA, 32 nt, Homo Sapiens
ucaguguaagaucugcugggaacagggccacc

SEQ ID NO: 273261 - RNA, 32 nt, Homo Sapiens
auuguugaauucauaaucauggucucauuucc

SEQ ID NO: 273262 - RNA, 32 nt, Homo Sapiens
ccacggccccgcagagcagcucgggccgcugg

SEQ ID NO: 273263 - RNA, 32 nt, Homo Sapiens
aauuuauuuaacaccuaagccuuuuuguagac

SEQ ID NO: 273264 - RNA, 32 nt, Homo Sapiens
ggcgcggaggagagggcgcagggguccuucug

SEQ ID NO: 273265 - RNA, 32 nt, Homo Sapiens
agcgcggauuguaagugcugcagcugugcccg

SEQ ID NO: 273266 - RNA, 32 nt, Homo Sapiens
guccucacagaaaauugaagacuugauggaaa

SEQ ID NO: 273267 - RNA, 32 nt, Homo Sapiens
gagcccagccccagcccgggguccauugccca

SEQ ID NO: 273268 - RNA, 32 nt, Homo Sapiens
acggucccgagccauggggguguugaugucca

SEQ ID NO: 273269 - RNA, 31 nt, Homo Sapiens
cucugcuguagagccauuuaauguuauuguc

SEQ ID NO: 273270 - RNA, 32 nt, Homo Sapiens
uauugcuuuauuugaaacaaauuaaaauaugc

SEQ ID NO: 273271 - RNA, 32 nt, Homo Sapiens
uuuagcugguaguuuuaauuuggguuuuaguu

SEQ ID NO: 273272 - RNA, 32 nt, Homo Sapiens
auagaaaaguuauuuuucaaaggucaugcagu

SEQ ID NO: 273273 - RNA, 32 nt, Homo Sapiens
ucuacauuuuugggacucgggaauuaugaggu

SEQ ID NO: 273274 - RNA, 32 nt, Homo Sapiens
cugauuuucagaaauuaacauaaaauccagaa

SEQ ID NO: 273275 - RNA, 32 nt, Homo Sapiens
guuuucccaaacuucuucccaucauagcacau

SEQ ID NO: 273276 - RNA, 32 nt, Homo Sapiens
ugcuaggagaacuuguacauuuaugauaaugc

SEQ ID NO: 273277 - RNA, 32 nt, Homo Sapiens
gggcggcacgggagggcggcgcaggagguggg

SEQ ID NO: 273278 - RNA, 32 nt, Homo Sapiens
uggcaaauuugcuucuauggaagauuuuuaau

SEQ ID NO: 273279 - RNA, 32 nt, Homo Sapiens
uuuuauacaaaugucuuaguuguacaaauaaa

SEQ ID NO: 273280 - RNA, 32 nt, Homo Sapiens
ucagccccagccccagcuccagcccugaggac

SEQ ID NO: 273281 - RNA, 32 nt, Homo Sapiens
aaagaagaguaucuucaaaauaugaucuguaa

SEQ ID NO: 273282 - RNA, 32 nt, Homo Sapiens
gucaccugggggcuuuucuggggcugucaacu

SEQ ID NO: 273283 - RNA, 32 nt, Homo Sapiens
uuggcucuggaaaucuaaguucauacugguuu

SEQ ID NO: 273284 - RNA, 32 nt, Homo Sapiens
cucccucaucuccauucucaguuucuucccca

SEQ ID NO: 273285 - RNA, 32 nt, Homo Sapiens
uuuugggggguaaucagcauuauucuucagaa

SEQ ID NO: 273286 - RNA, 32 nt, Homo Sapiens
gcugggcgggaagggugagccccugcaaggug

SEQ ID NO: 273287 - RNA, 32 nt, Homo Sapiens
cuguuuaguagcagugauugucuuaauauugu

SEQ ID NO: 273288 - RNA, 32 nt, Homo Sapiens
cugaaaauccgaagugccgcggaaaguggaga

SEQ ID NO: 273289 - RNA, 32 nt, Homo Sapiens
ccucucuuucccuugaccuauuucaaucauac

SEQ ID NO: 273290 - RNA, 32 nt, Homo Sapiens
agaggcaaagcaugcaaagaaaaaccaaccug

SEQ ID NO: 273291 - RNA, 32 nt, Homo Sapiens
cgcccgcccgacggagacgcagucccagcuau

SEQ ID NO: 273292 - RNA, 32 nt, Homo Sapiens
cuggggaagaacuccaggcgugcggacgcaac

SEQ ID NO: 273293 - RNA, 32 nt, Homo Sapiens
gucuaauauccuguuuuuaacugcuguagggg

SEQ ID NO: 273294 - RNA, 32 nt, Homo Sapiens
uaacacagccagcaguuucccuccugccacga

SEQ ID NO: 273295 - RNA, 32 nt, Homo Sapiens
ucuuugcacuacucuguaaaucuaacauuauu

SEQ ID NO: 273296 - RNA, 31 nt, Homo Sapiens
uccuugaugagugccugccugaugcaagcac

SEQ ID NO: 273297 - RNA, 32 nt, Homo Sapiens
uguauauacaauaacauaauuuguacauaugu

SEQ ID NO: 273298 - RNA, 31 nt, Homo Sapiens
cucccucaggcagcccaaccauccagaauga

SEQ ID NO: 273299 - RNA, 32 nt, Homo Sapiens
ucaccuaccuuugcaccaacuaccuuuucaga

SEQ ID NO: 273300 - RNA, 32 nt, Homo Sapiens
gagcaguugaaccugggaacaaaccucacuug

SEQ ID NO: 273301 - RNA, 32 nt, Homo Sapiens
uaaauguuucuuuucccuuaaauacagauaau

SEQ ID NO: 273302 - RNA, 31 nt, Homo Sapiens
gaagaccaagagguuuacuguugaugcuuag

SEQ ID NO: 273303 - RNA, 32 nt, Homo Sapiens
ucguccugccagccgccaugccguugcgaggc

SEQ ID NO: 273304 - RNA, 32 nt, Homo Sapiens
ugcaugucagcgagcgacacugucccugccuc

SEQ ID NO: 273305 - RNA, 31 nt, Homo Sapiens
ccauugaaauaaaugucugccaugucagcac

SEQ ID NO: 273306 - RNA, 29 nt, Homo Sapiens
uacuguucuaaauuauucaggccuauagu

SEQ ID NO: 273307 - RNA, 32 nt, Homo Sapiens
cccgccccguccccgggcgucuccauuuuggu

SEQ ID NO: 273308 - RNA, 28 nt, Homo Sapiens
cuucagugagcaggaccagcugccuuuc

SEQ ID NO: 273309 - RNA, 32 nt, Homo Sapiens
gcugacaacugggauagggaggggauuagaua

SEQ ID NO: 273310 - RNA, 32 nt, Homo Sapiens
aggcggagaaguacaaucugguccugggggcc

SEQ ID NO: 273311 - RNA, 32 nt, Homo Sapiens
aacaaauccgccacuuucaugacuagaguuga

SEQ ID NO: 273312 - RNA, 32 nt, Homo Sapiens
uguucaaaaguaccuuagccacuuagccuugu

SEQ ID NO: 273313 - RNA, 32 nt, Homo Sapiens
gcggccgccccggcuccucgccucccccacuu

SEQ ID NO: 273314 - RNA, 32 nt, Homo Sapiens
cggagccagaggauuggcucuggggcagcagg

SEQ ID NO: 273315 - RNA, 32 nt, Homo Sapiens
gaucuuauuuaguuauuugaaucugucuuagc

SEQ ID NO: 273316 - RNA, 31 nt, Homo Sapiens
ugggcagaaguguaggguucaguguguccug

SEQ ID NO: 273317 - RNA, 32 nt, Homo Sapiens
ggccauaugugcucagggacgugcuucucuug

SEQ ID NO: 273318 - RNA, 29 nt, Homo Sapiens
acguggaguaucuggcugggcagcauugc

SEQ ID NO: 273319 - RNA, 32 nt, Homo Sapiens
aacuccucagcagcgccuccuucagcuccaca

SEQ ID NO: 273320 - RNA, 32 nt, Homo Sapiens
aacucacuuuccuuuguagaaacaagggccag

SEQ ID NO: 273321 - RNA, 32 nt, Homo Sapiens
caccugaggcugguuucuuucaugcuccuuac

SEQ ID NO: 273322 - RNA, 32 nt, Homo Sapiens
ugucaagcaaucaagaaacaaacaaaagcuga

SEQ ID NO: 273323 - RNA, 32 nt, Homo Sapiens
acacgcacacacacacacacaaacacacgcgc

SEQ ID NO: 273324 - RNA, 32 nt, Homo Sapiens
accugaaaugacuacccuuuucugggggacaa

SEQ ID NO: 273325 - RNA, 32 nt, Homo Sapiens
uugaggcggagcccucaguucccggccaggac

SEQ ID NO: 273326 - RNA, 32 nt, Homo Sapiens
uucaagccauucuccugucucagccuccugag

SEQ ID NO: 273327 - RNA, 32 nt, Homo Sapiens
acucagaaacuuacugcaguuuuuaaguuaug

SEQ ID NO: 273328 - RNA, 32 nt, Homo Sapiens
aucccaaaacaucauuuucaaucaguagagaa

SEQ ID NO: 273329 - RNA, 32 nt, Homo Sapiens
uugaggucagcaguuugagaccagccuggcca

SEQ ID NO: 273330 - RNA, 32 nt, Homo Sapiens
ugccuguaauccuagcacuuuggaaggucgag

SEQ ID NO: 273331 - RNA, 32 nt, Homo Sapiens
accacccuucaccacacccuccugcgcucagg

SEQ ID NO: 273332 - RNA, 32 nt, Homo Sapiens
auauaauucauccacguaaccaaaaaccacuu

SEQ ID NO: 273333 - RNA, 32 nt, Homo Sapiens
auaauucuguuguguggaacuaucaagcuaag

SEQ ID NO: 273334 - RNA, 32 nt, Homo Sapiens
uauagaaaaugucacugaauuuuuucauauuu

SEQ ID NO: 273335 - RNA, 32 nt, Homo Sapiens
gagaaggacaccuggucaagaacguggaccac

SEQ ID NO: 273336 - RNA, 32 nt, Homo Sapiens
aaaacaaaaaagaagaauaaaauaauuuggau

SEQ ID NO: 273337 - RNA, 32 nt, Homo Sapiens
agccucccaccuuuauuuuuuauuuuccuaau

SEQ ID NO: 273338 - RNA, 32 nt, Homo Sapiens
ucccugccugaagagggacagggacuggggcu

SEQ ID NO: 273339 - RNA, 32 nt, Homo Sapiens
caagguuuuauuguuuuuuagaucaucaacag

SEQ ID NO: 273340 - RNA, 32 nt, Homo Sapiens
agucucccaagccuggcauguggcccucugga

SEQ ID NO: 273341 - RNA, 32 nt, Homo Sapiens
auacccagggaggggagcaacacacacugggg

SEQ ID NO: 273342 - RNA, 32 nt, Homo Sapiens
aagaguugagguugcuaauaauuuauacugga

SEQ ID NO: 273343 - RNA, 32 nt, Homo Sapiens
aaaaacauuuuauuaaacaaguagacauuuug

SEQ ID NO: 273344 - RNA, 31 nt, Homo Sapiens
gccgcggagcccccggagauggagggugaag

SEQ ID NO: 273345 - RNA, 32 nt, Homo Sapiens
agggccugggaguuggggggugcccaacgcaa

SEQ ID NO: 273346 - RNA, 32 nt, Homo Sapiens
caacauggaauuugcacuguuaacucauuauu

SEQ ID NO: 273347 - RNA, 32 nt, Homo Sapiens
aaccaaucaaggaacuuacucuauucagugga

SEQ ID NO: 273348 - RNA, 32 nt, Homo Sapiens
guacacacagaaaaugguauaaaauaugagaa

SEQ ID NO: 273349 - RNA, 32 nt, Homo Sapiens
guaccuuugccguggguucaagcgauucuccu

SEQ ID NO: 273350 - RNA, 32 nt, Homo Sapiens
cuccugccucaggcuccugaguagcuaggauu

SEQ ID NO: 273351 - RNA, 32 nt, Homo Sapiens
gguuacagaugcauauguccaauauaaaauag

SEQ ID NO: 273352 - RNA, 32 nt, Homo Sapiens
uuugaagaaaaaaggaaaaggauauacuaauc

SEQ ID NO: 273353 - RNA, 32 nt, Homo Sapiens
gaugcuuuuuucauuacucuuuauuuaaauau

SEQ ID NO: 273354 - RNA, 32 nt, Homo Sapiens
ugcagaaaacauuguuccagauucaaucgacu

SEQ ID NO: 273355 - RNA, 32 nt, Homo Sapiens
aaacgaaaacaauuucuacgagguuauaugug

SEQ ID NO: 273356 - RNA, 32 nt, Homo Sapiens
accaguagccgcggcugcuucgguugccgcgg

SEQ ID NO: 273357 - RNA, 32 nt, Homo Sapiens
ugacugaaaaagacacuguauuauuuaccaaa

SEQ ID NO: 273358 - RNA, 32 nt, Homo Sapiens
ugugcaaugaaguggaaugauaaacaguaugc

SEQ ID NO: 273359 - RNA, 32 nt, Homo Sapiens
uggcuaacuuuuuuuucuuuuugagacggagu

SEQ ID NO: 273360 - RNA, 32 nt, Homo Sapiens
guaauaugcggcccagccuauaaacagccucc

SEQ ID NO: 273361 - RNA, 32 nt, Homo Sapiens
cugaaggugggggauuuuguaccuguuuguac

SEQ ID NO: 273362 - RNA, 32 nt, Homo Sapiens
aacugaaauuuguuuucuuuuauggcaugauu

SEQ ID NO: 273363 - RNA, 32 nt, Homo Sapiens
uuuaaacgcaaugugcugaaacaucaauggau

SEQ ID NO: 273364 - RNA, 32 nt, Homo Sapiens
aggcccuagcuuucuucagcccuugggucagg

SEQ ID NO: 273365 - RNA, 32 nt, Homo Sapiens
ugcaaauaauuucugugcuucaaggagcuuca

SEQ ID NO: 273366 - RNA, 32 nt, Homo Sapiens
ugggacugccagcggagaguccgcgggaggug

SEQ ID NO: 273367 - RNA, 32 nt, Homo Sapiens
guggacugacauuucagaaagggauguuguga

SEQ ID NO: 273368 - RNA, 32 nt, Homo Sapiens
aaaacagugucuagugaagacgacaagaaaga

SEQ ID NO: 273369 - RNA, 32 nt, Homo Sapiens
ccuuagaaaaagaaucauggagaaguauguua

SEQ ID NO: 273370 - RNA, 32 nt, Homo Sapiens
gggaauaaguuauacagaagauauuuaauaca

SEQ ID NO: 273371 - RNA, 32 nt, Homo Sapiens
cucaugguguggcuaaucuacauuuaucaaua

SEQ ID NO: 273372 - RNA, 32 nt, Homo Sapiens
ccucugaagcgguccaggauccugcacauggc

SEQ ID NO: 273373 - RNA, 32 nt, Homo Sapiens
cuccuugucagucggcgccgcgugcgggcugg

SEQ ID NO: 273374 - RNA, 32 nt, Homo Sapiens
acuccccugcuuaauaaacucuaaaaauccac

SEQ ID NO: 273375 - RNA, 32 nt, Homo Sapiens
ccuaucccauccccaucauccucuucacaggg

SEQ ID NO: 273376 - RNA, 32 nt, Homo Sapiens
ucuccgaaucggcuccgcacagcuaggagaaa

SEQ ID NO: 273377 - RNA, 32 nt, Homo Sapiens
cucuuuacuccauucacagccaugcacgcgcu

SEQ ID NO: 273378 - RNA, 32 nt, Homo Sapiens
uguagguuauuaugauuagcuuugucacuguu

SEQ ID NO: 273379 - RNA, 32 nt, Homo Sapiens
gugccccauccucauuacagaugacacacugg

SEQ ID NO: 273380 - RNA, 32 nt, Homo Sapiens
gguuguauauauauguaaauuauauuucuaag

SEQ ID NO: 273381 - RNA, 32 nt, Homo Sapiens
ggccuccucaaccuccucccagccuccuacua

SEQ ID NO: 273382 - RNA, 32 nt, Homo Sapiens
gcaaccuagcuaaaaggugcugauauuuuauu

SEQ ID NO: 273383 - RNA, 32 nt, Homo Sapiens
ccccaggcccaccgugcauggugugggcggga

SEQ ID NO: 273384 - RNA, 32 nt, Homo Sapiens
gaucggcaggauguuagggcagcagcagcagc

SEQ ID NO: 273385 - RNA, 32 nt, Homo Sapiens
gcaggggccaggcccgucuccuccccuugggg

SEQ ID NO: 273386 - RNA, 32 nt, Homo Sapiens
gccuguaaacacaccuaagaaaauaaacauuu

SEQ ID NO: 273387 - RNA, 32 nt, Homo Sapiens
cagguggagacggggggcugcaccugaacauu

SEQ ID NO: 273388 - RNA, 32 nt, Homo Sapiens
gccgguagaaaggaugacgccucaacccucgg

SEQ ID NO: 273389 - RNA, 32 nt, Homo Sapiens
ccucuggacagaaugcagguccaaccacgcug

SEQ ID NO: 273390 - RNA, 32 nt, Homo Sapiens
gccaggcuggacgcuuccugugggaguccccu

SEQ ID NO: 273391 - RNA, 32 nt, Homo Sapiens
gcggccgucaggcuacugucugugauucuuuu

SEQ ID NO: 273392 - RNA, 32 nt, Homo Sapiens
ugccgcuguccccgccgcggccgcccgcgaca

SEQ ID NO: 273393 - RNA, 32 nt, Homo Sapiens
agaaaccugugcuuacagaaagaaacacgugc

SEQ ID NO: 273394 - RNA, 32 nt, Homo Sapiens
acuguccaacuuuggcccaggcuuguccaugc

SEQ ID NO: 273395 - RNA, 28 nt, Homo Sapiens
ugaaugaaagauuaaacagaugaugaga

SEQ ID NO: 273396 - RNA, 32 nt, Homo Sapiens
ggguaugaggaucaaaucaugacugcuauagc

SEQ ID NO: 273397 - RNA, 32 nt, Homo Sapiens
caccccaaacuccucaaaucaaaagccuucaa

SEQ ID NO: 273398 - RNA, 32 nt, Homo Sapiens
cucagaggggaagagggugcuaguaccaacac

SEQ ID NO: 273399 - RNA, 32 nt, Homo Sapiens
uaaaaagucaguuuucuuuuauaugcagccua

SEQ ID NO: 273400 - RNA, 32 nt, Homo Sapiens
acgugggaaggaagaaaaaaggcuacugagua

SEQ ID NO: 273401 - RNA, 32 nt, Homo Sapiens
aacggcgguauaauacaaacccuaacaacucc

SEQ ID NO: 273402 - RNA, 32 nt, Homo Sapiens
uccuugucccugggcucuggccaacccucaga

SEQ ID NO: 273403 - RNA, 32 nt, Homo Sapiens
uguuuuuuaaacaaaaauauuguccgaagcuc

SEQ ID NO: 273404 - RNA, 32 nt, Homo Sapiens
aucaucugcuccaaagccaggcuaggacaucu

SEQ ID NO: 273405 - RNA, 28 nt, Homo Sapiens
cagagaguggcuaguagaugauagaagg

SEQ ID NO: 273406 - RNA, 32 nt, Homo Sapiens
cuguggccaugucugcuucuuuucucugauua

SEQ ID NO: 273407 - RNA, 32 nt, Homo Sapiens
guuccuccugauucucuuuucucuucguggcg

SEQ ID NO: 273408 - RNA, 32 nt, Homo Sapiens
gcacagggguggcuaguuggggccuggggcag

SEQ ID NO: 273409 - RNA, 32 nt, Homo Sapiens
ugugcuuuuggugaaagaauuaaugaacucca

SEQ ID NO: 273410 - RNA, 32 nt, Homo Sapiens
ugucuggcggggaacagggaccaagagacaac

SEQ ID NO: 273411 - RNA, 32 nt, Homo Sapiens
ucuuuauacauucuggauauuaacuccuuacc

SEQ ID NO: 273412 - RNA, 32 nt, Homo Sapiens
gccgagucugguuuucuugguuucagaugaua

SEQ ID NO: 273413 - RNA, 32 nt, Homo Sapiens
aggucugagggccagagcugcccucuacauua

SEQ ID NO: 273414 - RNA, 32 nt, Homo Sapiens
ugacugugcuucauaucauguaccucucuagu

SEQ ID NO: 273415 - RNA, 32 nt, Homo Sapiens
ugaaagugcaggagugcuuuugcucugccagu

SEQ ID NO: 273416 - RNA, 32 nt, Homo Sapiens
cagcccugcaggucuuccuucugugggaagcu

SEQ ID NO: 273417 - RNA, 32 nt, Homo Sapiens
ccaaccugggcaauauagugagacccuauuuc

SEQ ID NO: 273418 - RNA, 32 nt, Homo Sapiens
gaagaaagaugaaucuauucaguuuuccugua

SEQ ID NO: 273419 - RNA, 32 nt, Homo Sapiens
ggaaggccgaggugggcagaucaucugaggcc

SEQ ID NO: 273420 - RNA, 32 nt, Homo Sapiens
ucgggguggauuuucguuguccguggaagaac

SEQ ID NO: 273421 - RNA, 32 nt, Homo Sapiens
gggcccaggagccagcaggagaccuuucuugg

SEQ ID NO: 273422 - RNA, 32 nt, Homo Sapiens
auacuauagaaaggagaacacugcauacuuug

SEQ ID NO: 273423 - RNA, 32 nt, Homo Sapiens
cacagaagccccacaccaguugcccagaugaa

SEQ ID NO: 273424 - RNA, 32 nt, Homo Sapiens
ccuugagaauguacauuaauucuuauauuuua

SEQ ID NO: 273425 - RNA, 32 nt, Homo Sapiens
ccuaguuucuuacacacugucuguauaguguc

SEQ ID NO: 273426 - RNA, 32 nt, Homo Sapiens
acauuugugaaugugucuaugagagaggggcc

SEQ ID NO: 273427 - RNA, 32 nt, Homo Sapiens
gagacccccaggcuucagguccugucacagug

SEQ ID NO: 273428 - RNA, 32 nt, Homo Sapiens
accacugucacuuccagcuaaccccguguccc

SEQ ID NO: 273429 - RNA, 32 nt, Homo Sapiens
gccaggauuccauuuguguugcugcuguauuu

SEQ ID NO: 273430 - RNA, 32 nt, Homo Sapiens
ucugguaguuuaaggaaggugauucauggaug

SEQ ID NO: 273431 - RNA, 32 nt, Homo Sapiens
uguccucugucccuuacccagccccaacuccu

SEQ ID NO: 273432 - RNA, 32 nt, Homo Sapiens
aauuuaugccuagcuuuuuuuuucuagguggu

SEQ ID NO: 273433 - RNA, 32 nt, Homo Sapiens
gaaggccuaaggaaacgugucgucuggaaugg

SEQ ID NO: 273434 - RNA, 32 nt, Homo Sapiens
gaucccagaaaaggaaagagggaaggcccugg

SEQ ID NO: 273435 - RNA, 32 nt, Homo Sapiens
gauuuuguggagguucuauucaguaauauggu

SEQ ID NO: 273436 - RNA, 32 nt, Homo Sapiens
guacuggagggagaggcgcgcgggaagaacag

SEQ ID NO: 273437 - RNA, 32 nt, Homo Sapiens
augauguuggaugcuccucacaugcugaguuu

SEQ ID NO: 273438 - RNA, 32 nt, Homo Sapiens
gggcaugcggucgggcaggggcuggagggagg

SEQ ID NO: 273439 - RNA, 32 nt, Homo Sapiens
ccaaucaucuguugauggauagauuccauauc

SEQ ID NO: 273440 - RNA, 32 nt, Homo Sapiens
cgucauuucaucuucacccccaccuccaaaug

SEQ ID NO: 273441 - RNA, 32 nt, Homo Sapiens
aagcuuuccuguuaaauaguagacauuuaaua

SEQ ID NO: 273442 - RNA, 32 nt, Homo Sapiens
gguaguaaacacauuucaucugcugcuucaaa

SEQ ID NO: 273443 - RNA, 32 nt, Homo Sapiens
agcccuucucagcuccacccugcccggggagg

SEQ ID NO: 273444 - RNA, 32 nt, Homo Sapiens
uucuggcagccucuuggugcucuggguaguga

SEQ ID NO: 273445 - RNA, 32 nt, Homo Sapiens
cauguucugcucacuccugucuccaggaagua

SEQ ID NO: 273446 - RNA, 32 nt, Homo Sapiens
guggaaggcaucaaagaugugcucuucuucag

SEQ ID NO: 273447 - RNA, 32 nt, Homo Sapiens
accacaucuauuacuugugauuaauauauucc

SEQ ID NO: 273448 - RNA, 32 nt, Homo Sapiens
ugcaaagguggacaccauucuccagcuucagg

SEQ ID NO: 273449 - RNA, 32 nt, Homo Sapiens
cuagacccgugaccugagaugugugauuuuua

SEQ ID NO: 273450 - RNA, 32 nt, Homo Sapiens
uucagccuaguauuaaaacugauaaaagcaaa

SEQ ID NO: 273451 - RNA, 32 nt, Homo Sapiens
cuucgacguaggcgcugugggcgaaggaaaag

SEQ ID NO: 273452 - RNA, 32 nt, Homo Sapiens
uucuguccuuagaggcacuuugagaaaggaug

SEQ ID NO: 273453 - RNA, 32 nt, Homo Sapiens
aaaugaaaagcaaagaggcucuuuaaggcagc

SEQ ID NO: 273454 - RNA, 32 nt, Homo Sapiens
uucuaaggaaaaugguucuacugcauccuuug

SEQ ID NO: 273455 - RNA, 32 nt, Homo Sapiens
cugcauggucuaaaucuuuguguacuuuauuu

SEQ ID NO: 273456 - RNA, 32 nt, Homo Sapiens
cggccgugcgcucccgcgggacgccacaggcg

SEQ ID NO: 273457 - RNA, 32 nt, Homo Sapiens
cgugcgcugcugagcccuguacuguuaacagu

SEQ ID NO: 273458 - RNA, 32 nt, Homo Sapiens
cccaagucaagccccagcacugccgacuccau

SEQ ID NO: 273459 - RNA, 32 nt, Homo Sapiens
cgcaccgcaggccggcggccgagcucgcgcau

SEQ ID NO: 273460 - RNA, 32 nt, Homo Sapiens
ugauauauuacaauuuucaaggugauaagcuu

SEQ ID NO: 273461 - RNA, 32 nt, Homo Sapiens
ucuagugcuaaauaaaaacucuaucuucaaau

SEQ ID NO: 273462 - RNA, 32 nt, Homo Sapiens
auaaacuauguauauauaagaaccauauuuuc

SEQ ID NO: 273463 - RNA, 32 nt, Homo Sapiens
gagcccuucccggcccuccccagggccccccg

SEQ ID NO: 273464 - RNA, 32 nt, Homo Sapiens
aaggcaaguggaggcagggcgagaucacagga

SEQ ID NO: 273465 - RNA, 32 nt, Homo Sapiens
gcugcccuggugggcucuggccauggcgcucu

SEQ ID NO: 273466 - RNA, 32 nt, Homo Sapiens
gcagggggccgagggcugggccaggcaaucac

SEQ ID NO: 273467 - RNA, 32 nt, Homo Sapiens
cauaguguaucuaugcaguuuauauaaacuac

SEQ ID NO: 273468 - RNA, 32 nt, Homo Sapiens
ugcacucccgcccugaggcccggagccaugcc

SEQ ID NO: 273469 - RNA, 31 nt, Homo Sapiens
aaggagggaaaaugccugcccugccaacauc

SEQ ID NO: 273470 - RNA, 32 nt, Homo Sapiens
acacauagagggaaacaacacacacuggggcc

SEQ ID NO: 273471 - RNA, 32 nt, Homo Sapiens
agggccugccuagcuugcgugcuugaggaagg

SEQ ID NO: 273472 - RNA, 32 nt, Homo Sapiens
gcugggagccagacccuccucccguggaugcc

SEQ ID NO: 273473 - RNA, 32 nt, Homo Sapiens
gagggagaggauuaauccugauuugaacucuu

SEQ ID NO: 273474 - RNA, 32 nt, Homo Sapiens
ccaagcagucagaaucagcaauuugagagaaa

SEQ ID NO: 273475 - RNA, 32 nt, Homo Sapiens
cgggaaucccgcucugcaccgccccaccagac

SEQ ID NO: 273476 - RNA, 32 nt, Homo Sapiens
cacugccccuggacuuucauguuuguagcuug

SEQ ID NO: 273477 - RNA, 32 nt, Homo Sapiens
acccaagaauggcggugcccccugccccgggg

SEQ ID NO: 273478 - RNA, 32 nt, Homo Sapiens
gcaugaauuaauaaccaccauuuuauaccagu

SEQ ID NO: 273479 - RNA, 32 nt, Homo Sapiens
agacccaggagccccaguccccagcauccuga

SEQ ID NO: 273480 - RNA, 32 nt, Homo Sapiens
acgaugccgaggaaacagugacccugagcgaa

SEQ ID NO: 273481 - RNA, 32 nt, Homo Sapiens
cagcucgcgcacccucaucuggagagaggcaa

SEQ ID NO: 273482 - RNA, 32 nt, Homo Sapiens
ggguuuuauagcaagucuccuuccuccauagg

SEQ ID NO: 273483 - RNA, 32 nt, Homo Sapiens
gccugagucuuaguuaucuuuccacucacucc

SEQ ID NO: 273484 - RNA, 32 nt, Homo Sapiens
uaacacagccugugggagacaagcaguuugug

SEQ ID NO: 273485 - RNA, 32 nt, Homo Sapiens
gccuggggccugggucaagggccagucagcag

SEQ ID NO: 273486 - RNA, 32 nt, Homo Sapiens
ucuguucugggaauguuucagcagccaauaag

SEQ ID NO: 273487 - RNA, 32 nt, Homo Sapiens
ugugccccgcccugagagcaguguuucggacg

SEQ ID NO: 273488 - RNA, 32 nt, Homo Sapiens
cuaguuagaauuuuugaaggagggauuacauu

SEQ ID NO: 273489 - RNA, 32 nt, Homo Sapiens
gaucccuacacgggcaggacagaugggcagcu

SEQ ID NO: 273490 - RNA, 32 nt, Homo Sapiens
gggccccgcucccgggcgcguugccgcccagu

SEQ ID NO: 273491 - RNA, 32 nt, Homo Sapiens
ccucaugguuggcaucacauaugccugcaugc

SEQ ID NO: 273492 - RNA, 32 nt, Homo Sapiens
gacaggaagagaggggcaauggcugccgaccc

SEQ ID NO: 273493 - RNA, 32 nt, Homo Sapiens
cuagccuggagaggagcgugcagacgcggcuc

SEQ ID NO: 273494 - RNA, 32 nt, Homo Sapiens
agauucuaacggucuguucuguuucaaggcac

SEQ ID NO: 273495 - RNA, 32 nt, Homo Sapiens
cucuuccauauauggggauaaauaucaccuag

SEQ ID NO: 273496 - RNA, 32 nt, Homo Sapiens
aauaaaucuugguuuugccacauauuagcugu

SEQ ID NO: 273497 - RNA, 32 nt, Homo Sapiens
ccugaagcuccggcugcgucuucccgcagcgc

SEQ ID NO: 273498 - RNA, 32 nt, Homo Sapiens
gggaggagggggagccccggacacacuguggg

SEQ ID NO: 273499 - RNA, 32 nt, Homo Sapiens
gagcaugugcagcguguguccaggcacagucu

SEQ ID NO: 273500 - RNA, 32 nt, Homo Sapiens
gcacgcuucagcgccccuucccucggccgacg

SEQ ID NO: 273501 - RNA, 32 nt, Homo Sapiens
cacacucaaagguaaugaccaagauaaauuga

SEQ ID NO: 273502 - RNA, 32 nt, Homo Sapiens
uagaauuugaucuuugcaaacuguauauaauu

SEQ ID NO: 273503 - RNA, 32 nt, Homo Sapiens
ugccuugggauuugagaagagaauuagagagg

SEQ ID NO: 273504 - RNA, 32 nt, Homo Sapiens
cucagugcaaccuccgccuccuggguucaagc

SEQ ID NO: 273505 - RNA, 32 nt, Homo Sapiens
ucaagaggaaugccucugguuuuugcccauug

SEQ ID NO: 273506 - RNA, 32 nt, Homo Sapiens
agguaacuuuguggcaaaaauuuucaauauaa

SEQ ID NO: 273507 - RNA, 32 nt, Homo Sapiens
uagaucuuuacuaaaaauggcuuuuuaguaaa

SEQ ID NO: 273508 - RNA, 32 nt, Homo Sapiens
cgcugcaaccucagcuuccagaguucaagcga

SEQ ID NO: 273509 - RNA, 32 nt, Homo Sapiens
uucaggucaggaguucgagaugagccuggcca

SEQ ID NO: 273510 - RNA, 32 nt, Homo Sapiens
ccacaccucucgcggcagcugucauuuccaug

SEQ ID NO: 273511 - RNA, 31 nt, Homo Sapiens
aagauuaaauaaaaauuagaagugucacuuu

SEQ ID NO: 273512 - RNA, 32 nt, Homo Sapiens
guugaaagcgcuauugaauauugcaaucuaua

SEQ ID NO: 273513 - RNA, 32 nt, Homo Sapiens
aauaagauggguggagaaggauguagacaaga

SEQ ID NO: 273514 - RNA, 32 nt, Homo Sapiens
gaagggcaggguggccucugcugcuagggccu

SEQ ID NO: 273515 - RNA, 32 nt, Homo Sapiens
gauuugauccccauccuggugcagcuccgaga

SEQ ID NO: 273516 - RNA, 32 nt, Homo Sapiens
uuuuuacaaacacaaugauaaugauaauuuau

SEQ ID NO: 273517 - RNA, 32 nt, Homo Sapiens
cuuucuaauuccgguuauucucuuuuucaucu

SEQ ID NO: 273518 - RNA, 32 nt, Homo Sapiens
uaaaagaagaaaaaagugauuauuuagacuau

SEQ ID NO: 273519 - RNA, 32 nt, Homo Sapiens
uaaaaguaauuucccuuuuugcagcuuuuccu

SEQ ID NO: 273520 - RNA, 32 nt, Homo Sapiens
agccuugcccaggcccaguccacagagccagc

SEQ ID NO: 273521 - RNA, 32 nt, Homo Sapiens
cccauucucacagcccugcuggaccaaggcau

SEQ ID NO: 273522 - RNA, 32 nt, Homo Sapiens
gacgaaaaccagucuguaaaacccgagccugg

SEQ ID NO: 273523 - RNA, 32 nt, Homo Sapiens
cccuuaucaguaguucugcuuuugcccuuugc

SEQ ID NO: 273524 - RNA, 32 nt, Homo Sapiens
aacauguugguggguaauuaugcgaauguuuc

SEQ ID NO: 273525 - RNA, 32 nt, Homo Sapiens
uuccagucaauacaacuuaccaauccugaggc

SEQ ID NO: 273526 - RNA, 32 nt, Homo Sapiens
uucgcguuguuuccuuuuuuuaaauugaguua

SEQ ID NO: 273527 - RNA, 32 nt, Homo Sapiens
acugaaaaauaaugcaugauauuuguuuguuu

SEQ ID NO: 273528 - RNA, 32 nt, Homo Sapiens
gacaagggcuggugcccggcccagggugccca

SEQ ID NO: 273529 - RNA, 32 nt, Homo Sapiens
uagugacuggacaugccuggaagaccccucag

SEQ ID NO: 273530 - RNA, 32 nt, Homo Sapiens
gacccccuggaaggguugcugcuggccuuacc

SEQ ID NO: 273531 - RNA, 32 nt, Homo Sapiens
cccgggcgggcgggcgggaagaugcugagcag

SEQ ID NO: 273532 - RNA, 32 nt, Homo Sapiens
ggcugcccauccccuccccaccggcgucccgg

SEQ ID NO: 273533 - RNA, 32 nt, Homo Sapiens
uucuucgucaugucgggacgcggcaagcaggg

SEQ ID NO: 273534 - RNA, 32 nt, Homo Sapiens
ucuggcugcaggaauuaggggguguggcauuc

SEQ ID NO: 273535 - RNA, 32 nt, Homo Sapiens
cgccugcuccuaugcccagcccggcccccugc

SEQ ID NO: 273536 - RNA, 32 nt, Homo Sapiens
cgauacuuuuggcgcgcgcgguugcuguuucu

SEQ ID NO: 273537 - RNA, 32 nt, Homo Sapiens
ugcauucuuucuuggaacccaggccacagcag

SEQ ID NO: 273538 - RNA, 32 nt, Homo Sapiens
acuuggcugauguuuucuuguuucuguuucag

SEQ ID NO: 273539 - RNA, 32 nt, Homo Sapiens
aauuuauuuuauucucucucccuuuuuauuuu

SEQ ID NO: 273540 - RNA, 30 nt, Homo Sapiens
aaguggcggccgcagcacucauugaagccg

SEQ ID NO: 273541 - RNA, 31 nt, Homo Sapiens
ccaagcggggagcucgggccccgcgcccagg

SEQ ID NO: 273542 - RNA, 32 nt, Homo Sapiens
gagucaccuguguguucaguggcacccccagc

SEQ ID NO: 273543 - RNA, 32 nt, Homo Sapiens
ucuccuuguccaagguacagccaggcaaccug

SEQ ID NO: 273544 - RNA, 32 nt, Homo Sapiens
aagcguccuguucuccuucugugcugucccag

SEQ ID NO: 273545 - RNA, 32 nt, Homo Sapiens
uaggauuuuuaaauggcauauucuguaagcuu

SEQ ID NO: 273546 - RNA, 32 nt, Homo Sapiens
gcacagccaugaacaccaacgaugccaaggag

SEQ ID NO: 273547 - RNA, 30 nt, Homo Sapiens
caggaucuggacugcaccaggaggaacaca

SEQ ID NO: 273548 - RNA, 32 nt, Homo Sapiens
uaagugcuuuugucauuugagcugacaaguuu

SEQ ID NO: 273549 - RNA, 32 nt, Homo Sapiens
acaauuaaaaacaggacaggaagaaggucuaa

SEQ ID NO: 273550 - RNA, 32 nt, Homo Sapiens
gccggcacuucgcggcagucagagcaccauaa

SEQ ID NO: 273551 - RNA, 32 nt, Homo Sapiens
auagacagcgcuccccagcgggcccccggccc

SEQ ID NO: 273552 - RNA, 32 nt, Homo Sapiens
aagucuuugcugucauaauuuaagcauuugag

SEQ ID NO: 273553 - RNA, 25 nt, Homo Sapiens
auggaggcgcccgggccggcccagg

SEQ ID NO: 273554 - RNA, 32 nt, Homo Sapiens
cccagaaacccccauguaaaucaaaugcccua

SEQ ID NO: 273555 - RNA, 32 nt, Homo Sapiens
cuuguuaauaauaguaaaccuuuauaccuaaa

SEQ ID NO: 273556 - RNA, 32 nt, Homo Sapiens
acuuuggccaagggcgugaaccucuuagagga

SEQ ID NO: 273557 - RNA, 32 nt, Homo Sapiens
ggacuguuccacugccccuccuccucacccua

SEQ ID NO: 273558 - RNA, 28 nt, Homo Sapiens
aggaaaguggggcuaccgagguggcgca

SEQ ID NO: 273559 - RNA, 32 nt, Homo Sapiens
gcugugcuguuuagaaacaacaucucagacuu

SEQ ID NO: 273560 - RNA, 29 nt, Homo Sapiens
ccaggaggauggcaguaccauaggcgacg

SEQ ID NO: 273561 - RNA, 32 nt, Homo Sapiens
cuauauguggauucacauuucuguggagauuu

SEQ ID NO: 273562 - RNA, 32 nt, Homo Sapiens
guucuguguuagucaugcacacacauaccuau

SEQ ID NO: 273563 - RNA, 32 nt, Homo Sapiens
ggugacugcaaaugcacagacguugugcugug

SEQ ID NO: 273564 - RNA, 32 nt, Homo Sapiens
aaaugggagcaaaagaggcauuccagaaagaa

SEQ ID NO: 273565 - RNA, 32 nt, Homo Sapiens
gcagauccaagagcaauuugggaggagcugcc

SEQ ID NO: 273566 - RNA, 32 nt, Homo Sapiens
aaacuggacuuccuaaugucugaaagaaucag

SEQ ID NO: 273567 - RNA, 32 nt, Homo Sapiens
agacacacaagaucuuuuuauguacuaguuaa

SEQ ID NO: 273568 - RNA, 32 nt, Homo Sapiens
gaauccgcuggcuaacaucugcucuugguuuc

SEQ ID NO: 273569 - RNA, 32 nt, Homo Sapiens
guugcucuaaaauguuuggaaaagagcugcuu

SEQ ID NO: 273570 - RNA, 32 nt, Homo Sapiens
gcgaggcacuggaugcugcugcugugcucucu

SEQ ID NO: 273571 - RNA, 32 nt, Homo Sapiens
cuguuauagacuagugauacaaacuuuaagaa

SEQ ID NO: 273572 - RNA, 29 nt, Homo Sapiens
cacucucggggaccaggacauagaccugu

SEQ ID NO: 273573 - RNA, 32 nt, Homo Sapiens
aguuccccucuacuccaugcacauaguaaguc

SEQ ID NO: 273574 - RNA, 32 nt, Homo Sapiens
gucccugcgggcgaccccgggcuccggacagg

SEQ ID NO: 273575 - RNA, 32 nt, Homo Sapiens
gcuggccccgacgaccccggccccgucccgca

SEQ ID NO: 273576 - RNA, 32 nt, Homo Sapiens
accacagacaccuucuugugaguuuucagucu

SEQ ID NO: 273577 - RNA, 32 nt, Homo Sapiens
cguuccggcugcggcuccgcugccgguagcgc

SEQ ID NO: 273578 - RNA, 32 nt, Homo Sapiens
agucauuuuuggacacauccaauagaaacauu

SEQ ID NO: 273579 - RNA, 32 nt, Homo Sapiens
ucuucugcaaacaccagacaaauuggacaaug

SEQ ID NO: 273580 - RNA, 32 nt, Homo Sapiens
auuuuuauuuuugucaauuucaugauaugguu

SEQ ID NO: 273581 - RNA, 32 nt, Homo Sapiens
gcaccuggcgcggaggucgcccggggugcccu

SEQ ID NO: 273582 - RNA, 32 nt, Homo Sapiens
auucuuggccaagcagaugacaacacaucucc

SEQ ID NO: 273583 - RNA, 32 nt, Homo Sapiens
aaaaagcaacccccauguaugccuauaugugu

SEQ ID NO: 273584 - RNA, 32 nt, Homo Sapiens
ucauugggccccacccuggccuagugacucuc

SEQ ID NO: 273585 - RNA, 32 nt, Homo Sapiens
agccgcgcgguuccggcugcuccggcgaggcg

SEQ ID NO: 273586 - RNA, 32 nt, Homo Sapiens
gcaagggagggagaguccaggccugggagucu

SEQ ID NO: 273587 - RNA, 32 nt, Homo Sapiens
cauguauacuagauauuuuaaagaguuauuua

SEQ ID NO: 273588 - RNA, 32 nt, Homo Sapiens
ugaagcagugauucuuuuuuuuuuuuuuuuuu

SEQ ID NO: 273589 - RNA, 32 nt, Homo Sapiens
gacacauggcugcuaauucaucagcuuaucau

SEQ ID NO: 273590 - RNA, 32 nt, Homo Sapiens
cacacuccugagccaaggucuugucuucaacc

SEQ ID NO: 273591 - RNA, 32 nt, Homo Sapiens
gauggacaacagacagaauagauggaguuuca

SEQ ID NO: 273592 - RNA, 32 nt, Homo Sapiens
cagauucugaguuuucacacuccacaaauccu

SEQ ID NO: 273593 - RNA, 32 nt, Homo Sapiens
uaacauacacauagaagcugagucucugaucc

SEQ ID NO: 273594 - RNA, 32 nt, Homo Sapiens
guaacccccuccugccuccauccaccggggcu

SEQ ID NO: 273595 - RNA, 32 nt, Homo Sapiens
acagagccagcauguuacaggauccugacagu

SEQ ID NO: 273596 - RNA, 32 nt, Homo Sapiens
gagggaagagaggacaagaggacccuuucacu

SEQ ID NO: 273597 - RNA, 32 nt, Homo Sapiens
cccucgcccccuccccucgggccgggagcuuc

SEQ ID NO: 273598 - RNA, 32 nt, Homo Sapiens
agaaauggacuuggaaaggaaauucuaacaga

SEQ ID NO: 273599 - RNA, 32 nt, Homo Sapiens
agucaguuucucuugcagaagauauaauucug

SEQ ID NO: 273600 - RNA, 32 nt, Homo Sapiens
cgucagccgccgccuccaugugcgagcagagg

SEQ ID NO: 273601 - RNA, 30 nt, Homo Sapiens
gaaaaugucuuccuugcagaaggcugucca

SEQ ID NO: 273602 - RNA, 30 nt, Homo Sapiens
ccagaguauuaacgcuccaagaguauuauu

SEQ ID NO: 273603 - RNA, 32 nt, Homo Sapiens
acucucaaaauaucuuucuucuuaauauaaaa

SEQ ID NO: 273604 - RNA, 32 nt, Homo Sapiens
ggagaugccaaaacgccagaugaaagcaauca

SEQ ID NO: 273605 - RNA, 32 nt, Homo Sapiens
cgugggugccccuucgcccaccuccgcccccg

SEQ ID NO: 273606 - RNA, 32 nt, Homo Sapiens
auacuggagagaaagccuacaauugugaagaa

SEQ ID NO: 273607 - RNA, 32 nt, Homo Sapiens
ucccucccgggcggggcggcuggccgggcaga

SEQ ID NO: 273608 - RNA, 32 nt, Homo Sapiens
aagaguggaacauggugucuguccucucccug

SEQ ID NO: 273609 - RNA, 32 nt, Homo Sapiens
uugugugcuuacuagcaaccacuuucagcguu

SEQ ID NO: 273610 - RNA, 32 nt, Homo Sapiens
accuaauguugguuuuaaccuauagcucuuca

SEQ ID NO: 273611 - RNA, 32 nt, Homo Sapiens
cuccucaucuucugcccggccaaccggccugc

SEQ ID NO: 273612 - RNA, 32 nt, Homo Sapiens
cacaaucaauuucaaagcuccauuucauaaag

SEQ ID NO: 273613 - RNA, 32 nt, Homo Sapiens
gguuuuaccauguuggccaggcuggucucaaa

SEQ ID NO: 273614 - RNA, 32 nt, Homo Sapiens
gguuucaccaugucggccaggcuggucucaaa

SEQ ID NO: 273615 - RNA, 32 nt, Homo Sapiens
aaacuugaggaggauaaaaauauguuggaaga

SEQ ID NO: 273616 - RNA, 28 nt, Homo Sapiens
gggagggggcggcggccauggagcgggu

SEQ ID NO: 273617 - RNA, 32 nt, Homo Sapiens
guugaggaaaggaaaagggcauuugucuaaac

SEQ ID NO: 273618 - RNA, 32 nt, Homo Sapiens
ucgaguguucagcccugugugcucuccagcuc

SEQ ID NO: 273619 - RNA, 32 nt, Homo Sapiens
gcgacggacaccaggccccagcccaacgcgcu

SEQ ID NO: 273620 - RNA, 32 nt, Homo Sapiens
ggaaagccacacgcggcagaggagagcuggca

SEQ ID NO: 273621 - RNA, 32 nt, Homo Sapiens
uuauaggugugagccacugcacccggccucca

SEQ ID NO: 273622 - RNA, 32 nt, Homo Sapiens
ggcacgaggggcuggcggccggcgggagaggc

SEQ ID NO: 273623 - RNA, 32 nt, Homo Sapiens
caggagaagcacaagacagagaagggccaaug

SEQ ID NO: 273624 - RNA, 31 nt, Homo Sapiens
ggagcgggcagcagccaaagacaaguaucag

SEQ ID NO: 273625 - RNA, 32 nt, Homo Sapiens
cguccgguugaccgcgcgucugcugcagagac

SEQ ID NO: 273626 - RNA, 32 nt, Homo Sapiens
agucaagagaaaguacaguaaacacuauuauc

SEQ ID NO: 273627 - RNA, 32 nt, Homo Sapiens
gacgaggaugugggaccgccagccgugggcac

SEQ ID NO: 273628 - RNA, 32 nt, Homo Sapiens
uuuucuuuucuuucuuuuuuuuuuuuuuuuuu

SEQ ID NO: 273629 - RNA, 32 nt, Homo Sapiens
ccgcuggggcaggcugcccccagcaagaggag

SEQ ID NO: 273630 - RNA, 32 nt, Homo Sapiens
uuuacuguguguuuaagcaagcaacagugcac

SEQ ID NO: 273631 - RNA, 32 nt, Homo Sapiens
caaauuuguuuuaaaauaauuguaaaugaggu

SEQ ID NO: 273632 - RNA, 32 nt, Homo Sapiens
cgccccacccccagcccuggcccuuggcuucu

SEQ ID NO: 273633 - RNA, 32 nt, Homo Sapiens
gccuccacccaccggcgcccaaguccuccccg

SEQ ID NO: 273634 - RNA, 31 nt, Homo Sapiens
uggaaaaugcaaaacaacgaaauuauaaagc

SEQ ID NO: 273635 - RNA, 32 nt, Homo Sapiens
gggcugugggcuucugggucugugccgacaaa

SEQ ID NO: 273636 - RNA, 32 nt, Homo Sapiens
ccacagccagcauguucacacacaaaagggcg

SEQ ID NO: 273637 - RNA, 32 nt, Homo Sapiens
cuggggugcccuccuucccccaucccaagcug

SEQ ID NO: 273638 - RNA, 32 nt, Homo Sapiens
agaugcugcugcacucagaagacgccagagcu

SEQ ID NO: 273639 - RNA, 32 nt, Homo Sapiens
ggcacgggguggccagugcagauggagcccaa

SEQ ID NO: 273640 - RNA, 32 nt, Homo Sapiens
uccauaauaaaacuuuaaaauaaaaugcagac

SEQ ID NO: 273641 - RNA, 32 nt, Homo Sapiens
acuaccaaucccaacuacguaauaggaaaaug

SEQ ID NO: 273642 - RNA, 32 nt, Homo Sapiens
gcucagugggcaggcgggacgcugcuccggga

SEQ ID NO: 273643 - RNA, 32 nt, Homo Sapiens
uggagcagauuguaguugauccacagcaaaga

SEQ ID NO: 273644 - RNA, 32 nt, Homo Sapiens
gagcugagggucugaggacgcagggagggugg

SEQ ID NO: 273645 - RNA, 32 nt, Homo Sapiens
uuccagcgccccaaggaggauucaaacuguug

SEQ ID NO: 273646 - RNA, 32 nt, Homo Sapiens
gaugggaagaggugggagcagauucugcccug

SEQ ID NO: 273647 - RNA, 31 nt, Homo Sapiens
ugacaggcucaccagaaccagcacagcagcu

SEQ ID NO: 273648 - RNA, 32 nt, Homo Sapiens
cugcuacuuaacccugaaaacaaaaucaguuu

SEQ ID NO: 273649 - RNA, 32 nt, Homo Sapiens
guuguguuuuaaagguagaguuaacagaauau

SEQ ID NO: 273650 - RNA, 32 nt, Homo Sapiens
gcuguggcacaccaucaugcauaccaauauau

SEQ ID NO: 273651 - RNA, 32 nt, Homo Sapiens
gcagcagagggagagcucggggcuuggagggg

SEQ ID NO: 273652 - RNA, 32 nt, Homo Sapiens
cucccagcacuuugagaggccgaggagggagg

SEQ ID NO: 273653 - RNA, 32 nt, Homo Sapiens
gcugauccgcacgcagccacuucggcuaccuu

SEQ ID NO: 273654 - RNA, 32 nt, Homo Sapiens
acagugcggacaccccggcugcuagcccacgg

SEQ ID NO: 273655 - RNA, 30 nt, Homo Sapiens
ggaggggccguucgaagagucgugaggggg

SEQ ID NO: 273656 - RNA, 32 nt, Homo Sapiens
aaugaggauuaacaaacucaauucaggacaca

SEQ ID NO: 273657 - RNA, 32 nt, Homo Sapiens
cgccaggaaggggcgggugacugcgaggcagc

SEQ ID NO: 273658 - RNA, 32 nt, Homo Sapiens
uguuuaaacaauacuaccuugccaaaaauaga

SEQ ID NO: 273659 - RNA, 32 nt, Homo Sapiens
ucaaggccauuaccaucaucucauuucauccu

SEQ ID NO: 273660 - RNA, 32 nt, Homo Sapiens
ucugugugggucuuaaacuguaaaaccuacca

SEQ ID NO: 273661 - RNA, 32 nt, Homo Sapiens
gaaagagaauguuccugguaaaacucuguuuu

SEQ ID NO: 273662 - RNA, 32 nt, Homo Sapiens
aucucgcucugauccgcacgccccccggguug

SEQ ID NO: 273663 - RNA, 32 nt, Homo Sapiens
aguccagauuucuuguguguggucaaggagac

SEQ ID NO: 273664 - RNA, 32 nt, Homo Sapiens
ucacccagggaacuaauaacuaaccaguuguu

SEQ ID NO: 273665 - RNA, 32 nt, Homo Sapiens
gaugccuauuaaaagaggaaugguuuaaagau

SEQ ID NO: 273666 - RNA, 32 nt, Homo Sapiens
gaaucauauggacuucaaaugccauuguaaaa

SEQ ID NO: 273667 - RNA, 32 nt, Homo Sapiens
cauucuccgaacuuacuccuuuuuauggguaa

SEQ ID NO: 273668 - RNA, 32 nt, Homo Sapiens
gccuccugucuccccagaaugggaauuucuuu

SEQ ID NO: 273669 - RNA, 32 nt, Homo Sapiens
cgagggcgcgcuggcccggcacggcggugguc

SEQ ID NO: 273670 - RNA, 32 nt, Homo Sapiens
gaagaugacgaggaugaagaccuuuacaauga

SEQ ID NO: 273671 - RNA, 32 nt, Homo Sapiens
acaggggaaugguuaaauacauuauggccagc

SEQ ID NO: 273672 - RNA, 32 nt, Homo Sapiens
uauuaaucugaacauuuucauguucuuugcua

SEQ ID NO: 273673 - RNA, 32 nt, Homo Sapiens
cauauguaaucccagcacuuugggaggcugag

SEQ ID NO: 273674 - RNA, 32 nt, Homo Sapiens
ugccagaggggaccagggccagagacgggacc

SEQ ID NO: 273675 - RNA, 32 nt, Homo Sapiens
gcccaaaauaccaugauucuuuauggaaauua

SEQ ID NO: 273676 - RNA, 32 nt, Homo Sapiens
uccagaggcgggauggccggccggguaggggg

SEQ ID NO: 273677 - RNA, 28 nt, Homo Sapiens
cccaugcccagcuguguccccagcccuc

SEQ ID NO: 273678 - RNA, 32 nt, Homo Sapiens
aaagcuagugaggggcggggcaggcggcgcgg

SEQ ID NO: 273679 - RNA, 32 nt, Homo Sapiens
uuacgaggaauucuuggaugacaucccucagc

SEQ ID NO: 273680 - RNA, 32 nt, Homo Sapiens
ggggcuggcagagcucacaucaguuagcaacc

SEQ ID NO: 273681 - RNA, 32 nt, Homo Sapiens
gggcccugaggaagaaauggggacugaucuca

SEQ ID NO: 273682 - RNA, 32 nt, Homo Sapiens
ccaccagucuuaggcaucauaaugugccccag

SEQ ID NO: 273683 - RNA, 32 nt, Homo Sapiens
gaaaaugccuggcgugagagccagcagacagc

SEQ ID NO: 273684 - RNA, 32 nt, Homo Sapiens
agagacacauuuuccuuaaaguuuacaaacug

SEQ ID NO: 273685 - RNA, 32 nt, Homo Sapiens
acaaaaauauacaugugaaauaaaacucagua

SEQ ID NO: 273686 - RNA, 32 nt, Homo Sapiens
cuauuuucuauucucucauuuauaauaaaaac

SEQ ID NO: 273687 - RNA, 32 nt, Homo Sapiens
acacagacgcagagcaggacucucucugcugc

SEQ ID NO: 273688 - RNA, 32 nt, Homo Sapiens
uaaggauggguggcccugguggccagcaaugc

SEQ ID NO: 273689 - RNA, 32 nt, Homo Sapiens
uuaaaaaaaggaaacaaaaaccaccccaaaau

SEQ ID NO: 273690 - RNA, 28 nt, Homo Sapiens
ucauuugaagauuaaguauuggagccau

SEQ ID NO: 273691 - RNA, 32 nt, Homo Sapiens
agcgagguagagaagcgagggggugagcccug

SEQ ID NO: 273692 - RNA, 32 nt, Homo Sapiens
cucaucacuccugauuucaucuccaggcaagu

SEQ ID NO: 273693 - RNA, 32 nt, Homo Sapiens
gccuugcccucccuggcucaagcagucuucau

SEQ ID NO: 273694 - RNA, 32 nt, Homo Sapiens
gaauauuuauuacaaauguuagaauauauuuc

SEQ ID NO: 273695 - RNA, 31 nt, Homo Sapiens
agcaccauggcggaagacauggagaccaaaa

SEQ ID NO: 273696 - RNA, 32 nt, Homo Sapiens
cggccguuggagguggcugcggcagcugaugu

SEQ ID NO: 273697 - RNA, 31 nt, Homo Sapiens
augugagaacaugcugcaagagccugccagc

SEQ ID NO: 273698 - RNA, 32 nt, Homo Sapiens
ugaaagagcccccuccuccccucucuccuggg

SEQ ID NO: 273699 - RNA, 32 nt, Homo Sapiens
guccccccaaaacagguauguugggguccuga

SEQ ID NO: 273700 - RNA, 32 nt, Homo Sapiens
cagccccccaccuccucgccccggcccgggga

SEQ ID NO: 273701 - RNA, 29 nt, Homo Sapiens
ucuugugauguauuugauuuucuaauaaa

SEQ ID NO: 273702 - RNA, 31 nt, Homo Sapiens
uaaugggaaauaccucucagagauguucaug

SEQ ID NO: 273703 - RNA, 32 nt, Homo Sapiens
agccucggauguuuccucgcugcacagaccug

SEQ ID NO: 273704 - RNA, 32 nt, Homo Sapiens
cuucaaagcgauccacaaucuguuagaaaggu

SEQ ID NO: 273705 - RNA, 32 nt, Homo Sapiens
gugcgugcccccagcccacugccgcugccagu

SEQ ID NO: 273706 - RNA, 32 nt, Homo Sapiens
uggcugagggucaggugugcugccaguaagug

SEQ ID NO: 273707 - RNA, 32 nt, Homo Sapiens
agcagcugcacgcgccguggcuccggaucucu

SEQ ID NO: 273708 - RNA, 32 nt, Homo Sapiens
ucaaagguuuaugugguauaucagugauauuu

SEQ ID NO: 273709 - RNA, 32 nt, Homo Sapiens
uauguucuaaaauuauuauauauacaugggug

SEQ ID NO: 273710 - RNA, 32 nt, Homo Sapiens
ccaguuugaaggaaaacaggguggccacuuac

SEQ ID NO: 273711 - RNA, 32 nt, Homo Sapiens
cgucccggccaagguuugcuguaaucugcgcg

SEQ ID NO: 273712 - RNA, 32 nt, Homo Sapiens
gacaacacucccucuccugggaccuccuugcc

SEQ ID NO: 273713 - RNA, 32 nt, Homo Sapiens
cugcccgggagggugggugcagacacaggcug

SEQ ID NO: 273714 - RNA, 29 nt, Homo Sapiens
uggcgcucgguccggucgcguccgacacc

SEQ ID NO: 273715 - RNA, 32 nt, Homo Sapiens
ugacaauaaacaaaaacacuuaaaaauauuuu

SEQ ID NO: 273716 - RNA, 32 nt, Homo Sapiens
ggcgggguuccugcgcgcggcccgccauggag

SEQ ID NO: 273717 - RNA, 32 nt, Homo Sapiens
gaucggagggcuuuucuuuuauggguggccca

SEQ ID NO: 273718 - RNA, 32 nt, Homo Sapiens
cucacccccaaacuccacgggugccccuagcu

SEQ ID NO: 273719 - RNA, 32 nt, Homo Sapiens
caggugcacccuccuccuccaggaggcagggg

SEQ ID NO: 273720 - RNA, 32 nt, Homo Sapiens
guuuuaaaacugacugugaauuuuauuuuuca

SEQ ID NO: 273721 - RNA, 32 nt, Homo Sapiens
uguuaauuuauuacggcuuuuacaauucacuu

SEQ ID NO: 273722 - RNA, 32 nt, Homo Sapiens
cugggcgccccgaggcgccgggauguggagcg

SEQ ID NO: 273723 - RNA, 32 nt, Homo Sapiens
agggagcagagccugggccuccccuaagaggc

SEQ ID NO: 273724 - RNA, 32 nt, Homo Sapiens
gauaucauuuauguggagauccacaaccuuua

SEQ ID NO: 273725 - RNA, 32 nt, Homo Sapiens
acucagaaucuccuucuuuccuggacuuaacu

SEQ ID NO: 273726 - RNA, 32 nt, Homo Sapiens
uguaagcacugacugggaccaggcaccaggca

SEQ ID NO: 273727 - RNA, 31 nt, Homo Sapiens
augggaauaaauuguaaaguacuuuugauau

SEQ ID NO: 273728 - RNA, 32 nt, Homo Sapiens
ggaggaucuggagagggaaggggcgugcgagc

SEQ ID NO: 273729 - RNA, 32 nt, Homo Sapiens
cagcgucugacgggaagccugaucuggaaccu

SEQ ID NO: 273730 - RNA, 32 nt, Homo Sapiens
cccaagccgagcaugccccgggcccccgccuc

SEQ ID NO: 273731 - RNA, 32 nt, Homo Sapiens
uggagaacgcucucggggccuuugccacuucu

SEQ ID NO: 273732 - RNA, 32 nt, Homo Sapiens
guaaggagcaaguggaauugaguccuucaggg

SEQ ID NO: 273733 - RNA, 32 nt, Homo Sapiens
ugaaccugagcggcauguauggcaccgccggg

SEQ ID NO: 273734 - RNA, 32 nt, Homo Sapiens
agcccugaaguuuccuagggguugccucagga

SEQ ID NO: 273735 - RNA, 32 nt, Homo Sapiens
aacgccugccaaugcuuucucauuuggaccca

SEQ ID NO: 273736 - RNA, 32 nt, Homo Sapiens
uuuuaacaaaaaucuauuauguaccuaauauu

SEQ ID NO: 273737 - RNA, 32 nt, Homo Sapiens
cacugcacuccagcuuggugacagagugagau

SEQ ID NO: 273738 - RNA, 32 nt, Homo Sapiens
uggcauacuguguguauagcacugccgauugg

SEQ ID NO: 273739 - RNA, 32 nt, Homo Sapiens
guggcaucagcagcuuccuggccuacucccaa

SEQ ID NO: 273740 - RNA, 32 nt, Homo Sapiens
ccuccagcacuagcggcuguuucugugucucc

SEQ ID NO: 273741 - RNA, 32 nt, Homo Sapiens
accuggacgcacccucacugucagggucccug

SEQ ID NO: 273742 - RNA, 32 nt, Homo Sapiens
ggggggcgucagagaagcugccccuuagccaa

SEQ ID NO: 273743 - RNA, 32 nt, Homo Sapiens
agugaggaggaggaggagggagacguagaaaa

SEQ ID NO: 273744 - RNA, 32 nt, Homo Sapiens
ccggcacguggugggccacgcugcuggcgcuc

SEQ ID NO: 273745 - RNA, 32 nt, Homo Sapiens
uuuugguaaauauacauguuuuaaagagguua

SEQ ID NO: 273746 - RNA, 32 nt, Homo Sapiens
cuguguggagcucagcuguguuguguggcagu

SEQ ID NO: 273747 - RNA, 32 nt, Homo Sapiens
cuuugcaaagcugcuugaaacuucucccaaac

SEQ ID NO: 273748 - RNA, 32 nt, Homo Sapiens
gucuggagggggcugaggugcugggcaaccag

SEQ ID NO: 273749 - RNA, 32 nt, Homo Sapiens
uuuuuuaagccauuuuaucuuuuacuuuagag

SEQ ID NO: 273750 - RNA, 32 nt, Homo Sapiens
cccuggauugguuuuuucugagucaaaguggu

SEQ ID NO: 273751 - RNA, 32 nt, Homo Sapiens
acugcccgccgggacauggcagccuggacgug

SEQ ID NO: 273752 - RNA, 32 nt, Homo Sapiens
caaaugauuuucuaacuuaguguuaggagaaa

SEQ ID NO: 273753 - RNA, 32 nt, Homo Sapiens
uguccugaggggauacuguggagcagcccagu

SEQ ID NO: 273754 - RNA, 32 nt, Homo Sapiens
uaccaggugucugagcagcugcaugcucccug

SEQ ID NO: 273755 - RNA, 32 nt, Homo Sapiens
gguagggacagggaagacugggggcgagauag

SEQ ID NO: 273756 - RNA, 32 nt, Homo Sapiens
ugcuucuuuacuauaucacugccuucuuuuau

SEQ ID NO: 273757 - RNA, 32 nt, Homo Sapiens
uaaauaugcauauuuucagacaaacguuuaga

SEQ ID NO: 273758 - RNA, 32 nt, Homo Sapiens
cggaccuuuuugcuguuuauccuguauguaau

SEQ ID NO: 273759 - RNA, 32 nt, Homo Sapiens
auacuuccaguggaagaccugagaggguaccu

SEQ ID NO: 273760 - RNA, 32 nt, Homo Sapiens
ccggggcgcucugcccgggggacuccggacac

SEQ ID NO: 273761 - RNA, 32 nt, Homo Sapiens
gaacggcggcagcggcggcggcuggaacaauc

SEQ ID NO: 273762 - RNA, 27 nt, Homo Sapiens
ucacaccauuaauaaugguaagauugg

SEQ ID NO: 273763 - RNA, 32 nt, Homo Sapiens
aaguugaauuuuuuuucuuuuucccuaugucu

SEQ ID NO: 273764 - RNA, 32 nt, Homo Sapiens
caaaauugcaguagugugaaaauacauuuuuu

SEQ ID NO: 273765 - RNA, 32 nt, Homo Sapiens
ucccacacagucgcgcgcagcugcuggagagc

SEQ ID NO: 273766 - RNA, 32 nt, Homo Sapiens
cgugggcuccugaguuccucccacagaacucc

SEQ ID NO: 273767 - RNA, 32 nt, Homo Sapiens
caacauugugaaaccccaucucugccaaaaau

SEQ ID NO: 273768 - RNA, 32 nt, Homo Sapiens
aaacuuuuugccacuauaugacaaggauuccc

SEQ ID NO: 273769 - RNA, 32 nt, Homo Sapiens
aagugucaguugucagaugauuuuaaaaguua

SEQ ID NO: 273770 - RNA, 32 nt, Homo Sapiens
cggagcuugcagugagcugaaauggugccacu

SEQ ID NO: 273771 - RNA, 32 nt, Homo Sapiens
aaucucuucugucacacacagaugaacuuuaa

SEQ ID NO: 273772 - RNA, 32 nt, Homo Sapiens
guuuggccaacucuuaauaaaguuauuuuggu

SEQ ID NO: 273773 - RNA, 32 nt, Homo Sapiens
gcaagcuccgccucucggguucacgccauucu

SEQ ID NO: 273774 - RNA, 32 nt, Homo Sapiens
caggguagcuguuuggcccagcccagaauccu

SEQ ID NO: 273775 - RNA, 32 nt, Homo Sapiens
uucucuauuuauauuucauuuaucacucuucu

SEQ ID NO: 273776 - RNA, 32 nt, Homo Sapiens
ccuguauggccagaaggcagggccgaggggug

SEQ ID NO: 273777 - RNA, 32 nt, Homo Sapiens
uuuccccaaccccuccuccccaaccuggcuga

SEQ ID NO: 273778 - RNA, 32 nt, Homo Sapiens
gcuacaccccuacaggcuuccaggcaccucau

SEQ ID NO: 273779 - RNA, 32 nt, Homo Sapiens
ccuugaugaagaugacaggcauggccgggguc

SEQ ID NO: 273780 - RNA, 32 nt, Homo Sapiens
cugagguggcauggugaugucuccaugaggga

SEQ ID NO: 273781 - RNA, 32 nt, Homo Sapiens
caggugagaaaaccauggucucucugcuugcu

SEQ ID NO: 273782 - RNA, 32 nt, Homo Sapiens
accucugccucccagguucaagugacucuccu

SEQ ID NO: 273783 - RNA, 32 nt, Homo Sapiens
gacuacaagagauuggucucauucccagguua

SEQ ID NO: 273784 - RNA, 32 nt, Homo Sapiens
augcggcauuuuacuaugaaauuuaauaugcu

SEQ ID NO: 273785 - RNA, 32 nt, Homo Sapiens
cuugggcccuccccggcccacguccuccguug

SEQ ID NO: 273786 - RNA, 32 nt, Homo Sapiens
cacucucugcugucgcccgucccgcgcgcucc

SEQ ID NO: 273787 - RNA, 32 nt, Homo Sapiens
aaagauaguuuauguuuuuagccuaaguauaa

SEQ ID NO: 273788 - RNA, 32 nt, Homo Sapiens
uuagagggagggcaggugcgggcugugugugu

SEQ ID NO: 273789 - RNA, 32 nt, Homo Sapiens
cuuugccucacagaggcaggagagaagaauug

SEQ ID NO: 273790 - RNA, 32 nt, Homo Sapiens
uuacaggugugagccaccacacccagccucug

SEQ ID NO: 273791 - RNA, 32 nt, Homo Sapiens
agaggaugcuuagucuuaaaauaaaaauaaau

SEQ ID NO: 273792 - RNA, 32 nt, Homo Sapiens
ggcggguccagcuuuggaagccaggcuccccu

SEQ ID NO: 273793 - RNA, 27 nt, Homo Sapiens
agaaccacauaaaauaaugcagaucau

SEQ ID NO: 273794 - RNA, 32 nt, Homo Sapiens
cccagcuccgccucugccaggugucugggcug

SEQ ID NO: 273795 - RNA, 32 nt, Homo Sapiens
gcaacucgugucugagcgcccggcggaaaacc

SEQ ID NO: 273796 - RNA, 32 nt, Homo Sapiens
ucgguagguggcuauuagagcucuaccauaua

SEQ ID NO: 273797 - RNA, 32 nt, Homo Sapiens
uuaagucaaaaauggagugggcuggggagugc

SEQ ID NO: 273798 - RNA, 32 nt, Homo Sapiens
gcacucaggguuccccagcagcuccugugugu

SEQ ID NO: 273799 - RNA, 32 nt, Homo Sapiens
ggaaggcaggguggagcggggggaagaccauc

SEQ ID NO: 273800 - RNA, 32 nt, Homo Sapiens
guguuccauucaugaaacuguauuugauacau

SEQ ID NO: 273801 - RNA, 32 nt, Homo Sapiens
cauccgcugggcgggguccgaggucguacccc

SEQ ID NO: 273802 - RNA, 32 nt, Homo Sapiens
gcggggaagaagaaacgcugcagaccacggcu

SEQ ID NO: 273803 - RNA, 32 nt, Homo Sapiens
uccuacccacaacuuuucauuauucuucugga

SEQ ID NO: 273804 - RNA, 32 nt, Homo Sapiens
caccuguagaaagccagagagcuggcaccuga

SEQ ID NO: 273805 - RNA, 32 nt, Homo Sapiens
cgccugugggguguccccggcgcgggagggug

SEQ ID NO: 273806 - RNA, 32 nt, Homo Sapiens
ggggaagcaggggacagguguccaguugcugg

SEQ ID NO: 273807 - RNA, 32 nt, Homo Sapiens
uugggagccagcaagaguccugacagcagcac

SEQ ID NO: 273808 - RNA, 32 nt, Homo Sapiens
uacagauggagcaaaccgaaguuggcugggaa

SEQ ID NO: 273809 - RNA, 32 nt, Homo Sapiens
ggcgcucugcccgggggacuccggacacugac

SEQ ID NO: 273810 - RNA, 32 nt, Homo Sapiens
aaaucagacucggaaccgaugugugcuuuagg

SEQ ID NO: 273811 - RNA, 32 nt, Homo Sapiens
ggucugccagccagcccuccuccccgacccag

SEQ ID NO: 273812 - RNA, 32 nt, Homo Sapiens
cagcagcaggagaccuucucugauggaugacc

SEQ ID NO: 273813 - RNA, 32 nt, Homo Sapiens
cucagggcucaguuuccauuucccucccucag

SEQ ID NO: 273814 - RNA, 32 nt, Homo Sapiens
ccaugcccggcuuuuuuguguuuuagucucua

SEQ ID NO: 273815 - RNA, 32 nt, Homo Sapiens
uuuccaucccagagccucccaaggcugggaaa

SEQ ID NO: 273816 - RNA, 31 nt, Homo Sapiens
acaggcagcauccauuuucagaauuuccugg

SEQ ID NO: 273817 - RNA, 30 nt, Homo Sapiens
ccucauuuucaagaaggggaaacugaggcc

SEQ ID NO: 273818 - RNA, 32 nt, Homo Sapiens
ucauagauuuuuuuuucuuuuguuagaggaga

SEQ ID NO: 273819 - RNA, 32 nt, Homo Sapiens
cuuagguuucuuuuuccaugguuuccagguaa

SEQ ID NO: 273820 - RNA, 32 nt, Homo Sapiens
aaagcaacagagcugagauuucacugcaggua

SEQ ID NO: 273821 - RNA, 32 nt, Homo Sapiens
uuucagcacugcagcucugaugguccagcucc

SEQ ID NO: 273822 - RNA, 32 nt, Homo Sapiens
gggaacagcagcuaaggcuucuccggggguuu

SEQ ID NO: 273823 - RNA, 32 nt, Homo Sapiens
aauuuuauuuaguucuugaaguagaucugcuu

SEQ ID NO: 273824 - RNA, 32 nt, Homo Sapiens
gaucugcuggguuucaggaaaaggcugguaga

SEQ ID NO: 273825 - RNA, 32 nt, Homo Sapiens
aagcccagaaaguggacagugauucaaguaaa

SEQ ID NO: 273826 - RNA, 32 nt, Homo Sapiens
acucauagggucugaacucacuccaaaagaua

SEQ ID NO: 273827 - RNA, 32 nt, Homo Sapiens
uucugcucagcagcaucucuuuucucagaugu

SEQ ID NO: 273828 - RNA, 32 nt, Homo Sapiens
uagaaauaccauuugacccagccaucccauua

SEQ ID NO: 273829 - RNA, 32 nt, Homo Sapiens
augcucugaaauaaaaugaaaguaaaaauaaa

SEQ ID NO: 273830 - RNA, 32 nt, Homo Sapiens
cgugcuccugugucuaccccaacacaaaggug

SEQ ID NO: 273831 - RNA, 32 nt, Homo Sapiens
cacagauuaugaugaagauuagauuguguuau

SEQ ID NO: 273832 - RNA, 31 nt, Homo Sapiens
cauucucauuugaguuuugcauagugaaccu

SEQ ID NO: 273833 - RNA, 32 nt, Homo Sapiens
uauuugcaaggugggccaaguugauaugucac

SEQ ID NO: 273834 - RNA, 32 nt, Homo Sapiens
ucugucucucuuucucuccuuuuaauuuuggu

SEQ ID NO: 273835 - RNA, 31 nt, Homo Sapiens
guaucccucaaugcuaucuuuuaaucugacu

SEQ ID NO: 273836 - RNA, 32 nt, Homo Sapiens
ugucgucgaggcuggaguguaguggugcgauu

SEQ ID NO: 273837 - RNA, 32 nt, Homo Sapiens
cggcaacucccggcccagccuccauacugcgg

SEQ ID NO: 273838 - RNA, 32 nt, Homo Sapiens
acucuagggauauaaaaacagauucugauucc

SEQ ID NO: 273839 - RNA, 32 nt, Homo Sapiens
ccuacguuuuacaauuuuauuuaugucacuuu

SEQ ID NO: 273840 - RNA, 32 nt, Homo Sapiens
ugaaaagauauuaaaacucaagaaggaccaag

SEQ ID NO: 273841 - RNA, 32 nt, Homo Sapiens
uaaagccuuuaaaauguuuguacuguaauacu

SEQ ID NO: 273842 - RNA, 32 nt, Homo Sapiens
gcugggcugaacaacuaacuucauaaguagua

SEQ ID NO: 273843 - RNA, 32 nt, Homo Sapiens
aaggaagugacaauacgggagguccaaacuuu

SEQ ID NO: 273844 - RNA, 32 nt, Homo Sapiens
aagcagccaugcuccccccgaccuccagccga

SEQ ID NO: 273845 - RNA, 32 nt, Homo Sapiens
aaucuugggaggcuuugcuuuggacuuuguua

SEQ ID NO: 273846 - RNA, 32 nt, Homo Sapiens
augaguggagggccugguguguaauaaagcac

SEQ ID NO: 273847 - RNA, 32 nt, Homo Sapiens
uuuuccauaaugucauaauuaauauacauuua

SEQ ID NO: 273848 - RNA, 32 nt, Homo Sapiens
aaaaagagaagcugugucuuuagacaacccug

SEQ ID NO: 273849 - RNA, 32 nt, Homo Sapiens
uccaccugaaugccugcuguggucugaucuua

SEQ ID NO: 273850 - RNA, 32 nt, Homo Sapiens
agcaguagcagcagcaucucugaacauuucuc

SEQ ID NO: 273851 - RNA, 32 nt, Homo Sapiens
cccacgccaugcugaccagaggucuugcagcc

SEQ ID NO: 273852 - RNA, 32 nt, Homo Sapiens
gccaggcacugguuucaccagggugcggcccu

SEQ ID NO: 273853 - RNA, 31 nt, Homo Sapiens
aaguauuauuuuguuuugccaacaugaaaac

SEQ ID NO: 273854 - RNA, 32 nt, Homo Sapiens
auauccagaagccuaggagauuuugaagaggc

SEQ ID NO: 273855 - RNA, 32 nt, Homo Sapiens
agcgucuugaagguuuuagaaaauauuuggcu

SEQ ID NO: 273856 - RNA, 32 nt, Homo Sapiens
gcggcacaaccugguccuuguucucuggcugg

SEQ ID NO: 273857 - RNA, 32 nt, Homo Sapiens
agacucgggggugcucagcagcagcccagauu

SEQ ID NO: 273858 - RNA, 32 nt, Homo Sapiens
uuuugauaaaauguaaauuuguugaacccugc

SEQ ID NO: 273859 - RNA, 32 nt, Homo Sapiens
agcaggaaggcacuauucagagccuuguuuug

SEQ ID NO: 273860 - RNA, 32 nt, Homo Sapiens
gguguauccagcugcagccgccuccggagcuu

SEQ ID NO: 273861 - RNA, 32 nt, Homo Sapiens
gguggcaggucuuugcagcucccggccagggu

SEQ ID NO: 273862 - RNA, 32 nt, Homo Sapiens
gauguucaagguggugggguucugagacacuu

SEQ ID NO: 273863 - RNA, 32 nt, Homo Sapiens
ccauuuucugcucugcuccccccugaggcugu

SEQ ID NO: 273864 - RNA, 32 nt, Homo Sapiens
acauuuaccaaaacgacacacaaacgcaacac

SEQ ID NO: 273865 - RNA, 32 nt, Homo Sapiens
cuguagaagccucuaucuccucuucacccaua

SEQ ID NO: 273866 - RNA, 32 nt, Homo Sapiens
gcggagauuggggauuaugacucagggaaaca

SEQ ID NO: 273867 - RNA, 32 nt, Homo Sapiens
gcaguggguacaaggaggaagaaaaagggcuu

SEQ ID NO: 273868 - RNA, 32 nt, Homo Sapiens
ccggccgcgcccagcccccaccaugccacccg

SEQ ID NO: 273869 - RNA, 32 nt, Homo Sapiens
cuuccccugccuauccucuccgaucaccaagg

SEQ ID NO: 273870 - RNA, 32 nt, Homo Sapiens
cucucucagacccaucuuggaggcugauuacu

SEQ ID NO: 273871 - RNA, 32 nt, Homo Sapiens
aauaaaaacuaauuuaaauguuagcugaagau

SEQ ID NO: 273872 - RNA, 32 nt, Homo Sapiens
uauguacaauauuuuaagcauuacucuuguaa

SEQ ID NO: 273873 - RNA, 32 nt, Homo Sapiens
uauuuuauuucuguaguuucugguuagcuacc

SEQ ID NO: 273874 - RNA, 32 nt, Homo Sapiens
agcggcacugauauaacguggugcugucacac

SEQ ID NO: 273875 - RNA, 32 nt, Homo Sapiens
ggaugugggaggaggggcuggcagggccgccu

SEQ ID NO: 273876 - RNA, 32 nt, Homo Sapiens
auucaugaaaauaaauguacaucuucuaucuu

SEQ ID NO: 273877 - RNA, 32 nt, Homo Sapiens
aaguuagauauacauuuuuaaauauuuacugc

SEQ ID NO: 273878 - RNA, 32 nt, Homo Sapiens
aaucuaguagaguauuacauuuagaaguaauc

SEQ ID NO: 273879 - RNA, 32 nt, Homo Sapiens
aaucuguguucucuuccuuucauuuuaucccu

SEQ ID NO: 273880 - RNA, 31 nt, Homo Sapiens
uucauggccaauuuguggggauaugucaaaa

SEQ ID NO: 273881 - RNA, 32 nt, Homo Sapiens
gaucucugcccccuccucuccccaggccucug

SEQ ID NO: 273882 - RNA, 32 nt, Homo Sapiens
cacagaagcaauaaaaagauucuuuuaucaga

SEQ ID NO: 273883 - RNA, 32 nt, Homo Sapiens
acaauuuguaguaccauaaaaacauaaaauuc

SEQ ID NO: 273884 - RNA, 29 nt, Homo Sapiens
aguuccauauguauaaugugccagguaac

SEQ ID NO: 273885 - RNA, 29 nt, Homo Sapiens
ccagagaggaagguggcuuaccaagauca

SEQ ID NO: 273886 - RNA, 32 nt, Homo Sapiens
auccaaagauaaauaagacuuauuccauccuc

SEQ ID NO: 273887 - RNA, 32 nt, Homo Sapiens
uaggucagucuaggaagaaagagaaaguagca

SEQ ID NO: 273888 - RNA, 32 nt, Homo Sapiens
ccccacgccuguaucuggcacugcuggugugu

SEQ ID NO: 273889 - RNA, 32 nt, Homo Sapiens
ucggccuccaccugcagccccgcggcccccgc

SEQ ID NO: 273890 - RNA, 31 nt, Homo Sapiens
ggagccaggagccggaaccagggccgagccc

SEQ ID NO: 273891 - RNA, 32 nt, Homo Sapiens
guacacuugcugaaaugaaauauuagaaaugg

SEQ ID NO: 273892 - RNA, 32 nt, Homo Sapiens
ugcugggucauaucagcuuuaucccuugguaa

SEQ ID NO: 273893 - RNA, 32 nt, Homo Sapiens
acuuuggcaaaggagugugaguuuuggggaag

SEQ ID NO: 273894 - RNA, 32 nt, Homo Sapiens
gagcaggucucccuuuuacucuucccaacugg

SEQ ID NO: 273895 - RNA, 32 nt, Homo Sapiens
cauaugaaauguucaauaaccagaaaagacug

SEQ ID NO: 273896 - RNA, 27 nt, Homo Sapiens
gccuuuggagacauuaaaauaguuuuc

SEQ ID NO: 273897 - RNA, 32 nt, Homo Sapiens
uguucuguucaaaacuauuuguucaaagaacc

SEQ ID NO: 273898 - RNA, 32 nt, Homo Sapiens
ccuucagcugcccuuggucuugccagacagca

SEQ ID NO: 273899 - RNA, 32 nt, Homo Sapiens
acuugagaaaauuuaaaguguuucuaguuaaa

SEQ ID NO: 273900 - RNA, 32 nt, Homo Sapiens
uguuuucaagggaaacaaucacauuguuugau

SEQ ID NO: 273901 - RNA, 32 nt, Homo Sapiens
caagacccuccccaaacagccaucuccccaga

SEQ ID NO: 273902 - RNA, 32 nt, Homo Sapiens
cgaaccucggggugggggugggcagugagugc

SEQ ID NO: 273903 - RNA, 32 nt, Homo Sapiens
caccgccgcgcgcucugacgccggcauaaggg

SEQ ID NO: 273904 - RNA, 31 nt, Homo Sapiens
uaagaaaaauaaaacagaugucagccugugu

SEQ ID NO: 273905 - RNA, 32 nt, Homo Sapiens
ugaaguauguguagcuuguugcaggagucaca

SEQ ID NO: 273906 - RNA, 32 nt, Homo Sapiens
ggugcugguggcggcggcggcggaggcgacgg

SEQ ID NO: 273907 - RNA, 32 nt, Homo Sapiens
aaauuguguauauaucuuauaacuguuuuaga

SEQ ID NO: 273908 - RNA, 32 nt, Homo Sapiens
agaggccucgcgaggcagggcuagaagcugug

SEQ ID NO: 273909 - RNA, 32 nt, Homo Sapiens
acaacauuaaaagccagacuagcggaguuuga

SEQ ID NO: 273910 - RNA, 32 nt, Homo Sapiens
cacaagugagcuggcaaguggugcuggugaca

SEQ ID NO: 273911 - RNA, 32 nt, Homo Sapiens
cgggagacgaggagggcgggcagggagguggg

SEQ ID NO: 273912 - RNA, 32 nt, Homo Sapiens
acagcugaaggagaaugaaacacacacaucca

SEQ ID NO: 273913 - RNA, 32 nt, Homo Sapiens
ugaugauugagauguucucacugugauuucaa

SEQ ID NO: 273914 - RNA, 32 nt, Homo Sapiens
ggcucuccuuucugugguuuuauuuaaugggc

SEQ ID NO: 273915 - RNA, 32 nt, Homo Sapiens
ucaguccauuuucucucauuuaugacaugagu

SEQ ID NO: 273916 - RNA, 32 nt, Homo Sapiens
cugagucccucauuggcugccagcagucuggg

SEQ ID NO: 273917 - RNA, 32 nt, Homo Sapiens
gaucauacguaccccaaaccucaacaucacac

SEQ ID NO: 273918 - RNA, 32 nt, Homo Sapiens
cuuuaguuagugcauuugaacuugguaccugu

SEQ ID NO: 273919 - RNA, 32 nt, Homo Sapiens
gagccuaggggagaggugcccugacggcacuu

SEQ ID NO: 273920 - RNA, 32 nt, Homo Sapiens
ggccuggaauucuaccacagggaauuuggugg

SEQ ID NO: 273921 - RNA, 32 nt, Homo Sapiens
cauggaguuucuuuaaauguuuuccuagagug

SEQ ID NO: 273922 - RNA, 32 nt, Homo Sapiens
ggagccggggcuuugcccugcugcuguccucu

SEQ ID NO: 273923 - RNA, 32 nt, Homo Sapiens
accuuugaaaaugcuagauuuacaaugagaaa

SEQ ID NO: 273924 - RNA, 32 nt, Homo Sapiens
cacaugugucucuguagucauguggccaggug

SEQ ID NO: 273925 - RNA, 32 nt, Homo Sapiens
agccugccccagccugccccagccucccagcu

SEQ ID NO: 273926 - RNA, 32 nt, Homo Sapiens
gcuggggauccgagugaggcgaggggagggac

SEQ ID NO: 273927 - RNA, 32 nt, Homo Sapiens
gccucagguaaggaugaggaacucugaaauca

SEQ ID NO: 273928 - RNA, 32 nt, Homo Sapiens
ugggcucagugguggcuucccagucaugguau

SEQ ID NO: 273929 - RNA, 32 nt, Homo Sapiens
ggguggcagcccccagcuccccucagugcugc

SEQ ID NO: 273930 - RNA, 32 nt, Homo Sapiens
ugagagagaagaaaaaucaugucccaaguucu

SEQ ID NO: 273931 - RNA, 32 nt, Homo Sapiens
ugugugguauacuuuuuaaauaaauuaaagcu

SEQ ID NO: 273932 - RNA, 32 nt, Homo Sapiens
ggaggcugcgggcagccguuaucccgugguuu

SEQ ID NO: 273933 - RNA, 32 nt, Homo Sapiens
gaggucguggugcaggcgagcagacgccagac

SEQ ID NO: 273934 - RNA, 32 nt, Homo Sapiens
uuuccuuaucauauuucuggugcaguugauua

SEQ ID NO: 273935 - RNA, 32 nt, Homo Sapiens
cuuaaaacaccuguucuccagcccuuggacag

SEQ ID NO: 273936 - RNA, 32 nt, Homo Sapiens
ccuucuggacuggcaggauucucuugccaagc

SEQ ID NO: 273937 - RNA, 32 nt, Homo Sapiens
acuggucucugacugccuuucccacagacaca

SEQ ID NO: 273938 - RNA, 32 nt, Homo Sapiens
gucucaugcacauggucaguacucaauaaaua

SEQ ID NO: 273939 - RNA, 32 nt, Homo Sapiens
gggcacgggcuguggcccgaggaggcggugga

SEQ ID NO: 273940 - RNA, 32 nt, Homo Sapiens
agaguugauaaagauuaccugugcagugcaga

SEQ ID NO: 273941 - RNA, 32 nt, Homo Sapiens
gccugucacggagggauugaucuucagggcug

SEQ ID NO: 273942 - RNA, 32 nt, Homo Sapiens
uggcccaggccugcgaggaguaccucagccag

SEQ ID NO: 273943 - RNA, 32 nt, Homo Sapiens
uguuccagcucuuugaaauagucugugugaag

SEQ ID NO: 273944 - RNA, 32 nt, Homo Sapiens
uugagauucuaccuuauauuuuuugaauuaua

SEQ ID NO: 273945 - RNA, 32 nt, Homo Sapiens
aaccugccugucccaaaccacuuacuucccug

SEQ ID NO: 273946 - RNA, 32 nt, Homo Sapiens
caucugugucaggcagcccgcaugagagauga

SEQ ID NO: 273947 - RNA, 32 nt, Homo Sapiens
uggugagggcuaggugugaucaacacuuuucu

SEQ ID NO: 273948 - RNA, 32 nt, Homo Sapiens
auuucuguaaaacuucuacaacuucugguguc

SEQ ID NO: 273949 - RNA, 32 nt, Homo Sapiens
aagcuagaaacacuugggguugucaacaugag

SEQ ID NO: 273950 - RNA, 32 nt, Homo Sapiens
gcgccggaggcaggugugggacaggcacuggc

SEQ ID NO: 273951 - RNA, 32 nt, Homo Sapiens
aggaauauaugauuuauucacaguuccucaag

SEQ ID NO: 273952 - RNA, 32 nt, Homo Sapiens
aaggugcuucccucgcaucucaucaccuacaa

SEQ ID NO: 273953 - RNA, 32 nt, Homo Sapiens
ugaugcaaggauuacagaaacugaugccaagg

SEQ ID NO: 273954 - RNA, 32 nt, Homo Sapiens
auuuuuuaaaauuuauauuguaaauauugugu

SEQ ID NO: 273955 - RNA, 32 nt, Homo Sapiens
aggaucagagguuccuuggggaagacccaccc

SEQ ID NO: 273956 - RNA, 32 nt, Homo Sapiens
cagugcccgccuuugcgccgccccacccccug

SEQ ID NO: 273957 - RNA, 32 nt, Homo Sapiens
uagaaaaauauuacagaaauagcugaagagaa

SEQ ID NO: 273958 - RNA, 32 nt, Homo Sapiens
ugcaacccugucugcugcuccggagcuccgag

SEQ ID NO: 273959 - RNA, 32 nt, Homo Sapiens
uuguaagaaaauaaaaguuugagcaccugaaa

SEQ ID NO: 273960 - RNA, 32 nt, Homo Sapiens
ugcuauaauaauaauaauacagauguuguuau

SEQ ID NO: 273961 - RNA, 32 nt, Homo Sapiens
uucuucucaguuugaaagacaaugaaaaaugg

SEQ ID NO: 273962 - RNA, 32 nt, Homo Sapiens
uuucaacauugucauuuuuucuuagaacuuca

SEQ ID NO: 273963 - RNA, 32 nt, Homo Sapiens
auuccugucucccgcuuuccucaccacauaca

SEQ ID NO: 273964 - RNA, 30 nt, Homo Sapiens
ugagguugucaaaggggcggcaggaaaugg

SEQ ID NO: 273965 - RNA, 32 nt, Homo Sapiens
aaaggaaauuuuaaaauguucuggaaguguuu

SEQ ID NO: 273966 - RNA, 32 nt, Homo Sapiens
gguucuggaagacggcagagcugccgccauuu

SEQ ID NO: 273967 - RNA, 32 nt, Homo Sapiens
cccccaugcagccaugacuggaugcgccccca

SEQ ID NO: 273968 - RNA, 32 nt, Homo Sapiens
gagguccugugggaagugaggaucucaggacg

SEQ ID NO: 273969 - RNA, 32 nt, Homo Sapiens
cugaccgcaccgugaggcgccaagucggccgc

SEQ ID NO: 273970 - RNA, 32 nt, Homo Sapiens
uuuucauuaagggaguagaauagucacuuaac

SEQ ID NO: 273971 - RNA, 32 nt, Homo Sapiens
uggggcacgcacugcgcagacuccccgcugca

SEQ ID NO: 273972 - RNA, 32 nt, Homo Sapiens
uugcaaucccauuugcaggauccgucugugca

SEQ ID NO: 273973 - RNA, 32 nt, Homo Sapiens
acaaggcuucacauaaaaaauuauuucuucac

SEQ ID NO: 273974 - RNA, 32 nt, Homo Sapiens
cagcugcccuuaaagggugggcagcauuuagu

SEQ ID NO: 273975 - RNA, 32 nt, Homo Sapiens
cagugccucccggcugcuagccugaaagcagc

SEQ ID NO: 273976 - RNA, 32 nt, Homo Sapiens
cucuucuggucacaguucuuccauugguugga

SEQ ID NO: 273977 - RNA, 32 nt, Homo Sapiens
gcggcggcgggggcgggcgugcggaacaaagc

SEQ ID NO: 273978 - RNA, 32 nt, Homo Sapiens
accaaaggaaaugguacaauuucugagaauau

SEQ ID NO: 273979 - RNA, 32 nt, Homo Sapiens
aaauauuuuggaacuuuuuuuuaaauuauagu

SEQ ID NO: 273980 - RNA, 32 nt, Homo Sapiens
cugccucuaauucacagaaugcacuuucuacc

SEQ ID NO: 273981 - RNA, 32 nt, Homo Sapiens
uucugcccgccgccgccgcugccgagcgccgc

SEQ ID NO: 273982 - RNA, 32 nt, Homo Sapiens
gaacuggauucugaaauugaacaagagacaca

SEQ ID NO: 273983 - RNA, 32 nt, Homo Sapiens
aacuuguucaacaucagggaauucacaaugga

SEQ ID NO: 273984 - RNA, 32 nt, Homo Sapiens
uuuauaauucuuucuuuuuccuucauaauuuu

SEQ ID NO: 273985 - RNA, 32 nt, Homo Sapiens
caaagggguuuggggggucuugggauggugug

SEQ ID NO: 273986 - RNA, 32 nt, Homo Sapiens
uaaaguuccuguguaugcugagauacaccagu

SEQ ID NO: 273987 - RNA, 32 nt, Homo Sapiens
ccuaaugauauuauuucuacuaauggaauaaa

SEQ ID NO: 273988 - RNA, 32 nt, Homo Sapiens
ugcucacugcaacauccaccucaugggcucaa

SEQ ID NO: 273989 - RNA, 32 nt, Homo Sapiens
ucacaagacagagaaaacguauuaggaaaaac

SEQ ID NO: 273990 - RNA, 32 nt, Homo Sapiens
aaguccgagcccccucccggggcuggaggggg

SEQ ID NO: 273991 - RNA, 32 nt, Homo Sapiens
cgccucggaacgcaggccuacugggugcaaca

SEQ ID NO: 273992 - RNA, 32 nt, Homo Sapiens
gcagaggcugugcucccuccucagguggccuc

SEQ ID NO: 273993 - RNA, 32 nt, Homo Sapiens
ggggcugagccacgcucucguuuugucaggca

SEQ ID NO: 273994 - RNA, 32 nt, Homo Sapiens
cgcugggcugugcgccccgccggcgccgguag

SEQ ID NO: 273995 - RNA, 32 nt, Homo Sapiens
aaugccuguauauaauaacucuuacgugauau

SEQ ID NO: 273996 - RNA, 32 nt, Homo Sapiens
ugugacuaauuaguuggcauauuguuaaaagu

SEQ ID NO: 273997 - RNA, 32 nt, Homo Sapiens
acgagcugcccacgucgucuccaggaagggac

SEQ ID NO: 273998 - RNA, 32 nt, Homo Sapiens
aguguggggcuuugugucuaugcuaccagaag

SEQ ID NO: 273999 - RNA, 32 nt, Homo Sapiens
auaugaauauugaauuucuaaauauuuguugu

SEQ ID NO: 274000 - RNA, 32 nt, Homo Sapiens
auacagugggcagccaaugaauguguuggaaa

SEQ ID NO: 274001 - RNA, 32 nt, Homo Sapiens
aggugcuaauuauggacauagauucuuugugu

SEQ ID NO: 274002 - RNA, 32 nt, Homo Sapiens
uuugauuugugauuuuuaaaaauugauaccuu

SEQ ID NO: 274003 - RNA, 32 nt, Homo Sapiens
gugauuucuuauuauuauauguuagccugcau

SEQ ID NO: 274004 - RNA, 32 nt, Homo Sapiens
cugcaguccaccuggugcuggggcuguggugc

SEQ ID NO: 274005 - RNA, 32 nt, Homo Sapiens
ggggcaggccgggggcagcugucugucuggcu

SEQ ID NO: 274006 - RNA, 32 nt, Homo Sapiens
ugacauuuuuauuuuuaugucucuccuuaacu

SEQ ID NO: 274007 - RNA, 32 nt, Homo Sapiens
ggacuggaugguuuuugcaagagcuuuuuuuu

SEQ ID NO: 274008 - RNA, 32 nt, Homo Sapiens
auauuuccugagggaucccacccccuacuuaa

SEQ ID NO: 274009 - RNA, 32 nt, Homo Sapiens
cuuccgauuggaaaaugcaaauuguuuuuauu

SEQ ID NO: 274010 - RNA, 32 nt, Homo Sapiens
cccaggcccgacgcucugggcgcgcccggaac

SEQ ID NO: 274011 - RNA, 32 nt, Homo Sapiens
ccgugaaaccuuuccuucuccuacucggccac

SEQ ID NO: 274012 - RNA, 32 nt, Homo Sapiens
cccucucgcugggugucccggaggaaggcgcc

SEQ ID NO: 274013 - RNA, 31 nt, Homo Sapiens
gcugcgcccaguuccgcaggagccgucccac

SEQ ID NO: 274014 - RNA, 32 nt, Homo Sapiens
auguguuuauucauccagcaguguugcucagc

SEQ ID NO: 274015 - RNA, 32 nt, Homo Sapiens
gcagaugaacacggaggcucucuguugucugu

SEQ ID NO: 274016 - RNA, 32 nt, Homo Sapiens
cuacaugguagaacuuuuucuucuuacaacuu

SEQ ID NO: 274017 - RNA, 32 nt, Homo Sapiens
accuccgccucccggguucaagugauucucuu

SEQ ID NO: 274018 - RNA, 32 nt, Homo Sapiens
caguuaacuaaaaguaaaaaugucuauucuga

SEQ ID NO: 274019 - RNA, 32 nt, Homo Sapiens
uauuaccccuuuucggccccauguaucucagu

SEQ ID NO: 274020 - RNA, 32 nt, Homo Sapiens
ucccugcgcaccgggugcgggcggcggagagg

SEQ ID NO: 274021 - RNA, 32 nt, Homo Sapiens
cuagaaccaaaauaaaguuggggcaggaagag

SEQ ID NO: 274022 - RNA, 32 nt, Homo Sapiens
aaaccuggcccauuuuggucccuaucacaucu

SEQ ID NO: 274023 - RNA, 32 nt, Homo Sapiens
gcuuccuaaauggcccuguuuacggccuauga

SEQ ID NO: 274024 - RNA, 32 nt, Homo Sapiens
aggcgcgggcagagccgagcgcagcggaggcu

SEQ ID NO: 274025 - RNA, 32 nt, Homo Sapiens
cagugcuguacugcacacaccacagaaugugu

SEQ ID NO: 274026 - RNA, 32 nt, Homo Sapiens
cugacauugguagauagauggauuuaggcaaa

SEQ ID NO: 274027 - RNA, 32 nt, Homo Sapiens
cagccccccuccccacugccuccccagcucuc

SEQ ID NO: 274028 - RNA, 32 nt, Homo Sapiens
cuauuacaaaaauaucaguauucauauuuuac

SEQ ID NO: 274029 - RNA, 32 nt, Homo Sapiens
acacugcaaccucagcuuaacaugaauaacaa

SEQ ID NO: 274030 - RNA, 32 nt, Homo Sapiens
uuauuauauggaaccaaaauuauucuuugguu

SEQ ID NO: 274031 - RNA, 32 nt, Homo Sapiens
uccucaggcuccuggguggccuguuaugccag

SEQ ID NO: 274032 - RNA, 32 nt, Homo Sapiens
caagcaaaugggagcuucuuuggaccuuggag

SEQ ID NO: 274033 - RNA, 32 nt, Homo Sapiens
uucgcagucaaaucccgcucuccgcccgccgc

SEQ ID NO: 274034 - RNA, 32 nt, Homo Sapiens
ugcuugugaagauaauaaacuucuccauuggu

SEQ ID NO: 274035 - RNA, 32 nt, Homo Sapiens
uggcugucaccauggugggauucuuucagaau

SEQ ID NO: 274036 - RNA, 32 nt, Homo Sapiens
gagaaacuacacaaccaagcaguuauuugguc

SEQ ID NO: 274037 - RNA, 32 nt, Homo Sapiens
gaagugcuggaacaugcucagauuguuuuuua

SEQ ID NO: 274038 - RNA, 32 nt, Homo Sapiens
uaaagcgccaucuauuugcuagauacuuucac

SEQ ID NO: 274039 - RNA, 32 nt, Homo Sapiens
cuuagagaauccaacaauguccugcuuccuug

SEQ ID NO: 274040 - RNA, 32 nt, Homo Sapiens
ccucuagugucuacugguggcucuaauacugc

SEQ ID NO: 274041 - RNA, 32 nt, Homo Sapiens
agcugccggccgcuggggacugggcccugcuc

SEQ ID NO: 274042 - RNA, 32 nt, Homo Sapiens
cuagaagcugucuagguccguccgguguguca

SEQ ID NO: 274043 - RNA, 32 nt, Homo Sapiens
cguggcucuucauugcggcugcuuucugcucc

SEQ ID NO: 274044 - RNA, 32 nt, Homo Sapiens
uccgcggcggccucucgcgcugcggaauccag

SEQ ID NO: 274045 - RNA, 32 nt, Homo Sapiens
ggguccaugcucccaacccuuagcaagaggag

SEQ ID NO: 274046 - RNA, 32 nt, Homo Sapiens
aaguaaauggauuguuugugcuuaauguaaag

SEQ ID NO: 274047 - RNA, 32 nt, Homo Sapiens
ggggcuuucaccuucucauacccaggcaacca

SEQ ID NO: 274048 - RNA, 32 nt, Homo Sapiens
cuccccaucgccagcugaugacucaagauucc

SEQ ID NO: 274049 - RNA, 32 nt, Homo Sapiens
augacaaggaaauuuacaaaauacuagaguau

SEQ ID NO: 274050 - RNA, 32 nt, Homo Sapiens
gagacuaggaugaguucuuggcaagggccagc

SEQ ID NO: 274051 - RNA, 32 nt, Homo Sapiens
ugagagaaugagccagugagaagcuucucuag

SEQ ID NO: 274052 - RNA, 31 nt, Homo Sapiens
acaggauuuuugacuucacagauaaauuauu

SEQ ID NO: 274053 - RNA, 32 nt, Homo Sapiens
aauguuuuaaaagggacuuuagcucuggaacu

SEQ ID NO: 274054 - RNA, 31 nt, Homo Sapiens
cuucuuucauccucagcuucagaagagacag

SEQ ID NO: 274055 - RNA, 32 nt, Homo Sapiens
acagggaaccccgaggggacaguggagcaggc

SEQ ID NO: 274056 - RNA, 31 nt, Homo Sapiens
gcccagcagcacugccaggccuugaagugcu

SEQ ID NO: 274057 - RNA, 32 nt, Homo Sapiens
ugacuccugccagccuccagguccccguggua

SEQ ID NO: 274058 - RNA, 32 nt, Homo Sapiens
cggugagcgcggacggcccggaggcggcggcu

SEQ ID NO: 274059 - RNA, 32 nt, Homo Sapiens
caaaucaaaaauaucugaaauacuuuuguccc

SEQ ID NO: 274060 - RNA, 32 nt, Homo Sapiens
gaagcagucaugugaacucaugugcuggaaga

SEQ ID NO: 274061 - RNA, 32 nt, Homo Sapiens
uagaguuucuuacauuuuugggaccuuuuuua

SEQ ID NO: 274062 - RNA, 32 nt, Homo Sapiens
uguguauguaaauauaaggcauuccuauuuug

SEQ ID NO: 274063 - RNA, 32 nt, Homo Sapiens
uuuacaagguuggcccuugauuggcaucuggg

SEQ ID NO: 274064 - RNA, 32 nt, Homo Sapiens
uuucuacaaauaaguucuuuuaaacagucuuu

SEQ ID NO: 274065 - RNA, 32 nt, Homo Sapiens
cugucugcaauaaagucaccagaaacugccau

SEQ ID NO: 274066 - RNA, 32 nt, Homo Sapiens
uagaaaugugaacacugaauuuauuuuaaaaa

SEQ ID NO: 274067 - RNA, 32 nt, Homo Sapiens
accugugccccgagggcggccagggacccauc

SEQ ID NO: 274068 - RNA, 32 nt, Homo Sapiens
guaaaaaguacacuuuaaaauauuuuaaucag

SEQ ID NO: 274069 - RNA, 32 nt, Homo Sapiens
gcuaucaaugaaaugcuacaaauggaauaagu

SEQ ID NO: 274070 - RNA, 32 nt, Homo Sapiens
ucuccccugggaagaggggaugagaggagaag

SEQ ID NO: 274071 - RNA, 32 nt, Homo Sapiens
ggcuggcugcggcuacaaggcagacccgggag

SEQ ID NO: 274072 - RNA, 32 nt, Homo Sapiens
ccaaaccagccagggaaccaaccugggaagug

SEQ ID NO: 274073 - RNA, 32 nt, Homo Sapiens
gaaaaaucuaauacuguugccuuaauaauuuu

SEQ ID NO: 274074 - RNA, 32 nt, Homo Sapiens
cggaggcaggggacagaagaggggagauuggg

SEQ ID NO: 274075 - RNA, 32 nt, Homo Sapiens
guucugacacuggguguugaggucauguggca

SEQ ID NO: 274076 - RNA, 32 nt, Homo Sapiens
agagcgagacuccgucucaaauaaaaaacaac

SEQ ID NO: 274077 - RNA, 32 nt, Homo Sapiens
ucugaagcuuugcccaggauccauugcugcag

SEQ ID NO: 274078 - RNA, 32 nt, Homo Sapiens
agacuuugggcagggaaggcgggcgggcgggg

SEQ ID NO: 274079 - RNA, 32 nt, Homo Sapiens
gccgagcgggcgcauacgcccgggccccaagg

SEQ ID NO: 274080 - RNA, 32 nt, Homo Sapiens
uauguauauuuuacugcaauugaaaaaaucau

SEQ ID NO: 274081 - RNA, 32 nt, Homo Sapiens
cacacacacacacacacacacacacacacaug

SEQ ID NO: 274082 - RNA, 32 nt, Homo Sapiens
cucuuaaaaauguuuuuucauguguuuuauaa

SEQ ID NO: 274083 - RNA, 32 nt, Homo Sapiens
cggucaggguagucccgaacuccugaccucaa

SEQ ID NO: 274084 - RNA, 32 nt, Homo Sapiens
agggaucuaaucuauucaucagucaacccaca

SEQ ID NO: 274085 - RNA, 32 nt, Homo Sapiens
ggcugccggagggcgggaggcaggagcgggcc

SEQ ID NO: 274086 - RNA, 32 nt, Homo Sapiens
cuggacugaccugguccacagggcaccugcca

SEQ ID NO: 274087 - RNA, 32 nt, Homo Sapiens
acucugccaucguacuucaagagcagccagua

SEQ ID NO: 274088 - RNA, 32 nt, Homo Sapiens
gguuaccaacuggccagcaggcugugucccug

SEQ ID NO: 274089 - RNA, 32 nt, Homo Sapiens
acagcuuuuaacaaaauugaggacuugggucu

SEQ ID NO: 274090 - RNA, 32 nt, Homo Sapiens
gcagaagacaagggggacugugaggcagcucc

SEQ ID NO: 274091 - RNA, 32 nt, Homo Sapiens
augccauugcacuguagaaggcgaaggggaag

SEQ ID NO: 274092 - RNA, 31 nt, Homo Sapiens
aagcagaaauaaaugguucuauguuuucaac

SEQ ID NO: 274093 - RNA, 32 nt, Homo Sapiens
aauugaagcaaauauggaaacuuuacaauaga

SEQ ID NO: 274094 - RNA, 32 nt, Homo Sapiens
auuuucauaacacuaauaauacacugggauug

SEQ ID NO: 274095 - RNA, 29 nt, Homo Sapiens
guuuuaguauguauguaccuggaaauuuu

SEQ ID NO: 274096 - RNA, 32 nt, Homo Sapiens
gcugcuucuacuuucuuucucacauucauuuc

SEQ ID NO: 274097 - RNA, 32 nt, Homo Sapiens
acagggauccauuuuaaagagcuacuuagaga

SEQ ID NO: 274098 - RNA, 32 nt, Homo Sapiens
cuguuuacuagaagaauuuuuaaaagaccagu

SEQ ID NO: 274099 - RNA, 32 nt, Homo Sapiens
cggagguggggguggggguaguuuaagccuau

SEQ ID NO: 274100 - RNA, 32 nt, Homo Sapiens
uaagccuugacaaagcuaaaaauuaaccugac

SEQ ID NO: 274101 - RNA, 32 nt, Homo Sapiens
ccuagacagaaccugcagcucuguggaaagag

SEQ ID NO: 274102 - RNA, 32 nt, Homo Sapiens
cggcuggccuggcagaggggcuccucacaucc

SEQ ID NO: 274103 - RNA, 32 nt, Homo Sapiens
ccucugcugcaaacagaugaauugaaucagca

SEQ ID NO: 274104 - RNA, 32 nt, Homo Sapiens
ugcccccguggggcucccggcauccugaaagc

SEQ ID NO: 274105 - RNA, 32 nt, Homo Sapiens
uuugauaucucaccagccaugugaacugaagc

SEQ ID NO: 274106 - RNA, 32 nt, Homo Sapiens
cuccaacgugcaccaccuccauugagcuuccg

SEQ ID NO: 274107 - RNA, 32 nt, Homo Sapiens
acgggagccagacgaauuaagaagauucccca

SEQ ID NO: 274108 - RNA, 32 nt, Homo Sapiens
augaaggaucuguggggugcugcaguuccugc

SEQ ID NO: 274109 - RNA, 32 nt, Homo Sapiens
cugggacccuggaaaggucuagcugagccuuu

SEQ ID NO: 274110 - RNA, 32 nt, Homo Sapiens
uacucccccagagcgugacccggagcaggugc

SEQ ID NO: 274111 - RNA, 32 nt, Homo Sapiens
cgauuucauccauuuuaaaugcuugacccucu

SEQ ID NO: 274112 - RNA, 32 nt, Homo Sapiens
aucaaagaacaaaaaacuaacccaauacuuuu

SEQ ID NO: 274113 - RNA, 32 nt, Homo Sapiens
uuuuggcuuuucugcuaaagauggcagaaauu

SEQ ID NO: 274114 - RNA, 32 nt, Homo Sapiens
agaaaaaugcuguucagaaauaugaaaaguca

SEQ ID NO: 274115 - RNA, 32 nt, Homo Sapiens
ucaacccaacuggaggguagguuagaagaaaa

SEQ ID NO: 274116 - RNA, 31 nt, Homo Sapiens
ucccugcugccggucauaccacagccuucau

SEQ ID NO: 274117 - RNA, 32 nt, Homo Sapiens
uaccuggccccgcuccagauccccccagcucu

SEQ ID NO: 274118 - RNA, 32 nt, Homo Sapiens
gugauccgcccgccucggccucccagaaugcu

SEQ ID NO: 274119 - RNA, 32 nt, Homo Sapiens
gguaugaggccuccgagauagcugagggaagu

SEQ ID NO: 274120 - RNA, 32 nt, Homo Sapiens
agugucaggccaugguagaauaugaguucaca

SEQ ID NO: 274121 - RNA, 32 nt, Homo Sapiens
agcaaaucaagcugcacaaaauguagagugcu

SEQ ID NO: 274122 - RNA, 32 nt, Homo Sapiens
aagguucgauuuucccaauuuugaugaagucu

SEQ ID NO: 274123 - RNA, 32 nt, Homo Sapiens
auuaucgauugcauauaucaguuuaugcugug

SEQ ID NO: 274124 - RNA, 32 nt, Homo Sapiens
cacgggggcaggagaagaaggaggaggaggcc

SEQ ID NO: 274125 - RNA, 32 nt, Homo Sapiens
uuucaaauauccaaauguugaaaaugcaauug

SEQ ID NO: 274126 - RNA, 32 nt, Homo Sapiens
ccgccagcccagcccagcccagcccuacuccc

SEQ ID NO: 274127 - RNA, 32 nt, Homo Sapiens
auguguuucuucauuauuuugcagcuccucgu

SEQ ID NO: 274128 - RNA, 32 nt, Homo Sapiens
gccaagugacaggcgagcuagcggaaagccgc

SEQ ID NO: 274129 - RNA, 32 nt, Homo Sapiens
gcugcccugggcccguucccacagcaccuggc

SEQ ID NO: 274130 - RNA, 32 nt, Homo Sapiens
aggccaguucuggagcuauugcagccucgguu

SEQ ID NO: 274131 - RNA, 28 nt, Homo Sapiens
ggaacaguuucaggaccacugacauaga

SEQ ID NO: 274132 - RNA, 32 nt, Homo Sapiens
uucucuccaugcccugggucacuuccuuuuuu

SEQ ID NO: 274133 - RNA, 32 nt, Homo Sapiens
cccuaggaauggguggcaaacaacaucaggaa

SEQ ID NO: 274134 - RNA, 32 nt, Homo Sapiens
accucucagggugccugcccugguuccucccc

SEQ ID NO: 274135 - RNA, 32 nt, Homo Sapiens
uagaugaaugucagccacaggagcuucuucaa

SEQ ID NO: 274136 - RNA, 32 nt, Homo Sapiens
ugccccagcuggaucugggggaccugaaccuc

SEQ ID NO: 274137 - RNA, 32 nt, Homo Sapiens
gccugcuggugcccuucugucuguccacgucu

SEQ ID NO: 274138 - RNA, 32 nt, Homo Sapiens
agaagcgcgugcccucagccgggggucccccg

SEQ ID NO: 274139 - RNA, 32 nt, Homo Sapiens
caaacuaauaaaacuuugacgagucaccuucc

SEQ ID NO: 274140 - RNA, 32 nt, Homo Sapiens
aggccaucuuagaugcugaaaacucugagcac

SEQ ID NO: 274141 - RNA, 32 nt, Homo Sapiens
aaagcaaugcaaacuuaggcgaguacuucuug

SEQ ID NO: 274142 - RNA, 32 nt, Homo Sapiens
accgccucuucccgccgcccagcccaccccau

SEQ ID NO: 274143 - RNA, 32 nt, Homo Sapiens
acuauaucuaugugcauagaaaaacccuggaa

SEQ ID NO: 274144 - RNA, 32 nt, Homo Sapiens
cgaguuugccccaccuacucuguaauuugcuu

SEQ ID NO: 274145 - RNA, 32 nt, Homo Sapiens
uuuggguccacauuuuccacucaaaaucauag

SEQ ID NO: 274146 - RNA, 32 nt, Homo Sapiens
uggugccgggccugggcuuccucgagcguccc

SEQ ID NO: 274147 - RNA, 32 nt, Homo Sapiens
auuucaauucuuccuuagaguuuuuguguucu

SEQ ID NO: 274148 - RNA, 32 nt, Homo Sapiens
cuggguaccugguggauagcugccuucuccug

SEQ ID NO: 274149 - RNA, 32 nt, Homo Sapiens
gacuuuauaauauuguguuuuaucucauuucu

SEQ ID NO: 274150 - RNA, 32 nt, Homo Sapiens
ccguguaaggcucagggcugcugggcucugau

SEQ ID NO: 274151 - RNA, 32 nt, Homo Sapiens
agugagaugcauuuuuucucauuuucagcaag

SEQ ID NO: 274152 - RNA, 31 nt, Homo Sapiens
uaacuucauuugaugccuugcuuauaauauc

SEQ ID NO: 274153 - RNA, 32 nt, Homo Sapiens
gcggaggauauucuuggugaucuuggaagugu

SEQ ID NO: 274154 - RNA, 32 nt, Homo Sapiens
uugcagaggugacacagguaggaaacaguagu

SEQ ID NO: 274155 - RNA, 32 nt, Homo Sapiens
aauuaaaaaaauuuaauaauuuggugauguuu

SEQ ID NO: 274156 - RNA, 32 nt, Homo Sapiens
uuuuaaccugaccguaguaccuaauguaauac

SEQ ID NO: 274157 - RNA, 32 nt, Homo Sapiens
cuggggcccagucauauaugcacaguuagacc

SEQ ID NO: 274158 - RNA, 32 nt, Homo Sapiens
ggggauccuggccacuguucccaucccauguc

SEQ ID NO: 274159 - RNA, 32 nt, Homo Sapiens
gaggaagaacaaaguccccucuguaguugguu

SEQ ID NO: 274160 - RNA, 32 nt, Homo Sapiens
acuuuuuauuaagcuguaauaucuauuuuugu

SEQ ID NO: 274161 - RNA, 32 nt, Homo Sapiens
cuggagaaggcacaguggcucaggcauggccg

SEQ ID NO: 274162 - RNA, 32 nt, Homo Sapiens
cugggagagagagcagagggcggcagggcuaa

SEQ ID NO: 274163 - RNA, 32 nt, Homo Sapiens
uugguucagugcacucuagaaacacugcugug

SEQ ID NO: 274164 - RNA, 32 nt, Homo Sapiens
cuguuuauuuuugcuguuacuuugaagcaugg

SEQ ID NO: 274165 - RNA, 32 nt, Homo Sapiens
uuccccuuccuuccucacucucuccagcugga

SEQ ID NO: 274166 - RNA, 32 nt, Homo Sapiens
uccagccuccggugcuguaaaacgcaggcgcu

SEQ ID NO: 274167 - RNA, 32 nt, Homo Sapiens
aggacaguugugacaguaaucugaccacuauc

SEQ ID NO: 274168 - RNA, 32 nt, Homo Sapiens
aucuuguacauauaaauuuauuucuuuugcag

SEQ ID NO: 274169 - RNA, 32 nt, Homo Sapiens
ggggaagauugacgaggcgcugcagucgcggg

SEQ ID NO: 274170 - RNA, 32 nt, Homo Sapiens
gaccaggaaaagcagcagcugccugcucucca

SEQ ID NO: 274171 - RNA, 32 nt, Homo Sapiens
cuugaaaacacagaaccguuaauuccuugguu

SEQ ID NO: 274172 - RNA, 32 nt, Homo Sapiens
aacuuucccuacagccagcagccgcucagcac

SEQ ID NO: 274173 - RNA, 32 nt, Homo Sapiens
aggaacaaaaaucaggagugugguauggauua

SEQ ID NO: 274174 - RNA, 32 nt, Homo Sapiens
ucgugucuuuugcauggaaagcacgcggugcc

SEQ ID NO: 274175 - RNA, 32 nt, Homo Sapiens
ggccagguguuggccugggggugcuaagugaa

SEQ ID NO: 274176 - RNA, 32 nt, Homo Sapiens
ccagcucccccuccuucaccuaguggucaagg

SEQ ID NO: 274177 - RNA, 32 nt, Homo Sapiens
ccggccccugccacccagccucaugcaaguca

SEQ ID NO: 274178 - RNA, 32 nt, Homo Sapiens
ggaggaaagggaggaguggaggugggcugggc

SEQ ID NO: 274179 - RNA, 32 nt, Homo Sapiens
acuuccugucucccaccucagcacuaguccau

SEQ ID NO: 274180 - RNA, 32 nt, Homo Sapiens
cgcgcugggcggcugggaauuccaccugagaa

SEQ ID NO: 274181 - RNA, 31 nt, Homo Sapiens
aagguaggcuuguguuuuucagugugugccu

SEQ ID NO: 274182 - RNA, 32 nt, Homo Sapiens
cauccccucccuaaccucccccgccucccgcg

SEQ ID NO: 274183 - RNA, 32 nt, Homo Sapiens
uggggcacauucaucuuaaaucuuauaguauu

SEQ ID NO: 274184 - RNA, 32 nt, Homo Sapiens
uguccucgcccucgccccggcgagcugccccc

SEQ ID NO: 274185 - RNA, 32 nt, Homo Sapiens
uuccugcugcugcuacugcugcugcugcugcc

SEQ ID NO: 274186 - RNA, 32 nt, Homo Sapiens
acacaccugcggugugcgaagcucgcauuguu

SEQ ID NO: 274187 - RNA, 32 nt, Homo Sapiens
uauuucacuuaaaauaaugaccuccaguuuca

SEQ ID NO: 274188 - RNA, 32 nt, Homo Sapiens
gucccuuuccccagccagacacucauucccau

SEQ ID NO: 274189 - RNA, 32 nt, Homo Sapiens
gcuuauuuuucucccccucuuuuuucaaggcu

SEQ ID NO: 274190 - RNA, 32 nt, Homo Sapiens
gggaaccuggaccgcgcggcgccggguuuccc

SEQ ID NO: 274191 - RNA, 30 nt, Homo Sapiens
aauuugagucucccugccucucccaaauau

SEQ ID NO: 274192 - RNA, 32 nt, Homo Sapiens
uggauuauuaaacaauucaugagaguuucccc

SEQ ID NO: 274193 - RNA, 32 nt, Homo Sapiens
ccgggggccaccugcccucccccauccucucc

SEQ ID NO: 274194 - RNA, 32 nt, Homo Sapiens
auguuuugucuucuauuucucuuaauaaucuu

SEQ ID NO: 274195 - RNA, 32 nt, Homo Sapiens
ccggagcgcacgggcugggcgguggagcagga

SEQ ID NO: 274196 - RNA, 32 nt, Homo Sapiens
cacuuucuucagaugcugacgcucggugaaca

SEQ ID NO: 274197 - RNA, 32 nt, Homo Sapiens
agugcauccacccccaggaggcggccuuaucu

SEQ ID NO: 274198 - RNA, 32 nt, Homo Sapiens
aacuaagggcuuuugaccugaugcucuuccug

SEQ ID NO: 274199 - RNA, 32 nt, Homo Sapiens
aaaaggucaucaaagggcauucaccaacugaa

SEQ ID NO: 274200 - RNA, 32 nt, Homo Sapiens
gcuauauuccacuguuuugacuccaugcuucu

SEQ ID NO: 274201 - RNA, 32 nt, Homo Sapiens
ccgccucuacugugaggauucuccaggggcua

SEQ ID NO: 274202 - RNA, 32 nt, Homo Sapiens
cagggauuugguuuuuguuuuaguuuugaaaa

SEQ ID NO: 274203 - RNA, 32 nt, Homo Sapiens
gacaccucugagauaaaagggccccuuucgac

SEQ ID NO: 274204 - RNA, 32 nt, Homo Sapiens
agugguucaaagcaguguuuggcucaagggca

SEQ ID NO: 274205 - RNA, 32 nt, Homo Sapiens
gcucagccucagagccguaggcgagagcgccu

SEQ ID NO: 274206 - RNA, 32 nt, Homo Sapiens
ccuucuaggaagcuccaguucgaugggcccaa

SEQ ID NO: 274207 - RNA, 32 nt, Homo Sapiens
auauaaauauaaauacauacauacauagauau

SEQ ID NO: 274208 - RNA, 32 nt, Homo Sapiens
cuaaugaaaaacuaccuauaauaggauaaauu

SEQ ID NO: 274209 - RNA, 32 nt, Homo Sapiens
ucgggcgauucuccugccccagccucuugagu

SEQ ID NO: 274210 - RNA, 32 nt, Homo Sapiens
cagaccugccagcagaugugcccaccaggggc

SEQ ID NO: 274211 - RNA, 32 nt, Homo Sapiens
augauuucacuuuuucuuuaguuucuuugcuc

SEQ ID NO: 274212 - RNA, 32 nt, Homo Sapiens
cugaacgaguucuacgcccacccccggcucca

SEQ ID NO: 274213 - RNA, 32 nt, Homo Sapiens
guggggauggugauuaaacaccucuuuugggu

SEQ ID NO: 274214 - RNA, 32 nt, Homo Sapiens
ccuccccuucccacccaccucuggcugaaggu

SEQ ID NO: 274215 - RNA, 32 nt, Homo Sapiens
cauguuugaagaaauuaauauuguggaagaac

SEQ ID NO: 274216 - RNA, 32 nt, Homo Sapiens
ggagauguaaaauuccuuucugaagugucucu

SEQ ID NO: 274217 - RNA, 32 nt, Homo Sapiens
agcaagaagaacugggagugguggaccaggcu

SEQ ID NO: 274218 - RNA, 32 nt, Homo Sapiens
augccccucccuccugugacccgcccucuuua

SEQ ID NO: 274219 - RNA, 32 nt, Homo Sapiens
cccaccuuccugugagugaagagaggaagcag

SEQ ID NO: 274220 - RNA, 32 nt, Homo Sapiens
cgcagcugcccggaccucccccugcacguccc

SEQ ID NO: 274221 - RNA, 32 nt, Homo Sapiens
uaucuauccauauauauguaccuauauauauc

SEQ ID NO: 274222 - RNA, 32 nt, Homo Sapiens
cugcaaauuggaaagaagacuugugguguuuu

SEQ ID NO: 274223 - RNA, 32 nt, Homo Sapiens
cacugaggcucagaaagguugaggauaagccc

SEQ ID NO: 274224 - RNA, 32 nt, Homo Sapiens
ggaaaccuaucauuuccuguccuuccuuaaga

SEQ ID NO: 274225 - RNA, 30 nt, Homo Sapiens
uccuaagagccagugggggaaccaggggcu

SEQ ID NO: 274226 - RNA, 32 nt, Homo Sapiens
guuuugcaaugagagaauaaacacugaaucca

SEQ ID NO: 274227 - RNA, 32 nt, Homo Sapiens
ccaguuugaugagaagcuuuuauuuaaaacug

SEQ ID NO: 274228 - RNA, 32 nt, Homo Sapiens
cuugguagucgcggcucuggcgcuccgcaccc

SEQ ID NO: 274229 - RNA, 32 nt, Homo Sapiens
aaacuggagaaauaaacgcauucuguccgaaa

SEQ ID NO: 274230 - RNA, 32 nt, Homo Sapiens
cucuggacaccucccacgggaccuccaucuga

SEQ ID NO: 274231 - RNA, 32 nt, Homo Sapiens
uauacguguauauaucuuauauaucuguauuc

SEQ ID NO: 274232 - RNA, 32 nt, Homo Sapiens
uguagucacugcuuaugggaagaaccucagau

SEQ ID NO: 274233 - RNA, 32 nt, Homo Sapiens
cccagcgcaggcaacuccgcgcggcggcccgg

SEQ ID NO: 274234 - RNA, 32 nt, Homo Sapiens
cgccgccuccgccgcagacgccgccgcgaugc

SEQ ID NO: 274235 - RNA, 32 nt, Homo Sapiens
cauuguguuguaauuaaaagaaacugucaaua

SEQ ID NO: 274236 - RNA, 32 nt, Homo Sapiens
accagugccagcgcccagcaucacugugcccc

SEQ ID NO: 274237 - RNA, 32 nt, Homo Sapiens
cgacuuuacagauugaauaaaugggaggaagu

SEQ ID NO: 274238 - RNA, 32 nt, Homo Sapiens
gaaccaggcucuggaaggcccgggccauuucu

SEQ ID NO: 274239 - RNA, 32 nt, Homo Sapiens
aagcucagagauaggcagaacaaugacucauu

SEQ ID NO: 274240 - RNA, 32 nt, Homo Sapiens
acuuaagaaaacuugaauaaaauguugaaacc

SEQ ID NO: 274241 - RNA, 32 nt, Homo Sapiens
gaaauuacagaaaagacagaagaugcaaagga

SEQ ID NO: 274242 - RNA, 32 nt, Homo Sapiens
cucuguuuuguuuuaagcaucauuuucuuaug

SEQ ID NO: 274243 - RNA, 32 nt, Homo Sapiens
auggagaagaaacaggcugugcugugucccua

SEQ ID NO: 274244 - RNA, 32 nt, Homo Sapiens
aaugcagccaaggagaguggcuuuuugugaau

SEQ ID NO: 274245 - RNA, 32 nt, Homo Sapiens
cgcacauuuccacagcaccugcuaaguuugua

SEQ ID NO: 274246 - RNA, 32 nt, Homo Sapiens
uccgucagaaaguguaaauguuaguuucuugg

SEQ ID NO: 274247 - RNA, 32 nt, Homo Sapiens
aaaugaaaguuugcugugugauugcaguuuua

SEQ ID NO: 274248 - RNA, 32 nt, Homo Sapiens
agaagagaugagaagaggcacaagaaacaauc

SEQ ID NO: 274249 - RNA, 32 nt, Homo Sapiens
guuuuuguguacuuuuuucaauaaaauaucaa

SEQ ID NO: 274250 - RNA, 32 nt, Homo Sapiens
aauggaaaauguuuugaguguuuauuguucag

SEQ ID NO: 274251 - RNA, 32 nt, Homo Sapiens
gcacugguggcaaggaaggaaugccauccacc

SEQ ID NO: 274252 - RNA, 32 nt, Homo Sapiens
uuaauugagagccgcucucuguaaguguuugc

SEQ ID NO: 274253 - RNA, 32 nt, Homo Sapiens
acccuuagcguaucuugccaugugucagcagg

SEQ ID NO: 274254 - RNA, 32 nt, Homo Sapiens
cugggaccuuggaggaucauguccggcaccag

SEQ ID NO: 274255 - RNA, 32 nt, Homo Sapiens
aagacaguuuagcaauacaguuuauaauagag

SEQ ID NO: 274256 - RNA, 30 nt, Homo Sapiens
ucauggccacuugcugggacauccugcaga

SEQ ID NO: 274257 - RNA, 32 nt, Homo Sapiens
aauauaaguauuuuucuuguguauguauacaa

SEQ ID NO: 274258 - RNA, 32 nt, Homo Sapiens
gauaaagguucagcuccagggguaguaccuga

SEQ ID NO: 274259 - RNA, 32 nt, Homo Sapiens
agccuucuucaucccaggacaccacacccagc

SEQ ID NO: 274260 - RNA, 32 nt, Homo Sapiens
ccaugcccagcuaauuuuuuuauuuuuuguag

SEQ ID NO: 274261 - RNA, 32 nt, Homo Sapiens
gaggccucuccgcuccugcacaggccuugcuu

SEQ ID NO: 274262 - RNA, 32 nt, Homo Sapiens
caaaauauuuaaaacaaauuuaaagggucugu

SEQ ID NO: 274263 - RNA, 32 nt, Homo Sapiens
ggagacuucauguguucauuuauuuccaccac

SEQ ID NO: 274264 - RNA, 32 nt, Homo Sapiens
ggacuugguguugguuucuuucuuucuuuucu

SEQ ID NO: 274265 - RNA, 32 nt, Homo Sapiens
caucucccauggauuugugaucagcguugcag

SEQ ID NO: 274266 - RNA, 32 nt, Homo Sapiens
aauuuuuaaguacacaauacaguauuguuaac

SEQ ID NO: 274267 - RNA, 32 nt, Homo Sapiens
cgaaaaucucgugcgaucugauuccagaagau

SEQ ID NO: 274268 - RNA, 31 nt, Homo Sapiens
auaccccgaggcgcggaaccauagauauaac

SEQ ID NO: 274269 - RNA, 32 nt, Homo Sapiens
gugccccgcgcgcccgaugcacgcgcggcaag

SEQ ID NO: 274270 - RNA, 32 nt, Homo Sapiens
gucauguaauugauguuuuucuuacauaacug

SEQ ID NO: 274271 - RNA, 32 nt, Homo Sapiens
gcgcgcgccuagcuggcgggaccguuagcucg

SEQ ID NO: 274272 - RNA, 32 nt, Homo Sapiens
ugucugucuaucuacuugucugucugggccac

SEQ ID NO: 274273 - RNA, 32 nt, Homo Sapiens
ccuuuaucccuacaauauuugcauuucauguu

SEQ ID NO: 274274 - RNA, 32 nt, Homo Sapiens
gaggacacuccaggcgcugacccugggaggcc

SEQ ID NO: 274275 - RNA, 32 nt, Homo Sapiens
guuggaccccuccgcgagccugcccggcccca

SEQ ID NO: 274276 - RNA, 32 nt, Homo Sapiens
auuuuugcucuucucaguuuacucauuguccc

SEQ ID NO: 274277 - RNA, 32 nt, Homo Sapiens
cauaauuaagggucaucuacaauggacaauuu

SEQ ID NO: 274278 - RNA, 32 nt, Homo Sapiens
cauucuaauuuggcaggcuuauuuuugacauu

SEQ ID NO: 274279 - RNA, 32 nt, Homo Sapiens
acagcgacccuggccuccccuguggccucuuu

SEQ ID NO: 274280 - RNA, 32 nt, Homo Sapiens
gaugaggaaaacugaggcucagugugguuaaa

SEQ ID NO: 274281 - RNA, 32 nt, Homo Sapiens
uguggaugaguccugccggcggugccaucuuc

SEQ ID NO: 274282 - RNA, 29 nt, Homo Sapiens
gacaggaugaagacaugcuugaggagcca

SEQ ID NO: 274283 - RNA, 32 nt, Homo Sapiens
cucagaccucggcugggaccagaaaugccugg

SEQ ID NO: 274284 - RNA, 32 nt, Homo Sapiens
accgccugggcugcagcagaucgcgggagaac

SEQ ID NO: 274285 - RNA, 32 nt, Homo Sapiens
caaaaauaacauauuaauugagcauuaacuag

SEQ ID NO: 274286 - RNA, 29 nt, Homo Sapiens
gcucucucgcggcagaggacgcggaucag

SEQ ID NO: 274287 - RNA, 32 nt, Homo Sapiens
ugguguauugcucuuuuucagcuuuauuuuua

SEQ ID NO: 274288 - RNA, 32 nt, Homo Sapiens
aguaccacugucagcacucuccagcaucaucu

SEQ ID NO: 274289 - RNA, 32 nt, Homo Sapiens
gaggcccaagguggccucgccagcccugcagu

SEQ ID NO: 274290 - RNA, 32 nt, Homo Sapiens
cacauuuaauucucagaaaaucuuaugagaua

SEQ ID NO: 274291 - RNA, 30 nt, Homo Sapiens
acacugaguaucccugacaggauucagcca

SEQ ID NO: 274292 - RNA, 31 nt, Homo Sapiens
aaggugaaauaaagccauauuuaguauacca

SEQ ID NO: 274293 - RNA, 32 nt, Homo Sapiens
cugccguucuccuugccaggaaugggaggagc

SEQ ID NO: 274294 - RNA, 29 nt, Homo Sapiens
aacacuguaguaauaaauuuucauaugcc

SEQ ID NO: 274295 - RNA, 32 nt, Homo Sapiens
acagugcugcaauaaacuuacaugugcaugug

SEQ ID NO: 274296 - RNA, 32 nt, Homo Sapiens
uguccuucucaucacugcacagaucugucuga

SEQ ID NO: 274297 - RNA, 32 nt, Homo Sapiens
gcuucucccccgcuuguguacgcuauuuguug

SEQ ID NO: 274298 - RNA, 32 nt, Homo Sapiens
gcuuccccagcgcccaggaugagcgguuuacc

SEQ ID NO: 274299 - RNA, 32 nt, Homo Sapiens
cgcuggaggcccggcccgccucagccgcauug

SEQ ID NO: 274300 - RNA, 32 nt, Homo Sapiens
cucucuaagccacuccucccauuuucaccugc

SEQ ID NO: 274301 - RNA, 32 nt, Homo Sapiens
gaaauuuucuucccuuaaacaugcugucacaa

SEQ ID NO: 274302 - RNA, 32 nt, Homo Sapiens
cuaacauguacaaagcuauguauuuugauuua

SEQ ID NO: 274303 - RNA, 32 nt, Homo Sapiens
aagcucugguauaagcuaaggcuggcaaguuc

SEQ ID NO: 274304 - RNA, 31 nt, Homo Sapiens
cccagggagccccagcccaagauggccagcc

SEQ ID NO: 274305 - RNA, 32 nt, Homo Sapiens
aagauacuuugcaaguaaaaaauaugccuccc

SEQ ID NO: 274306 - RNA, 32 nt, Homo Sapiens
accgucagcaugggcuuugucuuggacucuag

SEQ ID NO: 274307 - RNA, 32 nt, Homo Sapiens
uauuauuauuauaaaaaaugugugaauaucag

SEQ ID NO: 274308 - RNA, 32 nt, Homo Sapiens
uaugccauuauuuuuguaguuagacaauaguu

SEQ ID NO: 274309 - RNA, 32 nt, Homo Sapiens
gcccucccuggccucuccacugucuccacucu

SEQ ID NO: 274310 - RNA, 32 nt, Homo Sapiens
cuuuaacagacucuauaaccguuacaacuuca

SEQ ID NO: 274311 - RNA, 32 nt, Homo Sapiens
uguuacguaaauaaaguuucuuugaaacaagc

SEQ ID NO: 274312 - RNA, 32 nt, Homo Sapiens
uuuuuaggccccaauaccuuauuucuuuaugu

SEQ ID NO: 274313 - RNA, 32 nt, Homo Sapiens
cccacagauucuucugcugucuucccauuccc

SEQ ID NO: 274314 - RNA, 32 nt, Homo Sapiens
caguuuccuuaauauuuauaagaucauuuuaa

SEQ ID NO: 274315 - RNA, 32 nt, Homo Sapiens
auggugggaguggccuggaccugcccugggcc

SEQ ID NO: 274316 - RNA, 32 nt, Homo Sapiens
uuuuguguucccucaccacccauguaauauuc

SEQ ID NO: 274317 - RNA, 32 nt, Homo Sapiens
cauaguuuuuauuuuugugucugugaaagugc

SEQ ID NO: 274318 - RNA, 32 nt, Homo Sapiens
aucuauaauggaggucagugaacuuuuuuaau

SEQ ID NO: 274319 - RNA, 32 nt, Homo Sapiens
aggaaguuggaaaagccgaguaguuauaccag

SEQ ID NO: 274320 - RNA, 32 nt, Homo Sapiens
ugcuccuuuuuaaauuuuguagcucaaaagac

SEQ ID NO: 274321 - RNA, 32 nt, Homo Sapiens
auguggaaaaggguugagcaaaaauuuguagu

SEQ ID NO: 274322 - RNA, 32 nt, Homo Sapiens
gacugacagcaagcccuuggaugucauugagg

SEQ ID NO: 274323 - RNA, 32 nt, Homo Sapiens
cccuacucagggaguggcccaggccugcggcg

SEQ ID NO: 274324 - RNA, 32 nt, Homo Sapiens
cagugcccaucuugccagcagugcccgccccc

SEQ ID NO: 274325 - RNA, 32 nt, Homo Sapiens
cgaacuuggccauucagccgccgcuguccccg

SEQ ID NO: 274326 - RNA, 32 nt, Homo Sapiens
aaaauuuuaaguguuaugguuuuauauaguuc

SEQ ID NO: 274327 - RNA, 32 nt, Homo Sapiens
agucggagacaaagggaggcgagggccaaccc

SEQ ID NO: 274328 - RNA, 32 nt, Homo Sapiens
ucagaugauggggagcacuuuucagggugaaa

SEQ ID NO: 274329 - RNA, 32 nt, Homo Sapiens
ugugcauugcuuaugaaugccuucauauacua

SEQ ID NO: 274330 - RNA, 32 nt, Homo Sapiens
gggcccacccggugggaccccguggggcaggg

SEQ ID NO: 274331 - RNA, 32 nt, Homo Sapiens
acgugggaccuggaggagccugccuggggccu

SEQ ID NO: 274332 - RNA, 32 nt, Homo Sapiens
aguaguucaaccauuuagagucagucugcgcc

SEQ ID NO: 274333 - RNA, 32 nt, Homo Sapiens
cauaguuauuucuuuauugucuaucuccccac

SEQ ID NO: 274334 - RNA, 32 nt, Homo Sapiens
ccugggagaagcuucugcuggcagcucgugcu

SEQ ID NO: 274335 - RNA, 32 nt, Homo Sapiens
caacaaagcuguuuuaauaaaaaaggaaaaau

SEQ ID NO: 274336 - RNA, 32 nt, Homo Sapiens
ugucucagacugcauguaccauuugcauggcu

SEQ ID NO: 274337 - RNA, 32 nt, Homo Sapiens
aagcugaauuguagaaccgcauuuauacucug

SEQ ID NO: 274338 - RNA, 32 nt, Homo Sapiens
aguuccuucaauaaccaugaugaccugaaguu

SEQ ID NO: 274339 - RNA, 32 nt, Homo Sapiens
aaauaccuuuuucuacaguuuaucuuuuauuu

SEQ ID NO: 274340 - RNA, 32 nt, Homo Sapiens
aaaucuccaaaaacagugauuaaagcaagaga

SEQ ID NO: 274341 - RNA, 32 nt, Homo Sapiens
ccugggcagcgggguccucgucauugagaaca

SEQ ID NO: 274342 - RNA, 32 nt, Homo Sapiens
agguucuacugggaucucaucaucauccuuag

SEQ ID NO: 274343 - RNA, 32 nt, Homo Sapiens
uguuuccucccucucuggcccugucuuacccc

SEQ ID NO: 274344 - RNA, 32 nt, Homo Sapiens
gcuguagaugacuaggaauuaugucauuugua

SEQ ID NO: 274345 - RNA, 32 nt, Homo Sapiens
uacaaaggcuuccauuauuuccacaaaacuac

SEQ ID NO: 274346 - RNA, 32 nt, Homo Sapiens
aucaguugcucuugcugaccccucggagcaag

SEQ ID NO: 274347 - RNA, 32 nt, Homo Sapiens
uugguaaguauaggauauauaaaccauuacca

SEQ ID NO: 274348 - RNA, 32 nt, Homo Sapiens
gaguuggucccaggucagagaauggagagagc

SEQ ID NO: 274349 - RNA, 32 nt, Homo Sapiens
cagcuauuuccuggcaggggccccccgguuug

SEQ ID NO: 274350 - RNA, 32 nt, Homo Sapiens
gacgagauguggcuggagacugagagaagcag

SEQ ID NO: 274351 - RNA, 32 nt, Homo Sapiens
ggcuauaaauucuaaggaaucuuuugacacuu

SEQ ID NO: 274352 - RNA, 32 nt, Homo Sapiens
ccaaauggcugcugucuuccucuaguacuuag

SEQ ID NO: 274353 - RNA, 32 nt, Homo Sapiens
caggcgugguggcucaugcuuguaaucccagc

SEQ ID NO: 274354 - RNA, 32 nt, Homo Sapiens
gggagcuuggcugagggucugggaaaugagca

SEQ ID NO: 274355 - RNA, 32 nt, Homo Sapiens
auccccugccuuggccuugccuccccuuccug

SEQ ID NO: 274356 - RNA, 32 nt, Homo Sapiens
acaaaccugaagaugugacaaugauuuucacu

SEQ ID NO: 274357 - RNA, 32 nt, Homo Sapiens
aaaauaaaaccucagcuagcucugccaaaccc

SEQ ID NO: 274358 - RNA, 32 nt, Homo Sapiens
ugggcgggacgcagugggagauaauaugaauc

SEQ ID NO: 274359 - RNA, 32 nt, Homo Sapiens
aauuuaagccuacauguaaaucuuuuuugggg

SEQ ID NO: 274360 - RNA, 32 nt, Homo Sapiens
agguaccccugucuccucuccuccuccagccc

SEQ ID NO: 274361 - RNA, 32 nt, Homo Sapiens
guuuuuuguucaauguuccauucuucgacauc

SEQ ID NO: 274362 - RNA, 32 nt, Homo Sapiens
gccgggcgugguggcgcacgccuguaguccca

SEQ ID NO: 274363 - RNA, 32 nt, Homo Sapiens
ggcccuuaaguacaucgcuuucugguggugcc

SEQ ID NO: 274364 - RNA, 32 nt, Homo Sapiens
aucucuauccuuuugggaccaugcgcggagga

SEQ ID NO: 274365 - RNA, 32 nt, Homo Sapiens
caguauguuuuaaagcaaguaugucuuuauuu

SEQ ID NO: 274366 - RNA, 32 nt, Homo Sapiens
acgccccguguguggagugcccgggcacccua

SEQ ID NO: 274367 - RNA, 32 nt, Homo Sapiens
cauaugaguguggcccugaggaccagggcugg

SEQ ID NO: 274368 - RNA, 32 nt, Homo Sapiens
guucaagcacacuggaauauaaaacagccaug

SEQ ID NO: 274369 - RNA, 32 nt, Homo Sapiens
aucuccuuugggauuggggaggcuggccaaaa

SEQ ID NO: 274370 - RNA, 32 nt, Homo Sapiens
acugguuucccacgaggcgacacuuaauaucc

SEQ ID NO: 274371 - RNA, 32 nt, Homo Sapiens
ggcuauauaaauuugucuccauuuucaccauc

SEQ ID NO: 274372 - RNA, 32 nt, Homo Sapiens
agggaacagcaaaccaaugcuauugugauuau

SEQ ID NO: 274373 - RNA, 32 nt, Homo Sapiens
ccguggcucuuccuccucccucagcgaccagc

SEQ ID NO: 274374 - RNA, 32 nt, Homo Sapiens
gacaguaaacaaaacaagcaagucaauauaca

SEQ ID NO: 274375 - RNA, 32 nt, Homo Sapiens
ugagacauuauuucuaugucacauucuuuaug

SEQ ID NO: 274376 - RNA, 32 nt, Homo Sapiens
aaaaagaaugucaaguauaugauaagccuuag

SEQ ID NO: 274377 - RNA, 32 nt, Homo Sapiens
gacccucugaaucagaaacucugaggguggag

SEQ ID NO: 274378 - RNA, 32 nt, Homo Sapiens
cuggaccaaugcaucuucccaccaccuuaaac

SEQ ID NO: 274379 - RNA, 32 nt, Homo Sapiens
gaccauuggcagggaagcugcagagggcaggc

SEQ ID NO: 274380 - RNA, 32 nt, Homo Sapiens
guuuaaugggcaacuggacaaccaaguuaacc

SEQ ID NO: 274381 - RNA, 32 nt, Homo Sapiens
ugguccuguacccaguccccagccucaggugg

SEQ ID NO: 274382 - RNA, 32 nt, Homo Sapiens
aggaguggagaaugggagggcucgggcuacug

SEQ ID NO: 274383 - RNA, 32 nt, Homo Sapiens
cucugggcaaaggaggcuuguauuuugcacau

SEQ ID NO: 274384 - RNA, 32 nt, Homo Sapiens
aaaagugaaacacaaauguuagcugagcucuc

SEQ ID NO: 274385 - RNA, 32 nt, Homo Sapiens
auauaaaugcgcauugaaaauaaacauaaaau

SEQ ID NO: 274386 - RNA, 32 nt, Homo Sapiens
uguuuaucuaacuucauaauagcaauuauugc

SEQ ID NO: 274387 - RNA, 32 nt, Homo Sapiens
uauugugauaucuauuugauguuaauaaaguu

SEQ ID NO: 274388 - RNA, 32 nt, Homo Sapiens
uuuguagccaucuggccagaagugaggguggg

SEQ ID NO: 274389 - RNA, 32 nt, Homo Sapiens
gaucuggugggcagucgaaccauggugaacuc

SEQ ID NO: 274390 - RNA, 32 nt, Homo Sapiens
gaaucgccuuuuccgguguccaggcgcucugc

SEQ ID NO: 274391 - RNA, 32 nt, Homo Sapiens
gcaagacugucaacgagauuuacagcuggcuu

SEQ ID NO: 274392 - RNA, 28 nt, Homo Sapiens
cugguaguggcuaacggcacuggcuuuu

SEQ ID NO: 274393 - RNA, 32 nt, Homo Sapiens
guguacuauauuuguuuauagacuguaggugg

SEQ ID NO: 274394 - RNA, 32 nt, Homo Sapiens
guacaagcuguaaacuuggguuuuugugaugu

SEQ ID NO: 274395 - RNA, 32 nt, Homo Sapiens
agacauggagccggcccuuggcacucuggggu

SEQ ID NO: 274396 - RNA, 32 nt, Homo Sapiens
uuuuucuaacagagugauauuuccuguuuacu

SEQ ID NO: 274397 - RNA, 32 nt, Homo Sapiens
aagggcgguggccucgggagguuccggccuuc

SEQ ID NO: 274398 - RNA, 32 nt, Homo Sapiens
auuccuuauucuuuguuuuuuauuuuuuauuu

SEQ ID NO: 274399 - RNA, 32 nt, Homo Sapiens
ucgcacucuucuggucucccaggcccaaccca

SEQ ID NO: 274400 - RNA, 32 nt, Homo Sapiens
uuaugagagaauaaugauaaauguaaaauauc

SEQ ID NO: 274401 - RNA, 32 nt, Homo Sapiens
cagcauguggcucgcguggacagguggacgga

SEQ ID NO: 274402 - RNA, 32 nt, Homo Sapiens
ggagaacagucccugggucagcagccaggagg

SEQ ID NO: 274403 - RNA, 32 nt, Homo Sapiens
cggagccugccuagguucugugcgcucccgcc

SEQ ID NO: 274404 - RNA, 32 nt, Homo Sapiens
cuuguuuacagauaguuuaagacuauuuaaau

SEQ ID NO: 274405 - RNA, 32 nt, Homo Sapiens
aaucuaagccauauugcgaggaucucaaggau

SEQ ID NO: 274406 - RNA, 32 nt, Homo Sapiens
cagagggcgcaucccgccucuuccuccgcccc

SEQ ID NO: 274407 - RNA, 32 nt, Homo Sapiens
ugaaagccugucagcugcgacuugcgauuuga

SEQ ID NO: 274408 - RNA, 32 nt, Homo Sapiens
cagucagugucaggccauggacaggcugggcc

SEQ ID NO: 274409 - RNA, 32 nt, Homo Sapiens
cccggucggcccgcuccaugcagcuccguugc

SEQ ID NO: 274410 - RNA, 32 nt, Homo Sapiens
agauuaaaaaauauuggaaacgacauaucccc

SEQ ID NO: 274411 - RNA, 32 nt, Homo Sapiens
cgcccgcccgcagacgccccagccuacugcgc

SEQ ID NO: 274412 - RNA, 32 nt, Homo Sapiens
auggagcgccucaggggcggcccgcagagcga

SEQ ID NO: 274413 - RNA, 32 nt, Homo Sapiens
uugacuacggcgggcgcugugggaguggagaa

SEQ ID NO: 274414 - RNA, 32 nt, Homo Sapiens
gacuguaauuuaaugaugcguuuucaagaaua

SEQ ID NO: 274415 - RNA, 32 nt, Homo Sapiens
cacgggacccggagccgagggccauugagugg

SEQ ID NO: 274416 - RNA, 32 nt, Homo Sapiens
ugcgccgcaugacaugggaggcgauggggacg

SEQ ID NO: 274417 - RNA, 32 nt, Homo Sapiens
uuguguauauauacaugagguugaacagugaa

SEQ ID NO: 274418 - RNA, 32 nt, Homo Sapiens
augcuggggcuacccaugggcaaguggggcuc

SEQ ID NO: 274419 - RNA, 32 nt, Homo Sapiens
cguaugaucuguguggauggcaaacuccccag

SEQ ID NO: 274420 - RNA, 32 nt, Homo Sapiens
auccaccuccgugugcguggagguggcugaug

SEQ ID NO: 274421 - RNA, 28 nt, Homo Sapiens
gucgggggcuggaacauuaugagugcuc

SEQ ID NO: 274422 - RNA, 32 nt, Homo Sapiens
acuggaugccuauuuagaaauaaaguguaugc

SEQ ID NO: 274423 - RNA, 32 nt, Homo Sapiens
augggcuucccauggucacccuggacaaggag

SEQ ID NO: 274424 - RNA, 32 nt, Homo Sapiens
acuggagaguuccaugagagaacagcacucaa

SEQ ID NO: 274425 - RNA, 32 nt, Homo Sapiens
aggaggcgggugcaggugugggugcugagccg

SEQ ID NO: 274426 - RNA, 32 nt, Homo Sapiens
uaccacugguuuuacaaaggaccguguaaagu

SEQ ID NO: 274427 - RNA, 32 nt, Homo Sapiens
gagaaauguaaauuuuauaacagcaguauuua

SEQ ID NO: 274428 - RNA, 32 nt, Homo Sapiens
ccagcccagggugacuuugaugucguguucug

SEQ ID NO: 274429 - RNA, 32 nt, Homo Sapiens
uuauacuuucuuucuucuuuuuuauuuuuuug

SEQ ID NO: 274430 - RNA, 32 nt, Homo Sapiens
aagcagaagucaaaaacagggauugggaagua

SEQ ID NO: 274431 - RNA, 30 nt, Homo Sapiens
caaggaccacuugcaugccccucaguuaga

SEQ ID NO: 274432 - RNA, 32 nt, Homo Sapiens
uggaaggcuuguuaaaacccaaggcugcuagg

SEQ ID NO: 274433 - RNA, 32 nt, Homo Sapiens
uuauguucacuuucuauuuuuaaaagacuacu

SEQ ID NO: 274434 - RNA, 29 nt, Homo Sapiens
gucucggggaagcagaggacuguucauuc

SEQ ID NO: 274435 - RNA, 32 nt, Homo Sapiens
uuuaaaaaagaugcucagauauuaugugucaa

SEQ ID NO: 274436 - RNA, 32 nt, Homo Sapiens
guguguaucuguuaauaaccacagggguuaau

SEQ ID NO: 274437 - RNA, 32 nt, Homo Sapiens
ugcauuccccaucccacccccagguuuccugc

SEQ ID NO: 274438 - RNA, 32 nt, Homo Sapiens
agauugguuuuccuuuuuuuuauuuuguacau

SEQ ID NO: 274439 - RNA, 29 nt, Homo Sapiens
aaacaacaauauauuuuaucuuacuaauu

SEQ ID NO: 274440 - RNA, 32 nt, Homo Sapiens
cucaaccugccugccuggauugcaccuuucug

SEQ ID NO: 274441 - RNA, 32 nt, Homo Sapiens
auuuuuucaggauuauuaaaaucuucuuuuuu

SEQ ID NO: 274442 - RNA, 32 nt, Homo Sapiens
cuuauugccucccaggcaagcagcuggucagu

SEQ ID NO: 274443 - RNA, 32 nt, Homo Sapiens
cccuugacuaccuuuguuccucuucuuugaac

SEQ ID NO: 274444 - RNA, 32 nt, Homo Sapiens
ggauacaaauauggccguauagccucaggccu

SEQ ID NO: 274445 - RNA, 32 nt, Homo Sapiens
uuuacaaaaugaaugcauuggcccugacaaaa

SEQ ID NO: 274446 - RNA, 32 nt, Homo Sapiens
uuuccugugaaaacaucaguuuccuguaccaa

SEQ ID NO: 274447 - RNA, 32 nt, Homo Sapiens
guggggccccgccgcuugcccgugacacgcag

SEQ ID NO: 274448 - RNA, 32 nt, Homo Sapiens
agauaauccaaauaaacagauuugacuaaaag

SEQ ID NO: 274449 - RNA, 32 nt, Homo Sapiens
gucacccccucuacgcucuccuuccucgccag

SEQ ID NO: 274450 - RNA, 30 nt, Homo Sapiens
cugggaggaggugggcuagaugaucuuugg

SEQ ID NO: 274451 - RNA, 32 nt, Homo Sapiens
acgggacgcggcaggcuucucagucucugucc

SEQ ID NO: 274452 - RNA, 32 nt, Homo Sapiens
uuuccaaauuauuucuuaauuauuauaaaaau

SEQ ID NO: 274453 - RNA, 32 nt, Homo Sapiens
uuuagacacagcacaguccuuuuuucuguucc

SEQ ID NO: 274454 - RNA, 32 nt, Homo Sapiens
caucuuacuucuugcccuucugugcccaucuu

SEQ ID NO: 274455 - RNA, 32 nt, Homo Sapiens
cuuuacauuuuucuucugaaacugcaauacuu

SEQ ID NO: 274456 - RNA, 32 nt, Homo Sapiens
uguauuuauauuuauguuuagcaccgucagug

SEQ ID NO: 274457 - RNA, 32 nt, Homo Sapiens
cugucuuccccucccucaaccccaauaggagg

SEQ ID NO: 274458 - RNA, 32 nt, Homo Sapiens
agugaauggaucaucuuuuacaauuaaaagua

SEQ ID NO: 274459 - RNA, 32 nt, Homo Sapiens
acaggugcacaccaccacaccuggcuaauuuu

SEQ ID NO: 274460 - RNA, 32 nt, Homo Sapiens
auguaaggaguuauaacucacuuuucaagaga

SEQ ID NO: 274461 - RNA, 32 nt, Homo Sapiens
aauuaaauauauuguagcacuauguuaauuaa

SEQ ID NO: 274462 - RNA, 32 nt, Homo Sapiens
cgguuucucaucacuccaaccagccgcgacca

SEQ ID NO: 274463 - RNA, 32 nt, Homo Sapiens
acaaacaaacaaaaagagccagugggggaggg

SEQ ID NO: 274464 - RNA, 32 nt, Homo Sapiens
gggcggcgccgcacgcucgucacagugggccu

SEQ ID NO: 274465 - RNA, 32 nt, Homo Sapiens
aagucaccaaggaaauaaacaggaaggaaauc

SEQ ID NO: 274466 - RNA, 32 nt, Homo Sapiens
ccugaggcaagccauuuuuagagcaucugggc

SEQ ID NO: 274467 - RNA, 32 nt, Homo Sapiens
ugcuguugccagcagucgcagaccgcaggagc

SEQ ID NO: 274468 - RNA, 32 nt, Homo Sapiens
cgacugguguuuauccgucacucgccgagguu

SEQ ID NO: 274469 - RNA, 32 nt, Homo Sapiens
gacgcaugugacucaccccugcccuugguuuc

SEQ ID NO: 274470 - RNA, 32 nt, Homo Sapiens
auagcagauugagggaggaaaacagguaaggc

SEQ ID NO: 274471 - RNA, 32 nt, Homo Sapiens
gggacaaccaaaacaggucugcagagcaaagg

SEQ ID NO: 274472 - RNA, 32 nt, Homo Sapiens
ucgugucggaccccaaaccacugcccuccugg

SEQ ID NO: 274473 - RNA, 32 nt, Homo Sapiens
aagguuuuacuuuucugaaauuauacaucaca

SEQ ID NO: 274474 - RNA, 32 nt, Homo Sapiens
ccauacugcccagugcccacuacuucccaggg

SEQ ID NO: 274475 - RNA, 32 nt, Homo Sapiens
aauuccaccuccuuccugaacucuaauagagg

SEQ ID NO: 274476 - RNA, 32 nt, Homo Sapiens
auccuagcagccgccucccagcccugccuagg

SEQ ID NO: 274477 - RNA, 32 nt, Homo Sapiens
cuucuucuucuuccucuuccauaguuggauca

SEQ ID NO: 274478 - RNA, 32 nt, Homo Sapiens
cacuggccuuggacgguauugccugucaguga

SEQ ID NO: 274479 - RNA, 30 nt, Homo Sapiens
ccuuuacauaucccugcagaguuggccuuu

SEQ ID NO: 274480 - RNA, 32 nt, Homo Sapiens
gaggccgggaggaggguggggaccuugcagcc

SEQ ID NO: 274481 - RNA, 32 nt, Homo Sapiens
caacauugcauuccuugguuuauacuuuuucu

SEQ ID NO: 274482 - RNA, 32 nt, Homo Sapiens
gcuuuaacuaaauguuuuguaaagcguuuuga

SEQ ID NO: 274483 - RNA, 32 nt, Homo Sapiens
caguaaccacaaucuaaauauuuacauauacc

SEQ ID NO: 274484 - RNA, 32 nt, Homo Sapiens
gagcaagccggggccuggucggcagcugggcc

SEQ ID NO: 274485 - RNA, 32 nt, Homo Sapiens
ggcagcagugcacguggaggagacgucuccca

SEQ ID NO: 274486 - RNA, 32 nt, Homo Sapiens
aagagugggaggugggcgagggauaaaagacu

SEQ ID NO: 274487 - RNA, 32 nt, Homo Sapiens
gagugguugcuuccuuagccuuucaggaugga

SEQ ID NO: 274488 - RNA, 32 nt, Homo Sapiens
cgaacgcagcgaaggccggaggauggaaccag

SEQ ID NO: 274489 - RNA, 32 nt, Homo Sapiens
gaauucuagguccuccaaauaauuagcagucc

SEQ ID NO: 274490 - RNA, 32 nt, Homo Sapiens
caagggcccagcugugccuaggcgccccuccu

SEQ ID NO: 274491 - RNA, 32 nt, Homo Sapiens
aaccucugucucccggguucaagcgauuuccu

SEQ ID NO: 274492 - RNA, 32 nt, Homo Sapiens
aaaugaugcuaaaauauuuucacaaccagagu

SEQ ID NO: 274493 - RNA, 32 nt, Homo Sapiens
uucaacuggggggccucugugcuagccugugg

SEQ ID NO: 274494 - RNA, 32 nt, Homo Sapiens
accuagaaaaggaaaauucuaggccaccuccu

SEQ ID NO: 274495 - RNA, 32 nt, Homo Sapiens
ugucggccaggcuggucuccaacuacuggccu

SEQ ID NO: 274496 - RNA, 32 nt, Homo Sapiens
agcccaagcccuccccuggugcagcuggcagc

SEQ ID NO: 274497 - RNA, 32 nt, Homo Sapiens
gauuauaaaaauugacaugaacaucuuucacu

SEQ ID NO: 274498 - RNA, 32 nt, Homo Sapiens
ugaccucugaggaggaggagcugcacaaccag

SEQ ID NO: 274499 - RNA, 32 nt, Homo Sapiens
ucacaggguuguuuauaauagcaauauacaua

SEQ ID NO: 274500 - RNA, 32 nt, Homo Sapiens
caacugucuccgucgcaggcuccggcgggggc

SEQ ID NO: 274501 - RNA, 32 nt, Homo Sapiens
cggcuuccggcgggagcugugcagcuccuuau

SEQ ID NO: 274502 - RNA, 32 nt, Homo Sapiens
uggcuggguucaguaauaaauaugugaggccu

SEQ ID NO: 274503 - RNA, 32 nt, Homo Sapiens
gcagauguuuauucucuuaaugcacuucaggu

SEQ ID NO: 274504 - RNA, 32 nt, Homo Sapiens
ggaaugggaagcugcgcgccauugagucccuc

SEQ ID NO: 274505 - RNA, 32 nt, Homo Sapiens
guaccaacaacccucccaagagucccauaucu

SEQ ID NO: 274506 - RNA, 32 nt, Homo Sapiens
uguuagcccuuccuccaauuauaagaggauau

SEQ ID NO: 274507 - RNA, 32 nt, Homo Sapiens
aucaauuaaugacaugauaauaccauguuaca

SEQ ID NO: 274508 - RNA, 32 nt, Homo Sapiens
gggguuuaauuguugugcaguuucauagaugg

SEQ ID NO: 274509 - RNA, 32 nt, Homo Sapiens
uuugucaccaaaauaauacauuugagagagau

SEQ ID NO: 274510 - RNA, 32 nt, Homo Sapiens
uauuagacguaacagugaugucuuuuaaaaaa

SEQ ID NO: 274511 - RNA, 32 nt, Homo Sapiens
gacacccuagguuuuucuuagcuuccagcucu

SEQ ID NO: 274512 - RNA, 32 nt, Homo Sapiens
acccuuucugccccagcuuccaccugcucccc

SEQ ID NO: 274513 - RNA, 32 nt, Homo Sapiens
cgggccuggcggggcgggaggugacauacgcg

SEQ ID NO: 274514 - RNA, 31 nt, Homo Sapiens
aagcagugcuggauuccaggagucuuggcau

SEQ ID NO: 274515 - RNA, 32 nt, Homo Sapiens
ugcugcaugcugcaugagacccaggguccugc

SEQ ID NO: 274516 - RNA, 32 nt, Homo Sapiens
cccgguggccagcuccucuccuccuugcccaa

SEQ ID NO: 274517 - RNA, 32 nt, Homo Sapiens
uuuuccuucuuuugaauuuuuaucccaucugu

SEQ ID NO: 274518 - RNA, 32 nt, Homo Sapiens
cccagugcggacccuucccagcccucauccca

SEQ ID NO: 274519 - RNA, 31 nt, Homo Sapiens
cugguggucucuaugugucuaacuuuuuaaa

SEQ ID NO: 274520 - RNA, 32 nt, Homo Sapiens
auuuuuguguucaguacugaaguaaaacaaaa

SEQ ID NO: 274521 - RNA, 32 nt, Homo Sapiens
ggccuggccccgagccccgagcgggcgucgcu

SEQ ID NO: 274522 - RNA, 32 nt, Homo Sapiens
uccagccuccgucuucugguccacucugcucu

SEQ ID NO: 274523 - RNA, 32 nt, Homo Sapiens
uacuaaaccagcuucaucuagcacuaaaccac

SEQ ID NO: 274524 - RNA, 32 nt, Homo Sapiens
gaccugcucccagagaccuuccacacugaauc

SEQ ID NO: 274525 - RNA, 32 nt, Homo Sapiens
agacuucuguacaucacguucccuuuauuguc

SEQ ID NO: 274526 - RNA, 32 nt, Homo Sapiens
cugcccgggcgcaggauccaggcgcugcccgu

SEQ ID NO: 274527 - RNA, 32 nt, Homo Sapiens
caccugcagccacaggcccaccccuccccacu

SEQ ID NO: 274528 - RNA, 32 nt, Homo Sapiens
uaggcuuguccauuuuaugcauuucagcaaag

SEQ ID NO: 274529 - RNA, 32 nt, Homo Sapiens
gccgguaggaagugggggccaggagagcagcg

SEQ ID NO: 274530 - RNA, 32 nt, Homo Sapiens
auugaucaaaguuacauuucuaucuuuuaaaa

SEQ ID NO: 274531 - RNA, 32 nt, Homo Sapiens
cuggccgcggaccccucccaccccugccuugc

SEQ ID NO: 274532 - RNA, 27 nt, Homo Sapiens
gcauggguggggagcuugagggggcgu

SEQ ID NO: 274533 - RNA, 32 nt, Homo Sapiens
ucacagacuaagggggcagcccugccccugcc

SEQ ID NO: 274534 - RNA, 32 nt, Homo Sapiens
agcuuauagaugcuaaaggauacugucauuug

SEQ ID NO: 274535 - RNA, 32 nt, Homo Sapiens
gcaaacuggcaugaauucccaaggcugugaca

SEQ ID NO: 274536 - RNA, 32 nt, Homo Sapiens
guuuaaucaccagaauagaagaaacacauuau

SEQ ID NO: 274537 - RNA, 32 nt, Homo Sapiens
auguuuccaaggaaaggaaauguuaugagcaa

SEQ ID NO: 274538 - RNA, 32 nt, Homo Sapiens
ugcuccaagcucuauccuccccggguccagag

SEQ ID NO: 274539 - RNA, 32 nt, Homo Sapiens
uuuucaccaaaauaaugcuuuugaaaaaaaga

SEQ ID NO: 274540 - RNA, 32 nt, Homo Sapiens
ggugccgcgagccaggcugccaggcgcccggg

SEQ ID NO: 274541 - RNA, 32 nt, Homo Sapiens
gacaacucgaauaguuugacuuguguuuuauc

SEQ ID NO: 274542 - RNA, 32 nt, Homo Sapiens
ccccgcacucccuucuagcacccccaaaggaa

SEQ ID NO: 274543 - RNA, 32 nt, Homo Sapiens
gauuauaguguuaaugcaaaguuuacagacuu

SEQ ID NO: 274544 - RNA, 32 nt, Homo Sapiens
gcgguaggccuggcccgcagagccugcgaguc

SEQ ID NO: 274545 - RNA, 32 nt, Homo Sapiens
ugcuccaggacuccccuucucucauguccucu

SEQ ID NO: 274546 - RNA, 32 nt, Homo Sapiens
uacuaucucaauucuucaguuuccacguugua

SEQ ID NO: 274547 - RNA, 32 nt, Homo Sapiens
cuuccccuccacuaaaucuacucucuauucag

SEQ ID NO: 274548 - RNA, 32 nt, Homo Sapiens
cuaauauuuuaacaguuuuucuuauuuauagg

SEQ ID NO: 274549 - RNA, 30 nt, Homo Sapiens
cucugaggagguggcauuugagcacucaag

SEQ ID NO: 274550 - RNA, 32 nt, Homo Sapiens
ugaccauugacuaugacacaguuucuuauuua

SEQ ID NO: 274551 - RNA, 32 nt, Homo Sapiens
gccggagcgagggggcgggcgugggcggacgu

SEQ ID NO: 274552 - RNA, 32 nt, Homo Sapiens
ugggcccugguccaaugcugcuguugucugag

SEQ ID NO: 274553 - RNA, 32 nt, Homo Sapiens
ggacaccagcauggagccagcacgggaacagg

SEQ ID NO: 274554 - RNA, 32 nt, Homo Sapiens
ccugcugggguggaagcagagaugggggcucc

SEQ ID NO: 274555 - RNA, 32 nt, Homo Sapiens
uacacuugaaaauucuagacagacugucaaca

SEQ ID NO: 274556 - RNA, 32 nt, Homo Sapiens
aacugagagcagugugcaagauaauagguaaa

SEQ ID NO: 274557 - RNA, 32 nt, Homo Sapiens
gauuacggugcucgagcacgcuggugggaaag

SEQ ID NO: 274558 - RNA, 32 nt, Homo Sapiens
uguggcugccccaccugccgcaugcucccucc

SEQ ID NO: 274559 - RNA, 31 nt, Homo Sapiens
ggugucauggcagcugcggggagccgcaaga

SEQ ID NO: 274560 - RNA, 32 nt, Homo Sapiens
cugcacuccagccugggcgacggagugagacu

SEQ ID NO: 274561 - RNA, 32 nt, Homo Sapiens
uucugugcagcuuaucaacgaccgcugcgugg

SEQ ID NO: 274562 - RNA, 32 nt, Homo Sapiens
gauuggcuguacuacuccaugaagggccgggg

SEQ ID NO: 274563 - RNA, 32 nt, Homo Sapiens
gaugauuaaugaucucugcaaacaaggugcuu

SEQ ID NO: 274564 - RNA, 32 nt, Homo Sapiens
gcccucuggcccggccgccccgccccagagcu

SEQ ID NO: 274565 - RNA, 31 nt, Homo Sapiens
uuugugccacguuucaguucaguucugaagu

SEQ ID NO: 274566 - RNA, 32 nt, Homo Sapiens
uucugucaaaguuccuuuugcaugaaacaauu

SEQ ID NO: 274567 - RNA, 32 nt, Homo Sapiens
caaagagaacuaggcugucaucuuucagccuc

SEQ ID NO: 274568 - RNA, 31 nt, Homo Sapiens
uauaggaggaaaaaacaggcuccucauugua

SEQ ID NO: 274569 - RNA, 32 nt, Homo Sapiens
gcggcgcagcgggcggcugcgucccugagccg

SEQ ID NO: 274570 - RNA, 32 nt, Homo Sapiens
uugggugccggggcugcggguuuugggugcaa

SEQ ID NO: 274571 - RNA, 27 nt, Homo Sapiens
uguauacauuucuucagccacuucaau

SEQ ID NO: 274572 - RNA, 32 nt, Homo Sapiens
gcucccgguccuggucccacuccguguugacu

SEQ ID NO: 274573 - RNA, 32 nt, Homo Sapiens
uuaugccaacuuugcugagaauauggagggua

SEQ ID NO: 274574 - RNA, 32 nt, Homo Sapiens
aggcacagguauuuuugaauaauuaccaagca

SEQ ID NO: 274575 - RNA, 29 nt, Homo Sapiens
acaaaagugccuucauauuuucugucugg

SEQ ID NO: 274576 - RNA, 32 nt, Homo Sapiens
guguguuagugucaucaucuguaagucaggaa

SEQ ID NO: 274577 - RNA, 32 nt, Homo Sapiens
aacaaaacaaaacaaaauuuguguuuggcuaa

SEQ ID NO: 274578 - RNA, 32 nt, Homo Sapiens
uuaauacuucucaaaucugucccuuuaguuuc

SEQ ID NO: 274579 - RNA, 28 nt, Homo Sapiens
cccaugucugccuuagucuucuucccac

SEQ ID NO: 274580 - RNA, 32 nt, Homo Sapiens
gcauucgugcagggggugggggugcugggagc

SEQ ID NO: 274581 - RNA, 30 nt, Homo Sapiens
agaacaggcaggcugugccaguuuaguuaa

SEQ ID NO: 274582 - RNA, 32 nt, Homo Sapiens
acugugacccucugcuggccggucuugugugc

SEQ ID NO: 274583 - RNA, 31 nt, Homo Sapiens
ucacguacucggagcccuuccacuccuccca

SEQ ID NO: 274584 - RNA, 27 nt, Homo Sapiens
aagaaguccuucucuaccccuagguca

SEQ ID NO: 274585 - RNA, 32 nt, Homo Sapiens
aauuuaaaugucaauuuauugaaguguaaauu

SEQ ID NO: 274586 - RNA, 32 nt, Homo Sapiens
gagcugggagcccguggacucccggccuguuu

SEQ ID NO: 274587 - RNA, 32 nt, Homo Sapiens
agaccuuuugucacagggcuacaggacuacaa

SEQ ID NO: 274588 - RNA, 32 nt, Homo Sapiens
cgugcagcuccgaagcucuuuggaccuagcag

SEQ ID NO: 274589 - RNA, 32 nt, Homo Sapiens
cacugggguuugggggcuucccugggccucag

SEQ ID NO: 274590 - RNA, 32 nt, Homo Sapiens
gccaugugucaaaaucaugguuuuguaauugc

SEQ ID NO: 274591 - RNA, 28 nt, Homo Sapiens
cggucaguuacagaagcaggauuucuag

SEQ ID NO: 274592 - RNA, 32 nt, Homo Sapiens
ugucuccauaucuacucuuuuauaaaugaagu

SEQ ID NO: 274593 - RNA, 32 nt, Homo Sapiens
ugcuuggauacaaaaccaggucauccaaccug

SEQ ID NO: 274594 - RNA, 32 nt, Homo Sapiens
aaaaggggccggauuuccuucuccuggaggca

SEQ ID NO: 274595 - RNA, 32 nt, Homo Sapiens
ggguguuccucccugugacccagccgccucga

SEQ ID NO: 274596 - RNA, 32 nt, Homo Sapiens
auuugguggcauucggcuuguuuuguaauagg

SEQ ID NO: 274597 - RNA, 32 nt, Homo Sapiens
gcuacugauccaugaggccaagagggagugcc

SEQ ID NO: 274598 - RNA, 32 nt, Homo Sapiens
gacagggcucccgccuucacagcccucgccag

SEQ ID NO: 274599 - RNA, 32 nt, Homo Sapiens
acuaggaaaaggaaccaacuguaggcaccucu

SEQ ID NO: 274600 - RNA, 32 nt, Homo Sapiens
acuaaagucaaggggauugaugcugaugcauu

SEQ ID NO: 274601 - RNA, 32 nt, Homo Sapiens
gagaaaauacauauuucuuccccuuacuaagc

SEQ ID NO: 274602 - RNA, 32 nt, Homo Sapiens
ugagcgcacugcuguucagauaggggacggaa

SEQ ID NO: 274603 - RNA, 32 nt, Homo Sapiens
cauuccaguccuuugauauuuaugacaguacu

SEQ ID NO: 274604 - RNA, 32 nt, Homo Sapiens
gcgcgccgggcugccgcggugaccuuuccgac

SEQ ID NO: 274605 - RNA, 32 nt, Homo Sapiens
aucuuucaaacacaguuucacacugauucuua

SEQ ID NO: 274606 - RNA, 32 nt, Homo Sapiens
cccccuccugcugguuccccagcccuuuuccc

SEQ ID NO: 274607 - RNA, 32 nt, Homo Sapiens
ccaggaagcgcccucaccccagccccacucac

SEQ ID NO: 274608 - RNA, 32 nt, Homo Sapiens
uucagauuugcuaagaaccuucaaauacagac

SEQ ID NO: 274609 - RNA, 32 nt, Homo Sapiens
ggaccugaagugaagcuccccaaggcuccuga

SEQ ID NO: 274610 - RNA, 32 nt, Homo Sapiens
cggaaagcuagacccgcuucagggccaggagu

SEQ ID NO: 274611 - RNA, 32 nt, Homo Sapiens
ugcucugcagggcggaagacaccuggggcggg

SEQ ID NO: 274612 - RNA, 32 nt, Homo Sapiens
uugccagcaauggcagaaugcugcugcacacu

SEQ ID NO: 274613 - RNA, 32 nt, Homo Sapiens
ggagcggcggcgaagacaagggcccgccuccg

SEQ ID NO: 274614 - RNA, 32 nt, Homo Sapiens
gggauaacgaucugcugugccuuugcagucac

SEQ ID NO: 274615 - RNA, 30 nt, Homo Sapiens
gugcaugucuguguucuggcuccgauuggg

SEQ ID NO: 274616 - RNA, 32 nt, Homo Sapiens
uuccauccuccacgcacccccaccuaucguug

SEQ ID NO: 274617 - RNA, 32 nt, Homo Sapiens
aggcagcgcugacuucguugggcuuuuuucca

SEQ ID NO: 274618 - RNA, 32 nt, Homo Sapiens
gacaucagggcuaaaaucaucuguacuccuga

SEQ ID NO: 274619 - RNA, 32 nt, Homo Sapiens
ggaagcaccaaaauggaaaacuacuuuaauuc

SEQ ID NO: 274620 - RNA, 32 nt, Homo Sapiens
agcagccuaacacggugcucauuuuuucuucu

SEQ ID NO: 274621 - RNA, 32 nt, Homo Sapiens
uagcaaccagagcagugacaguagcaaccgcc

SEQ ID NO: 274622 - RNA, 32 nt, Homo Sapiens
gaggggccagugaccccacgggccccaccuac

SEQ ID NO: 274623 - RNA, 32 nt, Homo Sapiens
caggaggcccagaucacccauccuccccuggg

SEQ ID NO: 274624 - RNA, 32 nt, Homo Sapiens
uuuauguccguuaauuugauaauuaugaaauc

SEQ ID NO: 274625 - RNA, 32 nt, Homo Sapiens
gcagccccaucccaucuccugcccucuccuga

SEQ ID NO: 274626 - RNA, 32 nt, Homo Sapiens
cccggcagucagagccccuuuaugaugucaug

SEQ ID NO: 274627 - RNA, 32 nt, Homo Sapiens
gucuaucuggccccuccucccggcuggacugg

SEQ ID NO: 274628 - RNA, 32 nt, Homo Sapiens
gagaggcccugugccaagagaaugggcacugu

SEQ ID NO: 274629 - RNA, 32 nt, Homo Sapiens
ugaugcuguuuucucuugucugauuugaaaca

SEQ ID NO: 274630 - RNA, 32 nt, Homo Sapiens
cggcggcggcugcagcgcuagcggcgcggggg

SEQ ID NO: 274631 - RNA, 32 nt, Homo Sapiens
auacuaaucuucauauuuacuguucucuaaaa

SEQ ID NO: 274632 - RNA, 32 nt, Homo Sapiens
caccaacugucaauauuuugcacuguauguau

SEQ ID NO: 274633 - RNA, 32 nt, Homo Sapiens
uuguaucaaggaaagaggcacugaagagggua

SEQ ID NO: 274634 - RNA, 32 nt, Homo Sapiens
uacaucacaugcagccaagaucagcuugcucu

SEQ ID NO: 274635 - RNA, 32 nt, Homo Sapiens
cagccgcccacccccacccccagugcagggcu

SEQ ID NO: 274636 - RNA, 30 nt, Homo Sapiens
aagcaagugaagcuuggugcaagcuaaaau

SEQ ID NO: 274637 - RNA, 32 nt, Homo Sapiens
gaauugcguggaaaucuucagauucuucacug

SEQ ID NO: 274638 - RNA, 32 nt, Homo Sapiens
gucgucuccgcggcagcagcgcgggccccagc

SEQ ID NO: 274639 - RNA, 32 nt, Homo Sapiens
ugcaggguggcccuggcucagcagccaaccuu

SEQ ID NO: 274640 - RNA, 32 nt, Homo Sapiens
aauccuccccuggccuccugggacugcaguca

SEQ ID NO: 274641 - RNA, 32 nt, Homo Sapiens
uauuuuuaguuuucuguaaauuaucaguuauu

SEQ ID NO: 274642 - RNA, 32 nt, Homo Sapiens
gcucauugagagauacagaagaaauaggagca

SEQ ID NO: 274643 - RNA, 32 nt, Homo Sapiens
gucuucuagacuauaucuauguaaaguuauua

SEQ ID NO: 274644 - RNA, 32 nt, Homo Sapiens
caguaagagaauagaauuuucauuuguuuuuc

SEQ ID NO: 274645 - RNA, 32 nt, Homo Sapiens
auuuugauguuuuccauagugaggauggugua

SEQ ID NO: 274646 - RNA, 30 nt, Homo Sapiens
agugccuaaaagaaaaaaaaaaaaaaaaaa

SEQ ID NO: 274647 - RNA, 32 nt, Homo Sapiens
auguuauuuuuagagauaggaucuugcucugu

SEQ ID NO: 274648 - RNA, 32 nt, Homo Sapiens
uuggggggaauaaauaauuggcacaacuaaaa

SEQ ID NO: 274649 - RNA, 32 nt, Homo Sapiens
cagcugaaacaguaaagccugaugggugcaaa

SEQ ID NO: 274650 - RNA, 32 nt, Homo Sapiens
gaagugaggagaaaguguucuuguuuaguguu

SEQ ID NO: 274651 - RNA, 32 nt, Homo Sapiens
auucagcauuacaaagauggauguucuucagu

SEQ ID NO: 274652 - RNA, 32 nt, Homo Sapiens
uugucaugucauuucaugauugucugagaaac

SEQ ID NO: 274653 - RNA, 32 nt, Homo Sapiens
accuuugagacuauugagauauuuuuaaauaa

SEQ ID NO: 274654 - RNA, 32 nt, Homo Sapiens
accuugcuuggugacaugugccacuuuggcca

SEQ ID NO: 274655 - RNA, 32 nt, Homo Sapiens
uagggguagggagaagugucagcuucaggcau

SEQ ID NO: 274656 - RNA, 32 nt, Homo Sapiens
acaaaucagcuuauauuuuuuaucuugaugac

SEQ ID NO: 274657 - RNA, 32 nt, Homo Sapiens
cagaaaggggagaggacacaggagccuggggu

SEQ ID NO: 274658 - RNA, 32 nt, Homo Sapiens
auuuauuuucccugagccuauaucuucaucug

SEQ ID NO: 274659 - RNA, 32 nt, Homo Sapiens
ugaagaaaacaaaauagcuuauuauagaauug

SEQ ID NO: 274660 - RNA, 32 nt, Homo Sapiens
cccgaaacaacuaucaugagcgcgaggcugcc

SEQ ID NO: 274661 - RNA, 32 nt, Homo Sapiens
auguagacagguauaaugauacugcuuuucac

SEQ ID NO: 274662 - RNA, 29 nt, Homo Sapiens
aaggucggaggacagagaaaggucagcag

SEQ ID NO: 274663 - RNA, 32 nt, Homo Sapiens
acuuccuggagcuucugccgccuccuguggaa

SEQ ID NO: 274664 - RNA, 32 nt, Homo Sapiens
ggucuugagccacagagcuggcuccagaggca

SEQ ID NO: 274665 - RNA, 32 nt, Homo Sapiens
uggccuccagcauccgacaagaagcuucagcc

SEQ ID NO: 274666 - RNA, 32 nt, Homo Sapiens
gauuguggucugggcaguaaauccacagccaa

SEQ ID NO: 274667 - RNA, 32 nt, Homo Sapiens
aucuuccuggcuucuuuuuauuuugcacaaac

SEQ ID NO: 274668 - RNA, 32 nt, Homo Sapiens
ugccuguaauuccagcacuuugggaggccaaa

SEQ ID NO: 274669 - RNA, 32 nt, Homo Sapiens
uauucgugcagggcaggggcucugugccagcc

SEQ ID NO: 274670 - RNA, 32 nt, Homo Sapiens
ugagguugacuguggguaaaucuuuaagacac

SEQ ID NO: 274671 - RNA, 32 nt, Homo Sapiens
auccccagucugccacaccccaucccuuuggg

SEQ ID NO: 274672 - RNA, 32 nt, Homo Sapiens
acccuugcccccagcccucucucccugugcuu

SEQ ID NO: 274673 - RNA, 32 nt, Homo Sapiens
gugccuugucuucuccugccucuuccaugcuu

SEQ ID NO: 274674 - RNA, 32 nt, Homo Sapiens
uucuacucagacuuaaagaggcuguucuauca

SEQ ID NO: 274675 - RNA, 32 nt, Homo Sapiens
gaagguagauccagcucugcccaccugcccac

SEQ ID NO: 274676 - RNA, 32 nt, Homo Sapiens
uucauccuggaaauauauuaacuguuaaaaag

SEQ ID NO: 274677 - RNA, 31 nt, Homo Sapiens
ggaguagcagcagcaggacaggcaagagccu

SEQ ID NO: 274678 - RNA, 32 nt, Homo Sapiens
cucuccuccccucccugccgcagacacgcagg

SEQ ID NO: 274679 - RNA, 32 nt, Homo Sapiens
agcaugugcagcuggugacucugcgugggcca

SEQ ID NO: 274680 - RNA, 32 nt, Homo Sapiens
uucggccgguccccggcccgccugccggagcc

SEQ ID NO: 274681 - RNA, 32 nt, Homo Sapiens
ccucgaccucuuuagcugcagcgccuugcugg

SEQ ID NO: 274682 - RNA, 32 nt, Homo Sapiens
auucugugucccaugucccgugucuccucggu

SEQ ID NO: 274683 - RNA, 32 nt, Homo Sapiens
uuuuuuaaaaauuuauuuucuccucaaauuuc

SEQ ID NO: 274684 - RNA, 32 nt, Homo Sapiens
uucaggcuuagucugaccuuucugguuucuuc

SEQ ID NO: 274685 - RNA, 32 nt, Homo Sapiens
agagcccuaccuuuuccugacuguuccucuuu

SEQ ID NO: 274686 - RNA, 32 nt, Homo Sapiens
uugguguaugguaggaaauaaaaauugauaac

SEQ ID NO: 274687 - RNA, 32 nt, Homo Sapiens
ccugagugacagagcgagacuccaucucuuua

SEQ ID NO: 274688 - RNA, 32 nt, Homo Sapiens
uucaucuuugguuuuucuguaauuuccaaauu

SEQ ID NO: 274689 - RNA, 32 nt, Homo Sapiens
cuauguacuaguacuguguacuguauagacag

SEQ ID NO: 274690 - RNA, 32 nt, Homo Sapiens
gcgguucuuuccuaucucauuacccgcuaggg

SEQ ID NO: 274691 - RNA, 32 nt, Homo Sapiens
uuacaggugugagccaccacagccagccuaaa

SEQ ID NO: 274692 - RNA, 31 nt, Homo Sapiens
auauauuuuuacagaaagucuauuucuuuga

SEQ ID NO: 274693 - RNA, 32 nt, Homo Sapiens
gcugauuuucuuuuuucuuuuuuuuuuuaacu

SEQ ID NO: 274694 - RNA, 32 nt, Homo Sapiens
uucccucagcauaugccugagucgaucuuuua

SEQ ID NO: 274695 - RNA, 32 nt, Homo Sapiens
ucuuggccccacugccaaaggaagucagucag

SEQ ID NO: 274696 - RNA, 32 nt, Homo Sapiens
cucccuugacuucacgacuguggccagaucau

SEQ ID NO: 274697 - RNA, 32 nt, Homo Sapiens
ugcaucugaggacuuguuuucuuuuucuuuau

SEQ ID NO: 274698 - RNA, 32 nt, Homo Sapiens
auucagaauaguauuucuuuuagagugugaga

SEQ ID NO: 274699 - RNA, 32 nt, Homo Sapiens
uuggcacugugauuugaaaaauuuauagaaaa

SEQ ID NO: 274700 - RNA, 32 nt, Homo Sapiens
ugccuguacaaauguauauuaagguaaaauaa

SEQ ID NO: 274701 - RNA, 32 nt, Homo Sapiens
agugccagugugacucauccacaaugauuucu

SEQ ID NO: 274702 - RNA, 32 nt, Homo Sapiens
aggggugaaagagagggaauaguuucuccuug

SEQ ID NO: 274703 - RNA, 32 nt, Homo Sapiens
aacacacuagacagaugucuccugcuauggug

SEQ ID NO: 274704 - RNA, 32 nt, Homo Sapiens
ucacuuuuucccugagagacuacacugggaac

SEQ ID NO: 274705 - RNA, 32 nt, Homo Sapiens
auguaacaagguggggacguguguccuuuggu

SEQ ID NO: 274706 - RNA, 32 nt, Homo Sapiens
cccaggaggaagacugcucugagcgugcggcc

SEQ ID NO: 274707 - RNA, 32 nt, Homo Sapiens
ggcauagcgagaucugacuaccaagaguuauu

SEQ ID NO: 274708 - RNA, 32 nt, Homo Sapiens
gggggccugggccaggcaugauguguggggcu

SEQ ID NO: 274709 - RNA, 32 nt, Homo Sapiens
ugagcacacuguaugucaucucuggguuccuu

SEQ ID NO: 274710 - RNA, 32 nt, Homo Sapiens
ucuccgcucccucuggcucuggaguugggggc

SEQ ID NO: 274711 - RNA, 32 nt, Homo Sapiens
aagcacagugccguguuguuuacagcuuuucu

SEQ ID NO: 274712 - RNA, 32 nt, Homo Sapiens
aaaagcaaagcuuaacuaauagaauuauuagc

SEQ ID NO: 274713 - RNA, 32 nt, Homo Sapiens
gaucuuggcucacugcaacuucugccuuccag

SEQ ID NO: 274714 - RNA, 32 nt, Homo Sapiens
ccaaagugcugggauuacaggggagagcugcu

SEQ ID NO: 274715 - RNA, 32 nt, Homo Sapiens
aagagcuguaguaucaagauucaccaaugcug

SEQ ID NO: 274716 - RNA, 32 nt, Homo Sapiens
aauuuuauaauuuuaaaugucuguaaaguaag

SEQ ID NO: 274717 - RNA, 32 nt, Homo Sapiens
uauaauuugacaaagaaaaaugauacuucucu

SEQ ID NO: 274718 - RNA, 32 nt, Homo Sapiens
auuugaaauauuagaauggccgaccauggcag

SEQ ID NO: 274719 - RNA, 32 nt, Homo Sapiens
cccauuuccuuguagcuuuauuccuugcaucu

SEQ ID NO: 274720 - RNA, 32 nt, Homo Sapiens
cauuccugagugagggguucagacacccaguc

SEQ ID NO: 274721 - RNA, 31 nt, Homo Sapiens
ugcuggagggcggcagcggcgaccggagcgg

SEQ ID NO: 274722 - RNA, 30 nt, Homo Sapiens
uguaacuccuauagauccuauaggcagaga

SEQ ID NO: 274723 - RNA, 32 nt, Homo Sapiens
aggcagguugucccacagcagagacaacagac

SEQ ID NO: 274724 - RNA, 32 nt, Homo Sapiens
cgcgccuauuccccggccugcagcguccccga

SEQ ID NO: 274725 - RNA, 32 nt, Homo Sapiens
aauguauuuauuaacuuaauaauuacuuuaug

SEQ ID NO: 274726 - RNA, 32 nt, Homo Sapiens
uacacaguaugaugaauacuugaauuaggaac

SEQ ID NO: 274727 - RNA, 32 nt, Homo Sapiens
ccgcggcgcgcaaugcgagggagacgagauua

SEQ ID NO: 274728 - RNA, 32 nt, Homo Sapiens
ccugaggcucacgguggcuccgagcaugaggu

SEQ ID NO: 274729 - RNA, 32 nt, Homo Sapiens
uaguuucccuggauuucacugauuuauuuuuu

SEQ ID NO: 274730 - RNA, 32 nt, Homo Sapiens
ucggcccagcgccuaccuccccgaaucgcggc

SEQ ID NO: 274731 - RNA, 32 nt, Homo Sapiens
guaguaaaauagcaaaaauguauuagauagua

SEQ ID NO: 274732 - RNA, 32 nt, Homo Sapiens
ccgauaauuuuuuguuuucuugucuguaaugg

SEQ ID NO: 274733 - RNA, 32 nt, Homo Sapiens
ccagggcgccugggccucuccccuuucccagc

SEQ ID NO: 274734 - RNA, 32 nt, Homo Sapiens
uauagaacauuuccaguauugccaaaaaugcu

SEQ ID NO: 274735 - RNA, 32 nt, Homo Sapiens
caugucuucaguagccaaacuacuucuugagc

SEQ ID NO: 274736 - RNA, 29 nt, Homo Sapiens
augaggaugaagagucagauguuacagaa

SEQ ID NO: 274737 - RNA, 32 nt, Homo Sapiens
ggcccuaccacucuuaacggaccugcauccug

SEQ ID NO: 274738 - RNA, 32 nt, Homo Sapiens
gaauaaaauuaaaacuaacaaauaaaaaaaaa

SEQ ID NO: 274739 - RNA, 32 nt, Homo Sapiens
cuggcgcgggagccggcggggacgcgguugac

SEQ ID NO: 274740 - RNA, 32 nt, Homo Sapiens
agggacguggggagaaagaagccagaagccag

SEQ ID NO: 274741 - RNA, 32 nt, Homo Sapiens
agaaccaacuguguguaucuacaggaugaaga

SEQ ID NO: 274742 - RNA, 32 nt, Homo Sapiens
aggugguacucuauguauugucugugggcuug

SEQ ID NO: 274743 - RNA, 32 nt, Homo Sapiens
ucucaaaggugauagggacgauuagauaggug

SEQ ID NO: 274744 - RNA, 32 nt, Homo Sapiens
auaguuucaaaaaacaaaagugaauuuacugg

SEQ ID NO: 274745 - RNA, 32 nt, Homo Sapiens
ucgcuuugugauucuugauccggaacuuuguc

SEQ ID NO: 274746 - RNA, 32 nt, Homo Sapiens
ggaggcccagacaucuugggagccccaaauuc

SEQ ID NO: 274747 - RNA, 32 nt, Homo Sapiens
augauugaaauagagcuauacacaucaucaca

SEQ ID NO: 274748 - RNA, 32 nt, Homo Sapiens
cauaaaaacuggcaaaauaaaaaaucuuacaa

SEQ ID NO: 274749 - RNA, 32 nt, Homo Sapiens
cccccagaacuccugggaccauugagaugccc

SEQ ID NO: 274750 - RNA, 32 nt, Homo Sapiens
gucuuuuaaaaggaauaucacauaucaaaguc

SEQ ID NO: 274751 - RNA, 32 nt, Homo Sapiens
cugucuccgcggccucgcgcccggccccucca

SEQ ID NO: 274752 - RNA, 32 nt, Homo Sapiens
aucacuugauguaaccuggaaacuaugcuuua

SEQ ID NO: 274753 - RNA, 32 nt, Homo Sapiens
uccauuaugucugccagagacuuggagucagu

SEQ ID NO: 274754 - RNA, 32 nt, Homo Sapiens
agggucggaaagauuaguucauaauguacuag

SEQ ID NO: 274755 - RNA, 32 nt, Homo Sapiens
aaccuuaaaaauuaauaccaguuugcauaaac

SEQ ID NO: 274756 - RNA, 32 nt, Homo Sapiens
accauugcuuugcugagauguuguuaaucugu

SEQ ID NO: 274757 - RNA, 32 nt, Homo Sapiens
gaaagagaaaggcgccuuaguaccccacagcg

SEQ ID NO: 274758 - RNA, 32 nt, Homo Sapiens
acggcccaucugcacagcggcagcaaggauua

SEQ ID NO: 274759 - RNA, 32 nt, Homo Sapiens
ccagaguucugacacugugacucuguauaaaa

SEQ ID NO: 274760 - RNA, 32 nt, Homo Sapiens
gcagcccgcgcuccacggcaagccccgcccuc

SEQ ID NO: 274761 - RNA, 32 nt, Homo Sapiens
uugcaauacuggaacauaauucuuuuguguag

SEQ ID NO: 274762 - RNA, 32 nt, Homo Sapiens
guauacuuggaaagauagucauggcccaauau

SEQ ID NO: 274763 - RNA, 32 nt, Homo Sapiens
uuuugguuauucuacugccucuaggccagggu

SEQ ID NO: 274764 - RNA, 32 nt, Homo Sapiens
aaccugccacuacauucugguuuacauuaguu

SEQ ID NO: 274765 - RNA, 32 nt, Homo Sapiens
cuccccacccccagccucugccggcuccccua

SEQ ID NO: 274766 - RNA, 32 nt, Homo Sapiens
uucugggucuccugggcugccccuuucacuug

SEQ ID NO: 274767 - RNA, 32 nt, Homo Sapiens
gcaguggaugaaugucuguguuggugauauua

SEQ ID NO: 274768 - RNA, 32 nt, Homo Sapiens
cuaggucccuggggggugacccccaaggaaaa

SEQ ID NO: 274769 - RNA, 32 nt, Homo Sapiens
ugaagcugccuggcccccagggcgcuugaccu

SEQ ID NO: 274770 - RNA, 32 nt, Homo Sapiens
uuacgugcgcgaagcggaguggaccgggagcu

SEQ ID NO: 274771 - RNA, 32 nt, Homo Sapiens
aggagaggguggcaaugaugccuuugaucugg

SEQ ID NO: 274772 - RNA, 32 nt, Homo Sapiens
gcuccagggugggacagggugggcggggguga

SEQ ID NO: 274773 - RNA, 32 nt, Homo Sapiens
uaguaguaaaaugcuaugugcauuuauaccuu

SEQ ID NO: 274774 - RNA, 32 nt, Homo Sapiens
uucuuguuguacauaagauuuaaauaaugcac

SEQ ID NO: 274775 - RNA, 32 nt, Homo Sapiens
cccggcagcucucccgaggggaccagagagcu

SEQ ID NO: 274776 - RNA, 32 nt, Homo Sapiens
cucacccgccgggguccccuccgggcggggca

SEQ ID NO: 274777 - RNA, 32 nt, Homo Sapiens
auucauuuuccuaguguuagugucucagggag

SEQ ID NO: 274778 - RNA, 32 nt, Homo Sapiens
acaaguuagguuaucauuuucucuacaucaua

SEQ ID NO: 274779 - RNA, 30 nt, Homo Sapiens
cugucgaccauuccuccccaucuugcagcu

SEQ ID NO: 274780 - RNA, 32 nt, Homo Sapiens
aaugauccaaaauauggauaugauuggaugua

SEQ ID NO: 274781 - RNA, 32 nt, Homo Sapiens
caauaauaaaaggaaguguuuguaaucccagc

SEQ ID NO: 274782 - RNA, 32 nt, Homo Sapiens
cuuacuauaguucugugauccuggacaaguaa

SEQ ID NO: 274783 - RNA, 32 nt, Homo Sapiens
ugugguccaacgggaaggaagugaagagucua

SEQ ID NO: 274784 - RNA, 32 nt, Homo Sapiens
cccuggcagcggggcccuuucccggcucagga

SEQ ID NO: 274785 - RNA, 32 nt, Homo Sapiens
accacagcugaauugauuuuauggagcuguaa

SEQ ID NO: 274786 - RNA, 32 nt, Homo Sapiens
gauuguuggggguggggagggagggaucuagg

SEQ ID NO: 274787 - RNA, 32 nt, Homo Sapiens
gauagagauauuuuggguauauuuucaagaua

SEQ ID NO: 274788 - RNA, 29 nt, Homo Sapiens
auaauaagggaaguuuauuuucugcgguu

SEQ ID NO: 274789 - RNA, 32 nt, Homo Sapiens
uaugcuucgagccaugggucuacagggucauc

SEQ ID NO: 274790 - RNA, 32 nt, Homo Sapiens
guguccaucccgccggccccccagacuaaccu

SEQ ID NO: 274791 - RNA, 32 nt, Homo Sapiens
aaagcugacuuuuuuuuuuuuaagauauguuu

SEQ ID NO: 274792 - RNA, 32 nt, Homo Sapiens
ggaacccggaacggccguccucuucccccgcc

SEQ ID NO: 274793 - RNA, 32 nt, Homo Sapiens
caaaaacagaucugguaggggcggggaaauga

SEQ ID NO: 274794 - RNA, 32 nt, Homo Sapiens
gcuucugcaggcuucagccauccacuucacca

SEQ ID NO: 274795 - RNA, 32 nt, Homo Sapiens
gucuccgaccccagcccgcccccagcccuccc

SEQ ID NO: 274796 - RNA, 32 nt, Homo Sapiens
cccuagugauguccccugaggacccgggugau

SEQ ID NO: 274797 - RNA, 32 nt, Homo Sapiens
uauauccucgauaaguauuaaaacaguauuug

SEQ ID NO: 274798 - RNA, 32 nt, Homo Sapiens
cugaaggccgcggcguuugggagguaacugug

SEQ ID NO: 274799 - RNA, 32 nt, Homo Sapiens
cuggauccacacugugguguggcugccacggc

SEQ ID NO: 274800 - RNA, 32 nt, Homo Sapiens
acaaaaaugggaggagguguccacauuuaugg

SEQ ID NO: 274801 - RNA, 32 nt, Homo Sapiens
cgcacuggccccggcgcccacccgcaccccuc

SEQ ID NO: 274802 - RNA, 32 nt, Homo Sapiens
gagugaggccccguccuucucacugccugguc

SEQ ID NO: 274803 - RNA, 32 nt, Homo Sapiens
gguauuuagaauuagugcuguuguggagugcg

SEQ ID NO: 274804 - RNA, 32 nt, Homo Sapiens
uucagcgcggccucgggccucgucgagaagga

SEQ ID NO: 274805 - RNA, 32 nt, Homo Sapiens
uggugccccucccaggcuccuuuucacccugc

SEQ ID NO: 274806 - RNA, 32 nt, Homo Sapiens
ucuuagaagcagaguuggaaccacugaggaag

SEQ ID NO: 274807 - RNA, 32 nt, Homo Sapiens
ggaaauaaauuugaaauguaaccgagcaaaaa

SEQ ID NO: 274808 - RNA, 32 nt, Homo Sapiens
aguccauccgcggcggggagagggcaagcggg

SEQ ID NO: 274809 - RNA, 32 nt, Homo Sapiens
aaaaaugcgcuccagcagccuguuugggaagc

SEQ ID NO: 274810 - RNA, 32 nt, Homo Sapiens
cgaggucccgcaccagccauggcgcagauccu

SEQ ID NO: 274811 - RNA, 32 nt, Homo Sapiens
ugaauuuuacacagucuggccaucaagaaaga

SEQ ID NO: 274812 - RNA, 32 nt, Homo Sapiens
ggcccgcgcucgccccccagggccucaugucg

SEQ ID NO: 274813 - RNA, 32 nt, Homo Sapiens
ugccgcggugccuggccuccccucccagacug

SEQ ID NO: 274814 - RNA, 32 nt, Homo Sapiens
agacacccaccgccaccccggcugggucugcg

SEQ ID NO: 274815 - RNA, 32 nt, Homo Sapiens
auaaagaaaaagacaaacagaaauagacacac

SEQ ID NO: 274816 - RNA, 32 nt, Homo Sapiens
aagcagaugaccucagaaaacaucucugggcc

SEQ ID NO: 274817 - RNA, 32 nt, Homo Sapiens
ggcuggcccagcugcagacugcuuagggacuu

SEQ ID NO: 274818 - RNA, 32 nt, Homo Sapiens
cugugcccaucccucagccucuggauucucuu

SEQ ID NO: 274819 - RNA, 32 nt, Homo Sapiens
aggcaagcgcagggggacggggaccagcagcu

SEQ ID NO: 274820 - RNA, 32 nt, Homo Sapiens
agcccugggcugcacagcccuacugggcucca

SEQ ID NO: 274821 - RNA, 32 nt, Homo Sapiens
uuuccugaacucuguguuguugggagaacucu

SEQ ID NO: 274822 - RNA, 32 nt, Homo Sapiens
aagcccaaggaccugggauaaacugggagaac

SEQ ID NO: 274823 - RNA, 32 nt, Homo Sapiens
gguuuauucagcugcauagaugaccagcuuga

SEQ ID NO: 274824 - RNA, 32 nt, Homo Sapiens
auccuggagggaagaagaugauguuacuuuca

SEQ ID NO: 274825 - RNA, 32 nt, Homo Sapiens
gggagcaggcggccucccgggggugcgggagc

SEQ ID NO: 274826 - RNA, 32 nt, Homo Sapiens
cucugaaauuuaucuuaaaagagcuugcucug

SEQ ID NO: 274827 - RNA, 32 nt, Homo Sapiens
guagcugggauuacaggcgugugucaccacgc

SEQ ID NO: 274828 - RNA, 32 nt, Homo Sapiens
agagagaugaauugugagaacagcaaagaaau

SEQ ID NO: 274829 - RNA, 32 nt, Homo Sapiens
cuauauugauaaaaccauacagugagccagcc

SEQ ID NO: 274830 - RNA, 32 nt, Homo Sapiens
ugaacucuguuggcucucuuuggauccagguu

SEQ ID NO: 274831 - RNA, 32 nt, Homo Sapiens
ugccuucuguuguuuaucuuaccugcagauau

SEQ ID NO: 274832 - RNA, 29 nt, Homo Sapiens
cgggaccagggagggaggacgcugguugu

SEQ ID NO: 274833 - RNA, 32 nt, Homo Sapiens
ccccgccccugacgguuccgggccccgcgaag

SEQ ID NO: 274834 - RNA, 32 nt, Homo Sapiens
gcagaaaaccagauuuuaaaauguagaagucg

SEQ ID NO: 274835 - RNA, 32 nt, Homo Sapiens
uggggggaggcugcacugcugcugccagcagc

SEQ ID NO: 274836 - RNA, 32 nt, Homo Sapiens
cucuccgugggauuugccaggcguggacugag

SEQ ID NO: 274837 - RNA, 32 nt, Homo Sapiens
ugaauugcaauaaaacuaagaaauaacugaau

SEQ ID NO: 274838 - RNA, 32 nt, Homo Sapiens
auaguaaaaaauaaaagcuguuuucaccaccu

SEQ ID NO: 274839 - RNA, 32 nt, Homo Sapiens
uuucuccuucccuuucacacuccauguauaua

SEQ ID NO: 274840 - RNA, 32 nt, Homo Sapiens
gcagaguuuuauauauuuauagucacagaugg

SEQ ID NO: 274841 - RNA, 32 nt, Homo Sapiens
ccgccagcuuggcgcgcaccgccgccuccgcc

SEQ ID NO: 274842 - RNA, 32 nt, Homo Sapiens
ggacaguacuguaucauaccucugugaaugua

SEQ ID NO: 274843 - RNA, 30 nt, Homo Sapiens
aacgggcaggcgcgcgcggggcucggcgga

SEQ ID NO: 274844 - RNA, 32 nt, Homo Sapiens
ggggacuuggggauuucuggucaaccccacaa

SEQ ID NO: 274845 - RNA, 32 nt, Homo Sapiens
cgcaggugguggcgcgcggugaggagagcgcg

SEQ ID NO: 274846 - RNA, 32 nt, Homo Sapiens
uuuuuuauauugcaucuauuuacuugcuuugu

SEQ ID NO: 274847 - RNA, 32 nt, Homo Sapiens
gcagugggccccagacuucucgcaggcccagg

SEQ ID NO: 274848 - RNA, 31 nt, Homo Sapiens
ucgucugcgcuggagaaccaggacaucagag

SEQ ID NO: 274849 - RNA, 32 nt, Homo Sapiens
aaaaauuuaaaaauuagcugagcaugguggca

SEQ ID NO: 274850 - RNA, 32 nt, Homo Sapiens
augucuacugucagcucuaggugggaggugua

SEQ ID NO: 274851 - RNA, 32 nt, Homo Sapiens
gcgccagcggggccucgacggucgcccuccug

SEQ ID NO: 274852 - RNA, 32 nt, Homo Sapiens
gcggcugcugaggugagggccgggccagagga

SEQ ID NO: 274853 - RNA, 32 nt, Homo Sapiens
ugcggcgccagcucugcagagcccagacaggg

SEQ ID NO: 274854 - RNA, 32 nt, Homo Sapiens
auaaccuaauaaauucuacacaaggcuuucaa

SEQ ID NO: 274855 - RNA, 32 nt, Homo Sapiens
uuagugaugauuauguguauucuuguuggucu

SEQ ID NO: 274856 - RNA, 32 nt, Homo Sapiens
cuggcugcguuccgggagacucggggcaagaa

SEQ ID NO: 274857 - RNA, 32 nt, Homo Sapiens
uaaacuuuguaucucuaggaacgaagguggaa

SEQ ID NO: 274858 - RNA, 32 nt, Homo Sapiens
uuagaaaucgccuacauuucacaugugcuauu

SEQ ID NO: 274859 - RNA, 32 nt, Homo Sapiens
cuccuggcgugcccucgcucccuuccugagcc

SEQ ID NO: 274860 - RNA, 32 nt, Homo Sapiens
uuaaaucaaaaauuauuuauuaaauaggaucu

SEQ ID NO: 274861 - RNA, 32 nt, Homo Sapiens
uuggcacagagcaucugccuagcuggugaggg

SEQ ID NO: 274862 - RNA, 32 nt, Homo Sapiens
guuuaaaauuaaaaagugauuaucaaagaaua

SEQ ID NO: 274863 - RNA, 32 nt, Homo Sapiens
uuaacuacaaccucgauugucugggcaaugaa

SEQ ID NO: 274864 - RNA, 32 nt, Homo Sapiens
caacaggaaaguguguaaagcaauaagcacau

SEQ ID NO: 274865 - RNA, 32 nt, Homo Sapiens
acuggcgucuucaccaccauguagaaggcugg

SEQ ID NO: 274866 - RNA, 32 nt, Homo Sapiens
agucuucaaagucuuguguuuguuuuauagag

SEQ ID NO: 274867 - RNA, 32 nt, Homo Sapiens
gcugaccaaacacuaaggaugcugaaguuccg

SEQ ID NO: 274868 - RNA, 32 nt, Homo Sapiens
agcucauaguuggcucuuucugggugaguaau

SEQ ID NO: 274869 - RNA, 32 nt, Homo Sapiens
aucacagugacaaagaagaugaacagccucaa

SEQ ID NO: 274870 - RNA, 32 nt, Homo Sapiens
aaaagguauuaacaaauguuuaccaaaccuau

SEQ ID NO: 274871 - RNA, 32 nt, Homo Sapiens
gucauggacuuccucaaaaugaagugcuauuu

SEQ ID NO: 274872 - RNA, 32 nt, Homo Sapiens
cucuggagcccucgcgucccagccccagccag

SEQ ID NO: 274873 - RNA, 32 nt, Homo Sapiens
aagauggacugauagauuagauauaucagucu

SEQ ID NO: 274874 - RNA, 32 nt, Homo Sapiens
caagcacgaguuucugguaugucuaguguucu

SEQ ID NO: 274875 - RNA, 30 nt, Homo Sapiens
gaagaaccaagcugggucuauaggaauugu

SEQ ID NO: 274876 - RNA, 32 nt, Homo Sapiens
agugcuccagagcccacgaggcuugcagaucg

SEQ ID NO: 274877 - RNA, 32 nt, Homo Sapiens
aauuuuugaaaaugacauauuuuugugugaua

SEQ ID NO: 274878 - RNA, 32 nt, Homo Sapiens
ucacccuugcccucugucccugucccacccug

SEQ ID NO: 274879 - RNA, 32 nt, Homo Sapiens
cgcaggcccagcugagcggccgccgagcgggu

SEQ ID NO: 274880 - RNA, 32 nt, Homo Sapiens
ggcggccggaggagucgccggcggcgguggug

SEQ ID NO: 274881 - RNA, 32 nt, Homo Sapiens
aagaaauaaaaauuaguuuaagauggaauaaa

SEQ ID NO: 274882 - RNA, 32 nt, Homo Sapiens
cauucucugaauauauguauauauacauauau

SEQ ID NO: 274883 - RNA, 32 nt, Homo Sapiens
agcaguagccaccuuagcaugaacauaggguu

SEQ ID NO: 274884 - RNA, 32 nt, Homo Sapiens
agaccccuccaaggagaccccuccuggccuga

SEQ ID NO: 274885 - RNA, 32 nt, Homo Sapiens
gauuucuuuggaguaauuaaauccauccuguc

SEQ ID NO: 274886 - RNA, 32 nt, Homo Sapiens
gggucuggcuuggucuucccccguaaggaaau

SEQ ID NO: 274887 - RNA, 32 nt, Homo Sapiens
gagggagucauuucauuggcguuugagucagc

SEQ ID NO: 274888 - RNA, 32 nt, Homo Sapiens
ggccgggcgcgguggcucaagccuguaauccc

SEQ ID NO: 274889 - RNA, 32 nt, Homo Sapiens
ggcagggcgcgguggcucacgccuguaauccc

SEQ ID NO: 274890 - RNA, 32 nt, Homo Sapiens
cucacagggcuuugccacggagccacagagag

SEQ ID NO: 274891 - RNA, 32 nt, Homo Sapiens
aggggccggugcggcggcggcgcggagcgcgg

SEQ ID NO: 274892 - RNA, 32 nt, Homo Sapiens
ugaaaacagucuuuuuauagccuuuagcuugu

SEQ ID NO: 274893 - RNA, 32 nt, Homo Sapiens
uguaucaaggacacggaggggguguggugcug

SEQ ID NO: 274894 - RNA, 32 nt, Homo Sapiens
cacacaggggaagaggacaugaaucgcugacc

SEQ ID NO: 274895 - RNA, 32 nt, Homo Sapiens
gcagacuggggcauccugugccacuaaacuac

SEQ ID NO: 274896 - RNA, 32 nt, Homo Sapiens
ccucugguggaguucggucgggugugggggua

SEQ ID NO: 274897 - RNA, 32 nt, Homo Sapiens
cauuagggaauuccgcuggcauuagcauugcu

SEQ ID NO: 274898 - RNA, 32 nt, Homo Sapiens
cccgggcccucccuuggaaaccugcccugccu

SEQ ID NO: 274899 - RNA, 32 nt, Homo Sapiens
acauuuaguauacauuugaauguauuuuaaac

SEQ ID NO: 274900 - RNA, 32 nt, Homo Sapiens
guuuucuugaaauaacacuguuguguggcuag

SEQ ID NO: 274901 - RNA, 32 nt, Homo Sapiens
ggaucucagccucugaucaguuucacaaaguu

SEQ ID NO: 274902 - RNA, 32 nt, Homo Sapiens
ugugacgcuggccaccuuuucucagcuucuga

SEQ ID NO: 274903 - RNA, 32 nt, Homo Sapiens
uuaagacagucccaucaaaacuccugucuuug

SEQ ID NO: 274904 - RNA, 32 nt, Homo Sapiens
aggaaugaaaaauuaucaucucaauagacaaa

SEQ ID NO: 274905 - RNA, 32 nt, Homo Sapiens
uuuucuaaaugaaacuccauguagcaaccagg

SEQ ID NO: 274906 - RNA, 32 nt, Homo Sapiens
aauuaaagaaaauuauguguaguuauaaacca

SEQ ID NO: 274907 - RNA, 32 nt, Homo Sapiens
agguucaaucaauaaaaauauuuuauucaaaa

SEQ ID NO: 274908 - RNA, 30 nt, Homo Sapiens
gcagcgcggcccgugcacggcgcccacuug

SEQ ID NO: 274909 - RNA, 32 nt, Homo Sapiens
aggaggaggaggagguugcagugagccgagau

SEQ ID NO: 274910 - RNA, 32 nt, Homo Sapiens
uccacugcacgugcgccgcccgggcuucgcuc

SEQ ID NO: 274911 - RNA, 31 nt, Homo Sapiens
cuccgacggcacugacggccauggcgcguuc

SEQ ID NO: 274912 - RNA, 32 nt, Homo Sapiens
caauguagccaucccggccagccccugacauc

SEQ ID NO: 274913 - RNA, 32 nt, Homo Sapiens
gaagcuagaaagaaauaggaauuuaaguccau

SEQ ID NO: 274914 - RNA, 32 nt, Homo Sapiens
gagaagaaagacuguaugugacaauuaccugg

SEQ ID NO: 274915 - RNA, 32 nt, Homo Sapiens
uggcccugccuggaccccauggaggccgaaua

SEQ ID NO: 274916 - RNA, 32 nt, Homo Sapiens
uuacaauaaaauguuccuacuuuaaauauaca

SEQ ID NO: 274917 - RNA, 32 nt, Homo Sapiens
acugcagccgcggcccccguccauccgcgagg

SEQ ID NO: 274918 - RNA, 32 nt, Homo Sapiens
acaugccuuucuuuuccgaucaguuuauuuaa

SEQ ID NO: 274919 - RNA, 32 nt, Homo Sapiens
agacagacuguucccucucucuucccacagug

SEQ ID NO: 274920 - RNA, 32 nt, Homo Sapiens
guccuggcggccugggccgucccgcaccgaac

SEQ ID NO: 274921 - RNA, 32 nt, Homo Sapiens
acaccacugucaaguuucauguaguacaaagc

SEQ ID NO: 274922 - RNA, 28 nt, Homo Sapiens
ugggauugugguaagauguguuuccgug

SEQ ID NO: 274923 - RNA, 29 nt, Homo Sapiens
ugacaugugacuuuuuugucacuucgugc

SEQ ID NO: 274924 - RNA, 32 nt, Homo Sapiens
agcuuuuauaacuuaaauuuggcccuguuacg

SEQ ID NO: 274925 - RNA, 32 nt, Homo Sapiens
ccaggggaauccacacagcccgcucccaggag

SEQ ID NO: 274926 - RNA, 32 nt, Homo Sapiens
guguggacucugggcuccugcugccugggccc

SEQ ID NO: 274927 - RNA, 32 nt, Homo Sapiens
agaguggguuuaggaagauuuucauaaaguca

SEQ ID NO: 274928 - RNA, 32 nt, Homo Sapiens
aaagagguggaaagauuucuggcucagcucuc

SEQ ID NO: 274929 - RNA, 32 nt, Homo Sapiens
uauuuaaugaauugugauuuaaaacaaaauga

SEQ ID NO: 274930 - RNA, 32 nt, Homo Sapiens
gcccccaacuccccgggcccggccccugcccu

SEQ ID NO: 274931 - RNA, 32 nt, Homo Sapiens
ugggcacccacaggaaugaagagagaaagcag

SEQ ID NO: 274932 - RNA, 32 nt, Homo Sapiens
agaauucaauguuugauauuuuaagaauguau

SEQ ID NO: 274933 - RNA, 32 nt, Homo Sapiens
auuagacacacacacacagacacacacaaaga

SEQ ID NO: 274934 - RNA, 32 nt, Homo Sapiens
cggcuggcgggggacugcugggcuggugcaga

SEQ ID NO: 274935 - RNA, 32 nt, Homo Sapiens
auccugcccgggaggaacgccggcguccagcc

SEQ ID NO: 274936 - RNA, 32 nt, Homo Sapiens
ggucgggaauggggggaauguuuuggcugcgg

SEQ ID NO: 274937 - RNA, 32 nt, Homo Sapiens
ugaaaauggaaauaaacugcuugaaaagaaaa

SEQ ID NO: 274938 - RNA, 32 nt, Homo Sapiens
uuuuuaaacaaaucaguuuguuuugguaccuu

SEQ ID NO: 274939 - RNA, 30 nt, Homo Sapiens
uguucuggcccucaccugccggcgcccaca

SEQ ID NO: 274940 - RNA, 32 nt, Homo Sapiens
cgaaauaauaauauauguaaaguggaauuagc

SEQ ID NO: 274941 - RNA, 32 nt, Homo Sapiens
aggacgccggggucccaugggcggcgccgcgc

SEQ ID NO: 274942 - RNA, 32 nt, Homo Sapiens
gggaauugguauauucacagacuguagacuuu

SEQ ID NO: 274943 - RNA, 32 nt, Homo Sapiens
auuuguaaaaauacuguuucacuaauacuuac

SEQ ID NO: 274944 - RNA, 32 nt, Homo Sapiens
uucucugugguuuuauacuuggucaaaaguac

SEQ ID NO: 274945 - RNA, 32 nt, Homo Sapiens
uuuccugcauuuuaaaaguaauaaaauauuau

SEQ ID NO: 274946 - RNA, 32 nt, Homo Sapiens
ugguuuaaacaaaauuagauaaaccauguaca

SEQ ID NO: 274947 - RNA, 32 nt, Homo Sapiens
cccugucugauccuuagcaaaaguaggaaggu

SEQ ID NO: 274948 - RNA, 32 nt, Homo Sapiens
aauuauuuaguagucauacuguaauuuuuaug

SEQ ID NO: 274949 - RNA, 32 nt, Homo Sapiens
uggccgugaacaggugggugucugcgugcguc

SEQ ID NO: 274950 - RNA, 32 nt, Homo Sapiens
cagaagacguaggaagacaagccacaguugua

SEQ ID NO: 274951 - RNA, 32 nt, Homo Sapiens
ugaguuggauauuuuuaaagcaguuaacuaau

SEQ ID NO: 274952 - RNA, 32 nt, Homo Sapiens
ucuuaggagcacuuaaaagauaccuuggcauu

SEQ ID NO: 274953 - RNA, 32 nt, Homo Sapiens
cacagaaccaaagaagcaaguuauggaggagc

SEQ ID NO: 274954 - RNA, 32 nt, Homo Sapiens
cagcuuggcaguggccugcagacgccccuugg

SEQ ID NO: 274955 - RNA, 32 nt, Homo Sapiens
cggcggcggaagagggcggaggguagugggau

SEQ ID NO: 274956 - RNA, 32 nt, Homo Sapiens
aggugggaggaaaaguccuggcugggagaauu

SEQ ID NO: 274957 - RNA, 32 nt, Homo Sapiens
auuuaaaauggaaagcuguguuuggaaaauug

SEQ ID NO: 274958 - RNA, 32 nt, Homo Sapiens
agagcuggaguaaggacuuggguguggguggu

SEQ ID NO: 274959 - RNA, 32 nt, Homo Sapiens
ugguuuuguauuuuuucuuaauccuucacuuu

SEQ ID NO: 274960 - RNA, 32 nt, Homo Sapiens
ggguuuugcucuccuuacgugauacugccaug

SEQ ID NO: 274961 - RNA, 32 nt, Homo Sapiens
cguuucuacuaaaaauacaaaauuagcugggc

SEQ ID NO: 274962 - RNA, 32 nt, Homo Sapiens
ggugcacaacgcucugcucuacagaagggggu

SEQ ID NO: 274963 - RNA, 32 nt, Homo Sapiens
aaauuuugaaacacaaaacaauuuugaaucuu

SEQ ID NO: 274964 - RNA, 32 nt, Homo Sapiens
cccugcuguuugcaucuugagagcagcauggg

SEQ ID NO: 274965 - RNA, 32 nt, Homo Sapiens
gaacccaggaggagguggagaucgcagugagc

SEQ ID NO: 274966 - RNA, 32 nt, Homo Sapiens
gucacggugcugaggaaccuccucaucagccu

SEQ ID NO: 274967 - RNA, 32 nt, Homo Sapiens
uccagccgugccccagccuggaccccuggggc

SEQ ID NO: 274968 - RNA, 32 nt, Homo Sapiens
aauuuuccugaauaaucauuagccaaagauca

SEQ ID NO: 274969 - RNA, 32 nt, Homo Sapiens
accuuggucuuagaauuuuucuuuuauggucu

SEQ ID NO: 274970 - RNA, 32 nt, Homo Sapiens
gacggagcucggcgugcuugcugcuggagggu

SEQ ID NO: 274971 - RNA, 32 nt, Homo Sapiens
agcacauugggucuuucugccacaggcccuug

SEQ ID NO: 274972 - RNA, 32 nt, Homo Sapiens
cccaguggagaaugagaggcaggccccccgug

SEQ ID NO: 274973 - RNA, 32 nt, Homo Sapiens
caaaaucuggagaugcugaauuuuguuggggg

SEQ ID NO: 274974 - RNA, 32 nt, Homo Sapiens
uuggccacccggggcccugcuuccucacacug

SEQ ID NO: 274975 - RNA, 32 nt, Homo Sapiens
uguauuuauucccccaucuucaucccaacagc

SEQ ID NO: 274976 - RNA, 32 nt, Homo Sapiens
ugggagccaggaaggugggggguguccagucc

SEQ ID NO: 274977 - RNA, 32 nt, Homo Sapiens
ugggucuacccccagccaccagcccucauccu

SEQ ID NO: 274978 - RNA, 32 nt, Homo Sapiens
uguaguuuauauaaaagucggauguuaagaua

SEQ ID NO: 274979 - RNA, 32 nt, Homo Sapiens
cugucggagaaccagcugggaguggcaggagc

SEQ ID NO: 274980 - RNA, 32 nt, Homo Sapiens
cuaggauuuuuuuuuuuuuuuaagaaagaauu

SEQ ID NO: 274981 - RNA, 32 nt, Homo Sapiens
acaaaagaggguuuccucacuccuuuuacuca

SEQ ID NO: 274982 - RNA, 32 nt, Homo Sapiens
ccccgccucccuccccgccccgcgaugucgga

SEQ ID NO: 274983 - RNA, 32 nt, Homo Sapiens
ugcacugucuauauugcacugagagaggaagg

SEQ ID NO: 274984 - RNA, 30 nt, Homo Sapiens
ugcagcagucaccacuagggggugauggag

SEQ ID NO: 274985 - RNA, 32 nt, Homo Sapiens
ccgcccgcuaguccgccgcccggcgccauggc

SEQ ID NO: 274986 - RNA, 32 nt, Homo Sapiens
ccaccacuagggaaucuccagaugaacuauua

SEQ ID NO: 274987 - RNA, 32 nt, Homo Sapiens
gggugucguucuuuuccaacaaaauagcaauc

SEQ ID NO: 274988 - RNA, 32 nt, Homo Sapiens
ccucaccucgccgcuccucccgggccgccauc

SEQ ID NO: 274989 - RNA, 32 nt, Homo Sapiens
agcgggaucugaagggauuuugaaaggaauca

SEQ ID NO: 274990 - RNA, 32 nt, Homo Sapiens
acuuuuagaccgaauauuccuuugaaaacaug

SEQ ID NO: 274991 - RNA, 32 nt, Homo Sapiens
accugaggagcugguggagaaacuagagcuuc

SEQ ID NO: 274992 - RNA, 32 nt, Homo Sapiens
agaauaaaaugaaauuucauaacuguggcuau

SEQ ID NO: 274993 - RNA, 32 nt, Homo Sapiens
ggaaaucuguggcccugagauuuuaagaacau

SEQ ID NO: 274994 - RNA, 32 nt, Homo Sapiens
cuacagaaagcaggacuaggaacuggaaauaa

SEQ ID NO: 274995 - RNA, 32 nt, Homo Sapiens
cccgucacuccaggugggagccaccccgguga

SEQ ID NO: 274996 - RNA, 32 nt, Homo Sapiens
ggggggcugacacccccaccucccucccagac

SEQ ID NO: 274997 - RNA, 31 nt, Homo Sapiens
gaagggagggcgggccccgggcccuccuccg

SEQ ID NO: 274998 - RNA, 32 nt, Homo Sapiens
gagagucugccccuaccacgucccugccaccc

SEQ ID NO: 274999 - RNA, 32 nt, Homo Sapiens
cccagucccuggauguugcugaaacucucgag

SEQ ID NO: 275000 - RNA, 32 nt, Homo Sapiens
uaugguaacauaaccucugggaaguucuuaua

SEQ ID NO: 275001 - RNA, 32 nt, Homo Sapiens
cuuuaaagaaugcaugcccaaaacacuacuac

SEQ ID NO: 275002 - RNA, 32 nt, Homo Sapiens
agaagucuaccuuguauuggguccucacggca

SEQ ID NO: 275003 - RNA, 32 nt, Homo Sapiens
cccugaauuuucuccucuccucucaggucagu

SEQ ID NO: 275004 - RNA, 32 nt, Homo Sapiens
ggcacgagcaccaucgcugcuggagcagcugc

SEQ ID NO: 275005 - RNA, 32 nt, Homo Sapiens
agaggcuccgcggcccaggcuccugguguguc

SEQ ID NO: 275006 - RNA, 31 nt, Homo Sapiens
aacauguguaacauugaaugcauguuaaaua

SEQ ID NO: 275007 - RNA, 32 nt, Homo Sapiens
caggcccggggcaucgccgccggccgccgacu

SEQ ID NO: 275008 - RNA, 32 nt, Homo Sapiens
aguuggaaaaaccaccugaucacaacuuucua

SEQ ID NO: 275009 - RNA, 32 nt, Homo Sapiens
acacgcaugugcgcgcacacaccacacaugca

SEQ ID NO: 275010 - RNA, 32 nt, Homo Sapiens
acaagggaacagccuggacauggcaucagaga

SEQ ID NO: 275011 - RNA, 32 nt, Homo Sapiens
gugcaguggcacagucucggcucacugcaacc

SEQ ID NO: 275012 - RNA, 32 nt, Homo Sapiens
aagcaagaugaaaucacaaaaucacugaggcu

SEQ ID NO: 275013 - RNA, 31 nt, Homo Sapiens
ggggcguggcguuggcugccccggaccccgg

SEQ ID NO: 275014 - RNA, 32 nt, Homo Sapiens
gccaaggcugccuugcccuuugggcuggagau

SEQ ID NO: 275015 - RNA, 32 nt, Homo Sapiens
ucugcuguguugcgcagugcaguggggugcaa

SEQ ID NO: 275016 - RNA, 32 nt, Homo Sapiens
aaagaauauauuuuauacuugaagaauaacau

SEQ ID NO: 275017 - RNA, 32 nt, Homo Sapiens
uaguggaacaaaauugaaggguggucaguagu

SEQ ID NO: 275018 - RNA, 32 nt, Homo Sapiens
ugcaccggccccaagggccucucugcccgugg

SEQ ID NO: 275019 - RNA, 32 nt, Homo Sapiens
cugcgccccgugagccgaggcgggugauuuau

SEQ ID NO: 275020 - RNA, 32 nt, Homo Sapiens
uucauuugaguuugcauguuucucugcacuau

SEQ ID NO: 275021 - RNA, 32 nt, Homo Sapiens
aagaucuguauaugaauauguauauguauaug

SEQ ID NO: 275022 - RNA, 32 nt, Homo Sapiens
ggauucuuuuaaucccuugacuauuuagaguc

SEQ ID NO: 275023 - RNA, 32 nt, Homo Sapiens
aaagguaaauuaacuaaagauuuauucaggaa

SEQ ID NO: 275024 - RNA, 32 nt, Homo Sapiens
aauacaggugggcuccccagggugcugcauca

SEQ ID NO: 275025 - RNA, 32 nt, Homo Sapiens
cuuagcuauuacaauuugauaguuauguucag

SEQ ID NO: 275026 - RNA, 32 nt, Homo Sapiens
cuuuacaauuuauguuuagagauugcaguaag

SEQ ID NO: 275027 - RNA, 32 nt, Homo Sapiens
gcuacugccacggucagcauucccgcaggacu

SEQ ID NO: 275028 - RNA, 32 nt, Homo Sapiens
cccaggcgcccggccccgcaacgcgaaauaaa

SEQ ID NO: 275029 - RNA, 32 nt, Homo Sapiens
agacggacacggcccaccuggaggccugugug

SEQ ID NO: 275030 - RNA, 32 nt, Homo Sapiens
cacacacaagcacugcuauacuggacguggcu

SEQ ID NO: 275031 - RNA, 32 nt, Homo Sapiens
ccgagccggauuccgcgagcggugccccugag

SEQ ID NO: 275032 - RNA, 32 nt, Homo Sapiens
uaauucuugcuuauacucagucuauucgguaa

SEQ ID NO: 275033 - RNA, 32 nt, Homo Sapiens
gcacaccccccgcccaccccaccaaguguacu

SEQ ID NO: 275034 - RNA, 32 nt, Homo Sapiens
cgaggggaaaguucucagaacuguugcugcuc

SEQ ID NO: 275035 - RNA, 32 nt, Homo Sapiens
guauguaauuauuugcugcugcugcugugcuc

SEQ ID NO: 275036 - RNA, 32 nt, Homo Sapiens
gaacccccgccuugguuuuugaacacguaaac

SEQ ID NO: 275037 - RNA, 32 nt, Homo Sapiens
ccacccaggaggaggaaacuucacauagccgu

SEQ ID NO: 275038 - RNA, 32 nt, Homo Sapiens
aagaccauguagaaaacuuuuacaucugccuu

SEQ ID NO: 275039 - RNA, 32 nt, Homo Sapiens
uugcuaggaacaaaagaaaagucuaacuccau

SEQ ID NO: 275040 - RNA, 32 nt, Homo Sapiens
agucaccacugggacaggccugggccccaccc

SEQ ID NO: 275041 - RNA, 32 nt, Homo Sapiens
ccuccccaccucccucccggacgggguggcug

SEQ ID NO: 275042 - RNA, 32 nt, Homo Sapiens
uggguagaaaaaagauucaauugcuuggcugu

SEQ ID NO: 275043 - RNA, 32 nt, Homo Sapiens
cagguuuguggaucauccaaaggcuuugccac

SEQ ID NO: 275044 - RNA, 32 nt, Homo Sapiens
ugggcuuucuggcgggaagcaguuacgggggc

SEQ ID NO: 275045 - RNA, 32 nt, Homo Sapiens
cuggggaugcuuaauguguacaaaaacuaugu

SEQ ID NO: 275046 - RNA, 32 nt, Homo Sapiens
ggcagccucuggcggcagcgcgcuccacucgc

SEQ ID NO: 275047 - RNA, 32 nt, Homo Sapiens
cucugaggccaccagcagaucaucuuuaagcu

SEQ ID NO: 275048 - RNA, 31 nt, Homo Sapiens
gugcauauaaauuguauguuaaauguaagua

SEQ ID NO: 275049 - RNA, 32 nt, Homo Sapiens
ggcaacucaacgucaacgccaagcccuucgug

SEQ ID NO: 275050 - RNA, 32 nt, Homo Sapiens
ggugcggaucgagugagcgccggcggcggcgg

SEQ ID NO: 275051 - RNA, 32 nt, Homo Sapiens
gagcugggacgaacaaggacugggcugggucc

SEQ ID NO: 275052 - RNA, 32 nt, Homo Sapiens
uuuuaugcaauaaauguauacaugugugcaca

SEQ ID NO: 275053 - RNA, 32 nt, Homo Sapiens
uaaugagcaauauauggaaauaaacacaccuu

SEQ ID NO: 275054 - RNA, 32 nt, Homo Sapiens
acaggugugcccaggaccggggaagucucagg

SEQ ID NO: 275055 - RNA, 32 nt, Homo Sapiens
guuggccgggggugggggugagggcagaacca

SEQ ID NO: 275056 - RNA, 32 nt, Homo Sapiens
guaggauuuaaaucauuuaaaaaacuaaacug

SEQ ID NO: 275057 - RNA, 28 nt, Homo Sapiens
auaauggcaggugaagaaauuaaugaag

SEQ ID NO: 275058 - RNA, 32 nt, Homo Sapiens
aaccuacuuguacagcugcaagcuuugaacaa

SEQ ID NO: 275059 - RNA, 32 nt, Homo Sapiens
aaaggguccaaauaaaauaauuuucuaaugug

SEQ ID NO: 275060 - RNA, 32 nt, Homo Sapiens
gggcgacugccagcccucaccccgccucgggg

SEQ ID NO: 275061 - RNA, 32 nt, Homo Sapiens
uguguuuggggcacugaauaaacaagugaugu

SEQ ID NO: 275062 - RNA, 32 nt, Homo Sapiens
agaagcugacaggauuguuggugcugugggga

SEQ ID NO: 275063 - RNA, 32 nt, Homo Sapiens
ucaccaggacagagacuguauaggcugaccag

SEQ ID NO: 275064 - RNA, 32 nt, Homo Sapiens
guauuauucauuggucuuucugcugcuggaaa

SEQ ID NO: 275065 - RNA, 32 nt, Homo Sapiens
gguagauuuccacuuucaauuuuuaaaauuaa

SEQ ID NO: 275066 - RNA, 32 nt, Homo Sapiens
aaguacauuaaauuauuuuaaaaauaguuugu

SEQ ID NO: 275067 - RNA, 32 nt, Homo Sapiens
cacugcacuccagccugggugagagagugaga

SEQ ID NO: 275068 - RNA, 28 nt, Homo Sapiens
gacucaguggcuacugguauugucucuu

SEQ ID NO: 275069 - RNA, 32 nt, Homo Sapiens
aacaacaccuggguuggggcggcggccucuuc

SEQ ID NO: 275070 - RNA, 32 nt, Homo Sapiens
ugagccaccacaccccgccgcggcugacuuaa

SEQ ID NO: 275071 - RNA, 32 nt, Homo Sapiens
aggacagcuggguguggacgcucuccugcggc

SEQ ID NO: 275072 - RNA, 32 nt, Homo Sapiens
uguaaggaaauauuuauuuguauuuuuauguu

SEQ ID NO: 275073 - RNA, 32 nt, Homo Sapiens
gcgugccauugccagccgggcccgccaggccc

SEQ ID NO: 275074 - RNA, 32 nt, Homo Sapiens
gcugaggaggauguaugucaccucaggaccau

SEQ ID NO: 275075 - RNA, 29 nt, Homo Sapiens
ccgcguccggucccgagcgggccucccuc

SEQ ID NO: 275076 - RNA, 32 nt, Homo Sapiens
cuaagagagaauaacaauaggaacuguauuua

SEQ ID NO: 275077 - RNA, 32 nt, Homo Sapiens
ucauaaucauuuauauccauuauuuucugcau

SEQ ID NO: 275078 - RNA, 32 nt, Homo Sapiens
gaggucuguaagucagguuacaaggccgggag

SEQ ID NO: 275079 - RNA, 32 nt, Homo Sapiens
gcuggguugcuggggggugggcguggauuuag

SEQ ID NO: 275080 - RNA, 32 nt, Homo Sapiens
gccacacguaaaaacuauuugucauuguuaca

SEQ ID NO: 275081 - RNA, 32 nt, Homo Sapiens
agacaacagacagaaacccagaaaccaccugc

SEQ ID NO: 275082 - RNA, 32 nt, Homo Sapiens
agcuggccugguuuccuuccucccugauugau

SEQ ID NO: 275083 - RNA, 32 nt, Homo Sapiens
ucucuguaauauugguaauuuggaugaaggaa

SEQ ID NO: 275084 - RNA, 32 nt, Homo Sapiens
uaaaauuguaugaaaauccuuuuaaccauuuu

SEQ ID NO: 275085 - RNA, 32 nt, Homo Sapiens
cgacucgagggugacgcucgcuccgcucgucc

SEQ ID NO: 275086 - RNA, 32 nt, Homo Sapiens
uuauguaaagauaaauauucuagguuagucaa

SEQ ID NO: 275087 - RNA, 32 nt, Homo Sapiens
uuguuauguauauagaugugcaagucuuguca

SEQ ID NO: 275088 - RNA, 32 nt, Homo Sapiens
gcgggacgcgccgcgcucgggaugucgugaag

SEQ ID NO: 275089 - RNA, 32 nt, Homo Sapiens
agaugaggaucuguaucuccacugcuuggaug

SEQ ID NO: 275090 - RNA, 32 nt, Homo Sapiens
cagcgagugcgcgcuccuccucgcccgccgcu

SEQ ID NO: 275091 - RNA, 32 nt, Homo Sapiens
cugacuguccauguuuuccaccugcaaccauu

SEQ ID NO: 275092 - RNA, 32 nt, Homo Sapiens
gaacuucuucuuuugcagaugaaaauaaaggu

SEQ ID NO: 275093 - RNA, 32 nt, Homo Sapiens
uggaagcuuuuguuuauaggaacuuguagggc

SEQ ID NO: 275094 - RNA, 32 nt, Homo Sapiens
gacucaccugcuuguccaagggcccccuuuca

SEQ ID NO: 275095 - RNA, 32 nt, Homo Sapiens
gaguagagggagagggcagguggaacuggggc

SEQ ID NO: 275096 - RNA, 32 nt, Homo Sapiens
ugggugagcugauggaggcuucaucuuaggug

SEQ ID NO: 275097 - RNA, 32 nt, Homo Sapiens
agugugccaagaguucgauguuaguguuucug

SEQ ID NO: 275098 - RNA, 32 nt, Homo Sapiens
gaguguguauacaggaugucaaguacugacca

SEQ ID NO: 275099 - RNA, 32 nt, Homo Sapiens
agccacccacguggggugugccaggcaccccc

SEQ ID NO: 275100 - RNA, 32 nt, Homo Sapiens
cccggcugagggugggaggcaaacacgccuug

SEQ ID NO: 275101 - RNA, 32 nt, Homo Sapiens
gagccuugccuggccugggcuaggggcacugu

SEQ ID NO: 275102 - RNA, 32 nt, Homo Sapiens
gucuuuccuauuugcacacguccauguuuauc

SEQ ID NO: 275103 - RNA, 32 nt, Homo Sapiens
gcugauuuucuuuuauuuuucacugaaugaag

SEQ ID NO: 275104 - RNA, 32 nt, Homo Sapiens
ucgccccgcccggcgcgggcccaggacccuga

SEQ ID NO: 275105 - RNA, 32 nt, Homo Sapiens
uuggcuacugucaugcaggcuuccaggaacau

SEQ ID NO: 275106 - RNA, 29 nt, Homo Sapiens
guggcugugacuuucacccaggaggagug

SEQ ID NO: 275107 - RNA, 32 nt, Homo Sapiens
ucaacgugggcuccagcgugacauggcugaag

SEQ ID NO: 275108 - RNA, 32 nt, Homo Sapiens
agagcugaugaaaucucagucuuuuguaucua

SEQ ID NO: 275109 - RNA, 32 nt, Homo Sapiens
gaggggguggaggacucuccccugccucuggg

SEQ ID NO: 275110 - RNA, 32 nt, Homo Sapiens
cagacccugggcucagccucgcgccccggugc

SEQ ID NO: 275111 - RNA, 32 nt, Homo Sapiens
uccauaagcucuucucaccuccucuuagccca

SEQ ID NO: 275112 - RNA, 32 nt, Homo Sapiens
cuaugaaaucccuggagaauuuuuggugacau

SEQ ID NO: 275113 - RNA, 32 nt, Homo Sapiens
caagcagccgggcgcaguggcucacaccugua

SEQ ID NO: 275114 - RNA, 32 nt, Homo Sapiens
uaaacuuaauaaauuaucuguuaauguagauu

SEQ ID NO: 275115 - RNA, 32 nt, Homo Sapiens
aaugauguuuauuuccauaguuugauagugcc

SEQ ID NO: 275116 - RNA, 32 nt, Homo Sapiens
guucaagaauuccacugaagcacuuauuuuaa

SEQ ID NO: 275117 - RNA, 29 nt, Homo Sapiens
aggccacauaugaugucuaugagacauuc

SEQ ID NO: 275118 - RNA, 32 nt, Homo Sapiens
cgccuguaaucccagcacuuugggagaccgag

SEQ ID NO: 275119 - RNA, 32 nt, Homo Sapiens
gugagcuggcccagcccgcguccgugcugagc

SEQ ID NO: 275120 - RNA, 32 nt, Homo Sapiens
ugccuguaaucccagcacuuugggaggccuag

SEQ ID NO: 275121 - RNA, 32 nt, Homo Sapiens
aauuaaaauaccaugguaauauuugcaaaagg

SEQ ID NO: 275122 - RNA, 32 nt, Homo Sapiens
gaaaggcaaaggaaaauucuagccaaaugcaa

SEQ ID NO: 275123 - RNA, 32 nt, Homo Sapiens
cggcggccgcaagacccgccuuggagcuccac

SEQ ID NO: 275124 - RNA, 32 nt, Homo Sapiens
gcucacuagaacauccggcagcucuguucugc

SEQ ID NO: 275125 - RNA, 32 nt, Homo Sapiens
uuaaccuacucucggagcugccuccaugggca

SEQ ID NO: 275126 - RNA, 32 nt, Homo Sapiens
aaacagcagaaggagguagagaagguuaaacc

SEQ ID NO: 275127 - RNA, 32 nt, Homo Sapiens
aaugggcccauuuucuuggauaccaaggaccu

SEQ ID NO: 275128 - RNA, 32 nt, Homo Sapiens
aucuuccugcaccggcggccgggugagggcgg

SEQ ID NO: 275129 - RNA, 32 nt, Homo Sapiens
cccgccgcacugggcggcccaggccgcucccu

SEQ ID NO: 275130 - RNA, 32 nt, Homo Sapiens
uggccggauggcugaggccugguggcugccuc

SEQ ID NO: 275131 - RNA, 32 nt, Homo Sapiens
auauguuuaagugguauaaagaagccaggauu

SEQ ID NO: 275132 - RNA, 32 nt, Homo Sapiens
gcauaaaacuaaaagaggaaggagaagcggca

SEQ ID NO: 275133 - RNA, 32 nt, Homo Sapiens
ugugacagccccgaugagcaccuggcuggcug

SEQ ID NO: 275134 - RNA, 32 nt, Homo Sapiens
augagugaagggaucaacuucucugacaaccu

SEQ ID NO: 275135 - RNA, 32 nt, Homo Sapiens
cccccuccccuucuccuccucucccuuggaga

SEQ ID NO: 275136 - RNA, 32 nt, Homo Sapiens
gauagcuaaggauacaucacuugaaagauuca

SEQ ID NO: 275137 - RNA, 32 nt, Homo Sapiens
guguuuaauggcaaggcagcccugucugaagg

SEQ ID NO: 275138 - RNA, 32 nt, Homo Sapiens
auuuccaucccuccccugcccgggaagggacc

SEQ ID NO: 275139 - RNA, 32 nt, Homo Sapiens
uguguuuauaugccugacauuauuuggguuuu

SEQ ID NO: 275140 - RNA, 32 nt, Homo Sapiens
gaauuccgaaagcaaggagauggccaccaagg

SEQ ID NO: 275141 - RNA, 32 nt, Homo Sapiens
aaacaacauuuuuuacaacaaacaaaaaaacu

SEQ ID NO: 275142 - RNA, 32 nt, Homo Sapiens
uggccgauuggaaaugcuguaaaaugcaaacu

SEQ ID NO: 275143 - RNA, 32 nt, Homo Sapiens
auacaguuaaacuuauaaaccaaaaauuuuaa

SEQ ID NO: 275144 - RNA, 32 nt, Homo Sapiens
gccucuggggcagccacaguuuucaugaucac

SEQ ID NO: 275145 - RNA, 32 nt, Homo Sapiens
ugguguuuugucuuuuucagaaacuaugagcu

SEQ ID NO: 275146 - RNA, 32 nt, Homo Sapiens
uaaauggaauuaucuaugggaugugugguucu

SEQ ID NO: 275147 - RNA, 32 nt, Homo Sapiens
accuccgccucccggguucacgccauucuccu

SEQ ID NO: 275148 - RNA, 32 nt, Homo Sapiens
guucuuacuuuuuucuauucaauuuugucuau

SEQ ID NO: 275149 - RNA, 30 nt, Homo Sapiens
uuguggaauauccuuuccuaggcacauuug

SEQ ID NO: 275150 - RNA, 32 nt, Homo Sapiens
aaguuggccuccccgggcccagcuccauccuc

SEQ ID NO: 275151 - RNA, 32 nt, Homo Sapiens
augccuuccuucucugcccccagccuucuguc

SEQ ID NO: 275152 - RNA, 32 nt, Homo Sapiens
uugccuggaacgcugcagcugcacccacccug

SEQ ID NO: 275153 - RNA, 32 nt, Homo Sapiens
uguacauacauuuuuguauguuuagauauuac

SEQ ID NO: 275154 - RNA, 32 nt, Homo Sapiens
gucuacggaguugggugcccgccgagguuaag

SEQ ID NO: 275155 - RNA, 32 nt, Homo Sapiens
cucugcccuggccagcacucuagcuccugacc

SEQ ID NO: 275156 - RNA, 32 nt, Homo Sapiens
ucuacaaacaauuuuguuuucugcauuuaaac

SEQ ID NO: 275157 - RNA, 32 nt, Homo Sapiens
ccuccuuuuuaaaguagcccaaucucugccua

SEQ ID NO: 275158 - RNA, 32 nt, Homo Sapiens
caggaccccguccacagcugaucccugggccc

SEQ ID NO: 275159 - RNA, 32 nt, Homo Sapiens
uuugcugaugaagcagaagaggggaugcgcau

SEQ ID NO: 275160 - RNA, 32 nt, Homo Sapiens
uagaugaguauuuuuacuauuuguauuaagug

SEQ ID NO: 275161 - RNA, 32 nt, Homo Sapiens
aggcagcgugagcagccggaggagcgccgagu

SEQ ID NO: 275162 - RNA, 32 nt, Homo Sapiens
uucugcuuuauucucuagcaauccacaguaca

SEQ ID NO: 275163 - RNA, 32 nt, Homo Sapiens
aguaaagucagcaaacaacaaacaaaccaaaa

SEQ ID NO: 275164 - RNA, 32 nt, Homo Sapiens
guagcucuaaacuguuaacauagaauguuacu

SEQ ID NO: 275165 - RNA, 32 nt, Homo Sapiens
auugccuugccauuucugaacaaaagaaaacu

SEQ ID NO: 275166 - RNA, 32 nt, Homo Sapiens
gccucggcggccugucgguuuucaccauggag

SEQ ID NO: 275167 - RNA, 32 nt, Homo Sapiens
agaacugcauucaaauuaguuauuucaggaag

SEQ ID NO: 275168 - RNA, 32 nt, Homo Sapiens
uaccaaagugggaugccuuuaaaaugcaguca

SEQ ID NO: 275169 - RNA, 29 nt, Homo Sapiens
uucaguuaucacaugugaaagcuuuugcu

SEQ ID NO: 275170 - RNA, 32 nt, Homo Sapiens
auuuaauguaauuauuacuucaaauccuuugg

SEQ ID NO: 275171 - RNA, 32 nt, Homo Sapiens
cuuuggaugaggggcgcguggaggaggaggaa

SEQ ID NO: 275172 - RNA, 32 nt, Homo Sapiens
cccccuuccccucccccuugggacgcgcucua

SEQ ID NO: 275173 - RNA, 31 nt, Homo Sapiens
gccugagcgucgagacucggggccgaggcgg

SEQ ID NO: 275174 - RNA, 32 nt, Homo Sapiens
ucucugacccucacuuacagacuagcccagug

SEQ ID NO: 275175 - RNA, 32 nt, Homo Sapiens
ggcuccgugggaagaguuuucuggacccagaa

SEQ ID NO: 275176 - RNA, 32 nt, Homo Sapiens
uaaagaaaaauaugauacucucagauuuuaag

SEQ ID NO: 275177 - RNA, 32 nt, Homo Sapiens
ccuggaccugugggcgagucccauuggcuggg

SEQ ID NO: 275178 - RNA, 32 nt, Homo Sapiens
ccugggccuggcgguugagcccggggagcuag

SEQ ID NO: 275179 - RNA, 32 nt, Homo Sapiens
aggagcuccaagcccggauguuagagcaucag

SEQ ID NO: 275180 - RNA, 32 nt, Homo Sapiens
cucccgaguuggggggaggggguguggcaacg

SEQ ID NO: 275181 - RNA, 32 nt, Homo Sapiens
uucaaccugccagggcagggacaccgagcugg

SEQ ID NO: 275182 - RNA, 32 nt, Homo Sapiens
aguacuuccaaauaaauucauaucuagauuuu

SEQ ID NO: 275183 - RNA, 32 nt, Homo Sapiens
ggugauuuagggaaguggaaaagcaagauaca

SEQ ID NO: 275184 - RNA, 30 nt, Homo Sapiens
uccgggcggucggagccgccgggagcugua

SEQ ID NO: 275185 - RNA, 32 nt, Homo Sapiens
aggguucuaggggaucucagauguguguagca

SEQ ID NO: 275186 - RNA, 32 nt, Homo Sapiens
gcggcagcggaguaggaggcgaggcaagaccu

SEQ ID NO: 275187 - RNA, 32 nt, Homo Sapiens
gagcaggccccacucccuccccuccccccucc

SEQ ID NO: 275188 - RNA, 32 nt, Homo Sapiens
acgcacacacacgccacccagccucuuguuuc

SEQ ID NO: 275189 - RNA, 27 nt, Homo Sapiens
ucaaaccauagcaacugguauauagua

SEQ ID NO: 275190 - RNA, 32 nt, Homo Sapiens
uuggugacccugaguuucuccuccaucaguac

SEQ ID NO: 275191 - RNA, 32 nt, Homo Sapiens
ccuacggccgccucguagucacugccgcggcg

SEQ ID NO: 275192 - RNA, 32 nt, Homo Sapiens
uggcgggggccggggaggagcgcaaacucauc

SEQ ID NO: 275193 - RNA, 32 nt, Homo Sapiens
ugcccacggccuccuccuguagccccugccug

SEQ ID NO: 275194 - RNA, 32 nt, Homo Sapiens
cccucgcucgcauugguggcgcugaggugccg

SEQ ID NO: 275195 - RNA, 32 nt, Homo Sapiens
ccugucuccccuccccgacguuggggacgccc

SEQ ID NO: 275196 - RNA, 32 nt, Homo Sapiens
gagaguguggaggucugacaggguaggaauau

SEQ ID NO: 275197 - RNA, 32 nt, Homo Sapiens
cacuuuuauuuuuuccugugugucauguuggu

SEQ ID NO: 275198 - RNA, 32 nt, Homo Sapiens
cggccggcguccccugccuccacccugugccc

SEQ ID NO: 275199 - RNA, 32 nt, Homo Sapiens
uacaugggcuccugucauggggcccagagucc

SEQ ID NO: 275200 - RNA, 32 nt, Homo Sapiens
ugacaagugacauuauacauauuuucaugugc

SEQ ID NO: 275201 - RNA, 32 nt, Homo Sapiens
ccgccgccuccggcugcucuugcgacaagcca

SEQ ID NO: 275202 - RNA, 32 nt, Homo Sapiens
ugcugggacaagcagcccaucaacgccauggg

SEQ ID NO: 275203 - RNA, 32 nt, Homo Sapiens
gcaucugcccucuggagaacacugccucccgc

SEQ ID NO: 275204 - RNA, 32 nt, Homo Sapiens
ggcuggugcuuugaaagagaggcggaggggag

SEQ ID NO: 275205 - RNA, 32 nt, Homo Sapiens
ggaauggagagugaggcccacaaauuaccugc

SEQ ID NO: 275206 - RNA, 32 nt, Homo Sapiens
agagcuaaguucagggacacgcaaguuccucg

SEQ ID NO: 275207 - RNA, 32 nt, Homo Sapiens
uuugaggagagaaagcauaaaaauauagcaua

SEQ ID NO: 275208 - RNA, 32 nt, Homo Sapiens
caucuuuuagcaucuguaaacucauugcaugg

SEQ ID NO: 275209 - RNA, 32 nt, Homo Sapiens
uuagcugggcaugguggcaugcacuuguaguu

SEQ ID NO: 275210 - RNA, 32 nt, Homo Sapiens
gaagaaaggaagucgcagccccugcccacggc

SEQ ID NO: 275211 - RNA, 32 nt, Homo Sapiens
gggaggcggugaccagcagcaggaggagaaag

SEQ ID NO: 275212 - RNA, 32 nt, Homo Sapiens
aagaaugugcggaucgaagaccucucccggcg

SEQ ID NO: 275213 - RNA, 32 nt, Homo Sapiens
uaucaacaacuaaauauaaauuacuuuggaaa

SEQ ID NO: 275214 - RNA, 32 nt, Homo Sapiens
gugaucagccagcagcugugcgucaucuucac

SEQ ID NO: 275215 - RNA, 32 nt, Homo Sapiens
ucuaaccacacgcugacuguagccccaaaccu

SEQ ID NO: 275216 - RNA, 32 nt, Homo Sapiens
agaugauuaaacauuucuuuuuuuuagccauu

SEQ ID NO: 275217 - RNA, 32 nt, Homo Sapiens
caacugcuaagguccauaaaaugaagacugua

SEQ ID NO: 275218 - RNA, 32 nt, Homo Sapiens
uaggagagaaagggcagcucccucuuccuaau

SEQ ID NO: 275219 - RNA, 32 nt, Homo Sapiens
aacugagcaaggaaacaugguuuggauuauaa

SEQ ID NO: 275220 - RNA, 32 nt, Homo Sapiens
ccuagcaaaacgcagauggaauaagaaaacaa

SEQ ID NO: 275221 - RNA, 32 nt, Homo Sapiens
uuaguauauuuucauucuuucauuuuauauuc

SEQ ID NO: 275222 - RNA, 32 nt, Homo Sapiens
agucugcuaaagaucaaaugugaaaguacuug

SEQ ID NO: 275223 - RNA, 32 nt, Homo Sapiens
ucccuguccacugcugccccccugggccuguc

SEQ ID NO: 275224 - RNA, 32 nt, Homo Sapiens
agggccgcuccggcugcccgucggccgggucc

SEQ ID NO: 275225 - RNA, 32 nt, Homo Sapiens
aaacucaccaaaaugaauaguuguuucgguua

SEQ ID NO: 275226 - RNA, 32 nt, Homo Sapiens
ccuuucugacaucagcacuuuaccagaggcau

SEQ ID NO: 275227 - RNA, 30 nt, Homo Sapiens
gcacugcuggaaggaaugcaaaauggcaca

SEQ ID NO: 275228 - RNA, 32 nt, Homo Sapiens
acaaaauaaugagaauaguuuuaccaaagaua

SEQ ID NO: 275229 - RNA, 32 nt, Homo Sapiens
cuacagguagauuuuaaaaacacguuaaaggg

SEQ ID NO: 275230 - RNA, 32 nt, Homo Sapiens
gaucuuucucuuucuuuuucccaaagucacau

SEQ ID NO: 275231 - RNA, 32 nt, Homo Sapiens
aaagcuuuuguuaucaagauuuucauacuuuu

SEQ ID NO: 275232 - RNA, 32 nt, Homo Sapiens
aaguuuaugugcucuggagcuggaguggguuc

SEQ ID NO: 275233 - RNA, 32 nt, Homo Sapiens
gccaaagccgcaggugagaacguccgcgguag

SEQ ID NO: 275234 - RNA, 32 nt, Homo Sapiens
uauauaucccaauauauguuguuuccuuugag

SEQ ID NO: 275235 - RNA, 32 nt, Homo Sapiens
ccccugauucacugccuaugaacagaccaucc

SEQ ID NO: 275236 - RNA, 32 nt, Homo Sapiens
ucugaauugggucugucuuugagaugcccagg

SEQ ID NO: 275237 - RNA, 32 nt, Homo Sapiens
uuuucagauaaaacaguuuaugaguucauaga

SEQ ID NO: 275238 - RNA, 32 nt, Homo Sapiens
acacugaacuuauucaaccuacaggaggccac

SEQ ID NO: 275239 - RNA, 32 nt, Homo Sapiens
gggaagccgcgugcuccucaggagagagcugu

SEQ ID NO: 275240 - RNA, 32 nt, Homo Sapiens
aggaccugcugcuuguggagcacugccuggcc

SEQ ID NO: 275241 - RNA, 32 nt, Homo Sapiens
gggccgaccccgcuccggcgccuccgcuuccc

SEQ ID NO: 275242 - RNA, 32 nt, Homo Sapiens
uaaugacaaaggaaauuaaugaaaauguuuuu

SEQ ID NO: 275243 - RNA, 32 nt, Homo Sapiens
cccugagauccgcagagcugagcgccaggcgg

SEQ ID NO: 275244 - RNA, 32 nt, Homo Sapiens
ggucgcaggaaucuuguuggugauccauccag

SEQ ID NO: 275245 - RNA, 32 nt, Homo Sapiens
ggcugugcugcguuccgcacacuuccucggag

SEQ ID NO: 275246 - RNA, 32 nt, Homo Sapiens
gagaaaggggagaucugggccugggaagauuc

SEQ ID NO: 275247 - RNA, 32 nt, Homo Sapiens
cuggaagccggagccauaacugcugcaguuug

SEQ ID NO: 275248 - RNA, 32 nt, Homo Sapiens
uuugucauuuaauuauuuuaaaguuagaaacu

SEQ ID NO: 275249 - RNA, 32 nt, Homo Sapiens
ugagcccauucaugguaagucuuaagcuuguu

SEQ ID NO: 275250 - RNA, 32 nt, Homo Sapiens
ccuggaagccccaaggcucuuccuccagcugg

SEQ ID NO: 275251 - RNA, 32 nt, Homo Sapiens
caaauacaaaaauaaaaugguagagagugaac

SEQ ID NO: 275252 - RNA, 32 nt, Homo Sapiens
auuuuuauaugauuuguacaaauuuuuucuga

SEQ ID NO: 275253 - RNA, 32 nt, Homo Sapiens
cugucggaaaagucaccacuuuagucccuggc

SEQ ID NO: 275254 - RNA, 32 nt, Homo Sapiens
gacaacagcugcgggcucugugcgagcggccc

SEQ ID NO: 275255 - RNA, 32 nt, Homo Sapiens
gauaccucugcuggccugaaucugcaaagacc

SEQ ID NO: 275256 - RNA, 32 nt, Homo Sapiens
cggaggaggggggcgccgagggggcugugguu

SEQ ID NO: 275257 - RNA, 31 nt, Homo Sapiens
uuugcgugaaacagcucugccaggccgggag

SEQ ID NO: 275258 - RNA, 32 nt, Homo Sapiens
uggaagcugccuuauauagagcuacauuuggg

SEQ ID NO: 275259 - RNA, 32 nt, Homo Sapiens
auagguuaagagcuccaaacaucucugaauuc

SEQ ID NO: 275260 - RNA, 32 nt, Homo Sapiens
auuuuuuuuaagauuauaccaacaguggauca

SEQ ID NO: 275261 - RNA, 32 nt, Homo Sapiens
auuuuuuaaaaauuauuuuuguggacuugggu

SEQ ID NO: 275262 - RNA, 32 nt, Homo Sapiens
cagcugccagccccggcccuggcccccacccc

SEQ ID NO: 275263 - RNA, 32 nt, Homo Sapiens
ccucugccgggagggagggaggcacacaggug

SEQ ID NO: 275264 - RNA, 32 nt, Homo Sapiens
agcuacuaaauauauauuaugcaagucaggaa

SEQ ID NO: 275265 - RNA, 32 nt, Homo Sapiens
ccgccgguggccuggggagagugcggcgccau

SEQ ID NO: 275266 - RNA, 32 nt, Homo Sapiens
uuuuugcccuuauucauuucuccagcuaccau

SEQ ID NO: 275267 - RNA, 32 nt, Homo Sapiens
cucagccucugggaucucacgucaccccagac

SEQ ID NO: 275268 - RNA, 32 nt, Homo Sapiens
uuagaggugcucgcgccgcucugcugcugcug

SEQ ID NO: 275269 - RNA, 32 nt, Homo Sapiens
gcccuucaccccgauuccauugcuucuugcua

SEQ ID NO: 275270 - RNA, 32 nt, Homo Sapiens
cgcggccccgcggcccggagccaugcugagga

SEQ ID NO: 275271 - RNA, 32 nt, Homo Sapiens
agccuuuucugcaggcuucauguccuuagcug

SEQ ID NO: 275272 - RNA, 32 nt, Homo Sapiens
cugcccauauccuguuuucugucugcccaccu

SEQ ID NO: 275273 - RNA, 32 nt, Homo Sapiens
cacccccagccagcuggcccaggaccccucua

SEQ ID NO: 275274 - RNA, 32 nt, Homo Sapiens
ggggcgacuugccugccccugaagcccuuguu

SEQ ID NO: 275275 - RNA, 32 nt, Homo Sapiens
gugccuuguuucaacaguuuuugcuaauuuuu

SEQ ID NO: 275276 - RNA, 32 nt, Homo Sapiens
agggccacuccagcccggcuggggaagagagu

SEQ ID NO: 275277 - RNA, 32 nt, Homo Sapiens
ucuccccucaaaagaaagauuaugauaaagaa

SEQ ID NO: 275278 - RNA, 32 nt, Homo Sapiens
ccuuguuccagaaagcugagguuucuccaggu

SEQ ID NO: 275279 - RNA, 32 nt, Homo Sapiens
gggggcugugguccuuccuuucuccugaggag

SEQ ID NO: 275280 - RNA, 32 nt, Homo Sapiens
accucugcccagccggcccccgagaccuggga

SEQ ID NO: 275281 - RNA, 32 nt, Homo Sapiens
acuguauccauucuaccuguccuccgugaaaa

SEQ ID NO: 275282 - RNA, 32 nt, Homo Sapiens
cagggccaccgggaaccugucggcgagcugcg

SEQ ID NO: 275283 - RNA, 32 nt, Homo Sapiens
guuugaggcugggcugggagggggagggagau

SEQ ID NO: 275284 - RNA, 32 nt, Homo Sapiens
uggaauugcugaacucagaacuaggccaugga

SEQ ID NO: 275285 - RNA, 32 nt, Homo Sapiens
ccgugacaucagcagugcuggugcugcugugu

SEQ ID NO: 275286 - RNA, 32 nt, Homo Sapiens
uuagcuguggguuuuucuuggacauccuuauc

SEQ ID NO: 275287 - RNA, 32 nt, Homo Sapiens
aagaugaauuguaggcagguuuugcugaucag

SEQ ID NO: 275288 - RNA, 32 nt, Homo Sapiens
uucuacguguuacuguaaggcaaacagcaucc

SEQ ID NO: 275289 - RNA, 32 nt, Homo Sapiens
uaaugugguauuuuaaauaaaguaucauaaau

SEQ ID NO: 275290 - RNA, 31 nt, Homo Sapiens
gagagggagcccccgguauaccaagggagcc

SEQ ID NO: 275291 - RNA, 32 nt, Homo Sapiens
uuugcuuacucuauuuuuuuuaaccugugaaa

SEQ ID NO: 275292 - RNA, 32 nt, Homo Sapiens
uaucuuuuggcucaggaaaugacuucaccuau

SEQ ID NO: 275293 - RNA, 32 nt, Homo Sapiens
uaaaauuuccauuugcagaauuuggucucuca

SEQ ID NO: 275294 - RNA, 32 nt, Homo Sapiens
guacuggccggcgggggcguggcacccuggga

SEQ ID NO: 275295 - RNA, 32 nt, Homo Sapiens
agccuggaccuggacucugagaugccuggccc

SEQ ID NO: 275296 - RNA, 32 nt, Homo Sapiens
ggaagguucagacuagcuguguucagcauuca

SEQ ID NO: 275297 - RNA, 32 nt, Homo Sapiens
gugagccucgccccgcccucccugcgccggcc

SEQ ID NO: 275298 - RNA, 32 nt, Homo Sapiens
guuuguccaaaauaaauauuguggccuuauau

SEQ ID NO: 275299 - RNA, 32 nt, Homo Sapiens
cuaggagagguagaaacgauccuaucagcuuc

SEQ ID NO: 275300 - RNA, 32 nt, Homo Sapiens
cacaugcucugcucucacguggcaccagugga

SEQ ID NO: 275301 - RNA, 32 nt, Homo Sapiens
gagucuggggagagaaaagguggccaggaucc

SEQ ID NO: 275302 - RNA, 32 nt, Homo Sapiens
ugaugaggcagauagcagaacaaaugaggacc

SEQ ID NO: 275303 - RNA, 32 nt, Homo Sapiens
cauuuuuguccaguguuuuucuuuuuaagaug

SEQ ID NO: 275304 - RNA, 32 nt, Homo Sapiens
ugagaccccgucccacacagccccagcugggg

SEQ ID NO: 275305 - RNA, 32 nt, Homo Sapiens
uuuguguccuuauucuaauccuccuccccugg

SEQ ID NO: 275306 - RNA, 32 nt, Homo Sapiens
acaguagauaaaauuguuuaaaaucucaugaa

SEQ ID NO: 275307 - RNA, 32 nt, Homo Sapiens
gagccugcagugagccgagaucgcgccacugc

SEQ ID NO: 275308 - RNA, 32 nt, Homo Sapiens
caggaaagcaaagcuuccccagagacgcucag

SEQ ID NO: 275309 - RNA, 32 nt, Homo Sapiens
aauuucagauaaauaacaacuaauuucagaug

SEQ ID NO: 275310 - RNA, 32 nt, Homo Sapiens
gcuggaggacauuugguagaggucacacugca

SEQ ID NO: 275311 - RNA, 32 nt, Homo Sapiens
uggagaaagcaucaggacuguugaguaacucc

SEQ ID NO: 275312 - RNA, 32 nt, Homo Sapiens
uucgacacaccuguagacguucgccagguaaa

SEQ ID NO: 275313 - RNA, 32 nt, Homo Sapiens
uuauugucacccaaagaugccuaugggaacca

SEQ ID NO: 275314 - RNA, 32 nt, Homo Sapiens
agaguccagguggccuuggagaggaaagagga

SEQ ID NO: 275315 - RNA, 32 nt, Homo Sapiens
ggagacccauccccucccccuucucgcacccc

SEQ ID NO: 275316 - RNA, 32 nt, Homo Sapiens
uaaaacaaccucagauugaaaaagcaaccuaa

SEQ ID NO: 275317 - RNA, 32 nt, Homo Sapiens
gguugcagucugcgguucccaagccccaagac

SEQ ID NO: 275318 - RNA, 32 nt, Homo Sapiens
gaugcccggaagcuccugcgugcauccccggg

SEQ ID NO: 275319 - RNA, 32 nt, Homo Sapiens
ugaaagguccuaguauugcgcuucuuggauuu

SEQ ID NO: 275320 - RNA, 32 nt, Homo Sapiens
guuuuccaugugaaguuuuuauugagccaacu

SEQ ID NO: 275321 - RNA, 32 nt, Homo Sapiens
aauccguauuaccauggauuaauucugcauag

SEQ ID NO: 275322 - RNA, 32 nt, Homo Sapiens
ggcugaauccucauacagacaagaucauuaug

SEQ ID NO: 275323 - RNA, 32 nt, Homo Sapiens
guguguauauauauguacauguguauauaagu

SEQ ID NO: 275324 - RNA, 32 nt, Homo Sapiens
gagugguuugcccuuccugcuacucuauuacc

SEQ ID NO: 275325 - RNA, 32 nt, Homo Sapiens
gcaaaagggaaauuauuugguggaugguagcu

SEQ ID NO: 275326 - RNA, 32 nt, Homo Sapiens
uuucccaucccuccccaugaaggagggaggcu

SEQ ID NO: 275327 - RNA, 32 nt, Homo Sapiens
acugggauaggguggggaggcuggcagcccuc

SEQ ID NO: 275328 - RNA, 31 nt, Homo Sapiens
aaaaaucagcgcagccguucagcacuacccc

SEQ ID NO: 275329 - RNA, 32 nt, Homo Sapiens
ggcgaggacuccccggccacccgcagguaccg

SEQ ID NO: 275330 - RNA, 31 nt, Homo Sapiens
ccaccccaagccacagugagcuuggugcacu

SEQ ID NO: 275331 - RNA, 32 nt, Homo Sapiens
ugcuuagugaagcauaaaguuaccuacaucaa

SEQ ID NO: 275332 - RNA, 32 nt, Homo Sapiens
ccaucacaguccugcccuucacccucaagcac

SEQ ID NO: 275333 - RNA, 32 nt, Homo Sapiens
gggaccugagcggcgagcucccggggcagccc

SEQ ID NO: 275334 - RNA, 32 nt, Homo Sapiens
gcccucggcgcgcgcaggggaccgagcugguc

SEQ ID NO: 275335 - RNA, 32 nt, Homo Sapiens
accccggcgggcccugccagacgcacagggau

SEQ ID NO: 275336 - RNA, 32 nt, Homo Sapiens
uaaaacauuaggagauuuuggccagguacagu

SEQ ID NO: 275337 - RNA, 32 nt, Homo Sapiens
cucccccaccucagcccucuccugcauccucc

SEQ ID NO: 275338 - RNA, 32 nt, Homo Sapiens
ccucucuggcccacccaguccucugcccaagc

SEQ ID NO: 275339 - RNA, 32 nt, Homo Sapiens
acccaucccuacugccaguuauuggcuccucu

SEQ ID NO: 275340 - RNA, 32 nt, Homo Sapiens
gagcgcaacucggcuuccagacccgccgcgca

SEQ ID NO: 275341 - RNA, 32 nt, Homo Sapiens
guccauuugggaccagauguccaacuggagca

SEQ ID NO: 275342 - RNA, 30 nt, Homo Sapiens
gugccgugcacgcgcgcggguccggaggcg

SEQ ID NO: 275343 - RNA, 32 nt, Homo Sapiens
ugucuuucaccuguaaucccagcacuuuggga

SEQ ID NO: 275344 - RNA, 32 nt, Homo Sapiens
uacugcacuguaguuucaaauggauccuccag

SEQ ID NO: 275345 - RNA, 32 nt, Homo Sapiens
gaggcccacaucuugcccacuccgcgcgcggg

SEQ ID NO: 275346 - RNA, 32 nt, Homo Sapiens
cccgcuggucaucuccgccgcgcucgggggcc

SEQ ID NO: 275347 - RNA, 32 nt, Homo Sapiens
gggauuggauuaauacauuaauccuuaggaca

SEQ ID NO: 275348 - RNA, 32 nt, Homo Sapiens
uucuagguauuaauuuacuaagauauuccuaa

SEQ ID NO: 275349 - RNA, 32 nt, Homo Sapiens
cggaguaaaacacaagcaggacauuucagcaa

SEQ ID NO: 275350 - RNA, 32 nt, Homo Sapiens
aauuugaauaaauuauuugaacugcauaaaua

SEQ ID NO: 275351 - RNA, 32 nt, Homo Sapiens
cugcagccuccccagcucuccucugccagcca

SEQ ID NO: 275352 - RNA, 32 nt, Homo Sapiens
ggccuuuggccacacggccagaaguaccaggu

SEQ ID NO: 275353 - RNA, 32 nt, Homo Sapiens
gccgccgccggggcucuauggucucucccuag

SEQ ID NO: 275354 - RNA, 32 nt, Homo Sapiens
ggaggggggcagccuugccggauccagggcag

SEQ ID NO: 275355 - RNA, 32 nt, Homo Sapiens
aagcauggacauuuuuauuaaacagcaauagg

SEQ ID NO: 275356 - RNA, 32 nt, Homo Sapiens
cagcccugguaacugcaucuucuccccuugcc

SEQ ID NO: 275357 - RNA, 32 nt, Homo Sapiens
agaauagccuuucagcuacaagagguuauaua

SEQ ID NO: 275358 - RNA, 32 nt, Homo Sapiens
uaguccuggugcucuccuuucccgggguccug

SEQ ID NO: 275359 - RNA, 32 nt, Homo Sapiens
gcuuagcugccuugagcuaaccccaaggcugc

SEQ ID NO: 275360 - RNA, 32 nt, Homo Sapiens
aaugugaugauuauguggagauggugccuuug

SEQ ID NO: 275361 - RNA, 32 nt, Homo Sapiens
cugggggguuguggcagaggcugggggaggga

SEQ ID NO: 275362 - RNA, 32 nt, Homo Sapiens
aguccugugccguccucccauccaggggagug

SEQ ID NO: 275363 - RNA, 32 nt, Homo Sapiens
cagcuugagaagggucacuacugcauuuauag

SEQ ID NO: 275364 - RNA, 32 nt, Homo Sapiens
ggggcgguguuaacucuuucugcuccuugcau

SEQ ID NO: 275365 - RNA, 32 nt, Homo Sapiens
cccuucauggacgucuuaaucuuccacacaca

SEQ ID NO: 275366 - RNA, 32 nt, Homo Sapiens
ccauucuaggagccuuuaaaucucugagcuaa

SEQ ID NO: 275367 - RNA, 32 nt, Homo Sapiens
cccauccggcagcuccuccggugugcucacag

SEQ ID NO: 275368 - RNA, 32 nt, Homo Sapiens
guuguuuguaaauauaaagaaccauguaaaua

SEQ ID NO: 275369 - RNA, 32 nt, Homo Sapiens
gucuuccuuucuguacauugcuauaucuucag

SEQ ID NO: 275370 - RNA, 32 nt, Homo Sapiens
acaaacacuuaagagaugacauaucgcccuag

SEQ ID NO: 275371 - RNA, 32 nt, Homo Sapiens
cucuugguguugcccaggcagagagggcagug

SEQ ID NO: 275372 - RNA, 32 nt, Homo Sapiens
gcgugccacugagucauagcuaccuccucaga

SEQ ID NO: 275373 - RNA, 32 nt, Homo Sapiens
acaaaugaggaaacuaaacucuguggaaggga

SEQ ID NO: 275374 - RNA, 32 nt, Homo Sapiens
ccuucccugccugcugucaccauccacuguuu

SEQ ID NO: 275375 - RNA, 32 nt, Homo Sapiens
gcauauaccacccaucucuggucuggggcuga

SEQ ID NO: 275376 - RNA, 32 nt, Homo Sapiens
agacuucaaaaauaaaaaaucugaagaggcuu

SEQ ID NO: 275377 - RNA, 32 nt, Homo Sapiens
aguagucagcucaaugcucaugugcuucuucu

SEQ ID NO: 275378 - RNA, 32 nt, Homo Sapiens
gcugagggagccggcuucggccuuggccggcc

SEQ ID NO: 275379 - RNA, 32 nt, Homo Sapiens
ucaaauuuuuauaucugcaucccuuuaaauua

SEQ ID NO: 275380 - RNA, 32 nt, Homo Sapiens
cucauuuggggauaugguggaugggggcuguu

SEQ ID NO: 275381 - RNA, 32 nt, Homo Sapiens
uuucguacagggugggcgggggcgggaggggc

SEQ ID NO: 275382 - RNA, 32 nt, Homo Sapiens
cauccacuucacaagccuuguuucugauacuu

SEQ ID NO: 275383 - RNA, 32 nt, Homo Sapiens
uaccacugagaaaaaacaaugcagauuugugg

SEQ ID NO: 275384 - RNA, 32 nt, Homo Sapiens
guuggaaucugaauaaaccaauuacaaaauaa

SEQ ID NO: 275385 - RNA, 32 nt, Homo Sapiens
aacucugcaacuggggaccccugcauggccac

SEQ ID NO: 275386 - RNA, 32 nt, Homo Sapiens
ucugagaugcauuguuccuaugacuuccuaca

SEQ ID NO: 275387 - RNA, 32 nt, Homo Sapiens
aaagagaauauggcaaauauuuguauauuccc

SEQ ID NO: 275388 - RNA, 31 nt, Homo Sapiens
gugccagggcacugccugccccccaccccag

SEQ ID NO: 275389 - RNA, 32 nt, Homo Sapiens
ggaagagccacguccccagggauuggaggagg

SEQ ID NO: 275390 - RNA, 32 nt, Homo Sapiens
gugcacagguauauuucaaaccuaaucaccgu

SEQ ID NO: 275391 - RNA, 32 nt, Homo Sapiens
ugcggguguucgccaccaugcccagcuaauuu

SEQ ID NO: 275392 - RNA, 27 nt, Homo Sapiens
ggacuccagggauucuggugggauaug

SEQ ID NO: 275393 - RNA, 32 nt, Homo Sapiens
gaugccccaaaauaaagugagaaugguaauuu

SEQ ID NO: 275394 - RNA, 32 nt, Homo Sapiens
cggggccagcccggccgcuccuccccugggug

SEQ ID NO: 275395 - RNA, 32 nt, Homo Sapiens
cuccuucucauuguuucuaauuagcuccuuua

SEQ ID NO: 275396 - RNA, 32 nt, Homo Sapiens
auggcccuucgcucucccccagccccaccaug

SEQ ID NO: 275397 - RNA, 32 nt, Homo Sapiens
acaugagucacuuuucccacccuguauuuugu

SEQ ID NO: 275398 - RNA, 32 nt, Homo Sapiens
gcgggguccccggccgcaggauucccacuugg

SEQ ID NO: 275399 - RNA, 32 nt, Homo Sapiens
cuggccacggggaggcggggcauggggggcag

SEQ ID NO: 275400 - RNA, 32 nt, Homo Sapiens
caaccauaauaaauaaaauggcagcaaauuag

SEQ ID NO: 275401 - RNA, 32 nt, Homo Sapiens
auagucaccuacuuccuguccuccucggcccc

SEQ ID NO: 275402 - RNA, 32 nt, Homo Sapiens
aauucuucuuugauuguguugcacauagauau

SEQ ID NO: 275403 - RNA, 32 nt, Homo Sapiens
cccuccagcgcgcgcgaagaagcuugggaguc

SEQ ID NO: 275404 - RNA, 32 nt, Homo Sapiens
gguaccuuaucuacuguaaauauuucauuaaa

SEQ ID NO: 275405 - RNA, 32 nt, Homo Sapiens
aguuggccauugccugcggcuuucucgguuug

SEQ ID NO: 275406 - RNA, 32 nt, Homo Sapiens
cacucagcccugacaacccauccacacacggc

SEQ ID NO: 275407 - RNA, 32 nt, Homo Sapiens
uuuuuuuuggcuucuuuuuuccucuccccuuc

SEQ ID NO: 275408 - RNA, 32 nt, Homo Sapiens
ugccacugcacuccagccugccuggaugacag

SEQ ID NO: 275409 - RNA, 32 nt, Homo Sapiens
ccagauacugaauauuaaaaaccagcacauuc

SEQ ID NO: 275410 - RNA, 32 nt, Homo Sapiens
ugcaguuuccuuggggaccccugaacaaggag

SEQ ID NO: 275411 - RNA, 32 nt, Homo Sapiens
aaauacaaaaauuaguucggcaugguggcagg

SEQ ID NO: 275412 - RNA, 32 nt, Homo Sapiens
cacguucaacguauguacaagcggacgcuugg

SEQ ID NO: 275413 - RNA, 32 nt, Homo Sapiens
uuuauguuuauuuggauuugcuuuuauuugua

SEQ ID NO: 275414 - RNA, 32 nt, Homo Sapiens
aggugaguuguugugacaaccacaagcacuuu

SEQ ID NO: 275415 - RNA, 32 nt, Homo Sapiens
uccauuggaaaauuauaucauuuuggguugcc

SEQ ID NO: 275416 - RNA, 32 nt, Homo Sapiens
uuugugagggucacaguugcucugggacaccu

SEQ ID NO: 275417 - RNA, 32 nt, Homo Sapiens
gacacaugggccagcugccugugccugccaug

SEQ ID NO: 275418 - RNA, 32 nt, Homo Sapiens
ugugcuuuuuauucugucuuuggucguuucua

SEQ ID NO: 275419 - RNA, 32 nt, Homo Sapiens
ucaucugccaccucuccugcagugagaaguag

SEQ ID NO: 275420 - RNA, 32 nt, Homo Sapiens
auucaccauccuuuacuauuaagggaaaggaa

SEQ ID NO: 275421 - RNA, 32 nt, Homo Sapiens
acuguacaagguguugucacacucauuuagug

SEQ ID NO: 275422 - RNA, 32 nt, Homo Sapiens
auguccacaagugcagcguucaucucaucuca

SEQ ID NO: 275423 - RNA, 32 nt, Homo Sapiens
agcaaggcccucaggacccguguccucagagc

SEQ ID NO: 275424 - RNA, 32 nt, Homo Sapiens
gccuccccggccaggcacguggcaccgucgcc

SEQ ID NO: 275425 - RNA, 32 nt, Homo Sapiens
ccccccagcuccguucaggagucgccucccca

SEQ ID NO: 275426 - RNA, 32 nt, Homo Sapiens
caguaauaugaaagccacacuuugaagguaau

SEQ ID NO: 275427 - RNA, 32 nt, Homo Sapiens
uccuggugguggaacccgucaaguacaccgug

SEQ ID NO: 275428 - RNA, 32 nt, Homo Sapiens
auaaacgauuuaaugaaagcuagguaugacuu

SEQ ID NO: 275429 - RNA, 32 nt, Homo Sapiens
caugucccugucacaaucucaugggcaccuug

SEQ ID NO: 275430 - RNA, 32 nt, Homo Sapiens
aaugauugaaagggcugcugcgccaagaggcc

SEQ ID NO: 275431 - RNA, 32 nt, Homo Sapiens
cucauucucuccugagcccacuauuccacucu

SEQ ID NO: 275432 - RNA, 32 nt, Homo Sapiens
aaagcaagaggaaagagaugggauaaguaaac

SEQ ID NO: 275433 - RNA, 32 nt, Homo Sapiens
gcuugccccaccccgccccuccccuccacagc

SEQ ID NO: 275434 - RNA, 32 nt, Homo Sapiens
ugugggggcagacagacauagcaggggugggc

SEQ ID NO: 275435 - RNA, 32 nt, Homo Sapiens
cauuuuuguuuuuaugauagggcugauauuuu

SEQ ID NO: 275436 - RNA, 32 nt, Homo Sapiens
ggagucgaggguuuauucucgcaguagaggaa

SEQ ID NO: 275437 - RNA, 32 nt, Homo Sapiens
ugugcuguugcuaugcagugugaucuuuauuu

SEQ ID NO: 275438 - RNA, 32 nt, Homo Sapiens
ugccuccaagggugggccaggccgaagaaccu

SEQ ID NO: 275439 - RNA, 32 nt, Homo Sapiens
ccuggccccuccaauccuccccgcucugccgc

SEQ ID NO: 275440 - RNA, 32 nt, Homo Sapiens
uuugcagcugcugugucucuucgucgucuggg

SEQ ID NO: 275441 - RNA, 32 nt, Homo Sapiens
ucucggcggcaccgcgcuaacucaggggcugc

SEQ ID NO: 275442 - RNA, 32 nt, Homo Sapiens
gaggcuucaaggaccuaaauuuguaucauuau

SEQ ID NO: 275443 - RNA, 31 nt, Homo Sapiens
gggccgcugccggucaggucggccgccccug

SEQ ID NO: 275444 - RNA, 32 nt, Homo Sapiens
cauuuuauuucaaacuaacaaauguauacggu

SEQ ID NO: 275445 - RNA, 32 nt, Homo Sapiens
gguauaucaucaacuucuauaccuaagaauau

SEQ ID NO: 275446 - RNA, 32 nt, Homo Sapiens
aauauauguaaauauauuaaacacauccauua

SEQ ID NO: 275447 - RNA, 32 nt, Homo Sapiens
agcccgcccgccggcgucugcgcugcuccggc

SEQ ID NO: 275448 - RNA, 32 nt, Homo Sapiens
uaaauuuucuaaaaauggacuugcucuucuag

SEQ ID NO: 275449 - RNA, 32 nt, Homo Sapiens
auaaaaagggauuaaucugcuaaaauguaauc

SEQ ID NO: 275450 - RNA, 32 nt, Homo Sapiens
ucggcccccacagaguggcccgcgggccuccg

SEQ ID NO: 275451 - RNA, 32 nt, Homo Sapiens
gguaccgaggcgaggaggaaaaagcagggggg

SEQ ID NO: 275452 - RNA, 32 nt, Homo Sapiens
aacaaacaaacaaacauagaaccaucguuagc

SEQ ID NO: 275453 - RNA, 32 nt, Homo Sapiens
ccugggaguggccuuggcuuccugcaggacag

SEQ ID NO: 275454 - RNA, 32 nt, Homo Sapiens
gccuggcccuccccuccuuggcauucaugggg

SEQ ID NO: 275455 - RNA, 32 nt, Homo Sapiens
cuucaucccucgcgcccggguggaugcguggc

SEQ ID NO: 275456 - RNA, 30 nt, Homo Sapiens
cagcaucgccccgugcccucggcguuugca

SEQ ID NO: 275457 - RNA, 32 nt, Homo Sapiens
gagcagggagcgugagucgccauggcgacgcc

SEQ ID NO: 275458 - RNA, 32 nt, Homo Sapiens
uucuuuuuucucauuucuuuugaaauggcauc

SEQ ID NO: 275459 - RNA, 32 nt, Homo Sapiens
cucauggguaauggggcguguuuucuugccaa

SEQ ID NO: 275460 - RNA, 32 nt, Homo Sapiens
gagacagacaccuuuucuauuuaccuccuaau

SEQ ID NO: 275461 - RNA, 32 nt, Homo Sapiens
cagcgggagggcguagccguagucuuggccca

SEQ ID NO: 275462 - RNA, 32 nt, Homo Sapiens
guuuccaaauuugcauuuuuuauauuaaaaau

SEQ ID NO: 275463 - RNA, 32 nt, Homo Sapiens
agagagaugcguuuuucuaggacucugugcaa

SEQ ID NO: 275464 - RNA, 32 nt, Homo Sapiens
aagaugaccagcucgugggaccaucuagauaa

SEQ ID NO: 275465 - RNA, 32 nt, Homo Sapiens
ggugcuguggcuguagcugaccucuuuggacc

SEQ ID NO: 275466 - RNA, 32 nt, Homo Sapiens
gccuggagugucccugcuccagcccugccagg

SEQ ID NO: 275467 - RNA, 32 nt, Homo Sapiens
cacugcuacuauuugcaacuggucacgaccua

SEQ ID NO: 275468 - RNA, 32 nt, Homo Sapiens
uguggucuuacugaucuuuguauauuacauac

SEQ ID NO: 275469 - RNA, 32 nt, Homo Sapiens
cauccaaaggcuuugccacauucuucauauuu

SEQ ID NO: 275470 - RNA, 32 nt, Homo Sapiens
ccaagaccucaucccgccgccgcccacgucuu

SEQ ID NO: 275471 - RNA, 32 nt, Homo Sapiens
cgccgcugccgccgcugcucuuggcucgggga

SEQ ID NO: 275472 - RNA, 32 nt, Homo Sapiens
cuagaaauggugagaaaaugaauagaauugaa

SEQ ID NO: 275473 - RNA, 32 nt, Homo Sapiens
ucuuccuugcaugaggaugcaagaugcaacag

SEQ ID NO: 275474 - RNA, 32 nt, Homo Sapiens
aacaugugccggcgagcgcgggccaccccacc

SEQ ID NO: 275475 - RNA, 32 nt, Homo Sapiens
cccaguguuccuccucaccccacguccugggg

SEQ ID NO: 275476 - RNA, 32 nt, Homo Sapiens
aggcauagcgggccugcgcugcaccaacauug

SEQ ID NO: 275477 - RNA, 31 nt, Homo Sapiens
acguagccaugggccgcaggagugcauacaa

SEQ ID NO: 275478 - RNA, 32 nt, Homo Sapiens
guuugcuaaaagaagagaggggaagaauuuaa

SEQ ID NO: 275479 - RNA, 32 nt, Homo Sapiens
gcagcacgucuggaguuguucguucuuuccgg

SEQ ID NO: 275480 - RNA, 32 nt, Homo Sapiens
agaauuccuuugcaucagauacuaaaaugaaa

SEQ ID NO: 275481 - RNA, 32 nt, Homo Sapiens
acccaggaggagugggcuuugcuggauccuuc

SEQ ID NO: 275482 - RNA, 32 nt, Homo Sapiens
ugcgcugcggcgggcgcgcuacccagacgcug

SEQ ID NO: 275483 - RNA, 30 nt, Homo Sapiens
ucgaaccagauggaugaagaccacuaacgg

SEQ ID NO: 275484 - RNA, 32 nt, Homo Sapiens
gcgcggaggggcgggggaggcgccgggaaguc

SEQ ID NO: 275485 - RNA, 32 nt, Homo Sapiens
gcuacaaguacucaaggccagcccuugagagc

SEQ ID NO: 275486 - RNA, 32 nt, Homo Sapiens
gagauaugaugauuuugaaacugauuucuaga

SEQ ID NO: 275487 - RNA, 32 nt, Homo Sapiens
ggagcaagggggcgcuaggaaagggaacuggg

SEQ ID NO: 275488 - RNA, 32 nt, Homo Sapiens
acuaaugagcuucuagugauguucaaaauugc

SEQ ID NO: 275489 - RNA, 32 nt, Homo Sapiens
gucagagccaggaguauggagaucugagaccg

SEQ ID NO: 275490 - RNA, 32 nt, Homo Sapiens
cugagugggccuagcgcaccaagccccugggc

SEQ ID NO: 275491 - RNA, 29 nt, Homo Sapiens
uaaguugucauugagugaaagguucacuu

SEQ ID NO: 275492 - RNA, 32 nt, Homo Sapiens
gaagacacauucagagguuugauugguugaga

SEQ ID NO: 275493 - RNA, 32 nt, Homo Sapiens
gaagcaauaugauuuccauacauccaacccau

SEQ ID NO: 275494 - RNA, 32 nt, Homo Sapiens
aacuguauuauuauaauuauauuuugcauugc

SEQ ID NO: 275495 - RNA, 32 nt, Homo Sapiens
ccuucaguaaaugugauucaccucuucuuucc

SEQ ID NO: 275496 - RNA, 32 nt, Homo Sapiens
uuccccuaccucccggcccccgcucccgcccc

SEQ ID NO: 275497 - RNA, 32 nt, Homo Sapiens
cccauccuguaccccccauuucuggggccuca

SEQ ID NO: 275498 - RNA, 32 nt, Homo Sapiens
agaugggccagucgaagcaguuuccccucgag

SEQ ID NO: 275499 - RNA, 32 nt, Homo Sapiens
gucuugggucuucaccgccuccuuccaaauac

SEQ ID NO: 275500 - RNA, 32 nt, Homo Sapiens
cgucucaccaggcagacagucugccuaggacc

SEQ ID NO: 275501 - RNA, 32 nt, Homo Sapiens
uguaguugcggcuugcgugccucgcggcccac

SEQ ID NO: 275502 - RNA, 32 nt, Homo Sapiens
uggggcagggagccacagccgcgcucagccug

SEQ ID NO: 275503 - RNA, 32 nt, Homo Sapiens
guuugcugugaugaugaucacuuuuaggcaga

SEQ ID NO: 275504 - RNA, 32 nt, Homo Sapiens
ggaguuugcccuggcccugggguaggggcugu

SEQ ID NO: 275505 - RNA, 32 nt, Homo Sapiens
ugguuuguguuuauauuuucggggauacuuaa

SEQ ID NO: 275506 - RNA, 32 nt, Homo Sapiens
uggaugggaaaggcagggucagggcccacuga

SEQ ID NO: 275507 - RNA, 32 nt, Homo Sapiens
ccagcuccugauggccugagccaggcaucuug

SEQ ID NO: 275508 - RNA, 32 nt, Homo Sapiens
agccagacauguacaagggcuuucugugagca

SEQ ID NO: 275509 - RNA, 32 nt, Homo Sapiens
guucuaucaaccccaccagaguucccuaaacu

SEQ ID NO: 275510 - RNA, 32 nt, Homo Sapiens
acuccuucucauuuaaugcuuauggccuucac

SEQ ID NO: 275511 - RNA, 32 nt, Homo Sapiens
ggcucgguaaccucaaaacuccaagcccucgg

SEQ ID NO: 275512 - RNA, 32 nt, Homo Sapiens
agagaugccccaggguggagggggugggaaug

SEQ ID NO: 275513 - RNA, 32 nt, Homo Sapiens
uuguuagcuggguguuuuuggccagguugcac

SEQ ID NO: 275514 - RNA, 32 nt, Homo Sapiens
cuacccccaagucuucccuccucccaagccag

SEQ ID NO: 275515 - RNA, 32 nt, Homo Sapiens
auuucucugucuuuuuugaucaguguccuaua

SEQ ID NO: 275516 - RNA, 32 nt, Homo Sapiens
gggaaaucuauuucucacaguucuggacacug

SEQ ID NO: 275517 - RNA, 32 nt, Homo Sapiens
guguccccgcauggcccaccucagcaguauga

SEQ ID NO: 275518 - RNA, 32 nt, Homo Sapiens
gcccggcuagcucugccuacgcgcucagcccc

SEQ ID NO: 275519 - RNA, 32 nt, Homo Sapiens
cuauagauauauauguguauguauauaaagau

SEQ ID NO: 275520 - RNA, 32 nt, Homo Sapiens
uuaauaggucaaaaccaaaaugaccuaacccu

SEQ ID NO: 275521 - RNA, 31 nt, Homo Sapiens
gaccggaagcggcgccgcacggccucggccu

SEQ ID NO: 275522 - RNA, 32 nt, Homo Sapiens
ugugugguagccucagaagcagagcuguuugg

SEQ ID NO: 275523 - RNA, 32 nt, Homo Sapiens
accgguccggucgcccggggaucacagccuca

SEQ ID NO: 275524 - RNA, 32 nt, Homo Sapiens
ccgccgcgggccugcugagcuccggagcgcgg

SEQ ID NO: 275525 - RNA, 32 nt, Homo Sapiens
ccccagagggucaagaucgaggauaaaguuaa

SEQ ID NO: 275526 - RNA, 32 nt, Homo Sapiens
aaaaacccaagccuccaggcugagcuaacccu

SEQ ID NO: 275527 - RNA, 32 nt, Homo Sapiens
gcuggguauuagccaagcugguccugggagaa

SEQ ID NO: 275528 - RNA, 32 nt, Homo Sapiens
ccugucccgcggcacucagccugcacgcccuc

SEQ ID NO: 275529 - RNA, 32 nt, Homo Sapiens
aaaugcuuucccuuuuguauauagccaguguu

SEQ ID NO: 275530 - RNA, 32 nt, Homo Sapiens
gcauacaauguugacauauuaacauccaaaau

SEQ ID NO: 275531 - RNA, 32 nt, Homo Sapiens
cccuggaggagacuuccaagcaugauuggagc

SEQ ID NO: 275532 - RNA, 32 nt, Homo Sapiens
cuuaagccaauuucaaucuuauuugugauuac

SEQ ID NO: 275533 - RNA, 32 nt, Homo Sapiens
uguuccucaauccuuacuaaacauaagggaau

SEQ ID NO: 275534 - RNA, 32 nt, Homo Sapiens
uuccccuccugucucuccuccccuccucucuc

SEQ ID NO: 275535 - RNA, 32 nt, Homo Sapiens
accaaggcccaggcugcagcuccagcuucagu

SEQ ID NO: 275536 - RNA, 32 nt, Homo Sapiens
ggaccuggcgggagcccugggguagugucaga

SEQ ID NO: 275537 - RNA, 28 nt, Homo Sapiens
gaaaagauaguuguucauuugaaacuau

SEQ ID NO: 275538 - RNA, 32 nt, Homo Sapiens
gagggucccaggcagagcugcagagcuggaac

SEQ ID NO: 275539 - RNA, 32 nt, Homo Sapiens
ucaccacugccauaucuaauccugcuugccug

SEQ ID NO: 275540 - RNA, 32 nt, Homo Sapiens
acuugcucuucagacuuaaugcucaguauuac

SEQ ID NO: 275541 - RNA, 32 nt, Homo Sapiens
cacccagcccuucugccucccaauucucucuc

SEQ ID NO: 275542 - RNA, 32 nt, Homo Sapiens
uuaaaaagguacuuaaauuuucuggaauaucc

SEQ ID NO: 275543 - RNA, 32 nt, Homo Sapiens
cucuccuuauugauuauuuuuggacacaccca

SEQ ID NO: 275544 - RNA, 32 nt, Homo Sapiens
agcagccgccgccgcugccaccgccuacagag

SEQ ID NO: 275545 - RNA, 32 nt, Homo Sapiens
gguaauugauaaagaaaaagguuuguuuggcu

SEQ ID NO: 275546 - RNA, 32 nt, Homo Sapiens
uaucucgaggugccggguugcaggcgcucagg

SEQ ID NO: 275547 - RNA, 32 nt, Homo Sapiens
cggugaugaugaagaugaugcagaagaugaaa

SEQ ID NO: 275548 - RNA, 32 nt, Homo Sapiens
guaucucauccucccccuguaccaggccauag

SEQ ID NO: 275549 - RNA, 32 nt, Homo Sapiens
gcacucuggucccuauuccccagcuccuaggc

SEQ ID NO: 275550 - RNA, 32 nt, Homo Sapiens
gaggugaagauccaagaaaugacgaagcuggg

SEQ ID NO: 275551 - RNA, 32 nt, Homo Sapiens
cccucuaugccuggccagccuccagcuccuca

SEQ ID NO: 275552 - RNA, 32 nt, Homo Sapiens
guauuuuuauuuacccaaguguucagcuuauu

SEQ ID NO: 275553 - RNA, 32 nt, Homo Sapiens
ucuccucacucaagggauccaaggcugccucu

SEQ ID NO: 275554 - RNA, 32 nt, Homo Sapiens
aucaggcagaaggagcucucucuuacucaugg

SEQ ID NO: 275555 - RNA, 32 nt, Homo Sapiens
cuaguggggagggacuggggccucgaagggau

SEQ ID NO: 275556 - RNA, 32 nt, Homo Sapiens
uuucuuuucuuuucuuuuuuuuuuuuuuuuga

SEQ ID NO: 275557 - RNA, 32 nt, Homo Sapiens
cuucuugauuuuucuuuuuuuuuuuuuuuuuu

SEQ ID NO: 275558 - RNA, 32 nt, Homo Sapiens
uuccucccugucaccugccuccucaucaugga

SEQ ID NO: 275559 - RNA, 32 nt, Homo Sapiens
gcggacugggcaggccgggcccgggcacuggu

SEQ ID NO: 275560 - RNA, 32 nt, Homo Sapiens
gcaguaggcgaauauaauucaauauaaaauaa

SEQ ID NO: 275561 - RNA, 32 nt, Homo Sapiens
ugucucugucaugguagagaccgagccucugu

SEQ ID NO: 275562 - RNA, 32 nt, Homo Sapiens
caaguaaagggcccucuuggcuugauuuugcu

SEQ ID NO: 275563 - RNA, 32 nt, Homo Sapiens
ggaacacgcugcggggcucccgggccugagcc

SEQ ID NO: 275564 - RNA, 32 nt, Homo Sapiens
acuuggcuuagaagccacaggauucacuuuuc

SEQ ID NO: 275565 - RNA, 32 nt, Homo Sapiens
cgacgcgcagggggcugcugcggccggcgguc

SEQ ID NO: 275566 - RNA, 32 nt, Homo Sapiens
guuuucuucuuuucuuuuuuuaaacaguaaac

SEQ ID NO: 275567 - RNA, 32 nt, Homo Sapiens
auacauuuucuuuuucucaaauaugccaucau

SEQ ID NO: 275568 - RNA, 32 nt, Homo Sapiens
gcccccgcacagaaaugcugcagaguauauaa

SEQ ID NO: 275569 - RNA, 32 nt, Homo Sapiens
aacuuuuuccaaguccuuuaacucguugcagu

SEQ ID NO: 275570 - RNA, 32 nt, Homo Sapiens
acacccgccgcgcgcacucgcgcacggacccg

SEQ ID NO: 275571 - RNA, 32 nt, Homo Sapiens
ugaaugugaugaaugugggaaagccuuuaacc

SEQ ID NO: 275572 - RNA, 32 nt, Homo Sapiens
ggaaccgacagccccccuccccgcgucccucc

SEQ ID NO: 275573 - RNA, 32 nt, Homo Sapiens
augaagauucagaaccauccacaggaaugaau

SEQ ID NO: 275574 - RNA, 32 nt, Homo Sapiens
cuuuaaaucugaucaacuguagcuuuauuuaa

SEQ ID NO: 275575 - RNA, 32 nt, Homo Sapiens
aaacuggaaucauuacuuaauuuuaacuaacc

SEQ ID NO: 275576 - RNA, 32 nt, Homo Sapiens
aacuagcuuaguuuucugguuuccaaaacuaa

SEQ ID NO: 275577 - RNA, 32 nt, Homo Sapiens
aaaacauucugugccaaagugagauccuggaa

SEQ ID NO: 275578 - RNA, 32 nt, Homo Sapiens
ucacucucggggaagagauggcggcggagcgg

SEQ ID NO: 275579 - RNA, 32 nt, Homo Sapiens
aucagcuaguagccuuccccucuggucccuug

SEQ ID NO: 275580 - RNA, 31 nt, Homo Sapiens
gagggugacucgcguaccgugcggcugcuga

SEQ ID NO: 275581 - RNA, 32 nt, Homo Sapiens
uuagacuauugagccauaaaauuuugguuugu

SEQ ID NO: 275582 - RNA, 32 nt, Homo Sapiens
ugaacgcucaggugggaaucugucgcccugga

SEQ ID NO: 275583 - RNA, 32 nt, Homo Sapiens
ucguucucaggcccuccccccggaguacuuca

SEQ ID NO: 275584 - RNA, 32 nt, Homo Sapiens
ggccccggguuggcuucaacccggggcuucca

SEQ ID NO: 275585 - RNA, 32 nt, Homo Sapiens
ggaaacugucuccuuuuccuuucccuuccuuu

SEQ ID NO: 275586 - RNA, 32 nt, Homo Sapiens
gccuguagcuaauggacuugggauuucugguc

SEQ ID NO: 275587 - RNA, 32 nt, Homo Sapiens
ggugacagaaugagaccccaucucuaaaaaac

SEQ ID NO: 275588 - RNA, 32 nt, Homo Sapiens
gcauucacuccagccagccaucccuuauagcu

SEQ ID NO: 275589 - RNA, 32 nt, Homo Sapiens
ugccgggcaacgcgacuucuaaaccugaggga

SEQ ID NO: 275590 - RNA, 32 nt, Homo Sapiens
ggagaccugucucugaugcugcugagccacuu

SEQ ID NO: 275591 - RNA, 32 nt, Homo Sapiens
cuucccccucuagccccuccccugccuagagc

SEQ ID NO: 275592 - RNA, 32 nt, Homo Sapiens
cgccugggcccgugugcagagccuugcccaga

SEQ ID NO: 275593 - RNA, 32 nt, Homo Sapiens
gguuucaccauguuggccaggcuggucuccaa

SEQ ID NO: 275594 - RNA, 32 nt, Homo Sapiens
gguuugaccauguuggccaggcuggucucgaa

SEQ ID NO: 275595 - RNA, 32 nt, Homo Sapiens
uguucugagaauaaauacaugaauauuaagac

SEQ ID NO: 275596 - RNA, 32 nt, Homo Sapiens
uaauuauuuugagcuuguuuuguuuuuguuug

SEQ ID NO: 275597 - RNA, 32 nt, Homo Sapiens
uucaaacaguaguacaagcuccccucagccag

SEQ ID NO: 275598 - RNA, 32 nt, Homo Sapiens
guuccucccucugcaccuagaacucuuauccu

SEQ ID NO: 275599 - RNA, 32 nt, Homo Sapiens
ugguaagaccgucgggaagauggaaggagauc

SEQ ID NO: 275600 - RNA, 32 nt, Homo Sapiens
aacugggcgggggcacccgggcaggggugcca

SEQ ID NO: 275601 - RNA, 32 nt, Homo Sapiens
cugggggcuuuuuaaccuuguuuggcuacauu

SEQ ID NO: 275602 - RNA, 32 nt, Homo Sapiens
ugauggagggcagaggaaguacuuagggaggu

SEQ ID NO: 275603 - RNA, 32 nt, Homo Sapiens
cacggacccuccgacuccuaggaggcaguccc

SEQ ID NO: 275604 - RNA, 32 nt, Homo Sapiens
acugguacuagacauauaaucacagggaguca

SEQ ID NO: 275605 - RNA, 32 nt, Homo Sapiens
acugagcauuugcaccucuguucauuucacac

SEQ ID NO: 275606 - RNA, 32 nt, Homo Sapiens
ccgggcaugggugggggcgccgggccgucacg

SEQ ID NO: 275607 - RNA, 32 nt, Homo Sapiens
uaacucaugugauuucccaugcaugcugccag

SEQ ID NO: 275608 - RNA, 32 nt, Homo Sapiens
gcagccgucgccccgcagucccggggcuccca

SEQ ID NO: 275609 - RNA, 32 nt, Homo Sapiens
auaucagucaugugacacaaaauaucauucuu

SEQ ID NO: 275610 - RNA, 32 nt, Homo Sapiens
ccuuuugccuuugcagaaugugcuuuagccuu

SEQ ID NO: 275611 - RNA, 32 nt, Homo Sapiens
aguaaacuuccuuuccgccccccguccaucga

SEQ ID NO: 275612 - RNA, 32 nt, Homo Sapiens
augaaacugucugcauuucuaccuguuagaca

SEQ ID NO: 275613 - RNA, 32 nt, Homo Sapiens
acaggcaugcaccaccugacugauuuuguauu

SEQ ID NO: 275614 - RNA, 32 nt, Homo Sapiens
uuuaaaaaaugagcuuccauuaauuuuuacuu

SEQ ID NO: 275615 - RNA, 32 nt, Homo Sapiens
gcucggcccccgcggagagaucgagcugaagg

SEQ ID NO: 275616 - RNA, 32 nt, Homo Sapiens
gaaauugguuuugacuuuuuguaaucuaggag

SEQ ID NO: 275617 - RNA, 32 nt, Homo Sapiens
ccacccugagaacaccuucuccaggacuggca

SEQ ID NO: 275618 - RNA, 32 nt, Homo Sapiens
gccucccagcccgcaggggcgccgcgcgcaag

SEQ ID NO: 275619 - RNA, 32 nt, Homo Sapiens
ggccaggaacgcacgcugccuggccguaucgc

SEQ ID NO: 275620 - RNA, 32 nt, Homo Sapiens
cuccaagacaccuucuaccccaacaccagcaa

SEQ ID NO: 275621 - RNA, 32 nt, Homo Sapiens
cucauugucaaggccacccccaccccagaaca

SEQ ID NO: 275622 - RNA, 32 nt, Homo Sapiens
cacaaucuuuggaaucacucuaucuuugguca

SEQ ID NO: 275623 - RNA, 32 nt, Homo Sapiens
cucggagccccggacccucccccgagccgcag

SEQ ID NO: 275624 - RNA, 32 nt, Homo Sapiens
cccaucugaugaugagagacuugcuguggauu

SEQ ID NO: 275625 - RNA, 32 nt, Homo Sapiens
acaaugaugauuaacuaugaauucuuaagacu

SEQ ID NO: 275626 - RNA, 32 nt, Homo Sapiens
guaggguagugucaaacugcuuugagaggaau

SEQ ID NO: 275627 - RNA, 32 nt, Homo Sapiens
ugcagcggcgggcugaagggcuccucaagcgu

SEQ ID NO: 275628 - RNA, 32 nt, Homo Sapiens
gacuccuccugccagauuacagaugguucacu

SEQ ID NO: 275629 - RNA, 32 nt, Homo Sapiens
ugccuagaggggcuagaggcucucuguuggug

SEQ ID NO: 275630 - RNA, 32 nt, Homo Sapiens
agaugccuggcacagcucugagcaucaaauau

SEQ ID NO: 275631 - RNA, 32 nt, Homo Sapiens
ccuggcuuugucaucagugacugccauagcaa

SEQ ID NO: 275632 - RNA, 30 nt, Homo Sapiens
uaacugaguccagcugccuaauucugaaua

SEQ ID NO: 275633 - RNA, 32 nt, Homo Sapiens
uuccacgcccuuccgauuccaccuccaccucc

SEQ ID NO: 275634 - RNA, 32 nt, Homo Sapiens
agauuagacaaaaaauuccuuacaaaaauacu

SEQ ID NO: 275635 - RNA, 32 nt, Homo Sapiens
gugcguguaaagagauauauuuuuguaagagg

SEQ ID NO: 275636 - RNA, 32 nt, Homo Sapiens
caguuccgcucccugggaucagcggcgagaag

SEQ ID NO: 275637 - RNA, 32 nt, Homo Sapiens
acuccuggguccccggcagugucuggaggcau

SEQ ID NO: 275638 - RNA, 32 nt, Homo Sapiens
acugugugccuggcccugugcugggcacuggg

SEQ ID NO: 275639 - RNA, 32 nt, Homo Sapiens
caccuggggaggggaggcucaacccccuaccu

SEQ ID NO: 275640 - RNA, 32 nt, Homo Sapiens
gauuuggccauguugcccaggcuggucucgaa

SEQ ID NO: 275641 - RNA, 32 nt, Homo Sapiens
gcaugaggcagagcguccguagcauuuccagu

SEQ ID NO: 275642 - RNA, 32 nt, Homo Sapiens
uacguucaaaguuuaaagugauauauuaacaa

SEQ ID NO: 275643 - RNA, 32 nt, Homo Sapiens
uugcuuuuucagccauucacaagcauucaaaa

SEQ ID NO: 275644 - RNA, 32 nt, Homo Sapiens
aagugacaacccccauggccuaugauguaaug

SEQ ID NO: 275645 - RNA, 32 nt, Homo Sapiens
uuucaccuucucaaaacugagucagcaagaga

SEQ ID NO: 275646 - RNA, 32 nt, Homo Sapiens
gccaccgcgcccagcccucucucuuccucaau

SEQ ID NO: 275647 - RNA, 32 nt, Homo Sapiens
ucauccccuggccuccucccacuuacuuguuc

SEQ ID NO: 275648 - RNA, 32 nt, Homo Sapiens
ucuggugcuggccacauuuaagucuuaaaaau

SEQ ID NO: 275649 - RNA, 32 nt, Homo Sapiens
uuguggagcagggcuacaccauaggcagugug

SEQ ID NO: 275650 - RNA, 32 nt, Homo Sapiens
cccuuucacagauggcaccccugggcaucugu

SEQ ID NO: 275651 - RNA, 32 nt, Homo Sapiens
aggcccggcccgccauucccagccccgagcca

SEQ ID NO: 275652 - RNA, 32 nt, Homo Sapiens
agcucgagcggacggcgggggcggccggagcc

SEQ ID NO: 275653 - RNA, 32 nt, Homo Sapiens
acugcaccuuaccccacccauccaugccagca

SEQ ID NO: 275654 - RNA, 32 nt, Homo Sapiens
agcccccaguaagaaccuggaacuuggggagu

SEQ ID NO: 275655 - RNA, 32 nt, Homo Sapiens
ugaguucaaaauuuauaucuaacauuguuuau

SEQ ID NO: 275656 - RNA, 32 nt, Homo Sapiens
cugugacagcgguuucucuggaugucaaaggc

SEQ ID NO: 275657 - RNA, 32 nt, Homo Sapiens
gcucgggcgccgcgcgagccugucgccgcuau

SEQ ID NO: 275658 - RNA, 32 nt, Homo Sapiens
ggacucggagguacugggcgcgcgcggcuccg

SEQ ID NO: 275659 - RNA, 32 nt, Homo Sapiens
cuccaaagaaaauaaagcucaauuaaaauaaa

SEQ ID NO: 275660 - RNA, 31 nt, Homo Sapiens
gaccagcggcacuuuguccgguuuuccaguu

SEQ ID NO: 275661 - RNA, 32 nt, Homo Sapiens
ugcuggguugguuuuuuuuuuaauuaaaaagu

SEQ ID NO: 275662 - RNA, 32 nt, Homo Sapiens
ggacccgcagugcgcgcaccacaccagguuca

SEQ ID NO: 275663 - RNA, 32 nt, Homo Sapiens
gguugucccacuuuuguucgccucucuucggu

SEQ ID NO: 275664 - RNA, 32 nt, Homo Sapiens
ggagccaaaaauauaaaacaguucuguauacc

SEQ ID NO: 275665 - RNA, 32 nt, Homo Sapiens
ucugagauucccucccaccuguguucugacuc

SEQ ID NO: 275666 - RNA, 32 nt, Homo Sapiens
gacuaaguuuucuccauuuccuuuaacggucc

SEQ ID NO: 275667 - RNA, 32 nt, Homo Sapiens
cuggcagggcuuugggcaguuggccaggcucu

SEQ ID NO: 275668 - RNA, 32 nt, Homo Sapiens
acggaagcugggucuucuugcugugaggucgc

SEQ ID NO: 275669 - RNA, 32 nt, Homo Sapiens
cugcucugggcgcgccccgggcgaagugcgcc

SEQ ID NO: 275670 - RNA, 32 nt, Homo Sapiens
gauuuucucugccccagggaccuuccaucccu

SEQ ID NO: 275671 - RNA, 32 nt, Homo Sapiens
uggucagcugucucucuccuuugcaauuuugu

SEQ ID NO: 275672 - RNA, 32 nt, Homo Sapiens
aacucucccuggaggcccccagcccuucuggc

SEQ ID NO: 275673 - RNA, 32 nt, Homo Sapiens
uagccaggaaggaaacaagagaaaguacgucc

SEQ ID NO: 275674 - RNA, 32 nt, Homo Sapiens
ccggccagcagcaccccucccccaacccaagg

SEQ ID NO: 275675 - RNA, 32 nt, Homo Sapiens
cuucucaucagcacgugucuacaguugcaagu

SEQ ID NO: 275676 - RNA, 32 nt, Homo Sapiens
ggguaaauauccaaaagaauugaaagcaggau

SEQ ID NO: 275677 - RNA, 32 nt, Homo Sapiens
ugaagcccaagccaggccugguugagggugau

SEQ ID NO: 275678 - RNA, 32 nt, Homo Sapiens
caucugucgauucagaggcacgcacacaugcu

SEQ ID NO: 275679 - RNA, 32 nt, Homo Sapiens
agacuuuuuuucugccauucuggugagaaaaa

SEQ ID NO: 275680 - RNA, 32 nt, Homo Sapiens
cuacauaaauauauuucaauguauuuccaguu

SEQ ID NO: 275681 - RNA, 32 nt, Homo Sapiens
uccuagcuggcuucggcggggacggcggcggc

SEQ ID NO: 275682 - RNA, 32 nt, Homo Sapiens
agugauuuuggucaauuuuauuauuaauucuu

SEQ ID NO: 275683 - RNA, 26 nt, Homo Sapiens
aauggguuauuuucuuaaauuguaug

SEQ ID NO: 275684 - RNA, 32 nt, Homo Sapiens
ccugcgccugcgccuccuccugcaugucgggg

SEQ ID NO: 275685 - RNA, 32 nt, Homo Sapiens
ggaaauugucaucugccaacuguccuacucau

SEQ ID NO: 275686 - RNA, 32 nt, Homo Sapiens
cagaggcaucgcgccagccagcuccgaaagca

SEQ ID NO: 275687 - RNA, 32 nt, Homo Sapiens
aagaaugaagauuuuucuagcagccgugcuau

SEQ ID NO: 275688 - RNA, 32 nt, Homo Sapiens
uguacuacucugagauggauccauucagcuca

SEQ ID NO: 275689 - RNA, 32 nt, Homo Sapiens
gaugugaaaagcaucuuugguuaucaguuaaa

SEQ ID NO: 275690 - RNA, 32 nt, Homo Sapiens
ugggggccuggcgggggcauccggcggagcug

SEQ ID NO: 275691 - RNA, 32 nt, Homo Sapiens
aacuuggugauuacaaggugcugaauguguug

SEQ ID NO: 275692 - RNA, 32 nt, Homo Sapiens
gguuaugcugaauaaauucaccagaugcuaaa

SEQ ID NO: 275693 - RNA, 32 nt, Homo Sapiens
ucucuucugcauuuuucagagaauagaaaugc

SEQ ID NO: 275694 - RNA, 32 nt, Homo Sapiens
ucagggacaacaagauccuuaaugcagagcua

SEQ ID NO: 275695 - RNA, 32 nt, Homo Sapiens
gguuuucuagauuguacuuaugcauaagauag

SEQ ID NO: 275696 - RNA, 32 nt, Homo Sapiens
accucgccuucagccuggcccugcgcuccaug

SEQ ID NO: 275697 - RNA, 32 nt, Homo Sapiens
cccaggguauaaacaggaauuguuuugauagu

SEQ ID NO: 275698 - RNA, 32 nt, Homo Sapiens
ggcuccucacucccaguucccuggacagagcu

SEQ ID NO: 275699 - RNA, 32 nt, Homo Sapiens
gagcauaauugucuuugguuuggaaugagaaa

SEQ ID NO: 275700 - RNA, 32 nt, Homo Sapiens
uaguucaaagauugguuucuuuaugccacugu

SEQ ID NO: 275701 - RNA, 32 nt, Homo Sapiens
gucuugucccuuuugaucauuaacucaggguu

SEQ ID NO: 275702 - RNA, 32 nt, Homo Sapiens
ugugugugacucuugaagaaauccauguucag

SEQ ID NO: 275703 - RNA, 32 nt, Homo Sapiens
ccagccugcuuccugcuucucuauuccuccug

SEQ ID NO: 275704 - RNA, 32 nt, Homo Sapiens
ggcucagagcacccucccucccggcccccaug

SEQ ID NO: 275705 - RNA, 32 nt, Homo Sapiens
aaccaggaacaagaauagcuuauuguuaucug

SEQ ID NO: 275706 - RNA, 32 nt, Homo Sapiens
guccccuggcaacugcuuaacaaaaucccaag

SEQ ID NO: 275707 - RNA, 32 nt, Homo Sapiens
acccacacuuaccuuaauacaaacaucccagc

SEQ ID NO: 275708 - RNA, 32 nt, Homo Sapiens
uuuguuuuucuuuuaaccgagguguagauagg

SEQ ID NO: 275709 - RNA, 32 nt, Homo Sapiens
cugcuguucaucagcagccugauuccaugugg

SEQ ID NO: 275710 - RNA, 32 nt, Homo Sapiens
gaagacucagaauuagaagaggaacauggagc

SEQ ID NO: 275711 - RNA, 32 nt, Homo Sapiens
uggcgggcauuugggauaccaagauaaauugc

SEQ ID NO: 275712 - RNA, 32 nt, Homo Sapiens
uaaaaccugucaacgguaugauuaacugccuu

SEQ ID NO: 275713 - RNA, 32 nt, Homo Sapiens
uuggcauguccaacagaaauaguuuuugcugu

SEQ ID NO: 275714 - RNA, 32 nt, Homo Sapiens
uccacggucacguuccuguuuccuggaaucac

SEQ ID NO: 275715 - RNA, 32 nt, Homo Sapiens
ugaucuguguuuuauaggguagaguggauuug

SEQ ID NO: 275716 - RNA, 32 nt, Homo Sapiens
cuggauauuagugaaauauuugccaucucuua

SEQ ID NO: 275717 - RNA, 32 nt, Homo Sapiens
aacaagaauaaaggcagcuguugucucuucuc

SEQ ID NO: 275718 - RNA, 32 nt, Homo Sapiens
acaaauuaaguacaaaguaggagacagauaac

SEQ ID NO: 275719 - RNA, 32 nt, Homo Sapiens
aaguggacagcgacauucaguccugcacugcu

SEQ ID NO: 275720 - RNA, 32 nt, Homo Sapiens
gcggaggggcucuccggugcugcugggcuggg

SEQ ID NO: 275721 - RNA, 32 nt, Homo Sapiens
ggguguggacauugaaucuuccaggucuaccc

SEQ ID NO: 275722 - RNA, 32 nt, Homo Sapiens
acggcuaauuuaugcuuaacuuaggaagagau

SEQ ID NO: 275723 - RNA, 32 nt, Homo Sapiens
gagucagcccuucacagaacuacuacggaaga

SEQ ID NO: 275724 - RNA, 32 nt, Homo Sapiens
ccucgggaaggggguccaggguggcugagccu

SEQ ID NO: 275725 - RNA, 32 nt, Homo Sapiens
aacuucgccggcugcuucggacgcccggagcu

SEQ ID NO: 275726 - RNA, 32 nt, Homo Sapiens
auaaagaccggaagcugaguuuuuauccggaa

SEQ ID NO: 275727 - RNA, 32 nt, Homo Sapiens
uuguuuaaaaauugcuguuagucacagaguuu

SEQ ID NO: 275728 - RNA, 32 nt, Homo Sapiens
guugauccugauguacaugaugaugaaagaca

SEQ ID NO: 275729 - RNA, 32 nt, Homo Sapiens
cagagacauccugaagaggcucggggguggag

SEQ ID NO: 275730 - RNA, 32 nt, Homo Sapiens
gucugagacugggauugcauuugggguuuccc

SEQ ID NO: 275731 - RNA, 32 nt, Homo Sapiens
guccuuugaggccugguaaccauuccagguga

SEQ ID NO: 275732 - RNA, 32 nt, Homo Sapiens
uuuggcauauaccucuccuccuccccacuccc

SEQ ID NO: 275733 - RNA, 32 nt, Homo Sapiens
ccacugugagggugggugcuggcugacccccc

SEQ ID NO: 275734 - RNA, 32 nt, Homo Sapiens
caugcuguauguuuagauuugugauuuuacua

SEQ ID NO: 275735 - RNA, 32 nt, Homo Sapiens
uauugaguguacauuuaugugugaagcaaauu

SEQ ID NO: 275736 - RNA, 32 nt, Homo Sapiens
ucugggcuggguggagguguggcugggcuggg

SEQ ID NO: 275737 - RNA, 32 nt, Homo Sapiens
aaugcgugcaguuccugcugccugcaggcaga

SEQ ID NO: 275738 - RNA, 32 nt, Homo Sapiens
cccuugggcacgugugcugggaucuacuuucc

SEQ ID NO: 275739 - RNA, 32 nt, Homo Sapiens
ugcugaagaguuuuauacugugaggugccaag

SEQ ID NO: 275740 - RNA, 32 nt, Homo Sapiens
aggucgcugagggaccccggccaggcgcggag

SEQ ID NO: 275741 - RNA, 32 nt, Homo Sapiens
uaaacuuccccucuaccagccuccaagcccca

SEQ ID NO: 275742 - RNA, 32 nt, Homo Sapiens
auauguuuaccuuguuuuauagguuuacuuuu

SEQ ID NO: 275743 - RNA, 32 nt, Homo Sapiens
ucaagaaugugcuuuagaguaugugagcaacc

SEQ ID NO: 275744 - RNA, 32 nt, Homo Sapiens
ggguggcgggcccuuugccagcccucacccuu

SEQ ID NO: 275745 - RNA, 32 nt, Homo Sapiens
ccucccggaagagcuucaagagcuagaaccug

SEQ ID NO: 275746 - RNA, 32 nt, Homo Sapiens
aacagucccaaaccucuuaggggugaaaaaag

SEQ ID NO: 275747 - RNA, 32 nt, Homo Sapiens
cuuaguauugugugugcuaaugagagccucag

SEQ ID NO: 275748 - RNA, 32 nt, Homo Sapiens
gccuguaguccugccacauuccccucacugag

SEQ ID NO: 275749 - RNA, 32 nt, Homo Sapiens
ucuuggguucuaugacuugaccacauccugag

SEQ ID NO: 275750 - RNA, 32 nt, Homo Sapiens
agaaugguagauaccagaggcugguaauggug

SEQ ID NO: 275751 - RNA, 32 nt, Homo Sapiens
acaucacuuccccucuguauauauaaucuacc

SEQ ID NO: 275752 - RNA, 32 nt, Homo Sapiens
gguuuuaccauguuggccaggcuggucuugaa

SEQ ID NO: 275753 - RNA, 32 nt, Homo Sapiens
ugcgcuggccagacuccaggguugccugggaa

SEQ ID NO: 275754 - RNA, 32 nt, Homo Sapiens
cugggagaacaucaggugcacuguggacgugg

SEQ ID NO: 275755 - RNA, 32 nt, Homo Sapiens
aacuacauuugccuauggaccuuugguuauuu

SEQ ID NO: 275756 - RNA, 32 nt, Homo Sapiens
caucucagaaaauggcaucacuuuuuacccau

SEQ ID NO: 275757 - RNA, 32 nt, Homo Sapiens
acguuggacauucccaguuucugguaggcaug

SEQ ID NO: 275758 - RNA, 32 nt, Homo Sapiens
gucugaugaugaccaauuuacaauuuuucaaa

SEQ ID NO: 275759 - RNA, 32 nt, Homo Sapiens
uggagguggugaucagaugaucugucuuuccu

SEQ ID NO: 275760 - RNA, 32 nt, Homo Sapiens
auuuauuucagagaaacucuaauuguauuuuc

SEQ ID NO: 275761 - RNA, 32 nt, Homo Sapiens
uccauuggaaaagauauggugaaaaaaggaaa

SEQ ID NO: 275762 - RNA, 32 nt, Homo Sapiens
ccauggaaauuugaacugagugggggcagaga

SEQ ID NO: 275763 - RNA, 32 nt, Homo Sapiens
ggauguaucugugauaucuggaccucuggagu

SEQ ID NO: 275764 - RNA, 25 nt, Homo Sapiens
aacuacugguuugacuguggauuau

SEQ ID NO: 275765 - RNA, 32 nt, Homo Sapiens
uuucuacuguuguuucucuguggacugggcaa

SEQ ID NO: 275766 - RNA, 32 nt, Homo Sapiens
aagcuggcugcauuuauagaucuccuaggaga

SEQ ID NO: 275767 - RNA, 32 nt, Homo Sapiens
aaugagcugggguggggccguuuuagguagag

SEQ ID NO: 275768 - RNA, 32 nt, Homo Sapiens
uguggagauaauacugaugaaaaugagugugg

SEQ ID NO: 275769 - RNA, 32 nt, Homo Sapiens
uggguucuggucccaucuccaugacugauuca

SEQ ID NO: 275770 - RNA, 32 nt, Homo Sapiens
auugccucuuuggagaagcucaucagaaacuc

SEQ ID NO: 275771 - RNA, 32 nt, Homo Sapiens
ggagagaagggagagggcccgucggacagcca

SEQ ID NO: 275772 - RNA, 32 nt, Homo Sapiens
uuccuuaaaguaaaacaaaaaacaccuuuggu

SEQ ID NO: 275773 - RNA, 32 nt, Homo Sapiens
cuccccuaccuccuccuaauacaaauggaauu

SEQ ID NO: 275774 - RNA, 32 nt, Homo Sapiens
ugucuuuaaggaucugggcacuuguuucuugu

SEQ ID NO: 275775 - RNA, 29 nt, Homo Sapiens
acaaaugugaagauuguggcaaagccucu

SEQ ID NO: 275776 - RNA, 32 nt, Homo Sapiens
ggaacucucuucugccugguuucuuucacucg

SEQ ID NO: 275777 - RNA, 32 nt, Homo Sapiens
aacggugaccuucuucuugcucccagugaccu

SEQ ID NO: 275778 - RNA, 32 nt, Homo Sapiens
ggcugggagccaggcgggcggcugggcugcag

SEQ ID NO: 275779 - RNA, 31 nt, Homo Sapiens
gcgcacggagccugccugccucugccguccu

SEQ ID NO: 275780 - RNA, 32 nt, Homo Sapiens
accagccuccagccugcccccaggacugcccc

SEQ ID NO: 275781 - RNA, 32 nt, Homo Sapiens
uuucugauauuguuaguaccguaaugcccaaa

SEQ ID NO: 275782 - RNA, 32 nt, Homo Sapiens
ggucuuggucccagccccugcucagccccucc

SEQ ID NO: 275783 - RNA, 32 nt, Homo Sapiens
cacuucgcggucgggcccgccggcugcgggca

SEQ ID NO: 275784 - RNA, 32 nt, Homo Sapiens
gagguguucaaggcugccgcugucccagugga

SEQ ID NO: 275785 - RNA, 32 nt, Homo Sapiens
caagugcaaaaauaacaaauaugauuauugac

SEQ ID NO: 275786 - RNA, 32 nt, Homo Sapiens
ggagaaaaauuccacauacuuagagaguaauu

SEQ ID NO: 275787 - RNA, 32 nt, Homo Sapiens
cgccuggagaaguucacuggggccuacaagaa

SEQ ID NO: 275788 - RNA, 32 nt, Homo Sapiens
agauaucuuccaucaagcaguacucgugccca

SEQ ID NO: 275789 - RNA, 32 nt, Homo Sapiens
gauauccacuuaacuuuucuuaaaaauacuuu

SEQ ID NO: 275790 - RNA, 32 nt, Homo Sapiens
caacucccaucccagucaguuuccuucccaug

SEQ ID NO: 275791 - RNA, 32 nt, Homo Sapiens
cccugcggccccagcgccccucgcucucaucc

SEQ ID NO: 275792 - RNA, 32 nt, Homo Sapiens
aaaaaagcuucguaugccauuaauuuaacaaa

SEQ ID NO: 275793 - RNA, 32 nt, Homo Sapiens
aucuggaacuuccguccuguaccugacuccac

SEQ ID NO: 275794 - RNA, 32 nt, Homo Sapiens
gagaagucaggaggcggaggcugcuuuucuga

SEQ ID NO: 275795 - RNA, 32 nt, Homo Sapiens
cgccggagccaccguuccugcugcugccgccg

SEQ ID NO: 275796 - RNA, 32 nt, Homo Sapiens
cacgcagagcagguguucaugauaaaaagcaa

SEQ ID NO: 275797 - RNA, 32 nt, Homo Sapiens
ugcuuaggggcucuccugggccccacaccagu

SEQ ID NO: 275798 - RNA, 32 nt, Homo Sapiens
aucccaggucuccucgaccuccauacaccaca

SEQ ID NO: 275799 - RNA, 32 nt, Homo Sapiens
gagacgcagcugccgcgccugggccugagcgg

SEQ ID NO: 275800 - RNA, 32 nt, Homo Sapiens
gagccgugggucucgugggggcagaagagcuc

SEQ ID NO: 275801 - RNA, 32 nt, Homo Sapiens
gauggugcugaaaucacugccuuaaggucucu

SEQ ID NO: 275802 - RNA, 32 nt, Homo Sapiens
auuucaugaagaugaaaaugcauuucuaguga

SEQ ID NO: 275803 - RNA, 32 nt, Homo Sapiens
ugguggggcuggcaugagucagagcaccuggc

SEQ ID NO: 275804 - RNA, 32 nt, Homo Sapiens
ugguggacuuggcauccagagaugagccccag

SEQ ID NO: 275805 - RNA, 32 nt, Homo Sapiens
cgcaccuguggcggcagccucggacccccauc

SEQ ID NO: 275806 - RNA, 32 nt, Homo Sapiens
aaaauagggcuuuguaaacuccacagggacug

SEQ ID NO: 275807 - RNA, 32 nt, Homo Sapiens
gucugucuguuguauacagugggugccauaua

SEQ ID NO: 275808 - RNA, 32 nt, Homo Sapiens
ugaguccagaaagcacugcuucugcagugaaa

SEQ ID NO: 275809 - RNA, 32 nt, Homo Sapiens
cuucagagcccaggagucagugcuggugguug

SEQ ID NO: 275810 - RNA, 32 nt, Homo Sapiens
ucauaaauaucucucaucuacaugguugcuuc

SEQ ID NO: 275811 - RNA, 32 nt, Homo Sapiens
uauaguucugguugccaaaauuccuaagagga

SEQ ID NO: 275812 - RNA, 32 nt, Homo Sapiens
aagggagcaaacuuuuugauaauaaaucuuuu

SEQ ID NO: 275813 - RNA, 32 nt, Homo Sapiens
augcgcuuaguggucugacauauacuggaaau

SEQ ID NO: 275814 - RNA, 32 nt, Homo Sapiens
ggagaggacuuccagaaucugaucgccagggg

SEQ ID NO: 275815 - RNA, 32 nt, Homo Sapiens
ccauuuuccggggcugcucggugcugcuguua

SEQ ID NO: 275816 - RNA, 32 nt, Homo Sapiens
cuaauguuugaagacaaaaauauuuuggcagu

SEQ ID NO: 275817 - RNA, 32 nt, Homo Sapiens
uugcuaguuaucuaauguuuuaaaagaaaaua

SEQ ID NO: 275818 - RNA, 32 nt, Homo Sapiens
ggcaugccacagggauucuccuccuucauccu

SEQ ID NO: 275819 - RNA, 32 nt, Homo Sapiens
cugcuuccacucccuuucccauucaggcugac

SEQ ID NO: 275820 - RNA, 32 nt, Homo Sapiens
gcgcuccagagccgcaguucucccgugagagg

SEQ ID NO: 275821 - RNA, 32 nt, Homo Sapiens
aaauuuucagacuugaaaaaugugaguuguca

SEQ ID NO: 275822 - RNA, 32 nt, Homo Sapiens
gagcuugcagugagccgagauggugccacugc

SEQ ID NO: 275823 - RNA, 32 nt, Homo Sapiens
guuguuguuguuguuguuuucuuaaguguuac

SEQ ID NO: 275824 - RNA, 29 nt, Homo Sapiens
aaaaagaaguacauguucauuguagagaa

SEQ ID NO: 275825 - RNA, 32 nt, Homo Sapiens
uucugugacuguuuuucucuguuucacguucg

SEQ ID NO: 275826 - RNA, 32 nt, Homo Sapiens
aagccccuuuugcucaguaacacacucacuac

SEQ ID NO: 275827 - RNA, 32 nt, Homo Sapiens
cuucuccagucaaggaaagguagcuuaaagau

SEQ ID NO: 275828 - RNA, 32 nt, Homo Sapiens
gagauuauuucuguaaaugaaauugguagaga

SEQ ID NO: 275829 - RNA, 32 nt, Homo Sapiens
agcgcugcgacggcgcucgggaccucccucgu

SEQ ID NO: 275830 - RNA, 32 nt, Homo Sapiens
uacuuccagauggcugcccccaggaaugggga

SEQ ID NO: 275831 - RNA, 32 nt, Homo Sapiens
uagucauuuaguucuaaagauuucauaguuuc

SEQ ID NO: 275832 - RNA, 32 nt, Homo Sapiens
uagcaggcccgaaagaggcacccuuccaucug

SEQ ID NO: 275833 - RNA, 32 nt, Homo Sapiens
ucgagccugcgaggagcgcgccgcccgccagc

SEQ ID NO: 275834 - RNA, 32 nt, Homo Sapiens
ucuucuugcaucgaugauccaacagcaacacc

SEQ ID NO: 275835 - RNA, 32 nt, Homo Sapiens
gagcagcgcgggcggcagcccgggggaagcgu

SEQ ID NO: 275836 - RNA, 32 nt, Homo Sapiens
uauuauauguuuccuuuuuuuguuuacauagg

SEQ ID NO: 275837 - RNA, 32 nt, Homo Sapiens
ccucagggccccagaucccccuucuaaugguc

SEQ ID NO: 275838 - RNA, 32 nt, Homo Sapiens
uuuuuucacuuuccuuuuuuucuuucucagaa

SEQ ID NO: 275839 - RNA, 31 nt, Homo Sapiens
aauaccauguuaaccacaugaguuaaauaaa

SEQ ID NO: 275840 - RNA, 32 nt, Homo Sapiens
cguccugcuggcgcccucucgccacccugccc

SEQ ID NO: 275841 - RNA, 32 nt, Homo Sapiens
cauagugaacacacugauuagguuaugguuua

SEQ ID NO: 275842 - RNA, 32 nt, Homo Sapiens
cacccucgccauggacucggcccucagcgauc

SEQ ID NO: 275843 - RNA, 32 nt, Homo Sapiens
gaaacagccaaggcgaagacucacaggauccu

SEQ ID NO: 275844 - RNA, 32 nt, Homo Sapiens
uaacugauuaaaaauaccuucuauguauuagu

SEQ ID NO: 275845 - RNA, 32 nt, Homo Sapiens
gaaaccccauuuccacaaaaaauacaaaaauu

SEQ ID NO: 275846 - RNA, 32 nt, Homo Sapiens
gggagucggccgggcugcugcugcugcugcuc

SEQ ID NO: 275847 - RNA, 32 nt, Homo Sapiens
aggucaucugccagggucagugcugagacugu

SEQ ID NO: 275848 - RNA, 32 nt, Homo Sapiens
ggcccggccccugcccugcugcccccaacagc

SEQ ID NO: 275849 - RNA, 32 nt, Homo Sapiens
uuggugaaaaagaaaaaagugauaagaggcua

SEQ ID NO: 275850 - RNA, 32 nt, Homo Sapiens
ccccgccguucccugcgcuucaucucaugagg

SEQ ID NO: 275851 - RNA, 32 nt, Homo Sapiens
gaaaacauggauacuacuggaacuucccccag

SEQ ID NO: 275852 - RNA, 32 nt, Homo Sapiens
gcaagaauugaccaugagauggggucaggaau

SEQ ID NO: 275853 - RNA, 32 nt, Homo Sapiens
aaaauacaaaaauuagcugggggugguggcau

SEQ ID NO: 275854 - RNA, 32 nt, Homo Sapiens
cugugacagaagcaacuaccacaggggcuuca

SEQ ID NO: 275855 - RNA, 32 nt, Homo Sapiens
aagcaaauauaaaugagaaauaugaggauugu

SEQ ID NO: 275856 - RNA, 32 nt, Homo Sapiens
cagaagauggagaggaggcugcaaacccuuag

SEQ ID NO: 275857 - RNA, 32 nt, Homo Sapiens
ucaccagccuccaaaaugcggcuggggcuccu

SEQ ID NO: 275858 - RNA, 32 nt, Homo Sapiens
uuuacauagugucauuccaaauccaugcaugc

SEQ ID NO: 275859 - RNA, 32 nt, Homo Sapiens
ccuccuuggucuggagaagagaucugaggucc

SEQ ID NO: 275860 - RNA, 32 nt, Homo Sapiens
aagaaauuagucuauaucagguccuggcaccc

SEQ ID NO: 275861 - RNA, 32 nt, Homo Sapiens
ccaaccaugcccagcccuucccagcaccccca

SEQ ID NO: 275862 - RNA, 32 nt, Homo Sapiens
gccccauucgccagcccuccacguccucccag

SEQ ID NO: 275863 - RNA, 32 nt, Homo Sapiens
aagagucuguggucacuugaggaggcgagucu

SEQ ID NO: 275864 - RNA, 32 nt, Homo Sapiens
cucaaucagaaccucagaggguuacacuguaa

SEQ ID NO: 275865 - RNA, 32 nt, Homo Sapiens
cugugacaaggucuuacccagcccagggauuc

SEQ ID NO: 275866 - RNA, 32 nt, Homo Sapiens
uuauucugauucuccucauucccuagacugac

SEQ ID NO: 275867 - RNA, 32 nt, Homo Sapiens
aggaggaggaggagaccggcagcaacucugag

SEQ ID NO: 275868 - RNA, 32 nt, Homo Sapiens
ugacaaguacuuauuucacauauuaacucaug

SEQ ID NO: 275869 - RNA, 32 nt, Homo Sapiens
uaaguugguaaacaaccauacuuuuauccuca

SEQ ID NO: 275870 - RNA, 32 nt, Homo Sapiens
gucccucagggugacaguugacuuccugaagg

SEQ ID NO: 275871 - RNA, 32 nt, Homo Sapiens
ccacgggcgcuuugggcccucgguuggccuca

SEQ ID NO: 275872 - RNA, 32 nt, Homo Sapiens
guuucggaguugaaccuauuguguaguuuugu

SEQ ID NO: 275873 - RNA, 32 nt, Homo Sapiens
cugcucuccaggugcugggcccuggacuuacg

SEQ ID NO: 275874 - RNA, 32 nt, Homo Sapiens
auccuggccaacauagugaaaccccgucugag

SEQ ID NO: 275875 - RNA, 32 nt, Homo Sapiens
ucaccuuucaagguaaggagccaguuccagac

SEQ ID NO: 275876 - RNA, 32 nt, Homo Sapiens
ccuaaagaaaauuuuugagucagucuuuacaa

SEQ ID NO: 275877 - RNA, 32 nt, Homo Sapiens
cccuuccccacuucaccuccacucacacucca

SEQ ID NO: 275878 - RNA, 32 nt, Homo Sapiens
ugguuaagucauugucacuuagcuuuauauug

SEQ ID NO: 275879 - RNA, 31 nt, Homo Sapiens
gugguuauggagcagcugccgggggugccac

SEQ ID NO: 275880 - RNA, 32 nt, Homo Sapiens
ccccgcgcugcgcggagcagggaccaggcggu

SEQ ID NO: 275881 - RNA, 32 nt, Homo Sapiens
uguguuguauugcauuuauuucccaaggccug

SEQ ID NO: 275882 - RNA, 32 nt, Homo Sapiens
ccaaggccccacuuucaagaaucagacagcag

SEQ ID NO: 275883 - RNA, 32 nt, Homo Sapiens
ugaaauuauagcacuccuugauuaagaagcua

SEQ ID NO: 275884 - RNA, 30 nt, Homo Sapiens
ucugccacauuugccacccucugagcccac

SEQ ID NO: 275885 - RNA, 32 nt, Homo Sapiens
uuggaaguuggaccucaggccuuuucucacga

SEQ ID NO: 275886 - RNA, 32 nt, Homo Sapiens
gcagcgccgccuuuugugcugcggccgcggag

SEQ ID NO: 275887 - RNA, 32 nt, Homo Sapiens
agcacuggguugaacuugcuaaaguaaaucau

SEQ ID NO: 275888 - RNA, 32 nt, Homo Sapiens
aauucuaauauuuggaaauuaucuacaaugga

SEQ ID NO: 275889 - RNA, 32 nt, Homo Sapiens
ucacccugccagccgcccgcccgcccggcgca

SEQ ID NO: 275890 - RNA, 32 nt, Homo Sapiens
uucuucccuguaaauuccccguuuugacgacg

SEQ ID NO: 275891 - RNA, 32 nt, Homo Sapiens
aucuggccugcgguugucauauuuauugaucu

SEQ ID NO: 275892 - RNA, 32 nt, Homo Sapiens
acuaagaagauaacuaagcaaacaaguuggaa

SEQ ID NO: 275893 - RNA, 32 nt, Homo Sapiens
uuguggccccaaauucagggccccacccuucc

SEQ ID NO: 275894 - RNA, 32 nt, Homo Sapiens
uugacacaaaaauuaauuuucacaaauacuau

SEQ ID NO: 275895 - RNA, 32 nt, Homo Sapiens
uuucuuuucuuuucuuuuuuuuuugagaugga

SEQ ID NO: 275896 - RNA, 32 nt, Homo Sapiens
aucauaaaacauuuauacacaaaagcuuguau

SEQ ID NO: 275897 - RNA, 32 nt, Homo Sapiens
uaaacuaaaccuugacauccacaguagcauca

SEQ ID NO: 275898 - RNA, 32 nt, Homo Sapiens
aauugccccagggccugauucaggacugacuc

SEQ ID NO: 275899 - RNA, 32 nt, Homo Sapiens
ucggaagcccucgugaggacucggaccuauuc

SEQ ID NO: 275900 - RNA, 32 nt, Homo Sapiens
ugcagagucuugcuuugucacccaggcuggag

SEQ ID NO: 275901 - RNA, 32 nt, Homo Sapiens
ccccucccaucccccacgcagcuccaccccag

SEQ ID NO: 275902 - RNA, 32 nt, Homo Sapiens
gacacgugcggggcuuccugcgagcugagucc

SEQ ID NO: 275903 - RNA, 32 nt, Homo Sapiens
gcgcagaaggcacagccuuacugaccagcacg

SEQ ID NO: 275904 - RNA, 27 nt, Homo Sapiens
cacgagucccugcucagccccagcagu

SEQ ID NO: 275905 - RNA, 32 nt, Homo Sapiens
gguauugaggguucagggaugaacuaagcuga

SEQ ID NO: 275906 - RNA, 32 nt, Homo Sapiens
gaacuauuuacuggcaugauauuugcauuccu

SEQ ID NO: 275907 - RNA, 32 nt, Homo Sapiens
ucgucgcgcugggccgagcuuacgacuccagc

SEQ ID NO: 275908 - RNA, 32 nt, Homo Sapiens
ccugcgaggcggaggcaggaugaagaugacug

SEQ ID NO: 275909 - RNA, 32 nt, Homo Sapiens
ccgcagcacccagccgcgccggcgaggacaug

SEQ ID NO: 275910 - RNA, 32 nt, Homo Sapiens
ucagcccccgauccuggcuccuccucggccuc

SEQ ID NO: 275911 - RNA, 32 nt, Homo Sapiens
ggugcccgcucgcccgcccacccgcccucggu

SEQ ID NO: 275912 - RNA, 32 nt, Homo Sapiens
gcaggccuggaaacuuccuucuccggaggacc

SEQ ID NO: 275913 - RNA, 32 nt, Homo Sapiens
cugugacugagggccuggucaccacaauuaga

SEQ ID NO: 275914 - RNA, 32 nt, Homo Sapiens
aaacaguaaaaaaugaaaauggcauuagauuu

SEQ ID NO: 275915 - RNA, 32 nt, Homo Sapiens
uuaauuggggggagcgggaggguuagauguga

SEQ ID NO: 275916 - RNA, 32 nt, Homo Sapiens
ccguacuguauuuccuucucauaaccucaagg

SEQ ID NO: 275917 - RNA, 32 nt, Homo Sapiens
cauacauguguuugaaaauuaugugaggugcu

SEQ ID NO: 275918 - RNA, 32 nt, Homo Sapiens
ccugcgcuuccucuccuccuggguguuaauaa

SEQ ID NO: 275919 - RNA, 32 nt, Homo Sapiens
aaccuuuucaacaaaauaguguuugucaucag

SEQ ID NO: 275920 - RNA, 32 nt, Homo Sapiens
aggccuccuagccaugcuucuuguucacucug

SEQ ID NO: 275921 - RNA, 32 nt, Homo Sapiens
aucuuuaauaauuuauauguagguaauauuuu

SEQ ID NO: 275922 - RNA, 32 nt, Homo Sapiens
auugcauaucuggguuggauguuagacuaaag

SEQ ID NO: 275923 - RNA, 27 nt, Homo Sapiens
aaucccugucucuucagcuucucugau

SEQ ID NO: 275924 - RNA, 32 nt, Homo Sapiens
cccauuccaucggcacuaacgccccgcuccac

SEQ ID NO: 275925 - RNA, 32 nt, Homo Sapiens
agcaggcuucgacuccuucugagaggucuggu

SEQ ID NO: 275926 - RNA, 32 nt, Homo Sapiens
ccgagcacuccagccuggcagucagcaccucg

SEQ ID NO: 275927 - RNA, 32 nt, Homo Sapiens
augggcucuacagugcuuacugcagccuugug

SEQ ID NO: 275928 - RNA, 31 nt, Homo Sapiens
uaggaaacaaauuggaauaugaucuguuacc

SEQ ID NO: 275929 - RNA, 32 nt, Homo Sapiens
aggagaaaugugugacaccuauauuauaauga

SEQ ID NO: 275930 - RNA, 31 nt, Homo Sapiens
auggagucuaagccucccagagccuggagag

SEQ ID NO: 275931 - RNA, 32 nt, Homo Sapiens
uaugcgcauaaugguguaaaaguuagaugguu

SEQ ID NO: 275932 - RNA, 32 nt, Homo Sapiens
gguacugcuuggcggcggccagccccacaggg

SEQ ID NO: 275933 - RNA, 32 nt, Homo Sapiens
uuggucuuagcacuuuccuucuccagaucccc

SEQ ID NO: 275934 - RNA, 32 nt, Homo Sapiens
uauguuugaagaagaauguguguacauuucaa

SEQ ID NO: 275935 - RNA, 32 nt, Homo Sapiens
uuacugcuuuuggaaaaguuauuuuauaaaua

SEQ ID NO: 275936 - RNA, 32 nt, Homo Sapiens
cugguaauuuuucauuuguuuuucauauacug

SEQ ID NO: 275937 - RNA, 32 nt, Homo Sapiens
cauagccacuuuuuugucaagaguuacccuuu

SEQ ID NO: 275938 - RNA, 32 nt, Homo Sapiens
auuauuuagaucuagaaacagaucuugaaauc

SEQ ID NO: 275939 - RNA, 32 nt, Homo Sapiens
caacuguuagguacccaguuaucaauuuuauc

SEQ ID NO: 275940 - RNA, 32 nt, Homo Sapiens
auaugcugcaguuauuuuuuuauauuuuucaa

SEQ ID NO: 275941 - RNA, 32 nt, Homo Sapiens
ugauguucacacagugagagucuuaaagauac

SEQ ID NO: 275942 - RNA, 32 nt, Homo Sapiens
ugagcgccaggccagccgcgggguggagcccg

SEQ ID NO: 275943 - RNA, 32 nt, Homo Sapiens
ccaaccuagcuuccccgagguacugcaugaau

SEQ ID NO: 275944 - RNA, 32 nt, Homo Sapiens
agaggcgacacggcggcggcgccgcgcugcuc

SEQ ID NO: 275945 - RNA, 32 nt, Homo Sapiens
uucguuugauuucuuguguuuuauuugccaaa

SEQ ID NO: 275946 - RNA, 32 nt, Homo Sapiens
gcuccuguuucuuuucaucucuaggaaaggag

SEQ ID NO: 275947 - RNA, 32 nt, Homo Sapiens
aagguuuucuaaaaauuaaccucacaucccuu

SEQ ID NO: 275948 - RNA, 32 nt, Homo Sapiens
aguuugccaaacuucaggauuauugacaagca

SEQ ID NO: 275949 - RNA, 32 nt, Homo Sapiens
gcacgguccccucuccuuccccauccucuccc

SEQ ID NO: 275950 - RNA, 32 nt, Homo Sapiens
uucaauuugugauuuuguauacuuaauuggaa

SEQ ID NO: 275951 - RNA, 32 nt, Homo Sapiens
ucuccaauaacaauuucuuuuccacaguuaac

SEQ ID NO: 275952 - RNA, 32 nt, Homo Sapiens
agcccucccuugcacguuccggcuccuccucu

SEQ ID NO: 275953 - RNA, 32 nt, Homo Sapiens
ugcuguucucugccacccaccugagcccagcu

SEQ ID NO: 275954 - RNA, 32 nt, Homo Sapiens
aaguacaguaucugcaaaaaacaaaguaaccu

SEQ ID NO: 275955 - RNA, 32 nt, Homo Sapiens
ugcacaaaacauuguuagucuguggguuuaga

SEQ ID NO: 275956 - RNA, 32 nt, Homo Sapiens
ggagucgcccucgggggcugucagauuuguga

SEQ ID NO: 275957 - RNA, 32 nt, Homo Sapiens
aggaguaauuuaacaucugaaccccucaucaa

SEQ ID NO: 275958 - RNA, 32 nt, Homo Sapiens
uguucaaaaaauacaaaaauuagcuaggcaug

SEQ ID NO: 275959 - RNA, 32 nt, Homo Sapiens
aggguguggacuuuggaaugggguuugcuguu

SEQ ID NO: 275960 - RNA, 32 nt, Homo Sapiens
ggaaaccgcuggaaguucugcugccccucgug

SEQ ID NO: 275961 - RNA, 32 nt, Homo Sapiens
cugaugugucauugucccuuaguacagugugc

SEQ ID NO: 275962 - RNA, 32 nt, Homo Sapiens
gauacaugauaacacaucugaacaggguuagu

SEQ ID NO: 275963 - RNA, 32 nt, Homo Sapiens
caccuccugagcuguuuuuguaaaaugacugc

SEQ ID NO: 275964 - RNA, 32 nt, Homo Sapiens
uucuaagaggucgggaugagggcauggggaug

SEQ ID NO: 275965 - RNA, 32 nt, Homo Sapiens
uaauacagaaauuuuugagaggggguuacuuu

SEQ ID NO: 275966 - RNA, 32 nt, Homo Sapiens
cccagagcgcucgcucuccuccccuuccuucc

SEQ ID NO: 275967 - RNA, 32 nt, Homo Sapiens
gagaugguugguuaaggcgggguuuuucuggg

SEQ ID NO: 275968 - RNA, 32 nt, Homo Sapiens
aagagaagacgcuuuacccgacucuuugggcc

SEQ ID NO: 275969 - RNA, 30 nt, Homo Sapiens
aggaagggcgagcgcgcgggccagcgcuca

SEQ ID NO: 275970 - RNA, 32 nt, Homo Sapiens
ucugagugcuugucauccucuucccugccucu

SEQ ID NO: 275971 - RNA, 31 nt, Homo Sapiens
ccgugcaguccgugcgcaggaggucacacuc

SEQ ID NO: 275972 - RNA, 32 nt, Homo Sapiens
uuauagccaguuacagcuccccggcucuucug

SEQ ID NO: 275973 - RNA, 32 nt, Homo Sapiens
gcucaucuuaaaccucacuagagggaagucuu

SEQ ID NO: 275974 - RNA, 32 nt, Homo Sapiens
ggcugcaggccgagccgcucccgcggcggaac

SEQ ID NO: 275975 - RNA, 32 nt, Homo Sapiens
ccccaagcucccugccuauucccccaccuccg

SEQ ID NO: 275976 - RNA, 32 nt, Homo Sapiens
cccaacucgacccucccuccccucacccccaa

SEQ ID NO: 275977 - RNA, 32 nt, Homo Sapiens
uggcauggcccagcccugccucaugggaugga

SEQ ID NO: 275978 - RNA, 32 nt, Homo Sapiens
ucccucccgcguccugcccccauccuccaccc

SEQ ID NO: 275979 - RNA, 32 nt, Homo Sapiens
uugacuuugcuuucuuugcuuauuugacacuu

SEQ ID NO: 275980 - RNA, 32 nt, Homo Sapiens
gggucccgccccacagcagugucuagggguga

SEQ ID NO: 275981 - RNA, 28 nt, Homo Sapiens
ugcugagcugggccgccggcccgggugg

SEQ ID NO: 275982 - RNA, 32 nt, Homo Sapiens
ugcauuacaaauaggauacaaaaauaguugaa

SEQ ID NO: 275983 - RNA, 32 nt, Homo Sapiens
cugucccuuugccccagguuuccucccggagg

SEQ ID NO: 275984 - RNA, 32 nt, Homo Sapiens
auucaaugaugagagcacacacuacaggggag

SEQ ID NO: 275985 - RNA, 32 nt, Homo Sapiens
caccuugcccagcccuggccaagcccucccca

SEQ ID NO: 275986 - RNA, 31 nt, Homo Sapiens
ccgauggagcccccagauagagcuggguggc

SEQ ID NO: 275987 - RNA, 32 nt, Homo Sapiens
cggcguuugucuucuuuuucuuagucagaucc

SEQ ID NO: 275988 - RNA, 32 nt, Homo Sapiens
gugauaaaaauauuuagauaaaacauauucau

SEQ ID NO: 275989 - RNA, 32 nt, Homo Sapiens
aucaggcagucuguggccuccuguagcagggc

SEQ ID NO: 275990 - RNA, 32 nt, Homo Sapiens
gaagaaucccgaagaauguaacaagaagcaaa

SEQ ID NO: 275991 - RNA, 32 nt, Homo Sapiens
gaagcccuggcacagguacgggccccccucag

SEQ ID NO: 275992 - RNA, 32 nt, Homo Sapiens
aauauagugguauuauuuuaagauucuagaua

SEQ ID NO: 275993 - RNA, 32 nt, Homo Sapiens
gaccuggcaaauaagaucuugaauagccaaaa

SEQ ID NO: 275994 - RNA, 32 nt, Homo Sapiens
aacaaaggagcuucuuuuuuuuucuagguuuu

SEQ ID NO: 275995 - RNA, 32 nt, Homo Sapiens
auuguuuguaaaaauguaagcacaguguagug

SEQ ID NO: 275996 - RNA, 32 nt, Homo Sapiens
uccuuucuccucuccuucagccaaucauuauc

SEQ ID NO: 275997 - RNA, 32 nt, Homo Sapiens
acaggcuggcugcguguucuugaaauaggugu

SEQ ID NO: 275998 - RNA, 29 nt, Homo Sapiens
gggugauaaaguuuucuguuucccugguu

SEQ ID NO: 275999 - RNA, 32 nt, Homo Sapiens
guaaggaaaacgcaguuuuuaaaaugauccau

SEQ ID NO: 276000 - RNA, 31 nt, Homo Sapiens
uccuuaugcaucucuuugccaaguagaauuu

SEQ ID NO: 276001 - RNA, 32 nt, Homo Sapiens
ggugcucggcccgggagcgcgagcgggaggag

SEQ ID NO: 276002 - RNA, 32 nt, Homo Sapiens
ccauuuacgauaguuuaaaauaaaauaccuag

SEQ ID NO: 276003 - RNA, 32 nt, Homo Sapiens
uaaagagcauauaaauaauuugaucaauacaa

SEQ ID NO: 276004 - RNA, 32 nt, Homo Sapiens
uggaggcagcggggcaggucgccuggggcguc

SEQ ID NO: 276005 - RNA, 32 nt, Homo Sapiens
ggguguuucaugggaaaaucuacacaaacuau

SEQ ID NO: 276006 - RNA, 32 nt, Homo Sapiens
ccuggccucgccguccucuccccgcagccgga

SEQ ID NO: 276007 - RNA, 32 nt, Homo Sapiens
uuuagauuuuggauuuucaccagucauguguu

SEQ ID NO: 276008 - RNA, 32 nt, Homo Sapiens
aucuuugcguccgaagcacagcagcuaacaca

SEQ ID NO: 276009 - RNA, 32 nt, Homo Sapiens
ccuggacacacagauaaugcugccuugacaca

SEQ ID NO: 276010 - RNA, 32 nt, Homo Sapiens
ccgccgcucccggccccgcuccgcucacaauc

SEQ ID NO: 276011 - RNA, 32 nt, Homo Sapiens
cagaaaaacuaaaauuagaggacagaaauacc

SEQ ID NO: 276012 - RNA, 32 nt, Homo Sapiens
cuuaauuuuagauaauguaaauuuagaggaau

SEQ ID NO: 276013 - RNA, 32 nt, Homo Sapiens
aaaagaaaucaucauagucuaagguucaguug

SEQ ID NO: 276014 - RNA, 32 nt, Homo Sapiens
ugccgccaccgccgcgucccgucccaccgucg

SEQ ID NO: 276015 - RNA, 32 nt, Homo Sapiens
ggagguggccacagggauaaccccaacccucu

SEQ ID NO: 276016 - RNA, 32 nt, Homo Sapiens
ggcgacaauaaacuguauuuucguuucuaacu

SEQ ID NO: 276017 - RNA, 28 nt, Homo Sapiens
aaauagaaauaaugucauuugaaugaaa

SEQ ID NO: 276018 - RNA, 32 nt, Homo Sapiens
gcaguaguucuuaugauguguaggcucccucc

SEQ ID NO: 276019 - RNA, 32 nt, Homo Sapiens
gccccagaucucggggaguccccgagacaccc

SEQ ID NO: 276020 - RNA, 32 nt, Homo Sapiens
uacaggauucauaaaucagggaucauuuugcu

SEQ ID NO: 276021 - RNA, 32 nt, Homo Sapiens
auaguaaaaugaaaggaacuugacuguacagu

SEQ ID NO: 276022 - RNA, 32 nt, Homo Sapiens
aaccaagcccacggucuuggccgugacccuga

SEQ ID NO: 276023 - RNA, 32 nt, Homo Sapiens
ucgcaugguccuccccagagcaugccgaaccc

SEQ ID NO: 276024 - RNA, 32 nt, Homo Sapiens
agaaagggcaaagguggaccccugccuccaaa

SEQ ID NO: 276025 - RNA, 32 nt, Homo Sapiens
aaccuuugaaugcacaaauaaaacaggucaug

SEQ ID NO: 276026 - RNA, 32 nt, Homo Sapiens
ccagaaauucccuuuucaccuuuucaggaaaa

SEQ ID NO: 276027 - RNA, 32 nt, Homo Sapiens
ucucuggcgcaucaccugauuggaggggcugg

SEQ ID NO: 276028 - RNA, 32 nt, Homo Sapiens
cugggcuagugggaccccgcgcgggcugguuc

SEQ ID NO: 276029 - RNA, 32 nt, Homo Sapiens
aauugugcuguaaaaguuaaccagagacaauu

SEQ ID NO: 276030 - RNA, 32 nt, Homo Sapiens
ccccgcccgcgcgccguaccgcggcggagaug

SEQ ID NO: 276031 - RNA, 32 nt, Homo Sapiens
ccugcagcuccauggcugccccagggccaagg

SEQ ID NO: 276032 - RNA, 32 nt, Homo Sapiens
ugugaguacagcaucuucagccuguucuucuu

SEQ ID NO: 276033 - RNA, 32 nt, Homo Sapiens
cccugaucgagcggcgggagcgaggguucaga

SEQ ID NO: 276034 - RNA, 32 nt, Homo Sapiens
cugggcaucccucuccuccuccauccccagac

SEQ ID NO: 276035 - RNA, 32 nt, Homo Sapiens
uacagaagaacacacaccgcucggugcugaau

SEQ ID NO: 276036 - RNA, 32 nt, Homo Sapiens
cugggacacaaguucagagaagggcagagcug

SEQ ID NO: 276037 - RNA, 32 nt, Homo Sapiens
ugcuccgccucccagcuuuucucaaaauaguc

SEQ ID NO: 276038 - RNA, 32 nt, Homo Sapiens
uuaacagcucuuuucauugcauccugugagau

SEQ ID NO: 276039 - RNA, 32 nt, Homo Sapiens
cggcugggggucgggccgagcggggcaggagg

SEQ ID NO: 276040 - RNA, 32 nt, Homo Sapiens
ugccagagcccaggcuggccucaucugcacca

SEQ ID NO: 276041 - RNA, 32 nt, Homo Sapiens
uuuuuuuuucuauuuuaaccgcugaaggaaua

SEQ ID NO: 276042 - RNA, 32 nt, Homo Sapiens
gauaaugugucuuuuuucuucuggcugguuuu

SEQ ID NO: 276043 - RNA, 32 nt, Homo Sapiens
auugauuccacuuuucugcauagccgguagaa

SEQ ID NO: 276044 - RNA, 32 nt, Homo Sapiens
caacacaggccgcauauggacacacaugaggu

SEQ ID NO: 276045 - RNA, 32 nt, Homo Sapiens
aaccaugucgcuggcagcuggugcuggcggug

SEQ ID NO: 276046 - RNA, 32 nt, Homo Sapiens
gggcuugccggggccuggacagcugcgagggc

SEQ ID NO: 276047 - RNA, 32 nt, Homo Sapiens
cgccucucuuuugagcaaacaagcauucuaua

SEQ ID NO: 276048 - RNA, 32 nt, Homo Sapiens
auauguugacuucggucucuaaaagugcucuu

SEQ ID NO: 276049 - RNA, 32 nt, Homo Sapiens
aauuugguaaauuuuucuuuguauuuuuuuuu

SEQ ID NO: 276050 - RNA, 28 nt, Homo Sapiens
agaagaauggcgagauacauuaugaaac

SEQ ID NO: 276051 - RNA, 32 nt, Homo Sapiens
ccccuccugccagcggucuucaugguccugcu

SEQ ID NO: 276052 - RNA, 32 nt, Homo Sapiens
guccgggaggccugggagccgccggcagaggu

SEQ ID NO: 276053 - RNA, 32 nt, Homo Sapiens
cugguuuccuauuugcaguuacuugaauaaaa

SEQ ID NO: 276054 - RNA, 32 nt, Homo Sapiens
gggccaaggagcugccucuacugcucccacgu

SEQ ID NO: 276055 - RNA, 32 nt, Homo Sapiens
aauuuguccacuuuuuuauuuaucacacgucu

SEQ ID NO: 276056 - RNA, 32 nt, Homo Sapiens
ccggagagccccggagugagcggaguagcgag

SEQ ID NO: 276057 - RNA, 32 nt, Homo Sapiens
uggagucauuaacgugauccaagcugacuccg

SEQ ID NO: 276058 - RNA, 32 nt, Homo Sapiens
aacugaacgauuauuuuguuccuccguagucc

SEQ ID NO: 276059 - RNA, 32 nt, Homo Sapiens
gcuuggacuggcucuccuugcuccucaguuug

SEQ ID NO: 276060 - RNA, 32 nt, Homo Sapiens
cuuaauuccuucccuaucuccuuaccaaagua

SEQ ID NO: 276061 - RNA, 32 nt, Homo Sapiens
cauguggcaagggcaccuugugcgagaggauu

SEQ ID NO: 276062 - RNA, 32 nt, Homo Sapiens
gcgagagagcgcugcgccugccgccgccccaa

SEQ ID NO: 276063 - RNA, 32 nt, Homo Sapiens
aaagugucacaaaacauuugucucugaccaac

SEQ ID NO: 276064 - RNA, 32 nt, Homo Sapiens
cuccugccugccaguggccucuuuagcccagc

SEQ ID NO: 276065 - RNA, 32 nt, Homo Sapiens
caacauuugacugucaccugagucuaacagca

SEQ ID NO: 276066 - RNA, 32 nt, Homo Sapiens
ggacgauuggcggcgccccgggucuuccgccg

SEQ ID NO: 276067 - RNA, 32 nt, Homo Sapiens
aauuguagauauaggguaaucaauaaaaucca

SEQ ID NO: 276068 - RNA, 32 nt, Homo Sapiens
aaaugugcucuacuccacccacucccagcucu

SEQ ID NO: 276069 - RNA, 31 nt, Homo Sapiens
ugagguccagccaccaccaggcugagcagug

SEQ ID NO: 276070 - RNA, 30 nt, Homo Sapiens
acuguucuggacugugccuguuaguugcuc

SEQ ID NO: 276071 - RNA, 32 nt, Homo Sapiens
cccagccuggcccagcucccccgggaggcccc

SEQ ID NO: 276072 - RNA, 32 nt, Homo Sapiens
gugaucuaggauaaaaucuugagagucccaua

SEQ ID NO: 276073 - RNA, 32 nt, Homo Sapiens
cagaaauagcuguuugguuuuguuuuuaaaua

SEQ ID NO: 276074 - RNA, 32 nt, Homo Sapiens
uggccccuucaccuccuucuagaacccuuggg

SEQ ID NO: 276075 - RNA, 32 nt, Homo Sapiens
cucugccucuucggaacgauguccacuuugcu

SEQ ID NO: 276076 - RNA, 32 nt, Homo Sapiens
uccugcacuagcccugcaagcugcuggcaaca

SEQ ID NO: 276077 - RNA, 32 nt, Homo Sapiens
aaaugcauuuauuauagaauugucuacauuuc

SEQ ID NO: 276078 - RNA, 32 nt, Homo Sapiens
acauauaaaaauuucaauuaguacccuuuaau

SEQ ID NO: 276079 - RNA, 32 nt, Homo Sapiens
aggugggaggaccaccugaggucaagaguucg

SEQ ID NO: 276080 - RNA, 32 nt, Homo Sapiens
aggaacagaguacaacuuccauccucuuucau

SEQ ID NO: 276081 - RNA, 32 nt, Homo Sapiens
gacccaaaaugugaaugaagcuaaugugaaug

SEQ ID NO: 276082 - RNA, 32 nt, Homo Sapiens
ugaugagaaaucagacguuucugcuccaaacg

SEQ ID NO: 276083 - RNA, 32 nt, Homo Sapiens
cucgcgcccccuccucccgcggggggagccug

SEQ ID NO: 276084 - RNA, 32 nt, Homo Sapiens
gaaauaauugucccaucugggcaaauucaagu

SEQ ID NO: 276085 - RNA, 32 nt, Homo Sapiens
cuuuuuuguuuuuuguuugguaaagauggcau

SEQ ID NO: 276086 - RNA, 32 nt, Homo Sapiens
ucauguagguugucuaaaaauaaaaugcauuu

SEQ ID NO: 276087 - RNA, 32 nt, Homo Sapiens
ugcuuauagcuaaacugccuguucuagaaagc

SEQ ID NO: 276088 - RNA, 32 nt, Homo Sapiens
aagacauucugugccggagagagagugggaga

SEQ ID NO: 276089 - RNA, 32 nt, Homo Sapiens
ccuuaugcuaucucauugucucauggauuuuu

SEQ ID NO: 276090 - RNA, 32 nt, Homo Sapiens
uggguagaaucuggaguuuucaucucuuuuca

SEQ ID NO: 276091 - RNA, 32 nt, Homo Sapiens
gugaugugguggccgucacgcuuucaugacca

SEQ ID NO: 276092 - RNA, 32 nt, Homo Sapiens
cucagguugcccagcucuguggccucaggacu

SEQ ID NO: 276093 - RNA, 32 nt, Homo Sapiens
gggaccaauacugcugaucauguucgaaauuc

SEQ ID NO: 276094 - RNA, 32 nt, Homo Sapiens
ggugauacuuuuucuauauaugaugaaacuca

SEQ ID NO: 276095 - RNA, 32 nt, Homo Sapiens
gaaggcacagcucagagacauaaagagaagau

SEQ ID NO: 276096 - RNA, 32 nt, Homo Sapiens
aacugggacgcgaguggcuggcugggaaguuc

SEQ ID NO: 276097 - RNA, 32 nt, Homo Sapiens
uaugccaguacuacauuguaaaacagaguugu

SEQ ID NO: 276098 - RNA, 32 nt, Homo Sapiens
ccgccaaguccucggugccccuugccauuuuc

SEQ ID NO: 276099 - RNA, 32 nt, Homo Sapiens
ugcuccccucccacccaagaugcugguucaac

SEQ ID NO: 276100 - RNA, 32 nt, Homo Sapiens
ugaucuauuaccaggugacuagucggaaacua

SEQ ID NO: 276101 - RNA, 32 nt, Homo Sapiens
ggaagccaagggaggaucgcgaggggagccag

SEQ ID NO: 276102 - RNA, 31 nt, Homo Sapiens
uaacgcuuucauucccugccccgcccccacc

SEQ ID NO: 276103 - RNA, 32 nt, Homo Sapiens
aaucguaucuuuuguacuuccaucuaagcuac

SEQ ID NO: 276104 - RNA, 32 nt, Homo Sapiens
ugcugcaauauuugguuuguuauuauuaagaa

SEQ ID NO: 276105 - RNA, 28 nt, Homo Sapiens
aacucaggagcuaccaggcugcuuguuu

SEQ ID NO: 276106 - RNA, 32 nt, Homo Sapiens
auuugggccugccuggcaugacuguuuccagc

SEQ ID NO: 276107 - RNA, 32 nt, Homo Sapiens
uuauaagugcuuauccaguagaauuaauaagu

SEQ ID NO: 276108 - RNA, 32 nt, Homo Sapiens
uuaaaguaaaauguguuagauaaugaauaacu

SEQ ID NO: 276109 - RNA, 32 nt, Homo Sapiens
cugggcugugggguaccggcccggaaagcacg

SEQ ID NO: 276110 - RNA, 32 nt, Homo Sapiens
ccugacgcagcgcaggacccgccccgcgcgug

SEQ ID NO: 276111 - RNA, 32 nt, Homo Sapiens
ugaagauuaugaaaaugcugaauaugucgcuu

SEQ ID NO: 276112 - RNA, 32 nt, Homo Sapiens
auugucugucuguuuucuuaacucuuuacaug

SEQ ID NO: 276113 - RNA, 32 nt, Homo Sapiens
ugaugagaaaggaaacugcgugagccaggugu

SEQ ID NO: 276114 - RNA, 32 nt, Homo Sapiens
gcgacccucacagaaacacaaaagggaggggc

SEQ ID NO: 276115 - RNA, 32 nt, Homo Sapiens
agaguccuuucugcuggugaggacagcauuuc

SEQ ID NO: 276116 - RNA, 32 nt, Homo Sapiens
cuuuuauuuacuaacuuugagaacagaguacc

SEQ ID NO: 276117 - RNA, 32 nt, Homo Sapiens
cgccaacagcagcuaccagggcugcuuuuccu

SEQ ID NO: 276118 - RNA, 32 nt, Homo Sapiens
gauaauggguucuuuguauuggcacuuugcac

SEQ ID NO: 276119 - RNA, 32 nt, Homo Sapiens
ggcugggaggacagcucuggcccuucuuaggc

SEQ ID NO: 276120 - RNA, 32 nt, Homo Sapiens
gcgcucccaagccgcagcggccgcgccccuuc

SEQ ID NO: 276121 - RNA, 32 nt, Homo Sapiens
aaaagucugcugucaaucuagaccugcagaaa

SEQ ID NO: 276122 - RNA, 32 nt, Homo Sapiens
guugagaagggauggauuucgaaacuuguauc

SEQ ID NO: 276123 - RNA, 32 nt, Homo Sapiens
gaggauuuuagagcuucauguguggcuuuuaa

SEQ ID NO: 276124 - RNA, 32 nt, Homo Sapiens
cugguuuuccucccuccuucugcacgucugcu

SEQ ID NO: 276125 - RNA, 32 nt, Homo Sapiens
uuugaaaaaccaucuguaaaagacugaggugg

SEQ ID NO: 276126 - RNA, 32 nt, Homo Sapiens
auuguucauuuucuauuucuguuuuugggguu

SEQ ID NO: 276127 - RNA, 32 nt, Homo Sapiens
gaaacaaggguuacugugagucuugcacacaa

SEQ ID NO: 276128 - RNA, 32 nt, Homo Sapiens
cagcagcaggccaaggcugugcucaagcauuu

SEQ ID NO: 276129 - RNA, 32 nt, Homo Sapiens
acuuuccaaacaccacagcaucagcaugguuu

SEQ ID NO: 276130 - RNA, 32 nt, Homo Sapiens
uccaaaauuucuggugaauuacacagaaauuu

SEQ ID NO: 276131 - RNA, 32 nt, Homo Sapiens
accaaagugccauaauguaccaaguaaaaagc

SEQ ID NO: 276132 - RNA, 32 nt, Homo Sapiens
ucgcuuugacuucuccaacacgguuuggcauc

SEQ ID NO: 276133 - RNA, 32 nt, Homo Sapiens
gcagugaggcggaaaggcucucgccggggcac

SEQ ID NO: 276134 - RNA, 32 nt, Homo Sapiens
cggcccaugggccacuauuugaauuucucugu

SEQ ID NO: 276135 - RNA, 32 nt, Homo Sapiens
cgaggacgccggcgccccugugcgagugaccg

SEQ ID NO: 276136 - RNA, 32 nt, Homo Sapiens
guguuucaugcauucagaaaugauuguuaaaa

SEQ ID NO: 276137 - RNA, 32 nt, Homo Sapiens
ugcuaaguggcuggcaccuuguggggcucuug

SEQ ID NO: 276138 - RNA, 32 nt, Homo Sapiens
cugagagaacuaagaugauauuucagaagagu

SEQ ID NO: 276139 - RNA, 32 nt, Homo Sapiens
ggaugccucaguguuaaaaugacaucucaaaa

SEQ ID NO: 276140 - RNA, 32 nt, Homo Sapiens
guaaaaagcaugccacuuaucugguaaaaucc

SEQ ID NO: 276141 - RNA, 32 nt, Homo Sapiens
gcagccggguucgggggcgccgcgcugugagg

SEQ ID NO: 276142 - RNA, 32 nt, Homo Sapiens
ugacaggaagcuuuuauaaacaauuuauugga

SEQ ID NO: 276143 - RNA, 32 nt, Homo Sapiens
uguuuuguuuuaaaugauagaagugugaucuc

SEQ ID NO: 276144 - RNA, 32 nt, Homo Sapiens
gaggggcgggcgccgcgcugccuucccuccgc

SEQ ID NO: 276145 - RNA, 32 nt, Homo Sapiens
uucauaagaacaagagcucugcucuuaaagga

SEQ ID NO: 276146 - RNA, 32 nt, Homo Sapiens
guucucuagggucugauaggaacagaccugag

SEQ ID NO: 276147 - RNA, 32 nt, Homo Sapiens
gugguuacccucaaggcaacaaguauuaucca

SEQ ID NO: 276148 - RNA, 32 nt, Homo Sapiens
ggaggcgccggcuuguacucggcagcgcggga

SEQ ID NO: 276149 - RNA, 32 nt, Homo Sapiens
caagucccaagccugcccgggggcccugcggu

SEQ ID NO: 276150 - RNA, 32 nt, Homo Sapiens
uaggcaauuguaacacuuuuugaaaguaaccc

SEQ ID NO: 276151 - RNA, 32 nt, Homo Sapiens
uccgggccgggcggaaggggacgcgggcugug

SEQ ID NO: 276152 - RNA, 32 nt, Homo Sapiens
ucgcucaccucugguagcuauggaugggacag

SEQ ID NO: 276153 - RNA, 32 nt, Homo Sapiens
ugcucgggccccagccccggccgcugugguga

SEQ ID NO: 276154 - RNA, 32 nt, Homo Sapiens
cugacuuuaaacaagcuccggugauccugaaa

SEQ ID NO: 276155 - RNA, 32 nt, Homo Sapiens
gggaaaaaaagcuuuuuaauucuauaccuucc

SEQ ID NO: 276156 - RNA, 32 nt, Homo Sapiens
ugucugaaauccacauuccagaggcucaggaa

SEQ ID NO: 276157 - RNA, 32 nt, Homo Sapiens
gccuugcuuucaacagaaaugagcuccaccca

SEQ ID NO: 276158 - RNA, 32 nt, Homo Sapiens
uugugacugcagggaaaauuugaaagaaauua

SEQ ID NO: 276159 - RNA, 32 nt, Homo Sapiens
aacccaaaugggggcugcuggcagaccccgag

SEQ ID NO: 276160 - RNA, 32 nt, Homo Sapiens
uguacgucugucugcuggcccaucugucuccc

SEQ ID NO: 276161 - RNA, 32 nt, Homo Sapiens
gugaguaaagcacuggcuaccccuuuucacuu

SEQ ID NO: 276162 - RNA, 32 nt, Homo Sapiens
ugucuaccaugauuauuuuucuaagcuggucg

SEQ ID NO: 276163 - RNA, 32 nt, Homo Sapiens
uaucaagaacaugaaaauauuuuauuuuguau

SEQ ID NO: 276164 - RNA, 32 nt, Homo Sapiens
agagacuugcagcuuggauacacagcaguguc

SEQ ID NO: 276165 - RNA, 32 nt, Homo Sapiens
gccgacggggcccgaccaggauggugcagugg

SEQ ID NO: 276166 - RNA, 32 nt, Homo Sapiens
caggagggccgggcccggggcugcuucgccgc

SEQ ID NO: 276167 - RNA, 32 nt, Homo Sapiens
cuuaaaaaccgauauuuuuuuaucauggacca

SEQ ID NO: 276168 - RNA, 32 nt, Homo Sapiens
uuugagauauauauuuucacagucaaaaaaaa

SEQ ID NO: 276169 - RNA, 32 nt, Homo Sapiens
gucagcaucuucucacucccuucuccuugaua

SEQ ID NO: 276170 - RNA, 32 nt, Homo Sapiens
ccaaaccauguccccucaccgccccguggggu

SEQ ID NO: 276171 - RNA, 30 nt, Homo Sapiens
uggaguguccugcagggggaaagcgaagcc

SEQ ID NO: 276172 - RNA, 32 nt, Homo Sapiens
caucagcuuucccccauuaucucucagaucca

SEQ ID NO: 276173 - RNA, 32 nt, Homo Sapiens
uguaauuguacaaaaucacuguguuugaaauu

SEQ ID NO: 276174 - RNA, 32 nt, Homo Sapiens
ggagccggcagcgggggcggcuguaacuguga

SEQ ID NO: 276175 - RNA, 32 nt, Homo Sapiens
guacauguauaaaugucuuguauuuuaauuca

SEQ ID NO: 276176 - RNA, 32 nt, Homo Sapiens
uuggugugguuuuuuucuuuucucaggugaua

SEQ ID NO: 276177 - RNA, 32 nt, Homo Sapiens
gauggcuaagauacugcugaugcugaaauaaa

SEQ ID NO: 276178 - RNA, 32 nt, Homo Sapiens
ccaaaguucuagcugcagcuuugcuuccaaug

SEQ ID NO: 276179 - RNA, 30 nt, Homo Sapiens
caugagccgagcgugaagccggcgccucca

SEQ ID NO: 276180 - RNA, 32 nt, Homo Sapiens
ugccaggaaugggaggagcaggcuugaggcuu

SEQ ID NO: 276181 - RNA, 32 nt, Homo Sapiens
ugaagagagugacuggagugguaaagauggaa

SEQ ID NO: 276182 - RNA, 32 nt, Homo Sapiens
gguuuagggcuuuaccuuaaaagcucauuuuu

SEQ ID NO: 276183 - RNA, 32 nt, Homo Sapiens
auccuggccacagauagcuagauguggauagu

SEQ ID NO: 276184 - RNA, 32 nt, Homo Sapiens
cauguaaauuuguuccuacccagccgugacuu

SEQ ID NO: 276185 - RNA, 32 nt, Homo Sapiens
caaaauaaaaauuuuuacuuucacaaguugca

SEQ ID NO: 276186 - RNA, 32 nt, Homo Sapiens
ugaaaccaggaaguauuuuaaguuaaaaauga

SEQ ID NO: 276187 - RNA, 31 nt, Homo Sapiens
cagcgccgugugcaauaaagguuauguuucu

SEQ ID NO: 276188 - RNA, 32 nt, Homo Sapiens
aggcacagcuccccgcgccgcgcacgccgccc

SEQ ID NO: 276189 - RNA, 32 nt, Homo Sapiens
ccagcugagcuucgcgaacccucgggaguuaa

SEQ ID NO: 276190 - RNA, 32 nt, Homo Sapiens
uuuacuguccuuuaaagcauugcaauagcguu

SEQ ID NO: 276191 - RNA, 31 nt, Homo Sapiens
uuauguaugcuucacaugggccuugcucaug

SEQ ID NO: 276192 - RNA, 32 nt, Homo Sapiens
ucaucuccaacuacacaggggaacggagcaga

SEQ ID NO: 276193 - RNA, 32 nt, Homo Sapiens
uuuucuuuuucuucuuuuuuuuuuuggcuucu

SEQ ID NO: 276194 - RNA, 32 nt, Homo Sapiens
aucuggcuguggggcgggcauggggggugaag

SEQ ID NO: 276195 - RNA, 32 nt, Homo Sapiens
ggaagcagaagcugaguguggugaguggagca

SEQ ID NO: 276196 - RNA, 32 nt, Homo Sapiens
ccaucucgggcacaggcccaccccgccccacc

SEQ ID NO: 276197 - RNA, 32 nt, Homo Sapiens
agucugggagggcaugggagcagugagcaggc

SEQ ID NO: 276198 - RNA, 32 nt, Homo Sapiens
cagauuaauuuaauuuuguauuuucuggcuca

SEQ ID NO: 276199 - RNA, 32 nt, Homo Sapiens
cugcccuccacccacaccugcccgcuccccac

SEQ ID NO: 276200 - RNA, 32 nt, Homo Sapiens
ugaugcccucuucuccuugccuugcuucuccc

SEQ ID NO: 276201 - RNA, 32 nt, Homo Sapiens
gugaguggaagcucuggugcagcaugaugcug

SEQ ID NO: 276202 - RNA, 32 nt, Homo Sapiens
aggcauugccccagcccggucaggcucucaga

SEQ ID NO: 276203 - RNA, 32 nt, Homo Sapiens
ggaaguuaaaugacuggccuggcauuaugcua

SEQ ID NO: 276204 - RNA, 32 nt, Homo Sapiens
ucuaaacccaaagacauguccaccaaaagaca

SEQ ID NO: 276205 - RNA, 32 nt, Homo Sapiens
auggagggcugggcuccugggguugucccggg

SEQ ID NO: 276206 - RNA, 32 nt, Homo Sapiens
caaaagugcccauuuuaugcugcugugugguu

SEQ ID NO: 276207 - RNA, 32 nt, Homo Sapiens
ucggaccagccucagggcugcacguuaccuca

SEQ ID NO: 276208 - RNA, 32 nt, Homo Sapiens
gauguuguguguguugggggagcuuccacagg

SEQ ID NO: 276209 - RNA, 32 nt, Homo Sapiens
auaaugggcuaguuucuuacaaugaaauguuc

SEQ ID NO: 276210 - RNA, 32 nt, Homo Sapiens
acucauguuuuacaucuuuucuuucugcgcuc

SEQ ID NO: 276211 - RNA, 32 nt, Homo Sapiens
auugcuuucagcaccacuggcuuucuccccag

SEQ ID NO: 276212 - RNA, 32 nt, Homo Sapiens
agucuuuuuuaaaaucuuaaggucauagaagu

SEQ ID NO: 276213 - RNA, 31 nt, Homo Sapiens
ucaaaacggggcagccaaacccaugaggcaa

SEQ ID NO: 276214 - RNA, 32 nt, Homo Sapiens
ugacauaaaaacagugcuauucugagugaaaa

SEQ ID NO: 276215 - RNA, 32 nt, Homo Sapiens
cugcauuuacacacacacacacacacacacac

SEQ ID NO: 276216 - RNA, 32 nt, Homo Sapiens
aaauagagcaaggagaauauaacauguuugca

SEQ ID NO: 276217 - RNA, 32 nt, Homo Sapiens
ccuaaaccucuuccuuuagcuuuguuccuauu

SEQ ID NO: 276218 - RNA, 32 nt, Homo Sapiens
aagaauguggcaaugcuuguaacuaaaucuca

SEQ ID NO: 276219 - RNA, 32 nt, Homo Sapiens
caauuguugguaacagaagaugaagacaacag

SEQ ID NO: 276220 - RNA, 32 nt, Homo Sapiens
uucuaaucuuuuccuuaaaauuaauagauaac

SEQ ID NO: 276221 - RNA, 32 nt, Homo Sapiens
caguggccccuggggaugugccacugucacuc

SEQ ID NO: 276222 - RNA, 32 nt, Homo Sapiens
acuucgcccagcugaggcaugccugguuucaa

SEQ ID NO: 276223 - RNA, 27 nt, Homo Sapiens
cgauggcggcggccgcccugagggacc

SEQ ID NO: 276224 - RNA, 32 nt, Homo Sapiens
uaaaauaaacucucucuuuucccuggaaaaaa

SEQ ID NO: 276225 - RNA, 32 nt, Homo Sapiens
uguaucuucagcgacucucuugaucacacuuu

SEQ ID NO: 276226 - RNA, 32 nt, Homo Sapiens
ccuacaaguggauuuuagauauuguuaauccu

SEQ ID NO: 276227 - RNA, 32 nt, Homo Sapiens
ccuuguuauaucuauuucuguauuggaguaau

SEQ ID NO: 276228 - RNA, 32 nt, Homo Sapiens
guguugacaaauaaauaguugcucuucuacac

SEQ ID NO: 276229 - RNA, 32 nt, Homo Sapiens
gcgcguucggcggcggcgcgccgcgugcacag

SEQ ID NO: 276230 - RNA, 32 nt, Homo Sapiens
cugaacgccccggcgcucgcucugccuguagc

SEQ ID NO: 276231 - RNA, 32 nt, Homo Sapiens
guccaguacaucucaaguugcauacauuccua

SEQ ID NO: 276232 - RNA, 32 nt, Homo Sapiens
uugucacuguguuacacuuaugcauugccaaa

SEQ ID NO: 276233 - RNA, 32 nt, Homo Sapiens
aaugcaaaaauauucugauuacuuuagccuua

SEQ ID NO: 276234 - RNA, 32 nt, Homo Sapiens
guuuuucuccaaguuaggucucaucuacagcu

SEQ ID NO: 276235 - RNA, 32 nt, Homo Sapiens
cguggugaguucuggggugcgccuaggucccu

SEQ ID NO: 276236 - RNA, 32 nt, Homo Sapiens
uuuauuagcguagaguaggaagucucauauuc

SEQ ID NO: 276237 - RNA, 32 nt, Homo Sapiens
ggguuuuauuagaaaauauuugaaaguauuuu

SEQ ID NO: 276238 - RNA, 32 nt, Homo Sapiens
caagugugcgccccgaaguucaggcaacccuc

SEQ ID NO: 276239 - RNA, 32 nt, Homo Sapiens
ugccaacaucugagcaaacauuuugggguaua

SEQ ID NO: 276240 - RNA, 32 nt, Homo Sapiens
caaaagcaacuaaaaguugacucauuagaaag

SEQ ID NO: 276241 - RNA, 32 nt, Homo Sapiens
caacucugccccaccccagccucuuccaggag

SEQ ID NO: 276242 - RNA, 32 nt, Homo Sapiens
uuuuuauauaaccaaaugugguguuuuaguga

SEQ ID NO: 276243 - RNA, 32 nt, Homo Sapiens
gggcuuuccaaauagaaugauuuacucugaag

SEQ ID NO: 276244 - RNA, 32 nt, Homo Sapiens
aacugagaaugaggucucggacagcccgggag

SEQ ID NO: 276245 - RNA, 32 nt, Homo Sapiens
aaaauaacagagcugggaagaauauucaagau

SEQ ID NO: 276246 - RNA, 32 nt, Homo Sapiens
guuggggcacagggugugguggcugccuucuc

SEQ ID NO: 276247 - RNA, 31 nt, Homo Sapiens
aggccuugaagaaccugucuaacuggaugcu

SEQ ID NO: 276248 - RNA, 32 nt, Homo Sapiens
aaaagucuuuauauuauauacucuguaucaag

SEQ ID NO: 276249 - RNA, 32 nt, Homo Sapiens
ccucucaaguacuggcuuuauaaagaagaagg

SEQ ID NO: 276250 - RNA, 32 nt, Homo Sapiens
cacugacaaaaaugacccccauuugugugacu

SEQ ID NO: 276251 - RNA, 30 nt, Homo Sapiens
gaugcccucugcucuuguucucgaaacaca

SEQ ID NO: 276252 - RNA, 32 nt, Homo Sapiens
gauucacaucacgacgcggcggccccaacucg

SEQ ID NO: 276253 - RNA, 32 nt, Homo Sapiens
uuugugaaguuugauggucaagcaguugcuug

SEQ ID NO: 276254 - RNA, 32 nt, Homo Sapiens
aaaauggauuugggcgaggcugagagaaagga

SEQ ID NO: 276255 - RNA, 32 nt, Homo Sapiens
uuaaaguagggaauuuuuaaaaauuauuaaac

SEQ ID NO: 276256 - RNA, 32 nt, Homo Sapiens
ccucauuuuuaaaugucugcuuuacccuguua

SEQ ID NO: 276257 - RNA, 32 nt, Homo Sapiens
gaggugggcauuuccuacauuccuccuuguuu

SEQ ID NO: 276258 - RNA, 32 nt, Homo Sapiens
uguuccucauggccuaccccagccuuucuucu

SEQ ID NO: 276259 - RNA, 32 nt, Homo Sapiens
ccggaggagacgggggcagcuuggcuugagaa

SEQ ID NO: 276260 - RNA, 32 nt, Homo Sapiens
cauuggugacuauauucggucugugaacggga

SEQ ID NO: 276261 - RNA, 32 nt, Homo Sapiens
cugugcacuauaagggaguaggcuguauuuuc

SEQ ID NO: 276262 - RNA, 32 nt, Homo Sapiens
aagacuuaggaagacugguggaugcguuuggg

SEQ ID NO: 276263 - RNA, 32 nt, Homo Sapiens
ccuugugggggcuccagaaaagaggcuaggag

SEQ ID NO: 276264 - RNA, 32 nt, Homo Sapiens
cucgugaugcucccucccucuccggagugaca

SEQ ID NO: 276265 - RNA, 32 nt, Homo Sapiens
ggccagaggaggguggggucagggccgccccu

SEQ ID NO: 276266 - RNA, 32 nt, Homo Sapiens
uugguccuagggugggaaggggcuagggagga

SEQ ID NO: 276267 - RNA, 32 nt, Homo Sapiens
uuuucuggaaugacaacaaacauccaagaaau

SEQ ID NO: 276268 - RNA, 32 nt, Homo Sapiens
guguauacagaaaaugaaagaaacuagggucc

SEQ ID NO: 276269 - RNA, 32 nt, Homo Sapiens
acuaccuggugagugccggcgcgcgggagggc

SEQ ID NO: 276270 - RNA, 32 nt, Homo Sapiens
ggcagggcucugcgcuggugcugccugccauc

SEQ ID NO: 276271 - RNA, 32 nt, Homo Sapiens
ccacuccucuuucuccucuccucagccuuaca

SEQ ID NO: 276272 - RNA, 32 nt, Homo Sapiens
gcugcaggucccgccuguuccagggcaggacc

SEQ ID NO: 276273 - RNA, 32 nt, Homo Sapiens
aggggaggggguggagacugggacaugggaaa

SEQ ID NO: 276274 - RNA, 32 nt, Homo Sapiens
auguuggaacuggagcaucauaaagauagcaa

SEQ ID NO: 276275 - RNA, 32 nt, Homo Sapiens
ggugucagccccacaggaggcucccaggccuc

SEQ ID NO: 276276 - RNA, 30 nt, Homo Sapiens
gaccggagaagcugugagguucuuuagcgu

SEQ ID NO: 276277 - RNA, 32 nt, Homo Sapiens
auuuuggaacucuggagaguaagaauauagua

SEQ ID NO: 276278 - RNA, 32 nt, Homo Sapiens
cagccgccaagcccagccuuccccggcgcgca

SEQ ID NO: 276279 - RNA, 32 nt, Homo Sapiens
aaagaagucccaaagggcaguuccuucuaucu

SEQ ID NO: 276280 - RNA, 32 nt, Homo Sapiens
ugagcauuaucccccauacuccuccccaucau

SEQ ID NO: 276281 - RNA, 32 nt, Homo Sapiens
agaggauaguguguaccugcccugcccucugc

SEQ ID NO: 276282 - RNA, 32 nt, Homo Sapiens
acagccagaaucagccagcaaaugcuuuugua

SEQ ID NO: 276283 - RNA, 32 nt, Homo Sapiens
aggagcucggacugcugguccuggagagcugc

SEQ ID NO: 276284 - RNA, 32 nt, Homo Sapiens
ccggcggcucuucgcgucacccccgccgcuaa

SEQ ID NO: 276285 - RNA, 32 nt, Homo Sapiens
ugggguugggguggagggugcggcccggaguu

SEQ ID NO: 276286 - RNA, 32 nt, Homo Sapiens
cucauuaggaagucuuuguuucccucucuaua

SEQ ID NO: 276287 - RNA, 32 nt, Homo Sapiens
auauaugucaaugaaaacacacugguguauug

SEQ ID NO: 276288 - RNA, 32 nt, Homo Sapiens
gauauaugagguuuucuuucugauggugcaau

SEQ ID NO: 276289 - RNA, 32 nt, Homo Sapiens
uuuaucaauauuugugguuuaacuuugugggg

SEQ ID NO: 276290 - RNA, 32 nt, Homo Sapiens
auuauaccugauuuccaacaccagcuacaaag

SEQ ID NO: 276291 - RNA, 32 nt, Homo Sapiens
cacugccugccagguuguguugggguggcauc

SEQ ID NO: 276292 - RNA, 32 nt, Homo Sapiens
auucugacugagguaagacuuuccaagcccuu

SEQ ID NO: 276293 - RNA, 32 nt, Homo Sapiens
gaacuaaaaguacaucacacaaaacguuuaua

SEQ ID NO: 276294 - RNA, 31 nt, Homo Sapiens
auggagagggcggcgaagaggacccgcaggc

SEQ ID NO: 276295 - RNA, 32 nt, Homo Sapiens
aaaaauguucauucuaugacaauaaauuuuau

SEQ ID NO: 276296 - RNA, 32 nt, Homo Sapiens
gugucauuauccaggagcugguggggagggca

SEQ ID NO: 276297 - RNA, 32 nt, Homo Sapiens
guccagggggcugagccccacccccaaauccc

SEQ ID NO: 276298 - RNA, 32 nt, Homo Sapiens
uugcuuccuuucuccuuuuuacaaaaacaaac

SEQ ID NO: 276299 - RNA, 32 nt, Homo Sapiens
uucugcuggugcccuccgaccaucaacuggaa

SEQ ID NO: 276300 - RNA, 32 nt, Homo Sapiens
ucugagcccucccugcuaagagcugugugcug

SEQ ID NO: 276301 - RNA, 32 nt, Homo Sapiens
cucccagguucaagcauucuucugccucagcc

SEQ ID NO: 276302 - RNA, 32 nt, Homo Sapiens
gggacugucacccucagcacugugaacauacc

SEQ ID NO: 276303 - RNA, 32 nt, Homo Sapiens
gguuuugccuucuuuuauuugggaguuuauuu

SEQ ID NO: 276304 - RNA, 32 nt, Homo Sapiens
aauuagaaaggaaagagaaacaauauaagaaa

SEQ ID NO: 276305 - RNA, 32 nt, Homo Sapiens
aucagaagggaaggggagagucgagaugugug

SEQ ID NO: 276306 - RNA, 32 nt, Homo Sapiens
ucguaggcggcggcgccgccgcgccacccugu

SEQ ID NO: 276307 - RNA, 32 nt, Homo Sapiens
uuugagcaaacacuugaauauguguguccuuu

SEQ ID NO: 276308 - RNA, 32 nt, Homo Sapiens
cuacugcgaaacaaaaauagcuccuuaaaagu

SEQ ID NO: 276309 - RNA, 32 nt, Homo Sapiens
gcucugcccuccccggguucgcaccauucucc

SEQ ID NO: 276310 - RNA, 29 nt, Homo Sapiens
aauauaauagugaucauaaagaauaaaga

SEQ ID NO: 276311 - RNA, 32 nt, Homo Sapiens
caaaaaauacccuuguuuuuuauaguugagau

SEQ ID NO: 276312 - RNA, 32 nt, Homo Sapiens
auuagugggggaaaaaauauuuuuuaaacaaa

SEQ ID NO: 276313 - RNA, 32 nt, Homo Sapiens
auuuuucaacuccgcuggagccagugcccagg

SEQ ID NO: 276314 - RNA, 32 nt, Homo Sapiens
cguuggguuccaggaggcucucuccguccccu

SEQ ID NO: 276315 - RNA, 32 nt, Homo Sapiens
gaagucaauaaauauuuuuaaaugucacagau

SEQ ID NO: 276316 - RNA, 32 nt, Homo Sapiens
uaagggggaggguccccgcaccuaccacuucu

SEQ ID NO: 276317 - RNA, 32 nt, Homo Sapiens
uguuuguaaaauguguauguucaugaguaagg

SEQ ID NO: 276318 - RNA, 32 nt, Homo Sapiens
gguagggagugguauccaguguucaagugcag

SEQ ID NO: 276319 - RNA, 32 nt, Homo Sapiens
agcagugacaccuggcaaugacagaugcaagc

SEQ ID NO: 276320 - RNA, 32 nt, Homo Sapiens
aaaccuuccaguuaaauuucuccaucaauuuu

SEQ ID NO: 276321 - RNA, 32 nt, Homo Sapiens
aggagaccgugaggcucuggccugcagcucgc

SEQ ID NO: 276322 - RNA, 32 nt, Homo Sapiens
agaggcugccgcccccucuccccuucccuggc

SEQ ID NO: 276323 - RNA, 32 nt, Homo Sapiens
ggaucucuuugagaauguguucuucuggcugc

SEQ ID NO: 276324 - RNA, 32 nt, Homo Sapiens
aaugauuauuuguuuaaaucuguacaguuuua

SEQ ID NO: 276325 - RNA, 32 nt, Homo Sapiens
gugggcaaagauuucuuguguaauaccugaca

SEQ ID NO: 276326 - RNA, 28 nt, Homo Sapiens
agaaugaaggcgcuucuguugcuggucu

SEQ ID NO: 276327 - RNA, 32 nt, Homo Sapiens
cucuuaagccacucccccacccugcccuuuua

SEQ ID NO: 276328 - RNA, 32 nt, Homo Sapiens
cuaaagauuauuaauguugguuuuguaucucg

SEQ ID NO: 276329 - RNA, 32 nt, Homo Sapiens
aauggacaccaggggcuucuccccucaaagcc

SEQ ID NO: 276330 - RNA, 32 nt, Homo Sapiens
aaaaagauaaaacaagauaauggguucuuugu

SEQ ID NO: 276331 - RNA, 32 nt, Homo Sapiens
aggagacggaggaggaugcggggggcugcgga

SEQ ID NO: 276332 - RNA, 32 nt, Homo Sapiens
gcugcagcuugaggcggcucggugccugcaug

SEQ ID NO: 276333 - RNA, 32 nt, Homo Sapiens
uaaagguugggcaugauguaugcaaaguacug

SEQ ID NO: 276334 - RNA, 32 nt, Homo Sapiens
auacuuucaggaugaauuucuucuuucugcca

SEQ ID NO: 276335 - RNA, 32 nt, Homo Sapiens
aguauuaauaaucuggaagacaguguugccca

SEQ ID NO: 276336 - RNA, 30 nt, Homo Sapiens
uggaagcaggugugagagggucccgcagaa

SEQ ID NO: 276337 - RNA, 32 nt, Homo Sapiens
aaacugccugaagacuuaaguuuugugggcac

SEQ ID NO: 276338 - RNA, 32 nt, Homo Sapiens
uuaagacuaugaagguuuuucuuaguucuucu

SEQ ID NO: 276339 - RNA, 32 nt, Homo Sapiens
agaaauaucucacuaauuuagauguaagaaug

SEQ ID NO: 276340 - RNA, 32 nt, Homo Sapiens
accuugggcagcuccggccaggccuuguagga

SEQ ID NO: 276341 - RNA, 32 nt, Homo Sapiens
ucuggcaaguaugaggcaaggauuucacagaa

SEQ ID NO: 276342 - RNA, 32 nt, Homo Sapiens
ugauuaauauaaauaauagcagauauaaauug

SEQ ID NO: 276343 - RNA, 32 nt, Homo Sapiens
ugccacaggaggagugggaggagaagcuguug

SEQ ID NO: 276344 - RNA, 32 nt, Homo Sapiens
ccuugaacccucaccacgugcaggucacacac

SEQ ID NO: 276345 - RNA, 32 nt, Homo Sapiens
uuccccagaacaacgcuaauauucacauuuaa

SEQ ID NO: 276346 - RNA, 32 nt, Homo Sapiens
cuagcucaccaggccuggccucugggcagugu

SEQ ID NO: 276347 - RNA, 32 nt, Homo Sapiens
caucaaaaauuccacacccucagguaccaucu

SEQ ID NO: 276348 - RNA, 32 nt, Homo Sapiens
gaaaauuguaacuacauagaugcugaaaggcu

SEQ ID NO: 276349 - RNA, 32 nt, Homo Sapiens
caagcuccugauucuuucuacuaaaucaugaa

SEQ ID NO: 276350 - RNA, 32 nt, Homo Sapiens
uguaauaaaaagccucuuucuuucaaaaaaac

SEQ ID NO: 276351 - RNA, 32 nt, Homo Sapiens
ccaucgcccucccuggcggccucacccugcca

SEQ ID NO: 276352 - RNA, 32 nt, Homo Sapiens
cuaaaccucucucuccuugccagggaaaugug

SEQ ID NO: 276353 - RNA, 32 nt, Homo Sapiens
guucaaccucucuggcagaucaucucuuccaa

SEQ ID NO: 276354 - RNA, 32 nt, Homo Sapiens
caggcaugaggcaccgugccugucccauguug

SEQ ID NO: 276355 - RNA, 32 nt, Homo Sapiens
uaccucagaugggaaacugaggcccagcaaga

SEQ ID NO: 276356 - RNA, 32 nt, Homo Sapiens
cuagugggugucaagugguaucucauuguggu

SEQ ID NO: 276357 - RNA, 32 nt, Homo Sapiens
uuaaaagaaaaauuaucuaagaaguuaaaaau

SEQ ID NO: 276358 - RNA, 32 nt, Homo Sapiens
ggccucgcccuuccucucccuccagguuuaau

SEQ ID NO: 276359 - RNA, 32 nt, Homo Sapiens
gcugagacugaaacagaggggcugggacaugg

SEQ ID NO: 276360 - RNA, 32 nt, Homo Sapiens
ucaugggucugaggagagagaauggccagaga

SEQ ID NO: 276361 - RNA, 32 nt, Homo Sapiens
accgccaucaccgcugccccucgcggucccag

SEQ ID NO: 276362 - RNA, 32 nt, Homo Sapiens
acugcucaauaaaugggaggcaucauaauugu

SEQ ID NO: 276363 - RNA, 32 nt, Homo Sapiens
acccacagcacucauuccugaagcuacugguu

SEQ ID NO: 276364 - RNA, 32 nt, Homo Sapiens
ucuguccugccagcacugagggcucauccauc

SEQ ID NO: 276365 - RNA, 32 nt, Homo Sapiens
acacuuacagugcauuuggaagaauauaugau

SEQ ID NO: 276366 - RNA, 32 nt, Homo Sapiens
uuuaauuauguuguauaucauuguuugcaggg

SEQ ID NO: 276367 - RNA, 32 nt, Homo Sapiens
acagcugaaagaggaggaccccugccuuccuc

SEQ ID NO: 276368 - RNA, 32 nt, Homo Sapiens
ucuaaacccaaguuaaguguaaaggaagggga

SEQ ID NO: 276369 - RNA, 32 nt, Homo Sapiens
ugaaggaggagcuuccuuccccgguggagcug

SEQ ID NO: 276370 - RNA, 32 nt, Homo Sapiens
uuuggaaagggagagaagagaugucugaggaa

SEQ ID NO: 276371 - RNA, 32 nt, Homo Sapiens
uguaagguuguuaauguacauaauugcagauu

SEQ ID NO: 276372 - RNA, 32 nt, Homo Sapiens
ccuucccugagggcuccugggaggccuguggg

SEQ ID NO: 276373 - RNA, 32 nt, Homo Sapiens
ucuugguucuuugagcucguuucagaggcuga

SEQ ID NO: 276374 - RNA, 32 nt, Homo Sapiens
augucauauguacuuugaauuugagaaguggg

SEQ ID NO: 276375 - RNA, 32 nt, Homo Sapiens
ucaccucuacucugcccuccucauagucauaa

SEQ ID NO: 276376 - RNA, 32 nt, Homo Sapiens
ccaugagggaggggcgacgggggaggggggug

SEQ ID NO: 276377 - RNA, 32 nt, Homo Sapiens
cugaagugguuuugugggaaugugaaugaaca

SEQ ID NO: 276378 - RNA, 32 nt, Homo Sapiens
ggaccugaucagcuugauacaagaacuacuga

SEQ ID NO: 276379 - RNA, 32 nt, Homo Sapiens
cgaggaagugacaucaaggauaucacugugug

SEQ ID NO: 276380 - RNA, 32 nt, Homo Sapiens
cauguguacugacuugaggagaucuugcaaca

SEQ ID NO: 276381 - RNA, 32 nt, Homo Sapiens
ucgaagacacauuuguaaauuuucaagcagca

SEQ ID NO: 276382 - RNA, 32 nt, Homo Sapiens
cggcucccggugcccaaucccgggccgcagcc

SEQ ID NO: 276383 - RNA, 32 nt, Homo Sapiens
guucuuuuuuaaaauauuuguaauauggaaug

SEQ ID NO: 276384 - RNA, 32 nt, Homo Sapiens
aaagcuuaaugauucugauauguauccaucag

SEQ ID NO: 276385 - RNA, 32 nt, Homo Sapiens
caggugccaagcccuguucucggugcugggag

SEQ ID NO: 276386 - RNA, 32 nt, Homo Sapiens
aauuuuuuaauuaaaaucauguuuuaaaacag

SEQ ID NO: 276387 - RNA, 32 nt, Homo Sapiens
uugccucaucuuccucaugguuguacagagga

SEQ ID NO: 276388 - RNA, 31 nt, Homo Sapiens
caggcuucgcgcugccugcgcgcggggcgag

SEQ ID NO: 276389 - RNA, 32 nt, Homo Sapiens
agagggcuggcccagccugugcuccccgggcu

SEQ ID NO: 276390 - RNA, 32 nt, Homo Sapiens
agauaaacagauuggauagcaaggcugcuguu

SEQ ID NO: 276391 - RNA, 32 nt, Homo Sapiens
guuauuuauaaucuuguaaaucuuggacuuug

SEQ ID NO: 276392 - RNA, 32 nt, Homo Sapiens
uugugauagagcaucuuuuguugacucacgua

SEQ ID NO: 276393 - RNA, 32 nt, Homo Sapiens
uaauacugucuaggaaaauaagaauuagguuu

SEQ ID NO: 276394 - RNA, 32 nt, Homo Sapiens
gguuggcuccagcaaaggagguugaacaucac

SEQ ID NO: 276395 - RNA, 32 nt, Homo Sapiens
ggcgucugucuccgugcucuccugccuccacc

SEQ ID NO: 276396 - RNA, 32 nt, Homo Sapiens
gccuuaauucagucaagacucccuuugggaau

SEQ ID NO: 276397 - RNA, 32 nt, Homo Sapiens
uucguauggaaauaauguuuuauuagugugcu

SEQ ID NO: 276398 - RNA, 32 nt, Homo Sapiens
uaaagacccagcuugaauguaaauuuuguaua

SEQ ID NO: 276399 - RNA, 32 nt, Homo Sapiens
gggcuggggggccuguuuuggagcaggcaccg

SEQ ID NO: 276400 - RNA, 32 nt, Homo Sapiens
ccucaacucugacagcacccagcccuugugga

SEQ ID NO: 276401 - RNA, 32 nt, Homo Sapiens
ggcagcccgcggccaccggcucgccgucugcc

SEQ ID NO: 276402 - RNA, 32 nt, Homo Sapiens
gugaauaaagaccaaaggguccucucuaccuu

SEQ ID NO: 276403 - RNA, 32 nt, Homo Sapiens
uuaagcaggaaaccacugugugguggggggca

SEQ ID NO: 276404 - RNA, 32 nt, Homo Sapiens
uguacugggaaggcuccuggaguugaccugga

SEQ ID NO: 276405 - RNA, 32 nt, Homo Sapiens
aaauuacaaaaauggcccaaaauaguucuccc

SEQ ID NO: 276406 - RNA, 32 nt, Homo Sapiens
auguucucuauuucuucuugauuauuuauuag

SEQ ID NO: 276407 - RNA, 32 nt, Homo Sapiens
acccccacccccacccccacuggaauugugau

SEQ ID NO: 276408 - RNA, 32 nt, Homo Sapiens
accacaaugagauaaguauuggcauuaguguu

SEQ ID NO: 276409 - RNA, 32 nt, Homo Sapiens
ggggagcggcgguaccgggcggcugcggggcu

SEQ ID NO: 276410 - RNA, 32 nt, Homo Sapiens
aagcuuuggggaugacagugaguugcaagaau

SEQ ID NO: 276411 - RNA, 32 nt, Homo Sapiens
caccccaacugcaggucuaauuuuggacgcuu

SEQ ID NO: 276412 - RNA, 32 nt, Homo Sapiens
agcagagcccugagggguggggaccagcuggc

SEQ ID NO: 276413 - RNA, 32 nt, Homo Sapiens
cgucuccccccucccccgccugggcuucacuu

SEQ ID NO: 276414 - RNA, 32 nt, Homo Sapiens
ucgcccuuaacuugcuugccgccugccugcuu

SEQ ID NO: 276415 - RNA, 32 nt, Homo Sapiens
cagagaaaaugaauuugggauacuaaaguagu

SEQ ID NO: 276416 - RNA, 32 nt, Homo Sapiens
gccugccuguccagagcugaccagggagaugg

SEQ ID NO: 276417 - RNA, 32 nt, Homo Sapiens
ucugacccacuuuguaauuuuugcuccaauau

SEQ ID NO: 276418 - RNA, 32 nt, Homo Sapiens
uucaaauauuccaucagguaguugugagugca

SEQ ID NO: 276419 - RNA, 32 nt, Homo Sapiens
aauuacccacucuuaaauuugucgagugauuu

SEQ ID NO: 276420 - RNA, 32 nt, Homo Sapiens
augggagaaacaaggaggcagucgcuugugca

SEQ ID NO: 276421 - RNA, 32 nt, Homo Sapiens
aucaguggauggugcugucuaugcacaggugu

SEQ ID NO: 276422 - RNA, 32 nt, Homo Sapiens
gaccaagagagaaagaaguaggcaugagggau

SEQ ID NO: 276423 - RNA, 32 nt, Homo Sapiens
gagccugggaggccggccggugccagcaccuu

SEQ ID NO: 276424 - RNA, 32 nt, Homo Sapiens
gcuagucaacccugccauuuuaccacaaaagc

SEQ ID NO: 276425 - RNA, 32 nt, Homo Sapiens
ucaagaccagccuggccaacguggugaaagcc

SEQ ID NO: 276426 - RNA, 32 nt, Homo Sapiens
ggacaaccuggcaacugugagucccugcuucc

SEQ ID NO: 276427 - RNA, 32 nt, Homo Sapiens
guugggagaagcugaggccgagcuugcauguc

SEQ ID NO: 276428 - RNA, 32 nt, Homo Sapiens
cagaugcacacacagaugcacacacaccgaug

SEQ ID NO: 276429 - RNA, 32 nt, Homo Sapiens
guccuggagcagcagcagcugcccgugcaggc

SEQ ID NO: 276430 - RNA, 32 nt, Homo Sapiens
auaacagacaacaugagcaauggaggaccaca

SEQ ID NO: 276431 - RNA, 32 nt, Homo Sapiens
cgugaacugagcgcgcaggggcccguggcuug

SEQ ID NO: 276432 - RNA, 32 nt, Homo Sapiens
guuuuuuugaaucuuuccuaagaucauuuuua

SEQ ID NO: 276433 - RNA, 32 nt, Homo Sapiens
gcuggcccugcucagacaaaucugcucccugg

SEQ ID NO: 276434 - RNA, 32 nt, Homo Sapiens
uccaauccuucuuuuccacccaucccaagguu

SEQ ID NO: 276435 - RNA, 32 nt, Homo Sapiens
aaaaaucagggaguguuuucccucguuucugu

SEQ ID NO: 276436 - RNA, 28 nt, Homo Sapiens
gugcgggggcggcgcagagcagucccau

SEQ ID NO: 276437 - RNA, 32 nt, Homo Sapiens
acaggcuuucccuuuaagauuuguuuuccuca

SEQ ID NO: 276438 - RNA, 32 nt, Homo Sapiens
ucccuuacuuggauuucagacucuagauucgg

SEQ ID NO: 276439 - RNA, 32 nt, Homo Sapiens
caccguauucauuguauaaaucaaauuuuuca

SEQ ID NO: 276440 - RNA, 32 nt, Homo Sapiens
acaaaacccagcacauuaucugcacuauaagc

SEQ ID NO: 276441 - RNA, 32 nt, Homo Sapiens
cucaggggaggacuaggaaaagaccaucugcc

SEQ ID NO: 276442 - RNA, 32 nt, Homo Sapiens
gcucaacgugagccaggagcagcgucccggcu

SEQ ID NO: 276443 - RNA, 32 nt, Homo Sapiens
ccagcuuugcagugacagcuugaguggguucu

SEQ ID NO: 276444 - RNA, 32 nt, Homo Sapiens
uuagcaaaauuuauacuuugauaugaucacau

SEQ ID NO: 276445 - RNA, 32 nt, Homo Sapiens
cauuggaaaaggagucaggagccacugugagg

SEQ ID NO: 276446 - RNA, 32 nt, Homo Sapiens
gaagaccacgggggaagcaaaguuucagggca

SEQ ID NO: 276447 - RNA, 32 nt, Homo Sapiens
ccccucccuuccugggguguggaaaggcagcc

SEQ ID NO: 276448 - RNA, 32 nt, Homo Sapiens
uugaauaagaggaaaguaauuuuuguugcauu

SEQ ID NO: 276449 - RNA, 32 nt, Homo Sapiens
cggggugggcgcggccgaccuggucccugagc

SEQ ID NO: 276450 - RNA, 32 nt, Homo Sapiens
ugggagggaaagggagaaugguguacccuuua

SEQ ID NO: 276451 - RNA, 32 nt, Homo Sapiens
aggcagagcaccuuggggcuccuccuucuguc

SEQ ID NO: 276452 - RNA, 32 nt, Homo Sapiens
cacagacccuacccuuuccccuagcccaguua

SEQ ID NO: 276453 - RNA, 32 nt, Homo Sapiens
gauacaaagacugaagcucuuccuccucuucc

SEQ ID NO: 276454 - RNA, 32 nt, Homo Sapiens
gggaggaggaagaagcggaggaggcggcuccc

SEQ ID NO: 276455 - RNA, 32 nt, Homo Sapiens
agacaucaagacaagaggguagaaaguugaaa

SEQ ID NO: 276456 - RNA, 32 nt, Homo Sapiens
aaaccacauuuuacaguuuaugaugauuaaua

SEQ ID NO: 276457 - RNA, 32 nt, Homo Sapiens
guuacacuaaucagugaaauaaauauuuucau

SEQ ID NO: 276458 - RNA, 32 nt, Homo Sapiens
cauaaacuugaauaaauaaugccaaguucuuu

SEQ ID NO: 276459 - RNA, 32 nt, Homo Sapiens
cccaugagucuuccucagcagcugucgaaacu

SEQ ID NO: 276460 - RNA, 32 nt, Homo Sapiens
aaacaguuucucaauuucuacaaaauccugau

SEQ ID NO: 276461 - RNA, 27 nt, Homo Sapiens
gacagguccuucuguguccuugcaaaa

SEQ ID NO: 276462 - RNA, 32 nt, Homo Sapiens
gacuuaaaaagauaaggaggccagguguggug

SEQ ID NO: 276463 - RNA, 32 nt, Homo Sapiens
agccuuagucgccgccgccgcggggcgagguc

SEQ ID NO: 276464 - RNA, 32 nt, Homo Sapiens
uaauauauuaucuauuaaaauauuagaauuug

SEQ ID NO: 276465 - RNA, 32 nt, Homo Sapiens
cugccagcuuggaagggcaaccccaugacuga

SEQ ID NO: 276466 - RNA, 32 nt, Homo Sapiens
aagaauggaacccacacccauagcucucccca

SEQ ID NO: 276467 - RNA, 32 nt, Homo Sapiens
uauuggaaucccaauggcuccuggaguaggaa

SEQ ID NO: 276468 - RNA, 32 nt, Homo Sapiens
acaguggacuuccuauuaagacuuacuugcau

SEQ ID NO: 276469 - RNA, 32 nt, Homo Sapiens
ggcgucccggcagagggcgcgcggucgcccug

SEQ ID NO: 276470 - RNA, 32 nt, Homo Sapiens
ccgcucggcuccgccccggcgcucucccaggg

SEQ ID NO: 276471 - RNA, 32 nt, Homo Sapiens
auccggagggagauccuggaaccagggcugag

SEQ ID NO: 276472 - RNA, 32 nt, Homo Sapiens
cuuggacucaugcaauaagaaauuuaccgguu

SEQ ID NO: 276473 - RNA, 32 nt, Homo Sapiens
caguuguguugcuuauuacaacacaugcggac

SEQ ID NO: 276474 - RNA, 32 nt, Homo Sapiens
gcagagagauaaagaguuucgacuaaaacaau

SEQ ID NO: 276475 - RNA, 32 nt, Homo Sapiens
cuuuaaaauacaacuacuuaugcucuuaaauc

SEQ ID NO: 276476 - RNA, 32 nt, Homo Sapiens
ccacccuaccagcuccuccagcccugccgggc

SEQ ID NO: 276477 - RNA, 32 nt, Homo Sapiens
aagcaagaacuaaugguuaaauuaucaacuug

SEQ ID NO: 276478 - RNA, 32 nt, Homo Sapiens
cccacaaccacgccggacgugcccccucgcca

SEQ ID NO: 276479 - RNA, 32 nt, Homo Sapiens
ccggagcagucgccccuaucgcugcuccugca

SEQ ID NO: 276480 - RNA, 32 nt, Homo Sapiens
acuuauaugauuacaagaaacuuuaugcaaua

SEQ ID NO: 276481 - RNA, 32 nt, Homo Sapiens
aauuucuugaguuccugaauuuugaacaggau

SEQ ID NO: 276482 - RNA, 27 nt, Homo Sapiens
gaccccuccagcuucagccuccagcuu

SEQ ID NO: 276483 - RNA, 32 nt, Homo Sapiens
uuaugucagcacacacuuacagagcacaaaug

SEQ ID NO: 276484 - RNA, 32 nt, Homo Sapiens
cauacacagacacacacacacacacacacaca

SEQ ID NO: 276485 - RNA, 32 nt, Homo Sapiens
gauacacacacacacacacacacacacacaca

SEQ ID NO: 276486 - RNA, 32 nt, Homo Sapiens
aguacuugccuuuuuuguuuccucaguuuuau

SEQ ID NO: 276487 - RNA, 32 nt, Homo Sapiens
gggggaagccaugacauuuauccaccacuguc

SEQ ID NO: 276488 - RNA, 32 nt, Homo Sapiens
agccauccgccagcgcgggcgcccgccauccg

SEQ ID NO: 276489 - RNA, 32 nt, Homo Sapiens
ugacacucaccgcggagguuugcaguuucacu

SEQ ID NO: 276490 - RNA, 32 nt, Homo Sapiens
agccgcuccugcaggcucugcugcuggcucag

SEQ ID NO: 276491 - RNA, 32 nt, Homo Sapiens
cccucccgcccgcgugccccagcgcccuuccg

SEQ ID NO: 276492 - RNA, 32 nt, Homo Sapiens
uguucuugaacuccuggucuccagugauccuc

SEQ ID NO: 276493 - RNA, 32 nt, Homo Sapiens
auuuuauggcaguuguuuuaaguuuuaaaaua

SEQ ID NO: 276494 - RNA, 32 nt, Homo Sapiens
acaccaggcgcgcccgaguccacaguucugaa

SEQ ID NO: 276495 - RNA, 31 nt, Homo Sapiens
uguugggaauaaagguuuuucuuagauucug

SEQ ID NO: 276496 - RNA, 32 nt, Homo Sapiens
caaacaggagaugccuucagaaagcuuuguau

SEQ ID NO: 276497 - RNA, 32 nt, Homo Sapiens
uuggcaaguauggaagcagaggcagggcaaca

SEQ ID NO: 276498 - RNA, 32 nt, Homo Sapiens
caaaaagaacagagcuuuuuguucucauggcu

SEQ ID NO: 276499 - RNA, 32 nt, Homo Sapiens
aucuaauuucuuuaguuuucuauuugccucca

SEQ ID NO: 276500 - RNA, 32 nt, Homo Sapiens
augagaguucauugaagaagugccagugaggc

SEQ ID NO: 276501 - RNA, 32 nt, Homo Sapiens
uuuuccaagcuguuucgcuuugcaauauauua

SEQ ID NO: 276502 - RNA, 32 nt, Homo Sapiens
ggcuggucuugaacucuugaccucaggugauc

SEQ ID NO: 276503 - RNA, 32 nt, Homo Sapiens
uguggcguuucccuaugggggugucuguacgu

SEQ ID NO: 276504 - RNA, 32 nt, Homo Sapiens
aaaaugggaguacccaugguuaggauauagcu

SEQ ID NO: 276505 - RNA, 32 nt, Homo Sapiens
gguauucacaugcacuaaaaaaccaggcaaac

SEQ ID NO: 276506 - RNA, 32 nt, Homo Sapiens
caaucccaggugaugugugugcaugugaaaau

SEQ ID NO: 276507 - RNA, 32 nt, Homo Sapiens
cugucaaaaaucauuauucugugcagucgugg

SEQ ID NO: 276508 - RNA, 32 nt, Homo Sapiens
ggguuugaacuuuuggaaaccaauuaaaaugu

SEQ ID NO: 276509 - RNA, 32 nt, Homo Sapiens
gcuaaaugaagaucaaaggaaggauuuugguu

SEQ ID NO: 276510 - RNA, 32 nt, Homo Sapiens
gcacacucuucuauuaauuacuccauuaagag

SEQ ID NO: 276511 - RNA, 32 nt, Homo Sapiens
auggcagcugggggugagaggcuggugguugc

SEQ ID NO: 276512 - RNA, 32 nt, Homo Sapiens
ccuguaccacacugcgcaggcucugguucucc

SEQ ID NO: 276513 - RNA, 32 nt, Homo Sapiens
uugcaacuggguaucuuaauuuuuauguugug

SEQ ID NO: 276514 - RNA, 32 nt, Homo Sapiens
cagacgcccuccccaccaccucacacgcccuc

SEQ ID NO: 276515 - RNA, 32 nt, Homo Sapiens
ggucgcccacuuuacacuuccuucucaugcac

SEQ ID NO: 276516 - RNA, 32 nt, Homo Sapiens
ucuuuaccuucuaacaucaguuuaugaaaacu

SEQ ID NO: 276517 - RNA, 32 nt, Homo Sapiens
gggggccuggaacccgggugcuggggucaugc

SEQ ID NO: 276518 - RNA, 32 nt, Homo Sapiens
ucucgggugggagagcgggaccagaucucgac

SEQ ID NO: 276519 - RNA, 32 nt, Homo Sapiens
aggcggcccagcuguggauggucagauagccc

SEQ ID NO: 276520 - RNA, 32 nt, Homo Sapiens
ggaagauguccuuuggaccaaagcagacuucu

SEQ ID NO: 276521 - RNA, 32 nt, Homo Sapiens
ugguuccagaacugguucauguuaucuauucu

SEQ ID NO: 276522 - RNA, 32 nt, Homo Sapiens
cugacagaugccuggugagcaggggaagcagg

SEQ ID NO: 276523 - RNA, 32 nt, Homo Sapiens
aaaagaugacuuagaaaucaaacuauaagaac

SEQ ID NO: 276524 - RNA, 32 nt, Homo Sapiens
ggccuagacaaggcuccaggccccaccuccuc

SEQ ID NO: 276525 - RNA, 32 nt, Homo Sapiens
cuggccucuauuucuuaauaaauucuuccaag

SEQ ID NO: 276526 - RNA, 32 nt, Homo Sapiens
agguuauaauuucucauuuggagccgggcgca

SEQ ID NO: 276527 - RNA, 32 nt, Homo Sapiens
ggcggugagcgcggcguggggcugccccuccc

SEQ ID NO: 276528 - RNA, 32 nt, Homo Sapiens
auuugaucauuuucuuuuuuuccuuucucccc

SEQ ID NO: 276529 - RNA, 32 nt, Homo Sapiens
auauaauaugaauauauacauaaaaauuguuu

SEQ ID NO: 276530 - RNA, 32 nt, Homo Sapiens
uggagagacuuuggggacuuuuuuauuuuuau

SEQ ID NO: 276531 - RNA, 32 nt, Homo Sapiens
cagauucaaaggauccuggaggugaugggaua

SEQ ID NO: 276532 - RNA, 32 nt, Homo Sapiens
uaguauuuaaccaaauaggcuaaaauuuuaau

SEQ ID NO: 276533 - RNA, 32 nt, Homo Sapiens
gugagucacugacuuuucccccugggaaacua

SEQ ID NO: 276534 - RNA, 32 nt, Homo Sapiens
aagccaguauuagguaucuuuauuuuguaagu

SEQ ID NO: 276535 - RNA, 32 nt, Homo Sapiens
gguggaacacuggcauuuuguugacugucagg

SEQ ID NO: 276536 - RNA, 28 nt, Homo Sapiens
gcagcgggggcuaccaggggacccgcgg

SEQ ID NO: 276537 - RNA, 32 nt, Homo Sapiens
ugcaaagacggaauguuacuauuuuaucagca

SEQ ID NO: 276538 - RNA, 32 nt, Homo Sapiens
ugaacagacagacagacgcacacacacaacag

SEQ ID NO: 276539 - RNA, 32 nt, Homo Sapiens
uagagcggcgacagaagcucuucgggggauca

SEQ ID NO: 276540 - RNA, 32 nt, Homo Sapiens
gcauaagcacagaaaucugaaaaauggccaug

SEQ ID NO: 276541 - RNA, 32 nt, Homo Sapiens
auguuuuauuuuuuagcuauucaguuauguuu

SEQ ID NO: 276542 - RNA, 32 nt, Homo Sapiens
aaauaauguguauauaacuuuaaaagaaguag

SEQ ID NO: 276543 - RNA, 32 nt, Homo Sapiens
gggaaccugggcggcucuggaggcccagggca

SEQ ID NO: 276544 - RNA, 32 nt, Homo Sapiens
aggaggcgcggggacaccauggccgagccucu

SEQ ID NO: 276545 - RNA, 32 nt, Homo Sapiens
aauaagauaauauauaguaggcaucuugcaua

SEQ ID NO: 276546 - RNA, 32 nt, Homo Sapiens
ggaguuaguuuauacuuucacauaucaccaca

SEQ ID NO: 276547 - RNA, 32 nt, Homo Sapiens
ugcuuguuuuaaaggcagcaguuguuugaagu

SEQ ID NO: 276548 - RNA, 32 nt, Homo Sapiens
ccgaggcggcgguggcgccggucaggacaagg

SEQ ID NO: 276549 - RNA, 32 nt, Homo Sapiens
uuuuccaaacacucacaguauauacaacaggc

SEQ ID NO: 276550 - RNA, 32 nt, Homo Sapiens
agggcgcucagugagugccccgggccuucuag

SEQ ID NO: 276551 - RNA, 30 nt, Homo Sapiens
aaccaguggcugccacaccagucacaugac

SEQ ID NO: 276552 - RNA, 32 nt, Homo Sapiens
gugccucugccggcugcccaggaccugguauc

SEQ ID NO: 276553 - RNA, 32 nt, Homo Sapiens
ucugccaggugcucagugacuggccaucacau

SEQ ID NO: 276554 - RNA, 32 nt, Homo Sapiens
auugcucgccucggucgccgccgcuuuagccg

SEQ ID NO: 276555 - RNA, 32 nt, Homo Sapiens
ucugcuggucuggccuggugacucucagggua

SEQ ID NO: 276556 - RNA, 32 nt, Homo Sapiens
cacucggacccgggcucggcgccggggugucg

SEQ ID NO: 276557 - RNA, 32 nt, Homo Sapiens
gcggagacugcaucaggcucucgcgucugcuu

SEQ ID NO: 276558 - RNA, 32 nt, Homo Sapiens
gucuuuugaagaauuuauauuuggaaaguaaa

SEQ ID NO: 276559 - RNA, 32 nt, Homo Sapiens
gaguuccuggcgccgcucgcccggcccggcuu

SEQ ID NO: 276560 - RNA, 32 nt, Homo Sapiens
uaucuugggggaggauucgagggucacagagc

SEQ ID NO: 276561 - RNA, 30 nt, Homo Sapiens
uagaccaccagcugcacccaucuccacaaa

SEQ ID NO: 276562 - RNA, 32 nt, Homo Sapiens
aauguuuugcccgguuuuucucuucaauauuu

SEQ ID NO: 276563 - RNA, 32 nt, Homo Sapiens
aaauuuugcuauaauguacaaauugcuauaug

SEQ ID NO: 276564 - RNA, 32 nt, Homo Sapiens
acauuuaguauccccacccccaaauccuguuc

SEQ ID NO: 276565 - RNA, 32 nt, Homo Sapiens
ucacugcuuucuucuuuuccuacuuuucauuc

SEQ ID NO: 276566 - RNA, 32 nt, Homo Sapiens
uuuaguuagcaucuucaugcuuggaaaucuag

SEQ ID NO: 276567 - RNA, 32 nt, Homo Sapiens
ugccugguuacucugcgagacuugagucuacc

SEQ ID NO: 276568 - RNA, 31 nt, Homo Sapiens
ucuauauuauggagaaagcaaaacccugcaa

SEQ ID NO: 276569 - RNA, 32 nt, Homo Sapiens
cccccucagccccuuccuccccagggagcaaa

SEQ ID NO: 276570 - RNA, 32 nt, Homo Sapiens
gggggguggugggaaacuuugauuuucauagg

SEQ ID NO: 276571 - RNA, 32 nt, Homo Sapiens
ucaccuuugggguugccauguacaaugagauu

SEQ ID NO: 276572 - RNA, 32 nt, Homo Sapiens
gccuaaggaacacacucugcagagugcugggc

SEQ ID NO: 276573 - RNA, 32 nt, Homo Sapiens
gugugucuuugugcccacacgugguggcuggg

SEQ ID NO: 276574 - RNA, 30 nt, Homo Sapiens
aauggagagugaaaacgcagauucauaaug

SEQ ID NO: 276575 - RNA, 32 nt, Homo Sapiens
gaaaccaauuuaauguaaaguauuuggcuuuc

SEQ ID NO: 276576 - RNA, 32 nt, Homo Sapiens
cccacugcaauaaaguaauacguaccaauaaa

SEQ ID NO: 276577 - RNA, 32 nt, Homo Sapiens
uauguuuuauuucuuaccuuuaauuuuuccag

SEQ ID NO: 276578 - RNA, 32 nt, Homo Sapiens
ucggcacuagcggggaggagcuucccgcggcc

SEQ ID NO: 276579 - RNA, 32 nt, Homo Sapiens
cuggccccugaacaaauucuuuaagucauauu

SEQ ID NO: 276580 - RNA, 32 nt, Homo Sapiens
cgccucugcccggcugccccuacugggaagug

SEQ ID NO: 276581 - RNA, 32 nt, Homo Sapiens
uuaguguuugaaaaagcuggucuuugagcgag

SEQ ID NO: 276582 - RNA, 32 nt, Homo Sapiens
cggcggaucccggagagccccggagugagcgg

SEQ ID NO: 276583 - RNA, 32 nt, Homo Sapiens
ccuccccucaugccucaccgugucucaggaga

SEQ ID NO: 276584 - RNA, 32 nt, Homo Sapiens
ucacugugauuccucuccuuccuccguggcgu

SEQ ID NO: 276585 - RNA, 32 nt, Homo Sapiens
gcugcccugugcucugagugagggggaaggua

SEQ ID NO: 276586 - RNA, 32 nt, Homo Sapiens
cacuccacucuaugaagcugguguucauuuug

SEQ ID NO: 276587 - RNA, 32 nt, Homo Sapiens
gauggagucuugcccugucacccaggcuggag

SEQ ID NO: 276588 - RNA, 32 nt, Homo Sapiens
gacggagucucgcccugucacccaggcuggag

SEQ ID NO: 276589 - RNA, 32 nt, Homo Sapiens
aucuguaaauguguaguggaaacuauagaaag

SEQ ID NO: 276590 - RNA, 32 nt, Homo Sapiens
gccggggaaugggcccgcacuugcccagaggc

SEQ ID NO: 276591 - RNA, 32 nt, Homo Sapiens
aaaaagucauauuuuaagugggauuuguuuuu

SEQ ID NO: 276592 - RNA, 32 nt, Homo Sapiens
gucgggcauucauauaggaagaacgcggugug

SEQ ID NO: 276593 - RNA, 32 nt, Homo Sapiens
ugcugacaagggagagccaaguacuguuaaug

SEQ ID NO: 276594 - RNA, 32 nt, Homo Sapiens
cggcggcaauggcggagaggcccgaggaccua

SEQ ID NO: 276595 - RNA, 32 nt, Homo Sapiens
uguacagguugacaccauucagugaagguugu

SEQ ID NO: 276596 - RNA, 32 nt, Homo Sapiens
aaagauuucccuagccucuuccuuuuucauua

SEQ ID NO: 276597 - RNA, 32 nt, Homo Sapiens
aagucacacagcuagugaagaccagagcaguu

SEQ ID NO: 276598 - RNA, 32 nt, Homo Sapiens
gccaccuuuccgggggaagccacgcgcaccag

SEQ ID NO: 276599 - RNA, 32 nt, Homo Sapiens
agcacacacugacugugucaaccaucaguggg

SEQ ID NO: 276600 - RNA, 32 nt, Homo Sapiens
ccagcucuucugccggcccuggggcuaggcug

SEQ ID NO: 276601 - RNA, 32 nt, Homo Sapiens
gccuccccaucccccacccccauucuucugug

SEQ ID NO: 276602 - RNA, 32 nt, Homo Sapiens
ccugcagcccagggggugauguguguaaggga

SEQ ID NO: 276603 - RNA, 32 nt, Homo Sapiens
cucacuugacauugcauuacgaguauucuucc

SEQ ID NO: 276604 - RNA, 32 nt, Homo Sapiens
ggacagugcgcggcgccccgcagccaggcccc

SEQ ID NO: 276605 - RNA, 32 nt, Homo Sapiens
agccggcgcggcgggggcggguccaggaucuu

SEQ ID NO: 276606 - RNA, 28 nt, Homo Sapiens
caggagguuacagggcaaaagggcagcu

SEQ ID NO: 276607 - RNA, 32 nt, Homo Sapiens
ggcgagucccagggccaccccaucccacaggg

SEQ ID NO: 276608 - RNA, 32 nt, Homo Sapiens
aaguguacugaaugacacuuuaugccaucaaa

SEQ ID NO: 276609 - RNA, 32 nt, Homo Sapiens
aggcacaaccucugggcuggaguagaggacuc

SEQ ID NO: 276610 - RNA, 32 nt, Homo Sapiens
cgccagcagacacacaaaccccagcucaucca

SEQ ID NO: 276611 - RNA, 32 nt, Homo Sapiens
uauagucucauaguaguaguguugcuuucuaa

SEQ ID NO: 276612 - RNA, 32 nt, Homo Sapiens
cugugccuucuaccucuuucuucucuacguug

SEQ ID NO: 276613 - RNA, 32 nt, Homo Sapiens
cacucaucaguaaaauguaauaauugccuugu

SEQ ID NO: 276614 - RNA, 32 nt, Homo Sapiens
uccuggguggaccucccccacccaccuccgcu

SEQ ID NO: 276615 - RNA, 31 nt, Homo Sapiens
cuggcgucacgcagccacccgaguauggcug

SEQ ID NO: 276616 - RNA, 32 nt, Homo Sapiens
cuugugugauuucaaauuaaacuugcauuaug

SEQ ID NO: 276617 - RNA, 32 nt, Homo Sapiens
ugguggagcagccagagcugugccugcucagc

SEQ ID NO: 276618 - RNA, 32 nt, Homo Sapiens
gauauauucacaaagagaaaacaaaaggaacu

SEQ ID NO: 276619 - RNA, 32 nt, Homo Sapiens
ugugguggaucgggugggggcuggggcggcag

SEQ ID NO: 276620 - RNA, 32 nt, Homo Sapiens
aaggccugggguuguucacaccacaggcacaa

SEQ ID NO: 276621 - RNA, 32 nt, Homo Sapiens
gaaaaagaaaaaagaaauauuucaagcuuggc

SEQ ID NO: 276622 - RNA, 32 nt, Homo Sapiens
cguggugggcugccggcccaccuucccaaggc

SEQ ID NO: 276623 - RNA, 32 nt, Homo Sapiens
ucagcccgccccagcgaccucgucgggccccg

SEQ ID NO: 276624 - RNA, 32 nt, Homo Sapiens
uuuauaggaaaugcacagauacggcaugguua

SEQ ID NO: 276625 - RNA, 32 nt, Homo Sapiens
uuauccuggacaauuuccauauugcuggacau

SEQ ID NO: 276626 - RNA, 32 nt, Homo Sapiens
uacugccgcccggccugccuggggcugggagc

SEQ ID NO: 276627 - RNA, 32 nt, Homo Sapiens
auaagaucucauuugcagaaagcagauuaaag

SEQ ID NO: 276628 - RNA, 32 nt, Homo Sapiens
uguuggguaagaagguucugugcugucucauu

SEQ ID NO: 276629 - RNA, 32 nt, Homo Sapiens
cggaugguuuugaacugaccugugauauuuua

SEQ ID NO: 276630 - RNA, 30 nt, Homo Sapiens
aagagugacuaaccagccuaacuuuaauac

SEQ ID NO: 276631 - RNA, 32 nt, Homo Sapiens
aaagacuuucuggccugcugaggucgaaucuu

SEQ ID NO: 276632 - RNA, 32 nt, Homo Sapiens
aacagccgcgccccccucccugcggccgccgc

SEQ ID NO: 276633 - RNA, 32 nt, Homo Sapiens
ugauaaugaugaugaugauggugguguugaug

SEQ ID NO: 276634 - RNA, 32 nt, Homo Sapiens
gacaggaggaagacguggguuuggguuagugg

SEQ ID NO: 276635 - RNA, 32 nt, Homo Sapiens
cuucgagcaccaccgcguggacaggaacaccg

SEQ ID NO: 276636 - RNA, 32 nt, Homo Sapiens
caauuguguucgcagccgccgccgcgccgccg

SEQ ID NO: 276637 - RNA, 32 nt, Homo Sapiens
gggagguugcaccaggcccaccccacccugug

SEQ ID NO: 276638 - RNA, 32 nt, Homo Sapiens
cucauauaucaucuuucuuaauccuuuaaacc

SEQ ID NO: 276639 - RNA, 32 nt, Homo Sapiens
gggcccagacacacugauggcacuggcgcaau

SEQ ID NO: 276640 - RNA, 32 nt, Homo Sapiens
aucuuagccaucccaaaccaguaucuguccca

SEQ ID NO: 276641 - RNA, 32 nt, Homo Sapiens
accuguagcacugcacaccucccuucauagug

SEQ ID NO: 276642 - RNA, 32 nt, Homo Sapiens
guccuccgagggugcgcggggugcuccugggg

SEQ ID NO: 276643 - RNA, 32 nt, Homo Sapiens
cuggggacucaccgacacauuccuccugcgug

SEQ ID NO: 276644 - RNA, 32 nt, Homo Sapiens
ggugugagccaccacacccagcccaggcucau

SEQ ID NO: 276645 - RNA, 32 nt, Homo Sapiens
gugcucaggaccagccaucuuggcccucacag

SEQ ID NO: 276646 - RNA, 32 nt, Homo Sapiens
gcaccaguucccucuucauucuugaagcaggg

SEQ ID NO: 276647 - RNA, 32 nt, Homo Sapiens
gcaauugaaaauagucauuuugaauccuauug

SEQ ID NO: 276648 - RNA, 32 nt, Homo Sapiens
ugguuccagaaagggcuggagcagaagggcca

SEQ ID NO: 276649 - RNA, 32 nt, Homo Sapiens
uuuaucauuacugcuguaaacccugcuacaau

SEQ ID NO: 276650 - RNA, 32 nt, Homo Sapiens
cuuggggugucuagcguagacccaggcaauaa

SEQ ID NO: 276651 - RNA, 32 nt, Homo Sapiens
uacaggcgugugccgccacacacggcuaauuu

SEQ ID NO: 276652 - RNA, 32 nt, Homo Sapiens
cgccaccccaugcuccccaagaacgcggcucu

SEQ ID NO: 276653 - RNA, 32 nt, Homo Sapiens
gugccagggucucagggucaggucgcggcugg

SEQ ID NO: 276654 - RNA, 32 nt, Homo Sapiens
ugggccuugggguuacucaaccgcugggcucu

SEQ ID NO: 276655 - RNA, 32 nt, Homo Sapiens
agagaaccucggggaaggggucgggcagcccc

SEQ ID NO: 276656 - RNA, 32 nt, Homo Sapiens
uuuucuuucucauucgaaucuaccacaguugg

SEQ ID NO: 276657 - RNA, 32 nt, Homo Sapiens
ccagccuggaguucuuccugugcuccuugauc

SEQ ID NO: 276658 - RNA, 32 nt, Homo Sapiens
cauauuugcauuccucuuaugcuuuaccugua

SEQ ID NO: 276659 - RNA, 27 nt, Homo Sapiens
aauauguuuuucuucagugcuuaagag

SEQ ID NO: 276660 - RNA, 32 nt, Homo Sapiens
caugcuccacacugggaggccaggcugacccc

SEQ ID NO: 276661 - RNA, 32 nt, Homo Sapiens
uucugauuaguuggguuuuuuauaucaaacua

SEQ ID NO: 276662 - RNA, 32 nt, Homo Sapiens
gagagacuccauaguuugggcuuguaccacuu

SEQ ID NO: 276663 - RNA, 32 nt, Homo Sapiens
guuuuuggacuuuugaguuggugcuggaagaa

SEQ ID NO: 276664 - RNA, 32 nt, Homo Sapiens
aaaagcaugcaaugacaaaaccauacgcaauc

SEQ ID NO: 276665 - RNA, 32 nt, Homo Sapiens
ccgcuuuuccugaguucucccucccaauuggc

SEQ ID NO: 276666 - RNA, 32 nt, Homo Sapiens
ucuucgaguuuacccuaagauaccuucgggca

SEQ ID NO: 276667 - RNA, 29 nt, Homo Sapiens
cacgggauauauuuuagaggcaauugugg

SEQ ID NO: 276668 - RNA, 32 nt, Homo Sapiens
cucaaaacaaaguaguuguauauuuuaacauu

SEQ ID NO: 276669 - RNA, 32 nt, Homo Sapiens
aucacccucuuaucccaaaagaauaugccagu

SEQ ID NO: 276670 - RNA, 32 nt, Homo Sapiens
ggaauacucacucuugggucuaaucuuucccc

SEQ ID NO: 276671 - RNA, 32 nt, Homo Sapiens
auuguagacaccuggaugcaggugauacuauu

SEQ ID NO: 276672 - RNA, 32 nt, Homo Sapiens
cucuaacauguuccuuguuaauucuuguucug

SEQ ID NO: 276673 - RNA, 32 nt, Homo Sapiens
cagcaggucggccgcccucccguccucccaga

SEQ ID NO: 276674 - RNA, 32 nt, Homo Sapiens
uuuaaaccuuuuacugcuguguuauguugaua

SEQ ID NO: 276675 - RNA, 32 nt, Homo Sapiens
guuccgagggaucacugugguggagcugauca

SEQ ID NO: 276676 - RNA, 32 nt, Homo Sapiens
aaaaugcaaaaauuagcuggacgugguggcac

SEQ ID NO: 276677 - RNA, 32 nt, Homo Sapiens
ggagaaaacaccuuucccuucuaguuuugaga

SEQ ID NO: 276678 - RNA, 32 nt, Homo Sapiens
gaggccaguaccuuuccauuuauucuuugauc

SEQ ID NO: 276679 - RNA, 32 nt, Homo Sapiens
aaguggcugcagcagaguuagcugucuagcgc

SEQ ID NO: 276680 - RNA, 32 nt, Homo Sapiens
gcacugguuuauggcgauuguuuucuuggacg

SEQ ID NO: 276681 - RNA, 32 nt, Homo Sapiens
gcuaaagacugcauuauuuuacuacuguaauu

SEQ ID NO: 276682 - RNA, 32 nt, Homo Sapiens
ucgccgcccucccuaggccgccccgccgccau

SEQ ID NO: 276683 - RNA, 32 nt, Homo Sapiens
gaggcucccagcugcagcguccccgcccgccu

SEQ ID NO: 276684 - RNA, 32 nt, Homo Sapiens
aaggcuuauuuuugauuagcagucaauggcaa

SEQ ID NO: 276685 - RNA, 32 nt, Homo Sapiens
gggaggggguggcagggggcccugguuuugug

SEQ ID NO: 276686 - RNA, 32 nt, Homo Sapiens
ccaggcccgcggcggccccggccguaucgcga

SEQ ID NO: 276687 - RNA, 32 nt, Homo Sapiens
uuauugguaagauuauacuaacaaaauguuuc

SEQ ID NO: 276688 - RNA, 32 nt, Homo Sapiens
aaguuuagaucugucccuuaauaaaaauauau

SEQ ID NO: 276689 - RNA, 32 nt, Homo Sapiens
guugcuuguuuuuauuagguuuuugauuacuu

SEQ ID NO: 276690 - RNA, 32 nt, Homo Sapiens
uguagguguuuguucaucuguaacucuaaaag

SEQ ID NO: 276691 - RNA, 32 nt, Homo Sapiens
aacucuucaagaacaaggaucucuguagcguu

SEQ ID NO: 276692 - RNA, 32 nt, Homo Sapiens
ggucaaccuaugggugaagcugucccagcugu

SEQ ID NO: 276693 - RNA, 32 nt, Homo Sapiens
gaggagagagcuagcuaggggcugggaaaggg

SEQ ID NO: 276694 - RNA, 32 nt, Homo Sapiens
guccacuucgagucgccggcccacccucucgg

SEQ ID NO: 276695 - RNA, 32 nt, Homo Sapiens
caucccucuaucugcccacccuggacaacaac

SEQ ID NO: 276696 - RNA, 32 nt, Homo Sapiens
agaggaggcaccuuuauuucuaacugcucugg

SEQ ID NO: 276697 - RNA, 32 nt, Homo Sapiens
gagcggcccuccccacugcccuccuugcacuu

SEQ ID NO: 276698 - RNA, 32 nt, Homo Sapiens
accccuggggguacagggagaacagcaugcug

SEQ ID NO: 276699 - RNA, 32 nt, Homo Sapiens
gaguaucuuuauuccuuuauuaacuuagggca

SEQ ID NO: 276700 - RNA, 32 nt, Homo Sapiens
uuagagcaaaaauuaguaauaaaaauaagaaa

SEQ ID NO: 276701 - RNA, 32 nt, Homo Sapiens
gccauuugcccccagccuccagcuggcuccug

SEQ ID NO: 276702 - RNA, 32 nt, Homo Sapiens
aagacgccagcucugccgcgggcacuuuguuc

SEQ ID NO: 276703 - RNA, 32 nt, Homo Sapiens
uacuuuaagcacaacuagaaaauuguaaaaau

SEQ ID NO: 276704 - RNA, 32 nt, Homo Sapiens
ccuuaauaauaauaaacuuuuucagaaagaau

SEQ ID NO: 276705 - RNA, 32 nt, Homo Sapiens
ccgcugcucaccccggccguccggccgcuuca

SEQ ID NO: 276706 - RNA, 32 nt, Homo Sapiens
aaguguggaaaacuguggcuucucaauaaaua

SEQ ID NO: 276707 - RNA, 32 nt, Homo Sapiens
cagugagcuaugggugcaccacuacacaucag

SEQ ID NO: 276708 - RNA, 32 nt, Homo Sapiens
uuuuuaaaaauauuacuaaggauuuucacaau

SEQ ID NO: 276709 - RNA, 32 nt, Homo Sapiens
agggaacagaagacccaccucaggcucagccc

SEQ ID NO: 276710 - RNA, 32 nt, Homo Sapiens
uauacucaacugacuuuaaaacuauggucaac

SEQ ID NO: 276711 - RNA, 32 nt, Homo Sapiens
ucuagagucuuuacagguaggcaaaauuuguu

SEQ ID NO: 276712 - RNA, 32 nt, Homo Sapiens
uaggauauucuaauugcauuuaaaagaacuua

SEQ ID NO: 276713 - RNA, 32 nt, Homo Sapiens
gcagaggaggcaugagcauggcugggaggggu

SEQ ID NO: 276714 - RNA, 32 nt, Homo Sapiens
gaggucaccuacggcuguggccgugcaggccu

SEQ ID NO: 276715 - RNA, 32 nt, Homo Sapiens
ugacaucuaugcuacauauuauuauauaguuu

SEQ ID NO: 276716 - RNA, 32 nt, Homo Sapiens
caccgcuuugcuccaucuggcuuaccacucuc

SEQ ID NO: 276717 - RNA, 32 nt, Homo Sapiens
uauggauguaaauuguucagaucauaauuguc

SEQ ID NO: 276718 - RNA, 32 nt, Homo Sapiens
cuccuccugcuccccauccccagcccaccacu

SEQ ID NO: 276719 - RNA, 32 nt, Homo Sapiens
ucuuggggaaucugcaccuucuuggucacugc

SEQ ID NO: 276720 - RNA, 32 nt, Homo Sapiens
gcacauauuugggaacucugguagcuugaguu

SEQ ID NO: 276721 - RNA, 32 nt, Homo Sapiens
cauaucuucccacagcagcuuugcucagugau

SEQ ID NO: 276722 - RNA, 32 nt, Homo Sapiens
aaaauucauuuuggucuuuuuaccacaucugu

SEQ ID NO: 276723 - RNA, 32 nt, Homo Sapiens
cggacuuggcgcggggccggcccggccucucu

SEQ ID NO: 276724 - RNA, 32 nt, Homo Sapiens
aaaaugugguauauauacacaauagaauacua

SEQ ID NO: 276725 - RNA, 32 nt, Homo Sapiens
ccucuucugcugccccugccucaugggcuccc

SEQ ID NO: 276726 - RNA, 32 nt, Homo Sapiens
gugcccaggugccaccaagaggaagggccuug

SEQ ID NO: 276727 - RNA, 32 nt, Homo Sapiens
auuuaggaauaauuguaaauauauguuacgaa

SEQ ID NO: 276728 - RNA, 32 nt, Homo Sapiens
gggauccuccguaugcugaacgcugguccccu

SEQ ID NO: 276729 - RNA, 32 nt, Homo Sapiens
cagugaaauuuagacuugugauuugguaugac

SEQ ID NO: 276730 - RNA, 32 nt, Homo Sapiens
ucccaccaggccgcgguccccggagcaggccg

SEQ ID NO: 276731 - RNA, 32 nt, Homo Sapiens
acuggaaaugccuccauaaauaugaucuauga

SEQ ID NO: 276732 - RNA, 32 nt, Homo Sapiens
agaaccaccaaccgaggcgccgggcagcgacc

SEQ ID NO: 276733 - RNA, 32 nt, Homo Sapiens
caccgccuuucugaccccacccugcacuccca

SEQ ID NO: 276734 - RNA, 32 nt, Homo Sapiens
ggguaccuuuugcugcaguugugaauauucag

SEQ ID NO: 276735 - RNA, 32 nt, Homo Sapiens
gcaggaaguagaaauacuuuggcugcccaaau

SEQ ID NO: 276736 - RNA, 32 nt, Homo Sapiens
aagguuguuucaucuuuuuuuuccugucuaac

SEQ ID NO: 276737 - RNA, 32 nt, Homo Sapiens
acuagacaaaaaguauuuuaaaucaguuuuuc

SEQ ID NO: 276738 - RNA, 32 nt, Homo Sapiens
guauuacauaaaucauuuguaugagcaugaga

SEQ ID NO: 276739 - RNA, 32 nt, Homo Sapiens
agccuccuccccaccccaccucccucacuuca

SEQ ID NO: 276740 - RNA, 32 nt, Homo Sapiens
uuagaaacauaaauaaaaugaccaguaauugu

SEQ ID NO: 276741 - RNA, 32 nt, Homo Sapiens
gaagagaucccucuccuuuggucagauuauua

SEQ ID NO: 276742 - RNA, 32 nt, Homo Sapiens
uggcaagccccgaggcagggauggccggccca

SEQ ID NO: 276743 - RNA, 30 nt, Homo Sapiens
gcuccgggcaggcguggcgaggcugaaguc

SEQ ID NO: 276744 - RNA, 32 nt, Homo Sapiens
uaccuuacuguaaaaauaacugucgcguacac

SEQ ID NO: 276745 - RNA, 32 nt, Homo Sapiens
caaauccagaaagaucugcucugcugcccuga

SEQ ID NO: 276746 - RNA, 32 nt, Homo Sapiens
aaccugcccucccugcacucgcucccggcggc

SEQ ID NO: 276747 - RNA, 32 nt, Homo Sapiens
agaacgaggaacccgggccuugugcagaagag

SEQ ID NO: 276748 - RNA, 32 nt, Homo Sapiens
gcgaacccacuuuauuuuuguccaaggaaaag

SEQ ID NO: 276749 - RNA, 32 nt, Homo Sapiens
ggcccuuggggcugacagggccaggcagccuc

SEQ ID NO: 276750 - RNA, 32 nt, Homo Sapiens
gugaggcgggagguucagcagacccaugcagu

SEQ ID NO: 276751 - RNA, 32 nt, Homo Sapiens
ugucccguaggcccggcccgggccccucugga

SEQ ID NO: 276752 - RNA, 32 nt, Homo Sapiens
gccuccaccucuuuaacgagccucuuuuccuu

SEQ ID NO: 276753 - RNA, 32 nt, Homo Sapiens
uuccuucugugcccugccagugacccccaggu

SEQ ID NO: 276754 - RNA, 32 nt, Homo Sapiens
ugugccaggaccaucuuuacuuucuccacaaa

SEQ ID NO: 276755 - RNA, 32 nt, Homo Sapiens
uuggaaaagagauuuauuuuguuuugcucugc

SEQ ID NO: 276756 - RNA, 32 nt, Homo Sapiens
ggggcuuccuuccccuccauagggccaggcau

SEQ ID NO: 276757 - RNA, 27 nt, Homo Sapiens
gcugaccccuucuuccacccgccuucu

SEQ ID NO: 276758 - RNA, 32 nt, Homo Sapiens
uaauuaacugguuuuuuucagcaaauggaagc

SEQ ID NO: 276759 - RNA, 32 nt, Homo Sapiens
uuuaauagggacaacaguaaaucugagaggcu

SEQ ID NO: 276760 - RNA, 32 nt, Homo Sapiens
ugauaaccaauauacagauauauuaauuggaa

SEQ ID NO: 276761 - RNA, 32 nt, Homo Sapiens
gccaaguguuaaaaucuguguuuggaaaauag

SEQ ID NO: 276762 - RNA, 32 nt, Homo Sapiens
cgugguaucugaugaagaccugaucgagugua

SEQ ID NO: 276763 - RNA, 32 nt, Homo Sapiens
auggggaaaguguccugcuguggcaugaaaua

SEQ ID NO: 276764 - RNA, 32 nt, Homo Sapiens
cggccugccaguguaccugccggcgccucggu

SEQ ID NO: 276765 - RNA, 32 nt, Homo Sapiens
cucuagaaaaaauaaaauuagcugggcauggu

SEQ ID NO: 276766 - RNA, 32 nt, Homo Sapiens
ccuaaauaaaauuuaaaaaauuaacagccaag

SEQ ID NO: 276767 - RNA, 32 nt, Homo Sapiens
cggcgggagcggaggcugcugcuggcaggugg

SEQ ID NO: 276768 - RNA, 32 nt, Homo Sapiens
ggggaagagaauacaugggaaaauauugaaaa

SEQ ID NO: 276769 - RNA, 28 nt, Homo Sapiens
cagacaguuggcaacauuauaauuaaaa

SEQ ID NO: 276770 - RNA, 32 nt, Homo Sapiens
auagugcugcagugaacauacacaugcaugua

SEQ ID NO: 276771 - RNA, 31 nt, Homo Sapiens
accaggacagagcuagaaucgagccaguaaa

SEQ ID NO: 276772 - RNA, 32 nt, Homo Sapiens
cagggagaugcaagggcuaaaguaaaauuuug

SEQ ID NO: 276773 - RNA, 32 nt, Homo Sapiens
gggaauuucgccuguuugcgguuuagacccca

SEQ ID NO: 276774 - RNA, 32 nt, Homo Sapiens
aaagaagcugucucgaagcagguacaaaggca

SEQ ID NO: 276775 - RNA, 32 nt, Homo Sapiens
cugggcggguccggggacucagcacucgaccc

SEQ ID NO: 276776 - RNA, 32 nt, Homo Sapiens
cgcgcugcuuccacccaacuuccuguuaguuu

SEQ ID NO: 276777 - RNA, 32 nt, Homo Sapiens
gccucccagcucccaaccccugcaccacccac

SEQ ID NO: 276778 - RNA, 32 nt, Homo Sapiens
ggggacccaagcccgggguugcguccaagguc

SEQ ID NO: 276779 - RNA, 32 nt, Homo Sapiens
cacgcgaccccucccguuucccugcuuuggcc

SEQ ID NO: 276780 - RNA, 32 nt, Homo Sapiens
gcuccucuugucaucccacucagcgccauguc

SEQ ID NO: 276781 - RNA, 32 nt, Homo Sapiens
caaucacuaaguaauuuucucauccuugaaag

SEQ ID NO: 276782 - RNA, 32 nt, Homo Sapiens
aucaaggagcucaaacaaaaaagaagucagga

SEQ ID NO: 276783 - RNA, 32 nt, Homo Sapiens
aucagagaaagcaauugaagccaggcaugaag

SEQ ID NO: 276784 - RNA, 32 nt, Homo Sapiens
gcgacugcggcgaccgcgggacggcgagaggc

SEQ ID NO: 276785 - RNA, 32 nt, Homo Sapiens
gcagcggccccggccucccucuccgccgcgcu

SEQ ID NO: 276786 - RNA, 32 nt, Homo Sapiens
uuggugccuugggaaacagucugacuugaacc

SEQ ID NO: 276787 - RNA, 32 nt, Homo Sapiens
gcaggaacccacuuagguggcaccaaucuuga

SEQ ID NO: 276788 - RNA, 32 nt, Homo Sapiens
ucugucuccugccugucccugggcaauggaau

SEQ ID NO: 276789 - RNA, 32 nt, Homo Sapiens
ugacuuauugauccuuucuccucaccuucaga

SEQ ID NO: 276790 - RNA, 32 nt, Homo Sapiens
ggccguuucuagggccuggcuuccucagccuc

SEQ ID NO: 276791 - RNA, 32 nt, Homo Sapiens
aaaguauuauuuuguaacuaagauugcuggua

SEQ ID NO: 276792 - RNA, 32 nt, Homo Sapiens
gcuaccacgagccccagccucacaguguccac

SEQ ID NO: 276793 - RNA, 30 nt, Homo Sapiens
cgaccaugaaaaagcggcggcggcgggaga

SEQ ID NO: 276794 - RNA, 32 nt, Homo Sapiens
ccugguguucccagccccaccagagccccgug

SEQ ID NO: 276795 - RNA, 31 nt, Homo Sapiens
ccgccggcgucgacaccgagaguacgagcac

SEQ ID NO: 276796 - RNA, 32 nt, Homo Sapiens
uuguggaauuuggaaacguguguugacuccug

SEQ ID NO: 276797 - RNA, 32 nt, Homo Sapiens
gaagaguguacuuuuaguaagggagaagucuu

SEQ ID NO: 276798 - RNA, 32 nt, Homo Sapiens
aaagugaaaaagaagaaauagagaauuccagc

SEQ ID NO: 276799 - RNA, 32 nt, Homo Sapiens
cugcggucacugcugagguuuucagaacuuuc

SEQ ID NO: 276800 - RNA, 32 nt, Homo Sapiens
cucaguucccuucugaacacucgggggacaug

SEQ ID NO: 276801 - RNA, 32 nt, Homo Sapiens
gccauuuuccccaugacuuugguuuuguuuac

SEQ ID NO: 276802 - RNA, 32 nt, Homo Sapiens
caauuccuuggacucacagccaugcagauaag

SEQ ID NO: 276803 - RNA, 32 nt, Homo Sapiens
uccccgccuccagcgcgccggggccgcccaga

SEQ ID NO: 276804 - RNA, 32 nt, Homo Sapiens
cauaguaggcauugauaaaaauuugcuggagc

SEQ ID NO: 276805 - RNA, 32 nt, Homo Sapiens
auucuucaugguggggugucagacauaacuga

SEQ ID NO: 276806 - RNA, 32 nt, Homo Sapiens
auuuggggaaagggcuccuugggcugcuggug

SEQ ID NO: 276807 - RNA, 32 nt, Homo Sapiens
ugucggcaggaugcaggagcugauugggagga

SEQ ID NO: 276808 - RNA, 32 nt, Homo Sapiens
auuucccccucuauugauccccaccuccaaau

SEQ ID NO: 276809 - RNA, 32 nt, Homo Sapiens
uuuaaagugucuuucuucaaguuucuucaaga

SEQ ID NO: 276810 - RNA, 32 nt, Homo Sapiens
accccgacauuuccacuguuagcaaauauacg

SEQ ID NO: 276811 - RNA, 32 nt, Homo Sapiens
auaccacacagaagcugaaagagacucugggg

SEQ ID NO: 276812 - RNA, 32 nt, Homo Sapiens
agagcugaggccaccuggggcuggggauccca

SEQ ID NO: 276813 - RNA, 32 nt, Homo Sapiens
ucgagagcgggcccugcgcgccugaugggucg

SEQ ID NO: 276814 - RNA, 32 nt, Homo Sapiens
gccucgaggaggaaaagacaguagggaagaca

SEQ ID NO: 276815 - RNA, 32 nt, Homo Sapiens
ucagugcccucccuguugcucuaggaggcucc

SEQ ID NO: 276816 - RNA, 32 nt, Homo Sapiens
cuuucuagacuuuuaacaaaauguuugauguu

SEQ ID NO: 276817 - RNA, 32 nt, Homo Sapiens
ugcgcugcgcgagaucgagaucccgcuggggg

SEQ ID NO: 276818 - RNA, 32 nt, Homo Sapiens
ggagggaggcggacagccagaugcagagcgag

SEQ ID NO: 276819 - RNA, 32 nt, Homo Sapiens
gcuuccggagagccgguccaagcggaggcuuu

SEQ ID NO: 276820 - RNA, 30 nt, Homo Sapiens
gcauuugucuguggaacugagauuuagcug

SEQ ID NO: 276821 - RNA, 32 nt, Homo Sapiens
ucacugucgaagaaacaaaaaauaauagcaaa

SEQ ID NO: 276822 - RNA, 32 nt, Homo Sapiens
cuggccugcuaagaaagccgcugugaccgagg

SEQ ID NO: 276823 - RNA, 32 nt, Homo Sapiens
gucauucuauuaugaagaaaacaguuuuauuu

SEQ ID NO: 276824 - RNA, 32 nt, Homo Sapiens
ggaagggaaaauaaaggcaucuuuccaaguac

SEQ ID NO: 276825 - RNA, 32 nt, Homo Sapiens
cugggccuccauucuccuuuaagcaagcauga

SEQ ID NO: 276826 - RNA, 32 nt, Homo Sapiens
cucccagguucaagugauucuucugccucagc

SEQ ID NO: 276827 - RNA, 32 nt, Homo Sapiens
gaccccuacccacuuccauucccguggucucc

SEQ ID NO: 276828 - RNA, 32 nt, Homo Sapiens
acaagggauaugucaagguaaagcagaguuug

SEQ ID NO: 276829 - RNA, 32 nt, Homo Sapiens
guggcuuggggauuguacacgggaccagcuca

SEQ ID NO: 276830 - RNA, 32 nt, Homo Sapiens
acuggauuugggaaaaccugguuuuauuagaa

SEQ ID NO: 276831 - RNA, 32 nt, Homo Sapiens
gcuguuuguaaaauaaaucaggaugguagaaa

SEQ ID NO: 276832 - RNA, 32 nt, Homo Sapiens
gguggccucggccccaggccauccagcccugu

SEQ ID NO: 276833 - RNA, 32 nt, Homo Sapiens
gacauucucguuaauauucuuuugggcuaaua

SEQ ID NO: 276834 - RNA, 32 nt, Homo Sapiens
cugccauaguuaggaaggaaacaccugaacua

SEQ ID NO: 276835 - RNA, 32 nt, Homo Sapiens
ccaaauggcagccgggcuccccgggacccuuc

SEQ ID NO: 276836 - RNA, 32 nt, Homo Sapiens
gccgcgaugcaacagcagcagcaggagucgcc

SEQ ID NO: 276837 - RNA, 32 nt, Homo Sapiens
uguuauauggauuuuucuaaaaugacuauaua

SEQ ID NO: 276838 - RNA, 32 nt, Homo Sapiens
gaaccaucaguauuccucuccugguaccgcaa

SEQ ID NO: 276839 - RNA, 32 nt, Homo Sapiens
ugucucagcucuuguucugugccugagaaugg

SEQ ID NO: 276840 - RNA, 32 nt, Homo Sapiens
cggacaggacggguggagccgcggggcgggac

SEQ ID NO: 276841 - RNA, 32 nt, Homo Sapiens
cuccaagacaaaacuuccuguguguaugugga

SEQ ID NO: 276842 - RNA, 32 nt, Homo Sapiens
aucuacauuuugucuuuuuuuuuucaguucuc

SEQ ID NO: 276843 - RNA, 32 nt, Homo Sapiens
cccggguaucgcgggggcccaggccagcugag

SEQ ID NO: 276844 - RNA, 32 nt, Homo Sapiens
uagggauccacaggagaucaaaaggaaugaug

SEQ ID NO: 276845 - RNA, 32 nt, Homo Sapiens
uguguccgucucucaucucaauaaaagaauuu

SEQ ID NO: 276846 - RNA, 32 nt, Homo Sapiens
uagaaggaugccaugaaggaaaugacugcuuu

SEQ ID NO: 276847 - RNA, 32 nt, Homo Sapiens
ugauauaaauauauuuuuuucuuagacuaaau

SEQ ID NO: 276848 - RNA, 32 nt, Homo Sapiens
ugcucagaccucucagcccagcccucugugac

SEQ ID NO: 276849 - RNA, 30 nt, Homo Sapiens
ucauugcuggacuggauuucuucuggaggg

SEQ ID NO: 276850 - RNA, 32 nt, Homo Sapiens
uccuuacgaaagggauggagggggugguacuu

SEQ ID NO: 276851 - RNA, 32 nt, Homo Sapiens
ugugggaaagccuuuaaccagcccucgacucu

SEQ ID NO: 276852 - RNA, 31 nt, Homo Sapiens
auucuucaagccacacccaccugaaaucaaa

SEQ ID NO: 276853 - RNA, 32 nt, Homo Sapiens
acuguccacuuccucagcacagucccuguaug

SEQ ID NO: 276854 - RNA, 32 nt, Homo Sapiens
agcuugccgcugacgcucucuccugucacccc

SEQ ID NO: 276855 - RNA, 32 nt, Homo Sapiens
ugagacacaauuuugugucuguacaauuauga

SEQ ID NO: 276856 - RNA, 32 nt, Homo Sapiens
gaauucaguguaguaauauuuucagacguuuc

SEQ ID NO: 276857 - RNA, 32 nt, Homo Sapiens
cugucaaauauguuuuggacagcuaaaucauu

SEQ ID NO: 276858 - RNA, 32 nt, Homo Sapiens
agacuccagcccgcuccagcccggcccgaccc

SEQ ID NO: 276859 - RNA, 32 nt, Homo Sapiens
agagggcacaagaacuggcucuggagaccaaa

SEQ ID NO: 276860 - RNA, 32 nt, Homo Sapiens
uauuuaguagucauacuguaauuuuuauguua

SEQ ID NO: 276861 - RNA, 32 nt, Homo Sapiens
aaaggaacgucaaggucgugggaaauaaaagg

SEQ ID NO: 276862 - RNA, 32 nt, Homo Sapiens
gaggcagaggccgguggguugcuuuagcucag

SEQ ID NO: 276863 - RNA, 32 nt, Homo Sapiens
aaccauccaaaaaucauugcuuuuaacuguuu

SEQ ID NO: 276864 - RNA, 32 nt, Homo Sapiens
cucgagugaaaaccucuuucagcugaguccuc

SEQ ID NO: 276865 - RNA, 32 nt, Homo Sapiens
auuaugaaugucaauauugacaugaucuugua

SEQ ID NO: 276866 - RNA, 32 nt, Homo Sapiens
cguguugagccuuaaagaaguagcuaaggaac

SEQ ID NO: 276867 - RNA, 32 nt, Homo Sapiens
gggugaggucuccugcaaagcagaguuggcug

SEQ ID NO: 276868 - RNA, 32 nt, Homo Sapiens
aggaggacaaagugggauuugaagauccacuc

SEQ ID NO: 276869 - RNA, 32 nt, Homo Sapiens
ccacuuuauuuuuuauacacauuaaucagaua

SEQ ID NO: 276870 - RNA, 32 nt, Homo Sapiens
gcugcuauauauaaguguuugucauauggaau

SEQ ID NO: 276871 - RNA, 32 nt, Homo Sapiens
cagagcgcggggcucccccuccccuucggucc

SEQ ID NO: 276872 - RNA, 32 nt, Homo Sapiens
auuuuugugaaauucuagagcugcucugcugc

SEQ ID NO: 276873 - RNA, 32 nt, Homo Sapiens
gcugaaaucaccgcgccucacucgccucgaca

SEQ ID NO: 276874 - RNA, 32 nt, Homo Sapiens
cuuugugccuucuugggccuggcagauucacc

SEQ ID NO: 276875 - RNA, 32 nt, Homo Sapiens
uuugacaucccgggaggcugugccgccggccu

SEQ ID NO: 276876 - RNA, 32 nt, Homo Sapiens
acuuuugccauaaaaauaaacuauggaguccu

SEQ ID NO: 276877 - RNA, 32 nt, Homo Sapiens
uccugacucccucuuuguagcucugugcuuca

SEQ ID NO: 276878 - RNA, 32 nt, Homo Sapiens
gcuugaaaaucauuauuuuaaaauccuuaaau

SEQ ID NO: 276879 - RNA, 32 nt, Homo Sapiens
cccggggcccaggacucuggcuucucuccuca

SEQ ID NO: 276880 - RNA, 32 nt, Homo Sapiens
cgcccgggaccgccagcucuguccgcugccca

SEQ ID NO: 276881 - RNA, 32 nt, Homo Sapiens
cauuaugcaauaauaaaauaagcaucuggguc

SEQ ID NO: 276882 - RNA, 32 nt, Homo Sapiens
ucccggcgcccgccccaccucccgagcuggcu

SEQ ID NO: 276883 - RNA, 32 nt, Homo Sapiens
uggugggcgcgcgggcagcggugccgcggucc

SEQ ID NO: 276884 - RNA, 32 nt, Homo Sapiens
aaaggauggaagauaauauagacuaccaccca

SEQ ID NO: 276885 - RNA, 32 nt, Homo Sapiens
acgaugucaggagaucgaaaucagccuggcca

SEQ ID NO: 276886 - RNA, 32 nt, Homo Sapiens
uugggugaacaguggccuccucagcuuccucc

SEQ ID NO: 276887 - RNA, 32 nt, Homo Sapiens
ugcugggcuucaccccgcucucugagagcauc

SEQ ID NO: 276888 - RNA, 32 nt, Homo Sapiens
ugggacagggagaaaaaaguuguggagaguag

SEQ ID NO: 276889 - RNA, 32 nt, Homo Sapiens
agucuagaagcauugugaaaagguuccaaaac

SEQ ID NO: 276890 - RNA, 32 nt, Homo Sapiens
gggcccugccaauugggacgaguaucccugau

SEQ ID NO: 276891 - RNA, 32 nt, Homo Sapiens
accagcuucagauugcaucuuuugucgucaug

SEQ ID NO: 276892 - RNA, 32 nt, Homo Sapiens
augaaauaaaaugguauuuaguaagaaaucuc

SEQ ID NO: 276893 - RNA, 32 nt, Homo Sapiens
uaguuuguaaaauuauuuugguuuucuucuac

SEQ ID NO: 276894 - RNA, 32 nt, Homo Sapiens
auaguuuuaaauaaauaaauuggcucaucugg

SEQ ID NO: 276895 - RNA, 32 nt, Homo Sapiens
acuucaauauccaaaccaaauaaaaauauugu

SEQ ID NO: 276896 - RNA, 32 nt, Homo Sapiens
gugccuuuuaucuauuugagauugaugacaac

SEQ ID NO: 276897 - RNA, 32 nt, Homo Sapiens
uucauacaaacuuguaaauauaaagaaagcca

SEQ ID NO: 276898 - RNA, 32 nt, Homo Sapiens
guaaugaagacaccaugauaucauuaacauuu

SEQ ID NO: 276899 - RNA, 32 nt, Homo Sapiens
cuaagggggguugcugaugaccaaggacagca

SEQ ID NO: 276900 - RNA, 32 nt, Homo Sapiens
agaaauugcauaauuuucuaauuucaagucuu

SEQ ID NO: 276901 - RNA, 32 nt, Homo Sapiens
gacauugucaggcuuuucuaauguugguagua

SEQ ID NO: 276902 - RNA, 32 nt, Homo Sapiens
ugcauauauaaucaauccuuucuaguucagug

SEQ ID NO: 276903 - RNA, 32 nt, Homo Sapiens
acuucaguguuguuuguuucagugguugugag

SEQ ID NO: 276904 - RNA, 31 nt, Homo Sapiens
gguguuuuuuuuuaaaaccaggcagguuagc

SEQ ID NO: 276905 - RNA, 32 nt, Homo Sapiens
uccuuggcauugguucacuggacauuuccacg

SEQ ID NO: 276906 - RNA, 32 nt, Homo Sapiens
ucagucucuccagauagcacuacgauguauuc

SEQ ID NO: 276907 - RNA, 32 nt, Homo Sapiens
ucagauauaaaagacugaccaauauuguacag

SEQ ID NO: 276908 - RNA, 32 nt, Homo Sapiens
uaguccuaaucccagcacuuugggaggccgag

SEQ ID NO: 276909 - RNA, 32 nt, Homo Sapiens
cuacuucuaccccuucccguccccaaaguguc

SEQ ID NO: 276910 - RNA, 32 nt, Homo Sapiens
gagcgauguccucgaggcgaugauauucucac

SEQ ID NO: 276911 - RNA, 32 nt, Homo Sapiens
ccuggggaauaugcggcgcgcguggauccugc

SEQ ID NO: 276912 - RNA, 32 nt, Homo Sapiens
gguuagauuggaccucuuuuacuguuauaaaa

SEQ ID NO: 276913 - RNA, 32 nt, Homo Sapiens
aguuauuuuugggauaaauuuuacugguugcu

SEQ ID NO: 276914 - RNA, 32 nt, Homo Sapiens
ccguuggcagcgccuggcacuucugagcucgg

SEQ ID NO: 276915 - RNA, 32 nt, Homo Sapiens
caguugggugcuuaaccuuuuugcuuugcuuu

SEQ ID NO: 276916 - RNA, 32 nt, Homo Sapiens
guugauucgagcgggaagaggggggugggugg

SEQ ID NO: 276917 - RNA, 32 nt, Homo Sapiens
cuggccucaagggauccucuggcaugccuugg

SEQ ID NO: 276918 - RNA, 32 nt, Homo Sapiens
accccugggguagccuccuauccaccacugcu

SEQ ID NO: 276919 - RNA, 32 nt, Homo Sapiens
ucggggucuccccggggacgcggccgacugag

SEQ ID NO: 276920 - RNA, 32 nt, Homo Sapiens
gcagugccgccuggcuuuuggccggguccugg

SEQ ID NO: 276921 - RNA, 32 nt, Homo Sapiens
cuuccucugaacaacaugaucuuugagaggga

SEQ ID NO: 276922 - RNA, 32 nt, Homo Sapiens
gaguugugaaaguuuugaguagauauuacuuu

SEQ ID NO: 276923 - RNA, 32 nt, Homo Sapiens
cguggccgcuguccaggagcucugcucucccc

SEQ ID NO: 276924 - RNA, 30 nt, Homo Sapiens
gacggacgcgcgcacagucgcccaguuauc

SEQ ID NO: 276925 - RNA, 32 nt, Homo Sapiens
cggcugggagagcggucggcgggguuucuucg

SEQ ID NO: 276926 - RNA, 32 nt, Homo Sapiens
caaaguauggcaccuuggugugcugguacugu

SEQ ID NO: 276927 - RNA, 32 nt, Homo Sapiens
cggcgguggagccgagcggggagccaggaaag

SEQ ID NO: 276928 - RNA, 32 nt, Homo Sapiens
gaccgcgggaugcugucuguccccuugcucag

SEQ ID NO: 276929 - RNA, 32 nt, Homo Sapiens
auaugaaauaaaauauauucuucuaagcaaag

SEQ ID NO: 276930 - RNA, 32 nt, Homo Sapiens
cuauacuguaugucacaucuaccuaaauguug

SEQ ID NO: 276931 - RNA, 32 nt, Homo Sapiens
agcaccaccauuuaauuucauguaauaucuaa

SEQ ID NO: 276932 - RNA, 32 nt, Homo Sapiens
ucaugcacuuauaaguuuguucuugggcugcu

SEQ ID NO: 276933 - RNA, 32 nt, Homo Sapiens
caaguagcgcggccucggccaagggcuucucc

SEQ ID NO: 276934 - RNA, 32 nt, Homo Sapiens
uauugguacaagcagauacaguauaaacucac

SEQ ID NO: 276935 - RNA, 32 nt, Homo Sapiens
gagcaggaggcagacauguguugcuuugcacg

SEQ ID NO: 276936 - RNA, 32 nt, Homo Sapiens
ggaccccgcgcgcuucgcccacaggcccggcg

SEQ ID NO: 276937 - RNA, 32 nt, Homo Sapiens
gccccucuucuugccuuucacccaggcucuca

SEQ ID NO: 276938 - RNA, 32 nt, Homo Sapiens
aaagaggacaccuugaaaggguuucugaacuc

SEQ ID NO: 276939 - RNA, 32 nt, Homo Sapiens
uccagaauuuaaaaucuagauaucugaaucuc

SEQ ID NO: 276940 - RNA, 32 nt, Homo Sapiens
uggguggccuuuuuuuaccgauccccuuuuuu

SEQ ID NO: 276941 - RNA, 32 nt, Homo Sapiens
auggcuguaucagagggcuuugaaaacauaca

SEQ ID NO: 276942 - RNA, 32 nt, Homo Sapiens
cuguggacagagcucccucacuucaagauucc

SEQ ID NO: 276943 - RNA, 32 nt, Homo Sapiens
agaauuguguugcauuuuaaaugcacccagcu

SEQ ID NO: 276944 - RNA, 32 nt, Homo Sapiens
ggacacaggggaggugccaucgggcaggggug

SEQ ID NO: 276945 - RNA, 32 nt, Homo Sapiens
uucuuggguuuaauguuuaacaaggcuauaga

SEQ ID NO: 276946 - RNA, 32 nt, Homo Sapiens
uuccggagauaaaggauucaaaagauaaagac

SEQ ID NO: 276947 - RNA, 32 nt, Homo Sapiens
gacgcgcagagcgaggggcggcuggaccgacg

SEQ ID NO: 276948 - RNA, 32 nt, Homo Sapiens
uuugacaauauuuaauuugugcuuauguggug

SEQ ID NO: 276949 - RNA, 32 nt, Homo Sapiens
aaaagguacauguuuacaaagagguuuuauga

SEQ ID NO: 276950 - RNA, 32 nt, Homo Sapiens
aguggaaaaaauggagugauguuguaaucuaa

SEQ ID NO: 276951 - RNA, 32 nt, Homo Sapiens
cugccuggagguucucccugggguggcgggag

SEQ ID NO: 276952 - RNA, 32 nt, Homo Sapiens
cgcuccagccccaccuaucgugacugccucca

SEQ ID NO: 276953 - RNA, 32 nt, Homo Sapiens
cauauaugaaaauaaaugaugaaaaaagaacu

SEQ ID NO: 276954 - RNA, 32 nt, Homo Sapiens
acuuuguggucaggccgugucuuugugcugug

SEQ ID NO: 276955 - RNA, 32 nt, Homo Sapiens
aucuggggccagagacccagauucccgggccc

SEQ ID NO: 276956 - RNA, 32 nt, Homo Sapiens
agcgccucuaacaagugaaaacacgaguguga

SEQ ID NO: 276957 - RNA, 32 nt, Homo Sapiens
uucaggcugccucuccucgaaaagucaucuuc

SEQ ID NO: 276958 - RNA, 32 nt, Homo Sapiens
ugaggaaaggguuauaaugucugugguguaca

SEQ ID NO: 276959 - RNA, 32 nt, Homo Sapiens
aacagagggaggagguggccuuuguguccccu

SEQ ID NO: 276960 - RNA, 32 nt, Homo Sapiens
agaaggcgaaggagacccccugccguagccau

SEQ ID NO: 276961 - RNA, 32 nt, Homo Sapiens
ugucaauuugggaauuauuauuauuaauuuag

SEQ ID NO: 276962 - RNA, 32 nt, Homo Sapiens
uaccaguucuguuucuguuuuaucucauggua

SEQ ID NO: 276963 - RNA, 32 nt, Homo Sapiens
uugauuuguauuuuggggguaccuguguugag

SEQ ID NO: 276964 - RNA, 32 nt, Homo Sapiens
uaguuguuaugcuucgugugaacucuccuuaa

SEQ ID NO: 276965 - RNA, 32 nt, Homo Sapiens
ugacaaaguggaagaauuuagagccuucuuca

SEQ ID NO: 276966 - RNA, 32 nt, Homo Sapiens
cauuucuucuaaauaaacuauuuaauauccug

SEQ ID NO: 276967 - RNA, 32 nt, Homo Sapiens
auauuuuuccaaagaagacauaaaaacagcca

SEQ ID NO: 276968 - RNA, 32 nt, Homo Sapiens
gucaccaggaaguuaagaagaguaaucucuac

SEQ ID NO: 276969 - RNA, 32 nt, Homo Sapiens
cucccucuccuggcccagcaguauugcucacg

SEQ ID NO: 276970 - RNA, 32 nt, Homo Sapiens
agcaaccaccaccuuuaacuauuuccaaaaca

SEQ ID NO: 276971 - RNA, 32 nt, Homo Sapiens
gacggggaugggucacggggcccugacggguc

SEQ ID NO: 276972 - RNA, 32 nt, Homo Sapiens
ccccuguuuuuagagcuuccaaaugugucaga

SEQ ID NO: 276973 - RNA, 32 nt, Homo Sapiens
uauauuggcuugggccugccugcccuccccau

SEQ ID NO: 276974 - RNA, 32 nt, Homo Sapiens
cgcggucccccacccucaccccggccccccac

SEQ ID NO: 276975 - RNA, 32 nt, Homo Sapiens
cuucuguuaacuucccaccaccaucaaucauc

SEQ ID NO: 276976 - RNA, 32 nt, Homo Sapiens
caccaagccccccgcccucccgccgcgguccc

SEQ ID NO: 276977 - RNA, 32 nt, Homo Sapiens
cuccccgugccgccggccccagcgcugucucc

SEQ ID NO: 276978 - RNA, 32 nt, Homo Sapiens
accucucugaccaagagccucugauggagugg

SEQ ID NO: 276979 - RNA, 32 nt, Homo Sapiens
cauaccucacaaugcaaaccacuuacuaccag

SEQ ID NO: 276980 - RNA, 32 nt, Homo Sapiens
accacuccaugcuuucucuacucccugccuca

SEQ ID NO: 276981 - RNA, 32 nt, Homo Sapiens
gcccuuguuucauguuuccuaaaagcagaaua

SEQ ID NO: 276982 - RNA, 30 nt, Homo Sapiens
cugaggccacuugcaacauugugacaaaga

SEQ ID NO: 276983 - RNA, 32 nt, Homo Sapiens
gccccucgugcagccccuccuuagcacaucca

SEQ ID NO: 276984 - RNA, 32 nt, Homo Sapiens
ugcccuggaauggaaggcagggcuguggcuca

SEQ ID NO: 276985 - RNA, 32 nt, Homo Sapiens
gcaguuggcaucuggucuugacacugcagaga

SEQ ID NO: 276986 - RNA, 32 nt, Homo Sapiens
acaaugguuaggguuguuuucuuaauucuuuu

SEQ ID NO: 276987 - RNA, 32 nt, Homo Sapiens
gagggaguugcuggcuguuuccuccuuugacu

SEQ ID NO: 276988 - RNA, 32 nt, Homo Sapiens
gugacugaaggcugucaggauucuucaaggag

SEQ ID NO: 276989 - RNA, 32 nt, Homo Sapiens
ccgggcugcaggugcugcugaugcgcugggau

SEQ ID NO: 276990 - RNA, 32 nt, Homo Sapiens
cucaagguuuggaaaaaugacuuuucaguuau

SEQ ID NO: 276991 - RNA, 31 nt, Homo Sapiens
cuccuuuugcccuccgcaggagccuguguug

SEQ ID NO: 276992 - RNA, 32 nt, Homo Sapiens
ucacucuguugaccaggcuggagugcaguggu

SEQ ID NO: 276993 - RNA, 32 nt, Homo Sapiens
ggucuacuauguuuuacuuuuacuucauauuc

SEQ ID NO: 276994 - RNA, 32 nt, Homo Sapiens
gcuuucuugauuucauuuucugauauuuuauu

SEQ ID NO: 276995 - RNA, 32 nt, Homo Sapiens
ugugauuguugugauuuguucuuccgugcgca

SEQ ID NO: 276996 - RNA, 32 nt, Homo Sapiens
gugguauaugaugaagauucaccuuaucaaaa

SEQ ID NO: 276997 - RNA, 32 nt, Homo Sapiens
uuucucucuuauuuauuaaccauggucugaga

SEQ ID NO: 276998 - RNA, 30 nt, Homo Sapiens
gcgcgcggcaggcgacaggucucagcccgg

SEQ ID NO: 276999 - RNA, 32 nt, Homo Sapiens
acuuccuuggguuggugugcuggauggaagua

SEQ ID NO: 277000 - RNA, 32 nt, Homo Sapiens
acccagaauggauguagcuuaucccuccgaug

SEQ ID NO: 277001 - RNA, 32 nt, Homo Sapiens
cacugcagccccacccagaugccccuuucugg

SEQ ID NO: 277002 - RNA, 32 nt, Homo Sapiens
cugagcaaaaauagcaaaagccucucucagcc

SEQ ID NO: 277003 - RNA, 32 nt, Homo Sapiens
cguccagugaacuggcugauuccugcuguggc

SEQ ID NO: 277004 - RNA, 32 nt, Homo Sapiens
ugagcagacccggccccacucuggggcacccu

SEQ ID NO: 277005 - RNA, 32 nt, Homo Sapiens
cccgggagacucuggaggagcuggacuggugu

SEQ ID NO: 277006 - RNA, 32 nt, Homo Sapiens
ccugagacucuugaaguaauggcugauccugc

SEQ ID NO: 277007 - RNA, 32 nt, Homo Sapiens
uggagugcugggaaccugaggaauugccaagg

SEQ ID NO: 277008 - RNA, 32 nt, Homo Sapiens
aggccucauuuacuuauuaauuuauggucucu

SEQ ID NO: 277009 - RNA, 32 nt, Homo Sapiens
cucccgcuggaacggaaggaagagcugcccgg

SEQ ID NO: 277010 - RNA, 32 nt, Homo Sapiens
uucugacacaaaugcagaaucuggagaaaaag

SEQ ID NO: 277011 - RNA, 32 nt, Homo Sapiens
ggcggcggcggcauugggcagcuccucaggcu

SEQ ID NO: 277012 - RNA, 32 nt, Homo Sapiens
cucuccaaauuuccucuucggaguagccuaac

SEQ ID NO: 277013 - RNA, 32 nt, Homo Sapiens
uuucagucugacauagguuuuguuuguaguga

SEQ ID NO: 277014 - RNA, 32 nt, Homo Sapiens
auguuugguaaaugccagguugauagggcgcu

SEQ ID NO: 277015 - RNA, 32 nt, Homo Sapiens
auagauugccuaguggugaagucugggcuuuu

SEQ ID NO: 277016 - RNA, 32 nt, Homo Sapiens
acagguccaggugccgcucccucccccaccac

SEQ ID NO: 277017 - RNA, 32 nt, Homo Sapiens
aggccuccccgacucccuccagucucccagcc

SEQ ID NO: 277018 - RNA, 32 nt, Homo Sapiens
uuaugaccugcuguccaccccuccucaacauc

SEQ ID NO: 277019 - RNA, 32 nt, Homo Sapiens
cccguuuggauaaaccgaagacuuuauuaaau

SEQ ID NO: 277020 - RNA, 32 nt, Homo Sapiens
cacagagagguuagucgcgcgcugaaggucac

SEQ ID NO: 277021 - RNA, 32 nt, Homo Sapiens
gucccgguguccucgggucccaggugauugug

SEQ ID NO: 277022 - RNA, 32 nt, Homo Sapiens
gcaguugaugugucuuuuuuuuuuuuuuuaau

SEQ ID NO: 277023 - RNA, 32 nt, Homo Sapiens
gcgagaagaaaacgggccguugccaucaacga

SEQ ID NO: 277024 - RNA, 32 nt, Homo Sapiens
cugaagaugauuauugugaaauuuuaguaugc

SEQ ID NO: 277025 - RNA, 32 nt, Homo Sapiens
ugaguuguaacaaacaccauuauuuuuggacc

SEQ ID NO: 277026 - RNA, 32 nt, Homo Sapiens
gaaauuauuucugaguugaccaauaaauaaaa

SEQ ID NO: 277027 - RNA, 32 nt, Homo Sapiens
uaaacuacacaccagcagucagugaggaaaac

SEQ ID NO: 277028 - RNA, 25 nt, Homo Sapiens
augaauccgaauuuggaagacuucc

SEQ ID NO: 277029 - RNA, 32 nt, Homo Sapiens
ccauuucaagucccaggcccgccccgugggaa

SEQ ID NO: 277030 - RNA, 32 nt, Homo Sapiens
aggcaauacuuauuauccaccugguaacagug

SEQ ID NO: 277031 - RNA, 32 nt, Homo Sapiens
aagagcuugcuuugauuuacagcaaguagaua

SEQ ID NO: 277032 - RNA, 32 nt, Homo Sapiens
agccugaagucucccccuugguuuuuucauug

SEQ ID NO: 277033 - RNA, 32 nt, Homo Sapiens
uauuuggccuucuaagcagauugggaaggagg

SEQ ID NO: 277034 - RNA, 32 nt, Homo Sapiens
ugauuguuauuuagagaguuggaccacuauug

SEQ ID NO: 277035 - RNA, 28 nt, Homo Sapiens
gcauaacuguauuuuauguguuuauucu

SEQ ID NO: 277036 - RNA, 32 nt, Homo Sapiens
cugucccccugccugucuccagugggaaggua

SEQ ID NO: 277037 - RNA, 32 nt, Homo Sapiens
caagacuaucuaucuuuuauguuuccauucug

SEQ ID NO: 277038 - RNA, 32 nt, Homo Sapiens
uacuucucuuuuccuuauguccuccuuuggcu

SEQ ID NO: 277039 - RNA, 32 nt, Homo Sapiens
cacccgagucccagccccgcgucccggauucg

SEQ ID NO: 277040 - RNA, 32 nt, Homo Sapiens
ccacgggcucugcgucuccgcaguggguggcc

SEQ ID NO: 277041 - RNA, 32 nt, Homo Sapiens
gacucuuuaaggggauuaggcuuuugcucaga

SEQ ID NO: 277042 - RNA, 32 nt, Homo Sapiens
gacacggauugugacaguuucaccccauuugu

SEQ ID NO: 277043 - RNA, 32 nt, Homo Sapiens
aaaacggcagaaaugcaauaaaaacuauauuu

SEQ ID NO: 277044 - RNA, 32 nt, Homo Sapiens
aucuugauuuuucccccuguaauaauggaucu

SEQ ID NO: 277045 - RNA, 32 nt, Homo Sapiens
gaggcaaugacucguuaccugccgcccaucac

SEQ ID NO: 277046 - RNA, 32 nt, Homo Sapiens
agaggggccgccuccgcccgcacccagcaugc

SEQ ID NO: 277047 - RNA, 32 nt, Homo Sapiens
cggcgugcuccauggcaggcguggguggggac

SEQ ID NO: 277048 - RNA, 32 nt, Homo Sapiens
aucaguauauccauauuaaaacgagaugacag

SEQ ID NO: 277049 - RNA, 32 nt, Homo Sapiens
gagacggcgggggcggccgcggcuuugggucc

SEQ ID NO: 277050 - RNA, 31 nt, Homo Sapiens
cagggcuggcccugccugcuccugcggcagc

SEQ ID NO: 277051 - RNA, 32 nt, Homo Sapiens
agcuccugccuugccagccugcucuccauugc

SEQ ID NO: 277052 - RNA, 32 nt, Homo Sapiens
gagaauguuuuugucuauauggaucuggaagu

SEQ ID NO: 277053 - RNA, 32 nt, Homo Sapiens
gcuuccagagacccucgaaaucuccgagaaga

SEQ ID NO: 277054 - RNA, 32 nt, Homo Sapiens
ucauaaaguauuuuugacauaucugucaaccc

SEQ ID NO: 277055 - RNA, 32 nt, Homo Sapiens
cccagcauguugagaggcugaggugggcagau

SEQ ID NO: 277056 - RNA, 32 nt, Homo Sapiens
uuuauuauuuuaaucccuuguuuauuauagag

SEQ ID NO: 277057 - RNA, 32 nt, Homo Sapiens
auauucugguagcaaauuaacuuuacauccuu

SEQ ID NO: 277058 - RNA, 32 nt, Homo Sapiens
cagcggggagggcgggagccggcucucgggcg

SEQ ID NO: 277059 - RNA, 32 nt, Homo Sapiens
ucacagcuguacuccugcuacuacccgucccc

SEQ ID NO: 277060 - RNA, 32 nt, Homo Sapiens
gcggagggugauaagugaaaauacuauauaaa

SEQ ID NO: 277061 - RNA, 32 nt, Homo Sapiens
gaagacccacccagggagcgguuucaguggcg

SEQ ID NO: 277062 - RNA, 32 nt, Homo Sapiens
acuaucuucuucucauuuucucuucuaguucu

SEQ ID NO: 277063 - RNA, 32 nt, Homo Sapiens
uccaccucacucccucagccaagccuccaggc

SEQ ID NO: 277064 - RNA, 32 nt, Homo Sapiens
acugcagagcuaccccaccucugggccuggcc

SEQ ID NO: 277065 - RNA, 32 nt, Homo Sapiens
cggcuguucgcgcaaaggccucaugggaguug

SEQ ID NO: 277066 - RNA, 32 nt, Homo Sapiens
cucuguaaugauguugcuauccauucgaucaa

SEQ ID NO: 277067 - RNA, 32 nt, Homo Sapiens
cuguguuugccagcuggguguuccguguaaau

SEQ ID NO: 277068 - RNA, 32 nt, Homo Sapiens
caauuuuccaacuuuuucaucuuggcccugcu

SEQ ID NO: 277069 - RNA, 32 nt, Homo Sapiens
agacucuaagggaaaaaucugauucagaaaaa

SEQ ID NO: 277070 - RNA, 32 nt, Homo Sapiens
ccagugcgcuggccgcagccaccugcauucaa

SEQ ID NO: 277071 - RNA, 32 nt, Homo Sapiens
cauugaguuuuggaguugauugagauaauaug

SEQ ID NO: 277072 - RNA, 29 nt, Homo Sapiens
gaccagccugggcaacauggcaaaacuca

SEQ ID NO: 277073 - RNA, 32 nt, Homo Sapiens
auaaguguaguuguaaugucaaaucaauaaga

SEQ ID NO: 277074 - RNA, 32 nt, Homo Sapiens
aaauuuaugcuuaagaaguaaaaauggcaggc

SEQ ID NO: 277075 - RNA, 32 nt, Homo Sapiens
gaaggcggcuauaaagggagccugggaggcug

SEQ ID NO: 277076 - RNA, 32 nt, Homo Sapiens
ucacauauacauaacauacauuaauagauaca

SEQ ID NO: 277077 - RNA, 32 nt, Homo Sapiens
ccacccuucuugcuguccccaacacaccugau

SEQ ID NO: 277078 - RNA, 32 nt, Homo Sapiens
ccuaagagcugccugcugccuucugaagcugc

SEQ ID NO: 277079 - RNA, 32 nt, Homo Sapiens
ugaaauggguauauuucuucuguggucuagua

SEQ ID NO: 277080 - RNA, 32 nt, Homo Sapiens
uugcugaaagagaaaaagauaugguuugugaa

SEQ ID NO: 277081 - RNA, 32 nt, Homo Sapiens
uuuucagucugcugaagagcuuggaagacugg

SEQ ID NO: 277082 - RNA, 32 nt, Homo Sapiens
agccggcgcggagcgggagcggugcaggcuga

SEQ ID NO: 277083 - RNA, 32 nt, Homo Sapiens
cagaucccaagcaucaggaaaucauuuuguac

SEQ ID NO: 277084 - RNA, 32 nt, Homo Sapiens
aguaaauguaucaaguuguuuauauaauaaau

SEQ ID NO: 277085 - RNA, 32 nt, Homo Sapiens
auauauuuuaaaaagcacuuugcaaaauaguu

SEQ ID NO: 277086 - RNA, 32 nt, Homo Sapiens
auagcaauccagaauugggguuuuggggggcu

SEQ ID NO: 277087 - RNA, 32 nt, Homo Sapiens
aguucacugucaauucaaaucgcuuaaggaag

SEQ ID NO: 277088 - RNA, 32 nt, Homo Sapiens
acagcagacugccgguacgcgcggccggggcg

SEQ ID NO: 277089 - RNA, 32 nt, Homo Sapiens
cucggagcagugcagguuucguuauccugugu

SEQ ID NO: 277090 - RNA, 32 nt, Homo Sapiens
caaacaaguuuuugaccuuugagccaacccac

SEQ ID NO: 277091 - RNA, 32 nt, Homo Sapiens
gggugucgaucuagaaacaauuuuacagaacu

SEQ ID NO: 277092 - RNA, 32 nt, Homo Sapiens
agcccauagucagcagcagcucugagccagau

SEQ ID NO: 277093 - RNA, 32 nt, Homo Sapiens
auuugagguucaaaaugaccugcuugaaacuu

SEQ ID NO: 277094 - RNA, 32 nt, Homo Sapiens
gaaaggcaaauacauuuccauuuuucugucuu

SEQ ID NO: 277095 - RNA, 32 nt, Homo Sapiens
gcgucgaguccuguccuguuggguagcggaag

SEQ ID NO: 277096 - RNA, 32 nt, Homo Sapiens
accuccuggugcccuaucccgcaaaaugggcu

SEQ ID NO: 277097 - RNA, 32 nt, Homo Sapiens
uccuaccacacccaccuuucccggcccaagcc

SEQ ID NO: 277098 - RNA, 32 nt, Homo Sapiens
acuaaagucugcuauuuauggaaacuaacuuu

SEQ ID NO: 277099 - RNA, 32 nt, Homo Sapiens
ggcccggcggcucuggccggccguccaguccg

SEQ ID NO: 277100 - RNA, 32 nt, Homo Sapiens
ggguuggggagccagggcucauucuaaggccc

SEQ ID NO: 277101 - RNA, 32 nt, Homo Sapiens
acaauuuucuuauacuuugaucugucuuuuau

SEQ ID NO: 277102 - RNA, 32 nt, Homo Sapiens
uuacguucaccucggugucugcagcacccucc

SEQ ID NO: 277103 - RNA, 32 nt, Homo Sapiens
uaugugaacaaugaugaguccagggcagcagc

SEQ ID NO: 277104 - RNA, 32 nt, Homo Sapiens
aagaaggauuuggcauuuucucuucuugaccc

SEQ ID NO: 277105 - RNA, 32 nt, Homo Sapiens
uauacacccagcuccaugccagcccuucaugu

SEQ ID NO: 277106 - RNA, 32 nt, Homo Sapiens
aaaugaugaugaugauaaaaaccacgacccaa

SEQ ID NO: 277107 - RNA, 32 nt, Homo Sapiens
uugcuuucucuacgaugcuacaaaagaaauuc

SEQ ID NO: 277108 - RNA, 32 nt, Homo Sapiens
ugcccggcucaccgcccccuccccugcagccc

SEQ ID NO: 277109 - RNA, 32 nt, Homo Sapiens
ggccugcacaggggugggaggggggugcuucu

SEQ ID NO: 277110 - RNA, 32 nt, Homo Sapiens
aaccuccaaacacagagacggaaccugcaagu

SEQ ID NO: 277111 - RNA, 32 nt, Homo Sapiens
aggaggaggaggagggcuagucaagccccuau

SEQ ID NO: 277112 - RNA, 32 nt, Homo Sapiens
uccgaguucugcgcccucgagauccagcgcau

SEQ ID NO: 277113 - RNA, 32 nt, Homo Sapiens
agcacaccccucaggaagcuguggaggcugga

SEQ ID NO: 277114 - RNA, 32 nt, Homo Sapiens
cuuuccuuuuucuuccccauuuugccaucugu

SEQ ID NO: 277115 - RNA, 30 nt, Homo Sapiens
aguggaucacuugccaaaugcuuuagauga

SEQ ID NO: 277116 - RNA, 32 nt, Homo Sapiens
gugcauaaguuuacauguacuaacuuauuuug

SEQ ID NO: 277117 - RNA, 32 nt, Homo Sapiens
uauugucuggggauuguugggacagguuuugg

SEQ ID NO: 277118 - RNA, 32 nt, Homo Sapiens
caaagucaccuaguuauacaaacaauugucag

SEQ ID NO: 277119 - RNA, 32 nt, Homo Sapiens
gugaaggaaugaauuuacgagaaccugcauga

SEQ ID NO: 277120 - RNA, 32 nt, Homo Sapiens
uuuauccuaguauuuuucuuuaccugaaggag

SEQ ID NO: 277121 - RNA, 32 nt, Homo Sapiens
aaaguagcaucuuggugacuaaggugacuuug

SEQ ID NO: 277122 - RNA, 32 nt, Homo Sapiens
gggagccggccgcccucggucugguguaagca

SEQ ID NO: 277123 - RNA, 32 nt, Homo Sapiens
gugggugaagcacuucggcucuggaguuacag

SEQ ID NO: 277124 - RNA, 32 nt, Homo Sapiens
ccggugaaauaccacuacucugaucguuuuuu

SEQ ID NO: 277125 - RNA, 32 nt, Homo Sapiens
cuuucuuagugccuguguggauuuuugugaaa

SEQ ID NO: 277126 - RNA, 32 nt, Homo Sapiens
gacauauuuaaaaaccauuaaaacacugucuc

SEQ ID NO: 277127 - RNA, 32 nt, Homo Sapiens
agggaaaucccggcccagcuuuccacaggcau

SEQ ID NO: 277128 - RNA, 32 nt, Homo Sapiens
cagaccccuaugccuggcacguuggggugaga

SEQ ID NO: 277129 - RNA, 32 nt, Homo Sapiens
gacgcgccccgcccgcuuugcagacuucgggg

SEQ ID NO: 277130 - RNA, 32 nt, Homo Sapiens
auuuauuugguggcagaauguuugccuaggua

SEQ ID NO: 277131 - RNA, 32 nt, Homo Sapiens
cucucuuauuuucaguguauuugaaugaagca

SEQ ID NO: 277132 - RNA, 32 nt, Homo Sapiens
uaaaucaaaugaaaggugacauugccagaaac

SEQ ID NO: 277133 - RNA, 32 nt, Homo Sapiens
aguggcucuuuuuccuucucaaacacuuuacc

SEQ ID NO: 277134 - RNA, 32 nt, Homo Sapiens
caccuucccccaccccaucaaccccguggccu

SEQ ID NO: 277135 - RNA, 32 nt, Homo Sapiens
uugguacaaaaauaaauuuauaugaaaaccug

SEQ ID NO: 277136 - RNA, 32 nt, Homo Sapiens
ugagaauauauucguaaaauaggagcacauuu

SEQ ID NO: 277137 - RNA, 32 nt, Homo Sapiens
ggauaauuugaaaguacaauaguugguuuccc

SEQ ID NO: 277138 - RNA, 32 nt, Homo Sapiens
uccccaaauggcagucugauggacugcggguu

SEQ ID NO: 277139 - RNA, 28 nt, Homo Sapiens
gugaugaaaaggcagcauuugaauacuc

SEQ ID NO: 277140 - RNA, 32 nt, Homo Sapiens
cccauugucgccggcguccggcgcgcagcccc

SEQ ID NO: 277141 - RNA, 32 nt, Homo Sapiens
gacugaaacuucuauuugugugaauauauuca

SEQ ID NO: 277142 - RNA, 32 nt, Homo Sapiens
caaacacuagcucuguauuaauccccaucauu

SEQ ID NO: 277143 - RNA, 32 nt, Homo Sapiens
agccgggcaugguggcacgugccuguaauccc

SEQ ID NO: 277144 - RNA, 32 nt, Homo Sapiens
caccucucaggagaagccagaggcccuggcca

SEQ ID NO: 277145 - RNA, 32 nt, Homo Sapiens
ugcaguaugaaaucguauuguaauuuucuugc

SEQ ID NO: 277146 - RNA, 32 nt, Homo Sapiens
uucccggcugcccucccuccccagcuuacacc

SEQ ID NO: 277147 - RNA, 32 nt, Homo Sapiens
aaucagaaguuagguuuuucugauucaggaac

SEQ ID NO: 277148 - RNA, 32 nt, Homo Sapiens
ugugaaggaaaugugcuccuucucagcucacu

SEQ ID NO: 277149 - RNA, 32 nt, Homo Sapiens
aaaaugaaaaagacaagauuuaugagaaauau

SEQ ID NO: 277150 - RNA, 32 nt, Homo Sapiens
gacccuccauucucugccaagaggcauacucu

SEQ ID NO: 277151 - RNA, 32 nt, Homo Sapiens
gagcaagucccggcccugcccucagcgagccc

SEQ ID NO: 277152 - RNA, 32 nt, Homo Sapiens
auucuccuuucugcccauaaagggccuuggag

SEQ ID NO: 277153 - RNA, 32 nt, Homo Sapiens
acaauuugaaagcuauuggacuagagguucuc

SEQ ID NO: 277154 - RNA, 32 nt, Homo Sapiens
ugugcccucagguggggcuuacccccucguau

SEQ ID NO: 277155 - RNA, 32 nt, Homo Sapiens
aggcagcaccucacgcuggagcuggagugcga

SEQ ID NO: 277156 - RNA, 32 nt, Homo Sapiens
ccccccacccgccggcccggcgcccaccugag

SEQ ID NO: 277157 - RNA, 32 nt, Homo Sapiens
uuugagguuuugcugaagauauuccugaagaa

SEQ ID NO: 277158 - RNA, 32 nt, Homo Sapiens
uugagaauguauuuaucugaagaucaaaacaa

SEQ ID NO: 277159 - RNA, 32 nt, Homo Sapiens
uccgggccgcgucuguggggucgagacugcgc

SEQ ID NO: 277160 - RNA, 32 nt, Homo Sapiens
guaucuagaggugguucugcuaauucacacaa

SEQ ID NO: 277161 - RNA, 32 nt, Homo Sapiens
agacugaugaaaaguaaaauggacuacuuuug

SEQ ID NO: 277162 - RNA, 32 nt, Homo Sapiens
cacgcggcgcgguaggcgagcgccgaggccca

SEQ ID NO: 277163 - RNA, 32 nt, Homo Sapiens
acaauucugacuaugaaaaaugucucuuucag

SEQ ID NO: 277164 - RNA, 32 nt, Homo Sapiens
gcucugugcuucugccuuuaaggccuguucuc

SEQ ID NO: 277165 - RNA, 32 nt, Homo Sapiens
ggacauauaugauaaaugaaaauuucucagaa

SEQ ID NO: 277166 - RNA, 32 nt, Homo Sapiens
ggagcugccucgggcuggguugcuuggucaua

SEQ ID NO: 277167 - RNA, 32 nt, Homo Sapiens
ggcggggcucuuuccccguuucgccucagcua

SEQ ID NO: 277168 - RNA, 32 nt, Homo Sapiens
gcagaucuccaaaguguuccuaauggagaagg

SEQ ID NO: 277169 - RNA, 32 nt, Homo Sapiens
uugacauaugagaggucuuaugcuuaaaucug

SEQ ID NO: 277170 - RNA, 32 nt, Homo Sapiens
cggccgccccugacagcuccgggagcaucaag

SEQ ID NO: 277171 - RNA, 32 nt, Homo Sapiens
ccucggcccucccugcagccuuaacauucucu

SEQ ID NO: 277172 - RNA, 32 nt, Homo Sapiens
cuugcuaugugaaacaguauggaccaaucuca

SEQ ID NO: 277173 - RNA, 32 nt, Homo Sapiens
ugcaaguuugcaaggauuuuguagguccuguu

SEQ ID NO: 277174 - RNA, 32 nt, Homo Sapiens
cugcccccacccaagguggguaucugggaucc

SEQ ID NO: 277175 - RNA, 30 nt, Homo Sapiens
cugcagcgcgcgcauggcuagcacggcuuc

SEQ ID NO: 277176 - RNA, 32 nt, Homo Sapiens
agaauuuccuuccugaaucuccaugcucauau

SEQ ID NO: 277177 - RNA, 32 nt, Homo Sapiens
cuugcacgucaucauagacuucauacuagaga

SEQ ID NO: 277178 - RNA, 32 nt, Homo Sapiens
ccucugucagugccguguacguguuuggucaa

SEQ ID NO: 277179 - RNA, 32 nt, Homo Sapiens
guuaacuuucagaagagaugggcuuguuuucu

SEQ ID NO: 277180 - RNA, 32 nt, Homo Sapiens
gagggcaaaaauuuuggucauagcauucacuu

SEQ ID NO: 277181 - RNA, 31 nt, Homo Sapiens
aaagaauggggguuuacaggaguccaggagg

SEQ ID NO: 277182 - RNA, 32 nt, Homo Sapiens
cgcgcuccgcggcugcaccggccccaugagcc

SEQ ID NO: 277183 - RNA, 32 nt, Homo Sapiens
ucaaguuucuauuucuagaaaacauuuuuuag

SEQ ID NO: 277184 - RNA, 32 nt, Homo Sapiens
cucagagcccucaugcuguugaggcuaaaggg

SEQ ID NO: 277185 - RNA, 31 nt, Homo Sapiens
ccucgcggugccaugcugccccggcggcggc

SEQ ID NO: 277186 - RNA, 32 nt, Homo Sapiens
cuacuuccauuaauuguaaaucuaauuuguuc

SEQ ID NO: 277187 - RNA, 32 nt, Homo Sapiens
cuucuccuccucauccucccagccccacccua

SEQ ID NO: 277188 - RNA, 32 nt, Homo Sapiens
aggcggcagggaguuaaggcggugccuuucca

SEQ ID NO: 277189 - RNA, 32 nt, Homo Sapiens
guuuauucacauuaaccuuuauucuaucugga

SEQ ID NO: 277190 - RNA, 32 nt, Homo Sapiens
guagaagauuuagaaauugaagcaaagagaag

SEQ ID NO: 277191 - RNA, 32 nt, Homo Sapiens
aggggggaggggguggggagggggcccacaag

SEQ ID NO: 277192 - RNA, 32 nt, Homo Sapiens
ccugcgggaggcggcaugcucccgcggaggcu

SEQ ID NO: 277193 - RNA, 32 nt, Homo Sapiens
uaggagggggcggccugagugccguagccgag

SEQ ID NO: 277194 - RNA, 32 nt, Homo Sapiens
caaguugauagaaaacaaaauucugaauaucu

SEQ ID NO: 277195 - RNA, 32 nt, Homo Sapiens
cagcuucggaagcuuguguccuuugaccagga

SEQ ID NO: 277196 - RNA, 32 nt, Homo Sapiens
ggcacucugcuguguucuuugcaccgcgguca

SEQ ID NO: 277197 - RNA, 32 nt, Homo Sapiens
augcauuagcaaauggagcaucaguagguagc

SEQ ID NO: 277198 - RNA, 32 nt, Homo Sapiens
cccaggaucgcaagagccauguagaagcugca

SEQ ID NO: 277199 - RNA, 32 nt, Homo Sapiens
ccccuccauagagagccgccuuucucggaacu

SEQ ID NO: 277200 - RNA, 32 nt, Homo Sapiens
uuuauucagcuucauuugugucaaugggcaau

SEQ ID NO: 277201 - RNA, 32 nt, Homo Sapiens
agcuccucugcccacccuggcucccaaaaccc

SEQ ID NO: 277202 - RNA, 32 nt, Homo Sapiens
ucccagaguauuuggaaagguucuaaguacaa

SEQ ID NO: 277203 - RNA, 32 nt, Homo Sapiens
guacauauuauauguaaguacucuguuaaaua

SEQ ID NO: 277204 - RNA, 32 nt, Homo Sapiens
cugcagccugaguuuuuaaaaaacagaaaaug

SEQ ID NO: 277205 - RNA, 32 nt, Homo Sapiens
ugcgcucagggccaugcugaggccugggccgc

SEQ ID NO: 277206 - RNA, 32 nt, Homo Sapiens
cagauuuaauuaaaauuauacuuaguaauugc

SEQ ID NO: 277207 - RNA, 32 nt, Homo Sapiens
acaugacucucccccauuucccaggucucugg

SEQ ID NO: 277208 - RNA, 32 nt, Homo Sapiens
ggccaggcgugguggcucacgccuguaauccc

SEQ ID NO: 277209 - RNA, 32 nt, Homo Sapiens
ggccaggcgcgguggcucacgccugcaauccc

SEQ ID NO: 277210 - RNA, 32 nt, Homo Sapiens
ggccaggcgcgguggcuuacgccuguaauccc

SEQ ID NO: 277211 - RNA, 32 nt, Homo Sapiens
ccgagcggcaaggcagcgauggcgauuuuuag

SEQ ID NO: 277212 - RNA, 32 nt, Homo Sapiens
aguauuuguuauauauuugaaguuaugcaugg

SEQ ID NO: 277213 - RNA, 32 nt, Homo Sapiens
aaaucagguuuuauacauagccauuguauauu

SEQ ID NO: 277214 - RNA, 32 nt, Homo Sapiens
agagguagacauugcaaguguugacucuguga

SEQ ID NO: 277215 - RNA, 32 nt, Homo Sapiens
uaacaacugaauucucuuucucucucacucug

SEQ ID NO: 277216 - RNA, 32 nt, Homo Sapiens
ugaggaggcggcgguggcucccggggcguuug

SEQ ID NO: 277217 - RNA, 32 nt, Homo Sapiens
ucuuugcccucccuagucauguuuguccucuu

SEQ ID NO: 277218 - RNA, 32 nt, Homo Sapiens
aagcuguuauuuaccuuaacauguucuugagg

SEQ ID NO: 277219 - RNA, 32 nt, Homo Sapiens
accccacugcugucauugucacaggaugccau

SEQ ID NO: 277220 - RNA, 32 nt, Homo Sapiens
uucuacauugcuuuuucuuuuauuaucugugc

SEQ ID NO: 277221 - RNA, 32 nt, Homo Sapiens
cccauaaccugaagaaugaucaccuuauuccu

SEQ ID NO: 277222 - RNA, 32 nt, Homo Sapiens
ugcgggaugccggggcggccaggcuggcccaa

SEQ ID NO: 277223 - RNA, 32 nt, Homo Sapiens
uuugacucauccuggauuucuaacucuucuuc

SEQ ID NO: 277224 - RNA, 32 nt, Homo Sapiens
gcccucugaugugccagccaccauuccucucc

SEQ ID NO: 277225 - RNA, 32 nt, Homo Sapiens
cccacauuguaaaguuuguacaauuuguccug

SEQ ID NO: 277226 - RNA, 32 nt, Homo Sapiens
cuuauuuuauaaauaaugugauguagauguaa

SEQ ID NO: 277227 - RNA, 32 nt, Homo Sapiens
acccucacggauaggccugggugcuggcugcc

SEQ ID NO: 277228 - RNA, 32 nt, Homo Sapiens
cauguuguaguacauucuccaagaugcagccc

SEQ ID NO: 277229 - RNA, 32 nt, Homo Sapiens
uuuaaaguauucauugaguuuaccaaaaguua

SEQ ID NO: 277230 - RNA, 32 nt, Homo Sapiens
cucauucuauaagucuugcuagguaguuuauu

SEQ ID NO: 277231 - RNA, 32 nt, Homo Sapiens
cccucccccgagagggcugcgcaggcgggaag

SEQ ID NO: 277232 - RNA, 32 nt, Homo Sapiens
auguaucuuuauuuucauauuguacaguaauu

SEQ ID NO: 277233 - RNA, 32 nt, Homo Sapiens
ccgcaggaggaaauggcggggagguggcauuc

SEQ ID NO: 277234 - RNA, 32 nt, Homo Sapiens
ugaggucccgaggagggcaggggcaggucccg

SEQ ID NO: 277235 - RNA, 32 nt, Homo Sapiens
cuggcccggcugcaggccuuauaugccccauc

SEQ ID NO: 277236 - RNA, 32 nt, Homo Sapiens
aaccggcagcccagccccgggucccgguuccc

SEQ ID NO: 277237 - RNA, 32 nt, Homo Sapiens
ugggguagaggguggggcccgcggggcaguuc

SEQ ID NO: 277238 - RNA, 32 nt, Homo Sapiens
gcuccggaaagcugcggcccagcgcggacuag

SEQ ID NO: 277239 - RNA, 32 nt, Homo Sapiens
cccaccuccagccgggacccaggcguccgggc

SEQ ID NO: 277240 - RNA, 32 nt, Homo Sapiens
auaaugcagaaagaggcagaugaggccaaacu

SEQ ID NO: 277241 - RNA, 32 nt, Homo Sapiens
uguuuacaucuggauuuuccuguaauaaacuu

SEQ ID NO: 277242 - RNA, 32 nt, Homo Sapiens
aaggaagcgccugaagggucgugaggcugggg

SEQ ID NO: 277243 - RNA, 32 nt, Homo Sapiens
ccugcggccacagacugcgaccgcgauugcag

SEQ ID NO: 277244 - RNA, 31 nt, Homo Sapiens
ccccuccuccgccggcagccccgcgcugagc

SEQ ID NO: 277245 - RNA, 32 nt, Homo Sapiens
aaauuuacugugaaaaagcauuuuaaaaagaa

SEQ ID NO: 277246 - RNA, 32 nt, Homo Sapiens
gugguagggauggaaaaggauucuucacagag

SEQ ID NO: 277247 - RNA, 32 nt, Homo Sapiens
ugauuucuuuugcuauuucauugcucuagcua

SEQ ID NO: 277248 - RNA, 32 nt, Homo Sapiens
gggagccugggauggugcaaucaucaauuacg

SEQ ID NO: 277249 - RNA, 32 nt, Homo Sapiens
uggcccugccagcugguaguccaucagcacaa

SEQ ID NO: 277250 - RNA, 32 nt, Homo Sapiens
uguguaaauaaauguuuacaauuuuauaugaa

SEQ ID NO: 277251 - RNA, 32 nt, Homo Sapiens
uuuuucuucuugguucccaucccuuuaaaaag

SEQ ID NO: 277252 - RNA, 32 nt, Homo Sapiens
ucaucugggaaaaggaaggaaauugcaggagg

SEQ ID NO: 277253 - RNA, 32 nt, Homo Sapiens
aagucagguugacuagcaaggagucugcuucu

SEQ ID NO: 277254 - RNA, 32 nt, Homo Sapiens
ggucucgcuuccucgggaacucuaugaauggc

SEQ ID NO: 277255 - RNA, 32 nt, Homo Sapiens
aguagaucuccuccuccuucaugcagccagga

SEQ ID NO: 277256 - RNA, 32 nt, Homo Sapiens
gcugcgcugcuggggggcgcgggcgaggaugg

SEQ ID NO: 277257 - RNA, 32 nt, Homo Sapiens
gaccagcucugugaucagaaggaaauuggguc

SEQ ID NO: 277258 - RNA, 32 nt, Homo Sapiens
gaauauuggacauuuuaaacacuuacaaauaa

SEQ ID NO: 277259 - RNA, 32 nt, Homo Sapiens
gacucggagaggggacaaaaccagagaaauug

SEQ ID NO: 277260 - RNA, 32 nt, Homo Sapiens
aucuacacagaaaagugacaagggcagagaug

SEQ ID NO: 277261 - RNA, 32 nt, Homo Sapiens
ugucuccuccacaugcgguccacacaucagua

SEQ ID NO: 277262 - RNA, 32 nt, Homo Sapiens
ggaaaauugcuuaauggauuuuuauacucuau

SEQ ID NO: 277263 - RNA, 32 nt, Homo Sapiens
gcacggcgggaaccggcagccggagcaguccc

SEQ ID NO: 277264 - RNA, 32 nt, Homo Sapiens
ggucauucaucaacaaauauauuuauuggaga

SEQ ID NO: 277265 - RNA, 32 nt, Homo Sapiens
gcgcugggauuauaggucugugccgccucccu

SEQ ID NO: 277266 - RNA, 32 nt, Homo Sapiens
ggugaguggcggggcggccagggcuagagugg

SEQ ID NO: 277267 - RNA, 32 nt, Homo Sapiens
ccgggcccgucgggaggcgccauggcucggau

SEQ ID NO: 277268 - RNA, 32 nt, Homo Sapiens
ucugauuuucuuuuucuuuugcaagucuaaau

SEQ ID NO: 277269 - RNA, 32 nt, Homo Sapiens
uuucaaucauagagcaacaacaaaaauaaugc

SEQ ID NO: 277270 - RNA, 31 nt, Homo Sapiens
accgggcggcacuggccagcgccagcccucg

SEQ ID NO: 277271 - RNA, 32 nt, Homo Sapiens
acacccccaaaauaagacuuucauucacauuc

SEQ ID NO: 277272 - RNA, 32 nt, Homo Sapiens
cggcccuggccuuugaggagaagugcucuaca

SEQ ID NO: 277273 - RNA, 32 nt, Homo Sapiens
uuacugauuaaaaugucaauguaaucuaaaaa

SEQ ID NO: 277274 - RNA, 32 nt, Homo Sapiens
uucaugaaaccaaaguaauugauucaacaaua

SEQ ID NO: 277275 - RNA, 32 nt, Homo Sapiens
cuuuuuuucuauuuauugaacgguguauuaca

SEQ ID NO: 277276 - RNA, 32 nt, Homo Sapiens
aaugaaacaacagaaguacaaaaaagaauauc

SEQ ID NO: 277277 - RNA, 32 nt, Homo Sapiens
ccugcugcuuugcauucacuuccuuggccaga

SEQ ID NO: 277278 - RNA, 32 nt, Homo Sapiens
uacaugcucuaguaacucugguagucacugug

SEQ ID NO: 277279 - RNA, 32 nt, Homo Sapiens
gcaggcuccgccuccuggguucacgccauucu

SEQ ID NO: 277280 - RNA, 32 nt, Homo Sapiens
uaacaaucauauuugucauuguuguuuucugc

SEQ ID NO: 277281 - RNA, 32 nt, Homo Sapiens
auagcagaucucgcucucguacauagaugauu

SEQ ID NO: 277282 - RNA, 32 nt, Homo Sapiens
acucuuuguagcaaaauucuuaaguauguuau

SEQ ID NO: 277283 - RNA, 32 nt, Homo Sapiens
uguauguuuggaguuccaaaucugcaaguggc

SEQ ID NO: 277284 - RNA, 32 nt, Homo Sapiens
ccuuagccaaaauaagguuggguuuucuaaaa

SEQ ID NO: 277285 - RNA, 32 nt, Homo Sapiens
gcaugaguacuuuuaaaaaauaugaauuuaau

SEQ ID NO: 277286 - RNA, 32 nt, Homo Sapiens
gccaagggaaaggggugcuuuuauagaggcua

SEQ ID NO: 277287 - RNA, 32 nt, Homo Sapiens
uuccucaccuccuguuuggcccuggagaaugu

SEQ ID NO: 277288 - RNA, 32 nt, Homo Sapiens
cuccuuuguaaacguccaaauaaaauacagau

SEQ ID NO: 277289 - RNA, 32 nt, Homo Sapiens
caaauagugacaucacaaacauaauguccucu

SEQ ID NO: 277290 - RNA, 32 nt, Homo Sapiens
agacaagcauuucugugagcugccccauguga

SEQ ID NO: 277291 - RNA, 32 nt, Homo Sapiens
gaaauuuuggaaggguucuuugaaauagcagc

SEQ ID NO: 277292 - RNA, 32 nt, Homo Sapiens
cccagugugcgcccggccggcccuggggguuc

SEQ ID NO: 277293 - RNA, 32 nt, Homo Sapiens
caauauaauuauguuucugccuaugauguuga

SEQ ID NO: 277294 - RNA, 32 nt, Homo Sapiens
cuaccacagcuauaauugaggcagcuaacguc

SEQ ID NO: 277295 - RNA, 32 nt, Homo Sapiens
uccaggacugguuuuccaguacaucuuuaaac

SEQ ID NO: 277296 - RNA, 32 nt, Homo Sapiens
gccaagaguuugaagcuggugcuugagguugg

SEQ ID NO: 277297 - RNA, 32 nt, Homo Sapiens
uguauuuaguuauaauuuuuguaucuuacaac

SEQ ID NO: 277298 - RNA, 32 nt, Homo Sapiens
agcuacaugcaccucuccuccccucagccacc

SEQ ID NO: 277299 - RNA, 32 nt, Homo Sapiens
uaaugucuauuggauuucuuccaaagugguua

SEQ ID NO: 277300 - RNA, 32 nt, Homo Sapiens
aauuucacguugaauuaagaugauuuggaaga

SEQ ID NO: 277301 - RNA, 31 nt, Homo Sapiens
ugcuuauagaccuaaaguucagguacuuauu

SEQ ID NO: 277302 - RNA, 32 nt, Homo Sapiens
uauaaaaaugucucagagcaaccgggagcugg

SEQ ID NO: 277303 - RNA, 32 nt, Homo Sapiens
ugguuaagggaugccagaagggccguugguga

SEQ ID NO: 277304 - RNA, 32 nt, Homo Sapiens
uggcguuguuuaaggucaacuccaccaaauac

SEQ ID NO: 277305 - RNA, 32 nt, Homo Sapiens
ggcaaguuuuucagacaucauucauaacuugc

SEQ ID NO: 277306 - RNA, 32 nt, Homo Sapiens
acgaggaggggcggggcgauagggauccagag

SEQ ID NO: 277307 - RNA, 32 nt, Homo Sapiens
ucuccugcuuucugccugugacuagcgccguc

SEQ ID NO: 277308 - RNA, 32 nt, Homo Sapiens
uggccugugccagcaccacagccggucagagg

SEQ ID NO: 277309 - RNA, 32 nt, Homo Sapiens
uuaaauuuuuaaaauaucuuguaguaacucuu

SEQ ID NO: 277310 - RNA, 32 nt, Homo Sapiens
ccugugugcagggcagagagugcggggggcga

SEQ ID NO: 277311 - RNA, 32 nt, Homo Sapiens
agccucuggaugcauuuccauuucucuccuua

SEQ ID NO: 277312 - RNA, 32 nt, Homo Sapiens
uauuuuuuacuuuucuaauaaacauguuuguu

SEQ ID NO: 277313 - RNA, 32 nt, Homo Sapiens
auugcuguaaucacuaauuucuauucaacauu

SEQ ID NO: 277314 - RNA, 32 nt, Homo Sapiens
cagccauaaaauguuaccaccuuaagagaacc

SEQ ID NO: 277315 - RNA, 32 nt, Homo Sapiens
uuauuaucaaaaaagaguaguguaugguuggc

SEQ ID NO: 277316 - RNA, 32 nt, Homo Sapiens
gcuguguauuucuuuucagggauuuuucuacc

SEQ ID NO: 277317 - RNA, 32 nt, Homo Sapiens
acccccgccccggcccgauccucacucgccgc

SEQ ID NO: 277318 - RNA, 32 nt, Homo Sapiens
aaauaauuacuggaucggauuaucauaugaug

SEQ ID NO: 277319 - RNA, 31 nt, Homo Sapiens
gcugucugcugcgucucaggagucugugagc

SEQ ID NO: 277320 - RNA, 32 nt, Homo Sapiens
cagcacugugcaggacguggaccagcuggagc

SEQ ID NO: 277321 - RNA, 32 nt, Homo Sapiens
ccaggaaugcugcgcugcugcugcugcgcacc

SEQ ID NO: 277322 - RNA, 32 nt, Homo Sapiens
uaguuuuguacauggaucucauuuuacaagag

SEQ ID NO: 277323 - RNA, 32 nt, Homo Sapiens
uucuuggacaccuggccagugcugaagggcug

SEQ ID NO: 277324 - RNA, 32 nt, Homo Sapiens
cccaccgcuuugcacauggggugcagggaagu

SEQ ID NO: 277325 - RNA, 32 nt, Homo Sapiens
guuagggucugggagaacaggugggaggcuuu

SEQ ID NO: 277326 - RNA, 30 nt, Homo Sapiens
uuccagcccugcuuuagcgugggugccaug

SEQ ID NO: 277327 - RNA, 32 nt, Homo Sapiens
cagguuucuguuaagaucaccaaguagcugug

SEQ ID NO: 277328 - RNA, 32 nt, Homo Sapiens
aauuuaaagggccuguuaauucuuauauuuuu

SEQ ID NO: 277329 - RNA, 32 nt, Homo Sapiens
augaaacugcuauauuugaaugcaguuguuca

SEQ ID NO: 277330 - RNA, 32 nt, Homo Sapiens
uaaaagguuuugaaacagcugcauccuucugg

SEQ ID NO: 277331 - RNA, 32 nt, Homo Sapiens
guuaagaguacaauugcaaaucuuaucuauau

SEQ ID NO: 277332 - RNA, 32 nt, Homo Sapiens
uugggcaggaggaaaaggcuuggugucugcgg

SEQ ID NO: 277333 - RNA, 32 nt, Homo Sapiens
cagcugcuaacccuugcaccagcccuuguggg

SEQ ID NO: 277334 - RNA, 32 nt, Homo Sapiens
aauauguugaaccauccuugcaucccagaaau

SEQ ID NO: 277335 - RNA, 32 nt, Homo Sapiens
aagcaguuucuaaaccaaaaaaugacauguug

SEQ ID NO: 277336 - RNA, 30 nt, Homo Sapiens
gucugaguuucugcugcagauagugguguu

SEQ ID NO: 277337 - RNA, 32 nt, Homo Sapiens
uggagauucuugacaagugcugagugaaagau

SEQ ID NO: 277338 - RNA, 32 nt, Homo Sapiens
cugucugacuugauaacuccagugccaguaua

SEQ ID NO: 277339 - RNA, 32 nt, Homo Sapiens
aagagguucuuugugauucacuuacaguacug

SEQ ID NO: 277340 - RNA, 32 nt, Homo Sapiens
aacaauucacuuuaaacuuuuauuaccacagu

SEQ ID NO: 277341 - RNA, 32 nt, Homo Sapiens
cucgcacccagcuguagagccccauguugugu

SEQ ID NO: 277342 - RNA, 32 nt, Homo Sapiens
cucuacauaacauacugaaacuauuuauauuu

SEQ ID NO: 277343 - RNA, 32 nt, Homo Sapiens
caccaaggcgggcgcucuggcccucccuuccu

SEQ ID NO: 277344 - RNA, 32 nt, Homo Sapiens
agcuguggugggcugcuccccggagcugggcu

SEQ ID NO: 277345 - RNA, 32 nt, Homo Sapiens
ccuguguuugacugagguuuauuaagcucuuu

SEQ ID NO: 277346 - RNA, 32 nt, Homo Sapiens
uagggguagcccacggccccagccgggggucu

SEQ ID NO: 277347 - RNA, 32 nt, Homo Sapiens
acugcaggagcugaggagcugcacagcaaggu

SEQ ID NO: 277348 - RNA, 29 nt, Homo Sapiens
ugaaauguagauuuuuauuuucuacuuuu

SEQ ID NO: 277349 - RNA, 32 nt, Homo Sapiens
uggugaguagccaaguggcaaucuuaugaaac

SEQ ID NO: 277350 - RNA, 32 nt, Homo Sapiens
cuguuccugaccagccgaagugccaggcaggg

SEQ ID NO: 277351 - RNA, 32 nt, Homo Sapiens
cuagggaccccucgccccagccucauucccca

SEQ ID NO: 277352 - RNA, 32 nt, Homo Sapiens
uaagcgcacggaugaauggagcuuacaagauc

SEQ ID NO: 277353 - RNA, 32 nt, Homo Sapiens
gcaaagagagucaggcuugguggcuggggugg

SEQ ID NO: 277354 - RNA, 32 nt, Homo Sapiens
caggagacacgaggagggccugcccggaaguc

SEQ ID NO: 277355 - RNA, 32 nt, Homo Sapiens
cuucaugcaucuguaauuuaauuuuaaguaua

SEQ ID NO: 277356 - RNA, 32 nt, Homo Sapiens
uuauguaucuucugcuguccccuaaacucccc

SEQ ID NO: 277357 - RNA, 32 nt, Homo Sapiens
uaugaauuuccagaaacagaugaugaagaaga

SEQ ID NO: 277358 - RNA, 32 nt, Homo Sapiens
uagcucuauggcucugcggagucccagcagag

SEQ ID NO: 277359 - RNA, 32 nt, Homo Sapiens
agccaagauugugccacugcacuccagccugg

SEQ ID NO: 277360 - RNA, 32 nt, Homo Sapiens
agccaagauugugccauugcacucuagccugg

SEQ ID NO: 277361 - RNA, 32 nt, Homo Sapiens
agccgagauugugccacugcgcuccagccugg

SEQ ID NO: 277362 - RNA, 32 nt, Homo Sapiens
guccuuacaagcuuuucuuaaaacgucaauga

SEQ ID NO: 277363 - RNA, 32 nt, Homo Sapiens
cugaguccggagcuaccaaaaccauccuccug

SEQ ID NO: 277364 - RNA, 32 nt, Homo Sapiens
guuugcgguguuggaacaugguuccuuuggca

SEQ ID NO: 277365 - RNA, 32 nt, Homo Sapiens
agacuacuucguaaguaguaugauuauuugaa

SEQ ID NO: 277366 - RNA, 32 nt, Homo Sapiens
gacuuugguggcaagaggagcuggcggagccc

SEQ ID NO: 277367 - RNA, 32 nt, Homo Sapiens
ucagacuugauuuuugucagcuaauuacauaa

SEQ ID NO: 277368 - RNA, 32 nt, Homo Sapiens
cgugagcgccgcccacaagggcugggagcaga

SEQ ID NO: 277369 - RNA, 32 nt, Homo Sapiens
guuugcugcgcgggcuuuuggagggggcggcc

SEQ ID NO: 277370 - RNA, 32 nt, Homo Sapiens
cugggccaggacucagagaaggugaaggagcu

SEQ ID NO: 277371 - RNA, 32 nt, Homo Sapiens
ugugaugccugccuguuacagaucacuucucc

SEQ ID NO: 277372 - RNA, 32 nt, Homo Sapiens
augaaaaaucauaucugacuaauuuugggacu

SEQ ID NO: 277373 - RNA, 30 nt, Homo Sapiens
uggccaccucuccucacccaucuuagaggc

SEQ ID NO: 277374 - RNA, 32 nt, Homo Sapiens
agggcacuggggauguacuuugaaaucaccga

SEQ ID NO: 277375 - RNA, 32 nt, Homo Sapiens
acagcuggccucuggacagagguaggcauagu

SEQ ID NO: 277376 - RNA, 32 nt, Homo Sapiens
auucucgccggcggccggcgcaauucugccuc

SEQ ID NO: 277377 - RNA, 32 nt, Homo Sapiens
gaauuccaguguuuuauuaagauguucaugaa

SEQ ID NO: 277378 - RNA, 32 nt, Homo Sapiens
acuaaaaguuuacaagaacaugcaguucaaug

SEQ ID NO: 277379 - RNA, 32 nt, Homo Sapiens
gaaaauucauauuugccaacuuuguuagcugc

SEQ ID NO: 277380 - RNA, 32 nt, Homo Sapiens
ccccaaauccggaagucaaaguucucaugguc

SEQ ID NO: 277381 - RNA, 30 nt, Homo Sapiens
cuagaagucucggggcgcggcagggagccc

SEQ ID NO: 277382 - RNA, 32 nt, Homo Sapiens
ccagagccagugccgcccccaaagcuguggaa

SEQ ID NO: 277383 - RNA, 32 nt, Homo Sapiens
cuccggggcuccugcucccaccccuccggccc

SEQ ID NO: 277384 - RNA, 32 nt, Homo Sapiens
gauuuuacaggaagguuaugccaaucuacuga

SEQ ID NO: 277385 - RNA, 32 nt, Homo Sapiens
ugauaucaugguguaaaaaacacacacauaca

SEQ ID NO: 277386 - RNA, 31 nt, Homo Sapiens
uuuacaaauugccccauucugaagaauuauu

SEQ ID NO: 277387 - RNA, 32 nt, Homo Sapiens
ugaauaggaaaauaaaucaugcuguauguaua

SEQ ID NO: 277388 - RNA, 32 nt, Homo Sapiens
gugagucaccuuucuucagaugauuuuggcau

SEQ ID NO: 277389 - RNA, 32 nt, Homo Sapiens
aagauugaacaaaauguuuucuguuugggcau

SEQ ID NO: 277390 - RNA, 32 nt, Homo Sapiens
gggugcugugcucucuggcgccccacagccug

SEQ ID NO: 277391 - RNA, 32 nt, Homo Sapiens
gugacuucuggugacauaguaauaaagugaag

SEQ ID NO: 277392 - RNA, 32 nt, Homo Sapiens
ugugaauauguaaaacaaaaccauuaucuuug

SEQ ID NO: 277393 - RNA, 32 nt, Homo Sapiens
ucugcccccaucccaacccagcccuuauuauu

SEQ ID NO: 277394 - RNA, 32 nt, Homo Sapiens
ucauucuggaccagcccaccuaucuccauuuc

SEQ ID NO: 277395 - RNA, 32 nt, Homo Sapiens
aaggacaacuggaaguaauuuaucauauaaag

SEQ ID NO: 277396 - RNA, 32 nt, Homo Sapiens
aagauguguugcaauugcaguaugaguuucag

SEQ ID NO: 277397 - RNA, 32 nt, Homo Sapiens
acgguuuaaccggagauuuugaggcuagggug

SEQ ID NO: 277398 - RNA, 32 nt, Homo Sapiens
ccgccggggccaccaaacagaagugcuucuga

SEQ ID NO: 277399 - RNA, 32 nt, Homo Sapiens
ucaucuuuuugguuggauaccuuugaacucca

SEQ ID NO: 277400 - RNA, 30 nt, Homo Sapiens
gaguggggaggugguaagaacaccugacaa

SEQ ID NO: 277401 - RNA, 32 nt, Homo Sapiens
ggacauguuuucugcccuuaagaaacucacag

SEQ ID NO: 277402 - RNA, 32 nt, Homo Sapiens
auuugacauuuuacugcuucuuucugucugug

SEQ ID NO: 277403 - RNA, 32 nt, Homo Sapiens
ccaaggaucaggaugagcaagaggaacuggau

SEQ ID NO: 277404 - RNA, 32 nt, Homo Sapiens
uuccuuggcgaguugagggaauuugccaccuu

SEQ ID NO: 277405 - RNA, 32 nt, Homo Sapiens
caugccagaaugggaaguugugacguugcagc

SEQ ID NO: 277406 - RNA, 32 nt, Homo Sapiens
cccuguaggagaaaagucuguguccugugaag

SEQ ID NO: 277407 - RNA, 32 nt, Homo Sapiens
ccugagcccucccagcauguccucacaugcuc

SEQ ID NO: 277408 - RNA, 32 nt, Homo Sapiens
acgguaguacacgggccuggugaggcaacagc

SEQ ID NO: 277409 - RNA, 32 nt, Homo Sapiens
ugaaccuuacugaaccacuugcagauuccaaa

SEQ ID NO: 277410 - RNA, 32 nt, Homo Sapiens
uucccuccacuccacccucuucugggauggcu

SEQ ID NO: 277411 - RNA, 32 nt, Homo Sapiens
uugggcagcuccggccaggccuuguaggaaaa

SEQ ID NO: 277412 - RNA, 32 nt, Homo Sapiens
gcuuuguugucugacaagggagaagguggcac

SEQ ID NO: 277413 - RNA, 32 nt, Homo Sapiens
gcugcucgcagggcuagguggagacacacuuc

SEQ ID NO: 277414 - RNA, 32 nt, Homo Sapiens
cccugaccugucagcuacaucuggauguaacu

SEQ ID NO: 277415 - RNA, 32 nt, Homo Sapiens
gggaaggucacuguggaauauagacccauaau

SEQ ID NO: 277416 - RNA, 32 nt, Homo Sapiens
ccaguaaggaauucauuuuuuauuacauugua

SEQ ID NO: 277417 - RNA, 32 nt, Homo Sapiens
aagugcaggaacaguuauucuaugagaacacu

SEQ ID NO: 277418 - RNA, 32 nt, Homo Sapiens
uuucuccuaaguuucaugcagaugaauauaag

SEQ ID NO: 277419 - RNA, 32 nt, Homo Sapiens
auuuauccacccaaaccccagacugagauacu

SEQ ID NO: 277420 - RNA, 32 nt, Homo Sapiens
uguggggcaguuggugggggcugggggaagag

SEQ ID NO: 277421 - RNA, 32 nt, Homo Sapiens
ggucagcuccucaggacccuggcagaaucaga

SEQ ID NO: 277422 - RNA, 30 nt, Homo Sapiens
cugggacgcuucgcucggcgcgcgcaggug

SEQ ID NO: 277423 - RNA, 32 nt, Homo Sapiens
aacucucauucauuuuaaaugacuuaccuuua

SEQ ID NO: 277424 - RNA, 32 nt, Homo Sapiens
aaaccuuuucccuucaugauaacauccauaga

SEQ ID NO: 277425 - RNA, 32 nt, Homo Sapiens
uggaggcugggucagaggggaguuaagggacu

SEQ ID NO: 277426 - RNA, 32 nt, Homo Sapiens
ucuggaacacgcugcuccccugggcagcuguu

SEQ ID NO: 277427 - RNA, 32 nt, Homo Sapiens
acuagugugacugucuucugagcacaguauua

SEQ ID NO: 277428 - RNA, 32 nt, Homo Sapiens
aauagaagcaacaaggcccuagcuggagacuc

SEQ ID NO: 277429 - RNA, 32 nt, Homo Sapiens
ggacugcgcggaggcgacugcagacguaucgg

SEQ ID NO: 277430 - RNA, 32 nt, Homo Sapiens
gaugcugugcaggcugcagagcgcgcacggcu

SEQ ID NO: 277431 - RNA, 32 nt, Homo Sapiens
guagcuuugauaaugccugggagauuccuugg

SEQ ID NO: 277432 - RNA, 32 nt, Homo Sapiens
ccugcaccaccucaccaagauggcuacuuugg

SEQ ID NO: 277433 - RNA, 32 nt, Homo Sapiens
guauaugcagcagccagugggcuaacaaauau

SEQ ID NO: 277434 - RNA, 32 nt, Homo Sapiens
agaggacgacccgggguacugccuugggaguc

SEQ ID NO: 277435 - RNA, 32 nt, Homo Sapiens
aaggauggagcaaaugucaacaggcacagaug

SEQ ID NO: 277436 - RNA, 32 nt, Homo Sapiens
uguuuacaaaauggaaaaggacacagcauguc

SEQ ID NO: 277437 - RNA, 32 nt, Homo Sapiens
uacgcgaggguagagcacaagauggaaaugga

SEQ ID NO: 277438 - RNA, 32 nt, Homo Sapiens
uuaaguauaaaccaaugauccuuugguaguca

SEQ ID NO: 277439 - RNA, 32 nt, Homo Sapiens
gucagcauauccuuguaguaugucacaguaua

SEQ ID NO: 277440 - RNA, 32 nt, Homo Sapiens
ucuuauguaauacuauauaucuguaaaaugca

SEQ ID NO: 277441 - RNA, 32 nt, Homo Sapiens
agaaucccgaugaggacuucagcugguauagu

SEQ ID NO: 277442 - RNA, 32 nt, Homo Sapiens
uuuccuuccuuccuucucggcagcgcuccgcg

SEQ ID NO: 277443 - RNA, 32 nt, Homo Sapiens
ucccccaggaggaggggggucccgaccugugu

SEQ ID NO: 277444 - RNA, 32 nt, Homo Sapiens
acggucagcacuccucucccagccccccugcc

SEQ ID NO: 277445 - RNA, 32 nt, Homo Sapiens
ggcagagucuugcucugucacccaggcuggag

SEQ ID NO: 277446 - RNA, 32 nt, Homo Sapiens
cacgacggagggaaaaucauuggugcuuggag

SEQ ID NO: 277447 - RNA, 32 nt, Homo Sapiens
auuuggggacuucaggaccccagagccacuag

SEQ ID NO: 277448 - RNA, 32 nt, Homo Sapiens
uuccuaaaacagugucaaaaacaagggaauca

SEQ ID NO: 277449 - RNA, 32 nt, Homo Sapiens
caacuuguuaaaccucuucacggcugagauca

SEQ ID NO: 277450 - RNA, 32 nt, Homo Sapiens
uucaugcccucccucccuuuccuaccacugcu

SEQ ID NO: 277451 - RNA, 32 nt, Homo Sapiens
guuagacaucuucugugauuguuauggcauau

SEQ ID NO: 277452 - RNA, 32 nt, Homo Sapiens
acagaaguacuaguaaacuguuugaaacugcu

SEQ ID NO: 277453 - RNA, 32 nt, Homo Sapiens
gugguccuccugaaagucacuggcuggaaaua

SEQ ID NO: 277454 - RNA, 32 nt, Homo Sapiens
uaccggguucaagagauuccccugccucagcc

SEQ ID NO: 277455 - RNA, 32 nt, Homo Sapiens
uuggccccggcgguucuacuacgucacuaccu

SEQ ID NO: 277456 - RNA, 32 nt, Homo Sapiens
ggaagcugccagcucgcuucccccaagcugcc

SEQ ID NO: 277457 - RNA, 32 nt, Homo Sapiens
cauucgccauauccguuuuuuaccuuuuuguc

SEQ ID NO: 277458 - RNA, 32 nt, Homo Sapiens
cucugucagggcuggggugcucugucugggaa

SEQ ID NO: 277459 - RNA, 32 nt, Homo Sapiens
ggggacgggucccugaggaucccgaugccuac

SEQ ID NO: 277460 - RNA, 32 nt, Homo Sapiens
uuucccaccccauuuuaucuugacaaccgugu

SEQ ID NO: 277461 - RNA, 32 nt, Homo Sapiens
gcuggguggaggaugccaggaaggggcugaac

SEQ ID NO: 277462 - RNA, 32 nt, Homo Sapiens
gugagccccaugcuggcugugcacugcgcggg

SEQ ID NO: 277463 - RNA, 32 nt, Homo Sapiens
cccuacaugaucuggagcaacagcugggaaau

SEQ ID NO: 277464 - RNA, 32 nt, Homo Sapiens
gaaccauauguucaaauccuacaggacgaucu

SEQ ID NO: 277465 - RNA, 32 nt, Homo Sapiens
cgaagaaugaacucugagaauguuuggagaau

SEQ ID NO: 277466 - RNA, 32 nt, Homo Sapiens
aagacaugguucagcaucaucuuuuaacaagg

SEQ ID NO: 277467 - RNA, 32 nt, Homo Sapiens
gcuuuaugcuauuugcaguccuguguuauggu

SEQ ID NO: 277468 - RNA, 32 nt, Homo Sapiens
cuggcucugacacuuuuugucaguugucuuua

SEQ ID NO: 277469 - RNA, 32 nt, Homo Sapiens
ccugagucaccauguagcgcugcuacuggagg

SEQ ID NO: 277470 - RNA, 31 nt, Homo Sapiens
ucucauggucgcugccugcugcuuggcccca

SEQ ID NO: 277471 - RNA, 32 nt, Homo Sapiens
ucaauuauauauaucaacuauaugguugccuu

SEQ ID NO: 277472 - RNA, 32 nt, Homo Sapiens
acagggcgacaucagcuggggacgaugggccu

SEQ ID NO: 277473 - RNA, 32 nt, Homo Sapiens
gcgcgugugcuuuuguuuuuuauuuugaacag

SEQ ID NO: 277474 - RNA, 32 nt, Homo Sapiens
aguuuuucaucaaaauaaaauuccauuguuuu

SEQ ID NO: 277475 - RNA, 32 nt, Homo Sapiens
gaggcaagcaaggaaggcagggugguuggaac

SEQ ID NO: 277476 - RNA, 32 nt, Homo Sapiens
ugcgccagcgacuaaaaagagaauuaaauaug

SEQ ID NO: 277477 - RNA, 32 nt, Homo Sapiens
ucugagaguuccccuguccccucccccuuccc

SEQ ID NO: 277478 - RNA, 32 nt, Homo Sapiens
gauacaauuaaaacuuuucuugcauucaaaaa

SEQ ID NO: 277479 - RNA, 32 nt, Homo Sapiens
guauguauaucuucuguaaauaacaucuagua

SEQ ID NO: 277480 - RNA, 32 nt, Homo Sapiens
acagcaaacuugugucugucucuucuuucauu

SEQ ID NO: 277481 - RNA, 32 nt, Homo Sapiens
uggaggugggcagucgccgcggaggcuccagc

SEQ ID NO: 277482 - RNA, 32 nt, Homo Sapiens
uggccaaguguaauuucuuaaaauuuagcauu

SEQ ID NO: 277483 - RNA, 32 nt, Homo Sapiens
cucagguucuuuuucuaauuccaaauaaacuu

SEQ ID NO: 277484 - RNA, 32 nt, Homo Sapiens
uugggcuuugguacaagaacugugacccccaa

SEQ ID NO: 277485 - RNA, 32 nt, Homo Sapiens
acugaaaguucauaaagugcugggaaguucau

SEQ ID NO: 277486 - RNA, 32 nt, Homo Sapiens
auaguuaguauuuuguauguauguacaggcug

SEQ ID NO: 277487 - RNA, 32 nt, Homo Sapiens
gacagucuccaagucgacuguucugggaguga

SEQ ID NO: 277488 - RNA, 32 nt, Homo Sapiens
cucgcauggcuguggagccgggacagcuauga

SEQ ID NO: 277489 - RNA, 32 nt, Homo Sapiens
acacagccgcgugcagcggcucacgccuacaa

SEQ ID NO: 277490 - RNA, 32 nt, Homo Sapiens
accucugcccuggccagcacucuagcuccuga

SEQ ID NO: 277491 - RNA, 32 nt, Homo Sapiens
uauggcaucuuccccaacgaaaagcacaucca

SEQ ID NO: 277492 - RNA, 32 nt, Homo Sapiens
uaugccugucuuuacuuuaaucuccuaauccu

SEQ ID NO: 277493 - RNA, 32 nt, Homo Sapiens
gcagccccauccccuuccagccccuaaguagg

SEQ ID NO: 277494 - RNA, 32 nt, Homo Sapiens
auuguuuucuugacuaugucucucuucuggga

SEQ ID NO: 277495 - RNA, 32 nt, Homo Sapiens
cccagagggcccagcccuggcuguccggcuuu

SEQ ID NO: 277496 - RNA, 32 nt, Homo Sapiens
ugucauuaauacuuuuucuaaauguuuaguuu

SEQ ID NO: 277497 - RNA, 32 nt, Homo Sapiens
acccagcugauggggguuggggugcuuccuuu

SEQ ID NO: 277498 - RNA, 32 nt, Homo Sapiens
caucccguccugcgcaggccgacacucacuga

SEQ ID NO: 277499 - RNA, 32 nt, Homo Sapiens
ggucuaaaauugaaacgugauuuuaaauauau

SEQ ID NO: 277500 - RNA, 32 nt, Homo Sapiens
acuuuaugaugaugcaguauagccagaauguc

SEQ ID NO: 277501 - RNA, 32 nt, Homo Sapiens
ucuuuauauuauauacucuguaucaagucaaa

SEQ ID NO: 277502 - RNA, 32 nt, Homo Sapiens
aaucaagcauguaucugccuauacuuugugag

SEQ ID NO: 277503 - RNA, 32 nt, Homo Sapiens
cgcagcggccgcagcucuggcuccucuucagg

SEQ ID NO: 277504 - RNA, 32 nt, Homo Sapiens
guuucaaaagagauuuacuuuuuuaaaggacu

SEQ ID NO: 277505 - RNA, 32 nt, Homo Sapiens
ggcucuuccuccccgcugccccccacgacccu

SEQ ID NO: 277506 - RNA, 32 nt, Homo Sapiens
acggaauaugcuaagaaaacuaucagauagcg

SEQ ID NO: 277507 - RNA, 32 nt, Homo Sapiens
cgcgccccgcgcgccgcuugcuccacacucug

SEQ ID NO: 277508 - RNA, 32 nt, Homo Sapiens
cuagugcagacaccgucaucccaccccaccug

SEQ ID NO: 277509 - RNA, 30 nt, Homo Sapiens
aaugaaucugguguuggggaaaccuucauc

SEQ ID NO: 277510 - RNA, 32 nt, Homo Sapiens
cgcgcacccccucccuuagguggcaacaaagu

SEQ ID NO: 277511 - RNA, 32 nt, Homo Sapiens
accaggucagcugcccuggccuugcaccccuc

SEQ ID NO: 277512 - RNA, 32 nt, Homo Sapiens
ucuguuuuauuaccaagacauuaaguagcaug

SEQ ID NO: 277513 - RNA, 32 nt, Homo Sapiens
uccaguagugcagcugccgcagccgggggagg

SEQ ID NO: 277514 - RNA, 32 nt, Homo Sapiens
aaagucuucauggugauaugcacuauauucag

SEQ ID NO: 277515 - RNA, 32 nt, Homo Sapiens
gaguugugugacuuucuaugcuauagaugugc

SEQ ID NO: 277516 - RNA, 32 nt, Homo Sapiens
cagaccaauaaaauaccugguugaaauacaug

SEQ ID NO: 277517 - RNA, 32 nt, Homo Sapiens
gaccacuccuaagaaaauuaaugcuaauuuaa

SEQ ID NO: 277518 - RNA, 32 nt, Homo Sapiens
gacauccaggcccggggcuggugcuggggagu

SEQ ID NO: 277519 - RNA, 32 nt, Homo Sapiens
uaucuggggcugugcugcuugugguccgggug

SEQ ID NO: 277520 - RNA, 32 nt, Homo Sapiens
cccuccccacccucuuuccccagcgcucgccu

SEQ ID NO: 277521 - RNA, 32 nt, Homo Sapiens
ucuagaugucucugguucuauagugcaaaugc

SEQ ID NO: 277522 - RNA, 32 nt, Homo Sapiens
ccgcccgggcccggcugccucaacagccgccc

SEQ ID NO: 277523 - RNA, 32 nt, Homo Sapiens
guccauuugugaauacucugcacuaugagacc

SEQ ID NO: 277524 - RNA, 32 nt, Homo Sapiens
gaucgcuugagcccagcgguuuaagaucaguc

SEQ ID NO: 277525 - RNA, 32 nt, Homo Sapiens
aucucuauacuucuccuuuggacauggaaaga

SEQ ID NO: 277526 - RNA, 32 nt, Homo Sapiens
caaccgguaucauauucagaucaaaucuuaaa

SEQ ID NO: 277527 - RNA, 32 nt, Homo Sapiens
uucuguauugaaaaacaauuaggaaucauugc

SEQ ID NO: 277528 - RNA, 32 nt, Homo Sapiens
ccacaucugaauaaucaauguaaauauuuucu

SEQ ID NO: 277529 - RNA, 32 nt, Homo Sapiens
acaacaagguguuccuuuagagucaaugagaa

SEQ ID NO: 277530 - RNA, 32 nt, Homo Sapiens
ucccucugcccccugcagcugcugccaucccc

SEQ ID NO: 277531 - RNA, 32 nt, Homo Sapiens
uaggcaauuuaaagaaacugcuagaaccaaga

SEQ ID NO: 277532 - RNA, 32 nt, Homo Sapiens
gcuuuucaacagucuuuguacaguguaaauag

SEQ ID NO: 277533 - RNA, 32 nt, Homo Sapiens
uuuagacauucauuuuaaacacuaccucaguu

SEQ ID NO: 277534 - RNA, 32 nt, Homo Sapiens
uauuacaagcuacuggaugcacugucagauua

SEQ ID NO: 277535 - RNA, 32 nt, Homo Sapiens
agcuggcuugagcuccucuggaaugugcaggg

SEQ ID NO: 277536 - RNA, 32 nt, Homo Sapiens
caaauaguguuauccuuuuacaauuaacugca

SEQ ID NO: 277537 - RNA, 31 nt, Homo Sapiens
gaggcgcgggcggugaggacggacagucacc

SEQ ID NO: 277538 - RNA, 32 nt, Homo Sapiens
gcacguaaucccaacaauuugggaggcugagg

SEQ ID NO: 277539 - RNA, 32 nt, Homo Sapiens
agacaugcugguggccccggcggagcggagag

SEQ ID NO: 277540 - RNA, 32 nt, Homo Sapiens
cagcugaaccccgcgggccccuagcacgcgcc

SEQ ID NO: 277541 - RNA, 32 nt, Homo Sapiens
cuggugcugcugcugcugcugcugcccacccu

SEQ ID NO: 277542 - RNA, 32 nt, Homo Sapiens
cacgguguuucagugcggagugccaagagucc

SEQ ID NO: 277543 - RNA, 32 nt, Homo Sapiens
uggcagccaguggcuuccugaacgugccucug

SEQ ID NO: 277544 - RNA, 32 nt, Homo Sapiens
ggcacuaaggguggagaguugggggccagcac

SEQ ID NO: 277545 - RNA, 32 nt, Homo Sapiens
uugagaccaaaauuuaaguuaacuguugcugg

SEQ ID NO: 277546 - RNA, 32 nt, Homo Sapiens
auuaggagaaagugaggugcuauauagaauau

SEQ ID NO: 277547 - RNA, 32 nt, Homo Sapiens
agugagguuucuucucuucugcccuaacuauu

SEQ ID NO: 277548 - RNA, 32 nt, Homo Sapiens
gaagaaauauuuugauugcaauggucucucuc

SEQ ID NO: 277549 - RNA, 32 nt, Homo Sapiens
gccggcgccagacgcggagggaaggagcuacg

SEQ ID NO: 277550 - RNA, 32 nt, Homo Sapiens
uggcugcaaggaugagcagagaacaaggacag

SEQ ID NO: 277551 - RNA, 32 nt, Homo Sapiens
aaggcacaggacagggguuggagcacgccagg

SEQ ID NO: 277552 - RNA, 32 nt, Homo Sapiens
aggcugaggggcgguuguuguuggcagcugug

SEQ ID NO: 277553 - RNA, 32 nt, Homo Sapiens
cuugcccagggaguccucuccacucccccucc

SEQ ID NO: 277554 - RNA, 32 nt, Homo Sapiens
uccccgcccucccccagcuccuaccugccucc

SEQ ID NO: 277555 - RNA, 32 nt, Homo Sapiens
cacaagcauccaccaaaggaguuugggauuga

SEQ ID NO: 277556 - RNA, 32 nt, Homo Sapiens
cgggaagacggaucccaccucccuuucuuagc

SEQ ID NO: 277557 - RNA, 32 nt, Homo Sapiens
gggauccucucgcgcccgcgggcuccaaucgc

SEQ ID NO: 277558 - RNA, 32 nt, Homo Sapiens
gcccuacccugcccuccaccgccggcuccaca

SEQ ID NO: 277559 - RNA, 29 nt, Homo Sapiens
aagacugugacuuugcuucggcucuauuu

SEQ ID NO: 277560 - RNA, 32 nt, Homo Sapiens
ugucuuggucacucucucugucucucuuucuc

SEQ ID NO: 277561 - RNA, 32 nt, Homo Sapiens
ucguccuguccagccgagggaccgccggcagc

SEQ ID NO: 277562 - RNA, 28 nt, Homo Sapiens
cggcggaggcggccgccacagggacuug

SEQ ID NO: 277563 - RNA, 32 nt, Homo Sapiens
ugaaagucuuaaagggagcauuagagauccuu

SEQ ID NO: 277564 - RNA, 32 nt, Homo Sapiens
ucuugcaacuuuauuuuauauuuuaaacugcu

SEQ ID NO: 277565 - RNA, 32 nt, Homo Sapiens
gaucugugucauaagugacuccggaugcauca

SEQ ID NO: 277566 - RNA, 32 nt, Homo Sapiens
cucccuggggacuuaaauuuuggcaguguucc

SEQ ID NO: 277567 - RNA, 32 nt, Homo Sapiens
accuaauaauuggccuucgauuuuaaauauuu

SEQ ID NO: 277568 - RNA, 32 nt, Homo Sapiens
aggaaaugaccgccaucuccagccggccaccu

SEQ ID NO: 277569 - RNA, 32 nt, Homo Sapiens
aguguugcccuggaggcauaaaacaggggccc

SEQ ID NO: 277570 - RNA, 32 nt, Homo Sapiens
guggccguccaagugccaauuggcuuuucgcc

SEQ ID NO: 277571 - RNA, 31 nt, Homo Sapiens
uuuguaucauuuguuuuccucaucuaaaaag

SEQ ID NO: 277572 - RNA, 32 nt, Homo Sapiens
ggguagauaguuucauaguuuauuuuuuaaga

SEQ ID NO: 277573 - RNA, 32 nt, Homo Sapiens
ucuaccacaacacugaaauaaaguuugacuuu

SEQ ID NO: 277574 - RNA, 32 nt, Homo Sapiens
agacugcugguggcccaaggccuacagacaca

SEQ ID NO: 277575 - RNA, 32 nt, Homo Sapiens
ccaaguguguggaaccucacacucccucugga

SEQ ID NO: 277576 - RNA, 32 nt, Homo Sapiens
cagccaugaugcugcagccgggcccgcagcuc

SEQ ID NO: 277577 - RNA, 32 nt, Homo Sapiens
aaauuuuaaaaauacugucggaaaaaagcgua

SEQ ID NO: 277578 - RNA, 32 nt, Homo Sapiens
aaacuguccccagacccugccacacauggaag

SEQ ID NO: 277579 - RNA, 32 nt, Homo Sapiens
agcugugccugcccacuggcacacagcuggca

SEQ ID NO: 277580 - RNA, 32 nt, Homo Sapiens
acgcaccuccacguccggcuaauuuuguauuu

SEQ ID NO: 277581 - RNA, 32 nt, Homo Sapiens
gaagcuuccugcccagagagccagcagccuug

SEQ ID NO: 277582 - RNA, 32 nt, Homo Sapiens
uuuugaagcaaacuuuuuuuuauccuugugca

SEQ ID NO: 277583 - RNA, 32 nt, Homo Sapiens
agggggucaagguggaccugugcgggcagugg

SEQ ID NO: 277584 - RNA, 32 nt, Homo Sapiens
uucuauggcaacagugaugacauugguguguu

SEQ ID NO: 277585 - RNA, 29 nt, Homo Sapiens
cugcuucuuauauugcaagcuccaucucu

SEQ ID NO: 277586 - RNA, 32 nt, Homo Sapiens
uguaccuuagaaguacaagaauuuaaguaaaa

SEQ ID NO: 277587 - RNA, 32 nt, Homo Sapiens
cuugugagcgugaggagcugccgccaccgccu

SEQ ID NO: 277588 - RNA, 32 nt, Homo Sapiens
uauggguuauuuuguccuuuuacuuuuuuaaa

SEQ ID NO: 277589 - RNA, 32 nt, Homo Sapiens
agagaauuacacugugggaaaacuaccauugu

SEQ ID NO: 277590 - RNA, 32 nt, Homo Sapiens
augacagacaauuuagauaauuuagguuaaag

SEQ ID NO: 277591 - RNA, 32 nt, Homo Sapiens
ucguagugaugaucuguuuucucuaaaaucuu

SEQ ID NO: 277592 - RNA, 32 nt, Homo Sapiens
guaagagguuauauaguuuuucagugggaggg

SEQ ID NO: 277593 - RNA, 32 nt, Homo Sapiens
uacaagccaaaauagaaauauuucuccacaga

SEQ ID NO: 277594 - RNA, 32 nt, Homo Sapiens
gcauuuauacaaaauguugaccucaggucuau

SEQ ID NO: 277595 - RNA, 30 nt, Homo Sapiens
acuguaaauaucccuccccucucucccugg

SEQ ID NO: 277596 - RNA, 32 nt, Homo Sapiens
ggucuggugagcacggagaggcugggaagggg

SEQ ID NO: 277597 - RNA, 31 nt, Homo Sapiens
uuggcccagacacccaccugacuuaguggcu

SEQ ID NO: 277598 - RNA, 32 nt, Homo Sapiens
aaggaaggagaaugagggguacgggacuaggu

SEQ ID NO: 277599 - RNA, 32 nt, Homo Sapiens
cuuauagaauaggcaggaaccaauuugcauuu

SEQ ID NO: 277600 - RNA, 32 nt, Homo Sapiens
cccaggccaucccaaccgacuuccaucucaug

SEQ ID NO: 277601 - RNA, 32 nt, Homo Sapiens
uguguauaucuagauguuuuuaauaagauguu

SEQ ID NO: 277602 - RNA, 32 nt, Homo Sapiens
guugcucugggagucuucagaauagaaacuac

SEQ ID NO: 277603 - RNA, 32 nt, Homo Sapiens
ugagggcaaggugguacuuccuccuucugagc

SEQ ID NO: 277604 - RNA, 30 nt, Homo Sapiens
caagcauguggcuccuggucaguguaauuc

SEQ ID NO: 277605 - RNA, 32 nt, Homo Sapiens
ugcccugugcuugagaguucagggccggacac

SEQ ID NO: 277606 - RNA, 32 nt, Homo Sapiens
uuuuuuacucuagaaaugggugcauaauauaa

SEQ ID NO: 277607 - RNA, 32 nt, Homo Sapiens
aaaaagccauaacuuaaauaguguuauaaaau

SEQ ID NO: 277608 - RNA, 32 nt, Homo Sapiens
cucuauccucuuuuuccaauucucaucuucuc

SEQ ID NO: 277609 - RNA, 32 nt, Homo Sapiens
gaagaguauguggcaggguguuuuuuauucuc

SEQ ID NO: 277610 - RNA, 32 nt, Homo Sapiens
ccaccccuccuguuccucugcacuaugucucu

SEQ ID NO: 277611 - RNA, 32 nt, Homo Sapiens
uuuaguuuguuugcugucuggauggccaauga

SEQ ID NO: 277612 - RNA, 32 nt, Homo Sapiens
aagaaacuuuuacuccuucugcucaaggcuga

SEQ ID NO: 277613 - RNA, 32 nt, Homo Sapiens
uacugcauuuguguuuaggguuuguaugaccc

SEQ ID NO: 277614 - RNA, 32 nt, Homo Sapiens
ccuccucccucccccgcagucggacucccucc

SEQ ID NO: 277615 - RNA, 32 nt, Homo Sapiens
cagcccaggaccagcuuucuugucaccuugag

SEQ ID NO: 277616 - RNA, 32 nt, Homo Sapiens
agcuuauugccgacuacugagaacgaacccug

SEQ ID NO: 277617 - RNA, 32 nt, Homo Sapiens
gcugcaccgggagagcgccgaucugggugcga

SEQ ID NO: 277618 - RNA, 32 nt, Homo Sapiens
gaaauguaacagagccacagcuccacaggccu

SEQ ID NO: 277619 - RNA, 32 nt, Homo Sapiens
cuuuuguauggacuacaaauaaaacuuggggc

SEQ ID NO: 277620 - RNA, 32 nt, Homo Sapiens
uuggaagauguaucauuuuucuuaaaaugcau

SEQ ID NO: 277621 - RNA, 32 nt, Homo Sapiens
caucguucccuacuccuccccaccacuuaccc

SEQ ID NO: 277622 - RNA, 32 nt, Homo Sapiens
gugagacugaggguacauuagaggaaauggug

SEQ ID NO: 277623 - RNA, 32 nt, Homo Sapiens
agcggguucgguugcgcguggcgcacggggug

SEQ ID NO: 277624 - RNA, 32 nt, Homo Sapiens
cacacggcauucaacaaggcaccaaguccacc

SEQ ID NO: 277625 - RNA, 32 nt, Homo Sapiens
uuacaucuuuagcucagguccauccuucucaa

SEQ ID NO: 277626 - RNA, 32 nt, Homo Sapiens
uguuuucccagccccagaaaccggcuaaagga

SEQ ID NO: 277627 - RNA, 32 nt, Homo Sapiens
uucaaggcccaacugugcccagcccucugcag

SEQ ID NO: 277628 - RNA, 32 nt, Homo Sapiens
gcaucuaaugaaaaggacuguucaaguggguc

SEQ ID NO: 277629 - RNA, 32 nt, Homo Sapiens
uaauuaggcaacaggaaaaaacaaagucuggc

SEQ ID NO: 277630 - RNA, 32 nt, Homo Sapiens
gaaagggaaaggggguguggccaggcagcagu

SEQ ID NO: 277631 - RNA, 32 nt, Homo Sapiens
uaagguuucuaaaauaaauaaauuucuagcau

SEQ ID NO: 277632 - RNA, 32 nt, Homo Sapiens
acuucuguagugcugcagggucccucgggugc

SEQ ID NO: 277633 - RNA, 32 nt, Homo Sapiens
acaggagggagauguuacaguuaauccacaau

SEQ ID NO: 277634 - RNA, 30 nt, Homo Sapiens
aaaaaaggagguggcucuaaguaaacuggg

SEQ ID NO: 277635 - RNA, 32 nt, Homo Sapiens
uuuucuuguuuaauaaaguuaugauagcuaaa

SEQ ID NO: 277636 - RNA, 32 nt, Homo Sapiens
accaguuuuauccauaaugauggauuuaacag

SEQ ID NO: 277637 - RNA, 32 nt, Homo Sapiens
ggagcaggagaugcucagcucuggugccuuuu

SEQ ID NO: 277638 - RNA, 32 nt, Homo Sapiens
gcuggccuggcugugagguuucuggggaggca

SEQ ID NO: 277639 - RNA, 32 nt, Homo Sapiens
gagaggaggggacuuucccauaaacaggcaga

SEQ ID NO: 277640 - RNA, 32 nt, Homo Sapiens
gacagaaaccucucaucaggaccuccaaguuc

SEQ ID NO: 277641 - RNA, 32 nt, Homo Sapiens
acaggaagcagacaaagcaaauauggcaacuu

SEQ ID NO: 277642 - RNA, 32 nt, Homo Sapiens
uuauugcccaaguuuacaagaguagcgauaca

SEQ ID NO: 277643 - RNA, 32 nt, Homo Sapiens
auguauaggcaccuaaaggcauggcacuugag

SEQ ID NO: 277644 - RNA, 32 nt, Homo Sapiens
guacgaggaccacugugaggaccuaggaacgc

SEQ ID NO: 277645 - RNA, 32 nt, Homo Sapiens
ccgcgugcggcccacucacgggccggcaggau

SEQ ID NO: 277646 - RNA, 32 nt, Homo Sapiens
gaugcgcuucaaaguggcaaguauuuggcuau

SEQ ID NO: 277647 - RNA, 32 nt, Homo Sapiens
ggggaguuggcgccggggaggggggcgcgaug

SEQ ID NO: 277648 - RNA, 32 nt, Homo Sapiens
uuccucagcuggaugacgaggccacuaugaag

SEQ ID NO: 277649 - RNA, 32 nt, Homo Sapiens
cugguauggcugcaguccuccgguugcauacu

SEQ ID NO: 277650 - RNA, 32 nt, Homo Sapiens
ggcaggaggaggggcugcucucugagacaggg

SEQ ID NO: 277651 - RNA, 32 nt, Homo Sapiens
guuuuuuagcuuagugccauuaugucauuuug

SEQ ID NO: 277652 - RNA, 32 nt, Homo Sapiens
cuaauuuccuuccauaucccucaggccucagu

SEQ ID NO: 277653 - RNA, 32 nt, Homo Sapiens
guuucuuuaaauuuauugugauauucuauauc

SEQ ID NO: 277654 - RNA, 32 nt, Homo Sapiens
agccgcccaagccgccuuccggcucgcggucu

SEQ ID NO: 277655 - RNA, 32 nt, Homo Sapiens
ccaaaguagugggauuucaggcaugaccaccu

SEQ ID NO: 277656 - RNA, 32 nt, Homo Sapiens
gccaucuuaggaaaauacauucugccccugaa

SEQ ID NO: 277657 - RNA, 32 nt, Homo Sapiens
agggagacagagaaacagaacugguggugcug

SEQ ID NO: 277658 - RNA, 32 nt, Homo Sapiens
ggcuggcuguaccucagcaucaaccaccucug

SEQ ID NO: 277659 - RNA, 32 nt, Homo Sapiens
cugugggacccacuggacacacacagucccuu

SEQ ID NO: 277660 - RNA, 32 nt, Homo Sapiens
aggugagccaaggggucugcuccuguggcggu

SEQ ID NO: 277661 - RNA, 32 nt, Homo Sapiens
ccaggaaaacagauguuauaugaccuauauca

SEQ ID NO: 277662 - RNA, 32 nt, Homo Sapiens
uccucaggccuggcccucgggccuccgugaug

SEQ ID NO: 277663 - RNA, 32 nt, Homo Sapiens
cccgcgucugagggagcggaggucuuccuggg

SEQ ID NO: 277664 - RNA, 32 nt, Homo Sapiens
uagaccugucuccuggcgguuccucguucucc

SEQ ID NO: 277665 - RNA, 32 nt, Homo Sapiens
ccauucacccugcggcagacgggcaccguacu

SEQ ID NO: 277666 - RNA, 32 nt, Homo Sapiens
uuucauaaugaaaaaacugaagagauacguga

SEQ ID NO: 277667 - RNA, 32 nt, Homo Sapiens
guccuuuauccgguguccgccggcccccggcc

SEQ ID NO: 277668 - RNA, 32 nt, Homo Sapiens
ugaugcccuguccaaugugaggacugccuggg

SEQ ID NO: 277669 - RNA, 32 nt, Homo Sapiens
aaugacuuuucuuuacuccccagcugucggca

SEQ ID NO: 277670 - RNA, 32 nt, Homo Sapiens
gcagaucuagggcgagcuugcacguuacauca

SEQ ID NO: 277671 - RNA, 32 nt, Homo Sapiens
ugaaagauccagagagugggggugaggggugg

SEQ ID NO: 277672 - RNA, 32 nt, Homo Sapiens
uccugacuucaccuuuuugauuuggugugugc

SEQ ID NO: 277673 - RNA, 32 nt, Homo Sapiens
cgccuuccgccagccgcgcccugcgccaccua

SEQ ID NO: 277674 - RNA, 32 nt, Homo Sapiens
aguaaauaaaauaagugacauaaaaaaaaaaa

SEQ ID NO: 277675 - RNA, 30 nt, Homo Sapiens
uagugcucgggucccaccgcccugaggcuc

SEQ ID NO: 277676 - RNA, 32 nt, Homo Sapiens
auuggaucagcaugcagacaaguuuacaaaua

SEQ ID NO: 277677 - RNA, 32 nt, Homo Sapiens
gggcggcgcccacgcuccuaccgcccggacgc

SEQ ID NO: 277678 - RNA, 32 nt, Homo Sapiens
ugccuggugucugcuguaaauguuugucuacu

SEQ ID NO: 277679 - RNA, 32 nt, Homo Sapiens
auuuacugaauauuuuuagcuuucuuuugaga

SEQ ID NO: 277680 - RNA, 32 nt, Homo Sapiens
cgcaccccuggccauuguaccuuuugauguuu

SEQ ID NO: 277681 - RNA, 32 nt, Homo Sapiens
aucucauuaauucagaucuguaccucauugcu

SEQ ID NO: 277682 - RNA, 32 nt, Homo Sapiens
ccagaaaggaucaguguuagaaugggaaauag

SEQ ID NO: 277683 - RNA, 32 nt, Homo Sapiens
ccucagucgcugggccagccugcccggcccca

SEQ ID NO: 277684 - RNA, 32 nt, Homo Sapiens
ggggggcaccagguuuagugcugcugcuuuca

SEQ ID NO: 277685 - RNA, 32 nt, Homo Sapiens
auaccuucaauccuuacuucugccagucugua

SEQ ID NO: 277686 - RNA, 32 nt, Homo Sapiens
auguuugugucucccucaaauucauaaguuga

SEQ ID NO: 277687 - RNA, 32 nt, Homo Sapiens
ugggggaaccagcagaaaugcccccauucucc

SEQ ID NO: 277688 - RNA, 32 nt, Homo Sapiens
aggauagaggaugaauacauuauuaggccggc

SEQ ID NO: 277689 - RNA, 32 nt, Homo Sapiens
uuucugagagauucaaagccuccacgacucug

SEQ ID NO: 277690 - RNA, 32 nt, Homo Sapiens
uuuuggaauauaaauuccccaugcuaguauag

SEQ ID NO: 277691 - RNA, 32 nt, Homo Sapiens
acacacugggggugggggcggggggaagaugc

SEQ ID NO: 277692 - RNA, 32 nt, Homo Sapiens
acuaagaaaauagaagugggccaggcacggug

SEQ ID NO: 277693 - RNA, 32 nt, Homo Sapiens
gauuacauuauuuuugucacuuugccaucauu

SEQ ID NO: 277694 - RNA, 29 nt, Homo Sapiens
guguguguauguaugugugugcuuuaucu

SEQ ID NO: 277695 - RNA, 32 nt, Homo Sapiens
cuggcauuuuuccaagccaagagaagaucgaa

SEQ ID NO: 277696 - RNA, 32 nt, Homo Sapiens
gagcuggcuugaaauccucuuguuuauggcag

SEQ ID NO: 277697 - RNA, 32 nt, Homo Sapiens
gucccuugcagcagguccccgccccgccacug

SEQ ID NO: 277698 - RNA, 32 nt, Homo Sapiens
ucugaaaacacuuccaaugccaguuugauucu

SEQ ID NO: 277699 - RNA, 32 nt, Homo Sapiens
uguaguuggauaguugggcuugccagaaggca

SEQ ID NO: 277700 - RNA, 32 nt, Homo Sapiens
uucucccucgaagcacuccccccagcuccaug

SEQ ID NO: 277701 - RNA, 32 nt, Homo Sapiens
auuaaacuaaugagcuucugcacagcaaaaga

SEQ ID NO: 277702 - RNA, 32 nt, Homo Sapiens
acaagggggcuguguguggccuugagguuggu

SEQ ID NO: 277703 - RNA, 32 nt, Homo Sapiens
cuacuggcugugugagcgagcugcuggauacu

SEQ ID NO: 277704 - RNA, 32 nt, Homo Sapiens
augugguuuccagcuuugccugauggaauucc

SEQ ID NO: 277705 - RNA, 32 nt, Homo Sapiens
cacaggcccuccccagcucaacccauuaaaga

SEQ ID NO: 277706 - RNA, 32 nt, Homo Sapiens
ggcaaaauucacccccaauauuucauguaggu

SEQ ID NO: 277707 - RNA, 32 nt, Homo Sapiens
gaggaguagccaggcaucuacugcagaugaag

SEQ ID NO: 277708 - RNA, 32 nt, Homo Sapiens
acucgggcuaggggcggggccagcgcaggggg

SEQ ID NO: 277709 - RNA, 31 nt, Homo Sapiens
ggugagcggcacucugcccuuccagagcaag

SEQ ID NO: 277710 - RNA, 32 nt, Homo Sapiens
gcauuccuuaguuuccucaacuagccuggaaa

SEQ ID NO: 277711 - RNA, 32 nt, Homo Sapiens
cggagcugaaccgcggcccccgguggugggcu

SEQ ID NO: 277712 - RNA, 32 nt, Homo Sapiens
uccucucgggucccgcugccccgccccgacug

SEQ ID NO: 277713 - RNA, 29 nt, Homo Sapiens
auauagcaauaugaguguauggcuaccac

SEQ ID NO: 277714 - RNA, 31 nt, Homo Sapiens
gcuagauccaaauaaagacgcuauaaaaauu

SEQ ID NO: 277715 - RNA, 32 nt, Homo Sapiens
uuuugguccgcacgcuccugcuccugacucac

SEQ ID NO: 277716 - RNA, 32 nt, Homo Sapiens
auaaaggacuuccaaaaugacagaugagaaac

SEQ ID NO: 277717 - RNA, 32 nt, Homo Sapiens
ucacucuuaugaauuaauaaacauuuggaggu

SEQ ID NO: 277718 - RNA, 32 nt, Homo Sapiens
aaugacuguuggaguuccugugucugguuuuc

SEQ ID NO: 277719 - RNA, 32 nt, Homo Sapiens
ucagauguucuucuccuucagcuucggcuuca

SEQ ID NO: 277720 - RNA, 32 nt, Homo Sapiens
auuugauucucauuuuaccauagcuuauauuc

SEQ ID NO: 277721 - RNA, 32 nt, Homo Sapiens
aggucuggaaaauuaggaaaaacuaccauaug

SEQ ID NO: 277722 - RNA, 32 nt, Homo Sapiens
gcucauucucaguaucucauuaacucauugaa

SEQ ID NO: 277723 - RNA, 32 nt, Homo Sapiens
gacgcgggccuggcccguguguguccuggcgg

SEQ ID NO: 277724 - RNA, 32 nt, Homo Sapiens
guaauuuauuaaaaucuaccuaauuugccgug

SEQ ID NO: 277725 - RNA, 32 nt, Homo Sapiens
uucauuggagggcugagcuuugaaacaacuga

SEQ ID NO: 277726 - RNA, 32 nt, Homo Sapiens
acuaggaggaggaggaggagccgucgcaggau

SEQ ID NO: 277727 - RNA, 32 nt, Homo Sapiens
ccuccugaaccuugcagugacaucaguccagg

SEQ ID NO: 277728 - RNA, 32 nt, Homo Sapiens
uccagcugucuccuccaggcagugcugccagu

SEQ ID NO: 277729 - RNA, 32 nt, Homo Sapiens
guuuguauuauuaauauaucauguuaccuuau

SEQ ID NO: 277730 - RNA, 32 nt, Homo Sapiens
uuuaucauggaccagaggaaaaccagaaaacu

SEQ ID NO: 277731 - RNA, 32 nt, Homo Sapiens
uuucuguuucucuggagggacagagcagaggg

SEQ ID NO: 277732 - RNA, 32 nt, Homo Sapiens
cacacacgcauuugcacagacacacacauaua

SEQ ID NO: 277733 - RNA, 32 nt, Homo Sapiens
uuagcagaaaauuuaauaugaaucaaagcuua

SEQ ID NO: 277734 - RNA, 32 nt, Homo Sapiens
ucccacauuuacagccagaaucaacauucccu

SEQ ID NO: 277735 - RNA, 30 nt, Homo Sapiens
gggaaggcggcgcggccgggucccgaaacu

SEQ ID NO: 277736 - RNA, 32 nt, Homo Sapiens
gccuuuuucuagucuuuucagaauagaucaug

SEQ ID NO: 277737 - RNA, 32 nt, Homo Sapiens
cuggcagugcuggcucuuccccgggucuccag

SEQ ID NO: 277738 - RNA, 32 nt, Homo Sapiens
gcuguacauggaucagaaccacuucuuccccc

SEQ ID NO: 277739 - RNA, 32 nt, Homo Sapiens
aggaugaugucugaaguggcugaaacacauau

SEQ ID NO: 277740 - RNA, 32 nt, Homo Sapiens
aguucauuuuuucucucauuaugggaaggaua

SEQ ID NO: 277741 - RNA, 32 nt, Homo Sapiens
gaagacuguuauauacaugaaauuauauggua

SEQ ID NO: 277742 - RNA, 32 nt, Homo Sapiens
uuuguuaaccucccaaacccauuccucccauc

SEQ ID NO: 277743 - RNA, 32 nt, Homo Sapiens
gccuagcccuggaagugagcacugccggccac

SEQ ID NO: 277744 - RNA, 32 nt, Homo Sapiens
ucccgccacagagccuggggcccccagccuug

SEQ ID NO: 277745 - RNA, 32 nt, Homo Sapiens
accaugacacgauuuaaaucuuuucaaauguu

SEQ ID NO: 277746 - RNA, 32 nt, Homo Sapiens
ggcggguccuggauguugauguccugcaucua

SEQ ID NO: 277747 - RNA, 32 nt, Homo Sapiens
aagauagaagaaaaaagaaugucagaaaaaca

SEQ ID NO: 277748 - RNA, 32 nt, Homo Sapiens
cauuccagugggcgggugggcgggcgggcggg

SEQ ID NO: 277749 - RNA, 32 nt, Homo Sapiens
gcguucuggcagagacacgcagaccagcugag

SEQ ID NO: 277750 - RNA, 32 nt, Homo Sapiens
auaccuauauuuucaaguuaugucaauuaaau

SEQ ID NO: 277751 - RNA, 32 nt, Homo Sapiens
gggaacccugacgcucagcucccgcccgacgg

SEQ ID NO: 277752 - RNA, 32 nt, Homo Sapiens
guauugcucuaccuaccuacaaggcugugcag

SEQ ID NO: 277753 - RNA, 32 nt, Homo Sapiens
ggcucacugucucucgccccagcccuuccagc

SEQ ID NO: 277754 - RNA, 32 nt, Homo Sapiens
gaagaaauagcaggagagaggacccauuagcu

SEQ ID NO: 277755 - RNA, 32 nt, Homo Sapiens
cccggaaguggagcggcugucgcagugcggcu

SEQ ID NO: 277756 - RNA, 32 nt, Homo Sapiens
aaggcaaaucauccuuucccuacguccccugc

SEQ ID NO: 277757 - RNA, 32 nt, Homo Sapiens
cacgcguaccuucagcggcgcgagcccaagcc

SEQ ID NO: 277758 - RNA, 32 nt, Homo Sapiens
uggcugggacuacaagcgugcgccaccaugcc

SEQ ID NO: 277759 - RNA, 32 nt, Homo Sapiens
uucgguggggagaggaggcgcaaggcugguuc

SEQ ID NO: 277760 - RNA, 31 nt, Homo Sapiens
auuguugaaaauaaauguauuuuuguacauc

SEQ ID NO: 277761 - RNA, 32 nt, Homo Sapiens
cccgcccgcgucugcggccguucggguccuca

SEQ ID NO: 277762 - RNA, 32 nt, Homo Sapiens
aauaaguguucaauguuuguaguucuucaaaa

SEQ ID NO: 277763 - RNA, 32 nt, Homo Sapiens
aaagugaucugaucacacucaguguccccagc

SEQ ID NO: 277764 - RNA, 31 nt, Homo Sapiens
ccggacauggaacaaccguggccgccuccgg

SEQ ID NO: 277765 - RNA, 32 nt, Homo Sapiens
gguuugcaguuuucacucaaguuuugcaugaa

SEQ ID NO: 277766 - RNA, 32 nt, Homo Sapiens
ucaggggcucaugaaaauauuuuaauuuauuu

SEQ ID NO: 277767 - RNA, 32 nt, Homo Sapiens
uccaguccggggcucuccacccgcccacccuu

SEQ ID NO: 277768 - RNA, 32 nt, Homo Sapiens
uccccgaacugccaacucuucacgcacgcgaa

SEQ ID NO: 277769 - RNA, 32 nt, Homo Sapiens
aggaggagaacacacccugcaacuacagaacc

SEQ ID NO: 277770 - RNA, 32 nt, Homo Sapiens
agcggcugcgagcgagagagcguaagagcaag

SEQ ID NO: 277771 - RNA, 32 nt, Homo Sapiens
ccuuugguuugacaauuuugucuuaaguguuu

SEQ ID NO: 277772 - RNA, 31 nt, Homo Sapiens
cuguagucauggagaaagguauuucaagauc

SEQ ID NO: 277773 - RNA, 32 nt, Homo Sapiens
guggugccggcagcugccagcgccugcccucu

SEQ ID NO: 277774 - RNA, 32 nt, Homo Sapiens
cagcaagugugucauucacacacaucauucug

SEQ ID NO: 277775 - RNA, 30 nt, Homo Sapiens
gguucacccuuugccacccagccuaccccc

SEQ ID NO: 277776 - RNA, 32 nt, Homo Sapiens
caaagcagauuuuccuaaggccacuguuuuaa

SEQ ID NO: 277777 - RNA, 32 nt, Homo Sapiens
uguuuagcuuuaggaagaaacaucuagaaguu

SEQ ID NO: 277778 - RNA, 32 nt, Homo Sapiens
cgguuuguuuuuauucuuucauuuuuacaagg

SEQ ID NO: 277779 - RNA, 32 nt, Homo Sapiens
cccagagcagugccgcugcccaaauccucgca

SEQ ID NO: 277780 - RNA, 32 nt, Homo Sapiens
aaacuucguugguccuggagaaagggaggcaa

SEQ ID NO: 277781 - RNA, 32 nt, Homo Sapiens
cgcagcauuucccucggaccccccucgaagcc

SEQ ID NO: 277782 - RNA, 32 nt, Homo Sapiens
acuucaguggacccccagccccugcccccacu

SEQ ID NO: 277783 - RNA, 32 nt, Homo Sapiens
cuguuauccuaguaaaagcaucaggggcuggg

SEQ ID NO: 277784 - RNA, 32 nt, Homo Sapiens
aagugucaggguggagugauuccaagugggau

SEQ ID NO: 277785 - RNA, 32 nt, Homo Sapiens
cgcgugucggcgggacaugcgcugcgucgccu

SEQ ID NO: 277786 - RNA, 32 nt, Homo Sapiens
ugucagacaaagaauguauccuuuacuuuucu

SEQ ID NO: 277787 - RNA, 32 nt, Homo Sapiens
uucuuuggauaaaguucucauuuuucucauga

SEQ ID NO: 277788 - RNA, 30 nt, Homo Sapiens
uacaguauguaacugcgggaaacccacugc

SEQ ID NO: 277789 - RNA, 32 nt, Homo Sapiens
augguaagugaacaauuuuaaauuuauuuuuu

SEQ ID NO: 277790 - RNA, 32 nt, Homo Sapiens
ucggucccaagcaucaaagccuuuggccuuuc

SEQ ID NO: 277791 - RNA, 32 nt, Homo Sapiens
guaauaauggauaauucuuuuacauauuguuu

SEQ ID NO: 277792 - RNA, 32 nt, Homo Sapiens
gacuaucagggugaagcugucuuuuucacuug

SEQ ID NO: 277793 - RNA, 31 nt, Homo Sapiens
auaggaaaacaagagaagcaggcaagaagcg

SEQ ID NO: 277794 - RNA, 32 nt, Homo Sapiens
aaaugucaucucuaauuguaauccccacaugu

SEQ ID NO: 277795 - RNA, 32 nt, Homo Sapiens
cugauggggaggaggacccggcaugacagccc

SEQ ID NO: 277796 - RNA, 32 nt, Homo Sapiens
uuuccugcaccugaggccgccggccagccgcc

SEQ ID NO: 277797 - RNA, 32 nt, Homo Sapiens
acauuagcugggugugguggcgcauaccugug

SEQ ID NO: 277798 - RNA, 32 nt, Homo Sapiens
ccgcaccggccaauggcaccgccccguccgcc

SEQ ID NO: 277799 - RNA, 32 nt, Homo Sapiens
ccuggucaggcacggcacgucuggccggccgc

SEQ ID NO: 277800 - RNA, 32 nt, Homo Sapiens
gccuuucucagauuagucaaaaauucuauaga

SEQ ID NO: 277801 - RNA, 32 nt, Homo Sapiens
gcagauauauauucgauaaaucaguguacuug

SEQ ID NO: 277802 - RNA, 31 nt, Homo Sapiens
ugagaccagcccagccaacauggucccaggu

SEQ ID NO: 277803 - RNA, 32 nt, Homo Sapiens
guuggccucuuccuccuccccugccaggccuc

SEQ ID NO: 277804 - RNA, 32 nt, Homo Sapiens
uccauuccccaaacucccuccucccuguuaaa

SEQ ID NO: 277805 - RNA, 32 nt, Homo Sapiens
aacgggaagcacaugagaggugggcacccggu

SEQ ID NO: 277806 - RNA, 32 nt, Homo Sapiens
cugaucguucaauuuccucuucgguccuuggc

SEQ ID NO: 277807 - RNA, 32 nt, Homo Sapiens
augcuucuuuugcugccuuaagcccccuaugc

SEQ ID NO: 277808 - RNA, 32 nt, Homo Sapiens
uugcccagcucuuuuccuugaugcaguuuccc

SEQ ID NO: 277809 - RNA, 32 nt, Homo Sapiens
augccagacacaggcucgcugcugcuggaagg

SEQ ID NO: 277810 - RNA, 32 nt, Homo Sapiens
uaugaacuauaaaugauugucuuuaauaaaua

SEQ ID NO: 277811 - RNA, 32 nt, Homo Sapiens
cagcuggaucaagggauucacuggccucucca

SEQ ID NO: 277812 - RNA, 32 nt, Homo Sapiens
ucuuuucguaguuuuugucaugucugucaacu

SEQ ID NO: 277813 - RNA, 32 nt, Homo Sapiens
caucuaacaucaucaucuucuaauguguugga

SEQ ID NO: 277814 - RNA, 32 nt, Homo Sapiens
acaaaaccuuuaaucugcaccuuacaacucgg

SEQ ID NO: 277815 - RNA, 32 nt, Homo Sapiens
uuuguuaugguuguuggaauuucuuggccuac

SEQ ID NO: 277816 - RNA, 32 nt, Homo Sapiens
uuuuuuuucuauuucaauguauuuaaacucua

SEQ ID NO: 277817 - RNA, 32 nt, Homo Sapiens
cuagcuauauuucauacaaaguguuuuaagag

SEQ ID NO: 277818 - RNA, 32 nt, Homo Sapiens
cugggacgccaguguuuuaugcucuuaguuca

SEQ ID NO: 277819 - RNA, 32 nt, Homo Sapiens
ggaucucacagcacagcuauccacagggagac

SEQ ID NO: 277820 - RNA, 32 nt, Homo Sapiens
gucuuuaagcagcuggcguguuacaucuccau

SEQ ID NO: 277821 - RNA, 32 nt, Homo Sapiens
cucgcagguccacuuccggcgccgcggcuguu

SEQ ID NO: 277822 - RNA, 32 nt, Homo Sapiens
ugugaagcaaaauaaauuuauauaauggaauu

SEQ ID NO: 277823 - RNA, 32 nt, Homo Sapiens
accaucucugguucgguucucaucuaucaaac

SEQ ID NO: 277824 - RNA, 32 nt, Homo Sapiens
cggggaagcgcucgcgcacgcgccggaagagc

SEQ ID NO: 277825 - RNA, 32 nt, Homo Sapiens
uucauaagaaguuauauaaauaaaauagguuu

SEQ ID NO: 277826 - RNA, 32 nt, Homo Sapiens
agccuuaguucuuggggugcaguaguauguac

SEQ ID NO: 277827 - RNA, 32 nt, Homo Sapiens
gcucacguaggcgucaugaggucuccgguucg

SEQ ID NO: 277828 - RNA, 32 nt, Homo Sapiens
cugaagccgggcgggcgaugcccgcggcguga

SEQ ID NO: 277829 - RNA, 32 nt, Homo Sapiens
ucaaaugugagccuauggaucaagcaggccua

SEQ ID NO: 277830 - RNA, 28 nt, Homo Sapiens
agcccggugccgagaccaagcgacagac

SEQ ID NO: 277831 - RNA, 32 nt, Homo Sapiens
aagaugcggaagaggaugugggaccaggaccc

SEQ ID NO: 277832 - RNA, 32 nt, Homo Sapiens
acggugcccgcgagcgccgcccccgcuggcua

SEQ ID NO: 277833 - RNA, 32 nt, Homo Sapiens
gaacauuaguaacauuuuuucuuagauauuuc

SEQ ID NO: 277834 - RNA, 32 nt, Homo Sapiens
ugucauggaacacuuaagccgcuugagugccu

SEQ ID NO: 277835 - RNA, 32 nt, Homo Sapiens
guuucauguuuguccuaagugugcuguugcua

SEQ ID NO: 277836 - RNA, 32 nt, Homo Sapiens
caugcuaccagacauggggaaccauuagaggu

SEQ ID NO: 277837 - RNA, 32 nt, Homo Sapiens
uguucccucuccuguuugccacggauccagag

SEQ ID NO: 277838 - RNA, 32 nt, Homo Sapiens
ucccaguguuaggguagcaugggauuacaggg

SEQ ID NO: 277839 - RNA, 32 nt, Homo Sapiens
cccgacccugugcuuugccuaauucgagcacg

SEQ ID NO: 277840 - RNA, 28 nt, Homo Sapiens
aggcaggggccuuccaggaugccuggug

SEQ ID NO: 277841 - RNA, 32 nt, Homo Sapiens
cugcaugguguuggcuggcaugcccaucagcu

SEQ ID NO: 277842 - RNA, 32 nt, Homo Sapiens
aucucuauuuaaaaaaugaacaaaauuaccug

SEQ ID NO: 277843 - RNA, 32 nt, Homo Sapiens
cuugccaggagucugcagaaccacguggcuag

SEQ ID NO: 277844 - RNA, 32 nt, Homo Sapiens
uucugauguuguguugucauuuucauuuuugc

SEQ ID NO: 277845 - RNA, 32 nt, Homo Sapiens
aacccaggagaguagcugggccaggcaagggg

SEQ ID NO: 277846 - RNA, 32 nt, Homo Sapiens
caucuuucauuacuuuuuucccauuuagcccc

SEQ ID NO: 277847 - RNA, 32 nt, Homo Sapiens
cacagcuagcuaugcaucuacauuuugguuug

SEQ ID NO: 277848 - RNA, 32 nt, Homo Sapiens
gagcaucugucagaucuguggcuucaggcagg

SEQ ID NO: 277849 - RNA, 32 nt, Homo Sapiens
agccccugcuccugccucccccgucccaccac

SEQ ID NO: 277850 - RNA, 32 nt, Homo Sapiens
aggaacuuguccuuuacccaguuuuuccuuug

SEQ ID NO: 277851 - RNA, 32 nt, Homo Sapiens
caucuacggggcaugucuaccgucagauagga

SEQ ID NO: 277852 - RNA, 32 nt, Homo Sapiens
uuuugaaaugcaguuuuuacuguaaucuuaac

SEQ ID NO: 277853 - RNA, 32 nt, Homo Sapiens
gccgagccgaacgucccggcccgccgcgcuuc

SEQ ID NO: 277854 - RNA, 32 nt, Homo Sapiens
cuacuaggcugacuauguaucaccucuucagc

SEQ ID NO: 277855 - RNA, 32 nt, Homo Sapiens
uauuucuuuucuaaaacagggauuuugaauau

SEQ ID NO: 277856 - RNA, 32 nt, Homo Sapiens
gugccacaucaauaacaacaguuuuuauguuu

SEQ ID NO: 277857 - RNA, 32 nt, Homo Sapiens
gccuugcagugaccccucuggaacucaggacu

SEQ ID NO: 277858 - RNA, 29 nt, Homo Sapiens
gcaugggguugccaguaccacaaaaacug

SEQ ID NO: 277859 - RNA, 32 nt, Homo Sapiens
uccuaaggccccagcucgcuggccucgcgcug

SEQ ID NO: 277860 - RNA, 31 nt, Homo Sapiens
ccucggcagaagaguaccgugagggaggcgg

SEQ ID NO: 277861 - RNA, 32 nt, Homo Sapiens
cgccgaggagaaggcgggaggggggugggggc

SEQ ID NO: 277862 - RNA, 32 nt, Homo Sapiens
aaggauugcuucugcuuuaaccucugaugcuu

SEQ ID NO: 277863 - RNA, 32 nt, Homo Sapiens
uauaauaguuuauuauguacaguuaauucuac

SEQ ID NO: 277864 - RNA, 32 nt, Homo Sapiens
uuaccugggaacaaauuuacuugaauauucag

SEQ ID NO: 277865 - RNA, 32 nt, Homo Sapiens
ccuguaacuaaauuucugucucuauagugucu

SEQ ID NO: 277866 - RNA, 32 nt, Homo Sapiens
ggggaggccaaggguuuggucuaagcugugcc

SEQ ID NO: 277867 - RNA, 32 nt, Homo Sapiens
agcuccaugcccgugagcugcuaugggguggu

SEQ ID NO: 277868 - RNA, 32 nt, Homo Sapiens
uaaucugcuuugugugacagcauuccaggcca

SEQ ID NO: 277869 - RNA, 32 nt, Homo Sapiens
cccagccccucucuccuuuuccuggacuggcu

SEQ ID NO: 277870 - RNA, 32 nt, Homo Sapiens
caccaaaacaauuuuuauuuccaguguuuaau

SEQ ID NO: 277871 - RNA, 32 nt, Homo Sapiens
auauuuuuaucuuuuccaaaauaaauuuguua

SEQ ID NO: 277872 - RNA, 32 nt, Homo Sapiens
gugauaggcauuccucaucuucuucacaauaa

SEQ ID NO: 277873 - RNA, 32 nt, Homo Sapiens
uuaaacaaaacgaaacaaaauccuucauauac

SEQ ID NO: 277874 - RNA, 32 nt, Homo Sapiens
uuaguugccacuuuuccgauugauguauuauu

SEQ ID NO: 277875 - RNA, 32 nt, Homo Sapiens
ucuggggccccugugacugcugccggaugcug

SEQ ID NO: 277876 - RNA, 32 nt, Homo Sapiens
guagcccuggcgcaagcaucucuucuuuuuuc

SEQ ID NO: 277877 - RNA, 31 nt, Homo Sapiens
agcggcggugucgcacuucucccgagaggcu

SEQ ID NO: 277878 - RNA, 32 nt, Homo Sapiens
gcacuuuuuucucauucccccaucucauuacc

SEQ ID NO: 277879 - RNA, 32 nt, Homo Sapiens
accaugaaguggcugcugcugcugggucuggu

SEQ ID NO: 277880 - RNA, 32 nt, Homo Sapiens
guuaugcucccucgccagccuauaccaagcug

SEQ ID NO: 277881 - RNA, 30 nt, Homo Sapiens
cuaggggcgcccgggcguuggaaccggcgg

SEQ ID NO: 277882 - RNA, 32 nt, Homo Sapiens
ucaguggaagcaggacugggggucuggcuugc

SEQ ID NO: 277883 - RNA, 32 nt, Homo Sapiens
cccaugucagcucccuaggagccacagcacca

SEQ ID NO: 277884 - RNA, 32 nt, Homo Sapiens
aggaaggcacaccacuguauuaguuuuauacu

SEQ ID NO: 277885 - RNA, 32 nt, Homo Sapiens
ucugcucgguccccggcagccgcgcuuccccu

SEQ ID NO: 277886 - RNA, 32 nt, Homo Sapiens
gugacuuccagaugaggcucacaggacuguac

SEQ ID NO: 277887 - RNA, 31 nt, Homo Sapiens
cacaccacugauaggaauguauaucaguaua

SEQ ID NO: 277888 - RNA, 32 nt, Homo Sapiens
gagcuauaauuggaacgcacacugccguccaa

SEQ ID NO: 277889 - RNA, 32 nt, Homo Sapiens
gugcugcggcggggcgugcugcgggacggcga

SEQ ID NO: 277890 - RNA, 32 nt, Homo Sapiens
uaggucucaggucagccuggcuccugagacgc

SEQ ID NO: 277891 - RNA, 32 nt, Homo Sapiens
aaucccggcccugcugugcugcugccauggcg

SEQ ID NO: 277892 - RNA, 32 nt, Homo Sapiens
cuccaguagugggugagguuuugccuuuguug

SEQ ID NO: 277893 - RNA, 29 nt, Homo Sapiens
uauggcuagagugacuauuuucugaauca

SEQ ID NO: 277894 - RNA, 32 nt, Homo Sapiens
auuucgauaucuucuuuuuuuuugagauggag

SEQ ID NO: 277895 - RNA, 32 nt, Homo Sapiens
uccagcaguuuaggaagccgaagugugcagau

SEQ ID NO: 277896 - RNA, 32 nt, Homo Sapiens
ugucugcauuguucuagagugaaacagguguc

SEQ ID NO: 277897 - RNA, 32 nt, Homo Sapiens
uaaaaauaaaauuucaguuacuuuuuaaaagc

SEQ ID NO: 277898 - RNA, 29 nt, Homo Sapiens
gacuuguucgauuauaaccacaaauugug

SEQ ID NO: 277899 - RNA, 32 nt, Homo Sapiens
accugcgcuccuuuuuuggggggauccuuugc

SEQ ID NO: 277900 - RNA, 32 nt, Homo Sapiens
gcggggaucccucccucccaccccuccccucc

SEQ ID NO: 277901 - RNA, 32 nt, Homo Sapiens
auauugagauggauauuuaacucugucaaacc

SEQ ID NO: 277902 - RNA, 32 nt, Homo Sapiens
uuuauuaucuucaaugaguccuugacuuugua

SEQ ID NO: 277903 - RNA, 32 nt, Homo Sapiens
auuuuuuaauaaauagacgaaaccacgaaaaa

SEQ ID NO: 277904 - RNA, 32 nt, Homo Sapiens
uagauuccugaacauucccaccucauuucacc

SEQ ID NO: 277905 - RNA, 32 nt, Homo Sapiens
cacuggaucucugaauacccaggcccccucca

SEQ ID NO: 277906 - RNA, 32 nt, Homo Sapiens
uuuuaaaaagguauuuauuccaaaguacuaaa

SEQ ID NO: 277907 - RNA, 30 nt, Homo Sapiens
gggcggacgagcagggcgccggcgccaugg

SEQ ID NO: 277908 - RNA, 32 nt, Homo Sapiens
ggcuuucuuuucuuuccuggguuccguggauu

SEQ ID NO: 277909 - RNA, 32 nt, Homo Sapiens
ggaagcuaaacaccaccucacacuugacaaug

SEQ ID NO: 277910 - RNA, 32 nt, Homo Sapiens
ggugcaggagucagcaucaucuuugggagguu

SEQ ID NO: 277911 - RNA, 32 nt, Homo Sapiens
cuguacaguggccagcaguguccuccagcacu

SEQ ID NO: 277912 - RNA, 32 nt, Homo Sapiens
gggacucagcagccuucucuggcucugggucc

SEQ ID NO: 277913 - RNA, 32 nt, Homo Sapiens
uuuauaaugaauuuugguuugaggaagccaca

SEQ ID NO: 277914 - RNA, 32 nt, Homo Sapiens
ugugggccagcuucccgguggaugcccacuga

SEQ ID NO: 277915 - RNA, 26 nt, Homo Sapiens
aauaaauaaaguucuuuuuuaguucc

SEQ ID NO: 277916 - RNA, 32 nt, Homo Sapiens
ggagugggcuccucggggucgggcaucugcug

SEQ ID NO: 277917 - RNA, 32 nt, Homo Sapiens
caaacuugaauaggggcuggggugcugucuuc

SEQ ID NO: 277918 - RNA, 32 nt, Homo Sapiens
guuaucuuguuaaaaaacgaugaugauguuaa

SEQ ID NO: 277919 - RNA, 30 nt, Homo Sapiens
auaucucuauacugcaucauauucggcaug

SEQ ID NO: 277920 - RNA, 32 nt, Homo Sapiens
auuguacuuuauuuuggagccaaaaaauugau

SEQ ID NO: 277921 - RNA, 32 nt, Homo Sapiens
guuggccuauuaucuggaugucccuugccuag

SEQ ID NO: 277922 - RNA, 32 nt, Homo Sapiens
gaacccagcccauuugcacacuaaaaaaaaaa

SEQ ID NO: 277923 - RNA, 32 nt, Homo Sapiens
gaugugaggcugcuguuggggguggggggagg

SEQ ID NO: 277924 - RNA, 32 nt, Homo Sapiens
guguaggccugccuguguucucauguggauuu

SEQ ID NO: 277925 - RNA, 32 nt, Homo Sapiens
caacaacaaaaaugccaggugugguggggugc

SEQ ID NO: 277926 - RNA, 32 nt, Homo Sapiens
acuaaggggcuuugcuuuucaaaccagagaaa

SEQ ID NO: 277927 - RNA, 32 nt, Homo Sapiens
gcugccuggagcuucccacccugcugugguca

SEQ ID NO: 277928 - RNA, 32 nt, Homo Sapiens
uuauguagaguuuuuaugccuuucucuccuag

SEQ ID NO: 277929 - RNA, 32 nt, Homo Sapiens
gacaaaggugccugcuucuccuuugccuuuug

SEQ ID NO: 277930 - RNA, 32 nt, Homo Sapiens
cuucuaggaugaauucauaauugggagauucu

SEQ ID NO: 277931 - RNA, 32 nt, Homo Sapiens
uaguuucaguuaucagaguauuagaccagacu

SEQ ID NO: 277932 - RNA, 32 nt, Homo Sapiens
ccuccgggcacugacgggccggugccuccgcc

SEQ ID NO: 277933 - RNA, 32 nt, Homo Sapiens
cagccggggcgauggcggggcucuggcugggg

SEQ ID NO: 277934 - RNA, 28 nt, Homo Sapiens
ugccaggaagauuaaauggugaagggcc

SEQ ID NO: 277935 - RNA, 32 nt, Homo Sapiens
cucagcucugcaaagagcuccucccccuccag

SEQ ID NO: 277936 - RNA, 32 nt, Homo Sapiens
acacugauuuucuguaucguuguuaugaaagc

SEQ ID NO: 277937 - RNA, 32 nt, Homo Sapiens
gguauuucgggcccuccucuucaggaaucuuc

SEQ ID NO: 277938 - RNA, 32 nt, Homo Sapiens
agugcacaaaguacaaaggaauuuauacagau

SEQ ID NO: 277939 - RNA, 32 nt, Homo Sapiens
cagcagcagcagcagcagcagccuccgccgcc

SEQ ID NO: 277940 - RNA, 32 nt, Homo Sapiens
gugcuccuccucggggugggaccccuguggcu

SEQ ID NO: 277941 - RNA, 32 nt, Homo Sapiens
cagaacucuaguuugauucaguuucuugccuc

SEQ ID NO: 277942 - RNA, 32 nt, Homo Sapiens
agcguccagggccagcgagcucccccggcagc

SEQ ID NO: 277943 - RNA, 32 nt, Homo Sapiens
gauaugcuuuugucuuagauggaugucagcag

SEQ ID NO: 277944 - RNA, 32 nt, Homo Sapiens
gaauaaaaggauuugcguuaaaaguugcugaa

SEQ ID NO: 277945 - RNA, 32 nt, Homo Sapiens
ucauuacaaaaguuaacguaacaaagaaucug

SEQ ID NO: 277946 - RNA, 32 nt, Homo Sapiens
ugaacaaaaacugaagugaaaacucauagugc

SEQ ID NO: 277947 - RNA, 32 nt, Homo Sapiens
uaacucaaacgauaaugaucauaguccaaagu

SEQ ID NO: 277948 - RNA, 32 nt, Homo Sapiens
aucuggguccaggcccggguccucccugcaga

SEQ ID NO: 277949 - RNA, 32 nt, Homo Sapiens
cuuuaacaugcuaucauaguacauuuagaaug

SEQ ID NO: 277950 - RNA, 32 nt, Homo Sapiens
aacggggaauaauaguaauaauaggaauaaug

SEQ ID NO: 277951 - RNA, 32 nt, Homo Sapiens
cagauucuccagccuucugccagcuuuaaaac

SEQ ID NO: 277952 - RNA, 32 nt, Homo Sapiens
ccccuagcuagaggcagggcugucccacagaa

SEQ ID NO: 277953 - RNA, 32 nt, Homo Sapiens
uaaagcauuuucuguuugauaagagaacuggc

SEQ ID NO: 277954 - RNA, 32 nt, Homo Sapiens
gguuuugccauauuggccaggcuggucucaaa

SEQ ID NO: 277955 - RNA, 32 nt, Homo Sapiens
cgaagccaguucacagucagugcagcgguuac

SEQ ID NO: 277956 - RNA, 32 nt, Homo Sapiens
augcagcuggcguagguggcaguugggccugg

SEQ ID NO: 277957 - RNA, 32 nt, Homo Sapiens
ccggccgggaggagggaccgggucugcggagc

SEQ ID NO: 277958 - RNA, 32 nt, Homo Sapiens
uuucuucugcaccuuggcuauucuguuuaaau

SEQ ID NO: 277959 - RNA, 32 nt, Homo Sapiens
caucuuuuaaacagguucaugggacagaguua

SEQ ID NO: 277960 - RNA, 32 nt, Homo Sapiens
uguuaugaauaaagcugcugugaauguucuug

SEQ ID NO: 277961 - RNA, 32 nt, Homo Sapiens
agcagccuuuggagcccuggaacuuaagaugu

SEQ ID NO: 277962 - RNA, 32 nt, Homo Sapiens
gccuugaggacuucauucugugccucuccuug

SEQ ID NO: 277963 - RNA, 32 nt, Homo Sapiens
uccagggagcaggcggugggcacccacccugg

SEQ ID NO: 277964 - RNA, 32 nt, Homo Sapiens
accucuagcuguucuuuuuuguacuuuucugg

SEQ ID NO: 277965 - RNA, 32 nt, Homo Sapiens
uauuugugcuuugcggggugagguccucauga

SEQ ID NO: 277966 - RNA, 32 nt, Homo Sapiens
uuuuuguuuucuucuuuuuuuaaacauucaua

SEQ ID NO: 277967 - RNA, 32 nt, Homo Sapiens
ucucugcuauauguuucuguccugcugucugu

SEQ ID NO: 277968 - RNA, 32 nt, Homo Sapiens
auaucuauuuuuguuuuugucuuuuuccuuua

SEQ ID NO: 277969 - RNA, 32 nt, Homo Sapiens
gcuuuacuggccugggcacaccuaccaaucuu

SEQ ID NO: 277970 - RNA, 32 nt, Homo Sapiens
gaucuuuuauuuucuauuauuuauacuucaga

SEQ ID NO: 277971 - RNA, 32 nt, Homo Sapiens
aaauguaguuuucaugacaauuuuauauugau

SEQ ID NO: 277972 - RNA, 32 nt, Homo Sapiens
acuuugagaagcugagcagagcuuccagcaau

SEQ ID NO: 277973 - RNA, 32 nt, Homo Sapiens
agucaacccaauauuucuacuacauucuuuaa

SEQ ID NO: 277974 - RNA, 32 nt, Homo Sapiens
aggagauaccuagauaccuguuuaccugggga

SEQ ID NO: 277975 - RNA, 32 nt, Homo Sapiens
gggagucgggggaagacgcggcaggccggccg

SEQ ID NO: 277976 - RNA, 32 nt, Homo Sapiens
guuuggggaaaggcuuucuaagugauuuugau

SEQ ID NO: 277977 - RNA, 30 nt, Homo Sapiens
cucugugucuguguugugaagcuugagacu

SEQ ID NO: 277978 - RNA, 32 nt, Homo Sapiens
augcacgcugggggcucuguuuuccugcacac

SEQ ID NO: 277979 - RNA, 32 nt, Homo Sapiens
aagaucauuucuugccucugguaacuuggggg

SEQ ID NO: 277980 - RNA, 32 nt, Homo Sapiens
uuacuuuuacacaagaugagcacgcgugccga

SEQ ID NO: 277981 - RNA, 32 nt, Homo Sapiens
gugggcgcagcacgcuccucagccgcccgccc

SEQ ID NO: 277982 - RNA, 32 nt, Homo Sapiens
ggggaggaggagagggcgcacgcugcggguac

SEQ ID NO: 277983 - RNA, 32 nt, Homo Sapiens
uugaugaauuccaguuauucuaagguucuuug

SEQ ID NO: 277984 - RNA, 32 nt, Homo Sapiens
ggccgggcacgguggcucacgccuguaaucuc

SEQ ID NO: 277985 - RNA, 32 nt, Homo Sapiens
ggccgggcacgguggcucacgcuuguaauccc

SEQ ID NO: 277986 - RNA, 32 nt, Homo Sapiens
aauggugcauauaagaaauauugacaguguuu

SEQ ID NO: 277987 - RNA, 32 nt, Homo Sapiens
cuccgcuaacuguucucuucuuuuccuuauua

SEQ ID NO: 277988 - RNA, 32 nt, Homo Sapiens
agggcaggcgggaggugagcgcggccaucccg

SEQ ID NO: 277989 - RNA, 32 nt, Homo Sapiens
gggcagggccagggcgggaggagcuggggagc

SEQ ID NO: 277990 - RNA, 32 nt, Homo Sapiens
gcgauuugcgacaguggggggggcgguggagg

SEQ ID NO: 277991 - RNA, 32 nt, Homo Sapiens
ggcaaccuccagguacacuuggcacucacaug

SEQ ID NO: 277992 - RNA, 32 nt, Homo Sapiens
cccuucgcccgggcugcccuugaggggccugc

SEQ ID NO: 277993 - RNA, 32 nt, Homo Sapiens
ugguggccuccucauucucuuuugccauugga

SEQ ID NO: 277994 - RNA, 32 nt, Homo Sapiens
uaagaauuugacuuucugaaugaaauaacaga

SEQ ID NO: 277995 - RNA, 32 nt, Homo Sapiens
augauuaguguguauauuaacguuauagauuu

SEQ ID NO: 277996 - RNA, 32 nt, Homo Sapiens
aagagagagggcugggugggagcccagaagga

SEQ ID NO: 277997 - RNA, 32 nt, Homo Sapiens
uugccccgggccguagcccgcgagaggcggcg

SEQ ID NO: 277998 - RNA, 32 nt, Homo Sapiens
cagagacucugcagcuugcaguggacauagau

SEQ ID NO: 277999 - RNA, 30 nt, Homo Sapiens
cucccaccucuugccaccugcugcugcuau

SEQ ID NO: 278000 - RNA, 32 nt, Homo Sapiens
accuaggcgggcgggagcugugcggcccaggg

SEQ ID NO: 278001 - RNA, 32 nt, Homo Sapiens
aagaucgggacuuuucugcgccccuccaccaa

SEQ ID NO: 278002 - RNA, 32 nt, Homo Sapiens
uaagaagaacagaaaaucuucuuauccucuuu

SEQ ID NO: 278003 - RNA, 32 nt, Homo Sapiens
ccuaccuugugcuugucugacuaguaucaccc

SEQ ID NO: 278004 - RNA, 32 nt, Homo Sapiens
auuccauauaaaaggacauauuuggcuauuuc

SEQ ID NO: 278005 - RNA, 32 nt, Homo Sapiens
acgguggggaugcugcagaucggggaggacgu

SEQ ID NO: 278006 - RNA, 32 nt, Homo Sapiens
guuccuugcccuccccaccccaucccagagcg

SEQ ID NO: 278007 - RNA, 32 nt, Homo Sapiens
cuuuuuaaaaauuuuuuuucuuuuaaaauauu

SEQ ID NO: 278008 - RNA, 32 nt, Homo Sapiens
ugggcagagcuggccuggcucugaguggccac

SEQ ID NO: 278009 - RNA, 30 nt, Homo Sapiens
gggcgccccgugucgccgccggagaggcac

SEQ ID NO: 278010 - RNA, 32 nt, Homo Sapiens
ugcacaaacauguguguacaugugcuugccau

SEQ ID NO: 278011 - RNA, 32 nt, Homo Sapiens
auaaaaggcuaccuuaaauaagacaugaugaa

SEQ ID NO: 278012 - RNA, 32 nt, Homo Sapiens
gagggcauuugcugcaaagacacacacaauca

SEQ ID NO: 278013 - RNA, 32 nt, Homo Sapiens
ccugagcacuaaaaggaggggucccugaagcu

SEQ ID NO: 278014 - RNA, 31 nt, Homo Sapiens
auguuguuuucauuugguccaaauaauauuu

SEQ ID NO: 278015 - RNA, 32 nt, Homo Sapiens
aaaccaaugcaaauggagaaauauauuucacc

SEQ ID NO: 278016 - RNA, 32 nt, Homo Sapiens
gcacauuauuaagaauggaaaaauauuuuuug

SEQ ID NO: 278017 - RNA, 32 nt, Homo Sapiens
uauuguuuuaaaaguuuuaacuucaaaauaug

SEQ ID NO: 278018 - RNA, 32 nt, Homo Sapiens
uuaaguaacccauuuuauccuucagaaccuca

SEQ ID NO: 278019 - RNA, 32 nt, Homo Sapiens
caggaaaacaaggcucagggugccuacugauu

SEQ ID NO: 278020 - RNA, 32 nt, Homo Sapiens
gcaucauggggcugcgugauguggcugcugug

SEQ ID NO: 278021 - RNA, 32 nt, Homo Sapiens
cauggaauugguuuaaacuuuuaugcgcaaau

SEQ ID NO: 278022 - RNA, 32 nt, Homo Sapiens
ccauuggaaaauuuaagacaaguucaacaaca

SEQ ID NO: 278023 - RNA, 32 nt, Homo Sapiens
acucccccgagcuccagcugccuuaggaggag

SEQ ID NO: 278024 - RNA, 32 nt, Homo Sapiens
acagcagaaccugaggagaaaagcagguggaa

SEQ ID NO: 278025 - RNA, 32 nt, Homo Sapiens
uugccucauuauucuuguuuuaaaagaaagaa

SEQ ID NO: 278026 - RNA, 32 nt, Homo Sapiens
gaccagcaccucagaugggaagcagaagggca

SEQ ID NO: 278027 - RNA, 32 nt, Homo Sapiens
aaugagcugggugugguggcgcgugccuguag

SEQ ID NO: 278028 - RNA, 32 nt, Homo Sapiens
gacagagcugucuuccuucugcaugucagcac

SEQ ID NO: 278029 - RNA, 32 nt, Homo Sapiens
ccuuacuucccuccccuggcacaaaggagccg

SEQ ID NO: 278030 - RNA, 32 nt, Homo Sapiens
cuccagccucuuuccuccuccucccgcagcuc

SEQ ID NO: 278031 - RNA, 32 nt, Homo Sapiens
gagguggauaggucggugauguguggagcgga

SEQ ID NO: 278032 - RNA, 32 nt, Homo Sapiens
ggaaaugcaaaacaggugaauuuucaagcgcu

SEQ ID NO: 278033 - RNA, 32 nt, Homo Sapiens
agaugguuucuuagcucuccauuugccaugau

SEQ ID NO: 278034 - RNA, 32 nt, Homo Sapiens
cuuguuacuaagcagauuuaagggucaguggg

SEQ ID NO: 278035 - RNA, 32 nt, Homo Sapiens
ccccaugcaaagugggaugguuuucauauguc

SEQ ID NO: 278036 - RNA, 32 nt, Homo Sapiens
cugaaauagaaagcagaguucgagaacuaagc

SEQ ID NO: 278037 - RNA, 32 nt, Homo Sapiens
ugucaucuagcccccaggagagggggucagug

SEQ ID NO: 278038 - RNA, 32 nt, Homo Sapiens
gugucgggcagcgauguacauauggagguggg

SEQ ID NO: 278039 - RNA, 32 nt, Homo Sapiens
cauugacagggaggaucaaauuccugacuuac

SEQ ID NO: 278040 - RNA, 32 nt, Homo Sapiens
acuuugcuccaacaacuugaaacaagucacuu

SEQ ID NO: 278041 - RNA, 32 nt, Homo Sapiens
gccuucccaccccaucgucuccacuucaggaa

SEQ ID NO: 278042 - RNA, 32 nt, Homo Sapiens
cuggagccgggcggagccagcgccccggcgca

SEQ ID NO: 278043 - RNA, 32 nt, Homo Sapiens
cgcgagucccgccugaccccgucgcugccucu

SEQ ID NO: 278044 - RNA, 32 nt, Homo Sapiens
gaggucaggugccucccagcccugcccagagu

SEQ ID NO: 278045 - RNA, 32 nt, Homo Sapiens
uacccaaggcugcuggugcugcuggugugacu

SEQ ID NO: 278046 - RNA, 32 nt, Homo Sapiens
cacccagcccuccugcuccaagagggauaacc

SEQ ID NO: 278047 - RNA, 32 nt, Homo Sapiens
accucugccucccagguucaagugauucuccu

SEQ ID NO: 278048 - RNA, 31 nt, Homo Sapiens
acucagucaaacacucuuugagcuucccuuc

SEQ ID NO: 278049 - RNA, 32 nt, Homo Sapiens
accuccgccucccagguucaagugauucuucu

SEQ ID NO: 278050 - RNA, 32 nt, Homo Sapiens
gaaaaaauaaauuccugaaguauaaagaaaaa

SEQ ID NO: 278051 - RNA, 31 nt, Homo Sapiens
ucuuuauguaacauugaagaaauguuguuac

SEQ ID NO: 278052 - RNA, 32 nt, Homo Sapiens
cccauaccuacugaauuagaaacucuagggga

SEQ ID NO: 278053 - RNA, 32 nt, Homo Sapiens
auggcaguuuccaggaccuccauuccacucau

SEQ ID NO: 278054 - RNA, 32 nt, Homo Sapiens
cuucugaucuucugaccuucugugcuuuuugu

SEQ ID NO: 278055 - RNA, 32 nt, Homo Sapiens
cucccagcagacggagccaggacgggcacaag

SEQ ID NO: 278056 - RNA, 32 nt, Homo Sapiens
uggcagccgugcggagcccgcgugagggucac

SEQ ID NO: 278057 - RNA, 32 nt, Homo Sapiens
aacuauacuauaaggccauugucaccaaaaca

SEQ ID NO: 278058 - RNA, 32 nt, Homo Sapiens
gccacaccccacaacccccuauauuauuuugg

SEQ ID NO: 278059 - RNA, 32 nt, Homo Sapiens
gccgcacccacaccccaacucccucccaagaa

SEQ ID NO: 278060 - RNA, 32 nt, Homo Sapiens
ccugguuucuuagaauaauuauuaauccuccc

SEQ ID NO: 278061 - RNA, 32 nt, Homo Sapiens
guuagaccucauccuccccuagcuuagcuguc

SEQ ID NO: 278062 - RNA, 32 nt, Homo Sapiens
acaguauucaugagaccaucugauggaaucag

SEQ ID NO: 278063 - RNA, 32 nt, Homo Sapiens
aaauuaacaacccagaaacaaaaaucucuaua

SEQ ID NO: 278064 - RNA, 32 nt, Homo Sapiens
uggggaccauggaguucacggcgucccccaag

SEQ ID NO: 278065 - RNA, 32 nt, Homo Sapiens
gagccccuggggaguaggugguggccugugcc

SEQ ID NO: 278066 - RNA, 32 nt, Homo Sapiens
uccccucagccucuccucacuauggccccagu

SEQ ID NO: 278067 - RNA, 32 nt, Homo Sapiens
ucaacugaaggucaauacuaagagccacaggu

SEQ ID NO: 278068 - RNA, 32 nt, Homo Sapiens
cuggaaucugaagagacaugagaugguagaca

SEQ ID NO: 278069 - RNA, 32 nt, Homo Sapiens
cuguguucgguuuccaguucuaccucuugcug

SEQ ID NO: 278070 - RNA, 32 nt, Homo Sapiens
accacagacuauuaaaacuaauaaucaccaua

SEQ ID NO: 278071 - RNA, 32 nt, Homo Sapiens
gcugcgggcuccuggcugcuggagcugagcgg

SEQ ID NO: 278072 - RNA, 32 nt, Homo Sapiens
uaguacaaaaauacaaucaugcuauuuugaaa

SEQ ID NO: 278073 - RNA, 29 nt, Homo Sapiens
uagcaugccugguuguacgauagagcuga

SEQ ID NO: 278074 - RNA, 32 nt, Homo Sapiens
accauuuuucccaugagaaagaagccaaugac

SEQ ID NO: 278075 - RNA, 32 nt, Homo Sapiens
auugcaagccagccccgugggcaaauuuguau

SEQ ID NO: 278076 - RNA, 32 nt, Homo Sapiens
gggagguggcuccugggucaucuuucacaagg

SEQ ID NO: 278077 - RNA, 32 nt, Homo Sapiens
ucugaggaaggacaauucgacaaaagaaugga

SEQ ID NO: 278078 - RNA, 30 nt, Homo Sapiens
aucggcgcacuugccacgaucuuggacggg

SEQ ID NO: 278079 - RNA, 32 nt, Homo Sapiens
gcauggauuugacaaagauaacaaagacagaa

SEQ ID NO: 278080 - RNA, 32 nt, Homo Sapiens
uagcccugagaagggaggcuaugaccccaggu

SEQ ID NO: 278081 - RNA, 32 nt, Homo Sapiens
gagcaaguuuuuaucagcaagcaauauuuuca

SEQ ID NO: 278082 - RNA, 32 nt, Homo Sapiens
uuaaaaaacuaaaacacauccugguaguccca

SEQ ID NO: 278083 - RNA, 32 nt, Homo Sapiens
gagucaucccagaagcaguggcugggaggugg

SEQ ID NO: 278084 - RNA, 32 nt, Homo Sapiens
uuuuacuauuuguacuuuuauguaauaaaaug

SEQ ID NO: 278085 - RNA, 32 nt, Homo Sapiens
caccuuaauauggaggagagaauaguauucca

SEQ ID NO: 278086 - RNA, 32 nt, Homo Sapiens
cgacgugugucgcucuccugagggcgaggaug

SEQ ID NO: 278087 - RNA, 32 nt, Homo Sapiens
uggagggaguggcucugugcuuucuacccaag

SEQ ID NO: 278088 - RNA, 32 nt, Homo Sapiens
agugcccgucggcgucuugguccuccuguccc

SEQ ID NO: 278089 - RNA, 32 nt, Homo Sapiens
uacucuugcugcccuccucccccgaccuugcc

SEQ ID NO: 278090 - RNA, 32 nt, Homo Sapiens
agaucuuuccaaugaaugguguuucacaguaa

SEQ ID NO: 278091 - RNA, 32 nt, Homo Sapiens
uuuuuuccugcacaugugaacacacacacaca

SEQ ID NO: 278092 - RNA, 32 nt, Homo Sapiens
aaucacugguuuauacaaagcuuuauuuaggg

SEQ ID NO: 278093 - RNA, 32 nt, Homo Sapiens
caccccggagaccuuuuuggaggccuccaagc

SEQ ID NO: 278094 - RNA, 32 nt, Homo Sapiens
auuugccccagcuggucucaaaccccugggcu

SEQ ID NO: 278095 - RNA, 32 nt, Homo Sapiens
cauccguucauuucgcgugcacugaggaccuc

SEQ ID NO: 278096 - RNA, 32 nt, Homo Sapiens
uccaucaacagcuaauuauccaaagauaguau

SEQ ID NO: 278097 - RNA, 32 nt, Homo Sapiens
aauuugauugacugauuuuaagaucagccaua

SEQ ID NO: 278098 - RNA, 32 nt, Homo Sapiens
ccuggguuugggcugcagucaccuggagaagc

SEQ ID NO: 278099 - RNA, 32 nt, Homo Sapiens
uuguucuaaaaauuaaguuuaaacaugcugaa

SEQ ID NO: 278100 - RNA, 32 nt, Homo Sapiens
aaaacagcacuauauuucugaucugucacugu

SEQ ID NO: 278101 - RNA, 32 nt, Homo Sapiens
ccccucccugccagcacccccacgcccucauu

SEQ ID NO: 278102 - RNA, 32 nt, Homo Sapiens
agccccuagccccuucccuccuccuggggccu

SEQ ID NO: 278103 - RNA, 32 nt, Homo Sapiens
auuuuaauggcugccuuuucauuuucaucuuu

SEQ ID NO: 278104 - RNA, 32 nt, Homo Sapiens
accucccggcuuugccguucagauggggcucc

SEQ ID NO: 278105 - RNA, 32 nt, Homo Sapiens
uguuuguuuggcacugaugcaauguauggcuu

SEQ ID NO: 278106 - RNA, 32 nt, Homo Sapiens
ugcuguuggggguggggggaggggaaugggca

SEQ ID NO: 278107 - RNA, 32 nt, Homo Sapiens
ucuggcagauucaaaucguuuauuucacacgc

SEQ ID NO: 278108 - RNA, 32 nt, Homo Sapiens
uuuuccaaacgcuuuaaauauucuucaaauga

SEQ ID NO: 278109 - RNA, 30 nt, Homo Sapiens
guagugcucugggugggggaaaauguuuaa

SEQ ID NO: 278110 - RNA, 32 nt, Homo Sapiens
ugucccaggguggaagguggggagggggccgg

SEQ ID NO: 278111 - RNA, 32 nt, Homo Sapiens
uccaaccuguaaaaugagccuacuucaacuca

SEQ ID NO: 278112 - RNA, 32 nt, Homo Sapiens
gcagagcggugcagcccuccuucccuuccauu

SEQ ID NO: 278113 - RNA, 32 nt, Homo Sapiens
ucugcgagugaagagggacgagggaaaagaaa

SEQ ID NO: 278114 - RNA, 32 nt, Homo Sapiens
cacgcgcgggcucgcgcuucgguuuccccaga

SEQ ID NO: 278115 - RNA, 32 nt, Homo Sapiens
caaagaagaaacaaaaccaguugcaccuuaaa

SEQ ID NO: 278116 - RNA, 32 nt, Homo Sapiens
acgcucggccgggccccggcccgcgcucaacg

SEQ ID NO: 278117 - RNA, 32 nt, Homo Sapiens
uucuguguauaaauaauaaaguaggcauuugu

SEQ ID NO: 278118 - RNA, 32 nt, Homo Sapiens
augacacuaugaaagaaugucuuuaaguuucu

SEQ ID NO: 278119 - RNA, 32 nt, Homo Sapiens
cuguuaggugccuccuucuuuucuuuccucaa

SEQ ID NO: 278120 - RNA, 32 nt, Homo Sapiens
gccccuaccggccccccuccccgguuagcggg

SEQ ID NO: 278121 - RNA, 32 nt, Homo Sapiens
cugggcgaucccagccccuccccacccacccu

SEQ ID NO: 278122 - RNA, 31 nt, Homo Sapiens
gaccaucucucuuauuaauagagaaguaaaa

SEQ ID NO: 278123 - RNA, 32 nt, Homo Sapiens
gagcagcgugcaggagcaaggcugcccugucc

SEQ ID NO: 278124 - RNA, 32 nt, Homo Sapiens
gacaccuuuugcaucucccccauccacauagc

SEQ ID NO: 278125 - RNA, 32 nt, Homo Sapiens
guguucugccagcaccgcccuucacccggccu

SEQ ID NO: 278126 - RNA, 32 nt, Homo Sapiens
cuggagcugcgcaggcugguggagaccaugcg

SEQ ID NO: 278127 - RNA, 32 nt, Homo Sapiens
ucucauaaauaaauaaauacauaaauaaagcu

SEQ ID NO: 278128 - RNA, 32 nt, Homo Sapiens
aguucuggcucuucuuucuuugggguucucug

SEQ ID NO: 278129 - RNA, 32 nt, Homo Sapiens
ggaagcugcagcuugggagagccccuggggcc

SEQ ID NO: 278130 - RNA, 32 nt, Homo Sapiens
aaaggccccucuauuuuauuuuucuugaaaac

SEQ ID NO: 278131 - RNA, 32 nt, Homo Sapiens
uugggaggggauguuaagucaaaucacuaaaa

SEQ ID NO: 278132 - RNA, 32 nt, Homo Sapiens
gaagugucaagcgggcgcucccccaucuccgc

SEQ ID NO: 278133 - RNA, 32 nt, Homo Sapiens
ggucugagauuauauuguaauuuuauacuuuc

SEQ ID NO: 278134 - RNA, 32 nt, Homo Sapiens
uuuauaauaagucuuguugguuauggugagua

SEQ ID NO: 278135 - RNA, 32 nt, Homo Sapiens
auaaacguguauuuguuguucuuaucaguccc

SEQ ID NO: 278136 - RNA, 32 nt, Homo Sapiens
agucuucuguuuucuuuuugaauucuaacauu

SEQ ID NO: 278137 - RNA, 32 nt, Homo Sapiens
uuaccacaacagcagcugaacuguuguaacca

SEQ ID NO: 278138 - RNA, 32 nt, Homo Sapiens
agcugccccuccccgaggacccgccucccuug

SEQ ID NO: 278139 - RNA, 32 nt, Homo Sapiens
ggaggagccaggcaggcugccucgguaguucc

SEQ ID NO: 278140 - RNA, 32 nt, Homo Sapiens
uuuggguaauuauaggcuuguuuucuuaauau

SEQ ID NO: 278141 - RNA, 32 nt, Homo Sapiens
cgacuggaagggacuacugauguucugugaua

SEQ ID NO: 278142 - RNA, 32 nt, Homo Sapiens
ggauagacagguccagggcuccccucacuugg

SEQ ID NO: 278143 - RNA, 32 nt, Homo Sapiens
cuuuuuaauauuuguuuagauaugacauuuau

SEQ ID NO: 278144 - RNA, 32 nt, Homo Sapiens
aagauugugcuaauuuauuagagcagaaccug

SEQ ID NO: 278145 - RNA, 32 nt, Homo Sapiens
gcagaacuaaucuuuugcaaguuaucacagug

SEQ ID NO: 278146 - RNA, 32 nt, Homo Sapiens
cugaacacaauuuugggacaacguuuaaacau

SEQ ID NO: 278147 - RNA, 32 nt, Homo Sapiens
aggcauggaaaggaggcgcagauggcggcacu

SEQ ID NO: 278148 - RNA, 32 nt, Homo Sapiens
auagauacaguguuucuagaaacaaguaaaug

SEQ ID NO: 278149 - RNA, 32 nt, Homo Sapiens
uuguucuuuguacagcuguuugaaaagaguga

SEQ ID NO: 278150 - RNA, 32 nt, Homo Sapiens
gagauauauggacaucagaagaaaccuuucuc

SEQ ID NO: 278151 - RNA, 32 nt, Homo Sapiens
aguuaaaaagccaccugagcuccugaggccau

SEQ ID NO: 278152 - RNA, 32 nt, Homo Sapiens
gcgccucggagcccggcccgcccuccggcuac

SEQ ID NO: 278153 - RNA, 32 nt, Homo Sapiens
auuccgcauccacaauaugacucgccuuccac

SEQ ID NO: 278154 - RNA, 32 nt, Homo Sapiens
aagguuaaauuucaagcaaaaugcuuacaggg

SEQ ID NO: 278155 - RNA, 32 nt, Homo Sapiens
cccacaucacaguuccaccucccccaacacuc

SEQ ID NO: 278156 - RNA, 32 nt, Homo Sapiens
guugguuaaaacacaaauggauucauucuuuc

SEQ ID NO: 278157 - RNA, 32 nt, Homo Sapiens
aaugauaaauguuugagaugauggaaaugcug

SEQ ID NO: 278158 - RNA, 32 nt, Homo Sapiens
gagcucccuuuucuaagguguuuuuguuuuuu

SEQ ID NO: 278159 - RNA, 30 nt, Homo Sapiens
gcgcggagccuucccuucgcccuggugagg

SEQ ID NO: 278160 - RNA, 30 nt, Homo Sapiens
uaagucugcgcugcugcaggagggcugggg

SEQ ID NO: 278161 - RNA, 32 nt, Homo Sapiens
cgccccugcuccauguccuuguguggcugcuc

SEQ ID NO: 278162 - RNA, 32 nt, Homo Sapiens
uugggcuugcuagauacagaaaacacuuaagg

SEQ ID NO: 278163 - RNA, 32 nt, Homo Sapiens
aaaaucccccagcccagcccagcccagcccca

SEQ ID NO: 278164 - RNA, 32 nt, Homo Sapiens
agguguaagaacuggcuggagguugaauguuu

SEQ ID NO: 278165 - RNA, 32 nt, Homo Sapiens
gaccccugcuccaggccaggaaugagcaccuu

SEQ ID NO: 278166 - RNA, 32 nt, Homo Sapiens
acuugaaaacaaaaaacaguuacuuauaguca

SEQ ID NO: 278167 - RNA, 32 nt, Homo Sapiens
agcucuggugccugcccucuggugcgagcuga

SEQ ID NO: 278168 - RNA, 32 nt, Homo Sapiens
aggcucagcucucuccaccacccagcucuucc

SEQ ID NO: 278169 - RNA, 32 nt, Homo Sapiens
agccgcgcgggcccgcggagugcauggugccc

SEQ ID NO: 278170 - RNA, 32 nt, Homo Sapiens
gacaaaacgccuuaaagcccccggcccagccc

SEQ ID NO: 278171 - RNA, 32 nt, Homo Sapiens
aucaccccaguuuccgcccccaucaucacaug

SEQ ID NO: 278172 - RNA, 32 nt, Homo Sapiens
cagaaggagcugaguucucuagaccagaagag

SEQ ID NO: 278173 - RNA, 28 nt, Homo Sapiens
gauaugucaauacccuuacauucacugc

SEQ ID NO: 278174 - RNA, 32 nt, Homo Sapiens
uucuaagugaccugcucuguguuuggucucuc

SEQ ID NO: 278175 - RNA, 32 nt, Homo Sapiens
cccuagcaguugcugcauauguguguacagac

SEQ ID NO: 278176 - RNA, 32 nt, Homo Sapiens
ggggccccucggcuaccccccgucuccugccg

SEQ ID NO: 278177 - RNA, 32 nt, Homo Sapiens
aaagcagcagcaugucaccucccccacgcccc

SEQ ID NO: 278178 - RNA, 32 nt, Homo Sapiens
acaaccgugccggcugcugcccgugcugccag

SEQ ID NO: 278179 - RNA, 32 nt, Homo Sapiens
acuuuuugccacuaacugaauucuucaaauac

SEQ ID NO: 278180 - RNA, 32 nt, Homo Sapiens
cuacagcuccacggaggggucugggggcagaa

SEQ ID NO: 278181 - RNA, 32 nt, Homo Sapiens
gcuuaagaucacauuuugagguaguggggguu

SEQ ID NO: 278182 - RNA, 30 nt, Homo Sapiens
caccuugucugugaagccagaagccagaag

SEQ ID NO: 278183 - RNA, 32 nt, Homo Sapiens
aaauuaaaaaccaacagacuccauuuagaaag

SEQ ID NO: 278184 - RNA, 32 nt, Homo Sapiens
ggggaccgugcagcugucggcugaugaggagg

SEQ ID NO: 278185 - RNA, 32 nt, Homo Sapiens
gucauugaaaagacagaaucauggccaagaau

SEQ ID NO: 278186 - RNA, 32 nt, Homo Sapiens
cucccaagggaagagaaugggcagcagguaug

SEQ ID NO: 278187 - RNA, 32 nt, Homo Sapiens
ucuuuuuccucuuggcauuucuuaauaacaaa

SEQ ID NO: 278188 - RNA, 32 nt, Homo Sapiens
guuuguugcucuuuccuucucuccaucauagu

SEQ ID NO: 278189 - RNA, 32 nt, Homo Sapiens
ucggcgccugcgugaccuccccgccggcggga

SEQ ID NO: 278190 - RNA, 32 nt, Homo Sapiens
cgccgggcccuucccuugcccgaggccggcug

SEQ ID NO: 278191 - RNA, 32 nt, Homo Sapiens
aaugacagaugcaaggaagaaaaggaauaaua

SEQ ID NO: 278192 - RNA, 32 nt, Homo Sapiens
gagaucagcagaggggaaugggcccgggcucu

SEQ ID NO: 278193 - RNA, 32 nt, Homo Sapiens
ucagccccauccaggugccgcggccagcucuc

SEQ ID NO: 278194 - RNA, 32 nt, Homo Sapiens
uugcuucugccauuuuacugucacuaauuaau

SEQ ID NO: 278195 - RNA, 32 nt, Homo Sapiens
agguggacaucuuugggggacauuauuccgcc

SEQ ID NO: 278196 - RNA, 32 nt, Homo Sapiens
ucgugggaccccagcccgcaaggccugcggag

SEQ ID NO: 278197 - RNA, 32 nt, Homo Sapiens
cacucccacccgccuccagcagcccucugucg

SEQ ID NO: 278198 - RNA, 32 nt, Homo Sapiens
agcgcggucccgcgcacugagccccgcggcgc

SEQ ID NO: 278199 - RNA, 32 nt, Homo Sapiens
ugagucacagaaacccagggccgaagcaaagu

SEQ ID NO: 278200 - RNA, 32 nt, Homo Sapiens
aacucuccaggccuccuccccugagcccugca

SEQ ID NO: 278201 - RNA, 32 nt, Homo Sapiens
ccacaggaaaggaaauggugaaaagucauugu

SEQ ID NO: 278202 - RNA, 32 nt, Homo Sapiens
ggagucagagguuuccuaucccccucaagccc

SEQ ID NO: 278203 - RNA, 32 nt, Homo Sapiens
gcagguccuucccacagaaggcagaugaaauc

SEQ ID NO: 278204 - RNA, 32 nt, Homo Sapiens
ucccgaggcagaaaggccggccauggagagcc

SEQ ID NO: 278205 - RNA, 32 nt, Homo Sapiens
gaccccccaauacuagaauggguuugagcuug

SEQ ID NO: 278206 - RNA, 32 nt, Homo Sapiens
aguuggauuuguuuuucuguucucuucugucc

SEQ ID NO: 278207 - RNA, 32 nt, Homo Sapiens
ccccagaaaugaaugcuugagugaacuucccu

SEQ ID NO: 278208 - RNA, 32 nt, Homo Sapiens
cuuaauuagaaacgugauaaauauauggacaa

SEQ ID NO: 278209 - RNA, 32 nt, Homo Sapiens
aaccuuuuuugggggagugacaggauggggua

SEQ ID NO: 278210 - RNA, 32 nt, Homo Sapiens
gccucgcagaugcacaagcacggagcuggugg

SEQ ID NO: 278211 - RNA, 32 nt, Homo Sapiens
cacugcacuccagccuggacaacagagugaga

SEQ ID NO: 278212 - RNA, 32 nt, Homo Sapiens
cacugcacuccagccugggugacagaacaaga

SEQ ID NO: 278213 - RNA, 32 nt, Homo Sapiens
ugccaaccucccugggguccugccuguuuccu

SEQ ID NO: 278214 - RNA, 32 nt, Homo Sapiens
ucucuuugacuucuguggcauggugcuagugc

SEQ ID NO: 278215 - RNA, 32 nt, Homo Sapiens
cugcgccgugugcucugggggcuguggcaggg

SEQ ID NO: 278216 - RNA, 32 nt, Homo Sapiens
uugcucccucgcucgcccggcgcgggugauuu

SEQ ID NO: 278217 - RNA, 29 nt, Homo Sapiens
cuauugucauaugggucacaggcugaccc

SEQ ID NO: 278218 - RNA, 32 nt, Homo Sapiens
uuuugagagagaauaaagguuauguuugucuu

SEQ ID NO: 278219 - RNA, 32 nt, Homo Sapiens
acaggccgcaugcucuaaucggucucuuuaua

SEQ ID NO: 278220 - RNA, 32 nt, Homo Sapiens
acucauuccuucccacccccaguccuguccua

SEQ ID NO: 278221 - RNA, 32 nt, Homo Sapiens
uguacuucuucucgcccucguuccagcccccc

SEQ ID NO: 278222 - RNA, 32 nt, Homo Sapiens
gaacgggucgagaugccgacguggugaguggg

SEQ ID NO: 278223 - RNA, 32 nt, Homo Sapiens
caguguuaaggagagggaaaucagacuucauc

SEQ ID NO: 278224 - RNA, 32 nt, Homo Sapiens
cccaagacacugggcugucugcuugugucucg

SEQ ID NO: 278225 - RNA, 32 nt, Homo Sapiens
cucacugcaaccuccgccucccagguucaagu

SEQ ID NO: 278226 - RNA, 32 nt, Homo Sapiens
augaggaggaggaggggaaagcgccagugccc

SEQ ID NO: 278227 - RNA, 32 nt, Homo Sapiens
caaccuccuccagggacuuugggccugcucua

SEQ ID NO: 278228 - RNA, 32 nt, Homo Sapiens
gagugagcccucgugggaucugguuguugaaa

SEQ ID NO: 278229 - RNA, 32 nt, Homo Sapiens
gggagcagucuccacgaggacccaggcggacc

SEQ ID NO: 278230 - RNA, 32 nt, Homo Sapiens
uucggagccugcugcaucggaccucggccagu

SEQ ID NO: 278231 - RNA, 32 nt, Homo Sapiens
gguuaacaauuaccaucaaaauguuuugugga

SEQ ID NO: 278232 - RNA, 32 nt, Homo Sapiens
uucugugacaccuuggacaaguuuugugaccc

SEQ ID NO: 278233 - RNA, 32 nt, Homo Sapiens
gcagcaguggcccucaucacagcccuccagga

SEQ ID NO: 278234 - RNA, 32 nt, Homo Sapiens
guuuccauuucccucccucaguauucuuccug

SEQ ID NO: 278235 - RNA, 32 nt, Homo Sapiens
aaugcaucaguucugucaagcuucauucaaag

SEQ ID NO: 278236 - RNA, 32 nt, Homo Sapiens
ugggaagaugacugugacuauuaaguuuacac

SEQ ID NO: 278237 - RNA, 32 nt, Homo Sapiens
gggcagccggcgguggcuccucuuccuggaag

SEQ ID NO: 278238 - RNA, 32 nt, Homo Sapiens
ugggagauucccagcucugcuuuccagcgcuu

SEQ ID NO: 278239 - RNA, 32 nt, Homo Sapiens
uccggggucugccccaggacuccuggguggac

SEQ ID NO: 278240 - RNA, 32 nt, Homo Sapiens
uggcugagaaaaggaauccaaaauauuaauaa

SEQ ID NO: 278241 - RNA, 32 nt, Homo Sapiens
aauauauucuggauaauauauaauagucuuau

SEQ ID NO: 278242 - RNA, 32 nt, Homo Sapiens
ugauaaauuucugccugagcaguaagcacugg

SEQ ID NO: 278243 - RNA, 32 nt, Homo Sapiens
gccacacucgcaccuccugggugcuguagucu

SEQ ID NO: 278244 - RNA, 32 nt, Homo Sapiens
cguguuuuuuaaaaaagccugguuuuucucaa

SEQ ID NO: 278245 - RNA, 32 nt, Homo Sapiens
gcugggcacgguggcuccugccugugauccua

SEQ ID NO: 278246 - RNA, 32 nt, Homo Sapiens
cuggcgcgcgugcacacacacacacacacaca

SEQ ID NO: 278247 - RNA, 32 nt, Homo Sapiens
gacaguaggccagccuguucucugccauuccc

SEQ ID NO: 278248 - RNA, 32 nt, Homo Sapiens
cacaaacccacuuuuccucuugccugagugcc

SEQ ID NO: 278249 - RNA, 32 nt, Homo Sapiens
ugagcaggaaauuuauaagaaauugaaagagc

SEQ ID NO: 278250 - RNA, 32 nt, Homo Sapiens
aguagggaaugggaggcuugcugaacauggau

SEQ ID NO: 278251 - RNA, 32 nt, Homo Sapiens
uugguugcuauuuuccuucuuuagucaauaug

SEQ ID NO: 278252 - RNA, 32 nt, Homo Sapiens
ccguccacaagucaugcugaguuuugcagccu

SEQ ID NO: 278253 - RNA, 32 nt, Homo Sapiens
uccacggggaucuggaaauccacgaccaaucc

SEQ ID NO: 278254 - RNA, 32 nt, Homo Sapiens
guuacaaaaaauauugcuguuaaaaaacuaag

SEQ ID NO: 278255 - RNA, 32 nt, Homo Sapiens
ucugguggggacgcgggggugcccccaauggu

SEQ ID NO: 278256 - RNA, 32 nt, Homo Sapiens
acaagaagauggugugagguguucuccaccag

SEQ ID NO: 278257 - RNA, 32 nt, Homo Sapiens
cccaugugcaccugccccccagccuucacuga

SEQ ID NO: 278258 - RNA, 32 nt, Homo Sapiens
ccugcccccuggagggcacuguguuugguugu

SEQ ID NO: 278259 - RNA, 32 nt, Homo Sapiens
cagaagaccuggaguucacagacauggguggc

SEQ ID NO: 278260 - RNA, 32 nt, Homo Sapiens
ugagauugccagcgcccugggagacagcaccg

SEQ ID NO: 278261 - RNA, 32 nt, Homo Sapiens
agggacguccacuguggaacaugaagcagcau

SEQ ID NO: 278262 - RNA, 32 nt, Homo Sapiens
gaauggaacaaaucuacuuauccaguuauacc

SEQ ID NO: 278263 - RNA, 32 nt, Homo Sapiens
auacuucauggugauagacugaaggcugaaug

SEQ ID NO: 278264 - RNA, 32 nt, Homo Sapiens
cccacuggccccagaucucauccugccucauc

SEQ ID NO: 278265 - RNA, 32 nt, Homo Sapiens
guuguuugguacuuuuaacauaaagaaaucau

SEQ ID NO: 278266 - RNA, 32 nt, Homo Sapiens
augcccccaaccccaagcccugcccuucaccg

SEQ ID NO: 278267 - RNA, 32 nt, Homo Sapiens
gggagccaggcacccggcaccuccaccugccu

SEQ ID NO: 278268 - RNA, 32 nt, Homo Sapiens
guggggggcugguggcuccggggcugggggau

SEQ ID NO: 278269 - RNA, 32 nt, Homo Sapiens
gcaggcaggugccaugggcccgcuugaggcac

SEQ ID NO: 278270 - RNA, 32 nt, Homo Sapiens
ccgaagccagcgagacuguaaauccacuggga

SEQ ID NO: 278271 - RNA, 32 nt, Homo Sapiens
ucucuaauuggaagaaauuccuguagcaucuu

SEQ ID NO: 278272 - RNA, 32 nt, Homo Sapiens
uagccgggauugcaggcgcgcgccaccaggcc

SEQ ID NO: 278273 - RNA, 31 nt, Homo Sapiens
cguuucccggcuucgacuccccgcgcgucua

SEQ ID NO: 278274 - RNA, 32 nt, Homo Sapiens
uccugugccuggggauaacaguguaacacauu

SEQ ID NO: 278275 - RNA, 32 nt, Homo Sapiens
uuuucuggacagccugggggagcuggcccaac

SEQ ID NO: 278276 - RNA, 32 nt, Homo Sapiens
gcaaagacaacacuuacccaggauguuucccc

SEQ ID NO: 278277 - RNA, 32 nt, Homo Sapiens
gcggcgaucugugcuaagaggucaggacccag

SEQ ID NO: 278278 - RNA, 32 nt, Homo Sapiens
aguaccuggaggaggagcaggggcguggaggg

SEQ ID NO: 278279 - RNA, 32 nt, Homo Sapiens
ugcccgccugccugcuggcucucccccagccc

SEQ ID NO: 278280 - RNA, 32 nt, Homo Sapiens
agcucagccucccaccgucuuccuccuacaca

SEQ ID NO: 278281 - RNA, 32 nt, Homo Sapiens
uguggaucuucagauaaauucugucauuuucc

SEQ ID NO: 278282 - RNA, 32 nt, Homo Sapiens
cccaggccaugccugccuuuguuguggggaac

SEQ ID NO: 278283 - RNA, 32 nt, Homo Sapiens
aguguccugagccccagggagagggggcuggu

SEQ ID NO: 278284 - RNA, 32 nt, Homo Sapiens
gugaauggcuggggccccaaauccaggagauu

SEQ ID NO: 278285 - RNA, 32 nt, Homo Sapiens
aacccucaguugcaggugugcauguuccagcc

SEQ ID NO: 278286 - RNA, 32 nt, Homo Sapiens
cucuuuggugagacuucccuggauggagagca

SEQ ID NO: 278287 - RNA, 32 nt, Homo Sapiens
uuccaucucagccccaggacucaguacugcgg

SEQ ID NO: 278288 - RNA, 32 nt, Homo Sapiens
gguuuucauacucugcacaccauccucggggu

SEQ ID NO: 278289 - RNA, 32 nt, Homo Sapiens
aaacugaaacaaaauuagaaauguaauuaugu

SEQ ID NO: 278290 - RNA, 32 nt, Homo Sapiens
aaauaaggaaacgaugaaauaagauauauaca

SEQ ID NO: 278291 - RNA, 32 nt, Homo Sapiens
ucacuacccacccacgcauguaccgggaaaaa

SEQ ID NO: 278292 - RNA, 32 nt, Homo Sapiens
gagcggcagcggggcugugaguuucaaauuaa

SEQ ID NO: 278293 - RNA, 32 nt, Homo Sapiens
gagguuacuuuuuauggcuuaucaaaugcuug

SEQ ID NO: 278294 - RNA, 32 nt, Homo Sapiens
aggagcggguccgccgcggguaaccaugccua

SEQ ID NO: 278295 - RNA, 32 nt, Homo Sapiens
gaugcugaggcccuggcccggacucuggccuc

SEQ ID NO: 278296 - RNA, 32 nt, Homo Sapiens
gagggucgcggccggagggucccggccggugg

SEQ ID NO: 278297 - RNA, 31 nt, Homo Sapiens
uaauaaaauguucuccaagagccuggcuuuu

SEQ ID NO: 278298 - RNA, 32 nt, Homo Sapiens
agaugagaaaaaagucauauugggaaaagcuu

SEQ ID NO: 278299 - RNA, 32 nt, Homo Sapiens
uuuaccccagcaugcuugugacgggcagaccu

SEQ ID NO: 278300 - RNA, 32 nt, Homo Sapiens
ucccauugaggacuucuguuugaucuuuggga

SEQ ID NO: 278301 - RNA, 32 nt, Homo Sapiens
cuggaggcugggcgcaguggcucacgccuaua

SEQ ID NO: 278302 - RNA, 32 nt, Homo Sapiens
uauaagguuguuuuuaccacaguggucuuuuu

SEQ ID NO: 278303 - RNA, 32 nt, Homo Sapiens
ggagaagaaaucaccugcuuuagggcugguaa

SEQ ID NO: 278304 - RNA, 32 nt, Homo Sapiens
ucuccccaccccaccccagauaaccuccucag

SEQ ID NO: 278305 - RNA, 32 nt, Homo Sapiens
agucaaauacucagggugaacugaccucagag

SEQ ID NO: 278306 - RNA, 32 nt, Homo Sapiens
cggcugggacugccagaggaaccuggcuuugc

SEQ ID NO: 278307 - RNA, 32 nt, Homo Sapiens
gcuaggcugcggacgagcgggcggcaggagcc

SEQ ID NO: 278308 - RNA, 32 nt, Homo Sapiens
guucauauauuaugaauguauuauuuuauuug

SEQ ID NO: 278309 - RNA, 32 nt, Homo Sapiens
guaaauuuauuaugagacuguacuaacagugu

SEQ ID NO: 278310 - RNA, 32 nt, Homo Sapiens
ggcuccucuucaggcccggcucgccgcagcuc

SEQ ID NO: 278311 - RNA, 32 nt, Homo Sapiens
ccaagauagaacuuuuauaauuuuauuccagu

SEQ ID NO: 278312 - RNA, 32 nt, Homo Sapiens
uugcggcacaggcaacgcuugaccugagucuu

SEQ ID NO: 278313 - RNA, 32 nt, Homo Sapiens
accuuaaaacuuucuucauaaauacuuuauga

SEQ ID NO: 278314 - RNA, 32 nt, Homo Sapiens
uagcccccuggccucugugccuucuuuugauu

SEQ ID NO: 278315 - RNA, 32 nt, Homo Sapiens
uuggccugaugaugacucuugagugauacccu

SEQ ID NO: 278316 - RNA, 32 nt, Homo Sapiens
uucagcccaucccauccuuuauugccacugag

SEQ ID NO: 278317 - RNA, 32 nt, Homo Sapiens
ucaggaggaaagguuuggaaaacuaacucagg

SEQ ID NO: 278318 - RNA, 32 nt, Homo Sapiens
ggcuuugacaacauccuuuucaaugcggaugg

SEQ ID NO: 278319 - RNA, 32 nt, Homo Sapiens
cgggugguguguguccccuguuuacuuuuagc

SEQ ID NO: 278320 - RNA, 32 nt, Homo Sapiens
aggucacuuuaaauguucuaguagcaacuuuu

SEQ ID NO: 278321 - RNA, 32 nt, Homo Sapiens
ggcacuggaaguauguccuggggagcaaugca

SEQ ID NO: 278322 - RNA, 32 nt, Homo Sapiens
ucugcccgcucccgagcccccggagccuccgc

SEQ ID NO: 278323 - RNA, 32 nt, Homo Sapiens
uuauuuuauauuauuauuucugauggugacaa

SEQ ID NO: 278324 - RNA, 32 nt, Homo Sapiens
ugaagcaaccucagcacacuuagccucccagu

SEQ ID NO: 278325 - RNA, 32 nt, Homo Sapiens
gaugggcucccggcccgggaggcggcggugga

SEQ ID NO: 278326 - RNA, 32 nt, Homo Sapiens
cccaaggcgcaugcgccgccuguccuggaggg

SEQ ID NO: 278327 - RNA, 30 nt, Homo Sapiens
gagacuguaucugcagcagaagcugcccac

SEQ ID NO: 278328 - RNA, 32 nt, Homo Sapiens
cuuauuaaacuguguauuuuguacuuaucacu

SEQ ID NO: 278329 - RNA, 32 nt, Homo Sapiens
caaugacgaugaugaugauucuuggcgguuac

SEQ ID NO: 278330 - RNA, 32 nt, Homo Sapiens
augccgucuauucuugacagaagugcuuuaug

SEQ ID NO: 278331 - RNA, 32 nt, Homo Sapiens
aagccaaaagggaggacagucugcuagcaaga

SEQ ID NO: 278332 - RNA, 32 nt, Homo Sapiens
auggauuggaaggcaugauguucugcuucugu

SEQ ID NO: 278333 - RNA, 32 nt, Homo Sapiens
caagggcagcgaaggggccgggccccagacug

SEQ ID NO: 278334 - RNA, 32 nt, Homo Sapiens
gaagauuuuuuggagauuuauaauuacauuca

SEQ ID NO: 278335 - RNA, 32 nt, Homo Sapiens
ccauccagaauaaaacgcaaagggcugaaagc

SEQ ID NO: 278336 - RNA, 32 nt, Homo Sapiens
augauaaugaucaaguuguuugaugcaauaaa

SEQ ID NO: 278337 - RNA, 32 nt, Homo Sapiens
uucuuuuaaaauuguaucauugcuuucuuucu

SEQ ID NO: 278338 - RNA, 32 nt, Homo Sapiens
ggagagaggcgagcaccgggaaggggagcgug

SEQ ID NO: 278339 - RNA, 32 nt, Homo Sapiens
gacuaaucagggauuaucauagauaauuugac

SEQ ID NO: 278340 - RNA, 32 nt, Homo Sapiens
gaacacaagugucuucucauaagauuuauaga

SEQ ID NO: 278341 - RNA, 32 nt, Homo Sapiens
cacacacagcugccucccggugcgagaagaag

SEQ ID NO: 278342 - RNA, 32 nt, Homo Sapiens
aagacagguauaugaacaacuaccucccaggg

SEQ ID NO: 278343 - RNA, 32 nt, Homo Sapiens
aaggaacugccagccucagaggaggcagcacc

SEQ ID NO: 278344 - RNA, 32 nt, Homo Sapiens
aucgaacaucugaguucccaguacacuagucu

SEQ ID NO: 278345 - RNA, 32 nt, Homo Sapiens
auuuuggauuacagguauauuaaugaacuugu

SEQ ID NO: 278346 - RNA, 32 nt, Homo Sapiens
agcugagauugugccgcugcacuccagccugg

SEQ ID NO: 278347 - RNA, 32 nt, Homo Sapiens
uggauugcauauuaguuguucucuaaguggac

SEQ ID NO: 278348 - RNA, 32 nt, Homo Sapiens
gaggaaccagguaccucuguuggaaaugcaga

SEQ ID NO: 278349 - RNA, 32 nt, Homo Sapiens
gggauuuauuuuauguuggcuuucucugaaau

SEQ ID NO: 278350 - RNA, 32 nt, Homo Sapiens
cucgacuacggcgcgggcgauggcccggggcu

SEQ ID NO: 278351 - RNA, 32 nt, Homo Sapiens
uuuuuuuguaugucuuuuuuuuuuuaagcaau

SEQ ID NO: 278352 - RNA, 32 nt, Homo Sapiens
uguuugucuuuguauauaacuacuucuaaucu

SEQ ID NO: 278353 - RNA, 32 nt, Homo Sapiens
ucccccucaauuuccaaccccauccccauuug

SEQ ID NO: 278354 - RNA, 32 nt, Homo Sapiens
ucuucuuuacagaggaaaauaggaaacccucc

SEQ ID NO: 278355 - RNA, 31 nt, Homo Sapiens
ggacagaagaaauaauggggauauguggaau

SEQ ID NO: 278356 - RNA, 32 nt, Homo Sapiens
caguuaccaucacucucuuccuccucuagacu

SEQ ID NO: 278357 - RNA, 32 nt, Homo Sapiens
gaggacucuacccuccucccccacguccuguc

SEQ ID NO: 278358 - RNA, 32 nt, Homo Sapiens
caucaggagagccuugauuuaggcuacggccu

SEQ ID NO: 278359 - RNA, 32 nt, Homo Sapiens
cccucguuguccuggacaccacaggggcaccu

SEQ ID NO: 278360 - RNA, 32 nt, Homo Sapiens
cucaaaaauaauauacuuuuacauuaaagaaa

SEQ ID NO: 278361 - RNA, 32 nt, Homo Sapiens
ccacccuuuugcugauugauaauuguauuauu

SEQ ID NO: 278362 - RNA, 32 nt, Homo Sapiens
aucgccaucaucaucaccaccaucaucaucuu

SEQ ID NO: 278363 - RNA, 32 nt, Homo Sapiens
aauacaugggaaaauauugaaaaggacagagu

SEQ ID NO: 278364 - RNA, 32 nt, Homo Sapiens
cuccaucuaacucguuuucaagugcaugauuu

SEQ ID NO: 278365 - RNA, 32 nt, Homo Sapiens
uuguucugacccacuacccuggcgauuugucu

SEQ ID NO: 278366 - RNA, 32 nt, Homo Sapiens
ugacugcgcggcccgcgcccggggcggugacu

SEQ ID NO: 278367 - RNA, 32 nt, Homo Sapiens
cacacagcauccugcaccuuagcgucccaugu

SEQ ID NO: 278368 - RNA, 32 nt, Homo Sapiens
cucuaagcuuugcaagggauccuaaaagaggc

SEQ ID NO: 278369 - RNA, 32 nt, Homo Sapiens
gugcccccuuucugccagcaguucugguucuu

SEQ ID NO: 278370 - RNA, 32 nt, Homo Sapiens
cauauaaugacugauaagaguacaauacaggu

SEQ ID NO: 278371 - RNA, 32 nt, Homo Sapiens
cgacggaggaggaggauggaggcggugguguu

SEQ ID NO: 278372 - RNA, 32 nt, Homo Sapiens
ggagccuggcaugggcagggagcccacaaaac

SEQ ID NO: 278373 - RNA, 32 nt, Homo Sapiens
auauugaaaugguguaauguuguaccauuugc

SEQ ID NO: 278374 - RNA, 32 nt, Homo Sapiens
auacuauuaagaaaaugaaugugauucugcuc

SEQ ID NO: 278375 - RNA, 32 nt, Homo Sapiens
uccaguccucacaugcccgcugucccaggggu

SEQ ID NO: 278376 - RNA, 32 nt, Homo Sapiens
cuguaaguuggaagaacacuggguugacagag

SEQ ID NO: 278377 - RNA, 32 nt, Homo Sapiens
aaacccucccuggccucauccuguggguggca

SEQ ID NO: 278378 - RNA, 32 nt, Homo Sapiens
cuagggcggggccugugcaugcucucccauga

SEQ ID NO: 278379 - RNA, 32 nt, Homo Sapiens
cacaacacagauaauuuuuucuuaagucggcc

SEQ ID NO: 278380 - RNA, 32 nt, Homo Sapiens
accacgaugugacuccgccgccggggacccgu

SEQ ID NO: 278381 - RNA, 32 nt, Homo Sapiens
uccccaagcucuugcacccauagcacacacuc

SEQ ID NO: 278382 - RNA, 32 nt, Homo Sapiens
auggagagauuuggggaagcauggacucuuua

SEQ ID NO: 278383 - RNA, 32 nt, Homo Sapiens
gagauugggaggagggcugucgguggcagugc

SEQ ID NO: 278384 - RNA, 32 nt, Homo Sapiens
uuugagcuuagugcuaggacugagaggcugca

SEQ ID NO: 278385 - RNA, 32 nt, Homo Sapiens
cggcgaugcggcccggccugugagcggccggc

SEQ ID NO: 278386 - RNA, 32 nt, Homo Sapiens
ccucuguguacguaucugugugaguguggggg

SEQ ID NO: 278387 - RNA, 32 nt, Homo Sapiens
gaaaacuuuggaugcugaaccuuguuugucag

SEQ ID NO: 278388 - RNA, 32 nt, Homo Sapiens
guucugggccuggccaggucugagaugaggcc

SEQ ID NO: 278389 - RNA, 32 nt, Homo Sapiens
ccauacggggagagggagcccuguguucccgg

SEQ ID NO: 278390 - RNA, 32 nt, Homo Sapiens
aaugcugaaccaaaaugugccuuuuuuuuuuu

SEQ ID NO: 278391 - RNA, 32 nt, Homo Sapiens
aaaagccaggacuucuguggggcugguacagg

SEQ ID NO: 278392 - RNA, 32 nt, Homo Sapiens
ggcaauacuuuauguuuuuauagaucuucaua

SEQ ID NO: 278393 - RNA, 32 nt, Homo Sapiens
gcccccgcccucaccccagccaucugcacuug

SEQ ID NO: 278394 - RNA, 32 nt, Homo Sapiens
ccaaaaacaaccccucccaagucccuaacucc

SEQ ID NO: 278395 - RNA, 32 nt, Homo Sapiens
uuugcaaaguuuaauggugccuucauuuggga

SEQ ID NO: 278396 - RNA, 32 nt, Homo Sapiens
agcaaagcaucauagauugcugauuuaaacug

SEQ ID NO: 278397 - RNA, 32 nt, Homo Sapiens
gcucugcacugacacuuggcuggagccggagc

SEQ ID NO: 278398 - RNA, 32 nt, Homo Sapiens
cuauuuugggguacugguuuucuauccacguu

SEQ ID NO: 278399 - RNA, 32 nt, Homo Sapiens
ggcaaguucuccccacccccagccccacaguu

SEQ ID NO: 278400 - RNA, 32 nt, Homo Sapiens
ggucuacaggcacaacugcugccucacaacag

SEQ ID NO: 278401 - RNA, 30 nt, Homo Sapiens
ccuccaggcaggcggcgggaccccaggcga

SEQ ID NO: 278402 - RNA, 32 nt, Homo Sapiens
agcaaauauuauauuucaugacaauggaguuc

SEQ ID NO: 278403 - RNA, 32 nt, Homo Sapiens
accauccugccaccaccuucucuucucuuguc

SEQ ID NO: 278404 - RNA, 32 nt, Homo Sapiens
agacuggagugggaccgcgucugucaaaagcc

SEQ ID NO: 278405 - RNA, 32 nt, Homo Sapiens
caaagaauauuaaguaauauaaacuguguuca

SEQ ID NO: 278406 - RNA, 32 nt, Homo Sapiens
uaaauauuuuucccuguaauugagacagaauu

SEQ ID NO: 278407 - RNA, 32 nt, Homo Sapiens
uccgcaguccccccgcgacgcgagccaacggg

SEQ ID NO: 278408 - RNA, 32 nt, Homo Sapiens
caauaagacccaauucuuaacagucuuuucua

SEQ ID NO: 278409 - RNA, 32 nt, Homo Sapiens
cagcuucgggaagaggaaaggaaccucagacc

SEQ ID NO: 278410 - RNA, 32 nt, Homo Sapiens
ucagauucugcaacugacucauuuucaggagg

SEQ ID NO: 278411 - RNA, 32 nt, Homo Sapiens
gcaaaagugugaugaagaacggcgauuugcau

SEQ ID NO: 278412 - RNA, 32 nt, Homo Sapiens
aguagcuuucuccagaucagacuuuaauuucu

SEQ ID NO: 278413 - RNA, 32 nt, Homo Sapiens
uccggcgagagagagcuggggugcuggggugc

SEQ ID NO: 278414 - RNA, 32 nt, Homo Sapiens
uucugguggugggaagggaggcguuuccucag

SEQ ID NO: 278415 - RNA, 32 nt, Homo Sapiens
aaauacuaugaauguaaggauaugaguguugu

SEQ ID NO: 278416 - RNA, 32 nt, Homo Sapiens
gaaaaggcucugcccuagagcccugccaagaa

SEQ ID NO: 278417 - RNA, 32 nt, Homo Sapiens
uugugauccaacaagaacauuuccaaaaguau

SEQ ID NO: 278418 - RNA, 32 nt, Homo Sapiens
gcgaggagccagcgcuggccccggccuuccgc

SEQ ID NO: 278419 - RNA, 32 nt, Homo Sapiens
uuuucucaucauccuugcuuuaccacaaugag

SEQ ID NO: 278420 - RNA, 30 nt, Homo Sapiens
cagcacuaaaucccugccugcucucucaaa

SEQ ID NO: 278421 - RNA, 32 nt, Homo Sapiens
ucacugcaaacaugcaugauucuccaagacaa

SEQ ID NO: 278422 - RNA, 32 nt, Homo Sapiens
gcacugcuuugggcgcgagacuugcggagcug

SEQ ID NO: 278423 - RNA, 32 nt, Homo Sapiens
ugugucacgcacccccgagggcgcaggaggcc

SEQ ID NO: 278424 - RNA, 32 nt, Homo Sapiens
uuuugaguuucaguauaucuuuucuagugucc

SEQ ID NO: 278425 - RNA, 32 nt, Homo Sapiens
cgguuccuucucugcuggccccagaagccacc

SEQ ID NO: 278426 - RNA, 32 nt, Homo Sapiens
gcccugugauuaauaaauggcucuacaaccug

SEQ ID NO: 278427 - RNA, 32 nt, Homo Sapiens
aggacuugcacaaagaaaacauucaauaucca

SEQ ID NO: 278428 - RNA, 32 nt, Homo Sapiens
cagaucagcaccuucucuguaccugcuggacc

SEQ ID NO: 278429 - RNA, 32 nt, Homo Sapiens
acuuggcaaauuuuugaguuuuacauucuuac

SEQ ID NO: 278430 - RNA, 32 nt, Homo Sapiens
auauuuucuacauuucuauuaagaggcuacuu

SEQ ID NO: 278431 - RNA, 32 nt, Homo Sapiens
agcuugcuuuguauaagaacuaagcuaucagu

SEQ ID NO: 278432 - RNA, 32 nt, Homo Sapiens
gaauugccggugccgccgccaccgcugucugu

SEQ ID NO: 278433 - RNA, 32 nt, Homo Sapiens
uggacccuggggagcuaacauccaucccuuga

SEQ ID NO: 278434 - RNA, 32 nt, Homo Sapiens
gcuuuaaaaaaauaaaguacuguugaaaagau

SEQ ID NO: 278435 - RNA, 32 nt, Homo Sapiens
ucaucucccacuuucacaccuaacccugacuc

SEQ ID NO: 278436 - RNA, 32 nt, Homo Sapiens
aaaccaaaauuugacuguccuuuagcagaugu

SEQ ID NO: 278437 - RNA, 32 nt, Homo Sapiens
acuuucuaaggaaaugaugcuucccaagcacc

SEQ ID NO: 278438 - RNA, 32 nt, Homo Sapiens
uaaauuguuuuaauuauucagaaagaggguca

SEQ ID NO: 278439 - RNA, 32 nt, Homo Sapiens
guagaaauguucuuuguguauuuuuucuacag

SEQ ID NO: 278440 - RNA, 32 nt, Homo Sapiens
cagggacaagauacucacgaggacgaggaaga

SEQ ID NO: 278441 - RNA, 32 nt, Homo Sapiens
uauuguguuacuauuaaauaugcugaaaacac

SEQ ID NO: 278442 - RNA, 32 nt, Homo Sapiens
aaagcuagaugaggacaugagaauaauucagg

SEQ ID NO: 278443 - RNA, 32 nt, Homo Sapiens
gcagcgggcuuguagguguccggcuuugcugg

SEQ ID NO: 278444 - RNA, 32 nt, Homo Sapiens
guauuacaagagaaacaaauaaacuagucugu

SEQ ID NO: 278445 - RNA, 32 nt, Homo Sapiens
uugcauguuaauauucucauaauccuaguuug

SEQ ID NO: 278446 - RNA, 32 nt, Homo Sapiens
caggcucuggcgggaaggagcaggaagggcuc

SEQ ID NO: 278447 - RNA, 32 nt, Homo Sapiens
uuccuuugugucugcaccaccagccccugagc

SEQ ID NO: 278448 - RNA, 32 nt, Homo Sapiens
ccuguucaacuuucucauuuggccugugcaga

SEQ ID NO: 278449 - RNA, 32 nt, Homo Sapiens
uuggagcaggaugagggaauccugucaccauc

SEQ ID NO: 278450 - RNA, 32 nt, Homo Sapiens
ucaccugucacuguuuucccaccucuaaggau

SEQ ID NO: 278451 - RNA, 32 nt, Homo Sapiens
agucaacaucuucaucauugggcuuucuuuaa

SEQ ID NO: 278452 - RNA, 32 nt, Homo Sapiens
guggagacugguucucugaagucuucucaguu

SEQ ID NO: 278453 - RNA, 32 nt, Homo Sapiens
gagaagcucggcggcgucccggggccggaggg

SEQ ID NO: 278454 - RNA, 32 nt, Homo Sapiens
acaauuggaaggaaacacagccguacuaagga

SEQ ID NO: 278455 - RNA, 32 nt, Homo Sapiens
guagcccccuccccuacgccucaccccuccuc

SEQ ID NO: 278456 - RNA, 32 nt, Homo Sapiens
gaggcgacgccggggacgcccggggauccggc

SEQ ID NO: 278457 - RNA, 32 nt, Homo Sapiens
augcagcaucuucagaacuuguccugauggug

SEQ ID NO: 278458 - RNA, 30 nt, Homo Sapiens
cagaaaugaaacaauuugcauguacacucu

SEQ ID NO: 278459 - RNA, 32 nt, Homo Sapiens
caucaacaaggugguguguggcuccugcacag

SEQ ID NO: 278460 - RNA, 32 nt, Homo Sapiens
aucaaggaaauuccccuccguuuuccuuuguc

SEQ ID NO: 278461 - RNA, 32 nt, Homo Sapiens
agcccacgcugcuggagcuggugagccugcgg

SEQ ID NO: 278462 - RNA, 27 nt, Homo Sapiens
acaauuaaauguuuauagcagcugcau

SEQ ID NO: 278463 - RNA, 32 nt, Homo Sapiens
guguccaggcuguggugcaggcguggggaccc

SEQ ID NO: 278464 - RNA, 32 nt, Homo Sapiens
cgcccucccacgcagacacgggacucaauccg

SEQ ID NO: 278465 - RNA, 32 nt, Homo Sapiens
acuggcaccaaaaaugguuuauucugagcugu

SEQ ID NO: 278466 - RNA, 32 nt, Homo Sapiens
auuuucauacuuacuaaagggauuguaaaaaa

SEQ ID NO: 278467 - RNA, 32 nt, Homo Sapiens
agaaaaaguuccuaaguggucccaauuugaaa

SEQ ID NO: 278468 - RNA, 32 nt, Homo Sapiens
cccugcgcccccggugcccccgacauguccuu

SEQ ID NO: 278469 - RNA, 32 nt, Homo Sapiens
gccucuuuucgcccggccccagccccucuggu

SEQ ID NO: 278470 - RNA, 32 nt, Homo Sapiens
uggacucaggcgugcucuuugcugguuccugg

SEQ ID NO: 278471 - RNA, 32 nt, Homo Sapiens
ccaaaacaaaaauuagaggauuauuuuaauac

SEQ ID NO: 278472 - RNA, 32 nt, Homo Sapiens
gagcagaggaggaggaggcaugagcgaggcgg

SEQ ID NO: 278473 - RNA, 32 nt, Homo Sapiens
gucccuccaccugggggccccuggacacuguc

SEQ ID NO: 278474 - RNA, 32 nt, Homo Sapiens
auuaaaaauaaucaaaauuuuccucaaauuuu

SEQ ID NO: 278475 - RNA, 32 nt, Homo Sapiens
ugggagacagaccccaccuccuuggguaguga

SEQ ID NO: 278476 - RNA, 32 nt, Homo Sapiens
accacugggcccagcccaaaccuucaccuucu

SEQ ID NO: 278477 - RNA, 32 nt, Homo Sapiens
aagcuuuucauucccacccccacccggaaccu

SEQ ID NO: 278478 - RNA, 32 nt, Homo Sapiens
ccacauuggaauaaaaaagauauuuuuguuac

SEQ ID NO: 278479 - RNA, 32 nt, Homo Sapiens
ggaauauaaauaguauuauauguaucaggaaa

SEQ ID NO: 278480 - RNA, 32 nt, Homo Sapiens
uuggguuuuaucaauccuguuaaugcuugucc

SEQ ID NO: 278481 - RNA, 32 nt, Homo Sapiens
gccacuccgucuccaguacgcguuagcccgcg

SEQ ID NO: 278482 - RNA, 32 nt, Homo Sapiens
uaacucucucaauuccuucucucuccagaacu

SEQ ID NO: 278483 - RNA, 32 nt, Homo Sapiens
guaaaaauguuuuuuucuuuuagcuuugaauu

SEQ ID NO: 278484 - RNA, 32 nt, Homo Sapiens
ccugggcccuuaaguuuacaguccagcaggaa

SEQ ID NO: 278485 - RNA, 32 nt, Homo Sapiens
ggcacaugccugccagcguugugucaugccug

SEQ ID NO: 278486 - RNA, 32 nt, Homo Sapiens
ugccaggaauggggggugcugagucaucucac

SEQ ID NO: 278487 - RNA, 32 nt, Homo Sapiens
acugauguguauauaacuauuuaaugugggau

SEQ ID NO: 278488 - RNA, 32 nt, Homo Sapiens
uagcauggccccagcauucagccagucgguca

SEQ ID NO: 278489 - RNA, 32 nt, Homo Sapiens
gucauggccuccugggggcagaaggcgaugug

SEQ ID NO: 278490 - RNA, 32 nt, Homo Sapiens
ucccuggcgcuuccuucuucucuuccggcgga

SEQ ID NO: 278491 - RNA, 32 nt, Homo Sapiens
uuacaguugcagagaauuguuucugggcucau

SEQ ID NO: 278492 - RNA, 32 nt, Homo Sapiens
auuaccuagaacugugccugguaaauaagagc

SEQ ID NO: 278493 - RNA, 32 nt, Homo Sapiens
uguugcccaggcuggucuccaacuccuggacu

SEQ ID NO: 278494 - RNA, 32 nt, Homo Sapiens
uggugacuucuggugacauaguaauaaaguga

SEQ ID NO: 278495 - RNA, 32 nt, Homo Sapiens
gcggugggcacuguuaagaagcagccaucaca

SEQ ID NO: 278496 - RNA, 27 nt, Homo Sapiens
ccauggacggacauugcccagcccacg

SEQ ID NO: 278497 - RNA, 32 nt, Homo Sapiens
cguuuuguacaaaauaaauacagucauauguu

SEQ ID NO: 278498 - RNA, 32 nt, Homo Sapiens
cccccugcuucuuucucuaaaggcugucuuca

SEQ ID NO: 278499 - RNA, 32 nt, Homo Sapiens
aguguccuuguacaugcuguagcacuuaaaaa

SEQ ID NO: 278500 - RNA, 32 nt, Homo Sapiens
ccccauagcuggaagccagggcccucagacag

SEQ ID NO: 278501 - RNA, 32 nt, Homo Sapiens
uggggaaaacaguuguggaauucuuacuucau

SEQ ID NO: 278502 - RNA, 32 nt, Homo Sapiens
uuucacugacuucuuggaacaaaugugagcua

SEQ ID NO: 278503 - RNA, 30 nt, Homo Sapiens
auaucgcagaggagacggauguguaaauua

SEQ ID NO: 278504 - RNA, 32 nt, Homo Sapiens
ggaauaucaucauuuucuaguugacauuugaa

SEQ ID NO: 278505 - RNA, 32 nt, Homo Sapiens
gcuggccggccgcgccuggcuucuuggaaaga

SEQ ID NO: 278506 - RNA, 32 nt, Homo Sapiens
cuugaaucaaaagccacuuuguuaggcgagga

SEQ ID NO: 278507 - RNA, 32 nt, Homo Sapiens
uagagccccccggccggcccacaaacucccgu

SEQ ID NO: 278508 - RNA, 32 nt, Homo Sapiens
ccgcuccgaggccucgcgaccgccgagccugc

SEQ ID NO: 278509 - RNA, 32 nt, Homo Sapiens
gaaauacgcauauuuuuaaggcuuuuguuaug

SEQ ID NO: 278510 - RNA, 32 nt, Homo Sapiens
ccuuccuaaaugucaagaagugaaguauguca

SEQ ID NO: 278511 - RNA, 32 nt, Homo Sapiens
ucauaacauaucaauaguuauuucauaaauau

SEQ ID NO: 278512 - RNA, 32 nt, Homo Sapiens
aaaggggcugucuauuagcauauuuccuuuga

SEQ ID NO: 278513 - RNA, 32 nt, Homo Sapiens
uuagguucaaagccauauggacagccauguag

SEQ ID NO: 278514 - RNA, 32 nt, Homo Sapiens
ucauagcaagggcccgcagagcagccaucacg

SEQ ID NO: 278515 - RNA, 32 nt, Homo Sapiens
caaacuguaucacccccaaaauguaaagucuc

SEQ ID NO: 278516 - RNA, 32 nt, Homo Sapiens
ucucagagaugggccugacaccucuuucucau

SEQ ID NO: 278517 - RNA, 32 nt, Homo Sapiens
cuggucuccgcggaugucacaggcucggcaac

SEQ ID NO: 278518 - RNA, 30 nt, Homo Sapiens
uaauaauggccacuguugcuuuuacacuau

SEQ ID NO: 278519 - RNA, 32 nt, Homo Sapiens
gaugcgccgcggcugcacacggucgcccgcgc

SEQ ID NO: 278520 - RNA, 29 nt, Homo Sapiens
guucucuuuauuuuccaccacaaaaaaua

SEQ ID NO: 278521 - RNA, 32 nt, Homo Sapiens
gaggaggggaucugcccuucuccacuccucuc

SEQ ID NO: 278522 - RNA, 32 nt, Homo Sapiens
acuucaugucauuaaucaauuucucaauaguu

SEQ ID NO: 278523 - RNA, 32 nt, Homo Sapiens
uauuaaagaaauaaaaaagaacuuuuguaucu

SEQ ID NO: 278524 - RNA, 32 nt, Homo Sapiens
gagaaccucagguguucuuaugcuagugcuug

SEQ ID NO: 278525 - RNA, 32 nt, Homo Sapiens
uccauuugccccgcaacccuggcugcuccgac

SEQ ID NO: 278526 - RNA, 32 nt, Homo Sapiens
ugacaugagguaaauguguugauaaaaacuaa

SEQ ID NO: 278527 - RNA, 32 nt, Homo Sapiens
uaauuuuauccacuagcaaaucuugauuuagu

SEQ ID NO: 278528 - RNA, 32 nt, Homo Sapiens
uuuucuuuuuucuuuuuuuuuauuugaagccg

SEQ ID NO: 278529 - RNA, 32 nt, Homo Sapiens
cucccacauccuggccucuccucuccacgguc

SEQ ID NO: 278530 - RNA, 32 nt, Homo Sapiens
auggccaguucuuucuuaauuuauauguuuca

SEQ ID NO: 278531 - RNA, 32 nt, Homo Sapiens
guaagagaggaugugcaagcgacgacagaugc

SEQ ID NO: 278532 - RNA, 32 nt, Homo Sapiens
gagguggcugagggguccaggcggcgggacga

SEQ ID NO: 278533 - RNA, 32 nt, Homo Sapiens
agaauaagggaagaggauuugcuggucacugu

SEQ ID NO: 278534 - RNA, 32 nt, Homo Sapiens
uccccaggccucagaugcugcauauugcuggc

SEQ ID NO: 278535 - RNA, 32 nt, Homo Sapiens
agguggagaagcuguuagaacaggagaggcgg

SEQ ID NO: 278536 - RNA, 32 nt, Homo Sapiens
aauuucaaauacugagaccgauagaugaagau

SEQ ID NO: 278537 - RNA, 32 nt, Homo Sapiens
uucaccucuacugugauucagacagaucaugg

SEQ ID NO: 278538 - RNA, 32 nt, Homo Sapiens
uuuguacuuugugaagggagaugaaaggacgu

SEQ ID NO: 278539 - RNA, 32 nt, Homo Sapiens
ugauucuauucauuuuaagcacaaagaauuuc

SEQ ID NO: 278540 - RNA, 32 nt, Homo Sapiens
gcgcccaccaaccgcuccgccccgggacagcc

SEQ ID NO: 278541 - RNA, 32 nt, Homo Sapiens
cucagagagacauaaaggagaagauuugggag

SEQ ID NO: 278542 - RNA, 32 nt, Homo Sapiens
guaaauaaucuuaugaaaccuuuuuugauuga

SEQ ID NO: 278543 - RNA, 32 nt, Homo Sapiens
ccucucugcuuagccacuggcuuaaacugcca

SEQ ID NO: 278544 - RNA, 32 nt, Homo Sapiens
ccucuuaauucauuuucauauuguucuacacc

SEQ ID NO: 278545 - RNA, 32 nt, Homo Sapiens
cguccguacgucggaguccuucguccuccagg

SEQ ID NO: 278546 - RNA, 32 nt, Homo Sapiens
guaaagcggcguuacuucucgcagcugggcgg

SEQ ID NO: 278547 - RNA, 32 nt, Homo Sapiens
ccguuuaauuuaauuauaugauuugucugcac

SEQ ID NO: 278548 - RNA, 32 nt, Homo Sapiens
agaaaaugguacgagguaaccaauucuuguca

SEQ ID NO: 278549 - RNA, 32 nt, Homo Sapiens
ggauggguaugcaaggaaaaaauauacuucug

SEQ ID NO: 278550 - RNA, 32 nt, Homo Sapiens
uaccggaaacaucaguugaugguuuucuucua

SEQ ID NO: 278551 - RNA, 30 nt, Homo Sapiens
cguuuugucuguguugcuguuuagguaaau

SEQ ID NO: 278552 - RNA, 32 nt, Homo Sapiens
agauuauguuuuauuucuuugcauugagugag

SEQ ID NO: 278553 - RNA, 32 nt, Homo Sapiens
uccuccgcgggccggcgcgaugcggcugggcc

SEQ ID NO: 278554 - RNA, 32 nt, Homo Sapiens
uugcauuuauaauaucuuucuggaaugggucu

SEQ ID NO: 278555 - RNA, 32 nt, Homo Sapiens
ccaucuguaucuucuucagugccccucuagua

SEQ ID NO: 278556 - RNA, 32 nt, Homo Sapiens
ccagagccucucccaucugacccaggccaggc

SEQ ID NO: 278557 - RNA, 32 nt, Homo Sapiens
gaaaaaaugcaacaaagagcaaacaaauaaac

SEQ ID NO: 278558 - RNA, 32 nt, Homo Sapiens
agaggcucccggccaaccaagccaggaauuua

SEQ ID NO: 278559 - RNA, 32 nt, Homo Sapiens
accugaggccccagcuucccucugcccuagga

SEQ ID NO: 278560 - RNA, 32 nt, Homo Sapiens
uccucugucuucuugggcuggggcguccaucu

SEQ ID NO: 278561 - RNA, 32 nt, Homo Sapiens
ggaaaagaaaaaagcugagaguuucuuaucuu

SEQ ID NO: 278562 - RNA, 32 nt, Homo Sapiens
gauaugggggcgggggcggggcagggcagggu

SEQ ID NO: 278563 - RNA, 32 nt, Homo Sapiens
cggggacauagaugcagacaguuguugagauu

SEQ ID NO: 278564 - RNA, 32 nt, Homo Sapiens
agagcuaauagauacauaggccguaagcacag

SEQ ID NO: 278565 - RNA, 32 nt, Homo Sapiens
aaaguugacaaacuuuuuugacucuuucugga

SEQ ID NO: 278566 - RNA, 32 nt, Homo Sapiens
ugugaacagaagccagcagagaauugaaaagu

SEQ ID NO: 278567 - RNA, 32 nt, Homo Sapiens
ugcuucaccugcuuauuagugaaagaagaaag

SEQ ID NO: 278568 - RNA, 32 nt, Homo Sapiens
gcauauuuuuaaagacaauuuggaucuaaaua

SEQ ID NO: 278569 - RNA, 32 nt, Homo Sapiens
cccaggaagguucuaggugggaccccgucuuc

SEQ ID NO: 278570 - RNA, 32 nt, Homo Sapiens
gaaggacuuccacuucaacacuuccacuucaa

SEQ ID NO: 278571 - RNA, 30 nt, Homo Sapiens
ccuaguuuacuugccagucucuuguguaaa

SEQ ID NO: 278572 - RNA, 32 nt, Homo Sapiens
cguggccgccgggaccugccucaugcaggagg

SEQ ID NO: 278573 - RNA, 32 nt, Homo Sapiens
ggccuggcggggggaccaugggcgccucgguc

SEQ ID NO: 278574 - RNA, 32 nt, Homo Sapiens
ggacuccuuugcugccaccaaauuagcuccac

SEQ ID NO: 278575 - RNA, 32 nt, Homo Sapiens
ugacgucugaccacaccucucccgggggcguu

SEQ ID NO: 278576 - RNA, 32 nt, Homo Sapiens
uacuacgguugaucuugcaacucuguaaauau

SEQ ID NO: 278577 - RNA, 32 nt, Homo Sapiens
gaggagccgcggacgcucuccccggugccgcc

SEQ ID NO: 278578 - RNA, 32 nt, Homo Sapiens
uugagguguuugucaguuuuggcuuuuuucuu

SEQ ID NO: 278579 - RNA, 32 nt, Homo Sapiens
uuucagcccucauagggaguggcaggugcuca

SEQ ID NO: 278580 - RNA, 32 nt, Homo Sapiens
auuuagagacauuugggauucgcauacaauug

SEQ ID NO: 278581 - RNA, 32 nt, Homo Sapiens
cgcaagaggaggaggggagagcccguccgcgc

SEQ ID NO: 278582 - RNA, 31 nt, Homo Sapiens
caggagaugcuguccgaugaccacgugaaug

SEQ ID NO: 278583 - RNA, 32 nt, Homo Sapiens
gguacaucaguucuuuuugauaugaaaacauu

SEQ ID NO: 278584 - RNA, 32 nt, Homo Sapiens
agcugaggccgcgcggccgcgcuuggccccag

SEQ ID NO: 278585 - RNA, 32 nt, Homo Sapiens
cugacuguuggcuaauuuugucaagcacagcu

SEQ ID NO: 278586 - RNA, 32 nt, Homo Sapiens
gagaaagucauuacuuacuacugcacuccugc

SEQ ID NO: 278587 - RNA, 32 nt, Homo Sapiens
ccugcuguuaguuaucugaauuuuucuccuga

SEQ ID NO: 278588 - RNA, 32 nt, Homo Sapiens
ccacuggagccgcuccggcagcucuuccugcc

SEQ ID NO: 278589 - RNA, 32 nt, Homo Sapiens
gcugcgauaccauggaaggaggcgggggaagc

SEQ ID NO: 278590 - RNA, 29 nt, Homo Sapiens
gaccugccugggcaacauggcaaaacuuu

SEQ ID NO: 278591 - RNA, 32 nt, Homo Sapiens
ucaucuacugaagcacuuuaauaaaaauaaaa

SEQ ID NO: 278592 - RNA, 32 nt, Homo Sapiens
ugaggagaauauuuuuuuuuuauugagacggg

SEQ ID NO: 278593 - RNA, 32 nt, Homo Sapiens
ccucuccugcugucacagcugccauccacuuc

SEQ ID NO: 278594 - RNA, 32 nt, Homo Sapiens
aucagccugggcaacauagugagaccuccauu

SEQ ID NO: 278595 - RNA, 27 nt, Homo Sapiens
uuacuauggaagcagccauauuugagu

SEQ ID NO: 278596 - RNA, 32 nt, Homo Sapiens
ggccaaggcugagagcucucucuucucuguua

SEQ ID NO: 278597 - RNA, 32 nt, Homo Sapiens
gcccccaaagcugcuuuucgguugccuacaaa

SEQ ID NO: 278598 - RNA, 32 nt, Homo Sapiens
cguccgugucucaccgucuuuauuuaacaaag

SEQ ID NO: 278599 - RNA, 30 nt, Homo Sapiens
uggggguggggcgcuugcccaggagaggga

SEQ ID NO: 278600 - RNA, 32 nt, Homo Sapiens
gaaauuuaaaaauuacacaaaacuagaauagu

SEQ ID NO: 278601 - RNA, 32 nt, Homo Sapiens
acacccaugaugugagcaaacacacacacgug

SEQ ID NO: 278602 - RNA, 32 nt, Homo Sapiens
ccucgcucccucuccgguaaugagggggcuga

SEQ ID NO: 278603 - RNA, 32 nt, Homo Sapiens
ugaacuuggggaacaaggguggcaucccagug

SEQ ID NO: 278604 - RNA, 32 nt, Homo Sapiens
cacgcgcgcuccccggcucacgcgcgcuccga

SEQ ID NO: 278605 - RNA, 32 nt, Homo Sapiens
cuacaugccccagcaggcgucaccauccaccu

SEQ ID NO: 278606 - RNA, 32 nt, Homo Sapiens
auauuuuuaggaccaauuucauuuuuaauaag

SEQ ID NO: 278607 - RNA, 32 nt, Homo Sapiens
ccauugcagagcugcuggccuccugcccaggu

SEQ ID NO: 278608 - RNA, 32 nt, Homo Sapiens
guuuaugaagugagccuggacaacaacgugga

SEQ ID NO: 278609 - RNA, 32 nt, Homo Sapiens
gaaucccggccgccaccaggggccgugccacc

SEQ ID NO: 278610 - RNA, 32 nt, Homo Sapiens
gcagcuuccccgggcgcugccuggacaggccu

SEQ ID NO: 278611 - RNA, 32 nt, Homo Sapiens
aaggcaugguugugguuaaucugguuuauuuu

SEQ ID NO: 278612 - RNA, 32 nt, Homo Sapiens
uuuugcuuugcuuuuauuaaguucuuaaggcu

SEQ ID NO: 278613 - RNA, 32 nt, Homo Sapiens
gagugcugggauccaaggcauucuacaggguu

SEQ ID NO: 278614 - RNA, 32 nt, Homo Sapiens
uuggaagcugaauucuagcccuagauuuugga

SEQ ID NO: 278615 - RNA, 32 nt, Homo Sapiens
auuugggaaaauuaaguaacaacgaccuagaa

SEQ ID NO: 278616 - RNA, 32 nt, Homo Sapiens
ugagucugaugaggaugugcugugguguauug

SEQ ID NO: 278617 - RNA, 32 nt, Homo Sapiens
acccgcugaauuucugaggccuugcuuaaagc

SEQ ID NO: 278618 - RNA, 32 nt, Homo Sapiens
gagggcucucaccuccuucuccuagguaguau

SEQ ID NO: 278619 - RNA, 32 nt, Homo Sapiens
uaucugccaucccacaaagugauuauaugcca

SEQ ID NO: 278620 - RNA, 32 nt, Homo Sapiens
aauuguaauaauaucauuaauaaaugucuuac

SEQ ID NO: 278621 - RNA, 32 nt, Homo Sapiens
aagauuauacuucuuuaccucuuugugcuuua

SEQ ID NO: 278622 - RNA, 32 nt, Homo Sapiens
ucccucagcaguguaugcccuuucucagcauc

SEQ ID NO: 278623 - RNA, 32 nt, Homo Sapiens
gcugaaugacacugagaaaugcccagugcaau

SEQ ID NO: 278624 - RNA, 32 nt, Homo Sapiens
gcucacugcaaccuccaccuccccaguucaca

SEQ ID NO: 278625 - RNA, 32 nt, Homo Sapiens
agaaagaaacgcaaacaccccuaggaaccaga

SEQ ID NO: 278626 - RNA, 32 nt, Homo Sapiens
gacaacuaaauggcagaaaugguauuuaagcu

SEQ ID NO: 278627 - RNA, 32 nt, Homo Sapiens
ccauccagccccacccaauggccuuuugugcu

SEQ ID NO: 278628 - RNA, 32 nt, Homo Sapiens
ucuggaaguuuucaauacaacuccucuaccaa

SEQ ID NO: 278629 - RNA, 32 nt, Homo Sapiens
acauaaaggaaaaugucaguguuuacauggga

SEQ ID NO: 278630 - RNA, 32 nt, Homo Sapiens
caccaacaucuucauugggaacaguucagaaa

SEQ ID NO: 278631 - RNA, 32 nt, Homo Sapiens
cugacgaucacuuacauuuguguuaugcugau

SEQ ID NO: 278632 - RNA, 32 nt, Homo Sapiens
cccguggacgccaagcuccgggaggcugcagu

SEQ ID NO: 278633 - RNA, 32 nt, Homo Sapiens
gcugugcccgaggcccacggggcccgcgccug

SEQ ID NO: 278634 - RNA, 32 nt, Homo Sapiens
cuccuacucacccccuucccugucccaggccc

SEQ ID NO: 278635 - RNA, 32 nt, Homo Sapiens
uaccccagggagaggaggcgccgaguucugau

SEQ ID NO: 278636 - RNA, 32 nt, Homo Sapiens
acccgcggcgauggcccagcccggggacccgc

SEQ ID NO: 278637 - RNA, 32 nt, Homo Sapiens
ccaaaggccaggccgccacagagcccccuccc

SEQ ID NO: 278638 - RNA, 32 nt, Homo Sapiens
cagcauuacugauucccaaauggaugauguug

SEQ ID NO: 278639 - RNA, 32 nt, Homo Sapiens
cgggggcugcgcaugcgccuucauuucgucag

SEQ ID NO: 278640 - RNA, 30 nt, Homo Sapiens
acuccucggaggaaggaugagucugagggu

SEQ ID NO: 278641 - RNA, 27 nt, Homo Sapiens
uaacaaucauucuucagaucacccaca

SEQ ID NO: 278642 - RNA, 32 nt, Homo Sapiens
acccuuucaccugcccgggguucgcgucgcag

SEQ ID NO: 278643 - RNA, 32 nt, Homo Sapiens
acguuuuguuuuuauugagcacggaguagaau

SEQ ID NO: 278644 - RNA, 32 nt, Homo Sapiens
gcagccgaaguacgcagugcuugaugaagcca

SEQ ID NO: 278645 - RNA, 32 nt, Homo Sapiens
gaccuuuuacacaucaaaucaggaaauuucug

SEQ ID NO: 278646 - RNA, 32 nt, Homo Sapiens
uacaaaaauugguuuuucaaugcaucauuauu

SEQ ID NO: 278647 - RNA, 32 nt, Homo Sapiens
cccaucccuggccgcuggcccgggaccgaagc

SEQ ID NO: 278648 - RNA, 32 nt, Homo Sapiens
uagcuuuuuuauuuuaacccucuuuaauucuu

SEQ ID NO: 278649 - RNA, 32 nt, Homo Sapiens
uuggggggugggaaccacaggccauuucucua

SEQ ID NO: 278650 - RNA, 32 nt, Homo Sapiens
augcaauucuaccuuuuucuaacaccaucucu

SEQ ID NO: 278651 - RNA, 32 nt, Homo Sapiens
guugauuccugaacguaucacaucucaccugc

SEQ ID NO: 278652 - RNA, 32 nt, Homo Sapiens
gcuuccuuuucugcacuccacagcaggaagaa

SEQ ID NO: 278653 - RNA, 32 nt, Homo Sapiens
gccacugcacuccaggcugggcgacagaguga

SEQ ID NO: 278654 - RNA, 32 nt, Homo Sapiens
aaaaagaaaaagaaauaagaaauucugaguuu

SEQ ID NO: 278655 - RNA, 32 nt, Homo Sapiens
aaauuugaugggauucaaauccauucacauuu

SEQ ID NO: 278656 - RNA, 32 nt, Homo Sapiens
ucagucaaauuaacacauauuaacuaccuuag

SEQ ID NO: 278657 - RNA, 32 nt, Homo Sapiens
ggaccugugagcgcugcauccaauuaaccaug

SEQ ID NO: 278658 - RNA, 32 nt, Homo Sapiens
uuugaagggcaguuuagaaaaauuaacuuugu

SEQ ID NO: 278659 - RNA, 32 nt, Homo Sapiens
gcagaagccuuacauuaagauuucauaaauga

SEQ ID NO: 278660 - RNA, 32 nt, Homo Sapiens
uagaagauguggcaaugggagcacagcaguag

SEQ ID NO: 278661 - RNA, 32 nt, Homo Sapiens
ucuucaagggaaggacggacuggaggccucac

SEQ ID NO: 278662 - RNA, 32 nt, Homo Sapiens
uuuuuucuuuuuuuuuuuuuuaauguaaacua

SEQ ID NO: 278663 - RNA, 32 nt, Homo Sapiens
guuaguguuuuagucuuuuuugaaagaugugc

SEQ ID NO: 278664 - RNA, 32 nt, Homo Sapiens
ugugauuugucuggaucagauccgcgcuauuc

SEQ ID NO: 278665 - RNA, 32 nt, Homo Sapiens
caucaccaccuggaaucagggauugcucacuc

SEQ ID NO: 278666 - RNA, 32 nt, Homo Sapiens
acacacauauacauuugaaaaugauagaggaa

SEQ ID NO: 278667 - RNA, 32 nt, Homo Sapiens
cacuuccuucagcgccagcagcgcguagccga

SEQ ID NO: 278668 - RNA, 32 nt, Homo Sapiens
gcgcagggcugagacaggugucugcgcucccc

SEQ ID NO: 278669 - RNA, 32 nt, Homo Sapiens
cggucccuggagcccguggggcccgugcuccc

SEQ ID NO: 278670 - RNA, 32 nt, Homo Sapiens
acauaaugguuuuuuguuguuguuguuuuuaa

SEQ ID NO: 278671 - RNA, 32 nt, Homo Sapiens
ucuugccccucgcagcugggucgcggugucuc

SEQ ID NO: 278672 - RNA, 32 nt, Homo Sapiens
uggacauguuuccuaccaagcauguuucacau

SEQ ID NO: 278673 - RNA, 29 nt, Homo Sapiens
uaaggcuggggacaggggcuuguuggggc

SEQ ID NO: 278674 - RNA, 32 nt, Homo Sapiens
gguaauuuccacugucuuuucauuuacaacca

SEQ ID NO: 278675 - RNA, 32 nt, Homo Sapiens
ccuaccuagaucuggagcgggaguaggaacgg

SEQ ID NO: 278676 - RNA, 32 nt, Homo Sapiens
caaauugcugcuaucucggaccuauuguuaaa

SEQ ID NO: 278677 - RNA, 32 nt, Homo Sapiens
gaguagggugaggagagagccacaaaacauag

SEQ ID NO: 278678 - RNA, 32 nt, Homo Sapiens
ucugccccuauccaugacccccaagcagauau

SEQ ID NO: 278679 - RNA, 32 nt, Homo Sapiens
gcuugagggcucaccuaggagaucauaggcag

SEQ ID NO: 278680 - RNA, 32 nt, Homo Sapiens
gugacauaacugucauuauaccaguguugucc

SEQ ID NO: 278681 - RNA, 32 nt, Homo Sapiens
gcuggccagugccugccuuuuucaccaccucu

SEQ ID NO: 278682 - RNA, 32 nt, Homo Sapiens
cacgcgcuccauugccccggcguggcaggcca

SEQ ID NO: 278683 - RNA, 32 nt, Homo Sapiens
uccuguaucccugugcccuccauccuccaucc

SEQ ID NO: 278684 - RNA, 32 nt, Homo Sapiens
uuauagcaaaaagagacucuguuaggugacau

SEQ ID NO: 278685 - RNA, 32 nt, Homo Sapiens
uauuggugaugaugaaugggaaugaaaucagg

SEQ ID NO: 278686 - RNA, 32 nt, Homo Sapiens
agggugggggucccugcccacccauacugggc

SEQ ID NO: 278687 - RNA, 32 nt, Homo Sapiens
uuaguuguauugcaugcucuuuguccuguaau

SEQ ID NO: 278688 - RNA, 32 nt, Homo Sapiens
aagcaguccaggagauuauuaaggggucgcca

SEQ ID NO: 278689 - RNA, 32 nt, Homo Sapiens
auguuaacaaaauaaacugguccuugagcaga

SEQ ID NO: 278690 - RNA, 32 nt, Homo Sapiens
gcccggcggcgcccgccuccuccacggccacu

SEQ ID NO: 278691 - RNA, 32 nt, Homo Sapiens
cgugguccugaauggucugucuucuuacuugg

SEQ ID NO: 278692 - RNA, 32 nt, Homo Sapiens
gccgccccacgcucagcccugcguggcuucuc

SEQ ID NO: 278693 - RNA, 32 nt, Homo Sapiens
agaaauucuaauuguuagaaauccuuccuuau

SEQ ID NO: 278694 - RNA, 32 nt, Homo Sapiens
gcauuuagaacaccuugagacaugacauugua

SEQ ID NO: 278695 - RNA, 32 nt, Homo Sapiens
ccuucaguggugcugucccuggaugggggcua

SEQ ID NO: 278696 - RNA, 32 nt, Homo Sapiens
uuguuguuguuuuuuuuuuuuauugucuucaa

SEQ ID NO: 278697 - RNA, 32 nt, Homo Sapiens
uucuagaauuguucuuuuuuuauuuuuuauuu

SEQ ID NO: 278698 - RNA, 32 nt, Homo Sapiens
uuacuuuuuuaaagcugaguaguuaagaauuc

SEQ ID NO: 278699 - RNA, 32 nt, Homo Sapiens
caauguaggccauaagaaauguuugauacaag

SEQ ID NO: 278700 - RNA, 32 nt, Homo Sapiens
uagagaaggcugucccggggcccgcagaggug

SEQ ID NO: 278701 - RNA, 32 nt, Homo Sapiens
gcugggccccagggcgggaagggauguggucc

SEQ ID NO: 278702 - RNA, 32 nt, Homo Sapiens
cuuuagaacaucugagaaauguuaauaaauaa

SEQ ID NO: 278703 - RNA, 32 nt, Homo Sapiens
gccaggagcugugcccggugccugcagccuuc

SEQ ID NO: 278704 - RNA, 32 nt, Homo Sapiens
aucacauucuaccuggcauuauuucaucugag

SEQ ID NO: 278705 - RNA, 32 nt, Homo Sapiens
cuucuacguggauggccauguccccaagcccc

SEQ ID NO: 278706 - RNA, 32 nt, Homo Sapiens
guguguuuuaacaugaaugacuuuuaaagugu

SEQ ID NO: 278707 - RNA, 32 nt, Homo Sapiens
agccuccacccucgcauccccagcuguccccc

SEQ ID NO: 278708 - RNA, 32 nt, Homo Sapiens
cugugggagaaggggaucaauauuuugcacac

SEQ ID NO: 278709 - RNA, 32 nt, Homo Sapiens
aaauaaaaccucucucccacucagcuaugcua

SEQ ID NO: 278710 - RNA, 32 nt, Homo Sapiens
acacauacauaaauauaugcguaaauauauau

SEQ ID NO: 278711 - RNA, 32 nt, Homo Sapiens
aaacugugcaggguaagcucugauaaagcaca

SEQ ID NO: 278712 - RNA, 32 nt, Homo Sapiens
agguucagcccauuugcaguugcugauaaccu

SEQ ID NO: 278713 - RNA, 31 nt, Homo Sapiens
ugaaggaaauaaagguaaaaucacuucagau

SEQ ID NO: 278714 - RNA, 32 nt, Homo Sapiens
gccagggagagccgcacaacauacaauuauau

SEQ ID NO: 278715 - RNA, 32 nt, Homo Sapiens
gagcccucaccacuuuuuccuucccccgccuc

SEQ ID NO: 278716 - RNA, 32 nt, Homo Sapiens
cccucccguccucgugccugucucucagucaa

SEQ ID NO: 278717 - RNA, 32 nt, Homo Sapiens
gcccggcggcaggucccagcccggggcuagag

SEQ ID NO: 278718 - RNA, 32 nt, Homo Sapiens
acagggcacggaaaaucuuaugcugcuccguc

SEQ ID NO: 278719 - RNA, 32 nt, Homo Sapiens
uuuaagugugugcuaaggcacauggaagaccg

SEQ ID NO: 278720 - RNA, 32 nt, Homo Sapiens
gacuuauucauuccucacaaugaggcuaugag

SEQ ID NO: 278721 - RNA, 32 nt, Homo Sapiens
uccugaguuuuacuccacggagucuuagguac

SEQ ID NO: 278722 - RNA, 32 nt, Homo Sapiens
augagguaggcacaaauacauuccuuuuagag

SEQ ID NO: 278723 - RNA, 29 nt, Homo Sapiens
cucgguuggugacagagggggugggacag

SEQ ID NO: 278724 - RNA, 32 nt, Homo Sapiens
cugauacuuuuguaaaauacauaacaguugaa

SEQ ID NO: 278725 - RNA, 32 nt, Homo Sapiens
uguugcuuuaucuuugaaauuuugcaugaaaa

SEQ ID NO: 278726 - RNA, 32 nt, Homo Sapiens
guaucagcaccgaaaccucacaggaaaaaugg

SEQ ID NO: 278727 - RNA, 32 nt, Homo Sapiens
uagugcguuugccuuccacucucagaggcagc

SEQ ID NO: 278728 - RNA, 32 nt, Homo Sapiens
gacugugucuuggguucucaccuguugauugg

SEQ ID NO: 278729 - RNA, 32 nt, Homo Sapiens
cagcaaaugguuaaguaaguaaaauuaauuuu

SEQ ID NO: 278730 - RNA, 32 nt, Homo Sapiens
ccuucugcaaggggccugcagaugaaagggaa

SEQ ID NO: 278731 - RNA, 32 nt, Homo Sapiens
uagaguacuccgcgccgccgggacgccgcgcg

SEQ ID NO: 278732 - RNA, 32 nt, Homo Sapiens
gacacggccacaccaagugcagcccucguccu

SEQ ID NO: 278733 - RNA, 32 nt, Homo Sapiens
aacucauaaaaauuauuuaauguuuguuauga

SEQ ID NO: 278734 - RNA, 32 nt, Homo Sapiens
augcuggagccaggauuaaaauugggguguac

SEQ ID NO: 278735 - RNA, 28 nt, Homo Sapiens
agccaagggcggccgcggaggugcgcgg

SEQ ID NO: 278736 - RNA, 32 nt, Homo Sapiens
ccgucccuccgucugcccaccagccgccccuc

SEQ ID NO: 278737 - RNA, 32 nt, Homo Sapiens
gguaggaaagagagauguuuuucccaccuguc

SEQ ID NO: 278738 - RNA, 32 nt, Homo Sapiens
uuacaaucauauagaauauauagaguuacauu

SEQ ID NO: 278739 - RNA, 32 nt, Homo Sapiens
agcugccugaauuaucaugacucugaacuugg

SEQ ID NO: 278740 - RNA, 32 nt, Homo Sapiens
aggcgugagccaucgugcccagcuagacgucu

SEQ ID NO: 278741 - RNA, 27 nt, Homo Sapiens
ugauggcugucgucccggcgucucucu

SEQ ID NO: 278742 - RNA, 32 nt, Homo Sapiens
cagacuauuuccugcccuuggaaucugaccuu

SEQ ID NO: 278743 - RNA, 32 nt, Homo Sapiens
cuggggguucucauccgugucaauguccgagc

SEQ ID NO: 278744 - RNA, 32 nt, Homo Sapiens
cgugguagugacauaggcuagcagucuguauu

SEQ ID NO: 278745 - RNA, 30 nt, Homo Sapiens
agcucugucugugugggugcucacgggagg

SEQ ID NO: 278746 - RNA, 32 nt, Homo Sapiens
uauaaaucaaaauaacaaauuaucuaaaaaaa

SEQ ID NO: 278747 - RNA, 32 nt, Homo Sapiens
uauaaaucaaaauaacagauuaucugaaaaaa

SEQ ID NO: 278748 - RNA, 32 nt, Homo Sapiens
ugauaaagguggcauuacauuuugaacaauag

SEQ ID NO: 278749 - RNA, 32 nt, Homo Sapiens
gggguccacauuacaaugggcugugcucucca

SEQ ID NO: 278750 - RNA, 32 nt, Homo Sapiens
uuucauugaugugcggaccauuggccgcuuuu

SEQ ID NO: 278751 - RNA, 32 nt, Homo Sapiens
ccgggggaacgcgccagcugcuuucgcggccc

SEQ ID NO: 278752 - RNA, 32 nt, Homo Sapiens
cugagcgccggcugcugucagugggggauggg

SEQ ID NO: 278753 - RNA, 32 nt, Homo Sapiens
auuacagucagaaaaagauaacauuaugucaa

SEQ ID NO: 278754 - RNA, 32 nt, Homo Sapiens
aguuuaucuuugcacaaucaauaaaaauggca

SEQ ID NO: 278755 - RNA, 32 nt, Homo Sapiens
gagcagaggagcuucccagggaagcugauugg

SEQ ID NO: 278756 - RNA, 32 nt, Homo Sapiens
agcuaccuggggugggggccaagucacagguu

SEQ ID NO: 278757 - RNA, 32 nt, Homo Sapiens
acucacucacacugaggccuuggggacugagg

SEQ ID NO: 278758 - RNA, 32 nt, Homo Sapiens
acgccagcaugcagcgcccgggcccccgccug

SEQ ID NO: 278759 - RNA, 30 nt, Homo Sapiens
gggagaaguaucccugcuaguggcucugua

SEQ ID NO: 278760 - RNA, 32 nt, Homo Sapiens
cauuagauuuuuuuuucuuaagcauaagacug

SEQ ID NO: 278761 - RNA, 28 nt, Homo Sapiens
gcaaugcgcgcgccauuccgguggaauu

SEQ ID NO: 278762 - RNA, 32 nt, Homo Sapiens
cggcgccguggcggaauggcggcuuccaucuc

SEQ ID NO: 278763 - RNA, 32 nt, Homo Sapiens
cuccgccgccgcggccgggacuagguccgggc

SEQ ID NO: 278764 - RNA, 32 nt, Homo Sapiens
uguaccauuuaaguauaguugauauaugugag

SEQ ID NO: 278765 - RNA, 32 nt, Homo Sapiens
cccuuggagagcccgggcagccacugccccgc

SEQ ID NO: 278766 - RNA, 32 nt, Homo Sapiens
aggaccuauagcaagcuguuucuaggaucaga

SEQ ID NO: 278767 - RNA, 32 nt, Homo Sapiens
gcuccccgcgcgcaagauggcugacccggcug

SEQ ID NO: 278768 - RNA, 32 nt, Homo Sapiens
ccacacagggugaacgggcagcagccggcucc

SEQ ID NO: 278769 - RNA, 32 nt, Homo Sapiens
caucagcuucugugaaggcugauuccccucau

SEQ ID NO: 278770 - RNA, 32 nt, Homo Sapiens
acccuucugaccauccaaaggcaagcacaaua

SEQ ID NO: 278771 - RNA, 32 nt, Homo Sapiens
gauuuaauuuuuagcuacauaauuuuaagaau

SEQ ID NO: 278772 - RNA, 32 nt, Homo Sapiens
aaaaacuaaaaauuacuuuacauauuugaucu

SEQ ID NO: 278773 - RNA, 32 nt, Homo Sapiens
gcuggaaagaaauuauuuuguuaaugaaccaa

SEQ ID NO: 278774 - RNA, 32 nt, Homo Sapiens
ccccucacccucaacucucaaugucuugcugu

SEQ ID NO: 278775 - RNA, 32 nt, Homo Sapiens
gcaagcuggagcccuccuacccgcaggcuuga

SEQ ID NO: 278776 - RNA, 32 nt, Homo Sapiens
auaucuuaucuaggauguugguggcaagaagg

SEQ ID NO: 278777 - RNA, 32 nt, Homo Sapiens
acuugcaauuuaaacuguuaagcuguuuucac

SEQ ID NO: 278778 - RNA, 32 nt, Homo Sapiens
cucccccugccucuccucccugacccagggcu

SEQ ID NO: 278779 - RNA, 32 nt, Homo Sapiens
agugagaaaaaaacauuuuaaaauuaauuauc

SEQ ID NO: 278780 - RNA, 32 nt, Homo Sapiens
cagccaaccuacagccaugaucuuuagcacag

SEQ ID NO: 278781 - RNA, 32 nt, Homo Sapiens
agagguggcaggaggagaagaagacgccggca

SEQ ID NO: 278782 - RNA, 32 nt, Homo Sapiens
caaucucugccagcagaacugguuuuguucug

SEQ ID NO: 278783 - RNA, 32 nt, Homo Sapiens
uacaccuggagccugaugucccaggugaacaa

SEQ ID NO: 278784 - RNA, 32 nt, Homo Sapiens
cucacugugucccaaacuuacaaugaagagca

SEQ ID NO: 278785 - RNA, 32 nt, Homo Sapiens
gucugcuuuucuagucuguccacacagggauu

SEQ ID NO: 278786 - RNA, 32 nt, Homo Sapiens
ugugagaggaucucaugguucugaugaugauu

SEQ ID NO: 278787 - RNA, 32 nt, Homo Sapiens
aaccuaaacacuuagacaaguguuaguggaau

SEQ ID NO: 278788 - RNA, 32 nt, Homo Sapiens
agacagggcugauguuaccuuuuuccacuuug

SEQ ID NO: 278789 - RNA, 32 nt, Homo Sapiens
aaagcaagucuuucuuuggcagcccuccggcc

SEQ ID NO: 278790 - RNA, 32 nt, Homo Sapiens
uaaaucacagaaaauuuaacuuaagaaaauuu

SEQ ID NO: 278791 - RNA, 32 nt, Homo Sapiens
ucuuaauccuaucuauggauguguuuugugug

SEQ ID NO: 278792 - RNA, 32 nt, Homo Sapiens
uuuuguuaucauuuucauuucauuucucucau

SEQ ID NO: 278793 - RNA, 32 nt, Homo Sapiens
gguauaaugcccuuccaucacacaacaggaca

SEQ ID NO: 278794 - RNA, 32 nt, Homo Sapiens
agagaggggggcccagaggccgccuuuugaaa

SEQ ID NO: 278795 - RNA, 32 nt, Homo Sapiens
uccgaaugacaucaaaagcagcccuuaucuca

SEQ ID NO: 278796 - RNA, 32 nt, Homo Sapiens
ucggccagccucgggggugcagccugggcugg

SEQ ID NO: 278797 - RNA, 32 nt, Homo Sapiens
gaaguggauaacaaggaggccuuguggaaguu

SEQ ID NO: 278798 - RNA, 32 nt, Homo Sapiens
aagccuuaggagaagcgagagaaauggcagug

SEQ ID NO: 278799 - RNA, 32 nt, Homo Sapiens
cuugagauccugaacaugugcugauuuuuauu

SEQ ID NO: 278800 - RNA, 32 nt, Homo Sapiens
auaaauuagaaaaaauaagugauucaaaauga

SEQ ID NO: 278801 - RNA, 32 nt, Homo Sapiens
uuccauugugucuuuucauuuaauuuuccuga

SEQ ID NO: 278802 - RNA, 30 nt, Homo Sapiens
caggguuugugaaugcaccaguugacacuc

SEQ ID NO: 278803 - RNA, 32 nt, Homo Sapiens
aguagcugggauuacaggcacccacgagcaug

SEQ ID NO: 278804 - RNA, 32 nt, Homo Sapiens
aaacaauagauaaacagcaugaaaauguaaau

SEQ ID NO: 278805 - RNA, 32 nt, Homo Sapiens
cagagucacugggcggccgccgagguccccga

SEQ ID NO: 278806 - RNA, 32 nt, Homo Sapiens
ugcuaaguuuuuuauggaacauguaaauagau

SEQ ID NO: 278807 - RNA, 32 nt, Homo Sapiens
guggcuagacugcuacggcagcuucucugaug

SEQ ID NO: 278808 - RNA, 28 nt, Homo Sapiens
auccuguggaaguaacauuugagcuaau

SEQ ID NO: 278809 - RNA, 32 nt, Homo Sapiens
caugcuggggcccggggccacccccuuccugu

SEQ ID NO: 278810 - RNA, 32 nt, Homo Sapiens
gcccagguagggguccugggggauuggguuca

SEQ ID NO: 278811 - RNA, 32 nt, Homo Sapiens
gggcggucagcugggccgcagcuccuccggcu

SEQ ID NO: 278812 - RNA, 32 nt, Homo Sapiens
guaauacacagcucgggcuuuguaguccugau

SEQ ID NO: 278813 - RNA, 32 nt, Homo Sapiens
gucagggucggcuugugaaaaguuguuaaaca

SEQ ID NO: 278814 - RNA, 26 nt, Homo Sapiens
aaaaguaaagcacuguggucuuugcc

SEQ ID NO: 278815 - RNA, 32 nt, Homo Sapiens
gcacacccagacccuccaccaggcugugaccu

SEQ ID NO: 278816 - RNA, 30 nt, Homo Sapiens
gcaggcacugaaggcggcggcggggccaga

SEQ ID NO: 278817 - RNA, 32 nt, Homo Sapiens
gaaguuuucucuccacuuaaaaauaguaaaaa

SEQ ID NO: 278818 - RNA, 32 nt, Homo Sapiens
gcugagguuuccuuaggcagcuuauuuauuug

SEQ ID NO: 278819 - RNA, 32 nt, Homo Sapiens
gagggggguauggagggaaaggagggucaugu

SEQ ID NO: 278820 - RNA, 32 nt, Homo Sapiens
uggcaaauauaaacucaauacuaugaaaaauu

SEQ ID NO: 278821 - RNA, 27 nt, Homo Sapiens
ccauguuccgccucugguugcugcugg

SEQ ID NO: 278822 - RNA, 32 nt, Homo Sapiens
cugccuggcccgcuccauccuacucccacuaa

SEQ ID NO: 278823 - RNA, 32 nt, Homo Sapiens
ucuccugucuucauuuuccuccuuccaggccc

SEQ ID NO: 278824 - RNA, 32 nt, Homo Sapiens
gagucuaggccguggggacuguucuggggagg

SEQ ID NO: 278825 - RNA, 32 nt, Homo Sapiens
auaaaagcacugcuacuauaagacauucugga

SEQ ID NO: 278826 - RNA, 32 nt, Homo Sapiens
gccaacaccuggauuuuaguucugggacccca

SEQ ID NO: 278827 - RNA, 32 nt, Homo Sapiens
uaguggauucagaacuugacguucugaggcac

SEQ ID NO: 278828 - RNA, 32 nt, Homo Sapiens
ccucagcaucagagcaugcaucagggguccac

SEQ ID NO: 278829 - RNA, 32 nt, Homo Sapiens
ggcugauggccccugaggcuguguguaacaaa

SEQ ID NO: 278830 - RNA, 32 nt, Homo Sapiens
ugauuuaugaagacgcauuguuagaaauccau

SEQ ID NO: 278831 - RNA, 32 nt, Homo Sapiens
aauaaagguaccagaagaauauggcugcacaa

SEQ ID NO: 278832 - RNA, 32 nt, Homo Sapiens
aaacauagauuugggagauauaaggccuacau

SEQ ID NO: 278833 - RNA, 32 nt, Homo Sapiens
auuaugucaaaauaaaaauuguuucugagaaa

SEQ ID NO: 278834 - RNA, 32 nt, Homo Sapiens
gugccuccaggugugcacguggcauguggccu

SEQ ID NO: 278835 - RNA, 32 nt, Homo Sapiens
ucuggccuccucaagagcugcuuguuaaaugu

SEQ ID NO: 278836 - RNA, 32 nt, Homo Sapiens
gugaacuuuacuauauaucuguuuauuuuacu

SEQ ID NO: 278837 - RNA, 32 nt, Homo Sapiens
agacugcugguagcgugcaugcagcuuugccu

SEQ ID NO: 278838 - RNA, 32 nt, Homo Sapiens
uggcgaaaccuggauuagaggcgaugccuucu

SEQ ID NO: 278839 - RNA, 32 nt, Homo Sapiens
guccaucccaauaaaaaucaggagacccuggc

SEQ ID NO: 278840 - RNA, 32 nt, Homo Sapiens
agaaaacgcuauagcaagguugaagcuuuauc

SEQ ID NO: 278841 - RNA, 32 nt, Homo Sapiens
augaucagaaaagcagaaagagagaguggccg

SEQ ID NO: 278842 - RNA, 32 nt, Homo Sapiens
cuccaccuucaguuuagcgucauuccaaaacc

SEQ ID NO: 278843 - RNA, 32 nt, Homo Sapiens
ccacccauuugcuuuuaauccaaagaacaugu

SEQ ID NO: 278844 - RNA, 32 nt, Homo Sapiens
gcaagggaguuauuuucaucuaacauagaaag

SEQ ID NO: 278845 - RNA, 31 nt, Homo Sapiens
aauuucccacccucaguuuuuacucaaauaa

SEQ ID NO: 278846 - RNA, 32 nt, Homo Sapiens
cucccgcccucccugcagcuccccgcccucag

SEQ ID NO: 278847 - RNA, 32 nt, Homo Sapiens
ugauucucuuauucucuugucuuuucuaaaug

SEQ ID NO: 278848 - RNA, 32 nt, Homo Sapiens
aaaccgagcagggcugugugaaacaugguugu

SEQ ID NO: 278849 - RNA, 32 nt, Homo Sapiens
cuguaguacauggcgagcuagagaaaucacca

SEQ ID NO: 278850 - RNA, 32 nt, Homo Sapiens
cacauacacagauuuuucugcuggccaggugg

SEQ ID NO: 278851 - RNA, 32 nt, Homo Sapiens
ucugucagacaggcugcccuagagccccaccc

SEQ ID NO: 278852 - RNA, 32 nt, Homo Sapiens
uuuucuagagucaagacuauuuucucauagca

SEQ ID NO: 278853 - RNA, 32 nt, Homo Sapiens
aauugauacaucucaaggcccuacccauaaaa

SEQ ID NO: 278854 - RNA, 32 nt, Homo Sapiens
gaauugaauuguuuuucuuucucaaaucugug

SEQ ID NO: 278855 - RNA, 32 nt, Homo Sapiens
gcaaugcucccuccuucccaggguccacaggc

SEQ ID NO: 278856 - RNA, 32 nt, Homo Sapiens
agcgugcgccucucccgccgccgcccggucac

SEQ ID NO: 278857 - RNA, 32 nt, Homo Sapiens
gaccuggggacacccccacuccugucauuuau

SEQ ID NO: 278858 - RNA, 32 nt, Homo Sapiens
caggcagggcgcccggcuucuaucccagguag

SEQ ID NO: 278859 - RNA, 32 nt, Homo Sapiens
uuuugaaugauuauaaauaaaaauucugugag

SEQ ID NO: 278860 - RNA, 32 nt, Homo Sapiens
cgacuagaugacuucugcacuuuuagcugguu

SEQ ID NO: 278861 - RNA, 32 nt, Homo Sapiens
cacuuuucaaaccucagccaaccccggaagaa

SEQ ID NO: 278862 - RNA, 32 nt, Homo Sapiens
acuuuguuuugacccuuaaaaauguauuuuuc

SEQ ID NO: 278863 - RNA, 32 nt, Homo Sapiens
guagacuccaggaggugggauucuucaacuaa

SEQ ID NO: 278864 - RNA, 28 nt, Homo Sapiens
ucacagggcgcuccgccgagggcgcggg

SEQ ID NO: 278865 - RNA, 32 nt, Homo Sapiens
ccgcgcccccgcgcgccgcggcuccuguugac

SEQ ID NO: 278866 - RNA, 32 nt, Homo Sapiens
cugggaggccucuggagccgaacugcaaacca

SEQ ID NO: 278867 - RNA, 32 nt, Homo Sapiens
uuaggugcaucuaucucuucgcucugucuucc

SEQ ID NO: 278868 - RNA, 32 nt, Homo Sapiens
gccacagcucuggaggcugcugcugccugggc

SEQ ID NO: 278869 - RNA, 32 nt, Homo Sapiens
gugcugggaaaggcaggacugggagccggagg

SEQ ID NO: 278870 - RNA, 32 nt, Homo Sapiens
acacccugggguguaccccaccccuucccacu

SEQ ID NO: 278871 - RNA, 32 nt, Homo Sapiens
gacuucuugcuggccuguggagggugaggugu

SEQ ID NO: 278872 - RNA, 32 nt, Homo Sapiens
guauuuucauuuaaauucucugauggagggac

SEQ ID NO: 278873 - RNA, 32 nt, Homo Sapiens
agugugcccgugcgccgccgccgucguaccug

SEQ ID NO: 278874 - RNA, 32 nt, Homo Sapiens
cucaucuugauaaagaaaaguggguacuuuac

SEQ ID NO: 278875 - RNA, 32 nt, Homo Sapiens
aggccagagcaagagauggcccugcccagaaa

SEQ ID NO: 278876 - RNA, 32 nt, Homo Sapiens
uggggacagaagggguccucucguccuccccu

SEQ ID NO: 278877 - RNA, 32 nt, Homo Sapiens
agcggccucuuguuacccggggcccgcuugcc

SEQ ID NO: 278878 - RNA, 32 nt, Homo Sapiens
cuggggaggaggaggauauuccagacucacgg

SEQ ID NO: 278879 - RNA, 32 nt, Homo Sapiens
ugcgccgccgacgccgcccucggcccagaccu

SEQ ID NO: 278880 - RNA, 32 nt, Homo Sapiens
ugucuuaaaaauugauaagguaccacugauga

SEQ ID NO: 278881 - RNA, 32 nt, Homo Sapiens
ggcuagcgcgcggcggccguggcuaaggcugc

SEQ ID NO: 278882 - RNA, 32 nt, Homo Sapiens
cauuuaaaaguacuuuauauuuuacauaauag

SEQ ID NO: 278883 - RNA, 32 nt, Homo Sapiens
aaguucccagguaaugcuuaugcugcuggccu

SEQ ID NO: 278884 - RNA, 32 nt, Homo Sapiens
gcuauuccaagagaaggauaugcugagggaaa

SEQ ID NO: 278885 - RNA, 32 nt, Homo Sapiens
agccggacccucacgaguggagagaaguccuu

SEQ ID NO: 278886 - RNA, 32 nt, Homo Sapiens
gggaagagcucgccggggcgccgggccaggac

SEQ ID NO: 278887 - RNA, 32 nt, Homo Sapiens
gagagccguguuagccaagacauggaacugug

SEQ ID NO: 278888 - RNA, 32 nt, Homo Sapiens
cacuuuuauuaugguagcacugcauaauuaau

SEQ ID NO: 278889 - RNA, 32 nt, Homo Sapiens
uuuccaaaacaauugacauaaugauacauuac

SEQ ID NO: 278890 - RNA, 32 nt, Homo Sapiens
gugcagaccccucccugcgggacaggcagggc

SEQ ID NO: 278891 - RNA, 32 nt, Homo Sapiens
ugcucauucugggguugcgguugacggcuggu

SEQ ID NO: 278892 - RNA, 32 nt, Homo Sapiens
cgucagugucuccugcccugacuccacaucau

SEQ ID NO: 278893 - RNA, 32 nt, Homo Sapiens
auaaauguagaaucgugguaauauuggcuguu

SEQ ID NO: 278894 - RNA, 30 nt, Homo Sapiens
gagacugucugugcugggggugcuaauuac

SEQ ID NO: 278895 - RNA, 32 nt, Homo Sapiens
auauuuguaaaaacaauuuuugguaaaaugug

SEQ ID NO: 278896 - RNA, 32 nt, Homo Sapiens
aggacacagucaacagggugaaaagacacgca

SEQ ID NO: 278897 - RNA, 32 nt, Homo Sapiens
uggaagucuccaugaagagcuuguguccuguc

SEQ ID NO: 278898 - RNA, 32 nt, Homo Sapiens
cucgcgagggucacgcuugccuggucacccug

SEQ ID NO: 278899 - RNA, 32 nt, Homo Sapiens
ggaagggcagguggcgccuagacccagcguuc

SEQ ID NO: 278900 - RNA, 32 nt, Homo Sapiens
aaagcagcacuaaagcacucugagucaagaug

SEQ ID NO: 278901 - RNA, 31 nt, Homo Sapiens
ggagaugcaaggugcuggugggucugagcug

SEQ ID NO: 278902 - RNA, 32 nt, Homo Sapiens
gugccuucuuauagugucuacucauuggucuu

SEQ ID NO: 278903 - RNA, 32 nt, Homo Sapiens
gggcagcaucauggugcucggucagccgagga

SEQ ID NO: 278904 - RNA, 32 nt, Homo Sapiens
ugcagggagaaugcaggggucugugcuuggcu

SEQ ID NO: 278905 - RNA, 32 nt, Homo Sapiens
cugucuguggguggggggaggggagggaaguc

SEQ ID NO: 278906 - RNA, 32 nt, Homo Sapiens
uugguucugggauuuucuuaauugggucuuag

SEQ ID NO: 278907 - RNA, 28 nt, Homo Sapiens
agugguuugaggauuauguguuuucauc

SEQ ID NO: 278908 - RNA, 32 nt, Homo Sapiens
uauuucuguaaaauauuagcuguaugaauaug

SEQ ID NO: 278909 - RNA, 32 nt, Homo Sapiens
gcuugguggggggaggggcgccaaccauuacc

SEQ ID NO: 278910 - RNA, 32 nt, Homo Sapiens
cuccccgccaacaaaaggugaugauuccuagc

SEQ ID NO: 278911 - RNA, 32 nt, Homo Sapiens
cagcagcccuccccgcagcuagcagcgagggc

SEQ ID NO: 278912 - RNA, 30 nt, Homo Sapiens
ccaaggcugcccgugcguccugggacccug

SEQ ID NO: 278913 - RNA, 32 nt, Homo Sapiens
uucuuccugggaggauggaaacagugcagccc

SEQ ID NO: 278914 - RNA, 32 nt, Homo Sapiens
gucugcaaggccacgcugucagcaguccacuc

SEQ ID NO: 278915 - RNA, 32 nt, Homo Sapiens
cuaggugucucucacggcugcuccauccuagc

SEQ ID NO: 278916 - RNA, 32 nt, Homo Sapiens
caucacauuguuacucuuucugaugaugauuc

SEQ ID NO: 278917 - RNA, 32 nt, Homo Sapiens
uuuuaagucauuuuaauuuuguguuguuuccc

SEQ ID NO: 278918 - RNA, 32 nt, Homo Sapiens
gggacugggcagagacugagccaggcaggaag

SEQ ID NO: 278919 - RNA, 32 nt, Homo Sapiens
uuccgugcauuacuccaaacauuuuaauaaaa

SEQ ID NO: 278920 - RNA, 32 nt, Homo Sapiens
gugcugcaucuugccccaauucuuaggauuuc

SEQ ID NO: 278921 - RNA, 32 nt, Homo Sapiens
aacuuucuguuguuuuuguagcaccgcucagc

SEQ ID NO: 278922 - RNA, 32 nt, Homo Sapiens
uguauggcuucuuucccugcaacagcagaguu

SEQ ID NO: 278923 - RNA, 27 nt, Homo Sapiens
ugccuccccagccucagcccccaccuc

SEQ ID NO: 278924 - RNA, 32 nt, Homo Sapiens
cgcccagcccuccugauccuccugucauuccu

SEQ ID NO: 278925 - RNA, 32 nt, Homo Sapiens
cauucugcaauaaugucuuuaauguauacuca

SEQ ID NO: 278926 - RNA, 30 nt, Homo Sapiens
gucccccaccccucaccccaucuugucaca

SEQ ID NO: 278927 - RNA, 32 nt, Homo Sapiens
agugguuuacuuuuuccauuaauauaaauuuc

SEQ ID NO: 278928 - RNA, 32 nt, Homo Sapiens
uaaaacucaaggcuuauauuaagcaaacacuu

SEQ ID NO: 278929 - RNA, 32 nt, Homo Sapiens
caaguucugcuguuggacucuggacuguuucc

SEQ ID NO: 278930 - RNA, 32 nt, Homo Sapiens
cagcccggccccagaguucccuuagcccccug

SEQ ID NO: 278931 - RNA, 32 nt, Homo Sapiens
agcuccuguguguaauacccauauacuaugcc

SEQ ID NO: 278932 - RNA, 32 nt, Homo Sapiens
ggacgaugcggcgcgcccaggaugcugccgug

SEQ ID NO: 278933 - RNA, 32 nt, Homo Sapiens
caggaaugaaaguuacugggagauaacuucga

SEQ ID NO: 278934 - RNA, 32 nt, Homo Sapiens
ugaggcucugucaucaguuucugcuacguuuc

SEQ ID NO: 278935 - RNA, 31 nt, Homo Sapiens
uccauuuugugcucugaguuuugcuguugaa

SEQ ID NO: 278936 - RNA, 32 nt, Homo Sapiens
ccgggcgcagagcggcuccgcggcgggagcug

SEQ ID NO: 278937 - RNA, 32 nt, Homo Sapiens
augaguuuuuuacuuuugaauuuuucuuuagu

SEQ ID NO: 278938 - RNA, 32 nt, Homo Sapiens
agacauggcagggucggagcgcggccugcgcc

SEQ ID NO: 278939 - RNA, 32 nt, Homo Sapiens
aguggugcugaucuuucucguuuggaccuucg

SEQ ID NO: 278940 - RNA, 32 nt, Homo Sapiens
gccucgccccgaggcccggcccuggguguggg

SEQ ID NO: 278941 - RNA, 32 nt, Homo Sapiens
auuggggacauuccucuaggacugguuugggg

SEQ ID NO: 278942 - RNA, 32 nt, Homo Sapiens
ugggaggaaugggaagauugaggucuuucuuu

SEQ ID NO: 278943 - RNA, 32 nt, Homo Sapiens
aguuccaguccuuccucccaccagcccuuggu

SEQ ID NO: 278944 - RNA, 32 nt, Homo Sapiens
aaucaagaaauaaguauaaaaauagccaguua

SEQ ID NO: 278945 - RNA, 32 nt, Homo Sapiens
gauuugaaaaauuuauagaaaaaaagguacag

SEQ ID NO: 278946 - RNA, 32 nt, Homo Sapiens
cucguccagcccccaaaccuccccuuccuuuc

SEQ ID NO: 278947 - RNA, 32 nt, Homo Sapiens
gucaucucaguucgauauuuuacuuuagaauc

SEQ ID NO: 278948 - RNA, 32 nt, Homo Sapiens
ggcuuuacaaaauaaaaucaugcuuggaaaac

SEQ ID NO: 278949 - RNA, 32 nt, Homo Sapiens
acagucuugggguguuucugcacuuggcuaug

SEQ ID NO: 278950 - RNA, 32 nt, Homo Sapiens
gcgaccacccccgucccgggccucagccccuc

SEQ ID NO: 278951 - RNA, 32 nt, Homo Sapiens
auauggcuauaaauuucaucuguuuacauccu

SEQ ID NO: 278952 - RNA, 32 nt, Homo Sapiens
gcuccauuuuucaucaucuacccaucuauuug

SEQ ID NO: 278953 - RNA, 32 nt, Homo Sapiens
gggcuuuguuucccuugccccauccuaguucc

SEQ ID NO: 278954 - RNA, 32 nt, Homo Sapiens
uccugcggcggccgcgggaggcagcggggcag

SEQ ID NO: 278955 - RNA, 32 nt, Homo Sapiens
cagagcagaaaaggcaguugaaggaggcagag

SEQ ID NO: 278956 - RNA, 32 nt, Homo Sapiens
agagggagacagggcugcuccccaacaccugc

SEQ ID NO: 278957 - RNA, 32 nt, Homo Sapiens
uccccagccugguuugcucugggcucugaccc

SEQ ID NO: 278958 - RNA, 32 nt, Homo Sapiens
caaaugaggacacguggcuuuuauacaaagua

SEQ ID NO: 278959 - RNA, 32 nt, Homo Sapiens
cacggccuucccucccgcagugcccgggcugc

SEQ ID NO: 278960 - RNA, 32 nt, Homo Sapiens
ggaagccccugcugucauggccccacaugggg

SEQ ID NO: 278961 - RNA, 32 nt, Homo Sapiens
ccucggaacugugacacccccaucuucgacuu

SEQ ID NO: 278962 - RNA, 32 nt, Homo Sapiens
cuaaaagcagagcuaaccaccccuuuuguccu

SEQ ID NO: 278963 - RNA, 32 nt, Homo Sapiens
guacgugucugugcgugcaacauaaaaauaca

SEQ ID NO: 278964 - RNA, 32 nt, Homo Sapiens
uggguuuucuaaaauaauauucuuacaaagua

SEQ ID NO: 278965 - RNA, 32 nt, Homo Sapiens
cccaguggcaucuccucaucacguucugugcc

SEQ ID NO: 278966 - RNA, 28 nt, Homo Sapiens
aaagagggggcuaccaaagagacaaagc

SEQ ID NO: 278967 - RNA, 32 nt, Homo Sapiens
ugaggcugcccccaguggacaucaccuuuggc

SEQ ID NO: 278968 - RNA, 32 nt, Homo Sapiens
ugaaaguggguuuauccaauguuccagagacu

SEQ ID NO: 278969 - RNA, 32 nt, Homo Sapiens
uguugcauguuaugggucgauguuccuguaau

SEQ ID NO: 278970 - RNA, 32 nt, Homo Sapiens
aucccccugcggcuacaccauguccagcuccu

SEQ ID NO: 278971 - RNA, 32 nt, Homo Sapiens
acuuaagaaagauaaccgaaacuguuaaugac

SEQ ID NO: 278972 - RNA, 32 nt, Homo Sapiens
acucaacuuuacaaugcaaacaucuuauuucu

SEQ ID NO: 278973 - RNA, 32 nt, Homo Sapiens
uaugaggaaaucaaccacagugaaaaggcuug

SEQ ID NO: 278974 - RNA, 32 nt, Homo Sapiens
gaacgggguacacggugggcugaguacaguca

SEQ ID NO: 278975 - RNA, 32 nt, Homo Sapiens
guggcauuggggcagaucuggaugcagcccaa

SEQ ID NO: 278976 - RNA, 32 nt, Homo Sapiens
gugguggugguggugguggcccgggccgcagg
